United States Patent Application Publication US 2024/0226339 A1 - sequence listing, part 2

SEQ ID NO: 21676 - DNA, 20 bp, synthetic construct
  misc_feature 1..20: note = chemically synthesized
  source 1..20: mol_type = other DNA
ttgttctgttattccttctt

SEQ ID NO: 21677 - DNA, 20 bp, synthetic construct
  misc_feature 1..20: note = chemically synthesized
  source 1..20: mol_type = other DNA
tgttctgttattccttcttt

SEQ ID NO: 21678 - DNA, 20 bp, synthetic construct
  misc_feature 1..20: note = chemically synthesized
  source 1..20: mol_type = other DNA
ttctgttattccttctttgg

SEQ ID NO: 21679 - DNA, 20 bp, synthetic construct
  misc_feature 1..20: note = chemically synthesized
  source 1..20: mol_type = other DNA
ctgttattccttctttggga

SEQ ID NO: 21680 - DNA, 20 bp, synthetic construct
  misc_feature 1..20: note = chemically synthesized
  source 1..20: mol_type = other DNA
ttattccttctttgggagag

SEQ ID NO: 21681 - DNA, 20 bp, synthetic construct
  misc_feature 1..20: note = chemically synthesized
  source 1..20: mol_type = other DNA
tattccttctttgggagagc

SEQ ID NO: 21682 - DNA, 20 bp, synthetic construct
  misc_feature 1..20: note = chemically synthesized
  source 1..20: mol_type = other DNA
ccttctttgggagagcaggc

SEQ ID NO: 21683 - DNA, 20 bp, synthetic construct
  misc_feature 1..20: note = chemically synthesized
  source 1..20: mol_type = other DNA
ctttgggagagcaggctggc

SEQ ID NO: 21684 - DNA, 20 bp, synthetic construct
  misc_feature 1..20: note = chemically synthesized
  source 1..20: mol_type = other DNA
tttgggagagcaggctggcc

SEQ ID NO: 21685 - DNA, 20 bp, synthetic construct
  misc_feature 1..20: note = chemically synthesized
  source 1..20: mol_type = other DNA
tgggagagcaggctggccag

SEQ ID NO: 21686 - DNA, 20 bp, synthetic construct
  misc_feature 1..20: note = chemically synthesized
  source 1..20: mol_type = other DNA
gggagagcaggctggccagg

SEQ ID NO: 21687 - DNA, 20 bp, synthetic construct
  misc_feature 1..20: note = chemically synthesized
  source 1..20: mol_type = other DNA
agagcaggctggccaggagg

SEQ ID NO: 21688 - DNA, 20 bp, synthetic construct
  misc_feature 1..20: note = chemically synthesized
  source 1..20: mol_type = other DNA
gagcaggctggccaggagga

SEQ ID NO: 21689 - DNA, 20 bp, synthetic construct
  misc_feature 1..20: note = chemically synthesized
  source 1..20: mol_type = other DNA
gctggccaggaggaaggttc

SEQ ID NO: 21690 - DNA, 20 bp, synthetic construct
  misc_feature 1..20: note = chemically synthesized
  source 1..20: mol_type = other DNA
ggttcaagtgtgtcatatcc

SEQ ID NO: 21691 - DNA, 20 bp, synthetic construct
  misc_feature 1..20: note = chemically synthesized
  source 1..20: mol_type = other DNA
gtgtgtcatatcctagcatt

SEQ ID NO: 21692 - DNA, 20 bp, synthetic construct
  misc_feature 1..20: note = chemically synthesized
  source 1..20: mol_type = other DNA
gtcatatcctagcattcaga

SEQ ID NO: 21693 - DNA, 20 bp, synthetic construct
  misc_feature 1..20: note = chemically synthesized
  source 1..20: mol_type = other DNA
tcatatcctagcattcagat

SEQ ID NO: 21694 - DNA, 20 bp, synthetic construct
  misc_feature 1..20: note = chemically synthesized
  source 1..20: mol_type = other DNA
tatcctagcattcagatagg

SEQ ID NO: 21695 - DNA, 20 bp, synthetic construct
  misc_feature 1..20: note = chemically synthesized
  source 1..20: mol_type = other DNA
ggtggcctcctctgcctttt

SEQ ID NO: 21696 - DNA, 20 bp, synthetic construct
  misc_feature 1..20: note = chemically synthesized
  source 1..20: mol_type = other DNA
ggcctcctctgccttttcag

SEQ ID NO: 21697 - DNA, 20 bp, synthetic construct
  misc_feature 1..20: note = chemically synthesized
  source 1..20: mol_type = other DNA
gcctcctctgccttttcagt

SEQ ID NO: 21698 - DNA, 20 bp, synthetic construct
  misc_feature 1..20: note = chemically synthesized
  source 1..20: mol_type = other DNA
tcctctgccttttcagtggg

SEQ ID NO: 21699 - DNA, 20 bp, synthetic construct
  misc_feature 1..20: note = chemically synthesized
  source 1..20: mol_type = other DNA
ctgccttttcagtgggtggc

SEQ ID NO: 21700 - DNA, 20 bp, synthetic construct
  misc_feature 1..20: note = chemically synthesized
  source 1..20: mol_type = other DNA
tgccttttcagtgggtggct

SEQ ID NO: 21701 - DNA, 20 bp, synthetic construct
  misc_feature 1..20: note = chemically synthesized
  source 1..20: mol_type = other DNA
ttttcagtgggtggctgggc

SEQ ID NO: 21702 - DNA, 20 bp, synthetic construct
  misc_feature 1..20: note = chemically synthesized
  source 1..20: mol_type = other DNA
tttcagtgggtggctgggct

SEQ ID NO: 21703 - DNA, 20 bp, synthetic construct
  misc_feature 1..20: note = chemically synthesized
  source 1..20: mol_type = other DNA
ctgggctgggtgaaatcttg

SEQ ID NO: 21704 - DNA, 20 bp, synthetic construct
  misc_feature 1..20: note = chemically synthesized
  source 1..20: mol_type = other DNA
ggtgaaatcttgcagtgact

SEQ ID NO: 21705 - DNA, 20 bp, synthetic construct
  misc_feature 1..20: note = chemically synthesized
  source 1..20: mol_type = other DNA
aaatcttgcagtgactaaga

SEQ ID NO: 21706 - DNA, 20 bp, synthetic construct
  misc_feature 1..20: note = chemically synthesized
  source 1..20: mol_type = other DNA
aatcttgcagtgactaagaa

SEQ ID NO: 21707 - DNA, 20 bp, synthetic construct
  misc_feature 1..20: note = chemically synthesized
  source 1..20: mol_type = other DNA
cttgcagtgactaagaaagg

SEQ ID NO: 21708 - DNA, 20 bp, synthetic construct
  misc_feature 1..20: note = chemically synthesized
  source 1..20: mol_type = other DNA
ttgcagtgactaagaaagga

SEQ ID NO: 21709 - DNA, 20 bp, synthetic construct
  misc_feature 1..20: note = chemically synthesized
  source 1..20: mol_type = other DNA
tgcagtgactaagaaaggaa

SEQ ID NO: 21710 - DNA, 20 bp, synthetic construct
  misc_feature 1..20: note = chemically synthesized
  source 1..20: mol_type = other DNA
agtgactaagaaaggaaggg

SEQ ID NO: 21711 - DNA, 20 bp, synthetic construct
  misc_feature 1..20: note = chemically synthesized
  source 1..20: mol_type = other DNA
taagaaaggaagggtggacc

SEQ ID NO: 21712 - DNA, 20 bp, synthetic construct
  misc_feature 1..20: note = chemically synthesized
  source 1..20: mol_type = other DNA
aagaaaggaagggtggaccc

SEQ ID NO: 21713 - DNA, 20 bp, synthetic construct
  misc_feature 1..20: note = chemically synthesized
  source 1..20: mol_type = other DNA
aaaggaagggtggacccagg

SEQ ID NO: 21714 - DNA, 20 bp, synthetic construct
  misc_feature 1..20: note = chemically synthesized
  source 1..20: mol_type = other DNA
agggtggacccaggcagacc

SEQ ID NO: 21715 - DNA, 20 bp, synthetic construct
  misc_feature 1..20: note = chemically synthesized
  source 1..20: mol_type = other DNA
gtggacccaggcagacccag

SEQ ID NO: 21716 - DNA, 20 bp, synthetic construct
  misc_feature 1..20: note = chemically synthesized
  source 1..20: mol_type = other DNA
tggacccaggcagacccaga

SEQ ID NO: 21717 - DNA, 20 bp, synthetic construct
  misc_feature 1..20: note = chemically synthesized
  source 1..20: mol_type = other DNA
cattgatcctgcatgcgtgc

SEQ ID NO: 21718 - DNA, 20 bp, synthetic construct
  misc_feature 1..20: note = chemically synthesized
  source 1..20: mol_type = other DNA
tgatcctgcatgcgtgccgg

SEQ ID NO: 21719 - DNA, 20 bp, synthetic construct
  misc_feature 1..20: note = chemically synthesized
  source 1..20: mol_type = other DNA
gatcctgcatgcgtgccggt

SEQ ID NO: 21720 - DNA, 20 bp, synthetic construct
  misc_feature 1..20: note = chemically synthesized
  source 1..20: mol_type = other DNA
cctgcatgcgtgccggtagg

SEQ ID NO: 21721 - DNA, 20 bp, synthetic construct
  misc_feature 1..20: note = chemically synthesized
  source 1..20: mol_type = other DNA
gcatgcgtgccggtaggcag

SEQ ID NO: 21722 - DNA, 20 bp, synthetic construct
  misc_feature 1..20: note = chemically synthesized
  source 1..20: mol_type = other DNA
gtgccggtaggcagcagttc

SEQ ID NO: 21723 - DNA, 20 bp, synthetic construct
  misc_feature 1..20: note = chemically synthesized
  source 1..20: mol_type = other DNA
ggcagcagttctggaattgc

SEQ ID NO: 21724 - DNA, 20 bp, synthetic construct
  misc_feature 1..20: note = chemically synthesized
  source 1..20: mol_type = other DNA
gcagcagttctggaattgct

SEQ ID NO: 21725 - DNA, 20 bp, synthetic construct
  misc_feature 1..20: note = chemically synthesized
  source 1..20: mol_type = other DNA
cagcagttctggaattgctg

SEQ ID NO: 21726 - DNA, 20 bp, synthetic construct
  misc_feature 1..20: note = chemically synthesized
  source 1..20: mol_type = other DNA
tggaattgctggggaaacca

SEQ ID NO: 21727 - DNA, 20 bp, synthetic construct
  misc_feature 1..20: note = chemically synthesized
  source 1..20: mol_type = other DNA
ttgctggggaaaccacagtg

SEQ ID NO: 21728 - DNA, 20 bp, synthetic construct
  misc_feature 1..20: note = chemically synthesized
  source 1..20: mol_type = other DNA
gggaaaccacagtgcagcat

SEQ ID NO: 21729 - DNA, 20 bp, synthetic construct
  misc_feature 1..20: note = chemically synthesized
  source 1..20: mol_type = other DNA
ccacagtgcagcatgagccc

SEQ ID NO: 21730 - DNA, 20 bp, synthetic construct
  misc_feature 1..20: note = chemically synthesized
  source 1..20: mol_type = other DNA
cacagtgcagcatgagccct

SEQ ID NO: 21731 - DNA, 20 bp, synthetic construct
  misc_feature 1..20: note = chemically synthesized
  source 1..20: mol_type = other DNA
acagtgcagcatgagccctg

SEQ ID NO: 21732 - DNA, 20 bp, synthetic construct
  misc_feature 1..20: note = chemically synthesized
  source 1..20: mol_type = other DNA
ggggcctgctctcttgtgcc

SEQ ID NO: 21733 - DNA, 20 bp, synthetic construct
  misc_feature 1..20: note = chemically synthesized
  source 1..20: mol_type = other DNA
ctgctctcttgtgcccggct

SEQ ID NO: 21734 - DNA, 20 bp, synthetic construct
  misc_feature 1..20: note = chemically synthesized
  source 1..20: mol_type = other DNA
ctgagcatctctgttctgtt

SEQ ID NO: 21735 - DNA, 20 bp, synthetic construct
  misc_feature 1..20: note = chemically synthesized
  source 1..20: mol_type = other DNA
tgagcatctctgttctgttt

SEQ ID NO: 21736 - DNA, 20 bp, synthetic construct
  misc_feature 1..20: note = chemically synthesized
  source 1..20: mol_type = other DNA
gagcatctctgttctgtttg

SEQ ID NO: 21737 - DNA, 20 bp, synthetic construct
  misc_feature 1..20: note = chemically synthesized
  source 1..20: mol_type = other DNA
gcatctctgttctgtttggg

SEQ ID NO: 21738 - DNA, 20 bp, synthetic construct
  misc_feature 1..20: note = chemically synthesized
  source 1..20: mol_type = other DNA
ttctgtttggggagtcctgc

SEQ ID NO: 21739 - DNA, 20 bp, synthetic construct
  misc_feature 1..20: note = chemically synthesized
  source 1..20: mol_type = other DNA
tctgtttggggagtcctgcc

SEQ ID NO: 21740 - DNA, 20 bp, synthetic construct
  misc_feature 1..20: note = chemically synthesized
  source 1..20: mol_type = other DNA
tttggggagtcctgccaggc

SEQ ID NO: 21741 - DNA, 20 bp, synthetic construct
  misc_feature 1..20: note = chemically synthesized
  source 1..20: mol_type = other DNA
gagtcctgccaggcaagtgt

SEQ ID NO: 21742 - DNA, 20 bp, synthetic construct
  misc_feature 1..20: note = chemically synthesized
  source 1..20: mol_type = other DNA
tgccaggcaagtgtgagtca

SEQ ID NO: 21743 - DNA, 20 bp, synthetic construct
  misc_feature 1..20: note = chemically synthesized
  source 1..20: mol_type = other DNA
ccaggcaagtgtgagtcaaa

SEQ ID NO: 21744 - DNA, 20 bp, synthetic construct
  misc_feature 1..20: note = chemically synthesized
  source 1..20: mol_type = other DNA
caggcaagtgtgagtcaaag

SEQ ID NO: 21745 - DNA, 20 bp, synthetic construct
  misc_feature 1..20: note = chemically synthesized
  source 1..20: mol_type = other DNA
ggcaagtgtgagtcaaagag

SEQ ID NO: 21746 - DNA, 20 bp, synthetic construct
  misc_feature 1..20: note = chemically synthesized
  source 1..20: mol_type = other DNA
gtgtgagtcaaagaggagac

SEQ ID NO: 21747 - DNA, 20 bp, synthetic construct
  misc_feature 1..20: note = chemically synthesized
  source 1..20: mol_type = other DNA
tgtgagtcaaagaggagacc

SEQ ID NO: 21748 - DNA, 20 bp, synthetic construct
  misc_feature 1..20: note = chemically synthesized
  source 1..20: mol_type = other DNA
gtgagtcaaagaggagacca

SEQ ID NO: 21749 - DNA, 20 bp, synthetic construct
  misc_feature 1..20: note = chemically synthesized
  source 1..20: mol_type = other DNA
gagaccagggccctatgtca

SEQ ID NO: 21750 - DNA, 20 bp, synthetic construct
  misc_feature 1..20: note = chemically synthesized
  source 1..20: mol_type = other DNA
agaccagggccctatgtcat

SEQ ID NO: 21751 - DNA, 20 bp, synthetic construct
  misc_feature 1..20: note = chemically synthesized
  source 1..20: mol_type = other DNA
gaccagggccctatgtcatg

SEQ ID NO: 21752 - DNA, 20 bp, synthetic construct
  misc_feature 1..20: note = chemically synthesized
  source 1..20: mol_type = other DNA
accagggccctatgtcatgg

SEQ ID NO: 21753 - DNA, 20 bp, synthetic construct
  misc_feature 1..20: note = chemically synthesized
  source 1..20: mol_type = other DNA
agggccctatgtcatggggg

SEQ ID NO: 21754 - DNA, 20 bp, synthetic construct
  misc_feature 1..20: note = chemically synthesized
  source 1..20: mol_type = other DNA
ctatgtcatgggggcagtgt

SEQ ID NO: 21755 - DNA, 20 bp, synthetic construct
  misc_feature 1..20: note = chemically synthesized
  source 1..20: mol_type = other DNA
tcatgggggcagtgtcggct

SEQ ID NO: 21756 - DNA, 20 bp, synthetic construct
  misc_feature 1..20: note = chemically synthesized
  source 1..20: mol_type = other DNA
tgggggcagtgtcggctgag

SEQ ID NO: 21757 - DNA, 20 bp, synthetic construct
  misc_feature 1..20: note = chemically synthesized
  source 1..20: mol_type = other DNA
gtcggctgagtggtactctt

SEQ ID NO: 21758 - DNA, 20 bp, synthetic construct
  misc_feature 1..20: note = chemically synthesized
  source 1..20: mol_type = other DNA
cggctgagtggtactcttca

SEQ ID NO: 21759 - DNA, 20 bp, synthetic construct
  misc_feature 1..20: note = chemically synthesized
  source 1..20: mol_type = other DNA
gtggtactcttcagagttct

SEQ ID NO: 21760 - DNA, 20 bp, synthetic construct
  misc_feature 1..20: note = chemically synthesized
  source 1..20: mol_type = other DNA
ttctcagaatgtgccgctcg

SEQ ID NO: 21761 - DNA, 20 bp, synthetic construct
  misc_feature 1..20: note = chemically synthesized
  source 1..20: mol_type = other DNA
atgtgccgctcgaagccatg

SEQ ID NO: 21762 - DNA, 20 bp, synthetic construct
  misc_feature 1..20: note = chemically synthesized
  source 1..20: mol_type = other DNA
tgtgccgctcgaagccatgt

SEQ ID NO: 21763 - DNA, 20 bp, synthetic construct
  misc_feature 1..20: note = chemically synthesized
  source 1..20: mol_type = other DNA
ctcgaagccatgtaggcttc

SEQ ID NO: 21764 - DNA, 20 bp, synthetic construct
  misc_feature 1..20: note = chemically synthesized
  source 1..20: mol_type = other DNA
gaagccatgtaggcttccag

SEQ ID NO: 21765 - DNA, 20 bp, synthetic construct
  misc_feature 1..20: note = chemically synthesized
  source 1..20: mol_type = other DNA
aagccatgtaggcttccagc

SEQ ID NO: 21766 - DNA, 20 bp, synthetic construct
  misc_feature 1..20: note = chemically synthesized
  source 1..20: mol_type = other DNA
gtaggcttccagcaggcttc

SEQ ID NO: 21767 - DNA, 20 bp, synthetic construct
  misc_feature 1..20: note = chemically synthesized
  source 1..20: mol_type = other DNA
ggcttccagcaggcttctag

SEQ ID NO: 21768 - DNA, 20 bp, synthetic construct
  misc_feature 1..20: note = chemically synthesized
  source 1..20: mol_type = other DNA
tccagcaggcttctagcaga

SEQ ID NO: 21769 - DNA, 20 bp, synthetic construct
  misc_feature 1..20: note = chemically synthesized
  source 1..20: mol_type = other DNA
ccagcaggcttctagcagat

SEQ ID NO: 21770 - DNA, 20 bp, synthetic construct
  misc_feature 1..20: note = chemically synthesized
  source 1..20: mol_type = other DNA
cagcaggcttctagcagatg

SEQ ID NO: 21771 - DNA, 20 bp, synthetic construct
  misc_feature 1..20: note = chemically synthesized
  source 1..20: mol_type = other DNA
gcttctagcagatggggttt

SEQ ID NO: 21772 - DNA, 20 bp, synthetic construct
  misc_feature 1..20: note = chemically synthesized
  source 1..20: mol_type = other DNA
ctagcagatggggttttggc

SEQ ID NO: 21773 - DNA, 20 bp, synthetic construct
  misc_feature 1..20: note = chemically synthesized
  source 1..20: mol_type = other DNA
tagcagatggggttttggct

SEQ ID NO: 21774 - DNA, 20 bp, synthetic construct
  misc_feature 1..20: note = chemically synthesized
  source 1..20: mol_type = other DNA
agatggggttttggctgggt

SEQ ID NO: 21775 - DNA, 20 bp, synthetic construct
  misc_feature 1..20: note = chemically synthesized
  source 1..20: mol_type = other DNA
gatggggttttggctgggtt

SEQ ID NO: 21776 - DNA, 20 bp, synthetic construct
  misc_feature 1..20: note = chemically synthesized
  source 1..20: mol_type = other DNA
ctgggttgggccttaatact

SEQ ID NO: 21777 - DNA, 20 bp, synthetic construct
  misc_feature 1..20: note = chemically synthesized
  source 1..20: mol_type = other DNA
ttcttgctttcttttttttc

SEQ ID NO: 21778 - DNA, 20 bp, synthetic construct
  misc_feature 1..20: note = chemically synthesized
  source 1..20: mol_type = other DNA
ttttttttctagaatcaacg

SEQ ID NO: 21779 - DNA, 20 bp, synthetic construct
  misc_feature 1..20: note = chemically synthesized
  source 1..20: mol_type = other DNA
tttttctagaatcaacgaag

SEQ ID NO: 21780 - DNA, 20 bp, synthetic construct
  misc_feature 1..20: note = chemically synthesized
  source 1..20: mol_type = other DNA
agcagccaataaccaatttt

SEQ ID NO: 21781 - DNA, 20 bp, synthetic construct
  misc_feature 1..20: note = chemically synthesized
  source 1..20: mol_type = other DNA
gcagccaataaccaattttc

SEQ ID NO: 21782 - DNA, 20 bp, synthetic construct
  misc_feature 1..20: note = chemically synthesized
  source 1..20: mol_type = other DNA
agccaataaccaattttcag

SEQ ID NO: 21783 - DNA, 20 bp, synthetic construct
  misc_feature 1..20: note = chemically synthesized
  source 1..20: mol_type = other DNA
gccaataaccaattttcagg

SEQ ID NO: 21784 - DNA, 20 bp, synthetic construct
  misc_feature 1..20: note = chemically synthesized
  source 1..20: mol_type = other DNA
taaccaattttcaggaggtt

SEQ ID NO: 21785 - DNA, 20 bp, synthetic construct
  misc_feature 1..20: note = chemically synthesized
  source 1..20: mol_type = other DNA
aaaattttattaaaataata

SEQ ID NO: 21786 - DNA, 20 bp, synthetic construct
  misc_feature 1..20: note = chemically synthesized
  source 1..20: mol_type = other DNA
aaataataaagctctgacaa

SEQ ID NO: 21787 - DNA, 20 bp, synthetic construct
  misc_feature 1..20: note = chemically synthesized
  source 1..20: mol_type = other DNA
taaagctctgacaaaagatc

SEQ ID NO: 21788 - DNA, 20 bp, synthetic construct
  misc_feature 1..20: note = chemically synthesized
  source 1..20: mol_type = other DNA
atccagaatattgtcccttg

SEQ ID NO: 21789 - DNA, 20 bp, synthetic construct
  misc_feature 1..20: note = chemically synthesized
  source 1..20: mol_type = other DNA
cagaatattgtcccttgcag

SEQ ID NO: 21790 - DNA, 20 bp, synthetic construct
  misc_feature 1..20: note = chemically synthesized
  source 1..20: mol_type = other DNA
agaatattgtcccttgcagt

SEQ ID NO: 21791 - DNA, 20 bp, synthetic construct
  misc_feature 1..20: note = chemically synthesized
  source 1..20: mol_type = other DNA
ttgtcccttgcagtgggctt

SEQ ID NO: 21792 - DNA, 20 bp, synthetic construct
  misc_feature 1..20: note = chemically synthesized
  source 1..20: mol_type = other DNA
tgtcccttgcagtgggcttt

SEQ ID NO: 21793 - DNA, 20 bp, synthetic construct
  misc_feature 1..20: note = chemically synthesized
  source 1..20: mol_type = other DNA
gtcccttgcagtgggcttta

SEQ ID NO: 21794 - DNA, 20 bp, synthetic construct
  misc_feature 1..20: note = chemically synthesized
  source 1..20: mol_type = other DNA
tgggctttagggttgcatct

SEQ ID NO: 21795 - DNA, 20 bp, synthetic construct
  misc_feature 1..20: note = chemically synthesized
  source 1..20: mol_type = other DNA
atcttggctcctaaatcttc

SEQ ID NO: 21796 - DNA, 20 bp, synthetic construct
  misc_feature 1..20: note = chemically synthesized
  source 1..20: mol_type = other DNA
tcttggctcctaaatcttct

SEQ ID NO: 21797 - DNA, 20 bp, synthetic construct
  misc_feature 1..20: note = chemically synthesized
  source 1..20: mol_type = other DNA
tggctcctaaatcttctagg

SEQ ID NO: 21798 - DNA, 20 bp, synthetic construct
  misc_feature 1..20: note = chemically synthesized
  source 1..20: mol_type = other DNA
ggctcctaaatcttctaggc

SEQ ID NO: 21799 - DNA, 20 bp, synthetic construct
  misc_feature 1..20: note = chemically synthesized
  source 1..20: mol_type = other DNA
atcttctaggcgggttaaat

SEQ ID NO: 21800 - DNA, 20 bp, synthetic construct
  misc_feature 1..20: note = chemically synthesized
  source 1..20: mol_type = other DNA
cacaaaatgtcacatttccc

SEQ ID NO: 21801 - DNA, 20 bp, synthetic construct
  misc_feature 1..20: note = chemically synthesized
  source 1..20: mol_type = other DNA
aaaatgtcacatttccctgg

SEQ ID NO: 21802 - DNA, 20 bp, synthetic construct
  misc_feature 1..20: note = chemically synthesized
  source 1..20: mol_type = other DNA
tcacatttccctggcagcta

SEQ ID NO: 21803 - DNA, 20 bp, synthetic construct
  misc_feature 1..20: note = chemically synthesized
  source 1..20: mol_type = other DNA
cacatttccctggcagctat

SEQ ID NO: 21804 - DNA, 20 bp, synthetic construct
  misc_feature 1..20: note = chemically synthesized
  source 1..20: mol_type = other DNA
ccctggcagctataggtttc

SEQ ID NO: 21805 - DNA, 20 bp, synthetic construct
  misc_feature 1..20: note = chemically synthesized
  source 1..20: mol_type = other DNA
cctggcagctataggtttcc

SEQ ID NO: 21806 - DNA, 20 bp, synthetic construct
  misc_feature 1..20: note = chemically synthesized
  source 1..20: mol_type = other DNA
tggcagctataggtttccag

SEQ ID NO: 21807 - DNA, 20 bp, synthetic construct
  misc_feature 1..20: note = chemically synthesized
  source 1..20: mol_type = other DNA
ggcagctataggtttccagg

SEQ ID NO: 21808 - DNA, 20 bp, synthetic construct
  misc_feature 1..20: note = chemically synthesized
  source 1..20: mol_type = other DNA
gcagctataggtttccagga

SEQ ID NO: 21809 - DNA, 20 bp, synthetic construct
  misc_feature 1..20: note = chemically synthesized
  source 1..20: mol_type = other DNA
aggtttccaggagggtgaac

SEQ ID NO: 21810 - DNA, 20 bp, synthetic construct
  misc_feature 1..20: note = chemically synthesized
  source 1..20: mol_type = other DNA
ggtttccaggagggtgaaca

SEQ ID NO: 21811 - DNA, 20 bp, synthetic construct
  misc_feature 1..20: note = chemically synthesized
  source 1..20: mol_type = other DNA
gtttccaggagggtgaacaa

SEQ ID NO: 21812 - DNA, 20 bp, synthetic construct
  misc_feature 1..20: note = chemically synthesized
  source 1..20: mol_type = other DNA
gagggtgaacaagggccatc

SEQ ID NO: 21813 - DNA, 20 bp, synthetic construct
  misc_feature 1..20: note = chemically synthesized
  source 1..20: mol_type = other DNA
agggtgaacaagggccatct

SEQ ID NO: 21814 - DNA, 20 bp, synthetic construct
  misc_feature 1..20: note = chemically synthesized
  source 1..20: mol_type = other DNA
gggccatctgggtgtttgct

SEQ ID NO: 21815 - DNA, 20 bp, synthetic construct
  misc_feature 1..20: note = chemically synthesized
  source 1..20: mol_type = other DNA
ggccatctgggtgtttgctg

SEQ ID NO: 21816 - DNA, 20 bp, synthetic construct
  misc_feature 1..20: note = chemically synthesized
  source 1..20: mol_type = other DNA
gccatctgggtgtttgctga

SEQ ID NO: 21817 - DNA, 20 bp, synthetic construct
  misc_feature 1..20: note = chemically synthesized
  source 1..20: mol_type = other DNA
ggtgtttgctgagggcttct

SEQ ID NO: 21818 - DNA, 20 bp, synthetic construct
  misc_feature 1..20: note = chemically synthesized
  source 1..20: mol_type = other DNA
tgctgagggcttctcagtcc

SEQ ID NO: 21819 - DNA, 20 bp, synthetic construct
  misc_feature 1..20: note = chemically synthesized
  source 1..20: mol_type = other DNA
gctgagggcttctcagtcct

SEQ ID NO: 21820 - DNA, 20 bp, synthetic construct
  misc_feature 1..20: note = chemically synthesized
  source 1..20: mol_type = other DNA
gagggcttctcagtcctggg

SEQ ID NO: 21821 - DNA, 20 bp, synthetic construct
  misc_feature 1..20: note = chemically synthesized
  source 1..20: mol_type = other DNA
agggcttctcagtcctgggt

SEQ ID NO: 21822 - DNA, 20 bp, synthetic construct
  misc_feature 1..20: note = chemically synthesized
  source 1..20: mol_type = other DNA
cagtcctgggtaggaactgc

SEQ ID NO: 21823 - DNA, 20 bp, synthetic construct
  misc_feature 1..20: note = chemically synthesized
  source 1..20: mol_type = other DNA
agtcctgggtaggaactgct

SEQ ID NO: 21824 - DNA, 20 bp, synthetic construct
  misc_feature 1..20: note = chemically synthesized
  source 1..20: mol_type = other DNA
tgggtaggaactgctgggtg

SEQ ID NO: 21825 - DNA, 20 bp, synthetic construct
  misc_feature 1..20: note = chemically synthesized
  source 1..20: mol_type = other DNA
tgctgggtgtggaaaccacc

SEQ ID NO: 21826 - DNA, 20 bp, synthetic construct
  misc_feature 1..20: note = chemically synthesized
  source 1..20: mol_type = other DNA
gctgggtgtggaaaccacca

SEQ ID NO: 21827 - DNA, 20 bp, synthetic construct
  misc_feature 1..20: note = chemically synthesized
  source 1..20: mol_type = other DNA
ggaaaccaccaaggctttgt

SEQ ID NO: 21828 - DNA, 20 bp, synthetic construct
  misc_feature 1..20: note = chemically synthesized
  source 1..20: mol_type = other DNA
ccaaggctttgtaagcctga

SEQ ID NO: 21829 - DNA, 20 bp, synthetic construct
  misc_feature 1..20: note = chemically synthesized
  source 1..20: mol_type = other DNA
aaggctttgtaagcctgaaa

SEQ ID NO: 21830 - DNA, 20 bp, synthetic construct
  misc_feature 1..20: note = chemically synthesized
  source 1..20: mol_type = other DNA
tgtaagcctgaaagagccac

SEQ ID NO: 21831 - DNA, 20 bp, synthetic construct
  misc_feature 1..20: note = chemically synthesized
  source 1..20: mol_type = other DNA
cctgaaagagccactggtat

SEQ ID NO: 21832 - DNA, 20 bp, synthetic construct
  misc_feature 1..20: note = chemically synthesized
  source 1..20: mol_type = other DNA
ctgaaagagccactggtatt

SEQ ID NO: 21833 - DNA, 20 bp, synthetic construct
  misc_feature 1..20: note = chemically synthesized
  source 1..20: mol_type = other DNA
gaaagagccactggtattgg

SEQ ID NO: 21834 - DNA, 20 bp, synthetic construct
  misc_feature 1..20: note = chemically synthesized
  source 1..20: mol_type = other DNA
agccactggtattgggagct

SEQ ID NO: 21835 - DNA, 20 bp, synthetic construct
  misc_feature 1..20: note = chemically synthesized
  source 1..20: mol_type = other DNA
ttgggagcttggtctgcact

SEQ ID NO: 21836 - DNA, 20 bp, synthetic construct
  misc_feature 1..20: note = chemically synthesized
  source 1..20: mol_type = other DNA
cttggtctgcactcagacct

SEQ ID NO: 21837 - DNA, 20 bp, synthetic construct
  misc_feature 1..20: note = chemically synthesized
  source 1..20: mol_type = other DNA
agcgccacacattattttcc

SEQ ID NO: 21838 - DNA, 20 bp, synthetic construct
  misc_feature 1..20: note = chemically synthesized
  source 1..20: mol_type = other DNA
acacattattttcccagatt

SEQ ID NO: 21839 - DNA, 20 bp, synthetic construct
  misc_feature 1..20: note = chemically synthesized
  source 1..20: mol_type = other DNA
cacattattttcccagattt

SEQ ID NO: 21840 - DNA, 20 bp, synthetic construct
  misc_feature 1..20: note = chemically synthesized
  source 1..20: mol_type = other DNA
cccagatttgggcaatctaa

SEQ ID NO: 21841 - DNA, 20 bp, synthetic construct
  misc_feature 1..20: note = chemically synthesized
  source 1..20: mol_type = other DNA
gatttgggcaatctaatgga

SEQ ID NO: 21842 - DNA, 20 bp, synthetic construct
  misc_feature 1..20: note = chemically synthesized
  source 1..20: mol_type = other DNA
atttgggcaatctaatggat

SEQ ID NO: 21843 - DNA, 20 bp, synthetic construct
  misc_feature 1..20: note = chemically synthesized
  source 1..20: mol_type = other DNA
ttgggcaatctaatggatag

SEQ ID NO: 21844 - DNA, 20 bp, synthetic construct
  misc_feature 1..20: note = chemically synthesized
  source 1..20: mol_type = other DNA
tgggcaatctaatggatagg

SEQ ID NO: 21845 - DNA, 20 bp, synthetic construct
  misc_feature 1..20: note = chemically synthesized
  source 1..20: mol_type = other DNA
gggcaatctaatggatagga

SEQ ID NO: 21846 - DNA, 20 bp, synthetic construct
  misc_feature 1..20: note = chemically synthesized
  source 1..20: mol_type = other DNA
gcaatctaatggataggagg

SEQ ID NO: 21847 - DNA, 20 bp, synthetic construct
  misc_feature 1..20: note = chemically synthesized
  source 1..20: mol_type = other DNA
caatctaatggataggaggg

SEQ ID NO: 21848 - DNA, 20 bp, synthetic construct
  misc_feature 1..20: note = chemically synthesized
  source 1..20: mol_type = other DNA
aatctaatggataggaggga

SEQ ID NO: 21849 - DNA, 20 bp, synthetic construct
  misc_feature 1..20: note = chemically synthesized
  source 1..20: mol_type = other DNA
ggttatgccccatctgtgaa

SEQ ID NO: 21850 - DNA, 20 bp, synthetic construct
  misc_feature 1..20: note = chemically synthesized
  source 1..20: mol_type = other DNA
gttatgccccatctgtgaat

SEQ ID NO: 21851 - DNA, 20 bp, synthetic construct
  misc_feature 1..20: note = chemically synthesized
  source 1..20: mol_type = other DNA
atgccccatctgtgaatagg

SEQ ID NO: 21852 - DNA, 20 bp, synthetic construct
  misc_feature 1..20: note = chemically synthesized
  source 1..20: mol_type = other DNA
gccccatctgtgaataggtg

SEQ ID NO: 21853 - DNA, 20 bp, synthetic construct
  misc_feature 1..20: note = chemically synthesized
  source 1..20: mol_type = other DNA
ccccatctgtgaataggtgg

SEQ ID NO: 21854 - DNA, 20 bp, synthetic construct
  misc_feature 1..20: note = chemically synthesized
  source 1..20: mol_type = other DNA
ccatctgtgaataggtggag

SEQ ID NO: 21855 - DNA, 20 bp, synthetic construct
  misc_feature 1..20: note = chemically synthesized
  source 1..20: mol_type = other DNA
atctgtgaataggtggagga

SEQ ID NO: 21856 - DNA, 20 bp, synthetic construct
  misc_feature 1..20: note = chemically synthesized
  source 1..20: mol_type = other DNA
tctgtgaataggtggaggag

SEQ ID NO: 21857 - DNA, 20 bp, synthetic construct
  misc_feature 1..20: note = chemically synthesized
  source 1..20: mol_type = other DNA
ctgtgaataggtggaggaga

SEQ ID NO: 21858 - DNA, 20 bp, synthetic construct
  misc_feature 1..20: note = chemically synthesized
  source 1..20: mol_type = other DNA
aataggtggaggagagggtc

SEQ ID NO: 21859 - DNA, 20 bp, synthetic construct
  misc_feature 1..20: note = chemically synthesized
  source 1..20: mol_type = other DNA
taggtggaggagagggtcca

SEQ ID NO: 21860 - DNA, 20 bp, synthetic construct
  misc_feature 1..20: note = chemically synthesized
  source 1..20: mol_type = other DNA
gggtccagagaaaattgttg

SEQ ID NO: 21861 - DNA, 20 bp, synthetic construct
  misc_feature 1..20: note = chemically synthesized
  source 1..20: mol_type = other DNA
gagaaaattgttgcagtgct

SEQ ID NO: 21862 - DNA, 20 bp, synthetic construct
  misc_feature 1..20: note = chemically synthesized
  source 1..20: mol_type = other DNA
gaaaattgttgcagtgctca

SEQ ID NO: 21863 - DNA, 20 bp, synthetic construct
  misc_feature 1..20: note = chemically synthesized
  source 1..20: mol_type = other DNA
aaaattgttgcagtgctcag

SEQ ID NO: 21864 - DNA, 20 bp, synthetic construct
  misc_feature 1..20: note = chemically synthesized
  source 1..20: mol_type = other DNA
attgttgcagtgctcagagg

SEQ ID NO: 21865 - DNA, 20 bp, synthetic construct
  misc_feature 1..20: note = chemically synthesized
  source 1..20: mol_type = other DNA
gcagtgctcagaggaagcaa

SEQ ID NO: 21866 - DNA, 20 bp, synthetic construct
  misc_feature 1..20: note = chemically synthesized
  source 1..20: mol_type = other DNA
agcaatagcctactgtcttc

SEQ ID NO: 21867 - DNA, 20 bp, synthetic construct
  misc_feature 1..20: note = chemically synthesized
  source 1..20: mol_type = other DNA
gcaatagcctactgtcttcc

SEQ ID NO: 21868 - DNA, 20 bp, synthetic construct
  misc_feature 1..20: note = chemically synthesized
  source 1..20: mol_type = other DNA
caatagcctactgtcttcca

SEQ ID NO: 21869 - DNA, 20 bp, synthetic construct
  misc_feature 1..20: note = chemically synthesized
  source 1..20: mol_type = other DNA
ctgtcttccagggacatgtc

SEQ ID NO: 21870 - DNA, 20 bp, synthetic construct
  misc_feature 1..20: note = chemically synthesized
  source 1..20: mol_type = other DNA
ccagggacatgtctggctcc

SEQ ID NO: 21871 - DNA, 20 bp, synthetic construct
  misc_feature 1..20: note = chemically synthesized
  source 1..20: mol_type = other DNA
tggctcctggaatgcctgtc

SEQ ID NO: 21872 - DNA, 20 bp, synthetic construct
  misc_feature 1..20: note = chemically synthesized
  source 1..20: mol_type = other DNA
ggctcctggaatgcctgtcc

SEQ ID NO: 21873 - DNA, 20 bp, synthetic construct
  misc_feature 1..20: note = chemically synthesized
  source 1..20: mol_type = other DNA
tggaatgcctgtccaggctg

SEQ ID NO: 21874 - DNA, 20 bp, synthetic construct
  misc_feature 1..20: note = chemically synthesized
  source 1..20: mol_type = other DNA
aatgcctgtccaggctgcgg

SEQ ID NO: 21875 - DNA, 20 bp, synthetic construct
  misc_feature 1..20: note = chemically synthesized
  source 1..20: mol_type = other DNA
atgcctgtccaggctgcggt

SEQ ID NO: 21876 - DNA, 20 bp, synthetic construct
  misc_feature 1..20: note = chemically synthesized
  source 1..20: mol_type = other DNA
cctgtccaggctgcggtggg

SEQ ID NO: 21877 - DNA, 20 bp, synthetic construct
  misc_feature 1..20: note = chemically synthesized
  source 1..20: mol_type = other DNA
ccaggctgcggtgggtggca

SEQ ID NO: 21878 - DNA, 20 bp, synthetic construct
  misc_feature 1..20: note = chemically synthesized
  source 1..20: mol_type = other DNA
caggctgcggtgggtggcat

SEQ ID NO: 21879 - DNA, 20 bp, synthetic construct
  misc_feature 1..20: note = chemically synthesized
  source 1..20: mol_type = other DNA
ctgcggtgggtggcatgggt

SEQ ID NO: 21880 - DNA, 20 bp, synthetic construct
  misc_feature 1..20: note = chemically synthesized
  source 1..20: mol_type = other DNA
tgcggtgggtggcatgggta

SEQ ID NO: 21881 - DNA, 20 bp, synthetic construct
  misc_feature 1..20: note = chemically synthesized
  source 1..20: mol_type = other DNA
gcggtgggtggcatgggtaa

SEQ ID NO: 21882 - DNA, 20 bp, synthetic construct
  misc_feature 1..20: note = chemically synthesized
  source 1..20: mol_type = other DNA
gggtaagggtttttaataaa

SEQ ID NO: 21883 - DNA, 20 bp, synthetic construct
  misc_feature 1..20: note = chemically synthesized
  source 1..20: mol_type = other DNA
taataaaaagtcacaatgcc

SEQ ID NO: 21884 - DNA, 20 bp, synthetic construct
  misc_feature 1..20: note = chemically synthesized
  source 1..20: mol_type = other DNA
ataaaaagtcacaatgcctg

SEQ ID NO: 21885 - DNA, 20 bp, synthetic construct
  misc_feature 1..20: note = chemically synthesized
  source 1..20: mol_type = other DNA
aaaagtcacaatgcctggag

SEQ ID NO: 21886 - DNA, 20 bp, synthetic construct
  misc_feature 1..20: note = chemically synthesized
  source 1..20: mol_type = other DNA
gtcacaatgcctggagaagt

SEQ ID NO: 21887 - DNA, 20 bp, synthetic construct
  misc_feature 1..20: note = chemically synthesized
  source 1..20: mol_type = other DNA
tcacaatgcctggagaagtg

SEQ ID NO: 21888 - DNA, 20 bp, synthetic construct
  misc_feature 1..20: note = chemically synthesized
  source 1..20: mol_type = other DNA
tggagaagtgaggctccttg

SEQ ID NO: 21889 - DNA, 20 bp, synthetic construct
  misc_feature 1..20: note = chemically synthesized
  source 1..20: mol_type = other DNA
gccacctgccttttctgtct

SEQ ID NO: 21890 - DNA, 20 bp, synthetic construct
  misc_feature 1..20: note = chemically synthesized
  source 1..20: mol_type = other DNA
ccacctgccttttctgtctt

SEQ ID NO: 21891 - DNA, 20 bp, synthetic construct
  misc_feature 1..20: note = chemically synthesized
  source 1..20: mol_type = other DNA
cttttctgtcttgggtctcc

SEQ ID NO: 21892 - DNA, 20 bp, synthetic construct
  misc_feature 1..20: note = chemically synthesized
  source 1..20: mol_type = other DNA
tctgtcttgggtctcctggt

SEQ ID NO: 21893 - DNA, 20 bp, synthetic construct
  misc_feature 1..20: note = chemically synthesized
  source 1..20: mol_type = other DNA
ctcctggttggaccccattc

SEQ ID NO: 21894 - DNA, 20 bp, synthetic construct
  misc_feature 1..20: note = chemically synthesized
  source 1..20: mol_type = other DNA
ccccattctggctttccacc

SEQ ID NO: 21895 - DNA, 20 bp, synthetic construct
  misc_feature 1..20: note = chemically synthesized
  source 1..20: mol_type = other DNA
attctggctttccacctggt

SEQ ID NO: 21896 - DNA, 20 bp, synthetic construct
  misc_feature 1..20: note = chemically synthesized
  source 1..20: mol_type = other DNA
tctggctttccacctggtca

SEQ ID NO: 21897 - DNA, 20 bp, synthetic construct
  misc_feature 1..20: note = chemically synthesized
  source 1..20: mol_type = other DNA
ccacctggtcagagcctcct

SEQ ID NO: 21898 - DNA, 20 bp, synthetic construct
  misc_feature 1..20: note = chemically synthesized
  source 1..20: mol_type = other DNA
cacctggtcagagcctcctg

SEQ ID NO: 21899 - DNA, 20 bp, synthetic construct
  misc_feature 1..20: note = chemically synthesized
  source 1..20: mol_type = other DNA
gtcagagcctcctgaggctg

SEQ ID NO: 21900 - DNA, 20 bp, synthetic construct
  misc_feature 1..20: note = chemically synthesized
  source 1..20: mol_type = other DNA
agcctcctgaggctgcagaa

SEQ ID NO: 21901 - DNA, 20 bp, synthetic construct
  misc_feature 1..20: note = chemically synthesized
  source 1..20: mol_type = other DNA
gcctcctgaggctgcagaat

SEQ ID NO: 21902 - DNA, 20 bp, synthetic construct
  misc_feature 1..20: note = chemically synthesized
  source 1..20: mol_type = other DNA
cctcctgaggctgcagaatg

SEQ ID NO: 21903 - DNA, 20 bp, synthetic construct
  misc_feature 1..20: note = chemically synthesized
  source 1..20: mol_type = other DNA
agaatggggctaacatgatc

SEQ ID NO: 21904 - DNA, 20 bp, synthetic construct
  misc_feature 1..20: note = chemically synthesized
  source 1..20: mol_type = other DNA
gaatggggctaacatgatca

SEQ ID NO: 21905 - DNA, 20 bp, synthetic construct
  misc_feature 1..20: note = chemically synthesized
  source 1..20: mol_type = other DNA
aatggggctaacatgatcaa

SEQ ID NO: 21906 - DNA, 20 bp, synthetic construct
  misc_feature 1..20: note = chemically synthesized
  source 1..20: mol_type = other DNA
taacatgatcaagggtgatg

SEQ ID NO: 21907 - DNA, 20 bp, synthetic construct
  misc_feature 1..20: note = chemically synthesized
  source 1..20: mol_type = other DNA
gtgatgtggcttctccatct

SEQ ID NO: 21908 - DNA, 20 bp, synthetic construct
  misc_feature 1..20: note = chemically synthesized
  source 1..20: mol_type = other DNA
tgatgtggcttctccatctt

SEQ ID NO: 21909 - DNA, 20 bp, synthetic construct
  misc_feature 1..20: note = chemically synthesized
  source 1..20: mol_type = other DNA
tggcttctccatcttgggac

SEQ ID NO: 21910 - DNA, 20 bp, synthetic construct
  misc_feature 1..20: note = chemically synthesized
  source 1..20: mol_type = other DNA
ggcttctccatcttgggact

SEQ ID NO: 21911 - DNA, 20 bp, synthetic construct
  misc_feature 1..20: note = chemically synthesized
  source 1..20: mol_type = other DNA
cttctccatcttgggactag

SEQ ID NO: 21912 - DNA, 20 bp, synthetic construct
  misc_feature 1..20: note = chemically synthesized
  source 1..20: mol_type = other DNA
atcttgggactaggagtgac

SEQ ID NO: 21913 - DNA, 20 bp, synthetic construct
  misc_feature 1..20: note = chemically synthesized
  source 1..20: mol_type = other DNA
tcttgggactaggagtgacc

SEQ ID NO: 21914 - DNA, 20 bp, synthetic construct
  misc_feature 1..20: note = chemically synthesized
  source 1..20: mol_type = other DNA
ggactaggagtgaccaggtt

SEQ ID NO: 21915 - DNA, 20 bp, synthetic construct
  misc_feature 1..20: note = chemically synthesized
  source 1..20: mol_type = other DNA
actaggagtgaccaggttta

SEQ ID NO: 21916 - DNA, 20 bp, synthetic construct
  misc_feature 1..20: note = chemically synthesized
  source 1..20: mol_type = other DNA
aggagtgaccaggtttagag

SEQ ID NO: 21917 - DNA, 20 bp, synthetic construct
  misc_feature 1..20: note = chemically synthesized
  source 1..20: mol_type = other DNA
ggagtgaccaggtttagaga

SEQ ID NO: 21918 - DNA, 20 bp, synthetic construct
  misc_feature 1..20: note = chemically synthesized
  source 1..20: mol_type = other DNA
gtgaccaggtttagagaagg

SEQ ID NO: 21919 - DNA, 20 bp, synthetic construct
  misc_feature 1..20: note = chemically synthesized
  source 1..20: mol_type = other DNA
ctcattcctgctcccattgc

SEQ ID NO: 21920 - DNA, 20 bp, synthetic construct
  misc_feature 1..20: note = chemically synthesized
  source 1..20: mol_type = other DNA
tcattcctgctcccattgcc

SEQ ID NO: 21921 - DNA, 20 bp, synthetic construct
  misc_feature 1..20: note = chemically synthesized
  source 1..20: mol_type = other DNA
tcccattgccaggacaaatg

SEQ ID NO: 21922 - DNA, 20 bp, synthetic construct
  misc_feature 1..20: note = chemically synthesized
  source 1..20: mol_type = other DNA
ccattgccaggacaaatgca

SEQ ID NO: 21923 - DNA, 20 bp, synthetic construct
  misc_feature 1..20: note = chemically synthesized
  source 1..20: mol_type = other DNA
ttgccaggacaaatgcagag

SEQ ID NO: 21924 - DNA, 20 bp, synthetic construct
  misc_feature 1..20: note = chemically synthesized
  source 1..20: mol_type = other DNA
ggacaaatgcagagtggatc

SEQ ID NO: 21925 - DNA, 20 bp, synthetic construct
  misc_feature 1..20: note = chemically synthesized
  source 1..20: mol_type = other DNA
gacaaatgcagagtggatct

SEQ ID NO: 21926 - DNA, 20 bp, synthetic construct
  misc_feature 1..20: note = chemically synthesized
  source 1..20: mol_type = other DNA
ctgggtctgtcccttccaca

SEQ ID NO: 21927 - DNA, 20 bp, synthetic construct
  misc_feature 1..20: note = chemically synthesized
  source 1..20: mol_type = other DNA
caacacattccgtgtgtatt

SEQ ID NO: 21928 - DNA, 20 bp, synthetic construct
  misc_feature 1..20: note = chemically synthesized
  source 1..20: mol_type = other DNA
ttccgtgtgtattaagatga

SEQ ID NO: 21929 - DNA, 20 bp, synthetic construct
  misc_feature 1..20: note = chemically synthesized
  source 1..20: mol_type = other DNA
tattaagatgacagacacgt

SEQ ID NO: 21930 - DNA, 20 bp, synthetic construct
  misc_feature 1..20: note = chemically synthesized
  source 1..20: mol_type = other DNA
agacacgttggttttgctcc

SEQ ID NO: 21931 - DNA, 20 bp, synthetic construct
  misc_feature 1..20: note = chemically synthesized
  source 1..20: mol_type = other DNA
acgttggttttgctccaagc

SEQ ID NO: 21932 - DNA, 20 bp, synthetic construct
  misc_feature 1..20: note = chemically synthesized
  source 1..20: mol_type = other DNA
ttggttttgctccaagccag

SEQ ID NO: 21933 - DNA, 20 bp, synthetic construct
  misc_feature 1..20: note = chemically synthesized
  source 1..20: mol_type = other DNA
caagccagtagccatccccc

SEQ ID NO: 21934 - DNA, 20 bp, synthetic construct
  misc_feature 1..20: note = chemically synthesized
  source 1..20: mol_type = other DNA
ccagtagccatccccctaga

SEQ ID NO: 21935 - DNA, 20 bp, synthetic construct
  misc_feature 1..20: note = chemically synthesized
  source 1..20: mol_type = other DNA
agccatccccctagacagcc

SEQ ID NO: 21936 - DNA, 20 bp, synthetic construct
  misc_feature 1..20: note = chemically synthesized
  source 1..20: mol_type = other DNA
gccatccccctagacagccc

SEQ ID NO: 21937 - DNA, 20 bp, synthetic construct
  misc_feature 1..20: note = chemically synthesized
  source 1..20: mol_type = other DNA
ctagacagcccaggccttaa

SEQ ID NO: 21938 - DNA, 20 bp, synthetic construct
  misc_feature 1..20: note = chemically synthesized
  source 1..20: mol_type = other DNA
cagcccaggccttaaaagac

SEQ ID NO: 21939 - DNA, 20 bp, synthetic construct
  misc_feature 1..20: note = chemically synthesized
  source 1..20: mol_type = other DNA
agcccaggccttaaaagaca

SEQ ID NO: 21940 - DNA, 20 bp, synthetic construct
  misc_feature 1..20: note = chemically synthesized
  source 1..20: mol_type = other DNA
cccaggccttaaaagacaag

SEQ ID NO: 21941 - DNA, 20 bp, synthetic construct
  misc_feature 1..20: note = chemically synthesized
  source 1..20: mol_type = other DNA
ccaggccttaaaagacaagg

SEQ ID NO: 21942 - DNA, 20 bp, synthetic construct
  misc_feature 1..20: note = chemically synthesized
  source 1..20: mol_type = other DNA
ttaaaagacaaggaggtgtt

SEQ ID NO: 21943 - DNA, 20 bp, synthetic construct
  misc_feature 1..20: note = chemically synthesized
  source 1..20: mol_type = other DNA
agacaaggaggtgtttggac

SEQ ID NO: 21944 - DNA, 20 bp, synthetic construct
  misc_feature 1..20: note = chemically synthesized
  source 1..20: mol_type = other DNA
acaaggaggtgtttggacaa

SEQ ID NO: 21945 - DNA, 20 bp, synthetic construct
  misc_feature 1..20: note = chemically synthesized
  source 1..20: mol_type = other DNA
ggaggtgtttggacaagagc

SEQ ID NO: 21946 - DNA, 20 bp, synthetic construct
  misc_feature 1..20: note = chemically synthesized
  source 1..20: mol_type = other DNA
gtgtttggacaagagcaaga

SEQ ID NO: 21947 - DNA, 20 bp, synthetic construct
  misc_feature 1..20: note = chemically synthesized
  source 1..20: mol_type = other DNA
tttggacaagagcaagaaag

SEQ ID NO: 21948 - DNA, 20 bp, synthetic construct
  misc_feature 1..20: note = chemically synthesized
  source 1..20: mol_type = other DNA
acaagagcaagaaagaagtc

SEQ ID NO: 21949 - DNA, 20 bp, synthetic construct
  misc_feature 1..20: note = chemically synthesized
  source 1..20: mol_type = other DNA
agaagtctggctgtgtcttc

SEQ ID NO: 21950 - DNA, 20 bp, synthetic construct
  misc_feature 1..20: note = chemically synthesized
  source 1..20: mol_type = other DNA
gaagtctggctgtgtcttct

SEQ ID NO: 21951 - DNA, 20 bp, synthetic construct
  misc_feature 1..20: note = chemically synthesized
  source 1..20: mol_type = other DNA
agtctggctgtgtcttctgg

SEQ ID NO: 21952 - DNA, 20 bp, synthetic construct
  misc_feature 1..20: note = chemically synthesized
  source 1..20: mol_type = other DNA
gctgtgtcttctgggagccc

SEQ ID NO: 21953 - DNA, 20 bp, synthetic construct
  misc_feature 1..20: note = chemically synthesized
  source 1..20: mol_type = other DNA
tgtcttctgggagccccaga

SEQ ID NO: 21954 - DNA, 20 bp, synthetic construct
  misc_feature 1..20: note = chemically synthesized
  source 1..20: mol_type = other DNA
tctgggagccccagacagac

SEQ ID NO: 21955 - DNA, 20 bp, synthetic construct
  misc_feature 1..20: note = chemically synthesized
  source 1..20: mol_type = other DNA
agaccagtgttctttctcac

SEQ ID NO: 21956 - DNA, 20 bp, synthetic construct
  misc_feature 1..20: note = chemically synthesized
  source 1..20: mol_type = other DNA
tcactggttcactccttccc

SEQ ID NO: 21957 - DNA, 20 bp, synthetic construct
  misc_feature 1..20: note = chemically synthesized
  source 1..20: mol_type = other DNA
ccagctcattttacccactc

SEQ ID NO: 21958 - DNA, 20 bp, synthetic construct
  misc_feature 1..20: note = chemically synthesized
  source 1..20: mol_type = other DNA
cactcgagacttgattctct

SEQ ID NO: 21959 - DNA, 20 bp, synthetic construct
  misc_feature 1..20: note = chemically synthesized
  source 1..20: mol_type = other DNA
ctcgagacttgattctctta

SEQ ID NO: 21960 - DNA, 20 bp, synthetic construct
  misc_feature 1..20: note = chemically synthesized
  source 1..20: mol_type = other DNA
acttgattctcttagagatt

SEQ ID NO: 21961 - DNA, 20 bp, synthetic construct
  misc_feature 1..20: note = chemically synthesized
  source 1..20: mol_type = other DNA
tagagattaagtacctcccc

SEQ ID NO: 21962 - DNA, 20 bp, synthetic construct
  misc_feature 1..20: note = chemically synthesized
  source 1..20: mol_type = other DNA
aagtacctcccctggtcaca

SEQ ID NO: 21963 - DNA, 20 bp, synthetic construct
  misc_feature 1..20: note = chemically synthesized
  source 1..20: mol_type = other DNA
tcccctggtcacatagtttc

SEQ ID NO: 21964 - DNA, 20 bp, synthetic construct
  misc_feature 1..20: note = chemically synthesized
  source 1..20: mol_type = other DNA
cccctggtcacatagtttct

SEQ ID NO: 21965 - DNA, 20 bp, synthetic construct
  misc_feature 1..20: note = chemically synthesized
  source 1..20: mol_type = other DNA
gtcacatagtttctgggtga

SEQ ID NO: 21966 - DNA, 20 bp, synthetic construct
  misc_feature 1..20: note = chemically synthesized
  source 1..20: mol_type = other DNA
tcacatagtttctgggtgac

SEQ ID NO: 21967 - DNA, 20 bp, synthetic construct
  misc_feature 1..20: note = chemically synthesized
  source 1..20: mol_type = other DNA
tagtttctgggtgacaggac

SEQ ID NO: 21968 - DNA, 20 bp, synthetic construct
  misc_feature 1..20: note = chemically synthesized
  source 1..20: mol_type = other DNA
atttcttttgatcaccaatt

SEQ ID NO: 21969 - DNA, 20 bp, synthetic construct
  misc_feature 1..20: note = chemically synthesized
  source 1..20: mol_type = other DNA
ctctactgtgctaccatgat

SEQ ID NO: 21970 - DNA, 20 bp, synthetic construct
  misc_feature 1..20: note = chemically synthesized
  source 1..20: mol_type = other DNA
ctactgtgctaccatgatca

SEQ ID NO: 21971 - DNA, 20 bp, synthetic construct
  misc_feature 1..20: note = chemically synthesized
  source 1..20: mol_type = other DNA
tactgtgctaccatgatcag

SEQ ID NO: 21972 - DNA, 20 bp, synthetic construct
  misc_feature 1..20: note = chemically synthesized
  source 1..20: mol_type = other DNA
tctctgatgatgattgaaaa

SEQ ID NO: 21973 - DNA, 20 bp, synthetic construct
  misc_feature 1..20: note = chemically synthesized
  source 1..20: mol_type = other DNA
aacagttttattaacatatc

SEQ ID NO: 21974 - DNA, 20 bp, synthetic construct
  misc_feature 1..20: note = chemically synthesized
  source 1..20: mol_type = other DNA
atcaagaacattacaacaca

SEQ ID NO: 21975 - DNA, 20 bp, synthetic construct
  misc_feature 1..20: note = chemically synthesized
  source 1..20: mol_type = other DNA
caagaacattacaacacaaa

SEQ ID NO: 21976 - DNA, 20 bp, synthetic construct
  misc_feature 1..20: note = chemically synthesized
  source 1..20: mol_type = other DNA
attacaacacaaagagtttc

SEQ ID NO: 21977 - DNA, 20 bp, synthetic construct
  misc_feature 1..20: note = chemically synthesized
  source 1..20: mol_type = other DNA
tttaaaaaatctcttttcac

SEQ ID NO: 21978 - DNA, 20 bp, synthetic construct
  misc_feature 1..20: note = chemically synthesized
  source 1..20: mol_type = other DNA
ttaaattcatattttaatat

SEQ ID NO: 21979 - DNA, 20 bp, synthetic construct
  misc_feature 1..20: note = chemically synthesized
  source 1..20: mol_type = other DNA
attcatattttaatattaga

SEQ ID NO: 21980 - DNA, 20 bp, synthetic construct
  misc_feature 1..20: note = chemically synthesized
  source 1..20: mol_type = other DNA
tattttaatattagaaagca

SEQ ID NO: 21981 - DNA, 20 bp, synthetic construct
  misc_feature 1..20: note = chemically synthesized
  source 1..20: mol_type = other DNA
attttaatattagaaagcat

SEQ ID NO: 21982 - DNA, 20 bp, synthetic construct
  misc_feature 1..20: note = chemically synthesized
  source 1..20: mol_type = other DNA
aatattagaaagcatgggat

SEQ ID NO: 21983 - DNA, 20 bp, synthetic construct
  misc_feature 1..20: note = chemically synthesized
  source 1..20: mol_type = other DNA
atattagaaagcatgggatt

SEQ ID NO: 21984 - DNA, 20 bp, synthetic construct
  misc_feature 1..20: note = chemically synthesized
  source 1..20: mol_type = other DNA
ttgggtgtgaacactgcttt

SEQ ID NO: 21985 - DNA, 20 bp, synthetic construct
  misc_feature 1..20: note = chemically synthesized
  source 1..20: mol_type = other DNA
tgaacactgcttttggatgt

SEQ ID NO: 21986 - DNA, 20 bp, synthetic construct
  misc_feature 1..20: note = chemically synthesized
  source 1..20: mol_type = other DNA
aacactgcttttggatgttg

SEQ ID NO: 21987 - DNA, 20 bp, synthetic construct
  misc_feature 1..20: note = chemically synthesized
  source 1..20: mol_type = other DNA
acactgcttttggatgttgg

SEQ ID NO: 21988 - DNA, 20 bp, synthetic construct
  misc_feature 1..20: note = chemically synthesized
  source 1..20: mol_type = other DNA
ctgcttttggatgttggagg

SEQ ID NO: 21989 - DNA, 20 bp, synthetic construct
  misc_feature 1..20: note = chemically synthesized
  source 1..20: mol_type = other DNA
tttggatgttggaggaagat

SEQ ID NO: 21990 - DNA, 20 bp, synthetic construct
  misc_feature 1..20: note = chemically synthesized
  source 1..20: mol_type = other DNA
tggatgttggaggaagataa

SEQ ID NO: 21991 - DNA, 20 bp, synthetic construct
  misc_feature 1..20: note = chemically synthesized
  source 1..20: mol_type = other DNA
atgttggaggaagataagag

SEQ ID NO: 21992 - DNA, 20 bp, synthetic construct
  misc_feature 1..20: note = chemically synthesized
  source 1..20: mol_type = other DNA
tgttggaggaagataagaga

SEQ ID NO: 21993 - DNA, 20 bp, synthetic construct
  misc_feature 1..20: note = chemically synthesized
  source 1..20: mol_type = other DNA
tggaggaagataagagaagg

SEQ ID NO: 21994 - DNA, 20 bp, synthetic construct
  misc_feature 1..20: note = chemically synthesized
  source 1..20: mol_type = other DNA
ggaagataagagaaggaagc

SEQ ID NO: 21995 - DNA, 20 bp, synthetic construct
  misc_feature 1..20: note = chemically synthesized
  source 1..20: mol_type = other DNA
aaggaagctggctctttctt

SEQ ID NO: 21996 - DNA, 20 bp, synthetic construct
  misc_feature 1..20: note = chemically synthesized
  source 1..20: mol_type = other DNA
aggaagctggctctttcttt

SEQ ID NO: 21997 - DNA, 20 bp, synthetic construct
  misc_feature 1..20: note = chemically synthesized
  source 1..20: mol_type = other DNA
gaagctggctctttctttag

SEQ ID NO: 21998 - DNA, 20 bp, synthetic construct
  misc_feature 1..20: note = chemically synthesized
  source 1..20: mol_type = other DNA
tttctttaggagcaatacct

SEQ ID NO: 21999 - DNA, 20 bp, synthetic construct
  misc_feature 1..20: note = chemically synthesized
  source 1..20: mol_type = other DNA
aggagcaatacctgagatcc

SEQ ID NO: 22000 - DNA, 20 bp, synthetic construct
  misc_feature 1..20: note = chemically synthesized
  source 1..20: mol_type = other DNA
atcccagaattgtatgtaca

SEQ ID NO: 22001 - DNA, 20 bp, synthetic construct
  misc_feature 1..20: note = chemically synthesized
  source 1..20: mol_type = other DNA
tgtatgtacaaagtgtgtga

SEQ ID NO: 22002 - DNA, 20 bp, synthetic construct
  misc_feature 1..20: note = chemically synthesized
  source 1..20: mol_type = other DNA
atgtacaaagtgtgtgatgg

SEQ ID NO: 22003 - DNA, 20 bp, synthetic construct
  misc_feature 1..20: note = chemically synthesized
  source 1..20: mol_type = other DNA
gtacaaagtgtgtgatggca

SEQ ID NO: 22004 - DNA, 20 bp, synthetic construct
  misc_feature 1..20: note = chemically synthesized
  source 1..20: mol_type = other DNA
ggcagagctcaaatctgtgc

SEQ ID NO: 22005 - DNA, 20 bp, synthetic construct
  misc_feature 1..20: note = chemically synthesized
  source 1..20: mol_type = other DNA
gagctcaaatctgtgctagc

SEQ ID NO: 22006 - DNA, 20 bp, synthetic construct
  misc_feature 1..20: note = chemically synthesized
  source 1..20: mol_type = other DNA
ctactcttctgaatctgatg

SEQ ID NO: 22007 - DNA, 20 bp, synthetic construct
  misc_feature 1..20: note = chemically synthesized
  source 1..20: mol_type = other DNA
ctcttctgaatctgatgaag

SEQ ID NO: 22008 - DNA, 20 bp, synthetic construct
  misc_feature 1..20: note = chemically synthesized
  source 1..20: mol_type = other DNA
aagaagttattctgtctgtg

SEQ ID NO: 22009 - DNA, 20 bp, synthetic construct
  misc_feature 1..20: note = chemically synthesized
  source 1..20: mol_type = other DNA
ttctgtctgtgcagttttat

SEQ ID NO: 22010 - DNA, 20 bp, synthetic construct
  misc_feature 1..20: note = chemically synthesized
  source 1..20: mol_type = other DNA
tctgtctgtgcagttttatt

SEQ ID NO: 22011 - DNA, 20 bp, synthetic construct
  misc_feature 1..20: note = chemically synthesized
  source 1..20: mol_type = other DNA
ctgtgcagttttattaggct

SEQ ID NO: 22012 - DNA, 20 bp, synthetic construct
  misc_feature 1..20: note = chemically synthesized
  source 1..20: mol_type = other DNA
taggctgagactttttccga

SEQ ID NO: 22013 - DNA, 20 bp, synthetic construct
  misc_feature 1..20: note = chemically synthesized
  source 1..20: mol_type = other DNA
tttatttttccgtttgctca

SEQ ID NO: 22014 - DNA, 20 bp, synthetic construct
  misc_feature 1..20: note = chemically synthesized
  source 1..20: mol_type = other DNA
ttccgtttgctcacagaatg

SEQ ID NO: 22015 - DNA, 20 bp, synthetic construct
  misc_feature 1..20: note = chemically synthesized
  source 1..20: mol_type = other DNA
ccgtttgctcacagaatgta

SEQ ID NO: 22016 - DNA, 20 bp, synthetic construct
  misc_feature 1..20: note = chemically synthesized
  source 1..20: mol_type = other DNA
cgtttgctcacagaatgtag

SEQ ID NO: 22017 - DNA, 20 bp, synthetic construct
  misc_feature 1..20: note = chemically synthesized
  source 1..20: mol_type = other DNA
tttgctcacagaatgtagag

SEQ ID NO: 22018 - DNA, 20 bp, synthetic construct
  misc_feature 1..20: note = chemically synthesized
  source 1..20: mol_type = other DNA
tgctcacagaatgtagagga

SEQ ID NO: 22019 - DNA, 20 bp, synthetic construct
  misc_feature 1..20: note = chemically synthesized
  source 1..20: mol_type = other DNA
cacagaatgtagaggagagc

SEQ ID NO: 22020 - DNA, 20 bp, synthetic construct
  misc_feature 1..20: note = chemically synthesized
  source 1..20: mol_type = other DNA
acagaatgtagaggagagcc

SEQ ID NO: 22021 - DNA, 20 bp, synthetic construct
  misc_feature 1..20: note = chemically synthesized
  source 1..20: mol_type = other DNA
agaatgtagaggagagccag

SEQ ID NO: 22022 - DNA, 20 bp, synthetic construct
  misc_feature 1..20: note = chemically synthesized
  source 1..20: mol_type = other DNA
gaatgtagaggagagccagg

SEQ ID NO: 22023 - DNA, 20 bp, synthetic construct
  misc_feature 1..20: note = chemically synthesized
  source 1..20: mol_type = other DNA
aatgtagaggagagccagga

SEQ ID NO: 22024 - DNA, 20 bp, synthetic construct
  misc_feature 1..20: note = chemically synthesized
  source 1..20: mol_type = other DNA
tgtagaggagagccaggagg

SEQ ID NO: 22025 - DNA, 20 bp, synthetic construct
  misc_feature 1..20: note = chemically synthesized
  source 1..20: mol_type = other DNA
gtttacctactccctgactt

SEQ ID NO: 22026 - DNA, 20 bp, synthetic construct
  misc_feature 1..20: note = chemically synthesized
  source 1..20: mol_type = other DNA
ttacctactccctgactttg

SEQ ID NO: 22027 - DNA, 20 bp, synthetic construct
  misc_feature 1..20: note = chemically synthesized
  source 1..20: mol_type = other DNA
tactccctgactttggagct

SEQ ID NO: 22028 - DNA, 20 bp, synthetic construct
  misc_feature 1..20: note = chemically synthesized
  source 1..20: mol_type = other DNA
tatccatcattttgtttcac

SEQ ID NO: 22029 - DNA, 20 bp, synthetic construct
  misc_feature 1..20: note = chemically synthesized
  source 1..20: mol_type = other DNA
ttgtttcaccagcttttaca

SEQ ID NO: 22030 - DNA, 20 bp, synthetic construct
  misc_feature 1..20: note = chemically synthesized
  source 1..20: mol_type = other DNA
tttcaccagcttttacaaag

SEQ ID NO: 22031 - DNA, 20 bp, synthetic construct
  misc_feature 1..20: note = chemically synthesized
  source 1..20: mol_type = other DNA
ttcaccagcttttacaaagc

SEQ ID NO: 22032 - DNA, 20 bp, synthetic construct
  misc_feature 1..20: note = chemically synthesized
  source 1..20: mol_type = other DNA
aaagcaggatcataaactgt

SEQ ID NO: 22033 - DNA, 20 bp, synthetic construct
  misc_feature 1..20: note = chemically synthesized
  source 1..20: mol_type = other DNA
tcataaactgtaagctcatt

SEQ ID NO: 22034 - DNA, 20 bp, synthetic construct
  misc_feature 1..20: note = chemically synthesized
  source 1..20: mol_type = other DNA
ataaactgtaagctcatttg

SEQ ID NO: 22035 - DNA, 20 bp, synthetic construct
  misc_feature 1..20: note = chemically synthesized
  source 1..20: mol_type = other DNA
taaactgtaagctcatttgg

SEQ ID NO: 22036 - DNA, 20 bp, synthetic construct
  misc_feature 1..20: note = chemically synthesized
  source 1..20: mol_type = other DNA
aaactgtaagctcatttgga

SEQ ID NO: 22037 - DNA, 20 bp, synthetic construct
  misc_feature 1..20: note = chemically synthesized
  source 1..20: mol_type = other DNA
tctctgattgttgctttgat

SEQ ID NO: 22038 - DNA, 20 bp, synthetic construct
  misc_feature 1..20: note = chemically synthesized
  source 1..20: mol_type = other DNA
aaatattcatatcattctga

SEQ ID NO: 22039 - DNA, 20 bp, synthetic construct
  misc_feature 1..20: note = chemically synthesized
  source 1..20: mol_type = other DNA
catatcattctgatagtctt

SEQ ID NO: 22040 - DNA, 20 bp, synthetic construct
  misc_feature 1..20: note = chemically synthesized
  source 1..20: mol_type = other DNA
gttacaacatgcaaacctct

SEQ ID NO: 22041 - DNA, 20 bp, synthetic construct
  misc_feature 1..20: note = chemically synthesized
  source 1..20: mol_type = other DNA
atgcaaacctctcagttttc

SEQ ID NO: 22042 - DNA, 20 bp, synthetic construct
  misc_feature 1..20: note = chemically synthesized
  source 1..20: mol_type = other DNA
tgcaaacctctcagttttcc

SEQ ID NO: 22043 - DNA, 20 bp, synthetic construct
  misc_feature 1..20: note = chemically synthesized
  source 1..20: mol_type = other DNA
tctcagttttccaggacttc

SEQ ID NO: 22044 - DNA, 20 bp, synthetic construct
  misc_feature 1..20: note = chemically synthesized
  source 1..20: mol_type = other DNA
cagttttccaggacttctgg

SEQ ID NO: 22045 - DNA, 20 bp, synthetic construct
  misc_feature 1..20: note = chemically synthesized
  source 1..20: mol_type = other DNA
ttccaggacttctggtggta

SEQ ID NO: 22046 - DNA, 20 bp, synthetic construct
  misc_feature 1..20: note = chemically synthesized
  source 1..20: mol_type = other DNA
ctggtggtacagcttctctg

SEQ ID NO: 22047 - DNA, 20 bp, synthetic construct
  misc_feature 1..20: note = chemically synthesized
  source 1..20: mol_type = other DNA
ggtggtacagcttctctgtg

SEQ ID NO: 22048 - DNA, 20 bp, synthetic construct
  misc_feature 1..20: note = chemically synthesized
  source 1..20: mol_type = other DNA
gtacagcttctctgtggagt

SEQ ID NO: 22049 - DNA, 20 bp, synthetic construct
  misc_feature 1..20: note = chemically synthesized
  source 1..20: mol_type = other DNA
tacagcttctctgtggagtg

SEQ ID NO: 22050 - DNA, 20 bp, synthetic construct
  misc_feature 1..20: note = chemically synthesized
  source 1..20: mol_type = other DNA
tgtggagtgaggcatatttt

SEQ ID NO: 22051 - DNA, 20 bp, synthetic construct
  misc_feature 1..20: note = chemically synthesized
  source 1..20: mol_type = other DNA
agtgaggcatatttttggtc

SEQ ID NO: 22052 - DNA, 20 bp, synthetic construct
  misc_feature 1..20: note = chemically synthesized
  source 1..20: mol_type = other DNA
ggtctggcctttcctccctg

SEQ ID NO: 22053 - DNA, 20 bp, synthetic construct
  misc_feature 1..20: note = chemically synthesized
  source 1..20: mol_type = other DNA
tttcctccctgaagctctgt

SEQ ID NO: 22054 - DNA, 20 bp, synthetic construct
  misc_feature 1..20: note = chemically synthesized
  source 1..20: mol_type = other DNA
ccctgaagctctgttagcct

SEQ ID NO: 22055 - DNA, 20 bp, synthetic construct
  misc_feature 1..20: note = chemically synthesized
  source 1..20: mol_type = other DNA
tgttagcctgagatttcacc

SEQ ID NO: 22056 - DNA, 20 bp, synthetic construct
  misc_feature 1..20: note = chemically synthesized
  source 1..20: mol_type = other DNA
gatttcacctagtgcaacac

SEQ ID NO: 22057 - DNA, 20 bp, synthetic construct
  misc_feature 1..20: note = chemically synthesized
  source 1..20: mol_type = other DNA
ctagtgcaacacaagttgtg

SEQ ID NO: 22058 - DNA, 20 bp, synthetic construct
  misc_feature 1..20: note = chemically synthesized
  source 1..20: mol_type = other DNA
tgcaacacaagttgtgtaga

SEQ ID NO: 22059 - DNA, 20 bp, synthetic construct
  misc_feature 1..20: note = chemically synthesized
  source 1..20: mol_type = other DNA
tactttattccataattcac

SEQ ID NO: 22060 - DNA, 20 bp, synthetic construct
  misc_feature 1..20: note = chemically synthesized
  source 1..20: mol_type = other DNA
taattcactagtaaaataat

SEQ ID NO: 22061 - DNA, 20 bp, synthetic construct
  misc_feature 1..20: note = chemically synthesized
  source 1..20: mol_type = other DNA
tagtaaaataattagaataa

SEQ ID NO: 22062 - DNA, 20 bp, synthetic construct
  misc_feature 1..20: note = chemically synthesized
  source 1..20: mol_type = other DNA
agtaaaataattagaataaa

SEQ ID NO: 22063 - DNA, 20 bp, synthetic construct
  misc_feature 1..20: note = chemically synthesized
  source 1..20: mol_type = other DNA
attagaataaaaggctgttt

SEQ ID NO: 22064 - DNA, 20 bp, synthetic construct
  misc_feature 1..20: note = chemically synthesized
  source 1..20: mol_type = other DNA
taaaaggctgttttggaatg

SEQ ID NO: 22065 - DNA, 20 bp, synthetic construct
  misc_feature 1..20: note = chemically synthesized
  source 1..20: mol_type = other DNA
aaaggctgttttggaatgta

SEQ ID NO: 22066 - DNA, 20 bp, synthetic construct
  misc_feature 1..20: note = chemically synthesized
  source 1..20: mol_type = other DNA
aggctgttttggaatgtaga

SEQ ID NO: 22067 - DNA, 20 bp, synthetic construct
  misc_feature 1..20: note = chemically synthesized
  source 1..20: mol_type = other DNA
ggctgttttggaatgtagag

SEQ ID NO: 22068 - DNA, 20 bp, synthetic construct
  misc_feature 1..20: note = chemically synthesized
  source 1..20: mol_type = other DNA
tgttttggaatgtagagagg

SEQ ID NO: 22069 - DNA, 20 bp, synthetic construct
  misc_feature 1..20: note = chemically synthesized
  source 1..20: mol_type = other DNA
ttttggaatgtagagaggca

SEQ ID NO: 22070 - DNA, 20 bp, synthetic construct
  misc_feature 1..20: note = chemically synthesized
  source 1..20: mol_type = other DNA
tttggaatgtagagaggcag

SEQ ID NO: 22071 - DNA, 20 bp, synthetic construct
  misc_feature 1..20: note = chemically synthesized
  source 1..20: mol_type = other DNA
ttggaatgtagagaggcaga

SEQ ID NO: 22072 - DNA, 20 bp, synthetic construct
  misc_feature 1..20: note = chemically synthesized
  source 1..20: mol_type = other DNA
tggaatgtagagaggcagag

SEQ ID NO: 22073 - DNA, 20 bp, synthetic construct
  misc_feature 1..20: note = chemically synthesized
  source 1..20: mol_type = other DNA
gaggggctgatataacttct

SEQ ID NO: 22074 - DNA, 20 bp, synthetic construct
  misc_feature 1..20: note = chemically synthesized
  source 1..20: mol_type = other DNA
cccgtcttaaatttttatgt

SEQ ID NO: 22075 - DNA, 20 bp, synthetic construct
  misc_feature 1..20: note = chemically synthesized
  source 1..20: mol_type = other DNA
cttaaatttttatgtgagat

SEQ ID NO: 22076 - DNA, 20 bp, synthetic construct
  misc_feature 1..20: note = chemically synthesized
  source 1..20: mol_type = other DNA
atgagcacactgctgtaatt

SEQ ID NO: 22077 - DNA, 20 bp, synthetic construct
  misc_feature 1..20: note = chemically synthesized
  source 1..20: mol_type = other DNA
gcacactgctgtaattaaga

SEQ ID NO: 22078 - DNA, 20 bp, synthetic construct
  misc_feature 1..20: note = chemically synthesized
  source 1..20: mol_type = other DNA
cactgctgtaattaagaaag

SEQ ID NO: 22079 - DNA, 20 bp, synthetic construct
  misc_feature 1..20: note = chemically synthesized
  source 1..20: mol_type = other DNA
tgtaattaagaaagcagtgt

SEQ ID NO: 22080 - DNA, 20 bp, synthetic construct
  misc_feature 1..20: note = chemically synthesized
  source 1..20: mol_type = other DNA
gtaattaagaaagcagtgta

SEQ ID NO: 22081 - DNA, 20 bp, synthetic construct
  misc_feature 1..20: note = chemically synthesized
  source 1..20: mol_type = other DNA
ttaagaaagcagtgtaaggc

SEQ ID NO: 22082 - DNA, 20 bp, synthetic construct
  misc_feature 1..20: note = chemically synthesized
  source 1..20: mol_type = other DNA
taagaaagcagtgtaaggct

SEQ ID NO: 22083 - DNA, 20 bp, synthetic construct
  misc_feature 1..20: note = chemically synthesized
  source 1..20: mol_type = other DNA
aagcagtgtaaggctgggcg

SEQ ID NO: 22084 - DNA, 20 bp, synthetic construct
  misc_feature 1..20: note = chemically synthesized
  source 1..20: mol_type = other DNA
cagtgtaaggctgggcgcag

SEQ ID NO: 22085 - DNA, 20 bp, synthetic construct
  misc_feature 1..20: note = chemically synthesized
  source 1..20: mol_type = other DNA
gtggctcacgtctgtaattc

SEQ ID NO: 22086 - DNA, 20 bp, synthetic construct
  misc_feature 1..20: note = chemically synthesized
  source 1..20: mol_type = other DNA
cgtctgtaattccagcactt

SEQ ID NO: 22087 - DNA, 20 bp, synthetic construct
  misc_feature 1..20: note = chemically synthesized
  source 1..20: mol_type = other DNA
gtctgtaattccagcacttt

SEQ ID NO: 22088 - DNA, 20 bp, synthetic construct
  misc_feature 1..20: note = chemically synthesized
  source 1..20: mol_type = other DNA
ctgtaattccagcactttgg

SEQ ID NO: 22089 - DNA, 20 bp, synthetic construct
  misc_feature 1..20: note = chemically synthesized
  source 1..20: mol_type = other DNA
tgtaattccagcactttggg

SEQ ID NO: 22090 - DNA, 20 bp, synthetic construct
  misc_feature 1..20: note = chemically synthesized
  source 1..20: mol_type = other DNA
ttccagcactttgggaggcc

SEQ ID NO: 22091 - DNA, 20 bp, synthetic construct
  misc_feature 1..20: note = chemically synthesized
  source 1..20: mol_type = other DNA
tccagcactttgggaggccg

SEQ ID NO: 22092 - DNA, 20 bp, synthetic construct
  misc_feature 1..20: note = chemically synthesized
  source 1..20: mol_type = other DNA
agcactttgggaggccgagg

SEQ ID NO: 22093 - DNA, 20 bp, synthetic construct
  misc_feature 1..20: note = chemically synthesized
  source 1..20: mol_type = other DNA
gcactttgggaggccgaggt

SEQ ID NO: 22094 - DNA, 20 bp, synthetic construct
  misc_feature 1..20: note = chemically synthesized
  source 1..20: mol_type = other DNA
ctttgggaggccgaggtggg

SEQ ID NO: 22095 - DNA, 20 bp, synthetic construct
  misc_feature 1..20: note = chemically synthesized
  source 1..20: mol_type = other DNA
ccgaggtgggtagatcacct

SEQ ID NO: 22096 - DNA, 20 bp, synthetic construct
  misc_feature 1..20: note = chemically synthesized
  source 1..20: mol_type = other DNA
cgaggtgggtagatcacctg

SEQ ID NO: 22097 - DNA, 20 bp, synthetic construct
  misc_feature 1..20: note = chemically synthesized
  source 1..20: mol_type = other DNA
tgggtagatcacctgaggtc

SEQ ID NO: 22098 - DNA, 20 bp, synthetic construct
  misc_feature 1..20: note = chemically synthesized
  source 1..20: mol_type = other DNA
ggtagatcacctgaggtcaa

SEQ ID NO: 22099 - DNA, 20 bp, synthetic construct
  misc_feature 1..20: note = chemically synthesized
  source 1..20: mol_type = other DNA
tcacctgaggtcaagagttt

SEQ ID NO: 22100 - DNA, 20 bp, synthetic construct
  misc_feature 1..20: note = chemically synthesized
  source 1..20: mol_type = other DNA
tgaggtcaagagtttgagac

SEQ ID NO: 22101 - DNA, 20 bp, synthetic construct
  misc_feature 1..20: note = chemically synthesized
  source 1..20: mol_type = other DNA
tgagaccagcctgaccaaca

SEQ ID NO: 22102 - DNA, 20 bp, synthetic construct
  misc_feature 1..20: note = chemically synthesized
  source 1..20: mol_type = other DNA
agaccagcctgaccaacatg

SEQ ID NO: 22103 - DNA, 20 bp, synthetic construct
  misc_feature 1..20: note = chemically synthesized
  source 1..20: mol_type = other DNA
ctctattaaaaatataaact

SEQ ID NO: 22104 - DNA, 20 bp, synthetic construct
  misc_feature 1..20: note = chemically synthesized
  source 1..20: mol_type = other DNA
attaaaaatataaacttagc

SEQ ID NO: 22105 - DNA, 20 bp, synthetic construct
  misc_feature 1..20: note = chemically synthesized
  source 1..20: mol_type = other DNA
ttaaaaatataaacttagcc

SEQ ID NO: 22106 - DNA, 20 bp, synthetic construct
  misc_feature 1..20: note = chemically synthesized
  source 1..20: mol_type = other DNA
aatataaacttagccaggca

SEQ ID NO: 22107 - DNA, 20 bp, synthetic construct
  misc_feature 1..20: note = chemically synthesized
  source 1..20: mol_type = other DNA
gtcgcacatgcctgtaatcc

SEQ ID NO: 22108 - DNA, 20 bp, synthetic construct
  misc_feature 1..20: note = chemically synthesized
  source 1..20: mol_type = other DNA
tgcctgtaatcccagctact

SEQ ID NO: 22109 - DNA, 20 bp, synthetic construct
  misc_feature 1..20: note = chemically synthesized
  source 1..20: mol_type = other DNA
gcctgtaatcccagctactc

SEQ ID NO: 22110 - DNA, 20 bp, synthetic construct
  misc_feature 1..20: note = chemically synthesized
  source 1..20: mol_type = other DNA
ctgtaatcccagctactcag

SEQ ID NO: 22111 - DNA, 20 bp, synthetic construct
  misc_feature 1..20: note = chemically synthesized
  source 1..20: mol_type = other DNA
tgtaatcccagctactcagg

SEQ ID NO: 22112 - DNA, 20 bp, synthetic construct
  misc_feature 1..20: note = chemically synthesized
  source 1..20: mol_type = other DNA
tcccagctactcaggaggct

SEQ ID NO: 22113 - DNA, 20 bp, synthetic construct
  misc_feature 1..20: note = chemically synthesized
  source 1..20: mol_type = other DNA
cccagctactcaggaggctg

SEQ ID NO: 22114 - DNA, 20 bp, synthetic construct
  misc_feature 1..20: note = chemically synthesized
  source 1..20: mol_type = other DNA
ccagctactcaggaggctga

SEQ ID NO: 22115 - DNA, 20 bp, synthetic construct
  misc_feature 1..20: note = chemically synthesized
  source 1..20: mol_type = other DNA
agctactcaggaggctgagg

SEQ ID NO: 22116 - DNA, 20 bp, synthetic construct
  misc_feature 1..20: note = chemically synthesized
  source 1..20: mol_type = other DNA
gctactcaggaggctgaggg

SEQ ID NO: 22117 - DNA, 20 bp, synthetic construct
  misc_feature 1..20: note = chemically synthesized
  source 1..20: mol_type = other DNA
tactcaggaggctgagggag

SEQ ID NO: 22118 - DNA, 20 bp, synthetic construct
  misc_feature 1..20: note = chemically synthesized
  source 1..20: mol_type = other DNA
ggaggagaattgcttgaacc

SEQ ID NO: 22119 - DNA, 20 bp, synthetic construct
  misc_feature 1..20: note = chemically synthesized
  source 1..20: mol_type = other DNA
gaggagaattgcttgaaccc

SEQ ID NO: 22120 - DNA, 20 bp, synthetic construct
  misc_feature 1..20: note = chemically synthesized
  source 1..20: mol_type = other DNA
ggagaattgcttgaacccag

SEQ ID NO: 22121 - DNA, 20 bp, synthetic construct
  misc_feature 1..20: note = chemically synthesized
  source 1..20: mol_type = other DNA
gagaattgcttgaacccagg

SEQ ID NO: 22122 - DNA, 20 bp, synthetic construct
  misc_feature 1..20: note = chemically synthesized
  source 1..20: mol_type = other DNA
aattgcttgaacccaggagg

SEQ ID NO: 22123 - DNA, 20 bp, synthetic construct
  misc_feature 1..20: note = chemically synthesized
  source 1..20: mol_type = other DNA
ttgcttgaacccaggaggca

SEQ ID NO: 22124 - DNA, 20 bp, synthetic construct
  misc_feature 1..20: note = chemically synthesized
  source 1..20: mol_type = other DNA
tgcttgaacccaggaggcag

SEQ ID NO: 22125 - DNA, 20 bp, synthetic construct
  misc_feature 1..20: note = chemically synthesized
  source 1..20: mol_type = other DNA
ttgaacccaggaggcagagg

SEQ ID NO: 22126 - DNA, 20 bp, synthetic construct
  misc_feature 1..20: note = chemically synthesized
  source 1..20: mol_type = other DNA
acccaggaggcagaggtggt

SEQ ID NO: 22127 - DNA, 20 bp, synthetic construct
  misc_feature 1..20: note = chemically synthesized
  source 1..20: mol_type = other DNA
ggaggcagaggtggtgagcc

SEQ ID NO: 22128 - DNA, 20 bp, synthetic construct
  misc_feature 1..20: note = chemically synthesized
  source 1..20: mol_type = other DNA
gagatcacaccattgcaccc

SEQ ID NO: 22129 - DNA, 20 bp, synthetic construct
  misc_feature 1..20: note = chemically synthesized
  source 1..20: mol_type = other DNA
cacaccattgcaccccagcc

SEQ ID NO: 22130 - DNA, 20 bp, synthetic construct
  misc_feature 1..20: note = chemically synthesized
  source 1..20: mol_type = other DNA
acaccattgcaccccagcct

SEQ ID NO: 22131 - DNA, 20 bp, synthetic construct
  misc_feature 1..20: note = chemically synthesized
  source 1..20: mol_type = other DNA
tgcaccccagcctgggcaac

SEQ ID NO: 22132 - DNA, 20 bp, synthetic construct
  misc_feature 1..20: note = chemically synthesized
  source 1..20: mol_type = other DNA
caccccagcctgggcaacaa

SEQ ID NO: 22133 - DNA, 20 bp, synthetic construct
  misc_feature 1..20: note = chemically synthesized
  source 1..20: mol_type = other DNA
caaaaaaaaaaaaaaaaaaa

SEQ ID NO: 22134 - DNA, 20 bp, synthetic construct
  misc_feature 1..20: note = chemically synthesized
  source 1..20: mol_type = other DNA
aaaaaaaaaaaaaaaaaaga

SEQ ID NO: 22135 - DNA, 20 bp, synthetic construct
  misc_feature 1..20: note = chemically synthesized
  source 1..20: mol_type = other DNA
aaaaaaaaaaaaaaagaaag

SEQ ID NO: 22136 - DNA, 20 bp, synthetic construct
  misc_feature 1..20: note = chemically synthesized
  source 1..20: mol_type = other DNA
aaaaaaaaagaaagcggtgt

SEQ ID NO: 22137 - DNA, 20 bp, synthetic construct
  misc_feature 1..20: note = chemically synthesized
  source 1..20: mol_type = other DNA
agcggtgtcagtacttgcaa

SEQ ID NO: 22138 - DNA, 20 bp, synthetic construct
  misc_feature 1..20: note = chemically synthesized
  source 1..20: mol_type = other DNA
gcggtgtcagtacttgcaaa

SEQ ID NO: 22139 - DNA, 20 bp, synthetic construct
  misc_feature 1..20: note = chemically synthesized
  source 1..20: mol_type = other DNA
ggcctttccctcttgccact

SEQ ID NO: 22140 - DNA, 20 bp, synthetic construct
  misc_feature 1..20: note = chemically synthesized
  source 1..20: mol_type = other DNA
gcctttccctcttgccactc

SEQ ID NO: 22141 - DNA, 20 bp, synthetic construct
  misc_feature 1..20: note = chemically synthesized
  source 1..20: mol_type = other DNA
cctttccctcttgccactca

SEQ ID NO: 22142 - DNA, 20 bp, synthetic construct
  misc_feature 1..20: note = chemically synthesized
  source 1..20: mol_type = other DNA
ttccctcttgccactcaggg

SEQ ID NO: 22143 - DNA, 20 bp, synthetic construct
  misc_feature 1..20: note = chemically synthesized
  source 1..20: mol_type = other DNA
ccactcagggaagcacccga

SEQ ID NO: 22144 - DNA, 20 bp, synthetic construct
  misc_feature 1..20: note = chemically synthesized
  source 1..20: mol_type = other DNA
actcagggaagcacccgaaa

SEQ ID NO: 22145 - DNA, 20 bp, synthetic construct
  misc_feature 1..20: note = chemically synthesized
  source 1..20: mol_type = other DNA
ccgaaagagaacttacaaac

SEQ ID NO: 22146 - DNA, 20 bp, synthetic construct
  misc_feature 1..20: note = chemically synthesized
  source 1..20: mol_type = other DNA
cgaaagagaacttacaaacc

SEQ ID NO: 22147 - DNA, 20 bp, synthetic construct
  misc_feature 1..20: note = chemically synthesized
  source 1..20: mol_type = other DNA
gagaacttacaaaccaggta

SEQ ID NO: 22148 - DNA, 20 bp, synthetic construct
  misc_feature 1..20: note = chemically synthesized
  source 1..20: mol_type = other DNA
tacaaaccaggtaaagtatt

SEQ ID NO: 22149 - DNA, 20 bp, synthetic construct
  misc_feature 1..20: note = chemically synthesized
  source 1..20: mol_type = other DNA
aaaccaggtaaagtatttgg

SEQ ID NO: 22150 - DNA, 20 bp, synthetic construct
  misc_feature 1..20: note = chemically synthesized
  source 1..20: mol_type = other DNA
gaagtgattaatcatattac

SEQ ID NO: 22151 - DNA, 20 bp, synthetic construct
  misc_feature 1..20: note = chemically synthesized
  source 1..20: mol_type = other DNA
agtgattaatcatattacaa

SEQ ID NO: 22152 - DNA, 20 bp, synthetic construct
  misc_feature 1..20: note = chemically synthesized
  source 1..20: mol_type = other DNA
agtgttcttcatttccccca

SEQ ID NO: 22153 - DNA, 20 bp, synthetic construct
  misc_feature 1..20: note = chemically synthesized
  source 1..20: mol_type = other DNA
gtgttcttcatttcccccaa

SEQ ID NO: 22154 - DNA, 20 bp, synthetic construct
  misc_feature 1..20: note = chemically synthesized
  source 1..20: mol_type = other DNA
tcatttcccccaaaggacca

SEQ ID NO: 22155 - DNA, 20 bp, synthetic construct
  misc_feature 1..20: note = chemically synthesized
  source 1..20: mol_type = other DNA
gacacttacctgtgctctta

SEQ ID NO: 22156 - DNA, 20 bp, synthetic construct
  misc_feature 1..20: note = chemically synthesized
  source 1..20: mol_type = other DNA
ctgtgctcttatagatatta

SEQ ID NO: 22157 - DNA, 20 bp, synthetic construct
  misc_feature 1..20: note = chemically synthesized
  source 1..20: mol_type = other DNA
gctcttatagatattaaaga

SEQ ID NO: 22158 - DNA, 20 bp, synthetic construct
  misc_feature 1..20: note = chemically synthesized
  source 1..20: mol_type = other DNA
tcttatagatattaaagaca

SEQ ID NO: 22159 - DNA, 20 bp, synthetic construct
  misc_feature 1..20: note = chemically synthesized
  source 1..20: mol_type = other DNA
gatattaaagacagagccac

SEQ ID NO: 22160 - DNA, 20 bp, synthetic construct
  misc_feature 1..20: note = chemically synthesized
  source 1..20: mol_type = other DNA
agacagagccactggactgt

SEQ ID NO: 22161 - DNA, 20 bp, synthetic construct
  misc_feature 1..20: note = chemically synthesized
  source 1..20: mol_type = other DNA
cactggactgtgagctcctt

SEQ ID NO: 22162 - DNA, 20 bp, synthetic construct
  misc_feature 1..20: note = chemically synthesized
  source 1..20: mol_type = other DNA
actggactgtgagctccttg

SEQ ID NO: 22163 - DNA, 20 bp, synthetic construct
  misc_feature 1..20: note = chemically synthesized
  source 1..20: mol_type = other DNA
ctggactgtgagctccttga

SEQ ID NO: 22164 - DNA, 20 bp, synthetic construct
  misc_feature 1..20: note = chemically synthesized
  source 1..20: mol_type = other DNA
gactgtgagctccttgaggg

SEQ ID NO: 22165 - DNA, 20 bp, synthetic construct
  misc_feature 1..20: note = chemically synthesized
  source 1..20: mol_type = other DNA
actgtgagctccttgagggc

SEQ ID NO: 22166 - DNA, 20 bp, synthetic construct
  misc_feature 1..20: note = chemically synthesized
  source 1..20: mol_type = other DNA
ctgtgagctccttgagggca

SEQ ID NO: 22167 - DNA, 20 bp, synthetic construct
  misc_feature 1..20: note = chemically synthesized
  source 1..20: mol_type = other DNA
gctccttgagggcagggaat

SEQ ID NO: 22168 - DNA, 20 bp, synthetic construct
  misc_feature 1..20: note = chemically synthesized
  source 1..20: mol_type = other DNA
ctccttgagggcagggaatg

SEQ ID NO: 22169 - DNA, 20 bp, synthetic construct
  misc_feature 1..20: note = chemically synthesized
  source 1..20: mol_type = other DNA
aggctcattccattttgttc

SEQ ID NO: 22170 - DNA, 20 bp, synthetic construct
  misc_feature 1..20: note = chemically synthesized
  source 1..20: mol_type = other DNA
tcattccattttgttctggc

SEQ ID NO: 22171 - DNA, 20 bp, synthetic construct
  misc_feature 1..20: note = chemically synthesized
  source 1..20: mol_type = other DNA
ttccattttgttctggcaag

SEQ ID NO: 22172 - DNA, 20 bp, synthetic construct
  misc_feature 1..20: note = chemically synthesized
  source 1..20: mol_type = other DNA
tgttctggcaagtagcacta

SEQ ID NO: 22173 - DNA, 20 bp, synthetic construct
  misc_feature 1..20: note = chemically synthesized
  source 1..20: mol_type = other DNA
gttctggcaagtagcactac

SEQ ID NO: 22174 - DNA, 20 bp, synthetic construct
  misc_feature 1..20: note = chemically synthesized
  source 1..20: mol_type = other DNA
ggcaagtagcactacaggtt

SEQ ID NO: 22175 - DNA, 20 bp, synthetic construct
  misc_feature 1..20: note = chemically synthesized
  source 1..20: mol_type = other DNA
ttggaccaaatgaattaaat

SEQ ID NO: 22176 - DNA, 20 bp, synthetic construct
  misc_feature 1..20: note = chemically synthesized
  source 1..20: mol_type = other DNA
aattggctgccattgaatca

SEQ ID NO: 22177 - DNA, 20 bp, synthetic construct
  misc_feature 1..20: note = chemically synthesized
  source 1..20: mol_type = other DNA
tggctgccattgaatcaaag

SEQ ID NO: 22178 - DNA, 20 bp, synthetic construct
  misc_feature 1..20: note = chemically synthesized
  source 1..20: mol_type = other DNA
cattgaatcaaagcagaatg

SEQ ID NO: 22179 - DNA, 20 bp, synthetic construct
  misc_feature 1..20: note = chemically synthesized
  source 1..20: mol_type = other DNA
attgaatcaaagcagaatga

SEQ ID NO: 22180 - DNA, 20 bp, synthetic construct
  misc_feature 1..20: note = chemically synthesized
  source 1..20: mol_type = other DNA
gaatcaaagcagaatgaagg

SEQ ID NO: 22181 - DNA, 20 bp, synthetic construct
  misc_feature 1..20: note = chemically synthesized
  source 1..20: mol_type = other DNA
tctgaaacaataatataaat

SEQ ID NO: 22182 - DNA, 20 bp, synthetic construct
  misc_feature 1..20: note = chemically synthesized
  source 1..20: mol_type = other DNA
aatataaataagtgcaaaat

SEQ ID NO: 22183 - DNA, 20 bp, synthetic construct
  misc_feature 1..20: note = chemically synthesized
  source 1..20: mol_type = other DNA
gatgtttaccaacaactttc

SEQ ID NO: 22184 - DNA, 20 bp, synthetic construct
  misc_feature 1..20: note = chemically synthesized
  source 1..20: mol_type = other DNA
taccaacaactttccagaaa

SEQ ID NO: 22185 - DNA, 20 bp, synthetic construct
  misc_feature 1..20: note = chemically synthesized
  source 1..20: mol_type = other DNA
accaacaactttccagaaac

SEQ ID NO: 22186 - DNA, 20 bp, synthetic construct
  misc_feature 1..20: note = chemically synthesized
  source 1..20: mol_type = other DNA
tccagaaacaggtcttgttt

SEQ ID NO: 22187 - DNA, 20 bp, synthetic construct
  misc_feature 1..20: note = chemically synthesized
  source 1..20: mol_type = other DNA
agaaacaggtcttgtttcag

SEQ ID NO: 22188 - DNA, 20 bp, synthetic construct
  misc_feature 1..20: note = chemically synthesized
  source 1..20: mol_type = other DNA
ttgtttcagaagatgtgcca

SEQ ID NO: 22189 - DNA, 20 bp, synthetic construct
  misc_feature 1..20: note = chemically synthesized
  source 1..20: mol_type = other DNA
tgtgccaaagatgtctcatg

SEQ ID NO: 22190 - DNA, 20 bp, synthetic construct
  misc_feature 1..20: note = chemically synthesized
  source 1..20: mol_type = other DNA
gtgccaaagatgtctcatgt

SEQ ID NO: 22191 - DNA, 20 bp, synthetic construct
  misc_feature 1..20: note = chemically synthesized
  source 1..20: mol_type = other DNA
ccaaagatgtctcatgtggg

SEQ ID NO: 22192 - DNA, 20 bp, synthetic construct
  misc_feature 1..20: note = chemically synthesized
  source 1..20: mol_type = other DNA
caaagatgtctcatgtgggc

SEQ ID NO: 22193 - DNA, 20 bp, synthetic construct
  misc_feature 1..20: note = chemically synthesized
  source 1..20: mol_type = other DNA
aaagatgtctcatgtgggca

SEQ ID NO: 22194 - DNA, 20 bp, synthetic construct
  misc_feature 1..20: note = chemically synthesized
  source 1..20: mol_type = other DNA
tcatgtgggcagggctcctg

SEQ ID NO: 22195 - DNA, 20 bp, synthetic construct
  misc_feature 1..20: note = chemically synthesized
  source 1..20: mol_type = other DNA
atgtgggcagggctcctgtg

SEQ ID NO: 22196 - DNA, 20 bp, synthetic construct
  misc_feature 1..20: note = chemically synthesized
  source 1..20: mol_type = other DNA
ctgtggagacctctgttgct

SEQ ID NO: 22197 - DNA, 20 bp, synthetic construct
  misc_feature 1..20: note = chemically synthesized
  source 1..20: mol_type = other DNA
ggagacctctgttgctgagt

SEQ ID NO: 22198 - DNA, 20 bp, synthetic construct
  misc_feature 1..20: note = chemically synthesized
  source 1..20: mol_type = other DNA
ttgctgagtgagtcaaccat

SEQ ID NO: 22199 - DNA, 20 bp, synthetic construct
  misc_feature 1..20: note = chemically synthesized
  source 1..20: mol_type = other DNA
tgctgagtgagtcaaccatg

SEQ ID NO: 22200 - DNA, 20 bp, synthetic construct
  misc_feature 1..20: note = chemically synthesized
  source 1..20: mol_type = other DNA
gagtgagtcaaccatgaggt

SEQ ID NO: 22201 - DNA, 20 bp, synthetic construct
  misc_feature 1..20: note = chemically synthesized
  source 1..20: mol_type = other DNA
agtcaaccatgaggtcggct

SEQ ID NO: 22202 - DNA, 20 bp, synthetic construct
  misc_feature 1..20: note = chemically synthesized
  source 1..20: mol_type = other DNA
caaccatgaggtcggctgag

SEQ ID NO: 22203 - DNA, 20 bp, synthetic construct
  misc_feature 1..20: note = chemically synthesized
  source 1..20: mol_type = other DNA
atgaggtcggctgagcagtt

SEQ ID NO: 22204 - DNA, 20 bp, synthetic construct
  misc_feature 1..20: note = chemically synthesized
  source 1..20: mol_type = other DNA
tgaggtcggctgagcagttc

SEQ ID NO: 22205 - DNA, 20 bp, synthetic construct
  misc_feature 1..20: note = chemically synthesized
  source 1..20: mol_type = other DNA
gaggtcggctgagcagttca

SEQ ID NO: 22206 - DNA, 20 bp, synthetic construct
  misc_feature 1..20: note = chemically synthesized
  source 1..20: mol_type = other DNA
ttcagggttctcccatttta

SEQ ID NO: 22207 - DNA, 20 bp, synthetic construct
  misc_feature 1..20: note = chemically synthesized
  source 1..20: mol_type = other DNA
cagggttctcccattttaca

SEQ ID NO: 22208 - DNA, 20 bp, synthetic construct
  misc_feature 1..20: note = chemically synthesized
  source 1..20: mol_type = other DNA
agggttctcccattttacag

SEQ ID NO: 22209 - DNA, 20 bp, synthetic construct
  misc_feature 1..20: note = chemically synthesized
  source 1..20: mol_type = other DNA
ggttctcccattttacagag

SEQ ID NO: 22210 - DNA, 20 bp, synthetic construct
  misc_feature 1..20: note = chemically synthesized
  source 1..20: mol_type = other DNA
gttctcccattttacagagg

SEQ ID NO: 22211 - DNA, 20 bp, synthetic construct
  misc_feature 1..20: note = chemically synthesized
  source 1..20: mol_type = other DNA
ccattttacagaggaggatg

SEQ ID NO: 22212 - DNA, 20 bp, synthetic construct
  misc_feature 1..20: note = chemically synthesized
  source 1..20: mol_type = other DNA
cagaggaggatgcagcgacc

SEQ ID NO: 22213 - DNA, 20 bp, synthetic construct
  misc_feature 1..20: note = chemically synthesized
  source 1..20: mol_type = other DNA
agcgacccagaaatgcttgc

SEQ ID NO: 22214 - DNA, 20 bp, synthetic construct
  misc_feature 1..20: note = chemically synthesized
  source 1..20: mol_type = other DNA
gaaatgcttgcaagcccacc

SEQ ID NO: 22215 - DNA, 20 bp, synthetic construct
  misc_feature 1..20: note = chemically synthesized
  source 1..20: mol_type = other DNA
tgcttgcaagcccacccagc

SEQ ID NO: 22216 - DNA, 20 bp, synthetic construct
  misc_feature 1..20: note = chemically synthesized
  source 1..20: mol_type = other DNA
gcttgcaagcccacccagct

SEQ ID NO: 22217 - DNA, 20 bp, synthetic construct
  misc_feature 1..20: note = chemically synthesized
  source 1..20: mol_type = other DNA
acccagctaggcttgcttca

SEQ ID NO: 22218 - DNA, 20 bp, synthetic construct
  misc_feature 1..20: note = chemically synthesized
  source 1..20: mol_type = other DNA
ttcacagacactcttttaac

SEQ ID NO: 22219 - DNA, 20 bp, synthetic construct
  misc_feature 1..20: note = chemically synthesized
  source 1..20: mol_type = other DNA
actcttttaactagttccat

SEQ ID NO: 22220 - DNA, 20 bp, synthetic construct
  misc_feature 1..20: note = chemically synthesized
  source 1..20: mol_type = other DNA
actagttccatcagcaaccc

SEQ ID NO: 22221 - DNA, 20 bp, synthetic construct
  misc_feature 1..20: note = chemically synthesized
  source 1..20: mol_type = other DNA
ctagttccatcagcaacccc

SEQ ID NO: 22222 - DNA, 20 bp, synthetic construct
  misc_feature 1..20: note = chemically synthesized
  source 1..20: mol_type = other DNA
ttccatcagcaaccccaggt

SEQ ID NO: 22223 - DNA, 20 bp, synthetic construct
  misc_feature 1..20: note = chemically synthesized
  source 1..20: mol_type = other DNA
tgtcatcatacacattttac

SEQ ID NO: 22224 - DNA, 20 bp, synthetic construct
  misc_feature 1..20: note = chemically synthesized
  source 1..20: mol_type = other DNA
tcatacacattttaccagtg

SEQ ID NO: 22225 - DNA, 20 bp, synthetic construct
  misc_feature 1..20: note = chemically synthesized
  source 1..20: mol_type = other DNA
attttaccagtgaagaaact

SEQ ID NO: 22226 - DNA, 20 bp, synthetic construct
  misc_feature 1..20: note = chemically synthesized
  source 1..20: mol_type = other DNA
ttttaccagtgaagaaactg

SEQ ID NO: 22227 - DNA, 20 bp, synthetic construct
  misc_feature 1..20: note = chemically synthesized
  source 1..20: mol_type = other DNA
ccagtgaagaaactgaggct

SEQ ID NO: 22228 - DNA, 20 bp, synthetic construct
  misc_feature 1..20: note = chemically synthesized
  source 1..20: mol_type = other DNA
agtgaagaaactgaggcttg

SEQ ID NO: 22229 - DNA, 20 bp, synthetic construct
  misc_feature 1..20: note = chemically synthesized
  source 1..20: mol_type = other DNA
tgaagaaactgaggcttgga

SEQ ID NO: 22230 - DNA, 20 bp, synthetic construct
  misc_feature 1..20: note = chemically synthesized
  source 1..20: mol_type = other DNA
gaagaaactgaggcttggag

SEQ ID NO: 22231 - DNA, 20 bp, synthetic construct
  misc_feature 1..20: note = chemically synthesized
  source 1..20: mol_type = other DNA
actgaggcttggagaggtta

SEQ ID NO: 22232 - DNA, 20 bp, synthetic construct
  misc_feature 1..20: note = chemically synthesized
  source 1..20: mol_type = other DNA
tgaggcttggagaggttaaa

SEQ ID NO: 22233 - DNA, 20 bp, synthetic construct
  misc_feature 1..20: note = chemically synthesized
  source 1..20: mol_type = other DNA
agaggttaaagagctgctcc

SEQ ID NO: 22234 - DNA, 20 bp, synthetic construct
  misc_feature 1..20: note = chemically synthesized
  source 1..20: mol_type = other DNA
aagagctgctcccagacaca

SEQ ID NO: 22235 - DNA, 20 bp, synthetic construct
  misc_feature 1..20: note = chemically synthesized
  source 1..20: mol_type = other DNA
gctgctcccagacacacagc

SEQ ID NO: 22236 - DNA, 20 bp, synthetic construct
  misc_feature 1..20: note = chemically synthesized
  source 1..20: mol_type = other DNA
ctgctcccagacacacagcc

SEQ ID NO: 22237 - DNA, 20 bp, synthetic construct
  misc_feature 1..20: note = chemically synthesized
  source 1..20: mol_type = other DNA
cagacacacagccaggaaat

SEQ ID NO: 22238 - DNA, 20 bp, synthetic construct
  misc_feature 1..20: note = chemically synthesized
  source 1..20: mol_type = other DNA
acacacagccaggaaattgg

SEQ ID NO: 22239 - DNA, 20 bp, synthetic construct
  misc_feature 1..20: note = chemically synthesized
  source 1..20: mol_type = other DNA
cacagccaggaaattggtgg

SEQ ID NO: 22240 - DNA, 20 bp, synthetic construct
  misc_feature 1..20: note = chemically synthesized
  source 1..20: mol_type = other DNA
caggaaattggtggtagatg

SEQ ID NO: 22241 - DNA, 20 bp, synthetic construct
  misc_feature 1..20: note = chemically synthesized
  source 1..20: mol_type = other DNA
aggaaattggtggtagatga

SEQ ID NO: 22242 - DNA, 20 bp, synthetic construct
  misc_feature 1..20: note = chemically synthesized
  source 1..20: mol_type = other DNA
ttggtggtagatgaaggatc

SEQ ID NO: 22243 - DNA, 20 bp, synthetic construct
  misc_feature 1..20: note = chemically synthesized
  source 1..20: mol_type = other DNA
tccagctcatctgtctaact

SEQ ID NO: 22244 - DNA, 20 bp, synthetic construct
  misc_feature 1..20: note = chemically synthesized
  source 1..20: mol_type = other DNA
ccagctcatctgtctaactt

SEQ ID NO: 22245 - DNA, 20 bp, synthetic construct
  misc_feature 1..20: note = chemically synthesized
  source 1..20: mol_type = other DNA
agctcatctgtctaacttgg

SEQ ID NO: 22246 - DNA, 20 bp, synthetic construct
  misc_feature 1..20: note = chemically synthesized
  source 1..20: mol_type = other DNA
tctgtctaacttgggagcct

SEQ ID NO: 22247 - DNA, 20 bp, synthetic construct
  misc_feature 1..20: note = chemically synthesized
  source 1..20: mol_type = other DNA
gttcatcttacctatccacc

SEQ ID NO: 22248 - DNA, 20 bp, synthetic construct
  misc_feature 1..20: note = chemically synthesized
  source 1..20: mol_type = other DNA
ttcatcttacctatccacca

SEQ ID NO: 22249 - DNA, 20 bp, synthetic construct
  misc_feature 1..20: note = chemically synthesized
  source 1..20: mol_type = other DNA
tacctatccaccaaggcttg

SEQ ID NO: 22250 - DNA, 20 bp, synthetic construct
  misc_feature 1..20: note = chemically synthesized
  source 1..20: mol_type = other DNA
tatccaccaaggcttgaagt

SEQ ID NO: 22251 - DNA, 20 bp, synthetic construct
  misc_feature 1..20: note = chemically synthesized
  source 1..20: mol_type = other DNA
atccaccaaggcttgaagtg

SEQ ID NO: 22252 - DNA, 20 bp, synthetic construct
  misc_feature 1..20: note = chemically synthesized
  source 1..20: mol_type = other DNA
aagtgaggtgccccgactgt

SEQ ID NO: 22253 - DNA, 20 bp, synthetic construct
  misc_feature 1..20: note = chemically synthesized
  source 1..20: mol_type = other DNA
ggtgccccgactgtgagttc

SEQ ID NO: 22254 - DNA, 20 bp, synthetic construct
  misc_feature 1..20: note = chemically synthesized
  source 1..20: mol_type = other DNA
gtgccccgactgtgagttcc

SEQ ID NO: 22255 - DNA, 20 bp, synthetic construct
  misc_feature 1..20: note = chemically synthesized
  source 1..20: mol_type = other DNA
agttccaggtttgatgccta

SEQ ID NO: 22256 - DNA, 20 bp, synthetic construct
  misc_feature 1..20: note = chemically synthesized
  source 1..20: mol_type = other DNA
gtttgatgcctacagcccat

SEQ ID NO: 22257 - DNA, 20 bp, synthetic construct
  misc_feature 1..20: note = chemically synthesized
  source 1..20: mol_type = other DNA
accttgtcttataccttaac

SEQ ID NO: 22258 - DNA, 20 bp, synthetic construct
  misc_feature 1..20: note = chemically synthesized
  source 1..20: mol_type = other DNA
ttgtcttataccttaactgg

SEQ ID NO: 22259 - DNA, 20 bp, synthetic construct
  misc_feature 1..20: note = chemically synthesized
  source 1..20: mol_type = other DNA
gtcttataccttaactggtg

SEQ ID NO: 22260 - DNA, 20 bp, synthetic construct
  misc_feature 1..20: note = chemically synthesized
  source 1..20: mol_type = other DNA
tcttataccttaactggtgg

SEQ ID NO: 22261 - DNA, 20 bp, synthetic construct
  misc_feature 1..20: note = chemically synthesized
  source 1..20: mol_type = other DNA
cttataccttaactggtgga

SEQ ID NO: 22262 - DNA, 20 bp, synthetic construct
  misc_feature 1..20: note = chemically synthesized
  source 1..20: mol_type = other DNA
tggagggtgctgtctctgtg

SEQ ID NO: 22263 - DNA, 20 bp, synthetic construct
  misc_feature 1..20: note = chemically synthesized
  source 1..20: mol_type = other DNA
agggtgctgtctctgtgtag

SEQ ID NO: 22264 - DNA, 20 bp, synthetic construct
  misc_feature 1..20: note = chemically synthesized
  source 1..20: mol_type = other DNA
tgtctctgtgtagcagccac

SEQ ID NO: 22265 - DNA, 20 bp, synthetic construct
  misc_feature 1..20: note = chemically synthesized
  source 1..20: mol_type = other DNA
ctgtgtagcagccaccagcc

SEQ ID NO: 22266 - DNA, 20 bp, synthetic construct
  misc_feature 1..20: note = chemically synthesized
  source 1..20: mol_type = other DNA
ctagctctgaaccctgtcct

SEQ ID NO: 22267 - DNA, 20 bp, synthetic construct
  misc_feature 1..20: note = chemically synthesized
  source 1..20: mol_type = other DNA
tagctctgaaccctgtcctg

SEQ ID NO: 22268 - DNA, 20 bp, synthetic construct
  misc_feature 1..20: note = chemically synthesized
  source 1..20: mol_type = other DNA
gctctgaaccctgtcctgag

SEQ ID NO: 22269 - DNA, 20 bp, synthetic construct
  misc_feature 1..20: note = chemically synthesized
  source 1..20: mol_type = other DNA
tgaaccctgtcctgaggagt

SEQ ID NO: 22270 - DNA, 20 bp, synthetic construct
  misc_feature 1..20: note = chemically synthesized
  source 1..20: mol_type = other DNA
gaaccctgtcctgaggagtt

SEQ ID NO: 22271 - DNA, 20 bp, synthetic construct
  misc_feature 1..20: note = chemically synthesized
  source 1..20: mol_type = other DNA
ccctgtcctgaggagttggg

SEQ ID NO: 22272 - DNA, 20 bp, synthetic construct
  misc_feature 1..20: note = chemically synthesized
  source 1..20: mol_type = other DNA
tcctgaggagttgggaagtg

SEQ ID NO: 22273 - DNA, 20 bp, synthetic construct
  misc_feature 1..20: note = chemically synthesized
  source 1..20: mol_type = other DNA
cctgaggagttgggaagtgt

SEQ ID NO: 22274 - DNA, 20 bp, synthetic construct
  misc_feature 1..20: note = chemically synthesized
  source 1..20: mol_type = other DNA
ctgaggagttgggaagtgtg

SEQ ID NO: 22275 - DNA, 20 bp, synthetic construct
  misc_feature 1..20: note = chemically synthesized
  source 1..20: mol_type = other DNA
gttgggaagtgtggggtgtc

SEQ ID NO: 22276 - DNA, 20 bp, synthetic construct
  misc_feature 1..20: note = chemically synthesized
  source 1..20: mol_type = other DNA
gtttattccatcaatacacg

SEQ ID NO: 22277 - DNA, 20 bp, synthetic construct
  misc_feature 1..20: note = chemically synthesized
  source 1..20: mol_type = other DNA
attcttctgccattttttct

SEQ ID NO: 22278 - DNA, 20 bp, synthetic construct
  misc_feature 1..20: note = chemically synthesized
  source 1..20: mol_type = other DNA
ttcttctgccattttttctc

SEQ ID NO: 22279 - DNA, 20 bp, synthetic construct
  misc_feature 1..20: note = chemically synthesized
  source 1..20: mol_type = other DNA
tcttctgccattttttctca

SEQ ID NO: 22280 - DNA, 20 bp, synthetic construct
  misc_feature 1..20: note = chemically synthesized
  source 1..20: mol_type = other DNA
cttctgccattttttctcag

SEQ ID NO: 22281 - DNA, 20 bp, synthetic construct
  misc_feature 1..20: note = chemically synthesized
  source 1..20: mol_type = other DNA
aggggctctccttccttccc

SEQ ID NO: 22282 - DNA, 20 bp, synthetic construct
  misc_feature 1..20: note = chemically synthesized
  source 1..20: mol_type = other DNA
ctccttccttccctggctct

SEQ ID NO: 22283 - DNA, 20 bp, synthetic construct
  misc_feature 1..20: note = chemically synthesized
  source 1..20: mol_type = other DNA
tccttccttccctggctctt

SEQ ID NO: 22284 - DNA, 20 bp, synthetic construct
  misc_feature 1..20: note = chemically synthesized
  source 1..20: mol_type = other DNA
ttccttccctggctcttggg

SEQ ID NO: 22285 - DNA, 20 bp, synthetic construct
  misc_feature 1..20: note = chemically synthesized
  source 1..20: mol_type = other DNA
tccttccctggctcttgggt

SEQ ID NO: 22286 - DNA, 20 bp, synthetic construct
  misc_feature 1..20: note = chemically synthesized
  source 1..20: mol_type = other DNA
taggctgcctgctctgatgt

SEQ ID NO: 22287 - DNA, 20 bp, synthetic construct
  misc_feature 1..20: note = chemically synthesized
  source 1..20: mol_type = other DNA
gctctgatgtaagttcctgc

SEQ ID NO: 22288 - DNA, 20 bp, synthetic construct
  misc_feature 1..20: note = chemically synthesized
  source 1..20: mol_type = other DNA
ctctgatgtaagttcctgct

SEQ ID NO: 22289 - DNA, 20 bp, synthetic construct
  misc_feature 1..20: note = chemically synthesized
  source 1..20: mol_type = other DNA
tcctgctgggatgattgctc

SEQ ID NO: 22290 - DNA, 20 bp, synthetic construct
  misc_feature 1..20: note = chemically synthesized
  source 1..20: mol_type = other DNA
gctgggatgattgctctggc

SEQ ID NO: 22291 - DNA, 20 bp, synthetic construct
  misc_feature 1..20: note = chemically synthesized
  source 1..20: mol_type = other DNA
ctgggatgattgctctggcc

SEQ ID NO: 22292 - DNA, 20 bp, synthetic construct
  misc_feature 1..20: note = chemically synthesized
  source 1..20: mol_type = other DNA
gattgctctggccaggcccc

SEQ ID NO: 22293 - DNA, 20 bp, synthetic construct
  misc_feature 1..20: note = chemically synthesized
  source 1..20: mol_type = other DNA
ctgctccctgcccttctctg

SEQ ID NO: 22294 - DNA, 20 bp, synthetic construct
  misc_feature 1..20: note = chemically synthesized
  source 1..20: mol_type = other DNA
tgctccctgcccttctctga

SEQ ID NO: 22295 - DNA, 20 bp, synthetic construct
  misc_feature 1..20: note = chemically synthesized
  source 1..20: mol_type = other DNA
ttctctgaaggcacatctgt

SEQ ID NO: 22296 - DNA, 20 bp, synthetic construct
  misc_feature 1..20: note = chemically synthesized
  source 1..20: mol_type = other DNA
aaggcacatctgtcagccca

SEQ ID NO: 22297 - DNA, 20 bp, synthetic construct
  misc_feature 1..20: note = chemically synthesized
  source 1..20: mol_type = other DNA
ggcacatctgtcagcccaca

SEQ ID NO: 22298 - DNA, 20 bp, synthetic construct
  misc_feature 1..20: note = chemically synthesized
  source 1..20: mol_type = other DNA
gcacatctgtcagcccacag

SEQ ID NO: 22299 - DNA, 20 bp, synthetic construct
  misc_feature 1..20: note = chemically synthesized
  source 1..20: mol_type = other DNA
tctgtcagcccacagaggca

SEQ ID NO: 22300 - DNA, 20 bp, synthetic construct
  misc_feature 1..20: note = chemically synthesized
  source 1..20: mol_type = other DNA
gcccacagaggcacggttaa

SEQ ID NO: 22301 - DNA, 20 bp, synthetic construct
  misc_feature 1..20: note = chemically synthesized
  source 1..20: mol_type = other DNA
cacagaggcacggttaatgg

SEQ ID NO: 22302 - DNA, 20 bp, synthetic construct
  misc_feature 1..20: note = chemically synthesized
  source 1..20: mol_type = other DNA
agaggcacggttaatggtgg

SEQ ID NO: 22303 - DNA, 20 bp, synthetic construct
  misc_feature 1..20: note = chemically synthesized
  source 1..20: mol_type = other DNA
gaggcacggttaatggtggc

SEQ ID NO: 22304 - DNA, 20 bp, synthetic construct
  misc_feature 1..20: note = chemically synthesized
  source 1..20: mol_type = other DNA
aggcacggttaatggtggcg

SEQ ID NO: 22305 - DNA, 20 bp, synthetic construct
  misc_feature 1..20: note = chemically synthesized
  source 1..20: mol_type = other DNA
cacggttaatggtggcgggg

SEQ ID NO: 22306 - DNA, 20 bp, synthetic construct
  misc_feature 1..20: note = chemically synthesized
  source 1..20: mol_type = other DNA
ggttaatggtggcggggaag

SEQ ID NO: 22307 - DNA, 20 bp, synthetic construct
  misc_feature 1..20: note = chemically synthesized
  source 1..20: mol_type = other DNA
ttaatggtggcggggaagca

SEQ ID NO: 22308 - DNA, 20 bp, synthetic construct
  misc_feature 1..20: note = chemically synthesized
  source 1..20: mol_type = other DNA
taatggtggcggggaagcag

SEQ ID NO: 22309 - DNA, 20 bp, synthetic construct
  misc_feature 1..20: note = chemically synthesized
  source 1..20: mol_type = other DNA
tggtggcggggaagcagagg

SEQ ID NO: 22310 - DNA, 20 bp, synthetic construct
  misc_feature 1..20: note = chemically synthesized
  source 1..20: mol_type = other DNA
gaagcagaggcagtgcataa

SEQ ID NO: 22311 - DNA, 20 bp, synthetic construct
  misc_feature 1..20: note = chemically synthesized
  source 1..20: mol_type = other DNA
aagcagaggcagtgcataat

SEQ ID NO: 22312 - DNA, 20 bp, synthetic construct
  misc_feature 1..20: note = chemically synthesized
  source 1..20: mol_type = other DNA
agcagaggcagtgcataatg

SEQ ID NO: 22313 - DNA, 20 bp, synthetic construct
  misc_feature 1..20: note = chemically synthesized
  source 1..20: mol_type = other DNA
gcagaggcagtgcataatgg

SEQ ID NO: 22314 - DNA, 20 bp, synthetic construct
  misc_feature 1..20: note = chemically synthesized
  source 1..20: mol_type = other DNA
gcagtgcataatgggggaac

SEQ ID NO: 22315 - DNA, 20 bp, synthetic construct
  misc_feature 1..20: note = chemically synthesized
  source 1..20: mol_type = other DNA
cataatgggggaactggccc

SEQ ID NO: 22316 - DNA, 20 bp, synthetic construct
  misc_feature 1..20: note = chemically synthesized
  source 1..20: mol_type = other DNA
ataatgggggaactggcccc

SEQ ID NO: 22317 - DNA, 20 bp, synthetic construct
  misc_feature 1..20: note = chemically synthesized
  source 1..20: mol_type = other DNA
ccccctgtcccctccccgcc

SEQ ID NO: 22318 - DNA, 20 bp, synthetic construct
  misc_feature 1..20: note = chemically synthesized
  source 1..20: mol_type = other DNA
cccctgtcccctccccgcct

SEQ ID NO: 22319 - DNA, 20 bp, synthetic construct
  misc_feature 1..20: note = chemically synthesized
  source 1..20: mol_type = other DNA
acttgtccactttcactctc

SEQ ID NO: 22320 - DNA, 20 bp, synthetic construct
  misc_feature 1..20: note = chemically synthesized
  source 1..20: mol_type = other DNA
aagaccaccgctctcacaca

SEQ ID NO: 22321 - DNA, 20 bp, synthetic construct
  misc_feature 1..20: note = chemically synthesized
  source 1..20: mol_type = other DNA
agaccaccgctctcacacac

SEQ ID NO: 22322 - DNA, 20 bp, synthetic construct
  misc_feature 1..20: note = chemically synthesized
  source 1..20: mol_type = other DNA
caggtcctgtgctgccccca

SEQ ID NO: 22323 - DNA, 20 bp, synthetic construct
  misc_feature 1..20: note = chemically synthesized
  source 1..20: mol_type = other DNA
gtgctgcccccacagctttg

SEQ ID NO: 22324 - DNA, 20 bp, synthetic construct
  misc_feature 1..20: note = chemically synthesized
  source 1..20: mol_type = other DNA
tgctgcccccacagctttgc

SEQ ID NO: 22325 - DNA, 20 bp, synthetic construct
  misc_feature 1..20: note = chemically synthesized
  source 1..20: mol_type = other DNA
cccacagctttgcaggctgc

SEQ ID NO: 22326 - DNA, 20 bp, synthetic construct
  misc_feature 1..20: note = chemically synthesized
  source 1..20: mol_type = other DNA
caggctgctggttttccatc

SEQ ID NO: 22327 - DNA, 20 bp, synthetic construct
  misc_feature 1..20: note = chemically synthesized
  source 1..20: mol_type = other DNA
aggctgctggttttccatcc

SEQ ID NO: 22328 - DNA, 20 bp, synthetic construct
  misc_feature 1..20: note = chemically synthesized
  source 1..20: mol_type = other DNA
ggctgctggttttccatcca

SEQ ID NO: 22329 - DNA, 20 bp, synthetic construct
  misc_feature 1..20: note = chemically synthesized
  source 1..20: mol_type = other DNA
ctggttttccatccagggca

SEQ ID NO: 22330 - DNA, 20 bp, synthetic construct
  misc_feature 1..20: note = chemically synthesized
  source 1..20: mol_type = other DNA
ttccatccagggcacagccg

SEQ ID NO: 22331 - DNA, 20 bp, synthetic construct
  misc_feature 1..20: note = chemically synthesized
  source 1..20: mol_type = other DNA
tccatccagggcacagccgc

SEQ ID NO: 22332 - DNA, 20 bp, synthetic construct
  misc_feature 1..20: note = chemically synthesized
  source 1..20: mol_type = other DNA
agggcacagccgcaggcctc

SEQ ID NO: 22333 - DNA, 20 bp, synthetic construct
  misc_feature 1..20: note = chemically synthesized
  source 1..20: mol_type = other DNA
gggcacagccgcaggcctct

SEQ ID NO: 22334 - DNA, 20 bp, synthetic construct
  misc_feature 1..20: note = chemically synthesized
  source 1..20: mol_type = other DNA
ccgcaggcctctgggcaccc

SEQ ID NO: 22335 - DNA, 20 bp, synthetic construct
  misc_feature 1..20: note = chemically synthesized
  source 1..20: mol_type = other DNA
cctctgggcaccctagccct

SEQ ID NO: 22336 - DNA, 20 bp, synthetic construct
  misc_feature 1..20: note = chemically synthesized
  source 1..20: mol_type = other DNA
gcaccctagccctcagtgcc

SEQ ID NO: 22337 - DNA, 20 bp, synthetic construct
  misc_feature 1..20: note = chemically synthesized
  source 1..20: mol_type = other DNA
caccctagccctcagtgccc

SEQ ID NO: 22338 - DNA, 20 bp, synthetic construct
  misc_feature 1..20: note = chemically synthesized
  source 1..20: mol_type = other DNA
accctagccctcagtgccca

SEQ ID NO: 22339 - DNA, 20 bp, synthetic construct
  misc_feature 1..20: note = chemically synthesized
  source 1..20: mol_type = other DNA
agccctcagtgcccagggca

SEQ ID NO: 22340 - DNA, 20 bp, synthetic construct
  misc_feature 1..20: note = chemically synthesized
  source 1..20: mol_type = other DNA
gccctgacatgcaatctcac

SEQ ID NO: 22341 - DNA, 20 bp, synthetic construct
  misc_feature 1..20: note = chemically synthesized
  source 1..20: mol_type = other DNA
ctgacatgcaatctcactgg

SEQ ID NO: 22342 - DNA, 20 bp, synthetic construct
  misc_feature 1..20: note = chemically synthesized
  source 1..20: mol_type = other DNA
tgacatgcaatctcactggc

SEQ ID NO: 22343 - DNA, 20 bp, synthetic construct
  misc_feature 1..20: note = chemically synthesized
  source 1..20: mol_type = other DNA
catgcaatctcactggcagg

SEQ ID NO: 22344 - DNA, 20 bp, synthetic construct
  misc_feature 1..20: note = chemically synthesized
  source 1..20: mol_type = other DNA
atctcactggcaggcagcct

SEQ ID NO: 22345 - DNA, 20 bp, synthetic construct
  misc_feature 1..20: note = chemically synthesized
  source 1..20: mol_type = other DNA
tctcactggcaggcagcctc

SEQ ID NO: 22346 - DNA, 20 bp, synthetic construct
  misc_feature 1..20: note = chemically synthesized
  source 1..20: mol_type = other DNA
cactggcaggcagcctcagg

SEQ ID NO: 22347 - DNA, 20 bp, synthetic construct
  misc_feature 1..20: note = chemically synthesized
  source 1..20: mol_type = other DNA
actggcaggcagcctcaggc

SEQ ID NO: 22348 - DNA, 20 bp, synthetic construct
  misc_feature 1..20: note = chemically synthesized
  source 1..20: mol_type = other DNA
caggcagcctcaggcaggcc

SEQ ID NO: 22349 - DNA, 20 bp, synthetic construct
  misc_feature 1..20: note = chemically synthesized
  source 1..20: mol_type = other DNA
aggcagcctcaggcaggcct

SEQ ID NO: 22350 - DNA, 20 bp, synthetic construct
  misc_feature 1..20: note = chemically synthesized
  source 1..20: mol_type = other DNA
cagcctcaggcaggcctggg

SEQ ID NO: 22351 - DNA, 20 bp, synthetic construct
  misc_feature 1..20: note = chemically synthesized
  source 1..20: mol_type = other DNA
gcctcaggcaggcctgggca

SEQ ID NO: 22352 - DNA, 20 bp, synthetic construct
  misc_feature 1..20: note = chemically synthesized
  source 1..20: mol_type = other DNA
cctcaggcaggcctgggcag

SEQ ID NO: 22353 - DNA, 20 bp, synthetic construct
  misc_feature 1..20: note = chemically synthesized
  source 1..20: mol_type = other DNA
aggcctgggcagaggaccga

SEQ ID NO: 22354 - DNA, 20 bp, synthetic construct
  misc_feature 1..20: note = chemically synthesized
  source 1..20: mol_type = other DNA
ggcctgggcagaggaccgaa

SEQ ID NO: 22355 - DNA, 20 bp, synthetic construct
  misc_feature 1..20: note = chemically synthesized
  source 1..20: mol_type = other DNA
cctgggcagaggaccgaaag

SEQ ID NO: 22356 - DNA, 20 bp, synthetic construct
  misc_feature 1..20: note = chemically synthesized
  source 1..20: mol_type = other DNA
ctgggcagaggaccgaaagg

SEQ ID NO: 22357 - DNA, 20 bp, synthetic construct
  misc_feature 1..20: note = chemically synthesized
  source 1..20: mol_type = other DNA
gggcagaggaccgaaaggag

SEQ ID NO: 22358 - DNA, 20 bp, synthetic construct
  misc_feature 1..20: note = chemically synthesized
  source 1..20: mol_type = other DNA
gcagaggaccgaaaggagga

SEQ ID NO: 22359 - DNA, 20 bp, synthetic construct
  misc_feature 1..20: note = chemically synthesized
  source 1..20: mol_type = other DNA
cagaggaccgaaaggaggag

SEQ ID NO: 22360 - DNA, 20 bp, synthetic construct
  misc_feature 1..20: note = chemically synthesized
  source 1..20: mol_type = other DNA
gaggaccgaaaggaggagag

SEQ ID NO: 22361 - DNA, 20 bp, synthetic construct
  misc_feature 1..20: note = chemically synthesized
  source 1..20: mol_type = other DNA
aggaccgaaaggaggagagg

SEQ ID NO: 22362 - DNA, 20 bp, synthetic construct
  misc_feature 1..20: note = chemically synthesized
  source 1..20: mol_type = other DNA
ggaccgaaaggaggagagga

SEQ ID NO: 22363 - DNA, 20 bp, synthetic construct
  misc_feature 1..20: note = chemically synthesized
  source 1..20: mol_type = other DNA
accgaaaggaggagaggagg

SEQ ID NO: 22364 - DNA, 20 bp, synthetic construct
  misc_feature 1..20: note = chemically synthesized
  source 1..20: mol_type = other DNA
ccgaaaggaggagaggaggg

SEQ ID NO: 22365 - DNA, 20 bp, synthetic construct
  misc_feature 1..20: note = chemically synthesized
  source 1..20: mol_type = other DNA
cgaaaggaggagaggaggga

SEQ ID NO: 22366 - DNA, 20 bp, synthetic construct
  misc_feature 1..20: note = chemically synthesized
  source 1..20: mol_type = other DNA
aaaggaggagaggagggagg

SEQ ID NO: 22367 - DNA, 20 bp, synthetic construct
  misc_feature 1..20: note = chemically synthesized
  source 1..20: mol_type = other DNA
ggagaggagggagggagcta

SEQ ID NO: 22368 - DNA, 20 bp, synthetic construct
  misc_feature 1..20: note = chemically synthesized
  source 1..20: mol_type = other DNA
gaggagggagggagctacag

SEQ ID NO: 22369 - DNA, 20 bp, synthetic construct
  misc_feature 1..20: note = chemically synthesized
  source 1..20: mol_type = other DNA
ggagggagggagctacagta

SEQ ID NO: 22370 - DNA, 20 bp, synthetic construct
  misc_feature 1..20: note = chemically synthesized
  source 1..20: mol_type = other DNA
gggagggagctacagtagag

SEQ ID NO: 22371 - DNA, 20 bp, synthetic construct
  misc_feature 1..20: note = chemically synthesized
  source 1..20: mol_type = other DNA
gggagctacagtagagcaga

SEQ ID NO: 22372 - DNA, 20 bp, synthetic construct
  misc_feature 1..20: note = chemically synthesized
  source 1..20: mol_type = other DNA
ggagctacagtagagcagac

SEQ ID NO: 22373 - DNA, 20 bp, synthetic construct
  misc_feature 1..20: note = chemically synthesized
  source 1..20: mol_type = other DNA
agctacagtagagcagacag

SEQ ID NO: 22374 - DNA, 20 bp, synthetic construct
  misc_feature 1..20: note = chemically synthesized
  source 1..20: mol_type = other DNA
agcagacaggagacaaacac

SEQ ID NO: 22375 - DNA, 20 bp, synthetic construct
  misc_feature 1..20: note = chemically synthesized
  source 1..20: mol_type = other DNA
acaggagacaaacaccagct

SEQ ID NO: 22376 - DNA, 20 bp, synthetic construct
  misc_feature 1..20: note = chemically synthesized
  source 1..20: mol_type = other DNA
aggagacaaacaccagctaa

SEQ ID NO: 22377 - DNA, 20 bp, synthetic construct
  misc_feature 1..20: note = chemically synthesized
  source 1..20: mol_type = other DNA
aaacaccagctaagagtaaa

SEQ ID NO: 22378 - DNA, 20 bp, synthetic construct
  misc_feature 1..20: note = chemically synthesized
  source 1..20: mol_type = other DNA
ccagctaagagtaaacagcc

SEQ ID NO: 22379 - DNA, 20 bp, synthetic construct
  misc_feature 1..20: note = chemically synthesized
  source 1..20: mol_type = other DNA
gctaagagtaaacagcctgg

SEQ ID NO: 22380 - DNA, 20 bp, synthetic construct
  misc_feature 1..20: note = chemically synthesized
  source 1..20: mol_type = other DNA
aagagtaaacagcctggcag

SEQ ID NO: 22381 - DNA, 20 bp, synthetic construct
  misc_feature 1..20: note = chemically synthesized
  source 1..20: mol_type = other DNA
agagtaaacagcctggcagt

SEQ ID NO: 22382 - DNA, 20 bp, synthetic construct
  misc_feature 1..20: note = chemically synthesized
  source 1..20: mol_type = other DNA
gagtaaacagcctggcagtg

SEQ ID NO: 22383 - DNA, 20 bp, synthetic construct
  misc_feature 1..20: note = chemically synthesized
  source 1..20: mol_type = other DNA
aaacagcctggcagtggggt

SEQ ID NO: 22384 - DNA, 20 bp, synthetic construct
  misc_feature 1..20: note = chemically synthesized
  source 1..20: mol_type = other DNA
ctggcagtggggtgagtgcc

SEQ ID NO: 22385 - DNA, 20 bp, synthetic construct
  misc_feature 1..20: note = chemically synthesized
  source 1..20: mol_type = other DNA
cagtggggtgagtgcctggc

SEQ ID NO: 22386 - DNA, 20 bp, synthetic construct
  misc_feature 1..20: note = chemically synthesized
  source 1..20: mol_type = other DNA
gtggggtgagtgcctggctg

SEQ ID NO: 22387 - DNA, 20 bp, synthetic construct
  misc_feature 1..20: note = chemically synthesized
  source 1..20: mol_type = other DNA
tggggtgagtgcctggctgg

SEQ ID NO: 22388 - DNA, 20 bp, synthetic construct
  misc_feature 1..20: note = chemically synthesized
  source 1..20: mol_type = other DNA
ggggtgagtgcctggctgga

SEQ ID NO: 22389 - DNA, 20 bp, synthetic construct
  misc_feature 1..20: note = chemically synthesized
  source 1..20: mol_type = other DNA
gggtgagtgcctggctggag

SEQ ID NO: 22390 - DNA, 20 bp, synthetic construct
  misc_feature 1..20: note = chemically synthesized
  source 1..20: mol_type = other DNA
cctggctggaggggctcacc

SEQ ID NO: 22391 - DNA, 20 bp, synthetic construct
  misc_feature 1..20: note = chemically synthesized
  source 1..20: mol_type = other DNA
ctggctggaggggctcacct

SEQ ID NO: 22392 - DNA, 20 bp, synthetic construct
  misc_feature 1..20: note = chemically synthesized
  source 1..20: mol_type = other DNA
ctggaggggctcacctgggc

SEQ ID NO: 22393 - DNA, 20 bp, synthetic construct
  misc_feature 1..20: note = chemically synthesized
  source 1..20: mol_type = other DNA
ctcacctgggctggcctgcc

SEQ ID NO: 22394 - DNA, 20 bp, synthetic construct
  misc_feature 1..20: note = chemically synthesized
  source 1..20: mol_type = other DNA
tcacctgggctggcctgcct

SEQ ID NO: 22395 - DNA, 20 bp, synthetic construct
  misc_feature 1..20: note = chemically synthesized
  source 1..20: mol_type = other DNA
acctgggctggcctgcctgg

SEQ ID NO: 22396 - DNA, 20 bp, synthetic construct
  misc_feature 1..20: note = chemically synthesized
  source 1..20: mol_type = other DNA
cctgggctggcctgcctggg

SEQ ID NO: 22397 - DNA, 20 bp, synthetic construct
  misc_feature 1..20: note = chemically synthesized
  source 1..20: mol_type = other DNA
tgggctggcctgcctgggag

SEQ ID NO: 22398 - DNA, 20 bp, synthetic construct
  misc_feature 1..20: note = chemically synthesized
  source 1..20: mol_type = other DNA
ctggcctgcctgggaggagc

SEQ ID NO: 22399 - DNA, 20 bp, synthetic construct
  misc_feature 1..20: note = chemically synthesized
  source 1..20: mol_type = other DNA
tggcctgcctgggaggagcc

SEQ ID NO: 22400 - DNA, 20 bp, synthetic construct
  misc_feature 1..20: note = chemically synthesized
  source 1..20: mol_type = other DNA
ctgcctgggaggagccaggt

SEQ ID NO: 22401 - DNA, 20 bp, synthetic construct
  misc_feature 1..20: note = chemically synthesized
  source 1..20: mol_type = other DNA
cctgggaggagccaggtcgg

SEQ ID NO: 22402 - DNA, 20 bp, synthetic construct
  misc_feature 1..20: note = chemically synthesized
  source 1..20: mol_type = other DNA
tggctgctctctccgaatct

SEQ ID NO: 22403 - DNA, 20 bp, synthetic construct
  misc_feature 1..20: note = chemically synthesized
  source 1..20: mol_type = other DNA
tccgaatcttagtcctgctt

SEQ ID NO: 22404 - DNA, 20 bp, synthetic construct
  misc_feature 1..20: note = chemically synthesized
  source 1..20: mol_type = other DNA
ccgaatcttagtcctgcttg

SEQ ID NO: 22405 - DNA, 20 bp, synthetic construct
  misc_feature 1..20: note = chemically synthesized
  source 1..20: mol_type = other DNA
tcttagtcctgcttgaggtc

SEQ ID NO: 22406 - DNA, 20 bp, synthetic construct
  misc_feature 1..20: note = chemically synthesized
  source 1..20: mol_type = other DNA
tagtcctgcttgaggtctag

SEQ ID NO: 22407 - DNA, 20 bp, synthetic construct
  misc_feature 1..20: note = chemically synthesized
  source 1..20: mol_type = other DNA
gcttgaggtctagcagcttc

SEQ ID NO: 22408 - DNA, 20 bp, synthetic construct
  misc_feature 1..20: note = chemically synthesized
  source 1..20: mol_type = other DNA
ttgaggtctagcagcttccg

SEQ ID NO: 22409 - DNA, 20 bp, synthetic construct
  misc_feature 1..20: note = chemically synthesized
  source 1..20: mol_type = other DNA
gcagcttccggagctgcaca

SEQ ID NO: 22410 - DNA, 20 bp, synthetic construct
  misc_feature 1..20: note = chemically synthesized
  source 1..20: mol_type = other DNA
cagcttccggagctgcacat

SEQ ID NO: 22411 - DNA, 20 bp, synthetic construct
  misc_feature 1..20: note = chemically synthesized
  source 1..20: mol_type = other DNA
agcttccggagctgcacatg

SEQ ID NO: 22412 - DNA, 20 bp, synthetic construct
  misc_feature 1..20: note = chemically synthesized
  source 1..20: mol_type = other DNA
cggagctgcacatggggctt

SEQ ID NO: 22413 - DNA, 20 bp, synthetic construct
  misc_feature 1..20: note = chemically synthesized
  source 1..20: mol_type = other DNA
ggagctgcacatggggcttg

SEQ ID NO: 22414 - DNA, 20 bp, synthetic construct
  misc_feature 1..20: note = chemically synthesized
  source 1..20: mol_type = other DNA
tgcacatggggcttgaggtc

SEQ ID NO: 22415 - DNA, 20 bp, synthetic construct
  misc_feature 1..20: note = chemically synthesized
  source 1..20: mol_type = other DNA
ggcttgaggtctggtgctta

SEQ ID NO: 22416 - DNA, 20 bp, synthetic construct
  misc_feature 1..20: note = chemically synthesized
  source 1..20: mol_type = other DNA
gaggtctggtgcttatggat

SEQ ID NO: 22417 - DNA, 20 bp, synthetic construct
  misc_feature 1..20: note = chemically synthesized
  source 1..20: mol_type = other DNA
aggtctggtgcttatggatt

SEQ ID NO: 22418 - DNA, 20 bp, synthetic construct
  misc_feature 1..20: note = chemically synthesized
  source 1..20: mol_type = other DNA
gtctggtgcttatggattag

SEQ ID NO: 22419 - DNA, 20 bp, synthetic construct
  misc_feature 1..20: note = chemically synthesized
  source 1..20: mol_type = other DNA
tctggtgcttatggattagg

SEQ ID NO: 22420 - DNA, 20 bp, synthetic construct
  misc_feature 1..20: note = chemically synthesized
  source 1..20: mol_type = other DNA
ggtgcttatggattaggagg

SEQ ID NO: 22421 - DNA, 20 bp, synthetic construct
  misc_feature 1..20: note = chemically synthesized
  source 1..20: mol_type = other DNA
tgcttatggattaggaggaa

SEQ ID NO: 22422 - DNA, 20 bp, synthetic construct
  misc_feature 1..20: note = chemically synthesized
  source 1..20: mol_type = other DNA
ttatggattaggaggaagag

SEQ ID NO: 22423 - DNA, 20 bp, synthetic construct
  misc_feature 1..20: note = chemically synthesized
  source 1..20: mol_type = other DNA
ggattaggaggaagagaaga

SEQ ID NO: 22424 - DNA, 20 bp, synthetic construct
  misc_feature 1..20: note = chemically synthesized
  source 1..20: mol_type = other DNA
taggaggaagagaagacaga

SEQ ID NO: 22425 - DNA, 20 bp, synthetic construct
  misc_feature 1..20: note = chemically synthesized
  source 1..20: mol_type = other DNA
gaggaagagaagacagatgg

SEQ ID NO: 22426 - DNA, 20 bp, synthetic construct
  misc_feature 1..20: note = chemically synthesized
  source 1..20: mol_type = other DNA
ggaagagaagacagatggca

SEQ ID NO: 22427 - DNA, 20 bp, synthetic construct
  misc_feature 1..20: note = chemically synthesized
  source 1..20: mol_type = other DNA
gaagacagatggcagagtac

SEQ ID NO: 22428 - DNA, 20 bp, synthetic construct
  misc_feature 1..20: note = chemically synthesized
  source 1..20: mol_type = other DNA
aagacagatggcagagtacc

SEQ ID NO: 22429 - DNA, 20 bp, synthetic construct
  misc_feature 1..20: note = chemically synthesized
  source 1..20: mol_type = other DNA
acagatggcagagtaccagg

SEQ ID NO: 22430 - DNA, 20 bp, synthetic construct
  misc_feature 1..20: note = chemically synthesized
  source 1..20: mol_type = other DNA
tggcagagtaccaggcagct

SEQ ID NO: 22431 - DNA, 20 bp, synthetic construct
  misc_feature 1..20: note = chemically synthesized
  source 1..20: mol_type = other DNA
ggcagagtaccaggcagctt

SEQ ID NO: 22432 - DNA, 20 bp, synthetic construct
  misc_feature 1..20: note = chemically synthesized
  source 1..20: mol_type = other DNA
atgtctccttccacatgctg

SEQ ID NO: 22433 - DNA, 20 bp, synthetic construct
  misc_feature 1..20: note = chemically synthesized
  source 1..20: mol_type = other DNA
tccttccacatgctgtggcc

SEQ ID NO: 22434 - DNA, 20 bp, synthetic construct
  misc_feature 1..20: note = chemically synthesized
  source 1..20: mol_type = other DNA
ccttccacatgctgtggccc

SEQ ID NO: 22435 - DNA, 20 bp, synthetic construct
  misc_feature 1..20: note = chemically synthesized
  source 1..20: mol_type = other DNA
gctgtggcccaggtgctgcc

SEQ ID NO: 22436 - DNA, 20 bp, synthetic construct
  misc_feature 1..20: note = chemically synthesized
  source 1..20: mol_type = other DNA
tgtggcccaggtgctgccca

SEQ ID NO: 22437 - DNA, 20 bp, synthetic construct
  misc_feature 1..20: note = chemically synthesized
  source 1..20: mol_type = other DNA
tgctgcccagagctgtttca

SEQ ID NO: 22438 - DNA, 20 bp, synthetic construct
  misc_feature 1..20: note = chemically synthesized
  source 1..20: mol_type = other DNA
tgcccagagctgtttcacag

SEQ ID NO: 22439 - DNA, 20 bp, synthetic construct
  misc_feature 1..20: note = chemically synthesized
  source 1..20: mol_type = other DNA
tcacagcagcctctccactc

SEQ ID NO: 22440 - DNA, 20 bp, synthetic construct
  misc_feature 1..20: note = chemically synthesized
  source 1..20: mol_type = other DNA
cacagcagcctctccactca

SEQ ID NO: 22441 - DNA, 20 bp, synthetic construct
  misc_feature 1..20: note = chemically synthesized
  source 1..20: mol_type = other DNA
cagcctctccactcaaggtt

SEQ ID NO: 22442 - DNA, 20 bp, synthetic construct
  misc_feature 1..20: note = chemically synthesized
  source 1..20: mol_type = other DNA
cctctccactcaaggttgag

SEQ ID NO: 22443 - DNA, 20 bp, synthetic construct
  misc_feature 1..20: note = chemically synthesized
  source 1..20: mol_type = other DNA
caaggttgagcggtttcctt

SEQ ID NO: 22444 - DNA, 20 bp, synthetic construct
  misc_feature 1..20: note = chemically synthesized
  source 1..20: mol_type = other DNA
ttcagtgctgtccacccctt

SEQ ID NO: 22445 - DNA, 20 bp, synthetic construct
  misc_feature 1..20: note = chemically synthesized
  source 1..20: mol_type = other DNA
tgctgtccacccctttggtc

SEQ ID NO: 22446 - DNA, 20 bp, synthetic construct
  misc_feature 1..20: note = chemically synthesized
  source 1..20: mol_type = other DNA
gctgtccacccctttggtcc

SEQ ID NO: 22447 - DNA, 20 bp, synthetic construct
  misc_feature 1..20: note = chemically synthesized
  source 1..20: mol_type = other DNA
ctgtccacccctttggtccg

SEQ ID NO: 22448 - DNA, 20 bp, synthetic construct
  misc_feature 1..20: note = chemically synthesized
  source 1..20: mol_type = other DNA
gtccacccctttggtccggg

SEQ ID NO: 22449 - DNA, 20 bp, synthetic construct
  misc_feature 1..20: note = chemically synthesized
  source 1..20: mol_type = other DNA
tccggggagcttcatgttcc

SEQ ID NO: 22450 - DNA, 20 bp, synthetic construct
  misc_feature 1..20: note = chemically synthesized
  source 1..20: mol_type = other DNA
ccggggagcttcatgttcct

SEQ ID NO: 22451 - DNA, 20 bp, synthetic construct
  misc_feature 1..20: note = chemically synthesized
  source 1..20: mol_type = other DNA
gggcctcactgacacctgca

SEQ ID NO: 22452 - DNA, 20 bp, synthetic construct
  misc_feature 1..20: note = chemically synthesized
  source 1..20: mol_type = other DNA
ggcctcactgacacctgcat

SEQ ID NO: 22453 - DNA, 20 bp, synthetic construct
  misc_feature 1..20: note = chemically synthesized
  source 1..20: mol_type = other DNA
gcctcactgacacctgcatg

SEQ ID NO: 22454 - DNA, 20 bp, synthetic construct
  misc_feature 1..20: note = chemically synthesized
  source 1..20: mol_type = other DNA
cactgacacctgcatggggt

SEQ ID NO: 22455 - DNA, 20 bp, synthetic construct
  misc_feature 1..20: note = chemically synthesized
  source 1..20: mol_type = other DNA
tgacacctgcatggggttgg

SEQ ID NO: 22456 - DNA, 20 bp, synthetic construct
  misc_feature 1..20: note = chemically synthesized
  source 1..20: mol_type = other DNA
gacacctgcatggggttggt

SEQ ID NO: 22457 - DNA, 20 bp, synthetic construct
  misc_feature 1..20: note = chemically synthesized
  source 1..20: mol_type = other DNA
acacctgcatggggttggtg

SEQ ID NO: 22458 - DNA, 20 bp, synthetic construct
  misc_feature 1..20: note = chemically synthesized
  source 1..20: mol_type = other DNA
acctgcatggggttggtggg

SEQ ID NO: 22459 - DNA, 20 bp, synthetic construct
  misc_feature 1..20: note = chemically synthesized
  source 1..20: mol_type = other DNA
cctgcatggggttggtgggg

SEQ ID NO: 22460 - DNA, 20 bp, synthetic construct
  misc_feature 1..20: note = chemically synthesized
  source 1..20: mol_type = other DNA
tggggttggtggggaggtat

SEQ ID NO: 22461 - DNA, 20 bp, synthetic construct
  misc_feature 1..20: note = chemically synthesized
  source 1..20: mol_type = other DNA
ggggttggtggggaggtatg

SEQ ID NO: 22462 - DNA, 20 bp, synthetic construct
  misc_feature 1..20: note = chemically synthesized
  source 1..20: mol_type = other DNA
gggttggtggggaggtatga

SEQ ID NO: 22463 - DNA, 20 bp, synthetic construct
  misc_feature 1..20: note = chemically synthesized
  source 1..20: mol_type = other DNA
ggttggtggggaggtatgag

SEQ ID NO: 22464 - DNA, 20 bp, synthetic construct
  misc_feature 1..20: note = chemically synthesized
  source 1..20: mol_type = other DNA
ggtggggaggtatgaggggt

SEQ ID NO: 22465 - DNA, 20 bp, synthetic construct
  misc_feature 1..20: note = chemically synthesized
  source 1..20: mol_type = other DNA
tggggaggtatgaggggttg

SEQ ID NO: 22466 - DNA, 20 bp, synthetic construct
  misc_feature 1..20: note = chemically synthesized
  source 1..20: mol_type = other DNA
ggggaggtatgaggggttgg

SEQ ID NO: 22467 - DNA, 20 bp, synthetic construct
  misc_feature 1..20: note = chemically synthesized
  source 1..20: mol_type = other DNA
gggaggtatgaggggttgga

SEQ ID NO: 22468 - DNA, 20 bp, synthetic construct
  misc_feature 1..20: note = chemically synthesized
  source 1..20: mol_type = other DNA
ggaggtatgaggggttggag

SEQ ID NO: 22469 - DNA, 20 bp, synthetic construct
  misc_feature 1..20: note = chemically synthesized
  source 1..20: mol_type = other DNA
ggttggaggggtctttttgc

SEQ ID NO: 22470 - DNA, 20 bp, synthetic construct
  misc_feature 1..20: note = chemically synthesized
  source 1..20: mol_type = other DNA
aggggtctttttgctagccc

SEQ ID NO: 22471 - DNA, 20 bp, synthetic construct
  misc_feature 1..20: note = chemically synthesized
  source 1..20: mol_type = other DNA
tttttgctagccctggcccg

SEQ ID NO: 22472 - DNA, 20 bp, synthetic construct
  misc_feature 1..20: note = chemically synthesized
  source 1..20: mol_type = other DNA
cccgtggcaaacactgtctt

SEQ ID NO: 22473 - DNA, 20 bp, synthetic construct
  misc_feature 1..20: note = chemically synthesized
  source 1..20: mol_type = other DNA
tggcaaacactgtcttgaga

SEQ ID NO: 22474 - DNA, 20 bp, synthetic construct
  misc_feature 1..20: note = chemically synthesized
  source 1..20: mol_type = other DNA
caaacactgtcttgagaaag

SEQ ID NO: 22475 - DNA, 20 bp, synthetic construct
  misc_feature 1..20: note = chemically synthesized
  source 1..20: mol_type = other DNA
aaacactgtcttgagaaagt

SEQ ID NO: 22476 - DNA, 20 bp, synthetic construct
  misc_feature 1..20: note = chemically synthesized
  source 1..20: mol_type = other DNA
cttgagaaagtgggacgttg

SEQ ID NO: 22477 - DNA, 20 bp, synthetic construct
  misc_feature 1..20: note = chemically synthesized
  source 1..20: mol_type = other DNA
ttgagaaagtgggacgttga

SEQ ID NO: 22478 - DNA, 20 bp, synthetic construct
  misc_feature 1..20: note = chemically synthesized
  source 1..20: mol_type = other DNA
gagaaagtgggacgttgaag

SEQ ID NO: 22479 - DNA, 20 bp, synthetic construct
  misc_feature 1..20: note = chemically synthesized
  source 1..20: mol_type = other DNA
agtgggacgttgaaggagct

SEQ ID NO: 22480 - DNA, 20 bp, synthetic construct
  misc_feature 1..20: note = chemically synthesized
  source 1..20: mol_type = other DNA
ttgaaggagcttggactcta

SEQ ID NO: 22481 - DNA, 20 bp, synthetic construct
  misc_feature 1..20: note = chemically synthesized
  source 1..20: mol_type = other DNA
aggagcttggactctaaagt

SEQ ID NO: 22482 - DNA, 20 bp, synthetic construct
  misc_feature 1..20: note = chemically synthesized
  source 1..20: mol_type = other DNA
ctctaaagtcagctacacat

SEQ ID NO: 22483 - DNA, 20 bp, synthetic construct
  misc_feature 1..20: note = chemically synthesized
  source 1..20: mol_type = other DNA
acatgagtcttttcacctgc

SEQ ID NO: 22484 - DNA, 20 bp, synthetic construct
  misc_feature 1..20: note = chemically synthesized
  source 1..20: mol_type = other DNA
gagtcttttcacctgctggc

SEQ ID NO: 22485 - DNA, 20 bp, synthetic construct
  misc_feature 1..20: note = chemically synthesized
  source 1..20: mol_type = other DNA
agtcttttcacctgctggct

SEQ ID NO: 22486 - DNA, 20 bp, synthetic construct
  misc_feature 1..20: note = chemically synthesized
  source 1..20: mol_type = other DNA
cttttcacctgctggctagg

SEQ ID NO: 22487 - DNA, 20 bp, synthetic construct
  misc_feature 1..20: note = chemically synthesized
  source 1..20: mol_type = other DNA
acctgctggctaggtggccc

SEQ ID NO: 22488 - DNA, 20 bp, synthetic construct
  misc_feature 1..20: note = chemically synthesized
  source 1..20: mol_type = other DNA
ctggctaggtggccccggac

SEQ ID NO: 22489 - DNA, 20 bp, synthetic construct
  misc_feature 1..20: note = chemically synthesized
  source 1..20: mol_type = other DNA
gtggccccggacaagtcaat

SEQ ID NO: 22490 - DNA, 20 bp, synthetic construct
  misc_feature 1..20: note = chemically synthesized
  source 1..20: mol_type = other DNA
ggacaagtcaatcagcctat

SEQ ID NO: 22491 - DNA, 20 bp, synthetic construct
  misc_feature 1..20: note = chemically synthesized
  source 1..20: mol_type = other DNA
gacaagtcaatcagcctatt

SEQ ID NO: 22492 - DNA, 20 bp, synthetic construct
  misc_feature 1..20: note = chemically synthesized
  source 1..20: mol_type = other DNA
tcaatcagcctattgggcct

SEQ ID NO: 22493 - DNA, 20 bp, synthetic construct
  misc_feature 1..20: note = chemically synthesized
  source 1..20: mol_type = other DNA
caatcagcctattgggcctc

SEQ ID NO: 22494 - DNA, 20 bp, synthetic construct
  misc_feature 1..20: note = chemically synthesized
  source 1..20: mol_type = other DNA
caggctctttatctataaaa

SEQ ID NO: 22495 - DNA, 20 bp, synthetic construct
  misc_feature 1..20: note = chemically synthesized
  source 1..20: mol_type = other DNA
aggctctttatctataaaat

SEQ ID NO: 22496 - DNA, 20 bp, synthetic construct
  misc_feature 1..20: note = chemically synthesized
  source 1..20: mol_type = other DNA
ggctctttatctataaaatg

SEQ ID NO: 22497 - DNA, 20 bp, synthetic construct
  misc_feature 1..20: note = chemically synthesized
  source 1..20: mol_type = other DNA
ctaatttccttttttgcccc

SEQ ID NO: 22498 - DNA, 20 bp, synthetic construct
  misc_feature 1..20: note = chemically synthesized
  source 1..20: mol_type = other DNA
taatttccttttttgcccct

SEQ ID NO: 22499 - DNA, 20 bp, synthetic construct
  misc_feature 1..20: note = chemically synthesized
  source 1..20: mol_type = other DNA
tttccttttttgcccctggg

SEQ ID NO: 22500 - DNA, 20 bp, synthetic construct
  misc_feature 1..20: note = chemically synthesized
  source 1..20: mol_type = other DNA
ccctgggaagaaatatcact

SEQ ID NO: 22501 - DNA, 20 bp, synthetic construct
  misc_feature 1..20: note = chemically synthesized
  source 1..20: mol_type = other DNA
ctgggaagaaatatcactta

SEQ ID NO: 22502 - DNA, 20 bp, synthetic construct
  misc_feature 1..20: note = chemically synthesized
  source 1..20: mol_type = other DNA
tgggaagaaatatcacttag

SEQ ID NO: 22503 - DNA, 20 bp, synthetic construct
  misc_feature 1..20: note = chemically synthesized
  source 1..20: mol_type = other DNA
ggaagaaatatcacttagag

SEQ ID NO: 22504 - DNA, 20 bp, synthetic construct
  misc_feature 1..20: note = chemically synthesized
  source 1..20: mol_type = other DNA
aatatcacttagaggagtta

SEQ ID NO: 22505 - DNA, 20 bp, synthetic construct
  misc_feature 1..20: note = chemically synthesized
  source 1..20: mol_type = other DNA
acagaatgtgcaacctttcc

SEQ ID NO: 22506 - DNA, 20 bp, synthetic construct
  misc_feature 1..20: note = chemically synthesized
  source 1..20: mol_type = other DNA
cagaatgtgcaacctttccc

SEQ ID NO: 22507 - DNA, 20 bp, synthetic construct
  misc_feature 1..20: note = chemically synthesized
  source 1..20: mol_type = other DNA
gaatgtgcaacctttcccag

SEQ ID NO: 22508 - DNA, 20 bp, synthetic construct
  misc_feature 1..20: note = chemically synthesized
  source 1..20: mol_type = other DNA
tcccaggagtattgctcctg

SEQ ID NO: 22509 - DNA, 20 bp, synthetic construct
  misc_feature 1..20: note = chemically synthesized
  source 1..20: mol_type = other DNA
cccaggagtattgctcctga

SEQ ID NO: 22510 - DNA, 20 bp, synthetic construct
  misc_feature 1..20: note = chemically synthesized
  source 1..20: mol_type = other DNA
agtattgctcctgaaggaat

SEQ ID NO: 22511 - DNA, 20 bp, synthetic construct
  misc_feature 1..20: note = chemically synthesized
  source 1..20: mol_type = other DNA
gtattgctcctgaaggaata

SEQ ID NO: 22512 - DNA, 20 bp, synthetic construct
  misc_feature 1..20: note = chemically synthesized
  source 1..20: mol_type = other DNA
cctgaaggaataaggcacga

SEQ ID NO: 22513 - DNA, 20 bp, synthetic construct
  misc_feature 1..20: note = chemically synthesized
  source 1..20: mol_type = other DNA
ctgaaggaataaggcacgat

SEQ ID NO: 22514 - DNA, 20 bp, synthetic construct
  misc_feature 1..20: note = chemically synthesized
  source 1..20: mol_type = other DNA
ggcacgatgggctttgactt

SEQ ID NO: 22515 - DNA, 20 bp, synthetic construct
  misc_feature 1..20: note = chemically synthesized
  source 1..20: mol_type = other DNA
tgggctttgacttcagcctc

SEQ ID NO: 22516 - DNA, 20 bp, synthetic construct
  misc_feature 1..20: note = chemically synthesized
  source 1..20: mol_type = other DNA
gacttcagcctccagcactg

SEQ ID NO: 22517 - DNA, 20 bp, synthetic construct
  misc_feature 1..20: note = chemically synthesized
  source 1..20: mol_type = other DNA
cagcctccagcactgtggcc

SEQ ID NO: 22518 - DNA, 20 bp, synthetic construct
  misc_feature 1..20: note = chemically synthesized
  source 1..20: mol_type = other DNA
cctccagcactgtggcccag

SEQ ID NO: 22519 - DNA, 20 bp, synthetic construct
  misc_feature 1..20: note = chemically synthesized
  source 1..20: mol_type = other DNA
ctccagcactgtggcccaga

SEQ ID NO: 22520 - DNA, 20 bp, synthetic construct
  misc_feature 1..20: note = chemically synthesized
  source 1..20: mol_type = other DNA
tccagcactgtggcccagaa

SEQ ID NO: 22521 - DNA, 20 bp, synthetic construct
  misc_feature 1..20: note = chemically synthesized
  source 1..20: mol_type = other DNA
cactgtggcccagaagggta

SEQ ID NO: 22522 - DNA, 20 bp, synthetic construct
  misc_feature 1..20: note = chemically synthesized
  source 1..20: mol_type = other DNA
gtggcccagaagggtatggc

SEQ ID NO: 22523 - DNA, 20 bp, synthetic construct
  misc_feature 1..20: note = chemically synthesized
  source 1..20: mol_type = other DNA
tggcccagaagggtatggct

SEQ ID NO: 22524 - DNA, 20 bp, synthetic construct
  misc_feature 1..20: note = chemically synthesized
  source 1..20: mol_type = other DNA
cccagaagggtatggctggg

SEQ ID NO: 22525 - DNA, 20 bp, synthetic construct
  misc_feature 1..20: note = chemically synthesized
  source 1..20: mol_type = other DNA
ccagaagggtatggctgggc

SEQ ID NO: 22526 - DNA, 20 bp, synthetic construct
  misc_feature 1..20: note = chemically synthesized
  source 1..20: mol_type = other DNA
cagaagggtatggctgggca

SEQ ID NO: 22527 - DNA, 20 bp, synthetic construct
  misc_feature 1..20: note = chemically synthesized
  source 1..20: mol_type = other DNA
agaagggtatggctgggcag

SEQ ID NO: 22528 - DNA, 20 bp, synthetic construct
  misc_feature 1..20: note = chemically synthesized
  source 1..20: mol_type = other DNA
gcaggggcgtcacacccctg

SEQ ID NO: 22529 - DNA, 20 bp, synthetic construct
  misc_feature 1..20: note = chemically synthesized
  source 1..20: mol_type = other DNA
gtcacacccctgcagctctg

SEQ ID NO: 22530 - DNA, 20 bp, synthetic construct
  misc_feature 1..20: note = chemically synthesized
  source 1..20: mol_type = other DNA
tcacacccctgcagctctgt

SEQ ID NO: 22531 - DNA, 20 bp, synthetic construct
  misc_feature 1..20: note = chemically synthesized
  source 1..20: mol_type = other DNA
acacccctgcagctctgtgg

SEQ ID NO: 22532 - DNA, 20 bp, synthetic construct
  misc_feature 1..20: note = chemically synthesized
  source 1..20: mol_type = other DNA
ctgcagctctgtgggagtga

SEQ ID NO: 22533 - DNA, 20 bp, synthetic construct
  misc_feature 1..20: note = chemically synthesized
  source 1..20: mol_type = other DNA
cagctctgtgggagtgacgg

SEQ ID NO: 22534 - DNA, 20 bp, synthetic construct
  misc_feature 1..20: note = chemically synthesized
  source 1..20: mol_type = other DNA
agctctgtgggagtgacgga

SEQ ID NO: 22535 - DNA, 20 bp, synthetic construct
  misc_feature 1..20: note = chemically synthesized
  source 1..20: mol_type = other DNA
gctctgtgggagtgacggaa

SEQ ID NO: 22536 - DNA, 20 bp, synthetic construct
  misc_feature 1..20: note = chemically synthesized
  source 1..20: mol_type = other DNA
ctatccactcgccttgcaca

SEQ ID NO: 22537 - DNA, 20 bp, synthetic construct
  misc_feature 1..20: note = chemically synthesized
  source 1..20: mol_type = other DNA
acatggctgtcttgctctac

SEQ ID NO: 22538 - DNA, 20 bp, synthetic construct
  misc_feature 1..20: note = chemically synthesized
  source 1..20: mol_type = other DNA
catggctgtcttgctctacc

SEQ ID NO: 22539 - DNA, 20 bp, synthetic construct
  misc_feature 1..20: note = chemically synthesized
  source 1..20: mol_type = other DNA
tgtcttgctctaccaggcct

SEQ ID NO: 22540 - DNA, 20 bp, synthetic construct
  misc_feature 1..20: note = chemically synthesized
  source 1..20: mol_type = other DNA
gtcttgctctaccaggcctt

SEQ ID NO: 22541 - DNA, 20 bp, synthetic construct
  misc_feature 1..20: note = chemically synthesized
  source 1..20: mol_type = other DNA
ctaccaggccttaggttctg

SEQ ID NO: 22542 - DNA, 20 bp, synthetic construct
  misc_feature 1..20: note = chemically synthesized
  source 1..20: mol_type = other DNA
caggccttaggttctgtggc

SEQ ID NO: 22543 - DNA, 20 bp, synthetic construct
  misc_feature 1..20: note = chemically synthesized
  source 1..20: mol_type = other DNA
tgtggccagatactgttctc

SEQ ID NO: 22544 - DNA, 20 bp, synthetic construct
  misc_feature 1..20: note = chemically synthesized
  source 1..20: mol_type = other DNA
gatactgttctccagctctt

SEQ ID NO: 22545 - DNA, 20 bp, synthetic construct
  misc_feature 1..20: note = chemically synthesized
  source 1..20: mol_type = other DNA
tgttctccagctctttggct

SEQ ID NO: 22546 - DNA, 20 bp, synthetic construct
  misc_feature 1..20: note = chemically synthesized
  source 1..20: mol_type = other DNA
gttctccagctctttggctt

SEQ ID NO: 22547 - DNA, 20 bp, synthetic construct
  misc_feature 1..20: note = chemically synthesized
  source 1..20: mol_type = other DNA
agctctttggcttgggcccc

SEQ ID NO: 22548 - DNA, 20 bp, synthetic construct
  misc_feature 1..20: note = chemically synthesized
  source 1..20: mol_type = other DNA
tttggcttgggccccgagac

SEQ ID NO: 22549 - DNA, 20 bp, synthetic construct
  misc_feature 1..20: note = chemically synthesized
  source 1..20: mol_type = other DNA
tggcttgggccccgagacca

SEQ ID NO: 22550 - DNA, 20 bp, synthetic construct
  misc_feature 1..20: note = chemically synthesized
  source 1..20: mol_type = other DNA
cttgggccccgagaccagag

SEQ ID NO: 22551 - DNA, 20 bp, synthetic construct
  misc_feature 1..20: note = chemically synthesized
  source 1..20: mol_type = other DNA
cccgagaccagagaagataa

SEQ ID NO: 22552 - DNA, 20 bp, synthetic construct
  misc_feature 1..20: note = chemically synthesized
  source 1..20: mol_type = other DNA
gagaccagagaagataatgg

SEQ ID NO: 22553 - DNA, 20 bp, synthetic construct
  misc_feature 1..20: note = chemically synthesized
  source 1..20: mol_type = other DNA
cagagaagataatggcagcc

SEQ ID NO: 22554 - DNA, 20 bp, synthetic construct
  misc_feature 1..20: note = chemically synthesized
  source 1..20: mol_type = other DNA
cagcccagaaacctgaatac

SEQ ID NO: 22555 - DNA, 20 bp, synthetic construct
  misc_feature 1..20: note = chemically synthesized
  source 1..20: mol_type = other DNA
agcccagaaacctgaatact

SEQ ID NO: 22556 - DNA, 20 bp, synthetic construct
  misc_feature 1..20: note = chemically synthesized
  source 1..20: mol_type = other DNA
gcccagaaacctgaatactg

SEQ ID NO: 22557 - DNA, 20 bp, synthetic construct
  misc_feature 1..20: note = chemically synthesized
  source 1..20: mol_type = other DNA
gaatactggggaacacattg

SEQ ID NO: 22558 - DNA, 20 bp, synthetic construct
  misc_feature 1..20: note = chemically synthesized
  source 1..20: mol_type = other DNA
aatactggggaacacattgt

SEQ ID NO: 22559 - DNA, 20 bp, synthetic construct
  misc_feature 1..20: note = chemically synthesized
  source 1..20: mol_type = other DNA
atactggggaacacattgta

SEQ ID NO: 22560 - DNA, 20 bp, synthetic construct
  misc_feature 1..20: note = chemically synthesized
  source 1..20: mol_type = other DNA
cacattgtagggtgatctcc

SEQ ID NO: 22561 - DNA, 20 bp, synthetic construct
  misc_feature 1..20: note = chemically synthesized
  source 1..20: mol_type = other DNA
tgtagggtgatctcccagaa

SEQ ID NO: 22562 - DNA, 20 bp, synthetic construct
  misc_feature 1..20: note = chemically synthesized
  source 1..20: mol_type = other DNA
gggtgatctcccagaaaagc

SEQ ID NO: 22563 - DNA, 20 bp, synthetic construct
  misc_feature 1..20: note = chemically synthesized
  source 1..20: mol_type = other DNA
gatctcccagaaaagccagc

SEQ ID NO: 22564 - DNA, 20 bp, synthetic construct
  misc_feature 1..20: note = chemically synthesized
  source 1..20: mol_type = other DNA
ccagaaaagccagcgagaaa

SEQ ID NO: 22565 - DNA, 20 bp, synthetic construct
  misc_feature 1..20: note = chemically synthesized
  source 1..20: mol_type = other DNA
agccagcgagaaatggactg

SEQ ID NO: 22566 - DNA, 20 bp, synthetic construct
  misc_feature 1..20: note = chemically synthesized
  source 1..20: mol_type = other DNA
cgagaaatggactgtagctg

SEQ ID NO: 22567 - DNA, 20 bp, synthetic construct
  misc_feature 1..20: note = chemically synthesized
  source 1..20: mol_type = other DNA
agctgtagcattcttccctt

SEQ ID NO: 22568 - DNA, 20 bp, synthetic construct
  misc_feature 1..20: note = chemically synthesized
  source 1..20: mol_type = other DNA
cttccctttggatgcctgtg

SEQ ID NO: 22569 - DNA, 20 bp, synthetic construct
  misc_feature 1..20: note = chemically synthesized
  source 1..20: mol_type = other DNA
ttccctttggatgcctgtgt

SEQ ID NO: 22570 - DNA, 20 bp, synthetic construct
  misc_feature 1..20: note = chemically synthesized
  source 1..20: mol_type = other DNA
tccctttggatgcctgtgtg

SEQ ID NO: 22571 - DNA, 20 bp, synthetic construct
  misc_feature 1..20: note = chemically synthesized
  source 1..20: mol_type = other DNA
tttggatgcctgtgtgggga

SEQ ID NO: 22572 - DNA, 20 bp, synthetic construct
  misc_feature 1..20: note = chemically synthesized
  source 1..20: mol_type = other DNA
tgcctgtgtggggacagaat

SEQ ID NO: 22573 - DNA, 20 bp, synthetic construct
  misc_feature 1..20: note = chemically synthesized
  source 1..20: mol_type = other DNA
ctgtgtggggacagaatcag

SEQ ID NO: 22574 - DNA, 20 bp, synthetic construct
  misc_feature 1..20: note = chemically synthesized
  source 1..20: mol_type = other DNA
tggggacagaatcagtggaa

SEQ ID NO: 22575 - DNA, 20 bp, synthetic construct
  misc_feature 1..20: note = chemically synthesized
  source 1..20: mol_type = other DNA
aatcagtggaatggaaaatg

SEQ ID NO: 22576 - DNA, 20 bp, synthetic construct
  misc_feature 1..20: note = chemically synthesized
  source 1..20: mol_type = other DNA
cagtggaatggaaaatgaag

SEQ ID NO: 22577 - DNA, 20 bp, synthetic construct
  misc_feature 1..20: note = chemically synthesized
  source 1..20: mol_type = other DNA
ggaaaatgaagaagaaacac

SEQ ID NO: 22578 - DNA, 20 bp, synthetic construct
  misc_feature 1..20: note = chemically synthesized
  source 1..20: mol_type = other DNA
ccacctgcttcctgttctat

SEQ ID NO: 22579 - DNA, 20 bp, synthetic construct
  misc_feature 1..20: note = chemically synthesized
  source 1..20: mol_type = other DNA
cctgttctattagacaaacg

SEQ ID NO: 22580 - DNA, 20 bp, synthetic construct
  misc_feature 1..20: note = chemically synthesized
  source 1..20: mol_type = other DNA
tattagacaaacgtagtttc

SEQ ID NO: 22581 - DNA, 20 bp, synthetic construct
  misc_feature 1..20: note = chemically synthesized
  source 1..20: mol_type = other DNA
gacaaacgtagtttctggat

SEQ ID NO: 22582 - DNA, 20 bp, synthetic construct
  misc_feature 1..20: note = chemically synthesized
  source 1..20: mol_type = other DNA
aacgtagtttctggatgagt

SEQ ID NO: 22583 - DNA, 20 bp, synthetic construct
  misc_feature 1..20: note = chemically synthesized
  source 1..20: mol_type = other DNA
tagtttctggatgagttgga

SEQ ID NO: 22584 - DNA, 20 bp, synthetic construct
  misc_feature 1..20: note = chemically synthesized
  source 1..20: mol_type = other DNA
gatgagttggacagtcatct

SEQ ID NO: 22585 - DNA, 20 bp, synthetic construct
  misc_feature 1..20: note = chemically synthesized
  source 1..20: mol_type = other DNA
acagtcatctgagtttgatc

SEQ ID NO: 22586 - DNA, 20 bp, synthetic construct
  misc_feature 1..20: note = chemically synthesized
  source 1..20: mol_type = other DNA
ctgagtttgatcaagattta

SEQ ID NO: 22587 - DNA, 20 bp, synthetic construct
  misc_feature 1..20: note = chemically synthesized
  source 1..20: mol_type = other DNA
tgagtttgatcaagatttac

SEQ ID NO: 22588 - DNA, 20 bp, synthetic construct
  misc_feature 1..20: note = chemically synthesized
  source 1..20: mol_type = other DNA
ggtaattcaaatgtatgtat

SEQ ID NO: 22589 - DNA, 20 bp, synthetic construct
  misc_feature 1..20: note = chemically synthesized
  source 1..20: mol_type = other DNA
gtaattcaaatgtatgtata

SEQ ID NO: 22590 - DNA, 20 bp, synthetic construct
  misc_feature 1..20: note = chemically synthesized
  source 1..20: mol_type = other DNA
tgtataaggtacatacatat

SEQ ID NO: 22591 - DNA, 20 bp, synthetic construct
  misc_feature 1..20: note = chemically synthesized
  source 1..20: mol_type = other DNA
atacatattagtacatccat

SEQ ID NO: 22592 - DNA, 20 bp, synthetic construct
  misc_feature 1..20: note = chemically synthesized
  source 1..20: mol_type = other DNA
acatattagtacatccatca

SEQ ID NO: 22593 - DNA, 20 bp, synthetic construct
  misc_feature 1..20: note = chemically synthesized
  source 1..20: mol_type = other DNA
atattagtacatccatcaga

SEQ ID NO: 22594 - DNA, 20 bp, synthetic construct
  misc_feature 1..20: note = chemically synthesized
  source 1..20: mol_type = other DNA
tattagtacatccatcagag

SEQ ID NO: 22595 - DNA, 20 bp, synthetic construct
  misc_feature 1..20: note = chemically synthesized
  source 1..20: mol_type = other DNA
tccatcagagaggcttcctt

SEQ ID NO: 22596 - DNA, 20 bp, synthetic construct
  misc_feature 1..20: note = chemically synthesized
  source 1..20: mol_type = other DNA
gagaggcttccttaagccac

SEQ ID NO: 22597 - DNA, 20 bp, synthetic construct
  misc_feature 1..20: note = chemically synthesized
  source 1..20: mol_type = other DNA
ttccttaagccacaagtctc

SEQ ID NO: 22598 - DNA, 20 bp, synthetic construct
  misc_feature 1..20: note = chemically synthesized
  source 1..20: mol_type = other DNA
gccacaagtctctagctcct

SEQ ID NO: 22599 - DNA, 20 bp, synthetic construct
  misc_feature 1..20: note = chemically synthesized
  source 1..20: mol_type = other DNA
cacaagtctctagctcctca

SEQ ID NO: 22600 - DNA, 20 bp, synthetic construct
  misc_feature 1..20: note = chemically synthesized
  source 1..20: mol_type = other DNA
tctctagctcctcagagaac

SEQ ID NO: 22601 - DNA, 20 bp, synthetic construct
  misc_feature 1..20: note = chemically synthesized
  source 1..20: mol_type = other DNA
ctagctcctcagagaactgg

SEQ ID NO: 22602 - DNA, 20 bp, synthetic construct
  misc_feature 1..20: note = chemically synthesized
  source 1..20: mol_type = other DNA
tcctcagagaactggcagtc

SEQ ID NO: 22603 - DNA, 20 bp, synthetic construct
  misc_feature 1..20: note = chemically synthesized
  source 1..20: mol_type = other DNA
cagagaactggcagtctggc

SEQ ID NO: 22604 - DNA, 20 bp, synthetic construct
  misc_feature 1..20: note = chemically synthesized
  source 1..20: mol_type = other DNA
agagaactggcagtctggct

SEQ ID NO: 22605 - DNA, 20 bp, synthetic construct
  misc_feature 1..20: note = chemically synthesized
  source 1..20: mol_type = other DNA
tggctgggtctgtacgaact

SEQ ID NO: 22606 - DNA, 20 bp, synthetic construct
  misc_feature 1..20: note = chemically synthesized
  source 1..20: mol_type = other DNA
tctgtacgaacttggaccta

SEQ ID NO: 22607 - DNA, 20 bp, synthetic construct
  misc_feature 1..20: note = chemically synthesized
  source 1..20: mol_type = other DNA
ggacctatagatgacctcac

SEQ ID NO: 22608 - DNA, 20 bp, synthetic construct
  misc_feature 1..20: note = chemically synthesized
  source 1..20: mol_type = other DNA
tctctttactgatcttatgt

SEQ ID NO: 22609 - DNA, 20 bp, synthetic construct
  misc_feature 1..20: note = chemically synthesized
  source 1..20: mol_type = other DNA
ctttactgatcttatgtgag

SEQ ID NO: 22610 - DNA, 20 bp, synthetic construct
  misc_feature 1..20: note = chemically synthesized
  source 1..20: mol_type = other DNA
tttactgatcttatgtgagt

SEQ ID NO: 22611 - DNA, 20 bp, synthetic construct
  misc_feature 1..20: note = chemically synthesized
  source 1..20: mol_type = other DNA
actgatcttatgtgagtagg

SEQ ID NO: 22612 - DNA, 20 bp, synthetic construct
  misc_feature 1..20: note = chemically synthesized
  source 1..20: mol_type = other DNA
tgatcttatgtgagtaggta

SEQ ID NO: 22613 - DNA, 20 bp, synthetic construct
  misc_feature 1..20: note = chemically synthesized
  source 1..20: mol_type = other DNA
gatcttatgtgagtaggtag

SEQ ID NO: 22614 - DNA, 20 bp, synthetic construct
  misc_feature 1..20: note = chemically synthesized
  source 1..20: mol_type = other DNA
atcttatgtgagtaggtaga

SEQ ID NO: 22615 - DNA, 20 bp, synthetic construct
  misc_feature 1..20: note = chemically synthesized
  source 1..20: mol_type = other DNA
tcttatgtgagtaggtagag

SEQ ID NO: 22616 - DNA, 20 bp, synthetic construct
  misc_feature 1..20: note = chemically synthesized
  source 1..20: mol_type = other DNA
atgtgagtaggtagaggggt

SEQ ID NO: 22617 - DNA, 20 bp, synthetic construct
  misc_feature 1..20: note = chemically synthesized
  source 1..20: mol_type = other DNA
ggggtcagatcacctctgct

SEQ ID NO: 22618 - DNA, 20 bp, synthetic construct
  misc_feature 1..20: note = chemically synthesized
  source 1..20: mol_type = other DNA
cacctctgctcagctctgcc

SEQ ID NO: 22619 - DNA, 20 bp, synthetic construct
  misc_feature 1..20: note = chemically synthesized
  source 1..20: mol_type = other DNA
tcagctctgcccagcacact

SEQ ID NO: 22620 - DNA, 20 bp, synthetic construct
  misc_feature 1..20: note = chemically synthesized
  source 1..20: mol_type = other DNA
taaaatttgaaaaacaaatg

SEQ ID NO: 22621 - DNA, 20 bp, synthetic construct
  misc_feature 1..20: note = chemically synthesized
  source 1..20: mol_type = other DNA
aaaatttgaaaaacaaatgc

SEQ ID NO: 22622 - DNA, 20 bp, synthetic construct
  misc_feature 1..20: note = chemically synthesized
  source 1..20: mol_type = other DNA
tgaaaaacaaatgcaggtgc

SEQ ID NO: 22623 - DNA, 20 bp, synthetic construct
  misc_feature 1..20: note = chemically synthesized
  source 1..20: mol_type = other DNA
aaaaacaaatgcaggtgcca

SEQ ID NO: 22624 - DNA, 20 bp, synthetic construct
  misc_feature 1..20: note = chemically synthesized
  source 1..20: mol_type = other DNA
aaaacaaatgcaggtgccag

SEQ ID NO: 22625 - DNA, 20 bp, synthetic construct
  misc_feature 1..20: note = chemically synthesized
  source 1..20: mol_type = other DNA
acaaatgcaggtgccagagg

SEQ ID NO: 22626 - DNA, 20 bp, synthetic construct
  misc_feature 1..20: note = chemically synthesized
  source 1..20: mol_type = other DNA
tggctaaataatgaatgtcc

SEQ ID NO: 22627 - DNA, 20 bp, synthetic construct
  misc_feature 1..20: note = chemically synthesized
  source 1..20: mol_type = other DNA
ggctaaataatgaatgtccc

SEQ ID NO: 22628 - DNA, 20 bp, synthetic construct
  misc_feature 1..20: note = chemically synthesized
  source 1..20: mol_type = other DNA
tgaatgtcccaggccaattc

SEQ ID NO: 22629 - DNA, 20 bp, synthetic construct
  misc_feature 1..20: note = chemically synthesized
  source 1..20: mol_type = other DNA
gaatgtcccaggccaattct

SEQ ID NO: 22630 - DNA, 20 bp, synthetic construct
  misc_feature 1..20: note = chemically synthesized
  source 1..20: mol_type = other DNA
tgtcccaggccaattctagg

SEQ ID NO: 22631 - DNA, 20 bp, synthetic construct
  misc_feature 1..20: note = chemically synthesized
  source 1..20: mol_type = other DNA
gtcccaggccaattctagga

SEQ ID NO: 22632 - DNA, 20 bp, synthetic construct
  misc_feature 1..20: note = chemically synthesized
  source 1..20: mol_type = other DNA
tcccaggccaattctaggaa

SEQ ID NO: 22633 - DNA, 20 bp, synthetic construct
  misc_feature 1..20: note = chemically synthesized
  source 1..20: mol_type = other DNA
caggccaattctaggaaggg

SEQ ID NO: 22634 - DNA, 20 bp, synthetic construct
  misc_feature 1..20: note = chemically synthesized
  source 1..20: mol_type = other DNA
gccaattctaggaagggaag

SEQ ID NO: 22635 - DNA, 20 bp, synthetic construct
  misc_feature 1..20: note = chemically synthesized
  source 1..20: mol_type = other DNA
ccaattctaggaagggaagt

SEQ ID NO: 22636 - DNA, 20 bp, synthetic construct
  misc_feature 1..20: note = chemically synthesized
  source 1..20: mol_type = other DNA
tctaggaagggaagtgggta

SEQ ID NO: 22637 - DNA, 20 bp, synthetic construct
  misc_feature 1..20: note = chemically synthesized
  source 1..20: mol_type = other DNA
ctaggaagggaagtgggtat

SEQ ID NO: 22638 - DNA, 20 bp, synthetic construct
  misc_feature 1..20: note = chemically synthesized
  source 1..20: mol_type = other DNA
taggaagggaagtgggtatg

SEQ ID NO: 22639 - DNA, 20 bp, synthetic construct
  misc_feature 1..20: note = chemically synthesized
  source 1..20: mol_type = other DNA
gaagggaagtgggtatgggg

SEQ ID NO: 22640 - DNA, 20 bp, synthetic construct
  misc_feature 1..20: note = chemically synthesized
  source 1..20: mol_type = other DNA
ggggcagcccattgccttcc

SEQ ID NO: 22641 - DNA, 20 bp, synthetic construct
  misc_feature 1..20: note = chemically synthesized
  source 1..20: mol_type = other DNA
gcccattgccttcctggtac

SEQ ID NO: 22642 - DNA, 20 bp, synthetic construct
  misc_feature 1..20: note = chemically synthesized
  source 1..20: mol_type = other DNA
cccattgccttcctggtacc

SEQ ID NO: 22643 - DNA, 20 bp, synthetic construct
  misc_feature 1..20: note = chemically synthesized
  source 1..20: mol_type = other DNA
taccaggatgatgcaatgct

SEQ ID NO: 22644 - DNA, 20 bp, synthetic construct
  misc_feature 1..20: note = chemically synthesized
  source 1..20: mol_type = other DNA
ccaggatgatgcaatgcttg

SEQ ID NO: 22645 - DNA, 20 bp, synthetic construct
  misc_feature 1..20: note = chemically synthesized
  source 1..20: mol_type = other DNA
caggatgatgcaatgcttgg

SEQ ID NO: 22646 - DNA, 20 bp, synthetic construct
  misc_feature 1..20: note = chemically synthesized
  source 1..20: mol_type = other DNA
atgcaatgcttggaggctgt

SEQ ID NO: 22647 - DNA, 20 bp, synthetic construct
  misc_feature 1..20: note = chemically synthesized
  source 1..20: mol_type = other DNA
ctgtgagctccccaccttct

SEQ ID NO: 22648 - DNA, 20 bp, synthetic construct
  misc_feature 1..20: note = chemically synthesized
  source 1..20: mol_type = other DNA
tgtgagctccccaccttctc

SEQ ID NO: 22649 - DNA, 20 bp, synthetic construct
  misc_feature 1..20: note = chemically synthesized
  source 1..20: mol_type = other DNA
gtgagctccccaccttctca

SEQ ID NO: 22650 - DNA, 20 bp, synthetic construct
  misc_feature 1..20: note = chemically synthesized
  source 1..20: mol_type = other DNA
gggcacaccctgtgatcttg

SEQ ID NO: 22651 - DNA, 20 bp, synthetic construct
  misc_feature 1..20: note = chemically synthesized
  source 1..20: mol_type = other DNA
ggcacaccctgtgatcttgt

SEQ ID NO: 22652 - DNA, 20 bp, synthetic construct
  misc_feature 1..20: note = chemically synthesized
  source 1..20: mol_type = other DNA
tcttgtgggacccctctgtc

SEQ ID NO: 22653 - DNA, 20 bp, synthetic construct
  misc_feature 1..20: note = chemically synthesized
  source 1..20: mol_type = other DNA
tgggacccctctgtccagcc

SEQ ID NO: 22654 - DNA, 20 bp, synthetic construct
  misc_feature 1..20: note = chemically synthesized
  source 1..20: mol_type = other DNA
cccctctgtccagcccagcc

SEQ ID NO: 22655 - DNA, 20 bp, synthetic construct
  misc_feature 1..20: note = chemically synthesized
  source 1..20: mol_type = other DNA
ccctctgtccagcccagcct

SEQ ID NO: 22656 - DNA, 20 bp, synthetic construct
  misc_feature 1..20: note = chemically synthesized
  source 1..20: mol_type = other DNA
gggtgtgcatcttgtgtgct

SEQ ID NO: 22657 - DNA, 20 bp, synthetic construct
  misc_feature 1..20: note = chemically synthesized
  source 1..20: mol_type = other DNA
gtgcatcttgtgtgcttggt

SEQ ID NO: 22658 - DNA, 20 bp, synthetic construct
  misc_feature 1..20: note = chemically synthesized
  source 1..20: mol_type = other DNA
gtgtgcttggtcggcactga

SEQ ID NO: 22659 - DNA, 20 bp, synthetic construct
  misc_feature 1..20: note = chemically synthesized
  source 1..20: mol_type = other DNA
tgtgcttggtcggcactgat

SEQ ID NO: 22660 - DNA, 20 bp, synthetic construct
  misc_feature 1..20: note = chemically synthesized
  source 1..20: mol_type = other DNA
gtgcttggtcggcactgata

SEQ ID NO: 22661 - DNA, 20 bp, synthetic construct
  misc_feature 1..20: note = chemically synthesized
  source 1..20: mol_type = other DNA
tgcttggtcggcactgatag

SEQ ID NO: 22662 - DNA, 20 bp, synthetic construct
  misc_feature 1..20: note = chemically synthesized
  source 1..20: mol_type = other DNA
gtcggcactgataggggtcg

SEQ ID NO: 22663 - DNA, 20 bp, synthetic construct
  misc_feature 1..20: note = chemically synthesized
  source 1..20: mol_type = other DNA
ggcactgataggggtcgcgg

SEQ ID NO: 22664 - DNA, 20 bp, synthetic construct
  misc_feature 1..20: note = chemically synthesized
  source 1..20: mol_type = other DNA
gcactgataggggtcgcggt

SEQ ID NO: 22665 - DNA, 20 bp, synthetic construct
  misc_feature 1..20: note = chemically synthesized
  source 1..20: mol_type = other DNA
cactgataggggtcgcggta

SEQ ID NO: 22666 - DNA, 20 bp, synthetic construct
  misc_feature 1..20: note = chemically synthesized
  source 1..20: mol_type = other DNA
ctgataggggtcgcggtagg

SEQ ID NO: 22667 - DNA, 20 bp, synthetic construct
  misc_feature 1..20: note = chemically synthesized
  source 1..20: mol_type = other DNA
gggtcgcggtagggagttgt

SEQ ID NO: 22668 - DNA, 20 bp, synthetic construct
  misc_feature 1..20: note = chemically synthesized
  source 1..20: mol_type = other DNA
cacactgctgcatgtcctgt

SEQ ID NO: 22669 - DNA, 20 bp, synthetic construct
  misc_feature 1..20: note = chemically synthesized
  source 1..20: mol_type = other DNA
actgctgcatgtcctgtgag

SEQ ID NO: 22670 - DNA, 20 bp, synthetic construct
  misc_feature 1..20: note = chemically synthesized
  source 1..20: mol_type = other DNA
atgtcctgtgagcggtcccc

SEQ ID NO: 22671 - DNA, 20 bp, synthetic construct
  misc_feature 1..20: note = chemically synthesized
  source 1..20: mol_type = other DNA
tgtcctgtgagcggtcccca

SEQ ID NO: 22672 - DNA, 20 bp, synthetic construct
  misc_feature 1..20: note = chemically synthesized
  source 1..20: mol_type = other DNA
gcggtccccaaggctgtgcc

SEQ ID NO: 22673 - DNA, 20 bp, synthetic construct
  misc_feature 1..20: note = chemically synthesized
  source 1..20: mol_type = other DNA
ccaaggctgtgcccagcctt

SEQ ID NO: 22674 - DNA, 20 bp, synthetic construct
  misc_feature 1..20: note = chemically synthesized
  source 1..20: mol_type = other DNA
tgtgcccagccttcagtgtc

SEQ ID NO: 22675 - DNA, 20 bp, synthetic construct
  misc_feature 1..20: note = chemically synthesized
  source 1..20: mol_type = other DNA
gtgcccagccttcagtgtcc

SEQ ID NO: 22676 - DNA, 20 bp, synthetic construct
  misc_feature 1..20: note = chemically synthesized
  source 1..20: mol_type = other DNA
tgcccagccttcagtgtcca

SEQ ID NO: 22677 - DNA, 20 bp, synthetic construct
  misc_feature 1..20: note = chemically synthesized
  source 1..20: mol_type = other DNA
gtgtccagggcctcttctga

SEQ ID NO: 22678 - DNA, 20 bp, synthetic construct
  misc_feature 1..20: note = chemically synthesized
  source 1..20: mol_type = other DNA
tgtccagggcctcttctgac

SEQ ID NO: 22679 - DNA, 20 bp, synthetic construct
  misc_feature 1..20: note = chemically synthesized
  source 1..20: mol_type = other DNA
cctcttctgacaggccctgc

SEQ ID NO: 22680 - DNA, 20 bp, synthetic construct
  misc_feature 1..20: note = chemically synthesized
  source 1..20: mol_type = other DNA
gccctgctggttatcactgt

SEQ ID NO: 22681 - DNA, 20 bp, synthetic construct
  misc_feature 1..20: note = chemically synthesized
  source 1..20: mol_type = other DNA
ccacgcaccacttctgtgcc

SEQ ID NO: 22682 - DNA, 20 bp, synthetic construct
  misc_feature 1..20: note = chemically synthesized
  source 1..20: mol_type = other DNA
cacgcaccacttctgtgccc

SEQ ID NO: 22683 - DNA, 20 bp, synthetic construct
  misc_feature 1..20: note = chemically synthesized
  source 1..20: mol_type = other DNA
acgcaccacttctgtgccca

SEQ ID NO: 22684 - DNA, 20 bp, synthetic construct
  misc_feature 1..20: note = chemically synthesized
  source 1..20: mol_type = other DNA
acttctgtgcccagggctgc

SEQ ID NO: 22685 - DNA, 20 bp, synthetic construct
  misc_feature 1..20: note = chemically synthesized
  source 1..20: mol_type = other DNA
cttctgtgcccagggctgct

SEQ ID NO: 22686 - DNA, 20 bp, synthetic construct
  misc_feature 1..20: note = chemically synthesized
  source 1..20: mol_type = other DNA
cagggctgctgggtcacctt

SEQ ID NO: 22687 - DNA, 20 bp, synthetic construct
  misc_feature 1..20: note = chemically synthesized
  source 1..20: mol_type = other DNA
agggctgctgggtcacctta

SEQ ID NO: 22688 - DNA, 20 bp, synthetic construct
  misc_feature 1..20: note = chemically synthesized
  source 1..20: mol_type = other DNA
ggctgctgggtcaccttaag

SEQ ID NO: 22689 - DNA, 20 bp, synthetic construct
  misc_feature 1..20: note = chemically synthesized
  source 1..20: mol_type = other DNA
gagccacacacccgtctaca

SEQ ID NO: 22690 - DNA, 20 bp, synthetic construct
  misc_feature 1..20: note = chemically synthesized
  source 1..20: mol_type = other DNA
gccacacacccgtctacata

SEQ ID NO: 22691 - DNA, 20 bp, synthetic construct
  misc_feature 1..20: note = chemically synthesized
  source 1..20: mol_type = other DNA
ccacacacccgtctacatag

SEQ ID NO: 22692 - DNA, 20 bp, synthetic construct
  misc_feature 1..20: note = chemically synthesized
  source 1..20: mol_type = other DNA
acatagaggcccttcctgct

SEQ ID NO: 22693 - DNA, 20 bp, synthetic construct
  misc_feature 1..20: note = chemically synthesized
  source 1..20: mol_type = other DNA
catagaggcccttcctgctt

SEQ ID NO: 22694 - DNA, 20 bp, synthetic construct
  misc_feature 1..20: note = chemically synthesized
  source 1..20: mol_type = other DNA
atagaggcccttcctgcttg

SEQ ID NO: 22695 - DNA, 20 bp, synthetic construct
  misc_feature 1..20: note = chemically synthesized
  source 1..20: mol_type = other DNA
ttcctgcttggggtctgacc

SEQ ID NO: 22696 - DNA, 20 bp, synthetic construct
  misc_feature 1..20: note = chemically synthesized
  source 1..20: mol_type = other DNA
cctccacacctccattctcc

SEQ ID NO: 22697 - DNA, 20 bp, synthetic construct
  misc_feature 1..20: note = chemically synthesized
  source 1..20: mol_type = other DNA
cccagacttttgactcaccc

SEQ ID NO: 22698 - DNA, 20 bp, synthetic construct
  misc_feature 1..20: note = chemically synthesized
  source 1..20: mol_type = other DNA
tgactcaccccagccctgct

SEQ ID NO: 22699 - DNA, 20 bp, synthetic construct
  misc_feature 1..20: note = chemically synthesized
  source 1..20: mol_type = other DNA
actcaccccagccctgctaa

SEQ ID NO: 22700 - DNA, 20 bp, synthetic construct
  misc_feature 1..20: note = chemically synthesized
  source 1..20: mol_type = other DNA
aagagtgatgtcctccccca

SEQ ID NO: 22701 - DNA, 20 bp, synthetic construct
  misc_feature 1..20: note = chemically synthesized
  source 1..20: mol_type = other DNA
gagtgatgtcctcccccaaa

SEQ ID NO: 22702 - DNA, 20 bp, synthetic construct
  misc_feature 1..20: note = chemically synthesized
  source 1..20: mol_type = other DNA
tgatgtcctcccccaaagag

SEQ ID NO: 22703 - DNA, 20 bp, synthetic construct
  misc_feature 1..20: note = chemically synthesized
  source 1..20: mol_type = other DNA
aagagaagacccctgctctt

SEQ ID NO: 22704 - DNA, 20 bp, synthetic construct
  misc_feature 1..20: note = chemically synthesized
  source 1..20: mol_type = other DNA
agagaagacccctgctcttg

SEQ ID NO: 22705 - DNA, 20 bp, synthetic construct
  misc_feature 1..20: note = chemically synthesized
  source 1..20: mol_type = other DNA
gagaagacccctgctcttga

SEQ ID NO: 22706 - DNA, 20 bp, synthetic construct
  misc_feature 1..20: note = chemically synthesized
  source 1..20: mol_type = other DNA
ccctgctcttgagggtctgc

SEQ ID NO: 22707 - DNA, 20 bp, synthetic construct
  misc_feature 1..20: note = chemically synthesized
  source 1..20: mol_type = other DNA
cctgctcttgagggtctgcc

SEQ ID NO: 22708 - DNA, 20 bp, synthetic construct
  misc_feature 1..20: note = chemically synthesized
  source 1..20: mol_type = other DNA
gctcttgagggtctgccagg

SEQ ID NO: 22709 - DNA, 20 bp, synthetic construct
  misc_feature 1..20: note = chemically synthesized
  source 1..20: mol_type = other DNA
ctcttgagggtctgccaggt

SEQ ID NO: 22710 - DNA, 20 bp, synthetic construct
  misc_feature 1..20: note = chemically synthesized
  source 1..20: mol_type = other DNA
ccctcatctccccacctcca

SEQ ID NO: 22711 - DNA, 20 bp, synthetic construct
  misc_feature 1..20: note = chemically synthesized
  source 1..20: mol_type = other DNA
cctcatctccccacctccat

SEQ ID NO: 22712 - DNA, 20 bp, synthetic construct
  misc_feature 1..20: note = chemically synthesized
  source 1..20: mol_type = other DNA
ccccacctccatgggcctct

SEQ ID NO: 22713 - DNA, 20 bp, synthetic construct
  misc_feature 1..20: note = chemically synthesized
  source 1..20: mol_type = other DNA
ggcctcttggattttgtgca

SEQ ID NO: 22714 - DNA, 20 bp, synthetic construct
  misc_feature 1..20: note = chemically synthesized
  source 1..20: mol_type = other DNA
ctgcaacaccctgaccttta

SEQ ID NO: 22715 - DNA, 20 bp, synthetic construct
  misc_feature 1..20: note = chemically synthesized
  source 1..20: mol_type = other DNA
tgcaacaccctgacctttat

SEQ ID NO: 22716 - DNA, 20 bp, synthetic construct
  misc_feature 1..20: note = chemically synthesized
  source 1..20: mol_type = other DNA
gcaacaccctgacctttatg

SEQ ID NO: 22717 - DNA, 20 bp, synthetic construct
  misc_feature 1..20: note = chemically synthesized
  source 1..20: mol_type = other DNA
gacctttatggggtcatcct

SEQ ID NO: 22718 - DNA, 20 bp, synthetic construct
  misc_feature 1..20: note = chemically synthesized
  source 1..20: mol_type = other DNA
ggggtcatcctcggccaatg

SEQ ID NO: 22719 - DNA, 20 bp, synthetic construct
  misc_feature 1..20: note = chemically synthesized
  source 1..20: mol_type = other DNA
gtcatcctcggccaatgaag

SEQ ID NO: 22720 - DNA, 20 bp, synthetic construct
  misc_feature 1..20: note = chemically synthesized
  source 1..20: mol_type = other DNA
atcctcggccaatgaagcgg

SEQ ID NO: 22721 - DNA, 20 bp, synthetic construct
  misc_feature 1..20: note = chemically synthesized
  source 1..20: mol_type = other DNA
tcctcggccaatgaagcggt

SEQ ID NO: 22722 - DNA, 20 bp, synthetic construct
  misc_feature 1..20: note = chemically synthesized
  source 1..20: mol_type = other DNA
ggccaatgaagcggtgggtc

SEQ ID NO: 22723 - DNA, 20 bp, synthetic construct
  misc_feature 1..20: note = chemically synthesized
  source 1..20: mol_type = other DNA
gccaatgaagcggtgggtcc

SEQ ID NO: 22724 - DNA, 20 bp, synthetic construct
  misc_feature 1..20: note = chemically synthesized
  source 1..20: mol_type = other DNA
aggctcccccttctatcacc

SEQ ID NO: 22725 - DNA, 20 bp, synthetic construct
  misc_feature 1..20: note = chemically synthesized
  source 1..20: mol_type = other DNA
cctggctcacttccatcctg

SEQ ID NO: 22726 - DNA, 20 bp, synthetic construct
  misc_feature 1..20: note = chemically synthesized
  source 1..20: mol_type = other DNA
tggctcacttccatcctgca

SEQ ID NO: 22727 - DNA, 20 bp, synthetic construct
  misc_feature 1..20: note = chemically synthesized
  source 1..20: mol_type = other DNA
ggctcacttccatcctgcag

SEQ ID NO: 22728 - DNA, 20 bp, synthetic construct
  misc_feature 1..20: note = chemically synthesized
  source 1..20: mol_type = other DNA
tcacttccatcctgcagagg

SEQ ID NO: 22729 - DNA, 20 bp, synthetic construct
  misc_feature 1..20: note = chemically synthesized
  source 1..20: mol_type = other DNA
tccatcctgcagaggaagct

SEQ ID NO: 22730 - DNA, 20 bp, synthetic construct
  misc_feature 1..20: note = chemically synthesized
  source 1..20: mol_type = other DNA
agaggaagcttggtttcatt

SEQ ID NO: 22731 - DNA, 20 bp, synthetic construct
  misc_feature 1..20: note = chemically synthesized
  source 1..20: mol_type = other DNA
gaggaagcttggtttcattt

SEQ ID NO: 22732 - DNA, 20 bp, synthetic construct
  misc_feature 1..20: note = chemically synthesized
  source 1..20: mol_type = other DNA
gtttcatttaggacaatgtg

SEQ ID NO: 22733 - DNA, 20 bp, synthetic construct
  misc_feature 1..20: note = chemically synthesized
  source 1..20: mol_type = other DNA
tttcatttaggacaatgtgc

SEQ ID NO: 22734 - DNA, 20 bp, synthetic construct
  misc_feature 1..20: note = chemically synthesized
  source 1..20: mol_type = other DNA
ccttttgatcatttctctac

SEQ ID NO: 22735 - DNA, 20 bp, synthetic construct
  misc_feature 1..20: note = chemically synthesized
  source 1..20: mol_type = other DNA
tcatttctctactggatcat

SEQ ID NO: 22736 - DNA, 20 bp, synthetic construct
  misc_feature 1..20: note = chemically synthesized
  source 1..20: mol_type = other DNA
tctctactggatcatcagca

SEQ ID NO: 22737 - DNA, 20 bp, synthetic construct
  misc_feature 1..20: note = chemically synthesized
  source 1..20: mol_type = other DNA
ctctactggatcatcagcaa

SEQ ID NO: 22738 - DNA, 20 bp, synthetic construct
  misc_feature 1..20: note = chemically synthesized
  source 1..20: mol_type = other DNA
tctactggatcatcagcaaa

SEQ ID NO: 22739 - DNA, 20 bp, synthetic construct
  misc_feature 1..20: note = chemically synthesized
  source 1..20: mol_type = other DNA
tactggatcatcagcaaagg

SEQ ID NO: 22740 - DNA, 20 bp, synthetic construct
  misc_feature 1..20: note = chemically synthesized
  source 1..20: mol_type = other DNA
tcatcagcaaagggagaaat

SEQ ID NO: 22741 - DNA, 20 bp, synthetic construct
  misc_feature 1..20: note = chemically synthesized
  source 1..20: mol_type = other DNA
caaagggagaaatgagacaa

SEQ ID NO: 22742 - DNA, 20 bp, synthetic construct
  misc_feature 1..20: note = chemically synthesized
  source 1..20: mol_type = other DNA
aagggagaaatgagacaaaa

SEQ ID NO: 22743 - DNA, 20 bp, synthetic construct
  misc_feature 1..20: note = chemically synthesized
  source 1..20: mol_type = other DNA
agggagaaatgagacaaaag

SEQ ID NO: 22744 - DNA, 20 bp, synthetic construct
  misc_feature 1..20: note = chemically synthesized
  source 1..20: mol_type = other DNA
atgagacaaaagaggccact

SEQ ID NO: 22745 - DNA, 20 bp, synthetic construct
  misc_feature 1..20: note = chemically synthesized
  source 1..20: mol_type = other DNA
aaagaggccactgagtcctt

SEQ ID NO: 22746 - DNA, 20 bp, synthetic construct
  misc_feature 1..20: note = chemically synthesized
  source 1..20: mol_type = other DNA
aagaggccactgagtccttt

SEQ ID NO: 22747 - DNA, 20 bp, synthetic construct
  misc_feature 1..20: note = chemically synthesized
  source 1..20: mol_type = other DNA
agaggccactgagtcctttg

SEQ ID NO: 22748 - DNA, 20 bp, synthetic construct
  misc_feature 1..20: note = chemically synthesized
  source 1..20: mol_type = other DNA
gaggccactgagtcctttgg

SEQ ID NO: 22749 - DNA, 20 bp, synthetic construct
  misc_feature 1..20: note = chemically synthesized
  source 1..20: mol_type = other DNA
ttgggggaaatatgtgccta

SEQ ID NO: 22750 - DNA, 20 bp, synthetic construct
  misc_feature 1..20: note = chemically synthesized
  source 1..20: mol_type = other DNA
gggaaatatgtgcctatagt

SEQ ID NO: 22751 - DNA, 20 bp, synthetic construct
  misc_feature 1..20: note = chemically synthesized
  source 1..20: mol_type = other DNA
ggaaatatgtgcctatagta

SEQ ID NO: 22752 - DNA, 20 bp, synthetic construct
  misc_feature 1..20: note = chemically synthesized
  source 1..20: mol_type = other DNA
atgtgcctatagtaaggtga

SEQ ID NO: 22753 - DNA, 20 bp, synthetic construct
  misc_feature 1..20: note = chemically synthesized
  source 1..20: mol_type = other DNA
cctatagtaaggtgatagtt

SEQ ID NO: 22754 - DNA, 20 bp, synthetic construct
  misc_feature 1..20: note = chemically synthesized
  source 1..20: mol_type = other DNA
tatagtaaggtgatagttca

SEQ ID NO: 22755 - DNA, 20 bp, synthetic construct
  misc_feature 1..20: note = chemically synthesized
  source 1..20: mol_type = other DNA
gtaaggtgatagttcagaga

SEQ ID NO: 22756 - DNA, 20 bp, synthetic construct
  misc_feature 1..20: note = chemically synthesized
  source 1..20: mol_type = other DNA
aaggtgatagttcagagaaa

SEQ ID NO: 22757 - DNA, 20 bp, synthetic construct
  misc_feature 1..20: note = chemically synthesized
  source 1..20: mol_type = other DNA
gtgatagttcagagaaagag

SEQ ID NO: 22758 - DNA, 20 bp, synthetic construct
  misc_feature 1..20: note = chemically synthesized
  source 1..20: mol_type = other DNA
gatagttcagagaaagagaa

SEQ ID NO: 22759 - DNA, 20 bp, synthetic construct
  misc_feature 1..20: note = chemically synthesized
  source 1..20: mol_type = other DNA
agttcagagaaagagaagag

SEQ ID NO: 22760 - DNA, 20 bp, synthetic construct
  misc_feature 1..20: note = chemically synthesized
  source 1..20: mol_type = other DNA
gttcagagaaagagaagagt

SEQ ID NO: 22761 - DNA, 20 bp, synthetic construct
  misc_feature 1..20: note = chemically synthesized
  source 1..20: mol_type = other DNA
tcagagaaagagaagagtag

SEQ ID NO: 22762 - DNA, 20 bp, synthetic construct
  misc_feature 1..20: note = chemically synthesized
  source 1..20: mol_type = other DNA
cagagaaagagaagagtagg

SEQ ID NO: 22763 - DNA, 20 bp, synthetic construct
  misc_feature 1..20: note = chemically synthesized
  source 1..20: mol_type = other DNA
gaaagagaagagtaggaggc

SEQ ID NO: 22764 - DNA, 20 bp, synthetic construct
  misc_feature 1..20: note = chemically synthesized
  source 1..20: mol_type = other DNA
agagtaggaggctggacctg

SEQ ID NO: 22765 - DNA, 20 bp, synthetic construct
  misc_feature 1..20: note = chemically synthesized
  source 1..20: mol_type = other DNA
gagtaggaggctggacctga

SEQ ID NO: 22766 - DNA, 20 bp, synthetic construct
  misc_feature 1..20: note = chemically synthesized
  source 1..20: mol_type = other DNA
acctgaaggccttccaaaaa

SEQ ID NO: 22767 - DNA, 20 bp, synthetic construct
  misc_feature 1..20: note = chemically synthesized
  source 1..20: mol_type = other DNA
aaggccttccaaaaaaagta

SEQ ID NO: 22768 - DNA, 20 bp, synthetic construct
  misc_feature 1..20: note = chemically synthesized
  source 1..20: mol_type = other DNA
aggccttccaaaaaaagtaa

SEQ ID NO: 22769 - DNA, 20 bp, synthetic construct
  misc_feature 1..20: note = chemically synthesized
  source 1..20: mol_type = other DNA
taaaggatgttaaattgctc

SEQ ID NO: 22770 - DNA, 20 bp, synthetic construct
  misc_feature 1..20: note = chemically synthesized
  source 1..20: mol_type = other DNA
aggatgttaaattgctctgg

SEQ ID NO: 22771 - DNA, 20 bp, synthetic construct
  misc_feature 1..20: note = chemically synthesized
  source 1..20: mol_type = other DNA
ggatgttaaattgctctgga

SEQ ID NO: 22772 - DNA, 20 bp, synthetic construct
  misc_feature 1..20: note = chemically synthesized
  source 1..20: mol_type = other DNA
aaattgctctggaaggtgca

SEQ ID NO: 22773 - DNA, 20 bp, synthetic construct
  misc_feature 1..20: note = chemically synthesized
  source 1..20: mol_type = other DNA
ggaaggtgcaaagtgccatc

SEQ ID NO: 22774 - DNA, 20 bp, synthetic construct
  misc_feature 1..20: note = chemically synthesized
  source 1..20: mol_type = other DNA
aggtgcaaagtgccatccag

SEQ ID NO: 22775 - DNA, 20 bp, synthetic construct
  misc_feature 1..20: note = chemically synthesized
  source 1..20: mol_type = other DNA
tgcaaagtgccatccagtgg

SEQ ID NO: 22776 - DNA, 20 bp, synthetic construct
  misc_feature 1..20: note = chemically synthesized
  source 1..20: mol_type = other DNA
tattattatcatcatcataa

SEQ ID NO: 22777 - DNA, 20 bp, synthetic construct
  misc_feature 1..20: note = chemically synthesized
  source 1..20: mol_type = other DNA
ggtcattatcatcaccatta

SEQ ID NO: 22778 - DNA, 20 bp, synthetic construct
  misc_feature 1..20: note = chemically synthesized
  source 1..20: mol_type = other DNA
gtcattatcatcaccattat

SEQ ID NO: 22779 - DNA, 20 bp, synthetic construct
  misc_feature 1..20: note = chemically synthesized
  source 1..20: mol_type = other DNA
atcatcaccattataggata

SEQ ID NO: 22780 - DNA, 20 bp, synthetic construct
  misc_feature 1..20: note = chemically synthesized
  source 1..20: mol_type = other DNA
tataggatatggcactgacg

SEQ ID NO: 22781 - DNA, 20 bp, synthetic construct
  misc_feature 1..20: note = chemically synthesized
  source 1..20: mol_type = other DNA
ataggatatggcactgacgt

SEQ ID NO: 22782 - DNA, 20 bp, synthetic construct
  misc_feature 1..20: note = chemically synthesized
  source 1..20: mol_type = other DNA
ggatatggcactgacgtagg

SEQ ID NO: 22783 - DNA, 20 bp, synthetic construct
  misc_feature 1..20: note = chemically synthesized
  source 1..20: mol_type = other DNA
gcactgacgtaggtagtgac

SEQ ID NO: 22784 - DNA, 20 bp, synthetic construct
  misc_feature 1..20: note = chemically synthesized
  source 1..20: mol_type = other DNA
tgacgtaggtagtgactggt

SEQ ID NO: 22785 - DNA, 20 bp, synthetic construct
  misc_feature 1..20: note = chemically synthesized
  source 1..20: mol_type = other DNA
acgtaggtagtgactggtaa

SEQ ID NO: 22786 - DNA, 20 bp, synthetic construct
  misc_feature 1..20: note = chemically synthesized
  source 1..20: mol_type = other DNA
gtgactggtaagagccgatt

SEQ ID NO: 22787 - DNA, 20 bp, synthetic construct
  misc_feature 1..20: note = chemically synthesized
  source 1..20: mol_type = other DNA
gtaagagccgattgagtttc

SEQ ID NO: 22788 - DNA, 20 bp, synthetic construct
  misc_feature 1..20: note = chemically synthesized
  source 1..20: mol_type = other DNA
ttctagctgattcctgatgt

SEQ ID NO: 22789 - DNA, 20 bp, synthetic construct
  misc_feature 1..20: note = chemically synthesized
  source 1..20: mol_type = other DNA
tctagctgattcctgatgtt

SEQ ID NO: 22790 - DNA, 20 bp, synthetic construct
  misc_feature 1..20: note = chemically synthesized
  source 1..20: mol_type = other DNA
ctagctgattcctgatgtta

SEQ ID NO: 22791 - DNA, 20 bp, synthetic construct
  misc_feature 1..20: note = chemically synthesized
  source 1..20: mol_type = other DNA
tagctgattcctgatgttag

SEQ ID NO: 22792 - DNA, 20 bp, synthetic construct
  misc_feature 1..20: note = chemically synthesized
  source 1..20: mol_type = other DNA
gggccatgaatctgtctacc

SEQ ID NO: 22793 - DNA, 20 bp, synthetic construct
  misc_feature 1..20: note = chemically synthesized
  source 1..20: mol_type = other DNA
tggaatgttctaattcaatt

SEQ ID NO: 22794 - DNA, 20 bp, synthetic construct
  misc_feature 1..20: note = chemically synthesized
  source 1..20: mol_type = other DNA
ggaatgttctaattcaattc

SEQ ID NO: 22795 - DNA, 20 bp, synthetic construct
  misc_feature 1..20: note = chemically synthesized
  source 1..20: mol_type = other DNA
aatgttctaattcaattcag

SEQ ID NO: 22796 - DNA, 20 bp, synthetic construct
  misc_feature 1..20: note = chemically synthesized
  source 1..20: mol_type = other DNA
gttctaattcaattcaggag

SEQ ID NO: 22797 - DNA, 20 bp, synthetic construct
  misc_feature 1..20: note = chemically synthesized
  source 1..20: mol_type = other DNA
ctaattcaattcaggagcgg

SEQ ID NO: 22798 - DNA, 20 bp, synthetic construct
  misc_feature 1..20: note = chemically synthesized
  source 1..20: mol_type = other DNA
caattcaggagcggcagttt

SEQ ID NO: 22799 - DNA, 20 bp, synthetic construct
  misc_feature 1..20: note = chemically synthesized
  source 1..20: mol_type = other DNA
caggagcggcagtttaagtc

SEQ ID NO: 22800 - DNA, 20 bp, synthetic construct
  misc_feature 1..20: note = chemically synthesized
  source 1..20: mol_type = other DNA
cagtttaagtctagacttca

SEQ ID NO: 22801 - DNA, 20 bp, synthetic construct
  misc_feature 1..20: note = chemically synthesized
  source 1..20: mol_type = other DNA
aaagcactctcatatatcct

SEQ ID NO: 22802 - DNA, 20 bp, synthetic construct
  misc_feature 1..20: note = chemically synthesized
  source 1..20: mol_type = other DNA
tatccttggcctgctaacct

SEQ ID NO: 22803 - DNA, 20 bp, synthetic construct
  misc_feature 1..20: note = chemically synthesized
  source 1..20: mol_type = other DNA
atccttggcctgctaacctg

SEQ ID NO: 22804 - DNA, 20 bp, synthetic construct
  misc_feature 1..20: note = chemically synthesized
  source 1..20: mol_type = other DNA
tccttggcctgctaacctga

SEQ ID NO: 22805 - DNA, 20 bp, synthetic construct
  misc_feature 1..20: note = chemically synthesized
  source 1..20: mol_type = other DNA
tggcctgctaacctgagggc

SEQ ID NO: 22806 - DNA, 20 bp, synthetic construct
  misc_feature 1..20: note = chemically synthesized
  source 1..20: mol_type = other DNA
ctaacctgagggctagtttc

SEQ ID NO: 22807 - DNA, 20 bp, synthetic construct
  misc_feature 1..20: note = chemically synthesized
  source 1..20: mol_type = other DNA
taacctgagggctagtttct

SEQ ID NO: 22808 - DNA, 20 bp, synthetic construct
  misc_feature 1..20: note = chemically synthesized
  source 1..20: mol_type = other DNA
aacctgagggctagtttcta

SEQ ID NO: 22809 - DNA, 20 bp, synthetic construct
  misc_feature 1..20: note = chemically synthesized
  source 1..20: mol_type = other DNA
tctagggattgattaactta

SEQ ID NO: 22810 - DNA, 20 bp, synthetic construct
  misc_feature 1..20: note = chemically synthesized
  source 1..20: mol_type = other DNA
gggattgattaacttaaaga

SEQ ID NO: 22811 - DNA, 20 bp, synthetic construct
  misc_feature 1..20: note = chemically synthesized
  source 1..20: mol_type = other DNA
gttcatatatgcttgaatac

SEQ ID NO: 22812 - DNA, 20 bp, synthetic construct
  misc_feature 1..20: note = chemically synthesized
  source 1..20: mol_type = other DNA
aaaaatctgacttgatcaaa

SEQ ID NO: 22813 - DNA, 20 bp, synthetic construct
  misc_feature 1..20: note = chemically synthesized
  source 1..20: mol_type = other DNA
aaatctgacttgatcaaaca

SEQ ID NO: 22814 - DNA, 20 bp, synthetic construct
  misc_feature 1..20: note = chemically synthesized
  source 1..20: mol_type = other DNA
tctgacttgatcaaacagag

SEQ ID NO: 22815 - DNA, 20 bp, synthetic construct
  misc_feature 1..20: note = chemically synthesized
  source 1..20: mol_type = other DNA
ttgatcaaacagagcagtta

SEQ ID NO: 22816 - DNA, 20 bp, synthetic construct
  misc_feature 1..20: note = chemically synthesized
  source 1..20: mol_type = other DNA
tgatcaaacagagcagttaa

SEQ ID NO: 22817 - DNA, 20 bp, synthetic construct
  misc_feature 1..20: note = chemically synthesized
  source 1..20: mol_type = other DNA
ggcgatgcttcgttttacaa

SEQ ID NO: 22818 - DNA, 20 bp, synthetic construct
  misc_feature 1..20: note = chemically synthesized
  source 1..20: mol_type = other DNA
attttcccccctctttacaa

SEQ ID NO: 22819 - DNA, 20 bp, synthetic construct
  misc_feature 1..20: note = chemically synthesized
  source 1..20: mol_type = other DNA
ttttcccccctctttacaaa

SEQ ID NO: 22820 - DNA, 20 bp, synthetic construct
  misc_feature 1..20: note = chemically synthesized
  source 1..20: mol_type = other DNA
cctctttacaaaaggatgca

SEQ ID NO: 22821 - DNA, 20 bp, synthetic construct
  misc_feature 1..20: note = chemically synthesized
  source 1..20: mol_type = other DNA
ctttacaaaaggatgcacag

SEQ ID NO: 22822 - DNA, 20 bp, synthetic construct
  misc_feature 1..20: note = chemically synthesized
  source 1..20: mol_type = other DNA
cacagtggtattcctttcaa

SEQ ID NO: 22823 - DNA, 20 bp, synthetic construct
  misc_feature 1..20: note = chemically synthesized
  source 1..20: mol_type = other DNA
ctttcaatggaatgtttctc

SEQ ID NO: 22824 - DNA, 20 bp, synthetic construct
  misc_feature 1..20: note = chemically synthesized
  source 1..20: mol_type = other DNA
gaatgtttctctagctcatt

SEQ ID NO: 22825 - DNA, 20 bp, synthetic construct
  misc_feature 1..20: note = chemically synthesized
  source 1..20: mol_type = other DNA
tctagctcattaagtgttta

SEQ ID NO: 22826 - DNA, 20 bp, synthetic construct
  misc_feature 1..20: note = chemically synthesized
  source 1..20: mol_type = other DNA
ctagctcattaagtgtttac

SEQ ID NO: 22827 - DNA, 20 bp, synthetic construct
  misc_feature 1..20: note = chemically synthesized
  source 1..20: mol_type = other DNA
attaagtgtttacaggtcat

SEQ ID NO: 22828 - DNA, 20 bp, synthetic construct
  misc_feature 1..20: note = chemically synthesized
  source 1..20: mol_type = other DNA
acaggtcattagctactgca

SEQ ID NO: 22829 - DNA, 20 bp, synthetic construct
  misc_feature 1..20: note = chemically synthesized
  source 1..20: mol_type = other DNA
ggtcattagctactgcatgg

SEQ ID NO: 22830 - DNA, 20 bp, synthetic construct
  misc_feature 1..20: note = chemically synthesized
  source 1..20: mol_type = other DNA
gtcattagctactgcatgga

SEQ ID NO: 22831 - DNA, 20 bp, synthetic construct
  misc_feature 1..20: note = chemically synthesized
  source 1..20: mol_type = other DNA
actgcatggaaggactttgc

SEQ ID NO: 22832 - DNA, 20 bp, synthetic construct
  misc_feature 1..20: note = chemically synthesized
  source 1..20: mol_type = other DNA
tgcatggaaggactttgcta

SEQ ID NO: 22833 - DNA, 20 bp, synthetic construct
  misc_feature 1..20: note = chemically synthesized
  source 1..20: mol_type = other DNA
ggaaggactttgctagagaa

SEQ ID NO: 22834 - DNA, 20 bp, synthetic construct
  misc_feature 1..20: note = chemically synthesized
  source 1..20: mol_type = other DNA
gaaggactttgctagagaaa

SEQ ID NO: 22835 - DNA, 20 bp, synthetic construct
  misc_feature 1..20: note = chemically synthesized
  source 1..20: mol_type = other DNA
ggactttgctagagaaaagg

SEQ ID NO: 22836 - DNA, 20 bp, synthetic construct
  misc_feature 1..20: note = chemically synthesized
  source 1..20: mol_type = other DNA
gactttgctagagaaaagga

SEQ ID NO: 22837 - DNA, 20 bp, synthetic construct
  misc_feature 1..20: note = chemically synthesized
  source 1..20: mol_type = other DNA
ctagagaaaaggaaggctgc

SEQ ID NO: 22838 - DNA, 20 bp, synthetic construct
  misc_feature 1..20: note = chemically synthesized
  source 1..20: mol_type = other DNA
tagagaaaaggaaggctgca

SEQ ID NO: 22839 - DNA, 20 bp, synthetic construct
  misc_feature 1..20: note = chemically synthesized
  source 1..20: mol_type = other DNA
aaaggaaggctgcaaggaaa

SEQ ID NO: 22840 - DNA, 20 bp, synthetic construct
  misc_feature 1..20: note = chemically synthesized
  source 1..20: mol_type = other DNA
aggctgcaaggaaatagctc

SEQ ID NO: 22841 - DNA, 20 bp, synthetic construct
  misc_feature 1..20: note = chemically synthesized
  source 1..20: mol_type = other DNA
caaggaaatagctctagctc

SEQ ID NO: 22842 - DNA, 20 bp, synthetic construct
  misc_feature 1..20: note = chemically synthesized
  source 1..20: mol_type = other DNA
aatagctctagctctagctc

SEQ ID NO: 22843 - DNA, 20 bp, synthetic construct
  misc_feature 1..20: note = chemically synthesized
  source 1..20: mol_type = other DNA
ctctagctctagctctagct

SEQ ID NO: 22844 - DNA, 20 bp, synthetic construct
  misc_feature 1..20: note = chemically synthesized
  source 1..20: mol_type = other DNA
tctagctctagctctagctt

SEQ ID NO: 22845 - DNA, 20 bp, synthetic construct
  misc_feature 1..20: note = chemically synthesized
  source 1..20: mol_type = other DNA
ctagctctagctctagctta

SEQ ID NO: 22846 - DNA, 20 bp, synthetic construct
  misc_feature 1..20: note = chemically synthesized
  source 1..20: mol_type = other DNA
tagctctagctctagcttag

SEQ ID NO: 22847 - DNA, 20 bp, synthetic construct
  misc_feature 1..20: note = chemically synthesized
  source 1..20: mol_type = other DNA
agctctagcttaggggatgc

SEQ ID NO: 22848 - DNA, 20 bp, synthetic construct
  misc_feature 1..20: note = chemically synthesized
  source 1..20: mol_type = other DNA
agcttaggggatgctagcta

SEQ ID NO: 22849 - DNA, 20 bp, synthetic construct
  misc_feature 1..20: note = chemically synthesized
  source 1..20: mol_type = other DNA
gcttaggggatgctagctaa

SEQ ID NO: 22850 - DNA, 20 bp, synthetic construct
  misc_feature 1..20: note = chemically synthesized
  source 1..20: mol_type = other DNA
cttaggggatgctagctaaa

SEQ ID NO: 22851 - DNA, 20 bp, synthetic construct
  misc_feature 1..20: note = chemically synthesized
  source 1..20: mol_type = other DNA
ggatgctagctaaagggaat

SEQ ID NO: 22852 - DNA, 20 bp, synthetic construct
  misc_feature 1..20: note = chemically synthesized
  source 1..20: mol_type = other DNA
tagctaaagggaattagaat

SEQ ID NO: 22853 - DNA, 20 bp, synthetic construct
  misc_feature 1..20: note = chemically synthesized
  source 1..20: mol_type = other DNA
taaagggaattagaattggt

SEQ ID NO: 22854 - DNA, 20 bp, synthetic construct
  misc_feature 1..20: note = chemically synthesized
  source 1..20: mol_type = other DNA
aattagaattggttggccaa

SEQ ID NO: 22855 - DNA, 20 bp, synthetic construct
  misc_feature 1..20: note = chemically synthesized
  source 1..20: mol_type = other DNA
attagaattggttggccaac

SEQ ID NO: 22856 - DNA, 20 bp, synthetic construct
  misc_feature 1..20: note = chemically synthesized
  source 1..20: mol_type = other DNA
ggttggccaacaggtgtctg

SEQ ID NO: 22857 - DNA, 20 bp, synthetic construct
  misc_feature 1..20: note = chemically synthesized
  source 1..20: mol_type = other DNA
actccctgtccactcaacac

SEQ ID NO: 22858 - DNA, 20 bp, synthetic construct
  misc_feature 1..20: note = chemically synthesized
  source 1..20: mol_type = other DNA
ctccctgtccactcaacact

SEQ ID NO: 22859 - DNA, 20 bp, synthetic construct
  misc_feature 1..20: note = chemically synthesized
  source 1..20: mol_type = other DNA
tccctgtccactcaacactg

SEQ ID NO: 22860 - DNA, 20 bp, synthetic construct
  misc_feature 1..20: note = chemically synthesized
  source 1..20: mol_type = other DNA
ccctgtccactcaacactgg

SEQ ID NO: 22861 - DNA, 20 bp, synthetic construct
  misc_feature 1..20: note = chemically synthesized
  source 1..20: mol_type = other DNA
ctgtccactcaacactgggg

SEQ ID NO: 22862 - DNA, 20 bp, synthetic construct
  misc_feature 1..20: note = chemically synthesized
  source 1..20: mol_type = other DNA
tgtccactcaacactggggg

SEQ ID NO: 22863 - DNA, 20 bp, synthetic construct
  misc_feature 1..20: note = chemically synthesized
  source 1..20: mol_type = other DNA
tccactcaacactgggggag

SEQ ID NO: 22864 - DNA, 20 bp, synthetic construct
  misc_feature 1..20: note = chemically synthesized
  source 1..20: mol_type = other DNA
actcaacactgggggaggag

SEQ ID NO: 22865 - DNA, 20 bp, synthetic construct
  misc_feature 1..20: note = chemically synthesized
  source 1..20: mol_type = other DNA
tcaacactgggggaggagta

SEQ ID NO: 22866 - DNA, 20 bp, synthetic construct
  misc_feature 1..20: note = chemically synthesized
  source 1..20: mol_type = other DNA
gatcttgcttccttccatgt

SEQ ID NO: 22867 - DNA, 20 bp, synthetic construct
  misc_feature 1..20: note = chemically synthesized
  source 1..20: mol_type = other DNA
tcttgcttccttccatgtga

SEQ ID NO: 22868 - DNA, 20 bp, synthetic construct
  misc_feature 1..20: note = chemically synthesized
  source 1..20: mol_type = other DNA
tccttccatgtgagagctta

SEQ ID NO: 22869 - DNA, 20 bp, synthetic construct
  misc_feature 1..20: note = chemically synthesized
  source 1..20: mol_type = other DNA
gtgagagcttatagtccctt

SEQ ID NO: 22870 - DNA, 20 bp, synthetic construct
  misc_feature 1..20: note = chemically synthesized
  source 1..20: mol_type = other DNA
cttatagtccctttggaatc

SEQ ID NO: 22871 - DNA, 20 bp, synthetic construct
  misc_feature 1..20: note = chemically synthesized
  source 1..20: mol_type = other DNA
tggaatccagatttatcgtg

SEQ ID NO: 22872 - DNA, 20 bp, synthetic construct
  misc_feature 1..20: note = chemically synthesized
  source 1..20: mol_type = other DNA
tttatcgtgaagtaatcgtg

SEQ ID NO: 22873 - DNA, 20 bp, synthetic construct
  misc_feature 1..20: note = chemically synthesized
  source 1..20: mol_type = other DNA
tcgtgaagtaatcgtgaaga

SEQ ID NO: 22874 - DNA, 20 bp, synthetic construct
  misc_feature 1..20: note = chemically synthesized
  source 1..20: mol_type = other DNA
taatcgtgaagacagaaatt

SEQ ID NO: 22875 - DNA, 20 bp, synthetic construct
  misc_feature 1..20: note = chemically synthesized
  source 1..20: mol_type = other DNA
tcatctcttatgactgtcca

SEQ ID NO: 22876 - DNA, 20 bp, synthetic construct
  misc_feature 1..20: note = chemically synthesized
  source 1..20: mol_type = other DNA
catctcttatgactgtccat

SEQ ID NO: 22877 - DNA, 20 bp, synthetic construct
  misc_feature 1..20: note = chemically synthesized
  source 1..20: mol_type = other DNA
atctcttatgactgtccatg

SEQ ID NO: 22878 - DNA, 20 bp, synthetic construct
  misc_feature 1..20: note = chemically synthesized
  source 1..20: mol_type = other DNA
tatgactgtccatggggaaa

SEQ ID NO: 22879 - DNA, 20 bp, synthetic construct
  misc_feature 1..20: note = chemically synthesized
  source 1..20: mol_type = other DNA
atgactgtccatggggaaat

SEQ ID NO: 22880 - DNA, 20 bp, synthetic construct
  misc_feature 1..20: note = chemically synthesized
  source 1..20: mol_type = other DNA
ggtcctgctttacaaaaatt

SEQ ID NO: 22881 - DNA, 20 bp, synthetic construct
  misc_feature 1..20: note = chemically synthesized
  source 1..20: mol_type = other DNA
tcagtttgcatgctgctttt

SEQ ID NO: 22882 - DNA, 20 bp, synthetic construct
  misc_feature 1..20: note = chemically synthesized
  source 1..20: mol_type = other DNA
cagtttgcatgctgcttttc

SEQ ID NO: 22883 - DNA, 20 bp, synthetic construct
  misc_feature 1..20: note = chemically synthesized
  source 1..20: mol_type = other DNA
aggcctatgactgtgacatc

SEQ ID NO: 22884 - DNA, 20 bp, synthetic construct
  misc_feature 1..20: note = chemically synthesized
  source 1..20: mol_type = other DNA
ctatgactgtgacatccagt

SEQ ID NO: 22885 - DNA, 20 bp, synthetic construct
  misc_feature 1..20: note = chemically synthesized
  source 1..20: mol_type = other DNA
tatgactgtgacatccagtg

SEQ ID NO: 22886 - DNA, 20 bp, synthetic construct
  misc_feature 1..20: note = chemically synthesized
  source 1..20: mol_type = other DNA
atgactgtgacatccagtga

SEQ ID NO: 22887 - DNA, 20 bp, synthetic construct
  misc_feature 1..20: note = chemically synthesized
  source 1..20: mol_type = other DNA
gactgtgacatccagtgagg

SEQ ID NO: 22888 - DNA, 20 bp, synthetic construct
  misc_feature 1..20: note = chemically synthesized
  source 1..20: mol_type = other DNA
acatccagtgagggagattt

SEQ ID NO: 22889 - DNA, 20 bp, synthetic construct
  misc_feature 1..20: note = chemically synthesized
  source 1..20: mol_type = other DNA
catccagtgagggagatttg

SEQ ID NO: 22890 - DNA, 20 bp, synthetic construct
  misc_feature 1..20: note = chemically synthesized
  source 1..20: mol_type = other DNA
ccagtgagggagatttgagg

SEQ ID NO: 22891 - DNA, 20 bp, synthetic construct
  misc_feature 1..20: note = chemically synthesized
  source 1..20: mol_type = other DNA
cagtgagggagatttgagga

SEQ ID NO: 22892 - DNA, 20 bp, synthetic construct
  misc_feature 1..20: note = chemically synthesized
  source 1..20: mol_type = other DNA
agtgagggagatttgaggaa

SEQ ID NO: 22893 - DNA, 20 bp, synthetic construct
  misc_feature 1..20: note = chemically synthesized
  source 1..20: mol_type = other DNA
gtgagggagatttgaggaag

SEQ ID NO: 22894 - DNA, 20 bp, synthetic construct
  misc_feature 1..20: note = chemically synthesized
  source 1..20: mol_type = other DNA
tttgaggaaggggttgatgt

SEQ ID NO: 22895 - DNA, 20 bp, synthetic construct
  misc_feature 1..20: note = chemically synthesized
  source 1..20: mol_type = other DNA
ggttgatgtaagactcctct

SEQ ID NO: 22896 - DNA, 20 bp, synthetic construct
  misc_feature 1..20: note = chemically synthesized
  source 1..20: mol_type = other DNA
gttgatgtaagactcctctt

SEQ ID NO: 22897 - DNA, 20 bp, synthetic construct
  misc_feature 1..20: note = chemically synthesized
  source 1..20: mol_type = other DNA
tgatgtaagactcctcttgg

SEQ ID NO: 22898 - DNA, 20 bp, synthetic construct
  misc_feature 1..20: note = chemically synthesized
  source 1..20: mol_type = other DNA
taagactcctcttgggagca

SEQ ID NO: 22899 - DNA, 20 bp, synthetic construct
  misc_feature 1..20: note = chemically synthesized
  source 1..20: mol_type = other DNA
actcctcttgggagcatagt

SEQ ID NO: 22900 - DNA, 20 bp, synthetic construct
  misc_feature 1..20: note = chemically synthesized
  source 1..20: mol_type = other DNA
tcctcttgggagcatagtga

SEQ ID NO: 22901 - DNA, 20 bp, synthetic construct
  misc_feature 1..20: note = chemically synthesized
  source 1..20: mol_type = other DNA
ctcttgggagcatagtgaga

SEQ ID NO: 22902 - DNA, 20 bp, synthetic construct
  misc_feature 1..20: note = chemically synthesized
  source 1..20: mol_type = other DNA
cttgggagcatagtgagaga

SEQ ID NO: 22903 - DNA, 20 bp, synthetic construct
  misc_feature 1..20: note = chemically synthesized
  source 1..20: mol_type = other DNA
tgggagcatagtgagagaga

SEQ ID NO: 22904 - DNA, 20 bp, synthetic construct
  misc_feature 1..20: note = chemically synthesized
  source 1..20: mol_type = other DNA
ggagcatagtgagagagaga

SEQ ID NO: 22905 - DNA, 20 bp, synthetic construct
  misc_feature 1..20: note = chemically synthesized
  source 1..20: mol_type = other DNA
agcatagtgagagagagaga

SEQ ID NO: 22906 - DNA, 20 bp, synthetic construct
  misc_feature 1..20: note = chemically synthesized
  source 1..20: mol_type = other DNA
catagtgagagagagagaga

SEQ ID NO: 22907 - DNA, 20 bp, synthetic construct
  misc_feature 1..20: note = chemically synthesized
  source 1..20: mol_type = other DNA
tagtgagagagagagagaga

SEQ ID NO: 22908 - DNA, 20 bp, synthetic construct
  misc_feature 1..20: note = chemically synthesized
  source 1..20: mol_type = other DNA
gtgagagagagagagagaga

SEQ ID NO: 22909 - DNA, 20 bp, synthetic construct
  misc_feature 1..20: note = chemically synthesized
  source 1..20: mol_type = other DNA
agagagagagagagcactca

SEQ ID NO: 22910 - DNA, 20 bp, synthetic construct
  misc_feature 1..20: note = chemically synthesized
  source 1..20: mol_type = other DNA
gagagagagagcactcacag

SEQ ID NO: 22911 - DNA, 20 bp, synthetic construct
  misc_feature 1..20: note = chemically synthesized
  source 1..20: mol_type = other DNA
agagcactcacagtggaacc

SEQ ID NO: 22912 - DNA, 20 bp, synthetic construct
  misc_feature 1..20: note = chemically synthesized
  source 1..20: mol_type = other DNA
agcactcacagtggaaccta

SEQ ID NO: 22913 - DNA, 20 bp, synthetic construct
  misc_feature 1..20: note = chemically synthesized
  source 1..20: mol_type = other DNA
actcacagtggaacctagag

SEQ ID NO: 22914 - DNA, 20 bp, synthetic construct
  misc_feature 1..20: note = chemically synthesized
  source 1..20: mol_type = other DNA
ctcacagtggaacctagagt

SEQ ID NO: 22915 - DNA, 20 bp, synthetic construct
  misc_feature 1..20: note = chemically synthesized
  source 1..20: mol_type = other DNA
cagtggaacctagagtggga

SEQ ID NO: 22916 - DNA, 20 bp, synthetic construct
  misc_feature 1..20: note = chemically synthesized
  source 1..20: mol_type = other DNA
agtggaacctagagtgggaa

SEQ ID NO: 22917 - DNA, 20 bp, synthetic construct
  misc_feature 1..20: note = chemically synthesized
  source 1..20: mol_type = other DNA
ctagagtgggaaaggctacc

SEQ ID NO: 22918 - DNA, 20 bp, synthetic construct
  misc_feature 1..20: note = chemically synthesized
  source 1..20: mol_type = other DNA
gagtgggaaaggctacctgg

SEQ ID NO: 22919 - DNA, 20 bp, synthetic construct
  misc_feature 1..20: note = chemically synthesized
  source 1..20: mol_type = other DNA
aggctacctggtggctgtcc

SEQ ID NO: 22920 - DNA, 20 bp, synthetic construct
  misc_feature 1..20: note = chemically synthesized
  source 1..20: mol_type = other DNA
tggtggctgtcctggcatgt

SEQ ID NO: 22921 - DNA, 20 bp, synthetic construct
  misc_feature 1..20: note = chemically synthesized
  source 1..20: mol_type = other DNA
ggctgtcctggcatgtaagt

SEQ ID NO: 22922 - DNA, 20 bp, synthetic construct
  misc_feature 1..20: note = chemically synthesized
  source 1..20: mol_type = other DNA
ggcatgtaagtaagtctgtg

SEQ ID NO: 22923 - DNA, 20 bp, synthetic construct
  misc_feature 1..20: note = chemically synthesized
  source 1..20: mol_type = other DNA
tgtaagtaagtctgtgtggt

SEQ ID NO: 22924 - DNA, 20 bp, synthetic construct
  misc_feature 1..20: note = chemically synthesized
  source 1..20: mol_type = other DNA
gtaagtaagtctgtgtggtc

SEQ ID NO: 22925 - DNA, 20 bp, synthetic construct
  misc_feature 1..20: note = chemically synthesized
  source 1..20: mol_type = other DNA
taagtaagtctgtgtggtca

SEQ ID NO: 22926 - DNA, 20 bp, synthetic construct
  misc_feature 1..20: note = chemically synthesized
  source 1..20: mol_type = other DNA
cagggcttgcattccataaa

SEQ ID NO: 22927 - DNA, 20 bp, synthetic construct
  misc_feature 1..20: note = chemically synthesized
  source 1..20: mol_type = other DNA
cttgcattccataaatggcc

SEQ ID NO: 22928 - DNA, 20 bp, synthetic construct
  misc_feature 1..20: note = chemically synthesized
  source 1..20: mol_type = other DNA
ttgcattccataaatggccc

SEQ ID NO: 22929 - DNA, 20 bp, synthetic construct
  misc_feature 1..20: note = chemically synthesized
  source 1..20: mol_type = other DNA
taaatggcccaggcccctgc

SEQ ID NO: 22930 - DNA, 20 bp, synthetic construct
  misc_feature 1..20: note = chemically synthesized
  source 1..20: mol_type = other DNA
cccaggcccctgctggctgc

SEQ ID NO: 22931 - DNA, 20 bp, synthetic construct
  misc_feature 1..20: note = chemically synthesized
  source 1..20: mol_type = other DNA
ccaggcccctgctggctgct

SEQ ID NO: 22932 - DNA, 20 bp, synthetic construct
  misc_feature 1..20: note = chemically synthesized
  source 1..20: mol_type = other DNA
aggcccctgctggctgctgg

SEQ ID NO: 22933 - DNA, 20 bp, synthetic construct
  misc_feature 1..20: note = chemically synthesized
  source 1..20: mol_type = other DNA
gcccctgctggctgctggga

SEQ ID NO: 22934 - DNA, 20 bp, synthetic construct
  misc_feature 1..20: note = chemically synthesized
  source 1..20: mol_type = other DNA
ctgctggctgctgggagaga

SEQ ID NO: 22935 - DNA, 20 bp, synthetic construct
  misc_feature 1..20: note = chemically synthesized
  source 1..20: mol_type = other DNA
tggctgctgggagagaaagt

SEQ ID NO: 22936 - DNA, 20 bp, synthetic construct
  misc_feature 1..20: note = chemically synthesized
  source 1..20: mol_type = other DNA
tgctgggagagaaagtcggt

SEQ ID NO: 22937 - DNA, 20 bp, synthetic construct
  misc_feature 1..20: note = chemically synthesized
  source 1..20: mol_type = other DNA
gctgggagagaaagtcggtg

SEQ ID NO: 22938 - DNA, 20 bp, synthetic construct
  misc_feature 1..20: note = chemically synthesized
  source 1..20: mol_type = other DNA
tgggagagaaagtcggtgag

SEQ ID NO: 22939 - DNA, 20 bp, synthetic construct
  misc_feature 1..20: note = chemically synthesized
  source 1..20: mol_type = other DNA
ggagagaaagtcggtgagga

SEQ ID NO: 22940 - DNA, 20 bp, synthetic construct
  misc_feature 1..20: note = chemically synthesized
  source 1..20: mol_type = other DNA
agagaaagtcggtgaggaga

SEQ ID NO: 22941 - DNA, 20 bp, synthetic construct
  misc_feature 1..20: note = chemically synthesized
  source 1..20: mol_type = other DNA
gagaaagtcggtgaggagag

SEQ ID NO: 22942 - DNA, 20 bp, synthetic construct
  misc_feature 1..20: note = chemically synthesized
  source 1..20: mol_type = other DNA
agaaagtcggtgaggagaga

SEQ ID NO: 22943 - DNA, 20 bp, synthetic construct
  misc_feature 1..20: note = chemically synthesized
  source 1..20: mol_type = other DNA
gtgaggagagagggttgtac

SEQ ID NO: 22944 - DNA, 20 bp, synthetic construct
  misc_feature 1..20: note = chemically synthesized
  source 1..20: mol_type = other DNA
tgaggagagagggttgtaca

SEQ ID NO: 22945 - DNA, 20 bp, synthetic construct
  misc_feature 1..20: note = chemically synthesized
  source 1..20: mol_type = other DNA
ggagagagggttgtacaagg

SEQ ID NO: 22946 - DNA, 20 bp, synthetic construct
  misc_feature 1..20: note = chemically synthesized
  source 1..20: mol_type = other DNA
gagagagggttgtacaaggc

SEQ ID NO: 22947 - DNA, 20 bp, synthetic construct
  misc_feature 1..20: note = chemically synthesized
  source 1..20: mol_type = other DNA
gagagggttgtacaaggcag

SEQ ID NO: 22948 - DNA, 20 bp, synthetic construct
  misc_feature 1..20: note = chemically synthesized
  source 1..20: mol_type = other DNA
gagggttgtacaaggcagga

SEQ ID NO: 22949 - DNA, 20 bp, synthetic construct
  misc_feature 1..20: note = chemically synthesized
  source 1..20: mol_type = other DNA
ggcaggagagatgtactcac

SEQ ID NO: 22950 - DNA, 20 bp, synthetic construct
  misc_feature 1..20: note = chemically synthesized
  source 1..20: mol_type = other DNA
gcaggagagatgtactcacc

SEQ ID NO: 22951 - DNA, 20 bp, synthetic construct
  misc_feature 1..20: note = chemically synthesized
  source 1..20: mol_type = other DNA
atgtactcaccaggctcttc

SEQ ID NO: 22952 - DNA, 20 bp, synthetic construct
  misc_feature 1..20: note = chemically synthesized
  source 1..20: mol_type = other DNA
tactcaccaggctcttccag

SEQ ID NO: 22953 - DNA, 20 bp, synthetic construct
  misc_feature 1..20: note = chemically synthesized
  source 1..20: mol_type = other DNA
actcaccaggctcttccaga

SEQ ID NO: 22954 - DNA, 20 bp, synthetic construct
  misc_feature 1..20: note = chemically synthesized
  source 1..20: mol_type = other DNA
ctcaccaggctcttccagaa

SEQ ID NO: 22955 - DNA, 20 bp, synthetic construct
  misc_feature 1..20: note = chemically synthesized
  source 1..20: mol_type = other DNA
tcaccaggctcttccagaag

SEQ ID NO: 22956 - DNA, 20 bp, synthetic construct
  misc_feature 1..20: note = chemically synthesized
  source 1..20: mol_type = other DNA
aaatccttgccttgaacctg

SEQ ID NO: 22957 - DNA, 20 bp, synthetic construct
  misc_feature 1..20: note = chemically synthesized
  source 1..20: mol_type = other DNA
cttgccttgaacctgcagca

SEQ ID NO: 22958 - DNA, 20 bp, synthetic construct
  misc_feature 1..20: note = chemically synthesized
  source 1..20: mol_type = other DNA
gccttgaacctgcagcaaag

SEQ ID NO: 22959 - DNA, 20 bp, synthetic construct
  misc_feature 1..20: note = chemically synthesized
  source 1..20: mol_type = other DNA
ttgaacctgcagcaaagtgg

SEQ ID NO: 22960 - DNA, 20 bp, synthetic construct
  misc_feature 1..20: note = chemically synthesized
  source 1..20: mol_type = other DNA
acctgcagcaaagtggaaga

SEQ ID NO: 22961 - DNA, 20 bp, synthetic construct
  misc_feature 1..20: note = chemically synthesized
  source 1..20: mol_type = other DNA
cctgcagcaaagtggaagat

SEQ ID NO: 22962 - DNA, 20 bp, synthetic construct
  misc_feature 1..20: note = chemically synthesized
  source 1..20: mol_type = other DNA
ctcttccctctttcctgctt

SEQ ID NO: 22963 - DNA, 20 bp, synthetic construct
  misc_feature 1..20: note = chemically synthesized
  source 1..20: mol_type = other DNA
tcttccctctttcctgcttc

SEQ ID NO: 22964 - DNA, 20 bp, synthetic construct
  misc_feature 1..20: note = chemically synthesized
  source 1..20: mol_type = other DNA
actcacttttgctgtgtgtc

SEQ ID NO: 22965 - DNA, 20 bp, synthetic construct
  misc_feature 1..20: note = chemically synthesized
  source 1..20: mol_type = other DNA
tcacttttgctgtgtgtcca

SEQ ID NO: 22966 - DNA, 20 bp, synthetic construct
  misc_feature 1..20: note = chemically synthesized
  source 1..20: mol_type = other DNA
gctgtgtgtccagagctgac

SEQ ID NO: 22967 - DNA, 20 bp, synthetic construct
  misc_feature 1..20: note = chemically synthesized
  source 1..20: mol_type = other DNA
tgtgtgtccagagctgacca

SEQ ID NO: 22968 - DNA, 20 bp, synthetic construct
  misc_feature 1..20: note = chemically synthesized
  source 1..20: mol_type = other DNA
gtgtgtccagagctgaccag

SEQ ID NO: 22969 - DNA, 20 bp, synthetic construct
  misc_feature 1..20: note = chemically synthesized
  source 1..20: mol_type = other DNA
cagagctgaccagaggacaa

SEQ ID NO: 22970 - DNA, 20 bp, synthetic construct
  misc_feature 1..20: note = chemically synthesized
  source 1..20: mol_type = other DNA
agctgaccagaggacaatgg

SEQ ID NO: 22971 - DNA, 20 bp, synthetic construct
  misc_feature 1..20: note = chemically synthesized
  source 1..20: mol_type = other DNA
gacaatggcagacttattgt

SEQ ID NO: 22972 - DNA, 20 bp, synthetic construct
  misc_feature 1..20: note = chemically synthesized
  source 1..20: mol_type = other DNA
tggcagacttattgtcagac

SEQ ID NO: 22973 - DNA, 20 bp, synthetic construct
  misc_feature 1..20: note = chemically synthesized
  source 1..20: mol_type = other DNA
cagacttattgtcagactgg

SEQ ID NO: 22974 - DNA, 20 bp, synthetic construct
  misc_feature 1..20: note = chemically synthesized
  source 1..20: mol_type = other DNA
tattgtcagactggcagcac

SEQ ID NO: 22975 - DNA, 20 bp, synthetic construct
  misc_feature 1..20: note = chemically synthesized
  source 1..20: mol_type = other DNA
tcagactggcagcaccagcc

SEQ ID NO: 22976 - DNA, 20 bp, synthetic construct
  misc_feature 1..20: note = chemically synthesized
  source 1..20: mol_type = other DNA
cctagtgctctgtctctgcc

SEQ ID NO: 22977 - DNA, 20 bp, synthetic construct
  misc_feature 1..20: note = chemically synthesized
  source 1..20: mol_type = other DNA
ctagtgctctgtctctgcct

SEQ ID NO: 22978 - DNA, 20 bp, synthetic construct
  misc_feature 1..20: note = chemically synthesized
  source 1..20: mol_type = other DNA
ctctgtctctgcctgggaaa

SEQ ID NO: 22979 - DNA, 20 bp, synthetic construct
  misc_feature 1..20: note = chemically synthesized
  source 1..20: mol_type = other DNA
gcctgggaaatggtttcaca

SEQ ID NO: 22980 - DNA, 20 bp, synthetic construct
  misc_feature 1..20: note = chemically synthesized
  source 1..20: mol_type = other DNA
gaaatggtttcacaaagctc

SEQ ID NO: 22981 - DNA, 20 bp, synthetic construct
  misc_feature 1..20: note = chemically synthesized
  source 1..20: mol_type = other DNA
acaaagctccagttctgccc

SEQ ID NO: 22982 - DNA, 20 bp, synthetic construct
  misc_feature 1..20: note = chemically synthesized
  source 1..20: mol_type = other DNA
tgccctggacacttgcctca

SEQ ID NO: 22983 - DNA, 20 bp, synthetic construct
  misc_feature 1..20: note = chemically synthesized
  source 1..20: mol_type = other DNA
gccctggacacttgcctcat

SEQ ID NO: 22984 - DNA, 20 bp, synthetic construct
  misc_feature 1..20: note = chemically synthesized
  source 1..20: mol_type = other DNA
ccctggacacttgcctcata

SEQ ID NO: 22985 - DNA, 20 bp, synthetic construct
  misc_feature 1..20: note = chemically synthesized
  source 1..20: mol_type = other DNA
agggctatccctttgcccct

SEQ ID NO: 22986 - DNA, 20 bp, synthetic construct
  misc_feature 1..20: note = chemically synthesized
  source 1..20: mol_type = other DNA
ttgcccctcagtaacaccac

SEQ ID NO: 22987 - DNA, 20 bp, synthetic construct
  misc_feature 1..20: note = chemically synthesized
  source 1..20: mol_type = other DNA
tgcccctcagtaacaccact

SEQ ID NO: 22988 - DNA, 20 bp, synthetic construct
  misc_feature 1..20: note = chemically synthesized
  source 1..20: mol_type = other DNA
cctcagtaacaccactggga

SEQ ID NO: 22989 - DNA, 20 bp, synthetic construct
  misc_feature 1..20: note = chemically synthesized
  source 1..20: mol_type = other DNA
cccaccctgtcccccatctg

SEQ ID NO: 22990 - DNA, 20 bp, synthetic construct
  misc_feature 1..20: note = chemically synthesized
  source 1..20: mol_type = other DNA
accctgtcccccatctgtgg

SEQ ID NO: 22991 - DNA, 20 bp, synthetic construct
  misc_feature 1..20: note = chemically synthesized
  source 1..20: mol_type = other DNA
tggtagcctgtgttgcctcg

SEQ ID NO: 22992 - DNA, 20 bp, synthetic construct
  misc_feature 1..20: note = chemically synthesized
  source 1..20: mol_type = other DNA
ggtagcctgtgttgcctcgt

SEQ ID NO: 22993 - DNA, 20 bp, synthetic construct
  misc_feature 1..20: note = chemically synthesized
  source 1..20: mol_type = other DNA
cctgtgttgcctcgtgggac

SEQ ID NO: 22994 - DNA, 20 bp, synthetic construct
  misc_feature 1..20: note = chemically synthesized
  source 1..20: mol_type = other DNA
ctgtgttgcctcgtgggaca

SEQ ID NO: 22995 - DNA, 20 bp, synthetic construct
  misc_feature 1..20: note = chemically synthesized
  source 1..20: mol_type = other DNA
ggcattctgtaaacgtgtat

SEQ ID NO: 22996 - DNA, 20 bp, synthetic construct
  misc_feature 1..20: note = chemically synthesized
  source 1..20: mol_type = other DNA
gtattggacttccattgctt

SEQ ID NO: 22997 - DNA, 20 bp, synthetic construct
  misc_feature 1..20: note = chemically synthesized
  source 1..20: mol_type = other DNA
tgatttgtttttccgacttc

SEQ ID NO: 22998 - DNA, 20 bp, synthetic construct
  misc_feature 1..20: note = chemically synthesized
  source 1..20: mol_type = other DNA
tccgacttccagaactttcc

SEQ ID NO: 22999 - DNA, 20 bp, synthetic construct
  misc_feature 1..20: note = chemically synthesized
  source 1..20: mol_type = other DNA
ttccagaactttcccggttc

SEQ ID NO: 23000 - DNA, 20 bp, synthetic construct
  misc_feature 1..20: note = chemically synthesized
  source 1..20: mol_type = other DNA
ctttcccggttctggttttc

SEQ ID NO: 23001 - DNA, 20 bp, synthetic construct
  misc_feature 1..20: note = chemically synthesized
  source 1..20: mol_type = other DNA
tttcccggttctggttttct

SEQ ID NO: 23002 - DNA, 20 bp, synthetic construct
  misc_feature 1..20: note = chemically synthesized
  source 1..20: mol_type = other DNA
tccgtaatccatttcctgca

SEQ ID NO: 23003 - DNA, 20 bp, synthetic construct
  misc_feature 1..20: note = chemically synthesized
  source 1..20: mol_type = other DNA
ccgtaatccatttcctgcac

SEQ ID NO: 23004 - DNA, 20 bp, synthetic construct
  misc_feature 1..20: note = chemically synthesized
  source 1..20: mol_type = other DNA
gctttcaatcatctcccctc

SEQ ID NO: 23005 - DNA, 20 bp, synthetic construct
  misc_feature 1..20: note = chemically synthesized
  source 1..20: mol_type = other DNA
tctcccctccggttatccta

SEQ ID NO: 23006 - DNA, 20 bp, synthetic construct
  misc_feature 1..20: note = chemically synthesized
  source 1..20: mol_type = other DNA
tcaattgacttttcacatat

SEQ ID NO: 23007 - DNA, 20 bp, synthetic construct
  misc_feature 1..20: note = chemically synthesized
  source 1..20: mol_type = other DNA
caattgacttttcacatatg

SEQ ID NO: 23008 - DNA, 20 bp, synthetic construct
  misc_feature 1..20: note = chemically synthesized
  source 1..20: mol_type = other DNA
aattgacttttcacatatga

SEQ ID NO: 23009 - DNA, 20 bp, synthetic construct
  misc_feature 1..20: note = chemically synthesized
  source 1..20: mol_type = other DNA
tcacatatgagggtgacctc

SEQ ID NO: 23010 - DNA, 20 bp, synthetic construct
  misc_feature 1..20: note = chemically synthesized
  source 1..20: mol_type = other DNA
acctctggatcccttctctt

SEQ ID NO: 23011 - DNA, 20 bp, synthetic construct
  misc_feature 1..20: note = chemically synthesized
  source 1..20: mol_type = other DNA
ggtttgtttgttctcttttc

SEQ ID NO: 23012 - DNA, 20 bp, synthetic construct
  misc_feature 1..20: note = chemically synthesized
  source 1..20: mol_type = other DNA
tttgtttgttctcttttcca

SEQ ID NO: 23013 - DNA, 20 bp, synthetic construct
  misc_feature 1..20: note = chemically synthesized
  source 1..20: mol_type = other DNA
tgttctcttttccagagctg

SEQ ID NO: 23014 - DNA, 20 bp, synthetic construct
  misc_feature 1..20: note = chemically synthesized
  source 1..20: mol_type = other DNA
cagagctgcagtatgtttct

SEQ ID NO: 23015 - DNA, 20 bp, synthetic construct
  misc_feature 1..20: note = chemically synthesized
  source 1..20: mol_type = other DNA
agagctgcagtatgtttctt

SEQ ID NO: 23016 - DNA, 20 bp, synthetic construct
  misc_feature 1..20: note = chemically synthesized
  source 1..20: mol_type = other DNA
ttcttaggtgttttaaaaaa

SEQ ID NO: 23017 - DNA, 20 bp, synthetic construct
  misc_feature 1..20: note = chemically synthesized
  source 1..20: mol_type = other DNA
aggtgttttaaaaaatagct

SEQ ID NO: 23018 - DNA, 20 bp, synthetic construct
  misc_feature 1..20: note = chemically synthesized
  source 1..20: mol_type = other DNA
ttttaaaaaatagctaagaa

SEQ ID NO: 23019 - DNA, 20 bp, synthetic construct
  misc_feature 1..20: note = chemically synthesized
  source 1..20: mol_type = other DNA
gtgaaaacacccttgtaatt

SEQ ID NO: 23020 - DNA, 20 bp, synthetic construct
  misc_feature 1..20: note = chemically synthesized
  source 1..20: mol_type = other DNA
gaaaacacccttgtaattta

SEQ ID NO: 23021 - DNA, 20 bp, synthetic construct
  misc_feature 1..20: note = chemically synthesized
  source 1..20: mol_type = other DNA
ccttgtaatttagagactct

SEQ ID NO: 23022 - DNA, 20 bp, synthetic construct
  misc_feature 1..20: note = chemically synthesized
  source 1..20: mol_type = other DNA
agagactctcagaaaaatga

SEQ ID NO: 23023 - DNA, 20 bp, synthetic construct
  misc_feature 1..20: note = chemically synthesized
  source 1..20: mol_type = other DNA
agaaaaatgacagcaccatt

SEQ ID NO: 23024 - DNA, 20 bp, synthetic construct
  misc_feature 1..20: note = chemically synthesized
  source 1..20: mol_type = other DNA
aaaaatgacagcaccattta

SEQ ID NO: 23025 - DNA, 20 bp, synthetic construct
  misc_feature 1..20: note = chemically synthesized
  source 1..20: mol_type = other DNA
tgacagcaccatttagagcc

SEQ ID NO: 23026 - DNA, 20 bp, synthetic construct
  misc_feature 1..20: note = chemically synthesized
  source 1..20: mol_type = other DNA
ccatttagagcctggaatta

SEQ ID NO: 23027 - DNA, 20 bp, synthetic construct
  misc_feature 1..20: note = chemically synthesized
  source 1..20: mol_type = other DNA
tcactgtgccttctctgccc

SEQ ID NO: 23028 - DNA, 20 bp, synthetic construct
  misc_feature 1..20: note = chemically synthesized
  source 1..20: mol_type = other DNA
cactgtgccttctctgcccc

SEQ ID NO: 23029 - DNA, 20 bp, synthetic construct
  misc_feature 1..20: note = chemically synthesized
  source 1..20: mol_type = other DNA
ttctctgccccaggctccca

SEQ ID NO: 23030 - DNA, 20 bp, synthetic construct
  misc_feature 1..20: note = chemically synthesized
  source 1..20: mol_type = other DNA
tctgccccaggctcccatgg

SEQ ID NO: 23031 - DNA, 20 bp, synthetic construct
  misc_feature 1..20: note = chemically synthesized
  source 1..20: mol_type = other DNA
ccccaggctcccatggtggc

SEQ ID NO: 23032 - DNA, 20 bp, synthetic construct
  misc_feature 1..20: note = chemically synthesized
  source 1..20: mol_type = other DNA
cccaggctcccatggtggca

SEQ ID NO: 23033 - DNA, 20 bp, synthetic construct
  misc_feature 1..20: note = chemically synthesized
  source 1..20: mol_type = other DNA
ccaggctcccatggtggcaa

SEQ ID NO: 23034 - DNA, 20 bp, synthetic construct
  misc_feature 1..20: note = chemically synthesized
  source 1..20: mol_type = other DNA
cccatggtggcaagggtttt

SEQ ID NO: 23035 - DNA, 20 bp, synthetic construct
  misc_feature 1..20: note = chemically synthesized
  source 1..20: mol_type = other DNA
tggtggcaagggtttttggt

SEQ ID NO: 23036 - DNA, 20 bp, synthetic construct
  misc_feature 1..20: note = chemically synthesized
  source 1..20: mol_type = other DNA
ggtggcaagggtttttggtt

SEQ ID NO: 23037 - DNA, 20 bp, synthetic construct
  misc_feature 1..20: note = chemically synthesized
  source 1..20: mol_type = other DNA
gtggcaagggtttttggttg

SEQ ID NO: 23038 - DNA, 20 bp, synthetic construct
  misc_feature 1..20: note = chemically synthesized
  source 1..20: mol_type = other DNA
tggcaagggtttttggttgg

SEQ ID NO: 23039 - DNA, 20 bp, synthetic construct
  misc_feature 1..20: note = chemically synthesized
  source 1..20: mol_type = other DNA
caagggtttttggttggggg

SEQ ID NO: 23040 - DNA, 20 bp, synthetic construct
  misc_feature 1..20: note = chemically synthesized
  source 1..20: mol_type = other DNA
aagggtttttggttggggga

SEQ ID NO: 23041 - DNA, 20 bp, synthetic construct
  misc_feature 1..20: note = chemically synthesized
  source 1..20: mol_type = other DNA
agggtttttggttgggggaa

SEQ ID NO: 23042 - DNA, 20 bp, synthetic construct
  misc_feature 1..20: note = chemically synthesized
  source 1..20: mol_type = other DNA
gggtttttggttgggggaag

SEQ ID NO: 23043 - DNA, 20 bp, synthetic construct
  misc_feature 1..20: note = chemically synthesized
  source 1..20: mol_type = other DNA
gtattgaattgcctgtcttt

SEQ ID NO: 23044 - DNA, 20 bp, synthetic construct
  misc_feature 1..20: note = chemically synthesized
  source 1..20: mol_type = other DNA
ttgaattgcctgtctttgag

SEQ ID NO: 23045 - DNA, 20 bp, synthetic construct
  misc_feature 1..20: note = chemically synthesized
  source 1..20: mol_type = other DNA
tgaattgcctgtctttgagc

SEQ ID NO: 23046 - DNA, 20 bp, synthetic construct
  misc_feature 1..20: note = chemically synthesized
  source 1..20: mol_type = other DNA
tgcctgtctttgagcaggaa

SEQ ID NO: 23047 - DNA, 20 bp, synthetic construct
  misc_feature 1..20: note = chemically synthesized
  source 1..20: mol_type = other DNA
tttgagcaggaaaagaatta

SEQ ID NO: 23048 - DNA, 20 bp, synthetic construct
  misc_feature 1..20: note = chemically synthesized
  source 1..20: mol_type = other DNA
ggaaaagaattacagttttc

SEQ ID NO: 23049 - DNA, 20 bp, synthetic construct
  misc_feature 1..20: note = chemically synthesized
  source 1..20: mol_type = other DNA
gaaaagaattacagttttcc

SEQ ID NO: 23050 - DNA, 20 bp, synthetic construct
  misc_feature 1..20: note = chemically synthesized
  source 1..20: mol_type = other DNA
tttgtgtgtatgtgctgatt

SEQ ID NO: 23051 - DNA, 20 bp, synthetic construct
  misc_feature 1..20: note = chemically synthesized
  source 1..20: mol_type = other DNA
ttgtgtgtatgtgctgattg

SEQ ID NO: 23052 - DNA, 20 bp, synthetic construct
  misc_feature 1..20: note = chemically synthesized
  source 1..20: mol_type = other DNA
tgtgtgtatgtgctgattga

SEQ ID NO: 23053 - DNA, 20 bp, synthetic construct
  misc_feature 1..20: note = chemically synthesized
  source 1..20: mol_type = other DNA
gtgctgattgagggcccatt

SEQ ID NO: 23054 - DNA, 20 bp, synthetic construct
  misc_feature 1..20: note = chemically synthesized
  source 1..20: mol_type = other DNA
attgagaatattttgacttt

SEQ ID NO: 23055 - DNA, 20 bp, synthetic construct
  misc_feature 1..20: note = chemically synthesized
  source 1..20: mol_type = other DNA
ttgagaatattttgactttt

SEQ ID NO: 23056 - DNA, 20 bp, synthetic construct
  misc_feature 1..20: note = chemically synthesized
  source 1..20: mol_type = other DNA
tgagaatattttgactttta

SEQ ID NO: 23057 - DNA, 20 bp, synthetic construct
  misc_feature 1..20: note = chemically synthesized
  source 1..20: mol_type = other DNA
gaatattttgacttttaggg

SEQ ID NO: 23058 - DNA, 20 bp, synthetic construct
  misc_feature 1..20: note = chemically synthesized
  source 1..20: mol_type = other DNA
agctccaaactctcaaacca

SEQ ID NO: 23059 - DNA, 20 bp, synthetic construct
  misc_feature 1..20: note = chemically synthesized
  source 1..20: mol_type = other DNA
gctccaaactctcaaaccac

SEQ ID NO: 23060 - DNA, 20 bp, synthetic construct
  misc_feature 1..20: note = chemically synthesized
  source 1..20: mol_type = other DNA
ctccaaactctcaaaccaca

SEQ ID NO: 23061 - DNA, 20 bp, synthetic construct
  misc_feature 1..20: note = chemically synthesized
  source 1..20: mol_type = other DNA
tctgttatgacgttatatgt

SEQ ID NO: 23062 - DNA, 20 bp, synthetic construct
  misc_feature 1..20: note = chemically synthesized
  source 1..20: mol_type = other DNA
gttatatgtaagcatcacaa

SEQ ID NO: 23063 - DNA, 20 bp, synthetic construct
  misc_feature 1..20: note = chemically synthesized
  source 1..20: mol_type = other DNA
ttatatgtaagcatcacaac

SEQ ID NO: 23064 - DNA, 20 bp, synthetic construct
  misc_feature 1..20: note = chemically synthesized
  source 1..20: mol_type = other DNA
tatgtaagcatcacaacagg

SEQ ID NO: 23065 - DNA, 20 bp, synthetic construct
  misc_feature 1..20: note = chemically synthesized
  source 1..20: mol_type = other DNA
tgtaagcatcacaacaggca

SEQ ID NO: 23066 - DNA, 20 bp, synthetic construct
  misc_feature 1..20: note = chemically synthesized
  source 1..20: mol_type = other DNA
agaatgtctgcaccccaccc

SEQ ID NO: 23067 - DNA, 20 bp, synthetic construct
  misc_feature 1..20: note = chemically synthesized
  source 1..20: mol_type = other DNA
ctgcaccccaccctggaaaa

SEQ ID NO: 23068 - DNA, 20 bp, synthetic construct
  misc_feature 1..20: note = chemically synthesized
  source 1..20: mol_type = other DNA
aacagcctgactgtgcccca

SEQ ID NO: 23069 - DNA, 20 bp, synthetic construct
  misc_feature 1..20: note = chemically synthesized
  source 1..20: mol_type = other DNA
acagcctgactgtgccccat

SEQ ID NO: 23070 - DNA, 20 bp, synthetic construct
  misc_feature 1..20: note = chemically synthesized
  source 1..20: mol_type = other DNA
actgtgccccatgggcaaac

SEQ ID NO: 23071 - DNA, 20 bp, synthetic construct
  misc_feature 1..20: note = chemically synthesized
  source 1..20: mol_type = other DNA
gccccatgggcaaaccagac

SEQ ID NO: 23072 - DNA, 20 bp, synthetic construct
  misc_feature 1..20: note = chemically synthesized
  source 1..20: mol_type = other DNA
gggcaaaccagactagttta

SEQ ID NO: 23073 - DNA, 20 bp, synthetic construct
  misc_feature 1..20: note = chemically synthesized
  source 1..20: mol_type = other DNA
ggcaaaccagactagtttat

SEQ ID NO: 23074 - DNA, 20 bp, synthetic construct
  misc_feature 1..20: note = chemically synthesized
  source 1..20: mol_type = other DNA
gcaaaccagactagtttata

SEQ ID NO: 23075 - DNA, 20 bp, synthetic construct
  misc_feature 1..20: note = chemically synthesized
  source 1..20: mol_type = other DNA
caaaccagactagtttatag

SEQ ID NO: 23076 - DNA, 20 bp, synthetic construct
  misc_feature 1..20: note = chemically synthesized
  source 1..20: mol_type = other DNA
aaaccagactagtttatagg

SEQ ID NO: 23077 - DNA, 20 bp, synthetic construct
  misc_feature 1..20: note = chemically synthesized
  source 1..20: mol_type = other DNA
tttatagggggttctactct

SEQ ID NO: 23078 - DNA, 20 bp, synthetic construct
  misc_feature 1..20: note = chemically synthesized
  source 1..20: mol_type = other DNA
ttatagggggttctactctg

SEQ ID NO: 23079 - DNA, 20 bp, synthetic construct
  misc_feature 1..20: note = chemically synthesized
  source 1..20: mol_type = other DNA
gttctactctgaggtactga

SEQ ID NO: 23080 - DNA, 20 bp, synthetic construct
  misc_feature 1..20: note = chemically synthesized
  source 1..20: mol_type = other DNA
tctgaggtactgatggacct

SEQ ID NO: 23081 - DNA, 20 bp, synthetic construct
  misc_feature 1..20: note = chemically synthesized
  source 1..20: mol_type = other DNA
ctgaggtactgatggacctt

SEQ ID NO: 23082 - DNA, 20 bp, synthetic construct
  misc_feature 1..20: note = chemically synthesized
  source 1..20: mol_type = other DNA
ttgggtgctattcctgtgat

SEQ ID NO: 23083 - DNA, 20 bp, synthetic construct
  misc_feature 1..20: note = chemically synthesized
  source 1..20: mol_type = other DNA
tgggtgctattcctgtgata

SEQ ID NO: 23084 - DNA, 20 bp, synthetic construct
  misc_feature 1..20: note = chemically synthesized
  source 1..20: mol_type = other DNA
gtgctattcctgtgataagg

SEQ ID NO: 23085 - DNA, 20 bp, synthetic construct
  misc_feature 1..20: note = chemically synthesized
  source 1..20: mol_type = other DNA
tgctattcctgtgataagga

SEQ ID NO: 23086 - DNA, 20 bp, synthetic construct
  misc_feature 1..20: note = chemically synthesized
  source 1..20: mol_type = other DNA
tattcctgtgataaggaagg

SEQ ID NO: 23087 - DNA, 20 bp, synthetic construct
  misc_feature 1..20: note = chemically synthesized
  source 1..20: mol_type = other DNA
cctgtgataaggaaggcagc

SEQ ID NO: 23088 - DNA, 20 bp, synthetic construct
  misc_feature 1..20: note = chemically synthesized
  source 1..20: mol_type = other DNA
tgataaggaaggcagctaga

SEQ ID NO: 23089 - DNA, 20 bp, synthetic construct
  misc_feature 1..20: note = chemically synthesized
  source 1..20: mol_type = other DNA
gataaggaaggcagctagac

SEQ ID NO: 23090 - DNA, 20 bp, synthetic construct
  misc_feature 1..20: note = chemically synthesized
  source 1..20: mol_type = other DNA
gaaggcagctagacaggact

SEQ ID NO: 23091 - DNA, 20 bp, synthetic construct
  misc_feature 1..20: note = chemically synthesized
  source 1..20: mol_type = other DNA
aaggcagctagacaggactt

SEQ ID NO: 23092 - DNA, 20 bp, synthetic construct
  misc_feature 1..20: note = chemically synthesized
  source 1..20: mol_type = other DNA
ggcagctagacaggacttgg

SEQ ID NO: 23093 - DNA, 20 bp, synthetic construct
  misc_feature 1..20: note = chemically synthesized
  source 1..20: mol_type = other DNA
caggacttgggagttatctg

SEQ ID NO: 23094 - DNA, 20 bp, synthetic construct
  misc_feature 1..20: note = chemically synthesized
  source 1..20: mol_type = other DNA
acttgggagttatctgtagt

SEQ ID NO: 23095 - DNA, 20 bp, synthetic construct
  misc_feature 1..20: note = chemically synthesized
  source 1..20: mol_type = other DNA
gggagttatctgtagtgaga

SEQ ID NO: 23096 - DNA, 20 bp, synthetic construct
  misc_feature 1..20: note = chemically synthesized
  source 1..20: mol_type = other DNA
tctgtagtgagatggctgaa

SEQ ID NO: 23097 - DNA, 20 bp, synthetic construct
  misc_feature 1..20: note = chemically synthesized
  source 1..20: mol_type = other DNA
gagatggctgaaaagcgata

SEQ ID NO: 23098 - DNA, 20 bp, synthetic construct
  misc_feature 1..20: note = chemically synthesized
  source 1..20: mol_type = other DNA
agatggctgaaaagcgatac

SEQ ID NO: 23099 - DNA, 20 bp, synthetic construct
  misc_feature 1..20: note = chemically synthesized
  source 1..20: mol_type = other DNA
gatggctgaaaagcgataca

SEQ ID NO: 23100 - DNA, 20 bp, synthetic construct
  misc_feature 1..20: note = chemically synthesized
  source 1..20: mol_type = other DNA
gctgaaaagcgatacagggc

SEQ ID NO: 23101 - DNA, 20 bp, synthetic construct
  misc_feature 1..20: note = chemically synthesized
  source 1..20: mol_type = other DNA
acagggctggctctatgccc

SEQ ID NO: 23102 - DNA, 20 bp, synthetic construct
  misc_feature 1..20: note = chemically synthesized
  source 1..20: mol_type = other DNA
cagggctggctctatgcccc

SEQ ID NO: 23103 - DNA, 20 bp, synthetic construct
  misc_feature 1..20: note = chemically synthesized
  source 1..20: mol_type = other DNA
tctatgccccaggtgtgcat

SEQ ID NO: 23104 - DNA, 20 bp, synthetic construct
  misc_feature 1..20: note = chemically synthesized
  source 1..20: mol_type = other DNA
tgccccaggtgtgcataagt

SEQ ID NO: 23105 - DNA, 20 bp, synthetic construct
  misc_feature 1..20: note = chemically synthesized
  source 1..20: mol_type = other DNA
ccccaggtgtgcataagtaa

SEQ ID NO: 23106 - DNA, 20 bp, synthetic construct
  misc_feature 1..20: note = chemically synthesized
  source 1..20: mol_type = other DNA
caggtgtgcataagtaagag

SEQ ID NO: 23107 - DNA, 20 bp, synthetic construct
  misc_feature 1..20: note = chemically synthesized
  source 1..20: mol_type = other DNA
tgtgcataagtaagagcaga

SEQ ID NO: 23108 - DNA, 20 bp, synthetic construct
  misc_feature 1..20: note = chemically synthesized
  source 1..20: mol_type = other DNA
taagagcagatagctgattc

SEQ ID NO: 23109 - DNA, 20 bp, synthetic construct
  misc_feature 1..20: note = chemically synthesized
  source 1..20: mol_type = other DNA
agatagctgattccagtgca

SEQ ID NO: 23110 - DNA, 20 bp, synthetic construct
  misc_feature 1..20: note = chemically synthesized
  source 1..20: mol_type = other DNA
attccagtgcaaagtccata

SEQ ID NO: 23111 - DNA, 20 bp, synthetic construct
  misc_feature 1..20: note = chemically synthesized
  source 1..20: mol_type = other DNA
ttccagtgcaaagtccatac

SEQ ID NO: 23112 - DNA, 20 bp, synthetic construct
  misc_feature 1..20: note = chemically synthesized
  source 1..20: mol_type = other DNA
agtccatacaggtaataaca

SEQ ID NO: 23113 - DNA, 20 bp, synthetic construct
  misc_feature 1..20: note = chemically synthesized
  source 1..20: mol_type = other DNA
gtccatacaggtaataacat

SEQ ID NO: 23114 - DNA, 20 bp, synthetic construct
  misc_feature 1..20: note = chemically synthesized
  source 1..20: mol_type = other DNA
atacaggtaataacataggc

SEQ ID NO: 23115 - DNA, 20 bp, synthetic construct
  misc_feature 1..20: note = chemically synthesized
  source 1..20: mol_type = other DNA
ggtaataacataggccagaa

SEQ ID NO: 23116 - DNA, 20 bp, synthetic construct
  misc_feature 1..20: note = chemically synthesized
  source 1..20: mol_type = other DNA
taataacataggccagaaaa

SEQ ID NO: 23117 - DNA, 20 bp, synthetic construct
  misc_feature 1..20: note = chemically synthesized
  source 1..20: mol_type = other DNA
cataggccagaaaagagata

SEQ ID NO: 23118 - DNA, 20 bp, synthetic construct
  misc_feature 1..20: note = chemically synthesized
  source 1..20: mol_type = other DNA
agagatatggcatctactct

SEQ ID NO: 23119 - DNA, 20 bp, synthetic construct
  misc_feature 1..20: note = chemically synthesized
  source 1..20: mol_type = other DNA
tactcttagacataacacac

SEQ ID NO: 23120 - DNA, 20 bp, synthetic construct
  misc_feature 1..20: note = chemically synthesized
  source 1..20: mol_type = other DNA
actcttagacataacacacc

SEQ ID NO: 23121 - DNA, 20 bp, synthetic construct
  misc_feature 1..20: note = chemically synthesized
  source 1..20: mol_type = other DNA
ctcttagacataacacacca

SEQ ID NO: 23122 - DNA, 20 bp, synthetic construct
  misc_feature 1..20: note = chemically synthesized
  source 1..20: mol_type = other DNA
ccagggtcaatacaactttg

SEQ ID NO: 23123 - DNA, 20 bp, synthetic construct
  misc_feature 1..20: note = chemically synthesized
  source 1..20: mol_type = other DNA
ggtcaatacaactttgaagc

SEQ ID NO: 23124 - DNA, 20 bp, synthetic construct
  misc_feature 1..20: note = chemically synthesized
  source 1..20: mol_type = other DNA
atacaactttgaagctagtc

SEQ ID NO: 23125 - DNA, 20 bp, synthetic construct
  misc_feature 1..20: note = chemically synthesized
  source 1..20: mol_type = other DNA
ctttgaagctagtctagtgc

SEQ ID NO: 23126 - DNA, 20 bp, synthetic construct
  misc_feature 1..20: note = chemically synthesized
  source 1..20: mol_type = other DNA
gctagtctagtgcaagctaa

SEQ ID NO: 23127 - DNA, 20 bp, synthetic construct
  misc_feature 1..20: note = chemically synthesized
  source 1..20: mol_type = other DNA
gctaacagttgcttttatca

SEQ ID NO: 23128 - DNA, 20 bp, synthetic construct
  misc_feature 1..20: note = chemically synthesized
  source 1..20: mol_type = other DNA
ctaacagttgcttttatcac

SEQ ID NO: 23129 - DNA, 20 bp, synthetic construct
  misc_feature 1..20: note = chemically synthesized
  source 1..20: mol_type = other DNA
gttgcttttatcacaggctc

SEQ ID NO: 23130 - DNA, 20 bp, synthetic construct
  misc_feature 1..20: note = chemically synthesized
  source 1..20: mol_type = other DNA
ttgcttttatcacaggctcc

SEQ ID NO: 23131 - DNA, 20 bp, synthetic construct
  misc_feature 1..20: note = chemically synthesized
  source 1..20: mol_type = other DNA
cttttatcacaggctccagg

SEQ ID NO: 23132 - DNA, 20 bp, synthetic construct
  misc_feature 1..20: note = chemically synthesized
  source 1..20: mol_type = other DNA
ttttatcacaggctccagga

SEQ ID NO: 23133 - DNA, 20 bp, synthetic construct
  misc_feature 1..20: note = chemically synthesized
  source 1..20: mol_type = other DNA
tttatcacaggctccaggaa

SEQ ID NO: 23134 - DNA, 20 bp, synthetic construct
  misc_feature 1..20: note = chemically synthesized
  source 1..20: mol_type = other DNA
cacaggctccaggaagggtt

SEQ ID NO: 23135 - DNA, 20 bp, synthetic construct
  misc_feature 1..20: note = chemically synthesized
  source 1..20: mol_type = other DNA
ggaagggtttggcctctgat

SEQ ID NO: 23136 - DNA, 20 bp, synthetic construct
  misc_feature 1..20: note = chemically synthesized
  source 1..20: mol_type = other DNA
gaagggtttggcctctgatt

SEQ ID NO: 23137 - DNA, 20 bp, synthetic construct
  misc_feature 1..20: note = chemically synthesized
  source 1..20: mol_type = other DNA
aagggtttggcctctgatta

SEQ ID NO: 23138 - DNA, 20 bp, synthetic construct
  misc_feature 1..20: note = chemically synthesized
  source 1..20: mol_type = other DNA
ggtttggcctctgattaggg

SEQ ID NO: 23139 - DNA, 20 bp, synthetic construct
  misc_feature 1..20: note = chemically synthesized
  source 1..20: mol_type = other DNA
gtttggcctctgattagggt

SEQ ID NO: 23140 - DNA, 20 bp, synthetic construct
  misc_feature 1..20: note = chemically synthesized
  source 1..20: mol_type = other DNA
tttggcctctgattagggtg

SEQ ID NO: 23141 - DNA, 20 bp, synthetic construct
  misc_feature 1..20: note = chemically synthesized
  source 1..20: mol_type = other DNA
ttggcctctgattagggtgg

SEQ ID NO: 23142 - DNA, 20 bp, synthetic construct
  misc_feature 1..20: note = chemically synthesized
  source 1..20: mol_type = other DNA
ctctgattagggtgggggcg

SEQ ID NO: 23143 - DNA, 20 bp, synthetic construct
  misc_feature 1..20: note = chemically synthesized
  source 1..20: mol_type = other DNA
tctgattagggtgggggcgt

SEQ ID NO: 23144 - DNA, 20 bp, synthetic construct
  misc_feature 1..20: note = chemically synthesized
  source 1..20: mol_type = other DNA
gattagggtgggggcgtggg

SEQ ID NO: 23145 - DNA, 20 bp, synthetic construct
  misc_feature 1..20: note = chemically synthesized
  source 1..20: mol_type = other DNA
attagggtgggggcgtgggt

SEQ ID NO: 23146 - DNA, 20 bp, synthetic construct
  misc_feature 1..20: note = chemically synthesized
  source 1..20: mol_type = other DNA
ttagggtgggggcgtgggtg

SEQ ID NO: 23147 - DNA, 20 bp, synthetic construct
  misc_feature 1..20: note = chemically synthesized
  source 1..20: mol_type = other DNA
gggtgggggcgtgggtgggg

SEQ ID NO: 23148 - DNA, 20 bp, synthetic construct
  misc_feature 1..20: note = chemically synthesized
  source 1..20: mol_type = other DNA
tgggggcgtgggtggggtag

SEQ ID NO: 23149 - DNA, 20 bp, synthetic construct
  misc_feature 1..20: note = chemically synthesized
  source 1..20: mol_type = other DNA
ggggcgtgggtggggtagaa

SEQ ID NO: 23150 - DNA, 20 bp, synthetic construct
  misc_feature 1..20: note = chemically synthesized
  source 1..20: mol_type = other DNA
gggcgtgggtggggtagaag

SEQ ID NO: 23151 - DNA, 20 bp, synthetic construct
  misc_feature 1..20: note = chemically synthesized
  source 1..20: mol_type = other DNA
tgggtggggtagaagaggac

SEQ ID NO: 23152 - DNA, 20 bp, synthetic construct
  misc_feature 1..20: note = chemically synthesized
  source 1..20: mol_type = other DNA
gtggggtagaagaggactgg

SEQ ID NO: 23153 - DNA, 20 bp, synthetic construct
  misc_feature 1..20: note = chemically synthesized
  source 1..20: mol_type = other DNA
ggactggcagacctctccat

SEQ ID NO: 23154 - DNA, 20 bp, synthetic construct
  misc_feature 1..20: note = chemically synthesized
  source 1..20: mol_type = other DNA
ctggcagacctctccatcgg

SEQ ID NO: 23155 - DNA, 20 bp, synthetic construct
  misc_feature 1..20: note = chemically synthesized
  source 1..20: mol_type = other DNA
tccatcggtggccgtttgcc

SEQ ID NO: 23156 - DNA, 20 bp, synthetic construct
  misc_feature 1..20: note = chemically synthesized
  source 1..20: mol_type = other DNA
ccatcggtggccgtttgccc

SEQ ID NO: 23157 - DNA, 20 bp, synthetic construct
  misc_feature 1..20: note = chemically synthesized
  source 1..20: mol_type = other DNA
catcggtggccgtttgccca

SEQ ID NO: 23158 - DNA, 20 bp, synthetic construct
  misc_feature 1..20: note = chemically synthesized
  source 1..20: mol_type = other DNA
atcggtggccgtttgcccag

SEQ ID NO: 23159 - DNA, 20 bp, synthetic construct
  misc_feature 1..20: note = chemically synthesized
  source 1..20: mol_type = other DNA
tcggtggccgtttgcccagg

SEQ ID NO: 23160 - DNA, 20 bp, synthetic construct
  misc_feature 1..20: note = chemically synthesized
  source 1..20: mol_type = other DNA
cggtggccgtttgcccaggg

SEQ ID NO: 23161 - DNA, 20 bp, synthetic construct
  misc_feature 1..20: note = chemically synthesized
  source 1..20: mol_type = other DNA
ttgcccaggggggcctcttt

SEQ ID NO: 23162 - DNA, 20 bp, synthetic construct
  misc_feature 1..20: note = chemically synthesized
  source 1..20: mol_type = other DNA
cccaggggggcctctttcgg

SEQ ID NO: 23163 - DNA, 20 bp, synthetic construct
  misc_feature 1..20: note = chemically synthesized
  source 1..20: mol_type = other DNA
ccaggggggcctctttcgga

SEQ ID NO: 23164 - DNA, 20 bp, synthetic construct
  misc_feature 1..20: note = chemically synthesized
  source 1..20: mol_type = other DNA
cctctttcggaaggctctct

SEQ ID NO: 23165 - DNA, 20 bp, synthetic construct
  misc_feature 1..20: note = chemically synthesized
  source 1..20: mol_type = other DNA
tcggaaggctctcttggtga

SEQ ID NO: 23166 - DNA, 20 bp, synthetic construct
  misc_feature 1..20: note = chemically synthesized
  source 1..20: mol_type = other DNA
ggaaggctctcttggtgatg

SEQ ID NO: 23167 - DNA, 20 bp, synthetic construct
  misc_feature 1..20: note = chemically synthesized
  source 1..20: mol_type = other DNA
ctctcttggtgatggagaat

SEQ ID NO: 23168 - DNA, 20 bp, synthetic construct
  misc_feature 1..20: note = chemically synthesized
  source 1..20: mol_type = other DNA
aattggattttatttctcaa

SEQ ID NO: 23169 - DNA, 20 bp, synthetic construct
  misc_feature 1..20: note = chemically synthesized
  source 1..20: mol_type = other DNA
attggattttatttctcaat

SEQ ID NO: 23170 - DNA, 20 bp, synthetic construct
  misc_feature 1..20: note = chemically synthesized
  source 1..20: mol_type = other DNA
aatttgtatgccatgccgtg

SEQ ID NO: 23171 - DNA, 20 bp, synthetic construct
  misc_feature 1..20: note = chemically synthesized
  source 1..20: mol_type = other DNA
tgtggactcccaaaattgta

SEQ ID NO: 23172 - DNA, 20 bp, synthetic construct
  misc_feature 1..20: note = chemically synthesized
  source 1..20: mol_type = other DNA
gtggactcccaaaattgtaa

SEQ ID NO: 23173 - DNA, 20 bp, synthetic construct
  misc_feature 1..20: note = chemically synthesized
  source 1..20: mol_type = other DNA
ggactcccaaaattgtaaag

SEQ ID NO: 23174 - DNA, 20 bp, synthetic construct
  misc_feature 1..20: note = chemically synthesized
  source 1..20: mol_type = other DNA
gactcccaaaattgtaaagg

SEQ ID NO: 23175 - DNA, 20 bp, synthetic construct
  misc_feature 1..20: note = chemically synthesized
  source 1..20: mol_type = other DNA
ccaaaattgtaaaggaggtg

SEQ ID NO: 23176 - DNA, 20 bp, synthetic construct
  misc_feature 1..20: note = chemically synthesized
  source 1..20: mol_type = other DNA
attgtccatttttcatctgt

SEQ ID NO: 23177 - DNA, 20 bp, synthetic construct
  misc_feature 1..20: note = chemically synthesized
  source 1..20: mol_type = other DNA
ttgtccatttttcatctgtc

SEQ ID NO: 23178 - DNA, 20 bp, synthetic construct
  misc_feature 1..20: note = chemically synthesized
  source 1..20: mol_type = other DNA
gtccacccatccatcacata

SEQ ID NO: 23179 - DNA, 20 bp, synthetic construct
  misc_feature 1..20: note = chemically synthesized
  source 1..20: mol_type = other DNA
tccacccatccatcacatat

SEQ ID NO: 23180 - DNA, 20 bp, synthetic construct
  misc_feature 1..20: note = chemically synthesized
  source 1..20: mol_type = other DNA
catcacatataggcacctat

SEQ ID NO: 23181 - DNA, 20 bp, synthetic construct
  misc_feature 1..20: note = chemically synthesized
  source 1..20: mol_type = other DNA
atcacatataggcacctatc

SEQ ID NO: 23182 - DNA, 20 bp, synthetic construct
  misc_feature 1..20: note = chemically synthesized
  source 1..20: mol_type = other DNA
tataggcacctatcaggtac

SEQ ID NO: 23183 - DNA, 20 bp, synthetic construct
  misc_feature 1..20: note = chemically synthesized
  source 1..20: mol_type = other DNA
tcaggtaccagctactgtgt

SEQ ID NO: 23184 - DNA, 20 bp, synthetic construct
  misc_feature 1..20: note = chemically synthesized
  source 1..20: mol_type = other DNA
caggtaccagctactgtgtt

SEQ ID NO: 23185 - DNA, 20 bp, synthetic construct
  misc_feature 1..20: note = chemically synthesized
  source 1..20: mol_type = other DNA
ccttttcttctgacccaaac

SEQ ID NO: 23186 - DNA, 20 bp, synthetic construct
  misc_feature 1..20: note = chemically synthesized
  source 1..20: mol_type = other DNA
cttttcttctgacccaaact

SEQ ID NO: 23187 - DNA, 20 bp, synthetic construct
  misc_feature 1..20: note = chemically synthesized
  source 1..20: mol_type = other DNA
ttctgacccaaactaggaat

SEQ ID NO: 23188 - DNA, 20 bp, synthetic construct
  misc_feature 1..20: note = chemically synthesized
  source 1..20: mol_type = other DNA
tctgacccaaactaggaatt

SEQ ID NO: 23189 - DNA, 20 bp, synthetic construct
  misc_feature 1..20: note = chemically synthesized
  source 1..20: mol_type = other DNA
ctgacccaaactaggaattg

SEQ ID NO: 23190 - DNA, 20 bp, synthetic construct
  misc_feature 1..20: note = chemically synthesized
  source 1..20: mol_type = other DNA
cccaaactaggaattgggga

SEQ ID NO: 23191 - DNA, 20 bp, synthetic construct
  misc_feature 1..20: note = chemically synthesized
  source 1..20: mol_type = other DNA
ccaaactaggaattggggaa

SEQ ID NO: 23192 - DNA, 20 bp, synthetic construct
  misc_feature 1..20: note = chemically synthesized
  source 1..20: mol_type = other DNA
caaactaggaattggggaaa

SEQ ID NO: 23193 - DNA, 20 bp, synthetic construct
  misc_feature 1..20: note = chemically synthesized
  source 1..20: mol_type = other DNA
ctgataactttgtttctgct

SEQ ID NO: 23194 - DNA, 20 bp, synthetic construct
  misc_feature 1..20: note = chemically synthesized
  source 1..20: mol_type = other DNA
tgataactttgtttctgctg

SEQ ID NO: 23195 - DNA, 20 bp, synthetic construct
  misc_feature 1..20: note = chemically synthesized
  source 1..20: mol_type = other DNA
gaggtgtaactaataaatac

SEQ ID NO: 23196 - DNA, 20 bp, synthetic construct
  misc_feature 1..20: note = chemically synthesized
  source 1..20: mol_type = other DNA
aggtgtaactaataaatacc

SEQ ID NO: 23197 - DNA, 20 bp, synthetic construct
  misc_feature 1..20: note = chemically synthesized
  source 1..20: mol_type = other DNA
gtgtaactaataaataccag

SEQ ID NO: 23198 - DNA, 20 bp, synthetic construct
  misc_feature 1..20: note = chemically synthesized
  source 1..20: mol_type = other DNA
tgtaactaataaataccagg

SEQ ID NO: 23199 - DNA, 20 bp, synthetic construct
  misc_feature 1..20: note = chemically synthesized
  source 1..20: mol_type = other DNA
aactaataaataccaggagg

SEQ ID NO: 23200 - DNA, 20 bp, synthetic construct
  misc_feature 1..20: note = chemically synthesized
  source 1..20: mol_type = other DNA
aataccaggaggcagcattt

SEQ ID NO: 23201 - DNA, 20 bp, synthetic construct
  misc_feature 1..20: note = chemically synthesized
  source 1..20: mol_type = other DNA
gaggcagcattttagttcac

SEQ ID NO: 23202 - DNA, 20 bp, synthetic construct
  misc_feature 1..20: note = chemically synthesized
  source 1..20: mol_type = other DNA
agcattttagttcacaagct

SEQ ID NO: 23203 - DNA, 20 bp, synthetic construct
  misc_feature 1..20: note = chemically synthesized
  source 1..20: mol_type = other DNA
cattttagttcacaagctcg

SEQ ID NO: 23204 - DNA, 20 bp, synthetic construct
  misc_feature 1..20: note = chemically synthesized
  source 1..20: mol_type = other DNA
tcggagcacttactctgctc

SEQ ID NO: 23205 - DNA, 20 bp, synthetic construct
  misc_feature 1..20: note = chemically synthesized
  source 1..20: mol_type = other DNA
cggagcacttactctgctct

SEQ ID NO: 23206 - DNA, 20 bp, synthetic construct
  misc_feature 1..20: note = chemically synthesized
  source 1..20: mol_type = other DNA
attttcatacaaaccctatg

SEQ ID NO: 23207 - DNA, 20 bp, synthetic construct
  misc_feature 1..20: note = chemically synthesized
  source 1..20: mol_type = other DNA
ctattattattcctatttta

SEQ ID NO: 23208 - DNA, 20 bp, synthetic construct
  misc_feature 1..20: note = chemically synthesized
  source 1..20: mol_type = other DNA
attattcctattttacggat

SEQ ID NO: 23209 - DNA, 20 bp, synthetic construct
  misc_feature 1..20: note = chemically synthesized
  source 1..20: mol_type = other DNA
tgagtccatattttaaattc

SEQ ID NO: 23210 - DNA, 20 bp, synthetic construct
  misc_feature 1..20: note = chemically synthesized
  source 1..20: mol_type = other DNA
catattttaaattccagctg

SEQ ID NO: 23211 - DNA, 20 bp, synthetic construct
  misc_feature 1..20: note = chemically synthesized
  source 1..20: mol_type = other DNA
ttttaaattccagctgaaga

SEQ ID NO: 23212 - DNA, 20 bp, synthetic construct
  misc_feature 1..20: note = chemically synthesized
  source 1..20: mol_type = other DNA
ccagctgaagaaagaacatt

SEQ ID NO: 23213 - DNA, 20 bp, synthetic construct
  misc_feature 1..20: note = chemically synthesized
  source 1..20: mol_type = other DNA
aacatttggtgataaatcat

SEQ ID NO: 23214 - DNA, 20 bp, synthetic construct
  misc_feature 1..20: note = chemically synthesized
  source 1..20: mol_type = other DNA
acatttggtgataaatcatt

SEQ ID NO: 23215 - DNA, 20 bp, synthetic construct
  misc_feature 1..20: note = chemically synthesized
  source 1..20: mol_type = other DNA
ggtgataaatcattaggaat

SEQ ID NO: 23216 - DNA, 20 bp, synthetic construct
  misc_feature 1..20: note = chemically synthesized
  source 1..20: mol_type = other DNA
ataaatcattaggaatgagc

SEQ ID NO: 23217 - DNA, 20 bp, synthetic construct
  misc_feature 1..20: note = chemically synthesized
  source 1..20: mol_type = other DNA
taaatcattaggaatgagct

SEQ ID NO: 23218 - DNA, 20 bp, synthetic construct
  misc_feature 1..20: note = chemically synthesized
  source 1..20: mol_type = other DNA
aatcattaggaatgagctag

SEQ ID NO: 23219 - DNA, 20 bp, synthetic construct
  misc_feature 1..20: note = chemically synthesized
  source 1..20: mol_type = other DNA
ctaggagttatttgtcatca

SEQ ID NO: 23220 - DNA, 20 bp, synthetic construct
  misc_feature 1..20: note = chemically synthesized
  source 1..20: mol_type = other DNA
gttatttgtcatcacagaac

SEQ ID NO: 23221 - DNA, 20 bp, synthetic construct
  misc_feature 1..20: note = chemically synthesized
  source 1..20: mol_type = other DNA
gaaccagtctgtattgcccc

SEQ ID NO: 23222 - DNA, 20 bp, synthetic construct
  misc_feature 1..20: note = chemically synthesized
  source 1..20: mol_type = other DNA
agtctgtattgccccaagtc

SEQ ID NO: 23223 - DNA, 20 bp, synthetic construct
  misc_feature 1..20: note = chemically synthesized
  source 1..20: mol_type = other DNA
ccaagtctggctttgccaat

SEQ ID NO: 23224 - DNA, 20 bp, synthetic construct
  misc_feature 1..20: note = chemically synthesized
  source 1..20: mol_type = other DNA
aagtctggctttgccaattg

SEQ ID NO: 23225 - DNA, 20 bp, synthetic construct
  misc_feature 1..20: note = chemically synthesized
  source 1..20: mol_type = other DNA
tggctttgccaattggagat

SEQ ID NO: 23226 - DNA, 20 bp, synthetic construct
  misc_feature 1..20: note = chemically synthesized
  source 1..20: mol_type = other DNA
ggctttgccaattggagatt

SEQ ID NO: 23227 - DNA, 20 bp, synthetic construct
  misc_feature 1..20: note = chemically synthesized
  source 1..20: mol_type = other DNA
gctttgccaattggagatta

SEQ ID NO: 23228 - DNA, 20 bp, synthetic construct
  misc_feature 1..20: note = chemically synthesized
  source 1..20: mol_type = other DNA
tttgccaattggagattagg

SEQ ID NO: 23229 - DNA, 20 bp, synthetic construct
  misc_feature 1..20: note = chemically synthesized
  source 1..20: mol_type = other DNA
ccaattggagattagggaga

SEQ ID NO: 23230 - DNA, 20 bp, synthetic construct
  misc_feature 1..20: note = chemically synthesized
  source 1..20: mol_type = other DNA
ctttgatatctcatctcact

SEQ ID NO: 23231 - DNA, 20 bp, synthetic construct
  misc_feature 1..20: note = chemically synthesized
  source 1..20: mol_type = other DNA
tatctcatctcactgagctc

SEQ ID NO: 23232 - DNA, 20 bp, synthetic construct
  misc_feature 1..20: note = chemically synthesized
  source 1..20: mol_type = other DNA
atctcatctcactgagctct

SEQ ID NO: 23233 - DNA, 20 bp, synthetic construct
  misc_feature 1..20: note = chemically synthesized
  source 1..20: mol_type = other DNA
ctctccccatactcccatct

SEQ ID NO: 23234 - DNA, 20 bp, synthetic construct
  misc_feature 1..20: note = chemically synthesized
  source 1..20: mol_type = other DNA
catcttggcaaaaattgcat

SEQ ID NO: 23235 - DNA, 20 bp, synthetic construct
  misc_feature 1..20: note = chemically synthesized
  source 1..20: mol_type = other DNA
aaaaattgcataagatttat

SEQ ID NO: 23236 - DNA, 20 bp, synthetic construct
  misc_feature 1..20: note = chemically synthesized
  source 1..20: mol_type = other DNA
gcataagatttataagacat

SEQ ID NO: 23237 - DNA, 20 bp, synthetic construct
  misc_feature 1..20: note = chemically synthesized
  source 1..20: mol_type = other DNA
cataagatttataagacatt

SEQ ID NO: 23238 - DNA, 20 bp, synthetic construct
  misc_feature 1..20: note = chemically synthesized
  source 1..20: mol_type = other DNA
ataagatttataagacatta

SEQ ID NO: 23239 - DNA, 20 bp, synthetic construct
  misc_feature 1..20: note = chemically synthesized
  source 1..20: mol_type = other DNA
tttataagacattagggtat

SEQ ID NO: 23240 - DNA, 20 bp, synthetic construct
  misc_feature 1..20: note = chemically synthesized
  source 1..20: mol_type = other DNA
tataagacattagggtattg

SEQ ID NO: 23241 - DNA, 20 bp, synthetic construct
  misc_feature 1..20: note = chemically synthesized
  source 1..20: mol_type = other DNA
tattacaacctccttgttta

SEQ ID NO: 23242 - DNA, 20 bp, synthetic construct
  misc_feature 1..20: note = chemically synthesized
  source 1..20: mol_type = other DNA
ttacaacctccttgtttaca

SEQ ID NO: 23243 - DNA, 20 bp, synthetic construct
  misc_feature 1..20: note = chemically synthesized
  source 1..20: mol_type = other DNA
tacaacctccttgtttacag

SEQ ID NO: 23244 - DNA, 20 bp, synthetic construct
  misc_feature 1..20: note = chemically synthesized
  source 1..20: mol_type = other DNA
acaacctccttgtttacaga

SEQ ID NO: 23245 - DNA, 20 bp, synthetic construct
  misc_feature 1..20: note = chemically synthesized
  source 1..20: mol_type = other DNA
caacctccttgtttacagag

SEQ ID NO: 23246 - DNA, 20 bp, synthetic construct
  misc_feature 1..20: note = chemically synthesized
  source 1..20: mol_type = other DNA
ttgtttacagaggggcaacc

SEQ ID NO: 23247 - DNA, 20 bp, synthetic construct
  misc_feature 1..20: note = chemically synthesized
  source 1..20: mol_type = other DNA
tgtttacagaggggcaaccc

SEQ ID NO: 23248 - DNA, 20 bp, synthetic construct
  misc_feature 1..20: note = chemically synthesized
  source 1..20: mol_type = other DNA
acagaggggcaacccaggtc

SEQ ID NO: 23249 - DNA, 20 bp, synthetic construct
  misc_feature 1..20: note = chemically synthesized
  source 1..20: mol_type = other DNA
agaggggcaacccaggtcca

SEQ ID NO: 23250 - DNA, 20 bp, synthetic construct
  misc_feature 1..20: note = chemically synthesized
  source 1..20: mol_type = other DNA
ggggcaacccaggtccagag

SEQ ID NO: 23251 - DNA, 20 bp, synthetic construct
  misc_feature 1..20: note = chemically synthesized
  source 1..20: mol_type = other DNA
gggcaacccaggtccagagt

SEQ ID NO: 23252 - DNA, 20 bp, synthetic construct
  misc_feature 1..20: note = chemically synthesized
  source 1..20: mol_type = other DNA
ggcaacccaggtccagagtg

SEQ ID NO: 23253 - DNA, 20 bp, synthetic construct
  misc_feature 1..20: note = chemically synthesized
  source 1..20: mol_type = other DNA
caacccaggtccagagtggg

SEQ ID NO: 23254 - DNA, 20 bp, synthetic construct
  misc_feature 1..20: note = chemically synthesized
  source 1..20: mol_type = other DNA
aacccaggtccagagtgggg

SEQ ID NO: 23255 - DNA, 20 bp, synthetic construct
  misc_feature 1..20: note = chemically synthesized
  source 1..20: mol_type = other DNA
gtccagagtggggaggtgac

SEQ ID NO: 23256 - DNA, 20 bp, synthetic construct
  misc_feature 1..20: note = chemically synthesized
  source 1..20: mol_type = other DNA
tccagagtggggaggtgacc

SEQ ID NO: 23257 - DNA, 20 bp, synthetic construct
  misc_feature 1..20: note = chemically synthesized
  source 1..20: mol_type = other DNA
gtggggaggtgaccaggcca

SEQ ID NO: 23258 - DNA, 20 bp, synthetic construct
  misc_feature 1..20: note = chemically synthesized
  source 1..20: mol_type = other DNA
accaggccatggtcactgcc

SEQ ID NO: 23259 - DNA, 20 bp, synthetic construct
  misc_feature 1..20: note = chemically synthesized
  source 1..20: mol_type = other DNA
gccatggtcactgcccagtt

SEQ ID NO: 23260 - DNA, 20 bp, synthetic construct
  misc_feature 1..20: note = chemically synthesized
  source 1..20: mol_type = other DNA
catggtcactgcccagttta

SEQ ID NO: 23261 - DNA, 20 bp, synthetic construct
  misc_feature 1..20: note = chemically synthesized
  source 1..20: mol_type = other DNA
atggtcactgcccagtttag

SEQ ID NO: 23262 - DNA, 20 bp, synthetic construct
  misc_feature 1..20: note = chemically synthesized
  source 1..20: mol_type = other DNA
cccagtttagaggccatgca

SEQ ID NO: 23263 - DNA, 20 bp, synthetic construct
  misc_feature 1..20: note = chemically synthesized
  source 1..20: mol_type = other DNA
tttagaggccatgcacagat

SEQ ID NO: 23264 - DNA, 20 bp, synthetic construct
  misc_feature 1..20: note = chemically synthesized
  source 1..20: mol_type = other DNA
agaggccatgcacagatgag

SEQ ID NO: 23265 - DNA, 20 bp, synthetic construct
  misc_feature 1..20: note = chemically synthesized
  source 1..20: mol_type = other DNA
cagatgagaagccaaactcc

SEQ ID NO: 23266 - DNA, 20 bp, synthetic construct
  misc_feature 1..20: note = chemically synthesized
  source 1..20: mol_type = other DNA
gaagccaaactcccagctcc

SEQ ID NO: 23267 - DNA, 20 bp, synthetic construct
  misc_feature 1..20: note = chemically synthesized
  source 1..20: mol_type = other DNA
cgtcttcccactctcccatg

SEQ ID NO: 23268 - DNA, 20 bp, synthetic construct
  misc_feature 1..20: note = chemically synthesized
  source 1..20: mol_type = other DNA
cactctcccatgtggcctgt

SEQ ID NO: 23269 - DNA, 20 bp, synthetic construct
  misc_feature 1..20: note = chemically synthesized
  source 1..20: mol_type = other DNA
caccctctctcactcttgct

SEQ ID NO: 23270 - DNA, 20 bp, synthetic construct
  misc_feature 1..20: note = chemically synthesized
  source 1..20: mol_type = other DNA
tcactcttgcttagcctgtg

SEQ ID NO: 23271 - DNA, 20 bp, synthetic construct
  misc_feature 1..20: note = chemically synthesized
  source 1..20: mol_type = other DNA
ttgcttagcctgtgtagctc

SEQ ID NO: 23272 - DNA, 20 bp, synthetic construct
  misc_feature 1..20: note = chemically synthesized
  source 1..20: mol_type = other DNA
tgcttagcctgtgtagctca

SEQ ID NO: 23273 - DNA, 20 bp, synthetic construct
  misc_feature 1..20: note = chemically synthesized
  source 1..20: mol_type = other DNA
caaggatgtatttattgccc

SEQ ID NO: 23274 - DNA, 20 bp, synthetic construct
  misc_feature 1..20: note = chemically synthesized
  source 1..20: mol_type = other DNA
aaggatgtatttattgccct

SEQ ID NO: 23275 - DNA, 20 bp, synthetic construct
  misc_feature 1..20: note = chemically synthesized
  source 1..20: mol_type = other DNA
gtatttattgccctaggcgt

SEQ ID NO: 23276 - DNA, 20 bp, synthetic construct
  misc_feature 1..20: note = chemically synthesized
  source 1..20: mol_type = other DNA
cctaggcgtaagaatgtgct

SEQ ID NO: 23277 - DNA, 20 bp, synthetic construct
  misc_feature 1..20: note = chemically synthesized
  source 1..20: mol_type = other DNA
ctaggcgtaagaatgtgctc

SEQ ID NO: 23278 - DNA, 20 bp, synthetic construct
  misc_feature 1..20: note = chemically synthesized
  source 1..20: mol_type = other DNA
agaatgtgctcaggtttctt

SEQ ID NO: 23279 - DNA, 20 bp, synthetic construct
  misc_feature 1..20: note = chemically synthesized
  source 1..20: mol_type = other DNA
ctcaggtttcttaagtaatg

SEQ ID NO: 23280 - DNA, 20 bp, synthetic construct
  misc_feature 1..20: note = chemically synthesized
  source 1..20: mol_type = other DNA
tcaggtttcttaagtaatgt

SEQ ID NO: 23281 - DNA, 20 bp, synthetic construct
  misc_feature 1..20: note = chemically synthesized
  source 1..20: mol_type = other DNA
atgtaggtgtgcctcaccca

SEQ ID NO: 23282 - DNA, 20 bp, synthetic construct
  misc_feature 1..20: note = chemically synthesized
  source 1..20: mol_type = other DNA
tgtaggtgtgcctcacccat

SEQ ID NO: 23283 - DNA, 20 bp, synthetic construct
  misc_feature 1..20: note = chemically synthesized
  source 1..20: mol_type = other DNA
gtaggtgtgcctcacccatg

SEQ ID NO: 23284 - DNA, 20 bp, synthetic construct
  misc_feature 1..20: note = chemically synthesized
  source 1..20: mol_type = other DNA
actttctctctgtttattgc

SEQ ID NO: 23285 - DNA, 20 bp, synthetic construct
  misc_feature 1..20: note = chemically synthesized
  source 1..20: mol_type = other DNA
ttctctctgtttattgccag

SEQ ID NO: 23286 - DNA, 20 bp, synthetic construct
  misc_feature 1..20: note = chemically synthesized
  source 1..20: mol_type = other DNA
tctctgtttattgccagtag

SEQ ID NO: 23287 - DNA, 20 bp, synthetic construct
  misc_feature 1..20: note = chemically synthesized
  source 1..20: mol_type = other DNA
ggtctctgttctgttttctt

SEQ ID NO: 23288 - DNA, 20 bp, synthetic construct
  misc_feature 1..20: note = chemically synthesized
  source 1..20: mol_type = other DNA
tcccccttgcattgttgtct

SEQ ID NO: 23289 - DNA, 20 bp, synthetic construct
  misc_feature 1..20: note = chemically synthesized
  source 1..20: mol_type = other DNA
ccttgcattgttgtctaaga

SEQ ID NO: 23290 - DNA, 20 bp, synthetic construct
  misc_feature 1..20: note = chemically synthesized
  source 1..20: mol_type = other DNA
tccccgtaccttcctttaat

SEQ ID NO: 23291 - DNA, 20 bp, synthetic construct
  misc_feature 1..20: note = chemically synthesized
  source 1..20: mol_type = other DNA
atcagcttccgccactgcct

SEQ ID NO: 23292 - DNA, 20 bp, synthetic construct
  misc_feature 1..20: note = chemically synthesized
  source 1..20: mol_type = other DNA
tcagcttccgccactgcctg

SEQ ID NO: 23293 - DNA, 20 bp, synthetic construct
  misc_feature 1..20: note = chemically synthesized
  source 1..20: mol_type = other DNA
cgccactgcctgaggccact

SEQ ID NO: 23294 - DNA, 20 bp, synthetic construct
  misc_feature 1..20: note = chemically synthesized
  source 1..20: mol_type = other DNA
tgcctgaggccactcagctc

SEQ ID NO: 23295 - DNA, 20 bp, synthetic construct
  misc_feature 1..20: note = chemically synthesized
  source 1..20: mol_type = other DNA
ccactcagctctggtcccac

SEQ ID NO: 23296 - DNA, 20 bp, synthetic construct
  misc_feature 1..20: note = chemically synthesized
  source 1..20: mol_type = other DNA
actcagctctggtcccactg

SEQ ID NO: 23297 - DNA, 20 bp, synthetic construct
  misc_feature 1..20: note = chemically synthesized
  source 1..20: mol_type = other DNA
ctcagctctggtcccactgg

SEQ ID NO: 23298 - DNA, 20 bp, synthetic construct
  misc_feature 1..20: note = chemically synthesized
  source 1..20: mol_type = other DNA
actggaggccctgtctcccc

SEQ ID NO: 23299 - DNA, 20 bp, synthetic construct
  misc_feature 1..20: note = chemically synthesized
  source 1..20: mol_type = other DNA
ctggaggccctgtctccccc

SEQ ID NO: 23300 - DNA, 20 bp, synthetic construct
  misc_feature 1..20: note = chemically synthesized
  source 1..20: mol_type = other DNA
tggaggccctgtctccccca

SEQ ID NO: 23301 - DNA, 20 bp, synthetic construct
  misc_feature 1..20: note = chemically synthesized
  source 1..20: mol_type = other DNA
ggaggccctgtctcccccag

SEQ ID NO: 23302 - DNA, 20 bp, synthetic construct
  misc_feature 1..20: note = chemically synthesized
  source 1..20: mol_type = other DNA
cctgttcacctctgatcccc

SEQ ID NO: 23303 - DNA, 20 bp, synthetic construct
  misc_feature 1..20: note = chemically synthesized
  source 1..20: mol_type = other DNA
ctgatcccccagccctgcca

SEQ ID NO: 23304 - DNA, 20 bp, synthetic construct
  misc_feature 1..20: note = chemically synthesized
  source 1..20: mol_type = other DNA
cccccagccctgccatggcc

SEQ ID NO: 23305 - DNA, 20 bp, synthetic construct
  misc_feature 1..20: note = chemically synthesized
  source 1..20: mol_type = other DNA
cctgccatggccaagctgat

SEQ ID NO: 23306 - DNA, 20 bp, synthetic construct
  misc_feature 1..20: note = chemically synthesized
  source 1..20: mol_type = other DNA
ctgccatggccaagctgatg

SEQ ID NO: 23307 - DNA, 20 bp, synthetic construct
  misc_feature 1..20: note = chemically synthesized
  source 1..20: mol_type = other DNA
catggccaagctgatgagga

SEQ ID NO: 23308 - DNA, 20 bp, synthetic construct
  misc_feature 1..20: note = chemically synthesized
  source 1..20: mol_type = other DNA
atggccaagctgatgaggat

SEQ ID NO: 23309 - DNA, 20 bp, synthetic construct
  misc_feature 1..20: note = chemically synthesized
  source 1..20: mol_type = other DNA
tggccaagctgatgaggatg

SEQ ID NO: 23310 - DNA, 20 bp, synthetic construct
  misc_feature 1..20: note = chemically synthesized
  source 1..20: mol_type = other DNA
ggccaagctgatgaggatgg

SEQ ID NO: 23311 - DNA, 20 bp, synthetic construct
  misc_feature 1..20: note = chemically synthesized
  source 1..20: mol_type = other DNA
ccaagctgatgaggatgggg

SEQ ID NO: 23312 - DNA, 20 bp, synthetic construct
  misc_feature 1..20: note = chemically synthesized
  source 1..20: mol_type = other DNA
caagctgatgaggatggggg

SEQ ID NO: 23313 - DNA, 20 bp, synthetic construct
  misc_feature 1..20: note = chemically synthesized
  source 1..20: mol_type = other DNA
aagctgatgaggatggggga

SEQ ID NO: 23314 - DNA, 20 bp, synthetic construct
  misc_feature 1..20: note = chemically synthesized
  source 1..20: mol_type = other DNA
agctgatgaggatgggggag

SEQ ID NO: 23315 - DNA, 20 bp, synthetic construct
  misc_feature 1..20: note = chemically synthesized
  source 1..20: mol_type = other DNA
gctgatgaggatgggggagg

SEQ ID NO: 23316 - DNA, 20 bp, synthetic construct
  misc_feature 1..20: note = chemically synthesized
  source 1..20: mol_type = other DNA
tgatgaggatgggggagggg

SEQ ID NO: 23317 - DNA, 20 bp, synthetic construct
  misc_feature 1..20: note = chemically synthesized
  source 1..20: mol_type = other DNA
gatgaggatgggggaggggg

SEQ ID NO: 23318 - DNA, 20 bp, synthetic construct
  misc_feature 1..20: note = chemically synthesized
  source 1..20: mol_type = other DNA
gaggatgggggagggggagg

SEQ ID NO: 23319 - DNA, 20 bp, synthetic construct
  misc_feature 1..20: note = chemically synthesized
  source 1..20: mol_type = other DNA
aggatgggggagggggaggc

SEQ ID NO: 23320 - DNA, 20 bp, synthetic construct
  misc_feature 1..20: note = chemically synthesized
  source 1..20: mol_type = other DNA
ggatgggggagggggaggca

SEQ ID NO: 23321 - DNA, 20 bp, synthetic construct
  misc_feature 1..20: note = chemically synthesized
  source 1..20: mol_type = other DNA
gatgggggagggggaggcag

SEQ ID NO: 23322 - DNA, 20 bp, synthetic construct
  misc_feature 1..20: note = chemically synthesized
  source 1..20: mol_type = other DNA
atgggggagggggaggcagg

SEQ ID NO: 23323 - DNA, 20 bp, synthetic construct
  misc_feature 1..20: note = chemically synthesized
  source 1..20: mol_type = other DNA
aatcttaatttcctgcactg

SEQ ID NO: 23324 - DNA, 20 bp, synthetic construct
  misc_feature 1..20: note = chemically synthesized
  source 1..20: mol_type = other DNA
cactgaagctttgctgtcca

SEQ ID NO: 23325 - DNA, 20 bp, synthetic construct
  misc_feature 1..20: note = chemically synthesized
  source 1..20: mol_type = other DNA
agctttgctgtccacagcac

SEQ ID NO: 23326 - DNA, 20 bp, synthetic construct
  misc_feature 1..20: note = chemically synthesized
  source 1..20: mol_type = other DNA
gctttgctgtccacagcact

SEQ ID NO: 23327 - DNA, 20 bp, synthetic construct
  misc_feature 1..20: note = chemically synthesized
  source 1..20: mol_type = other DNA
ttgctgtccacagcactggg

SEQ ID NO: 23328 - DNA, 20 bp, synthetic construct
  misc_feature 1..20: note = chemically synthesized
  source 1..20: mol_type = other DNA
ctgtccacagcactgggcag

SEQ ID NO: 23329 - DNA, 20 bp, synthetic construct
  misc_feature 1..20: note = chemically synthesized
  source 1..20: mol_type = other DNA
ctgggcagcagctgcctccc

SEQ ID NO: 23330 - DNA, 20 bp, synthetic construct
  misc_feature 1..20: note = chemically synthesized
  source 1..20: mol_type = other DNA
gggcagcagctgcctccctg

SEQ ID NO: 23331 - DNA, 20 bp, synthetic construct
  misc_feature 1..20: note = chemically synthesized
  source 1..20: mol_type = other DNA
gcctccctggagtgttgtgt

SEQ ID NO: 23332 - DNA, 20 bp, synthetic construct
  misc_feature 1..20: note = chemically synthesized
  source 1..20: mol_type = other DNA
ttgatgctgtctttcttccc

SEQ ID NO: 23333 - DNA, 20 bp, synthetic construct
  misc_feature 1..20: note = chemically synthesized
  source 1..20: mol_type = other DNA
tgatgctgtctttcttccca

SEQ ID NO: 23334 - DNA, 20 bp, synthetic construct
  misc_feature 1..20: note = chemically synthesized
  source 1..20: mol_type = other DNA
gtctttcttcccaaggcctt

SEQ ID NO: 23335 - DNA, 20 bp, synthetic construct
  misc_feature 1..20: note = chemically synthesized
  source 1..20: mol_type = other DNA
ttcttcccaaggcctttggc

SEQ ID NO: 23336 - DNA, 20 bp, synthetic construct
  misc_feature 1..20: note = chemically synthesized
  source 1..20: mol_type = other DNA
tcttcccaaggcctttggca

SEQ ID NO: 23337 - DNA, 20 bp, synthetic construct
  misc_feature 1..20: note = chemically synthesized
  source 1..20: mol_type = other DNA
tcccaaggcctttggcaagg

SEQ ID NO: 23338 - DNA, 20 bp, synthetic construct
  misc_feature 1..20: note = chemically synthesized
  source 1..20: mol_type = other DNA
caaggcctttggcaaggtag

SEQ ID NO: 23339 - DNA, 20 bp, synthetic construct
  misc_feature 1..20: note = chemically synthesized
  source 1..20: mol_type = other DNA
ttgactctccatgctgctaa

SEQ ID NO: 23340 - DNA, 20 bp, synthetic construct
  misc_feature 1..20: note = chemically synthesized
  source 1..20: mol_type = other DNA
tgactctccatgctgctaat

SEQ ID NO: 23341 - DNA, 20 bp, synthetic construct
  misc_feature 1..20: note = chemically synthesized
  source 1..20: mol_type = other DNA
gactctccatgctgctaatg

SEQ ID NO: 23342 - DNA, 20 bp, synthetic construct
  misc_feature 1..20: note = chemically synthesized
  source 1..20: mol_type = other DNA
actctccatgctgctaatgg

SEQ ID NO: 23343 - DNA, 20 bp, synthetic construct
  misc_feature 1..20: note = chemically synthesized
  source 1..20: mol_type = other DNA
tctccatgctgctaatgggg

SEQ ID NO: 23344 - DNA, 20 bp, synthetic construct
  misc_feature 1..20: note = chemically synthesized
  source 1..20: mol_type = other DNA
ctccatgctgctaatggggg

SEQ ID NO: 23345 - DNA, 20 bp, synthetic construct
  misc_feature 1..20: note = chemically synthesized
  source 1..20: mol_type = other DNA
gctaatgggggaggtcaact

SEQ ID NO: 23346 - DNA, 20 bp, synthetic construct
  misc_feature 1..20: note = chemically synthesized
  source 1..20: mol_type = other DNA
ggtcaactaagtccatttct

SEQ ID NO: 23347 - DNA, 20 bp, synthetic construct
  misc_feature 1..20: note = chemically synthesized
  source 1..20: mol_type = other DNA
aactaagtccatttctgagc

SEQ ID NO: 23348 - DNA, 20 bp, synthetic construct
  misc_feature 1..20: note = chemically synthesized
  source 1..20: mol_type = other DNA
taagtccatttctgagctag

SEQ ID NO: 23349 - DNA, 20 bp, synthetic construct
  misc_feature 1..20: note = chemically synthesized
  source 1..20: mol_type = other DNA
aagtccatttctgagctagt

SEQ ID NO: 23350 - DNA, 20 bp, synthetic construct
  misc_feature 1..20: note = chemically synthesized
  source 1..20: mol_type = other DNA
agtccatttctgagctagtg

SEQ ID NO: 23351 - DNA, 20 bp, synthetic construct
  misc_feature 1..20: note = chemically synthesized
  source 1..20: mol_type = other DNA
gtccatttctgagctagtgg

SEQ ID NO: 23352 - DNA, 20 bp, synthetic construct
  misc_feature 1..20: note = chemically synthesized
  source 1..20: mol_type = other DNA
tctgagctagtgggggctct

SEQ ID NO: 23353 - DNA, 20 bp, synthetic construct
  misc_feature 1..20: note = chemically synthesized
  source 1..20: mol_type = other DNA
ctgagctagtgggggctctt

SEQ ID NO: 23354 - DNA, 20 bp, synthetic construct
  misc_feature 1..20: note = chemically synthesized
  source 1..20: mol_type = other DNA
ggactccgaacaccacactt

SEQ ID NO: 23355 - DNA, 20 bp, synthetic construct
  misc_feature 1..20: note = chemically synthesized
  source 1..20: mol_type = other DNA
cacttaagttatctctgacc

SEQ ID NO: 23356 - DNA, 20 bp, synthetic construct
  misc_feature 1..20: note = chemically synthesized
  source 1..20: mol_type = other DNA
cttaagttatctctgaccca

SEQ ID NO: 23357 - DNA, 20 bp, synthetic construct
  misc_feature 1..20: note = chemically synthesized
  source 1..20: mol_type = other DNA
gacccagagtccaatttatt

SEQ ID NO: 23358 - DNA, 20 bp, synthetic construct
  misc_feature 1..20: note = chemically synthesized
  source 1..20: mol_type = other DNA
ttcaaatgaatgcccatttt

SEQ ID NO: 23359 - DNA, 20 bp, synthetic construct
  misc_feature 1..20: note = chemically synthesized
  source 1..20: mol_type = other DNA
tgcccattttaagaatgttt

SEQ ID NO: 23360 - DNA, 20 bp, synthetic construct
  misc_feature 1..20: note = chemically synthesized
  source 1..20: mol_type = other DNA
gcccattttaagaatgtttt

SEQ ID NO: 23361 - DNA, 20 bp, synthetic construct
  misc_feature 1..20: note = chemically synthesized
  source 1..20: mol_type = other DNA
cccattttaagaatgttttg

SEQ ID NO: 23362 - DNA, 20 bp, synthetic construct
  misc_feature 1..20: note = chemically synthesized
  source 1..20: mol_type = other DNA
gtctcttcccatcatttcct

SEQ ID NO: 23363 - DNA, 20 bp, synthetic construct
  misc_feature 1..20: note = chemically synthesized
  source 1..20: mol_type = other DNA
ttcccatcatttccttagtg

SEQ ID NO: 23364 - DNA, 20 bp, synthetic construct
  misc_feature 1..20: note = chemically synthesized
  source 1..20: mol_type = other DNA
ccatcatttccttagtgtag

SEQ ID NO: 23365 - DNA, 20 bp, synthetic construct
  misc_feature 1..20: note = chemically synthesized
  source 1..20: mol_type = other DNA
atcatttccttagtgtagtg

SEQ ID NO: 23366 - DNA, 20 bp, synthetic construct
  misc_feature 1..20: note = chemically synthesized
  source 1..20: mol_type = other DNA
catttccttagtgtagtgga

SEQ ID NO: 23367 - DNA, 20 bp, synthetic construct
  misc_feature 1..20: note = chemically synthesized
  source 1..20: mol_type = other DNA
atttccttagtgtagtggag

SEQ ID NO: 23368 - DNA, 20 bp, synthetic construct
  misc_feature 1..20: note = chemically synthesized
  source 1..20: mol_type = other DNA
gtagtggagaggtttctatt

SEQ ID NO: 23369 - DNA, 20 bp, synthetic construct
  misc_feature 1..20: note = chemically synthesized
  source 1..20: mol_type = other DNA
ggagaggtttctattcggaa

SEQ ID NO: 23370 - DNA, 20 bp, synthetic construct
  misc_feature 1..20: note = chemically synthesized
  source 1..20: mol_type = other DNA
gagaggtttctattcggaat

SEQ ID NO: 23371 - DNA, 20 bp, synthetic construct
  misc_feature 1..20: note = chemically synthesized
  source 1..20: mol_type = other DNA
attcggaataggatgacatt

SEQ ID NO: 23372 - DNA, 20 bp, synthetic construct
  misc_feature 1..20: note = chemically synthesized
  source 1..20: mol_type = other DNA
cggaataggatgacatttgg

SEQ ID NO: 23373 - DNA, 20 bp, synthetic construct
  misc_feature 1..20: note = chemically synthesized
  source 1..20: mol_type = other DNA
taggatgacatttggtagct

SEQ ID NO: 23374 - DNA, 20 bp, synthetic construct
  misc_feature 1..20: note = chemically synthesized
  source 1..20: mol_type = other DNA
catttggtagctgagccaaa

SEQ ID NO: 23375 - DNA, 20 bp, synthetic construct
  misc_feature 1..20: note = chemically synthesized
  source 1..20: mol_type = other DNA
tggtagctgagccaaacaga

SEQ ID NO: 23376 - DNA, 20 bp, synthetic construct
  misc_feature 1..20: note = chemically synthesized
  source 1..20: mol_type = other DNA
agctgagccaaacagatagc

SEQ ID NO: 23377 - DNA, 20 bp, synthetic construct
  misc_feature 1..20: note = chemically synthesized
  source 1..20: mol_type = other DNA
gctgagccaaacagatagct

SEQ ID NO: 23378 - DNA, 20 bp, synthetic construct
  misc_feature 1..20: note = chemically synthesized
  source 1..20: mol_type = other DNA
ccaaacagatagctgggata

SEQ ID NO: 23379 - DNA, 20 bp, synthetic construct
  misc_feature 1..20: note = chemically synthesized
  source 1..20: mol_type = other DNA
caaacagatagctgggatat

SEQ ID NO: 23380 - DNA, 20 bp, synthetic construct
  misc_feature 1..20: note = chemically synthesized
  source 1..20: mol_type = other DNA
aaacagatagctgggatata

SEQ ID NO: 23381 - DNA, 20 bp, synthetic construct
  misc_feature 1..20: note = chemically synthesized
  source 1..20: mol_type = other DNA
gatagctgggatatagggtt

SEQ ID NO: 23382 - DNA, 20 bp, synthetic construct
  misc_feature 1..20: note = chemically synthesized
  source 1..20: mol_type = other DNA
tagctgggatatagggtttg

SEQ ID NO: 23383 - DNA, 20 bp, synthetic construct
  misc_feature 1..20: note = chemically synthesized
  source 1..20: mol_type = other DNA
gggtttggagttgaactctc

SEQ ID NO: 23384 - DNA, 20 bp, synthetic construct
  misc_feature 1..20: note = chemically synthesized
  source 1..20: mol_type = other DNA
ggtttggagttgaactctcc

SEQ ID NO: 23385 - DNA, 20 bp, synthetic construct
  misc_feature 1..20: note = chemically synthesized
  source 1..20: mol_type = other DNA
gtttggagttgaactctcca

SEQ ID NO: 23386 - DNA, 20 bp, synthetic construct
  misc_feature 1..20: note = chemically synthesized
  source 1..20: mol_type = other DNA
gagttgaactctccagggaa

SEQ ID NO: 23387 - DNA, 20 bp, synthetic construct
  misc_feature 1..20: note = chemically synthesized
  source 1..20: mol_type = other DNA
agttgaactctccagggaat

SEQ ID NO: 23388 - DNA, 20 bp, synthetic construct
  misc_feature 1..20: note = chemically synthesized
  source 1..20: mol_type = other DNA
gttgaactctccagggaatg

SEQ ID NO: 23389 - DNA, 20 bp, synthetic construct
  misc_feature 1..20: note = chemically synthesized
  source 1..20: mol_type = other DNA
gaactctccagggaatgggg

SEQ ID NO: 23390 - DNA, 20 bp, synthetic construct
  misc_feature 1..20: note = chemically synthesized
  source 1..20: mol_type = other DNA
aactctccagggaatggggt

SEQ ID NO: 23391 - DNA, 20 bp, synthetic construct
  misc_feature 1..20: note = chemically synthesized
  source 1..20: mol_type = other DNA
ctctccagggaatggggtgg

SEQ ID NO: 23392 - DNA, 20 bp, synthetic construct
  misc_feature 1..20: note = chemically synthesized
  source 1..20: mol_type = other DNA
tctccagggaatggggtggg

SEQ ID NO: 23393 - DNA, 20 bp, synthetic construct
  misc_feature 1..20: note = chemically synthesized
  source 1..20: mol_type = other DNA
ctccagggaatggggtggga

SEQ ID NO: 23394 - DNA, 20 bp, synthetic construct
  misc_feature 1..20: note = chemically synthesized
  source 1..20: mol_type = other DNA
tccagggaatggggtgggag

SEQ ID NO: 23395 - DNA, 20 bp, synthetic construct
  misc_feature 1..20: note = chemically synthesized
  source 1..20: mol_type = other DNA
ccagggaatggggtgggagg

SEQ ID NO: 23396 - DNA, 20 bp, synthetic construct
  misc_feature 1..20: note = chemically synthesized
  source 1..20: mol_type = other DNA
cagggaatggggtgggaggg

SEQ ID NO: 23397 - DNA, 20 bp, synthetic construct
  misc_feature 1..20: note = chemically synthesized
  source 1..20: mol_type = other DNA
ggaatggggtgggagggggg

SEQ ID NO: 23398 - DNA, 20 bp, synthetic construct
  misc_feature 1..20: note = chemically synthesized
  source 1..20: mol_type = other DNA
ggggtgggaggggggcagcc

SEQ ID NO: 23399 - DNA, 20 bp, synthetic construct
  misc_feature 1..20: note = chemically synthesized
  source 1..20: mol_type = other DNA
ggtgggaggggggcagcctg

SEQ ID NO: 23400 - DNA, 20 bp, synthetic construct
  misc_feature 1..20: note = chemically synthesized
  source 1..20: mol_type = other DNA
gtgggaggggggcagcctgg

SEQ ID NO: 23401 - DNA, 20 bp, synthetic construct
  misc_feature 1..20: note = chemically synthesized
  source 1..20: mol_type = other DNA
agcctggaggatgacaaaat

SEQ ID NO: 23402 - DNA, 20 bp, synthetic construct
  misc_feature 1..20: note = chemically synthesized
  source 1..20: mol_type = other DNA
gcctggaggatgacaaaatg

SEQ ID NO: 23403 - DNA, 20 bp, synthetic construct
  misc_feature 1..20: note = chemically synthesized
  source 1..20: mol_type = other DNA
cctggaggatgacaaaatga

SEQ ID NO: 23404 - DNA, 20 bp, synthetic construct
  misc_feature 1..20: note = chemically synthesized
  source 1..20: mol_type = other DNA
atgacaaaatgagggctccc

SEQ ID NO: 23405 - DNA, 20 bp, synthetic construct
  misc_feature 1..20: note = chemically synthesized
  source 1..20: mol_type = other DNA
tctgtgttctcgaaatgcct

SEQ ID NO: 23406 - DNA, 20 bp, synthetic construct
  misc_feature 1..20: note = chemically synthesized
  source 1..20: mol_type = other DNA
aatgccttagatgtttacct

SEQ ID NO: 23407 - DNA, 20 bp, synthetic construct
  misc_feature 1..20: note = chemically synthesized
  source 1..20: mol_type = other DNA
tgccttagatgtttacctaa

SEQ ID NO: 23408 - DNA, 20 bp, synthetic construct
  misc_feature 1..20: note = chemically synthesized
  source 1..20: mol_type = other DNA
atgtttacctaagagaaatg

SEQ ID NO: 23409 - DNA, 20 bp, synthetic construct
  misc_feature 1..20: note = chemically synthesized
  source 1..20: mol_type = other DNA
ttcctataaacacatctaca

SEQ ID NO: 23410 - DNA, 20 bp, synthetic construct
  misc_feature 1..20: note = chemically synthesized
  source 1..20: mol_type = other DNA
catctacacagtgtccattg

SEQ ID NO: 23411 - DNA, 20 bp, synthetic construct
  misc_feature 1..20: note = chemically synthesized
  source 1..20: mol_type = other DNA
gtccattgtagcactgttca

SEQ ID NO: 23412 - DNA, 20 bp, synthetic construct
  misc_feature 1..20: note = chemically synthesized
  source 1..20: mol_type = other DNA
cattgtagcactgttcatag

SEQ ID NO: 23413 - DNA, 20 bp, synthetic construct
  misc_feature 1..20: note = chemically synthesized
  source 1..20: mol_type = other DNA
cactgttcatagtggtcaaa

SEQ ID NO: 23414 - DNA, 20 bp, synthetic construct
  misc_feature 1..20: note = chemically synthesized
  source 1..20: mol_type = other DNA
tgttcatagtggtcaaaaag

SEQ ID NO: 23415 - DNA, 20 bp, synthetic construct
  misc_feature 1..20: note = chemically synthesized
  source 1..20: mol_type = other DNA
aaaagtggtcacaacccaca

SEQ ID NO: 23416 - DNA, 20 bp, synthetic construct
  misc_feature 1..20: note = chemically synthesized
  source 1..20: mol_type = other DNA
acaacccacatggcaaccaa

SEQ ID NO: 23417 - DNA, 20 bp, synthetic construct
  misc_feature 1..20: note = chemically synthesized
  source 1..20: mol_type = other DNA
caacccacatggcaaccaat

SEQ ID NO: 23418 - DNA, 20 bp, synthetic construct
  misc_feature 1..20: note = chemically synthesized
  source 1..20: mol_type = other DNA
atggcaaccaataggttgaa

SEQ ID NO: 23419 - DNA, 20 bp, synthetic construct
  misc_feature 1..20: note = chemically synthesized
  source 1..20: mol_type = other DNA
ttgaatggataaacgcccta

SEQ ID NO: 23420 - DNA, 20 bp, synthetic construct
  misc_feature 1..20: note = chemically synthesized
  source 1..20: mol_type = other DNA
aatggataaacgccctatgg

SEQ ID NO: 23421 - DNA, 20 bp, synthetic construct
  misc_feature 1..20: note = chemically synthesized
  source 1..20: mol_type = other DNA
tatggtggaatacaactcaa

SEQ ID NO: 23422 - DNA, 20 bp, synthetic construct
  misc_feature 1..20: note = chemically synthesized
  source 1..20: mol_type = other DNA
ggtggaatacaactcaacag

SEQ ID NO: 23423 - DNA, 20 bp, synthetic construct
  misc_feature 1..20: note = chemically synthesized
  source 1..20: mol_type = other DNA
ggaatacaactcaacagtag

SEQ ID NO: 23424 - DNA, 20 bp, synthetic construct
  misc_feature 1..20: note = chemically synthesized
  source 1..20: mol_type = other DNA
actcaacagtagaagaatga

SEQ ID NO: 23425 - DNA, 20 bp, synthetic construct
  misc_feature 1..20: note = chemically synthesized
  source 1..20: mol_type = other DNA
tcaacagtagaagaatgaaa

SEQ ID NO: 23426 - DNA, 20 bp, synthetic construct
  misc_feature 1..20: note = chemically synthesized
  source 1..20: mol_type = other DNA
gagtaacacactccacacca

SEQ ID NO: 23427 - DNA, 20 bp, synthetic construct
  misc_feature 1..20: note = chemically synthesized
  source 1..20: mol_type = other DNA
tccacaccatggatgaatcc

SEQ ID NO: 23428 - DNA, 20 bp, synthetic construct
  misc_feature 1..20: note = chemically synthesized
  source 1..20: mol_type = other DNA
cccagaatcattctgctctg

SEQ ID NO: 23429 - DNA, 20 bp, synthetic construct
  misc_feature 1..20: note = chemically synthesized
  source 1..20: mol_type = other DNA
agaatcattctgctctgtgg

SEQ ID NO: 23430 - DNA, 20 bp, synthetic construct
  misc_feature 1..20: note = chemically synthesized
  source 1..20: mol_type = other DNA
gtggaagaaattaaacacaa

SEQ ID NO: 23431 - DNA, 20 bp, synthetic construct
  misc_feature 1..20: note = chemically synthesized
  source 1..20: mol_type = other DNA
caaaagacgatatcctgtat

SEQ ID NO: 23432 - DNA, 20 bp, synthetic construct
  misc_feature 1..20: note = chemically synthesized
  source 1..20: mol_type = other DNA
agtccatttgtaacaaattc

SEQ ID NO: 23433 - DNA, 20 bp, synthetic construct
  misc_feature 1..20: note = chemically synthesized
  source 1..20: mol_type = other DNA
ttctagaattctcaacactg

SEQ ID NO: 23434 - DNA, 20 bp, synthetic construct
  misc_feature 1..20: note = chemically synthesized
  source 1..20: mol_type = other DNA
tagaattctcaacactgtgg

SEQ ID NO: 23435 - DNA, 20 bp, synthetic construct
  misc_feature 1..20: note = chemically synthesized
  source 1..20: mol_type = other DNA
aattctcaacactgtggtgg

SEQ ID NO: 23436 - DNA, 20 bp, synthetic construct
  misc_feature 1..20: note = chemically synthesized
  source 1..20: mol_type = other DNA
attctcaacactgtggtggt

SEQ ID NO: 23437 - DNA, 20 bp, synthetic construct
  misc_feature 1..20: note = chemically synthesized
  source 1..20: mol_type = other DNA
ctcaacactgtggtggtagg

SEQ ID NO: 23438 - DNA, 20 bp, synthetic construct
  misc_feature 1..20: note = chemically synthesized
  source 1..20: mol_type = other DNA
tcaacactgtggtggtaggt

SEQ ID NO: 23439 - DNA, 20 bp, synthetic construct
  misc_feature 1..20: note = chemically synthesized
  source 1..20: mol_type = other DNA
caacactgtggtggtaggtg

SEQ ID NO: 23440 - DNA, 20 bp, synthetic construct
  misc_feature 1..20: note = chemically synthesized
  source 1..20: mol_type = other DNA
aacactgtggtggtaggtgg

SEQ ID NO: 23441 - DNA, 20 bp, synthetic construct
  misc_feature 1..20: note = chemically synthesized
  source 1..20: mol_type = other DNA
tgtggtggtaggtgggggtt

SEQ ID NO: 23442 - DNA, 20 bp, synthetic construct
  misc_feature 1..20: note = chemically synthesized
  source 1..20: mol_type = other DNA
ggtggtaggtgggggttcag

SEQ ID NO: 23443 - DNA, 20 bp, synthetic construct
  misc_feature 1..20: note = chemically synthesized
  source 1..20: mol_type = other DNA
gtaggtgggggttcagtggt

SEQ ID NO: 23444 - DNA, 20 bp, synthetic construct
  misc_feature 1..20: note = chemically synthesized
  source 1..20: mol_type = other DNA
ggtgggggttcagtggttag

SEQ ID NO: 23445 - DNA, 20 bp, synthetic construct
  misc_feature 1..20: note = chemically synthesized
  source 1..20: mol_type = other DNA
gtgggggttcagtggttaga

SEQ ID NO: 23446 - DNA, 20 bp, synthetic construct
  misc_feature 1..20: note = chemically synthesized
  source 1..20: mol_type = other DNA
ggggttcagtggttagaagg

SEQ ID NO: 23447 - DNA, 20 bp, synthetic construct
  misc_feature 1..20: note = chemically synthesized
  source 1..20: mol_type = other DNA
gggttcagtggttagaagga

SEQ ID NO: 23448 - DNA, 20 bp, synthetic construct
  misc_feature 1..20: note = chemically synthesized
  source 1..20: mol_type = other DNA
ggttcagtggttagaaggaa

SEQ ID NO: 23449 - DNA, 20 bp, synthetic construct
  misc_feature 1..20: note = chemically synthesized
  source 1..20: mol_type = other DNA
gttcagtggttagaaggaag

SEQ ID NO: 23450 - DNA, 20 bp, synthetic construct
  misc_feature 1..20: note = chemically synthesized
  source 1..20: mol_type = other DNA
agtggttagaaggaaggggt

SEQ ID NO: 23451 - DNA, 20 bp, synthetic construct
  misc_feature 1..20: note = chemically synthesized
  source 1..20: mol_type = other DNA
tggttagaaggaaggggtca

SEQ ID NO: 23452 - DNA, 20 bp, synthetic construct
  misc_feature 1..20: note = chemically synthesized
  source 1..20: mol_type = other DNA
ggttagaaggaaggggtcag

SEQ ID NO: 23453 - DNA, 20 bp, synthetic construct
  misc_feature 1..20: note = chemically synthesized
  source 1..20: mol_type = other DNA
gttagaaggaaggggtcaga

SEQ ID NO: 23454 - DNA, 20 bp, synthetic construct
  misc_feature 1..20: note = chemically synthesized
  source 1..20: mol_type = other DNA
gaaggaaggggtcagagggt

SEQ ID NO: 23455 - DNA, 20 bp, synthetic construct
  misc_feature 1..20: note = chemically synthesized
  source 1..20: mol_type = other DNA
aaggaaggggtcagagggtt

SEQ ID NO: 23456 - DNA, 20 bp, synthetic construct
  misc_feature 1..20: note = chemically synthesized
  source 1..20: mol_type = other DNA
aggaaggggtcagagggtta

SEQ ID NO: 23457 - DNA, 20 bp, synthetic construct
  misc_feature 1..20: note = chemically synthesized
  source 1..20: mol_type = other DNA
aaggggtcagagggttaggg

SEQ ID NO: 23458 - DNA, 20 bp, synthetic construct
  misc_feature 1..20: note = chemically synthesized
  source 1..20: mol_type = other DNA
aggggtcagagggttaggga

SEQ ID NO: 23459 - DNA, 20 bp, synthetic construct
  misc_feature 1..20: note = chemically synthesized
  source 1..20: mol_type = other DNA
ggggtcagagggttagggaa

SEQ ID NO: 23460 - DNA, 20 bp, synthetic construct
  misc_feature 1..20: note = chemically synthesized
  source 1..20: mol_type = other DNA
gggtcagagggttagggaag

SEQ ID NO: 23461 - DNA, 20 bp, synthetic construct
  misc_feature 1..20: note = chemically synthesized
  source 1..20: mol_type = other DNA
gggttagggaaggggattga

SEQ ID NO: 23462 - DNA, 20 bp, synthetic construct
  misc_feature 1..20: note = chemically synthesized
  source 1..20: mol_type = other DNA
agggaaggggattgacagca

SEQ ID NO: 23463 - DNA, 20 bp, synthetic construct
  misc_feature 1..20: note = chemically synthesized
  source 1..20: mol_type = other DNA
gggaaggggattgacagcaa

SEQ ID NO: 23464 - DNA, 20 bp, synthetic construct
  misc_feature 1..20: note = chemically synthesized
  source 1..20: mol_type = other DNA
ggaaggggattgacagcaaa

SEQ ID NO: 23465 - DNA, 20 bp, synthetic construct
  misc_feature 1..20: note = chemically synthesized
  source 1..20: mol_type = other DNA
gaaggggattgacagcaaag

SEQ ID NO: 23466 - DNA, 20 bp, synthetic construct
  misc_feature 1..20: note = chemically synthesized
  source 1..20: mol_type = other DNA
gattgacagcaaaggggcat

SEQ ID NO: 23467 - DNA, 20 bp, synthetic construct
  misc_feature 1..20: note = chemically synthesized
  source 1..20: mol_type = other DNA
attgacagcaaaggggcatg

SEQ ID NO: 23468 - DNA, 20 bp, synthetic construct
  misc_feature 1..20: note = chemically synthesized
  source 1..20: mol_type = other DNA
ttgacagcaaaggggcatga

SEQ ID NO: 23469 - DNA, 20 bp, synthetic construct
  misc_feature 1..20: note = chemically synthesized
  source 1..20: mol_type = other DNA
tgacagcaaaggggcatgag

SEQ ID NO: 23470 - DNA, 20 bp, synthetic construct
  misc_feature 1..20: note = chemically synthesized
  source 1..20: mol_type = other DNA
gacagcaaaggggcatgagg

SEQ ID NO: 23471 - DNA, 20 bp, synthetic construct
  misc_feature 1..20: note = chemically synthesized
  source 1..20: mol_type = other DNA
aggggcatgagggggctttc

SEQ ID NO: 23472 - DNA, 20 bp, synthetic construct
  misc_feature 1..20: note = chemically synthesized
  source 1..20: mol_type = other DNA
catgagggggctttctagac

SEQ ID NO: 23473 - DNA, 20 bp, synthetic construct
  misc_feature 1..20: note = chemically synthesized
  source 1..20: mol_type = other DNA
gagggggctttctagactgg

SEQ ID NO: 23474 - DNA, 20 bp, synthetic construct
  misc_feature 1..20: note = chemically synthesized
  source 1..20: mol_type = other DNA
cgtgttctgtatcttgattt

SEQ ID NO: 23475 - DNA, 20 bp, synthetic construct
  misc_feature 1..20: note = chemically synthesized
  source 1..20: mol_type = other DNA
gttctgtatcttgattttgg

SEQ ID NO: 23476 - DNA, 20 bp, synthetic construct
  misc_feature 1..20: note = chemically synthesized
  source 1..20: mol_type = other DNA
tctgtatcttgattttggtg

SEQ ID NO: 23477 - DNA, 20 bp, synthetic construct
  misc_feature 1..20: note = chemically synthesized
  source 1..20: mol_type = other DNA
ctgtatcttgattttggtgg

SEQ ID NO: 23478 - DNA, 20 bp, synthetic construct
  misc_feature 1..20: note = chemically synthesized
  source 1..20: mol_type = other DNA
tgattttggtggaggccaca

SEQ ID NO: 23479 - DNA, 20 bp, synthetic construct
  misc_feature 1..20: note = chemically synthesized
  source 1..20: mol_type = other DNA
gccacacagctgtatacaac

SEQ ID NO: 23480 - DNA, 20 bp, synthetic construct
  misc_feature 1..20: note = chemically synthesized
  source 1..20: mol_type = other DNA
aatgacttttgttgtatgta

SEQ ID NO: 23481 - DNA, 20 bp, synthetic construct
  misc_feature 1..20: note = chemically synthesized
  source 1..20: mol_type = other DNA
atgtaaagtataccttaata

SEQ ID NO: 23482 - DNA, 20 bp, synthetic construct
  misc_feature 1..20: note = chemically synthesized
  source 1..20: mol_type = other DNA
agtataccttaataaagcta

SEQ ID NO: 23483 - DNA, 20 bp, synthetic construct
  misc_feature 1..20: note = chemically synthesized
  source 1..20: mol_type = other DNA
caaaacaaaacacccaccac

SEQ ID NO: 23484 - DNA, 20 bp, synthetic construct
  misc_feature 1..20: note = chemically synthesized
  source 1..20: mol_type = other DNA
aaacaaaacacccaccactg

SEQ ID NO: 23485 - DNA, 20 bp, synthetic construct
  misc_feature 1..20: note = chemically synthesized
  source 1..20: mol_type = other DNA
caaaacacccaccactggag

SEQ ID NO: 23486 - DNA, 20 bp, synthetic construct
  misc_feature 1..20: note = chemically synthesized
  source 1..20: mol_type = other DNA
cccaccactggagtggaacc

SEQ ID NO: 23487 - DNA, 20 bp, synthetic construct
  misc_feature 1..20: note = chemically synthesized
  source 1..20: mol_type = other DNA
gtctgtaacctttaactgtt

SEQ ID NO: 23488 - DNA, 20 bp, synthetic construct
  misc_feature 1..20: note = chemically synthesized
  source 1..20: mol_type = other DNA
tctgtaacctttaactgttt

SEQ ID NO: 23489 - DNA, 20 bp, synthetic construct
  misc_feature 1..20: note = chemically synthesized
  source 1..20: mol_type = other DNA
ttaactgtttgggtctcctc

SEQ ID NO: 23490 - DNA, 20 bp, synthetic construct
  misc_feature 1..20: note = chemically synthesized
  source 1..20: mol_type = other DNA
tttgggtctcctcaagactc

SEQ ID NO: 23491 - DNA, 20 bp, synthetic construct
  misc_feature 1..20: note = chemically synthesized
  source 1..20: mol_type = other DNA
tcaagactctagccgtcttt

SEQ ID NO: 23492 - DNA, 20 bp, synthetic construct
  misc_feature 1..20: note = chemically synthesized
  source 1..20: mol_type = other DNA
caagactctagccgtctttc

SEQ ID NO: 23493 - DNA, 20 bp, synthetic construct
  misc_feature 1..20: note = chemically synthesized
  source 1..20: mol_type = other DNA
aagactctagccgtctttca

SEQ ID NO: 23494 - DNA, 20 bp, synthetic construct
  misc_feature 1..20: note = chemically synthesized
  source 1..20: mol_type = other DNA
actctagccgtctttcaggg

SEQ ID NO: 23495 - DNA, 20 bp, synthetic construct
  misc_feature 1..20: note = chemically synthesized
  source 1..20: mol_type = other DNA
cgtctttcagggtagcacca

SEQ ID NO: 23496 - DNA, 20 bp, synthetic construct
  misc_feature 1..20: note = chemically synthesized
  source 1..20: mol_type = other DNA
ggtagcaccaaagtacattt

SEQ ID NO: 23497 - DNA, 20 bp, synthetic construct
  misc_feature 1..20: note = chemically synthesized
  source 1..20: mol_type = other DNA
gtagcaccaaagtacatttc

SEQ ID NO: 23498 - DNA, 20 bp, synthetic construct
  misc_feature 1..20: note = chemically synthesized
  source 1..20: mol_type = other DNA
tagcaccaaagtacatttca

SEQ ID NO: 23499 - DNA, 20 bp, synthetic construct
  misc_feature 1..20: note = chemically synthesized
  source 1..20: mol_type = other DNA
aaagtacatttcagggaaat

SEQ ID NO: 23500 - DNA, 20 bp, synthetic construct
  misc_feature 1..20: note = chemically synthesized
  source 1..20: mol_type = other DNA
gagaatgccctttgtattct

SEQ ID NO: 23501 - DNA, 20 bp, synthetic construct
  misc_feature 1..20: note = chemically synthesized
  source 1..20: mol_type = other DNA
ctttgtattctgagatttta

SEQ ID NO: 23502 - DNA, 20 bp, synthetic construct
  misc_feature 1..20: note = chemically synthesized
  source 1..20: mol_type = other DNA
tgtattctgagattttatag

SEQ ID NO: 23503 - DNA, 20 bp, synthetic construct
  misc_feature 1..20: note = chemically synthesized
  source 1..20: mol_type = other DNA
ttctgagattttatagaagt

SEQ ID NO: 23504 - DNA, 20 bp, synthetic construct
  misc_feature 1..20: note = chemically synthesized
  source 1..20: mol_type = other DNA
tttatagaagttggtaatga

SEQ ID NO: 23505 - DNA, 20 bp, synthetic construct
  misc_feature 1..20: note = chemically synthesized
  source 1..20: mol_type = other DNA
tatagaagttggtaatgaca

SEQ ID NO: 23506 - DNA, 20 bp, synthetic construct
  misc_feature 1..20: note = chemically synthesized
  source 1..20: mol_type = other DNA
tagaagttggtaatgacaga

SEQ ID NO: 23507 - DNA, 20 bp, synthetic construct
  misc_feature 1..20: note = chemically synthesized
  source 1..20: mol_type = other DNA
gaagttggtaatgacagaga

SEQ ID NO: 23508 - DNA, 20 bp, synthetic construct
  misc_feature 1..20: note = chemically synthesized
  source 1..20: mol_type = other DNA
agttggtaatgacagagaga

SEQ ID NO: 23509 - DNA, 20 bp, synthetic construct
  misc_feature 1..20: note = chemically synthesized
  source 1..20: mol_type = other DNA
ttggtaatgacagagagaga

SEQ ID NO: 23510 - DNA, 20 bp, synthetic construct
  misc_feature 1..20: note = chemically synthesized
  source 1..20: mol_type = other DNA
ggtaatgacagagagagaga

SEQ ID NO: 23511 - DNA, 20 bp, synthetic construct
  misc_feature 1..20: note = chemically synthesized
  source 1..20: mol_type = other DNA
taatgacagagagagagaga

SEQ ID NO: 23512 - DNA, 20 bp, synthetic construct
  misc_feature 1..20: note = chemically synthesized
  source 1..20: mol_type = other DNA
atgacagagagagagagaga

SEQ ID NO: 23513 - DNA, 20 bp, synthetic construct
  misc_feature 1..20: note = chemically synthesized
  source 1..20: mol_type = other DNA
gacagagagagagagagaga

SEQ ID NO: 23514 - DNA, 20 bp, synthetic construct
  misc_feature 1..20: note = chemically synthesized
  source 1..20: mol_type = other DNA
cagagagagagagagagaga

SEQ ID NO: 23515 - DNA, 20 bp, synthetic construct
  misc_feature 1..20: note = chemically synthesized
  source 1..20: mol_type = other DNA
gagagagagagagagagaga

SEQ ID NO: 23516 - DNA, 20 bp, synthetic construct
  misc_feature 1..20: note = chemically synthesized
  source 1..20: mol_type = other DNA
gagagagagagagagagaga

SEQ ID NO: 23517 - DNA, 20 bp, synthetic construct
  misc_feature 1..20: note = chemically synthesized
  source 1..20: mol_type = other DNA
gagagagagagagagagaga

SEQ ID NO: 23518 - DNA, 20 bp, synthetic construct
  misc_feature 1..20: note = chemically synthesized
  source 1..20: mol_type = other DNA
agagagagagagagagagag

SEQ ID NO: 23519 - DNA, 20 bp, synthetic construct
  misc_feature 1..20: note = chemically synthesized
  source 1..20: mol_type = other DNA
gagagagagagagagagaga

SEQ ID NO: 23520 - DNA, 20 bp, synthetic construct
  misc_feature 1..20: note = chemically synthesized
  source 1..20: mol_type = other DNA
gagagagagagagagagagg

SEQ ID NO: 23521 - DNA, 20 bp, synthetic construct
  misc_feature 1..20: note = chemically synthesized
  source 1..20: mol_type = other DNA
agagagagagagagagaggg

SEQ ID NO: 23522 - DNA, 20 bp, synthetic construct
  misc_feature 1..20: note = chemically synthesized
  source 1..20: mol_type = other DNA
gagagagagggaggcccact

SEQ ID NO: 23523 - DNA, 20 bp, synthetic construct
  misc_feature 1..20: note = chemically synthesized
  source 1..20: mol_type = other DNA
gagagggaggcccactgaga

SEQ ID NO: 23524 - DNA, 20 bp, synthetic construct
  misc_feature 1..20: note = chemically synthesized
  source 1..20: mol_type = other DNA
agagggaggcccactgagat

SEQ ID NO: 23525 - DNA, 20 bp, synthetic construct
  misc_feature 1..20: note = chemically synthesized
  source 1..20: mol_type = other DNA
gagggaggcccactgagatg

SEQ ID NO: 23526 - DNA, 20 bp, synthetic construct
  misc_feature 1..20: note = chemically synthesized
  source 1..20: mol_type = other DNA
gagatggggttatccaccat

SEQ ID NO: 23527 - DNA, 20 bp, synthetic construct
  misc_feature 1..20: note = chemically synthesized
  source 1..20: mol_type = other DNA
atggggttatccaccataag

SEQ ID NO: 23528 - DNA, 20 bp, synthetic construct
  misc_feature 1..20: note = chemically synthesized
  source 1..20: mol_type = other DNA
ggggttatccaccataagca

SEQ ID NO: 23529 - DNA, 20 bp, synthetic construct
  misc_feature 1..20: note = chemically synthesized
  source 1..20: mol_type = other DNA
tccaccataagcagagcatt

SEQ ID NO: 23530 - DNA, 20 bp, synthetic construct
  misc_feature 1..20: note = chemically synthesized
  source 1..20: mol_type = other DNA
ccaccataagcagagcattt

SEQ ID NO: 23531 - DNA, 20 bp, synthetic construct
  misc_feature 1..20: note = chemically synthesized
  source 1..20: mol_type = other DNA
taagcagagcatttgggtct

SEQ ID NO: 23532 - DNA, 20 bp, synthetic construct
  misc_feature 1..20: note = chemically synthesized
  source 1..20: mol_type = other DNA
gcagagcatttgggtctgag

SEQ ID NO: 23533 - DNA, 20 bp, synthetic construct
  misc_feature 1..20: note = chemically synthesized
  source 1..20: mol_type = other DNA
tttgggtctgagaagcgcat

SEQ ID NO: 23534 - DNA, 20 bp, synthetic construct
  misc_feature 1..20: note = chemically synthesized
  source 1..20: mol_type = other DNA
tctgagaagcgcatgagtac

SEQ ID NO: 23535 - DNA, 20 bp, synthetic construct
  misc_feature 1..20: note = chemically synthesized
  source 1..20: mol_type = other DNA
agaagcgcatgagtactggt

SEQ ID NO: 23536 - DNA, 20 bp, synthetic construct
  misc_feature 1..20: note = chemically synthesized
  source 1..20: mol_type = other DNA
atgagtactggtgagtatgt

SEQ ID NO: 23537 - DNA, 20 bp, synthetic construct
  misc_feature 1..20: note = chemically synthesized
  source 1..20: mol_type = other DNA
tgagtactggtgagtatgtg

SEQ ID NO: 23538 - DNA, 20 bp, synthetic construct
  misc_feature 1..20: note = chemically synthesized
  source 1..20: mol_type = other DNA
gtactggtgagtatgtgagg

SEQ ID NO: 23539 - DNA, 20 bp, synthetic construct
  misc_feature 1..20: note = chemically synthesized
  source 1..20: mol_type = other DNA
tactggtgagtatgtgagga

SEQ ID NO: 23540 - DNA, 20 bp, synthetic construct
  misc_feature 1..20: note = chemically synthesized
  source 1..20: mol_type = other DNA
ctggtgagtatgtgaggaag

SEQ ID NO: 23541 - DNA, 20 bp, synthetic construct
  misc_feature 1..20: note = chemically synthesized
  source 1..20: mol_type = other DNA
ggtgagtatgtgaggaagga

SEQ ID NO: 23542 - DNA, 20 bp, synthetic construct
  misc_feature 1..20: note = chemically synthesized
  source 1..20: mol_type = other DNA
tgagtatgtgaggaaggaga

SEQ ID NO: 23543 - DNA, 20 bp, synthetic construct
  misc_feature 1..20: note = chemically synthesized
  source 1..20: mol_type = other DNA
tatgtgaggaaggagagagc

SEQ ID NO: 23544 - DNA, 20 bp, synthetic construct
  misc_feature 1..20: note = chemically synthesized
  source 1..20: mol_type = other DNA
atgtgaggaaggagagagca

SEQ ID NO: 23545 - DNA, 20 bp, synthetic construct
  misc_feature 1..20: note = chemically synthesized
  source 1..20: mol_type = other DNA
tgtgaggaaggagagagcaa

SEQ ID NO: 23546 - DNA, 20 bp, synthetic construct
  misc_feature 1..20: note = chemically synthesized
  source 1..20: mol_type = other DNA
gtgaggaaggagagagcaag

SEQ ID NO: 23547 - DNA, 20 bp, synthetic construct
  misc_feature 1..20: note = chemically synthesized
  source 1..20: mol_type = other DNA
gaggaaggagagagcaaggg

SEQ ID NO: 23548 - DNA, 20 bp, synthetic construct
  misc_feature 1..20: note = chemically synthesized
  source 1..20: mol_type = other DNA
aggaaggagagagcaagggg

SEQ ID NO: 23549 - DNA, 20 bp, synthetic construct
  misc_feature 1..20: note = chemically synthesized
  source 1..20: mol_type = other DNA
ggggaggaaatctgttttcc

SEQ ID NO: 23550 - DNA, 20 bp, synthetic construct
  misc_feature 1..20: note = chemically synthesized
  source 1..20: mol_type = other DNA
aatctgttttcctagaattc

SEQ ID NO: 23551 - DNA, 20 bp, synthetic construct
  misc_feature 1..20: note = chemically synthesized
  source 1..20: mol_type = other DNA
ctgttttcctagaattccag

SEQ ID NO: 23552 - DNA, 20 bp, synthetic construct
  misc_feature 1..20: note = chemically synthesized
  source 1..20: mol_type = other DNA
tgttttcctagaattccagc

SEQ ID NO: 23553 - DNA, 20 bp, synthetic construct
  misc_feature 1..20: note = chemically synthesized
  source 1..20: mol_type = other DNA
gaattccagcaggcttcaaa

SEQ ID NO: 23554 - DNA, 20 bp, synthetic construct
  misc_feature 1..20: note = chemically synthesized
  source 1..20: mol_type = other DNA
agcaggcttcaaaaagtaaa

SEQ ID NO: 23555 - DNA, 20 bp, synthetic construct
  misc_feature 1..20: note = chemically synthesized
  source 1..20: mol_type = other DNA
gcaggcttcaaaaagtaaaa

SEQ ID NO: 23556 - DNA, 20 bp, synthetic construct
  misc_feature 1..20: note = chemically synthesized
  source 1..20: mol_type = other DNA
caggcttcaaaaagtaaaaa

SEQ ID NO: 23557 - DNA, 20 bp, synthetic construct
  misc_feature 1..20: note = chemically synthesized
  source 1..20: mol_type = other DNA
aggcttcaaaaagtaaaaag

SEQ ID NO: 23558 - DNA, 20 bp, synthetic construct
  misc_feature 1..20: note = chemically synthesized
  source 1..20: mol_type = other DNA
gcttcaaaaagtaaaaaggg

SEQ ID NO: 23559 - DNA, 20 bp, synthetic construct
  misc_feature 1..20: note = chemically synthesized
  source 1..20: mol_type = other DNA
cttcaaaaagtaaaaagggg

SEQ ID NO: 23560 - DNA, 20 bp, synthetic construct
  misc_feature 1..20: note = chemically synthesized
  source 1..20: mol_type = other DNA
ttcaaaaagtaaaaagggga

SEQ ID NO: 23561 - DNA, 20 bp, synthetic construct
  misc_feature 1..20: note = chemically synthesized
  source 1..20: mol_type = other DNA
caaaaagtaaaaaggggagg

SEQ ID NO: 23562 - DNA, 20 bp, synthetic construct
  misc_feature 1..20: note = chemically synthesized
  source 1..20: mol_type = other DNA
aggggagggagtacccaact

SEQ ID NO: 23563 - DNA, 20 bp, synthetic construct
  misc_feature 1..20: note = chemically synthesized
  source 1..20: mol_type = other DNA
aactaagtttttttcttccc

SEQ ID NO: 23564 - DNA, 20 bp, synthetic construct
  misc_feature 1..20: note = chemically synthesized
  source 1..20: mol_type = other DNA
aatacatttattctaaacat

SEQ ID NO: 23565 - DNA, 20 bp, synthetic construct
  misc_feature 1..20: note = chemically synthesized
  source 1..20: mol_type = other DNA
attctaaacattagcccaat

SEQ ID NO: 23566 - DNA, 20 bp, synthetic construct
  misc_feature 1..20: note = chemically synthesized
  source 1..20: mol_type = other DNA
ttgtttgtttgtttgttttt

SEQ ID NO: 23567 - DNA, 20 bp, synthetic construct
  misc_feature 1..20: note = chemically synthesized
  source 1..20: mol_type = other DNA
ttgtttgtttgtttttgaga

SEQ ID NO: 23568 - DNA, 20 bp, synthetic construct
  misc_feature 1..20: note = chemically synthesized
  source 1..20: mol_type = other DNA
tgtttgtttgtttttgagac

SEQ ID NO: 23569 - DNA, 20 bp, synthetic construct
  misc_feature 1..20: note = chemically synthesized
  source 1..20: mol_type = other DNA
gtttgtttgtttttgagaca

SEQ ID NO: 23570 - DNA, 20 bp, synthetic construct
  misc_feature 1..20: note = chemically synthesized
  source 1..20: mol_type = other DNA
cagggtctcgctgtgttgcc

SEQ ID NO: 23571 - DNA, 20 bp, synthetic construct
  misc_feature 1..20: note = chemically synthesized
  source 1..20: mol_type = other DNA
agggtctcgctgtgttgcct

SEQ ID NO: 23572 - DNA, 20 bp, synthetic construct
  misc_feature 1..20: note = chemically synthesized
  source 1..20: mol_type = other DNA
tctcgctgtgttgcctaggc

SEQ ID NO: 23573 - DNA, 20 bp, synthetic construct
  misc_feature 1..20: note = chemically synthesized
  source 1..20: mol_type = other DNA
tcgctgtgttgcctaggcta

SEQ ID NO: 23574 - DNA, 20 bp, synthetic construct
  misc_feature 1..20: note = chemically synthesized
  source 1..20: mol_type = other DNA
gtgttgcctaggctagagtg

SEQ ID NO: 23575 - DNA, 20 bp, synthetic construct
  misc_feature 1..20: note = chemically synthesized
  source 1..20: mol_type = other DNA
ttgcctaggctagagtgtag

SEQ ID NO: 23576 - DNA, 20 bp, synthetic construct
  misc_feature 1..20: note = chemically synthesized
  source 1..20: mol_type = other DNA
agagtgtagtggcatgttca

SEQ ID NO: 23577 - DNA, 20 bp, synthetic construct
  misc_feature 1..20: note = chemically synthesized
  source 1..20: mol_type = other DNA
ggcatgttcatagctcactg

SEQ ID NO: 23578 - DNA, 20 bp, synthetic construct
  misc_feature 1..20: note = chemically synthesized
  source 1..20: mol_type = other DNA
tcactgcagccttgatctcc

SEQ ID NO: 23579 - DNA, 20 bp, synthetic construct
  misc_feature 1..20: note = chemically synthesized
  source 1..20: mol_type = other DNA
cactgcagccttgatctcct

SEQ ID NO: 23580 - DNA, 20 bp, synthetic construct
  misc_feature 1..20: note = chemically synthesized
  source 1..20: mol_type = other DNA
agccttgatctcctaggctc

SEQ ID NO: 23581 - DNA, 20 bp, synthetic construct
  misc_feature 1..20: note = chemically synthesized
  source 1..20: mol_type = other DNA
ctcaagccatcctgtcacct

SEQ ID NO: 23582 - DNA, 20 bp, synthetic construct
  misc_feature 1..20: note = chemically synthesized
  source 1..20: mol_type = other DNA
tcctgtcacctcagcctcct

SEQ ID NO: 23583 - DNA, 20 bp, synthetic construct
  misc_feature 1..20: note = chemically synthesized
  source 1..20: mol_type = other DNA
tgtcacctcagcctcctgag

SEQ ID NO: 23584 - DNA, 20 bp, synthetic construct
  misc_feature 1..20: note = chemically synthesized
  source 1..20: mol_type = other DNA
acctcagcctcctgagtagc

SEQ ID NO: 23585 - DNA, 20 bp, synthetic construct
  misc_feature 1..20: note = chemically synthesized
  source 1..20: mol_type = other DNA
cctcagcctcctgagtagct

SEQ ID NO: 23586 - DNA, 20 bp, synthetic construct
  misc_feature 1..20: note = chemically synthesized
  source 1..20: mol_type = other DNA
ctcctgagtagctgggacga

SEQ ID NO: 23587 - DNA, 20 bp, synthetic construct
  misc_feature 1..20: note = chemically synthesized
  source 1..20: mol_type = other DNA
tcctgagtagctgggacgac

SEQ ID NO: 23588 - DNA, 20 bp, synthetic construct
  misc_feature 1..20: note = chemically synthesized
  source 1..20: mol_type = other DNA
caggtgcatgccaccatgcc

SEQ ID NO: 23589 - DNA, 20 bp, synthetic construct
  misc_feature 1..20: note = chemically synthesized
  source 1..20: mol_type = other DNA
accatgcctggctaattttg

SEQ ID NO: 23590 - DNA, 20 bp, synthetic construct
  misc_feature 1..20: note = chemically synthesized
  source 1..20: mol_type = other DNA
catgcctggctaattttgta

SEQ ID NO: 23591 - DNA, 20 bp, synthetic construct
  misc_feature 1..20: note = chemically synthesized
  source 1..20: mol_type = other DNA
cctggctaattttgtagaga

SEQ ID NO: 23592 - DNA, 20 bp, synthetic construct
  misc_feature 1..20: note = chemically synthesized
  source 1..20: mol_type = other DNA
tggctaattttgtagagatg

SEQ ID NO: 23593 - DNA, 20 bp, synthetic construct
  misc_feature 1..20: note = chemically synthesized
  source 1..20: mol_type = other DNA
tggagtttctccctgttgcc

SEQ ID NO: 23594 - DNA, 20 bp, synthetic construct
  misc_feature 1..20: note = chemically synthesized
  source 1..20: mol_type = other DNA
ggagtttctccctgttgccc

SEQ ID NO: 23595 - DNA, 20 bp, synthetic construct
  misc_feature 1..20: note = chemically synthesized
  source 1..20: mol_type = other DNA
tttctccctgttgcccaggc

SEQ ID NO: 23596 - DNA, 20 bp, synthetic construct
  misc_feature 1..20: note = chemically synthesized
  source 1..20: mol_type = other DNA
ccaggctggtcttgaactcc

SEQ ID NO: 23597 - DNA, 20 bp, synthetic construct
  misc_feature 1..20: note = chemically synthesized
  source 1..20: mol_type = other DNA
caggctggtcttgaactcct

SEQ ID NO: 23598 - DNA, 20 bp, synthetic construct
  misc_feature 1..20: note = chemically synthesized
  source 1..20: mol_type = other DNA
ggtcttgaactcctgggctc

SEQ ID NO: 23599 - DNA, 20 bp, synthetic construct
  misc_feature 1..20: note = chemically synthesized
  source 1..20: mol_type = other DNA
cctcctgccttgacctccca

SEQ ID NO: 23600 - DNA, 20 bp, synthetic construct
  misc_feature 1..20: note = chemically synthesized
  source 1..20: mol_type = other DNA
gccttgacctcccaaagtgc

SEQ ID NO: 23601 - DNA, 20 bp, synthetic construct
  misc_feature 1..20: note = chemically synthesized
  source 1..20: mol_type = other DNA
ccttgacctcccaaagtgct

SEQ ID NO: 23602 - DNA, 20 bp, synthetic construct
  misc_feature 1..20: note = chemically synthesized
  source 1..20: mol_type = other DNA
ctcccaaagtgctgggatta

SEQ ID NO: 23603 - DNA, 20 bp, synthetic construct
  misc_feature 1..20: note = chemically synthesized
  source 1..20: mol_type = other DNA
tcccaaagtgctgggattac

SEQ ID NO: 23604 - DNA, 20 bp, synthetic construct
  misc_feature 1..20: note = chemically synthesized
  source 1..20: mol_type = other DNA
aaagtgctgggattacaggc

SEQ ID NO: 23605 - DNA, 20 bp, synthetic construct
  misc_feature 1..20: note = chemically synthesized
  source 1..20: mol_type = other DNA
agtgctgggattacaggcga

SEQ ID NO: 23606 - DNA, 20 bp, synthetic construct
  misc_feature 1..20: note = chemically synthesized
  source 1..20: mol_type = other DNA
cactgtgcctgtcaccaact

SEQ ID NO: 23607 - DNA, 20 bp, synthetic construct
  misc_feature 1..20: note = chemically synthesized
  source 1..20: mol_type = other DNA
accaactcagtcttattcat

SEQ ID NO: 23608 - DNA, 20 bp, synthetic construct
  misc_feature 1..20: note = chemically synthesized
  source 1..20: mol_type = other DNA
catcagtatgtcttctcctt

SEQ ID NO: 23609 - DNA, 20 bp, synthetic construct
  misc_feature 1..20: note = chemically synthesized
  source 1..20: mol_type = other DNA
cagtatgtcttctccttaag

SEQ ID NO: 23610 - DNA, 20 bp, synthetic construct
  misc_feature 1..20: note = chemically synthesized
  source 1..20: mol_type = other DNA
gtatgtcttctccttaagcg

SEQ ID NO: 23611 - DNA, 20 bp, synthetic construct
  misc_feature 1..20: note = chemically synthesized
  source 1..20: mol_type = other DNA
aagcggagatgctaacaatg

SEQ ID NO: 23612 - DNA, 20 bp, synthetic construct
  misc_feature 1..20: note = chemically synthesized
  source 1..20: mol_type = other DNA
tcctgtgctgaattcctgta

SEQ ID NO: 23613 - DNA, 20 bp, synthetic construct
  misc_feature 1..20: note = chemically synthesized
  source 1..20: mol_type = other DNA
gtgctgaattcctgtaaagt

SEQ ID NO: 23614 - DNA, 20 bp, synthetic construct
  misc_feature 1..20: note = chemically synthesized
  source 1..20: mol_type = other DNA
tgctgaattcctgtaaagtg

SEQ ID NO: 23615 - DNA, 20 bp, synthetic construct
  misc_feature 1..20: note = chemically synthesized
  source 1..20: mol_type = other DNA
gctgaattcctgtaaagtga

SEQ ID NO: 23616 - DNA, 20 bp, synthetic construct
  misc_feature 1..20: note = chemically synthesized
  source 1..20: mol_type = other DNA
cctacatccatcttcctctc

SEQ ID NO: 23617 - DNA, 20 bp, synthetic construct
  misc_feature 1..20: note = chemically synthesized
  source 1..20: mol_type = other DNA
cagattccctctcaatttcc

SEQ ID NO: 23618 - DNA, 20 bp, synthetic construct
  misc_feature 1..20: note = chemically synthesized
  source 1..20: mol_type = other DNA
agattccctctcaatttcca

SEQ ID NO: 23619 - DNA, 20 bp, synthetic construct
  misc_feature 1..20: note = chemically synthesized
  source 1..20: mol_type = other DNA
ctctcaatttccaaggtatt

SEQ ID NO: 23620 - DNA, 20 bp, synthetic construct
  misc_feature 1..20: note = chemically synthesized
  source 1..20: mol_type = other DNA
atatctgaacttcatttatt

SEQ ID NO: 23621 - DNA, 20 bp, synthetic construct
  misc_feature 1..20: note = chemically synthesized
  source 1..20: mol_type = other DNA
tctgaacttcatttatttgg

SEQ ID NO: 23622 - DNA, 20 bp, synthetic construct
  misc_feature 1..20: note = chemically synthesized
  source 1..20: mol_type = other DNA
atttatttggcagatttgtg

SEQ ID NO: 23623 - DNA, 20 bp, synthetic construct
  misc_feature 1..20: note = chemically synthesized
  source 1..20: mol_type = other DNA
ctgccttttctgaacctatt

SEQ ID NO: 23624 - DNA, 20 bp, synthetic construct
  misc_feature 1..20: note = chemically synthesized
  source 1..20: mol_type = other DNA
tgccttttctgaacctattt

SEQ ID NO: 23625 - DNA, 20 bp, synthetic construct
  misc_feature 1..20: note = chemically synthesized
  source 1..20: mol_type = other DNA
tctgaacctatttgggtgct

SEQ ID NO: 23626 - DNA, 20 bp, synthetic construct
  misc_feature 1..20: note = chemically synthesized
  source 1..20: mol_type = other DNA
ctgaacctatttgggtgcta

SEQ ID NO: 23627 - DNA, 20 bp, synthetic construct
  misc_feature 1..20: note = chemically synthesized
  source 1..20: mol_type = other DNA
tttgggtgctaaggactgta

SEQ ID NO: 23628 - DNA, 20 bp, synthetic construct
  misc_feature 1..20: note = chemically synthesized
  source 1..20: mol_type = other DNA
tgctaaggactgtatggatt

SEQ ID NO: 23629 - DNA, 20 bp, synthetic construct
  misc_feature 1..20: note = chemically synthesized
  source 1..20: mol_type = other DNA
gctaaggactgtatggattt

SEQ ID NO: 23630 - DNA, 20 bp, synthetic construct
  misc_feature 1..20: note = chemically synthesized
  source 1..20: mol_type = other DNA
atggatttgggttcttaaca

SEQ ID NO: 23631 - DNA, 20 bp, synthetic construct
  misc_feature 1..20: note = chemically synthesized
  source 1..20: mol_type = other DNA
ggaaaacgtctgtgcctgcg

SEQ ID NO: 23632 - DNA, 20 bp, synthetic construct
  misc_feature 1..20: note = chemically synthesized
  source 1..20: mol_type = other DNA
cgtctgtgcctgcgtagtgt

SEQ ID NO: 23633 - DNA, 20 bp, synthetic construct
  misc_feature 1..20: note = chemically synthesized
  source 1..20: mol_type = other DNA
gtctgtgcctgcgtagtgtt

SEQ ID NO: 23634 - DNA, 20 bp, synthetic construct
  misc_feature 1..20: note = chemically synthesized
  source 1..20: mol_type = other DNA
gcgtagtgttgggtcctacc

SEQ ID NO: 23635 - DNA, 20 bp, synthetic construct
  misc_feature 1..20: note = chemically synthesized
  source 1..20: mol_type = other DNA
ttgggtcctacctggccact

SEQ ID NO: 23636 - DNA, 20 bp, synthetic construct
  misc_feature 1..20: note = chemically synthesized
  source 1..20: mol_type = other DNA
tggccacttggctctcaaca

SEQ ID NO: 23637 - DNA, 20 bp, synthetic construct
  misc_feature 1..20: note = chemically synthesized
  source 1..20: mol_type = other DNA
gccacttggctctcaacacg

SEQ ID NO: 23638 - DNA, 20 bp, synthetic construct
  misc_feature 1..20: note = chemically synthesized
  source 1..20: mol_type = other DNA
caacacggagtgatgatgcc

SEQ ID NO: 23639 - DNA, 20 bp, synthetic construct
  misc_feature 1..20: note = chemically synthesized
  source 1..20: mol_type = other DNA
aacacggagtgatgatgcct

SEQ ID NO: 23640 - DNA, 20 bp, synthetic construct
  misc_feature 1..20: note = chemically synthesized
  source 1..20: mol_type = other DNA
acacggagtgatgatgccta

SEQ ID NO: 23641 - DNA, 20 bp, synthetic construct
  misc_feature 1..20: note = chemically synthesized
  source 1..20: mol_type = other DNA
atgcctagggtgttttgacg

SEQ ID NO: 23642 - DNA, 20 bp, synthetic construct
  misc_feature 1..20: note = chemically synthesized
  source 1..20: mol_type = other DNA
tgcctagggtgttttgacgt

SEQ ID NO: 23643 - DNA, 20 bp, synthetic construct
  misc_feature 1..20: note = chemically synthesized
  source 1..20: mol_type = other DNA
ctagggtgttttgacgtggg

SEQ ID NO: 23644 - DNA, 20 bp, synthetic construct
  misc_feature 1..20: note = chemically synthesized
  source 1..20: mol_type = other DNA
ggtgttttgacgtgggcagt

SEQ ID NO: 23645 - DNA, 20 bp, synthetic construct
  misc_feature 1..20: note = chemically synthesized
  source 1..20: mol_type = other DNA
tttgacgtgggcagtcagcc

SEQ ID NO: 23646 - DNA, 20 bp, synthetic construct
  misc_feature 1..20: note = chemically synthesized
  source 1..20: mol_type = other DNA
cgtgggcagtcagcccagcc

SEQ ID NO: 23647 - DNA, 20 bp, synthetic construct
  misc_feature 1..20: note = chemically synthesized
  source 1..20: mol_type = other DNA
tgggcagtcagcccagcctg

SEQ ID NO: 23648 - DNA, 20 bp, synthetic construct
  misc_feature 1..20: note = chemically synthesized
  source 1..20: mol_type = other DNA
tcagcccagcctggagaact

SEQ ID NO: 23649 - DNA, 20 bp, synthetic construct
  misc_feature 1..20: note = chemically synthesized
  source 1..20: mol_type = other DNA
cagcccagcctggagaactg

SEQ ID NO: 23650 - DNA, 20 bp, synthetic construct
  misc_feature 1..20: note = chemically synthesized
  source 1..20: mol_type = other DNA
agcccagcctggagaactga

SEQ ID NO: 23651 - DNA, 20 bp, synthetic construct
  misc_feature 1..20: note = chemically synthesized
  source 1..20: mol_type = other DNA
gcccagcctggagaactgag

SEQ ID NO: 23652 - DNA, 20 bp, synthetic construct
  misc_feature 1..20: note = chemically synthesized
  source 1..20: mol_type = other DNA
ccagcctggagaactgaggg

SEQ ID NO: 23653 - DNA, 20 bp, synthetic construct
  misc_feature 1..20: note = chemically synthesized
  source 1..20: mol_type = other DNA
ttttttcttttttctttttt

SEQ ID NO: 23654 - DNA, 20 bp, synthetic construct
  misc_feature 1..20: note = chemically synthesized
  source 1..20: mol_type = other DNA
ttcttttttctttttttggt

SEQ ID NO: 23655 - DNA, 20 bp, synthetic construct
  misc_feature 1..20: note = chemically synthesized
  source 1..20: mol_type = other DNA
tttttctttttttggtgaga

SEQ ID NO: 23656 - DNA, 20 bp, synthetic construct
  misc_feature 1..20: note = chemically synthesized
  source 1..20: mol_type = other DNA
tttctttttttggtgagacg

SEQ ID NO: 23657 - DNA, 20 bp, synthetic construct
  misc_feature 1..20: note = chemically synthesized
  source 1..20: mol_type = other DNA
ggagatttactcttgttgcc

SEQ ID NO: 23658 - DNA, 20 bp, synthetic construct
  misc_feature 1..20: note = chemically synthesized
  source 1..20: mol_type = other DNA
gagatttactcttgttgccc

SEQ ID NO: 23659 - DNA, 20 bp, synthetic construct
  misc_feature 1..20: note = chemically synthesized
  source 1..20: mol_type = other DNA
tttactcttgttgcccgggc

SEQ ID NO: 23660 - DNA, 20 bp, synthetic construct
  misc_feature 1..20: note = chemically synthesized
  source 1..20: mol_type = other DNA
ttgcccgggctggaatgcaa

SEQ ID NO: 23661 - DNA, 20 bp, synthetic construct
  misc_feature 1..20: note = chemically synthesized
  source 1..20: mol_type = other DNA
ggaatgcaatggcgcgatct

SEQ ID NO: 23662 - DNA, 20 bp, synthetic construct
  misc_feature 1..20: note = chemically synthesized
  source 1..20: mol_type = other DNA
tcactgcatcttctgcctcc

SEQ ID NO: 23663 - DNA, 20 bp, synthetic construct
  misc_feature 1..20: note = chemically synthesized
  source 1..20: mol_type = other DNA
cactgcatcttctgcctccc

SEQ ID NO: 23664 - DNA, 20 bp, synthetic construct
  misc_feature 1..20: note = chemically synthesized
  source 1..20: mol_type = other DNA
atcttctgcctcccaggttc

SEQ ID NO: 23665 - DNA, 20 bp, synthetic construct
  misc_feature 1..20: note = chemically synthesized
  source 1..20: mol_type = other DNA
gttcaagcgatctcctgcct

SEQ ID NO: 23666 - DNA, 20 bp, synthetic construct
  misc_feature 1..20: note = chemically synthesized
  source 1..20: mol_type = other DNA
atctcctgcctcagcctccc

SEQ ID NO: 23667 - DNA, 20 bp, synthetic construct
  misc_feature 1..20: note = chemically synthesized
  source 1..20: mol_type = other DNA
tcctgcctcagcctcccgag

SEQ ID NO: 23668 - DNA, 20 bp, synthetic construct
  misc_feature 1..20: note = chemically synthesized
  source 1..20: mol_type = other DNA
cctcagcctcccgagtagct

SEQ ID NO: 23669 - DNA, 20 bp, synthetic construct
  misc_feature 1..20: note = chemically synthesized
  source 1..20: mol_type = other DNA
ctcccgagtagctgagatta

SEQ ID NO: 23670 - DNA, 20 bp, synthetic construct
  misc_feature 1..20: note = chemically synthesized
  source 1..20: mol_type = other DNA
tcccgagtagctgagattac

SEQ ID NO: 23671 - DNA, 20 bp, synthetic construct
  misc_feature 1..20: note = chemically synthesized
  source 1..20: mol_type = other DNA
caggcatgtattaccatgcc

SEQ ID NO: 23672 - DNA, 20 bp, synthetic construct
  misc_feature 1..20: note = chemically synthesized
  source 1..20: mol_type = other DNA
cccggctaattttgtatttt

SEQ ID NO: 23673 - DNA, 20 bp, synthetic construct
  misc_feature 1..20: note = chemically synthesized
  source 1..20: mol_type = other DNA
ggctaattttgtatttttag

SEQ ID NO: 23674 - DNA, 20 bp, synthetic construct
  misc_feature 1..20: note = chemically synthesized
  source 1..20: mol_type = other DNA
ctaattttgtatttttagta

SEQ ID NO: 23675 - DNA, 20 bp, synthetic construct
  misc_feature 1..20: note = chemically synthesized
  source 1..20: mol_type = other DNA
ttttgtatttttagtagaga

SEQ ID NO: 23676 - DNA, 20 bp, synthetic construct
  misc_feature 1..20: note = chemically synthesized
  source 1..20: mol_type = other DNA
tttgtatttttagtagagac

SEQ ID NO: 23677 - DNA, 20 bp, synthetic construct
  misc_feature 1..20: note = chemically synthesized
  source 1..20: mol_type = other DNA
ttgtatttttagtagagacg

SEQ ID NO: 23678 - DNA, 20 bp, synthetic construct
  misc_feature 1..20: note = chemically synthesized
  source 1..20: mol_type = other DNA
tgatcttgaactcctgacct

SEQ ID NO: 23679 - DNA, 20 bp, synthetic construct
  misc_feature 1..20: note = chemically synthesized
  source 1..20: mol_type = other DNA
gatcttgaactcctgacctc

SEQ ID NO: 23680 - DNA, 20 bp, synthetic construct
  misc_feature 1..20: note = chemically synthesized
  source 1..20: mol_type = other DNA
ctcaggtgatcctcctgccc

SEQ ID NO: 23681 - DNA, 20 bp, synthetic construct
  misc_feature 1..20: note = chemically synthesized
  source 1..20: mol_type = other DNA
cctcctgccccggcctccca

SEQ ID NO: 23682 - DNA, 20 bp, synthetic construct
  misc_feature 1..20: note = chemically synthesized
  source 1..20: mol_type = other DNA
gccccggcctcccaaagtgc

SEQ ID NO: 23683 - DNA, 20 bp, synthetic construct
  misc_feature 1..20: note = chemically synthesized
  source 1..20: mol_type = other DNA
ccccggcctcccaaagtgct

SEQ ID NO: 23684 - DNA, 20 bp, synthetic construct
  misc_feature 1..20: note = chemically synthesized
  source 1..20: mol_type = other DNA
ctcccaaagtgctgggatta

SEQ ID NO: 23685 - DNA, 20 bp, synthetic construct
  misc_feature 1..20: note = chemically synthesized
  source 1..20: mol_type = other DNA
tcccaaagtgctgggattac

SEQ ID NO: 23686 - DNA, 20 bp, synthetic construct
  misc_feature 1..20: note = chemically synthesized
  source 1..20: mol_type = other DNA
agtgctgggattacaggtgt

SEQ ID NO: 23687 - DNA, 20 bp, synthetic construct
  misc_feature 1..20: note = chemically synthesized
  source 1..20: mol_type = other DNA
gggattacaggtgtgagcca

SEQ ID NO: 23688 - DNA, 20 bp, synthetic construct
  misc_feature 1..20: note = chemically synthesized
  source 1..20: mol_type = other DNA
caggtgtgagccacagcgcc

SEQ ID NO: 23689 - DNA, 20 bp, synthetic construct
  misc_feature 1..20: note = chemically synthesized
  source 1..20: mol_type = other DNA
tgtgagccacagcgcctggc

SEQ ID NO: 23690 - DNA, 20 bp, synthetic construct
  misc_feature 1..20: note = chemically synthesized
  source 1..20: mol_type = other DNA
gtgagccacagcgcctggcc

SEQ ID NO: 23691 - DNA, 20 bp, synthetic construct
  misc_feature 1..20: note = chemically synthesized
  source 1..20: mol_type = other DNA
gagccacagcgcctggccgg

SEQ ID NO: 23692 - DNA, 20 bp, synthetic construct
  misc_feature 1..20: note = chemically synthesized
  source 1..20: mol_type = other DNA
gccgggagcatttcaaatga

SEQ ID NO: 23693 - DNA, 20 bp, synthetic construct
  misc_feature 1..20: note = chemically synthesized
  source 1..20: mol_type = other DNA
ggagcatttcaaatgatagt

SEQ ID NO: 23694 - DNA, 20 bp, synthetic construct
  misc_feature 1..20: note = chemically synthesized
  source 1..20: mol_type = other DNA
gagcatttcaaatgatagtt

SEQ ID NO: 23695 - DNA, 20 bp, synthetic construct
  misc_feature 1..20: note = chemically synthesized
  source 1..20: mol_type = other DNA
cttccttttactgtacttaa

SEQ ID NO: 23696 - DNA, 20 bp, synthetic construct
  misc_feature 1..20: note = chemically synthesized
  source 1..20: mol_type = other DNA
tttactgtacttaatagctg

SEQ ID NO: 23697 - DNA, 20 bp, synthetic construct
  misc_feature 1..20: note = chemically synthesized
  source 1..20: mol_type = other DNA
ttactgtacttaatagctga

SEQ ID NO: 23698 - DNA, 20 bp, synthetic construct
  misc_feature 1..20: note = chemically synthesized
  source 1..20: mol_type = other DNA
tactgtacttaatagctgaa

SEQ ID NO: 23699 - DNA, 20 bp, synthetic construct
  misc_feature 1..20: note = chemically synthesized
  source 1..20: mol_type = other DNA
actgtacttaatagctgaag

SEQ ID NO: 23700 - DNA, 20 bp, synthetic construct
  misc_feature 1..20: note = chemically synthesized
  source 1..20: mol_type = other DNA
ctgtacttaatagctgaagg

SEQ ID NO: 23701 - DNA, 20 bp, synthetic construct
  misc_feature 1..20: note = chemically synthesized
  source 1..20: mol_type = other DNA
taatagctgaagggggccaa

SEQ ID NO: 23702 - DNA, 20 bp, synthetic construct
  misc_feature 1..20: note = chemically synthesized
  source 1..20: mol_type = other DNA
tgtccatgtttgctgccctc

SEQ ID NO: 23703 - DNA, 20 bp, synthetic construct
  misc_feature 1..20: note = chemically synthesized
  source 1..20: mol_type = other DNA
ctgccctctggcatcaaaat

SEQ ID NO: 23704 - DNA, 20 bp, synthetic construct
  misc_feature 1..20: note = chemically synthesized
  source 1..20: mol_type = other DNA
tgccctctggcatcaaaatg

SEQ ID NO: 23705 - DNA, 20 bp, synthetic construct
  misc_feature 1..20: note = chemically synthesized
  source 1..20: mol_type = other DNA
catcaaaatgaggtcctttt

SEQ ID NO: 23706 - DNA, 20 bp, synthetic construct
  misc_feature 1..20: note = chemically synthesized
  source 1..20: mol_type = other DNA
caaaatgaggtcctttttag

SEQ ID NO: 23707 - DNA, 20 bp, synthetic construct
  misc_feature 1..20: note = chemically synthesized
  source 1..20: mol_type = other DNA
tagtagtgctgcatttaaaa

SEQ ID NO: 23708 - DNA, 20 bp, synthetic construct
  misc_feature 1..20: note = chemically synthesized
  source 1..20: mol_type = other DNA
gctgcatttaaaacagcatt

SEQ ID NO: 23709 - DNA, 20 bp, synthetic construct
  misc_feature 1..20: note = chemically synthesized
  source 1..20: mol_type = other DNA
cagcattaagaatacgtttt

SEQ ID NO: 23710 - DNA, 20 bp, synthetic construct
  misc_feature 1..20: note = chemically synthesized
  source 1..20: mol_type = other DNA
aagaatacgtttttagaact

SEQ ID NO: 23711 - DNA, 20 bp, synthetic construct
  misc_feature 1..20: note = chemically synthesized
  source 1..20: mol_type = other DNA
agaacttagctttttgcatt

SEQ ID NO: 23712 - DNA, 20 bp, synthetic construct
  misc_feature 1..20: note = chemically synthesized
  source 1..20: mol_type = other DNA
gaacttagctttttgcattg

SEQ ID NO: 23713 - DNA, 20 bp, synthetic construct
  misc_feature 1..20: note = chemically synthesized
  source 1..20: mol_type = other DNA
ctttttgcattgaggatgcg

SEQ ID NO: 23714 - DNA, 20 bp, synthetic construct
  misc_feature 1..20: note = chemically synthesized
  source 1..20: mol_type = other DNA
tttttgcattgaggatgcgc

SEQ ID NO: 23715 - DNA, 20 bp, synthetic construct
  misc_feature 1..20: note = chemically synthesized
  source 1..20: mol_type = other DNA
ttgcattgaggatgcgcagg

SEQ ID NO: 23716 - DNA, 20 bp, synthetic construct
  misc_feature 1..20: note = chemically synthesized
  source 1..20: mol_type = other DNA
ttgaggatgcgcaggtggct

SEQ ID NO: 23717 - DNA, 20 bp, synthetic construct
  misc_feature 1..20: note = chemically synthesized
  source 1..20: mol_type = other DNA
ggctgagactaacttctttg

SEQ ID NO: 23718 - DNA, 20 bp, synthetic construct
  misc_feature 1..20: note = chemically synthesized
  source 1..20: mol_type = other DNA
aacttctttgcagatgacca

SEQ ID NO: 23719 - DNA, 20 bp, synthetic construct
  misc_feature 1..20: note = chemically synthesized
  source 1..20: mol_type = other DNA
ttgcagatgaccatggttga

SEQ ID NO: 23720 - DNA, 20 bp, synthetic construct
  misc_feature 1..20: note = chemically synthesized
  source 1..20: mol_type = other DNA
agatgaccatggttgaaagt

SEQ ID NO: 23721 - DNA, 20 bp, synthetic construct
  misc_feature 1..20: note = chemically synthesized
  source 1..20: mol_type = other DNA
ccatggttgaaagtcagcta

SEQ ID NO: 23722 - DNA, 20 bp, synthetic construct
  misc_feature 1..20: note = chemically synthesized
  source 1..20: mol_type = other DNA
atggttgaaagtcagctata

SEQ ID NO: 23723 - DNA, 20 bp, synthetic construct
  misc_feature 1..20: note = chemically synthesized
  source 1..20: mol_type = other DNA
tatagagttgcacaaccacg

SEQ ID NO: 23724 - DNA, 20 bp, synthetic construct
  misc_feature 1..20: note = chemically synthesized
  source 1..20: mol_type = other DNA
gagttgcacaaccacgtagt

SEQ ID NO: 23725 - DNA, 20 bp, synthetic construct
  misc_feature 1..20: note = chemically synthesized
  source 1..20: mol_type = other DNA
agttgcacaaccacgtagtt

SEQ ID NO: 23726 - DNA, 20 bp, synthetic construct
  misc_feature 1..20: note = chemically synthesized
  source 1..20: mol_type = other DNA
acgtagttgggcttcacata

SEQ ID NO: 23727 - DNA, 20 bp, synthetic construct
  misc_feature 1..20: note = chemically synthesized
  source 1..20: mol_type = other DNA
tagttgggcttcacatatag

SEQ ID NO: 23728 - DNA, 20 bp, synthetic construct
  misc_feature 1..20: note = chemically synthesized
  source 1..20: mol_type = other DNA
tagaagatgttgtcattttt

SEQ ID NO: 23729 - DNA, 20 bp, synthetic construct
  misc_feature 1..20: note = chemically synthesized
  source 1..20: mol_type = other DNA
tcattttttggtaactctgt

SEQ ID NO: 23730 - DNA, 20 bp, synthetic construct
  misc_feature 1..20: note = chemically synthesized
  source 1..20: mol_type = other DNA
tctgtcagactttaccaacc

SEQ ID NO: 23731 - DNA, 20 bp, synthetic construct
  misc_feature 1..20: note = chemically synthesized
  source 1..20: mol_type = other DNA
gactttaccaacctggcgca

SEQ ID NO: 23732 - DNA, 20 bp, synthetic construct
  misc_feature 1..20: note = chemically synthesized
  source 1..20: mol_type = other DNA
taccaacctggcgcacagtc

SEQ ID NO: 23733 - DNA, 20 bp, synthetic construct
  misc_feature 1..20: note = chemically synthesized
  source 1..20: mol_type = other DNA
aacctggcgcacagtctggt

SEQ ID NO: 23734 - DNA, 20 bp, synthetic construct
  misc_feature 1..20: note = chemically synthesized
  source 1..20: mol_type = other DNA
acttcacatttgctcttctc

SEQ ID NO: 23735 - DNA, 20 bp, synthetic construct
  misc_feature 1..20: note = chemically synthesized
  source 1..20: mol_type = other DNA
cttcacatttgctcttctcc

SEQ ID NO: 23736 - DNA, 20 bp, synthetic construct
  misc_feature 1..20: note = chemically synthesized
  source 1..20: mol_type = other DNA
ttcacatttgctcttctcca

SEQ ID NO: 23737 - DNA, 20 bp, synthetic construct
  misc_feature 1..20: note = chemically synthesized
  source 1..20: mol_type = other DNA
atttgctcttctccagggtg

SEQ ID NO: 23738 - DNA, 20 bp, synthetic construct
  misc_feature 1..20: note = chemically synthesized
  source 1..20: mol_type = other DNA
tttgctcttctccagggtgt

SEQ ID NO: 23739 - DNA, 20 bp, synthetic construct
  misc_feature 1..20: note = chemically synthesized
  source 1..20: mol_type = other DNA
ttgctcttctccagggtgtg

SEQ ID NO: 23740 - DNA, 20 bp, synthetic construct
  misc_feature 1..20: note = chemically synthesized
  source 1..20: mol_type = other DNA
ctcttctccagggtgtgggg

SEQ ID NO: 23741 - DNA, 20 bp, synthetic construct
  misc_feature 1..20: note = chemically synthesized
  source 1..20: mol_type = other DNA
gggtgtggggtggctgttta

SEQ ID NO: 23742 - DNA, 20 bp, synthetic construct
  misc_feature 1..20: note = chemically synthesized
  source 1..20: mol_type = other DNA
gtgtggggtggctgtttaaa

SEQ ID NO: 23743 - DNA, 20 bp, synthetic construct
  misc_feature 1..20: note = chemically synthesized
  source 1..20: mol_type = other DNA
tgtggggtggctgtttaaag

SEQ ID NO: 23744 - DNA, 20 bp, synthetic construct
  misc_feature 1..20: note = chemically synthesized
  source 1..20: mol_type = other DNA
gtggggtggctgtttaaaga

SEQ ID NO: 23745 - DNA, 20 bp, synthetic construct
  misc_feature 1..20: note = chemically synthesized
  source 1..20: mol_type = other DNA
gggtggctgtttaaagaggg

SEQ ID NO: 23746 - DNA, 20 bp, synthetic construct
  misc_feature 1..20: note = chemically synthesized
  source 1..20: mol_type = other DNA
tattcatgctaatctttgtg

SEQ ID NO: 23747 - DNA, 20 bp, synthetic construct
  misc_feature 1..20: note = chemically synthesized
  source 1..20: mol_type = other DNA
gcttttttttttttatctga

SEQ ID NO: 23748 - DNA, 20 bp, synthetic construct
  misc_feature 1..20: note = chemically synthesized
  source 1..20: mol_type = other DNA
ttttttttatctgaaagttc

SEQ ID NO: 23749 - DNA, 20 bp, synthetic construct
  misc_feature 1..20: note = chemically synthesized
  source 1..20: mol_type = other DNA
tttttatctgaaagttcaag

SEQ ID NO: 23750 - DNA, 20 bp, synthetic construct
  misc_feature 1..20: note = chemically synthesized
  source 1..20: mol_type = other DNA
ctgaaagttcaagtagatat

SEQ ID NO: 23751 - DNA, 20 bp, synthetic construct
  misc_feature 1..20: note = chemically synthesized
  source 1..20: mol_type = other DNA
aaagttcaagtagatatcag

SEQ ID NO: 23752 - DNA, 20 bp, synthetic construct
  misc_feature 1..20: note = chemically synthesized
  source 1..20: mol_type = other DNA
aagttcaagtagatatcaga

SEQ ID NO: 23753 - DNA, 20 bp, synthetic construct
  misc_feature 1..20: note = chemically synthesized
  source 1..20: mol_type = other DNA
agttcaagtagatatcagaa

SEQ ID NO: 23754 - DNA, 20 bp, synthetic construct
  misc_feature 1..20: note = chemically synthesized
  source 1..20: mol_type = other DNA
tatcagaagggaaatgtttg

SEQ ID NO: 23755 - DNA, 20 bp, synthetic construct
  misc_feature 1..20: note = chemically synthesized
  source 1..20: mol_type = other DNA
atcagaagggaaatgtttgt

SEQ ID NO: 23756 - DNA, 20 bp, synthetic construct
  misc_feature 1..20: note = chemically synthesized
  source 1..20: mol_type = other DNA
gggaaatgtttgtgggtgct

SEQ ID NO: 23757 - DNA, 20 bp, synthetic construct
  misc_feature 1..20: note = chemically synthesized
  source 1..20: mol_type = other DNA
aaatgtttgtgggtgctaag

SEQ ID NO: 23758 - DNA, 20 bp, synthetic construct
  misc_feature 1..20: note = chemically synthesized
  source 1..20: mol_type = other DNA
aatgtttgtgggtgctaaga

SEQ ID NO: 23759 - DNA, 20 bp, synthetic construct
  misc_feature 1..20: note = chemically synthesized
  source 1..20: mol_type = other DNA
gttaaaattaccattttgaa

SEQ ID NO: 23760 - DNA, 20 bp, synthetic construct
  misc_feature 1..20: note = chemically synthesized
  source 1..20: mol_type = other DNA
ttttgaacagaaatgatatt

SEQ ID NO: 23761 - DNA, 20 bp, synthetic construct
  misc_feature 1..20: note = chemically synthesized
  source 1..20: mol_type = other DNA
tggaaaaataacttcccttt

SEQ ID NO: 23762 - DNA, 20 bp, synthetic construct
  misc_feature 1..20: note = chemically synthesized
  source 1..20: mol_type = other DNA
ggaaaaataacttccctttt

SEQ ID NO: 23763 - DNA, 20 bp, synthetic construct
  misc_feature 1..20: note = chemically synthesized
  source 1..20: mol_type = other DNA
aaaataacttcccttttagg

SEQ ID NO: 23764 - DNA, 20 bp, synthetic construct
  misc_feature 1..20: note = chemically synthesized
  source 1..20: mol_type = other DNA
aaataacttcccttttagga

SEQ ID NO: 23765 - DNA, 20 bp, synthetic construct
  misc_feature 1..20: note = chemically synthesized
  source 1..20: mol_type = other DNA
tcccttttaggaaggtaaat

SEQ ID NO: 23766 - DNA, 20 bp, synthetic construct
  misc_feature 1..20: note = chemically synthesized
  source 1..20: mol_type = other DNA
tatgctatttgttgaattcc

SEQ ID NO: 23767 - DNA, 20 bp, synthetic construct
  misc_feature 1..20: note = chemically synthesized
  source 1..20: mol_type = other DNA
tatcatgtcacatgctgtgc

SEQ ID NO: 23768 - DNA, 20 bp, synthetic construct
  misc_feature 1..20: note = chemically synthesized
  source 1..20: mol_type = other DNA
gctggtactttcaaatataa

SEQ ID NO: 23769 - DNA, 20 bp, synthetic construct
  misc_feature 1..20: note = chemically synthesized
  source 1..20: mol_type = other DNA
ggtactttcaaatataatag

SEQ ID NO: 23770 - DNA, 20 bp, synthetic construct
  misc_feature 1..20: note = chemically synthesized
  source 1..20: mol_type = other DNA
ctttcaaatataatagaagc

SEQ ID NO: 23771 - DNA, 20 bp, synthetic construct
  misc_feature 1..20: note = chemically synthesized
  source 1..20: mol_type = other DNA
tcaaatataatagaagcaag

SEQ ID NO: 23772 - DNA, 20 bp, synthetic construct
  misc_feature 1..20: note = chemically synthesized
  source 1..20: mol_type = other DNA
caaatataatagaagcaagt

SEQ ID NO: 23773 - DNA, 20 bp, synthetic construct
  misc_feature 1..20: note = chemically synthesized
  source 1..20: mol_type = other DNA
aatataatagaagcaagtag

SEQ ID NO: 23774 - DNA, 20 bp, synthetic construct
  misc_feature 1..20: note = chemically synthesized
  source 1..20: mol_type = other DNA
taatagaagcaagtaggaga

SEQ ID NO: 23775 - DNA, 20 bp, synthetic construct
  misc_feature 1..20: note = chemically synthesized
  source 1..20: mol_type = other DNA
atagaagcaagtaggagaaa

SEQ ID NO: 23776 - DNA, 20 bp, synthetic construct
  misc_feature 1..20: note = chemically synthesized
  source 1..20: mol_type = other DNA
gagaaagagtccctgtattg

SEQ ID NO: 23777 - DNA, 20 bp, synthetic construct
  misc_feature 1..20: note = chemically synthesized
  source 1..20: mol_type = other DNA
cctgtattgaagaaactcat

SEQ ID NO: 23778 - DNA, 20 bp, synthetic construct
  misc_feature 1..20: note = chemically synthesized
  source 1..20: mol_type = other DNA
ctgtattgaagaaactcatt

SEQ ID NO: 23779 - DNA, 20 bp, synthetic construct
  misc_feature 1..20: note = chemically synthesized
  source 1..20: mol_type = other DNA
tgggaacacatgaaattaat

SEQ ID NO: 23780 - DNA, 20 bp, synthetic construct
  misc_feature 1..20: note = chemically synthesized
  source 1..20: mol_type = other DNA
ggaacacatgaaattaatta

SEQ ID NO: 23781 - DNA, 20 bp, synthetic construct
  misc_feature 1..20: note = chemically synthesized
  source 1..20: mol_type = other DNA
gaacacatgaaattaattag

SEQ ID NO: 23782 - DNA, 20 bp, synthetic construct
  misc_feature 1..20: note = chemically synthesized
  source 1..20: mol_type = other DNA
catgaaattaattagaggca

SEQ ID NO: 23783 - DNA, 20 bp, synthetic construct
  misc_feature 1..20: note = chemically synthesized
  source 1..20: mol_type = other DNA
tgaaattaattagaggcata

SEQ ID NO: 23784 - DNA, 20 bp, synthetic construct
  misc_feature 1..20: note = chemically synthesized
  source 1..20: mol_type = other DNA
gaaattaattagaggcatag

SEQ ID NO: 23785 - DNA, 20 bp, synthetic construct
  misc_feature 1..20: note = chemically synthesized
  source 1..20: mol_type = other DNA
aaattaattagaggcataga

SEQ ID NO: 23786 - DNA, 20 bp, synthetic construct
  misc_feature 1..20: note = chemically synthesized
  source 1..20: mol_type = other DNA
tagaggcatagagggttaac

SEQ ID NO: 23787 - DNA, 20 bp, synthetic construct
  misc_feature 1..20: note = chemically synthesized
  source 1..20: mol_type = other DNA
agagggttaaccagcaatgt

SEQ ID NO: 23788 - DNA, 20 bp, synthetic construct
  misc_feature 1..20: note = chemically synthesized
  source 1..20: mol_type = other DNA
gagggttaaccagcaatgta

SEQ ID NO: 23789 - DNA, 20 bp, synthetic construct
  misc_feature 1..20: note = chemically synthesized
  source 1..20: mol_type = other DNA
ttaaccagcaatgtaaggcc

SEQ ID NO: 23790 - DNA, 20 bp, synthetic construct
  misc_feature 1..20: note = chemically synthesized
  source 1..20: mol_type = other DNA
gcaatgtaaggcctagatat

SEQ ID NO: 23791 - DNA, 20 bp, synthetic construct
  misc_feature 1..20: note = chemically synthesized
  source 1..20: mol_type = other DNA
tgtaaggcctagatatgagt

SEQ ID NO: 23792 - DNA, 20 bp, synthetic construct
  misc_feature 1..20: note = chemically synthesized
  source 1..20: mol_type = other DNA
gtaaggcctagatatgagtc

SEQ ID NO: 23793 - DNA, 20 bp, synthetic construct
  misc_feature 1..20: note = chemically synthesized
  source 1..20: mol_type = other DNA
taaggcctagatatgagtca

SEQ ID NO: 23794 - DNA, 20 bp, synthetic construct
  misc_feature 1..20: note = chemically synthesized
  source 1..20: mol_type = other DNA
aggcctagatatgagtcagg

SEQ ID NO: 23795 - DNA, 20 bp, synthetic construct
  misc_feature 1..20: note = chemically synthesized
  source 1..20: mol_type = other DNA
cctagatatgagtcagggag

SEQ ID NO: 23796 - DNA, 20 bp, synthetic construct
  misc_feature 1..20: note = chemically synthesized
  source 1..20: mol_type = other DNA
atgagtcagggagtggtgca

SEQ ID NO: 23797 - DNA, 20 bp, synthetic construct
  misc_feature 1..20: note = chemically synthesized
  source 1..20: mol_type = other DNA
tgagtcagggagtggtgcat

SEQ ID NO: 23798 - DNA, 20 bp, synthetic construct
  misc_feature 1..20: note = chemically synthesized
  source 1..20: mol_type = other DNA
cagggagtggtgcatgggat

SEQ ID NO: 23799 - DNA, 20 bp, synthetic construct
  misc_feature 1..20: note = chemically synthesized
  source 1..20: mol_type = other DNA
gcatgggatgagtgttctat

SEQ ID NO: 23800 - DNA, 20 bp, synthetic construct
  misc_feature 1..20: note = chemically synthesized
  source 1..20: mol_type = other DNA
catgggatgagtgttctatg

SEQ ID NO: 23801 - DNA, 20 bp, synthetic construct
  misc_feature 1..20: note = chemically synthesized
  source 1..20: mol_type = other DNA
ggatgagtgttctatgaggt

SEQ ID NO: 23802 - DNA, 20 bp, synthetic construct
  misc_feature 1..20: note = chemically synthesized
  source 1..20: mol_type = other DNA
atgagtgttctatgaggttg

SEQ ID NO: 23803 - DNA, 20 bp, synthetic construct
  misc_feature 1..20: note = chemically synthesized
  source 1..20: mol_type = other DNA
agtgttctatgaggttggag

SEQ ID NO: 23804 - DNA, 20 bp, synthetic construct
  misc_feature 1..20: note = chemically synthesized
  source 1..20: mol_type = other DNA
gtgttctatgaggttggaga

SEQ ID NO: 23805 - DNA, 20 bp, synthetic construct
  misc_feature 1..20: note = chemically synthesized
  source 1..20: mol_type = other DNA
ctatgaggttggagaaggat

SEQ ID NO: 23806 - DNA, 20 bp, synthetic construct
  misc_feature 1..20: note = chemically synthesized
  source 1..20: mol_type = other DNA
tgagattgattcttcttgct

SEQ ID NO: 23807 - DNA, 20 bp, synthetic construct
  misc_feature 1..20: note = chemically synthesized
  source 1..20: mol_type = other DNA
gagattgattcttcttgcta

SEQ ID NO: 23808 - DNA, 20 bp, synthetic construct
  misc_feature 1..20: note = chemically synthesized
  source 1..20: mol_type = other DNA
attcttcttgctaaggtgac

SEQ ID NO: 23809 - DNA, 20 bp, synthetic construct
  misc_feature 1..20: note = chemically synthesized
  source 1..20: mol_type = other DNA
ttcttcttgctaaggtgact

SEQ ID NO: 23810 - DNA, 20 bp, synthetic construct
  misc_feature 1..20: note = chemically synthesized
  source 1..20: mol_type = other DNA
ttcttgctaaggtgactagg

SEQ ID NO: 23811 - DNA, 20 bp, synthetic construct
  misc_feature 1..20: note = chemically synthesized
  source 1..20: mol_type = other DNA
tgactaggtagaccttcatt

SEQ ID NO: 23812 - DNA, 20 bp, synthetic construct
  misc_feature 1..20: note = chemically synthesized
  source 1..20: mol_type = other DNA
gactaggtagaccttcattg

SEQ ID NO: 23813 - DNA, 20 bp, synthetic construct
  misc_feature 1..20: note = chemically synthesized
  source 1..20: mol_type = other DNA
agaccttcattgaggccttg

SEQ ID NO: 23814 - DNA, 20 bp, synthetic construct
  misc_feature 1..20: note = chemically synthesized
  source 1..20: mol_type = other DNA
tcattgaggccttgaagtat

SEQ ID NO: 23815 - DNA, 20 bp, synthetic construct
  misc_feature 1..20: note = chemically synthesized
  source 1..20: mol_type = other DNA
ttgaggccttgaagtatgag

SEQ ID NO: 23816 - DNA, 20 bp, synthetic construct
  misc_feature 1..20: note = chemically synthesized
  source 1..20: mol_type = other DNA
tgaggccttgaagtatgagc

SEQ ID NO: 23817 - DNA, 20 bp, synthetic construct
  misc_feature 1..20: note = chemically synthesized
  source 1..20: mol_type = other DNA
ttgaagtatgagcaggattc

SEQ ID NO: 23818 - DNA, 20 bp, synthetic construct
  misc_feature 1..20: note = chemically synthesized
  source 1..20: mol_type = other DNA
tgaagtatgagcaggattcc

SEQ ID NO: 23819 - DNA, 20 bp, synthetic construct
  misc_feature 1..20: note = chemically synthesized
  source 1..20: mol_type = other DNA
aagtatgagcaggattccag

SEQ ID NO: 23820 - DNA, 20 bp, synthetic construct
  misc_feature 1..20: note = chemically synthesized
  source 1..20: mol_type = other DNA
agtatgagcaggattccagg

SEQ ID NO: 23821 - DNA, 20 bp, synthetic construct
  misc_feature 1..20: note = chemically synthesized
  source 1..20: mol_type = other DNA
tgagcaggattccaggaggt

SEQ ID NO: 23822 - DNA, 20 bp, synthetic construct
  misc_feature 1..20: note = chemically synthesized
  source 1..20: mol_type = other DNA
agcaggattccaggaggtaa

SEQ ID NO: 23823 - DNA, 20 bp, synthetic construct
  misc_feature 1..20: note = chemically synthesized
  source 1..20: mol_type = other DNA
aggattccaggaggtaagag

SEQ ID NO: 23824 - DNA, 20 bp, synthetic construct
  misc_feature 1..20: note = chemically synthesized
  source 1..20: mol_type = other DNA
attccaggaggtaagagaag

SEQ ID NO: 23825 - DNA, 20 bp, synthetic construct
  misc_feature 1..20: note = chemically synthesized
  source 1..20: mol_type = other DNA
ccaggaggtaagagaagaag

SEQ ID NO: 23826 - DNA, 20 bp, synthetic construct
  misc_feature 1..20: note = chemically synthesized
  source 1..20: mol_type = other DNA
aggtaagagaagaagaagaa

SEQ ID NO: 23827 - DNA, 20 bp, synthetic construct
  misc_feature 1..20: note = chemically synthesized
  source 1..20: mol_type = other DNA
aagagaagaagaagaaaagc

SEQ ID NO: 23828 - DNA, 20 bp, synthetic construct
  misc_feature 1..20: note = chemically synthesized
  source 1..20: mol_type = other DNA
agagaagaagaagaaaagcc

SEQ ID NO: 23829 - DNA, 20 bp, synthetic construct
  misc_feature 1..20: note = chemically synthesized
  source 1..20: mol_type = other DNA
gaagaagaagaaaagccagg

SEQ ID NO: 23830 - DNA, 20 bp, synthetic construct
  misc_feature 1..20: note = chemically synthesized
  source 1..20: mol_type = other DNA
aagaagaagaaaagccagga

SEQ ID NO: 23831 - DNA, 20 bp, synthetic construct
  misc_feature 1..20: note = chemically synthesized
  source 1..20: mol_type = other DNA
agaaaagccaggaaggaaat

SEQ ID NO: 23832 - DNA, 20 bp, synthetic construct
  misc_feature 1..20: note = chemically synthesized
  source 1..20: mol_type = other DNA
agccaggaaggaaatgagaa

SEQ ID NO: 23833 - DNA, 20 bp, synthetic construct
  misc_feature 1..20: note = chemically synthesized
  source 1..20: mol_type = other DNA
caggaaggaaatgagaacgg

SEQ ID NO: 23834 - DNA, 20 bp, synthetic construct
  misc_feature 1..20: note = chemically synthesized
  source 1..20: mol_type = other DNA
aggaaggaaatgagaacgga

SEQ ID NO: 23835 - DNA, 20 bp, synthetic construct
  misc_feature 1..20: note = chemically synthesized
  source 1..20: mol_type = other DNA
ggaaggaaatgagaacggaa

SEQ ID NO: 23836 - DNA, 20 bp, synthetic construct
  misc_feature 1..20: note = chemically synthesized
  source 1..20: mol_type = other DNA
gaacggaagggatttttact

SEQ ID NO: 23837 - DNA, 20 bp, synthetic construct
  misc_feature 1..20: note = chemically synthesized
  source 1..20: mol_type = other DNA
aacggaagggatttttactt

SEQ ID NO: 23838 - DNA, 20 bp, synthetic construct
  misc_feature 1..20: note = chemically synthesized
  source 1..20: mol_type = other DNA
ggaagggatttttacttggg

SEQ ID NO: 23839 - DNA, 20 bp, synthetic construct
  misc_feature 1..20: note = chemically synthesized
  source 1..20: mol_type = other DNA
gggcagaatattttccttga

SEQ ID NO: 23840 - DNA, 20 bp, synthetic construct
  misc_feature 1..20: note = chemically synthesized
  source 1..20: mol_type = other DNA
ggcagaatattttccttgat

SEQ ID NO: 23841 - DNA, 20 bp, synthetic construct
  misc_feature 1..20: note = chemically synthesized
  source 1..20: mol_type = other DNA
aatattttccttgatgggta

SEQ ID NO: 23842 - DNA, 20 bp, synthetic construct
  misc_feature 1..20: note = chemically synthesized
  source 1..20: mol_type = other DNA
atattttccttgatgggtac

SEQ ID NO: 23843 - DNA, 20 bp, synthetic construct
  misc_feature 1..20: note = chemically synthesized
  source 1..20: mol_type = other DNA
tattttccttgatgggtacg

SEQ ID NO: 23844 - DNA, 20 bp, synthetic construct
  misc_feature 1..20: note = chemically synthesized
  source 1..20: mol_type = other DNA
cttgatgggtacggggaact

SEQ ID NO: 23845 - DNA, 20 bp, synthetic construct
  misc_feature 1..20: note = chemically synthesized
  source 1..20: mol_type = other DNA
tgggtacggggaactaagac

SEQ ID NO: 23846 - DNA, 20 bp, synthetic construct
  misc_feature 1..20: note = chemically synthesized
  source 1..20: mol_type = other DNA
acggggaactaagactggaa

SEQ ID NO: 23847 - DNA, 20 bp, synthetic construct
  misc_feature 1..20: note = chemically synthesized
  source 1..20: mol_type = other DNA
ctaagactggaatagaaaat

SEQ ID NO: 23848 - DNA, 20 bp, synthetic construct
  misc_feature 1..20: note = chemically synthesized
  source 1..20: mol_type = other DNA
aagactggaatagaaaattg

SEQ ID NO: 23849 - DNA, 20 bp, synthetic construct
  misc_feature 1..20: note = chemically synthesized
  source 1..20: mol_type = other DNA
ctggaatagaaaattggagt

SEQ ID NO: 23850 - DNA, 20 bp, synthetic construct
  misc_feature 1..20: note = chemically synthesized
  source 1..20: mol_type = other DNA
agaaaattggagttggattg

SEQ ID NO: 23851 - DNA, 20 bp, synthetic construct
  misc_feature 1..20: note = chemically synthesized
  source 1..20: mol_type = other DNA
aaaattggagttggattgtg

SEQ ID NO: 23852 - DNA, 20 bp, synthetic construct
  misc_feature 1..20: note = chemically synthesized
  source 1..20: mol_type = other DNA
ggagttggattgtggagctc

SEQ ID NO: 23853 - DNA, 20 bp, synthetic construct
  misc_feature 1..20: note = chemically synthesized
  source 1..20: mol_type = other DNA
attgtggagctctggaatga

SEQ ID NO: 23854 - DNA, 20 bp, synthetic construct
  misc_feature 1..20: note = chemically synthesized
  source 1..20: mol_type = other DNA
gagctctggaatgatggctt

SEQ ID NO: 23855 - DNA, 20 bp, synthetic construct
  misc_feature 1..20: note = chemically synthesized
  source 1..20: mol_type = other DNA
agctctggaatgatggctta

SEQ ID NO: 23856 - DNA, 20 bp, synthetic construct
  misc_feature 1..20: note = chemically synthesized
  source 1..20: mol_type = other DNA
ctctggaatgatggcttaag

SEQ ID NO: 23857 - DNA, 20 bp, synthetic construct
  misc_feature 1..20: note = chemically synthesized
  source 1..20: mol_type = other DNA
ggaatgatggcttaaggagt

SEQ ID NO: 23858 - DNA, 20 bp, synthetic construct
  misc_feature 1..20: note = chemically synthesized
  source 1..20: mol_type = other DNA
aggagttggaccatatccta

SEQ ID NO: 23859 - DNA, 20 bp, synthetic construct
  misc_feature 1..20: note = chemically synthesized
  source 1..20: mol_type = other DNA
ggaccatatcctatagatca

SEQ ID NO: 23860 - DNA, 20 bp, synthetic construct
  misc_feature 1..20: note = chemically synthesized
  source 1..20: mol_type = other DNA
accatatcctatagatcaca

SEQ ID NO: 23861 - DNA, 20 bp, synthetic construct
  misc_feature 1..20: note = chemically synthesized
  source 1..20: mol_type = other DNA
ccatatcctatagatcacag

SEQ ID NO: 23862 - DNA, 20 bp, synthetic construct
  misc_feature 1..20: note = chemically synthesized
  source 1..20: mol_type = other DNA
catatcctatagatcacaga

SEQ ID NO: 23863 - DNA, 20 bp, synthetic construct
  misc_feature 1..20: note = chemically synthesized
  source 1..20: mol_type = other DNA
ggctgctgaaatactctgat

SEQ ID NO: 23864 - DNA, 20 bp, synthetic construct
  misc_feature 1..20: note = chemically synthesized
  source 1..20: mol_type = other DNA
tgctgaaatactctgatcag

SEQ ID NO: 23865 - DNA, 20 bp, synthetic construct
  misc_feature 1..20: note = chemically synthesized
  source 1..20: mol_type = other DNA
aatactctgatcagaagaca

SEQ ID NO: 23866 - DNA, 20 bp, synthetic construct
  misc_feature 1..20: note = chemically synthesized
  source 1..20: mol_type = other DNA
atactctgatcagaagacaa

SEQ ID NO: 23867 - DNA, 20 bp, synthetic construct
  misc_feature 1..20: note = chemically synthesized
  source 1..20: mol_type = other DNA
ctctgatcagaagacaaagg

SEQ ID NO: 23868 - DNA, 20 bp, synthetic construct
  misc_feature 1..20: note = chemically synthesized
  source 1..20: mol_type = other DNA
agaagacaaaggcagcatgc

SEQ ID NO: 23869 - DNA, 20 bp, synthetic construct
  misc_feature 1..20: note = chemically synthesized
  source 1..20: mol_type = other DNA
gaagacaaaggcagcatgct

SEQ ID NO: 23870 - DNA, 20 bp, synthetic construct
  misc_feature 1..20: note = chemically synthesized
  source 1..20: mol_type = other DNA
aagacaaaggcagcatgcta

SEQ ID NO: 23871 - DNA, 20 bp, synthetic construct
  misc_feature 1..20: note = chemically synthesized
  source 1..20: mol_type = other DNA
agacaaaggcagcatgctag

SEQ ID NO: 23872 - DNA, 20 bp, synthetic construct
  misc_feature 1..20: note = chemically synthesized
  source 1..20: mol_type = other DNA
gcagcatgctaggggatgtt

SEQ ID NO: 23873 - DNA, 20 bp, synthetic construct
  misc_feature 1..20: note = chemically synthesized
  source 1..20: mol_type = other DNA
catgctaggggatgttaagt

SEQ ID NO: 23874 - DNA, 20 bp, synthetic construct
  misc_feature 1..20: note = chemically synthesized
  source 1..20: mol_type = other DNA
atgctaggggatgttaagtg

SEQ ID NO: 23875 - DNA, 20 bp, synthetic construct
  misc_feature 1..20: note = chemically synthesized
  source 1..20: mol_type = other DNA
tgttaagtgaggactctgca

SEQ ID NO: 23876 - DNA, 20 bp, synthetic construct
  misc_feature 1..20: note = chemically synthesized
  source 1..20: mol_type = other DNA
gttaagtgaggactctgcaa

SEQ ID NO: 23877 - DNA, 20 bp, synthetic construct
  misc_feature 1..20: note = chemically synthesized
  source 1..20: mol_type = other DNA
ttaagtgaggactctgcaaa

SEQ ID NO: 23878 - DNA, 20 bp, synthetic construct
  misc_feature 1..20: note = chemically synthesized
  source 1..20: mol_type = other DNA
taagtgaggactctgcaaag

SEQ ID NO: 23879 - DNA, 20 bp, synthetic construct
  misc_feature 1..20: note = chemically synthesized
  source 1..20: mol_type = other DNA
aagtgaggactctgcaaagg

SEQ ID NO: 23880 - DNA, 20 bp, synthetic construct
  misc_feature 1..20: note = chemically synthesized
  source 1..20: mol_type = other DNA
tgaggactctgcaaaggggg

SEQ ID NO: 23881 - DNA, 20 bp, synthetic construct
  misc_feature 1..20: note = chemically synthesized
  source 1..20: mol_type = other DNA
actctgcaaagggggtggat

SEQ ID NO: 23882 - DNA, 20 bp, synthetic construct
  misc_feature 1..20: note = chemically synthesized
  source 1..20: mol_type = other DNA
tctgttatacccttcatgcc

SEQ ID NO: 23883 - DNA, 20 bp, synthetic construct
  misc_feature 1..20: note = chemically synthesized
  source 1..20: mol_type = other DNA
ccctgttgacttatatgttc

SEQ ID NO: 23884 - DNA, 20 bp, synthetic construct
  misc_feature 1..20: note = chemically synthesized
  source 1..20: mol_type = other DNA
ctgttgacttatatgttcta

SEQ ID NO: 23885 - DNA, 20 bp, synthetic construct
  misc_feature 1..20: note = chemically synthesized
  source 1..20: mol_type = other DNA
tgttgacttatatgttctag

SEQ ID NO: 23886 - DNA, 20 bp, synthetic construct
  misc_feature 1..20: note = chemically synthesized
  source 1..20: mol_type = other DNA
gacttatatgttctagagga

SEQ ID NO: 23887 - DNA, 20 bp, synthetic construct
  misc_feature 1..20: note = chemically synthesized
  source 1..20: mol_type = other DNA
cttatatgttctagaggatg

SEQ ID NO: 23888 - DNA, 20 bp, synthetic construct
  misc_feature 1..20: note = chemically synthesized
  source 1..20: mol_type = other DNA
tatgttctagaggatggagt

SEQ ID NO: 23889 - DNA, 20 bp, synthetic construct
  misc_feature 1..20: note = chemically synthesized
  source 1..20: mol_type = other DNA
aggatggagttggttgaccg

SEQ ID NO: 23890 - DNA, 20 bp, synthetic construct
  misc_feature 1..20: note = chemically synthesized
  source 1..20: mol_type = other DNA
ggatggagttggttgaccgt

SEQ ID NO: 23891 - DNA, 20 bp, synthetic construct
  misc_feature 1..20: note = chemically synthesized
  source 1..20: mol_type = other DNA
gatggagttggttgaccgta

SEQ ID NO: 23892 - DNA, 20 bp, synthetic construct
  misc_feature 1..20: note = chemically synthesized
  source 1..20: mol_type = other DNA
accgtagggtttcctttcac

SEQ ID NO: 23893 - DNA, 20 bp, synthetic construct
  misc_feature 1..20: note = chemically synthesized
  source 1..20: mol_type = other DNA
gtagggtttcctttcactag

SEQ ID NO: 23894 - DNA, 20 bp, synthetic construct
  misc_feature 1..20: note = chemically synthesized
  source 1..20: mol_type = other DNA
gtttcctttcactagcagaa

SEQ ID NO: 23895 - DNA, 20 bp, synthetic construct
  misc_feature 1..20: note = chemically synthesized
  source 1..20: mol_type = other DNA
tttcactagcagaatggaac

SEQ ID NO: 23896 - DNA, 20 bp, synthetic construct
  misc_feature 1..20: note = chemically synthesized
  source 1..20: mol_type = other DNA
cagaatggaaccagatattg

SEQ ID NO: 23897 - DNA, 20 bp, synthetic construct
  misc_feature 1..20: note = chemically synthesized
  source 1..20: mol_type = other DNA
agaatggaaccagatattgt

SEQ ID NO: 23898 - DNA, 20 bp, synthetic construct
  misc_feature 1..20: note = chemically synthesized
  source 1..20: mol_type = other DNA
aatggaaccagatattgtag

SEQ ID NO: 23899 - DNA, 20 bp, synthetic construct
  misc_feature 1..20: note = chemically synthesized
  source 1..20: mol_type = other DNA
aaccagatattgtaggagcc

SEQ ID NO: 23900 - DNA, 20 bp, synthetic construct
  misc_feature 1..20: note = chemically synthesized
  source 1..20: mol_type = other DNA
tattgtaggagcctagcaca

SEQ ID NO: 23901 - DNA, 20 bp, synthetic construct
  misc_feature 1..20: note = chemically synthesized
  source 1..20: mol_type = other DNA
attgtaggagcctagcacat

SEQ ID NO: 23902 - DNA, 20 bp, synthetic construct
  misc_feature 1..20: note = chemically synthesized
  source 1..20: mol_type = other DNA
acatgggtctgttactaata

SEQ ID NO: 23903 - DNA, 20 bp, synthetic construct
  misc_feature 1..20: note = chemically synthesized
  source 1..20: mol_type = other DNA
atgggtctgttactaatata

SEQ ID NO: 23904 - DNA, 20 bp, synthetic construct
  misc_feature 1..20: note = chemically synthesized
  source 1..20: mol_type = other DNA
tgggtctgttactaatatag

SEQ ID NO: 23905 - DNA, 20 bp, synthetic construct
  misc_feature 1..20: note = chemically synthesized
  source 1..20: mol_type = other DNA
atagaggactgtttaaatct

SEQ ID NO: 23906 - DNA, 20 bp, synthetic construct
  misc_feature 1..20: note = chemically synthesized
  source 1..20: mol_type = other DNA
aggactgtttaaatcttgga

SEQ ID NO: 23907 - DNA, 20 bp, synthetic construct
  misc_feature 1..20: note = chemically synthesized
  source 1..20: mol_type = other DNA
ttttgcctttgcccccattg

SEQ ID NO: 23908 - DNA, 20 bp, synthetic construct
  misc_feature 1..20: note = chemically synthesized
  source 1..20: mol_type = other DNA
gcctttgcccccattgcaga

SEQ ID NO: 23909 - DNA, 20 bp, synthetic construct
  misc_feature 1..20: note = chemically synthesized
  source 1..20: mol_type = other DNA
cctttgcccccattgcagat

SEQ ID NO: 23910 - DNA, 20 bp, synthetic construct
  misc_feature 1..20: note = chemically synthesized
  source 1..20: mol_type = other DNA
ctttgcccccattgcagatg

SEQ ID NO: 23911 - DNA, 20 bp, synthetic construct
  misc_feature 1..20: note = chemically synthesized
  source 1..20: mol_type = other DNA
ttgcccccattgcagatggg

SEQ ID NO: 23912 - DNA, 20 bp, synthetic construct
  misc_feature 1..20: note = chemically synthesized
  source 1..20: mol_type = other DNA
cccccattgcagatggggag

SEQ ID NO: 23913 - DNA, 20 bp, synthetic construct
  misc_feature 1..20: note = chemically synthesized
  source 1..20: mol_type = other DNA
ccccattgcagatggggagt

SEQ ID NO: 23914 - DNA, 20 bp, synthetic construct
  misc_feature 1..20: note = chemically synthesized
  source 1..20: mol_type = other DNA
cattgcagatggggagtggg

SEQ ID NO: 23915 - DNA, 20 bp, synthetic construct
  misc_feature 1..20: note = chemically synthesized
  source 1..20: mol_type = other DNA
attgcagatggggagtgggc

SEQ ID NO: 23916 - DNA, 20 bp, synthetic construct
  misc_feature 1..20: note = chemically synthesized
  source 1..20: mol_type = other DNA
gagtgggcaggaatgacgtt

SEQ ID NO: 23917 - DNA, 20 bp, synthetic construct
  misc_feature 1..20: note = chemically synthesized
  source 1..20: mol_type = other DNA
caggaatgacgttcagaatc

SEQ ID NO: 23918 - DNA, 20 bp, synthetic construct
  misc_feature 1..20: note = chemically synthesized
  source 1..20: mol_type = other DNA
aggaatgacgttcagaatca

SEQ ID NO: 23919 - DNA, 20 bp, synthetic construct
  misc_feature 1..20: note = chemically synthesized
  source 1..20: mol_type = other DNA
ggaatgacgttcagaatcaa

SEQ ID NO: 23920 - DNA, 20 bp, synthetic construct
  misc_feature 1..20: note = chemically synthesized
  source 1..20: mol_type = other DNA
gttcagaatcaagggcccat

SEQ ID NO: 23921 - DNA, 20 bp, synthetic construct
  misc_feature 1..20: note = chemically synthesized
  source 1..20: mol_type = other DNA
ttcagaatcaagggcccatc

SEQ ID NO: 23922 - DNA, 20 bp, synthetic construct
  misc_feature 1..20: note = chemically synthesized
  source 1..20: mol_type = other DNA
tcagaatcaagggcccatca

SEQ ID NO: 23923 - DNA, 20 bp, synthetic construct
  misc_feature 1..20: note = chemically synthesized
  source 1..20: mol_type = other DNA
gggcccatcagggtctgtat

SEQ ID NO: 23924 - DNA, 20 bp, synthetic construct
  misc_feature 1..20: note = chemically synthesized
  source 1..20: mol_type = other DNA
ggtcccttgtccctctcctc

SEQ ID NO: 23925 - DNA, 20 bp, synthetic construct
  misc_feature 1..20: note = chemically synthesized
  source 1..20: mol_type = other DNA
ctcctccagtccatccatgt

SEQ ID NO: 23926 - DNA, 20 bp, synthetic construct
  misc_feature 1..20: note = chemically synthesized
  source 1..20: mol_type = other DNA
tcctccagtccatccatgtt

SEQ ID NO: 23927 - DNA, 20 bp, synthetic construct
  misc_feature 1..20: note = chemically synthesized
  source 1..20: mol_type = other DNA
tccatccatgttgggatact

SEQ ID NO: 23928 - DNA, 20 bp, synthetic construct
  misc_feature 1..20: note = chemically synthesized
  source 1..20: mol_type = other DNA
ccatccatgttgggatactc

SEQ ID NO: 23929 - DNA, 20 bp, synthetic construct
  misc_feature 1..20: note = chemically synthesized
  source 1..20: mol_type = other DNA
catccatgttgggatactca

SEQ ID NO: 23930 - DNA, 20 bp, synthetic construct
  misc_feature 1..20: note = chemically synthesized
  source 1..20: mol_type = other DNA
atgttgggatactcagggca

SEQ ID NO: 23931 - DNA, 20 bp, synthetic construct
  misc_feature 1..20: note = chemically synthesized
  source 1..20: mol_type = other DNA
tgggatactcagggcatgga

SEQ ID NO: 23932 - DNA, 20 bp, synthetic construct
  misc_feature 1..20: note = chemically synthesized
  source 1..20: mol_type = other DNA
gcatggatggtgtttcatga

SEQ ID NO: 23933 - DNA, 20 bp, synthetic construct
  misc_feature 1..20: note = chemically synthesized
  source 1..20: mol_type = other DNA
ttgatgatatgtgacaaaat

SEQ ID NO: 23934 - DNA, 20 bp, synthetic construct
  misc_feature 1..20: note = chemically synthesized
  source 1..20: mol_type = other DNA
tgatgatatgtgacaaaata

SEQ ID NO: 23935 - DNA, 20 bp, synthetic construct
  misc_feature 1..20: note = chemically synthesized
  source 1..20: mol_type = other DNA
tgatatgtgacaaaataagg

SEQ ID NO: 23936 - DNA, 20 bp, synthetic construct
  misc_feature 1..20: note = chemically synthesized
  source 1..20: mol_type = other DNA
gatatgtgacaaaataaggc

SEQ ID NO: 23937 - DNA, 20 bp, synthetic construct
  misc_feature 1..20: note = chemically synthesized
  source 1..20: mol_type = other DNA
tccctgtgatctctctttaa

SEQ ID NO: 23938 - DNA, 20 bp, synthetic construct
  misc_feature 1..20: note = chemically synthesized
  source 1..20: mol_type = other DNA
ttaatagtgtcctcctgctt

SEQ ID NO: 23939 - DNA, 20 bp, synthetic construct
  misc_feature 1..20: note = chemically synthesized
  source 1..20: mol_type = other DNA
taatagtgtcctcctgcttt

SEQ ID NO: 23940 - DNA, 20 bp, synthetic construct
  misc_feature 1..20: note = chemically synthesized
  source 1..20: mol_type = other DNA
aatagtgtcctcctgctttg

SEQ ID NO: 23941 - DNA, 20 bp, synthetic construct
  misc_feature 1..20: note = chemically synthesized
  source 1..20: mol_type = other DNA
atagtgtcctcctgctttgg

SEQ ID NO: 23942 - DNA, 20 bp, synthetic construct
  misc_feature 1..20: note = chemically synthesized
  source 1..20: mol_type = other DNA
ctcctgctttgggggttatt

SEQ ID NO: 23943 - DNA, 20 bp, synthetic construct
  misc_feature 1..20: note = chemically synthesized
  source 1..20: mol_type = other DNA
tgctttgggggttattaagc

SEQ ID NO: 23944 - DNA, 20 bp, synthetic construct
  misc_feature 1..20: note = chemically synthesized
  source 1..20: mol_type = other DNA
tattaagctagcctgaactt

SEQ ID NO: 23945 - DNA, 20 bp, synthetic construct
  misc_feature 1..20: note = chemically synthesized
  source 1..20: mol_type = other DNA
tgaacttgagtaaacatttt

SEQ ID NO: 23946 - DNA, 20 bp, synthetic construct
  misc_feature 1..20: note = chemically synthesized
  source 1..20: mol_type = other DNA
cttgagtaaacatttttgga

SEQ ID NO: 23947 - DNA, 20 bp, synthetic construct
  misc_feature 1..20: note = chemically synthesized
  source 1..20: mol_type = other DNA
ttgagtaaacatttttggat

SEQ ID NO: 23948 - DNA, 20 bp, synthetic construct
  misc_feature 1..20: note = chemically synthesized
  source 1..20: mol_type = other DNA
tgagtaaacatttttggatg

SEQ ID NO: 23949 - DNA, 20 bp, synthetic construct
  misc_feature 1..20: note = chemically synthesized
  source 1..20: mol_type = other DNA
taaacatttttggatggggt

SEQ ID NO: 23950 - DNA, 20 bp, synthetic construct
  misc_feature 1..20: note = chemically synthesized
  source 1..20: mol_type = other DNA
aacatttttggatggggtga

SEQ ID NO: 23951 - DNA, 20 bp, synthetic construct
  misc_feature 1..20: note = chemically synthesized
  source 1..20: mol_type = other DNA
acatttttggatggggtgag

SEQ ID NO: 23952 - DNA, 20 bp, synthetic construct
  misc_feature 1..20: note = chemically synthesized
  source 1..20: mol_type = other DNA
catttttggatggggtgaga

SEQ ID NO: 23953 - DNA, 20 bp, synthetic construct
  misc_feature 1..20: note = chemically synthesized
  source 1..20: mol_type = other DNA
atttttggatggggtgagag

SEQ ID NO: 23954 - DNA, 20 bp, synthetic construct
  misc_feature 1..20: note = chemically synthesized
  source 1..20: mol_type = other DNA
tttttggatggggtgagagg

SEQ ID NO: 23955 - DNA, 20 bp, synthetic construct
  misc_feature 1..20: note = chemically synthesized
  source 1..20: mol_type = other DNA
ttttggatggggtgagaggg

SEQ ID NO: 23956 - DNA, 20 bp, synthetic construct
  misc_feature 1..20: note = chemically synthesized
  source 1..20: mol_type = other DNA
ggtgagaggggggctgataa

SEQ ID NO: 23957 - DNA, 20 bp, synthetic construct
  misc_feature 1..20: note = chemically synthesized
  source 1..20: mol_type = other DNA
gagaggggggctgataaaag

SEQ ID NO: 23958 - DNA, 20 bp, synthetic construct
  misc_feature 1..20: note = chemically synthesized
  source 1..20: mol_type = other DNA
ggggggctgataaaagtggt

SEQ ID NO: 23959 - DNA, 20 bp, synthetic construct
  misc_feature 1..20: note = chemically synthesized
  source 1..20: mol_type = other DNA
tgataaaagtggttagtaaa

SEQ ID NO: 23960 - DNA, 20 bp, synthetic construct
  misc_feature 1..20: note = chemically synthesized
  source 1..20: mol_type = other DNA
aaaagtggttagtaaataga

SEQ ID NO: 23961 - DNA, 20 bp, synthetic construct
  misc_feature 1..20: note = chemically synthesized
  source 1..20: mol_type = other DNA
gtggttagtaaatagacagt

SEQ ID NO: 23962 - DNA, 20 bp, synthetic construct
  misc_feature 1..20: note = chemically synthesized
  source 1..20: mol_type = other DNA
ttagtaaatagacagttgga

SEQ ID NO: 23963 - DNA, 20 bp, synthetic construct
  misc_feature 1..20: note = chemically synthesized
  source 1..20: mol_type = other DNA
tagtaaatagacagttggaa

SEQ ID NO: 23964 - DNA, 20 bp, synthetic construct
  misc_feature 1..20: note = chemically synthesized
  source 1..20: mol_type = other DNA
gtaaatagacagttggaaag

SEQ ID NO: 23965 - DNA, 20 bp, synthetic construct
  misc_feature 1..20: note = chemically synthesized
  source 1..20: mol_type = other DNA
tagacagttggaaaggagaa

SEQ ID NO: 23966 - DNA, 20 bp, synthetic construct
  misc_feature 1..20: note = chemically synthesized
  source 1..20: mol_type = other DNA
agttggaaaggagaacggcc

SEQ ID NO: 23967 - DNA, 20 bp, synthetic construct
  misc_feature 1..20: note = chemically synthesized
  source 1..20: mol_type = other DNA
gttggaaaggagaacggccc

SEQ ID NO: 23968 - DNA, 20 bp, synthetic construct
  misc_feature 1..20: note = chemically synthesized
  source 1..20: mol_type = other DNA
ttggaaaggagaacggcccg

SEQ ID NO: 23969 - DNA, 20 bp, synthetic construct
  misc_feature 1..20: note = chemically synthesized
  source 1..20: mol_type = other DNA
tggaaaggagaacggcccgg

SEQ ID NO: 23970 - DNA, 20 bp, synthetic construct
  misc_feature 1..20: note = chemically synthesized
  source 1..20: mol_type = other DNA
aggagaacggcccgggggct

SEQ ID NO: 23971 - DNA, 20 bp, synthetic construct
  misc_feature 1..20: note = chemically synthesized
  source 1..20: mol_type = other DNA
ggagaacggcccgggggctc

SEQ ID NO: 23972 - DNA, 20 bp, synthetic construct
  misc_feature 1..20: note = chemically synthesized
  source 1..20: mol_type = other DNA
agaacggcccgggggctcag

SEQ ID NO: 23973 - DNA, 20 bp, synthetic construct
  misc_feature 1..20: note = chemically synthesized
  source 1..20: mol_type = other DNA
ggcccgggggctcaggagat

SEQ ID NO: 23974 - DNA, 20 bp, synthetic construct
  misc_feature 1..20: note = chemically synthesized
  source 1..20: mol_type = other DNA
cgggggctcaggagatgagc

SEQ ID NO: 23975 - DNA, 20 bp, synthetic construct
  misc_feature 1..20: note = chemically synthesized
  source 1..20: mol_type = other DNA
gggggctcaggagatgagcc

SEQ ID NO: 23976 - DNA, 20 bp, synthetic construct
  misc_feature 1..20: note = chemically synthesized
  source 1..20: mol_type = other DNA
ggggctcaggagatgagcca

SEQ ID NO: 23977 - DNA, 20 bp, synthetic construct
  misc_feature 1..20: note = chemically synthesized
  source 1..20: mol_type = other DNA
caggagatgagccagggaac

SEQ ID NO: 23978 - DNA, 20 bp, synthetic construct
  misc_feature 1..20: note = chemically synthesized
  source 1..20: mol_type = other DNA
aggagatgagccagggaaca

SEQ ID NO: 23979 - DNA, 20 bp, synthetic construct
  misc_feature 1..20: note = chemically synthesized
  source 1..20: mol_type = other DNA
gatgagccagggaacaagga

SEQ ID NO: 23980 - DNA, 20 bp, synthetic construct
  misc_feature 1..20: note = chemically synthesized
  source 1..20: mol_type = other DNA
gagccagggaacaaggaaag

SEQ ID NO: 23981 - DNA, 20 bp, synthetic construct
  misc_feature 1..20: note = chemically synthesized
  source 1..20: mol_type = other DNA
gccagggaacaaggaaagca

SEQ ID NO: 23982 - DNA, 20 bp, synthetic construct
  misc_feature 1..20: note = chemically synthesized
  source 1..20: mol_type = other DNA
aacaaggaaagcagagatgc

SEQ ID NO: 23983 - DNA, 20 bp, synthetic construct
  misc_feature 1..20: note = chemically synthesized
  source 1..20: mol_type = other DNA
aagcagagatgctagtgacc

SEQ ID NO: 23984 - DNA, 20 bp, synthetic construct
  misc_feature 1..20: note = chemically synthesized
  source 1..20: mol_type = other DNA
gcagagatgctagtgaccca

SEQ ID NO: 23985 - DNA, 20 bp, synthetic construct
  misc_feature 1..20: note = chemically synthesized
  source 1..20: mol_type = other DNA
gctagtgacccagagtgtcc

SEQ ID NO: 23986 - DNA, 20 bp, synthetic construct
  misc_feature 1..20: note = chemically synthesized
  source 1..20: mol_type = other DNA
tagtgacccagagtgtccta

SEQ ID NO: 23987 - DNA, 20 bp, synthetic construct
  misc_feature 1..20: note = chemically synthesized
  source 1..20: mol_type = other DNA
agtgacccagagtgtcctag

SEQ ID NO: 23988 - DNA, 20 bp, synthetic construct
  misc_feature 1..20: note = chemically synthesized
  source 1..20: mol_type = other DNA
gtgacccagagtgtcctaga

SEQ ID NO: 23989 - DNA, 20 bp, synthetic construct
  misc_feature 1..20: note = chemically synthesized
  source 1..20: mol_type = other DNA
tgacccagagtgtcctagag

SEQ ID NO: 23990 - DNA, 20 bp, synthetic construct
  misc_feature 1..20: note = chemically synthesized
  source 1..20: mol_type = other DNA
ccagagtgtcctagagggga

SEQ ID NO: 23991 - DNA, 20 bp, synthetic construct
  misc_feature 1..20: note = chemically synthesized
  source 1..20: mol_type = other DNA
agaggggaaagaacctctgt

SEQ ID NO: 23992 - DNA, 20 bp, synthetic construct
  misc_feature 1..20: note = chemically synthesized
  source 1..20: mol_type = other DNA
tctgttagaatttcaaatgt

SEQ ID NO: 23993 - DNA, 20 bp, synthetic construct
  misc_feature 1..20: note = chemically synthesized
  source 1..20: mol_type = other DNA
caaatgtcagactttctttt

SEQ ID NO: 23994 - DNA, 20 bp, synthetic construct
  misc_feature 1..20: note = chemically synthesized
  source 1..20: mol_type = other DNA
actttcttttcagcttcctt

SEQ ID NO: 23995 - DNA, 20 bp, synthetic construct
  misc_feature 1..20: note = chemically synthesized
  source 1..20: mol_type = other DNA
ctttcttttcagcttccttc

SEQ ID NO: 23996 - DNA, 20 bp, synthetic construct
  misc_feature 1..20: note = chemically synthesized
  source 1..20: mol_type = other DNA
caggtgcttcctcttctact

SEQ ID NO: 23997 - DNA, 20 bp, synthetic construct
  misc_feature 1..20: note = chemically synthesized
  source 1..20: mol_type = other DNA
tctactcagaattttctttt

SEQ ID NO: 23998 - DNA, 20 bp, synthetic construct
  misc_feature 1..20: note = chemically synthesized
  source 1..20: mol_type = other DNA
ctcagaattttcttttgaga

SEQ ID NO: 23999 - DNA, 20 bp, synthetic construct
  misc_feature 1..20: note = chemically synthesized
  source 1..20: mol_type = other DNA
tcagaattttcttttgagat

SEQ ID NO: 24000 - DNA, 20 bp, synthetic construct
  misc_feature 1..20: note = chemically synthesized
  source 1..20: mol_type = other DNA
ttttcttttgagataggtgc

SEQ ID NO: 24001 - DNA, 20 bp, synthetic construct
  misc_feature 1..20: note = chemically synthesized
  source 1..20: mol_type = other DNA
gagataggtgctggtcaaac

SEQ ID NO: 24002 - DNA, 20 bp, synthetic construct
  misc_feature 1..20: note = chemically synthesized
  source 1..20: mol_type = other DNA
gtcaaacaagcttttgtttg

SEQ ID NO: 24003 - DNA, 20 bp, synthetic construct
  misc_feature 1..20: note = chemically synthesized
  source 1..20: mol_type = other DNA
aacaagcttttgtttgtggc

SEQ ID NO: 24004 - DNA, 20 bp, synthetic construct
  misc_feature 1..20: note = chemically synthesized
  source 1..20: mol_type = other DNA
tttgtttgtggctggtcact

SEQ ID NO: 24005 - DNA, 20 bp, synthetic construct
  misc_feature 1..20: note = chemically synthesized
  source 1..20: mol_type = other DNA
gtggctggtcacttggcaca

SEQ ID NO: 24006 - DNA, 20 bp, synthetic construct
  misc_feature 1..20: note = chemically synthesized
  source 1..20: mol_type = other DNA
tggtcacttggcacacagtg

SEQ ID NO: 24007 - DNA, 20 bp, synthetic construct
  misc_feature 1..20: note = chemically synthesized
  source 1..20: mol_type = other DNA
agtgtggctgtttgtcatcc

SEQ ID NO: 24008 - DNA, 20 bp, synthetic construct
  misc_feature 1..20: note = chemically synthesized
  source 1..20: mol_type = other DNA
tgtttgtcatcctggatgat

SEQ ID NO: 24009 - DNA, 20 bp, synthetic construct
  misc_feature 1..20: note = chemically synthesized
  source 1..20: mol_type = other DNA
gtttgtcatcctggatgatg

SEQ ID NO: 24010 - DNA, 20 bp, synthetic construct
  misc_feature 1..20: note = chemically synthesized
  source 1..20: mol_type = other DNA
tgtcatcctggatgatgagg

SEQ ID NO: 24011 - DNA, 20 bp, synthetic construct
  misc_feature 1..20: note = chemically synthesized
  source 1..20: mol_type = other DNA
tgatgaggcagctattttaa

SEQ ID NO: 24012 - DNA, 20 bp, synthetic construct
  misc_feature 1..20: note = chemically synthesized
  source 1..20: mol_type = other DNA
gcagctattttaatggcacg

SEQ ID NO: 24013 - DNA, 20 bp, synthetic construct
  misc_feature 1..20: note = chemically synthesized
  source 1..20: mol_type = other DNA
cagctattttaatggcacgc

SEQ ID NO: 24014 - DNA, 20 bp, synthetic construct
  misc_feature 1..20: note = chemically synthesized
  source 1..20: mol_type = other DNA
agctattttaatggcacgca

SEQ ID NO: 24015 - DNA, 20 bp, synthetic construct
  misc_feature 1..20: note = chemically synthesized
  source 1..20: mol_type = other DNA
gccgccgtgtgtttactgcc

SEQ ID NO: 24016 - DNA, 20 bp, synthetic construct
  misc_feature 1..20: note = chemically synthesized
  source 1..20: mol_type = other DNA
tgtgtttactgccaagaaat

SEQ ID NO: 24017 - DNA, 20 bp, synthetic construct
  misc_feature 1..20: note = chemically synthesized
  source 1..20: mol_type = other DNA
gtgtttactgccaagaaata

SEQ ID NO: 24018 - DNA, 20 bp, synthetic construct
  misc_feature 1..20: note = chemically synthesized
  source 1..20: mol_type = other DNA
tgtttactgccaagaaataa

SEQ ID NO: 24019 - DNA, 20 bp, synthetic construct
  misc_feature 1..20: note = chemically synthesized
  source 1..20: mol_type = other DNA
tgccaagaaataagggcttc

SEQ ID NO: 24020 - DNA, 20 bp, synthetic construct
  misc_feature 1..20: note = chemically synthesized
  source 1..20: mol_type = other DNA
gccaagaaataagggcttct

SEQ ID NO: 24021 - DNA, 20 bp, synthetic construct
  misc_feature 1..20: note = chemically synthesized
  source 1..20: mol_type = other DNA
caagaaataagggcttctag

SEQ ID NO: 24022 - DNA, 20 bp, synthetic construct
  misc_feature 1..20: note = chemically synthesized
  source 1..20: mol_type = other DNA
ataagggcttctaggagact

SEQ ID NO: 24023 - DNA, 20 bp, synthetic construct
  misc_feature 1..20: note = chemically synthesized
  source 1..20: mol_type = other DNA
agggcttctaggagacttgg

SEQ ID NO: 24024 - DNA, 20 bp, synthetic construct
  misc_feature 1..20: note = chemically synthesized
  source 1..20: mol_type = other DNA
tctaggagacttggtggctt

SEQ ID NO: 24025 - DNA, 20 bp, synthetic construct
  misc_feature 1..20: note = chemically synthesized
  source 1..20: mol_type = other DNA
ctaggagacttggtggcttt

SEQ ID NO: 24026 - DNA, 20 bp, synthetic construct
  misc_feature 1..20: note = chemically synthesized
  source 1..20: mol_type = other DNA
tggctttaggaacaaacttc

SEQ ID NO: 24027 - DNA, 20 bp, synthetic construct
  misc_feature 1..20: note = chemically synthesized
  source 1..20: mol_type = other DNA
ctttaggaacaaacttccag

SEQ ID NO: 24028 - DNA, 20 bp, synthetic construct
  misc_feature 1..20: note = chemically synthesized
  source 1..20: mol_type = other DNA
taggaacaaacttccagcgg

SEQ ID NO: 24029 - DNA, 20 bp, synthetic construct
  misc_feature 1..20: note = chemically synthesized
  source 1..20: mol_type = other DNA
aaacttccagcggcagaaat

SEQ ID NO: 24030 - DNA, 20 bp, synthetic construct
  misc_feature 1..20: note = chemically synthesized
  source 1..20: mol_type = other DNA
ttccagcggcagaaattagt

SEQ ID NO: 24031 - DNA, 20 bp, synthetic construct
  misc_feature 1..20: note = chemically synthesized
  source 1..20: mol_type = other DNA
tccagcggcagaaattagtt

SEQ ID NO: 24032 - DNA, 20 bp, synthetic construct
  misc_feature 1..20: note = chemically synthesized
  source 1..20: mol_type = other DNA
agcggcagaaattagttagg

SEQ ID NO: 24033 - DNA, 20 bp, synthetic construct
  misc_feature 1..20: note = chemically synthesized
  source 1..20: mol_type = other DNA
ggcagaaattagttaggaag

SEQ ID NO: 24034 - DNA, 20 bp, synthetic construct
  misc_feature 1..20: note = chemically synthesized
  source 1..20: mol_type = other DNA
cagaaattagttaggaagca

SEQ ID NO: 24035 - DNA, 20 bp, synthetic construct
  misc_feature 1..20: note = chemically synthesized
  source 1..20: mol_type = other DNA
aaattagttaggaagcagag

SEQ ID NO: 24036 - DNA, 20 bp, synthetic construct
  misc_feature 1..20: note = chemically synthesized
  source 1..20: mol_type = other DNA
gttaggaagcagagtagcac

SEQ ID NO: 24037 - DNA, 20 bp, synthetic construct
  misc_feature 1..20: note = chemically synthesized
  source 1..20: mol_type = other DNA
ttaggaagcagagtagcact

SEQ ID NO: 24038 - DNA, 20 bp, synthetic construct
  misc_feature 1..20: note = chemically synthesized
  source 1..20: mol_type = other DNA
atgcctctattgtatgaatt

SEQ ID NO: 24039 - DNA, 20 bp, synthetic construct
  misc_feature 1..20: note = chemically synthesized
  source 1..20: mol_type = other DNA
gtatgaatttggatatgttg

SEQ ID NO: 24040 - DNA, 20 bp, synthetic construct
  misc_feature 1..20: note = chemically synthesized
  source 1..20: mol_type = other DNA
tatgaatttggatatgttgt

SEQ ID NO: 24041 - DNA, 20 bp, synthetic construct
  misc_feature 1..20: note = chemically synthesized
  source 1..20: mol_type = other DNA
ttgtgggcaaaatgacataa

SEQ ID NO: 24042 - DNA, 20 bp, synthetic construct
  misc_feature 1..20: note = chemically synthesized
  source 1..20: mol_type = other DNA
gcaaaatgacataaaagaaa

SEQ ID NO: 24043 - DNA, 20 bp, synthetic construct
  misc_feature 1..20: note = chemically synthesized
  source 1..20: mol_type = other DNA
tgacataaaagaaatggaat

SEQ ID NO: 24044 - DNA, 20 bp, synthetic construct
  misc_feature 1..20: note = chemically synthesized
  source 1..20: mol_type = other DNA
aaaagaaatggaatgagaaa

SEQ ID NO: 24045 - DNA, 20 bp, synthetic construct
  misc_feature 1..20: note = chemically synthesized
  source 1..20: mol_type = other DNA
aatggaatgagaaatagtgt

SEQ ID NO: 24046 - DNA, 20 bp, synthetic construct
  misc_feature 1..20: note = chemically synthesized
  source 1..20: mol_type = other DNA
aaatagtgtaagtgactgac

SEQ ID NO: 24047 - DNA, 20 bp, synthetic construct
  misc_feature 1..20: note = chemically synthesized
  source 1..20: mol_type = other DNA
aatagtgtaagtgactgaca

SEQ ID NO: 24048 - DNA, 20 bp, synthetic construct
  misc_feature 1..20: note = chemically synthesized
  source 1..20: mol_type = other DNA
gtgactgacaaggaccccat

SEQ ID NO: 24049 - DNA, 20 bp, synthetic construct
  misc_feature 1..20: note = chemically synthesized
  source 1..20: mol_type = other DNA
acaaggaccccattggcatg

SEQ ID NO: 24050 - DNA, 20 bp, synthetic construct
  misc_feature 1..20: note = chemically synthesized
  source 1..20: mol_type = other DNA
caaggaccccattggcatgt

SEQ ID NO: 24051 - DNA, 20 bp, synthetic construct
  misc_feature 1..20: note = chemically synthesized
  source 1..20: mol_type = other DNA
gaccccattggcatgtgggc

SEQ ID NO: 24052 - DNA, 20 bp, synthetic construct
  misc_feature 1..20: note = chemically synthesized
  source 1..20: mol_type = other DNA
gcatgtgggctagtgttgac

SEQ ID NO: 24053 - DNA, 20 bp, synthetic construct
  misc_feature 1..20: note = chemically synthesized
  source 1..20: mol_type = other DNA
ctagtgttgactggctctca

SEQ ID NO: 24054 - DNA, 20 bp, synthetic construct
  misc_feature 1..20: note = chemically synthesized
  source 1..20: mol_type = other DNA
tggctctcacagtgtgaatt

SEQ ID NO: 24055 - DNA, 20 bp, synthetic construct
  misc_feature 1..20: note = chemically synthesized
  source 1..20: mol_type = other DNA
tctcacagtgtgaatttagt

SEQ ID NO: 24056 - DNA, 20 bp, synthetic construct
  misc_feature 1..20: note = chemically synthesized
  source 1..20: mol_type = other DNA
ctcacagtgtgaatttagtt

SEQ ID NO: 24057 - DNA, 20 bp, synthetic construct
  misc_feature 1..20: note = chemically synthesized
  source 1..20: mol_type = other DNA
tttattttccccaaactcta

SEQ ID NO: 24058 - DNA, 20 bp, synthetic construct
  misc_feature 1..20: note = chemically synthesized
  source 1..20: mol_type = other DNA
ttccccaaactctaaagcaa

SEQ ID NO: 24059 - DNA, 20 bp, synthetic construct
  misc_feature 1..20: note = chemically synthesized
  source 1..20: mol_type = other DNA
ctctaaagcaacagtttaat

SEQ ID NO: 24060 - DNA, 20 bp, synthetic construct
  misc_feature 1..20: note = chemically synthesized
  source 1..20: mol_type = other DNA
tctaaagcaacagtttaatt

SEQ ID NO: 24061 - DNA, 20 bp, synthetic construct
  misc_feature 1..20: note = chemically synthesized
  source 1..20: mol_type = other DNA
ctaaagcaacagtttaattg

SEQ ID NO: 24062 - DNA, 20 bp, synthetic construct
  misc_feature 1..20: note = chemically synthesized
  source 1..20: mol_type = other DNA
caacagtttaattggggtct

SEQ ID NO: 24063 - DNA, 20 bp, synthetic construct
  misc_feature 1..20: note = chemically synthesized
  source 1..20: mol_type = other DNA
aacagtttaattggggtcta

SEQ ID NO: 24064 - DNA, 20 bp, synthetic construct
  misc_feature 1..20: note = chemically synthesized
  source 1..20: mol_type = other DNA
ttggggtctaaggtaccctt

SEQ ID NO: 24065 - DNA, 20 bp, synthetic construct
  misc_feature 1..20: note = chemically synthesized
  source 1..20: mol_type = other DNA
cattttgaccacctattatt

SEQ ID NO: 24066 - DNA, 20 bp, synthetic construct
  misc_feature 1..20: note = chemically synthesized
  source 1..20: mol_type = other DNA
attttgaccacctattattt

SEQ ID NO: 24067 - DNA, 20 bp, synthetic construct
  misc_feature 1..20: note = chemically synthesized
  source 1..20: mol_type = other DNA
cacctattatttaggacaca

SEQ ID NO: 24068 - DNA, 20 bp, synthetic construct
  misc_feature 1..20: note = chemically synthesized
  source 1..20: mol_type = other DNA
cacagcattttttttctttg

SEQ ID NO: 24069 - DNA, 20 bp, synthetic construct
  misc_feature 1..20: note = chemically synthesized
  source 1..20: mol_type = other DNA
ctttgaagataaatttgttt

SEQ ID NO: 24070 - DNA, 20 bp, synthetic construct
  misc_feature 1..20: note = chemically synthesized
  source 1..20: mol_type = other DNA
tttgaagataaatttgtttt

SEQ ID NO: 24071 - DNA, 20 bp, synthetic construct
  misc_feature 1..20: note = chemically synthesized
  source 1..20: mol_type = other DNA
agataaatttgttttgggta

SEQ ID NO: 24072 - DNA, 20 bp, synthetic construct
  misc_feature 1..20: note = chemically synthesized
  source 1..20: mol_type = other DNA
aaatttgttttgggtatggc

SEQ ID NO: 24073 - DNA, 20 bp, synthetic construct
  misc_feature 1..20: note = chemically synthesized
  source 1..20: mol_type = other DNA
aatttgttttgggtatggct

SEQ ID NO: 24074 - DNA, 20 bp, synthetic construct
  misc_feature 1..20: note = chemically synthesized
  source 1..20: mol_type = other DNA
gttttgggtatggctgggtg

SEQ ID NO: 24075 - DNA, 20 bp, synthetic construct
  misc_feature 1..20: note = chemically synthesized
  source 1..20: mol_type = other DNA
ttgggtatggctgggtgtgg

SEQ ID NO: 24076 - DNA, 20 bp, synthetic construct
  misc_feature 1..20: note = chemically synthesized
  source 1..20: mol_type = other DNA
gtagcttatgcctataatcc

SEQ ID NO: 24077 - DNA, 20 bp, synthetic construct
  misc_feature 1..20: note = chemically synthesized
  source 1..20: mol_type = other DNA
tgcctataatcccagcactt

SEQ ID NO: 24078 - DNA, 20 bp, synthetic construct
  misc_feature 1..20: note = chemically synthesized
  source 1..20: mol_type = other DNA
gcctataatcccagcacttt

SEQ ID NO: 24079 - DNA, 20 bp, synthetic construct
  misc_feature 1..20: note = chemically synthesized
  source 1..20: mol_type = other DNA
ctataatcccagcactttgg

SEQ ID NO: 24080 - DNA, 20 bp, synthetic construct
  misc_feature 1..20: note = chemically synthesized
  source 1..20: mol_type = other DNA
tataatcccagcactttggg

SEQ ID NO: 24081 - DNA, 20 bp, synthetic construct
  misc_feature 1..20: note = chemically synthesized
  source 1..20: mol_type = other DNA
tcccagcactttgggaggct

SEQ ID NO: 24082 - DNA, 20 bp, synthetic construct
  misc_feature 1..20: note = chemically synthesized
  source 1..20: mol_type = other DNA
cccagcactttgggaggctg

SEQ ID NO: 24083 - DNA, 20 bp, synthetic construct
  misc_feature 1..20: note = chemically synthesized
  source 1..20: mol_type = other DNA
agcactttgggaggctgagg

SEQ ID NO: 24084 - DNA, 20 bp, synthetic construct
  misc_feature 1..20: note = chemically synthesized
  source 1..20: mol_type = other DNA
gcactttgggaggctgaggt

SEQ ID NO: 24085 - DNA, 20 bp, synthetic construct
  misc_feature 1..20: note = chemically synthesized
  source 1..20: mol_type = other DNA
ctttgggaggctgaggtggg

SEQ ID NO: 24086 - DNA, 20 bp, synthetic construct
  misc_feature 1..20: note = chemically synthesized
  source 1..20: mol_type = other DNA
ctgaggtgggtggatcacct

SEQ ID NO: 24087 - DNA, 20 bp, synthetic construct
  misc_feature 1..20: note = chemically synthesized
  source 1..20: mol_type = other DNA
tgaggtgggtggatcaccta

SEQ ID NO: 24088 - DNA, 20 bp, synthetic construct
  misc_feature 1..20: note = chemically synthesized
  source 1..20: mol_type = other DNA
gtgggtggatcacctaaggt

SEQ ID NO: 24089 - DNA, 20 bp, synthetic construct
  misc_feature 1..20: note = chemically synthesized
  source 1..20: mol_type = other DNA
tgggtggatcacctaaggtc

SEQ ID NO: 24090 - DNA, 20 bp, synthetic construct
  misc_feature 1..20: note = chemically synthesized
  source 1..20: mol_type = other DNA
ggtggatcacctaaggtcgg

SEQ ID NO: 24091 - DNA, 20 bp, synthetic construct
  misc_feature 1..20: note = chemically synthesized
  source 1..20: mol_type = other DNA
tcacctaaggtcgggagttt

SEQ ID NO: 24092 - DNA, 20 bp, synthetic construct
  misc_feature 1..20: note = chemically synthesized
  source 1..20: mol_type = other DNA
taaggtcgggagtttgagac

SEQ ID NO: 24093 - DNA, 20 bp, synthetic construct
  misc_feature 1..20: note = chemically synthesized
  source 1..20: mol_type = other DNA
tgagaccagcctgaccaaca

SEQ ID NO: 24094 - DNA, 20 bp, synthetic construct
  misc_feature 1..20: note = chemically synthesized
  source 1..20: mol_type = other DNA
agaccagcctgaccaacatg

SEQ ID NO: 24095 - DNA, 20 bp, synthetic construct
  misc_feature 1..20: note = chemically synthesized
  source 1..20: mol_type = other DNA
ccccgtctctaccaaaaata

SEQ ID NO: 24096 - DNA, 20 bp, synthetic construct
  misc_feature 1..20: note = chemically synthesized
  source 1..20: mol_type = other DNA
tctaccaaaaatacagaaat

SEQ ID NO: 24097 - DNA, 20 bp, synthetic construct
  misc_feature 1..20: note = chemically synthesized
  source 1..20: mol_type = other DNA
atacagaaattagccgcgtg

SEQ ID NO: 24098 - DNA, 20 bp, synthetic construct
  misc_feature 1..20: note = chemically synthesized
  source 1..20: mol_type = other DNA
cagaaattagccgcgtgtgg

SEQ ID NO: 24099 - DNA, 20 bp, synthetic construct
  misc_feature 1..20: note = chemically synthesized
  source 1..20: mol_type = other DNA
gtggcgcatgcctataatcc

SEQ ID NO: 24100 - DNA, 20 bp, synthetic construct
  misc_feature 1..20: note = chemically synthesized
  source 1..20: mol_type = other DNA
tgcctataatcccagctact

SEQ ID NO: 24101 - DNA, 20 bp, synthetic construct
  misc_feature 1..20: note = chemically synthesized
  source 1..20: mol_type = other DNA
gcctataatcccagctactt

SEQ ID NO: 24102 - DNA, 20 bp, synthetic construct
  misc_feature 1..20: note = chemically synthesized
  source 1..20: mol_type = other DNA
ctataatcccagctacttgg

SEQ ID NO: 24103 - DNA, 20 bp, synthetic construct
  misc_feature 1..20: note = chemically synthesized
  source 1..20: mol_type = other DNA
tataatcccagctacttggg

SEQ ID NO: 24104 - DNA, 20 bp, synthetic construct
  misc_feature 1..20: note = chemically synthesized
  source 1..20: mol_type = other DNA
tcccagctacttgggaggct

SEQ ID NO: 24105 - DNA, 20 bp, synthetic construct
  misc_feature 1..20: note = chemically synthesized
  source 1..20: mol_type = other DNA
cccagctacttgggaggctg

SEQ ID NO: 24106 - DNA, 20 bp, synthetic construct
  misc_feature 1..20: note = chemically synthesized
  source 1..20: mol_type = other DNA
agctacttgggaggctgagg

SEQ ID NO: 24107 - DNA, 20 bp, synthetic construct
  misc_feature 1..20: note = chemically synthesized
  source 1..20: mol_type = other DNA
gctacttgggaggctgaggc

SEQ ID NO: 24108 - DNA, 20 bp, synthetic construct
  misc_feature 1..20: note = chemically synthesized
  source 1..20: mol_type = other DNA
tacttgggaggctgaggcag

SEQ ID NO: 24109 - DNA, 20 bp, synthetic construct
  misc_feature 1..20: note = chemically synthesized
  source 1..20: mol_type = other DNA
gcaggagaatcgcttgaacc

SEQ ID NO: 24110 - DNA, 20 bp, synthetic construct
  misc_feature 1..20: note = chemically synthesized
  source 1..20: mol_type = other DNA
caggagaatcgcttgaaccc

SEQ ID NO: 24111 - DNA, 20 bp, synthetic construct
  misc_feature 1..20: note = chemically synthesized
  source 1..20: mol_type = other DNA
ggagaatcgcttgaacccgg

SEQ ID NO: 24112 - DNA, 20 bp, synthetic construct
  misc_feature 1..20: note = chemically synthesized
  source 1..20: mol_type = other DNA
gagaatcgcttgaacccggg

SEQ ID NO: 24113 - DNA, 20 bp, synthetic construct
  misc_feature 1..20: note = chemically synthesized
  source 1..20: mol_type = other DNA
aatcgcttgaacccgggagg

SEQ ID NO: 24114 - DNA, 20 bp, synthetic construct
  misc_feature 1..20: note = chemically synthesized
  source 1..20: mol_type = other DNA
tcgcttgaacccgggaggcg

SEQ ID NO: 24115 - DNA, 20 bp, synthetic construct
  misc_feature 1..20: note = chemically synthesized
  source 1..20: mol_type = other DNA
aacccgggaggcggagattg

SEQ ID NO: 24116 - DNA, 20 bp, synthetic construct
  misc_feature 1..20: note = chemically synthesized
  source 1..20: mol_type = other DNA
cgggaggcggagattgcggt

SEQ ID NO: 24117 - DNA, 20 bp, synthetic construct
  misc_feature 1..20: note = chemically synthesized
  source 1..20: mol_type = other DNA
ggcggagattgcggtgagcc

SEQ ID NO: 24118 - DNA, 20 bp, synthetic construct
  misc_feature 1..20: note = chemically synthesized
  source 1..20: mol_type = other DNA
gagattgcgccattgcactc

SEQ ID NO: 24119 - DNA, 20 bp, synthetic construct
  misc_feature 1..20: note = chemically synthesized
  source 1..20: mol_type = other DNA
tgcgccattgcactccagcc

SEQ ID NO: 24120 - DNA, 20 bp, synthetic construct
  misc_feature 1..20: note = chemically synthesized
  source 1..20: mol_type = other DNA
gcgccattgcactccagccc

SEQ ID NO: 24121 - DNA, 20 bp, synthetic construct
  misc_feature 1..20: note = chemically synthesized
  source 1..20: mol_type = other DNA
tgcactccagcccgggcaac

SEQ ID NO: 24122 - DNA, 20 bp, synthetic construct
  misc_feature 1..20: note = chemically synthesized
  source 1..20: mol_type = other DNA
cactccagcccgggcaacaa

SEQ ID NO: 24123 - DNA, 20 bp, synthetic construct
  misc_feature 1..20: note = chemically synthesized
  source 1..20: mol_type = other DNA
acaagagcgaaactccacct

SEQ ID NO: 24124 - DNA, 20 bp, synthetic construct
  misc_feature 1..20: note = chemically synthesized
  source 1..20: mol_type = other DNA
acaaacaaacaaaatcgttt

SEQ ID NO: 24125 - DNA, 20 bp, synthetic construct
  misc_feature 1..20: note = chemically synthesized
  source 1..20: mol_type = other DNA
caaacaaacaaaatcgtttt

SEQ ID NO: 24126 - DNA, 20 bp, synthetic construct
  misc_feature 1..20: note = chemically synthesized
  source 1..20: mol_type = other DNA
acaaacaaaatcgttttggg

SEQ ID NO: 24127 - DNA, 20 bp, synthetic construct
  misc_feature 1..20: note = chemically synthesized
  source 1..20: mol_type = other DNA
aacaaaatcgttttgggtag

SEQ ID NO: 24128 - DNA, 20 bp, synthetic construct
  misc_feature 1..20: note = chemically synthesized
  source 1..20: mol_type = other DNA
aaaatcgttttgggtagcag

SEQ ID NO: 24129 - DNA, 20 bp, synthetic construct
  misc_feature 1..20: note = chemically synthesized
  source 1..20: mol_type = other DNA
gttttgggtagcagtggctt

SEQ ID NO: 24130 - DNA, 20 bp, synthetic construct
  misc_feature 1..20: note = chemically synthesized
  source 1..20: mol_type = other DNA
ttttgggtagcagtggcttt

SEQ ID NO: 24131 - DNA, 20 bp, synthetic construct
  misc_feature 1..20: note = chemically synthesized
  source 1..20: mol_type = other DNA
cagtggctttaggctgtttt

SEQ ID NO: 24132 - DNA, 20 bp, synthetic construct
  misc_feature 1..20: note = chemically synthesized
  source 1..20: mol_type = other DNA
ttaggctgtttttggatctt

SEQ ID NO: 24133 - DNA, 20 bp, synthetic construct
  misc_feature 1..20: note = chemically synthesized
  source 1..20: mol_type = other DNA
tttgttattattttcatgtt

SEQ ID NO: 24134 - DNA, 20 bp, synthetic construct
  misc_feature 1..20: note = chemically synthesized
  source 1..20: mol_type = other DNA
attttcatgttaagcaaaac

SEQ ID NO: 24135 - DNA, 20 bp, synthetic construct
  misc_feature 1..20: note = chemically synthesized
  source 1..20: mol_type = other DNA
tcatgttaagcaaaactaga

SEQ ID NO: 24136 - DNA, 20 bp, synthetic construct
  misc_feature 1..20: note = chemically synthesized
  source 1..20: mol_type = other DNA
agttttaccgaattcccctg

SEQ ID NO: 24137 - DNA, 20 bp, synthetic construct
  misc_feature 1..20: note = chemically synthesized
  source 1..20: mol_type = other DNA
taccgaattcccctgcagta

SEQ ID NO: 24138 - DNA, 20 bp, synthetic construct
  misc_feature 1..20: note = chemically synthesized
  source 1..20: mol_type = other DNA
gaattcccctgcagtacagt

SEQ ID NO: 24139 - DNA, 20 bp, synthetic construct
  misc_feature 1..20: note = chemically synthesized
  source 1..20: mol_type = other DNA
cagtaagtattttctttcat

SEQ ID NO: 24140 - DNA, 20 bp, synthetic construct
  misc_feature 1..20: note = chemically synthesized
  source 1..20: mol_type = other DNA
agtaagtattttctttcatt

SEQ ID NO: 24141 - DNA, 20 bp, synthetic construct
  misc_feature 1..20: note = chemically synthesized
  source 1..20: mol_type = other DNA
gtaagtattttctttcattg

SEQ ID NO: 24142 - DNA, 20 bp, synthetic construct
  misc_feature 1..20: note = chemically synthesized
  source 1..20: mol_type = other DNA
taagtattttctttcattgg

SEQ ID NO: 24143 - DNA, 20 bp, synthetic construct
  misc_feature 1..20: note = chemically synthesized
  source 1..20: mol_type = other DNA
gtattttctttcattggggg

SEQ ID NO: 24144 - DNA, 20 bp, synthetic construct
  misc_feature 1..20: note = chemically synthesized
  source 1..20: mol_type = other DNA
tgggggaagcaaactattta

SEQ ID NO: 24145 - DNA, 20 bp, synthetic construct
  misc_feature 1..20: note = chemically synthesized
  source 1..20: mol_type = other DNA
caaactatttacagccataa

SEQ ID NO: 24146 - DNA, 20 bp, synthetic construct
  misc_feature 1..20: note = chemically synthesized
  source 1..20: mol_type = other DNA
aaactatttacagccataac

SEQ ID NO: 24147 - DNA, 20 bp, synthetic construct
  misc_feature 1..20: note = chemically synthesized
  source 1..20: mol_type = other DNA
aactatttacagccataaca

SEQ ID NO: 24148 - DNA, 20 bp, synthetic construct
  misc_feature 1..20: note = chemically synthesized
  source 1..20: mol_type = other DNA
tacagccataacagggtttc

SEQ ID NO: 24149 - DNA, 20 bp, synthetic construct
  misc_feature 1..20: note = chemically synthesized
  source 1..20: mol_type = other DNA
gggtttccagtgaattgtat

SEQ ID NO: 24150 - DNA, 20 bp, synthetic construct
  misc_feature 1..20: note = chemically synthesized
  source 1..20: mol_type = other DNA
tttccagtgaattgtataag

SEQ ID NO: 24151 - DNA, 20 bp, synthetic construct
  misc_feature 1..20: note = chemically synthesized
  source 1..20: mol_type = other DNA
tgaattgtataagtagcact

SEQ ID NO: 24152 - DNA, 20 bp, synthetic construct
  misc_feature 1..20: note = chemically synthesized
  source 1..20: mol_type = other DNA
agtagcactgagttctgtgt

SEQ ID NO: 24153 - DNA, 20 bp, synthetic construct
  misc_feature 1..20: note = chemically synthesized
  source 1..20: mol_type = other DNA
aatgaaacaaaaactgatca

SEQ ID NO: 24154 - DNA, 20 bp, synthetic construct
  misc_feature 1..20: note = chemically synthesized
  source 1..20: mol_type = other DNA
agatgacattacctaaatga

SEQ ID NO: 24155 - DNA, 20 bp, synthetic construct
  misc_feature 1..20: note = chemically synthesized
  source 1..20: mol_type = other DNA
catttgctgtaatcctgtta

SEQ ID NO: 24156 - DNA, 20 bp, synthetic construct
  misc_feature 1..20: note = chemically synthesized
  source 1..20: mol_type = other DNA
tggcattgtcctattatctc

SEQ ID NO: 24157 - DNA, 20 bp, synthetic construct
  misc_feature 1..20: note = chemically synthesized
  source 1..20: mol_type = other DNA
aaatgctgtcaaattgtaac

SEQ ID NO: 24158 - DNA, 20 bp, synthetic construct
  misc_feature 1..20: note = chemically synthesized
  source 1..20: mol_type = other DNA
caaattgtaactggattgcc

SEQ ID NO: 24159 - DNA, 20 bp, synthetic construct
  misc_feature 1..20: note = chemically synthesized
  source 1..20: mol_type = other DNA
aaattgtaactggattgcca

SEQ ID NO: 24160 - DNA, 20 bp, synthetic construct
  misc_feature 1..20: note = chemically synthesized
  source 1..20: mol_type = other DNA
tgtaactggattgccaagga

SEQ ID NO: 24161 - DNA, 20 bp, synthetic construct
  misc_feature 1..20: note = chemically synthesized
  source 1..20: mol_type = other DNA
taactggattgccaaggaca

SEQ ID NO: 24162 - DNA, 20 bp, synthetic construct
  misc_feature 1..20: note = chemically synthesized
  source 1..20: mol_type = other DNA
aactggattgccaaggacag

SEQ ID NO: 24163 - DNA, 20 bp, synthetic construct
  misc_feature 1..20: note = chemically synthesized
  source 1..20: mol_type = other DNA
ctggattgccaaggacagag

SEQ ID NO: 24164 - DNA, 20 bp, synthetic construct
  misc_feature 1..20: note = chemically synthesized
  source 1..20: mol_type = other DNA
ggattgccaaggacagagga

SEQ ID NO: 24165 - DNA, 20 bp, synthetic construct
  misc_feature 1..20: note = chemically synthesized
  source 1..20: mol_type = other DNA
gattgccaaggacagaggag

SEQ ID NO: 24166 - DNA, 20 bp, synthetic construct
  misc_feature 1..20: note = chemically synthesized
  source 1..20: mol_type = other DNA
caaggacagaggagaggaac

SEQ ID NO: 24167 - DNA, 20 bp, synthetic construct
  misc_feature 1..20: note = chemically synthesized
  source 1..20: mol_type = other DNA
aaggacagaggagaggaacc

SEQ ID NO: 24168 - DNA, 20 bp, synthetic construct
  misc_feature 1..20: note = chemically synthesized
  source 1..20: mol_type = other DNA
aggacagaggagaggaacca

SEQ ID NO: 24169 - DNA, 20 bp, synthetic construct
  misc_feature 1..20: note = chemically synthesized
  source 1..20: mol_type = other DNA
gacagaggagaggaaccagg

SEQ ID NO: 24170 - DNA, 20 bp, synthetic construct
  misc_feature 1..20: note = chemically synthesized
  source 1..20: mol_type = other DNA
acagaggagaggaaccaggg

SEQ ID NO: 24171 - DNA, 20 bp, synthetic construct
  misc_feature 1..20: note = chemically synthesized
  source 1..20: mol_type = other DNA
aggaaccagggaggacacaa

SEQ ID NO: 24172 - DNA, 20 bp, synthetic construct
  misc_feature 1..20: note = chemically synthesized
  source 1..20: mol_type = other DNA
tggcaattcccactgcacca

SEQ ID NO: 24173 - DNA, 20 bp, synthetic construct
  misc_feature 1..20: note = chemically synthesized
  source 1..20: mol_type = other DNA
gcaattcccactgcaccaaa

SEQ ID NO: 24174 - DNA, 20 bp, synthetic construct
  misc_feature 1..20: note = chemically synthesized
  source 1..20: mol_type = other DNA
ttcccactgcaccaaagaga

SEQ ID NO: 24175 - DNA, 20 bp, synthetic construct
  misc_feature 1..20: note = chemically synthesized
  source 1..20: mol_type = other DNA
cggtcttcttccccctctca

SEQ ID NO: 24176 - DNA, 20 bp, synthetic construct
  misc_feature 1..20: note = chemically synthesized
  source 1..20: mol_type = other DNA
cctctcacagtctgaattct

SEQ ID NO: 24177 - DNA, 20 bp, synthetic construct
  misc_feature 1..20: note = chemically synthesized
  source 1..20: mol_type = other DNA
tctcacagtctgaattcttg

SEQ ID NO: 24178 - DNA, 20 bp, synthetic construct
  misc_feature 1..20: note = chemically synthesized
  source 1..20: mol_type = other DNA
gaattcttggagacattgtt

SEQ ID NO: 24179 - DNA, 20 bp, synthetic construct
  misc_feature 1..20: note = chemically synthesized
  source 1..20: mol_type = other DNA
gttcagttaaaatcatgact

SEQ ID NO: 24180 - DNA, 20 bp, synthetic construct
  misc_feature 1..20: note = chemically synthesized
  source 1..20: mol_type = other DNA
ttcagttaaaatcatgactc

SEQ ID NO: 24181 - DNA, 20 bp, synthetic construct
  misc_feature 1..20: note = chemically synthesized
  source 1..20: mol_type = other DNA
catgactcaggtatctttta

SEQ ID NO: 24182 - DNA, 20 bp, synthetic construct
  misc_feature 1..20: note = chemically synthesized
  source 1..20: mol_type = other DNA
atgactcaggtatcttttac

SEQ ID NO: 24183 - DNA, 20 bp, synthetic construct
  misc_feature 1..20: note = chemically synthesized
  source 1..20: mol_type = other DNA
ttttacaggctttgatgaaa

SEQ ID NO: 24184 - DNA, 20 bp, synthetic construct
  misc_feature 1..20: note = chemically synthesized
  source 1..20: mol_type = other DNA
acaggctttgatgaaatagt

SEQ ID NO: 24185 - DNA, 20 bp, synthetic construct
  misc_feature 1..20: note = chemically synthesized
  source 1..20: mol_type = other DNA
agattcactcctcatgttcc

SEQ ID NO: 24186 - DNA, 20 bp, synthetic construct
  misc_feature 1..20: note = chemically synthesized
  source 1..20: mol_type = other DNA
ttcactcctcatgttcctag

SEQ ID NO: 24187 - DNA, 20 bp, synthetic construct
  misc_feature 1..20: note = chemically synthesized
  source 1..20: mol_type = other DNA
tcactcctcatgttcctaga

SEQ ID NO: 24188 - DNA, 20 bp, synthetic construct
  misc_feature 1..20: note = chemically synthesized
  source 1..20: mol_type = other DNA
tcctcatgttcctagaagga

SEQ ID NO: 24189 - DNA, 20 bp, synthetic construct
  misc_feature 1..20: note = chemically synthesized
  source 1..20: mol_type = other DNA
cctcatgttcctagaaggaa

SEQ ID NO: 24190 - DNA, 20 bp, synthetic construct
  misc_feature 1..20: note = chemically synthesized
  source 1..20: mol_type = other DNA
catgttcctagaaggaaagg

SEQ ID NO: 24191 - DNA, 20 bp, synthetic construct
  misc_feature 1..20: note = chemically synthesized
  source 1..20: mol_type = other DNA
aggaagaaacactctttgaa

SEQ ID NO: 24192 - DNA, 20 bp, synthetic construct
  misc_feature 1..20: note = chemically synthesized
  source 1..20: mol_type = other DNA
acactctttgaacagcccgt

SEQ ID NO: 24193 - DNA, 20 bp, synthetic construct
  misc_feature 1..20: note = chemically synthesized
  source 1..20: mol_type = other DNA
gcccgtgagacaaactcttc

SEQ ID NO: 24194 - DNA, 20 bp, synthetic construct
  misc_feature 1..20: note = chemically synthesized
  source 1..20: mol_type = other DNA
cccgtgagacaaactcttcc

SEQ ID NO: 24195 - DNA, 20 bp, synthetic construct
  misc_feature 1..20: note = chemically synthesized
  source 1..20: mol_type = other DNA
tttaaatgtttctacataat

SEQ ID NO: 24196 - DNA, 20 bp, synthetic construct
  misc_feature 1..20: note = chemically synthesized
  source 1..20: mol_type = other DNA
acataatgagaataaattgt

SEQ ID NO: 24197 - DNA, 20 bp, synthetic construct
  misc_feature 1..20: note = chemically synthesized
  source 1..20: mol_type = other DNA
gttactgtgtttttaaaacc

SEQ ID NO: 24198 - DNA, 20 bp, synthetic construct
  misc_feature 1..20: note = chemically synthesized
  source 1..20: mol_type = other DNA
ttactgtgtttttaaaaccc

SEQ ID NO: 24199 - DNA, 20 bp, synthetic construct
  misc_feature 1..20: note = chemically synthesized
  source 1..20: mol_type = other DNA
gtttttaaaacccaggtcaa

SEQ ID NO: 24200 - DNA, 20 bp, synthetic construct
  misc_feature 1..20: note = chemically synthesized
  source 1..20: mol_type = other DNA
aaaacccaggtcaaaagtaa

SEQ ID NO: 24201 - DNA, 20 bp, synthetic construct
  misc_feature 1..20: note = chemically synthesized
  source 1..20: mol_type = other DNA
ccaggtcaaaagtaatagca

SEQ ID NO: 24202 - DNA, 20 bp, synthetic construct
  misc_feature 1..20: note = chemically synthesized
  source 1..20: mol_type = other DNA
aggtcaaaagtaatagcaca

SEQ ID NO: 24203 - DNA, 20 bp, synthetic construct
  misc_feature 1..20: note = chemically synthesized
  source 1..20: mol_type = other DNA
gtcaaaagtaatagcacaga

SEQ ID NO: 24204 - DNA, 20 bp, synthetic construct
  misc_feature 1..20: note = chemically synthesized
  source 1..20: mol_type = other DNA
tcaaaagtaatagcacagag

SEQ ID NO: 24205 - DNA, 20 bp, synthetic construct
  misc_feature 1..20: note = chemically synthesized
  source 1..20: mol_type = other DNA
caaaagtaatagcacagaga

SEQ ID NO: 24206 - DNA, 20 bp, synthetic construct
  misc_feature 1..20: note = chemically synthesized
  source 1..20: mol_type = other DNA
tagcacagagagggatctat

SEQ ID NO: 24207 - DNA, 20 bp, synthetic construct
  misc_feature 1..20: note = chemically synthesized
  source 1..20: mol_type = other DNA
ttgttcatatattgcttccc

SEQ ID NO: 24208 - DNA, 20 bp, synthetic construct
  misc_feature 1..20: note = chemically synthesized
  source 1..20: mol_type = other DNA
tgttcatatattgcttcccc

SEQ ID NO: 24209 - DNA, 20 bp, synthetic construct
  misc_feature 1..20: note = chemically synthesized
  source 1..20: mol_type = other DNA
atatattgcttccccaggtt

SEQ ID NO: 24210 - DNA, 20 bp, synthetic construct
  misc_feature 1..20: note = chemically synthesized
  source 1..20: mol_type = other DNA
ttgcttccccaggtttagat

SEQ ID NO: 24211 - DNA, 20 bp, synthetic construct
  misc_feature 1..20: note = chemically synthesized
  source 1..20: mol_type = other DNA
tgcttccccaggtttagatg

SEQ ID NO: 24212 - DNA, 20 bp, synthetic construct
  misc_feature 1..20: note = chemically synthesized
  source 1..20: mol_type = other DNA
gcttccccaggtttagatga

SEQ ID NO: 24213 - DNA, 20 bp, synthetic construct
  misc_feature 1..20: note = chemically synthesized
  source 1..20: mol_type = other DNA
tttagatgagggctccattc

SEQ ID NO: 24214 - DNA, 20 bp, synthetic construct
  misc_feature 1..20: note = chemically synthesized
  source 1..20: mol_type = other DNA
tagatgagggctccattcta

SEQ ID NO: 24215 - DNA, 20 bp, synthetic construct
  misc_feature 1..20: note = chemically synthesized
  source 1..20: mol_type = other DNA
tgagggctccattctagagt

SEQ ID NO: 24216 - DNA, 20 bp, synthetic construct
  misc_feature 1..20: note = chemically synthesized
  source 1..20: mol_type = other DNA
gagggctccattctagagtt

SEQ ID NO: 24217 - DNA, 20 bp, synthetic construct
  misc_feature 1..20: note = chemically synthesized
  source 1..20: mol_type = other DNA
attctagagttgggaaaacc

SEQ ID NO: 24218 - DNA, 20 bp, synthetic construct
  misc_feature 1..20: note = chemically synthesized
  source 1..20: mol_type = other DNA
tagagttgggaaaaccaagt

SEQ ID NO: 24219 - DNA, 20 bp, synthetic construct
  misc_feature 1..20: note = chemically synthesized
  source 1..20: mol_type = other DNA
aaaccaagtcagtaaacctt

SEQ ID NO: 24220 - DNA, 20 bp, synthetic construct
  misc_feature 1..20: note = chemically synthesized
  source 1..20: mol_type = other DNA
ccaagtcagtaaacctttag

SEQ ID NO: 24221 - DNA, 20 bp, synthetic construct
  misc_feature 1..20: note = chemically synthesized
  source 1..20: mol_type = other DNA
agtcagtaaacctttagtgg

SEQ ID NO: 24222 - DNA, 20 bp, synthetic construct
  misc_feature 1..20: note = chemically synthesized
  source 1..20: mol_type = other DNA
cctttagtggcagatgttat

SEQ ID NO: 24223 - DNA, 20 bp, synthetic construct
  misc_feature 1..20: note = chemically synthesized
  source 1..20: mol_type = other DNA
ctttagtggcagatgttatc

SEQ ID NO: 24224 - DNA, 20 bp, synthetic construct
  misc_feature 1..20: note = chemically synthesized
  source 1..20: mol_type = other DNA
tttagtggcagatgttatca

SEQ ID NO: 24225 - DNA, 20 bp, synthetic construct
  misc_feature 1..20: note = chemically synthesized
  source 1..20: mol_type = other DNA
tagtggcagatgttatcagg

SEQ ID NO: 24226 - DNA, 20 bp, synthetic construct
  misc_feature 1..20: note = chemically synthesized
  source 1..20: mol_type = other DNA
ggcagatgttatcagggagc

SEQ ID NO: 24227 - DNA, 20 bp, synthetic construct
  misc_feature 1..20: note = chemically synthesized
  source 1..20: mol_type = other DNA
cagatgttatcagggagctg

SEQ ID NO: 24228 - DNA, 20 bp, synthetic construct
  misc_feature 1..20: note = chemically synthesized
  source 1..20: mol_type = other DNA
tgttatcagggagctggagt

SEQ ID NO: 24229 - DNA, 20 bp, synthetic construct
  misc_feature 1..20: note = chemically synthesized
  source 1..20: mol_type = other DNA
ttatcagggagctggagttg

SEQ ID NO: 24230 - DNA, 20 bp, synthetic construct
  misc_feature 1..20: note = chemically synthesized
  source 1..20: mol_type = other DNA
cttgcattttgtgtttgtgc

SEQ ID NO: 24231 - DNA, 20 bp, synthetic construct
  misc_feature 1..20: note = chemically synthesized
  source 1..20: mol_type = other DNA
catgttcctcttcatatatt

SEQ ID NO: 24232 - DNA, 20 bp, synthetic construct
  misc_feature 1..20: note = chemically synthesized
  source 1..20: mol_type = other DNA
atttagaccaaattcttatc

SEQ ID NO: 24233 - DNA, 20 bp, synthetic construct
  misc_feature 1..20: note = chemically synthesized
  source 1..20: mol_type = other DNA
cttatccagatttcccatta

SEQ ID NO: 24234 - DNA, 20 bp, synthetic construct
  misc_feature 1..20: note = chemically synthesized
  source 1..20: mol_type = other DNA
ttatccagatttcccattaa

SEQ ID NO: 24235 - DNA, 20 bp, synthetic construct
  misc_feature 1..20: note = chemically synthesized
  source 1..20: mol_type = other DNA
attaaaggttcataaatttc

SEQ ID NO: 24236 - DNA, 20 bp, synthetic construct
  misc_feature 1..20: note = chemically synthesized
  source 1..20: mol_type = other DNA
ttccagttttcacctttctg

SEQ ID NO: 24237 - DNA, 20 bp, synthetic construct
  misc_feature 1..20: note = chemically synthesized
  source 1..20: mol_type = other DNA
tcacctttctgcagcttcct

SEQ ID NO: 24238 - DNA, 20 bp, synthetic construct
  misc_feature 1..20: note = chemically synthesized
  source 1..20: mol_type = other DNA
ctttctgcagcttccttaga

SEQ ID NO: 24239 - DNA, 20 bp, synthetic construct
  misc_feature 1..20: note = chemically synthesized
  source 1..20: mol_type = other DNA
tgcagcttccttagatagaa

SEQ ID NO: 24240 - DNA, 20 bp, synthetic construct
  misc_feature 1..20: note = chemically synthesized
  source 1..20: mol_type = other DNA
ccttagatagaatggttgat

SEQ ID NO: 24241 - DNA, 20 bp, synthetic construct
  misc_feature 1..20: note = chemically synthesized
  source 1..20: mol_type = other DNA
aaaattaccgcattaaaatt

SEQ ID NO: 24242 - DNA, 20 bp, synthetic construct
  misc_feature 1..20: note = chemically synthesized
  source 1..20: mol_type = other DNA
acattctgctgctcataaat

SEQ ID NO: 24243 - DNA, 20 bp, synthetic construct
  misc_feature 1..20: note = chemically synthesized
  source 1..20: mol_type = other DNA
cattctgctgctcataaata

SEQ ID NO: 24244 - DNA, 20 bp, synthetic construct
  misc_feature 1..20: note = chemically synthesized
  source 1..20: mol_type = other DNA
attctgctgctcataaataa

SEQ ID NO: 24245 - DNA, 20 bp, synthetic construct
  misc_feature 1..20: note = chemically synthesized
  source 1..20: mol_type = other DNA
tctgctgctcataaataagg

SEQ ID NO: 24246 - DNA, 20 bp, synthetic construct
  misc_feature 1..20: note = chemically synthesized
  source 1..20: mol_type = other DNA
gctgctcataaataagggag

SEQ ID NO: 24247 - DNA, 20 bp, synthetic construct
  misc_feature 1..20: note = chemically synthesized
  source 1..20: mol_type = other DNA
ctgctcataaataagggagt

SEQ ID NO: 24248 - DNA, 20 bp, synthetic construct
  misc_feature 1..20: note = chemically synthesized
  source 1..20: mol_type = other DNA
ataaataagggagtgggaaa

SEQ ID NO: 24249 - DNA, 20 bp, synthetic construct
  misc_feature 1..20: note = chemically synthesized
  source 1..20: mol_type = other DNA
tactttgaacaccctcgtta

SEQ ID NO: 24250 - DNA, 20 bp, synthetic construct
  misc_feature 1..20: note = chemically synthesized
  source 1..20: mol_type = other DNA
actttgaacaccctcgttaa

SEQ ID NO: 24251 - DNA, 20 bp, synthetic construct
  misc_feature 1..20: note = chemically synthesized
  source 1..20: mol_type = other DNA
tgaacaccctcgttaaaggc

SEQ ID NO: 24252 - DNA, 20 bp, synthetic construct
  misc_feature 1..20: note = chemically synthesized
  source 1..20: mol_type = other DNA
accctcgttaaaggctggtg

SEQ ID NO: 24253 - DNA, 20 bp, synthetic construct
  misc_feature 1..20: note = chemically synthesized
  source 1..20: mol_type = other DNA
ttaaaggctggtgtggttgc

SEQ ID NO: 24254 - DNA, 20 bp, synthetic construct
  misc_feature 1..20: note = chemically synthesized
  source 1..20: mol_type = other DNA
aaaggctggtgtggttgcca

SEQ ID NO: 24255 - DNA, 20 bp, synthetic construct
  misc_feature 1..20: note = chemically synthesized
  source 1..20: mol_type = other DNA
ctggtgtggttgccagagaa

SEQ ID NO: 24256 - DNA, 20 bp, synthetic construct
  misc_feature 1..20: note = chemically synthesized
  source 1..20: mol_type = other DNA
tggtgtggttgccagagaat

SEQ ID NO: 24257 - DNA, 20 bp, synthetic construct
  misc_feature 1..20: note = chemically synthesized
  source 1..20: mol_type = other DNA
ggtgtggttgccagagaata

SEQ ID NO: 24258 - DNA, 20 bp, synthetic construct
  misc_feature 1..20: note = chemically synthesized
  source 1..20: mol_type = other DNA
ccagagaatagggctaactt

SEQ ID NO: 24259 - DNA, 20 bp, synthetic construct
  misc_feature 1..20: note = chemically synthesized
  source 1..20: mol_type = other DNA
cagagaatagggctaactta

SEQ ID NO: 24260 - DNA, 20 bp, synthetic construct
  misc_feature 1..20: note = chemically synthesized
  source 1..20: mol_type = other DNA
agagaatagggctaacttaa

SEQ ID NO: 24261 - DNA, 20 bp, synthetic construct
  misc_feature 1..20: note = chemically synthesized
  source 1..20: mol_type = other DNA
gagaatagggctaacttaag

SEQ ID NO: 24262 - DNA, 20 bp, synthetic construct
  misc_feature 1..20: note = chemically synthesized
  source 1..20: mol_type = other DNA
agaatagggctaacttaagg

SEQ ID NO: 24263 - DNA, 20 bp, synthetic construct
  misc_feature 1..20: note = chemically synthesized
  source 1..20: mol_type = other DNA
taacttaagggggatccgct

SEQ ID NO: 24264 - DNA, 20 bp, synthetic construct
  misc_feature 1..20: note = chemically synthesized
  source 1..20: mol_type = other DNA
ttttttgttttgttttgttc

SEQ ID NO: 24265 - DNA, 20 bp, synthetic construct
  misc_feature 1..20: note = chemically synthesized
  source 1..20: mol_type = other DNA
gttttgttctggattttata

SEQ ID NO: 24266 - DNA, 20 bp, synthetic construct
  misc_feature 1..20: note = chemically synthesized
  source 1..20: mol_type = other DNA
ttttgttctggattttataa

SEQ ID NO: 24267 - DNA, 20 bp, synthetic construct
  misc_feature 1..20: note = chemically synthesized
  source 1..20: mol_type = other DNA
gattttataaaggcatcatt

SEQ ID NO: 24268 - DNA, 20 bp, synthetic construct
  misc_feature 1..20: note = chemically synthesized
  source 1..20: mol_type = other DNA
tttaaatatctaatgttgat

SEQ ID NO: 24269 - DNA, 20 bp, synthetic construct
  misc_feature 1..20: note = chemically synthesized
  source 1..20: mol_type = other DNA
ttagtatgttctattattta

SEQ ID NO: 24270 - DNA, 20 bp, synthetic construct
  misc_feature 1..20: note = chemically synthesized
  source 1..20: mol_type = other DNA
ttctattatttatagccctc

SEQ ID NO: 24271 - DNA, 20 bp, synthetic construct
  misc_feature 1..20: note = chemically synthesized
  source 1..20: mol_type = other DNA
tattatttatagccctccag

SEQ ID NO: 24272 - DNA, 20 bp, synthetic construct
  misc_feature 1..20: note = chemically synthesized
  source 1..20: mol_type = other DNA
attatttatagccctccaga

SEQ ID NO: 24273 - DNA, 20 bp, synthetic construct
  misc_feature 1..20: note = chemically synthesized
  source 1..20: mol_type = other DNA
tagccctccagaaggatccc

SEQ ID NO: 24274 - DNA, 20 bp, synthetic construct
  misc_feature 1..20: note = chemically synthesized
  source 1..20: mol_type = other DNA
agccctccagaaggatccca

SEQ ID NO: 24275 - DNA, 20 bp, synthetic construct
  misc_feature 1..20: note = chemically synthesized
  source 1..20: mol_type = other DNA
gccctccagaaggatcccaa

SEQ ID NO: 24276 - DNA, 20 bp, synthetic construct
  misc_feature 1..20: note = chemically synthesized
  source 1..20: mol_type = other DNA
ctccagaaggatcccaaggg

SEQ ID NO: 24277 - DNA, 20 bp, synthetic construct
  misc_feature 1..20: note = chemically synthesized
  source 1..20: mol_type = other DNA
agggaagataatctacattt

SEQ ID NO: 24278 - DNA, 20 bp, synthetic construct
  misc_feature 1..20: note = chemically synthesized
  source 1..20: mol_type = other DNA
gaagataatctacatttgag

SEQ ID NO: 24279 - DNA, 20 bp, synthetic construct
  misc_feature 1..20: note = chemically synthesized
  source 1..20: mol_type = other DNA
acgatttcccaatttccata

SEQ ID NO: 24280 - DNA, 20 bp, synthetic construct
  misc_feature 1..20: note = chemically synthesized
  source 1..20: mol_type = other DNA
gaattttctttttccactct

SEQ ID NO: 24281 - DNA, 20 bp, synthetic construct
  misc_feature 1..20: note = chemically synthesized
  source 1..20: mol_type = other DNA
ctttttccactctcggtgtg

SEQ ID NO: 24282 - DNA, 20 bp, synthetic construct
  misc_feature 1..20: note = chemically synthesized
  source 1..20: mol_type = other DNA
actctcggtgtgtggcattg

SEQ ID NO: 24283 - DNA, 20 bp, synthetic construct
  misc_feature 1..20: note = chemically synthesized
  source 1..20: mol_type = other DNA
ctctcggtgtgtggcattgt

SEQ ID NO: 24284 - DNA, 20 bp, synthetic construct
  misc_feature 1..20: note = chemically synthesized
  source 1..20: mol_type = other DNA
tctcggtgtgtggcattgtg

SEQ ID NO: 24285 - DNA, 20 bp, synthetic construct
  misc_feature 1..20: note = chemically synthesized
  source 1..20: mol_type = other DNA
gtgtgtggcattgtggggtg

SEQ ID NO: 24286 - DNA, 20 bp, synthetic construct
  misc_feature 1..20: note = chemically synthesized
  source 1..20: mol_type = other DNA
tgtggggtgcagacacctga

SEQ ID NO: 24287 - DNA, 20 bp, synthetic construct
  misc_feature 1..20: note = chemically synthesized
  source 1..20: mol_type = other DNA
cagacacctgaaagcctgac

SEQ ID NO: 24288 - DNA, 20 bp, synthetic construct
  misc_feature 1..20: note = chemically synthesized
  source 1..20: mol_type = other DNA
gacacctgaaagcctgactg

SEQ ID NO: 24289 - DNA, 20 bp, synthetic construct
  misc_feature 1..20: note = chemically synthesized
  source 1..20: mol_type = other DNA
gcctgactggagatgtaaca

SEQ ID NO: 24290 - DNA, 20 bp, synthetic construct
  misc_feature 1..20: note = chemically synthesized
  source 1..20: mol_type = other DNA
cctgactggagatgtaacat

SEQ ID NO: 24291 - DNA, 20 bp, synthetic construct
  misc_feature 1..20: note = chemically synthesized
  source 1..20: mol_type = other DNA
aacatgggctctgctgacat

SEQ ID NO: 24292 - DNA, 20 bp, synthetic construct
  misc_feature 1..20: note = chemically synthesized
  source 1..20: mol_type = other DNA
gctctgctgacattagcatg

SEQ ID NO: 24293 - DNA, 20 bp, synthetic construct
  misc_feature 1..20: note = chemically synthesized
  source 1..20: mol_type = other DNA
tctgctgacattagcatgaa

SEQ ID NO: 24294 - DNA, 20 bp, synthetic construct
  misc_feature 1..20: note = chemically synthesized
  source 1..20: mol_type = other DNA
tgacattagcatgaagagct

SEQ ID NO: 24295 - DNA, 20 bp, synthetic construct
  misc_feature 1..20: note = chemically synthesized
  source 1..20: mol_type = other DNA
gctaatcgacttgcaaaata

SEQ ID NO: 24296 - DNA, 20 bp, synthetic construct
  misc_feature 1..20: note = chemically synthesized
  source 1..20: mol_type = other DNA
ctaatcgacttgcaaaatat

SEQ ID NO: 24297 - DNA, 20 bp, synthetic construct
  misc_feature 1..20: note = chemically synthesized
  source 1..20: mol_type = other DNA
tcgacttgcaaaatataggt

SEQ ID NO: 24298 - DNA, 20 bp, synthetic construct
  misc_feature 1..20: note = chemically synthesized
  source 1..20: mol_type = other DNA
cgacttgcaaaatataggtt

SEQ ID NO: 24299 - DNA, 20 bp, synthetic construct
  misc_feature 1..20: note = chemically synthesized
  source 1..20: mol_type = other DNA
gacttgcaaaatataggtta

SEQ ID NO: 24300 - DNA, 20 bp, synthetic construct
  misc_feature 1..20: note = chemically synthesized
  source 1..20: mol_type = other DNA
cttgcaaaatataggttagg

SEQ ID NO: 24301 - DNA, 20 bp, synthetic construct
  misc_feature 1..20: note = chemically synthesized
  source 1..20: mol_type = other DNA
atataggttagggagtttta

SEQ ID NO: 24302 - DNA, 20 bp, synthetic construct
  misc_feature 1..20: note = chemically synthesized
  source 1..20: mol_type = other DNA
tataggttagggagttttat

SEQ ID NO: 24303 - DNA, 20 bp, synthetic construct
  misc_feature 1..20: note = chemically synthesized
  source 1..20: mol_type = other DNA
tcttactctttcattgatta

SEQ ID NO: 24304 - DNA, 20 bp, synthetic construct
  misc_feature 1..20: note = chemically synthesized
  source 1..20: mol_type = other DNA
cttactctttcattgattaa

SEQ ID NO: 24305 - DNA, 20 bp, synthetic construct
  misc_feature 1..20: note = chemically synthesized
  source 1..20: mol_type = other DNA
aggcaaaatattacattaac

SEQ ID NO: 24306 - DNA, 20 bp, synthetic construct
  misc_feature 1..20: note = chemically synthesized
  source 1..20: mol_type = other DNA
acattaactagatcattaca

SEQ ID NO: 24307 - DNA, 20 bp, synthetic construct
  misc_feature 1..20: note = chemically synthesized
  source 1..20: mol_type = other DNA
cattaactagatcattacat

SEQ ID NO: 24308 - DNA, 20 bp, synthetic construct
  misc_feature 1..20: note = chemically synthesized
  source 1..20: mol_type = other DNA
ctagatcattacatgggtaa

SEQ ID NO: 24309 - DNA, 20 bp, synthetic construct
  misc_feature 1..20: note = chemically synthesized
  source 1..20: mol_type = other DNA
tagatcattacatgggtaaa

SEQ ID NO: 24310 - DNA, 20 bp, synthetic construct
  misc_feature 1..20: note = chemically synthesized
  source 1..20: mol_type = other DNA
tcattacatgggtaaaaggt

SEQ ID NO: 24311 - DNA, 20 bp, synthetic construct
  misc_feature 1..20: note = chemically synthesized
  source 1..20: mol_type = other DNA
aggttagaacttcacacact

SEQ ID NO: 24312 - DNA, 20 bp, synthetic construct
  misc_feature 1..20: note = chemically synthesized
  source 1..20: mol_type = other DNA
ggttagaacttcacacactt

SEQ ID NO: 24313 - DNA, 20 bp, synthetic construct
  misc_feature 1..20: note = chemically synthesized
  source 1..20: mol_type = other DNA
gttagaacttcacacactta

SEQ ID NO: 24314 - DNA, 20 bp, synthetic construct
  misc_feature 1..20: note = chemically synthesized
  source 1..20: mol_type = other DNA
ttagaacttcacacacttag

SEQ ID NO: 24315 - DNA, 20 bp, synthetic construct
  misc_feature 1..20: note = chemically synthesized
  source 1..20: mol_type = other DNA
tccttccccttcctgccttg

SEQ ID NO: 24316 - DNA, 20 bp, synthetic construct
  misc_feature 1..20: note = chemically synthesized
  source 1..20: mol_type = other DNA
tcctgccttgtggcaaatca

SEQ ID NO: 24317 - DNA, 20 bp, synthetic construct
  misc_feature 1..20: note = chemically synthesized
  source 1..20: mol_type = other DNA
cctgccttgtggcaaatcac

SEQ ID NO: 24318 - DNA, 20 bp, synthetic construct
  misc_feature 1..20: note = chemically synthesized
  source 1..20: mol_type = other DNA
ccttgtggcaaatcacaggt

SEQ ID NO: 24319 - DNA, 20 bp, synthetic construct
  misc_feature 1..20: note = chemically synthesized
  source 1..20: mol_type = other DNA
ttgtggcaaatcacaggttg

SEQ ID NO: 24320 - DNA, 20 bp, synthetic construct
  misc_feature 1..20: note = chemically synthesized
  source 1..20: mol_type = other DNA
tgtggcaaatcacaggttgg

SEQ ID NO: 24321 - DNA, 20 bp, synthetic construct
  misc_feature 1..20: note = chemically synthesized
  source 1..20: mol_type = other DNA
ggcaaatcacaggttggagg

SEQ ID NO: 24322 - DNA, 20 bp, synthetic construct
  misc_feature 1..20: note = chemically synthesized
  source 1..20: mol_type = other DNA
gcaaatcacaggttggaggc

SEQ ID NO: 24323 - DNA, 20 bp, synthetic construct
  misc_feature 1..20: note = chemically synthesized
  source 1..20: mol_type = other DNA
caaatcacaggttggaggca

SEQ ID NO: 24324 - DNA, 20 bp, synthetic construct
  misc_feature 1..20: note = chemically synthesized
  source 1..20: mol_type = other DNA
gcagggaaactcactgtgtc

SEQ ID NO: 24325 - DNA, 20 bp, synthetic construct
  misc_feature 1..20: note = chemically synthesized
  source 1..20: mol_type = other DNA
agcgctcctaaatgcctgaa

SEQ ID NO: 24326 - DNA, 20 bp, synthetic construct
  misc_feature 1..20: note = chemically synthesized
  source 1..20: mol_type = other DNA
aaatgcctgaatagcaacgt

SEQ ID NO: 24327 - DNA, 20 bp, synthetic construct
  misc_feature 1..20: note = chemically synthesized
  source 1..20: mol_type = other DNA
gaatagcaacgttagactta

SEQ ID NO: 24328 - DNA, 20 bp, synthetic construct
  misc_feature 1..20: note = chemically synthesized
  source 1..20: mol_type = other DNA
aatagcaacgttagacttaa

SEQ ID NO: 24329 - DNA, 20 bp, synthetic construct
  misc_feature 1..20: note = chemically synthesized
  source 1..20: mol_type = other DNA
tagcaacgttagacttaaag

SEQ ID NO: 24330 - DNA, 20 bp, synthetic construct
  misc_feature 1..20: note = chemically synthesized
  source 1..20: mol_type = other DNA
agcaacgttagacttaaagg

SEQ ID NO: 24331 - DNA, 20 bp, synthetic construct
  misc_feature 1..20: note = chemically synthesized
  source 1..20: mol_type = other DNA
gcaacgttagacttaaagga

SEQ ID NO: 24332 - DNA, 20 bp, synthetic construct
  misc_feature 1..20: note = chemically synthesized
  source 1..20: mol_type = other DNA
caacgttagacttaaaggag

SEQ ID NO: 24333 - DNA, 20 bp, synthetic construct
  misc_feature 1..20: note = chemically synthesized
  source 1..20: mol_type = other DNA
gccttcgctttgaatctccc

SEQ ID NO: 24334 - DNA, 20 bp, synthetic construct
  misc_feature 1..20: note = chemically synthesized
  source 1..20: mol_type = other DNA
ccgagtcttttttattctga

SEQ ID NO: 24335 - DNA, 20 bp, synthetic construct
  misc_feature 1..20: note = chemically synthesized
  source 1..20: mol_type = other DNA
tcttttttattctgatagaa

SEQ ID NO: 24336 - DNA, 20 bp, synthetic construct
  misc_feature 1..20: note = chemically synthesized
  source 1..20: mol_type = other DNA
tgttctgattccatttctgt

SEQ ID NO: 24337 - DNA, 20 bp, synthetic construct
  misc_feature 1..20: note = chemically synthesized
  source 1..20: mol_type = other DNA
tctgattccatttctgttag

SEQ ID NO: 24338 - DNA, 20 bp, synthetic construct
  misc_feature 1..20: note = chemically synthesized
  source 1..20: mol_type = other DNA
ctgattccatttctgttagc

SEQ ID NO: 24339 - DNA, 20 bp, synthetic construct
  misc_feature 1..20: note = chemically synthesized
  source 1..20: mol_type = other DNA
tgattccatttctgttagca

SEQ ID NO: 24340 - DNA, 20 bp, synthetic construct
  misc_feature 1..20: note = chemically synthesized
  source 1..20: mol_type = other DNA
ccatttctgttagcagggaa

SEQ ID NO: 24341 - DNA, 20 bp, synthetic construct
  misc_feature 1..20: note = chemically synthesized
  source 1..20: mol_type = other DNA
catttctgttagcagggaaa

SEQ ID NO: 24342 - DNA, 20 bp, synthetic construct
  misc_feature 1..20: note = chemically synthesized
  source 1..20: mol_type = other DNA
atttctgttagcagggaaaa

SEQ ID NO: 24343 - DNA, 20 bp, synthetic construct
  misc_feature 1..20: note = chemically synthesized
  source 1..20: mol_type = other DNA
ggaaaagggcaaatacatga

SEQ ID NO: 24344 - DNA, 20 bp, synthetic construct
  misc_feature 1..20: note = chemically synthesized
  source 1..20: mol_type = other DNA
gaaaagggcaaatacatgaa

SEQ ID NO: 24345 - DNA, 20 bp, synthetic construct
  misc_feature 1..20: note = chemically synthesized
  source 1..20: mol_type = other DNA
aaaagggcaaatacatgaaa

SEQ ID NO: 24346 - DNA, 20 bp, synthetic construct
  misc_feature 1..20: note = chemically synthesized
  source 1..20: mol_type = other DNA
ggcaaatacatgaaagggcg

SEQ ID NO: 24347 - DNA, 20 bp, synthetic construct
  misc_feature 1..20: note = chemically synthesized
  source 1..20: mol_type = other DNA
gcaaatacatgaaagggcgt

SEQ ID NO: 24348 - DNA, 20 bp, synthetic construct
  misc_feature 1..20: note = chemically synthesized
  source 1..20: mol_type = other DNA
tacatgaaagggcgtgggct

SEQ ID NO: 24349 - DNA, 20 bp, synthetic construct
  misc_feature 1..20: note = chemically synthesized
  source 1..20: mol_type = other DNA
aaagggcgtgggctgagcca

SEQ ID NO: 24350 - DNA, 20 bp, synthetic construct
  misc_feature 1..20: note = chemically synthesized
  source 1..20: mol_type = other DNA
ggcgtgggctgagccatggc

SEQ ID NO: 24351 - DNA, 20 bp, synthetic construct
  misc_feature 1..20: note = chemically synthesized
  source 1..20: mol_type = other DNA
gcgtgggctgagccatggcc

SEQ ID NO: 24352 - DNA, 20 bp, synthetic construct
  misc_feature 1..20: note = chemically synthesized
  source 1..20: mol_type = other DNA
gctgagccatggccaggttt

SEQ ID NO: 24353 - DNA, 20 bp, synthetic construct
  misc_feature 1..20: note = chemically synthesized
  source 1..20: mol_type = other DNA
tgagccatggccaggtttga

SEQ ID NO: 24354 - DNA, 20 bp, synthetic construct
  misc_feature 1..20: note = chemically synthesized
  source 1..20: mol_type = other DNA
ccatggccaggtttgagaga

SEQ ID NO: 24355 - DNA, 20 bp, synthetic construct
  misc_feature 1..20: note = chemically synthesized
  source 1..20: mol_type = other DNA
atggccaggtttgagagaca

SEQ ID NO: 24356 - DNA, 20 bp, synthetic construct
  misc_feature 1..20: note = chemically synthesized
  source 1..20: mol_type = other DNA
ttgagagacagagtgattcg

SEQ ID NO: 24357 - DNA, 20 bp, synthetic construct
  misc_feature 1..20: note = chemically synthesized
  source 1..20: mol_type = other DNA
agagacagagtgattcgcag

SEQ ID NO: 24358 - DNA, 20 bp, synthetic construct
  misc_feature 1..20: note = chemically synthesized
  source 1..20: mol_type = other DNA
gtgattcgcagtagtcttcc

SEQ ID NO: 24359 - DNA, 20 bp, synthetic construct
  misc_feature 1..20: note = chemically synthesized
  source 1..20: mol_type = other DNA
tgattcgcagtagtcttccc

SEQ ID NO: 24360 - DNA, 20 bp, synthetic construct
  misc_feature 1..20: note = chemically synthesized
  source 1..20: mol_type = other DNA
gattcgcagtagtcttccca

SEQ ID NO: 24361 - DNA, 20 bp, synthetic construct
  misc_feature 1..20: note = chemically synthesized
  source 1..20: mol_type = other DNA
agtagtcttcccagggtgtt

SEQ ID NO: 24362 - DNA, 20 bp, synthetic construct
  misc_feature 1..20: note = chemically synthesized
  source 1..20: mol_type = other DNA
agtcttcccagggtgttgag

SEQ ID NO: 24363 - DNA, 20 bp, synthetic construct
  misc_feature 1..20: note = chemically synthesized
  source 1..20: mol_type = other DNA
gtcttcccagggtgttgagt

SEQ ID NO: 24364 - DNA, 20 bp, synthetic construct
  misc_feature 1..20: note = chemically synthesized
  source 1..20: mol_type = other DNA
gttgagtgggaacgtctccc

SEQ ID NO: 24365 - DNA, 20 bp, synthetic construct
  misc_feature 1..20: note = chemically synthesized
  source 1..20: mol_type = other DNA
ttgagtgggaacgtctccct

SEQ ID NO: 24366 - DNA, 20 bp, synthetic construct
  misc_feature 1..20: note = chemically synthesized
  source 1..20: mol_type = other DNA
agtgggaacgtctccctggg

SEQ ID NO: 24367 - DNA, 20 bp, synthetic construct
  misc_feature 1..20: note = chemically synthesized
  source 1..20: mol_type = other DNA
gtgggaacgtctccctggga

SEQ ID NO: 24368 - DNA, 20 bp, synthetic construct
  misc_feature 1..20: note = chemically synthesized
  source 1..20: mol_type = other DNA
tgggaacgtctccctgggaa

SEQ ID NO: 24369 - DNA, 20 bp, synthetic construct
  misc_feature 1..20: note = chemically synthesized
  source 1..20: mol_type = other DNA
cgtctccctgggaagggatg

SEQ ID NO: 24370 - DNA, 20 bp, synthetic construct
  misc_feature 1..20: note = chemically synthesized
  source 1..20: mol_type = other DNA
ggaagggatgtggtcattct

SEQ ID NO: 24371 - DNA, 20 bp, synthetic construct
  misc_feature 1..20: note = chemically synthesized
  source 1..20: mol_type = other DNA
atgtggtcattctcagactg

SEQ ID NO: 24372 - DNA, 20 bp, synthetic construct
  misc_feature 1..20: note = chemically synthesized
  source 1..20: mol_type = other DNA
tgtggtcattctcagactgt

SEQ ID NO: 24373 - DNA, 20 bp, synthetic construct
  misc_feature 1..20: note = chemically synthesized
  source 1..20: mol_type = other DNA
tcattctcagactgtgggct

SEQ ID NO: 24374 - DNA, 20 bp, synthetic construct
  misc_feature 1..20: note = chemically synthesized
  source 1..20: mol_type = other DNA
gtcaaccatctaatgctatc

SEQ ID NO: 24375 - DNA, 20 bp, synthetic construct
  misc_feature 1..20: note = chemically synthesized
  source 1..20: mol_type = other DNA
tcaaccatctaatgctatca

SEQ ID NO: 24376 - DNA, 20 bp, synthetic construct
  misc_feature 1..20: note = chemically synthesized
  source 1..20: mol_type = other DNA
aatgctatcaaggccttcct

SEQ ID NO: 24377 - DNA, 20 bp, synthetic construct
  misc_feature 1..20: note = chemically synthesized
  source 1..20: mol_type = other DNA
tgctatcaaggccttcctga

SEQ ID NO: 24378 - DNA, 20 bp, synthetic construct
  misc_feature 1..20: note = chemically synthesized
  source 1..20: mol_type = other DNA
tatcaaggccttcctgagag

SEQ ID NO: 24379 - DNA, 20 bp, synthetic construct
  misc_feature 1..20: note = chemically synthesized
  source 1..20: mol_type = other DNA
ggccttcctgagagaagttt

SEQ ID NO: 24380 - DNA, 20 bp, synthetic construct
  misc_feature 1..20: note = chemically synthesized
  source 1..20: mol_type = other DNA
gccttcctgagagaagtttc

SEQ ID NO: 24381 - DNA, 20 bp, synthetic construct
  misc_feature 1..20: note = chemically synthesized
  source 1..20: mol_type = other DNA
tcaggcccaatcctgatgtt

SEQ ID NO: 24382 - DNA, 20 bp, synthetic construct
  misc_feature 1..20: note = chemically synthesized
  source 1..20: mol_type = other DNA
gcccaatcctgatgttgagt

SEQ ID NO: 24383 - DNA, 20 bp, synthetic construct
  misc_feature 1..20: note = chemically synthesized
  source 1..20: mol_type = other DNA
agttggcatgttcacatgtc

SEQ ID NO: 24384 - DNA, 20 bp, synthetic construct
  misc_feature 1..20: note = chemically synthesized
  source 1..20: mol_type = other DNA
catgtctggtaataatctgc

SEQ ID NO: 24385 - DNA, 20 bp, synthetic construct
  misc_feature 1..20: note = chemically synthesized
  source 1..20: mol_type = other DNA
tctgtgcattattcatctca

SEQ ID NO: 24386 - DNA, 20 bp, synthetic construct
  misc_feature 1..20: note = chemically synthesized
  source 1..20: mol_type = other DNA
tgcattattcatctcaaagc

SEQ ID NO: 24387 - DNA, 20 bp, synthetic construct
  misc_feature 1..20: note = chemically synthesized
  source 1..20: mol_type = other DNA
cattattcatctcaaagcca

SEQ ID NO: 24388 - DNA, 20 bp, synthetic construct
  misc_feature 1..20: note = chemically synthesized
  source 1..20: mol_type = other DNA
attattcatctcaaagccag

SEQ ID NO: 24389 - DNA, 20 bp, synthetic construct
  misc_feature 1..20: note = chemically synthesized
  source 1..20: mol_type = other DNA
agaggatctcatgtccatca

SEQ ID NO: 24390 - DNA, 20 bp, synthetic construct
  misc_feature 1..20: note = chemically synthesized
  source 1..20: mol_type = other DNA
gaggatctcatgtccatcac

SEQ ID NO: 24391 - DNA, 20 bp, synthetic construct
  misc_feature 1..20: note = chemically synthesized
  source 1..20: mol_type = other DNA
aggatctcatgtccatcaca

SEQ ID NO: 24392 - DNA, 20 bp, synthetic construct
  misc_feature 1..20: note = chemically synthesized
  source 1..20: mol_type = other DNA
tcatgtccatcacagggctg

SEQ ID NO: 24393 - DNA, 20 bp, synthetic construct
  misc_feature 1..20: note = chemically synthesized
  source 1..20: mol_type = other DNA
catcacagggctgtggtctg

SEQ ID NO: 24394 - DNA, 20 bp, synthetic construct
  misc_feature 1..20: note = chemically synthesized
  source 1..20: mol_type = other DNA
acagggctgtggtctgtgga

SEQ ID NO: 24395 - DNA, 20 bp, synthetic construct
  misc_feature 1..20: note = chemically synthesized
  source 1..20: mol_type = other DNA
cagggctgtggtctgtggat

SEQ ID NO: 24396 - DNA, 20 bp, synthetic construct
  misc_feature 1..20: note = chemically synthesized
  source 1..20: mol_type = other DNA
agggctgtggtctgtggata

SEQ ID NO: 24397 - DNA, 20 bp, synthetic construct
  misc_feature 1..20: note = chemically synthesized
  source 1..20: mol_type = other DNA
ctgtggatagggaaaatttc

SEQ ID NO: 24398 - DNA, 20 bp, synthetic construct
  misc_feature 1..20: note = chemically synthesized
  source 1..20: mol_type = other DNA
tgtggatagggaaaatttca

SEQ ID NO: 24399 - DNA, 20 bp, synthetic construct
  misc_feature 1..20: note = chemically synthesized
  source 1..20: mol_type = other DNA
ggaaaatttcaaggcttttc

SEQ ID NO: 24400 - DNA, 20 bp, synthetic construct
  misc_feature 1..20: note = chemically synthesized
  source 1..20: mol_type = other DNA
gaaaatttcaaggcttttct

SEQ ID NO: 24401 - DNA, 20 bp, synthetic construct
  misc_feature 1..20: note = chemically synthesized
  source 1..20: mol_type = other DNA
aggcttttctgggcctgatg

SEQ ID NO: 24402 - DNA, 20 bp, synthetic construct
  misc_feature 1..20: note = chemically synthesized
  source 1..20: mol_type = other DNA
ctgatgtagccattttcttt

SEQ ID NO: 24403 - DNA, 20 bp, synthetic construct
  misc_feature 1..20: note = chemically synthesized
  source 1..20: mol_type = other DNA
gccattttctttcagtatct

SEQ ID NO: 24404 - DNA, 20 bp, synthetic construct
  misc_feature 1..20: note = chemically synthesized
  source 1..20: mol_type = other DNA
tttctttcagtatcttagat

SEQ ID NO: 24405 - DNA, 20 bp, synthetic construct
  misc_feature 1..20: note = chemically synthesized
  source 1..20: mol_type = other DNA
ctttcagtatcttagattgg

SEQ ID NO: 24406 - DNA, 20 bp, synthetic construct
  misc_feature 1..20: note = chemically synthesized
  source 1..20: mol_type = other DNA
tttcagtatcttagattggt

SEQ ID NO: 24407 - DNA, 20 bp, synthetic construct
  misc_feature 1..20: note = chemically synthesized
  source 1..20: mol_type = other DNA
atcttagattggtaggtctt

SEQ ID NO: 24408 - DNA, 20 bp, synthetic construct
  misc_feature 1..20: note = chemically synthesized
  source 1..20: mol_type = other DNA
aaatgtgtgtgtgtgtgcct

SEQ ID NO: 24409 - DNA, 20 bp, synthetic construct
  misc_feature 1..20: note = chemically synthesized
  source 1..20: mol_type = other DNA
tgtgtgtgtgtgcctaagta

SEQ ID NO: 24410 - DNA, 20 bp, synthetic construct
  misc_feature 1..20: note = chemically synthesized
  source 1..20: mol_type = other DNA
ttttcttgaatttctcactt

SEQ ID NO: 24411 - DNA, 20 bp, synthetic construct
  misc_feature 1..20: note = chemically synthesized
  source 1..20: mol_type = other DNA
tacttaactacacatatgtg

SEQ ID NO: 24412 - DNA, 20 bp, synthetic construct
  misc_feature 1..20: note = chemically synthesized
  source 1..20: mol_type = other DNA
taactacacatatgtgcaga

SEQ ID NO: 24413 - DNA, 20 bp, synthetic construct
  misc_feature 1..20: note = chemically synthesized
  source 1..20: mol_type = other DNA
atgtgcagaaagtgaactct

SEQ ID NO: 24414 - DNA, 20 bp, synthetic construct
  misc_feature 1..20: note = chemically synthesized
  source 1..20: mol_type = other DNA
gaaagtgaactcttagaatt

SEQ ID NO: 24415 - DNA, 20 bp, synthetic construct
  misc_feature 1..20: note = chemically synthesized
  source 1..20: mol_type = other DNA
tccgttctttctcattgtgt

SEQ ID NO: 24416 - DNA, 20 bp, synthetic construct
  misc_feature 1..20: note = chemically synthesized
  source 1..20: mol_type = other DNA
gttctttctcattgtgtgag

SEQ ID NO: 24417 - DNA, 20 bp, synthetic construct
  misc_feature 1..20: note = chemically synthesized
  source 1..20: mol_type = other DNA
ttctttctcattgtgtgaga

SEQ ID NO: 24418 - DNA, 20 bp, synthetic construct
  misc_feature 1..20: note = chemically synthesized
  source 1..20: mol_type = other DNA
ctttctcattgtgtgagaag

SEQ ID NO: 24419 - DNA, 20 bp, synthetic construct
  misc_feature 1..20: note = chemically synthesized
  source 1..20: mol_type = other DNA
tttctcattgtgtgagaagg

SEQ ID NO: 24420 - DNA, 20 bp, synthetic construct
  misc_feature 1..20: note = chemically synthesized
  source 1..20: mol_type = other DNA
cattgtgtgagaaggaggca

SEQ ID NO: 24421 - DNA, 20 bp, synthetic construct
  misc_feature 1..20: note = chemically synthesized
  source 1..20: mol_type = other DNA
aggaggcaaagttgccaaat

SEQ ID NO: 24422 - DNA, 20 bp, synthetic construct
  misc_feature 1..20: note = chemically synthesized
  source 1..20: mol_type = other DNA
gaggcaaagttgccaaattg

SEQ ID NO: 24423 - DNA, 20 bp, synthetic construct
  misc_feature 1..20: note = chemically synthesized
  source 1..20: mol_type = other DNA
aggcaaagttgccaaattgg

SEQ ID NO: 24424 - DNA, 20 bp, synthetic construct
  misc_feature 1..20: note = chemically synthesized
  source 1..20: mol_type = other DNA
caaagttgccaaattggagg

SEQ ID NO: 24425 - DNA, 20 bp, synthetic construct
  misc_feature 1..20: note = chemically synthesized
  source 1..20: mol_type = other DNA
aaagttgccaaattggaggt

SEQ ID NO: 24426 - DNA, 20 bp, synthetic construct
  misc_feature 1..20: note = chemically synthesized
  source 1..20: mol_type = other DNA
aagttgccaaattggaggtg

SEQ ID NO: 24427 - DNA, 20 bp, synthetic construct
  misc_feature 1..20: note = chemically synthesized
  source 1..20: mol_type = other DNA
tgccaaattggaggtggggc

SEQ ID NO: 24428 - DNA, 20 bp, synthetic construct
  misc_feature 1..20: note = chemically synthesized
  source 1..20: mol_type = other DNA
gccaaattggaggtggggca

SEQ ID NO: 24429 - DNA, 20 bp, synthetic construct
  misc_feature 1..20: note = chemically synthesized
  source 1..20: mol_type = other DNA
aaattggaggtggggcaagg

SEQ ID NO: 24430 - DNA, 20 bp, synthetic construct
  misc_feature 1..20: note = chemically synthesized
  source 1..20: mol_type = other DNA
aattggaggtggggcaaggt

SEQ ID NO: 24431 - DNA, 20 bp, synthetic construct
  misc_feature 1..20: note = chemically synthesized
  source 1..20: mol_type = other DNA
ggaggtggggcaaggtgggc

SEQ ID NO: 24432 - DNA, 20 bp, synthetic construct
  misc_feature 1..20: note = chemically synthesized
  source 1..20: mol_type = other DNA
ggtggggcaaggtgggccag

SEQ ID NO: 24433 - DNA, 20 bp, synthetic construct
  misc_feature 1..20: note = chemically synthesized
  source 1..20: mol_type = other DNA
tggggcaaggtgggccagta

SEQ ID NO: 24434 - DNA, 20 bp, synthetic construct
  misc_feature 1..20: note = chemically synthesized
  source 1..20: mol_type = other DNA
tgggccagtagagctgtgat

SEQ ID NO: 24435 - DNA, 20 bp, synthetic construct
  misc_feature 1..20: note = chemically synthesized
  source 1..20: mol_type = other DNA
tggtgtctcactttgatgtg

SEQ ID NO: 24436 - DNA, 20 bp, synthetic construct
  misc_feature 1..20: note = chemically synthesized
  source 1..20: mol_type = other DNA
ggtgtctcactttgatgtgt

SEQ ID NO: 24437 - DNA, 20 bp, synthetic construct
  misc_feature 1..20: note = chemically synthesized
  source 1..20: mol_type = other DNA
tgtctcactttgatgtgtag

SEQ ID NO: 24438 - DNA, 20 bp, synthetic construct
  misc_feature 1..20: note = chemically synthesized
  source 1..20: mol_type = other DNA
tctcactttgatgtgtagga

SEQ ID NO: 24439 - DNA, 20 bp, synthetic construct
  misc_feature 1..20: note = chemically synthesized
  source 1..20: mol_type = other DNA
tcactttgatgtgtaggaga

SEQ ID NO: 24440 - DNA, 20 bp, synthetic construct
  misc_feature 1..20: note = chemically synthesized
  source 1..20: mol_type = other DNA
taggagagagaacaaatcac

SEQ ID NO: 24441 - DNA, 20 bp, synthetic construct
  misc_feature 1..20: note = chemically synthesized
  source 1..20: mol_type = other DNA
acaaatcacaagtcattctc

SEQ ID NO: 24442 - DNA, 20 bp, synthetic construct
  misc_feature 1..20: note = chemically synthesized
  source 1..20: mol_type = other DNA
atcacaagtcattctctgga

SEQ ID NO: 24443 - DNA, 20 bp, synthetic construct
  misc_feature 1..20: note = chemically synthesized
  source 1..20: mol_type = other DNA
tcacaagtcattctctggaa

SEQ ID NO: 24444 - DNA, 20 bp, synthetic construct
  misc_feature 1..20: note = chemically synthesized
  source 1..20: mol_type = other DNA
acaagtcattctctggaaag

SEQ ID NO: 24445 - DNA, 20 bp, synthetic construct
  misc_feature 1..20: note = chemically synthesized
  source 1..20: mol_type = other DNA
cattctctggaaaggagcca

SEQ ID NO: 24446 - DNA, 20 bp, synthetic construct
  misc_feature 1..20: note = chemically synthesized
  source 1..20: mol_type = other DNA
aaggagccatggtccaccca

SEQ ID NO: 24447 - DNA, 20 bp, synthetic construct
  misc_feature 1..20: note = chemically synthesized
  source 1..20: mol_type = other DNA
ccatggtccacccacagaac

SEQ ID NO: 24448 - DNA, 20 bp, synthetic construct
  misc_feature 1..20: note = chemically synthesized
  source 1..20: mol_type = other DNA
catggtccacccacagaaca

SEQ ID NO: 24449 - DNA, 20 bp, synthetic construct
  misc_feature 1..20: note = chemically synthesized
  source 1..20: mol_type = other DNA
aacaaggaccctgaaatccc

SEQ ID NO: 24450 - DNA, 20 bp, synthetic construct
  misc_feature 1..20: note = chemically synthesized
  source 1..20: mol_type = other DNA
gaccctgaaatccccagtac

SEQ ID NO: 24451 - DNA, 20 bp, synthetic construct
  misc_feature 1..20: note = chemically synthesized
  source 1..20: mol_type = other DNA
atccccagtaccagtctccc

SEQ ID NO: 24452 - DNA, 20 bp, synthetic construct
  misc_feature 1..20: note = chemically synthesized
  source 1..20: mol_type = other DNA
tccccagtaccagtctccct

SEQ ID NO: 24453 - DNA, 20 bp, synthetic construct
  misc_feature 1..20: note = chemically synthesized
  source 1..20: mol_type = other DNA
ccctaggatgtcttgccttt

SEQ ID NO: 24454 - DNA, 20 bp, synthetic construct
  misc_feature 1..20: note = chemically synthesized
  source 1..20: mol_type = other DNA
taggatgtcttgcctttcag

SEQ ID NO: 24455 - DNA, 20 bp, synthetic construct
  misc_feature 1..20: note = chemically synthesized
  source 1..20: mol_type = other DNA
cttgcctttcagcagctgtt

SEQ ID NO: 24456 - DNA, 20 bp, synthetic construct
  misc_feature 1..20: note = chemically synthesized
  source 1..20: mol_type = other DNA
ctgttcagtcaaatccattt

SEQ ID NO: 24457 - DNA, 20 bp, synthetic construct
  misc_feature 1..20: note = chemically synthesized
  source 1..20: mol_type = other DNA
cagtcaaatccatttcagaa

SEQ ID NO: 24458 - DNA, 20 bp, synthetic construct
  misc_feature 1..20: note = chemically synthesized
  source 1..20: mol_type = other DNA
gtcaaatccatttcagaatg

SEQ ID NO: 24459 - DNA, 20 bp, synthetic construct
  misc_feature 1..20: note = chemically synthesized
  source 1..20: mol_type = other DNA
atccatttcagaatggagaa

SEQ ID NO: 24460 - DNA, 20 bp, synthetic construct
  misc_feature 1..20: note = chemically synthesized
  source 1..20: mol_type = other DNA
gaatggagaacagcttgtca

SEQ ID NO: 24461 - DNA, 20 bp, synthetic construct
  misc_feature 1..20: note = chemically synthesized
  source 1..20: mol_type = other DNA
ctctactcttgacctgctga

SEQ ID NO: 24462 - DNA, 20 bp, synthetic construct
  misc_feature 1..20: note = chemically synthesized
  source 1..20: mol_type = other DNA
tcttgacctgctgatagaac

SEQ ID NO: 24463 - DNA, 20 bp, synthetic construct
  misc_feature 1..20: note = chemically synthesized
  source 1..20: mol_type = other DNA
cttgacctgctgatagaaca

SEQ ID NO: 24464 - DNA, 20 bp, synthetic construct
  misc_feature 1..20: note = chemically synthesized
  source 1..20: mol_type = other DNA
ttgacctgctgatagaacaa

SEQ ID NO: 24465 - DNA, 20 bp, synthetic construct
  misc_feature 1..20: note = chemically synthesized
  source 1..20: mol_type = other DNA
tgacctgctgatagaacaag

SEQ ID NO: 24466 - DNA, 20 bp, synthetic construct
  misc_feature 1..20: note = chemically synthesized
  source 1..20: mol_type = other DNA
tgctgatagaacaaggggct

SEQ ID NO: 24467 - DNA, 20 bp, synthetic construct
  misc_feature 1..20: note = chemically synthesized
  source 1..20: mol_type = other DNA
ctgatagaacaaggggcttg

SEQ ID NO: 24468 - DNA, 20 bp, synthetic construct
  misc_feature 1..20: note = chemically synthesized
  source 1..20: mol_type = other DNA
aacaaggggcttggagattt

SEQ ID NO: 24469 - DNA, 20 bp, synthetic construct
  misc_feature 1..20: note = chemically synthesized
  source 1..20: mol_type = other DNA
acaaggggcttggagatttt

SEQ ID NO: 24470 - DNA, 20 bp, synthetic construct
  misc_feature 1..20: note = chemically synthesized
  source 1..20: mol_type = other DNA
aggggcttggagattttggg

SEQ ID NO: 24471 - DNA, 20 bp, synthetic construct
  misc_feature 1..20: note = chemically synthesized
  source 1..20: mol_type = other DNA
ttggagattttgggtagata

SEQ ID NO: 24472 - DNA, 20 bp, synthetic construct
  misc_feature 1..20: note = chemically synthesized
  source 1..20: mol_type = other DNA
attttgggtagatatggaaa

SEQ ID NO: 24473 - DNA, 20 bp, synthetic construct
  misc_feature 1..20: note = chemically synthesized
  source 1..20: mol_type = other DNA
agatccctaaacatactaaa

SEQ ID NO: 24474 - DNA, 20 bp, synthetic construct
  misc_feature 1..20: note = chemically synthesized
  source 1..20: mol_type = other DNA
aaagattttttttgtacgtg

SEQ ID NO: 24475 - DNA, 20 bp, synthetic construct
  misc_feature 1..20: note = chemically synthesized
  source 1..20: mol_type = other DNA
gattttttttgtacgtgtgg

SEQ ID NO: 24476 - DNA, 20 bp, synthetic construct
  misc_feature 1..20: note = chemically synthesized
  source 1..20: mol_type = other DNA
attttttttgtacgtgtggt

SEQ ID NO: 24477 - DNA, 20 bp, synthetic construct
  misc_feature 1..20: note = chemically synthesized
  source 1..20: mol_type = other DNA
ttttttttgtacgtgtggtg

SEQ ID NO: 24478 - DNA, 20 bp, synthetic construct
  misc_feature 1..20: note = chemically synthesized
  source 1..20: mol_type = other DNA
tttttttgtacgtgtggtgg

SEQ ID NO: 24479 - DNA, 20 bp, synthetic construct
  misc_feature 1..20: note = chemically synthesized
  source 1..20: mol_type = other DNA
tttttgtacgtgtggtgggg

SEQ ID NO: 24480 - DNA, 20 bp, synthetic construct
  misc_feature 1..20: note = chemically synthesized
  source 1..20: mol_type = other DNA
tttgtacgtgtggtggggga

SEQ ID NO: 24481 - DNA, 20 bp, synthetic construct
  misc_feature 1..20: note = chemically synthesized
  source 1..20: mol_type = other DNA
ttgtacgtgtggtgggggag

SEQ ID NO: 24482 - DNA, 20 bp, synthetic construct
  misc_feature 1..20: note = chemically synthesized
  source 1..20: mol_type = other DNA
gtacgtgtggtgggggagag

SEQ ID NO: 24483 - DNA, 20 bp, synthetic construct
  misc_feature 1..20: note = chemically synthesized
  source 1..20: mol_type = other DNA
gtggtgggggagaggagaac

SEQ ID NO: 24484 - DNA, 20 bp, synthetic construct
  misc_feature 1..20: note = chemically synthesized
  source 1..20: mol_type = other DNA
ggtgggggagaggagaacca

SEQ ID NO: 24485 - DNA, 20 bp, synthetic construct
  misc_feature 1..20: note = chemically synthesized
  source 1..20: mol_type = other DNA
gggggagaggagaaccagag

SEQ ID NO: 24486 - DNA, 20 bp, synthetic construct
  misc_feature 1..20: note = chemically synthesized
  source 1..20: mol_type = other DNA
ggagaggagaaccagagcag

SEQ ID NO: 24487 - DNA, 20 bp, synthetic construct
  misc_feature 1..20: note = chemically synthesized
  source 1..20: mol_type = other DNA
gagaggagaaccagagcaga

SEQ ID NO: 24488 - DNA, 20 bp, synthetic construct
  misc_feature 1..20: note = chemically synthesized
  source 1..20: mol_type = other DNA
ggagaaccagagcagaaggt

SEQ ID NO: 24489 - DNA, 20 bp, synthetic construct
  misc_feature 1..20: note = chemically synthesized
  source 1..20: mol_type = other DNA
agaaccagagcagaaggttg

SEQ ID NO: 24490 - DNA, 20 bp, synthetic construct
  misc_feature 1..20: note = chemically synthesized
  source 1..20: mol_type = other DNA
ccagagcagaaggttggaga

SEQ ID NO: 24491 - DNA, 20 bp, synthetic construct
  misc_feature 1..20: note = chemically synthesized
  source 1..20: mol_type = other DNA
agcagaaggttggagaaaga

SEQ ID NO: 24492 - DNA, 20 bp, synthetic construct
  misc_feature 1..20: note = chemically synthesized
  source 1..20: mol_type = other DNA
gaaggttggagaaagaaagt

SEQ ID NO: 24493 - DNA, 20 bp, synthetic construct
  misc_feature 1..20: note = chemically synthesized
  source 1..20: mol_type = other DNA
aaggttggagaaagaaagtt

SEQ ID NO: 24494 - DNA, 20 bp, synthetic construct
  misc_feature 1..20: note = chemically synthesized
  source 1..20: mol_type = other DNA
aggttggagaaagaaagttg

SEQ ID NO: 24495 - DNA, 20 bp, synthetic construct
  misc_feature 1..20: note = chemically synthesized
  source 1..20: mol_type = other DNA
ttggagaaagaaagttgggg

SEQ ID NO: 24496 - DNA, 20 bp, synthetic construct
  misc_feature 1..20: note = chemically synthesized
  source 1..20: mol_type = other DNA
tggagaaagaaagttgggga

SEQ ID NO: 24497 - DNA, 20 bp, synthetic construct
  misc_feature 1..20: note = chemically synthesized
  source 1..20: mol_type = other DNA
aaatgtgcaatctcattcct

SEQ ID NO: 24498 - DNA, 20 bp, synthetic construct
  misc_feature 1..20: note = chemically synthesized
  source 1..20: mol_type = other DNA
tcagccttcttgttgaaaat

SEQ ID NO: 24499 - DNA, 20 bp, synthetic construct
  misc_feature 1..20: note = chemically synthesized
  source 1..20: mol_type = other DNA
ttcttgttgaaaatgagaat

SEQ ID NO: 24500 - DNA, 20 bp, synthetic construct
  misc_feature 1..20: note = chemically synthesized
  source 1..20: mol_type = other DNA
ttgaaaatgagaatcagatg

SEQ ID NO: 24501 - DNA, 20 bp, synthetic construct
  misc_feature 1..20: note = chemically synthesized
  source 1..20: mol_type = other DNA
tgcagcaatgtattatttcc

SEQ ID NO: 24502 - DNA, 20 bp, synthetic construct
  misc_feature 1..20: note = chemically synthesized
  source 1..20: mol_type = other DNA
cagcaatgtattatttccaa

SEQ ID NO: 24503 - DNA, 20 bp, synthetic construct
  misc_feature 1..20: note = chemically synthesized
  source 1..20: mol_type = other DNA
tattatttccaagagctatc

SEQ ID NO: 24504 - DNA, 20 bp, synthetic construct
  misc_feature 1..20: note = chemically synthesized
  source 1..20: mol_type = other DNA
ttccaagagctatctggtga

SEQ ID NO: 24505 - DNA, 20 bp, synthetic construct
  misc_feature 1..20: note = chemically synthesized
  source 1..20: mol_type = other DNA
tccaagagctatctggtgat

SEQ ID NO: 24506 - DNA, 20 bp, synthetic construct
  misc_feature 1..20: note = chemically synthesized
  source 1..20: mol_type = other DNA
atctggtgatgggatccatc

SEQ ID NO: 24507 - DNA, 20 bp, synthetic construct
  misc_feature 1..20: note = chemically synthesized
  source 1..20: mol_type = other DNA
gtgatgggatccatctggtg

SEQ ID NO: 24508 - DNA, 20 bp, synthetic construct
  misc_feature 1..20: note = chemically synthesized
  source 1..20: mol_type = other DNA
tgatgggatccatctggtga

SEQ ID NO: 24509 - DNA, 20 bp, synthetic construct
  misc_feature 1..20: note = chemically synthesized
  source 1..20: mol_type = other DNA
gatgggatccatctggtgaa

SEQ ID NO: 24510 - DNA, 20 bp, synthetic construct
  misc_feature 1..20: note = chemically synthesized
  source 1..20: mol_type = other DNA
atctggtgaagggctacttc

SEQ ID NO: 24511 - DNA, 20 bp, synthetic construct
  misc_feature 1..20: note = chemically synthesized
  source 1..20: mol_type = other DNA
tctggtgaagggctacttct

SEQ ID NO: 24512 - DNA, 20 bp, synthetic construct
  misc_feature 1..20: note = chemically synthesized
  source 1..20: mol_type = other DNA
ctggtgaagggctacttctg

SEQ ID NO: 24513 - DNA, 20 bp, synthetic construct
  misc_feature 1..20: note = chemically synthesized
  source 1..20: mol_type = other DNA
tggtgaagggctacttctgg

SEQ ID NO: 24514 - DNA, 20 bp, synthetic construct
  misc_feature 1..20: note = chemically synthesized
  source 1..20: mol_type = other DNA
agggctacttctgggggacc

SEQ ID NO: 24515 - DNA, 20 bp, synthetic construct
  misc_feature 1..20: note = chemically synthesized
  source 1..20: mol_type = other DNA
tggaattgctgtgtgacctt

SEQ ID NO: 24516 - DNA, 20 bp, synthetic construct
  misc_feature 1..20: note = chemically synthesized
  source 1..20: mol_type = other DNA
ggaattgctgtgtgaccttt

SEQ ID NO: 24517 - DNA, 20 bp, synthetic construct
  misc_feature 1..20: note = chemically synthesized
  source 1..20: mol_type = other DNA
tgggaaacacttgccttctc

SEQ ID NO: 24518 - DNA, 20 bp, synthetic construct
  misc_feature 1..20: note = chemically synthesized
  source 1..20: mol_type = other DNA
gggaaacacttgccttctct

SEQ ID NO: 24519 - DNA, 20 bp, synthetic construct
  misc_feature 1..20: note = chemically synthesized
  source 1..20: mol_type = other DNA
acacttgccttctctgggtt

SEQ ID NO: 24520 - DNA, 20 bp, synthetic construct
  misc_feature 1..20: note = chemically synthesized
  source 1..20: mol_type = other DNA
tgccttctctgggttgagct

SEQ ID NO: 24521 - DNA, 20 bp, synthetic construct
  misc_feature 1..20: note = chemically synthesized
  source 1..20: mol_type = other DNA
tctgggttgagctcagcccg

SEQ ID NO: 24522 - DNA, 20 bp, synthetic construct
  misc_feature 1..20: note = chemically synthesized
  source 1..20: mol_type = other DNA
gagctcagcccgtagttcac

SEQ ID NO: 24523 - DNA, 20 bp, synthetic construct
  misc_feature 1..20: note = chemically synthesized
  source 1..20: mol_type = other DNA
agctcagcccgtagttcaca

SEQ ID NO: 24524 - DNA, 20 bp, synthetic construct
  misc_feature 1..20: note = chemically synthesized
  source 1..20: mol_type = other DNA
gctcagcccgtagttcacaa

SEQ ID NO: 24525 - DNA, 20 bp, synthetic construct
  misc_feature 1..20: note = chemically synthesized
  source 1..20: mol_type = other DNA
ctcagcccgtagttcacaag

SEQ ID NO: 24526 - DNA, 20 bp, synthetic construct
  misc_feature 1..20: note = chemically synthesized
  source 1..20: mol_type = other DNA
tagttcacaaggggcattgc

SEQ ID NO: 24527 - DNA, 20 bp, synthetic construct
  misc_feature 1..20: note = chemically synthesized
  source 1..20: mol_type = other DNA
aggggcattgctggtattta

SEQ ID NO: 24528 - DNA, 20 bp, synthetic construct
  misc_feature 1..20: note = chemically synthesized
  source 1..20: mol_type = other DNA
tatttatagactgtgtttga

SEQ ID NO: 24529 - DNA, 20 bp, synthetic construct
  misc_feature 1..20: note = chemically synthesized
  source 1..20: mol_type = other DNA
agactgtgtttgacagtccc

SEQ ID NO: 24530 - DNA, 20 bp, synthetic construct
  misc_feature 1..20: note = chemically synthesized
  source 1..20: mol_type = other DNA
tgtttgacagtcccgagtga

SEQ ID NO: 24531 - DNA, 20 bp, synthetic construct
  misc_feature 1..20: note = chemically synthesized
  source 1..20: mol_type = other DNA
gtttgacagtcccgagtgaa

SEQ ID NO: 24532 - DNA, 20 bp, synthetic construct
  misc_feature 1..20: note = chemically synthesized
  source 1..20: mol_type = other DNA
ggcaacttcacttctcaccc

SEQ ID NO: 24533 - DNA, 20 bp, synthetic construct
  misc_feature 1..20: note = chemically synthesized
  source 1..20: mol_type = other DNA
cttcacttctcaccccagaa

SEQ ID NO: 24534 - DNA, 20 bp, synthetic construct
  misc_feature 1..20: note = chemically synthesized
  source 1..20: mol_type = other DNA
acttctcaccccagaatagc

SEQ ID NO: 24535 - DNA, 20 bp, synthetic construct
  misc_feature 1..20: note = chemically synthesized
  source 1..20: mol_type = other DNA
caagcgttgtttctcatatc

SEQ ID NO: 24536 - DNA, 20 bp, synthetic construct
  misc_feature 1..20: note = chemically synthesized
  source 1..20: mol_type = other DNA
aagcgttgtttctcatatct

SEQ ID NO: 24537 - DNA, 20 bp, synthetic construct
  misc_feature 1..20: note = chemically synthesized
  source 1..20: mol_type = other DNA
gtttctcatatctaggttgc

SEQ ID NO: 24538 - DNA, 20 bp, synthetic construct
  misc_feature 1..20: note = chemically synthesized
  source 1..20: mol_type = other DNA
tttctcatatctaggttgct

SEQ ID NO: 24539 - DNA, 20 bp, synthetic construct
  misc_feature 1..20: note = chemically synthesized
  source 1..20: mol_type = other DNA
tcatatctaggttgctggga

SEQ ID NO: 24540 - DNA, 20 bp, synthetic construct
  misc_feature 1..20: note = chemically synthesized
  source 1..20: mol_type = other DNA
aggttgctgggacagcttcc

SEQ ID NO: 24541 - DNA, 20 bp, synthetic construct
  misc_feature 1..20: note = chemically synthesized
  source 1..20: mol_type = other DNA
ggttgctgggacagcttccc

SEQ ID NO: 24542 - DNA, 20 bp, synthetic construct
  misc_feature 1..20: note = chemically synthesized
  source 1..20: mol_type = other DNA
cttcccaggaacctaatatt

SEQ ID NO: 24543 - DNA, 20 bp, synthetic construct
  misc_feature 1..20: note = chemically synthesized
  source 1..20: mol_type = other DNA
cccaggaacctaatattcag

SEQ ID NO: 24544 - DNA, 20 bp, synthetic construct
  misc_feature 1..20: note = chemically synthesized
  source 1..20: mol_type = other DNA
attcagcagcttcgtgacgt

SEQ ID NO: 24545 - DNA, 20 bp, synthetic construct
  misc_feature 1..20: note = chemically synthesized
  source 1..20: mol_type = other DNA
agcagcttcgtgacgttgga

SEQ ID NO: 24546 - DNA, 20 bp, synthetic construct
  misc_feature 1..20: note = chemically synthesized
  source 1..20: mol_type = other DNA
cagcttcgtgacgttggatg

SEQ ID NO: 24547 - DNA, 20 bp, synthetic construct
  misc_feature 1..20: note = chemically synthesized
  source 1..20: mol_type = other DNA
agcttcgtgacgttggatgg

SEQ ID NO: 24548 - DNA, 20 bp, synthetic construct
  misc_feature 1..20: note = chemically synthesized
  source 1..20: mol_type = other DNA
gcttcgtgacgttggatgga

SEQ ID NO: 24549 - DNA, 20 bp, synthetic construct
  misc_feature 1..20: note = chemically synthesized
  source 1..20: mol_type = other DNA
gagggtttttctttttaaat

SEQ ID NO: 24550 - DNA, 20 bp, synthetic construct
  misc_feature 1..20: note = chemically synthesized
  source 1..20: mol_type = other DNA
ttctttttaaatgagttgat

SEQ ID NO: 24551 - DNA, 20 bp, synthetic construct
  misc_feature 1..20: note = chemically synthesized
  source 1..20: mol_type = other DNA
ccactttacacattgttttc

SEQ ID NO: 24552 - DNA, 20 bp, synthetic construct
  misc_feature 1..20: note = chemically synthesized
  source 1..20: mol_type = other DNA
cactttacacattgttttcc

SEQ ID NO: 24553 - DNA, 20 bp, synthetic construct
  misc_feature 1..20: note = chemically synthesized
  source 1..20: mol_type = other DNA
tacacattgttttccaggtc

SEQ ID NO: 24554 - DNA, 20 bp, synthetic construct
  misc_feature 1..20: note = chemically synthesized
  source 1..20: mol_type = other DNA
acacattgttttccaggtct

SEQ ID NO: 24555 - DNA, 20 bp, synthetic construct
  misc_feature 1..20: note = chemically synthesized
  source 1..20: mol_type = other DNA
ctaggtttatttttccctta

SEQ ID NO: 24556 - DNA, 20 bp, synthetic construct
  misc_feature 1..20: note = chemically synthesized
  source 1..20: mol_type = other DNA
taggtttatttttcccttat

SEQ ID NO: 24557 - DNA, 20 bp, synthetic construct
  misc_feature 1..20: note = chemically synthesized
  source 1..20: mol_type = other DNA
gtttatttttcccttatagg

SEQ ID NO: 24558 - DNA, 20 bp, synthetic construct
  misc_feature 1..20: note = chemically synthesized
  source 1..20: mol_type = other DNA
cccttataggtagaatataa

SEQ ID NO: 24559 - DNA, 20 bp, synthetic construct
  misc_feature 1..20: note = chemically synthesized
  source 1..20: mol_type = other DNA
cttataggtagaatataaaa

SEQ ID NO: 24560 - DNA, 20 bp, synthetic construct
  misc_feature 1..20: note = chemically synthesized
  source 1..20: mol_type = other DNA
aggtagaatataaaagagta

SEQ ID NO: 24561 - DNA, 20 bp, synthetic construct
  misc_feature 1..20: note = chemically synthesized
  source 1..20: mol_type = other DNA
ggtagaatataaaagagtat

SEQ ID NO: 24562 - DNA, 20 bp, synthetic construct
  misc_feature 1..20: note = chemically synthesized
  source 1..20: mol_type = other DNA
gtagaatataaaagagtatg

SEQ ID NO: 24563 - DNA, 20 bp, synthetic construct
  misc_feature 1..20: note = chemically synthesized
  source 1..20: mol_type = other DNA
aaagagtatggggtctgccc

SEQ ID NO: 24564 - DNA, 20 bp, synthetic construct
  misc_feature 1..20: note = chemically synthesized
  source 1..20: mol_type = other DNA
ctcacaccgttctgtttttg

SEQ ID NO: 24565 - DNA, 20 bp, synthetic construct
  misc_feature 1..20: note = chemically synthesized
  source 1..20: mol_type = other DNA
caccgttctgtttttgcagt

SEQ ID NO: 24566 - DNA, 20 bp, synthetic construct
  misc_feature 1..20: note = chemically synthesized
  source 1..20: mol_type = other DNA
ctgtttttgcagttagctta

SEQ ID NO: 24567 - DNA, 20 bp, synthetic construct
  misc_feature 1..20: note = chemically synthesized
  source 1..20: mol_type = other DNA
tgtttttgcagttagcttaa

SEQ ID NO: 24568 - DNA, 20 bp, synthetic construct
  misc_feature 1..20: note = chemically synthesized
  source 1..20: mol_type = other DNA
ttgcagttagcttaaaggca

SEQ ID NO: 24569 - DNA, 20 bp, synthetic construct
  misc_feature 1..20: note = chemically synthesized
  source 1..20: mol_type = other DNA
gcagttagcttaaaggcatg

SEQ ID NO: 24570 - DNA, 20 bp, synthetic construct
  misc_feature 1..20: note = chemically synthesized
  source 1..20: mol_type = other DNA
cagttagcttaaaggcatgg

SEQ ID NO: 24571 - DNA, 20 bp, synthetic construct
  misc_feature 1..20: note = chemically synthesized
  source 1..20: mol_type = other DNA
aaaggcatggaggacattcc

SEQ ID NO: 24572 - DNA, 20 bp, synthetic construct
  misc_feature 1..20: note = chemically synthesized
  source 1..20: mol_type = other DNA
aaggcatggaggacattcct

SEQ ID NO: 24573 - DNA, 20 bp, synthetic construct
  misc_feature 1..20: note = chemically synthesized
  source 1..20: mol_type = other DNA
atggaggacattcctgggac

SEQ ID NO: 24574 - DNA, 20 bp, synthetic construct
  misc_feature 1..20: note = chemically synthesized
  source 1..20: mol_type = other DNA
ttcctgggactagcatctgc

SEQ ID NO: 24575 - DNA, 20 bp, synthetic construct
  misc_feature 1..20: note = chemically synthesized
  source 1..20: mol_type = other DNA
gggactagcatctgctagcc

SEQ ID NO: 24576 - DNA, 20 bp, synthetic construct
  misc_feature 1..20: note = chemically synthesized
  source 1..20: mol_type = other DNA
gcatctgctagccaagaacg

SEQ ID NO: 24577 - DNA, 20 bp, synthetic construct
  misc_feature 1..20: note = chemically synthesized
  source 1..20: mol_type = other DNA
ctagccaagaacgaagatga

SEQ ID NO: 24578 - DNA, 20 bp, synthetic construct
  misc_feature 1..20: note = chemically synthesized
  source 1..20: mol_type = other DNA
gaacgaagatgacagcaaca

SEQ ID NO: 24579 - DNA, 20 bp, synthetic construct
  misc_feature 1..20: note = chemically synthesized
  source 1..20: mol_type = other DNA
agatgacagcaacatggccg

SEQ ID NO: 24580 - DNA, 20 bp, synthetic construct
  misc_feature 1..20: note = chemically synthesized
  source 1..20: mol_type = other DNA
atgacagcaacatggccgta

SEQ ID NO: 24581 - DNA, 20 bp, synthetic construct
  misc_feature 1..20: note = chemically synthesized
  source 1..20: mol_type = other DNA
tgacagcaacatggccgtag

SEQ ID NO: 24582 - DNA, 20 bp, synthetic construct
  misc_feature 1..20: note = chemically synthesized
  source 1..20: mol_type = other DNA
gcaacatggccgtagaggca

SEQ ID NO: 24583 - DNA, 20 bp, synthetic construct
  misc_feature 1..20: note = chemically synthesized
  source 1..20: mol_type = other DNA
caacatggccgtagaggcat

SEQ ID NO: 24584 - DNA, 20 bp, synthetic construct
  misc_feature 1..20: note = chemically synthesized
  source 1..20: mol_type = other DNA
cgtagaggcatgggccctgc

SEQ ID NO: 24585 - DNA, 20 bp, synthetic construct
  misc_feature 1..20: note = chemically synthesized
  source 1..20: mol_type = other DNA
gtagaggcatgggccctgct

SEQ ID NO: 24586 - DNA, 20 bp, synthetic construct
  misc_feature 1..20: note = chemically synthesized
  source 1..20: mol_type = other DNA
tagaggcatgggccctgctg

SEQ ID NO: 24587 - DNA, 20 bp, synthetic construct
  misc_feature 1..20: note = chemically synthesized
  source 1..20: mol_type = other DNA
ctggggctaataacccactg

SEQ ID NO: 24588 - DNA, 20 bp, synthetic construct
  misc_feature 1..20: note = chemically synthesized
  source 1..20: mol_type = other DNA
tggggctaataacccactgc

SEQ ID NO: 24589 - DNA, 20 bp, synthetic construct
  misc_feature 1..20: note = chemically synthesized
  source 1..20: mol_type = other DNA
aacccactgcaggctatcct

SEQ ID NO: 24590 - DNA, 20 bp, synthetic construct
  misc_feature 1..20: note = chemically synthesized
  source 1..20: mol_type = other DNA
gctatccttggcattcttgc

SEQ ID NO: 24591 - DNA, 20 bp, synthetic construct
  misc_feature 1..20: note = chemically synthesized
  source 1..20: mol_type = other DNA
tatccttggcattcttgctg

SEQ ID NO: 24592 - DNA, 20 bp, synthetic construct
  misc_feature 1..20: note = chemically synthesized
  source 1..20: mol_type = other DNA
ccttggcattcttgctggag

SEQ ID NO: 24593 - DNA, 20 bp, synthetic construct
  misc_feature 1..20: note = chemically synthesized
  source 1..20: mol_type = other DNA
tggccttgctccaccctacc

SEQ ID NO: 24594 - DNA, 20 bp, synthetic construct
  misc_feature 1..20: note = chemically synthesized
  source 1..20: mol_type = other DNA
tacctggtcactgtgccgtt

SEQ ID NO: 24595 - DNA, 20 bp, synthetic construct
  misc_feature 1..20: note = chemically synthesized
  source 1..20: mol_type = other DNA
ggtcactgtgccgttcagtc

SEQ ID NO: 24596 - DNA, 20 bp, synthetic construct
  misc_feature 1..20: note = chemically synthesized
  source 1..20: mol_type = other DNA
gtcactgtgccgttcagtct

SEQ ID NO: 24597 - DNA, 20 bp, synthetic construct
  misc_feature 1..20: note = chemically synthesized
  source 1..20: mol_type = other DNA
gtgccgttcagtctgggcta

SEQ ID NO: 24598 - DNA, 20 bp, synthetic construct
  misc_feature 1..20: note = chemically synthesized
  source 1..20: mol_type = other DNA
ctcatcccattgcatttcat

SEQ ID NO: 24599 - DNA, 20 bp, synthetic construct
  misc_feature 1..20: note = chemically synthesized
  source 1..20: mol_type = other DNA
tcccattgcatttcataagc

SEQ ID NO: 24600 - DNA, 20 bp, synthetic construct
  misc_feature 1..20: note = chemically synthesized
  source 1..20: mol_type = other DNA
tttcataagccagtaactcc

SEQ ID NO: 24601 - DNA, 20 bp, synthetic construct
  misc_feature 1..20: note = chemically synthesized
  source 1..20: mol_type = other DNA
ttcataagccagtaactcca

SEQ ID NO: 24602 - DNA, 20 bp, synthetic construct
  misc_feature 1..20: note = chemically synthesized
  source 1..20: mol_type = other DNA
taagccagtaactccaaggc

SEQ ID NO: 24603 - DNA, 20 bp, synthetic construct
  misc_feature 1..20: note = chemically synthesized
  source 1..20: mol_type = other DNA
gccagacttccattacactc

SEQ ID NO: 24604 - DNA, 20 bp, synthetic construct
  misc_feature 1..20: note = chemically synthesized
  source 1..20: mol_type = other DNA
tggatgactgcatttatttg

SEQ ID NO: 24605 - DNA, 20 bp, synthetic construct
  misc_feature 1..20: note = chemically synthesized
  source 1..20: mol_type = other DNA
catttatttgcagtgacttc

SEQ ID NO: 24606 - DNA, 20 bp, synthetic construct
  misc_feature 1..20: note = chemically synthesized
  source 1..20: mol_type = other DNA
atttatttgcagtgacttca

SEQ ID NO: 24607 - DNA, 20 bp, synthetic construct
  misc_feature 1..20: note = chemically synthesized
  source 1..20: mol_type = other DNA
tatttgcagtgacttcaagg

SEQ ID NO: 24608 - DNA, 20 bp, synthetic construct
  misc_feature 1..20: note = chemically synthesized
  source 1..20: mol_type = other DNA
ttgcagtgacttcaaggaag

SEQ ID NO: 24609 - DNA, 20 bp, synthetic construct
  misc_feature 1..20: note = chemically synthesized
  source 1..20: mol_type = other DNA
tgcagtgacttcaaggaaga

SEQ ID NO: 24610 - DNA, 20 bp, synthetic construct
  misc_feature 1..20: note = chemically synthesized
  source 1..20: mol_type = other DNA
gcagtgacttcaaggaagaa

SEQ ID NO: 24611 - DNA, 20 bp, synthetic construct
  misc_feature 1..20: note = chemically synthesized
  source 1..20: mol_type = other DNA
cagtgacttcaaggaagaag

SEQ ID NO: 24612 - DNA, 20 bp, synthetic construct
  misc_feature 1..20: note = chemically synthesized
  source 1..20: mol_type = other DNA
caaggaagaaggggcctgtt

SEQ ID NO: 24613 - DNA, 20 bp, synthetic construct
  misc_feature 1..20: note = chemically synthesized
  source 1..20: mol_type = other DNA
aaggaagaaggggcctgttt

SEQ ID NO: 24614 - DNA, 20 bp, synthetic construct
  misc_feature 1..20: note = chemically synthesized
  source 1..20: mol_type = other DNA
aaggggcctgtttaggaaat

SEQ ID NO: 24615 - DNA, 20 bp, synthetic construct
  misc_feature 1..20: note = chemically synthesized
  source 1..20: mol_type = other DNA
aggggcctgtttaggaaatt

SEQ ID NO: 24616 - DNA, 20 bp, synthetic construct
  misc_feature 1..20: note = chemically synthesized
  source 1..20: mol_type = other DNA
ctgtttaggaaattaggcac

SEQ ID NO: 24617 - DNA, 20 bp, synthetic construct
  misc_feature 1..20: note = chemically synthesized
  source 1..20: mol_type = other DNA
taggaaattaggcactggcc

SEQ ID NO: 24618 - DNA, 20 bp, synthetic construct
  misc_feature 1..20: note = chemically synthesized
  source 1..20: mol_type = other DNA
ttaggcactggcctggtgaa

SEQ ID NO: 24619 - DNA, 20 bp, synthetic construct
  misc_feature 1..20: note = chemically synthesized
  source 1..20: mol_type = other DNA
taggcactggcctggtgaaa

SEQ ID NO: 24620 - DNA, 20 bp, synthetic construct
  misc_feature 1..20: note = chemically synthesized
  source 1..20: mol_type = other DNA
aaggtcaacttgcgaaattg

SEQ ID NO: 24621 - DNA, 20 bp, synthetic construct
  misc_feature 1..20: note = chemically synthesized
  source 1..20: mol_type = other DNA
acttgcgaaattgtggctgc

SEQ ID NO: 24622 - DNA, 20 bp, synthetic construct
  misc_feature 1..20: note = chemically synthesized
  source 1..20: mol_type = other DNA
cttgcgaaattgtggctgca

SEQ ID NO: 24623 - DNA, 20 bp, synthetic construct
  misc_feature 1..20: note = chemically synthesized
  source 1..20: mol_type = other DNA
ttgcgaaattgtggctgcaa

SEQ ID NO: 24624 - DNA, 20 bp, synthetic construct
  misc_feature 1..20: note = chemically synthesized
  source 1..20: mol_type = other DNA
aagggatgcctttttcttcc

SEQ ID NO: 24625 - DNA, 20 bp, synthetic construct
  misc_feature 1..20: note = chemically synthesized
  source 1..20: mol_type = other DNA
agggatgcctttttcttcca

SEQ ID NO: 24626 - DNA, 20 bp, synthetic construct
  misc_feature 1..20: note = chemically synthesized
  source 1..20: mol_type = other DNA
tttcttccaaggctatgcct

SEQ ID NO: 24627 - DNA, 20 bp, synthetic construct
  misc_feature 1..20: note = chemically synthesized
  source 1..20: mol_type = other DNA
cttccaaggctatgccttgg

SEQ ID NO: 24628 - DNA, 20 bp, synthetic construct
  misc_feature 1..20: note = chemically synthesized
  source 1..20: mol_type = other DNA
ccaaggctatgccttggtgg

SEQ ID NO: 24629 - DNA, 20 bp, synthetic construct
  misc_feature 1..20: note = chemically synthesized
  source 1..20: mol_type = other DNA
aggctatgccttggtggtgg

SEQ ID NO: 24630 - DNA, 20 bp, synthetic construct
  misc_feature 1..20: note = chemically synthesized
  source 1..20: mol_type = other DNA
tatgccttggtggtggtggt

SEQ ID NO: 24631 - DNA, 20 bp, synthetic construct
  misc_feature 1..20: note = chemically synthesized
  source 1..20: mol_type = other DNA
atgccttggtggtggtggtg

SEQ ID NO: 24632 - DNA, 20 bp, synthetic construct
  misc_feature 1..20: note = chemically synthesized
  source 1..20: mol_type = other DNA
tgccttggtggtggtggtga

SEQ ID NO: 24633 - DNA, 20 bp, synthetic construct
  misc_feature 1..20: note = chemically synthesized
  source 1..20: mol_type = other DNA
tttaaatactgttttttgtt

SEQ ID NO: 24634 - DNA, 20 bp, synthetic construct
  misc_feature 1..20: note = chemically synthesized
  source 1..20: mol_type = other DNA
aatactgttttttgtttggt

SEQ ID NO: 24635 - DNA, 20 bp, synthetic construct
  misc_feature 1..20: note = chemically synthesized
  source 1..20: mol_type = other DNA
ctgttttttgtttggttggt

SEQ ID NO: 24636 - DNA, 20 bp, synthetic construct
  misc_feature 1..20: note = chemically synthesized
  source 1..20: mol_type = other DNA
ggtttttttttttttttttt

SEQ ID NO: 24637 - DNA, 20 bp, synthetic construct
  misc_feature 1..20: note = chemically synthesized
  source 1..20: mol_type = other DNA
tttttttttaagtcctaaac

SEQ ID NO: 24638 - DNA, 20 bp, synthetic construct
  misc_feature 1..20: note = chemically synthesized
  source 1..20: mol_type = other DNA
taagtcctaaacaagtgcca

SEQ ID NO: 24639 - DNA, 20 bp, synthetic construct
  misc_feature 1..20: note = chemically synthesized
  source 1..20: mol_type = other DNA
agtcctaaacaagtgccaca

SEQ ID NO: 24640 - DNA, 20 bp, synthetic construct
  misc_feature 1..20: note = chemically synthesized
  source 1..20: mol_type = other DNA
gtcctaaacaagtgccacag

SEQ ID NO: 24641 - DNA, 20 bp, synthetic construct
  misc_feature 1..20: note = chemically synthesized
  source 1..20: mol_type = other DNA
tgccacagaggatttctttt

SEQ ID NO: 24642 - DNA, 20 bp, synthetic construct
  misc_feature 1..20: note = chemically synthesized
  source 1..20: mol_type = other DNA
ggcttgaacttgataaaatt

SEQ ID NO: 24643 - DNA, 20 bp, synthetic construct
  misc_feature 1..20: note = chemically synthesized
  source 1..20: mol_type = other DNA
cttgaacttgataaaatttg

SEQ ID NO: 24644 - DNA, 20 bp, synthetic construct
  misc_feature 1..20: note = chemically synthesized
  source 1..20: mol_type = other DNA
tgataaaatttggagcacac

SEQ ID NO: 24645 - DNA, 20 bp, synthetic construct
  misc_feature 1..20: note = chemically synthesized
  source 1..20: mol_type = other DNA
agcacacaagtttacacaca

SEQ ID NO: 24646 - DNA, 20 bp, synthetic construct
  misc_feature 1..20: note = chemically synthesized
  source 1..20: mol_type = other DNA
caccccttctcccatctccc

SEQ ID NO: 24647 - DNA, 20 bp, synthetic construct
  misc_feature 1..20: note = chemically synthesized
  source 1..20: mol_type = other DNA
ctcccatctccccagacccc

SEQ ID NO: 24648 - DNA, 20 bp, synthetic construct
  misc_feature 1..20: note = chemically synthesized
  source 1..20: mol_type = other DNA
cagcacatatgttccataat

SEQ ID NO: 24649 - DNA, 20 bp, synthetic construct
  misc_feature 1..20: note = chemically synthesized
  source 1..20: mol_type = other DNA
agcacatatgttccataatg

SEQ ID NO: 24650 - DNA, 20 bp, synthetic construct
  misc_feature 1..20: note = chemically synthesized
  source 1..20: mol_type = other DNA
ttccataatgaggtgttcct

SEQ ID NO: 24651 - DNA, 20 bp, synthetic construct
  misc_feature 1..20: note = chemically synthesized
  source 1..20: mol_type = other DNA
ataatgaggtgttcctaagt

SEQ ID NO: 24652 - DNA, 20 bp, synthetic construct
  misc_feature 1..20: note = chemically synthesized
  source 1..20: mol_type = other DNA
agtgagaattcccataattt

SEQ ID NO: 24653 - DNA, 20 bp, synthetic construct
  misc_feature 1..20: note = chemically synthesized
  source 1..20: mol_type = other DNA
gtgagaattcccataatttg

SEQ ID NO: 24654 - DNA, 20 bp, synthetic construct
  misc_feature 1..20: note = chemically synthesized
  source 1..20: mol_type = other DNA
cataatttgaggttttatac

SEQ ID NO: 24655 - DNA, 20 bp, synthetic construct
  misc_feature 1..20: note = chemically synthesized
  source 1..20: mol_type = other DNA
tttgaggttttatactggaa

SEQ ID NO: 24656 - DNA, 20 bp, synthetic construct
  misc_feature 1..20: note = chemically synthesized
  source 1..20: mol_type = other DNA
ttttatactggaatggtgat

SEQ ID NO: 24657 - DNA, 20 bp, synthetic construct
  misc_feature 1..20: note = chemically synthesized
  source 1..20: mol_type = other DNA
tttatactggaatggtgata

SEQ ID NO: 24658 - DNA, 20 bp, synthetic construct
  misc_feature 1..20: note = chemically synthesized
  source 1..20: mol_type = other DNA
ttatactggaatggtgataa

SEQ ID NO: 24659 - DNA, 20 bp, synthetic construct
  misc_feature 1..20: note = chemically synthesized
  source 1..20: mol_type = other DNA
tactggaatggtgataaggg

SEQ ID NO: 24660 - DNA, 20 bp, synthetic construct
  misc_feature 1..20: note = chemically synthesized
  source 1..20: mol_type = other DNA
actggaatggtgataagggc

SEQ ID NO: 24661 - DNA, 20 bp, synthetic construct
  misc_feature 1..20: note = chemically synthesized
  source 1..20: mol_type = other DNA
gtgataagggcaggaaacct

SEQ ID NO: 24662 - DNA, 20 bp, synthetic construct
  misc_feature 1..20: note = chemically synthesized
  source 1..20: mol_type = other DNA
gcccatgtgcattttttctc

SEQ ID NO: 24663 - DNA, 20 bp, synthetic construct
  misc_feature 1..20: note = chemically synthesized
  source 1..20: mol_type = other DNA
catgtgcattttttctcgag

SEQ ID NO: 24664 - DNA, 20 bp, synthetic construct
  misc_feature 1..20: note = chemically synthesized
  source 1..20: mol_type = other DNA
tccaaattcccccttctctt

SEQ ID NO: 24665 - DNA, 20 bp, synthetic construct
  misc_feature 1..20: note = chemically synthesized
  source 1..20: mol_type = other DNA
tctcttaagaaaaaacacgt

SEQ ID NO: 24666 - DNA, 20 bp, synthetic construct
  misc_feature 1..20: note = chemically synthesized
  source 1..20: mol_type = other DNA
aaaaaacacgtgagccatgt

SEQ ID NO: 24667 - DNA, 20 bp, synthetic construct
  misc_feature 1..20: note = chemically synthesized
  source 1..20: mol_type = other DNA
aaacacgtgagccatgttgg

SEQ ID NO: 24668 - DNA, 20 bp, synthetic construct
  misc_feature 1..20: note = chemically synthesized
  source 1..20: mol_type = other DNA
cgtgagccatgttggaagta

SEQ ID NO: 24669 - DNA, 20 bp, synthetic construct
  misc_feature 1..20: note = chemically synthesized
  source 1..20: mol_type = other DNA
tggaagtacagccttgacct

SEQ ID NO: 24670 - DNA, 20 bp, synthetic construct
  misc_feature 1..20: note = chemically synthesized
  source 1..20: mol_type = other DNA
agccttgacctcagcctcac

SEQ ID NO: 24671 - DNA, 20 bp, synthetic construct
  misc_feature 1..20: note = chemically synthesized
  source 1..20: mol_type = other DNA
gccttgacctcagcctcacc

SEQ ID NO: 24672 - DNA, 20 bp, synthetic construct
  misc_feature 1..20: note = chemically synthesized
  source 1..20: mol_type = other DNA
gacctcagcctcaccaggtg

SEQ ID NO: 24673 - DNA, 20 bp, synthetic construct
  misc_feature 1..20: note = chemically synthesized
  source 1..20: mol_type = other DNA
caccaggtgcggctgctgac

SEQ ID NO: 24674 - DNA, 20 bp, synthetic construct
  misc_feature 1..20: note = chemically synthesized
  source 1..20: mol_type = other DNA
tgctgaccggtgcaaaaaaa

SEQ ID NO: 24675 - DNA, 20 bp, synthetic construct
  misc_feature 1..20: note = chemically synthesized
  source 1..20: mol_type = other DNA
gctgaccggtgcaaaaaaat

SEQ ID NO: 24676 - DNA, 20 bp, synthetic construct
  misc_feature 1..20: note = chemically synthesized
  source 1..20: mol_type = other DNA
aaataggaaatattatttaa

SEQ ID NO: 24677 - DNA, 20 bp, synthetic construct
  misc_feature 1..20: note = chemically synthesized
  source 1..20: mol_type = other DNA
aataggaaatattatttaaa

SEQ ID NO: 24678 - DNA, 20 bp, synthetic construct
  misc_feature 1..20: note = chemically synthesized
  source 1..20: mol_type = other DNA
aggaaatattatttaaaagg

SEQ ID NO: 24679 - DNA, 20 bp, synthetic construct
  misc_feature 1..20: note = chemically synthesized
  source 1..20: mol_type = other DNA
ggaaatattatttaaaaggc

SEQ ID NO: 24680 - DNA, 20 bp, synthetic construct
  misc_feature 1..20: note = chemically synthesized
  source 1..20: mol_type = other DNA
gaaatattatttaaaaggca

SEQ ID NO: 24681 - DNA, 20 bp, synthetic construct
  misc_feature 1..20: note = chemically synthesized
  source 1..20: mol_type = other DNA
aatattatttaaaaggcagg

SEQ ID NO: 24682 - DNA, 20 bp, synthetic construct
  misc_feature 1..20: note = chemically synthesized
  source 1..20: mol_type = other DNA
atattatttaaaaggcaggg

SEQ ID NO: 24683 - DNA, 20 bp, synthetic construct
  misc_feature 1..20: note = chemically synthesized
  source 1..20: mol_type = other DNA
tattatttaaaaggcaggga

SEQ ID NO: 24684 - DNA, 20 bp, synthetic construct
  misc_feature 1..20: note = chemically synthesized
  source 1..20: mol_type = other DNA
attatttaaaaggcagggag

SEQ ID NO: 24685 - DNA, 20 bp, synthetic construct
  misc_feature 1..20: note = chemically synthesized
  source 1..20: mol_type = other DNA
tatttaaaaggcagggaggg

SEQ ID NO: 24686 - DNA, 20 bp, synthetic construct
  misc_feature 1..20: note = chemically synthesized
  source 1..20: mol_type = other DNA
tttaaaaggcagggagggga

SEQ ID NO: 24687 - DNA, 20 bp, synthetic construct
  misc_feature 1..20: note = chemically synthesized
  source 1..20: mol_type = other DNA
ttccacaatcactgctgttt

SEQ ID NO: 24688 - DNA, 20 bp, synthetic construct
  misc_feature 1..20: note = chemically synthesized
  source 1..20: mol_type = other DNA
atcactgctgtttcagtgaa

SEQ ID NO: 24689 - DNA, 20 bp, synthetic construct
  misc_feature 1..20: note = chemically synthesized
  source 1..20: mol_type = other DNA
tgtttcagtgaaaagcaacc

SEQ ID NO: 24690 - DNA, 20 bp, synthetic construct
  misc_feature 1..20: note = chemically synthesized
  source 1..20: mol_type = other DNA
gtaaaacctacttccctttc

SEQ ID NO: 24691 - DNA, 20 bp, synthetic construct
  misc_feature 1..20: note = chemically synthesized
  source 1..20: mol_type = other DNA
acttccctttctggtgaatg

SEQ ID NO: 24692 - DNA, 20 bp, synthetic construct
  misc_feature 1..20: note = chemically synthesized
  source 1..20: mol_type = other DNA
gtgaatgtggctgtttttga

SEQ ID NO: 24693 - DNA, 20 bp, synthetic construct
  misc_feature 1..20: note = chemically synthesized
  source 1..20: mol_type = other DNA
aatgtggctgtttttgacag

SEQ ID NO: 24694 - DNA, 20 bp, synthetic construct
  misc_feature 1..20: note = chemically synthesized
  source 1..20: mol_type = other DNA
tgtggctgtttttgacagca

SEQ ID NO: 24695 - DNA, 20 bp, synthetic construct
  misc_feature 1..20: note = chemically synthesized
  source 1..20: mol_type = other DNA
gtggctgtttttgacagcag

SEQ ID NO: 24696 - DNA, 20 bp, synthetic construct
  misc_feature 1..20: note = chemically synthesized
  source 1..20: mol_type = other DNA
tttttgacagcagaggaccc

SEQ ID NO: 24697 - DNA, 20 bp, synthetic construct
  misc_feature 1..20: note = chemically synthesized
  source 1..20: mol_type = other DNA
agcagaggaccccagttgtt

SEQ ID NO: 24698 - DNA, 20 bp, synthetic construct
  misc_feature 1..20: note = chemically synthesized
  source 1..20: mol_type = other DNA
gcagaggaccccagttgttg

SEQ ID NO: 24699 - DNA, 20 bp, synthetic construct
  misc_feature 1..20: note = chemically synthesized
  source 1..20: mol_type = other DNA
accccagttgttgaggacta

SEQ ID NO: 24700 - DNA, 20 bp, synthetic construct
  misc_feature 1..20: note = chemically synthesized
  source 1..20: mol_type = other DNA
cccagttgttgaggactaaa

SEQ ID NO: 24701 - DNA, 20 bp, synthetic construct
  misc_feature 1..20: note = chemically synthesized
  source 1..20: mol_type = other DNA
cagttgttgaggactaaaga

SEQ ID NO: 24702 - DNA, 20 bp, synthetic construct
  misc_feature 1..20: note = chemically synthesized
  source 1..20: mol_type = other DNA
gttgttgaggactaaagaga

SEQ ID NO: 24703 - DNA, 20 bp, synthetic construct
  misc_feature 1..20: note = chemically synthesized
  source 1..20: mol_type = other DNA
gttgaggactaaagagagag

SEQ ID NO: 24704 - DNA, 20 bp, synthetic construct
  misc_feature 1..20: note = chemically synthesized
  source 1..20: mol_type = other DNA
ggactaaagagagagaagat

SEQ ID NO: 24705 - DNA, 20 bp, synthetic construct
  misc_feature 1..20: note = chemically synthesized
  source 1..20: mol_type = other DNA
taaagagagagaagatgaga

SEQ ID NO: 24706 - DNA, 20 bp, synthetic construct
  misc_feature 1..20: note = chemically synthesized
  source 1..20: mol_type = other DNA
agagagagaagatgagaaag

SEQ ID NO: 24707 - DNA, 20 bp, synthetic construct
  misc_feature 1..20: note = chemically synthesized
  source 1..20: mol_type = other DNA
gaagatgagaaagaagatgc

SEQ ID NO: 24708 - DNA, 20 bp, synthetic construct
  misc_feature 1..20: note = chemically synthesized
  source 1..20: mol_type = other DNA
gagaaagaagatgctggaaa

SEQ ID NO: 24709 - DNA, 20 bp, synthetic construct
  misc_feature 1..20: note = chemically synthesized
  source 1..20: mol_type = other DNA
gaaagaagatgctggaaaca

SEQ ID NO: 24710 - DNA, 20 bp, synthetic construct
  misc_feature 1..20: note = chemically synthesized
  source 1..20: mol_type = other DNA
aaagaagatgctggaaacag

SEQ ID NO: 24711 - DNA, 20 bp, synthetic construct
  misc_feature 1..20: note = chemically synthesized
  source 1..20: mol_type = other DNA
aagatgctggaaacagaggt

SEQ ID NO: 24712 - DNA, 20 bp, synthetic construct
  misc_feature 1..20: note = chemically synthesized
  source 1..20: mol_type = other DNA
gatgctggaaacagaggttg

SEQ ID NO: 24713 - DNA, 20 bp, synthetic construct
  misc_feature 1..20: note = chemically synthesized
  source 1..20: mol_type = other DNA
ctggaaacagaggttggaga

SEQ ID NO: 24714 - DNA, 20 bp, synthetic construct
  misc_feature 1..20: note = chemically synthesized
  source 1..20: mol_type = other DNA
ggaaacagaggttggagaaa

SEQ ID NO: 24715 - DNA, 20 bp, synthetic construct
  misc_feature 1..20: note = chemically synthesized
  source 1..20: mol_type = other DNA
aaacagaggttggagaaaga

SEQ ID NO: 24716 - DNA, 20 bp, synthetic construct
  misc_feature 1..20: note = chemically synthesized
  source 1..20: mol_type = other DNA
aacagaggttggagaaagag

SEQ ID NO: 24717 - DNA, 20 bp, synthetic construct
  misc_feature 1..20: note = chemically synthesized
  source 1..20: mol_type = other DNA
gaggttggagaaagagaggc

SEQ ID NO: 24718 - DNA, 20 bp, synthetic construct
  misc_feature 1..20: note = chemically synthesized
  source 1..20: mol_type = other DNA
aggttggagaaagagaggca

SEQ ID NO: 24719 - DNA, 20 bp, synthetic construct
  misc_feature 1..20: note = chemically synthesized
  source 1..20: mol_type = other DNA
ttggagaaagagaggcaagg

SEQ ID NO: 24720 - DNA, 20 bp, synthetic construct
  misc_feature 1..20: note = chemically synthesized
  source 1..20: mol_type = other DNA
gagaaagagaggcaaggaag

SEQ ID NO: 24721 - DNA, 20 bp, synthetic construct
  misc_feature 1..20: note = chemically synthesized
  source 1..20: mol_type = other DNA
aagagaggcaaggaagtaga

SEQ ID NO: 24722 - DNA, 20 bp, synthetic construct
  misc_feature 1..20: note = chemically synthesized
  source 1..20: mol_type = other DNA
agagaggcaaggaagtagaa

SEQ ID NO: 24723 - DNA, 20 bp, synthetic construct
  misc_feature 1..20: note = chemically synthesized
  source 1..20: mol_type = other DNA
agaggcaaggaagtagaaag

SEQ ID NO: 24724 - DNA, 20 bp, synthetic construct
  misc_feature 1..20: note = chemically synthesized
  source 1..20: mol_type = other DNA
gaggcaaggaagtagaaagg

SEQ ID NO: 24725 - DNA, 20 bp, synthetic construct
  misc_feature 1..20: note = chemically synthesized
  source 1..20: mol_type = other DNA
aaggaagtagaaaggaggaa

SEQ ID NO: 24726 - DNA, 20 bp, synthetic construct
  misc_feature 1..20: note = chemically synthesized
  source 1..20: mol_type = other DNA
aggaagtagaaaggaggaaa

SEQ ID NO: 24727 - DNA, 20 bp, synthetic construct
  misc_feature 1..20: note = chemically synthesized
  source 1..20: mol_type = other DNA
ggaagtagaaaggaggaaaa

SEQ ID NO: 24728 - DNA, 20 bp, synthetic construct
  misc_feature 1..20: note = chemically synthesized
  source 1..20: mol_type = other DNA
gaagtagaaaggaggaaaag

SEQ ID NO: 24729 - DNA, 20 bp, synthetic construct
  misc_feature 1..20: note = chemically synthesized
  source 1..20: mol_type = other DNA
gtagaaaggaggaaaagggg

SEQ ID NO: 24730 - DNA, 20 bp, synthetic construct
  misc_feature 1..20: note = chemically synthesized
  source 1..20: mol_type = other DNA
agaaaggaggaaaaggggaa

SEQ ID NO: 24731 - DNA, 20 bp, synthetic construct
  misc_feature 1..20: note = chemically synthesized
  source 1..20: mol_type = other DNA
aaaggaggaaaaggggaaga

SEQ ID NO: 24732 - DNA, 20 bp, synthetic construct
  misc_feature 1..20: note = chemically synthesized
  source 1..20: mol_type = other DNA
aaggaggaaaaggggaagag

SEQ ID NO: 24733 - DNA, 20 bp, synthetic construct
  misc_feature 1..20: note = chemically synthesized
  source 1..20: mol_type = other DNA
ggaggaaaaggggaagagag

SEQ ID NO: 24734 - DNA, 20 bp, synthetic construct
  misc_feature 1..20: note = chemically synthesized
  source 1..20: mol_type = other DNA
gaggaaaaggggaagagagg

SEQ ID NO: 24735 - DNA, 20 bp, synthetic construct
  misc_feature 1..20: note = chemically synthesized
  source 1..20: mol_type = other DNA
gaaaaggggaagagaggagg

SEQ ID NO: 24736 - DNA, 20 bp, synthetic construct
  misc_feature 1..20: note = chemically synthesized
  source 1..20: mol_type = other DNA
aaaaggggaagagaggaggc

SEQ ID NO: 24737 - DNA, 20 bp, synthetic construct
  misc_feature 1..20: note = chemically synthesized
  source 1..20: mol_type = other DNA
aaaggggaagagaggaggca

SEQ ID NO: 24738 - DNA, 20 bp, synthetic construct
  misc_feature 1..20: note = chemically synthesized
  source 1..20: mol_type = other DNA
aaggggaagagaggaggcag

SEQ ID NO: 24739 - DNA, 20 bp, synthetic construct
  misc_feature 1..20: note = chemically synthesized
  source 1..20: mol_type = other DNA
aggggaagagaggaggcagg

SEQ ID NO: 24740 - DNA, 20 bp, synthetic construct
  misc_feature 1..20: note = chemically synthesized
  source 1..20: mol_type = other DNA
gggaagagaggaggcagggg

SEQ ID NO: 24741 - DNA, 20 bp, synthetic construct
  misc_feature 1..20: note = chemically synthesized
  source 1..20: mol_type = other DNA
gaagagaggaggcaggggga

SEQ ID NO: 24742 - DNA, 20 bp, synthetic construct
  misc_feature 1..20: note = chemically synthesized
  source 1..20: mol_type = other DNA
agagaggaggcagggggaga

SEQ ID NO: 24743 - DNA, 20 bp, synthetic construct
  misc_feature 1..20: note = chemically synthesized
  source 1..20: mol_type = other DNA
gagaggaggcagggggagag

SEQ ID NO: 24744 - DNA, 20 bp, synthetic construct
  misc_feature 1..20: note = chemically synthesized
  source 1..20: mol_type = other DNA
agaggaggcagggggagaga

SEQ ID NO: 24745 - DNA, 20 bp, synthetic construct
  misc_feature 1..20: note = chemically synthesized
  source 1..20: mol_type = other DNA
gaggcagggggagagagggt

SEQ ID NO: 24746 - DNA, 20 bp, synthetic construct
  misc_feature 1..20: note = chemically synthesized
  source 1..20: mol_type = other DNA
gggagagagggttggaattc

SEQ ID NO: 24747 - DNA, 20 bp, synthetic construct
  misc_feature 1..20: note = chemically synthesized
  source 1..20: mol_type = other DNA
gttggaattcgagctatttt

SEQ ID NO: 24748 - DNA, 20 bp, synthetic construct
  misc_feature 1..20: note = chemically synthesized
  source 1..20: mol_type = other DNA
agctattttcagctgaatgt

SEQ ID NO: 24749 - DNA, 20 bp, synthetic construct
  misc_feature 1..20: note = chemically synthesized
  source 1..20: mol_type = other DNA
ttttcagctgaatgtgagtg

SEQ ID NO: 24750 - DNA, 20 bp, synthetic construct
  misc_feature 1..20: note = chemically synthesized
  source 1..20: mol_type = other DNA
aatgtgagtgcagatttcat

SEQ ID NO: 24751 - DNA, 20 bp, synthetic construct
  misc_feature 1..20: note = chemically synthesized
  source 1..20: mol_type = other DNA
atgtgagtgcagatttcatc

SEQ ID NO: 24752 - DNA, 20 bp, synthetic construct
  misc_feature 1..20: note = chemically synthesized
  source 1..20: mol_type = other DNA
tgcagatttcatcaggcttc

SEQ ID NO: 24753 - DNA, 20 bp, synthetic construct
  misc_feature 1..20: note = chemically synthesized
  source 1..20: mol_type = other DNA
gcagatttcatcaggcttct

SEQ ID NO: 24754 - DNA, 20 bp, synthetic construct
  misc_feature 1..20: note = chemically synthesized
  source 1..20: mol_type = other DNA
ttcatcaggcttctgggcta

SEQ ID NO: 24755 - DNA, 20 bp, synthetic construct
  misc_feature 1..20: note = chemically synthesized
  source 1..20: mol_type = other DNA
tcatcaggcttctgggctac

SEQ ID NO: 24756 - DNA, 20 bp, synthetic construct
  misc_feature 1..20: note = chemically synthesized
  source 1..20: mol_type = other DNA
catcaggcttctgggctaca

SEQ ID NO: 24757 - DNA, 20 bp, synthetic construct
  misc_feature 1..20: note = chemically synthesized
  source 1..20: mol_type = other DNA
acagggaaactgactgtgtg

SEQ ID NO: 24758 - DNA, 20 bp, synthetic construct
  misc_feature 1..20: note = chemically synthesized
  source 1..20: mol_type = other DNA
cttgcgtgtaacttcctgtg

SEQ ID NO: 24759 - DNA, 20 bp, synthetic construct
  misc_feature 1..20: note = chemically synthesized
  source 1..20: mol_type = other DNA
gcgtgtaacttcctgtgaag

SEQ ID NO: 24760 - DNA, 20 bp, synthetic construct
  misc_feature 1..20: note = chemically synthesized
  source 1..20: mol_type = other DNA
aacttcctgtgaagcagccg

SEQ ID NO: 24761 - DNA, 20 bp, synthetic construct
  misc_feature 1..20: note = chemically synthesized
  source 1..20: mol_type = other DNA
actgcattttctgacactgt

SEQ ID NO: 24762 - DNA, 20 bp, synthetic construct
  misc_feature 1..20: note = chemically synthesized
  source 1..20: mol_type = other DNA
tgcattttctgacactgtca

SEQ ID NO: 24763 - DNA, 20 bp, synthetic construct
  misc_feature 1..20: note = chemically synthesized
  source 1..20: mol_type = other DNA
tttctgacactgtcagagtc

SEQ ID NO: 24764 - DNA, 20 bp, synthetic construct
  misc_feature 1..20: note = chemically synthesized
  source 1..20: mol_type = other DNA
cagagtctggacaaccctgc

SEQ ID NO: 24765 - DNA, 20 bp, synthetic construct
  misc_feature 1..20: note = chemically synthesized
  source 1..20: mol_type = other DNA
tggacaaccctgccagctcc

SEQ ID NO: 24766 - DNA, 20 bp, synthetic construct
  misc_feature 1..20: note = chemically synthesized
  source 1..20: mol_type = other DNA
acaaccctgccagctcctag

SEQ ID NO: 24767 - DNA, 20 bp, synthetic construct
  misc_feature 1..20: note = chemically synthesized
  source 1..20: mol_type = other DNA
caaccctgccagctcctaga

SEQ ID NO: 24768 - DNA, 20 bp, synthetic construct
  misc_feature 1..20: note = chemically synthesized
  source 1..20: mol_type = other DNA
aaccctgccagctcctagaa

SEQ ID NO: 24769 - DNA, 20 bp, synthetic construct
  misc_feature 1..20: note = chemically synthesized
  source 1..20: mol_type = other DNA
gggcaacccaacaactgtca

SEQ ID NO: 24770 - DNA, 20 bp, synthetic construct
  misc_feature 1..20: note = chemically synthesized
  source 1..20: mol_type = other DNA
cccaacaactgtcacagacg

SEQ ID NO: 24771 - DNA, 20 bp, synthetic construct
  misc_feature 1..20: note = chemically synthesized
  source 1..20: mol_type = other DNA
tgtcacagacgaagcatcaa

SEQ ID NO: 24772 - DNA, 20 bp, synthetic construct
  misc_feature 1..20: note = chemically synthesized
  source 1..20: mol_type = other DNA
agacgaagcatcaaaagcat

SEQ ID NO: 24773 - DNA, 20 bp, synthetic construct
  misc_feature 1..20: note = chemically synthesized
  source 1..20: mol_type = other DNA
tcaaaagcatgagctgtcga

SEQ ID NO: 24774 - DNA, 20 bp, synthetic construct
  misc_feature 1..20: note = chemically synthesized
  source 1..20: mol_type = other DNA
tcgatagtgacctgcatttg

SEQ ID NO: 24775 - DNA, 20 bp, synthetic construct
  misc_feature 1..20: note = chemically synthesized
  source 1..20: mol_type = other DNA
cctgcatttgcagaaaatct

SEQ ID NO: 24776 - DNA, 20 bp, synthetic construct
  misc_feature 1..20: note = chemically synthesized
  source 1..20: mol_type = other DNA
ctgcatttgcagaaaatctg

SEQ ID NO: 24777 - DNA, 20 bp, synthetic construct
  misc_feature 1..20: note = chemically synthesized
  source 1..20: mol_type = other DNA
tgcatttgcagaaaatctga

SEQ ID NO: 24778 - DNA, 20 bp, synthetic construct
  misc_feature 1..20: note = chemically synthesized
  source 1..20: mol_type = other DNA
tctgagggctttctaattaa

SEQ ID NO: 24779 - DNA, 20 bp, synthetic construct
  misc_feature 1..20: note = chemically synthesized
  source 1..20: mol_type = other DNA
tgagggctttctaattaaca

SEQ ID NO: 24780 - DNA, 20 bp, synthetic construct
  misc_feature 1..20: note = chemically synthesized
  source 1..20: mol_type = other DNA
gagggctttctaattaacag

SEQ ID NO: 24781 - DNA, 20 bp, synthetic construct
  misc_feature 1..20: note = chemically synthesized
  source 1..20: mol_type = other DNA
gggctttctaattaacagag

SEQ ID NO: 24782 - DNA, 20 bp, synthetic construct
  misc_feature 1..20: note = chemically synthesized
  source 1..20: mol_type = other DNA
ttaacagaggagctctaaat

SEQ ID NO: 24783 - DNA, 20 bp, synthetic construct
  misc_feature 1..20: note = chemically synthesized
  source 1..20: mol_type = other DNA
aacagaggagctctaaatta

SEQ ID NO: 24784 - DNA, 20 bp, synthetic construct
  misc_feature 1..20: note = chemically synthesized
  source 1..20: mol_type = other DNA
aggagctctaaattagagta

SEQ ID NO: 24785 - DNA, 20 bp, synthetic construct
  misc_feature 1..20: note = chemically synthesized
  source 1..20: mol_type = other DNA
ttagagtaaagctgttcgac

SEQ ID NO: 24786 - DNA, 20 bp, synthetic construct
  misc_feature 1..20: note = chemically synthesized
  source 1..20: mol_type = other DNA
tcgacaagacccctcatacg

SEQ ID NO: 24787 - DNA, 20 bp, synthetic construct
  misc_feature 1..20: note = chemically synthesized
  source 1..20: mol_type = other DNA
caagacccctcatacgcggt

SEQ ID NO: 24788 - DNA, 20 bp, synthetic construct
  misc_feature 1..20: note = chemically synthesized
  source 1..20: mol_type = other DNA
acgcggtaagtgtcacaatg

SEQ ID NO: 24789 - DNA, 20 bp, synthetic construct
  misc_feature 1..20: note = chemically synthesized
  source 1..20: mol_type = other DNA
agataatcattacatctaac

SEQ ID NO: 24790 - DNA, 20 bp, synthetic construct
  misc_feature 1..20: note = chemically synthesized
  source 1..20: mol_type = other DNA
aacaagcttctgatttttaa

SEQ ID NO: 24791 - DNA, 20 bp, synthetic construct
  misc_feature 1..20: note = chemically synthesized
  source 1..20: mol_type = other DNA
aagcttctgatttttaacag

SEQ ID NO: 24792 - DNA, 20 bp, synthetic construct
  misc_feature 1..20: note = chemically synthesized
  source 1..20: mol_type = other DNA
tgatttttaacagaagctat

SEQ ID NO: 24793 - DNA, 20 bp, synthetic construct
  misc_feature 1..20: note = chemically synthesized
  source 1..20: mol_type = other DNA
tgagaccaactcatttataa

SEQ ID NO: 24794 - DNA, 20 bp, synthetic construct
  misc_feature 1..20: note = chemically synthesized
  source 1..20: mol_type = other DNA
ccaactcatttataatggtt

SEQ ID NO: 24795 - DNA, 20 bp, synthetic construct
  misc_feature 1..20: note = chemically synthesized
  source 1..20: mol_type = other DNA
tttataatggttcagtttca

SEQ ID NO: 24796 - DNA, 20 bp, synthetic construct
  misc_feature 1..20: note = chemically synthesized
  source 1..20: mol_type = other DNA
ttataatggttcagtttcaa

SEQ ID NO: 24797 - DNA, 20 bp, synthetic construct
  misc_feature 1..20: note = chemically synthesized
  source 1..20: mol_type = other DNA
tataatggttcagtttcaaa

SEQ ID NO: 24798 - DNA, 20 bp, synthetic construct
  misc_feature 1..20: note = chemically synthesized
  source 1..20: mol_type = other DNA
ataatggttcagtttcaaag

SEQ ID NO: 24799 - DNA, 20 bp, synthetic construct
  misc_feature 1..20: note = chemically synthesized
  source 1..20: mol_type = other DNA
taatggttcagtttcaaagg

SEQ ID NO: 24800 - DNA, 20 bp, synthetic construct
  misc_feature 1..20: note = chemically synthesized
  source 1..20: mol_type = other DNA
agtttcaaagggggaaaaaa

SEQ ID NO: 24801 - DNA, 20 bp, synthetic construct
  misc_feature 1..20: note = chemically synthesized
  source 1..20: mol_type = other DNA
agggggaaaaaaaagcaacc

SEQ ID NO: 24802 - DNA, 20 bp, synthetic construct
  misc_feature 1..20: note = chemically synthesized
  source 1..20: mol_type = other DNA
ggaaaaaaaagcaaccaaga

SEQ ID NO: 24803 - DNA, 20 bp, synthetic construct
  misc_feature 1..20: note = chemically synthesized
  source 1..20: mol_type = other DNA
aaaagcaaccaagaaagaaa

SEQ ID NO: 24804 - DNA, 20 bp, synthetic construct
  misc_feature 1..20: note = chemically synthesized
  source 1..20: mol_type = other DNA
agcaaccaagaaagaaaaag

SEQ ID NO: 24805 - DNA, 20 bp, synthetic construct
  misc_feature 1..20: note = chemically synthesized
  source 1..20: mol_type = other DNA
gcaaccaagaaagaaaaaga

SEQ ID NO: 24806 - DNA, 20 bp, synthetic construct
  misc_feature 1..20: note = chemically synthesized
  source 1..20: mol_type = other DNA
ccaagaaagaaaaagaagga

SEQ ID NO: 24807 - DNA, 20 bp, synthetic construct
  misc_feature 1..20: note = chemically synthesized
  source 1..20: mol_type = other DNA
gaaaaagaaggaaagaaaaa

SEQ ID NO: 24808 - DNA, 20 bp, synthetic construct
  misc_feature 1..20: note = chemically synthesized
  source 1..20: mol_type = other DNA
aaaaagaaggaaagaaaaaa

SEQ ID NO: 24809 - DNA, 20 bp, synthetic construct
  misc_feature 1..20: note = chemically synthesized
  source 1..20: mol_type = other DNA
aaaagaaggaaagaaaaaaa

SEQ ID NO: 24810 - DNA, 20 bp, synthetic construct
  misc_feature 1..20: note = chemically synthesized
  source 1..20: mol_type = other DNA
aagaaggaaagaaaaaaagg

SEQ ID NO: 24811 - DNA, 20 bp, synthetic construct
  misc_feature 1..20: note = chemically synthesized
  source 1..20: mol_type = other DNA
ggaaagaaaaaaagggagaa

SEQ ID NO: 24812 - DNA, 20 bp, synthetic construct
  misc_feature 1..20: note = chemically synthesized
  source 1..20: mol_type = other DNA
gaaagaaaaaaagggagaaa

SEQ ID NO: 24813 - DNA, 20 bp, synthetic construct
  misc_feature 1..20: note = chemically synthesized
  source 1..20: mol_type = other DNA
agaaaaaaagggagaaaagg

SEQ ID NO: 24814 - DNA, 20 bp, synthetic construct
  misc_feature 1..20: note = chemically synthesized
  source 1..20: mol_type = other DNA
aaaaagggagaaaaggaaga

SEQ ID NO: 24815 - DNA, 20 bp, synthetic construct
  misc_feature 1..20: note = chemically synthesized
  source 1..20: mol_type = other DNA
agggagaaaaggaagaaaga

SEQ ID NO: 24816 - DNA, 20 bp, synthetic construct
  misc_feature 1..20: note = chemically synthesized
  source 1..20: mol_type = other DNA
aggaagaaagaaagaacaac

SEQ ID NO: 24817 - DNA, 20 bp, synthetic construct
  misc_feature 1..20: note = chemically synthesized
  source 1..20: mol_type = other DNA
aagaaagaaagaacaaccag

SEQ ID NO: 24818 - DNA, 20 bp, synthetic construct
  misc_feature 1..20: note = chemically synthesized
  source 1..20: mol_type = other DNA
aacaaccagaagaacaaaaa

SEQ ID NO: 24819 - DNA, 20 bp, synthetic construct
  misc_feature 1..20: note = chemically synthesized
  source 1..20: mol_type = other DNA
acaaccagaagaacaaaaat

SEQ ID NO: 24820 - DNA, 20 bp, synthetic construct
  misc_feature 1..20: note = chemically synthesized
  source 1..20: mol_type = other DNA
ccagaagaacaaaaatagga

SEQ ID NO: 24821 - DNA, 20 bp, synthetic construct
  misc_feature 1..20: note = chemically synthesized
  source 1..20: mol_type = other DNA
aaataggaaagaaaaataaa

SEQ ID NO: 24822 - DNA, 20 bp, synthetic construct
  misc_feature 1..20: note = chemically synthesized
  source 1..20: mol_type = other DNA
ataaaaagaaatcctccttc

SEQ ID NO: 24823 - DNA, 20 bp, synthetic construct
  misc_feature 1..20: note = chemically synthesized
  source 1..20: mol_type = other DNA
aaatcctccttctagtgctt

SEQ ID NO: 24824 - DNA, 20 bp, synthetic construct
  misc_feature 1..20: note = chemically synthesized
  source 1..20: mol_type = other DNA
aatcctccttctagtgcttt

SEQ ID NO: 24825 - DNA, 20 bp, synthetic construct
  misc_feature 1..20: note = chemically synthesized
  source 1..20: mol_type = other DNA
ctccttctagtgctttgggc

SEQ ID NO: 24826 - DNA, 20 bp, synthetic construct
  misc_feature 1..20: note = chemically synthesized
  source 1..20: mol_type = other DNA
tagtgctttgggcgagtgct

SEQ ID NO: 24827 - DNA, 20 bp, synthetic construct
  misc_feature 1..20: note = chemically synthesized
  source 1..20: mol_type = other DNA
tttgggcgagtgcttagacc

SEQ ID NO: 24828 - DNA, 20 bp, synthetic construct
  misc_feature 1..20: note = chemically synthesized
  source 1..20: mol_type = other DNA
tcttcctttgttgtctgctg

SEQ ID NO: 24829 - DNA, 20 bp, synthetic construct
  misc_feature 1..20: note = chemically synthesized
  source 1..20: mol_type = other DNA
ttgttgtctgctgaagcatc

SEQ ID NO: 24830 - DNA, 20 bp, synthetic construct
  misc_feature 1..20: note = chemically synthesized
  source 1..20: mol_type = other DNA
tccagatacatcttctgttt

SEQ ID NO: 24831 - DNA, 20 bp, synthetic construct
  misc_feature 1..20: note = chemically synthesized
  source 1..20: mol_type = other DNA
atccacgtctgctaatatgc

SEQ ID NO: 24832 - DNA, 20 bp, synthetic construct
  misc_feature 1..20: note = chemically synthesized
  source 1..20: mol_type = other DNA
ctcattcatttgatgtttcc

SEQ ID NO: 24833 - DNA, 20 bp, synthetic construct
  misc_feature 1..20: note = chemically synthesized
  source 1..20: mol_type = other DNA
tcattcatttgatgtttcct

SEQ ID NO: 24834 - DNA, 20 bp, synthetic construct
  misc_feature 1..20: note = chemically synthesized
  source 1..20: mol_type = other DNA
cattcatttgatgtttcctg

SEQ ID NO: 24835 - DNA, 20 bp, synthetic construct
  misc_feature 1..20: note = chemically synthesized
  source 1..20: mol_type = other DNA
atttgatgtttcctggggac

SEQ ID NO: 24836 - DNA, 20 bp, synthetic construct
  misc_feature 1..20: note = chemically synthesized
  source 1..20: mol_type = other DNA
ggggacgagcatcctctctt

SEQ ID NO: 24837 - DNA, 20 bp, synthetic construct
  misc_feature 1..20: note = chemically synthesized
  source 1..20: mol_type = other DNA
tgagttatttctgacaactg

SEQ ID NO: 24838 - DNA, 20 bp, synthetic construct
  misc_feature 1..20: note = chemically synthesized
  source 1..20: mol_type = other DNA
ctgacaactgcagcattcca

SEQ ID NO: 24839 - DNA, 20 bp, synthetic construct
  misc_feature 1..20: note = chemically synthesized
  source 1..20: mol_type = other DNA
tgacaactgcagcattccac

SEQ ID NO: 24840 - DNA, 20 bp, synthetic construct
  misc_feature 1..20: note = chemically synthesized
  source 1..20: mol_type = other DNA
gacaactgcagcattccaca

SEQ ID NO: 24841 - DNA, 20 bp, synthetic construct
  misc_feature 1..20: note = chemically synthesized
  source 1..20: mol_type = other DNA
tgcagcattccacagggtct

SEQ ID NO: 24842 - DNA, 20 bp, synthetic construct
  misc_feature 1..20: note = chemically synthesized
  source 1..20: mol_type = other DNA
agggtctgagttgttgaaca

SEQ ID NO: 24843 - DNA, 20 bp, synthetic construct
  misc_feature 1..20: note = chemically synthesized
  source 1..20: mol_type = other DNA
tacaatcaaaacacatgaca

SEQ ID NO: 24844 - DNA, 20 bp, synthetic construct
  misc_feature 1..20: note = chemically synthesized
  source 1..20: mol_type = other DNA
atcaaaacacatgacataga

SEQ ID NO: 24845 - DNA, 20 bp, synthetic construct
  misc_feature 1..20: note = chemically synthesized
  source 1..20: mol_type = other DNA
aaaacacatgacatagacag

SEQ ID NO: 24846 - DNA, 20 bp, synthetic construct
  misc_feature 1..20: note = chemically synthesized
  source 1..20: mol_type = other DNA
gacatagacagcagttgatt

SEQ ID NO: 24847 - DNA, 20 bp, synthetic construct
  misc_feature 1..20: note = chemically synthesized
  source 1..20: mol_type = other DNA
acatagacagcagttgattt

SEQ ID NO: 24848 - DNA, 20 bp, synthetic construct
  misc_feature 1..20: note = chemically synthesized
  source 1..20: mol_type = other DNA
agttgatttgggttctgcct

SEQ ID NO: 24849 - DNA, 20 bp, synthetic construct
  misc_feature 1..20: note = chemically synthesized
  source 1..20: mol_type = other DNA
gatttgggttctgccttgga

SEQ ID NO: 24850 - DNA, 20 bp, synthetic construct
  misc_feature 1..20: note = chemically synthesized
  source 1..20: mol_type = other DNA
tttgggttctgccttggaca

SEQ ID NO: 24851 - DNA, 20 bp, synthetic construct
  misc_feature 1..20: note = chemically synthesized
  source 1..20: mol_type = other DNA
ttctgccttggacagagaaa

SEQ ID NO: 24852 - DNA, 20 bp, synthetic construct
  misc_feature 1..20: note = chemically synthesized
  source 1..20: mol_type = other DNA
ccttggacagagaaacagac

SEQ ID NO: 24853 - DNA, 20 bp, synthetic construct
  misc_feature 1..20: note = chemically synthesized
  source 1..20: mol_type = other DNA
cttggacagagaaacagact

SEQ ID NO: 24854 - DNA, 20 bp, synthetic construct
  misc_feature 1..20: note = chemically synthesized
  source 1..20: mol_type = other DNA
ttggacagagaaacagactg

SEQ ID NO: 24855 - DNA, 20 bp, synthetic construct
  misc_feature 1..20: note = chemically synthesized
  source 1..20: mol_type = other DNA
agagaaacagactggggcta

SEQ ID NO: 24856 - DNA, 20 bp, synthetic construct
  misc_feature 1..20: note = chemically synthesized
  source 1..20: mol_type = other DNA
gagaaacagactggggctaa

SEQ ID NO: 24857 - DNA, 20 bp, synthetic construct
  misc_feature 1..20: note = chemically synthesized
  source 1..20: mol_type = other DNA
agaaacagactggggctaaa

SEQ ID NO: 24858 - DNA, 20 bp, synthetic construct
  misc_feature 1..20: note = chemically synthesized
  source 1..20: mol_type = other DNA
gactggggctaaagggactg

SEQ ID NO: 24859 - DNA, 20 bp, synthetic construct
  misc_feature 1..20: note = chemically synthesized
  source 1..20: mol_type = other DNA
aaagggactgcagctatacc

SEQ ID NO: 24860 - DNA, 20 bp, synthetic construct
  misc_feature 1..20: note = chemically synthesized
  source 1..20: mol_type = other DNA
aagggactgcagctatacct

SEQ ID NO: 24861 - DNA, 20 bp, synthetic construct
  misc_feature 1..20: note = chemically synthesized
  source 1..20: mol_type = other DNA
agggactgcagctatacctg

SEQ ID NO: 24862 - DNA, 20 bp, synthetic construct
  misc_feature 1..20: note = chemically synthesized
  source 1..20: mol_type = other DNA
ctatacctggggacttgcct

SEQ ID NO: 24863 - DNA, 20 bp, synthetic construct
  misc_feature 1..20: note = chemically synthesized
  source 1..20: mol_type = other DNA
gggacttgcctgagatcatc

SEQ ID NO: 24864 - DNA, 20 bp, synthetic construct
  misc_feature 1..20: note = chemically synthesized
  source 1..20: mol_type = other DNA
ggacttgcctgagatcatct

SEQ ID NO: 24865 - DNA, 20 bp, synthetic construct
  misc_feature 1..20: note = chemically synthesized
  source 1..20: mol_type = other DNA
gagatcatctgggacttgcc

SEQ ID NO: 24866 - DNA, 20 bp, synthetic construct
  misc_feature 1..20: note = chemically synthesized
  source 1..20: mol_type = other DNA
tctgggacttgcctggtctc

SEQ ID NO: 24867 - DNA, 20 bp, synthetic construct
  misc_feature 1..20: note = chemically synthesized
  source 1..20: mol_type = other DNA
ggtctcaagtcttctgacct

SEQ ID NO: 24868 - DNA, 20 bp, synthetic construct
  misc_feature 1..20: note = chemically synthesized
  source 1..20: mol_type = other DNA
tcaagtcttctgaccttggc

SEQ ID NO: 24869 - DNA, 20 bp, synthetic construct
  misc_feature 1..20: note = chemically synthesized
  source 1..20: mol_type = other DNA
caagtcttctgaccttggcc

SEQ ID NO: 24870 - DNA, 20 bp, synthetic construct
  misc_feature 1..20: note = chemically synthesized
  source 1..20: mol_type = other DNA
aagtcttctgaccttggcca

SEQ ID NO: 24871 - DNA, 20 bp, synthetic construct
  misc_feature 1..20: note = chemically synthesized
  source 1..20: mol_type = other DNA
ttggccagggatctttgcac

SEQ ID NO: 24872 - DNA, 20 bp, synthetic construct
  misc_feature 1..20: note = chemically synthesized
  source 1..20: mol_type = other DNA
tggccagggatctttgcact

SEQ ID NO: 24873 - DNA, 20 bp, synthetic construct
  misc_feature 1..20: note = chemically synthesized
  source 1..20: mol_type = other DNA
ccagggatctttgcactggg

SEQ ID NO: 24874 - DNA, 20 bp, synthetic construct
  misc_feature 1..20: note = chemically synthesized
  source 1..20: mol_type = other DNA
cagggatctttgcactgggc

SEQ ID NO: 24875 - DNA, 20 bp, synthetic construct
  misc_feature 1..20: note = chemically synthesized
  source 1..20: mol_type = other DNA
agggatctttgcactgggca

SEQ ID NO: 24876 - DNA, 20 bp, synthetic construct
  misc_feature 1..20: note = chemically synthesized
  source 1..20: mol_type = other DNA
gggatctttgcactgggcag

SEQ ID NO: 24877 - DNA, 20 bp, synthetic construct
  misc_feature 1..20: note = chemically synthesized
  source 1..20: mol_type = other DNA
tgcactgggcaggggaattt

SEQ ID NO: 24878 - DNA, 20 bp, synthetic construct
  misc_feature 1..20: note = chemically synthesized
  source 1..20: mol_type = other DNA
gggaatttgagtcccaattt

SEQ ID NO: 24879 - DNA, 20 bp, synthetic construct
  misc_feature 1..20: note = chemically synthesized
  source 1..20: mol_type = other DNA
ggaatttgagtcccaatttg

SEQ ID NO: 24880 - DNA, 20 bp, synthetic construct
  misc_feature 1..20: note = chemically synthesized
  source 1..20: mol_type = other DNA
tcgatttaaaccacttttca

SEQ ID NO: 24881 - DNA, 20 bp, synthetic construct
  misc_feature 1..20: note = chemically synthesized
  source 1..20: mol_type = other DNA
cgatttaaaccacttttcaa

SEQ ID NO: 24882 - DNA, 20 bp, synthetic construct
  misc_feature 1..20: note = chemically synthesized
  source 1..20: mol_type = other DNA
ccacttttcaaaggcctgaa

SEQ ID NO: 24883 - DNA, 20 bp, synthetic construct
  misc_feature 1..20: note = chemically synthesized
  source 1..20: mol_type = other DNA
acttttcaaaggcctgaatg

SEQ ID NO: 24884 - DNA, 20 bp, synthetic construct
  misc_feature 1..20: note = chemically synthesized
  source 1..20: mol_type = other DNA
atttgtgtgtcttcttttcc

SEQ ID NO: 24885 - DNA, 20 bp, synthetic construct
  misc_feature 1..20: note = chemically synthesized
  source 1..20: mol_type = other DNA
ttcctggtcttccccttgtc

SEQ ID NO: 24886 - DNA, 20 bp, synthetic construct
  misc_feature 1..20: note = chemically synthesized
  source 1..20: mol_type = other DNA
tcaagaccatttctctacca

SEQ ID NO: 24887 - DNA, 20 bp, synthetic construct
  misc_feature 1..20: note = chemically synthesized
  source 1..20: mol_type = other DNA
caagaccatttctctaccac

SEQ ID NO: 24888 - DNA, 20 bp, synthetic construct
  misc_feature 1..20: note = chemically synthesized
  source 1..20: mol_type = other DNA
ctctaccacgggatatatat

SEQ ID NO: 24889 - DNA, 20 bp, synthetic construct
  misc_feature 1..20: note = chemically synthesized
  source 1..20: mol_type = other DNA
ctaccacgggatatatatta

SEQ ID NO: 24890 - DNA, 20 bp, synthetic construct
  misc_feature 1..20: note = chemically synthesized
  source 1..20: mol_type = other DNA
taccacgggatatatattag

SEQ ID NO: 24891 - DNA, 20 bp, synthetic construct
  misc_feature 1..20: note = chemically synthesized
  source 1..20: mol_type = other DNA
accacgggatatatattaga

SEQ ID NO: 24892 - DNA, 20 bp, synthetic construct
  misc_feature 1..20: note = chemically synthesized
  source 1..20: mol_type = other DNA
ccacgggatatatattagag

SEQ ID NO: 24893 - DNA, 20 bp, synthetic construct
  misc_feature 1..20: note = chemically synthesized
  source 1..20: mol_type = other DNA
atatatattagaggggaaaa

SEQ ID NO: 24894 - DNA, 20 bp, synthetic construct
  misc_feature 1..20: note = chemically synthesized
  source 1..20: mol_type = other DNA
cggctgtaaaccctgattgt

SEQ ID NO: 24895 - DNA, 20 bp, synthetic construct
  misc_feature 1..20: note = chemically synthesized
  source 1..20: mol_type = other DNA
tgtaaaccctgattgttggc

SEQ ID NO: 24896 - DNA, 20 bp, synthetic construct
  misc_feature 1..20: note = chemically synthesized
  source 1..20: mol_type = other DNA
gattgttggctagcattgtt

SEQ ID NO: 24897 - DNA, 20 bp, synthetic construct
  misc_feature 1..20: note = chemically synthesized
  source 1..20: mol_type = other DNA
attgttggctagcattgttc

SEQ ID NO: 24898 - DNA, 20 bp, synthetic construct
  misc_feature 1..20: note = chemically synthesized
  source 1..20: mol_type = other DNA
gttggctagcattgttcagg

SEQ ID NO: 24899 - DNA, 20 bp, synthetic construct
  misc_feature 1..20: note = chemically synthesized
  source 1..20: mol_type = other DNA
ctagcattgttcaggaagtg

SEQ ID NO: 24900 - DNA, 20 bp, synthetic construct
  misc_feature 1..20: note = chemically synthesized
  source 1..20: mol_type = other DNA
tgttcaggaagtgtagcatt

SEQ ID NO: 24901 - DNA, 20 bp, synthetic construct
  misc_feature 1..20: note = chemically synthesized
  source 1..20: mol_type = other DNA
gttcaggaagtgtagcatta

SEQ ID NO: 24902 - DNA, 20 bp, synthetic construct
  misc_feature 1..20: note = chemically synthesized
  source 1..20: mol_type = other DNA
tcaggaagtgtagcattaag

SEQ ID NO: 24903 - DNA, 20 bp, synthetic construct
  misc_feature 1..20: note = chemically synthesized
  source 1..20: mol_type = other DNA
aactacccacactatccttg

SEQ ID NO: 24904 - DNA, 20 bp, synthetic construct
  misc_feature 1..20: note = chemically synthesized
  source 1..20: mol_type = other DNA
actatccttgcagttattca

SEQ ID NO: 24905 - DNA, 20 bp, synthetic construct
  misc_feature 1..20: note = chemically synthesized
  source 1..20: mol_type = other DNA
ctatccttgcagttattcat

SEQ ID NO: 24906 - DNA, 20 bp, synthetic construct
  misc_feature 1..20: note = chemically synthesized
  source 1..20: mol_type = other DNA
ttcttctcaaacatctcgca

SEQ ID NO: 24907 - DNA, 20 bp, synthetic construct
  misc_feature 1..20: note = chemically synthesized
  source 1..20: mol_type = other DNA
aacatctcgcaaagtaatca

SEQ ID NO: 24908 - DNA, 20 bp, synthetic construct
  misc_feature 1..20: note = chemically synthesized
  source 1..20: mol_type = other DNA
acatctcgcaaagtaatcat

SEQ ID NO: 24909 - DNA, 20 bp, synthetic construct
  misc_feature 1..20: note = chemically synthesized
  source 1..20: mol_type = other DNA
cgcaaagtaatcatgggctg

SEQ ID NO: 24910 - DNA, 20 bp, synthetic construct
  misc_feature 1..20: note = chemically synthesized
  source 1..20: mol_type = other DNA
agtaatcatgggctgaagtg

SEQ ID NO: 24911 - DNA, 20 bp, synthetic construct
  misc_feature 1..20: note = chemically synthesized
  source 1..20: mol_type = other DNA
gtaatcatgggctgaagtgc

SEQ ID NO: 24912 - DNA, 20 bp, synthetic construct
  misc_feature 1..20: note = chemically synthesized
  source 1..20: mol_type = other DNA
ctgaagtgcaggttttcttg

SEQ ID NO: 24913 - DNA, 20 bp, synthetic construct
  misc_feature 1..20: note = chemically synthesized
  source 1..20: mol_type = other DNA
ttttcttgcagtgcctttat

SEQ ID NO: 24914 - DNA, 20 bp, synthetic construct
  misc_feature 1..20: note = chemically synthesized
  source 1..20: mol_type = other DNA
cagtgcctttatcagtaaat

SEQ ID NO: 24915 - DNA, 20 bp, synthetic construct
  misc_feature 1..20: note = chemically synthesized
  source 1..20: mol_type = other DNA
ttatcagtaaatcagatttt

SEQ ID NO: 24916 - DNA, 20 bp, synthetic construct
  misc_feature 1..20: note = chemically synthesized
  source 1..20: mol_type = other DNA
atcagattttgagcatttat

SEQ ID NO: 24917 - DNA, 20 bp, synthetic construct
  misc_feature 1..20: note = chemically synthesized
  source 1..20: mol_type = other DNA
ttttgagcatttatcagcaa

SEQ ID NO: 24918 - DNA, 20 bp, synthetic construct
  misc_feature 1..20: note = chemically synthesized
  source 1..20: mol_type = other DNA
gagcatttatcagcaaaagt

SEQ ID NO: 24919 - DNA, 20 bp, synthetic construct
  misc_feature 1..20: note = chemically synthesized
  source 1..20: mol_type = other DNA
atcatttctgtaatgtttga

SEQ ID NO: 24920 - DNA, 20 bp, synthetic construct
  misc_feature 1..20: note = chemically synthesized
  source 1..20: mol_type = other DNA
tttctgtaatgtttgaaaga

SEQ ID NO: 24921 - DNA, 20 bp, synthetic construct
  misc_feature 1..20: note = chemically synthesized
  source 1..20: mol_type = other DNA
tttgaaagaaagatttgttt

SEQ ID NO: 24922 - DNA, 20 bp, synthetic construct
  misc_feature 1..20: note = chemically synthesized
  source 1..20: mol_type = other DNA
gaaagaaagatttgtttcag

SEQ ID NO: 24923 - DNA, 20 bp, synthetic construct
  misc_feature 1..20: note = chemically synthesized
  source 1..20: mol_type = other DNA
aaagaaagatttgtttcagt

SEQ ID NO: 24924 - DNA, 20 bp, synthetic construct
  misc_feature 1..20: note = chemically synthesized
  source 1..20: mol_type = other DNA
aagaaagatttgtttcagtg

SEQ ID NO: 24925 - DNA, 20 bp, synthetic construct
  misc_feature 1..20: note = chemically synthesized
  source 1..20: mol_type = other DNA
tctgccaatcaatgatcttc

SEQ ID NO: 24926 - DNA, 20 bp, synthetic construct
  misc_feature 1..20: note = chemically synthesized
  source 1..20: mol_type = other DNA
tattgctgcaattatttgtc

SEQ ID NO: 24927 - DNA, 20 bp, synthetic construct
  misc_feature 1..20: note = chemically synthesized
  source 1..20: mol_type = other DNA
gctgcaattatttgtctagt

SEQ ID NO: 24928 - DNA, 20 bp, synthetic construct
  misc_feature 1..20: note = chemically synthesized
  source 1..20: mol_type = other DNA
ttggatatttaaaatgtcat

SEQ ID NO: 24929 - DNA, 20 bp, synthetic construct
  misc_feature 1..20: note = chemically synthesized
  source 1..20: mol_type = other DNA
atatttaaaatgtcatcaga

SEQ ID NO: 24930 - DNA, 20 bp, synthetic construct
  misc_feature 1..20: note = chemically synthesized
  source 1..20: mol_type = other DNA
atttaaaatgtcatcagaaa

SEQ ID NO: 24931 - DNA, 20 bp, synthetic construct
  misc_feature 1..20: note = chemically synthesized
  source 1..20: mol_type = other DNA
aaagagatgattacacattc

SEQ ID NO: 24932 - DNA, 20 bp, synthetic construct
  misc_feature 1..20: note = chemically synthesized
  source 1..20: mol_type = other DNA
agatgattacacattctaga

SEQ ID NO: 24933 - DNA, 20 bp, synthetic construct
  misc_feature 1..20: note = chemically synthesized
  source 1..20: mol_type = other DNA
gattacacattctagaaagc

SEQ ID NO: 24934 - DNA, 20 bp, synthetic construct
  misc_feature 1..20: note = chemically synthesized
  source 1..20: mol_type = other DNA
attacacattctagaaagca

SEQ ID NO: 24935 - DNA, 20 bp, synthetic construct
  misc_feature 1..20: note = chemically synthesized
  source 1..20: mol_type = other DNA
ataatcacatgaactgaatc

SEQ ID NO: 24936 - DNA, 20 bp, synthetic construct
  misc_feature 1..20: note = chemically synthesized
  source 1..20: mol_type = other DNA
gaactgaatccagttaaatg

SEQ ID NO: 24937 - DNA, 20 bp, synthetic construct
  misc_feature 1..20: note = chemically synthesized
  source 1..20: mol_type = other DNA
gaatccagttaaatgtagtg

SEQ ID NO: 24938 - DNA, 20 bp, synthetic construct
  misc_feature 1..20: note = chemically synthesized
  source 1..20: mol_type = other DNA
tactaacctgtccttcaaaa

SEQ ID NO: 24939 - DNA, 20 bp, synthetic construct
  misc_feature 1..20: note = chemically synthesized
  source 1..20: mol_type = other DNA
tccttcaaaatagaattttt

SEQ ID NO: 24940 - DNA, 20 bp, synthetic construct
  misc_feature 1..20: note = chemically synthesized
  source 1..20: mol_type = other DNA
gaatttttgagctaccactg

SEQ ID NO: 24941 - DNA, 20 bp, synthetic construct
  misc_feature 1..20: note = chemically synthesized
  source 1..20: mol_type = other DNA
tttttgagctaccactgaag

SEQ ID NO: 24942 - DNA, 20 bp, synthetic construct
  misc_feature 1..20: note = chemically synthesized
  source 1..20: mol_type = other DNA
ttgagctaccactgaagcag

SEQ ID NO: 24943 - DNA, 20 bp, synthetic construct
  misc_feature 1..20: note = chemically synthesized
  source 1..20: mol_type = other DNA
gcagtcttctgccctgtttt

SEQ ID NO: 24944 - DNA, 20 bp, synthetic construct
  misc_feature 1..20: note = chemically synthesized
  source 1..20: mol_type = other DNA
cagtcttctgccctgttttc

SEQ ID NO: 24945 - DNA, 20 bp, synthetic construct
  misc_feature 1..20: note = chemically synthesized
  source 1..20: mol_type = other DNA
tcttctgccctgttttcagg

SEQ ID NO: 24946 - DNA, 20 bp, synthetic construct
  misc_feature 1..20: note = chemically synthesized
  source 1..20: mol_type = other DNA
caggaagctgatcttaacct

SEQ ID NO: 24947 - DNA, 20 bp, synthetic construct
  misc_feature 1..20: note = chemically synthesized
  source 1..20: mol_type = other DNA
aggaagctgatcttaacctt

SEQ ID NO: 24948 - DNA, 20 bp, synthetic construct
  misc_feature 1..20: note = chemically synthesized
  source 1..20: mol_type = other DNA
ctgatcttaaccttgggatg

SEQ ID NO: 24949 - DNA, 20 bp, synthetic construct
  misc_feature 1..20: note = chemically synthesized
  source 1..20: mol_type = other DNA
cttgggatgcagtgtgcttt

SEQ ID NO: 24950 - DNA, 20 bp, synthetic construct
  misc_feature 1..20: note = chemically synthesized
  source 1..20: mol_type = other DNA
ttgggatgcagtgtgctttc

SEQ ID NO: 24951 - DNA, 20 bp, synthetic construct
  misc_feature 1..20: note = chemically synthesized
  source 1..20: mol_type = other DNA
tgggatgcagtgtgctttca

SEQ ID NO: 24952 - DNA, 20 bp, synthetic construct
  misc_feature 1..20: note = chemically synthesized
  source 1..20: mol_type = other DNA
atgcagtgtgctttcagggt

SEQ ID NO: 24953 - DNA, 20 bp, synthetic construct
  misc_feature 1..20: note = chemically synthesized
  source 1..20: mol_type = other DNA
tgcagtgtgctttcagggtt

SEQ ID NO: 24954 - DNA, 20 bp, synthetic construct
  misc_feature 1..20: note = chemically synthesized
  source 1..20: mol_type = other DNA
ggttgggtgatacttaatta

SEQ ID NO: 24955 - DNA, 20 bp, synthetic construct
  misc_feature 1..20: note = chemically synthesized
  source 1..20: mol_type = other DNA
ttgggtgatacttaattatg

SEQ ID NO: 24956 - DNA, 20 bp, synthetic construct
  misc_feature 1..20: note = chemically synthesized
  source 1..20: mol_type = other DNA
ttaattatggagaactttcc

SEQ ID NO: 24957 - DNA, 20 bp, synthetic construct
  misc_feature 1..20: note = chemically synthesized
  source 1..20: mol_type = other DNA
gaactttccaagtctgaaaa

SEQ ID NO: 24958 - DNA, 20 bp, synthetic construct
  misc_feature 1..20: note = chemically synthesized
  source 1..20: mol_type = other DNA
aattgctccttcacatacgc

SEQ ID NO: 24959 - DNA, 20 bp, synthetic construct
  misc_feature 1..20: note = chemically synthesized
  source 1..20: mol_type = other DNA
tgctccttcacatacgcgag

SEQ ID NO: 24960 - DNA, 20 bp, synthetic construct
  misc_feature 1..20: note = chemically synthesized
  source 1..20: mol_type = other DNA
catacgcgagaagtgcattt

SEQ ID NO: 24961 - DNA, 20 bp, synthetic construct
  misc_feature 1..20: note = chemically synthesized
  source 1..20: mol_type = other DNA
tcatctgcaaatctataaat

SEQ ID NO: 24962 - DNA, 20 bp, synthetic construct
  misc_feature 1..20: note = chemically synthesized
  source 1..20: mol_type = other DNA
tctgcaaatctataaataag

SEQ ID NO: 24963 - DNA, 20 bp, synthetic construct
  misc_feature 1..20: note = chemically synthesized
  source 1..20: mol_type = other DNA
tctattcttcttgcttcctg

SEQ ID NO: 24964 - DNA, 20 bp, synthetic construct
  misc_feature 1..20: note = chemically synthesized
  source 1..20: mol_type = other DNA
aaatgccaaatcctgatttg

SEQ ID NO: 24965 - DNA, 20 bp, synthetic construct
  misc_feature 1..20: note = chemically synthesized
  source 1..20: mol_type = other DNA
ccaaatcctgatttgtggca

SEQ ID NO: 24966 - DNA, 20 bp, synthetic construct
  misc_feature 1..20: note = chemically synthesized
  source 1..20: mol_type = other DNA
cctttcccactctgtatgcc

SEQ ID NO: 24967 - DNA, 20 bp, synthetic construct
  misc_feature 1..20: note = chemically synthesized
  source 1..20: mol_type = other DNA
cactctgtatgcctggtgcc

SEQ ID NO: 24968 - DNA, 20 bp, synthetic construct
  misc_feature 1..20: note = chemically synthesized
  source 1..20: mol_type = other DNA
actctgtatgcctggtgccc

SEQ ID NO: 24969 - DNA, 20 bp, synthetic construct
  misc_feature 1..20: note = chemically synthesized
  source 1..20: mol_type = other DNA
atgcctggtgcccaggaact

SEQ ID NO: 24970 - DNA, 20 bp, synthetic construct
  misc_feature 1..20: note = chemically synthesized
  source 1..20: mol_type = other DNA
cctggtgcccaggaactaag

SEQ ID NO: 24971 - DNA, 20 bp, synthetic construct
  misc_feature 1..20: note = chemically synthesized
  source 1..20: mol_type = other DNA
ggtgcccaggaactaagcag

SEQ ID NO: 24972 - DNA, 20 bp, synthetic construct
  misc_feature 1..20: note = chemically synthesized
  source 1..20: mol_type = other DNA
gcccaggaactaagcagtgg

SEQ ID NO: 24973 - DNA, 20 bp, synthetic construct
  misc_feature 1..20: note = chemically synthesized
  source 1..20: mol_type = other DNA
caggaactaagcagtggcag

SEQ ID NO: 24974 - DNA, 20 bp, synthetic construct
  misc_feature 1..20: note = chemically synthesized
  source 1..20: mol_type = other DNA
cagtggaaattacaactgtt

SEQ ID NO: 24975 - DNA, 20 bp, synthetic construct
  misc_feature 1..20: note = chemically synthesized
  source 1..20: mol_type = other DNA
tggaaattacaactgtttgg

SEQ ID NO: 24976 - DNA, 20 bp, synthetic construct
  misc_feature 1..20: note = chemically synthesized
  source 1..20: mol_type = other DNA
attacaactgtttggaagcc

SEQ ID NO: 24977 - DNA, 20 bp, synthetic construct
  misc_feature 1..20: note = chemically synthesized
  source 1..20: mol_type = other DNA
ctgtttggaagccaagaaaa

SEQ ID NO: 24978 - DNA, 20 bp, synthetic construct
  misc_feature 1..20: note = chemically synthesized
  source 1..20: mol_type = other DNA
ctccatttctcacttttctc

SEQ ID NO: 24979 - DNA, 20 bp, synthetic construct
  misc_feature 1..20: note = chemically synthesized
  source 1..20: mol_type = other DNA
ttctcacttttctccagttc

SEQ ID NO: 24980 - DNA, 20 bp, synthetic construct
  misc_feature 1..20: note = chemically synthesized
  source 1..20: mol_type = other DNA
tctccagttccggatattct

SEQ ID NO: 24981 - DNA, 20 bp, synthetic construct
  misc_feature 1..20: note = chemically synthesized
  source 1..20: mol_type = other DNA
ctcggctctgctccatgtat

SEQ ID NO: 24982 - DNA, 20 bp, synthetic construct
  misc_feature 1..20: note = chemically synthesized
  source 1..20: mol_type = other DNA
ccttctgtccgctccgtgaa

SEQ ID NO: 24983 - DNA, 20 bp, synthetic construct
  misc_feature 1..20: note = chemically synthesized
  source 1..20: mol_type = other DNA
cttctgtccgctccgtgaac

SEQ ID NO: 24984 - DNA, 20 bp, synthetic construct
  misc_feature 1..20: note = chemically synthesized
  source 1..20: mol_type = other DNA
tccgctccgtgaacaggaaa

SEQ ID NO: 24985 - DNA, 20 bp, synthetic construct
  misc_feature 1..20: note = chemically synthesized
  source 1..20: mol_type = other DNA
gtgaacaggaaacagaaata

SEQ ID NO: 24986 - DNA, 20 bp, synthetic construct
  misc_feature 1..20: note = chemically synthesized
  source 1..20: mol_type = other DNA
gctccaatttttttttttaa

SEQ ID NO: 24987 - DNA, 20 bp, synthetic construct
  misc_feature 1..20: note = chemically synthesized
  source 1..20: mol_type = other DNA
tccaatttttttttttaatg

SEQ ID NO: 24988 - DNA, 20 bp, synthetic construct
  misc_feature 1..20: note = chemically synthesized
  source 1..20: mol_type = other DNA
ccaatttttttttttaatgg

SEQ ID NO: 24989 - DNA, 20 bp, synthetic construct
  misc_feature 1..20: note = chemically synthesized
  source 1..20: mol_type = other DNA
atttttttttttaatggagg

SEQ ID NO: 24990 - DNA, 20 bp, synthetic construct
  misc_feature 1..20: note = chemically synthesized
  source 1..20: mol_type = other DNA
ttttttttttaatggaggaa

SEQ ID NO: 24991 - DNA, 20 bp, synthetic construct
  misc_feature 1..20: note = chemically synthesized
  source 1..20: mol_type = other DNA
tccaaccaaactaaactctc

SEQ ID NO: 24992 - DNA, 20 bp, synthetic construct
  misc_feature 1..20: note = chemically synthesized
  source 1..20: mol_type = other DNA
accaaactaaactctcaaga

SEQ ID NO: 24993 - DNA, 20 bp, synthetic construct
  misc_feature 1..20: note = chemically synthesized
  source 1..20: mol_type = other DNA
aactctcaagatagaatcat

SEQ ID NO: 24994 - DNA, 20 bp, synthetic construct
  misc_feature 1..20: note = chemically synthesized
  source 1..20: mol_type = other DNA
ctctcaagatagaatcatga

SEQ ID NO: 24995 - DNA, 20 bp, synthetic construct
  misc_feature 1..20: note = chemically synthesized
  source 1..20: mol_type = other DNA
caaaatgtccaaaatgtcct

SEQ ID NO: 24996 - DNA, 20 bp, synthetic construct
  misc_feature 1..20: note = chemically synthesized
  source 1..20: mol_type = other DNA
aatgtccaaaatgtcctaag

SEQ ID NO: 24997 - DNA, 20 bp, synthetic construct
  misc_feature 1..20: note = chemically synthesized
  source 1..20: mol_type = other DNA
tcaaaccacccgccccttaa

SEQ ID NO: 24998 - DNA, 20 bp, synthetic construct
  misc_feature 1..20: note = chemically synthesized
  source 1..20: mol_type = other DNA
caaaccacccgccccttaac

SEQ ID NO: 24999 - DNA, 20 bp, synthetic construct
  misc_feature 1..20: note = chemically synthesized
  source 1..20: mol_type = other DNA
aacaggtctgcctctcttcc

SEQ ID NO: 25000 - DNA, 20 bp, synthetic construct
  misc_feature 1..20: note = chemically synthesized
  source 1..20: mol_type = other DNA
acaggtctgcctctcttcct

SEQ ID NO: 25001 - DNA, 20 bp, synthetic construct
  misc_feature 1..20: note = chemically synthesized
  source 1..20: mol_type = other DNA
aggtctgcctctcttcctgg

SEQ ID NO: 25002 - DNA, 20 bp, synthetic construct
  misc_feature 1..20: note = chemically synthesized
  source 1..20: mol_type = other DNA
ctgcctctcttcctgggagt

SEQ ID NO: 25003 - DNA, 20 bp, synthetic construct
  misc_feature 1..20: note = chemically synthesized
  source 1..20: mol_type = other DNA
cctctcttcctgggagtcag

SEQ ID NO: 25004 - DNA, 20 bp, synthetic construct
  misc_feature 1..20: note = chemically synthesized
  source 1..20: mol_type = other DNA
cagaagtgaccttgatgaac

SEQ ID NO: 25005 - DNA, 20 bp, synthetic construct
  misc_feature 1..20: note = chemically synthesized
  source 1..20: mol_type = other DNA
gaccttgatgaactggatgt

SEQ ID NO: 25006 - DNA, 20 bp, synthetic construct
  misc_feature 1..20: note = chemically synthesized
  source 1..20: mol_type = other DNA
accttgatgaactggatgtt

SEQ ID NO: 25007 - DNA, 20 bp, synthetic construct
  misc_feature 1..20: note = chemically synthesized
  source 1..20: mol_type = other DNA
taggtccaaaaatgacaaac

SEQ ID NO: 25008 - DNA, 20 bp, synthetic construct
  misc_feature 1..20: note = chemically synthesized
  source 1..20: mol_type = other DNA
atgacaaacaagccctccac

SEQ ID NO: 25009 - DNA, 20 bp, synthetic construct
  misc_feature 1..20: note = chemically synthesized
  source 1..20: mol_type = other DNA
tgacaaacaagccctccact

SEQ ID NO: 25010 - DNA, 20 bp, synthetic construct
  misc_feature 1..20: note = chemically synthesized
  source 1..20: mol_type = other DNA
agccctccactgggaaacat

SEQ ID NO: 25011 - DNA, 20 bp, synthetic construct
  misc_feature 1..20: note = chemically synthesized
  source 1..20: mol_type = other DNA
gtccaacccctttcttttga

SEQ ID NO: 25012 - DNA, 20 bp, synthetic construct
  misc_feature 1..20: note = chemically synthesized
  source 1..20: mol_type = other DNA
caacccctttcttttgacag

SEQ ID NO: 25013 - DNA, 20 bp, synthetic construct
  misc_feature 1..20: note = chemically synthesized
  source 1..20: mol_type = other DNA
aacccctttcttttgacagc

SEQ ID NO: 25014 - DNA, 20 bp, synthetic construct
  misc_feature 1..20: note = chemically synthesized
  source 1..20: mol_type = other DNA
ctttcttttgacagcaggac

SEQ ID NO: 25015 - DNA, 20 bp, synthetic construct
  misc_feature 1..20: note = chemically synthesized
  source 1..20: mol_type = other DNA
ttttgacagcaggactagaa

SEQ ID NO: 25016 - DNA, 20 bp, synthetic construct
  misc_feature 1..20: note = chemically synthesized
  source 1..20: mol_type = other DNA
acagcaggactagaacagac

SEQ ID NO: 25017 - DNA, 20 bp, synthetic construct
  misc_feature 1..20: note = chemically synthesized
  source 1..20: mol_type = other DNA
agcaggactagaacagacca

SEQ ID NO: 25018 - DNA, 20 bp, synthetic construct
  misc_feature 1..20: note = chemically synthesized
  source 1..20: mol_type = other DNA
gcaggactagaacagaccag

SEQ ID NO: 25019 - DNA, 20 bp, synthetic construct
  misc_feature 1..20: note = chemically synthesized
  source 1..20: mol_type = other DNA
ctagaacagaccagaggttc

SEQ ID NO: 25020 - DNA, 20 bp, synthetic construct
  misc_feature 1..20: note = chemically synthesized
  source 1..20: mol_type = other DNA
agaacagaccagaggttccg

SEQ ID NO: 25021 - DNA, 20 bp, synthetic construct
  misc_feature 1..20: note = chemically synthesized
  source 1..20: mol_type = other DNA
acagaccagaggttccggag

SEQ ID NO: 25022 - DNA, 20 bp, synthetic construct
  misc_feature 1..20: note = chemically synthesized
  source 1..20: mol_type = other DNA
cagaccagaggttccggaga

SEQ ID NO: 25023 - DNA, 20 bp, synthetic construct
  misc_feature 1..20: note = chemically synthesized
  source 1..20: mol_type = other DNA
ccggagaaggtctctatacc

SEQ ID NO: 25024 - DNA, 20 bp, synthetic construct
  misc_feature 1..20: note = chemically synthesized
  source 1..20: mol_type = other DNA
cggagaaggtctctatacct

SEQ ID NO: 25025 - DNA, 20 bp, synthetic construct
  misc_feature 1..20: note = chemically synthesized
  source 1..20: mol_type = other DNA
agaaggtctctatacctagg

SEQ ID NO: 25026 - DNA, 20 bp, synthetic construct
  misc_feature 1..20: note = chemically synthesized
  source 1..20: mol_type = other DNA
gaaggtctctatacctaggt

SEQ ID NO: 25027 - DNA, 20 bp, synthetic construct
  misc_feature 1..20: note = chemically synthesized
  source 1..20: mol_type = other DNA
tatacctaggtgggtttcct

SEQ ID NO: 25028 - DNA, 20 bp, synthetic construct
  misc_feature 1..20: note = chemically synthesized
  source 1..20: mol_type = other DNA
cctaggtgggtttcctgagc

SEQ ID NO: 25029 - DNA, 20 bp, synthetic construct
  misc_feature 1..20: note = chemically synthesized
  source 1..20: mol_type = other DNA
taggtgggtttcctgagctg

SEQ ID NO: 25030 - DNA, 20 bp, synthetic construct
  misc_feature 1..20: note = chemically synthesized
  source 1..20: mol_type = other DNA
ctgagctggagaattttcca

SEQ ID NO: 25031 - DNA, 20 bp, synthetic construct
  misc_feature 1..20: note = chemically synthesized
  source 1..20: mol_type = other DNA
tgagctggagaattttccat

SEQ ID NO: 25032 - DNA, 20 bp, synthetic construct
  misc_feature 1..20: note = chemically synthesized
  source 1..20: mol_type = other DNA
gagctggagaattttccatg

SEQ ID NO: 25033 - DNA, 20 bp, synthetic construct
  misc_feature 1..20: note = chemically synthesized
  source 1..20: mol_type = other DNA
catggggctgtctgtgtgtt

SEQ ID NO: 25034 - DNA, 20 bp, synthetic construct
  misc_feature 1..20: note = chemically synthesized
  source 1..20: mol_type = other DNA
atggggctgtctgtgtgttg

SEQ ID NO: 25035 - DNA, 20 bp, synthetic construct
  misc_feature 1..20: note = chemically synthesized
  source 1..20: mol_type = other DNA
cactttcccaattcacttcc

SEQ ID NO: 25036 - DNA, 20 bp, synthetic construct
  misc_feature 1..20: note = chemically synthesized
  source 1..20: mol_type = other DNA
ctttcccaattcacttccca

SEQ ID NO: 25037 - DNA, 20 bp, synthetic construct
  misc_feature 1..20: note = chemically synthesized
  source 1..20: mol_type = other DNA
ttcccaattcacttcccaga

SEQ ID NO: 25038 - DNA, 20 bp, synthetic construct
  misc_feature 1..20: note = chemically synthesized
  source 1..20: mol_type = other DNA
cacttcccagagagcatgct

SEQ ID NO: 25039 - DNA, 20 bp, synthetic construct
  misc_feature 1..20: note = chemically synthesized
  source 1..20: mol_type = other DNA
agagcatgctgagctcattc

SEQ ID NO: 25040 - DNA, 20 bp, synthetic construct
  misc_feature 1..20: note = chemically synthesized
  source 1..20: mol_type = other DNA
gagcatgctgagctcattcc

SEQ ID NO: 25041 - DNA, 20 bp, synthetic construct
  misc_feature 1..20: note = chemically synthesized
  source 1..20: mol_type = other DNA
ctcattccaggacactgtga

SEQ ID NO: 25042 - DNA, 20 bp, synthetic construct
  misc_feature 1..20: note = chemically synthesized
  source 1..20: mol_type = other DNA
caggacactgtgatggtcaa

SEQ ID NO: 25043 - DNA, 20 bp, synthetic construct
  misc_feature 1..20: note = chemically synthesized
  source 1..20: mol_type = other DNA
aggacactgtgatggtcaaa

SEQ ID NO: 25044 - DNA, 20 bp, synthetic construct
  misc_feature 1..20: note = chemically synthesized
  source 1..20: mol_type = other DNA
aaggctctcccaccatcaca

SEQ ID NO: 25045 - DNA, 20 bp, synthetic construct
  misc_feature 1..20: note = chemically synthesized
  source 1..20: mol_type = other DNA
caccatcacacagaatgtac

SEQ ID NO: 25046 - DNA, 20 bp, synthetic construct
  misc_feature 1..20: note = chemically synthesized
  source 1..20: mol_type = other DNA
accatcacacagaatgtact

SEQ ID NO: 25047 - DNA, 20 bp, synthetic construct
  misc_feature 1..20: note = chemically synthesized
  source 1..20: mol_type = other DNA
ccatcacacagaatgtacta

SEQ ID NO: 25048 - DNA, 20 bp, synthetic construct
  misc_feature 1..20: note = chemically synthesized
  source 1..20: mol_type = other DNA
agaatgtactagggttctgt

SEQ ID NO: 25049 - DNA, 20 bp, synthetic construct
  misc_feature 1..20: note = chemically synthesized
  source 1..20: mol_type = other DNA
tagaaaattaatctcacttg

SEQ ID NO: 25050 - DNA, 20 bp, synthetic construct
  misc_feature 1..20: note = chemically synthesized
  source 1..20: mol_type = other DNA
aaaaaatgcccttaaaacac

SEQ ID NO: 25051 - DNA, 20 bp, synthetic construct
  misc_feature 1..20: note = chemically synthesized
  source 1..20: mol_type = other DNA
aaaatgcccttaaaacactg

SEQ ID NO: 25052 - DNA, 20 bp, synthetic construct
  misc_feature 1..20: note = chemically synthesized
  source 1..20: mol_type = other DNA
ccttaaaacactggagccct

SEQ ID NO: 25053 - DNA, 20 bp, synthetic construct
  misc_feature 1..20: note = chemically synthesized
  source 1..20: mol_type = other DNA
gagccctgagttgtatgtgc

SEQ ID NO: 25054 - DNA, 20 bp, synthetic construct
  misc_feature 1..20: note = chemically synthesized
  source 1..20: mol_type = other DNA
gccctgagttgtatgtgctg

SEQ ID NO: 25055 - DNA, 20 bp, synthetic construct
  misc_feature 1..20: note = chemically synthesized
  source 1..20: mol_type = other DNA
gttgtatgtgctggagcatg

SEQ ID NO: 25056 - DNA, 20 bp, synthetic construct
  misc_feature 1..20: note = chemically synthesized
  source 1..20: mol_type = other DNA
ttgtatgtgctggagcatgt

SEQ ID NO: 25057 - DNA, 20 bp, synthetic construct
  misc_feature 1..20: note = chemically synthesized
  source 1..20: mol_type = other DNA
tgtatgtgctggagcatgtg

SEQ ID NO: 25058 - DNA, 20 bp, synthetic construct
  misc_feature 1..20: note = chemically synthesized
  source 1..20: mol_type = other DNA
gtgctggagcatgtggggaa

SEQ ID NO: 25059 - DNA, 20 bp, synthetic construct
  misc_feature 1..20: note = chemically synthesized
  source 1..20: mol_type = other DNA
tggagcatgtggggaaaaga

SEQ ID NO: 25060 - DNA, 20 bp, synthetic construct
  misc_feature 1..20: note = chemically synthesized
  source 1..20: mol_type = other DNA
atgtggggaaaagaaagatg

SEQ ID NO: 25061 - DNA, 20 bp, synthetic construct
  misc_feature 1..20: note = chemically synthesized
  source 1..20: mol_type = other DNA
tgtggggaaaagaaagatgt

SEQ ID NO: 25062 - DNA, 20 bp, synthetic construct
  misc_feature 1..20: note = chemically synthesized
  source 1..20: mol_type = other DNA
gtggggaaaagaaagatgta

SEQ ID NO: 25063 - DNA, 20 bp, synthetic construct
  misc_feature 1..20: note = chemically synthesized
  source 1..20: mol_type = other DNA
tggggaaaagaaagatgtag

SEQ ID NO: 25064 - DNA, 20 bp, synthetic construct
  misc_feature 1..20: note = chemically synthesized
  source 1..20: mol_type = other DNA
ggggaaaagaaagatgtagg

SEQ ID NO: 25065 - DNA, 20 bp, synthetic construct
  misc_feature 1..20: note = chemically synthesized
  source 1..20: mol_type = other DNA
gaaaagaaagatgtaggggg

SEQ ID NO: 25066 - DNA, 20 bp, synthetic construct
  misc_feature 1..20: note = chemically synthesized
  source 1..20: mol_type = other DNA
aaagaaagatgtagggggtg

SEQ ID NO: 25067 - DNA, 20 bp, synthetic construct
  misc_feature 1..20: note = chemically synthesized
  source 1..20: mol_type = other DNA
gatgtagggggtggagcgtc

SEQ ID NO: 25068 - DNA, 20 bp, synthetic construct
  misc_feature 1..20: note = chemically synthesized
  source 1..20: mol_type = other DNA
ggtggagcgtcaagaaaaac

SEQ ID NO: 25069 - DNA, 20 bp, synthetic construct
  misc_feature 1..20: note = chemically synthesized
  source 1..20: mol_type = other DNA
aacaagacaaaaaaattcac

SEQ ID NO: 25070 - DNA, 20 bp, synthetic construct
  misc_feature 1..20: note = chemically synthesized
  source 1..20: mol_type = other DNA
acaaaaaaattcacgagcca

SEQ ID NO: 25071 - DNA, 20 bp, synthetic construct
  misc_feature 1..20: note = chemically synthesized
  source 1..20: mol_type = other DNA
aaattcacgagccatggaaa

SEQ ID NO: 25072 - DNA, 20 bp, synthetic construct
  misc_feature 1..20: note = chemically synthesized
  source 1..20: mol_type = other DNA
attcacgagccatggaaatg

SEQ ID NO: 25073 - DNA, 20 bp, synthetic construct
  misc_feature 1..20: note = chemically synthesized
  source 1..20: mol_type = other DNA
cacgagccatggaaatggag

SEQ ID NO: 25074 - DNA, 20 bp, synthetic construct
  misc_feature 1..20: note = chemically synthesized
  source 1..20: mol_type = other DNA
aagaaacactgtttctgctg

SEQ ID NO: 25075 - DNA, 20 bp, synthetic construct
  misc_feature 1..20: note = chemically synthesized
  source 1..20: mol_type = other DNA
gtttctgctgcagttgctct

SEQ ID NO: 25076 - DNA, 20 bp, synthetic construct
  misc_feature 1..20: note = chemically synthesized
  source 1..20: mol_type = other DNA
ctgctgcagttgctcttagc

SEQ ID NO: 25077 - DNA, 20 bp, synthetic construct
  misc_feature 1..20: note = chemically synthesized
  source 1..20: mol_type = other DNA
tgctgcagttgctcttagcc

SEQ ID NO: 25078 - DNA, 20 bp, synthetic construct
  misc_feature 1..20: note = chemically synthesized
  source 1..20: mol_type = other DNA
gctgcagttgctcttagcca

SEQ ID NO: 25079 - DNA, 20 bp, synthetic construct
  misc_feature 1..20: note = chemically synthesized
  source 1..20: mol_type = other DNA
ctgcagttgctcttagccag

SEQ ID NO: 25080 - DNA, 20 bp, synthetic construct
  misc_feature 1..20: note = chemically synthesized
  source 1..20: mol_type = other DNA
agttgctcttagccaggggc

SEQ ID NO: 25081 - DNA, 20 bp, synthetic construct
  misc_feature 1..20: note = chemically synthesized
  source 1..20: mol_type = other DNA
ctcttagccaggggccagcg

SEQ ID NO: 25082 - DNA, 20 bp, synthetic construct
  misc_feature 1..20: note = chemically synthesized
  source 1..20: mol_type = other DNA
tagccaggggccagcgtgga

SEQ ID NO: 25083 - DNA, 20 bp, synthetic construct
  misc_feature 1..20: note = chemically synthesized
  source 1..20: mol_type = other DNA
ccctgtcctccttcacctgc

SEQ ID NO: 25084 - DNA, 20 bp, synthetic construct
  misc_feature 1..20: note = chemically synthesized
  source 1..20: mol_type = other DNA
ctccttcacctgccagcttg

SEQ ID NO: 25085 - DNA, 20 bp, synthetic construct
  misc_feature 1..20: note = chemically synthesized
  source 1..20: mol_type = other DNA
tccttcacctgccagcttgt

SEQ ID NO: 25086 - DNA, 20 bp, synthetic construct
  misc_feature 1..20: note = chemically synthesized
  source 1..20: mol_type = other DNA
tcacctgccagcttgtgggc

SEQ ID NO: 25087 - DNA, 20 bp, synthetic construct
  misc_feature 1..20: note = chemically synthesized
  source 1..20: mol_type = other DNA
cacctgccagcttgtgggct

SEQ ID NO: 25088 - DNA, 20 bp, synthetic construct
  misc_feature 1..20: note = chemically synthesized
  source 1..20: mol_type = other DNA
ctgccagcttgtgggctggg

SEQ ID NO: 25089 - DNA, 20 bp, synthetic construct
  misc_feature 1..20: note = chemically synthesized
  source 1..20: mol_type = other DNA
gcttgtgggctgggtggctt

SEQ ID NO: 25090 - DNA, 20 bp, synthetic construct
  misc_feature 1..20: note = chemically synthesized
  source 1..20: mol_type = other DNA
gggctgggtggcttaagttc

SEQ ID NO: 25091 - DNA, 20 bp, synthetic construct
  misc_feature 1..20: note = chemically synthesized
  source 1..20: mol_type = other DNA
ggtggcttaagttctagccc

SEQ ID NO: 25092 - DNA, 20 bp, synthetic construct
  misc_feature 1..20: note = chemically synthesized
  source 1..20: mol_type = other DNA
gtggcttaagttctagccct

SEQ ID NO: 25093 - DNA, 20 bp, synthetic construct
  misc_feature 1..20: note = chemically synthesized
  source 1..20: mol_type = other DNA
tgggtgaccctctgactcct

SEQ ID NO: 25094 - DNA, 20 bp, synthetic construct
  misc_feature 1..20: note = chemically synthesized
  source 1..20: mol_type = other DNA
ggtgaccctctgactcctga

SEQ ID NO: 25095 - DNA, 20 bp, synthetic construct
  misc_feature 1..20: note = chemically synthesized
  source 1..20: mol_type = other DNA
agagcatgtgtatgtgcttg

SEQ ID NO: 25096 - DNA, 20 bp, synthetic construct
  misc_feature 1..20: note = chemically synthesized
  source 1..20: mol_type = other DNA
gcatgtgtatgtgcttgtgg

SEQ ID NO: 25097 - DNA, 20 bp, synthetic construct
  misc_feature 1..20: note = chemically synthesized
  source 1..20: mol_type = other DNA
catgtgtatgtgcttgtggt

SEQ ID NO: 25098 - DNA, 20 bp, synthetic construct
  misc_feature 1..20: note = chemically synthesized
  source 1..20: mol_type = other DNA
gtgtatgtgcttgtggtggg

SEQ ID NO: 25099 - DNA, 20 bp, synthetic construct
  misc_feature 1..20: note = chemically synthesized
  source 1..20: mol_type = other DNA
tgtatgtgcttgtggtgggt

SEQ ID NO: 25100 - DNA, 20 bp, synthetic construct
  misc_feature 1..20: note = chemically synthesized
  source 1..20: mol_type = other DNA
gtatgtgcttgtggtgggtg

SEQ ID NO: 25101 - DNA, 20 bp, synthetic construct
  misc_feature 1..20: note = chemically synthesized
  source 1..20: mol_type = other DNA
tgcttgtggtgggtggggtg

SEQ ID NO: 25102 - DNA, 20 bp, synthetic construct
  misc_feature 1..20: note = chemically synthesized
  source 1..20: mol_type = other DNA
gggtggggtgtagtgcgtta

SEQ ID NO: 25103 - DNA, 20 bp, synthetic construct
  misc_feature 1..20: note = chemically synthesized
  source 1..20: mol_type = other DNA
tgtagtgcgttaaagccgca

SEQ ID NO: 25104 - DNA, 20 bp, synthetic construct
  misc_feature 1..20: note = chemically synthesized
  source 1..20: mol_type = other DNA
agtgcgttaaagccgcaaag

SEQ ID NO: 25105 - DNA, 20 bp, synthetic construct
  misc_feature 1..20: note = chemically synthesized
  source 1..20: mol_type = other DNA
tgcgttaaagccgcaaagca

SEQ ID NO: 25106 - DNA, 20 bp, synthetic construct
  misc_feature 1..20: note = chemically synthesized
  source 1..20: mol_type = other DNA
gcgttaaagccgcaaagcag

SEQ ID NO: 25107 - DNA, 20 bp, synthetic construct
  misc_feature 1..20: note = chemically synthesized
  source 1..20: mol_type = other DNA
agccgcaaagcagaggtgcg

SEQ ID NO: 25108 - DNA, 20 bp, synthetic construct
  misc_feature 1..20: note = chemically synthesized
  source 1..20: mol_type = other DNA
gccgcaaagcagaggtgcga

SEQ ID NO: 25109 - DNA, 20 bp, synthetic construct
  misc_feature 1..20: note = chemically synthesized
  source 1..20: mol_type = other DNA
ccgcaaagcagaggtgcgaa

SEQ ID NO: 25110 - DNA, 20 bp, synthetic construct
  misc_feature 1..20: note = chemically synthesized
  source 1..20: mol_type = other DNA
aagcagaggtgcgaagggcc

SEQ ID NO: 25111 - DNA, 20 bp, synthetic construct
  misc_feature 1..20: note = chemically synthesized
  source 1..20: mol_type = other DNA
gaggtgcgaagggcctggtg

SEQ ID NO: 25112 - DNA, 20 bp, synthetic construct
  misc_feature 1..20: note = chemically synthesized
  source 1..20: mol_type = other DNA
aggtgcgaagggcctggtgt

SEQ ID NO: 25113 - DNA, 20 bp, synthetic construct
  misc_feature 1..20: note = chemically synthesized
  source 1..20: mol_type = other DNA
gaagggcctggtgtaggtcg

SEQ ID NO: 25114 - DNA, 20 bp, synthetic construct
  misc_feature 1..20: note = chemically synthesized
  source 1..20: mol_type = other DNA
aagggcctggtgtaggtcgt

SEQ ID NO: 25115 - DNA, 20 bp, synthetic construct
  misc_feature 1..20: note = chemically synthesized
  source 1..20: mol_type = other DNA
gggcctggtgtaggtcgtgg

SEQ ID NO: 25116 - DNA, 20 bp, synthetic construct
  misc_feature 1..20: note = chemically synthesized
  source 1..20: mol_type = other DNA
ctggtgtaggtcgtgggaga

SEQ ID NO: 25117 - DNA, 20 bp, synthetic construct
  misc_feature 1..20: note = chemically synthesized
  source 1..20: mol_type = other DNA
ggtgtaggtcgtgggagaca

SEQ ID NO: 25118 - DNA, 20 bp, synthetic construct
  misc_feature 1..20: note = chemically synthesized
  source 1..20: mol_type = other DNA
tgtaggtcgtgggagacaga

SEQ ID NO: 25119 - DNA, 20 bp, synthetic construct
  misc_feature 1..20: note = chemically synthesized
  source 1..20: mol_type = other DNA
aggtcgtgggagacagagag

SEQ ID NO: 25120 - DNA, 20 bp, synthetic construct
  misc_feature 1..20: note = chemically synthesized
  source 1..20: mol_type = other DNA
ggtcgtgggagacagagaga

SEQ ID NO: 25121 - DNA, 20 bp, synthetic construct
  misc_feature 1..20: note = chemically synthesized
  source 1..20: mol_type = other DNA
gggagacagagagaaggccc

SEQ ID NO: 25122 - DNA, 20 bp, synthetic construct
  misc_feature 1..20: note = chemically synthesized
  source 1..20: mol_type = other DNA
ggagacagagagaaggccct

SEQ ID NO: 25123 - DNA, 20 bp, synthetic construct
  misc_feature 1..20: note = chemically synthesized
  source 1..20: mol_type = other DNA
ctgaatgtttttacttttcc

SEQ ID NO: 25124 - DNA, 20 bp, synthetic construct
  misc_feature 1..20: note = chemically synthesized
  source 1..20: mol_type = other DNA
tgaatgtttttacttttcct

SEQ ID NO: 25125 - DNA, 20 bp, synthetic construct
  misc_feature 1..20: note = chemically synthesized
  source 1..20: mol_type = other DNA
cctgcttcatttttgttttc

SEQ ID NO: 25126 - DNA, 20 bp, synthetic construct
  misc_feature 1..20: note = chemically synthesized
  source 1..20: mol_type = other DNA
ctgcttcatttttgttttca

SEQ ID NO: 25127 - DNA, 20 bp, synthetic construct
  misc_feature 1..20: note = chemically synthesized
  source 1..20: mol_type = other DNA
gcttcatttttgttttcaag

SEQ ID NO: 25128 - DNA, 20 bp, synthetic construct
  misc_feature 1..20: note = chemically synthesized
  source 1..20: mol_type = other DNA
gtttctctcttcttgccttc

SEQ ID NO: 25129 - DNA, 20 bp, synthetic construct
  misc_feature 1..20: note = chemically synthesized
  source 1..20: mol_type = other DNA
cttgccttccagcatgtccc

SEQ ID NO: 25130 - DNA, 20 bp, synthetic construct
  misc_feature 1..20: note = chemically synthesized
  source 1..20: mol_type = other DNA
gccttccagcatgtcccaag

SEQ ID NO: 25131 - DNA, 20 bp, synthetic construct
  misc_feature 1..20: note = chemically synthesized
  source 1..20: mol_type = other DNA
cttccagcatgtcccaagca

SEQ ID NO: 25132 - DNA, 20 bp, synthetic construct
  misc_feature 1..20: note = chemically synthesized
  source 1..20: mol_type = other DNA
cagcatgtcccaagcagaga

SEQ ID NO: 25133 - DNA, 20 bp, synthetic construct
  misc_feature 1..20: note = chemically synthesized
  source 1..20: mol_type = other DNA
agcatgtcccaagcagagat

SEQ ID NO: 25134 - DNA, 20 bp, synthetic construct
  misc_feature 1..20: note = chemically synthesized
  source 1..20: mol_type = other DNA
atgtcccaagcagagatggg

SEQ ID NO: 25135 - DNA, 20 bp, synthetic construct
  misc_feature 1..20: note = chemically synthesized
  source 1..20: mol_type = other DNA
cccaagcagagatgggtggc

SEQ ID NO: 25136 - DNA, 20 bp, synthetic construct
  misc_feature 1..20: note = chemically synthesized
  source 1..20: mol_type = other DNA
ccaagcagagatgggtggct

SEQ ID NO: 25137 - DNA, 20 bp, synthetic construct
  misc_feature 1..20: note = chemically synthesized
  source 1..20: mol_type = other DNA
cagagatgggtggctaggtt

SEQ ID NO: 25138 - DNA, 20 bp, synthetic construct
  misc_feature 1..20: note = chemically synthesized
  source 1..20: mol_type = other DNA
agagatgggtggctaggttt

SEQ ID NO: 25139 - DNA, 20 bp, synthetic construct
  misc_feature 1..20: note = chemically synthesized
  source 1..20: mol_type = other DNA
tgggtggctaggtttgggaa

SEQ ID NO: 25140 - DNA, 20 bp, synthetic construct
  misc_feature 1..20: note = chemically synthesized
  source 1..20: mol_type = other DNA
gggtggctaggtttgggaat

SEQ ID NO: 25141 - DNA, 20 bp, synthetic construct
  misc_feature 1..20: note = chemically synthesized
  source 1..20: mol_type = other DNA
ggtggctaggtttgggaatg

SEQ ID NO: 25142 - DNA, 20 bp, synthetic construct
  misc_feature 1..20: note = chemically synthesized
  source 1..20: mol_type = other DNA
taggtttgggaatggggtgc

SEQ ID NO: 25143 - DNA, 20 bp, synthetic construct
  misc_feature 1..20: note = chemically synthesized
  source 1..20: mol_type = other DNA
aggtttgggaatggggtgct

SEQ ID NO: 25144 - DNA, 20 bp, synthetic construct
  misc_feature 1..20: note = chemically synthesized
  source 1..20: mol_type = other DNA
gtttgggaatggggtgctgg

SEQ ID NO: 25145 - DNA, 20 bp, synthetic construct
  misc_feature 1..20: note = chemically synthesized
  source 1..20: mol_type = other DNA
tttgggaatggggtgctggg

SEQ ID NO: 25146 - DNA, 20 bp, synthetic construct
  misc_feature 1..20: note = chemically synthesized
  source 1..20: mol_type = other DNA
ttgggaatggggtgctggga

SEQ ID NO: 25147 - DNA, 20 bp, synthetic construct
  misc_feature 1..20: note = chemically synthesized
  source 1..20: mol_type = other DNA
tgggaatggggtgctgggag

SEQ ID NO: 25148 - DNA, 20 bp, synthetic construct
  misc_feature 1..20: note = chemically synthesized
  source 1..20: mol_type = other DNA
ggaatggggtgctgggaggg

SEQ ID NO: 25149 - DNA, 20 bp, synthetic construct
  misc_feature 1..20: note = chemically synthesized
  source 1..20: mol_type = other DNA
gaatggggtgctgggagggg

SEQ ID NO: 25150 - DNA, 20 bp, synthetic construct
  misc_feature 1..20: note = chemically synthesized
  source 1..20: mol_type = other DNA
aatggggtgctgggagggga

SEQ ID NO: 25151 - DNA, 20 bp, synthetic construct
  misc_feature 1..20: note = chemically synthesized
  source 1..20: mol_type = other DNA
atggggtgctgggaggggag

SEQ ID NO: 25152 - DNA, 20 bp, synthetic construct
  misc_feature 1..20: note = chemically synthesized
  source 1..20: mol_type = other DNA
ggggaggggatatcccattc

SEQ ID NO: 25153 - DNA, 20 bp, synthetic construct
  misc_feature 1..20: note = chemically synthesized
  source 1..20: mol_type = other DNA
gggaggggatatcccattcc

SEQ ID NO: 25154 - DNA, 20 bp, synthetic construct
  misc_feature 1..20: note = chemically synthesized
  source 1..20: mol_type = other DNA
ggaggggatatcccattcca

SEQ ID NO: 25155 - DNA, 20 bp, synthetic construct
  misc_feature 1..20: note = chemically synthesized
  source 1..20: mol_type = other DNA
tcccattccagggcccttcc

SEQ ID NO: 25156 - DNA, 20 bp, synthetic construct
  misc_feature 1..20: note = chemically synthesized
  source 1..20: mol_type = other DNA
tccagggcccttcccagttt

SEQ ID NO: 25157 - DNA, 20 bp, synthetic construct
  misc_feature 1..20: note = chemically synthesized
  source 1..20: mol_type = other DNA
ccagggcccttcccagtttt

SEQ ID NO: 25158 - DNA, 20 bp, synthetic construct
  misc_feature 1..20: note = chemically synthesized
  source 1..20: mol_type = other DNA
cagggcccttcccagttttg

SEQ ID NO: 25159 - DNA, 20 bp, synthetic construct
  misc_feature 1..20: note = chemically synthesized
  source 1..20: mol_type = other DNA
gcccttcccagttttggggc

SEQ ID NO: 25160 - DNA, 20 bp, synthetic construct
  misc_feature 1..20: note = chemically synthesized
  source 1..20: mol_type = other DNA
cccttcccagttttggggct

SEQ ID NO: 25161 - DNA, 20 bp, synthetic construct
  misc_feature 1..20: note = chemically synthesized
  source 1..20: mol_type = other DNA
ttcccagttttggggctggg

SEQ ID NO: 25162 - DNA, 20 bp, synthetic construct
  misc_feature 1..20: note = chemically synthesized
  source 1..20: mol_type = other DNA
tgggaagcctcaatctcctt

SEQ ID NO: 25163 - DNA, 20 bp, synthetic construct
  misc_feature 1..20: note = chemically synthesized
  source 1..20: mol_type = other DNA
agcctcaatctccttgagca

SEQ ID NO: 25164 - DNA, 20 bp, synthetic construct
  misc_feature 1..20: note = chemically synthesized
  source 1..20: mol_type = other DNA
ctcaatctccttgagcacag

SEQ ID NO: 25165 - DNA, 20 bp, synthetic construct
  misc_feature 1..20: note = chemically synthesized
  source 1..20: mol_type = other DNA
tcaatctccttgagcacagc

SEQ ID NO: 25166 - DNA, 20 bp, synthetic construct
  misc_feature 1..20: note = chemically synthesized
  source 1..20: mol_type = other DNA
caatctccttgagcacagca

SEQ ID NO: 25167 - DNA, 20 bp, synthetic construct
  misc_feature 1..20: note = chemically synthesized
  source 1..20: mol_type = other DNA
ctttgccttctttcttccct

SEQ ID NO: 25168 - DNA, 20 bp, synthetic construct
  misc_feature 1..20: note = chemically synthesized
  source 1..20: mol_type = other DNA
cttctttcttccctgagctg

SEQ ID NO: 25169 - DNA, 20 bp, synthetic construct
  misc_feature 1..20: note = chemically synthesized
  source 1..20: mol_type = other DNA
ccctgagctgcggccaccac

SEQ ID NO: 25170 - DNA, 20 bp, synthetic construct
  misc_feature 1..20: note = chemically synthesized
  source 1..20: mol_type = other DNA
cctgagctgcggccaccact

SEQ ID NO: 25171 - DNA, 20 bp, synthetic construct
  misc_feature 1..20: note = chemically synthesized
  source 1..20: mol_type = other DNA
cggccaccactgggctgtac

SEQ ID NO: 25172 - DNA, 20 bp, synthetic construct
  misc_feature 1..20: note = chemically synthesized
  source 1..20: mol_type = other DNA
ggccaccactgggctgtacc

SEQ ID NO: 25173 - DNA, 20 bp, synthetic construct
  misc_feature 1..20: note = chemically synthesized
  source 1..20: mol_type = other DNA
cactgggctgtaccaggatc

SEQ ID NO: 25174 - DNA, 20 bp, synthetic construct
  misc_feature 1..20: note = chemically synthesized
  source 1..20: mol_type = other DNA
taccaggatctagtgcaact

SEQ ID NO: 25175 - DNA, 20 bp, synthetic construct
  misc_feature 1..20: note = chemically synthesized
  source 1..20: mol_type = other DNA
accaggatctagtgcaactt

SEQ ID NO: 25176 - DNA, 20 bp, synthetic construct
  misc_feature 1..20: note = chemically synthesized
  source 1..20: mol_type = other DNA
tctagtgcaacttgggtgac

SEQ ID NO: 25177 - DNA, 20 bp, synthetic construct
  misc_feature 1..20: note = chemically synthesized
  source 1..20: mol_type = other DNA
ctagtgcaacttgggtgaca

SEQ ID NO: 25178 - DNA, 20 bp, synthetic construct
  misc_feature 1..20: note = chemically synthesized
  source 1..20: mol_type = other DNA
gcaacttgggtgacaaggtg

SEQ ID NO: 25179 - DNA, 20 bp, synthetic construct
  misc_feature 1..20: note = chemically synthesized
  source 1..20: mol_type = other DNA
caacttgggtgacaaggtgt

SEQ ID NO: 25180 - DNA, 20 bp, synthetic construct
  misc_feature 1..20: note = chemically synthesized
  source 1..20: mol_type = other DNA
cttgggtgacaaggtgtggg

SEQ ID NO: 25181 - DNA, 20 bp, synthetic construct
  misc_feature 1..20: note = chemically synthesized
  source 1..20: mol_type = other DNA
tgacaaggtgtgggtggctg

SEQ ID NO: 25182 - DNA, 20 bp, synthetic construct
  misc_feature 1..20: note = chemically synthesized
  source 1..20: mol_type = other DNA
gacaaggtgtgggtggctgc

SEQ ID NO: 25183 - DNA, 20 bp, synthetic construct
  misc_feature 1..20: note = chemically synthesized
  source 1..20: mol_type = other DNA
caggtgttctccctgcatct

SEQ ID NO: 25184 - DNA, 20 bp, synthetic construct
  misc_feature 1..20: note = chemically synthesized
  source 1..20: mol_type = other DNA
aggtgttctccctgcatctg

SEQ ID NO: 25185 - DNA, 20 bp, synthetic construct
  misc_feature 1..20: note = chemically synthesized
  source 1..20: mol_type = other DNA
tgttctccctgcatctgagg

SEQ ID NO: 25186 - DNA, 20 bp, synthetic construct
  misc_feature 1..20: note = chemically synthesized
  source 1..20: mol_type = other DNA
gttctccctgcatctgaggc

SEQ ID NO: 25187 - DNA, 20 bp, synthetic construct
  misc_feature 1..20: note = chemically synthesized
  source 1..20: mol_type = other DNA
ttctccctgcatctgaggca

SEQ ID NO: 25188 - DNA, 20 bp, synthetic construct
  misc_feature 1..20: note = chemically synthesized
  source 1..20: mol_type = other DNA
ctccctgcatctgaggcagg

SEQ ID NO: 25189 - DNA, 20 bp, synthetic construct
  misc_feature 1..20: note = chemically synthesized
  source 1..20: mol_type = other DNA
tccctgcatctgaggcaggg

SEQ ID NO: 25190 - DNA, 20 bp, synthetic construct
  misc_feature 1..20: note = chemically synthesized
  source 1..20: mol_type = other DNA
ctgcatctgaggcagggagg

SEQ ID NO: 25191 - DNA, 20 bp, synthetic construct
  misc_feature 1..20: note = chemically synthesized
  source 1..20: mol_type = other DNA
atctgaggcagggaggcagc

SEQ ID NO: 25192 - DNA, 20 bp, synthetic construct
  misc_feature 1..20: note = chemically synthesized
  source 1..20: mol_type = other DNA
tctgaggcagggaggcagct

SEQ ID NO: 25193 - DNA, 20 bp, synthetic construct
  misc_feature 1..20: note = chemically synthesized
  source 1..20: mol_type = other DNA
ctgaggcagggaggcagctg

SEQ ID NO: 25194 - DNA, 20 bp, synthetic construct
  misc_feature 1..20: note = chemically synthesized
  source 1..20: mol_type = other DNA
tgaggcagggaggcagctgg

SEQ ID NO: 25195 - DNA, 20 bp, synthetic construct
  misc_feature 1..20: note = chemically synthesized
  source 1..20: mol_type = other DNA
gggaggcagctgggggcttc

SEQ ID NO: 25196 - DNA, 20 bp, synthetic construct
  misc_feature 1..20: note = chemically synthesized
  source 1..20: mol_type = other DNA
ggcagctgggggcttccagc

SEQ ID NO: 25197 - DNA, 20 bp, synthetic construct
  misc_feature 1..20: note = chemically synthesized
  source 1..20: mol_type = other DNA
ccagcctgtaatgcccctcc

SEQ ID NO: 25198 - DNA, 20 bp, synthetic construct
  misc_feature 1..20: note = chemically synthesized
  source 1..20: mol_type = other DNA
cagcctgtaatgcccctccc

SEQ ID NO: 25199 - DNA, 20 bp, synthetic construct
  misc_feature 1..20: note = chemically synthesized
  source 1..20: mol_type = other DNA
tgtaatgcccctcccaggtc

SEQ ID NO: 25200 - DNA, 20 bp, synthetic construct
  misc_feature 1..20: note = chemically synthesized
  source 1..20: mol_type = other DNA
ccctcccaggtctagcttcc

SEQ ID NO: 25201 - DNA, 20 bp, synthetic construct
  misc_feature 1..20: note = chemically synthesized
  source 1..20: mol_type = other DNA
agcttcctagccttattttt

SEQ ID NO: 25202 - DNA, 20 bp, synthetic construct
  misc_feature 1..20: note = chemically synthesized
  source 1..20: mol_type = other DNA
gccttatttttaagcccttt

SEQ ID NO: 25203 - DNA, 20 bp, synthetic construct
  misc_feature 1..20: note = chemically synthesized
  source 1..20: mol_type = other DNA
ttatttttaagcccttttag

SEQ ID NO: 25204 - DNA, 20 bp, synthetic construct
  misc_feature 1..20: note = chemically synthesized
  source 1..20: mol_type = other DNA
atttttaagcccttttagtg

SEQ ID NO: 25205 - DNA, 20 bp, synthetic construct
  misc_feature 1..20: note = chemically synthesized
  source 1..20: mol_type = other DNA
ttagtggagcaaaaactatt

SEQ ID NO: 25206 - DNA, 20 bp, synthetic construct
  misc_feature 1..20: note = chemically synthesized
  source 1..20: mol_type = other DNA
caaaaactatttagaactat

SEQ ID NO: 25207 - DNA, 20 bp, synthetic construct
  misc_feature 1..20: note = chemically synthesized
  source 1..20: mol_type = other DNA
tagaactatgagttcaaaaa

SEQ ID NO: 25208 - DNA, 20 bp, synthetic construct
  misc_feature 1..20: note = chemically synthesized
  source 1..20: mol_type = other DNA
agaactatgagttcaaaaat

SEQ ID NO: 25209 - DNA, 20 bp, synthetic construct
  misc_feature 1..20: note = chemically synthesized
  source 1..20: mol_type = other DNA
gttcaaaaataggattattc

SEQ ID NO: 25210 - DNA, 20 bp, synthetic construct
  misc_feature 1..20: note = chemically synthesized
  source 1..20: mol_type = other DNA
caaaaataggattattcaag

SEQ ID NO: 25211 - DNA, 20 bp, synthetic construct
  misc_feature 1..20: note = chemically synthesized
  source 1..20: mol_type = other DNA
aaaataggattattcaagcg

SEQ ID NO: 25212 - DNA, 20 bp, synthetic construct
  misc_feature 1..20: note = chemically synthesized
  source 1..20: mol_type = other DNA
aaataggattattcaagcgg

SEQ ID NO: 25213 - DNA, 20 bp, synthetic construct
  misc_feature 1..20: note = chemically synthesized
  source 1..20: mol_type = other DNA
cttcacactgttctttctct

SEQ ID NO: 25214 - DNA, 20 bp, synthetic construct
  misc_feature 1..20: note = chemically synthesized
  source 1..20: mol_type = other DNA
ttcacactgttctttctctt

SEQ ID NO: 25215 - DNA, 20 bp, synthetic construct
  misc_feature 1..20: note = chemically synthesized
  source 1..20: mol_type = other DNA
cactgttctttctcttggga

SEQ ID NO: 25216 - DNA, 20 bp, synthetic construct
  misc_feature 1..20: note = chemically synthesized
  source 1..20: mol_type = other DNA
ctgttctttctcttgggaca

SEQ ID NO: 25217 - DNA, 20 bp, synthetic construct
  misc_feature 1..20: note = chemically synthesized
  source 1..20: mol_type = other DNA
tctttctcttgggacagaga

SEQ ID NO: 25218 - DNA, 20 bp, synthetic construct
  misc_feature 1..20: note = chemically synthesized
  source 1..20: mol_type = other DNA
ctttctcttgggacagagat

SEQ ID NO: 25219 - DNA, 20 bp, synthetic construct
  misc_feature 1..20: note = chemically synthesized
  source 1..20: mol_type = other DNA
tttctcttgggacagagatg

SEQ ID NO: 25220 - DNA, 20 bp, synthetic construct
  misc_feature 1..20: note = chemically synthesized
  source 1..20: mol_type = other DNA
ttctcttgggacagagatgg

SEQ ID NO: 25221 - DNA, 20 bp, synthetic construct
  misc_feature 1..20: note = chemically synthesized
  source 1..20: mol_type = other DNA
ttgggacagagatgggggtg

SEQ ID NO: 25222 - DNA, 20 bp, synthetic construct
  misc_feature 1..20: note = chemically synthesized
  source 1..20: mol_type = other DNA
tgggacagagatgggggtgc

SEQ ID NO: 25223 - DNA, 20 bp, synthetic construct
  misc_feature 1..20: note = chemically synthesized
  source 1..20: mol_type = other DNA
gacagagatgggggtgcagg

SEQ ID NO: 25224 - DNA, 20 bp, synthetic construct
  misc_feature 1..20: note = chemically synthesized
  source 1..20: mol_type = other DNA
acagagatgggggtgcaggt

SEQ ID NO: 25225 - DNA, 20 bp, synthetic construct
  misc_feature 1..20: note = chemically synthesized
  source 1..20: mol_type = other DNA
cagagatgggggtgcaggta

SEQ ID NO: 25226 - DNA, 20 bp, synthetic construct
  misc_feature 1..20: note = chemically synthesized
  source 1..20: mol_type = other DNA
agagatgggggtgcaggtag

SEQ ID NO: 25227 - DNA, 20 bp, synthetic construct
  misc_feature 1..20: note = chemically synthesized
  source 1..20: mol_type = other DNA
tgggggtgcaggtaggggat

SEQ ID NO: 25228 - DNA, 20 bp, synthetic construct
  misc_feature 1..20: note = chemically synthesized
  source 1..20: mol_type = other DNA
gtgcaggtaggggatgagaa

SEQ ID NO: 25229 - DNA, 20 bp, synthetic construct
  misc_feature 1..20: note = chemically synthesized
  source 1..20: mol_type = other DNA
gcaggtaggggatgagaata

SEQ ID NO: 25230 - DNA, 20 bp, synthetic construct
  misc_feature 1..20: note = chemically synthesized
  source 1..20: mol_type = other DNA
caggtaggggatgagaatag

SEQ ID NO: 25231 - DNA, 20 bp, synthetic construct
  misc_feature 1..20: note = chemically synthesized
  source 1..20: mol_type = other DNA
gatgagaatagaggaaaatg

SEQ ID NO: 25232 - DNA, 20 bp, synthetic construct
  misc_feature 1..20: note = chemically synthesized
  source 1..20: mol_type = other DNA
tgagaatagaggaaaatgtg

SEQ ID NO: 25233 - DNA, 20 bp, synthetic construct
  misc_feature 1..20: note = chemically synthesized
  source 1..20: mol_type = other DNA
gagaatagaggaaaatgtgg

SEQ ID NO: 25234 - DNA, 20 bp, synthetic construct
  misc_feature 1..20: note = chemically synthesized
  source 1..20: mol_type = other DNA
gaggattgctaaaacaaatt

SEQ ID NO: 25235 - DNA, 20 bp, synthetic construct
  misc_feature 1..20: note = chemically synthesized
  source 1..20: mol_type = other DNA
ggattgctaaaacaaattga

SEQ ID NO: 25236 - DNA, 20 bp, synthetic construct
  misc_feature 1..20: note = chemically synthesized
  source 1..20: mol_type = other DNA
attgctaaaacaaattgaga

SEQ ID NO: 25237 - DNA, 20 bp, synthetic construct
  misc_feature 1..20: note = chemically synthesized
  source 1..20: mol_type = other DNA
ttgctaaaacaaattgagag

SEQ ID NO: 25238 - DNA, 20 bp, synthetic construct
  misc_feature 1..20: note = chemically synthesized
  source 1..20: mol_type = other DNA
ctaaaacaaattgagagagg

SEQ ID NO: 25239 - DNA, 20 bp, synthetic construct
  misc_feature 1..20: note = chemically synthesized
  source 1..20: mol_type = other DNA
taaaacaaattgagagagga

SEQ ID NO: 25240 - DNA, 20 bp, synthetic construct
  misc_feature 1..20: note = chemically synthesized
  source 1..20: mol_type = other DNA
aacaaattgagagaggaagg

SEQ ID NO: 25241 - DNA, 20 bp, synthetic construct
  misc_feature 1..20: note = chemically synthesized
  source 1..20: mol_type = other DNA
aattgagagaggaaggaaga

SEQ ID NO: 25242 - DNA, 20 bp, synthetic construct
  misc_feature 1..20: note = chemically synthesized
  source 1..20: mol_type = other DNA
attgagagaggaaggaagaa

SEQ ID NO: 25243 - DNA, 20 bp, synthetic construct
  misc_feature 1..20: note = chemically synthesized
  source 1..20: mol_type = other DNA
ttgagagaggaaggaagaaa

SEQ ID NO: 25244 - DNA, 20 bp, synthetic construct
  misc_feature 1..20: note = chemically synthesized
  source 1..20: mol_type = other DNA
gaggaaggaagaaagggacc

SEQ ID NO: 25245 - DNA, 20 bp, synthetic construct
  misc_feature 1..20: note = chemically synthesized
  source 1..20: mol_type = other DNA
aggaagaaagggacccagac

SEQ ID NO: 25246 - DNA, 20 bp, synthetic construct
  misc_feature 1..20: note = chemically synthesized
  source 1..20: mol_type = other DNA
agggacccagactagtaatt

SEQ ID NO: 25247 - DNA, 20 bp, synthetic construct
  misc_feature 1..20: note = chemically synthesized
  source 1..20: mol_type = other DNA
agtaattgagaccaattcac

SEQ ID NO: 25248 - DNA, 20 bp, synthetic construct
  misc_feature 1..20: note = chemically synthesized
  source 1..20: mol_type = other DNA
aattgagaccaattcaccag

SEQ ID NO: 25249 - DNA, 20 bp, synthetic construct
  misc_feature 1..20: note = chemically synthesized
  source 1..20: mol_type = other DNA
accaattcaccagaagactt

SEQ ID NO: 25250 - DNA, 20 bp, synthetic construct
  misc_feature 1..20: note = chemically synthesized
  source 1..20: mol_type = other DNA
ccaattcaccagaagactta

SEQ ID NO: 25251 - DNA, 20 bp, synthetic construct
  misc_feature 1..20: note = chemically synthesized
  source 1..20: mol_type = other DNA
aggaaatttgacatccgctg

SEQ ID NO: 25252 - DNA, 20 bp, synthetic construct
  misc_feature 1..20: note = chemically synthesized
  source 1..20: mol_type = other DNA
cttttaactgtgtaattaca

SEQ ID NO: 25253 - DNA, 20 bp, synthetic construct
  misc_feature 1..20: note = chemically synthesized
  source 1..20: mol_type = other DNA
ctgtgtaattacacagcatt

SEQ ID NO: 25254 - DNA, 20 bp, synthetic construct
  misc_feature 1..20: note = chemically synthesized
  source 1..20: mol_type = other DNA
gtaattacacagcatttgga

SEQ ID NO: 25255 - DNA, 20 bp, synthetic construct
  misc_feature 1..20: note = chemically synthesized
  source 1..20: mol_type = other DNA
gattgtccataacaaccatt

SEQ ID NO: 25256 - DNA, 20 bp, synthetic construct
  misc_feature 1..20: note = chemically synthesized
  source 1..20: mol_type = other DNA
attgagtaaatacactatta

SEQ ID NO: 25257 - DNA, 20 bp, synthetic construct
  misc_feature 1..20: note = chemically synthesized
  source 1..20: mol_type = other DNA
actattacagattgccaaaa

SEQ ID NO: 25258 - DNA, 20 bp, synthetic construct
  misc_feature 1..20: note = chemically synthesized
  source 1..20: mol_type = other DNA
tacagattgccaaaatagta

SEQ ID NO: 25259 - DNA, 20 bp, synthetic construct
  misc_feature 1..20: note = chemically synthesized
  source 1..20: mol_type = other DNA
attgccaaaatagtacagtg

SEQ ID NO: 25260 - DNA, 20 bp, synthetic construct
  misc_feature 1..20: note = chemically synthesized
  source 1..20: mol_type = other DNA
aaaatagtacagtgaagcga

SEQ ID NO: 25261 - DNA, 20 bp, synthetic construct
  misc_feature 1..20: note = chemically synthesized
  source 1..20: mol_type = other DNA
agtacagtgaagcgatggac

SEQ ID NO: 25262 - DNA, 20 bp, synthetic construct
  misc_feature 1..20: note = chemically synthesized
  source 1..20: mol_type = other DNA
acagtgaagcgatggaccag

SEQ ID NO: 25263 - DNA, 20 bp, synthetic construct
  misc_feature 1..20: note = chemically synthesized
  source 1..20: mol_type = other DNA
atggaccagcagccactttc

SEQ ID NO: 25264 - DNA, 20 bp, synthetic construct
  misc_feature 1..20: note = chemically synthesized
  source 1..20: mol_type = other DNA
tggaccagcagccactttca

SEQ ID NO: 25265 - DNA, 20 bp, synthetic construct
  misc_feature 1..20: note = chemically synthesized
  source 1..20: mol_type = other DNA
ggaccagcagccactttcaa

SEQ ID NO: 25266 - DNA, 20 bp, synthetic construct
  misc_feature 1..20: note = chemically synthesized
  source 1..20: mol_type = other DNA
gaccagcagccactttcaag

SEQ ID NO: 25267 - DNA, 20 bp, synthetic construct
  misc_feature 1..20: note = chemically synthesized
  source 1..20: mol_type = other DNA
aaggggctgtaatcctctcc

SEQ ID NO: 25268 - DNA, 20 bp, synthetic construct
  misc_feature 1..20: note = chemically synthesized
  source 1..20: mol_type = other DNA
aggggctgtaatcctctcct

SEQ ID NO: 25269 - DNA, 20 bp, synthetic construct
  misc_feature 1..20: note = chemically synthesized
  source 1..20: mol_type = other DNA
ctgtaatcctctcctgggtc

SEQ ID NO: 25270 - DNA, 20 bp, synthetic construct
  misc_feature 1..20: note = chemically synthesized
  source 1..20: mol_type = other DNA
tgtaatcctctcctgggtca

SEQ ID NO: 25271 - DNA, 20 bp, synthetic construct
  misc_feature 1..20: note = chemically synthesized
  source 1..20: mol_type = other DNA
ctcctgggtcaaggctgacc

SEQ ID NO: 25272 - DNA, 20 bp, synthetic construct
  misc_feature 1..20: note = chemically synthesized
  source 1..20: mol_type = other DNA
cctgggtcaaggctgaccca

SEQ ID NO: 25273 - DNA, 20 bp, synthetic construct
  misc_feature 1..20: note = chemically synthesized
  source 1..20: mol_type = other DNA
ctgggtcaaggctgacccag

SEQ ID NO: 25274 - DNA, 20 bp, synthetic construct
  misc_feature 1..20: note = chemically synthesized
  source 1..20: mol_type = other DNA
aggctgacccagaggctcct

SEQ ID NO: 25275 - DNA, 20 bp, synthetic construct
  misc_feature 1..20: note = chemically synthesized
  source 1..20: mol_type = other DNA
tgacccagaggctccttggt

SEQ ID NO: 25276 - DNA, 20 bp, synthetic construct
  misc_feature 1..20: note = chemically synthesized
  source 1..20: mol_type = other DNA
ttggttagtgaatcatttac

SEQ ID NO: 25277 - DNA, 20 bp, synthetic construct
  misc_feature 1..20: note = chemically synthesized
  source 1..20: mol_type = other DNA
tggttagtgaatcatttact

SEQ ID NO: 25278 - DNA, 20 bp, synthetic construct
  misc_feature 1..20: note = chemically synthesized
  source 1..20: mol_type = other DNA
ggttagtgaatcatttacta

SEQ ID NO: 25279 - DNA, 20 bp, synthetic construct
  misc_feature 1..20: note = chemically synthesized
  source 1..20: mol_type = other DNA
tagtgaatcatttactaggg

SEQ ID NO: 25280 - DNA, 20 bp, synthetic construct
  misc_feature 1..20: note = chemically synthesized
  source 1..20: mol_type = other DNA
agtgaatcatttactaggga

SEQ ID NO: 25281 - DNA, 20 bp, synthetic construct
  misc_feature 1..20: note = chemically synthesized
  source 1..20: mol_type = other DNA
ttactagggaaggtttcccc

SEQ ID NO: 25282 - DNA, 20 bp, synthetic construct
  misc_feature 1..20: note = chemically synthesized
  source 1..20: mol_type = other DNA
aggtttcccctggtcactgc

SEQ ID NO: 25283 - DNA, 20 bp, synthetic construct
  misc_feature 1..20: note = chemically synthesized
  source 1..20: mol_type = other DNA
cctggtcactgctggctcca

SEQ ID NO: 25284 - DNA, 20 bp, synthetic construct
  misc_feature 1..20: note = chemically synthesized
  source 1..20: mol_type = other DNA
tcactgctggctccatggcc

SEQ ID NO: 25285 - DNA, 20 bp, synthetic construct
  misc_feature 1..20: note = chemically synthesized
  source 1..20: mol_type = other DNA
gctccatggcctggtccttc

SEQ ID NO: 25286 - DNA, 20 bp, synthetic construct
  misc_feature 1..20: note = chemically synthesized
  source 1..20: mol_type = other DNA
catggcctggtccttccagc

SEQ ID NO: 25287 - DNA, 20 bp, synthetic construct
  misc_feature 1..20: note = chemically synthesized
  source 1..20: mol_type = other DNA
atggcctggtccttccagcc

SEQ ID NO: 25288 - DNA, 20 bp, synthetic construct
  misc_feature 1..20: note = chemically synthesized
  source 1..20: mol_type = other DNA
gtccttccagccaggtcatt

SEQ ID NO: 25289 - DNA, 20 bp, synthetic construct
  misc_feature 1..20: note = chemically synthesized
  source 1..20: mol_type = other DNA
tccagccaggtcatttagaa

SEQ ID NO: 25290 - DNA, 20 bp, synthetic construct
  misc_feature 1..20: note = chemically synthesized
  source 1..20: mol_type = other DNA
catttagaatggctctccaa

SEQ ID NO: 25291 - DNA, 20 bp, synthetic construct
  misc_feature 1..20: note = chemically synthesized
  source 1..20: mol_type = other DNA
atttagaatggctctccaac

SEQ ID NO: 25292 - DNA, 20 bp, synthetic construct
  misc_feature 1..20: note = chemically synthesized
  source 1..20: mol_type = other DNA
tagaatggctctccaacagg

SEQ ID NO: 25293 - DNA, 20 bp, synthetic construct
  misc_feature 1..20: note = chemically synthesized
  source 1..20: mol_type = other DNA
tggctctccaacaggaagaa

SEQ ID NO: 25294 - DNA, 20 bp, synthetic construct
  misc_feature 1..20: note = chemically synthesized
  source 1..20: mol_type = other DNA
aggaagaaaagttcactgca

SEQ ID NO: 25295 - DNA, 20 bp, synthetic construct
  misc_feature 1..20: note = chemically synthesized
  source 1..20: mol_type = other DNA
ttgaatcctaattatttatt

SEQ ID NO: 25296 - DNA, 20 bp, synthetic construct
  misc_feature 1..20: note = chemically synthesized
  source 1..20: mol_type = other DNA
tgaatcctaattatttattg

SEQ ID NO: 25297 - DNA, 20 bp, synthetic construct
  misc_feature 1..20: note = chemically synthesized
  source 1..20: mol_type = other DNA
gaatcctaattatttattga

SEQ ID NO: 25298 - DNA, 20 bp, synthetic construct
  misc_feature 1..20: note = chemically synthesized
  source 1..20: mol_type = other DNA
aatcctaattatttattgag

SEQ ID NO: 25299 - DNA, 20 bp, synthetic construct
  misc_feature 1..20: note = chemically synthesized
  source 1..20: mol_type = other DNA
ttgaggggctcttctttgcc

SEQ ID NO: 25300 - DNA, 20 bp, synthetic construct
  misc_feature 1..20: note = chemically synthesized
  source 1..20: mol_type = other DNA
gggctcttctttgcccagca

SEQ ID NO: 25301 - DNA, 20 bp, synthetic construct
  misc_feature 1..20: note = chemically synthesized
  source 1..20: mol_type = other DNA
ttctttgcccagcatggtgc

SEQ ID NO: 25302 - DNA, 20 bp, synthetic construct
  misc_feature 1..20: note = chemically synthesized
  source 1..20: mol_type = other DNA
ttgcccagcatggtgctgga

SEQ ID NO: 25303 - DNA, 20 bp, synthetic construct
  misc_feature 1..20: note = chemically synthesized
  source 1..20: mol_type = other DNA
ccagcatggtgctggacagt

SEQ ID NO: 25304 - DNA, 20 bp, synthetic construct
  misc_feature 1..20: note = chemically synthesized
  source 1..20: mol_type = other DNA
agcatggtgctggacagtca

SEQ ID NO: 25305 - DNA, 20 bp, synthetic construct
  misc_feature 1..20: note = chemically synthesized
  source 1..20: mol_type = other DNA
gcatggtgctggacagtcag

SEQ ID NO: 25306 - DNA, 20 bp, synthetic construct
  misc_feature 1..20: note = chemically synthesized
  source 1..20: mol_type = other DNA
tggtgctggacagtcagagg

SEQ ID NO: 25307 - DNA, 20 bp, synthetic construct
  misc_feature 1..20: note = chemically synthesized
  source 1..20: mol_type = other DNA
acagtcagaggtagaccact

SEQ ID NO: 25308 - DNA, 20 bp, synthetic construct
  misc_feature 1..20: note = chemically synthesized
  source 1..20: mol_type = other DNA
agaggtagaccactgagtct

SEQ ID NO: 25309 - DNA, 20 bp, synthetic construct
  misc_feature 1..20: note = chemically synthesized
  source 1..20: mol_type = other DNA
gaccactgagtcttggttct

SEQ ID NO: 25310 - DNA, 20 bp, synthetic construct
  misc_feature 1..20: note = chemically synthesized
  source 1..20: mol_type = other DNA
cactgagtcttggttcttag

SEQ ID NO: 25311 - DNA, 20 bp, synthetic construct
  misc_feature 1..20: note = chemically synthesized
  source 1..20: mol_type = other DNA
tcttagaagccttgaacttt

SEQ ID NO: 25312 - DNA, 20 bp, synthetic construct
  misc_feature 1..20: note = chemically synthesized
  source 1..20: mol_type = other DNA
agaagccttgaacttttagt

SEQ ID NO: 25313 - DNA, 20 bp, synthetic construct
  misc_feature 1..20: note = chemically synthesized
  source 1..20: mol_type = other DNA
aagccttgaacttttagttg

SEQ ID NO: 25314 - DNA, 20 bp, synthetic construct
  misc_feature 1..20: note = chemically synthesized
  source 1..20: mol_type = other DNA
tgaacttttagttggagaac

SEQ ID NO: 25315 - DNA, 20 bp, synthetic construct
  misc_feature 1..20: note = chemically synthesized
  source 1..20: mol_type = other DNA
acttttagttggagaaccag

SEQ ID NO: 25316 - DNA, 20 bp, synthetic construct
  misc_feature 1..20: note = chemically synthesized
  source 1..20: mol_type = other DNA
tttagttggagaaccagtgg

SEQ ID NO: 25317 - DNA, 20 bp, synthetic construct
  misc_feature 1..20: note = chemically synthesized
  source 1..20: mol_type = other DNA
tggtagatacatgctgatta

SEQ ID NO: 25318 - DNA, 20 bp, synthetic construct
  misc_feature 1..20: note = chemically synthesized
  source 1..20: mol_type = other DNA
ggtagatacatgctgattac

SEQ ID NO: 25319 - DNA, 20 bp, synthetic construct
  misc_feature 1..20: note = chemically synthesized
  source 1..20: mol_type = other DNA
gtagatacatgctgattaca

SEQ ID NO: 25320 - DNA, 20 bp, synthetic construct
  misc_feature 1..20: note = chemically synthesized
  source 1..20: mol_type = other DNA
agatacatgctgattacagg

SEQ ID NO: 25321 - DNA, 20 bp, synthetic construct
  misc_feature 1..20: note = chemically synthesized
  source 1..20: mol_type = other DNA
atgctgattacagggagact

SEQ ID NO: 25322 - DNA, 20 bp, synthetic construct
  misc_feature 1..20: note = chemically synthesized
  source 1..20: mol_type = other DNA
attacagggagacttggatc

SEQ ID NO: 25323 - DNA, 20 bp, synthetic construct
  misc_feature 1..20: note = chemically synthesized
  source 1..20: mol_type = other DNA
ttacagggagacttggatcc

SEQ ID NO: 25324 - DNA, 20 bp, synthetic construct
  misc_feature 1..20: note = chemically synthesized
  source 1..20: mol_type = other DNA
acagggagacttggatccag

SEQ ID NO: 25325 - DNA, 20 bp, synthetic construct
  misc_feature 1..20: note = chemically synthesized
  source 1..20: mol_type = other DNA
agacttggatccaggagaaa

SEQ ID NO: 25326 - DNA, 20 bp, synthetic construct
  misc_feature 1..20: note = chemically synthesized
  source 1..20: mol_type = other DNA
acttggatccaggagaaatg

SEQ ID NO: 25327 - DNA, 20 bp, synthetic construct
  misc_feature 1..20: note = chemically synthesized
  source 1..20: mol_type = other DNA
tggatccaggagaaatggag

SEQ ID NO: 25328 - DNA, 20 bp, synthetic construct
  misc_feature 1..20: note = chemically synthesized
  source 1..20: mol_type = other DNA
gatccaggagaaatggagtg

SEQ ID NO: 25329 - DNA, 20 bp, synthetic construct
  misc_feature 1..20: note = chemically synthesized
  source 1..20: mol_type = other DNA
tccaggagaaatggagtgga

SEQ ID NO: 25330 - DNA, 20 bp, synthetic construct
  misc_feature 1..20: note = chemically synthesized
  source 1..20: mol_type = other DNA
ggagaaatggagtggagagc

SEQ ID NO: 25331 - DNA, 20 bp, synthetic construct
  misc_feature 1..20: note = chemically synthesized
  source 1..20: mol_type = other DNA
gagaaatggagtggagagcc

SEQ ID NO: 25332 - DNA, 20 bp, synthetic construct
  misc_feature 1..20: note = chemically synthesized
  source 1..20: mol_type = other DNA
atggagtggagagccaggtt

SEQ ID NO: 25333 - DNA, 20 bp, synthetic construct
  misc_feature 1..20: note = chemically synthesized
  source 1..20: mol_type = other DNA
gagtggagagccaggttcag

SEQ ID NO: 25334 - DNA, 20 bp, synthetic construct
  misc_feature 1..20: note = chemically synthesized
  source 1..20: mol_type = other DNA
gtggagagccaggttcagaa

SEQ ID NO: 25335 - DNA, 20 bp, synthetic construct
  misc_feature 1..20: note = chemically synthesized
  source 1..20: mol_type = other DNA
ggagagccaggttcagaaga

SEQ ID NO: 25336 - DNA, 20 bp, synthetic construct
  misc_feature 1..20: note = chemically synthesized
  source 1..20: mol_type = other DNA
gaagagagacatatccttta

SEQ ID NO: 25337 - DNA, 20 bp, synthetic construct
  misc_feature 1..20: note = chemically synthesized
  source 1..20: mol_type = other DNA
aagagagacatatcctttac

SEQ ID NO: 25338 - DNA, 20 bp, synthetic construct
  misc_feature 1..20: note = chemically synthesized
  source 1..20: mol_type = other DNA
ttacaggcctttgtgttacc

SEQ ID NO: 25339 - DNA, 20 bp, synthetic construct
  misc_feature 1..20: note = chemically synthesized
  source 1..20: mol_type = other DNA
aggcctttgtgttacctagc

SEQ ID NO: 25340 - DNA, 20 bp, synthetic construct
  misc_feature 1..20: note = chemically synthesized
  source 1..20: mol_type = other DNA
agccagtgccttcatgtccc

SEQ ID NO: 25341 - DNA, 20 bp, synthetic construct
  misc_feature 1..20: note = chemically synthesized
  source 1..20: mol_type = other DNA
ccttcatgtccccagccccc

SEQ ID NO: 25342 - DNA, 20 bp, synthetic construct
  misc_feature 1..20: note = chemically synthesized
  source 1..20: mol_type = other DNA
gtccccagccccctggcctc

SEQ ID NO: 25343 - DNA, 20 bp, synthetic construct
  misc_feature 1..20: note = chemically synthesized
  source 1..20: mol_type = other DNA
tcccccctcctcgctgtcct

SEQ ID NO: 25344 - DNA, 20 bp, synthetic construct
  misc_feature 1..20: note = chemically synthesized
  source 1..20: mol_type = other DNA
cctcctcgctgtccttggtg

SEQ ID NO: 25345 - DNA, 20 bp, synthetic construct
  misc_feature 1..20: note = chemically synthesized
  source 1..20: mol_type = other DNA
tcctcgctgtccttggtgca

SEQ ID NO: 25346 - DNA, 20 bp, synthetic construct
  misc_feature 1..20: note = chemically synthesized
  source 1..20: mol_type = other DNA
tcgctgtccttggtgcagag

SEQ ID NO: 25347 - DNA, 20 bp, synthetic construct
  misc_feature 1..20: note = chemically synthesized
  source 1..20: mol_type = other DNA
cgctgtccttggtgcagagt

SEQ ID NO: 25348 - DNA, 20 bp, synthetic construct
  misc_feature 1..20: note = chemically synthesized
  source 1..20: mol_type = other DNA
gctgtccttggtgcagagtg

SEQ ID NO: 25349 - DNA, 20 bp, synthetic construct
  misc_feature 1..20: note = chemically synthesized
  source 1..20: mol_type = other DNA
gtccttggtgcagagtgggg

SEQ ID NO: 25350 - DNA, 20 bp, synthetic construct
  misc_feature 1..20: note = chemically synthesized
  source 1..20: mol_type = other DNA
gcagagtggggcagtcatct

SEQ ID NO: 25351 - DNA, 20 bp, synthetic construct
  misc_feature 1..20: note = chemically synthesized
  source 1..20: mol_type = other DNA
gagtggggcagtcatctcag

SEQ ID NO: 25352 - DNA, 20 bp, synthetic construct
  misc_feature 1..20: note = chemically synthesized
  source 1..20: mol_type = other DNA
agtggggcagtcatctcagt

SEQ ID NO: 25353 - DNA, 20 bp, synthetic construct
  misc_feature 1..20: note = chemically synthesized
  source 1..20: mol_type = other DNA
gtggggcagtcatctcagtg

SEQ ID NO: 25354 - DNA, 20 bp, synthetic construct
  misc_feature 1..20: note = chemically synthesized
  source 1..20: mol_type = other DNA
atctcagtggggcctcctcc

SEQ ID NO: 25355 - DNA, 20 bp, synthetic construct
  misc_feature 1..20: note = chemically synthesized
  source 1..20: mol_type = other DNA
tctcagtggggcctcctccc

SEQ ID NO: 25356 - DNA, 20 bp, synthetic construct
  misc_feature 1..20: note = chemically synthesized
  source 1..20: mol_type = other DNA
ctcagtggggcctcctcccg

SEQ ID NO: 25357 - DNA, 20 bp, synthetic construct
  misc_feature 1..20: note = chemically synthesized
  source 1..20: mol_type = other DNA
agtggggcctcctcccgggg

SEQ ID NO: 25358 - DNA, 20 bp, synthetic construct
  misc_feature 1..20: note = chemically synthesized
  source 1..20: mol_type = other DNA
cctcctcccggggaagtcca

SEQ ID NO: 25359 - DNA, 20 bp, synthetic construct
  misc_feature 1..20: note = chemically synthesized
  source 1..20: mol_type = other DNA
gtccacagcttgctccacac

SEQ ID NO: 25360 - DNA, 20 bp, synthetic construct
  misc_feature 1..20: note = chemically synthesized
  source 1..20: mol_type = other DNA
ccacagcttgctccacaccg

SEQ ID NO: 25361 - DNA, 20 bp, synthetic construct
  misc_feature 1..20: note = chemically synthesized
  source 1..20: mol_type = other DNA
cacagcttgctccacaccgg

SEQ ID NO: 25362 - DNA, 20 bp, synthetic construct
  misc_feature 1..20: note = chemically synthesized
  source 1..20: mol_type = other DNA
cagcttgctccacaccggag

SEQ ID NO: 25363 - DNA, 20 bp, synthetic construct
  misc_feature 1..20: note = chemically synthesized
  source 1..20: mol_type = other DNA
ccacaccggaggagccgcca

SEQ ID NO: 25364 - DNA, 20 bp, synthetic construct
  misc_feature 1..20: note = chemically synthesized
  source 1..20: mol_type = other DNA
accggaggagccgccaaagt

SEQ ID NO: 25365 - DNA, 20 bp, synthetic construct
  misc_feature 1..20: note = chemically synthesized
  source 1..20: mol_type = other DNA
aggagccgccaaagtcagcc

SEQ ID NO: 25366 - DNA, 20 bp, synthetic construct
  misc_feature 1..20: note = chemically synthesized
  source 1..20: mol_type = other DNA
gagccgccaaagtcagccaa

SEQ ID NO: 25367 - DNA, 20 bp, synthetic construct
  misc_feature 1..20: note = chemically synthesized
  source 1..20: mol_type = other DNA
ccaaagtcagccaagagccg

SEQ ID NO: 25368 - DNA, 20 bp, synthetic construct
  misc_feature 1..20: note = chemically synthesized
  source 1..20: mol_type = other DNA
caaagtcagccaagagccgc

SEQ ID NO: 25369 - DNA, 20 bp, synthetic construct
  misc_feature 1..20: note = chemically synthesized
  source 1..20: mol_type = other DNA
agccgcaggccataaatgca

SEQ ID NO: 25370 - DNA, 20 bp, synthetic construct
  misc_feature 1..20: note = chemically synthesized
  source 1..20: mol_type = other DNA
tgcaaagtatgatttaacaa

SEQ ID NO: 25371 - DNA, 20 bp, synthetic construct
  misc_feature 1..20: note = chemically synthesized
  source 1..20: mol_type = other DNA
aaagtatgatttaacaaaag

SEQ ID NO: 25372 - DNA, 20 bp, synthetic construct
  misc_feature 1..20: note = chemically synthesized
  source 1..20: mol_type = other DNA
atttaacaaaagcagctttt

SEQ ID NO: 25373 - DNA, 20 bp, synthetic construct
  misc_feature 1..20: note = chemically synthesized
  source 1..20: mol_type = other DNA
aacaaaagcagcttttgagt

SEQ ID NO: 25374 - DNA, 20 bp, synthetic construct
  misc_feature 1..20: note = chemically synthesized
  source 1..20: mol_type = other DNA
aaagcagcttttgagtgaga

SEQ ID NO: 25375 - DNA, 20 bp, synthetic construct
  misc_feature 1..20: note = chemically synthesized
  source 1..20: mol_type = other DNA
agcttttgagtgagaaagct

SEQ ID NO: 25376 - DNA, 20 bp, synthetic construct
  misc_feature 1..20: note = chemically synthesized
  source 1..20: mol_type = other DNA
ttttgagtgagaaagctgag

SEQ ID NO: 25377 - DNA, 20 bp, synthetic construct
  misc_feature 1..20: note = chemically synthesized
  source 1..20: mol_type = other DNA
ttgagtgagaaagctgagtg

SEQ ID NO: 25378 - DNA, 20 bp, synthetic construct
  misc_feature 1..20: note = chemically synthesized
  source 1..20: mol_type = other DNA
ttgtcccaacctgtcaactt

SEQ ID NO: 25379 - DNA, 20 bp, synthetic construct
  misc_feature 1..20: note = chemically synthesized
  source 1..20: mol_type = other DNA
cctccccataaatcaaaaaa

SEQ ID NO: 25380 - DNA, 20 bp, synthetic construct
  misc_feature 1..20: note = chemically synthesized
  source 1..20: mol_type = other DNA
cccataaatcaaaaaacggt

SEQ ID NO: 25381 - DNA, 20 bp, synthetic construct
  misc_feature 1..20: note = chemically synthesized
  source 1..20: mol_type = other DNA
ataaatcaaaaaacggttgg

SEQ ID NO: 25382 - DNA, 20 bp, synthetic construct
  misc_feature 1..20: note = chemically synthesized
  source 1..20: mol_type = other DNA
aatcaaaaaacggttggtgg

SEQ ID NO: 25383 - DNA, 20 bp, synthetic construct
  misc_feature 1..20: note = chemically synthesized
  source 1..20: mol_type = other DNA
atcaaaaaacggttggtgga

SEQ ID NO: 25384 - DNA, 20 bp, synthetic construct
  misc_feature 1..20: note = chemically synthesized
  source 1..20: mol_type = other DNA
tcaaaaaacggttggtggaa

SEQ ID NO: 25385 - DNA, 20 bp, synthetic construct
  misc_feature 1..20: note = chemically synthesized
  source 1..20: mol_type = other DNA
aaaaaacggttggtggaagg

SEQ ID NO: 25386 - DNA, 20 bp, synthetic construct
  misc_feature 1..20: note = chemically synthesized
  source 1..20: mol_type = other DNA
aaaaacggttggtggaaggg

SEQ ID NO: 25387 - DNA, 20 bp, synthetic construct
  misc_feature 1..20: note = chemically synthesized
  source 1..20: mol_type = other DNA
aaaacggttggtggaaggga

SEQ ID NO: 25388 - DNA, 20 bp, synthetic construct
  misc_feature 1..20: note = chemically synthesized
  source 1..20: mol_type = other DNA
cggttggtggaagggaggga

SEQ ID NO: 25389 - DNA, 20 bp, synthetic construct
  misc_feature 1..20: note = chemically synthesized
  source 1..20: mol_type = other DNA
ttggtggaagggagggacag

SEQ ID NO: 25390 - DNA, 20 bp, synthetic construct
  misc_feature 1..20: note = chemically synthesized
  source 1..20: mol_type = other DNA
ggacagaagcgtttcatttt

SEQ ID NO: 25391 - DNA, 20 bp, synthetic construct
  misc_feature 1..20: note = chemically synthesized
  source 1..20: mol_type = other DNA
gtttcattttcagattttgt

SEQ ID NO: 25392 - DNA, 20 bp, synthetic construct
  misc_feature 1..20: note = chemically synthesized
  source 1..20: mol_type = other DNA
agaaaataaaataaaatcaa

SEQ ID NO: 25393 - DNA, 20 bp, synthetic construct
  misc_feature 1..20: note = chemically synthesized
  source 1..20: mol_type = other DNA
cacgctgataccttacatgc

SEQ ID NO: 25394 - DNA, 20 bp, synthetic construct
  misc_feature 1..20: note = chemically synthesized
  source 1..20: mol_type = other DNA
acgctgataccttacatgcc

SEQ ID NO: 25395 - DNA, 20 bp, synthetic construct
  misc_feature 1..20: note = chemically synthesized
  source 1..20: mol_type = other DNA
ataccttacatgccaggttt

SEQ ID NO: 25396 - DNA, 20 bp, synthetic construct
  misc_feature 1..20: note = chemically synthesized
  source 1..20: mol_type = other DNA
tacatgccaggtttgagcct

SEQ ID NO: 25397 - DNA, 20 bp, synthetic construct
  misc_feature 1..20: note = chemically synthesized
  source 1..20: mol_type = other DNA
acatgccaggtttgagcctg

SEQ ID NO: 25398 - DNA, 20 bp, synthetic construct
  misc_feature 1..20: note = chemically synthesized
  source 1..20: mol_type = other DNA
gagcctgaggcaaatttttg

SEQ ID NO: 25399 - DNA, 20 bp, synthetic construct
  misc_feature 1..20: note = chemically synthesized
  source 1..20: mol_type = other DNA
aatttttgtggccatgtaat

SEQ ID NO: 25400 - DNA, 20 bp, synthetic construct
  misc_feature 1..20: note = chemically synthesized
  source 1..20: mol_type = other DNA
tgtaataagcctctttaaaa

SEQ ID NO: 25401 - DNA, 20 bp, synthetic construct
  misc_feature 1..20: note = chemically synthesized
  source 1..20: mol_type = other DNA
aagcctctttaaaatggtga

SEQ ID NO: 25402 - DNA, 20 bp, synthetic construct
  misc_feature 1..20: note = chemically synthesized
  source 1..20: mol_type = other DNA
gccttgaattacattgataa

SEQ ID NO: 25403 - DNA, 20 bp, synthetic construct
  misc_feature 1..20: note = chemically synthesized
  source 1..20: mol_type = other DNA
taaaagacattttattgcat

SEQ ID NO: 25404 - DNA, 20 bp, synthetic construct
  misc_feature 1..20: note = chemically synthesized
  source 1..20: mol_type = other DNA
aaagacattttattgcatta

SEQ ID NO: 25405 - DNA, 20 bp, synthetic construct
  misc_feature 1..20: note = chemically synthesized
  source 1..20: mol_type = other DNA
acattttattgcattagagc

SEQ ID NO: 25406 - DNA, 20 bp, synthetic construct
  misc_feature 1..20: note = chemically synthesized
  source 1..20: mol_type = other DNA
cattttattgcattagagct

SEQ ID NO: 25407 - DNA, 20 bp, synthetic construct
  misc_feature 1..20: note = chemically synthesized
  source 1..20: mol_type = other DNA
attttattgcattagagctg

SEQ ID NO: 25408 - DNA, 20 bp, synthetic construct
  misc_feature 1..20: note = chemically synthesized
  source 1..20: mol_type = other DNA
ttattgcattagagctgggg

SEQ ID NO: 25409 - DNA, 20 bp, synthetic construct
  misc_feature 1..20: note = chemically synthesized
  source 1..20: mol_type = other DNA
tattgcattagagctggggc

SEQ ID NO: 25410 - DNA, 20 bp, synthetic construct
  misc_feature 1..20: note = chemically synthesized
  source 1..20: mol_type = other DNA
ttgcattagagctggggcag

SEQ ID NO: 25411 - DNA, 20 bp, synthetic construct
  misc_feature 1..20: note = chemically synthesized
  source 1..20: mol_type = other DNA
ttagagctggggcaggagta

SEQ ID NO: 25412 - DNA, 20 bp, synthetic construct
  misc_feature 1..20: note = chemically synthesized
  source 1..20: mol_type = other DNA
tagagctggggcaggagtac

SEQ ID NO: 25413 - DNA, 20 bp, synthetic construct
  misc_feature 1..20: note = chemically synthesized
  source 1..20: mol_type = other DNA
gctggggcaggagtacagga

SEQ ID NO: 25414 - DNA, 20 bp, synthetic construct
  misc_feature 1..20: note = chemically synthesized
  source 1..20: mol_type = other DNA
agtacaggacggttcttgcc

SEQ ID NO: 25415 - DNA, 20 bp, synthetic construct
  misc_feature 1..20: note = chemically synthesized
  source 1..20: mol_type = other DNA
caggacggttcttgcctggt

SEQ ID NO: 25416 - DNA, 20 bp, synthetic construct
  misc_feature 1..20: note = chemically synthesized
  source 1..20: mol_type = other DNA
cggcctctttgaaaccgcgt

SEQ ID NO: 25417 - DNA, 20 bp, synthetic construct
  misc_feature 1..20: note = chemically synthesized
  source 1..20: mol_type = other DNA
ccacactctccaccgcctga

SEQ ID NO: 25418 - DNA, 20 bp, synthetic construct
  misc_feature 1..20: note = chemically synthesized
  source 1..20: mol_type = other DNA
cacactctccaccgcctgac

SEQ ID NO: 25419 - DNA, 20 bp, synthetic construct
  misc_feature 1..20: note = chemically synthesized
  source 1..20: mol_type = other DNA
acactctccaccgcctgaca

SEQ ID NO: 25420 - DNA, 20 bp, synthetic construct
  misc_feature 1..20: note = chemically synthesized
  source 1..20: mol_type = other DNA
tccaccgcctgacagggttt

SEQ ID NO: 25421 - DNA, 20 bp, synthetic construct
  misc_feature 1..20: note = chemically synthesized
  source 1..20: mol_type = other DNA
ctgacagggtttgagtgcga

SEQ ID NO: 25422 - DNA, 20 bp, synthetic construct
  misc_feature 1..20: note = chemically synthesized
  source 1..20: mol_type = other DNA
acagggtttgagtgcgatgg

SEQ ID NO: 25423 - DNA, 20 bp, synthetic construct
  misc_feature 1..20: note = chemically synthesized
  source 1..20: mol_type = other DNA
gtttgagtgcgatggcagct

SEQ ID NO: 25424 - DNA, 20 bp, synthetic construct
  misc_feature 1..20: note = chemically synthesized
  source 1..20: mol_type = other DNA
gcgatggcagctgagatctg

SEQ ID NO: 25425 - DNA, 20 bp, synthetic construct
  misc_feature 1..20: note = chemically synthesized
  source 1..20: mol_type = other DNA
cgatggcagctgagatctgt

SEQ ID NO: 25426 - DNA, 20 bp, synthetic construct
  misc_feature 1..20: note = chemically synthesized
  source 1..20: mol_type = other DNA
ggcagctgagatctgtgggc

SEQ ID NO: 25427 - DNA, 20 bp, synthetic construct
  misc_feature 1..20: note = chemically synthesized
  source 1..20: mol_type = other DNA
tgagatctgtgggccggtga

SEQ ID NO: 25428 - DNA, 20 bp, synthetic construct
  misc_feature 1..20: note = chemically synthesized
  source 1..20: mol_type = other DNA
agatctgtgggccggtgaca

SEQ ID NO: 25429 - DNA, 20 bp, synthetic construct
  misc_feature 1..20: note = chemically synthesized
  source 1..20: mol_type = other DNA
gatctgtgggccggtgacag

SEQ ID NO: 25430 - DNA, 20 bp, synthetic construct
  misc_feature 1..20: note = chemically synthesized
  source 1..20: mol_type = other DNA
atctgtgggccggtgacaga

SEQ ID NO: 25431 - DNA, 20 bp, synthetic construct
  misc_feature 1..20: note = chemically synthesized
  source 1..20: mol_type = other DNA
tctgtgggccggtgacagag

SEQ ID NO: 25432 - DNA, 20 bp, synthetic construct
  misc_feature 1..20: note = chemically synthesized
  source 1..20: mol_type = other DNA
ctgtgggccggtgacagagg

SEQ ID NO: 25433 - DNA, 20 bp, synthetic construct
  misc_feature 1..20: note = chemically synthesized
  source 1..20: mol_type = other DNA
gacagagggggctttctacc

SEQ ID NO: 25434 - DNA, 20 bp, synthetic construct
  misc_feature 1..20: note = chemically synthesized
  source 1..20: mol_type = other DNA
agagggggctttctacccag

SEQ ID NO: 25435 - DNA, 20 bp, synthetic construct
  misc_feature 1..20: note = chemically synthesized
  source 1..20: mol_type = other DNA
gggggctttctacccagcag

SEQ ID NO: 25436 - DNA, 20 bp, synthetic construct
  misc_feature 1..20: note = chemically synthesized
  source 1..20: mol_type = other DNA
ggctttctacccagcagtag

SEQ ID NO: 25437 - DNA, 20 bp, synthetic construct
  misc_feature 1..20: note = chemically synthesized
  source 1..20: mol_type = other DNA
gctttctacccagcagtaga

SEQ ID NO: 25438 - DNA, 20 bp, synthetic construct
  misc_feature 1..20: note = chemically synthesized
  source 1..20: mol_type = other DNA
ctacccagcagtagaaggtt

SEQ ID NO: 25439 - DNA, 20 bp, synthetic construct
  misc_feature 1..20: note = chemically synthesized
  source 1..20: mol_type = other DNA
tacccagcagtagaaggttg

SEQ ID NO: 25440 - DNA, 20 bp, synthetic construct
  misc_feature 1..20: note = chemically synthesized
  source 1..20: mol_type = other DNA
gcagtagaaggttgaggccc

SEQ ID NO: 25441 - DNA, 20 bp, synthetic construct
  misc_feature 1..20: note = chemically synthesized
  source 1..20: mol_type = other DNA
gtagaaggttgaggccctgg

SEQ ID NO: 25442 - DNA, 20 bp, synthetic construct
  misc_feature 1..20: note = chemically synthesized
  source 1..20: mol_type = other DNA
ggttgaggccctggaagcaa

SEQ ID NO: 25443 - DNA, 20 bp, synthetic construct
  misc_feature 1..20: note = chemically synthesized
  source 1..20: mol_type = other DNA
gttgaggccctggaagcaaa

SEQ ID NO: 25444 - DNA, 20 bp, synthetic construct
  misc_feature 1..20: note = chemically synthesized
  source 1..20: mol_type = other DNA
ccctggaagcaaaaggattt

SEQ ID NO: 25445 - DNA, 20 bp, synthetic construct
  misc_feature 1..20: note = chemically synthesized
  source 1..20: mol_type = other DNA
aagcaaaaggatttcagcct

SEQ ID NO: 25446 - DNA, 20 bp, synthetic construct
  misc_feature 1..20: note = chemically synthesized
  source 1..20: mol_type = other DNA
agcaaaaggatttcagcctg

SEQ ID NO: 25447 - DNA, 20 bp, synthetic construct
  misc_feature 1..20: note = chemically synthesized
  source 1..20: mol_type = other DNA
gcaaaaggatttcagcctga

SEQ ID NO: 25448 - DNA, 20 bp, synthetic construct
  misc_feature 1..20: note = chemically synthesized
  source 1..20: mol_type = other DNA
caaaaggatttcagcctgag

SEQ ID NO: 25449 - DNA, 20 bp, synthetic construct
  misc_feature 1..20: note = chemically synthesized
  source 1..20: mol_type = other DNA
ttcagcctgaggggcttgtt

SEQ ID NO: 25450 - DNA, 20 bp, synthetic construct
  misc_feature 1..20: note = chemically synthesized
  source 1..20: mol_type = other DNA
tcagcctgaggggcttgtta

SEQ ID NO: 25451 - DNA, 20 bp, synthetic construct
  misc_feature 1..20: note = chemically synthesized
  source 1..20: mol_type = other DNA
cagcctgaggggcttgttaa

SEQ ID NO: 25452 - DNA, 20 bp, synthetic construct
  misc_feature 1..20: note = chemically synthesized
  source 1..20: mol_type = other DNA
gcctgaggggcttgttaagg

SEQ ID NO: 25453 - DNA, 20 bp, synthetic construct
  misc_feature 1..20: note = chemically synthesized
  source 1..20: mol_type = other DNA
ctgaggggcttgttaaggga

SEQ ID NO: 25454 - DNA, 20 bp, synthetic construct
  misc_feature 1..20: note = chemically synthesized
  source 1..20: mol_type = other DNA
gagttattctttcctgttcc

SEQ ID NO: 25455 - DNA, 20 bp, synthetic construct
  misc_feature 1..20: note = chemically synthesized
  source 1..20: mol_type = other DNA
ttattctttcctgttcctag

SEQ ID NO: 25456 - DNA, 20 bp, synthetic construct
  misc_feature 1..20: note = chemically synthesized
  source 1..20: mol_type = other DNA
ttcctgttcctagtagacct

SEQ ID NO: 25457 - DNA, 20 bp, synthetic construct
  misc_feature 1..20: note = chemically synthesized
  source 1..20: mol_type = other DNA
cctgttcctagtagacctga

SEQ ID NO: 25458 - DNA, 20 bp, synthetic construct
  misc_feature 1..20: note = chemically synthesized
  source 1..20: mol_type = other DNA
tgttcctagtagacctgaga

SEQ ID NO: 25459 - DNA, 20 bp, synthetic construct
  misc_feature 1..20: note = chemically synthesized
  source 1..20: mol_type = other DNA
gacctgagagagcttgacgt

SEQ ID NO: 25460 - DNA, 20 bp, synthetic construct
  misc_feature 1..20: note = chemically synthesized
  source 1..20: mol_type = other DNA
ctgagagagcttgacgttgg

SEQ ID NO: 25461 - DNA, 20 bp, synthetic construct
  misc_feature 1..20: note = chemically synthesized
  source 1..20: mol_type = other DNA
agcttgacgttggtggcctc

SEQ ID NO: 25462 - DNA, 20 bp, synthetic construct
  misc_feature 1..20: note = chemically synthesized
  source 1..20: mol_type = other DNA
tgacgttggtggcctctggt

SEQ ID NO: 25463 - DNA, 20 bp, synthetic construct
  misc_feature 1..20: note = chemically synthesized
  source 1..20: mol_type = other DNA
gtggcctctggtcagcctca

SEQ ID NO: 25464 - DNA, 20 bp, synthetic construct
  misc_feature 1..20: note = chemically synthesized
  source 1..20: mol_type = other DNA
cctctggtcagcctcatggt

SEQ ID NO: 25465 - DNA, 20 bp, synthetic construct
  misc_feature 1..20: note = chemically synthesized
  source 1..20: mol_type = other DNA
ctctggtcagcctcatggtt

SEQ ID NO: 25466 - DNA, 20 bp, synthetic construct
  misc_feature 1..20: note = chemically synthesized
  source 1..20: mol_type = other DNA
gcctcatggttgggactgcg

SEQ ID NO: 25467 - DNA, 20 bp, synthetic construct
  misc_feature 1..20: note = chemically synthesized
  source 1..20: mol_type = other DNA
ttgggactgcgtggaaatgc

SEQ ID NO: 25468 - DNA, 20 bp, synthetic construct
  misc_feature 1..20: note = chemically synthesized
  source 1..20: mol_type = other DNA
tgcgtggaaatgctagacct

SEQ ID NO: 25469 - DNA, 20 bp, synthetic construct
  misc_feature 1..20: note = chemically synthesized
  source 1..20: mol_type = other DNA
cgtggaaatgctagacctga

SEQ ID NO: 25470 - DNA, 20 bp, synthetic construct
  misc_feature 1..20: note = chemically synthesized
  source 1..20: mol_type = other DNA
cctgagagacctcatttccc

SEQ ID NO: 25471 - DNA, 20 bp, synthetic construct
  misc_feature 1..20: note = chemically synthesized
  source 1..20: mol_type = other DNA
gagagacctcatttcccaag

SEQ ID NO: 25472 - DNA, 20 bp, synthetic construct
  misc_feature 1..20: note = chemically synthesized
  source 1..20: mol_type = other DNA
cctcatttcccaagcagtct

SEQ ID NO: 25473 - DNA, 20 bp, synthetic construct
  misc_feature 1..20: note = chemically synthesized
  source 1..20: mol_type = other DNA
tcatttcccaagcagtctta

SEQ ID NO: 25474 - DNA, 20 bp, synthetic construct
  misc_feature 1..20: note = chemically synthesized
  source 1..20: mol_type = other DNA
atttcccaagcagtcttaga

SEQ ID NO: 25475 - DNA, 20 bp, synthetic construct
  misc_feature 1..20: note = chemically synthesized
  source 1..20: mol_type = other DNA
gagagactcaaaacaaaaaa

SEQ ID NO: 25476 - DNA, 20 bp, synthetic construct
  misc_feature 1..20: note = chemically synthesized
  source 1..20: mol_type = other DNA
tcaaaacaaaaaatggtctc

SEQ ID NO: 25477 - DNA, 20 bp, synthetic construct
  misc_feature 1..20: note = chemically synthesized
  source 1..20: mol_type = other DNA
caaaacaaaaaatggtctcc

SEQ ID NO: 25478 - DNA, 20 bp, synthetic construct
  misc_feature 1..20: note = chemically synthesized
  source 1..20: mol_type = other DNA
atggtctccgggtcccaccg

SEQ ID NO: 25479 - DNA, 20 bp, synthetic construct
  misc_feature 1..20: note = chemically synthesized
  source 1..20: mol_type = other DNA
ccgggtcccaccgtggtgtg

SEQ ID NO: 25480 - DNA, 20 bp, synthetic construct
  misc_feature 1..20: note = chemically synthesized
  source 1..20: mol_type = other DNA
gtgtgtggccgctgtgcccg

SEQ ID NO: 25481 - DNA, 20 bp, synthetic construct
  misc_feature 1..20: note = chemically synthesized
  source 1..20: mol_type = other DNA
gtgtggccgctgtgcccgca

SEQ ID NO: 25482 - DNA, 20 bp, synthetic construct
  misc_feature 1..20: note = chemically synthesized
  source 1..20: mol_type = other DNA
tgtggccgctgtgcccgcag

SEQ ID NO: 25483 - DNA, 20 bp, synthetic construct
  misc_feature 1..20: note = chemically synthesized
  source 1..20: mol_type = other DNA
gccgctgtgcccgcagaggc

SEQ ID NO: 25484 - DNA, 20 bp, synthetic construct
  misc_feature 1..20: note = chemically synthesized
  source 1..20: mol_type = other DNA
ccgctgtgcccgcagaggcc

SEQ ID NO: 25485 - DNA, 20 bp, synthetic construct
  misc_feature 1..20: note = chemically synthesized
  source 1..20: mol_type = other DNA
ccgcagaggccaggtgtcca

SEQ ID NO: 25486 - DNA, 20 bp, synthetic construct
  misc_feature 1..20: note = chemically synthesized
  source 1..20: mol_type = other DNA
cgcagaggccaggtgtccat

SEQ ID NO: 25487 - DNA, 20 bp, synthetic construct
  misc_feature 1..20: note = chemically synthesized
  source 1..20: mol_type = other DNA
aggccaggtgtccataggct

SEQ ID NO: 25488 - DNA, 20 bp, synthetic construct
  misc_feature 1..20: note = chemically synthesized
  source 1..20: mol_type = other DNA
ccataggctgagtccccacg

SEQ ID NO: 25489 - DNA, 20 bp, synthetic construct
  misc_feature 1..20: note = chemically synthesized
  source 1..20: mol_type = other DNA
gagtccccacgtggacctgc

SEQ ID NO: 25490 - DNA, 20 bp, synthetic construct
  misc_feature 1..20: note = chemically synthesized
  source 1..20: mol_type = other DNA
agtccccacgtggacctgct

SEQ ID NO: 25491 - DNA, 20 bp, synthetic construct
  misc_feature 1..20: note = chemically synthesized
  source 1..20: mol_type = other DNA
ccccacgtggacctgctagg

SEQ ID NO: 25492 - DNA, 20 bp, synthetic construct
  misc_feature 1..20: note = chemically synthesized
  source 1..20: mol_type = other DNA
cccacgtggacctgctaggt

SEQ ID NO: 25493 - DNA, 20 bp, synthetic construct
  misc_feature 1..20: note = chemically synthesized
  source 1..20: mol_type = other DNA
acgtggacctgctaggtggg

SEQ ID NO: 25494 - DNA, 20 bp, synthetic construct
  misc_feature 1..20: note = chemically synthesized
  source 1..20: mol_type = other DNA
ggacctgctaggtgggtaga

SEQ ID NO: 25495 - DNA, 20 bp, synthetic construct
  misc_feature 1..20: note = chemically synthesized
  source 1..20: mol_type = other DNA
gacctgctaggtgggtagaa

SEQ ID NO: 25496 - DNA, 20 bp, synthetic construct
  misc_feature 1..20: note = chemically synthesized
  source 1..20: mol_type = other DNA
cctgctaggtgggtagaaag

SEQ ID NO: 25497 - DNA, 20 bp, synthetic construct
  misc_feature 1..20: note = chemically synthesized
  source 1..20: mol_type = other DNA
aggtgggtagaaaggagttg

SEQ ID NO: 25498 - DNA, 20 bp, synthetic construct
  misc_feature 1..20: note = chemically synthesized
  source 1..20: mol_type = other DNA
agttgaagatgttgtgctgt

SEQ ID NO: 25499 - DNA, 20 bp, synthetic construct
  misc_feature 1..20: note = chemically synthesized
  source 1..20: mol_type = other DNA
gaagatgttgtgctgttggt

SEQ ID NO: 25500 - DNA, 20 bp, synthetic construct
  misc_feature 1..20: note = chemically synthesized
  source 1..20: mol_type = other DNA
agatgttgtgctgttggttg

SEQ ID NO: 25501 - DNA, 20 bp, synthetic construct
  misc_feature 1..20: note = chemically synthesized
  source 1..20: mol_type = other DNA
gatgttgtgctgttggttgg

SEQ ID NO: 25502 - DNA, 20 bp, synthetic construct
  misc_feature 1..20: note = chemically synthesized
  source 1..20: mol_type = other DNA
tgttgtgctgttggttggag

SEQ ID NO: 25503 - DNA, 20 bp, synthetic construct
  misc_feature 1..20: note = chemically synthesized
  source 1..20: mol_type = other DNA
tgctgttggttggaggagct

SEQ ID NO: 25504 - DNA, 20 bp, synthetic construct
  misc_feature 1..20: note = chemically synthesized
  source 1..20: mol_type = other DNA
ctgttggttggaggagcttg

SEQ ID NO: 25505 - DNA, 20 bp, synthetic construct
  misc_feature 1..20: note = chemically synthesized
  source 1..20: mol_type = other DNA
tgttggttggaggagcttgg

SEQ ID NO: 25506 - DNA, 20 bp, synthetic construct
  misc_feature 1..20: note = chemically synthesized
  source 1..20: mol_type = other DNA
tggaggagcttggaggtgtc

SEQ ID NO: 25507 - DNA, 20 bp, synthetic construct
  misc_feature 1..20: note = chemically synthesized
  source 1..20: mol_type = other DNA
ggaggagcttggaggtgtct

SEQ ID NO: 25508 - DNA, 20 bp, synthetic construct
  misc_feature 1..20: note = chemically synthesized
  source 1..20: mol_type = other DNA
ttggaggtgtctgggaacat

SEQ ID NO: 25509 - DNA, 20 bp, synthetic construct
  misc_feature 1..20: note = chemically synthesized
  source 1..20: mol_type = other DNA
aacattggatgttactcata

SEQ ID NO: 25510 - DNA, 20 bp, synthetic construct
  misc_feature 1..20: note = chemically synthesized
  source 1..20: mol_type = other DNA
ggatgttactcatatggaat

SEQ ID NO: 25511 - DNA, 20 bp, synthetic construct
  misc_feature 1..20: note = chemically synthesized
  source 1..20: mol_type = other DNA
tgttactcatatggaatcag

SEQ ID NO: 25512 - DNA, 20 bp, synthetic construct
  misc_feature 1..20: note = chemically synthesized
  source 1..20: mol_type = other DNA
tcatatggaatcagcagaat

SEQ ID NO: 25513 - DNA, 20 bp, synthetic construct
  misc_feature 1..20: note = chemically synthesized
  source 1..20: mol_type = other DNA
tatggaatcagcagaattag

SEQ ID NO: 25514 - DNA, 20 bp, synthetic construct
  misc_feature 1..20: note = chemically synthesized
  source 1..20: mol_type = other DNA
tggaatcagcagaattagta

SEQ ID NO: 25515 - DNA, 20 bp, synthetic construct
  misc_feature 1..20: note = chemically synthesized
  source 1..20: mol_type = other DNA
tcagcagaattagtagagcc

SEQ ID NO: 25516 - DNA, 20 bp, synthetic construct
  misc_feature 1..20: note = chemically synthesized
  source 1..20: mol_type = other DNA
agaattagtagagccaagaa

SEQ ID NO: 25517 - DNA, 20 bp, synthetic construct
  misc_feature 1..20: note = chemically synthesized
  source 1..20: mol_type = other DNA
ttagtagagccaagaacaga

SEQ ID NO: 25518 - DNA, 20 bp, synthetic construct
  misc_feature 1..20: note = chemically synthesized
  source 1..20: mol_type = other DNA
gtagagccaagaacagacgg

SEQ ID NO: 25519 - DNA, 20 bp, synthetic construct
  misc_feature 1..20: note = chemically synthesized
  source 1..20: mol_type = other DNA
gacggcagtgccacacccca

SEQ ID NO: 25520 - DNA, 20 bp, synthetic construct
  misc_feature 1..20: note = chemically synthesized
  source 1..20: mol_type = other DNA
gcagtgccacaccccatggc

SEQ ID NO: 25521 - DNA, 20 bp, synthetic construct
  misc_feature 1..20: note = chemically synthesized
  source 1..20: mol_type = other DNA
ccacaccccatggctggact

SEQ ID NO: 25522 - DNA, 20 bp, synthetic construct
  misc_feature 1..20: note = chemically synthesized
  source 1..20: mol_type = other DNA
cacaccccatggctggactg

SEQ ID NO: 25523 - DNA, 20 bp, synthetic construct
  misc_feature 1..20: note = chemically synthesized
  source 1..20: mol_type = other DNA
gactgaggctgctccaatga

SEQ ID NO: 25524 - DNA, 20 bp, synthetic construct
  misc_feature 1..20: note = chemically synthesized
  source 1..20: mol_type = other DNA
tgaggctgctccaatgatgg

SEQ ID NO: 25525 - DNA, 20 bp, synthetic construct
  misc_feature 1..20: note = chemically synthesized
  source 1..20: mol_type = other DNA
gaggctgctccaatgatggc

SEQ ID NO: 25526 - DNA, 20 bp, synthetic construct
  misc_feature 1..20: note = chemically synthesized
  source 1..20: mol_type = other DNA
atgatggcaggttgtatctg

SEQ ID NO: 25527 - DNA, 20 bp, synthetic construct
  misc_feature 1..20: note = chemically synthesized
  source 1..20: mol_type = other DNA
tgatggcaggttgtatctgc

SEQ ID NO: 25528 - DNA, 20 bp, synthetic construct
  misc_feature 1..20: note = chemically synthesized
  source 1..20: mol_type = other DNA
gcgggcatctccaatttgct

SEQ ID NO: 25529 - DNA, 20 bp, synthetic construct
  misc_feature 1..20: note = chemically synthesized
  source 1..20: mol_type = other DNA
cgggcatctccaatttgctc

SEQ ID NO: 25530 - DNA, 20 bp, synthetic construct
  misc_feature 1..20: note = chemically synthesized
  source 1..20: mol_type = other DNA
gggcatctccaatttgctca

SEQ ID NO: 25531 - DNA, 20 bp, synthetic construct
  misc_feature 1..20: note = chemically synthesized
  source 1..20: mol_type = other DNA
tttgctcagggaactctttc

SEQ ID NO: 25532 - DNA, 20 bp, synthetic construct
  misc_feature 1..20: note = chemically synthesized
  source 1..20: mol_type = other DNA
tcagggaactctttccagat

SEQ ID NO: 25533 - DNA, 20 bp, synthetic construct
  misc_feature 1..20: note = chemically synthesized
  source 1..20: mol_type = other DNA
ggaactctttccagattggt

SEQ ID NO: 25534 - DNA, 20 bp, synthetic construct
  misc_feature 1..20: note = chemically synthesized
  source 1..20: mol_type = other DNA
actctttccagattggtcag

SEQ ID NO: 25535 - DNA, 20 bp, synthetic construct
  misc_feature 1..20: note = chemically synthesized
  source 1..20: mol_type = other DNA
attggtcagtggtataaatg

SEQ ID NO: 25536 - DNA, 20 bp, synthetic construct
  misc_feature 1..20: note = chemically synthesized
  source 1..20: mol_type = other DNA
ttggtcagtggtataaatga

SEQ ID NO: 25537 - DNA, 20 bp, synthetic construct
  misc_feature 1..20: note = chemically synthesized
  source 1..20: mol_type = other DNA
cagtggtataaatgaaggat

SEQ ID NO: 25538 - DNA, 20 bp, synthetic construct
  misc_feature 1..20: note = chemically synthesized
  source 1..20: mol_type = other DNA
agtggtataaatgaaggatt

SEQ ID NO: 25539 - DNA, 20 bp, synthetic construct
  misc_feature 1..20: note = chemically synthesized
  source 1..20: mol_type = other DNA
taaatgaaggattaggaaat

SEQ ID NO: 25540 - DNA, 20 bp, synthetic construct
  misc_feature 1..20: note = chemically synthesized
  source 1..20: mol_type = other DNA
aaatgaaggattaggaaatt

SEQ ID NO: 25541 - DNA, 20 bp, synthetic construct
  misc_feature 1..20: note = chemically synthesized
  source 1..20: mol_type = other DNA
ggattaggaaattgggtaaa

SEQ ID NO: 25542 - DNA, 20 bp, synthetic construct
  misc_feature 1..20: note = chemically synthesized
  source 1..20: mol_type = other DNA
taggaaattgggtaaaaagc

SEQ ID NO: 25543 - DNA, 20 bp, synthetic construct
  misc_feature 1..20: note = chemically synthesized
  source 1..20: mol_type = other DNA
aggaaattgggtaaaaagcc

SEQ ID NO: 25544 - DNA, 20 bp, synthetic construct
  misc_feature 1..20: note = chemically synthesized
  source 1..20: mol_type = other DNA
ggaaattgggtaaaaagcca

SEQ ID NO: 25545 - DNA, 20 bp, synthetic construct
  misc_feature 1..20: note = chemically synthesized
  source 1..20: mol_type = other DNA
aaattgggtaaaaagccagg

SEQ ID NO: 25546 - DNA, 20 bp, synthetic construct
  misc_feature 1..20: note = chemically synthesized
  source 1..20: mol_type = other DNA
aattgggtaaaaagccaggg

SEQ ID NO: 25547 - DNA, 20 bp, synthetic construct
  misc_feature 1..20: note = chemically synthesized
  source 1..20: mol_type = other DNA
ttgggtaaaaagccagggag

SEQ ID NO: 25548 - DNA, 20 bp, synthetic construct
  misc_feature 1..20: note = chemically synthesized
  source 1..20: mol_type = other DNA
tgggtaaaaagccagggagg

SEQ ID NO: 25549 - DNA, 20 bp, synthetic construct
  misc_feature 1..20: note = chemically synthesized
  source 1..20: mol_type = other DNA
gggtaaaaagccagggagga

SEQ ID NO: 25550 - DNA, 20 bp, synthetic construct
  misc_feature 1..20: note = chemically synthesized
  source 1..20: mol_type = other DNA
aaaaaaaaaaacaaaaaaca

SEQ ID NO: 25551 - DNA, 20 bp, synthetic construct
  misc_feature 1..20: note = chemically synthesized
  source 1..20: mol_type = other DNA
acaaaaaacaaagcacgtca

SEQ ID NO: 25552 - DNA, 20 bp, synthetic construct
  misc_feature 1..20: note = chemically synthesized
  source 1..20: mol_type = other DNA
aaacaaagcacgtcaaagcc

SEQ ID NO: 25553 - DNA, 20 bp, synthetic construct
  misc_feature 1..20: note = chemically synthesized
  source 1..20: mol_type = other DNA
aacaaagcacgtcaaagcca

SEQ ID NO: 25554 - DNA, 20 bp, synthetic construct
  misc_feature 1..20: note = chemically synthesized
  source 1..20: mol_type = other DNA
aaggcctgtgttttgttctg

SEQ ID NO: 25555 - DNA, 20 bp, synthetic construct
  misc_feature 1..20: note = chemically synthesized
  source 1..20: mol_type = other DNA
aggcctgtgttttgttctgt

SEQ ID NO: 25556 - DNA, 20 bp, synthetic construct
  misc_feature 1..20: note = chemically synthesized
  source 1..20: mol_type = other DNA
tttgttctgtgggactttgc

SEQ ID NO: 25557 - DNA, 20 bp, synthetic construct
  misc_feature 1..20: note = chemically synthesized
  source 1..20: mol_type = other DNA
tgttctgtgggactttgcca

SEQ ID NO: 25558 - DNA, 20 bp, synthetic construct
  misc_feature 1..20: note = chemically synthesized
  source 1..20: mol_type = other DNA
ttctgtgggactttgccaga

SEQ ID NO: 25559 - DNA, 20 bp, synthetic construct
  misc_feature 1..20: note = chemically synthesized
  source 1..20: mol_type = other DNA
tgggactttgccagagagat

SEQ ID NO: 25560 - DNA, 20 bp, synthetic construct
  misc_feature 1..20: note = chemically synthesized
  source 1..20: mol_type = other DNA
gggactttgccagagagatg

SEQ ID NO: 25561 - DNA, 20 bp, synthetic construct
  misc_feature 1..20: note = chemically synthesized
  source 1..20: mol_type = other DNA
ttgccagagagatgaggact

SEQ ID NO: 25562 - DNA, 20 bp, synthetic construct
  misc_feature 1..20: note = chemically synthesized
  source 1..20: mol_type = other DNA
tgccagagagatgaggactg

SEQ ID NO: 25563 - DNA, 20 bp, synthetic construct
  misc_feature 1..20: note = chemically synthesized
  source 1..20: mol_type = other DNA
agagagatgaggactgaggc

SEQ ID NO: 25564 - DNA, 20 bp, synthetic construct
  misc_feature 1..20: note = chemically synthesized
  source 1..20: mol_type = other DNA
gagagatgaggactgaggct

SEQ ID NO: 25565 - DNA, 20 bp, synthetic construct
  misc_feature 1..20: note = chemically synthesized
  source 1..20: mol_type = other DNA
aggctgggctgctgtgtgcc

SEQ ID NO: 25566 - DNA, 20 bp, synthetic construct
  misc_feature 1..20: note = chemically synthesized
  source 1..20: mol_type = other DNA
ggctgggctgctgtgtgcct

SEQ ID NO: 25567 - DNA, 20 bp, synthetic construct
  misc_feature 1..20: note = chemically synthesized
  source 1..20: mol_type = other DNA
ctgggctgctgtgtgcctgg

SEQ ID NO: 25568 - DNA, 20 bp, synthetic construct
  misc_feature 1..20: note = chemically synthesized
  source 1..20: mol_type = other DNA
tgggctgctgtgtgcctggg

SEQ ID NO: 25569 - DNA, 20 bp, synthetic construct
  misc_feature 1..20: note = chemically synthesized
  source 1..20: mol_type = other DNA
gctgctgtgtgcctgggagg

SEQ ID NO: 25570 - DNA, 20 bp, synthetic construct
  misc_feature 1..20: note = chemically synthesized
  source 1..20: mol_type = other DNA
ctgctgtgtgcctgggaggc

SEQ ID NO: 25571 - DNA, 20 bp, synthetic construct
  misc_feature 1..20: note = chemically synthesized
  source 1..20: mol_type = other DNA
ctgtgtgcctgggaggcggg

SEQ ID NO: 25572 - DNA, 20 bp, synthetic construct
  misc_feature 1..20: note = chemically synthesized
  source 1..20: mol_type = other DNA
tgtgtgcctgggaggcggga

SEQ ID NO: 25573 - DNA, 20 bp, synthetic construct
  misc_feature 1..20: note = chemically synthesized
  source 1..20: mol_type = other DNA
ctgggaggcgggaaggtgct

SEQ ID NO: 25574 - DNA, 20 bp, synthetic construct
  misc_feature 1..20: note = chemically synthesized
  source 1..20: mol_type = other DNA
tgggaggcgggaaggtgctg

SEQ ID NO: 25575 - DNA, 20 bp, synthetic construct
  misc_feature 1..20: note = chemically synthesized
  source 1..20: mol_type = other DNA
gggaaggtgctgaggcactg

SEQ ID NO: 25576 - DNA, 20 bp, synthetic construct
  misc_feature 1..20: note = chemically synthesized
  source 1..20: mol_type = other DNA
gaaggtgctgaggcactgca

SEQ ID NO: 25577 - DNA, 20 bp, synthetic construct
  misc_feature 1..20: note = chemically synthesized
  source 1..20: mol_type = other DNA
ggtgctgaggcactgcagag

SEQ ID NO: 25578 - DNA, 20 bp, synthetic construct
  misc_feature 1..20: note = chemically synthesized
  source 1..20: mol_type = other DNA
gctgaggcactgcagagaag

SEQ ID NO: 25579 - DNA, 20 bp, synthetic construct
  misc_feature 1..20: note = chemically synthesized
  source 1..20: mol_type = other DNA
gcactgcagagaagcagctg

SEQ ID NO: 25580 - DNA, 20 bp, synthetic construct
  misc_feature 1..20: note = chemically synthesized
  source 1..20: mol_type = other DNA
gaagcagctgcagcatgccc

SEQ ID NO: 25581 - DNA, 20 bp, synthetic construct
  misc_feature 1..20: note = chemically synthesized
  source 1..20: mol_type = other DNA
aagcagctgcagcatgcccc

SEQ ID NO: 25582 - DNA, 20 bp, synthetic construct
  misc_feature 1..20: note = chemically synthesized
  source 1..20: mol_type = other DNA
cagctgcagcatgccccggg

SEQ ID NO: 25583 - DNA, 20 bp, synthetic construct
  misc_feature 1..20: note = chemically synthesized
  source 1..20: mol_type = other DNA
gctgcagcatgccccgggca

SEQ ID NO: 25584 - DNA, 20 bp, synthetic construct
  misc_feature 1..20: note = chemically synthesized
  source 1..20: mol_type = other DNA
ctgcagcatgccccgggcag

SEQ ID NO: 25585 - DNA, 20 bp, synthetic construct
  misc_feature 1..20: note = chemically synthesized
  source 1..20: mol_type = other DNA
ggcagaggcctgttttctga

SEQ ID NO: 25586 - DNA, 20 bp, synthetic construct
  misc_feature 1..20: note = chemically synthesized
  source 1..20: mol_type = other DNA
agaggcctgttttctgaaag

SEQ ID NO: 25587 - DNA, 20 bp, synthetic construct
  misc_feature 1..20: note = chemically synthesized
  source 1..20: mol_type = other DNA
gaggcctgttttctgaaaga

SEQ ID NO: 25588 - DNA, 20 bp, synthetic construct
  misc_feature 1..20: note = chemically synthesized
  source 1..20: mol_type = other DNA
gaaagaaggacttgccgtca

SEQ ID NO: 25589 - DNA, 20 bp, synthetic construct
  misc_feature 1..20: note = chemically synthesized
  source 1..20: mol_type = other DNA
aaagaaggacttgccgtcat

SEQ ID NO: 25590 - DNA, 20 bp, synthetic construct
  misc_feature 1..20: note = chemically synthesized
  source 1..20: mol_type = other DNA
agaaggacttgccgtcatgg

SEQ ID NO: 25591 - DNA, 20 bp, synthetic construct
  misc_feature 1..20: note = chemically synthesized
  source 1..20: mol_type = other DNA
gaaggacttgccgtcatggg

SEQ ID NO: 25592 - DNA, 20 bp, synthetic construct
  misc_feature 1..20: note = chemically synthesized
  source 1..20: mol_type = other DNA
aggacttgccgtcatgggag

SEQ ID NO: 25593 - DNA, 20 bp, synthetic construct
  misc_feature 1..20: note = chemically synthesized
  source 1..20: mol_type = other DNA
ggacttgccgtcatgggagg

SEQ ID NO: 25594 - DNA, 20 bp, synthetic construct
  misc_feature 1..20: note = chemically synthesized
  source 1..20: mol_type = other DNA
tgccgtcatgggaggaggcc

SEQ ID NO: 25595 - DNA, 20 bp, synthetic construct
  misc_feature 1..20: note = chemically synthesized
  source 1..20: mol_type = other DNA
tgggaggaggcctggcctcg

SEQ ID NO: 25596 - DNA, 20 bp, synthetic construct
  misc_feature 1..20: note = chemically synthesized
  source 1..20: mol_type = other DNA
gaggcctggcctcgcagcac

SEQ ID NO: 25597 - DNA, 20 bp, synthetic construct
  misc_feature 1..20: note = chemically synthesized
  source 1..20: mol_type = other DNA
ggcctggcctcgcagcacca

SEQ ID NO: 25598 - DNA, 20 bp, synthetic construct
  misc_feature 1..20: note = chemically synthesized
  source 1..20: mol_type = other DNA
caccagagcgctccttcatt

SEQ ID NO: 25599 - DNA, 20 bp, synthetic construct
  misc_feature 1..20: note = chemically synthesized
  source 1..20: mol_type = other DNA
tccttcattcagcctcacct

SEQ ID NO: 25600 - DNA, 20 bp, synthetic construct
  misc_feature 1..20: note = chemically synthesized
  source 1..20: mol_type = other DNA
ccttcattcagcctcacctc

SEQ ID NO: 25601 - DNA, 20 bp, synthetic construct
  misc_feature 1..20: note = chemically synthesized
  source 1..20: mol_type = other DNA
cattcagcctcacctcaggc

SEQ ID NO: 25602 - DNA, 20 bp, synthetic construct
  misc_feature 1..20: note = chemically synthesized
  source 1..20: mol_type = other DNA
ttcagcctcacctcaggcga

SEQ ID NO: 25603 - DNA, 20 bp, synthetic construct
  misc_feature 1..20: note = chemically synthesized
  source 1..20: mol_type = other DNA
tcagcctcacctcaggcgag

SEQ ID NO: 25604 - DNA, 20 bp, synthetic construct
  misc_feature 1..20: note = chemically synthesized
  source 1..20: mol_type = other DNA
cagcctcacctcaggcgaga

SEQ ID NO: 25605 - DNA, 20 bp, synthetic construct
  misc_feature 1..20: note = chemically synthesized
  source 1..20: mol_type = other DNA
cctcacctcaggcgagaggg

SEQ ID NO: 25606 - DNA, 20 bp, synthetic construct
  misc_feature 1..20: note = chemically synthesized
  source 1..20: mol_type = other DNA
cctcaggcgagagggcagcc

SEQ ID NO: 25607 - DNA, 20 bp, synthetic construct
  misc_feature 1..20: note = chemically synthesized
  source 1..20: mol_type = other DNA
gcagcctagttttattcctg

SEQ ID NO: 25608 - DNA, 20 bp, synthetic construct
  misc_feature 1..20: note = chemically synthesized
  source 1..20: mol_type = other DNA
ttttattcctgaagaaatgt

SEQ ID NO: 25609 - DNA, 20 bp, synthetic construct
  misc_feature 1..20: note = chemically synthesized
  source 1..20: mol_type = other DNA
ttattcctgaagaaatgtta

SEQ ID NO: 25610 - DNA, 20 bp, synthetic construct
  misc_feature 1..20: note = chemically synthesized
  source 1..20: mol_type = other DNA
aatgttagagcctgacctgc

SEQ ID NO: 25611 - DNA, 20 bp, synthetic construct
  misc_feature 1..20: note = chemically synthesized
  source 1..20: mol_type = other DNA
acctgctagaccattttttt

SEQ ID NO: 25612 - DNA, 20 bp, synthetic construct
  misc_feature 1..20: note = chemically synthesized
  source 1..20: mol_type = other DNA
tgctagaccattttttttgg

SEQ ID NO: 25613 - DNA, 20 bp, synthetic construct
  misc_feature 1..20: note = chemically synthesized
  source 1..20: mol_type = other DNA
ctagaccattttttttggta

SEQ ID NO: 25614 - DNA, 20 bp, synthetic construct
  misc_feature 1..20: note = chemically synthesized
  source 1..20: mol_type = other DNA
ttttttttggtagagctttg

SEQ ID NO: 25615 - DNA, 20 bp, synthetic construct
  misc_feature 1..20: note = chemically synthesized
  source 1..20: mol_type = other DNA
agagctttgaagccttaaat

SEQ ID NO: 25616 - DNA, 20 bp, synthetic construct
  misc_feature 1..20: note = chemically synthesized
  source 1..20: mol_type = other DNA
aattagttctcataatttct

SEQ ID NO: 25617 - DNA, 20 bp, synthetic construct
  misc_feature 1..20: note = chemically synthesized
  source 1..20: mol_type = other DNA
tagttctcataatttctgag

SEQ ID NO: 25618 - DNA, 20 bp, synthetic construct
  misc_feature 1..20: note = chemically synthesized
  source 1..20: mol_type = other DNA
gagcagctctgtgttaacca

SEQ ID NO: 25619 - DNA, 20 bp, synthetic construct
  misc_feature 1..20: note = chemically synthesized
  source 1..20: mol_type = other DNA
agcagctctgtgttaaccat

SEQ ID NO: 25620 - DNA, 20 bp, synthetic construct
  misc_feature 1..20: note = chemically synthesized
  source 1..20: mol_type = other DNA
gtgttaaccataggacataa

SEQ ID NO: 25621 - DNA, 20 bp, synthetic construct
  misc_feature 1..20: note = chemically synthesized
  source 1..20: mol_type = other DNA
tgttaaccataggacataat

SEQ ID NO: 25622 - DNA, 20 bp, synthetic construct
  misc_feature 1..20: note = chemically synthesized
  source 1..20: mol_type = other DNA
gacataataggttttaattc

SEQ ID NO: 25623 - DNA, 20 bp, synthetic construct
  misc_feature 1..20: note = chemically synthesized
  source 1..20: mol_type = other DNA
cataataggttttaattctg

SEQ ID NO: 25624 - DNA, 20 bp, synthetic construct
  misc_feature 1..20: note = chemically synthesized
  source 1..20: mol_type = other DNA
taggttttaattctggagaa

SEQ ID NO: 25625 - DNA, 20 bp, synthetic construct
  misc_feature 1..20: note = chemically synthesized
  source 1..20: mol_type = other DNA
ttttaattctggagaatggc

SEQ ID NO: 25626 - DNA, 20 bp, synthetic construct
  misc_feature 1..20: note = chemically synthesized
  source 1..20: mol_type = other DNA
ttctggagaatggccagttc

SEQ ID NO: 25627 - DNA, 20 bp, synthetic construct
  misc_feature 1..20: note = chemically synthesized
  source 1..20: mol_type = other DNA
gaatggccagttctggttct

SEQ ID NO: 25628 - DNA, 20 bp, synthetic construct
  misc_feature 1..20: note = chemically synthesized
  source 1..20: mol_type = other DNA
ttctggttctcagaatctct

SEQ ID NO: 25629 - DNA, 20 bp, synthetic construct
  misc_feature 1..20: note = chemically synthesized
  source 1..20: mol_type = other DNA
gttctcagaatctcttggcc

SEQ ID NO: 25630 - DNA, 20 bp, synthetic construct
  misc_feature 1..20: note = chemically synthesized
  source 1..20: mol_type = other DNA
tctcttggccaagactgtca

SEQ ID NO: 25631 - DNA, 20 bp, synthetic construct
  misc_feature 1..20: note = chemically synthesized
  source 1..20: mol_type = other DNA
tcttggccaagactgtcaca

SEQ ID NO: 25632 - DNA, 20 bp, synthetic construct
  misc_feature 1..20: note = chemically synthesized
  source 1..20: mol_type = other DNA
ccaagactgtcacagagtat

SEQ ID NO: 25633 - DNA, 20 bp, synthetic construct
  misc_feature 1..20: note = chemically synthesized
  source 1..20: mol_type = other DNA
caagactgtcacagagtatt

SEQ ID NO: 25634 - DNA, 20 bp, synthetic construct
  misc_feature 1..20: note = chemically synthesized
  source 1..20: mol_type = other DNA
cacagagtattaggcctgtg

SEQ ID NO: 25635 - DNA, 20 bp, synthetic construct
  misc_feature 1..20: note = chemically synthesized
  source 1..20: mol_type = other DNA
tgccttccacgcttcccctg

SEQ ID NO: 25636 - DNA, 20 bp, synthetic construct
  misc_feature 1..20: note = chemically synthesized
  source 1..20: mol_type = other DNA
ttcccctgaagtccacacac

SEQ ID NO: 25637 - DNA, 20 bp, synthetic construct
  misc_feature 1..20: note = chemically synthesized
  source 1..20: mol_type = other DNA
tccacacaccagtcactcaa

SEQ ID NO: 25638 - DNA, 20 bp, synthetic construct
  misc_feature 1..20: note = chemically synthesized
  source 1..20: mol_type = other DNA
caccagtcactcaatagtgc

SEQ ID NO: 25639 - DNA, 20 bp, synthetic construct
  misc_feature 1..20: note = chemically synthesized
  source 1..20: mol_type = other DNA
agtcactcaatagtgccaga

SEQ ID NO: 25640 - DNA, 20 bp, synthetic construct
  misc_feature 1..20: note = chemically synthesized
  source 1..20: mol_type = other DNA
gtcactcaatagtgccagaa

SEQ ID NO: 25641 - DNA, 20 bp, synthetic construct
  misc_feature 1..20: note = chemically synthesized
  source 1..20: mol_type = other DNA
ctcaatagtgccagaaaggc

SEQ ID NO: 25642 - DNA, 20 bp, synthetic construct
  misc_feature 1..20: note = chemically synthesized
  source 1..20: mol_type = other DNA
atagtgccagaaaggcaagt

SEQ ID NO: 25643 - DNA, 20 bp, synthetic construct
  misc_feature 1..20: note = chemically synthesized
  source 1..20: mol_type = other DNA
tagtgccagaaaggcaagtg

SEQ ID NO: 25644 - DNA, 20 bp, synthetic construct
  misc_feature 1..20: note = chemically synthesized
  source 1..20: mol_type = other DNA
gtgccagaaaggcaagtgag

SEQ ID NO: 25645 - DNA, 20 bp, synthetic construct
  misc_feature 1..20: note = chemically synthesized
  source 1..20: mol_type = other DNA
caagtgaggagattgcctga

SEQ ID NO: 25646 - DNA, 20 bp, synthetic construct
  misc_feature 1..20: note = chemically synthesized
  source 1..20: mol_type = other DNA
aagtgaggagattgcctgaa

SEQ ID NO: 25647 - DNA, 20 bp, synthetic construct
  misc_feature 1..20: note = chemically synthesized
  source 1..20: mol_type = other DNA
agtgaggagattgcctgaaa

SEQ ID NO: 25648 - DNA, 20 bp, synthetic construct
  misc_feature 1..20: note = chemically synthesized
  source 1..20: mol_type = other DNA
gtgaggagattgcctgaaag

SEQ ID NO: 25649 - DNA, 20 bp, synthetic construct
  misc_feature 1..20: note = chemically synthesized
  source 1..20: mol_type = other DNA
cctgaaaggggctgtatgac

SEQ ID NO: 25650 - DNA, 20 bp, synthetic construct
  misc_feature 1..20: note = chemically synthesized
  source 1..20: mol_type = other DNA
ggggctgtatgaccagtgtc

SEQ ID NO: 25651 - DNA, 20 bp, synthetic construct
  misc_feature 1..20: note = chemically synthesized
  source 1..20: mol_type = other DNA
tatgaccagtgtccagacga

SEQ ID NO: 25652 - DNA, 20 bp, synthetic construct
  misc_feature 1..20: note = chemically synthesized
  source 1..20: mol_type = other DNA
atgaccagtgtccagacgac

SEQ ID NO: 25653 - DNA, 20 bp, synthetic construct
  misc_feature 1..20: note = chemically synthesized
  source 1..20: mol_type = other DNA
cagacgacaggtttctgccg

SEQ ID NO: 25654 - DNA, 20 bp, synthetic construct
  misc_feature 1..20: note = chemically synthesized
  source 1..20: mol_type = other DNA
caggtttctgccgcggccct

SEQ ID NO: 25655 - DNA, 20 bp, synthetic construct
  misc_feature 1..20: note = chemically synthesized
  source 1..20: mol_type = other DNA
aggtttctgccgcggccctg

SEQ ID NO: 25656 - DNA, 20 bp, synthetic construct
  misc_feature 1..20: note = chemically synthesized
  source 1..20: mol_type = other DNA
tttctgccgcggccctgagg

SEQ ID NO: 25657 - DNA, 20 bp, synthetic construct
  misc_feature 1..20: note = chemically synthesized
  source 1..20: mol_type = other DNA
ctgccgcggccctgaggtgg

SEQ ID NO: 25658 - DNA, 20 bp, synthetic construct
  misc_feature 1..20: note = chemically synthesized
  source 1..20: mol_type = other DNA
ccgcggccctgaggtggcag

SEQ ID NO: 25659 - DNA, 20 bp, synthetic construct
  misc_feature 1..20: note = chemically synthesized
  source 1..20: mol_type = other DNA
cgcggccctgaggtggcagt

SEQ ID NO: 25660 - DNA, 20 bp, synthetic construct
  misc_feature 1..20: note = chemically synthesized
  source 1..20: mol_type = other DNA
cggccctgaggtggcagtgg

SEQ ID NO: 25661 - DNA, 20 bp, synthetic construct
  misc_feature 1..20: note = chemically synthesized
  source 1..20: mol_type = other DNA
ggccctgaggtggcagtggg

SEQ ID NO: 25662 - DNA, 20 bp, synthetic construct
  misc_feature 1..20: note = chemically synthesized
  source 1..20: mol_type = other DNA
gccctgaggtggcagtggga

SEQ ID NO: 25663 - DNA, 20 bp, synthetic construct
  misc_feature 1..20: note = chemically synthesized
  source 1..20: mol_type = other DNA
ccctgaggtggcagtgggag

SEQ ID NO: 25664 - DNA, 20 bp, synthetic construct
  misc_feature 1..20: note = chemically synthesized
  source 1..20: mol_type = other DNA
tggcagtgggaggggtttgt

SEQ ID NO: 25665 - DNA, 20 bp, synthetic construct
  misc_feature 1..20: note = chemically synthesized
  source 1..20: mol_type = other DNA
cagtgggaggggtttgtcag

SEQ ID NO: 25666 - DNA, 20 bp, synthetic construct
  misc_feature 1..20: note = chemically synthesized
  source 1..20: mol_type = other DNA
agtgggaggggtttgtcaga

SEQ ID NO: 25667 - DNA, 20 bp, synthetic construct
  misc_feature 1..20: note = chemically synthesized
  source 1..20: mol_type = other DNA
gggaggggtttgtcagaagg

SEQ ID NO: 25668 - DNA, 20 bp, synthetic construct
  misc_feature 1..20: note = chemically synthesized
  source 1..20: mol_type = other DNA
ggaggggtttgtcagaaggt

SEQ ID NO: 25669 - DNA, 20 bp, synthetic construct
  misc_feature 1..20: note = chemically synthesized
  source 1..20: mol_type = other DNA
ggggtttgtcagaaggtggg

SEQ ID NO: 25670 - DNA, 20 bp, synthetic construct
  misc_feature 1..20: note = chemically synthesized
  source 1..20: mol_type = other DNA
gggtttgtcagaaggtgggc

SEQ ID NO: 25671 - DNA, 20 bp, synthetic construct
  misc_feature 1..20: note = chemically synthesized
  source 1..20: mol_type = other DNA
ggtttgtcagaaggtgggca

SEQ ID NO: 25672 - DNA, 20 bp, synthetic construct
  misc_feature 1..20: note = chemically synthesized
  source 1..20: mol_type = other DNA
agaaggtgggcagggtcctg

SEQ ID NO: 25673 - DNA, 20 bp, synthetic construct
  misc_feature 1..20: note = chemically synthesized
  source 1..20: mol_type = other DNA
gtgggcagggtcctgaagcc

SEQ ID NO: 25674 - DNA, 20 bp, synthetic construct
  misc_feature 1..20: note = chemically synthesized
  source 1..20: mol_type = other DNA
agccctgtcctccctgtcca

SEQ ID NO: 25675 - DNA, 20 bp, synthetic construct
  misc_feature 1..20: note = chemically synthesized
  source 1..20: mol_type = other DNA
cctgtcctccctgtccacag

SEQ ID NO: 25676 - DNA, 20 bp, synthetic construct
  misc_feature 1..20: note = chemically synthesized
  source 1..20: mol_type = other DNA
ctgtcctccctgtccacagc

SEQ ID NO: 25677 - DNA, 20 bp, synthetic construct
  misc_feature 1..20: note = chemically synthesized
  source 1..20: mol_type = other DNA
gtccacagcaggacacttct

SEQ ID NO: 25678 - DNA, 20 bp, synthetic construct
  misc_feature 1..20: note = chemically synthesized
  source 1..20: mol_type = other DNA
aggacacttctgagatcttc

SEQ ID NO: 25679 - DNA, 20 bp, synthetic construct
  misc_feature 1..20: note = chemically synthesized
  source 1..20: mol_type = other DNA
gagatcttcgagttcctcac

SEQ ID NO: 25680 - DNA, 20 bp, synthetic construct
  misc_feature 1..20: note = chemically synthesized
  source 1..20: mol_type = other DNA
agatcttcgagttcctcact

SEQ ID NO: 25681 - DNA, 20 bp, synthetic construct
  misc_feature 1..20: note = chemically synthesized
  source 1..20: mol_type = other DNA
atcttcgagttcctcactgg

SEQ ID NO: 25682 - DNA, 20 bp, synthetic construct
  misc_feature 1..20: note = chemically synthesized
  source 1..20: mol_type = other DNA
tcttcgagttcctcactggg

SEQ ID NO: 25683 - DNA, 20 bp, synthetic construct
  misc_feature 1..20: note = chemically synthesized
  source 1..20: mol_type = other DNA
cgagttcctcactgggaggt

SEQ ID NO: 25684 - DNA, 20 bp, synthetic construct
  misc_feature 1..20: note = chemically synthesized
  source 1..20: mol_type = other DNA
gagttcctcactgggaggtg

SEQ ID NO: 25685 - DNA, 20 bp, synthetic construct
  misc_feature 1..20: note = chemically synthesized
  source 1..20: mol_type = other DNA
taataccttccctcattcca

SEQ ID NO: 25686 - DNA, 20 bp, synthetic construct
  misc_feature 1..20: note = chemically synthesized
  source 1..20: mol_type = other DNA
aataccttccctcattccac

SEQ ID NO: 25687 - DNA, 20 bp, synthetic construct
  misc_feature 1..20: note = chemically synthesized
  source 1..20: mol_type = other DNA
ataccttccctcattccaca

SEQ ID NO: 25688 - DNA, 20 bp, synthetic construct
  misc_feature 1..20: note = chemically synthesized
  source 1..20: mol_type = other DNA
tcattccacagggcgactgt

SEQ ID NO: 25689 - DNA, 20 bp, synthetic construct
  misc_feature 1..20: note = chemically synthesized
  source 1..20: mol_type = other DNA
cattccacagggcgactgtt

SEQ ID NO: 25690 - DNA, 20 bp, synthetic construct
  misc_feature 1..20: note = chemically synthesized
  source 1..20: mol_type = other DNA
attccacagggcgactgttg

SEQ ID NO: 25691 - DNA, 20 bp, synthetic construct
  misc_feature 1..20: note = chemically synthesized
  source 1..20: mol_type = other DNA
ccacagggcgactgttgggg

SEQ ID NO: 25692 - DNA, 20 bp, synthetic construct
  misc_feature 1..20: note = chemically synthesized
  source 1..20: mol_type = other DNA
cacagggcgactgttggggc

SEQ ID NO: 25693 - DNA, 20 bp, synthetic construct
  misc_feature 1..20: note = chemically synthesized
  source 1..20: mol_type = other DNA
cgactgttggggcaggatgt

SEQ ID NO: 25694 - DNA, 20 bp, synthetic construct
  misc_feature 1..20: note = chemically synthesized
  source 1..20: mol_type = other DNA
gactgttggggcaggatgtg

SEQ ID NO: 25695 - DNA, 20 bp, synthetic construct
  misc_feature 1..20: note = chemically synthesized
  source 1..20: mol_type = other DNA
ctgttggggcaggatgtgag

SEQ ID NO: 25696 - DNA, 20 bp, synthetic construct
  misc_feature 1..20: note = chemically synthesized
  source 1..20: mol_type = other DNA
gttggggcaggatgtgagga

SEQ ID NO: 25697 - DNA, 20 bp, synthetic construct
  misc_feature 1..20: note = chemically synthesized
  source 1..20: mol_type = other DNA
aggatgtgaggagagtactt

SEQ ID NO: 25698 - DNA, 20 bp, synthetic construct
  misc_feature 1..20: note = chemically synthesized
  source 1..20: mol_type = other DNA
ggatgtgaggagagtacttt

SEQ ID NO: 25699 - DNA, 20 bp, synthetic construct
  misc_feature 1..20: note = chemically synthesized
  source 1..20: mol_type = other DNA
tgtgaggagagtactttggg

SEQ ID NO: 25700 - DNA, 20 bp, synthetic construct
  misc_feature 1..20: note = chemically synthesized
  source 1..20: mol_type = other DNA
agaacataacactttccacc

SEQ ID NO: 25701 - DNA, 20 bp, synthetic construct
  misc_feature 1..20: note = chemically synthesized
  source 1..20: mol_type = other DNA
ataacactttccacccagcc

SEQ ID NO: 25702 - DNA, 20 bp, synthetic construct
  misc_feature 1..20: note = chemically synthesized
  source 1..20: mol_type = other DNA
taacactttccacccagcct

SEQ ID NO: 25703 - DNA, 20 bp, synthetic construct
  misc_feature 1..20: note = chemically synthesized
  source 1..20: mol_type = other DNA
tccacccagcctgggcaaca

SEQ ID NO: 25704 - DNA, 20 bp, synthetic construct
  misc_feature 1..20: note = chemically synthesized
  source 1..20: mol_type = other DNA
cccagcctgggcaacatggt

SEQ ID NO: 25705 - DNA, 20 bp, synthetic construct
  misc_feature 1..20: note = chemically synthesized
  source 1..20: mol_type = other DNA
tctacaaaaaatacaaaaat

SEQ ID NO: 25706 - DNA, 20 bp, synthetic construct
  misc_feature 1..20: note = chemically synthesized
  source 1..20: mol_type = other DNA
caaaaaatacaaaaattagc

SEQ ID NO: 25707 - DNA, 20 bp, synthetic construct
  misc_feature 1..20: note = chemically synthesized
  source 1..20: mol_type = other DNA
aaaaaatacaaaaattagcc

SEQ ID NO: 25708 - DNA, 20 bp, synthetic construct
  misc_feature 1..20: note = chemically synthesized
  source 1..20: mol_type = other DNA
atacaaaaattagccaggtg

SEQ ID NO: 25709 - DNA, 20 bp, synthetic construct
  misc_feature 1..20: note = chemically synthesized
  source 1..20: mol_type = other DNA
caaaaattagccaggtgtgg

SEQ ID NO: 25710 - DNA, 20 bp, synthetic construct
  misc_feature 1..20: note = chemically synthesized
  source 1..20: mol_type = other DNA
aaattagccaggtgtggtgg

SEQ ID NO: 25711 - DNA, 20 bp, synthetic construct
  misc_feature 1..20: note = chemically synthesized
  source 1..20: mol_type = other DNA
gtggtggtggcgcatgcctg

SEQ ID NO: 25712 - DNA, 20 bp, synthetic construct
  misc_feature 1..20: note = chemically synthesized
  source 1..20: mol_type = other DNA
gtggcgcatgcctgtagtcc

SEQ ID NO: 25713 - DNA, 20 bp, synthetic construct
  misc_feature 1..20: note = chemically synthesized
  source 1..20: mol_type = other DNA
gcctgtagtcctagctactt

SEQ ID NO: 25714 - DNA, 20 bp, synthetic construct
  misc_feature 1..20: note = chemically synthesized
  source 1..20: mol_type = other DNA
ctgtagtcctagctacttga

SEQ ID NO: 25715 - DNA, 20 bp, synthetic construct
  misc_feature 1..20: note = chemically synthesized
  source 1..20: mol_type = other DNA
gtcctagctacttgagagct

SEQ ID NO: 25716 - DNA, 20 bp, synthetic construct
  misc_feature 1..20: note = chemically synthesized
  source 1..20: mol_type = other DNA
tcctagctacttgagagctg

SEQ ID NO: 25717 - DNA, 20 bp, synthetic construct
  misc_feature 1..20: note = chemically synthesized
  source 1..20: mol_type = other DNA
tagctacttgagagctgagg

SEQ ID NO: 25718 - DNA, 20 bp, synthetic construct
  misc_feature 1..20: note = chemically synthesized
  source 1..20: mol_type = other DNA
agctacttgagagctgaggc

SEQ ID NO: 25719 - DNA, 20 bp, synthetic construct
  misc_feature 1..20: note = chemically synthesized
  source 1..20: mol_type = other DNA
ctacttgagagctgaggcag

SEQ ID NO: 25720 - DNA, 20 bp, synthetic construct
  misc_feature 1..20: note = chemically synthesized
  source 1..20: mol_type = other DNA
tacttgagagctgaggcagg

SEQ ID NO: 25721 - DNA, 20 bp, synthetic construct
  misc_feature 1..20: note = chemically synthesized
  source 1..20: mol_type = other DNA
gcaggaggactgcttgaact

SEQ ID NO: 25722 - DNA, 20 bp, synthetic construct
  misc_feature 1..20: note = chemically synthesized
  source 1..20: mol_type = other DNA
caggaggactgcttgaactc

SEQ ID NO: 25723 - DNA, 20 bp, synthetic construct
  misc_feature 1..20: note = chemically synthesized
  source 1..20: mol_type = other DNA
ggaggactgcttgaactcgg

SEQ ID NO: 25724 - DNA, 20 bp, synthetic construct
  misc_feature 1..20: note = chemically synthesized
  source 1..20: mol_type = other DNA
gaggactgcttgaactcggg

SEQ ID NO: 25725 - DNA, 20 bp, synthetic construct
  misc_feature 1..20: note = chemically synthesized
  source 1..20: mol_type = other DNA
gactgcttgaactcgggagg

SEQ ID NO: 25726 - DNA, 20 bp, synthetic construct
  misc_feature 1..20: note = chemically synthesized
  source 1..20: mol_type = other DNA
ctgcttgaactcgggaggcg

SEQ ID NO: 25727 - DNA, 20 bp, synthetic construct
  misc_feature 1..20: note = chemically synthesized
  source 1..20: mol_type = other DNA
tgcttgaactcgggaggcgg

SEQ ID NO: 25728 - DNA, 20 bp, synthetic construct
  misc_feature 1..20: note = chemically synthesized
  source 1..20: mol_type = other DNA
aactcgggaggcggaggttg

SEQ ID NO: 25729 - DNA, 20 bp, synthetic construct
  misc_feature 1..20: note = chemically synthesized
  source 1..20: mol_type = other DNA
cgggaggcggaggttgcagt

SEQ ID NO: 25730 - DNA, 20 bp, synthetic construct
  misc_feature 1..20: note = chemically synthesized
  source 1..20: mol_type = other DNA
ggcggaggttgcagtgagcc

SEQ ID NO: 25731 - DNA, 20 bp, synthetic construct
  misc_feature 1..20: note = chemically synthesized
  source 1..20: mol_type = other DNA
aagattgcaccactgcactc

SEQ ID NO: 25732 - DNA, 20 bp, synthetic construct
  misc_feature 1..20: note = chemically synthesized
  source 1..20: mol_type = other DNA
tgcaccactgcactccagcc

SEQ ID NO: 25733 - DNA, 20 bp, synthetic construct
  misc_feature 1..20: note = chemically synthesized
  source 1..20: mol_type = other DNA
gcaccactgcactccagcct

SEQ ID NO: 25734 - DNA, 20 bp, synthetic construct
  misc_feature 1..20: note = chemically synthesized
  source 1..20: mol_type = other DNA
ctgcactccagcctgggcaa

SEQ ID NO: 25735 - DNA, 20 bp, synthetic construct
  misc_feature 1..20: note = chemically synthesized
  source 1..20: mol_type = other DNA
gcactccagcctgggcaaca

SEQ ID NO: 25736 - DNA, 20 bp, synthetic construct
  misc_feature 1..20: note = chemically synthesized
  source 1..20: mol_type = other DNA
tccagcctgggcaacagagt

SEQ ID NO: 25737 - DNA, 20 bp, synthetic construct
  misc_feature 1..20: note = chemically synthesized
  source 1..20: mol_type = other DNA
aattaaaaaaaaaaaaaaaa

SEQ ID NO: 25738 - DNA, 20 bp, synthetic construct
  misc_feature 1..20: note = chemically synthesized
  source 1..20: mol_type = other DNA
aaaaaaaaaagctttccata

SEQ ID NO: 25739 - DNA, 20 bp, synthetic construct
  misc_feature 1..20: note = chemically synthesized
  source 1..20: mol_type = other DNA
aaaaaaaaagctttccataa

SEQ ID NO: 25740 - DNA, 20 bp, synthetic construct
  misc_feature 1..20: note = chemically synthesized
  source 1..20: mol_type = other DNA
aaaaagctttccataaaggc

SEQ ID NO: 25741 - DNA, 20 bp, synthetic construct
  misc_feature 1..20: note = chemically synthesized
  source 1..20: mol_type = other DNA
aaaagctttccataaaggcc

SEQ ID NO: 25742 - DNA, 20 bp, synthetic construct
  misc_feature 1..20: note = chemically synthesized
  source 1..20: mol_type = other DNA
gctttccataaaggccagga

SEQ ID NO: 25743 - DNA, 20 bp, synthetic construct
  misc_feature 1..20: note = chemically synthesized
  source 1..20: mol_type = other DNA
caggacagatgtgcttcctt

SEQ ID NO: 25744 - DNA, 20 bp, synthetic construct
  misc_feature 1..20: note = chemically synthesized
  source 1..20: mol_type = other DNA
gacagatgtgcttccttaag

SEQ ID NO: 25745 - DNA, 20 bp, synthetic construct
  misc_feature 1..20: note = chemically synthesized
  source 1..20: mol_type = other DNA
acagatgtgcttccttaaga

SEQ ID NO: 25746 - DNA, 20 bp, synthetic construct
  misc_feature 1..20: note = chemically synthesized
  source 1..20: mol_type = other DNA
cagatgtgcttccttaagaa

SEQ ID NO: 25747 - DNA, 20 bp, synthetic construct
  misc_feature 1..20: note = chemically synthesized
  source 1..20: mol_type = other DNA
tgtgcttccttaagaagggc

SEQ ID NO: 25748 - DNA, 20 bp, synthetic construct
  misc_feature 1..20: note = chemically synthesized
  source 1..20: mol_type = other DNA
tgcttccttaagaagggcta

SEQ ID NO: 25749 - DNA, 20 bp, synthetic construct
  misc_feature 1..20: note = chemically synthesized
  source 1..20: mol_type = other DNA
tccttaagaagggctagagt

SEQ ID NO: 25750 - DNA, 20 bp, synthetic construct
  misc_feature 1..20: note = chemically synthesized
  source 1..20: mol_type = other DNA
cttaagaagggctagagttg

SEQ ID NO: 25751 - DNA, 20 bp, synthetic construct
  misc_feature 1..20: note = chemically synthesized
  source 1..20: mol_type = other DNA
ttaagaagggctagagttgg

SEQ ID NO: 25752 - DNA, 20 bp, synthetic construct
  misc_feature 1..20: note = chemically synthesized
  source 1..20: mol_type = other DNA
ttggaggccttgccctcctc

SEQ ID NO: 25753 - DNA, 20 bp, synthetic construct
  misc_feature 1..20: note = chemically synthesized
  source 1..20: mol_type = other DNA
tggaggccttgccctcctct

SEQ ID NO: 25754 - DNA, 20 bp, synthetic construct
  misc_feature 1..20: note = chemically synthesized
  source 1..20: mol_type = other DNA
ttgccctcctctgggcttgt

SEQ ID NO: 25755 - DNA, 20 bp, synthetic construct
  misc_feature 1..20: note = chemically synthesized
  source 1..20: mol_type = other DNA
tcctctgggcttgttggcct

SEQ ID NO: 25756 - DNA, 20 bp, synthetic construct
  misc_feature 1..20: note = chemically synthesized
  source 1..20: mol_type = other DNA
cctctgggcttgttggcctt

SEQ ID NO: 25757 - DNA, 20 bp, synthetic construct
  misc_feature 1..20: note = chemically synthesized
  source 1..20: mol_type = other DNA
ctctgggcttgttggccttg

SEQ ID NO: 25758 - DNA, 20 bp, synthetic construct
  misc_feature 1..20: note = chemically synthesized
  source 1..20: mol_type = other DNA
tctgggcttgttggccttgg

SEQ ID NO: 25759 - DNA, 20 bp, synthetic construct
  misc_feature 1..20: note = chemically synthesized
  source 1..20: mol_type = other DNA
tgggcttgttggccttgggg

SEQ ID NO: 25760 - DNA, 20 bp, synthetic construct
  misc_feature 1..20: note = chemically synthesized
  source 1..20: mol_type = other DNA
gggcttgttggccttggggg

SEQ ID NO: 25761 - DNA, 20 bp, synthetic construct
  misc_feature 1..20: note = chemically synthesized
  source 1..20: mol_type = other DNA
tggccttgggggaggcctga

SEQ ID NO: 25762 - DNA, 20 bp, synthetic construct
  misc_feature 1..20: note = chemically synthesized
  source 1..20: mol_type = other DNA
gccttgggggaggcctgaca

SEQ ID NO: 25763 - DNA, 20 bp, synthetic construct
  misc_feature 1..20: note = chemically synthesized
  source 1..20: mol_type = other DNA
gaggcctgacagagccttcc

SEQ ID NO: 25764 - DNA, 20 bp, synthetic construct
  misc_feature 1..20: note = chemically synthesized
  source 1..20: mol_type = other DNA
aggcctgacagagccttcct

SEQ ID NO: 25765 - DNA, 20 bp, synthetic construct
  misc_feature 1..20: note = chemically synthesized
  source 1..20: mol_type = other DNA
ggcctgacagagccttcctg

SEQ ID NO: 25766 - DNA, 20 bp, synthetic construct
  misc_feature 1..20: note = chemically synthesized
  source 1..20: mol_type = other DNA
cctggggctgcctgttcttc

SEQ ID NO: 25767 - DNA, 20 bp, synthetic construct
  misc_feature 1..20: note = chemically synthesized
  source 1..20: mol_type = other DNA
tctggccccttctccgtgca

SEQ ID NO: 25768 - DNA, 20 bp, synthetic construct
  misc_feature 1..20: note = chemically synthesized
  source 1..20: mol_type = other DNA
ccccttctccgtgcacagac

SEQ ID NO: 25769 - DNA, 20 bp, synthetic construct
  misc_feature 1..20: note = chemically synthesized
  source 1..20: mol_type = other DNA
ctccgtgcacagaccagtct

SEQ ID NO: 25770 - DNA, 20 bp, synthetic construct
  misc_feature 1..20: note = chemically synthesized
  source 1..20: mol_type = other DNA
acagaccagtcttggatgat

SEQ ID NO: 25771 - DNA, 20 bp, synthetic construct
  misc_feature 1..20: note = chemically synthesized
  source 1..20: mol_type = other DNA
accagtcttggatgataagt

SEQ ID NO: 25772 - DNA, 20 bp, synthetic construct
  misc_feature 1..20: note = chemically synthesized
  source 1..20: mol_type = other DNA
ccagtcttggatgataagtc

SEQ ID NO: 25773 - DNA, 20 bp, synthetic construct
  misc_feature 1..20: note = chemically synthesized
  source 1..20: mol_type = other DNA
tcttggatgataagtcagga

SEQ ID NO: 25774 - DNA, 20 bp, synthetic construct
  misc_feature 1..20: note = chemically synthesized
  source 1..20: mol_type = other DNA
agtcaggaaagccctccacc

SEQ ID NO: 25775 - DNA, 20 bp, synthetic construct
  misc_feature 1..20: note = chemically synthesized
  source 1..20: mol_type = other DNA
aggaaagccctccacctggc

SEQ ID NO: 25776 - DNA, 20 bp, synthetic construct
  misc_feature 1..20: note = chemically synthesized
  source 1..20: mol_type = other DNA
ggaaagccctccacctggcc

SEQ ID NO: 25777 - DNA, 20 bp, synthetic construct
  misc_feature 1..20: note = chemically synthesized
  source 1..20: mol_type = other DNA
ccctccacctggccgggctg

SEQ ID NO: 25778 - DNA, 20 bp, synthetic construct
  misc_feature 1..20: note = chemically synthesized
  source 1..20: mol_type = other DNA
tggccgggctgcagtgtcgc

SEQ ID NO: 25779 - DNA, 20 bp, synthetic construct
  misc_feature 1..20: note = chemically synthesized
  source 1..20: mol_type = other DNA
ggccgggctgcagtgtcgct

SEQ ID NO: 25780 - DNA, 20 bp, synthetic construct
  misc_feature 1..20: note = chemically synthesized
  source 1..20: mol_type = other DNA
gccgggctgcagtgtcgctg

SEQ ID NO: 25781 - DNA, 20 bp, synthetic construct
  misc_feature 1..20: note = chemically synthesized
  source 1..20: mol_type = other DNA
ctgcccacacttgctgacca

SEQ ID NO: 25782 - DNA, 20 bp, synthetic construct
  misc_feature 1..20: note = chemically synthesized
  source 1..20: mol_type = other DNA
ccccactcccttgtctctca

SEQ ID NO: 25783 - DNA, 20 bp, synthetic construct
  misc_feature 1..20: note = chemically synthesized
  source 1..20: mol_type = other DNA
caccactgcccctgtttcca

SEQ ID NO: 25784 - DNA, 20 bp, synthetic construct
  misc_feature 1..20: note = chemically synthesized
  source 1..20: mol_type = other DNA
agtgcccacgaacaaaacat

SEQ ID NO: 25785 - DNA, 20 bp, synthetic construct
  misc_feature 1..20: note = chemically synthesized
  source 1..20: mol_type = other DNA
gtgcccacgaacaaaacatc

SEQ ID NO: 25786 - DNA, 20 bp, synthetic construct
  misc_feature 1..20: note = chemically synthesized
  source 1..20: mol_type = other DNA
gcccacgaacaaaacatcag

SEQ ID NO: 25787 - DNA, 20 bp, synthetic construct
  misc_feature 1..20: note = chemically synthesized
  source 1..20: mol_type = other DNA
acaaaacatcaggagtctct

SEQ ID NO: 25788 - DNA, 20 bp, synthetic construct
  misc_feature 1..20: note = chemically synthesized
  source 1..20: mol_type = other DNA
ttctttatttattttactct

SEQ ID NO: 25789 - DNA, 20 bp, synthetic construct
  misc_feature 1..20: note = chemically synthesized
  source 1..20: mol_type = other DNA
atttattttactctaagttc

SEQ ID NO: 25790 - DNA, 20 bp, synthetic construct
  misc_feature 1..20: note = chemically synthesized
  source 1..20: mol_type = other DNA
tttattttactctaagttct

SEQ ID NO: 25791 - DNA, 20 bp, synthetic construct
  misc_feature 1..20: note = chemically synthesized
  source 1..20: mol_type = other DNA
taagttctgggatacatgtg

SEQ ID NO: 25792 - DNA, 20 bp, synthetic construct
  misc_feature 1..20: note = chemically synthesized
  source 1..20: mol_type = other DNA
ggatacatgtgcagaatgtg

SEQ ID NO: 25793 - DNA, 20 bp, synthetic construct
  misc_feature 1..20: note = chemically synthesized
  source 1..20: mol_type = other DNA
gatacatgtgcagaatgtgc

SEQ ID NO: 25794 - DNA, 20 bp, synthetic construct
  misc_feature 1..20: note = chemically synthesized
  source 1..20: mol_type = other DNA
aatgtgcaggtttgttacat

SEQ ID NO: 25795 - DNA, 20 bp, synthetic construct
  misc_feature 1..20: note = chemically synthesized
  source 1..20: mol_type = other DNA
acataagtatacatgtacca

SEQ ID NO: 25796 - DNA, 20 bp, synthetic construct
  misc_feature 1..20: note = chemically synthesized
  source 1..20: mol_type = other DNA
taagtatacatgtaccatgg

SEQ ID NO: 25797 - DNA, 20 bp, synthetic construct
  misc_feature 1..20: note = chemically synthesized
  source 1..20: mol_type = other DNA
tatcaacccatcatctacat

SEQ ID NO: 25798 - DNA, 20 bp, synthetic construct
  misc_feature 1..20: note = chemically synthesized
  source 1..20: mol_type = other DNA
atcaacccatcatctacatt

SEQ ID NO: 25799 - DNA, 20 bp, synthetic construct
  misc_feature 1..20: note = chemically synthesized
  source 1..20: mol_type = other DNA
cttgcccctccacccatgtt

SEQ ID NO: 25800 - DNA, 20 bp, synthetic construct
  misc_feature 1..20: note = chemically synthesized
  source 1..20: mol_type = other DNA
cacccatgtttggttttctt

SEQ ID NO: 25801 - DNA, 20 bp, synthetic construct
  misc_feature 1..20: note = chemically synthesized
  source 1..20: mol_type = other DNA
tggttttctttagcttattc

SEQ ID NO: 25802 - DNA, 20 bp, synthetic construct
  misc_feature 1..20: note = chemically synthesized
  source 1..20: mol_type = other DNA
gcttattctagtattttctc

SEQ ID NO: 25803 - DNA, 20 bp, synthetic construct
  misc_feature 1..20: note = chemically synthesized
  source 1..20: mol_type = other DNA
gaccgatcgaaatgataata

SEQ ID NO: 25804 - DNA, 20 bp, synthetic construct
  misc_feature 1..20: note = chemically synthesized
  source 1..20: mol_type = other DNA
ccgatcgaaatgataatata

SEQ ID NO: 25805 - DNA, 20 bp, synthetic construct
  misc_feature 1..20: note = chemically synthesized
  source 1..20: mol_type = other DNA
cgatcgaaatgataatatag

SEQ ID NO: 25806 - DNA, 20 bp, synthetic construct
  misc_feature 1..20: note = chemically synthesized
  source 1..20: mol_type = other DNA
aatgataatatagaggcata

SEQ ID NO: 25807 - DNA, 20 bp, synthetic construct
  misc_feature 1..20: note = chemically synthesized
  source 1..20: mol_type = other DNA
gcataaagcacatttgttgt

SEQ ID NO: 25808 - DNA, 20 bp, synthetic construct
  misc_feature 1..20: note = chemically synthesized
  source 1..20: mol_type = other DNA
acatttgttgtgagttgatg

SEQ ID NO: 25809 - DNA, 20 bp, synthetic construct
  misc_feature 1..20: note = chemically synthesized
  source 1..20: mol_type = other DNA
tgtgagttgatgcagataaa

SEQ ID NO: 25810 - DNA, 20 bp, synthetic construct
  misc_feature 1..20: note = chemically synthesized
  source 1..20: mol_type = other DNA
gtgagttgatgcagataaaa

SEQ ID NO: 25811 - DNA, 20 bp, synthetic construct
  misc_feature 1..20: note = chemically synthesized
  source 1..20: mol_type = other DNA
ttgatgcagataaaaaggct

SEQ ID NO: 25812 - DNA, 20 bp, synthetic construct
  misc_feature 1..20: note = chemically synthesized
  source 1..20: mol_type = other DNA
tgatgcagataaaaaggctt

SEQ ID NO: 25813 - DNA, 20 bp, synthetic construct
  misc_feature 1..20: note = chemically synthesized
  source 1..20: mol_type = other DNA
gatgcagataaaaaggcttg

SEQ ID NO: 25814 - DNA, 20 bp, synthetic construct
  misc_feature 1..20: note = chemically synthesized
  source 1..20: mol_type = other DNA
gcagataaaaaggcttgggg

SEQ ID NO: 25815 - DNA, 20 bp, synthetic construct
  misc_feature 1..20: note = chemically synthesized
  source 1..20: mol_type = other DNA
aaaaggcttggggtggtctt

SEQ ID NO: 25816 - DNA, 20 bp, synthetic construct
  misc_feature 1..20: note = chemically synthesized
  source 1..20: mol_type = other DNA
aaggcttggggtggtcttca

SEQ ID NO: 25817 - DNA, 20 bp, synthetic construct
  misc_feature 1..20: note = chemically synthesized
  source 1..20: mol_type = other DNA
gggtggtcttcagagtaatt

SEQ ID NO: 25818 - DNA, 20 bp, synthetic construct
  misc_feature 1..20: note = chemically synthesized
  source 1..20: mol_type = other DNA
ggtggtcttcagagtaattt

SEQ ID NO: 25819 - DNA, 20 bp, synthetic construct
  misc_feature 1..20: note = chemically synthesized
  source 1..20: mol_type = other DNA
tggtcttcagagtaatttgg

SEQ ID NO: 25820 - DNA, 20 bp, synthetic construct
  misc_feature 1..20: note = chemically synthesized
  source 1..20: mol_type = other DNA
ttgggagttgtgtgttctgc

SEQ ID NO: 25821 - DNA, 20 bp, synthetic construct
  misc_feature 1..20: note = chemically synthesized
  source 1..20: mol_type = other DNA
gtgtgttctgctggctttga

SEQ ID NO: 25822 - DNA, 20 bp, synthetic construct
  misc_feature 1..20: note = chemically synthesized
  source 1..20: mol_type = other DNA
ttctgctggctttgatagac

SEQ ID NO: 25823 - DNA, 20 bp, synthetic construct
  misc_feature 1..20: note = chemically synthesized
  source 1..20: mol_type = other DNA
agacaagcccttctctgctc

SEQ ID NO: 25824 - DNA, 20 bp, synthetic construct
  misc_feature 1..20: note = chemically synthesized
  source 1..20: mol_type = other DNA
caagcccttctctgctctgg

SEQ ID NO: 25825 - DNA, 20 bp, synthetic construct
  misc_feature 1..20: note = chemically synthesized
  source 1..20: mol_type = other DNA
aagcccttctctgctctggc

SEQ ID NO: 25826 - DNA, 20 bp, synthetic construct
  misc_feature 1..20: note = chemically synthesized
  source 1..20: mol_type = other DNA
tctgctctggcaggtgttat

SEQ ID NO: 25827 - DNA, 20 bp, synthetic construct
  misc_feature 1..20: note = chemically synthesized
  source 1..20: mol_type = other DNA
tctcatcgcatccatcttca

SEQ ID NO: 25828 - DNA, 20 bp, synthetic construct
  misc_feature 1..20: note = chemically synthesized
  source 1..20: mol_type = other DNA
catgcctcttcctgaatgct

SEQ ID NO: 25829 - DNA, 20 bp, synthetic construct
  misc_feature 1..20: note = chemically synthesized
  source 1..20: mol_type = other DNA
aatgcgtatttcaccttcct

SEQ ID NO: 25830 - DNA, 20 bp, synthetic construct
  misc_feature 1..20: note = chemically synthesized
  source 1..20: mol_type = other DNA
atgcgtatttcaccttcctc

SEQ ID NO: 25831 - DNA, 20 bp, synthetic construct
  misc_feature 1..20: note = chemically synthesized
  source 1..20: mol_type = other DNA
caggtatctaatacttaacc

SEQ ID NO: 25832 - DNA, 20 bp, synthetic construct
  misc_feature 1..20: note = chemically synthesized
  source 1..20: mol_type = other DNA
aggtatctaatacttaacct

SEQ ID NO: 25833 - DNA, 20 bp, synthetic construct
  misc_feature 1..20: note = chemically synthesized
  source 1..20: mol_type = other DNA
gtatctaatacttaacctgg

SEQ ID NO: 25834 - DNA, 20 bp, synthetic construct
  misc_feature 1..20: note = chemically synthesized
  source 1..20: mol_type = other DNA
acttaacctgggagaaacgc

SEQ ID NO: 25835 - DNA, 20 bp, synthetic construct
  misc_feature 1..20: note = chemically synthesized
  source 1..20: mol_type = other DNA
acctgggagaaacgcaagtg

SEQ ID NO: 25836 - DNA, 20 bp, synthetic construct
  misc_feature 1..20: note = chemically synthesized
  source 1..20: mol_type = other DNA
gaaacgcaagtgtggtttgc

SEQ ID NO: 25837 - DNA, 20 bp, synthetic construct
  misc_feature 1..20: note = chemically synthesized
  source 1..20: mol_type = other DNA
aaacgcaagtgtggtttgca

SEQ ID NO: 25838 - DNA, 20 bp, synthetic construct
  misc_feature 1..20: note = chemically synthesized
  source 1..20: mol_type = other DNA
gtgtggtttgcaaggctttc

SEQ ID NO: 25839 - DNA, 20 bp, synthetic construct
  misc_feature 1..20: note = chemically synthesized
  source 1..20: mol_type = other DNA
tgtggtttgcaaggctttcc

SEQ ID NO: 25840 - DNA, 20 bp, synthetic construct
  misc_feature 1..20: note = chemically synthesized
  source 1..20: mol_type = other DNA
catccttttcttcatttctc

SEQ ID NO: 25841 - DNA, 20 bp, synthetic construct
  misc_feature 1..20: note = chemically synthesized
  source 1..20: mol_type = other DNA
ccttttcttcatttctcgag

SEQ ID NO: 25842 - DNA, 20 bp, synthetic construct
  misc_feature 1..20: note = chemically synthesized
  source 1..20: mol_type = other DNA
cttttcttcatttctcgagt

SEQ ID NO: 25843 - DNA, 20 bp, synthetic construct
  misc_feature 1..20: note = chemically synthesized
  source 1..20: mol_type = other DNA
ttttcttcatttctcgagtg

SEQ ID NO: 25844 - DNA, 20 bp, synthetic construct
  misc_feature 1..20: note = chemically synthesized
  source 1..20: mol_type = other DNA
tcttcatttctcgagtgggg

SEQ ID NO: 25845 - DNA, 20 bp, synthetic construct
  misc_feature 1..20: note = chemically synthesized
  source 1..20: mol_type = other DNA
cttcatttctcgagtggggc

SEQ ID NO: 25846 - DNA, 20 bp, synthetic construct
  misc_feature 1..20: note = chemically synthesized
  source 1..20: mol_type = other DNA
ttcatttctcgagtggggca

SEQ ID NO: 25847 - DNA, 20 bp, synthetic construct
  misc_feature 1..20: note = chemically synthesized
  source 1..20: mol_type = other DNA
catttctcgagtggggcagg

SEQ ID NO: 25848 - DNA, 20 bp, synthetic construct
  misc_feature 1..20: note = chemically synthesized
  source 1..20: mol_type = other DNA
atttctcgagtggggcaggg

SEQ ID NO: 25849 - DNA, 20 bp, synthetic construct
  misc_feature 1..20: note = chemically synthesized
  source 1..20: mol_type = other DNA
cgagtggggcagggaggcat

SEQ ID NO: 25850 - DNA, 20 bp, synthetic construct
  misc_feature 1..20: note = chemically synthesized
  source 1..20: mol_type = other DNA
gagtggggcagggaggcatc

SEQ ID NO: 25851 - DNA, 20 bp, synthetic construct
  misc_feature 1..20: note = chemically synthesized
  source 1..20: mol_type = other DNA
agtggggcagggaggcatcg

SEQ ID NO: 25852 - DNA, 20 bp, synthetic construct
  misc_feature 1..20: note = chemically synthesized
  source 1..20: mol_type = other DNA
gtttgtgatacgtttgtgtg

SEQ ID NO: 25853 - DNA, 20 bp, synthetic construct
  misc_feature 1..20: note = chemically synthesized
  source 1..20: mol_type = other DNA
gtgatacgtttgtgtgaagc

SEQ ID NO: 25854 - DNA, 20 bp, synthetic construct
  misc_feature 1..20: note = chemically synthesized
  source 1..20: mol_type = other DNA
ttgtgtgaagctggacaatt

SEQ ID NO: 25855 - DNA, 20 bp, synthetic construct
  misc_feature 1..20: note = chemically synthesized
  source 1..20: mol_type = other DNA
tgtgtgaagctggacaattc

SEQ ID NO: 25856 - DNA, 20 bp, synthetic construct
  misc_feature 1..20: note = chemically synthesized
  source 1..20: mol_type = other DNA
aagctggacaattcgggtga

SEQ ID NO: 25857 - DNA, 20 bp, synthetic construct
  misc_feature 1..20: note = chemically synthesized
  source 1..20: mol_type = other DNA
tcgggtgacagaaatatgtt

SEQ ID NO: 25858 - DNA, 20 bp, synthetic construct
  misc_feature 1..20: note = chemically synthesized
  source 1..20: mol_type = other DNA
cgggtgacagaaatatgttc

SEQ ID NO: 25859 - DNA, 20 bp, synthetic construct
  misc_feature 1..20: note = chemically synthesized
  source 1..20: mol_type = other DNA
gggtgacagaaatatgttca

SEQ ID NO: 25860 - DNA, 20 bp, synthetic construct
  misc_feature 1..20: note = chemically synthesized
  source 1..20: mol_type = other DNA
tgacagaaatatgttcaggg

SEQ ID NO: 25861 - DNA, 20 bp, synthetic construct
  misc_feature 1..20: note = chemically synthesized
  source 1..20: mol_type = other DNA
tatcgtcccttctaactaca

SEQ ID NO: 25862 - DNA, 20 bp, synthetic construct
  misc_feature 1..20: note = chemically synthesized
  source 1..20: mol_type = other DNA
atcgtcccttctaactacaa

SEQ ID NO: 25863 - DNA, 20 bp, synthetic construct
  misc_feature 1..20: note = chemically synthesized
  source 1..20: mol_type = other DNA
cccttctaactacaaaggca

SEQ ID NO: 25864 - DNA, 20 bp, synthetic construct
  misc_feature 1..20: note = chemically synthesized
  source 1..20: mol_type = other DNA
aactacaaaggcatggattg

SEQ ID NO: 25865 - DNA, 20 bp, synthetic construct
  misc_feature 1..20: note = chemically synthesized
  source 1..20: mol_type = other DNA
caaaggcatggattgcagtt

SEQ ID NO: 25866 - DNA, 20 bp, synthetic construct
  misc_feature 1..20: note = chemically synthesized
  source 1..20: mol_type = other DNA
ttgcagttgagccccacttt

SEQ ID NO: 25867 - DNA, 20 bp, synthetic construct
  misc_feature 1..20: note = chemically synthesized
  source 1..20: mol_type = other DNA
cagttgagccccactttcag

SEQ ID NO: 25868 - DNA, 20 bp, synthetic construct
  misc_feature 1..20: note = chemically synthesized
  source 1..20: mol_type = other DNA
agttgagccccactttcaga

SEQ ID NO: 25869 - DNA, 20 bp, synthetic construct
  misc_feature 1..20: note = chemically synthesized
  source 1..20: mol_type = other DNA
acacacaaaaatctcattaa

SEQ ID NO: 25870 - DNA, 20 bp, synthetic construct
  misc_feature 1..20: note = chemically synthesized
  source 1..20: mol_type = other DNA
attaatggaaactgataaat

SEQ ID NO: 25871 - DNA, 20 bp, synthetic construct
  misc_feature 1..20: note = chemically synthesized
  source 1..20: mol_type = other DNA
taatggaaactgataaatta

SEQ ID NO: 25872 - DNA, 20 bp, synthetic construct
  misc_feature 1..20: note = chemically synthesized
  source 1..20: mol_type = other DNA
atggaaactgataaattaga

SEQ ID NO: 25873 - DNA, 20 bp, synthetic construct
  misc_feature 1..20: note = chemically synthesized
  source 1..20: mol_type = other DNA
gagagtgatttttcacatta

SEQ ID NO: 25874 - DNA, 20 bp, synthetic construct
  misc_feature 1..20: note = chemically synthesized
  source 1..20: mol_type = other DNA
gtgatttttcacattacaga

SEQ ID NO: 25875 - DNA, 20 bp, synthetic construct
  misc_feature 1..20: note = chemically synthesized
  source 1..20: mol_type = other DNA
aaagattgttaacttttcaa

SEQ ID NO: 25876 - DNA, 20 bp, synthetic construct
  misc_feature 1..20: note = chemically synthesized
  source 1..20: mol_type = other DNA
aagattgttaacttttcaaa

SEQ ID NO: 25877 - DNA, 20 bp, synthetic construct
  misc_feature 1..20: note = chemically synthesized
  source 1..20: mol_type = other DNA
cttttcaaaaggtttcacca

SEQ ID NO: 25878 - DNA, 20 bp, synthetic construct
  misc_feature 1..20: note = chemically synthesized
  source 1..20: mol_type = other DNA
ttttcaaaaggtttcaccac

SEQ ID NO: 25879 - DNA, 20 bp, synthetic construct
  misc_feature 1..20: note = chemically synthesized
  source 1..20: mol_type = other DNA
tttcaaaaggtttcaccaca

SEQ ID NO: 25880 - DNA, 20 bp, synthetic construct
  misc_feature 1..20: note = chemically synthesized
  source 1..20: mol_type = other DNA
caccacagggtttctttaaa

SEQ ID NO: 25881 - DNA, 20 bp, synthetic construct
  misc_feature 1..20: note = chemically synthesized
  source 1..20: mol_type = other DNA
acagggtttctttaaatagt

SEQ ID NO: 25882 - DNA, 20 bp, synthetic construct
  misc_feature 1..20: note = chemically synthesized
  source 1..20: mol_type = other DNA
gagctcccccactgaattta

SEQ ID NO: 25883 - DNA, 20 bp, synthetic construct
  misc_feature 1..20: note = chemically synthesized
  source 1..20: mol_type = other DNA
gaatttaaagtgtttgttta

SEQ ID NO: 25884 - DNA, 20 bp, synthetic construct
  misc_feature 1..20: note = chemically synthesized
  source 1..20: mol_type = other DNA
acagatcattaactacttga

SEQ ID NO: 25885 - DNA, 20 bp, synthetic construct
  misc_feature 1..20: note = chemically synthesized
  source 1..20: mol_type = other DNA
agatcattaactacttgaca

SEQ ID NO: 25886 - DNA, 20 bp, synthetic construct
  misc_feature 1..20: note = chemically synthesized
  source 1..20: mol_type = other DNA
atcattaactacttgacaga

SEQ ID NO: 25887 - DNA, 20 bp, synthetic construct
  misc_feature 1..20: note = chemically synthesized
  source 1..20: mol_type = other DNA
tcattaactacttgacagag

SEQ ID NO: 25888 - DNA, 20 bp, synthetic construct
  misc_feature 1..20: note = chemically synthesized
  source 1..20: mol_type = other DNA
ctacttgacagagaggatat

SEQ ID NO: 25889 - DNA, 20 bp, synthetic construct
  misc_feature 1..20: note = chemically synthesized
  source 1..20: mol_type = other DNA
tacttgacagagaggatatt

SEQ ID NO: 25890 - DNA, 20 bp, synthetic construct
  misc_feature 1..20: note = chemically synthesized
  source 1..20: mol_type = other DNA
acttgacagagaggatattg

SEQ ID NO: 25891 - DNA, 20 bp, synthetic construct
  misc_feature 1..20: note = chemically synthesized
  source 1..20: mol_type = other DNA
cttgacagagaggatattgg

SEQ ID NO: 25892 - DNA, 20 bp, synthetic construct
  misc_feature 1..20: note = chemically synthesized
  source 1..20: mol_type = other DNA
acagagaggatattgggggt

SEQ ID NO: 25893 - DNA, 20 bp, synthetic construct
  misc_feature 1..20: note = chemically synthesized
  source 1..20: mol_type = other DNA
cagagaggatattgggggtt

SEQ ID NO: 25894 - DNA, 20 bp, synthetic construct
  misc_feature 1..20: note = chemically synthesized
  source 1..20: mol_type = other DNA
agagaggatattgggggttg

SEQ ID NO: 25895 - DNA, 20 bp, synthetic construct
  misc_feature 1..20: note = chemically synthesized
  source 1..20: mol_type = other DNA
gagaggatattgggggttgg

SEQ ID NO: 25896 - DNA, 20 bp, synthetic construct
  misc_feature 1..20: note = chemically synthesized
  source 1..20: mol_type = other DNA
aggatattgggggttggggg

SEQ ID NO: 25897 - DNA, 20 bp, synthetic construct
  misc_feature 1..20: note = chemically synthesized
  source 1..20: mol_type = other DNA
ggatattgggggttggggga

SEQ ID NO: 25898 - DNA, 20 bp, synthetic construct
  misc_feature 1..20: note = chemically synthesized
  source 1..20: mol_type = other DNA
tattgggggttgggggaagg

SEQ ID NO: 25899 - DNA, 20 bp, synthetic construct
  misc_feature 1..20: note = chemically synthesized
  source 1..20: mol_type = other DNA
gggaaggaagacacacttaa

SEQ ID NO: 25900 - DNA, 20 bp, synthetic construct
  misc_feature 1..20: note = chemically synthesized
  source 1..20: mol_type = other DNA
ggaaggaagacacacttaaa

SEQ ID NO: 25901 - DNA, 20 bp, synthetic construct
  misc_feature 1..20: note = chemically synthesized
  source 1..20: mol_type = other DNA
acacttaaaaggtaaaatgt

SEQ ID NO: 25902 - DNA, 20 bp, synthetic construct
  misc_feature 1..20: note = chemically synthesized
  source 1..20: mol_type = other DNA
cttaaaaggtaaaatgttag

SEQ ID NO: 25903 - DNA, 20 bp, synthetic construct
  misc_feature 1..20: note = chemically synthesized
  source 1..20: mol_type = other DNA
aagccctgccaattttcaat

SEQ ID NO: 25904 - DNA, 20 bp, synthetic construct
  misc_feature 1..20: note = chemically synthesized
  source 1..20: mol_type = other DNA
ctgccaattttcaatgagcc

SEQ ID NO: 25905 - DNA, 20 bp, synthetic construct
  misc_feature 1..20: note = chemically synthesized
  source 1..20: mol_type = other DNA
ccaattttcaatgagcctgg

SEQ ID NO: 25906 - DNA, 20 bp, synthetic construct
  misc_feature 1..20: note = chemically synthesized
  source 1..20: mol_type = other DNA
caattttcaatgagcctgga

SEQ ID NO: 25907 - DNA, 20 bp, synthetic construct
  misc_feature 1..20: note = chemically synthesized
  source 1..20: mol_type = other DNA
aattttcaatgagcctggaa

SEQ ID NO: 25908 - DNA, 20 bp, synthetic construct
  misc_feature 1..20: note = chemically synthesized
  source 1..20: mol_type = other DNA
aaacatctctgaaattatgt

SEQ ID NO: 25909 - DNA, 20 bp, synthetic construct
  misc_feature 1..20: note = chemically synthesized
  source 1..20: mol_type = other DNA
atctctgaaattatgttggt

SEQ ID NO: 25910 - DNA, 20 bp, synthetic construct
  misc_feature 1..20: note = chemically synthesized
  source 1..20: mol_type = other DNA
agcaaatatgatttatttta

SEQ ID NO: 25911 - DNA, 20 bp, synthetic construct
  misc_feature 1..20: note = chemically synthesized
  source 1..20: mol_type = other DNA
acagaaattcattttacaca

SEQ ID NO: 25912 - DNA, 20 bp, synthetic construct
  misc_feature 1..20: note = chemically synthesized
  source 1..20: mol_type = other DNA
cattttacacatggctttcc

SEQ ID NO: 25913 - DNA, 20 bp, synthetic construct
  misc_feature 1..20: note = chemically synthesized
  source 1..20: mol_type = other DNA
ccaagaaccctccatgctga

SEQ ID NO: 25914 - DNA, 20 bp, synthetic construct
  misc_feature 1..20: note = chemically synthesized
  source 1..20: mol_type = other DNA
caagaaccctccatgctgat

SEQ ID NO: 25915 - DNA, 20 bp, synthetic construct
  misc_feature 1..20: note = chemically synthesized
  source 1..20: mol_type = other DNA
aagaaccctccatgctgatg

SEQ ID NO: 25916 - DNA, 20 bp, synthetic construct
  misc_feature 1..20: note = chemically synthesized
  source 1..20: mol_type = other DNA
ccctccatgctgatggggtg

SEQ ID NO: 25917 - DNA, 20 bp, synthetic construct
  misc_feature 1..20: note = chemically synthesized
  source 1..20: mol_type = other DNA
tccatgctgatggggtgtgg

SEQ ID NO: 25918 - DNA, 20 bp, synthetic construct
  misc_feature 1..20: note = chemically synthesized
  source 1..20: mol_type = other DNA
ccatgctgatggggtgtggt

SEQ ID NO: 25919 - DNA, 20 bp, synthetic construct
  misc_feature 1..20: note = chemically synthesized
  source 1..20: mol_type = other DNA
atgctgatggggtgtggtgg

SEQ ID NO: 25920 - DNA, 20 bp, synthetic construct
  misc_feature 1..20: note = chemically synthesized
  source 1..20: mol_type = other DNA
tgctgatggggtgtggtggg

SEQ ID NO: 25921 - DNA, 20 bp, synthetic construct
  misc_feature 1..20: note = chemically synthesized
  source 1..20: mol_type = other DNA
atggggtgtggtgggaggtc

SEQ ID NO: 25922 - DNA, 20 bp, synthetic construct
  misc_feature 1..20: note = chemically synthesized
  source 1..20: mol_type = other DNA
tggggtgtggtgggaggtca

SEQ ID NO: 25923 - DNA, 20 bp, synthetic construct
  misc_feature 1..20: note = chemically synthesized
  source 1..20: mol_type = other DNA
tggtgggaggtcaaggacca

SEQ ID NO: 25924 - DNA, 20 bp, synthetic construct
  misc_feature 1..20: note = chemically synthesized
  source 1..20: mol_type = other DNA
ggtgggaggtcaaggaccac

SEQ ID NO: 25925 - DNA, 20 bp, synthetic construct
  misc_feature 1..20: note = chemically synthesized
  source 1..20: mol_type = other DNA
gtgggaggtcaaggaccaca

SEQ ID NO: 25926 - DNA, 20 bp, synthetic construct
  misc_feature 1..20: note = chemically synthesized
  source 1..20: mol_type = other DNA
ggtcaaggaccacagggtgc

SEQ ID NO: 25927 - DNA, 20 bp, synthetic construct
  misc_feature 1..20: note = chemically synthesized
  source 1..20: mol_type = other DNA
gtcaaggaccacagggtgct

SEQ ID NO: 25928 - DNA, 20 bp, synthetic construct
  misc_feature 1..20: note = chemically synthesized
  source 1..20: mol_type = other DNA
ggtgctgggctttgctgtcc

SEQ ID NO: 25929 - DNA, 20 bp, synthetic construct
  misc_feature 1..20: note = chemically synthesized
  source 1..20: mol_type = other DNA
ggctttgctgtcctggtttg

SEQ ID NO: 25930 - DNA, 20 bp, synthetic construct
  misc_feature 1..20: note = chemically synthesized
  source 1..20: mol_type = other DNA
tttgctgtcctggtttgtgg

SEQ ID NO: 25931 - DNA, 20 bp, synthetic construct
  misc_feature 1..20: note = chemically synthesized
  source 1..20: mol_type = other DNA
ctgtcctggtttgtggtggc

SEQ ID NO: 25932 - DNA, 20 bp, synthetic construct
  misc_feature 1..20: note = chemically synthesized
  source 1..20: mol_type = other DNA
tgtcctggtttgtggtggct

SEQ ID NO: 25933 - DNA, 20 bp, synthetic construct
  misc_feature 1..20: note = chemically synthesized
  source 1..20: mol_type = other DNA
gtcctggtttgtggtggctg

SEQ ID NO: 25934 - DNA, 20 bp, synthetic construct
  misc_feature 1..20: note = chemically synthesized
  source 1..20: mol_type = other DNA
cctggtttgtggtggctggg

SEQ ID NO: 25935 - DNA, 20 bp, synthetic construct
  misc_feature 1..20: note = chemically synthesized
  source 1..20: mol_type = other DNA
tggtttgtggtggctgggga

SEQ ID NO: 25936 - DNA, 20 bp, synthetic construct
  misc_feature 1..20: note = chemically synthesized
  source 1..20: mol_type = other DNA
ggtttgtggtggctggggag

SEQ ID NO: 25937 - DNA, 20 bp, synthetic construct
  misc_feature 1..20: note = chemically synthesized
  source 1..20: mol_type = other DNA
gggagaggactcccttttct

SEQ ID NO: 25938 - DNA, 20 bp, synthetic construct
  misc_feature 1..20: note = chemically synthesized
  source 1..20: mol_type = other DNA
gagaggactcccttttctta

SEQ ID NO: 25939 - DNA, 20 bp, synthetic construct
  misc_feature 1..20: note = chemically synthesized
  source 1..20: mol_type = other DNA
agtcctgtgtgtgcctttgt

SEQ ID NO: 25940 - DNA, 20 bp, synthetic construct
  misc_feature 1..20: note = chemically synthesized
  source 1..20: mol_type = other DNA
gtgtgtgcctttgtgagcaa

SEQ ID NO: 25941 - DNA, 20 bp, synthetic construct
  misc_feature 1..20: note = chemically synthesized
  source 1..20: mol_type = other DNA
tgtgtgcctttgtgagcaat

SEQ ID NO: 25942 - DNA, 20 bp, synthetic construct
  misc_feature 1..20: note = chemically synthesized
  source 1..20: mol_type = other DNA
cctttgtgagcaatgggtgc

SEQ ID NO: 25943 - DNA, 20 bp, synthetic construct
  misc_feature 1..20: note = chemically synthesized
  source 1..20: mol_type = other DNA
ctttgtgagcaatgggtgcc

SEQ ID NO: 25944 - DNA, 20 bp, synthetic construct
  misc_feature 1..20: note = chemically synthesized
  source 1..20: mol_type = other DNA
gagcaatgggtgccaggctc

SEQ ID NO: 25945 - DNA, 20 bp, synthetic construct
  misc_feature 1..20: note = chemically synthesized
  source 1..20: mol_type = other DNA
tgggtgccaggctctggcat

SEQ ID NO: 25946 - DNA, 20 bp, synthetic construct
  misc_feature 1..20: note = chemically synthesized
  source 1..20: mol_type = other DNA
gggtgccaggctctggcatg

SEQ ID NO: 25947 - DNA, 20 bp, synthetic construct
  misc_feature 1..20: note = chemically synthesized
  source 1..20: mol_type = other DNA
ccaggctctggcatgaggcc

SEQ ID NO: 25948 - DNA, 20 bp, synthetic construct
  misc_feature 1..20: note = chemically synthesized
  source 1..20: mol_type = other DNA
atgaggccgagctttgctac

SEQ ID NO: 25949 - DNA, 20 bp, synthetic construct
  misc_feature 1..20: note = chemically synthesized
  source 1..20: mol_type = other DNA
gagctttgctactggacttc

SEQ ID NO: 25950 - DNA, 20 bp, synthetic construct
  misc_feature 1..20: note = chemically synthesized
  source 1..20: mol_type = other DNA
tgctactggacttctggcat

SEQ ID NO: 25951 - DNA, 20 bp, synthetic construct
  misc_feature 1..20: note = chemically synthesized
  source 1..20: mol_type = other DNA
gacttctggcatgagccact

SEQ ID NO: 25952 - DNA, 20 bp, synthetic construct
  misc_feature 1..20: note = chemically synthesized
  source 1..20: mol_type = other DNA
agaccttttcccttgacatt

SEQ ID NO: 25953 - DNA, 20 bp, synthetic construct
  misc_feature 1..20: note = chemically synthesized
  source 1..20: mol_type = other DNA
ttttcccttgacatttagcc

SEQ ID NO: 25954 - DNA, 20 bp, synthetic construct
  misc_feature 1..20: note = chemically synthesized
  source 1..20: mol_type = other DNA
tttcccttgacatttagcct

SEQ ID NO: 25955 - DNA, 20 bp, synthetic construct
  misc_feature 1..20: note = chemically synthesized
  source 1..20: mol_type = other DNA
cttgacatttagcctgggtt

SEQ ID NO: 25956 - DNA, 20 bp, synthetic construct
  misc_feature 1..20: note = chemically synthesized
  source 1..20: mol_type = other DNA
ttgacatttagcctgggttt

SEQ ID NO: 25957 - DNA, 20 bp, synthetic construct
  misc_feature 1..20: note = chemically synthesized
  source 1..20: mol_type = other DNA
tgacatttagcctgggtttg

SEQ ID NO: 25958 - DNA, 20 bp, synthetic construct
  misc_feature 1..20: note = chemically synthesized
  source 1..20: mol_type = other DNA
catttagcctgggtttgggg

SEQ ID NO: 25959 - DNA, 20 bp, synthetic construct
  misc_feature 1..20: note = chemically synthesized
  source 1..20: mol_type = other DNA
ggtttggggaagtttcttcc

SEQ ID NO: 25960 - DNA, 20 bp, synthetic construct
  misc_feature 1..20: note = chemically synthesized
  source 1..20: mol_type = other DNA
cttcctggttctctgacctt

SEQ ID NO: 25961 - DNA, 20 bp, synthetic construct
  misc_feature 1..20: note = chemically synthesized
  source 1..20: mol_type = other DNA
tctctgaccttcagtctcat

SEQ ID NO: 25962 - DNA, 20 bp, synthetic construct
  misc_feature 1..20: note = chemically synthesized
  source 1..20: mol_type = other DNA
gaccttcagtctcattggct

SEQ ID NO: 25963 - DNA, 20 bp, synthetic construct
  misc_feature 1..20: note = chemically synthesized
  source 1..20: mol_type = other DNA
accttcagtctcattggctc

SEQ ID NO: 25964 - DNA, 20 bp, synthetic construct
  misc_feature 1..20: note = chemically synthesized
  source 1..20: mol_type = other DNA
tcattggctcaggacacacc

SEQ ID NO: 25965 - DNA, 20 bp, synthetic construct
  misc_feature 1..20: note = chemically synthesized
  source 1..20: mol_type = other DNA
cattggctcaggacacacct

SEQ ID NO: 25966 - DNA, 20 bp, synthetic construct
  misc_feature 1..20: note = chemically synthesized
  source 1..20: mol_type = other DNA
acacctaggtttcctccttg

SEQ ID NO: 25967 - DNA, 20 bp, synthetic construct
  misc_feature 1..20: note = chemically synthesized
  source 1..20: mol_type = other DNA
taggtttcctccttgaagct

SEQ ID NO: 25968 - DNA, 20 bp, synthetic construct
  misc_feature 1..20: note = chemically synthesized
  source 1..20: mol_type = other DNA
ctcagacatgtaaactttgc

SEQ ID NO: 25969 - DNA, 20 bp, synthetic construct
  misc_feature 1..20: note = chemically synthesized
  source 1..20: mol_type = other DNA
aactttgcaagactgtgtcc

SEQ ID NO: 25970 - DNA, 20 bp, synthetic construct
  misc_feature 1..20: note = chemically synthesized
  source 1..20: mol_type = other DNA
actttgcaagactgtgtccc

SEQ ID NO: 25971 - DNA, 20 bp, synthetic construct
  misc_feature 1..20: note = chemically synthesized
  source 1..20: mol_type = other DNA
tttgcaagactgtgtcccag

SEQ ID NO: 25972 - DNA, 20 bp, synthetic construct
  misc_feature 1..20: note = chemically synthesized
  source 1..20: mol_type = other DNA
ttgcaagactgtgtcccagg

SEQ ID NO: 25973 - DNA, 20 bp, synthetic construct
  misc_feature 1..20: note = chemically synthesized
  source 1..20: mol_type = other DNA
aggaggttgaaatccatcat

SEQ ID NO: 25974 - DNA, 20 bp, synthetic construct
  misc_feature 1..20: note = chemically synthesized
  source 1..20: mol_type = other DNA
ggaggttgaaatccatcatc

SEQ ID NO: 25975 - DNA, 20 bp, synthetic construct
  misc_feature 1..20: note = chemically synthesized
  source 1..20: mol_type = other DNA
catcatcaggctcactctct

SEQ ID NO: 25976 - DNA, 20 bp, synthetic construct
  misc_feature 1..20: note = chemically synthesized
  source 1..20: mol_type = other DNA
caggctcactctctaagcct

SEQ ID NO: 25977 - DNA, 20 bp, synthetic construct
  misc_feature 1..20: note = chemically synthesized
  source 1..20: mol_type = other DNA
aggctcactctctaagccta

SEQ ID NO: 25978 - DNA, 20 bp, synthetic construct
  misc_feature 1..20: note = chemically synthesized
  source 1..20: mol_type = other DNA
cactctctaagcctaaggat

SEQ ID NO: 25979 - DNA, 20 bp, synthetic construct
  misc_feature 1..20: note = chemically synthesized
  source 1..20: mol_type = other DNA
tctaagcctaaggattagcc

SEQ ID NO: 25980 - DNA, 20 bp, synthetic construct
  misc_feature 1..20: note = chemically synthesized
  source 1..20: mol_type = other DNA
ctaagcctaaggattagcct

SEQ ID NO: 25981 - DNA, 20 bp, synthetic construct
  misc_feature 1..20: note = chemically synthesized
  source 1..20: mol_type = other DNA
taagcctaaggattagcctg

SEQ ID NO: 25982 - DNA, 20 bp, synthetic construct
  misc_feature 1..20: note = chemically synthesized
  source 1..20: mol_type = other DNA
taaggattagcctggggacc

SEQ ID NO: 25983 - DNA, 20 bp, synthetic construct
  misc_feature 1..20: note = chemically synthesized
  source 1..20: mol_type = other DNA
attagcctggggaccaagcc

SEQ ID NO: 25984 - DNA, 20 bp, synthetic construct
  misc_feature 1..20: note = chemically synthesized
  source 1..20: mol_type = other DNA
ccagccctgaactctcctat

SEQ ID NO: 25985 - DNA, 20 bp, synthetic construct
  misc_feature 1..20: note = chemically synthesized
  source 1..20: mol_type = other DNA
cagccctgaactctcctata

SEQ ID NO: 25986 - DNA, 20 bp, synthetic construct
  misc_feature 1..20: note = chemically synthesized
  source 1..20: mol_type = other DNA
cctataaggccctcctcatc

SEQ ID NO: 25987 - DNA, 20 bp, synthetic construct
  misc_feature 1..20: note = chemically synthesized
  source 1..20: mol_type = other DNA
ctataaggccctcctcatcc

SEQ ID NO: 25988 - DNA, 20 bp, synthetic construct
  misc_feature 1..20: note = chemically synthesized
  source 1..20: mol_type = other DNA
aggccctcctcatccaggtc

SEQ ID NO: 25989 - DNA, 20 bp, synthetic construct
  misc_feature 1..20: note = chemically synthesized
  source 1..20: mol_type = other DNA
ggccctcctcatccaggtca

SEQ ID NO: 25990 - DNA, 20 bp, synthetic construct
  misc_feature 1..20: note = chemically synthesized
  source 1..20: mol_type = other DNA
ctcatccaggtcaaggtcat

SEQ ID NO: 25991 - DNA, 20 bp, synthetic construct
  misc_feature 1..20: note = chemically synthesized
  source 1..20: mol_type = other DNA
tcatccaggtcaaggtcatg

SEQ ID NO: 25992 - DNA, 20 bp, synthetic construct
  misc_feature 1..20: note = chemically synthesized
  source 1..20: mol_type = other DNA
catccaggtcaaggtcatga

SEQ ID NO: 25993 - DNA, 20 bp, synthetic construct
  misc_feature 1..20: note = chemically synthesized
  source 1..20: mol_type = other DNA
atccaggtcaaggtcatgag

SEQ ID NO: 25994 - DNA, 20 bp, synthetic construct
  misc_feature 1..20: note = chemically synthesized
  source 1..20: mol_type = other DNA
ggtcaaggtcatgaggggaa

SEQ ID NO: 25995 - DNA, 20 bp, synthetic construct
  misc_feature 1..20: note = chemically synthesized
  source 1..20: mol_type = other DNA
gtcaaggtcatgaggggaac

SEQ ID NO: 25996 - DNA, 20 bp, synthetic construct
  misc_feature 1..20: note = chemically synthesized
  source 1..20: mol_type = other DNA
tgaggggaacaggtgtatcc

SEQ ID NO: 25997 - DNA, 20 bp, synthetic construct
  misc_feature 1..20: note = chemically synthesized
  source 1..20: mol_type = other DNA
gggaacaggtgtatcctggc

SEQ ID NO: 25998 - DNA, 20 bp, synthetic construct
  misc_feature 1..20: note = chemically synthesized
  source 1..20: mol_type = other DNA
ggtgtatcctggccagcttc

SEQ ID NO: 25999 - DNA, 20 bp, synthetic construct
  misc_feature 1..20: note = chemically synthesized
  source 1..20: mol_type = other DNA
atcctggccagcttctagca

SEQ ID NO: 26000 - DNA, 20 bp, synthetic construct
  misc_feature 1..20: note = chemically synthesized
  source 1..20: mol_type = other DNA
ccagcttctagcacggccta

SEQ ID NO: 26001 - DNA, 20 bp, synthetic construct
  misc_feature 1..20: note = chemically synthesized
  source 1..20: mol_type = other DNA
gcttctagcacggcctatag

SEQ ID NO: 26002 - DNA, 20 bp, synthetic construct
  misc_feature 1..20: note = chemically synthesized
  source 1..20: mol_type = other DNA
cttctagcacggcctatagt

SEQ ID NO: 26003 - DNA, 20 bp, synthetic construct
  misc_feature 1..20: note = chemically synthesized
  source 1..20: mol_type = other DNA
acggcctatagtaggtctct

SEQ ID NO: 26004 - DNA, 20 bp, synthetic construct
  misc_feature 1..20: note = chemically synthesized
  source 1..20: mol_type = other DNA
cctatagtaggtctcttggt

SEQ ID NO: 26005 - DNA, 20 bp, synthetic construct
  misc_feature 1..20: note = chemically synthesized
  source 1..20: mol_type = other DNA
taggtctcttggttggtcca

SEQ ID NO: 26006 - DNA, 20 bp, synthetic construct
  misc_feature 1..20: note = chemically synthesized
  source 1..20: mol_type = other DNA
aggtctcttggttggtccaa

SEQ ID NO: 26007 - DNA, 20 bp, synthetic construct
  misc_feature 1..20: note = chemically synthesized
  source 1..20: mol_type = other DNA
gtctcttggttggtccaaag

SEQ ID NO: 26008 - DNA, 20 bp, synthetic construct
  misc_feature 1..20: note = chemically synthesized
  source 1..20: mol_type = other DNA
tctcttggttggtccaaagg

SEQ ID NO: 26009 - DNA, 20 bp, synthetic construct
  misc_feature 1..20: note = chemically synthesized
  source 1..20: mol_type = other DNA
tggttggtccaaaggaggcc

SEQ ID NO: 26010 - DNA, 20 bp, synthetic construct
  misc_feature 1..20: note = chemically synthesized
  source 1..20: mol_type = other DNA
aaaggaggcctggacttgca

SEQ ID NO: 26011 - DNA, 20 bp, synthetic construct
  misc_feature 1..20: note = chemically synthesized
  source 1..20: mol_type = other DNA
aaggaggcctggacttgcat

SEQ ID NO: 26012 - DNA, 20 bp, synthetic construct
  misc_feature 1..20: note = chemically synthesized
  source 1..20: mol_type = other DNA
ggaggcctggacttgcatgg

SEQ ID NO: 26013 - DNA, 20 bp, synthetic construct
  misc_feature 1..20: note = chemically synthesized
  source 1..20: mol_type = other DNA
gaggcctggacttgcatggg

SEQ ID NO: 26014 - DNA, 20 bp, synthetic construct
  misc_feature 1..20: note = chemically synthesized
  source 1..20: mol_type = other DNA
gcctggacttgcatgggagg

SEQ ID NO: 26015 - DNA, 20 bp, synthetic construct
  misc_feature 1..20: note = chemically synthesized
  source 1..20: mol_type = other DNA
cctggacttgcatgggaggc

SEQ ID NO: 26016 - DNA, 20 bp, synthetic construct
  misc_feature 1..20: note = chemically synthesized
  source 1..20: mol_type = other DNA
tggacttgcatgggaggcag

SEQ ID NO: 26017 - DNA, 20 bp, synthetic construct
  misc_feature 1..20: note = chemically synthesized
  source 1..20: mol_type = other DNA
gacttgcatgggaggcagga

SEQ ID NO: 26018 - DNA, 20 bp, synthetic construct
  misc_feature 1..20: note = chemically synthesized
  source 1..20: mol_type = other DNA
cttgcatgggaggcaggaga

SEQ ID NO: 26019 - DNA, 20 bp, synthetic construct
  misc_feature 1..20: note = chemically synthesized
  source 1..20: mol_type = other DNA
gcatgggaggcaggagagag

SEQ ID NO: 26020 - DNA, 20 bp, synthetic construct
  misc_feature 1..20: note = chemically synthesized
  source 1..20: mol_type = other DNA
agaagccaccccatctaatc

SEQ ID NO: 26021 - DNA, 20 bp, synthetic construct
  misc_feature 1..20: note = chemically synthesized
  source 1..20: mol_type = other DNA
aatccagtcttctcctttta

SEQ ID NO: 26022 - DNA, 20 bp, synthetic construct
  misc_feature 1..20: note = chemically synthesized
  source 1..20: mol_type = other DNA
cagtcttctccttttaaaga

SEQ ID NO: 26023 - DNA, 20 bp, synthetic construct
  misc_feature 1..20: note = chemically synthesized
  source 1..20: mol_type = other DNA
cttttaaagatggaaacact

SEQ ID NO: 26024 - DNA, 20 bp, synthetic construct
  misc_feature 1..20: note = chemically synthesized
  source 1..20: mol_type = other DNA
ttttaaagatggaaacactt

SEQ ID NO: 26025 - DNA, 20 bp, synthetic construct
  misc_feature 1..20: note = chemically synthesized
  source 1..20: mol_type = other DNA
tttaaagatggaaacactta

SEQ ID NO: 26026 - DNA, 20 bp, synthetic construct
  misc_feature 1..20: note = chemically synthesized
  source 1..20: mol_type = other DNA
aagatggaaacacttagggc

SEQ ID NO: 26027 - DNA, 20 bp, synthetic construct
  misc_feature 1..20: note = chemically synthesized
  source 1..20: mol_type = other DNA
tggaaacacttagggccaga

SEQ ID NO: 26028 - DNA, 20 bp, synthetic construct
  misc_feature 1..20: note = chemically synthesized
  source 1..20: mol_type = other DNA
aacacttagggccagaaaga

SEQ ID NO: 26029 - DNA, 20 bp, synthetic construct
  misc_feature 1..20: note = chemically synthesized
  source 1..20: mol_type = other DNA
acacttagggccagaaagaa

SEQ ID NO: 26030 - DNA, 20 bp, synthetic construct
  misc_feature 1..20: note = chemically synthesized
  source 1..20: mol_type = other DNA
agaaagaaaggatttattca

SEQ ID NO: 26031 - DNA, 20 bp, synthetic construct
  misc_feature 1..20: note = chemically synthesized
  source 1..20: mol_type = other DNA
atttattcaaagtcacgaaa

SEQ ID NO: 26032 - DNA, 20 bp, synthetic construct
  misc_feature 1..20: note = chemically synthesized
  source 1..20: mol_type = other DNA
attcaaagtcacgaaacagc

SEQ ID NO: 26033 - DNA, 20 bp, synthetic construct
  misc_feature 1..20: note = chemically synthesized
  source 1..20: mol_type = other DNA
aaagtcacgaaacagctggt

SEQ ID NO: 26034 - DNA, 20 bp, synthetic construct
  misc_feature 1..20: note = chemically synthesized
  source 1..20: mol_type = other DNA
gtcacgaaacagctggtgag

SEQ ID NO: 26035 - DNA, 20 bp, synthetic construct
  misc_feature 1..20: note = chemically synthesized
  source 1..20: mol_type = other DNA
acgaaacagctggtgagtgg

SEQ ID NO: 26036 - DNA, 20 bp, synthetic construct
  misc_feature 1..20: note = chemically synthesized
  source 1..20: mol_type = other DNA
gaaacagctggtgagtggca

SEQ ID NO: 26037 - DNA, 20 bp, synthetic construct
  misc_feature 1..20: note = chemically synthesized
  source 1..20: mol_type = other DNA
cagctggtgagtggcagagt

SEQ ID NO: 26038 - DNA, 20 bp, synthetic construct
  misc_feature 1..20: note = chemically synthesized
  source 1..20: mol_type = other DNA
agctggtgagtggcagagtt

SEQ ID NO: 26039 - DNA, 20 bp, synthetic construct
  misc_feature 1..20: note = chemically synthesized
  source 1..20: mol_type = other DNA
gctggtgagtggcagagttg

SEQ ID NO: 26040 - DNA, 20 bp, synthetic construct
  misc_feature 1..20: note = chemically synthesized
  source 1..20: mol_type = other DNA
gagtggcagagttggggttg

SEQ ID NO: 26041 - DNA, 20 bp, synthetic construct
  misc_feature 1..20: note = chemically synthesized
  source 1..20: mol_type = other DNA
agagttggggttgcagaact

SEQ ID NO: 26042 - DNA, 20 bp, synthetic construct
  misc_feature 1..20: note = chemically synthesized
  source 1..20: mol_type = other DNA
gagttggggttgcagaactt

SEQ ID NO: 26043 - DNA, 20 bp, synthetic construct
  misc_feature 1..20: note = chemically synthesized
  source 1..20: mol_type = other DNA
ttaggttcctgactttcctc

SEQ ID NO: 26044 - DNA, 20 bp, synthetic construct
  misc_feature 1..20: note = chemically synthesized
  source 1..20: mol_type = other DNA
ggttcctgactttcctctag

SEQ ID NO: 26045 - DNA, 20 bp, synthetic construct
  misc_feature 1..20: note = chemically synthesized
  source 1..20: mol_type = other DNA
ctttcctctagcagtctctc

SEQ ID NO: 26046 - DNA, 20 bp, synthetic construct
  misc_feature 1..20: note = chemically synthesized
  source 1..20: mol_type = other DNA
ttcctctagcagtctctcca

SEQ ID NO: 26047 - DNA, 20 bp, synthetic construct
  misc_feature 1..20: note = chemically synthesized
  source 1..20: mol_type = other DNA
tcctctagcagtctctccag

SEQ ID NO: 26048 - DNA, 20 bp, synthetic construct
  misc_feature 1..20: note = chemically synthesized
  source 1..20: mol_type = other DNA
agcagtctctccagaggaac

SEQ ID NO: 26049 - DNA, 20 bp, synthetic construct
  misc_feature 1..20: note = chemically synthesized
  source 1..20: mol_type = other DNA
gaacaagtccctgcttccta

SEQ ID NO: 26050 - DNA, 20 bp, synthetic construct
  misc_feature 1..20: note = chemically synthesized
  source 1..20: mol_type = other DNA
aacaagtccctgcttcctaa

SEQ ID NO: 26051 - DNA, 20 bp, synthetic construct
  misc_feature 1..20: note = chemically synthesized
  source 1..20: mol_type = other DNA
aagtccctgcttcctaaagg

SEQ ID NO: 26052 - DNA, 20 bp, synthetic construct
  misc_feature 1..20: note = chemically synthesized
  source 1..20: mol_type = other DNA
cctgcttcctaaaggaagaa

SEQ ID NO: 26053 - DNA, 20 bp, synthetic construct
  misc_feature 1..20: note = chemically synthesized
  source 1..20: mol_type = other DNA
cctaaaggaagaaaagaatc

SEQ ID NO: 26054 - DNA, 20 bp, synthetic construct
  misc_feature 1..20: note = chemically synthesized
  source 1..20: mol_type = other DNA
ctaaaggaagaaaagaatcc

SEQ ID NO: 26055 - DNA, 20 bp, synthetic construct
  misc_feature 1..20: note = chemically synthesized
  source 1..20: mol_type = other DNA
taaaggaagaaaagaatccg

SEQ ID NO: 26056 - DNA, 20 bp, synthetic construct
  misc_feature 1..20: note = chemically synthesized
  source 1..20: mol_type = other DNA
aaggaagaaaagaatccggg

SEQ ID NO: 26057 - DNA, 20 bp, synthetic construct
  misc_feature 1..20: note = chemically synthesized
  source 1..20: mol_type = other DNA
gaagaaaagaatccggggag

SEQ ID NO: 26058 - DNA, 20 bp, synthetic construct
  misc_feature 1..20: note = chemically synthesized
  source 1..20: mol_type = other DNA
gaaaagaatccggggagtgg

SEQ ID NO: 26059 - DNA, 20 bp, synthetic construct
  misc_feature 1..20: note = chemically synthesized
  source 1..20: mol_type = other DNA
aagaatccggggagtggtgg

SEQ ID NO: 26060 - DNA, 20 bp, synthetic construct
  misc_feature 1..20: note = chemically synthesized
  source 1..20: mol_type = other DNA
aatccggggagtggtggcag

SEQ ID NO: 26061 - DNA, 20 bp, synthetic construct
  misc_feature 1..20: note = chemically synthesized
  source 1..20: mol_type = other DNA
atccggggagtggtggcagt

SEQ ID NO: 26062 - DNA, 20 bp, synthetic construct
  misc_feature 1..20: note = chemically synthesized
  source 1..20: mol_type = other DNA
gtggtggcagtgggaataca

SEQ ID NO: 26063 - DNA, 20 bp, synthetic construct
  misc_feature 1..20: note = chemically synthesized
  source 1..20: mol_type = other DNA
ggtggcagtgggaatacata

SEQ ID NO: 26064 - DNA, 20 bp, synthetic construct
  misc_feature 1..20: note = chemically synthesized
  source 1..20: mol_type = other DNA
gcagtgggaatacatagagc

SEQ ID NO: 26065 - DNA, 20 bp, synthetic construct
  misc_feature 1..20: note = chemically synthesized
  source 1..20: mol_type = other DNA
cagtgggaatacatagagca

SEQ ID NO: 26066 - DNA, 20 bp, synthetic construct
  misc_feature 1..20: note = chemically synthesized
  source 1..20: mol_type = other DNA
agtgggaatacatagagcaa

SEQ ID NO: 26067 - DNA, 20 bp, synthetic construct
  misc_feature 1..20: note = chemically synthesized
  source 1..20: mol_type = other DNA
tagagcaagggcatctctga

SEQ ID NO: 26068 - DNA, 20 bp, synthetic construct
  misc_feature 1..20: note = chemically synthesized
  source 1..20: mol_type = other DNA
agcaagggcatctctgaaag

SEQ ID NO: 26069 - DNA, 20 bp, synthetic construct
  misc_feature 1..20: note = chemically synthesized
  source 1..20: mol_type = other DNA
aaataacctgataaatacct

SEQ ID NO: 26070 - DNA, 20 bp, synthetic construct
  misc_feature 1..20: note = chemically synthesized
  source 1..20: mol_type = other DNA
aacctgataaatacctcgga

SEQ ID NO: 26071 - DNA, 20 bp, synthetic construct
  misc_feature 1..20: note = chemically synthesized
  source 1..20: mol_type = other DNA
cctgataaatacctcggata

SEQ ID NO: 26072 - DNA, 20 bp, synthetic construct
  misc_feature 1..20: note = chemically synthesized
  source 1..20: mol_type = other DNA
ctgataaatacctcggatag

SEQ ID NO: 26073 - DNA, 20 bp, synthetic construct
  misc_feature 1..20: note = chemically synthesized
  source 1..20: mol_type = other DNA
taaatacctcggatagaggc

SEQ ID NO: 26074 - DNA, 20 bp, synthetic construct
  misc_feature 1..20: note = chemically synthesized
  source 1..20: mol_type = other DNA
aaatacctcggatagaggca

SEQ ID NO: 26075 - DNA, 20 bp, synthetic construct
  misc_feature 1..20: note = chemically synthesized
  source 1..20: mol_type = other DNA
tgcccccactacacacaaac

SEQ ID NO: 26076 - DNA, 20 bp, synthetic construct
  misc_feature 1..20: note = chemically synthesized
  source 1..20: mol_type = other DNA
ctacacacaaacaagatcct

SEQ ID NO: 26077 - DNA, 20 bp, synthetic construct
  misc_feature 1..20: note = chemically synthesized
  source 1..20: mol_type = other DNA
cacaaacaagatcctcagct

SEQ ID NO: 26078 - DNA, 20 bp, synthetic construct
  misc_feature 1..20: note = chemically synthesized
  source 1..20: mol_type = other DNA
acaaacaagatcctcagctg

SEQ ID NO: 26079 - DNA, 20 bp, synthetic construct
  misc_feature 1..20: note = chemically synthesized
  source 1..20: mol_type = other DNA
aagatcctcagctgaggact

SEQ ID NO: 26080 - DNA, 20 bp, synthetic construct
  misc_feature 1..20: note = chemically synthesized
  source 1..20: mol_type = other DNA
gatcctcagctgaggactca

SEQ ID NO: 26081 - DNA, 20 bp, synthetic construct
  misc_feature 1..20: note = chemically synthesized
  source 1..20: mol_type = other DNA
cctcagctgaggactcagag

SEQ ID NO: 26082 - DNA, 20 bp, synthetic construct
  misc_feature 1..20: note = chemically synthesized
  source 1..20: mol_type = other DNA
ctcagctgaggactcagagc

SEQ ID NO: 26083 - DNA, 20 bp, synthetic construct
  misc_feature 1..20: note = chemically synthesized
  source 1..20: mol_type = other DNA
cagctgaggactcagagcag

SEQ ID NO: 26084 - DNA, 20 bp, synthetic construct
  misc_feature 1..20: note = chemically synthesized
  source 1..20: mol_type = other DNA
tgaggactcagagcaggagt

SEQ ID NO: 26085 - DNA, 20 bp, synthetic construct
  misc_feature 1..20: note = chemically synthesized
  source 1..20: mol_type = other DNA
gaggactcagagcaggagta

SEQ ID NO: 26086 - DNA, 20 bp, synthetic construct
  misc_feature 1..20: note = chemically synthesized
  source 1..20: mol_type = other DNA
aggactcagagcaggagtaa

SEQ ID NO: 26087 - DNA, 20 bp, synthetic construct
  misc_feature 1..20: note = chemically synthesized
  source 1..20: mol_type = other DNA
gggcacccctatcctcccca

SEQ ID NO: 26088 - DNA, 20 bp, synthetic construct
  misc_feature 1..20: note = chemically synthesized
  source 1..20: mol_type = other DNA
atcctccccatggctttgaa

SEQ ID NO: 26089 - DNA, 20 bp, synthetic construct
  misc_feature 1..20: note = chemically synthesized
  source 1..20: mol_type = other DNA
ctccccatggctttgaaaag

SEQ ID NO: 26090 - DNA, 20 bp, synthetic construct
  misc_feature 1..20: note = chemically synthesized
  source 1..20: mol_type = other DNA
ccatggctttgaaaagaaga

SEQ ID NO: 26091 - DNA, 20 bp, synthetic construct
  misc_feature 1..20: note = chemically synthesized
  source 1..20: mol_type = other DNA
atggctttgaaaagaagaaa

SEQ ID NO: 26092 - DNA, 20 bp, synthetic construct
  misc_feature 1..20: note = chemically synthesized
  source 1..20: mol_type = other DNA
tggctttgaaaagaagaaag

SEQ ID NO: 26093 - DNA, 20 bp, synthetic construct
  misc_feature 1..20: note = chemically synthesized
  source 1..20: mol_type = other DNA
ggctttgaaaagaagaaaga

SEQ ID NO: 26094 - DNA, 20 bp, synthetic construct
  misc_feature 1..20: note = chemically synthesized
  source 1..20: mol_type = other DNA
gctttgaaaagaagaaagag

SEQ ID NO: 26095 - DNA, 20 bp, synthetic construct
  misc_feature 1..20: note = chemically synthesized
  source 1..20: mol_type = other DNA
aagaagaaagaggggaaatt

SEQ ID NO: 26096 - DNA, 20 bp, synthetic construct
  misc_feature 1..20: note = chemically synthesized
  source 1..20: mol_type = other DNA
gaagaaagaggggaaatttg

SEQ ID NO: 26097 - DNA, 20 bp, synthetic construct
  misc_feature 1..20: note = chemically synthesized
  source 1..20: mol_type = other DNA
aagaaagaggggaaatttgg

SEQ ID NO: 26098 - DNA, 20 bp, synthetic construct
  misc_feature 1..20: note = chemically synthesized
  source 1..20: mol_type = other DNA
agaaagaggggaaatttgga

SEQ ID NO: 26099 - DNA, 20 bp, synthetic construct
  misc_feature 1..20: note = chemically synthesized
  source 1..20: mol_type = other DNA
agaggggaaatttggaggga

SEQ ID NO: 26100 - DNA, 20 bp, synthetic construct
  misc_feature 1..20: note = chemically synthesized
  source 1..20: mol_type = other DNA
ggaaatttggagggatggtc

SEQ ID NO: 26101 - DNA, 20 bp, synthetic construct
  misc_feature 1..20: note = chemically synthesized
  source 1..20: mol_type = other DNA
gatggtcaagttgatgattg

SEQ ID NO: 26102 - DNA, 20 bp, synthetic construct
  misc_feature 1..20: note = chemically synthesized
  source 1..20: mol_type = other DNA
tggtcaagttgatgattgaa

SEQ ID NO: 26103 - DNA, 20 bp, synthetic construct
  misc_feature 1..20: note = chemically synthesized
  source 1..20: mol_type = other DNA
agttgatgattgaagagaca

SEQ ID NO: 26104 - DNA, 20 bp, synthetic construct
  misc_feature 1..20: note = chemically synthesized
  source 1..20: mol_type = other DNA
tgatgattgaagagacaaag

SEQ ID NO: 26105 - DNA, 20 bp, synthetic construct
  misc_feature 1..20: note = chemically synthesized
  source 1..20: mol_type = other DNA
attgaagagacaaagtagtg

SEQ ID NO: 26106 - DNA, 20 bp, synthetic construct
  misc_feature 1..20: note = chemically synthesized
  source 1..20: mol_type = other DNA
ttgaagagacaaagtagtgt

SEQ ID NO: 26107 - DNA, 20 bp, synthetic construct
  misc_feature 1..20: note = chemically synthesized
  source 1..20: mol_type = other DNA
aaatctcaatgtttcttgca

SEQ ID NO: 26108 - DNA, 20 bp, synthetic construct
  misc_feature 1..20: note = chemically synthesized
  source 1..20: mol_type = other DNA
gtcatttgttgaaaatgtgt

SEQ ID NO: 26109 - DNA, 20 bp, synthetic construct
  misc_feature 1..20: note = chemically synthesized
  source 1..20: mol_type = other DNA
tttgttgaaaatgtgtcagc

SEQ ID NO: 26110 - DNA, 20 bp, synthetic construct
  misc_feature 1..20: note = chemically synthesized
  source 1..20: mol_type = other DNA
gaaaatgtgtcagcaagtac

SEQ ID NO: 26111 - DNA, 20 bp, synthetic construct
  misc_feature 1..20: note = chemically synthesized
  source 1..20: mol_type = other DNA
agtacaagcccatcttaaac

SEQ ID NO: 26112 - DNA, 20 bp, synthetic construct
  misc_feature 1..20: note = chemically synthesized
  source 1..20: mol_type = other DNA
gcccatcttaaactggcaat

SEQ ID NO: 26113 - DNA, 20 bp, synthetic construct
  misc_feature 1..20: note = chemically synthesized
  source 1..20: mol_type = other DNA
tggcaatgagacatctgaaa

SEQ ID NO: 26114 - DNA, 20 bp, synthetic construct
  misc_feature 1..20: note = chemically synthesized
  source 1..20: mol_type = other DNA
acatctgaaatagattattt

SEQ ID NO: 26115 - DNA, 20 bp, synthetic construct
  misc_feature 1..20: note = chemically synthesized
  source 1..20: mol_type = other DNA
ctgaaatagattatttaagc

SEQ ID NO: 26116 - DNA, 20 bp, synthetic construct
  misc_feature 1..20: note = chemically synthesized
  source 1..20: mol_type = other DNA
tgaaatagattatttaagcc

SEQ ID NO: 26117 - DNA, 20 bp, synthetic construct
  misc_feature 1..20: note = chemically synthesized
  source 1..20: mol_type = other DNA
gaaatagattatttaagcca

SEQ ID NO: 26118 - DNA, 20 bp, synthetic construct
  misc_feature 1..20: note = chemically synthesized
  source 1..20: mol_type = other DNA
aatagattatttaagccagg

SEQ ID NO: 26119 - DNA, 20 bp, synthetic construct
  misc_feature 1..20: note = chemically synthesized
  source 1..20: mol_type = other DNA
atagattatttaagccaggg

SEQ ID NO: 26120 - DNA, 20 bp, synthetic construct
  misc_feature 1..20: note = chemically synthesized
  source 1..20: mol_type = other DNA
gattatttaagccagggagg

SEQ ID NO: 26121 - DNA, 20 bp, synthetic construct
  misc_feature 1..20: note = chemically synthesized
  source 1..20: mol_type = other DNA
agccagggaggcagtattgc

SEQ ID NO: 26122 - DNA, 20 bp, synthetic construct
  misc_feature 1..20: note = chemically synthesized
  source 1..20: mol_type = other DNA
gccagggaggcagtattgca

SEQ ID NO: 26123 - DNA, 20 bp, synthetic construct
  misc_feature 1..20: note = chemically synthesized
  source 1..20: mol_type = other DNA
agggaggcagtattgcaagg

SEQ ID NO: 26124 - DNA, 20 bp, synthetic construct
  misc_feature 1..20: note = chemically synthesized
  source 1..20: mol_type = other DNA
cagtattgcaaggaagaaca

SEQ ID NO: 26125 - DNA, 20 bp, synthetic construct
  misc_feature 1..20: note = chemically synthesized
  source 1..20: mol_type = other DNA
caacacttgtttgtctgact

SEQ ID NO: 26126 - DNA, 20 bp, synthetic construct
  misc_feature 1..20: note = chemically synthesized
  source 1..20: mol_type = other DNA
acacttgtttgtctgactca

SEQ ID NO: 26127 - DNA, 20 bp, synthetic construct
  misc_feature 1..20: note = chemically synthesized
  source 1..20: mol_type = other DNA
cacttgtttgtctgactcag

SEQ ID NO: 26128 - DNA, 20 bp, synthetic construct
  misc_feature 1..20: note = chemically synthesized
  source 1..20: mol_type = other DNA
tgactcagaggaataaaaca

SEQ ID NO: 26129 - DNA, 20 bp, synthetic construct
  misc_feature 1..20: note = chemically synthesized
  source 1..20: mol_type = other DNA
aaacatagtaaattttgcct

SEQ ID NO: 26130 - DNA, 20 bp, synthetic construct
  misc_feature 1..20: note = chemically synthesized
  source 1..20: mol_type = other DNA
catagtaaattttgccttag

SEQ ID NO: 26131 - DNA, 20 bp, synthetic construct
  misc_feature 1..20: note = chemically synthesized
  source 1..20: mol_type = other DNA
atagtaaattttgccttagc

SEQ ID NO: 26132 - DNA, 20 bp, synthetic construct
  misc_feature 1..20: note = chemically synthesized
  source 1..20: mol_type = other DNA
agcgggccacccacattcat

SEQ ID NO: 26133 - DNA, 20 bp, synthetic construct
  misc_feature 1..20: note = chemically synthesized
  source 1..20: mol_type = other DNA
gcgggccacccacattcatt

SEQ ID NO: 26134 - DNA, 20 bp, synthetic construct
  misc_feature 1..20: note = chemically synthesized
  source 1..20: mol_type = other DNA
cgggccacccacattcattg

SEQ ID NO: 26135 - DNA, 20 bp, synthetic construct
  misc_feature 1..20: note = chemically synthesized
  source 1..20: mol_type = other DNA
gggccacccacattcattgg

SEQ ID NO: 26136 - DNA, 20 bp, synthetic construct
  misc_feature 1..20: note = chemically synthesized
  source 1..20: mol_type = other DNA
ccacccacattcattggggg

SEQ ID NO: 26137 - DNA, 20 bp, synthetic construct
  misc_feature 1..20: note = chemically synthesized
  source 1..20: mol_type = other DNA
cattgggggaagaaacaatt

SEQ ID NO: 26138 - DNA, 20 bp, synthetic construct
  misc_feature 1..20: note = chemically synthesized
  source 1..20: mol_type = other DNA
attgggggaagaaacaattg

SEQ ID NO: 26139 - DNA, 20 bp, synthetic construct
  misc_feature 1..20: note = chemically synthesized
  source 1..20: mol_type = other DNA
gggggaagaaacaattgagg

SEQ ID NO: 26140 - DNA, 20 bp, synthetic construct
  misc_feature 1..20: note = chemically synthesized
  source 1..20: mol_type = other DNA
ggggaagaaacaattgaggt

SEQ ID NO: 26141 - DNA, 20 bp, synthetic construct
  misc_feature 1..20: note = chemically synthesized
  source 1..20: mol_type = other DNA
gggaagaaacaattgaggtg

SEQ ID NO: 26142 - DNA, 20 bp, synthetic construct
  misc_feature 1..20: note = chemically synthesized
  source 1..20: mol_type = other DNA
ggaagaaacaattgaggtgg

SEQ ID NO: 26143 - DNA, 20 bp, synthetic construct
  misc_feature 1..20: note = chemically synthesized
  source 1..20: mol_type = other DNA
gaagaaacaattgaggtggg

SEQ ID NO: 26144 - DNA, 20 bp, synthetic construct
  misc_feature 1..20: note = chemically synthesized
  source 1..20: mol_type = other DNA
caattgaggtggggggaaaa

SEQ ID NO: 26145 - DNA, 20 bp, synthetic construct
  misc_feature 1..20: note = chemically synthesized
  source 1..20: mol_type = other DNA
gaggtggggggaaaacagaa

SEQ ID NO: 26146 - DNA, 20 bp, synthetic construct
  misc_feature 1..20: note = chemically synthesized
  source 1..20: mol_type = other DNA
acagaacagatgaaccttca

SEQ ID NO: 26147 - DNA, 20 bp, synthetic construct
  misc_feature 1..20: note = chemically synthesized
  source 1..20: mol_type = other DNA
agaacagatgaaccttcatg

SEQ ID NO: 26148 - DNA, 20 bp, synthetic construct
  misc_feature 1..20: note = chemically synthesized
  source 1..20: mol_type = other DNA
gaaccttcatggagtttcac

SEQ ID NO: 26149 - DNA, 20 bp, synthetic construct
  misc_feature 1..20: note = chemically synthesized
  source 1..20: mol_type = other DNA
accttcatggagtttcacaa

SEQ ID NO: 26150 - DNA, 20 bp, synthetic construct
  misc_feature 1..20: note = chemically synthesized
  source 1..20: mol_type = other DNA
gagtttcacaagagtccaca

SEQ ID NO: 26151 - DNA, 20 bp, synthetic construct
  misc_feature 1..20: note = chemically synthesized
  source 1..20: mol_type = other DNA
atggttgtgtcccttatttt

SEQ ID NO: 26152 - DNA, 20 bp, synthetic construct
  misc_feature 1..20: note = chemically synthesized
  source 1..20: mol_type = other DNA
attttcagaaaatgtgaaat

SEQ ID NO: 26153 - DNA, 20 bp, synthetic construct
  misc_feature 1..20: note = chemically synthesized
  source 1..20: mol_type = other DNA
tggaaaatacgcacttgtga

SEQ ID NO: 26154 - DNA, 20 bp, synthetic construct
  misc_feature 1..20: note = chemically synthesized
  source 1..20: mol_type = other DNA
atacgcacttgtgaaagctg

SEQ ID NO: 26155 - DNA, 20 bp, synthetic construct
  misc_feature 1..20: note = chemically synthesized
  source 1..20: mol_type = other DNA
tgtgaaagctgaagatgtca

SEQ ID NO: 26156 - DNA, 20 bp, synthetic construct
  misc_feature 1..20: note = chemically synthesized
  source 1..20: mol_type = other DNA
gaagatgtcacagaaatctt

SEQ ID NO: 26157 - DNA, 20 bp, synthetic construct
  misc_feature 1..20: note = chemically synthesized
  source 1..20: mol_type = other DNA
agatgtcacagaaatcttca

SEQ ID NO: 26158 - DNA, 20 bp, synthetic construct
  misc_feature 1..20: note = chemically synthesized
  source 1..20: mol_type = other DNA
gatgtcacagaaatcttcag

SEQ ID NO: 26159 - DNA, 20 bp, synthetic construct
  misc_feature 1..20: note = chemically synthesized
  source 1..20: mol_type = other DNA
aaatcttcagaggatttatt

SEQ ID NO: 26160 - DNA, 20 bp, synthetic construct
  misc_feature 1..20: note = chemically synthesized
  source 1..20: mol_type = other DNA
cttcagaggatttatttaga

SEQ ID NO: 26161 - DNA, 20 bp, synthetic construct
  misc_feature 1..20: note = chemically synthesized
  source 1..20: mol_type = other DNA
tcgtatcctccgctgtcaac

SEQ ID NO: 26162 - DNA, 20 bp, synthetic construct
  misc_feature 1..20: note = chemically synthesized
  source 1..20: mol_type = other DNA
ccgctgtcaactggatgaat

SEQ ID NO: 26163 - DNA, 20 bp, synthetic construct
  misc_feature 1..20: note = chemically synthesized
  source 1..20: mol_type = other DNA
atgtgaatgtaaccgcctat

SEQ ID NO: 26164 - DNA, 20 bp, synthetic construct
  misc_feature 1..20: note = chemically synthesized
  source 1..20: mol_type = other DNA
tgtgaatgtaaccgcctatt

SEQ ID NO: 26165 - DNA, 20 bp, synthetic construct
  misc_feature 1..20: note = chemically synthesized
  source 1..20: mol_type = other DNA
catttactctgtgcccacct

SEQ ID NO: 26166 - DNA, 20 bp, synthetic construct
  misc_feature 1..20: note = chemically synthesized
  source 1..20: mol_type = other DNA
atttactctgtgcccacctt

SEQ ID NO: 26167 - DNA, 20 bp, synthetic construct
  misc_feature 1..20: note = chemically synthesized
  source 1..20: mol_type = other DNA
cttgggctttgcttctctct

SEQ ID NO: 26168 - DNA, 20 bp, synthetic construct
  misc_feature 1..20: note = chemically synthesized
  source 1..20: mol_type = other DNA
acctgctttttctttttatc

SEQ ID NO: 26169 - DNA, 20 bp, synthetic construct
  misc_feature 1..20: note = chemically synthesized
  source 1..20: mol_type = other DNA
cctgctttttctttttatct

SEQ ID NO: 26170 - DNA, 20 bp, synthetic construct
  misc_feature 1..20: note = chemically synthesized
  source 1..20: mol_type = other DNA
atctaggatatcctttctct

SEQ ID NO: 26171 - DNA, 20 bp, synthetic construct
  misc_feature 1..20: note = chemically synthesized
  source 1..20: mol_type = other DNA
tatcctttctcttggctctc

SEQ ID NO: 26172 - DNA, 20 bp, synthetic construct
  misc_feature 1..20: note = chemically synthesized
  source 1..20: mol_type = other DNA
atcctttctcttggctctcc

SEQ ID NO: 26173 - DNA, 20 bp, synthetic construct
  misc_feature 1..20: note = chemically synthesized
  source 1..20: mol_type = other DNA
gctctccaggtttaactcat

SEQ ID NO: 26174 - DNA, 20 bp, synthetic construct
  misc_feature 1..20: note = chemically synthesized
  source 1..20: mol_type = other DNA
ataagttttcctctttccca

SEQ ID NO: 26175 - DNA, 20 bp, synthetic construct
  misc_feature 1..20: note = chemically synthesized
  source 1..20: mol_type = other DNA
ctctctccctcccttccaaa

SEQ ID NO: 26176 - DNA, 20 bp, synthetic construct
  misc_feature 1..20: note = chemically synthesized
  source 1..20: mol_type = other DNA
tctcttcctttgaatttcca

SEQ ID NO: 26177 - DNA, 20 bp, synthetic construct
  misc_feature 1..20: note = chemically synthesized
  source 1..20: mol_type = other DNA
cttcctttgaatttccatag

SEQ ID NO: 26178 - DNA, 20 bp, synthetic construct
  misc_feature 1..20: note = chemically synthesized
  source 1..20: mol_type = other DNA
ctcatgacacactttctaca

SEQ ID NO: 26179 - DNA, 20 bp, synthetic construct
  misc_feature 1..20: note = chemically synthesized
  source 1..20: mol_type = other DNA
tcatgacacactttctacat

SEQ ID NO: 26180 - DNA, 20 bp, synthetic construct
  misc_feature 1..20: note = chemically synthesized
  source 1..20: mol_type = other DNA
catgacacactttctacatg

SEQ ID NO: 26181 - DNA, 20 bp, synthetic construct
  misc_feature 1..20: note = chemically synthesized
  source 1..20: mol_type = other DNA
atgacacactttctacatgg

SEQ ID NO: 26182 - DNA, 20 bp, synthetic construct
  misc_feature 1..20: note = chemically synthesized
  source 1..20: mol_type = other DNA
acacactttctacatggggg

SEQ ID NO: 26183 - DNA, 20 bp, synthetic construct
  misc_feature 1..20: note = chemically synthesized
  source 1..20: mol_type = other DNA
acactttctacatgggggta

SEQ ID NO: 26184 - DNA, 20 bp, synthetic construct
  misc_feature 1..20: note = chemically synthesized
  source 1..20: mol_type = other DNA
ggggtagagcaatttctgtg

SEQ ID NO: 26185 - DNA, 20 bp, synthetic construct
  misc_feature 1..20: note = chemically synthesized
  source 1..20: mol_type = other DNA
gggtagagcaatttctgtgc

SEQ ID NO: 26186 - DNA, 20 bp, synthetic construct
  misc_feature 1..20: note = chemically synthesized
  source 1..20: mol_type = other DNA
cttaccttttctactaaatg

SEQ ID NO: 26187 - DNA, 20 bp, synthetic construct
  misc_feature 1..20: note = chemically synthesized
  source 1..20: mol_type = other DNA
ctactaaatgaagcctgctg

SEQ ID NO: 26188 - DNA, 20 bp, synthetic construct
  misc_feature 1..20: note = chemically synthesized
  source 1..20: mol_type = other DNA
tactaaatgaagcctgctgt

SEQ ID NO: 26189 - DNA, 20 bp, synthetic construct
  misc_feature 1..20: note = chemically synthesized
  source 1..20: mol_type = other DNA
ctaaatgaagcctgctgtgg

SEQ ID NO: 26190 - DNA, 20 bp, synthetic construct
  misc_feature 1..20: note = chemically synthesized
  source 1..20: mol_type = other DNA
tgttttctttgtactgccca

SEQ ID NO: 26191 - DNA, 20 bp, synthetic construct
  misc_feature 1..20: note = chemically synthesized
  source 1..20: mol_type = other DNA
tttctttgtactgcccacag

SEQ ID NO: 26192 - DNA, 20 bp, synthetic construct
  misc_feature 1..20: note = chemically synthesized
  source 1..20: mol_type = other DNA
tttgtactgcccacagcggc

SEQ ID NO: 26193 - DNA, 20 bp, synthetic construct
  misc_feature 1..20: note = chemically synthesized
  source 1..20: mol_type = other DNA
cagcggctagcccattgctt

SEQ ID NO: 26194 - DNA, 20 bp, synthetic construct
  misc_feature 1..20: note = chemically synthesized
  source 1..20: mol_type = other DNA
agcggctagcccattgcttt

SEQ ID NO: 26195 - DNA, 20 bp, synthetic construct
  misc_feature 1..20: note = chemically synthesized
  source 1..20: mol_type = other DNA
gcccattgctttgggcattg

SEQ ID NO: 26196 - DNA, 20 bp, synthetic construct
  misc_feature 1..20: note = chemically synthesized
  source 1..20: mol_type = other DNA
cccattgctttgggcattgt

SEQ ID NO: 26197 - DNA, 20 bp, synthetic construct
  misc_feature 1..20: note = chemically synthesized
  source 1..20: mol_type = other DNA
ctttgggcattgtaggcact

SEQ ID NO: 26198 - DNA, 20 bp, synthetic construct
  misc_feature 1..20: note = chemically synthesized
  source 1..20: mol_type = other DNA
tatttgttgaatgaatgcat

SEQ ID NO: 26199 - DNA, 20 bp, synthetic construct
  misc_feature 1..20: note = chemically synthesized
  source 1..20: mol_type = other DNA
tttgttgaatgaatgcatga

SEQ ID NO: 26200 - DNA, 20 bp, synthetic construct
  misc_feature 1..20: note = chemically synthesized
  source 1..20: mol_type = other DNA
ttgttgaatgaatgcatgag

SEQ ID NO: 26201 - DNA, 20 bp, synthetic construct
  misc_feature 1..20: note = chemically synthesized
  source 1..20: mol_type = other DNA
gagaggttgaatgaatgcat

SEQ ID NO: 26202 - DNA, 20 bp, synthetic construct
  misc_feature 1..20: note = chemically synthesized
  source 1..20: mol_type = other DNA
gaggttgaatgaatgcatga

SEQ ID NO: 26203 - DNA, 20 bp, synthetic construct
  misc_feature 1..20: note = chemically synthesized
  source 1..20: mol_type = other DNA
tgcatgagagaatgaatgaa

SEQ ID NO: 26204 - DNA, 20 bp, synthetic construct
  misc_feature 1..20: note = chemically synthesized
  source 1..20: mol_type = other DNA
tgaatgaatggaatttatcc

SEQ ID NO: 26205 - DNA, 20 bp, synthetic construct
  misc_feature 1..20: note = chemically synthesized
  source 1..20: mol_type = other DNA
gaatgaatggaatttatcct

SEQ ID NO: 26206 - DNA, 20 bp, synthetic construct
  misc_feature 1..20: note = chemically synthesized
  source 1..20: mol_type = other DNA
ctgggaacacacattttgca

SEQ ID NO: 26207 - DNA, 20 bp, synthetic construct
  misc_feature 1..20: note = chemically synthesized
  source 1..20: mol_type = other DNA
gaacacacattttgcatagt

SEQ ID NO: 26208 - DNA, 20 bp, synthetic construct
  misc_feature 1..20: note = chemically synthesized
  source 1..20: mol_type = other DNA
aacacacattttgcatagtg

SEQ ID NO: 26209 - DNA, 20 bp, synthetic construct
  misc_feature 1..20: note = chemically synthesized
  source 1..20: mol_type = other DNA
aaacaaaaaaaaattgtcct

SEQ ID NO: 26210 - DNA, 20 bp, synthetic construct
  misc_feature 1..20: note = chemically synthesized
  source 1..20: mol_type = other DNA
agacaatttgtctttttatg

SEQ ID NO: 26211 - DNA, 20 bp, synthetic construct
  misc_feature 1..20: note = chemically synthesized
  source 1..20: mol_type = other DNA
tttttatgcagctgccctct

SEQ ID NO: 26212 - DNA, 20 bp, synthetic construct
  misc_feature 1..20: note = chemically synthesized
  source 1..20: mol_type = other DNA
cagctgccctctcagtctcc

SEQ ID NO: 26213 - DNA, 20 bp, synthetic construct
  misc_feature 1..20: note = chemically synthesized
  source 1..20: mol_type = other DNA
gccctctcagtctcctagat

SEQ ID NO: 26214 - DNA, 20 bp, synthetic construct
  misc_feature 1..20: note = chemically synthesized
  source 1..20: mol_type = other DNA
tagataagttccgccattct

SEQ ID NO: 26215 - DNA, 20 bp, synthetic construct
  misc_feature 1..20: note = chemically synthesized
  source 1..20: mol_type = other DNA
agataagttccgccattcta

SEQ ID NO: 26216 - DNA, 20 bp, synthetic construct
  misc_feature 1..20: note = chemically synthesized
  source 1..20: mol_type = other DNA
gttccgccattctaaggcaa

SEQ ID NO: 26217 - DNA, 20 bp, synthetic construct
  misc_feature 1..20: note = chemically synthesized
  source 1..20: mol_type = other DNA
cattctaaggcaaaagctta

SEQ ID NO: 26218 - DNA, 20 bp, synthetic construct
  misc_feature 1..20: note = chemically synthesized
  source 1..20: mol_type = other DNA
aatttatctaattcacgatc

SEQ ID NO: 26219 - DNA, 20 bp, synthetic construct
  misc_feature 1..20: note = chemically synthesized
  source 1..20: mol_type = other DNA
acgatcaagtgaaaatactt

SEQ ID NO: 26220 - DNA, 20 bp, synthetic construct
  misc_feature 1..20: note = chemically synthesized
  source 1..20: mol_type = other DNA
cgatcaagtgaaaatacttt

SEQ ID NO: 26221 - DNA, 20 bp, synthetic construct
  misc_feature 1..20: note = chemically synthesized
  source 1..20: mol_type = other DNA
aagtgaaaatactttgggcc

SEQ ID NO: 26222 - DNA, 20 bp, synthetic construct
  misc_feature 1..20: note = chemically synthesized
  source 1..20: mol_type = other DNA
gtgaaaatactttgggccca

SEQ ID NO: 26223 - DNA, 20 bp, synthetic construct
  misc_feature 1..20: note = chemically synthesized
  source 1..20: mol_type = other DNA
atactttgggcccagagcca

SEQ ID NO: 26224 - DNA, 20 bp, synthetic construct
  misc_feature 1..20: note = chemically synthesized
  source 1..20: mol_type = other DNA
ccagagccaaagaatattat

SEQ ID NO: 26225 - DNA, 20 bp, synthetic construct
  misc_feature 1..20: note = chemically synthesized
  source 1..20: mol_type = other DNA
agagccaaagaatattattg

SEQ ID NO: 26226 - DNA, 20 bp, synthetic construct
  misc_feature 1..20: note = chemically synthesized
  source 1..20: mol_type = other DNA
tttaacaccctaaatttaac

SEQ ID NO: 26227 - DNA, 20 bp, synthetic construct
  misc_feature 1..20: note = chemically synthesized
  source 1..20: mol_type = other DNA
acaccctaaatttaaccagc

SEQ ID NO: 26228 - DNA, 20 bp, synthetic construct
  misc_feature 1..20: note = chemically synthesized
  source 1..20: mol_type = other DNA
ccagctggaattcttttttt

SEQ ID NO: 26229 - DNA, 20 bp, synthetic construct
  misc_feature 1..20: note = chemically synthesized
  source 1..20: mol_type = other DNA
ctattcaaccttttgaaatg

SEQ ID NO: 26230 - DNA, 20 bp, synthetic construct
  misc_feature 1..20: note = chemically synthesized
  source 1..20: mol_type = other DNA
tattcaaccttttgaaatga

SEQ ID NO: 26231 - DNA, 20 bp, synthetic construct
  misc_feature 1..20: note = chemically synthesized
  source 1..20: mol_type = other DNA
gaaatgaaggatttgccttt

SEQ ID NO: 26232 - DNA, 20 bp, synthetic construct
  misc_feature 1..20: note = chemically synthesized
  source 1..20: mol_type = other DNA
atgaaggatttgccttttag

SEQ ID NO: 26233 - DNA, 20 bp, synthetic construct
  misc_feature 1..20: note = chemically synthesized
  source 1..20: mol_type = other DNA
tgaaggatttgccttttagt

SEQ ID NO: 26234 - DNA, 20 bp, synthetic construct
  misc_feature 1..20: note = chemically synthesized
  source 1..20: mol_type = other DNA
gaaatctgcatttcaacaca

SEQ ID NO: 26235 - DNA, 20 bp, synthetic construct
  misc_feature 1..20: note = chemically synthesized
  source 1..20: mol_type = other DNA
tctgcatttcaacacaaaga

SEQ ID NO: 26236 - DNA, 20 bp, synthetic construct
  misc_feature 1..20: note = chemically synthesized
  source 1..20: mol_type = other DNA
aagatggaacacaatgtctt

SEQ ID NO: 26237 - DNA, 20 bp, synthetic construct
  misc_feature 1..20: note = chemically synthesized
  source 1..20: mol_type = other DNA
ggaacacaatgtctttggct

SEQ ID NO: 26238 - DNA, 20 bp, synthetic construct
  misc_feature 1..20: note = chemically synthesized
  source 1..20: mol_type = other DNA
tctttggcttagttgctttt

SEQ ID NO: 26239 - DNA, 20 bp, synthetic construct
  misc_feature 1..20: note = chemically synthesized
  source 1..20: mol_type = other DNA
ggcttagttgcttttcagaa

SEQ ID NO: 26240 - DNA, 20 bp, synthetic construct
  misc_feature 1..20: note = chemically synthesized
  source 1..20: mol_type = other DNA
tagttgcttttcagaaaagc

SEQ ID NO: 26241 - DNA, 20 bp, synthetic construct
  misc_feature 1..20: note = chemically synthesized
  source 1..20: mol_type = other DNA
aaagcaagattttttttttt

SEQ ID NO: 26242 - DNA, 20 bp, synthetic construct
  misc_feature 1..20: note = chemically synthesized
  source 1..20: mol_type = other DNA
tatatgctttgcttatgtta

SEQ ID NO: 26243 - DNA, 20 bp, synthetic construct
  misc_feature 1..20: note = chemically synthesized
  source 1..20: mol_type = other DNA
ctttgcttatgttaaagaca

SEQ ID NO: 26244 - DNA, 20 bp, synthetic construct
  misc_feature 1..20: note = chemically synthesized
  source 1..20: mol_type = other DNA
tatgttaaagacacagcttg

SEQ ID NO: 26245 - DNA, 20 bp, synthetic construct
  misc_feature 1..20: note = chemically synthesized
  source 1..20: mol_type = other DNA
gcttgcagaaaaattttgtt

SEQ ID NO: 26246 - DNA, 20 bp, synthetic construct
  misc_feature 1..20: note = chemically synthesized
  source 1..20: mol_type = other DNA
cttgcagaaaaattttgttt

SEQ ID NO: 26247 - DNA, 20 bp, synthetic construct
  misc_feature 1..20: note = chemically synthesized
  source 1..20: mol_type = other DNA
aaaattttgtttaggcctga

SEQ ID NO: 26248 - DNA, 20 bp, synthetic construct
  misc_feature 1..20: note = chemically synthesized
  source 1..20: mol_type = other DNA
tttgtttaggcctgacagat

SEQ ID NO: 26249 - DNA, 20 bp, synthetic construct
  misc_feature 1..20: note = chemically synthesized
  source 1..20: mol_type = other DNA
gtttaggcctgacagattgg

SEQ ID NO: 26250 - DNA, 20 bp, synthetic construct
  misc_feature 1..20: note = chemically synthesized
  source 1..20: mol_type = other DNA
aggcctgacagattggtggc

SEQ ID NO: 26251 - DNA, 20 bp, synthetic construct
  misc_feature 1..20: note = chemically synthesized
  source 1..20: mol_type = other DNA
attggtggctggcattttta

SEQ ID NO: 26252 - DNA, 20 bp, synthetic construct
  misc_feature 1..20: note = chemically synthesized
  source 1..20: mol_type = other DNA
ggctggcatttttatagata

SEQ ID NO: 26253 - DNA, 20 bp, synthetic construct
  misc_feature 1..20: note = chemically synthesized
  source 1..20: mol_type = other DNA
gctggcatttttatagataa

SEQ ID NO: 26254 - DNA, 20 bp, synthetic construct
  misc_feature 1..20: note = chemically synthesized
  source 1..20: mol_type = other DNA
ctggcatttttatagataaa

SEQ ID NO: 26255 - DNA, 20 bp, synthetic construct
  misc_feature 1..20: note = chemically synthesized
  source 1..20: mol_type = other DNA
tggcatttttatagataaag

SEQ ID NO: 26256 - DNA, 20 bp, synthetic construct
  misc_feature 1..20: note = chemically synthesized
  source 1..20: mol_type = other DNA
ctctacttcctccctttatt

SEQ ID NO: 26257 - DNA, 20 bp, synthetic construct
  misc_feature 1..20: note = chemically synthesized
  source 1..20: mol_type = other DNA
ttcctccctttattgagaaa

SEQ ID NO: 26258 - DNA, 20 bp, synthetic construct
  misc_feature 1..20: note = chemically synthesized
  source 1..20: mol_type = other DNA
ccctttattgagaaaaagcc

SEQ ID NO: 26259 - DNA, 20 bp, synthetic construct
  misc_feature 1..20: note = chemically synthesized
  source 1..20: mol_type = other DNA
cctttattgagaaaaagcct

SEQ ID NO: 26260 - DNA, 20 bp, synthetic construct
  misc_feature 1..20: note = chemically synthesized
  source 1..20: mol_type = other DNA
tttattgagaaaaagcctag

SEQ ID NO: 26261 - DNA, 20 bp, synthetic construct
  misc_feature 1..20: note = chemically synthesized
  source 1..20: mol_type = other DNA
ttattgagaaaaagcctagg

SEQ ID NO: 26262 - DNA, 20 bp, synthetic construct
  misc_feature 1..20: note = chemically synthesized
  source 1..20: mol_type = other DNA
attgagaaaaagcctaggag

SEQ ID NO: 26263 - DNA, 20 bp, synthetic construct
  misc_feature 1..20: note = chemically synthesized
  source 1..20: mol_type = other DNA
cctaggaggagaactcttaa

SEQ ID NO: 26264 - DNA, 20 bp, synthetic construct
  misc_feature 1..20: note = chemically synthesized
  source 1..20: mol_type = other DNA
ctaggaggagaactcttaaa

SEQ ID NO: 26265 - DNA, 20 bp, synthetic construct
  misc_feature 1..20: note = chemically synthesized
  source 1..20: mol_type = other DNA
aggagaactcttaaaaggtg

SEQ ID NO: 26266 - DNA, 20 bp, synthetic construct
  misc_feature 1..20: note = chemically synthesized
  source 1..20: mol_type = other DNA
gaactcttaaaaggtgaagt

SEQ ID NO: 26267 - DNA, 20 bp, synthetic construct
  misc_feature 1..20: note = chemically synthesized
  source 1..20: mol_type = other DNA
aagttagtaacctgttgttt

SEQ ID NO: 26268 - DNA, 20 bp, synthetic construct
  misc_feature 1..20: note = chemically synthesized
  source 1..20: mol_type = other DNA
aacctgttgtttgagtaatc

SEQ ID NO: 26269 - DNA, 20 bp, synthetic construct
  misc_feature 1..20: note = chemically synthesized
  source 1..20: mol_type = other DNA
acctgttgtttgagtaatca

SEQ ID NO: 26270 - DNA, 20 bp, synthetic construct
  misc_feature 1..20: note = chemically synthesized
  source 1..20: mol_type = other DNA
gtttgagtaatcaaggctct

SEQ ID NO: 26271 - DNA, 20 bp, synthetic construct
  misc_feature 1..20: note = chemically synthesized
  source 1..20: mol_type = other DNA
ttgagtaatcaaggctctaa

SEQ ID NO: 26272 - DNA, 20 bp, synthetic construct
  misc_feature 1..20: note = chemically synthesized
  source 1..20: mol_type = other DNA
tgagtaatcaaggctctaag

SEQ ID NO: 26273 - DNA, 20 bp, synthetic construct
  misc_feature 1..20: note = chemically synthesized
  source 1..20: mol_type = other DNA
taatcaaggctctaagagga

SEQ ID NO: 26274 - DNA, 20 bp, synthetic construct
  misc_feature 1..20: note = chemically synthesized
  source 1..20: mol_type = other DNA
gaggatagcattgatcaaaa

SEQ ID NO: 26275 - DNA, 20 bp, synthetic construct
  misc_feature 1..20: note = chemically synthesized
  source 1..20: mol_type = other DNA
ggatagcattgatcaaaaaa

SEQ ID NO: 26276 - DNA, 20 bp, synthetic construct
  misc_feature 1..20: note = chemically synthesized
  source 1..20: mol_type = other DNA
tcaaaaaagagttttaaaat

SEQ ID NO: 26277 - DNA, 20 bp, synthetic construct
  misc_feature 1..20: note = chemically synthesized
  source 1..20: mol_type = other DNA
atgagtgattgatgttatta

SEQ ID NO: 26278 - DNA, 20 bp, synthetic construct
  misc_feature 1..20: note = chemically synthesized
  source 1..20: mol_type = other DNA
attgatgttattaaagtcac

SEQ ID NO: 26279 - DNA, 20 bp, synthetic construct
  misc_feature 1..20: note = chemically synthesized
  source 1..20: mol_type = other DNA
tgttattaaagtcactggtg

SEQ ID NO: 26280 - DNA, 20 bp, synthetic construct
  misc_feature 1..20: note = chemically synthesized
  source 1..20: mol_type = other DNA
aaagtcactggtgaagtatc

SEQ ID NO: 26281 - DNA, 20 bp, synthetic construct
  misc_feature 1..20: note = chemically synthesized
  source 1..20: mol_type = other DNA
aagtcactggtgaagtatca

SEQ ID NO: 26282 - DNA, 20 bp, synthetic construct
  misc_feature 1..20: note = chemically synthesized
  source 1..20: mol_type = other DNA
ggtgaagtatcaaggaatct

SEQ ID NO: 26283 - DNA, 20 bp, synthetic construct
  misc_feature 1..20: note = chemically synthesized
  source 1..20: mol_type = other DNA
gtgaagtatcaaggaatcta

SEQ ID NO: 26284 - DNA, 20 bp, synthetic construct
  misc_feature 1..20: note = chemically synthesized
  source 1..20: mol_type = other DNA
tcaaggaatctaaggaccat

SEQ ID NO: 26285 - DNA, 20 bp, synthetic construct
  misc_feature 1..20: note = chemically synthesized
  source 1..20: mol_type = other DNA
aaggaatctaaggaccatga

SEQ ID NO: 26286 - DNA, 20 bp, synthetic construct
  misc_feature 1..20: note = chemically synthesized
  source 1..20: mol_type = other DNA
ggaatctaaggaccatgaga

SEQ ID NO: 26287 - DNA, 20 bp, synthetic construct
  misc_feature 1..20: note = chemically synthesized
  source 1..20: mol_type = other DNA
taaggaccatgagagagttt

SEQ ID NO: 26288 - DNA, 20 bp, synthetic construct
  misc_feature 1..20: note = chemically synthesized
  source 1..20: mol_type = other DNA
aaggaccatgagagagtttc

SEQ ID NO: 26289 - DNA, 20 bp, synthetic construct
  misc_feature 1..20: note = chemically synthesized
  source 1..20: mol_type = other DNA
aggaccatgagagagtttca

SEQ ID NO: 26290 - DNA, 20 bp, synthetic construct
  misc_feature 1..20: note = chemically synthesized
  source 1..20: mol_type = other DNA
accatgagagagtttcaggg

SEQ ID NO: 26291 - DNA, 20 bp, synthetic construct
  misc_feature 1..20: note = chemically synthesized
  source 1..20: mol_type = other DNA
agggaagaaattctatattg

SEQ ID NO: 26292 - DNA, 20 bp, synthetic construct
  misc_feature 1..20: note = chemically synthesized
  source 1..20: mol_type = other DNA
attgctttcttttgtttttg

SEQ ID NO: 26293 - DNA, 20 bp, synthetic construct
  misc_feature 1..20: note = chemically synthesized
  source 1..20: mol_type = other DNA
tttgcagaatacacttttta

SEQ ID NO: 26294 - DNA, 20 bp, synthetic construct
  misc_feature 1..20: note = chemically synthesized
  source 1..20: mol_type = other DNA
atacactttttaaagaacat

SEQ ID NO: 26295 - DNA, 20 bp, synthetic construct
  misc_feature 1..20: note = chemically synthesized
  source 1..20: mol_type = other DNA
tacactttttaaagaacatc

SEQ ID NO: 26296 - DNA, 20 bp, synthetic construct
  misc_feature 1..20: note = chemically synthesized
  source 1..20: mol_type = other DNA
ttttaaagaacatcaggatt

SEQ ID NO: 26297 - DNA, 20 bp, synthetic construct
  misc_feature 1..20: note = chemically synthesized
  source 1..20: mol_type = other DNA
aacatcaggatttggtaaaa

SEQ ID NO: 26298 - DNA, 20 bp, synthetic construct
  misc_feature 1..20: note = chemically synthesized
  source 1..20: mol_type = other DNA
tcaggatttggtaaaacagc

SEQ ID NO: 26299 - DNA, 20 bp, synthetic construct
  misc_feature 1..20: note = chemically synthesized
  source 1..20: mol_type = other DNA
tggtaaaacagccagtaaaa

SEQ ID NO: 26300 - DNA, 20 bp, synthetic construct
  misc_feature 1..20: note = chemically synthesized
  source 1..20: mol_type = other DNA
cagccagtaaaaaagcaatg

SEQ ID NO: 26301 - DNA, 20 bp, synthetic construct
  misc_feature 1..20: note = chemically synthesized
  source 1..20: mol_type = other DNA
agccagtaaaaaagcaatga

SEQ ID NO: 26302 - DNA, 20 bp, synthetic construct
  misc_feature 1..20: note = chemically synthesized
  source 1..20: mol_type = other DNA
cacatgtaaatgctcatttc

SEQ ID NO: 26303 - DNA, 20 bp, synthetic construct
  misc_feature 1..20: note = chemically synthesized
  source 1..20: mol_type = other DNA
aatgctcatttctagaacaa

SEQ ID NO: 26304 - DNA, 20 bp, synthetic construct
  misc_feature 1..20: note = chemically synthesized
  source 1..20: mol_type = other DNA
tgctcatttctagaacaaaa

SEQ ID NO: 26305 - DNA, 20 bp, synthetic construct
  misc_feature 1..20: note = chemically synthesized
  source 1..20: mol_type = other DNA
ctcatttctagaacaaaaga

SEQ ID NO: 26306 - DNA, 20 bp, synthetic construct
  misc_feature 1..20: note = chemically synthesized
  source 1..20: mol_type = other DNA
gagtgcgattttgacaatat

SEQ ID NO: 26307 - DNA, 20 bp, synthetic construct
  misc_feature 1..20: note = chemically synthesized
  source 1..20: mol_type = other DNA
tgcgattttgacaatatcag

SEQ ID NO: 26308 - DNA, 20 bp, synthetic construct
  misc_feature 1..20: note = chemically synthesized
  source 1..20: mol_type = other DNA
gcgattttgacaatatcaga

SEQ ID NO: 26309 - DNA, 20 bp, synthetic construct
  misc_feature 1..20: note = chemically synthesized
  source 1..20: mol_type = other DNA
acaatatcagaaggttaatt

SEQ ID NO: 26310 - DNA, 20 bp, synthetic construct
  misc_feature 1..20: note = chemically synthesized
  source 1..20: mol_type = other DNA
atatcagaaggttaattaag

SEQ ID NO: 26311 - DNA, 20 bp, synthetic construct
  misc_feature 1..20: note = chemically synthesized
  source 1..20: mol_type = other DNA
aggttaattaagaagtctgt

SEQ ID NO: 26312 - DNA, 20 bp, synthetic construct
  misc_feature 1..20: note = chemically synthesized
  source 1..20: mol_type = other DNA
gaagtctgtgagtgatgata

SEQ ID NO: 26313 - DNA, 20 bp, synthetic construct
  misc_feature 1..20: note = chemically synthesized
  source 1..20: mol_type = other DNA
tctgtgagtgatgataaagc

SEQ ID NO: 26314 - DNA, 20 bp, synthetic construct
  misc_feature 1..20: note = chemically synthesized
  source 1..20: mol_type = other DNA
aagctggcacattttcatta

SEQ ID NO: 26315 - DNA, 20 bp, synthetic construct
  misc_feature 1..20: note = chemically synthesized
  source 1..20: mol_type = other DNA
attacagattgacacaactc

SEQ ID NO: 26316 - DNA, 20 bp, synthetic construct
  misc_feature 1..20: note = chemically synthesized
  source 1..20: mol_type = other DNA
gattgacacaactcaagtca

SEQ ID NO: 26317 - DNA, 20 bp, synthetic construct
  misc_feature 1..20: note = chemically synthesized
  source 1..20: mol_type = other DNA
attgacacaactcaagtcac

SEQ ID NO: 26318 - DNA, 20 bp, synthetic construct
  misc_feature 1..20: note = chemically synthesized
  source 1..20: mol_type = other DNA
cacaactcaagtcacaggca

SEQ ID NO: 26319 - DNA, 20 bp, synthetic construct
  misc_feature 1..20: note = chemically synthesized
  source 1..20: mol_type = other DNA
ttgctctataatactctgat

SEQ ID NO: 26320 - DNA, 20 bp, synthetic construct
  misc_feature 1..20: note = chemically synthesized
  source 1..20: mol_type = other DNA
tctataatactctgataagt

SEQ ID NO: 26321 - DNA, 20 bp, synthetic construct
  misc_feature 1..20: note = chemically synthesized
  source 1..20: mol_type = other DNA
tataatactctgataagtca

SEQ ID NO: 26322 - DNA, 20 bp, synthetic construct
  misc_feature 1..20: note = chemically synthesized
  source 1..20: mol_type = other DNA
tctgataagtcagagaatct

SEQ ID NO: 26323 - DNA, 20 bp, synthetic construct
  misc_feature 1..20: note = chemically synthesized
  source 1..20: mol_type = other DNA
ataagtcagagaatctaagt

SEQ ID NO: 26324 - DNA, 20 bp, synthetic construct
  misc_feature 1..20: note = chemically synthesized
  source 1..20: mol_type = other DNA
agtcagagaatctaagtgag

SEQ ID NO: 26325 - DNA, 20 bp, synthetic construct
  misc_feature 1..20: note = chemically synthesized
  source 1..20: mol_type = other DNA
agaatctaagtgagaagaac

SEQ ID NO: 26326 - DNA, 20 bp, synthetic construct
  misc_feature 1..20: note = chemically synthesized
  source 1..20: mol_type = other DNA
gtgagaagaactggtatcta

SEQ ID NO: 26327 - DNA, 20 bp, synthetic construct
  misc_feature 1..20: note = chemically synthesized
  source 1..20: mol_type = other DNA
actggtatctatggtaaaca

SEQ ID NO: 26328 - DNA, 20 bp, synthetic construct
  misc_feature 1..20: note = chemically synthesized
  source 1..20: mol_type = other DNA
ctggtatctatggtaaacat

SEQ ID NO: 26329 - DNA, 20 bp, synthetic construct
  misc_feature 1..20: note = chemically synthesized
  source 1..20: mol_type = other DNA
tggtatctatggtaaacata

SEQ ID NO: 26330 - DNA, 20 bp, synthetic construct
  misc_feature 1..20: note = chemically synthesized
  source 1..20: mol_type = other DNA
tctatggtaaacatagggtc

SEQ ID NO: 26331 - DNA, 20 bp, synthetic construct
  misc_feature 1..20: note = chemically synthesized
  source 1..20: mol_type = other DNA
tatggtaaacatagggtcaa

SEQ ID NO: 26332 - DNA, 20 bp, synthetic construct
  misc_feature 1..20: note = chemically synthesized
  source 1..20: mol_type = other DNA
gtaaacatagggtcaagagc

SEQ ID NO: 26333 - DNA, 20 bp, synthetic construct
  misc_feature 1..20: note = chemically synthesized
  source 1..20: mol_type = other DNA
atagggtcaagagctagatg

SEQ ID NO: 26334 - DNA, 20 bp, synthetic construct
  misc_feature 1..20: note = chemically synthesized
  source 1..20: mol_type = other DNA
aagagctagatgcggctgaa

SEQ ID NO: 26335 - DNA, 20 bp, synthetic construct
  misc_feature 1..20: note = chemically synthesized
  source 1..20: mol_type = other DNA
gctagatgcggctgaataga

SEQ ID NO: 26336 - DNA, 20 bp, synthetic construct
  misc_feature 1..20: note = chemically synthesized
  source 1..20: mol_type = other DNA
ctagatgcggctgaatagaa

SEQ ID NO: 26337 - DNA, 20 bp, synthetic construct
  misc_feature 1..20: note = chemically synthesized
  source 1..20: mol_type = other DNA
tagaaaggacatttactttg

SEQ ID NO: 26338 - DNA, 20 bp, synthetic construct
  misc_feature 1..20: note = chemically synthesized
  source 1..20: mol_type = other DNA
aaggacatttactttgcagt

SEQ ID NO: 26339 - DNA, 20 bp, synthetic construct
  misc_feature 1..20: note = chemically synthesized
  source 1..20: mol_type = other DNA
aggacatttactttgcagtt

SEQ ID NO: 26340 - DNA, 20 bp, synthetic construct
  misc_feature 1..20: note = chemically synthesized
  source 1..20: mol_type = other DNA
atttactttgcagttaggta

SEQ ID NO: 26341 - DNA, 20 bp, synthetic construct
  misc_feature 1..20: note = chemically synthesized
  source 1..20: mol_type = other DNA
tactttgcagttaggtaaag

SEQ ID NO: 26342 - DNA, 20 bp, synthetic construct
  misc_feature 1..20: note = chemically synthesized
  source 1..20: mol_type = other DNA
cagttaggtaaagaagcctc

SEQ ID NO: 26343 - DNA, 20 bp, synthetic construct
  misc_feature 1..20: note = chemically synthesized
  source 1..20: mol_type = other DNA
aggtaaagaagcctctagct

SEQ ID NO: 26344 - DNA, 20 bp, synthetic construct
  misc_feature 1..20: note = chemically synthesized
  source 1..20: mol_type = other DNA
aagaagcctctagctcagac

SEQ ID NO: 26345 - DNA, 20 bp, synthetic construct
  misc_feature 1..20: note = chemically synthesized
  source 1..20: mol_type = other DNA
ctgcactgttgttatttgtg

SEQ ID NO: 26346 - DNA, 20 bp, synthetic construct
  misc_feature 1..20: note = chemically synthesized
  source 1..20: mol_type = other DNA
ttatttgtgtggcttgaacc

SEQ ID NO: 26347 - DNA, 20 bp, synthetic construct
  misc_feature 1..20: note = chemically synthesized
  source 1..20: mol_type = other DNA
tgtggcttgaacctagtaat

SEQ ID NO: 26348 - DNA, 20 bp, synthetic construct
  misc_feature 1..20: note = chemically synthesized
  source 1..20: mol_type = other DNA
ttgaacctagtaatcggatt

SEQ ID NO: 26349 - DNA, 20 bp, synthetic construct
  misc_feature 1..20: note = chemically synthesized
  source 1..20: mol_type = other DNA
ctagtaatcggattcagaac

SEQ ID NO: 26350 - DNA, 20 bp, synthetic construct
  misc_feature 1..20: note = chemically synthesized
  source 1..20: mol_type = other DNA
aatcggattcagaactggaa

SEQ ID NO: 26351 - DNA, 20 bp, synthetic construct
  misc_feature 1..20: note = chemically synthesized
  source 1..20: mol_type = other DNA
atcggattcagaactggaat

SEQ ID NO: 26352 - DNA, 20 bp, synthetic construct
  misc_feature 1..20: note = chemically synthesized
  source 1..20: mol_type = other DNA
agaactggaatgggttcctt

SEQ ID NO: 26353 - DNA, 20 bp, synthetic construct
  misc_feature 1..20: note = chemically synthesized
  source 1..20: mol_type = other DNA
gaactggaatgggttccttc

SEQ ID NO: 26354 - DNA, 20 bp, synthetic construct
  misc_feature 1..20: note = chemically synthesized
  source 1..20: mol_type = other DNA
aactggaatgggttccttca

SEQ ID NO: 26355 - DNA, 20 bp, synthetic construct
  misc_feature 1..20: note = chemically synthesized
  source 1..20: mol_type = other DNA
cagggtactttacaaacgtt

SEQ ID NO: 26356 - DNA, 20 bp, synthetic construct
  misc_feature 1..20: note = chemically synthesized
  source 1..20: mol_type = other DNA
agggtactttacaaacgttc

SEQ ID NO: 26357 - DNA, 20 bp, synthetic construct
  misc_feature 1..20: note = chemically synthesized
  source 1..20: mol_type = other DNA
aaacgttcaggatgcatttt

SEQ ID NO: 26358 - DNA, 20 bp, synthetic construct
  misc_feature 1..20: note = chemically synthesized
  source 1..20: mol_type = other DNA
ttcaggatgcattttaagtg

SEQ ID NO: 26359 - DNA, 20 bp, synthetic construct
  misc_feature 1..20: note = chemically synthesized
  source 1..20: mol_type = other DNA
gatgcattttaagtgtagtc

SEQ ID NO: 26360 - DNA, 20 bp, synthetic construct
  misc_feature 1..20: note = chemically synthesized
  source 1..20: mol_type = other DNA
gcattttaagtgtagtctag

SEQ ID NO: 26361 - DNA, 20 bp, synthetic construct
  misc_feature 1..20: note = chemically synthesized
  source 1..20: mol_type = other DNA
cattttaagtgtagtctaga

SEQ ID NO: 26362 - DNA, 20 bp, synthetic construct
  misc_feature 1..20: note = chemically synthesized
  source 1..20: mol_type = other DNA
tttaagtgtagtctagaagg

SEQ ID NO: 26363 - DNA, 20 bp, synthetic construct
  misc_feature 1..20: note = chemically synthesized
  source 1..20: mol_type = other DNA
gtagtctagaaggtggtaca

SEQ ID NO: 26364 - DNA, 20 bp, synthetic construct
  misc_feature 1..20: note = chemically synthesized
  source 1..20: mol_type = other DNA
gtctagaaggtggtacatgg

SEQ ID NO: 26365 - DNA, 20 bp, synthetic construct
  misc_feature 1..20: note = chemically synthesized
  source 1..20: mol_type = other DNA
ctagaaggtggtacatggaa

SEQ ID NO: 26366 - DNA, 20 bp, synthetic construct
  misc_feature 1..20: note = chemically synthesized
  source 1..20: mol_type = other DNA
aggtggtacatggaagagct

SEQ ID NO: 26367 - DNA, 20 bp, synthetic construct
  misc_feature 1..20: note = chemically synthesized
  source 1..20: mol_type = other DNA
ggtggtacatggaagagctg

SEQ ID NO: 26368 - DNA, 20 bp, synthetic construct
  misc_feature 1..20: note = chemically synthesized
  source 1..20: mol_type = other DNA
gtggtacatggaagagctga

SEQ ID NO: 26369 - DNA, 20 bp, synthetic construct
  misc_feature 1..20: note = chemically synthesized
  source 1..20: mol_type = other DNA
atggaagagctgagggactt

SEQ ID NO: 26370 - DNA, 20 bp, synthetic construct
  misc_feature 1..20: note = chemically synthesized
  source 1..20: mol_type = other DNA
tggaagagctgagggacttg

SEQ ID NO: 26371 - DNA, 20 bp, synthetic construct
  misc_feature 1..20: note = chemically synthesized
  source 1..20: mol_type = other DNA
gctgagggacttgaggatta

SEQ ID NO: 26372 - DNA, 20 bp, synthetic construct
  misc_feature 1..20: note = chemically synthesized
  source 1..20: mol_type = other DNA
ttgaggattatggactgcga

SEQ ID NO: 26373 - DNA, 20 bp, synthetic construct
  misc_feature 1..20: note = chemically synthesized
  source 1..20: mol_type = other DNA
tgaggattatggactgcgaa

SEQ ID NO: 26374 - DNA, 20 bp, synthetic construct
  misc_feature 1..20: note = chemically synthesized
  source 1..20: mol_type = other DNA
tatggactgcgaaaggactg

SEQ ID NO: 26375 - DNA, 20 bp, synthetic construct
  misc_feature 1..20: note = chemically synthesized
  source 1..20: mol_type = other DNA
atggactgcgaaaggactgt

SEQ ID NO: 26376 - DNA, 20 bp, synthetic construct
  misc_feature 1..20: note = chemically synthesized
  source 1..20: mol_type = other DNA
gactgcgaaaggactgtagg

SEQ ID NO: 26377 - DNA, 20 bp, synthetic construct
  misc_feature 1..20: note = chemically synthesized
  source 1..20: mol_type = other DNA
ctgtaggtagtcctgtattt

SEQ ID NO: 26378 - DNA, 20 bp, synthetic construct
  misc_feature 1..20: note = chemically synthesized
  source 1..20: mol_type = other DNA
attttggcctgtcaccaata

SEQ ID NO: 26379 - DNA, 20 bp, synthetic construct
  misc_feature 1..20: note = chemically synthesized
  source 1..20: mol_type = other DNA
tttggcctgtcaccaatata

SEQ ID NO: 26380 - DNA, 20 bp, synthetic construct
  misc_feature 1..20: note = chemically synthesized
  source 1..20: mol_type = other DNA
atagagacccctcctcatca

SEQ ID NO: 26381 - DNA, 20 bp, synthetic construct
  misc_feature 1..20: note = chemically synthesized
  source 1..20: mol_type = other DNA
tgtcatccattctctttttg

SEQ ID NO: 26382 - DNA, 20 bp, synthetic construct
  misc_feature 1..20: note = chemically synthesized
  source 1..20: mol_type = other DNA
ccattctctttttgaagacc

SEQ ID NO: 26383 - DNA, 20 bp, synthetic construct
  misc_feature 1..20: note = chemically synthesized
  source 1..20: mol_type = other DNA
cattctctttttgaagaccc

SEQ ID NO: 26384 - DNA, 20 bp, synthetic construct
  misc_feature 1..20: note = chemically synthesized
  source 1..20: mol_type = other DNA
attctctttttgaagaccca

SEQ ID NO: 26385 - DNA, 20 bp, synthetic construct
  misc_feature 1..20: note = chemically synthesized
  source 1..20: mol_type = other DNA
tttttgaagacccagggtga

SEQ ID NO: 26386 - DNA, 20 bp, synthetic construct
  misc_feature 1..20: note = chemically synthesized
  source 1..20: mol_type = other DNA
tgaagacccagggtgaaaga

SEQ ID NO: 26387 - DNA, 20 bp, synthetic construct
  misc_feature 1..20: note = chemically synthesized
  source 1..20: mol_type = other DNA
gaagacccagggtgaaagaa

SEQ ID NO: 26388 - DNA, 20 bp, synthetic construct
  misc_feature 1..20: note = chemically synthesized
  source 1..20: mol_type = other DNA
aagacccagggtgaaagaaa

SEQ ID NO: 26389 - DNA, 20 bp, synthetic construct
  misc_feature 1..20: note = chemically synthesized
  source 1..20: mol_type = other DNA
agacccagggtgaaagaaag

SEQ ID NO: 26390 - DNA, 20 bp, synthetic construct
  misc_feature 1..20: note = chemically synthesized
  source 1..20: mol_type = other DNA
gacccagggtgaaagaaagg

SEQ ID NO: 26391 - DNA, 20 bp, synthetic construct
  misc_feature 1..20: note = chemically synthesized
  source 1..20: mol_type = other DNA
gggtgaaagaaagggggtca

SEQ ID NO: 26392 - DNA, 20 bp, synthetic construct
  misc_feature 1..20: note = chemically synthesized
  source 1..20: mol_type = other DNA
aaagggggtcacagtgtcac

SEQ ID NO: 26393 - DNA, 20 bp, synthetic construct
  misc_feature 1..20: note = chemically synthesized
  source 1..20: mol_type = other DNA
ggggtcacagtgtcacgaga

SEQ ID NO: 26394 - DNA, 20 bp, synthetic construct
  misc_feature 1..20: note = chemically synthesized
  source 1..20: mol_type = other DNA
acgagatagcccattccacg

SEQ ID NO: 26395 - DNA, 20 bp, synthetic construct
  misc_feature 1..20: note = chemically synthesized
  source 1..20: mol_type = other DNA
cgagatagcccattccacgt

SEQ ID NO: 26396 - DNA, 20 bp, synthetic construct
  misc_feature 1..20: note = chemically synthesized
  source 1..20: mol_type = other DNA
atagcccattccacgtggga

SEQ ID NO: 26397 - DNA, 20 bp, synthetic construct
  misc_feature 1..20: note = chemically synthesized
  source 1..20: mol_type = other DNA
cactgaaaaaaaaaaaaaaa

SEQ ID NO: 26398 - DNA, 20 bp, synthetic construct
  misc_feature 1..20: note = chemically synthesized
  source 1..20: mol_type = other DNA
actgaaaaaaaaaaaaaaac

SEQ ID NO: 26399 - DNA, 20 bp, synthetic construct
  misc_feature 1..20: note = chemically synthesized
  source 1..20: mol_type = other DNA
ctgaaaaaaaaaaaaaaaca

SEQ ID NO: 26400 - DNA, 20 bp, synthetic construct
  misc_feature 1..20: note = chemically synthesized
  source 1..20: mol_type = other DNA
attatctaaaaacatatgtt

SEQ ID NO: 26401 - DNA, 20 bp, synthetic construct
  misc_feature 1..20: note = chemically synthesized
  source 1..20: mol_type = other DNA
ttatctaaaaacatatgttt

SEQ ID NO: 26402 - DNA, 20 bp, synthetic construct
  misc_feature 1..20: note = chemically synthesized
  source 1..20: mol_type = other DNA
cacacattcacacacgtaca

SEQ ID NO: 26403 - DNA, 20 bp, synthetic construct
  misc_feature 1..20: note = chemically synthesized
  source 1..20: mol_type = other DNA
gcacatgctaacacatgcac

SEQ ID NO: 26404 - DNA, 20 bp, synthetic construct
  misc_feature 1..20: note = chemically synthesized
  source 1..20: mol_type = other DNA
agcatacacacacatgcaca

SEQ ID NO: 26405 - DNA, 20 bp, synthetic construct
  misc_feature 1..20: note = chemically synthesized
  source 1..20: mol_type = other DNA
acacacacacacgtacattt

SEQ ID NO: 26406 - DNA, 20 bp, synthetic construct
  misc_feature 1..20: note = chemically synthesized
  source 1..20: mol_type = other DNA
cacacgtacattttagtgaa

SEQ ID NO: 26407 - DNA, 20 bp, synthetic construct
  misc_feature 1..20: note = chemically synthesized
  source 1..20: mol_type = other DNA
cacacatctatgtactcctg

SEQ ID NO: 26408 - DNA, 20 bp, synthetic construct
  misc_feature 1..20: note = chemically synthesized
  source 1..20: mol_type = other DNA
cacatctatgtactcctgtg

SEQ ID NO: 26409 - DNA, 20 bp, synthetic construct
  misc_feature 1..20: note = chemically synthesized
  source 1..20: mol_type = other DNA
catctatgtactcctgtgga

SEQ ID NO: 26410 - DNA, 20 bp, synthetic construct
  misc_feature 1..20: note = chemically synthesized
  source 1..20: mol_type = other DNA
tactcctgtggagagtcctg

SEQ ID NO: 26411 - DNA, 20 bp, synthetic construct
  misc_feature 1..20: note = chemically synthesized
  source 1..20: mol_type = other DNA
tgtggttttaatacctgtta

SEQ ID NO: 26412 - DNA, 20 bp, synthetic construct
  misc_feature 1..20: note = chemically synthesized
  source 1..20: mol_type = other DNA
gttttaatacctgttaaagt

SEQ ID NO: 26413 - DNA, 20 bp, synthetic construct
  misc_feature 1..20: note = chemically synthesized
  source 1..20: mol_type = other DNA
ttttaatacctgttaaagtt

SEQ ID NO: 26414 - DNA, 20 bp, synthetic construct
  misc_feature 1..20: note = chemically synthesized
  source 1..20: mol_type = other DNA
ctgttaaagttgggctccca

SEQ ID NO: 26415 - DNA, 20 bp, synthetic construct
  misc_feature 1..20: note = chemically synthesized
  source 1..20: mol_type = other DNA
ttaaagttgggctcccaaag

SEQ ID NO: 26416 - DNA, 20 bp, synthetic construct
  misc_feature 1..20: note = chemically synthesized
  source 1..20: mol_type = other DNA
aaagcagtcattaaacgtgt

SEQ ID NO: 26417 - DNA, 20 bp, synthetic construct
  misc_feature 1..20: note = chemically synthesized
  source 1..20: mol_type = other DNA
ttggaatgatgctttttgct

SEQ ID NO: 26418 - DNA, 20 bp, synthetic construct
  misc_feature 1..20: note = chemically synthesized
  source 1..20: mol_type = other DNA
tgctttttgcttagctgttt

SEQ ID NO: 26419 - DNA, 20 bp, synthetic construct
  misc_feature 1..20: note = chemically synthesized
  source 1..20: mol_type = other DNA
cttagctgttttggcacatt

SEQ ID NO: 26420 - DNA, 20 bp, synthetic construct
  misc_feature 1..20: note = chemically synthesized
  source 1..20: mol_type = other DNA
ttggcacatttggaaatctg

SEQ ID NO: 26421 - DNA, 20 bp, synthetic construct
  misc_feature 1..20: note = chemically synthesized
  source 1..20: mol_type = other DNA
ctgcagtattacctgttgat

SEQ ID NO: 26422 - DNA, 20 bp, synthetic construct
  misc_feature 1..20: note = chemically synthesized
  source 1..20: mol_type = other DNA
cagtattacctgttgattag

SEQ ID NO: 26423 - DNA, 20 bp, synthetic construct
  misc_feature 1..20: note = chemically synthesized
  source 1..20: mol_type = other DNA
attacctgttgattagtaga

SEQ ID NO: 26424 - DNA, 20 bp, synthetic construct
  misc_feature 1..20: note = chemically synthesized
  source 1..20: mol_type = other DNA
ttgattagtagacagtaatg

SEQ ID NO: 26425 - DNA, 20 bp, synthetic construct
  misc_feature 1..20: note = chemically synthesized
  source 1..20: mol_type = other DNA
atgtggctgtattacacacc

SEQ ID NO: 26426 - DNA, 20 bp, synthetic construct
  misc_feature 1..20: note = chemically synthesized
  source 1..20: mol_type = other DNA
tgtattacacacccagtgat

SEQ ID NO: 26427 - DNA, 20 bp, synthetic construct
  misc_feature 1..20: note = chemically synthesized
  source 1..20: mol_type = other DNA
acacacccagtgattagttt

SEQ ID NO: 26428 - DNA, 20 bp, synthetic construct
  misc_feature 1..20: note = chemically synthesized
  source 1..20: mol_type = other DNA
tgattagtttcagaaacaaa

SEQ ID NO: 26429 - DNA, 20 bp, synthetic construct
  misc_feature 1..20: note = chemically synthesized
  source 1..20: mol_type = other DNA
agaaacaaatagcatgttaa

SEQ ID NO: 26430 - DNA, 20 bp, synthetic construct
  misc_feature 1..20: note = chemically synthesized
  source 1..20: mol_type = other DNA
caaatagcatgttaatagtc

SEQ ID NO: 26431 - DNA, 20 bp, synthetic construct
  misc_feature 1..20: note = chemically synthesized
  source 1..20: mol_type = other DNA
aaatagcatgttaatagtca

SEQ ID NO: 26432 - DNA, 20 bp, synthetic construct
  misc_feature 1..20: note = chemically synthesized
  source 1..20: mol_type = other DNA
ttaatagtcaaggaatcttt

SEQ ID NO: 26433 - DNA, 20 bp, synthetic construct
  misc_feature 1..20: note = chemically synthesized
  source 1..20: mol_type = other DNA
ggaatctttgagatgttctt

SEQ ID NO: 26434 - DNA, 20 bp, synthetic construct
  misc_feature 1..20: note = chemically synthesized
  source 1..20: mol_type = other DNA
gaatctttgagatgttcttg

SEQ ID NO: 26435 - DNA, 20 bp, synthetic construct
  misc_feature 1..20: note = chemically synthesized
  source 1..20: mol_type = other DNA
tgatttaatgacttaaattc

SEQ ID NO: 26436 - DNA, 20 bp, synthetic construct
  misc_feature 1..20: note = chemically synthesized
  source 1..20: mol_type = other DNA
gatttaatgacttaaattcc

SEQ ID NO: 26437 - DNA, 20 bp, synthetic construct
  misc_feature 1..20: note = chemically synthesized
  source 1..20: mol_type = other DNA
aaattccaggaacatcccac

SEQ ID NO: 26438 - DNA, 20 bp, synthetic construct
  misc_feature 1..20: note = chemically synthesized
  source 1..20: mol_type = other DNA
aattccaggaacatcccact

SEQ ID NO: 26439 - DNA, 20 bp, synthetic construct
  misc_feature 1..20: note = chemically synthesized
  source 1..20: mol_type = other DNA
caggaacatcccactgggct

SEQ ID NO: 26440 - DNA, 20 bp, synthetic construct
  misc_feature 1..20: note = chemically synthesized
  source 1..20: mol_type = other DNA
ggaacatcccactgggctta

SEQ ID NO: 26441 - DNA, 20 bp, synthetic construct
  misc_feature 1..20: note = chemically synthesized
  source 1..20: mol_type = other DNA
ggcttagagctctttgtcaa

SEQ ID NO: 26442 - DNA, 20 bp, synthetic construct
  misc_feature 1..20: note = chemically synthesized
  source 1..20: mol_type = other DNA
tagagctctttgtcaaaagt

SEQ ID NO: 26443 - DNA, 20 bp, synthetic construct
  misc_feature 1..20: note = chemically synthesized
  source 1..20: mol_type = other DNA
aagttggtacccaatatatg

SEQ ID NO: 26444 - DNA, 20 bp, synthetic construct
  misc_feature 1..20: note = chemically synthesized
  source 1..20: mol_type = other DNA
ccaatatatgtagaaatgta

SEQ ID NO: 26445 - DNA, 20 bp, synthetic construct
  misc_feature 1..20: note = chemically synthesized
  source 1..20: mol_type = other DNA
aaatgtataacattaaatca

SEQ ID NO: 26446 - DNA, 20 bp, synthetic construct
  misc_feature 1..20: note = chemically synthesized
  source 1..20: mol_type = other DNA
cattaaatcaaagccattcc

SEQ ID NO: 26447 - DNA, 20 bp, synthetic construct
  misc_feature 1..20: note = chemically synthesized
  source 1..20: mol_type = other DNA
tttaatgaaacctgaaaaat

SEQ ID NO: 26448 - DNA, 20 bp, synthetic construct
  misc_feature 1..20: note = chemically synthesized
  source 1..20: mol_type = other DNA
taatgaaacctgaaaaataa

SEQ ID NO: 26449 - DNA, 20 bp, synthetic construct
  misc_feature 1..20: note = chemically synthesized
  source 1..20: mol_type = other DNA
agagtcactatttttaaatt

SEQ ID NO: 26450 - DNA, 20 bp, synthetic construct
  misc_feature 1..20: note = chemically synthesized
  source 1..20: mol_type = other DNA
ctatttttaaattcagccat

SEQ ID NO: 26451 - DNA, 20 bp, synthetic construct
  misc_feature 1..20: note = chemically synthesized
  source 1..20: mol_type = other DNA
tatttttaaattcagccata

SEQ ID NO: 26452 - DNA, 20 bp, synthetic construct
  misc_feature 1..20: note = chemically synthesized
  source 1..20: mol_type = other DNA
tttgcaacctaataatgtgt

SEQ ID NO: 26453 - DNA, 20 bp, synthetic construct
  misc_feature 1..20: note = chemically synthesized
  source 1..20: mol_type = other DNA
ttgcaacctaataatgtgta

SEQ ID NO: 26454 - DNA, 20 bp, synthetic construct
  misc_feature 1..20: note = chemically synthesized
  source 1..20: mol_type = other DNA
ataatgtgtaaggcatttct

SEQ ID NO: 26455 - DNA, 20 bp, synthetic construct
  misc_feature 1..20: note = chemically synthesized
  source 1..20: mol_type = other DNA
taatgtgtaaggcatttctg

SEQ ID NO: 26456 - DNA, 20 bp, synthetic construct
  misc_feature 1..20: note = chemically synthesized
  source 1..20: mol_type = other DNA
taaggcatttctgaggcccc

SEQ ID NO: 26457 - DNA, 20 bp, synthetic construct
  misc_feature 1..20: note = chemically synthesized
  source 1..20: mol_type = other DNA
ggcatttctgaggccccaag

SEQ ID NO: 26458 - DNA, 20 bp, synthetic construct
  misc_feature 1..20: note = chemically synthesized
  source 1..20: mol_type = other DNA
gaggccccaagtggaaatac

SEQ ID NO: 26459 - DNA, 20 bp, synthetic construct
  misc_feature 1..20: note = chemically synthesized
  source 1..20: mol_type = other DNA
aggccccaagtggaaatact

SEQ ID NO: 26460 - DNA, 20 bp, synthetic construct
  misc_feature 1..20: note = chemically synthesized
  source 1..20: mol_type = other DNA
ccaagtggaaatactgggtc

SEQ ID NO: 26461 - DNA, 20 bp, synthetic construct
  misc_feature 1..20: note = chemically synthesized
  source 1..20: mol_type = other DNA
aagtggaaatactgggtcta

SEQ ID NO: 26462 - DNA, 20 bp, synthetic construct
  misc_feature 1..20: note = chemically synthesized
  source 1..20: mol_type = other DNA
gtggaaatactgggtctaga

SEQ ID NO: 26463 - DNA, 20 bp, synthetic construct
  misc_feature 1..20: note = chemically synthesized
  source 1..20: mol_type = other DNA
ctagagagacctttatgaaa

SEQ ID NO: 26464 - DNA, 20 bp, synthetic construct
  misc_feature 1..20: note = chemically synthesized
  source 1..20: mol_type = other DNA
gagacctttatgaaatagaa

SEQ ID NO: 26465 - DNA, 20 bp, synthetic construct
  misc_feature 1..20: note = chemically synthesized
  source 1..20: mol_type = other DNA
agacctttatgaaatagaac

SEQ ID NO: 26466 - DNA, 20 bp, synthetic construct
  misc_feature 1..20: note = chemically synthesized
  source 1..20: mol_type = other DNA
caggttgaaacaccttccac

SEQ ID NO: 26467 - DNA, 20 bp, synthetic construct
  misc_feature 1..20: note = chemically synthesized
  source 1..20: mol_type = other DNA
tgaaacaccttccaccagaa

SEQ ID NO: 26468 - DNA, 20 bp, synthetic construct
  misc_feature 1..20: note = chemically synthesized
  source 1..20: mol_type = other DNA
accttccaccagaaaagtgt

SEQ ID NO: 26469 - DNA, 20 bp, synthetic construct
  misc_feature 1..20: note = chemically synthesized
  source 1..20: mol_type = other DNA
aagtgtaagacatttgaaaa

SEQ ID NO: 26470 - DNA, 20 bp, synthetic construct
  misc_feature 1..20: note = chemically synthesized
  source 1..20: mol_type = other DNA
aagacatttgaaaaaagatt

SEQ ID NO: 26471 - DNA, 20 bp, synthetic construct
  misc_feature 1..20: note = chemically synthesized
  source 1..20: mol_type = other DNA
catttgaaaaaagattgagt

SEQ ID NO: 26472 - DNA, 20 bp, synthetic construct
  misc_feature 1..20: note = chemically synthesized
  source 1..20: mol_type = other DNA
gaaaaaagattgagtcagaa

SEQ ID NO: 26473 - DNA, 20 bp, synthetic construct
  misc_feature 1..20: note = chemically synthesized
  source 1..20: mol_type = other DNA
aaaaaagattgagtcagaaa

SEQ ID NO: 26474 - DNA, 20 bp, synthetic construct
  misc_feature 1..20: note = chemically synthesized
  source 1..20: mol_type = other DNA
aaaaagattgagtcagaaaa

SEQ ID NO: 26475 - DNA, 20 bp, synthetic construct
  misc_feature 1..20: note = chemically synthesized
  source 1..20: mol_type = other DNA
aagggaaatgtgtcccattt

SEQ ID NO: 26476 - DNA, 20 bp, synthetic construct
  misc_feature 1..20: note = chemically synthesized
  source 1..20: mol_type = other DNA
gggaaatgtgtcccatttga

SEQ ID NO: 26477 - DNA, 20 bp, synthetic construct
  misc_feature 1..20: note = chemically synthesized
  source 1..20: mol_type = other DNA
atgtgtcccatttgagagac

SEQ ID NO: 26478 - DNA, 20 bp, synthetic construct
  misc_feature 1..20: note = chemically synthesized
  source 1..20: mol_type = other DNA
gtcccatttgagagaccaga

SEQ ID NO: 26479 - DNA, 20 bp, synthetic construct
  misc_feature 1..20: note = chemically synthesized
  source 1..20: mol_type = other DNA
tcccatttgagagaccagaa

SEQ ID NO: 26480 - DNA, 20 bp, synthetic construct
  misc_feature 1..20: note = chemically synthesized
  source 1..20: mol_type = other DNA
cccatttgagagaccagaaa

SEQ ID NO: 26481 - DNA, 20 bp, synthetic construct
  misc_feature 1..20: note = chemically synthesized
  source 1..20: mol_type = other DNA
gagagaccagaaagggaaac

SEQ ID NO: 26482 - DNA, 20 bp, synthetic construct
  misc_feature 1..20: note = chemically synthesized
  source 1..20: mol_type = other DNA
gagaccagaaagggaaacaa

SEQ ID NO: 26483 - DNA, 20 bp, synthetic construct
  misc_feature 1..20: note = chemically synthesized
  source 1..20: mol_type = other DNA
cagaaagggaaacaagagtc

SEQ ID NO: 26484 - DNA, 20 bp, synthetic construct
  misc_feature 1..20: note = chemically synthesized
  source 1..20: mol_type = other DNA
cagttcctgctgtgtccgtg

SEQ ID NO: 26485 - DNA, 20 bp, synthetic construct
  misc_feature 1..20: note = chemically synthesized
  source 1..20: mol_type = other DNA
ctgtgtccgtgcagttgcca

SEQ ID NO: 26486 - DNA, 20 bp, synthetic construct
  misc_feature 1..20: note = chemically synthesized
  source 1..20: mol_type = other DNA
agctgcgttcgctgacatgt

SEQ ID NO: 26487 - DNA, 20 bp, synthetic construct
  misc_feature 1..20: note = chemically synthesized
  source 1..20: mol_type = other DNA
cgctgacatgtcggctttaa

SEQ ID NO: 26488 - DNA, 20 bp, synthetic construct
  misc_feature 1..20: note = chemically synthesized
  source 1..20: mol_type = other DNA
tgacatgtcggctttaatgg

SEQ ID NO: 26489 - DNA, 20 bp, synthetic construct
  misc_feature 1..20: note = chemically synthesized
  source 1..20: mol_type = other DNA
catgtcggctttaatggaag

SEQ ID NO: 26490 - DNA, 20 bp, synthetic construct
  misc_feature 1..20: note = chemically synthesized
  source 1..20: mol_type = other DNA
tcggctttaatggaagcagt

SEQ ID NO: 26491 - DNA, 20 bp, synthetic construct
  misc_feature 1..20: note = chemically synthesized
  source 1..20: mol_type = other DNA
cggctttaatggaagcagtg

SEQ ID NO: 26492 - DNA, 20 bp, synthetic construct
  misc_feature 1..20: note = chemically synthesized
  source 1..20: mol_type = other DNA
cagtgaggacacaatctgtc

SEQ ID NO: 26493 - DNA, 20 bp, synthetic construct
  misc_feature 1..20: note = chemically synthesized
  source 1..20: mol_type = other DNA
ggacacaatctgtctggcac

SEQ ID NO: 26494 - DNA, 20 bp, synthetic construct
  misc_feature 1..20: note = chemically synthesized
  source 1..20: mol_type = other DNA
acaatctgtctggcacaagc

SEQ ID NO: 26495 - DNA, 20 bp, synthetic construct
  misc_feature 1..20: note = chemically synthesized
  source 1..20: mol_type = other DNA
ctgtctggcacaagctggtt

SEQ ID NO: 26496 - DNA, 20 bp, synthetic construct
  misc_feature 1..20: note = chemically synthesized
  source 1..20: mol_type = other DNA
tgtctggcacaagctggttt

SEQ ID NO: 26497 - DNA, 20 bp, synthetic construct
  misc_feature 1..20: note = chemically synthesized
  source 1..20: mol_type = other DNA
tttgggtgttgtctcatgct

SEQ ID NO: 26498 - DNA, 20 bp, synthetic construct
  misc_feature 1..20: note = chemically synthesized
  source 1..20: mol_type = other DNA
gggtgttgtctcatgctaag

SEQ ID NO: 26499 - DNA, 20 bp, synthetic construct
  misc_feature 1..20: note = chemically synthesized
  source 1..20: mol_type = other DNA
ggtgttgtctcatgctaaga

SEQ ID NO: 26500 - DNA, 20 bp, synthetic construct
  misc_feature 1..20: note = chemically synthesized
  source 1..20: mol_type = other DNA
gtctcatgctaagaaggccc

SEQ ID NO: 26501 - DNA, 20 bp, synthetic construct
  misc_feature 1..20: note = chemically synthesized
  source 1..20: mol_type = other DNA
taagaaggccctggacctga

SEQ ID NO: 26502 - DNA, 20 bp, synthetic construct
  misc_feature 1..20: note = chemically synthesized
  source 1..20: mol_type = other DNA
agaaggccctggacctgatg

SEQ ID NO: 26503 - DNA, 20 bp, synthetic construct
  misc_feature 1..20: note = chemically synthesized
  source 1..20: mol_type = other DNA
aaggccctggacctgatgga

SEQ ID NO: 26504 - DNA, 20 bp, synthetic construct
  misc_feature 1..20: note = chemically synthesized
  source 1..20: mol_type = other DNA
cctggacctgatggagagcc

SEQ ID NO: 26505 - DNA, 20 bp, synthetic construct
  misc_feature 1..20: note = chemically synthesized
  source 1..20: mol_type = other DNA
ttccctgtccttatcaatga

SEQ ID NO: 26506 - DNA, 20 bp, synthetic construct
  misc_feature 1..20: note = chemically synthesized
  source 1..20: mol_type = other DNA
ctgtccttatcaatgacaga

SEQ ID NO: 26507 - DNA, 20 bp, synthetic construct
  misc_feature 1..20: note = chemically synthesized
  source 1..20: mol_type = other DNA
gtccttatcaatgacagacg

SEQ ID NO: 26508 - DNA, 20 bp, synthetic construct
  misc_feature 1..20: note = chemically synthesized
  source 1..20: mol_type = other DNA
tccttatcaatgacagacgg

SEQ ID NO: 26509 - DNA, 20 bp, synthetic construct
  misc_feature 1..20: note = chemically synthesized
  source 1..20: mol_type = other DNA
ccttatcaatgacagacgga

SEQ ID NO: 26510 - DNA, 20 bp, synthetic construct
  misc_feature 1..20: note = chemically synthesized
  source 1..20: mol_type = other DNA
tatcaatgacagacggaggg

SEQ ID NO: 26511 - DNA, 20 bp, synthetic construct
  misc_feature 1..20: note = chemically synthesized
  source 1..20: mol_type = other DNA
gtggaacctgaatttcctaa

SEQ ID NO: 26512 - DNA, 20 bp, synthetic construct
  misc_feature 1..20: note = chemically synthesized
  source 1..20: mol_type = other DNA
ggaacctgaatttcctaatg

SEQ ID NO: 26513 - DNA, 20 bp, synthetic construct
  misc_feature 1..20: note = chemically synthesized
  source 1..20: mol_type = other DNA
gaacctgaatttcctaatgg

SEQ ID NO: 26514 - DNA, 20 bp, synthetic construct
  misc_feature 1..20: note = chemically synthesized
  source 1..20: mol_type = other DNA
aacctgaatttcctaatgga

SEQ ID NO: 26515 - DNA, 20 bp, synthetic construct
  misc_feature 1..20: note = chemically synthesized
  source 1..20: mol_type = other DNA
tttcctaatggagggatcct

SEQ ID NO: 26516 - DNA, 20 bp, synthetic construct
  misc_feature 1..20: note = chemically synthesized
  source 1..20: mol_type = other DNA
ttcctaatggagggatcctt

SEQ ID NO: 26517 - DNA, 20 bp, synthetic construct
  misc_feature 1..20: note = chemically synthesized
  source 1..20: mol_type = other DNA
tcctaatggagggatcctta

SEQ ID NO: 26518 - DNA, 20 bp, synthetic construct
  misc_feature 1..20: note = chemically synthesized
  source 1..20: mol_type = other DNA
gggatccttagggattccct

SEQ ID NO: 26519 - DNA, 20 bp, synthetic construct
  misc_feature 1..20: note = chemically synthesized
  source 1..20: mol_type = other DNA
taatttgtttttgactgttc

SEQ ID NO: 26520 - DNA, 20 bp, synthetic construct
  misc_feature 1..20: note = chemically synthesized
  source 1..20: mol_type = other DNA
ttttgactgttccagtccta

SEQ ID NO: 26521 - DNA, 20 bp, synthetic construct
  misc_feature 1..20: note = chemically synthesized
  source 1..20: mol_type = other DNA
tttgactgttccagtcctaa

SEQ ID NO: 26522 - DNA, 20 bp, synthetic construct
  misc_feature 1..20: note = chemically synthesized
  source 1..20: mol_type = other DNA
tgactgttccagtcctaaag

SEQ ID NO: 26523 - DNA, 20 bp, synthetic construct
  misc_feature 1..20: note = chemically synthesized
  source 1..20: mol_type = other DNA
gactgttccagtcctaaagg

SEQ ID NO: 26524 - DNA, 20 bp, synthetic construct
  misc_feature 1..20: note = chemically synthesized
  source 1..20: mol_type = other DNA
tgttccagtcctaaaggagg

SEQ ID NO: 26525 - DNA, 20 bp, synthetic construct
  misc_feature 1..20: note = chemically synthesized
  source 1..20: mol_type = other DNA
gttccagtcctaaaggaggt

SEQ ID NO: 26526 - DNA, 20 bp, synthetic construct
  misc_feature 1..20: note = chemically synthesized
  source 1..20: mol_type = other DNA
gtcctaaaggaggtgggtcc

SEQ ID NO: 26527 - DNA, 20 bp, synthetic construct
  misc_feature 1..20: note = chemically synthesized
  source 1..20: mol_type = other DNA
taaaggaggtgggtcctgga

SEQ ID NO: 26528 - DNA, 20 bp, synthetic construct
  misc_feature 1..20: note = chemically synthesized
  source 1..20: mol_type = other DNA
aaaggaggtgggtcctggac

SEQ ID NO: 26529 - DNA, 20 bp, synthetic construct
  misc_feature 1..20: note = chemically synthesized
  source 1..20: mol_type = other DNA
aggaggtgggtcctggacag

SEQ ID NO: 26530 - DNA, 20 bp, synthetic construct
  misc_feature 1..20: note = chemically synthesized
  source 1..20: mol_type = other DNA
ggaggtgggtcctggacagg

SEQ ID NO: 26531 - DNA, 20 bp, synthetic construct
  misc_feature 1..20: note = chemically synthesized
  source 1..20: mol_type = other DNA
gaggtgggtcctggacagga

SEQ ID NO: 26532 - DNA, 20 bp, synthetic construct
  misc_feature 1..20: note = chemically synthesized
  source 1..20: mol_type = other DNA
gtcctggacaggagggaaaa

SEQ ID NO: 26533 - DNA, 20 bp, synthetic construct
  misc_feature 1..20: note = chemically synthesized
  source 1..20: mol_type = other DNA
caggagggaaaacagcctca

SEQ ID NO: 26534 - DNA, 20 bp, synthetic construct
  misc_feature 1..20: note = chemically synthesized
  source 1..20: mol_type = other DNA
gaaaacagcctcatggccca

SEQ ID NO: 26535 - DNA, 20 bp, synthetic construct
  misc_feature 1..20: note = chemically synthesized
  source 1..20: mol_type = other DNA
aaaacagcctcatggcccat

SEQ ID NO: 26536 - DNA, 20 bp, synthetic construct
  misc_feature 1..20: note = chemically synthesized
  source 1..20: mol_type = other DNA
atggcccatgggtctctgcc

SEQ ID NO: 26537 - DNA, 20 bp, synthetic construct
  misc_feature 1..20: note = chemically synthesized
  source 1..20: mol_type = other DNA
tggcccatgggtctctgccc

SEQ ID NO: 26538 - DNA, 20 bp, synthetic construct
  misc_feature 1..20: note = chemically synthesized
  source 1..20: mol_type = other DNA
ggcccatgggtctctgccca

SEQ ID NO: 26539 - DNA, 20 bp, synthetic construct
  misc_feature 1..20: note = chemically synthesized
  source 1..20: mol_type = other DNA
tctctgcccagggaatttca

SEQ ID NO: 26540 - DNA, 20 bp, synthetic construct
  misc_feature 1..20: note = chemically synthesized
  source 1..20: mol_type = other DNA
ccagggaatttcaaagcttc

SEQ ID NO: 26541 - DNA, 20 bp, synthetic construct
  misc_feature 1..20: note = chemically synthesized
  source 1..20: mol_type = other DNA
gttcatacttcccttaccct

SEQ ID NO: 26542 - DNA, 20 bp, synthetic construct
  misc_feature 1..20: note = chemically synthesized
  source 1..20: mol_type = other DNA
atacttcccttaccctaaga

SEQ ID NO: 26543 - DNA, 20 bp, synthetic construct
  misc_feature 1..20: note = chemically synthesized
  source 1..20: mol_type = other DNA
cttcccttaccctaagacag

SEQ ID NO: 26544 - DNA, 20 bp, synthetic construct
  misc_feature 1..20: note = chemically synthesized
  source 1..20: mol_type = other DNA
ctaagacagcagtgctgatt

SEQ ID NO: 26545 - DNA, 20 bp, synthetic construct
  misc_feature 1..20: note = chemically synthesized
  source 1..20: mol_type = other DNA
cagcagtgctgattcagctt

SEQ ID NO: 26546 - DNA, 20 bp, synthetic construct
  misc_feature 1..20: note = chemically synthesized
  source 1..20: mol_type = other DNA
gattcagcttgagtgtgcat

SEQ ID NO: 26547 - DNA, 20 bp, synthetic construct
  misc_feature 1..20: note = chemically synthesized
  source 1..20: mol_type = other DNA
gagtgtgcatgagaatcacc

SEQ ID NO: 26548 - DNA, 20 bp, synthetic construct
  misc_feature 1..20: note = chemically synthesized
  source 1..20: mol_type = other DNA
gtgtgcatgagaatcacctg

SEQ ID NO: 26549 - DNA, 20 bp, synthetic construct
  misc_feature 1..20: note = chemically synthesized
  source 1..20: mol_type = other DNA
cctggagaatttattcaaca

SEQ ID NO: 26550 - DNA, 20 bp, synthetic construct
  misc_feature 1..20: note = chemically synthesized
  source 1..20: mol_type = other DNA
ggagaatttattcaacatag

SEQ ID NO: 26551 - DNA, 20 bp, synthetic construct
  misc_feature 1..20: note = chemically synthesized
  source 1..20: mol_type = other DNA
gagaatttattcaacataga

SEQ ID NO: 26552 - DNA, 20 bp, synthetic construct
  misc_feature 1..20: note = chemically synthesized
  source 1..20: mol_type = other DNA
cccaccctcaatttctgatt

SEQ ID NO: 26553 - DNA, 20 bp, synthetic construct
  misc_feature 1..20: note = chemically synthesized
  source 1..20: mol_type = other DNA
ccctcaatttctgattcagt

SEQ ID NO: 26554 - DNA, 20 bp, synthetic construct
  misc_feature 1..20: note = chemically synthesized
  source 1..20: mol_type = other DNA
atttctgattcagtaagtct

SEQ ID NO: 26555 - DNA, 20 bp, synthetic construct
  misc_feature 1..20: note = chemically synthesized
  source 1..20: mol_type = other DNA
tttctgattcagtaagtctg

SEQ ID NO: 26556 - DNA, 20 bp, synthetic construct
  misc_feature 1..20: note = chemically synthesized
  source 1..20: mol_type = other DNA
ctgattcagtaagtctgagg

SEQ ID NO: 26557 - DNA, 20 bp, synthetic construct
  misc_feature 1..20: note = chemically synthesized
  source 1..20: mol_type = other DNA
gtaagtctgaggtggtgccc

SEQ ID NO: 26558 - DNA, 20 bp, synthetic construct
  misc_feature 1..20: note = chemically synthesized
  source 1..20: mol_type = other DNA
ttgcattttgaacaaactcc

SEQ ID NO: 26559 - DNA, 20 bp, synthetic construct
  misc_feature 1..20: note = chemically synthesized
  source 1..20: mol_type = other DNA
tgcattttgaacaaactccc

SEQ ID NO: 26560 - DNA, 20 bp, synthetic construct
  misc_feature 1..20: note = chemically synthesized
  source 1..20: mol_type = other DNA
aactcccaggtgatgctgat

SEQ ID NO: 26561 - DNA, 20 bp, synthetic construct
  misc_feature 1..20: note = chemically synthesized
  source 1..20: mol_type = other DNA
actcccaggtgatgctgatc

SEQ ID NO: 26562 - DNA, 20 bp, synthetic construct
  misc_feature 1..20: note = chemically synthesized
  source 1..20: mol_type = other DNA
ctcccaggtgatgctgatcg

SEQ ID NO: 26563 - DNA, 20 bp, synthetic construct
  misc_feature 1..20: note = chemically synthesized
  source 1..20: mol_type = other DNA
tcccaggtgatgctgatcgg

SEQ ID NO: 26564 - DNA, 20 bp, synthetic construct
  misc_feature 1..20: note = chemically synthesized
  source 1..20: mol_type = other DNA
caggtgatgctgatcggggg

SEQ ID NO: 26565 - DNA, 20 bp, synthetic construct
  misc_feature 1..20: note = chemically synthesized
  source 1..20: mol_type = other DNA
aggtgatgctgatcgggggt

SEQ ID NO: 26566 - DNA, 20 bp, synthetic construct
  misc_feature 1..20: note = chemically synthesized
  source 1..20: mol_type = other DNA
atgctgatcgggggtgggcc

SEQ ID NO: 26567 - DNA, 20 bp, synthetic construct
  misc_feature 1..20: note = chemically synthesized
  source 1..20: mol_type = other DNA
tgctgatcgggggtgggcct

SEQ ID NO: 26568 - DNA, 20 bp, synthetic construct
  misc_feature 1..20: note = chemically synthesized
  source 1..20: mol_type = other DNA
tgggcctgggtctgcgctgt

SEQ ID NO: 26569 - DNA, 20 bp, synthetic construct
  misc_feature 1..20: note = chemically synthesized
  source 1..20: mol_type = other DNA
gctgtgagaatcacttgcct

SEQ ID NO: 26570 - DNA, 20 bp, synthetic construct
  misc_feature 1..20: note = chemically synthesized
  source 1..20: mol_type = other DNA
tgtgagaatcacttgcctaa

SEQ ID NO: 26571 - DNA, 20 bp, synthetic construct
  misc_feature 1..20: note = chemically synthesized
  source 1..20: mol_type = other DNA
cttgcctaagagcactaaca

SEQ ID NO: 26572 - DNA, 20 bp, synthetic construct
  misc_feature 1..20: note = chemically synthesized
  source 1..20: mol_type = other DNA
agagcactaacaaagaaaaa

SEQ ID NO: 26573 - DNA, 20 bp, synthetic construct
  misc_feature 1..20: note = chemically synthesized
  source 1..20: mol_type = other DNA
agcactaacaaagaaaaaaa

SEQ ID NO: 26574 - DNA, 20 bp, synthetic construct
  misc_feature 1..20: note = chemically synthesized
  source 1..20: mol_type = other DNA
gcactaacaaagaaaaaaag

SEQ ID NO: 26575 - DNA, 20 bp, synthetic construct
  misc_feature 1..20: note = chemically synthesized
  source 1..20: mol_type = other DNA
agaaaaaaagaggacataac

SEQ ID NO: 26576 - DNA, 20 bp, synthetic construct
  misc_feature 1..20: note = chemically synthesized
  source 1..20: mol_type = other DNA
taactagatcacccacttcc

SEQ ID NO: 26577 - DNA, 20 bp, synthetic construct
  misc_feature 1..20: note = chemically synthesized
  source 1..20: mol_type = other DNA
tagatcacccacttcctagc

SEQ ID NO: 26578 - DNA, 20 bp, synthetic construct
  misc_feature 1..20: note = chemically synthesized
  source 1..20: mol_type = other DNA
cccacttcctagccagcaac

SEQ ID NO: 26579 - DNA, 20 bp, synthetic construct
  misc_feature 1..20: note = chemically synthesized
  source 1..20: mol_type = other DNA
cacttcctagccagcaacca

SEQ ID NO: 26580 - DNA, 20 bp, synthetic construct
  misc_feature 1..20: note = chemically synthesized
  source 1..20: mol_type = other DNA
cagcaaccagagcccatctc

SEQ ID NO: 26581 - DNA, 20 bp, synthetic construct
  misc_feature 1..20: note = chemically synthesized
  source 1..20: mol_type = other DNA
aaccagagcccatctctggc

SEQ ID NO: 26582 - DNA, 20 bp, synthetic construct
  misc_feature 1..20: note = chemically synthesized
  source 1..20: mol_type = other DNA
accagagcccatctctggct

SEQ ID NO: 26583 - DNA, 20 bp, synthetic construct
  misc_feature 1..20: note = chemically synthesized
  source 1..20: mol_type = other DNA
ccagagcccatctctggctg

SEQ ID NO: 26584 - DNA, 20 bp, synthetic construct
  misc_feature 1..20: note = chemically synthesized
  source 1..20: mol_type = other DNA
agagcccatctctggctggg

SEQ ID NO: 26585 - DNA, 20 bp, synthetic construct
  misc_feature 1..20: note = chemically synthesized
  source 1..20: mol_type = other DNA
tctctggctggggagaatga

SEQ ID NO: 26586 - DNA, 20 bp, synthetic construct
  misc_feature 1..20: note = chemically synthesized
  source 1..20: mol_type = other DNA
ggctggggagaatgaaagcg

SEQ ID NO: 26587 - DNA, 20 bp, synthetic construct
  misc_feature 1..20: note = chemically synthesized
  source 1..20: mol_type = other DNA
gctggggagaatgaaagcga

SEQ ID NO: 26588 - DNA, 20 bp, synthetic construct
  misc_feature 1..20: note = chemically synthesized
  source 1..20: mol_type = other DNA
ggggagaatgaaagcgaagg

SEQ ID NO: 26589 - DNA, 20 bp, synthetic construct
  misc_feature 1..20: note = chemically synthesized
  source 1..20: mol_type = other DNA
gggagaatgaaagcgaaggt

SEQ ID NO: 26590 - DNA, 20 bp, synthetic construct
  misc_feature 1..20: note = chemically synthesized
  source 1..20: mol_type = other DNA
aatgaaagcgaaggtgggaa

SEQ ID NO: 26591 - DNA, 20 bp, synthetic construct
  misc_feature 1..20: note = chemically synthesized
  source 1..20: mol_type = other DNA
gaaagcgaaggtgggaaaag

SEQ ID NO: 26592 - DNA, 20 bp, synthetic construct
  misc_feature 1..20: note = chemically synthesized
  source 1..20: mol_type = other DNA
aagcgaaggtgggaaaagaa

SEQ ID NO: 26593 - DNA, 20 bp, synthetic construct
  misc_feature 1..20: note = chemically synthesized
  source 1..20: mol_type = other DNA
agcgaaggtgggaaaagaag

SEQ ID NO: 26594 - DNA, 20 bp, synthetic construct
  misc_feature 1..20: note = chemically synthesized
  source 1..20: mol_type = other DNA
gaaaagaagaggccctcaac

SEQ ID NO: 26595 - DNA, 20 bp, synthetic construct
  misc_feature 1..20: note = chemically synthesized
  source 1..20: mol_type = other DNA
aaaagaagaggccctcaacc

SEQ ID NO: 26596 - DNA, 20 bp, synthetic construct
  misc_feature 1..20: note = chemically synthesized
  source 1..20: mol_type = other DNA
aaagaagaggccctcaacca

SEQ ID NO: 26597 - DNA, 20 bp, synthetic construct
  misc_feature 1..20: note = chemically synthesized
  source 1..20: mol_type = other DNA
aagaagaggccctcaaccag

SEQ ID NO: 26598 - DNA, 20 bp, synthetic construct
  misc_feature 1..20: note = chemically synthesized
  source 1..20: mol_type = other DNA
aagaggccctcaaccagggg

SEQ ID NO: 26599 - DNA, 20 bp, synthetic construct
  misc_feature 1..20: note = chemically synthesized
  source 1..20: mol_type = other DNA
gcagctccttttccccacct

SEQ ID NO: 26600 - DNA, 20 bp, synthetic construct
  misc_feature 1..20: note = chemically synthesized
  source 1..20: mol_type = other DNA
tccttttccccaccttggcc

SEQ ID NO: 26601 - DNA, 20 bp, synthetic construct
  misc_feature 1..20: note = chemically synthesized
  source 1..20: mol_type = other DNA
ccttttccccaccttggcct

SEQ ID NO: 26602 - DNA, 20 bp, synthetic construct
  misc_feature 1..20: note = chemically synthesized
  source 1..20: mol_type = other DNA
tttccccaccttggcctggg

SEQ ID NO: 26603 - DNA, 20 bp, synthetic construct
  misc_feature 1..20: note = chemically synthesized
  source 1..20: mol_type = other DNA
ttccccaccttggcctggga

SEQ ID NO: 26604 - DNA, 20 bp, synthetic construct
  misc_feature 1..20: note = chemically synthesized
  source 1..20: mol_type = other DNA
cccaccttggcctgggaagg

SEQ ID NO: 26605 - DNA, 20 bp, synthetic construct
  misc_feature 1..20: note = chemically synthesized
  source 1..20: mol_type = other DNA
caccttggcctgggaaggca

SEQ ID NO: 26606 - DNA, 20 bp, synthetic construct
  misc_feature 1..20: note = chemically synthesized
  source 1..20: mol_type = other DNA
ggaaggcagagctgctcctc

SEQ ID NO: 26607 - DNA, 20 bp, synthetic construct
  misc_feature 1..20: note = chemically synthesized
  source 1..20: mol_type = other DNA
tgctcctcgagtttgacgct

SEQ ID NO: 26608 - DNA, 20 bp, synthetic construct
  misc_feature 1..20: note = chemically synthesized
  source 1..20: mol_type = other DNA
tcctcgagtttgacgctcag

SEQ ID NO: 26609 - DNA, 20 bp, synthetic construct
  misc_feature 1..20: note = chemically synthesized
  source 1..20: mol_type = other DNA
tgtgatactttactttgcct

SEQ ID NO: 26610 - DNA, 20 bp, synthetic construct
  misc_feature 1..20: note = chemically synthesized
  source 1..20: mol_type = other DNA
aagccgtgatgaaataattg

SEQ ID NO: 26611 - DNA, 20 bp, synthetic construct
  misc_feature 1..20: note = chemically synthesized
  source 1..20: mol_type = other DNA
agccgtgatgaaataattga

SEQ ID NO: 26612 - DNA, 20 bp, synthetic construct
  misc_feature 1..20: note = chemically synthesized
  source 1..20: mol_type = other DNA
tgaaataattgaaggcatca

SEQ ID NO: 26613 - DNA, 20 bp, synthetic construct
  misc_feature 1..20: note = chemically synthesized
  source 1..20: mol_type = other DNA
ataattgaaggcatcatagc

SEQ ID NO: 26614 - DNA, 20 bp, synthetic construct
  misc_feature 1..20: note = chemically synthesized
  source 1..20: mol_type = other DNA
attgaaggcatcatagcaag

SEQ ID NO: 26615 - DNA, 20 bp, synthetic construct
  misc_feature 1..20: note = chemically synthesized
  source 1..20: mol_type = other DNA
aggcatcatagcaagaagtt

SEQ ID NO: 26616 - DNA, 20 bp, synthetic construct
  misc_feature 1..20: note = chemically synthesized
  source 1..20: mol_type = other DNA
catagcaagaagttaagccc

SEQ ID NO: 26617 - DNA, 20 bp, synthetic construct
  misc_feature 1..20: note = chemically synthesized
  source 1..20: mol_type = other DNA
atagcaagaagttaagccct

SEQ ID NO: 26618 - DNA, 20 bp, synthetic construct
  misc_feature 1..20: note = chemically synthesized
  source 1..20: mol_type = other DNA
tagcaagaagttaagcccta

SEQ ID NO: 26619 - DNA, 20 bp, synthetic construct
  misc_feature 1..20: note = chemically synthesized
  source 1..20: mol_type = other DNA
gcaagaagttaagccctagg

SEQ ID NO: 26620 - DNA, 20 bp, synthetic construct
  misc_feature 1..20: note = chemically synthesized
  source 1..20: mol_type = other DNA
caagaagttaagccctaggg

SEQ ID NO: 26621 - DNA, 20 bp, synthetic construct
  misc_feature 1..20: note = chemically synthesized
  source 1..20: mol_type = other DNA
tagggaggctattaacaatt

SEQ ID NO: 26622 - DNA, 20 bp, synthetic construct
  misc_feature 1..20: note = chemically synthesized
  source 1..20: mol_type = other DNA
tattaacaatttagcatttc

SEQ ID NO: 26623 - DNA, 20 bp, synthetic construct
  misc_feature 1..20: note = chemically synthesized
  source 1..20: mol_type = other DNA
tttagcatttccagttcatg

SEQ ID NO: 26624 - DNA, 20 bp, synthetic construct
  misc_feature 1..20: note = chemically synthesized
  source 1..20: mol_type = other DNA
ttagcatttccagttcatgt

SEQ ID NO: 26625 - DNA, 20 bp, synthetic construct
  misc_feature 1..20: note = chemically synthesized
  source 1..20: mol_type = other DNA
aatgtcgattttacttacca

SEQ ID NO: 26626 - DNA, 20 bp, synthetic construct
  misc_feature 1..20: note = chemically synthesized
  source 1..20: mol_type = other DNA
tgtcgattttacttaccaaa

SEQ ID NO: 26627 - DNA, 20 bp, synthetic construct
  misc_feature 1..20: note = chemically synthesized
  source 1..20: mol_type = other DNA
acttaccaaagagaatatta

SEQ ID NO: 26628 - DNA, 20 bp, synthetic construct
  misc_feature 1..20: note = chemically synthesized
  source 1..20: mol_type = other DNA
gagaatattatggatgtgtt

SEQ ID NO: 26629 - DNA, 20 bp, synthetic construct
  misc_feature 1..20: note = chemically synthesized
  source 1..20: mol_type = other DNA
aatattatggatgtgtttag

SEQ ID NO: 26630 - DNA, 20 bp, synthetic construct
  misc_feature 1..20: note = chemically synthesized
  source 1..20: mol_type = other DNA
attatggatgtgtttagtgg

SEQ ID NO: 26631 - DNA, 20 bp, synthetic construct
  misc_feature 1..20: note = chemically synthesized
  source 1..20: mol_type = other DNA
atggatgtgtttagtggaag

SEQ ID NO: 26632 - DNA, 20 bp, synthetic construct
  misc_feature 1..20: note = chemically synthesized
  source 1..20: mol_type = other DNA
gatgtgtttagtggaagaag

SEQ ID NO: 26633 - DNA, 20 bp, synthetic construct
  misc_feature 1..20: note = chemically synthesized
  source 1..20: mol_type = other DNA
gtgtttagtggaagaagcag

SEQ ID NO: 26634 - DNA, 20 bp, synthetic construct
  misc_feature 1..20: note = chemically synthesized
  source 1..20: mol_type = other DNA
agtggaagaagcagcagaat

SEQ ID NO: 26635 - DNA, 20 bp, synthetic construct
  misc_feature 1..20: note = chemically synthesized
  source 1..20: mol_type = other DNA
gaagaagcagcagaatcagc

SEQ ID NO: 26636 - DNA, 20 bp, synthetic construct
  misc_feature 1..20: note = chemically synthesized
  source 1..20: mol_type = other DNA
aagaagcagcagaatcagct

SEQ ID NO: 26637 - DNA, 20 bp, synthetic construct
  misc_feature 1..20: note = chemically synthesized
  source 1..20: mol_type = other DNA
agaagcagcagaatcagctg

SEQ ID NO: 26638 - DNA, 20 bp, synthetic construct
  misc_feature 1..20: note = chemically synthesized
  source 1..20: mol_type = other DNA
gcagaatcagctggggtccc

SEQ ID NO: 26639 - DNA, 20 bp, synthetic construct
  misc_feature 1..20: note = chemically synthesized
  source 1..20: mol_type = other DNA
aatcagctggggtccccagt

SEQ ID NO: 26640 - DNA, 20 bp, synthetic construct
  misc_feature 1..20: note = chemically synthesized
  source 1..20: mol_type = other DNA
ttgctttgaccctcttcctg

SEQ ID NO: 26641 - DNA, 20 bp, synthetic construct
  misc_feature 1..20: note = chemically synthesized
  source 1..20: mol_type = other DNA
tgctttgaccctcttcctga

SEQ ID NO: 26642 - DNA, 20 bp, synthetic construct
  misc_feature 1..20: note = chemically synthesized
  source 1..20: mol_type = other DNA
tttgaccctcttcctgaagg

SEQ ID NO: 26643 - DNA, 20 bp, synthetic construct
  misc_feature 1..20: note = chemically synthesized
  source 1..20: mol_type = other DNA
tcctgaaggaagataaatgc

SEQ ID NO: 26644 - DNA, 20 bp, synthetic construct
  misc_feature 1..20: note = chemically synthesized
  source 1..20: mol_type = other DNA
cctgaaggaagataaatgca

SEQ ID NO: 26645 - DNA, 20 bp, synthetic construct
  misc_feature 1..20: note = chemically synthesized
  source 1..20: mol_type = other DNA
ctgaaggaagataaatgcaa

SEQ ID NO: 26646 - DNA, 20 bp, synthetic construct
  misc_feature 1..20: note = chemically synthesized
  source 1..20: mol_type = other DNA
aggaagataaatgcaagggt

SEQ ID NO: 26647 - DNA, 20 bp, synthetic construct
  misc_feature 1..20: note = chemically synthesized
  source 1..20: mol_type = other DNA
atgcaagggtgagtctcaca

SEQ ID NO: 26648 - DNA, 20 bp, synthetic construct
  misc_feature 1..20: note = chemically synthesized
  source 1..20: mol_type = other DNA
aagggtgagtctcacaaaga

SEQ ID NO: 26649 - DNA, 20 bp, synthetic construct
  misc_feature 1..20: note = chemically synthesized
  source 1..20: mol_type = other DNA
gacagtgtgctttttttcta

SEQ ID NO: 26650 - DNA, 20 bp, synthetic construct
  misc_feature 1..20: note = chemically synthesized
  source 1..20: mol_type = other DNA
tgctttttttctaaagtaaa

SEQ ID NO: 26651 - DNA, 20 bp, synthetic construct
  misc_feature 1..20: note = chemically synthesized
  source 1..20: mol_type = other DNA
ttctaaagtaaatagcttct

SEQ ID NO: 26652 - DNA, 20 bp, synthetic construct
  misc_feature 1..20: note = chemically synthesized
  source 1..20: mol_type = other DNA
tctaaagtaaatagcttctt

SEQ ID NO: 26653 - DNA, 20 bp, synthetic construct
  misc_feature 1..20: note = chemically synthesized
  source 1..20: mol_type = other DNA
taaatagcttcttaggctga

SEQ ID NO: 26654 - DNA, 20 bp, synthetic construct
  misc_feature 1..20: note = chemically synthesized
  source 1..20: mol_type = other DNA
taggctgatagaaatgtttt

SEQ ID NO: 26655 - DNA, 20 bp, synthetic construct
  misc_feature 1..20: note = chemically synthesized
  source 1..20: mol_type = other DNA
tttttagctgtctaattctg

SEQ ID NO: 26656 - DNA, 20 bp, synthetic construct
  misc_feature 1..20: note = chemically synthesized
  source 1..20: mol_type = other DNA
ttttagctgtctaattctgc

SEQ ID NO: 26657 - DNA, 20 bp, synthetic construct
  misc_feature 1..20: note = chemically synthesized
  source 1..20: mol_type = other DNA
tttagctgtctaattctgca

SEQ ID NO: 26658 - DNA, 20 bp, synthetic construct
  misc_feature 1..20: note = chemically synthesized
  source 1..20: mol_type = other DNA
ttagctgtctaattctgcag

SEQ ID NO: 26659 - DNA, 20 bp, synthetic construct
  misc_feature 1..20: note = chemically synthesized
  source 1..20: mol_type = other DNA
gctgtctaattctgcagggg

SEQ ID NO: 26660 - DNA, 20 bp, synthetic construct
  misc_feature 1..20: note = chemically synthesized
  source 1..20: mol_type = other DNA
gtctaattctgcaggggaag

SEQ ID NO: 26661 - DNA, 20 bp, synthetic construct
  misc_feature 1..20: note = chemically synthesized
  source 1..20: mol_type = other DNA
ctaattctgcaggggaagca

SEQ ID NO: 26662 - DNA, 20 bp, synthetic construct
  misc_feature 1..20: note = chemically synthesized
  source 1..20: mol_type = other DNA
taattctgcaggggaagcag

SEQ ID NO: 26663 - DNA, 20 bp, synthetic construct
  misc_feature 1..20: note = chemically synthesized
  source 1..20: mol_type = other DNA
ttctgcaggggaagcagagg

SEQ ID NO: 26664 - DNA, 20 bp, synthetic construct
  misc_feature 1..20: note = chemically synthesized
  source 1..20: mol_type = other DNA
ctgcaggggaagcagaggta

SEQ ID NO: 26665 - DNA, 20 bp, synthetic construct
  misc_feature 1..20: note = chemically synthesized
  source 1..20: mol_type = other DNA
tgcaggggaagcagaggtag

SEQ ID NO: 26666 - DNA, 20 bp, synthetic construct
  misc_feature 1..20: note = chemically synthesized
  source 1..20: mol_type = other DNA
gcaggggaagcagaggtaga

SEQ ID NO: 26667 - DNA, 20 bp, synthetic construct
  misc_feature 1..20: note = chemically synthesized
  source 1..20: mol_type = other DNA
gcagaggtagagggtgaaca

SEQ ID NO: 26668 - DNA, 20 bp, synthetic construct
  misc_feature 1..20: note = chemically synthesized
  source 1..20: mol_type = other DNA
ggtagagggtgaacacagca

SEQ ID NO: 26669 - DNA, 20 bp, synthetic construct
  misc_feature 1..20: note = chemically synthesized
  source 1..20: mol_type = other DNA
gtagagggtgaacacagcaa

SEQ ID NO: 26670 - DNA, 20 bp, synthetic construct
  misc_feature 1..20: note = chemically synthesized
  source 1..20: mol_type = other DNA
agggtgaacacagcaaaggt

SEQ ID NO: 26671 - DNA, 20 bp, synthetic construct
  misc_feature 1..20: note = chemically synthesized
  source 1..20: mol_type = other DNA
gggtgaacacagcaaaggtg

SEQ ID NO: 26672 - DNA, 20 bp, synthetic construct
  misc_feature 1..20: note = chemically synthesized
  source 1..20: mol_type = other DNA
gaacacagcaaaggtgaggc

SEQ ID NO: 26673 - DNA, 20 bp, synthetic construct
  misc_feature 1..20: note = chemically synthesized
  source 1..20: mol_type = other DNA
aacacagcaaaggtgaggcc

SEQ ID NO: 26674 - DNA, 20 bp, synthetic construct
  misc_feature 1..20: note = chemically synthesized
  source 1..20: mol_type = other DNA
cacagcaaaggtgaggccag

SEQ ID NO: 26675 - DNA, 20 bp, synthetic construct
  misc_feature 1..20: note = chemically synthesized
  source 1..20: mol_type = other DNA
acagcaaaggtgaggccagg

SEQ ID NO: 26676 - DNA, 20 bp, synthetic construct
  misc_feature 1..20: note = chemically synthesized
  source 1..20: mol_type = other DNA
aaaggtgaggccaggaggcc

SEQ ID NO: 26677 - DNA, 20 bp, synthetic construct
  misc_feature 1..20: note = chemically synthesized
  source 1..20: mol_type = other DNA
aaggtgaggccaggaggccc

SEQ ID NO: 26678 - DNA, 20 bp, synthetic construct
  misc_feature 1..20: note = chemically synthesized
  source 1..20: mol_type = other DNA
gtgaggccaggaggcccagg

SEQ ID NO: 26679 - DNA, 20 bp, synthetic construct
  misc_feature 1..20: note = chemically synthesized
  source 1..20: mol_type = other DNA
aggccaggaggcccaggcag

SEQ ID NO: 26680 - DNA, 20 bp, synthetic construct
  misc_feature 1..20: note = chemically synthesized
  source 1..20: mol_type = other DNA
gccaggaggcccaggcagca

SEQ ID NO: 26681 - DNA, 20 bp, synthetic construct
  misc_feature 1..20: note = chemically synthesized
  source 1..20: mol_type = other DNA
aggaggcccaggcagcagag

SEQ ID NO: 26682 - DNA, 20 bp, synthetic construct
  misc_feature 1..20: note = chemically synthesized
  source 1..20: mol_type = other DNA
ggaggcccaggcagcagagc

SEQ ID NO: 26683 - DNA, 20 bp, synthetic construct
  misc_feature 1..20: note = chemically synthesized
  source 1..20: mol_type = other DNA
aggccttgttttccaattgt

SEQ ID NO: 26684 - DNA, 20 bp, synthetic construct
  misc_feature 1..20: note = chemically synthesized
  source 1..20: mol_type = other DNA
tgttttccaattgtgagacc

SEQ ID NO: 26685 - DNA, 20 bp, synthetic construct
  misc_feature 1..20: note = chemically synthesized
  source 1..20: mol_type = other DNA
ttccaattgtgagaccaagt

SEQ ID NO: 26686 - DNA, 20 bp, synthetic construct
  misc_feature 1..20: note = chemically synthesized
  source 1..20: mol_type = other DNA
gtgagaccaagtcagttcat

SEQ ID NO: 26687 - DNA, 20 bp, synthetic construct
  misc_feature 1..20: note = chemically synthesized
  source 1..20: mol_type = other DNA
agttcattggcacctttcga

SEQ ID NO: 26688 - DNA, 20 bp, synthetic construct
  misc_feature 1..20: note = chemically synthesized
  source 1..20: mol_type = other DNA
cacctttcgaaagccccatg

SEQ ID NO: 26689 - DNA, 20 bp, synthetic construct
  misc_feature 1..20: note = chemically synthesized
  source 1..20: mol_type = other DNA
aaagccccatgtagcgctgc

SEQ ID NO: 26690 - DNA, 20 bp, synthetic construct
  misc_feature 1..20: note = chemically synthesized
  source 1..20: mol_type = other DNA
aagccccatgtagcgctgct

SEQ ID NO: 26691 - DNA, 20 bp, synthetic construct
  misc_feature 1..20: note = chemically synthesized
  source 1..20: mol_type = other DNA
cccatgtagcgctgctgggc

SEQ ID NO: 26692 - DNA, 20 bp, synthetic construct
  misc_feature 1..20: note = chemically synthesized
  source 1..20: mol_type = other DNA
gctgggctggaccctccccc

SEQ ID NO: 26693 - DNA, 20 bp, synthetic construct
  misc_feature 1..20: note = chemically synthesized
  source 1..20: mol_type = other DNA
ggctggaccctcccccaaga

SEQ ID NO: 26694 - DNA, 20 bp, synthetic construct
  misc_feature 1..20: note = chemically synthesized
  source 1..20: mol_type = other DNA
gaccctcccccaagacggtt

SEQ ID NO: 26695 - DNA, 20 bp, synthetic construct
  misc_feature 1..20: note = chemically synthesized
  source 1..20: mol_type = other DNA
gacggttaagtactgcttaa

SEQ ID NO: 26696 - DNA, 20 bp, synthetic construct
  misc_feature 1..20: note = chemically synthesized
  source 1..20: mol_type = other DNA
ttaagtactgcttaatggat

SEQ ID NO: 26697 - DNA, 20 bp, synthetic construct
  misc_feature 1..20: note = chemically synthesized
  source 1..20: mol_type = other DNA
agtactgcttaatggatcag

SEQ ID NO: 26698 - DNA, 20 bp, synthetic construct
  misc_feature 1..20: note = chemically synthesized
  source 1..20: mol_type = other DNA
gcttaatggatcagtagaaa

SEQ ID NO: 26699 - DNA, 20 bp, synthetic construct
  misc_feature 1..20: note = chemically synthesized
  source 1..20: mol_type = other DNA
cttaatggatcagtagaaac

SEQ ID NO: 26700 - DNA, 20 bp, synthetic construct
  misc_feature 1..20: note = chemically synthesized
  source 1..20: mol_type = other DNA
tagaaacaggaccttcttgt

SEQ ID NO: 26701 - DNA, 20 bp, synthetic construct
  misc_feature 1..20: note = chemically synthesized
  source 1..20: mol_type = other DNA
agaaacaggaccttcttgtt

SEQ ID NO: 26702 - DNA, 20 bp, synthetic construct
  misc_feature 1..20: note = chemically synthesized
  source 1..20: mol_type = other DNA
aacaggaccttcttgttggg

SEQ ID NO: 26703 - DNA, 20 bp, synthetic construct
  misc_feature 1..20: note = chemically synthesized
  source 1..20: mol_type = other DNA
gaccttcttgttgggcagtg

SEQ ID NO: 26704 - DNA, 20 bp, synthetic construct
  misc_feature 1..20: note = chemically synthesized
  source 1..20: mol_type = other DNA
ttgttgggcagtgaagacca

SEQ ID NO: 26705 - DNA, 20 bp, synthetic construct
  misc_feature 1..20: note = chemically synthesized
  source 1..20: mol_type = other DNA
ttgggcagtgaagaccacgg

SEQ ID NO: 26706 - DNA, 20 bp, synthetic construct
  misc_feature 1..20: note = chemically synthesized
  source 1..20: mol_type = other DNA
tgggcagtgaagaccacggc

SEQ ID NO: 26707 - DNA, 20 bp, synthetic construct
  misc_feature 1..20: note = chemically synthesized
  source 1..20: mol_type = other DNA
ggcagtgaagaccacggcag

SEQ ID NO: 26708 - DNA, 20 bp, synthetic construct
  misc_feature 1..20: note = chemically synthesized
  source 1..20: mol_type = other DNA
agtgaagaccacggcaggag

SEQ ID NO: 26709 - DNA, 20 bp, synthetic construct
  misc_feature 1..20: note = chemically synthesized
  source 1..20: mol_type = other DNA
gaagaccacggcaggagcag

SEQ ID NO: 26710 - DNA, 20 bp, synthetic construct
  misc_feature 1..20: note = chemically synthesized
  source 1..20: mol_type = other DNA
aagaccacggcaggagcagc

SEQ ID NO: 26711 - DNA, 20 bp, synthetic construct
  misc_feature 1..20: note = chemically synthesized
  source 1..20: mol_type = other DNA
agaccacggcaggagcagca

SEQ ID NO: 26712 - DNA, 20 bp, synthetic construct
  misc_feature 1..20: note = chemically synthesized
  source 1..20: mol_type = other DNA
gaccacggcaggagcagcag

SEQ ID NO: 26713 - DNA, 20 bp, synthetic construct
  misc_feature 1..20: note = chemically synthesized
  source 1..20: mol_type = other DNA
accacggcaggagcagcagg

SEQ ID NO: 26714 - DNA, 20 bp, synthetic construct
  misc_feature 1..20: note = chemically synthesized
  source 1..20: mol_type = other DNA
ccacggcaggagcagcaggg

SEQ ID NO: 26715 - DNA, 20 bp, synthetic construct
  misc_feature 1..20: note = chemically synthesized
  source 1..20: mol_type = other DNA
cggcaggagcagcagggggg

SEQ ID NO: 26716 - DNA, 20 bp, synthetic construct
  misc_feature 1..20: note = chemically synthesized
  source 1..20: mol_type = other DNA
gcaggagcagcaggggggaa

SEQ ID NO: 26717 - DNA, 20 bp, synthetic construct
  misc_feature 1..20: note = chemically synthesized
  source 1..20: mol_type = other DNA
ggggggaagagacaaattcc

SEQ ID NO: 26718 - DNA, 20 bp, synthetic construct
  misc_feature 1..20: note = chemically synthesized
  source 1..20: mol_type = other DNA
gggggaagagacaaattccc

SEQ ID NO: 26719 - DNA, 20 bp, synthetic construct
  misc_feature 1..20: note = chemically synthesized
  source 1..20: mol_type = other DNA
gaagagacaaattcccagga

SEQ ID NO: 26720 - DNA, 20 bp, synthetic construct
  misc_feature 1..20: note = chemically synthesized
  source 1..20: mol_type = other DNA
aaattcccaggaaagaccac

SEQ ID NO: 26721 - DNA, 20 bp, synthetic construct
  misc_feature 1..20: note = chemically synthesized
  source 1..20: mol_type = other DNA
cccaggaaagaccactggat

SEQ ID NO: 26722 - DNA, 20 bp, synthetic construct
  misc_feature 1..20: note = chemically synthesized
  source 1..20: mol_type = other DNA
ccaggaaagaccactggatc

SEQ ID NO: 26723 - DNA, 20 bp, synthetic construct
  misc_feature 1..20: note = chemically synthesized
  source 1..20: mol_type = other DNA
aggaaagaccactggatcag

SEQ ID NO: 26724 - DNA, 20 bp, synthetic construct
  misc_feature 1..20: note = chemically synthesized
  source 1..20: mol_type = other DNA
aagaccactggatcaggagt

SEQ ID NO: 26725 - DNA, 20 bp, synthetic construct
  misc_feature 1..20: note = chemically synthesized
  source 1..20: mol_type = other DNA
agaccactggatcaggagtc

SEQ ID NO: 26726 - DNA, 20 bp, synthetic construct
  misc_feature 1..20: note = chemically synthesized
  source 1..20: mol_type = other DNA
accactggatcaggagtcag

SEQ ID NO: 26727 - DNA, 20 bp, synthetic construct
  misc_feature 1..20: note = chemically synthesized
  source 1..20: mol_type = other DNA
taattctaatcttcacattg

SEQ ID NO: 26728 - DNA, 20 bp, synthetic construct
  misc_feature 1..20: note = chemically synthesized
  source 1..20: mol_type = other DNA
ttcacattgtggttaatcat

SEQ ID NO: 26729 - DNA, 20 bp, synthetic construct
  misc_feature 1..20: note = chemically synthesized
  source 1..20: mol_type = other DNA
attgtggttaatcatcagtg

SEQ ID NO: 26730 - DNA, 20 bp, synthetic construct
  misc_feature 1..20: note = chemically synthesized
  source 1..20: mol_type = other DNA
gttaatcatcagtgtagcca

SEQ ID NO: 26731 - DNA, 20 bp, synthetic construct
  misc_feature 1..20: note = chemically synthesized
  source 1..20: mol_type = other DNA
ttaatcatcagtgtagccat

SEQ ID NO: 26732 - DNA, 20 bp, synthetic construct
  misc_feature 1..20: note = chemically synthesized
  source 1..20: mol_type = other DNA
tcatcagtgtagccatgggc

SEQ ID NO: 26733 - DNA, 20 bp, synthetic construct
  misc_feature 1..20: note = chemically synthesized
  source 1..20: mol_type = other DNA
gcaagtcacttaatttctca

SEQ ID NO: 26734 - DNA, 20 bp, synthetic construct
  misc_feature 1..20: note = chemically synthesized
  source 1..20: mol_type = other DNA
cacttaatttctcatggcct

SEQ ID NO: 26735 - DNA, 20 bp, synthetic construct
  misc_feature 1..20: note = chemically synthesized
  source 1..20: mol_type = other DNA
gtttccccatctgtaaaatg

SEQ ID NO: 26736 - DNA, 20 bp, synthetic construct
  misc_feature 1..20: note = chemically synthesized
  source 1..20: mol_type = other DNA
tttccccatctgtaaaatga

SEQ ID NO: 26737 - DNA, 20 bp, synthetic construct
  misc_feature 1..20: note = chemically synthesized
  source 1..20: mol_type = other DNA
ttccccatctgtaaaatgaa

SEQ ID NO: 26738 - DNA, 20 bp, synthetic construct
  misc_feature 1..20: note = chemically synthesized
  source 1..20: mol_type = other DNA
ccatctgtaaaatgaaggga

SEQ ID NO: 26739 - DNA, 20 bp, synthetic construct
  misc_feature 1..20: note = chemically synthesized
  source 1..20: mol_type = other DNA
tgaagggacagacttgatga

SEQ ID NO: 26740 - DNA, 20 bp, synthetic construct
  misc_feature 1..20: note = chemically synthesized
  source 1..20: mol_type = other DNA
gggacagacttgatgatagc

SEQ ID NO: 26741 - DNA, 20 bp, synthetic construct
  misc_feature 1..20: note = chemically synthesized
  source 1..20: mol_type = other DNA
ggacagacttgatgatagct

SEQ ID NO: 26742 - DNA, 20 bp, synthetic construct
  misc_feature 1..20: note = chemically synthesized
  source 1..20: mol_type = other DNA
gacagacttgatgatagcta

SEQ ID NO: 26743 - DNA, 20 bp, synthetic construct
  misc_feature 1..20: note = chemically synthesized
  source 1..20: mol_type = other DNA
agctagggttttttacaact

SEQ ID NO: 26744 - DNA, 20 bp, synthetic construct
  misc_feature 1..20: note = chemically synthesized
  source 1..20: mol_type = other DNA
acaaaaacaaactatgctgc

SEQ ID NO: 26745 - DNA, 20 bp, synthetic construct
  misc_feature 1..20: note = chemically synthesized
  source 1..20: mol_type = other DNA
aaacaaactatgctgccaga

SEQ ID NO: 26746 - DNA, 20 bp, synthetic construct
  misc_feature 1..20: note = chemically synthesized
  source 1..20: mol_type = other DNA
aaactatgctgccagatagt

SEQ ID NO: 26747 - DNA, 20 bp, synthetic construct
  misc_feature 1..20: note = chemically synthesized
  source 1..20: mol_type = other DNA
atgctgccagatagtcagat

SEQ ID NO: 26748 - DNA, 20 bp, synthetic construct
  misc_feature 1..20: note = chemically synthesized
  source 1..20: mol_type = other DNA
tgagacctcactttgccaca

SEQ ID NO: 26749 - DNA, 20 bp, synthetic construct
  misc_feature 1..20: note = chemically synthesized
  source 1..20: mol_type = other DNA
acctcactttgccacacggc

SEQ ID NO: 26750 - DNA, 20 bp, synthetic construct
  misc_feature 1..20: note = chemically synthesized
  source 1..20: mol_type = other DNA
tgccacacggccagacactg

SEQ ID NO: 26751 - DNA, 20 bp, synthetic construct
  misc_feature 1..20: note = chemically synthesized
  source 1..20: mol_type = other DNA
ccacacggccagacactgta

SEQ ID NO: 26752 - DNA, 20 bp, synthetic construct
  misc_feature 1..20: note = chemically synthesized
  source 1..20: mol_type = other DNA
ggccagacactgtagagatc

SEQ ID NO: 26753 - DNA, 20 bp, synthetic construct
  misc_feature 1..20: note = chemically synthesized
  source 1..20: mol_type = other DNA
tagagatctggtcctgccgt

SEQ ID NO: 26754 - DNA, 20 bp, synthetic construct
  misc_feature 1..20: note = chemically synthesized
  source 1..20: mol_type = other DNA
ggtcctgccgtcagcttgtt

SEQ ID NO: 26755 - DNA, 20 bp, synthetic construct
  misc_feature 1..20: note = chemically synthesized
  source 1..20: mol_type = other DNA
gtcctgccgtcagcttgttt

SEQ ID NO: 26756 - DNA, 20 bp, synthetic construct
  misc_feature 1..20: note = chemically synthesized
  source 1..20: mol_type = other DNA
tcctgccgtcagcttgttta

SEQ ID NO: 26757 - DNA, 20 bp, synthetic construct
  misc_feature 1..20: note = chemically synthesized
  source 1..20: mol_type = other DNA
gtcagcttgtttagggctaa

SEQ ID NO: 26758 - DNA, 20 bp, synthetic construct
  misc_feature 1..20: note = chemically synthesized
  source 1..20: mol_type = other DNA
tcagcttgtttagggctaat

SEQ ID NO: 26759 - DNA, 20 bp, synthetic construct
  misc_feature 1..20: note = chemically synthesized
  source 1..20: mol_type = other DNA
gtttagggctaatgggtttg

SEQ ID NO: 26760 - DNA, 20 bp, synthetic construct
  misc_feature 1..20: note = chemically synthesized
  source 1..20: mol_type = other DNA
gggctaatgggtttgtagac

SEQ ID NO: 26761 - DNA, 20 bp, synthetic construct
  misc_feature 1..20: note = chemically synthesized
  source 1..20: mol_type = other DNA
ttgtagacaagtttgccaac

SEQ ID NO: 26762 - DNA, 20 bp, synthetic construct
  misc_feature 1..20: note = chemically synthesized
  source 1..20: mol_type = other DNA
gtagacaagtttgccaacaa

SEQ ID NO: 26763 - DNA, 20 bp, synthetic construct
  misc_feature 1..20: note = chemically synthesized
  source 1..20: mol_type = other DNA
tgccaacaagagattcatgc

SEQ ID NO: 26764 - DNA, 20 bp, synthetic construct
  misc_feature 1..20: note = chemically synthesized
  source 1..20: mol_type = other DNA
gccaacaagagattcatgcg

SEQ ID NO: 26765 - DNA, 20 bp, synthetic construct
  misc_feature 1..20: note = chemically synthesized
  source 1..20: mol_type = other DNA
ccaacaagagattcatgcga

SEQ ID NO: 26766 - DNA, 20 bp, synthetic construct
  misc_feature 1..20: note = chemically synthesized
  source 1..20: mol_type = other DNA
caacaagagattcatgcgag

SEQ ID NO: 26767 - DNA, 20 bp, synthetic construct
  misc_feature 1..20: note = chemically synthesized
  source 1..20: mol_type = other DNA
aagagattcatgcgaggggc

SEQ ID NO: 26768 - DNA, 20 bp, synthetic construct
  misc_feature 1..20: note = chemically synthesized
  source 1..20: mol_type = other DNA
agagattcatgcgaggggct

SEQ ID NO: 26769 - DNA, 20 bp, synthetic construct
  misc_feature 1..20: note = chemically synthesized
  source 1..20: mol_type = other DNA
ttcatgcgaggggctaggca

SEQ ID NO: 26770 - DNA, 20 bp, synthetic construct
  misc_feature 1..20: note = chemically synthesized
  source 1..20: mol_type = other DNA
gcgaggggctaggcatggat

SEQ ID NO: 26771 - DNA, 20 bp, synthetic construct
  misc_feature 1..20: note = chemically synthesized
  source 1..20: mol_type = other DNA
cgaggggctaggcatggatt

SEQ ID NO: 26772 - DNA, 20 bp, synthetic construct
  misc_feature 1..20: note = chemically synthesized
  source 1..20: mol_type = other DNA
gggctaggcatggattaggt

SEQ ID NO: 26773 - DNA, 20 bp, synthetic construct
  misc_feature 1..20: note = chemically synthesized
  source 1..20: mol_type = other DNA
ctaggcatggattaggttag

SEQ ID NO: 26774 - DNA, 20 bp, synthetic construct
  misc_feature 1..20: note = chemically synthesized
  source 1..20: mol_type = other DNA
gcagttctcccatttcttgc

SEQ ID NO: 26775 - DNA, 20 bp, synthetic construct
  misc_feature 1..20: note = chemically synthesized
  source 1..20: mol_type = other DNA
agttctcccatttcttgctg

SEQ ID NO: 26776 - DNA, 20 bp, synthetic construct
  misc_feature 1..20: note = chemically synthesized
  source 1..20: mol_type = other DNA
gttctcccatttcttgctgg

SEQ ID NO: 26777 - DNA, 20 bp, synthetic construct
  misc_feature 1..20: note = chemically synthesized
  source 1..20: mol_type = other DNA
ttcttgctggaggcctgctg

SEQ ID NO: 26778 - DNA, 20 bp, synthetic construct
  misc_feature 1..20: note = chemically synthesized
  source 1..20: mol_type = other DNA
ggaggcctgctgaagcactt

SEQ ID NO: 26779 - DNA, 20 bp, synthetic construct
  misc_feature 1..20: note = chemically synthesized
  source 1..20: mol_type = other DNA
gaggcctgctgaagcacttc

SEQ ID NO: 26780 - DNA, 20 bp, synthetic construct
  misc_feature 1..20: note = chemically synthesized
  source 1..20: mol_type = other DNA
aggcctgctgaagcacttca

SEQ ID NO: 26781 - DNA, 20 bp, synthetic construct
  misc_feature 1..20: note = chemically synthesized
  source 1..20: mol_type = other DNA
agcacttcagggtctcttcc

SEQ ID NO: 26782 - DNA, 20 bp, synthetic construct
  misc_feature 1..20: note = chemically synthesized
  source 1..20: mol_type = other DNA
cacttcagggtctcttccca

SEQ ID NO: 26783 - DNA, 20 bp, synthetic construct
  misc_feature 1..20: note = chemically synthesized
  source 1..20: mol_type = other DNA
tcagggtctcttcccagagt

SEQ ID NO: 26784 - DNA, 20 bp, synthetic construct
  misc_feature 1..20: note = chemically synthesized
  source 1..20: mol_type = other DNA
gggtctcttcccagagtaag

SEQ ID NO: 26785 - DNA, 20 bp, synthetic construct
  misc_feature 1..20: note = chemically synthesized
  source 1..20: mol_type = other DNA
tctcttcccagagtaagtgg

SEQ ID NO: 26786 - DNA, 20 bp, synthetic construct
  misc_feature 1..20: note = chemically synthesized
  source 1..20: mol_type = other DNA
tcttcccagagtaagtggca

SEQ ID NO: 26787 - DNA, 20 bp, synthetic construct
  misc_feature 1..20: note = chemically synthesized
  source 1..20: mol_type = other DNA
aaatttgatactccccatac

SEQ ID NO: 26788 - DNA, 20 bp, synthetic construct
  misc_feature 1..20: note = chemically synthesized
  source 1..20: mol_type = other DNA
aatttgatactccccataca

SEQ ID NO: 26789 - DNA, 20 bp, synthetic construct
  misc_feature 1..20: note = chemically synthesized
  source 1..20: mol_type = other DNA
tactccccatacaaggatcc

SEQ ID NO: 26790 - DNA, 20 bp, synthetic construct
  misc_feature 1..20: note = chemically synthesized
  source 1..20: mol_type = other DNA
agtacctgttgcgtttatgc

SEQ ID NO: 26791 - DNA, 20 bp, synthetic construct
  misc_feature 1..20: note = chemically synthesized
  source 1..20: mol_type = other DNA
gtacctgttgcgtttatgct

SEQ ID NO: 26792 - DNA, 20 bp, synthetic construct
  misc_feature 1..20: note = chemically synthesized
  source 1..20: mol_type = other DNA
ttgcgtttatgctgggatca

SEQ ID NO: 26793 - DNA, 20 bp, synthetic construct
  misc_feature 1..20: note = chemically synthesized
  source 1..20: mol_type = other DNA
gcgtttatgctgggatcaca

SEQ ID NO: 26794 - DNA, 20 bp, synthetic construct
  misc_feature 1..20: note = chemically synthesized
  source 1..20: mol_type = other DNA
gctgggatcacagagatacc

SEQ ID NO: 26795 - DNA, 20 bp, synthetic construct
  misc_feature 1..20: note = chemically synthesized
  source 1..20: mol_type = other DNA
ctgggatcacagagatacct

SEQ ID NO: 26796 - DNA, 20 bp, synthetic construct
  misc_feature 1..20: note = chemically synthesized
  source 1..20: mol_type = other DNA
ctgggttgcctgtgtttcct

SEQ ID NO: 26797 - DNA, 20 bp, synthetic construct
  misc_feature 1..20: note = chemically synthesized
  source 1..20: mol_type = other DNA
ttgcctgtgtttcctaagaa

SEQ ID NO: 26798 - DNA, 20 bp, synthetic construct
  misc_feature 1..20: note = chemically synthesized
  source 1..20: mol_type = other DNA
tgcctgtgtttcctaagaaa

SEQ ID NO: 26799 - DNA, 20 bp, synthetic construct
  misc_feature 1..20: note = chemically synthesized
  source 1..20: mol_type = other DNA
taagaaaaggatgtctgttt

SEQ ID NO: 26800 - DNA, 20 bp, synthetic construct
  misc_feature 1..20: note = chemically synthesized
  source 1..20: mol_type = other DNA
gaaaaggatgtctgttttgg

SEQ ID NO: 26801 - DNA, 20 bp, synthetic construct
  misc_feature 1..20: note = chemically synthesized
  source 1..20: mol_type = other DNA
gtctgttttggcagcaaact

SEQ ID NO: 26802 - DNA, 20 bp, synthetic construct
  misc_feature 1..20: note = chemically synthesized
  source 1..20: mol_type = other DNA
ttggcagcaaacttagtgaa

SEQ ID NO: 26803 - DNA, 20 bp, synthetic construct
  misc_feature 1..20: note = chemically synthesized
  source 1..20: mol_type = other DNA
agcaaacttagtgaacggct

SEQ ID NO: 26804 - DNA, 20 bp, synthetic construct
  misc_feature 1..20: note = chemically synthesized
  source 1..20: mol_type = other DNA
gcaaacttagtgaacggctg

SEQ ID NO: 26805 - DNA, 20 bp, synthetic construct
  misc_feature 1..20: note = chemically synthesized
  source 1..20: mol_type = other DNA
tgaacggctgaggcaaaaac

SEQ ID NO: 26806 - DNA, 20 bp, synthetic construct
  misc_feature 1..20: note = chemically synthesized
  source 1..20: mol_type = other DNA
ctgaggcaaaaacaagtgca

SEQ ID NO: 26807 - DNA, 20 bp, synthetic construct
  misc_feature 1..20: note = chemically synthesized
  source 1..20: mol_type = other DNA
ggcaaaaacaagtgcaaaga

SEQ ID NO: 26808 - DNA, 20 bp, synthetic construct
  misc_feature 1..20: note = chemically synthesized
  source 1..20: mol_type = other DNA
caagtgcaaagatggattct

SEQ ID NO: 26809 - DNA, 20 bp, synthetic construct
  misc_feature 1..20: note = chemically synthesized
  source 1..20: mol_type = other DNA
aaataccatgacaaaatctg

SEQ ID NO: 26810 - DNA, 20 bp, synthetic construct
  misc_feature 1..20: note = chemically synthesized
  source 1..20: mol_type = other DNA
ctcaattcacttgacgtaaa

SEQ ID NO: 26811 - DNA, 20 bp, synthetic construct
  misc_feature 1..20: note = chemically synthesized
  source 1..20: mol_type = other DNA
ttgacgtaaacagtcaaatg

SEQ ID NO: 26812 - DNA, 20 bp, synthetic construct
  misc_feature 1..20: note = chemically synthesized
  source 1..20: mol_type = other DNA
tgtagacatacttgtttgtt

SEQ ID NO: 26813 - DNA, 20 bp, synthetic construct
  misc_feature 1..20: note = chemically synthesized
  source 1..20: mol_type = other DNA
acatacttgtttgttaagtc

SEQ ID NO: 26814 - DNA, 20 bp, synthetic construct
  misc_feature 1..20: note = chemically synthesized
  source 1..20: mol_type = other DNA
tccggtcttcctgcttgtgt

SEQ ID NO: 26815 - DNA, 20 bp, synthetic construct
  misc_feature 1..20: note = chemically synthesized
  source 1..20: mol_type = other DNA
gcttgtgttggttcactttg

SEQ ID NO: 26816 - DNA, 20 bp, synthetic construct
  misc_feature 1..20: note = chemically synthesized
  source 1..20: mol_type = other DNA
ttgtggtgtttattttgttt

SEQ ID NO: 26817 - DNA, 20 bp, synthetic construct
  misc_feature 1..20: note = chemically synthesized
  source 1..20: mol_type = other DNA
tgtggtgtttattttgtttt

SEQ ID NO: 26818 - DNA, 20 bp, synthetic construct
  misc_feature 1..20: note = chemically synthesized
  source 1..20: mol_type = other DNA
gtgtttattttgttttgggt

SEQ ID NO: 26819 - DNA, 20 bp, synthetic construct
  misc_feature 1..20: note = chemically synthesized
  source 1..20: mol_type = other DNA
gtttattttgttttgggtca

SEQ ID NO: 26820 - DNA, 20 bp, synthetic construct
  misc_feature 1..20: note = chemically synthesized
  source 1..20: mol_type = other DNA
ttattttgttttgggtcaga

SEQ ID NO: 26821 - DNA, 20 bp, synthetic construct
  misc_feature 1..20: note = chemically synthesized
  source 1..20: mol_type = other DNA
tattttgttttgggtcagag

SEQ ID NO: 26822 - DNA, 20 bp, synthetic construct
  misc_feature 1..20: note = chemically synthesized
  source 1..20: mol_type = other DNA
gagaggatgaaatgtctctg

SEQ ID NO: 26823 - DNA, 20 bp, synthetic construct
  misc_feature 1..20: note = chemically synthesized
  source 1..20: mol_type = other DNA
aatgtctctgtagatgttct

SEQ ID NO: 26824 - DNA, 20 bp, synthetic construct
  misc_feature 1..20: note = chemically synthesized
  source 1..20: mol_type = other DNA
atgtctctgtagatgttctc

SEQ ID NO: 26825 - DNA, 20 bp, synthetic construct
  misc_feature 1..20: note = chemically synthesized
  source 1..20: mol_type = other DNA
ctctgtagatgttctcaggc

SEQ ID NO: 26826 - DNA, 20 bp, synthetic construct
  misc_feature 1..20: note = chemically synthesized
  source 1..20: mol_type = other DNA
tctgtagatgttctcaggct

SEQ ID NO: 26827 - DNA, 20 bp, synthetic construct
  misc_feature 1..20: note = chemically synthesized
  source 1..20: mol_type = other DNA
gtagatgttctcaggctagg

SEQ ID NO: 26828 - DNA, 20 bp, synthetic construct
  misc_feature 1..20: note = chemically synthesized
  source 1..20: mol_type = other DNA
aggctaggtggtgcttccac

SEQ ID NO: 26829 - DNA, 20 bp, synthetic construct
  misc_feature 1..20: note = chemically synthesized
  source 1..20: mol_type = other DNA
ggctaggtggtgcttccacc

SEQ ID NO: 26830 - DNA, 20 bp, synthetic construct
  misc_feature 1..20: note = chemically synthesized
  source 1..20: mol_type = other DNA
gctaggtggtgcttccacca

SEQ ID NO: 26831 - DNA, 20 bp, synthetic construct
  misc_feature 1..20: note = chemically synthesized
  source 1..20: mol_type = other DNA
tccaccagggcttccctctg

SEQ ID NO: 26832 - DNA, 20 bp, synthetic construct
  misc_feature 1..20: note = chemically synthesized
  source 1..20: mol_type = other DNA
ccaccagggcttccctctgc

SEQ ID NO: 26833 - DNA, 20 bp, synthetic construct
  misc_feature 1..20: note = chemically synthesized
  source 1..20: mol_type = other DNA
agggcttccctctgcaggcc

SEQ ID NO: 26834 - DNA, 20 bp, synthetic construct
  misc_feature 1..20: note = chemically synthesized
  source 1..20: mol_type = other DNA
tccctctgcaggcctggtaa

SEQ ID NO: 26835 - DNA, 20 bp, synthetic construct
  misc_feature 1..20: note = chemically synthesized
  source 1..20: mol_type = other DNA
ctctgcaggcctggtaacag

SEQ ID NO: 26836 - DNA, 20 bp, synthetic construct
  misc_feature 1..20: note = chemically synthesized
  source 1..20: mol_type = other DNA
cagacctatgctgtctgtgt

SEQ ID NO: 26837 - DNA, 20 bp, synthetic construct
  misc_feature 1..20: note = chemically synthesized
  source 1..20: mol_type = other DNA
gacctatgctgtctgtgtaa

SEQ ID NO: 26838 - DNA, 20 bp, synthetic construct
  misc_feature 1..20: note = chemically synthesized
  source 1..20: mol_type = other DNA
tgtctgtgtaagagccttct

SEQ ID NO: 26839 - DNA, 20 bp, synthetic construct
  misc_feature 1..20: note = chemically synthesized
  source 1..20: mol_type = other DNA
ctgtgtaagagccttctcag

SEQ ID NO: 26840 - DNA, 20 bp, synthetic construct
  misc_feature 1..20: note = chemically synthesized
  source 1..20: mol_type = other DNA
agcacaccatcgttacccac

SEQ ID NO: 26841 - DNA, 20 bp, synthetic construct
  misc_feature 1..20: note = chemically synthesized
  source 1..20: mol_type = other DNA
gcacaccatcgttacccacc

SEQ ID NO: 26842 - DNA, 20 bp, synthetic construct
  misc_feature 1..20: note = chemically synthesized
  source 1..20: mol_type = other DNA
acccaccaggctccttgcga

SEQ ID NO: 26843 - DNA, 20 bp, synthetic construct
  misc_feature 1..20: note = chemically synthesized
  source 1..20: mol_type = other DNA
cccaccaggctccttgcgaa

SEQ ID NO: 26844 - DNA, 20 bp, synthetic construct
  misc_feature 1..20: note = chemically synthesized
  source 1..20: mol_type = other DNA
aaatcttgtcccaactgcct

SEQ ID NO: 26845 - DNA, 20 bp, synthetic construct
  misc_feature 1..20: note = chemically synthesized
  source 1..20: mol_type = other DNA
ccaactgccttggctgtgct

SEQ ID NO: 26846 - DNA, 20 bp, synthetic construct
  misc_feature 1..20: note = chemically synthesized
  source 1..20: mol_type = other DNA
actgccttggctgtgcttgg

SEQ ID NO: 26847 - DNA, 20 bp, synthetic construct
  misc_feature 1..20: note = chemically synthesized
  source 1..20: mol_type = other DNA
cttggcagtgtgctctatat

SEQ ID NO: 26848 - DNA, 20 bp, synthetic construct
  misc_feature 1..20: note = chemically synthesized
  source 1..20: mol_type = other DNA
ttggcagtgtgctctatata

SEQ ID NO: 26849 - DNA, 20 bp, synthetic construct
  misc_feature 1..20: note = chemically synthesized
  source 1..20: mol_type = other DNA
ggcagtgtgctctatataag

SEQ ID NO: 26850 - DNA, 20 bp, synthetic construct
  misc_feature 1..20: note = chemically synthesized
  source 1..20: mol_type = other DNA
tgtgctctatataaggagaa

SEQ ID NO: 26851 - DNA, 20 bp, synthetic construct
  misc_feature 1..20: note = chemically synthesized
  source 1..20: mol_type = other DNA
gtgctctatataaggagaac

SEQ ID NO: 26852 - DNA, 20 bp, synthetic construct
  misc_feature 1..20: note = chemically synthesized
  source 1..20: mol_type = other DNA
acaggatgtattttacactt

SEQ ID NO: 26853 - DNA, 20 bp, synthetic construct
  misc_feature 1..20: note = chemically synthesized
  source 1..20: mol_type = other DNA
acacttgagacctgctatcc

SEQ ID NO: 26854 - DNA, 20 bp, synthetic construct
  misc_feature 1..20: note = chemically synthesized
  source 1..20: mol_type = other DNA
acttgagacctgctatccta

SEQ ID NO: 26855 - DNA, 20 bp, synthetic construct
  misc_feature 1..20: note = chemically synthesized
  source 1..20: mol_type = other DNA
agtacaacaacaacacttct

SEQ ID NO: 26856 - DNA, 20 bp, synthetic construct
  misc_feature 1..20: note = chemically synthesized
  source 1..20: mol_type = other DNA
ttctaagtgctcttaatatt

SEQ ID NO: 26857 - DNA, 20 bp, synthetic construct
  misc_feature 1..20: note = chemically synthesized
  source 1..20: mol_type = other DNA
tgctcttaatattaagctaa

SEQ ID NO: 26858 - DNA, 20 bp, synthetic construct
  misc_feature 1..20: note = chemically synthesized
  source 1..20: mol_type = other DNA
atactgtttgttcaccatca

SEQ ID NO: 26859 - DNA, 20 bp, synthetic construct
  misc_feature 1..20: note = chemically synthesized
  source 1..20: mol_type = other DNA
catcatgaactccaaacctc

SEQ ID NO: 26860 - DNA, 20 bp, synthetic construct
  misc_feature 1..20: note = chemically synthesized
  source 1..20: mol_type = other DNA
ctccaaacctctagaacaca

SEQ ID NO: 26861 - DNA, 20 bp, synthetic construct
  misc_feature 1..20: note = chemically synthesized
  source 1..20: mol_type = other DNA
ccaaacctctagaacacaca

SEQ ID NO: 26862 - DNA, 20 bp, synthetic construct
  misc_feature 1..20: note = chemically synthesized
  source 1..20: mol_type = other DNA
ctcctgcaccatctatcctc

SEQ ID NO: 26863 - DNA, 20 bp, synthetic construct
  misc_feature 1..20: note = chemically synthesized
  source 1..20: mol_type = other DNA
tctatcctccagtctgtctc

SEQ ID NO: 26864 - DNA, 20 bp, synthetic construct
  misc_feature 1..20: note = chemically synthesized
  source 1..20: mol_type = other DNA
tcctccagtctgtctcaaga

SEQ ID NO: 26865 - DNA, 20 bp, synthetic construct
  misc_feature 1..20: note = chemically synthesized
  source 1..20: mol_type = other DNA
ccagtctgtctcaagatgga

SEQ ID NO: 26866 - DNA, 20 bp, synthetic construct
  misc_feature 1..20: note = chemically synthesized
  source 1..20: mol_type = other DNA
tctcaagatggacagctaca

SEQ ID NO: 26867 - DNA, 20 bp, synthetic construct
  misc_feature 1..20: note = chemically synthesized
  source 1..20: mol_type = other DNA
aagatggacagctacatggt

SEQ ID NO: 26868 - DNA, 20 bp, synthetic construct
  misc_feature 1..20: note = chemically synthesized
  source 1..20: mol_type = other DNA
tggacagctacatggttagt

SEQ ID NO: 26869 - DNA, 20 bp, synthetic construct
  misc_feature 1..20: note = chemically synthesized
  source 1..20: mol_type = other DNA
cagctacatggttagttagc

SEQ ID NO: 26870 - DNA, 20 bp, synthetic construct
  misc_feature 1..20: note = chemically synthesized
  source 1..20: mol_type = other DNA
gctacatggttagttagcta

SEQ ID NO: 26871 - DNA, 20 bp, synthetic construct
  misc_feature 1..20: note = chemically synthesized
  source 1..20: mol_type = other DNA
ctacatggttagttagctag

SEQ ID NO: 26872 - DNA, 20 bp, synthetic construct
  misc_feature 1..20: note = chemically synthesized
  source 1..20: mol_type = other DNA
acatggttagttagctagag

SEQ ID NO: 26873 - DNA, 20 bp, synthetic construct
  misc_feature 1..20: note = chemically synthesized
  source 1..20: mol_type = other DNA
catggttagttagctagagg

SEQ ID NO: 26874 - DNA, 20 bp, synthetic construct
  misc_feature 1..20: note = chemically synthesized
  source 1..20: mol_type = other DNA
tagttagctagaggaggact

SEQ ID NO: 26875 - DNA, 20 bp, synthetic construct
  misc_feature 1..20: note = chemically synthesized
  source 1..20: mol_type = other DNA
agctagaggaggacttggaa

SEQ ID NO: 26876 - DNA, 20 bp, synthetic construct
  misc_feature 1..20: note = chemically synthesized
  source 1..20: mol_type = other DNA
agaggaggacttggaaaagc

SEQ ID NO: 26877 - DNA, 20 bp, synthetic construct
  misc_feature 1..20: note = chemically synthesized
  source 1..20: mol_type = other DNA
gaggaggacttggaaaagct

SEQ ID NO: 26878 - DNA, 20 bp, synthetic construct
  misc_feature 1..20: note = chemically synthesized
  source 1..20: mol_type = other DNA
cacataaaccgtaaaatccc

SEQ ID NO: 26879 - DNA, 20 bp, synthetic construct
  misc_feature 1..20: note = chemically synthesized
  source 1..20: mol_type = other DNA
tcctcttctcaaaaaaatct

SEQ ID NO: 26880 - DNA, 20 bp, synthetic construct
  misc_feature 1..20: note = chemically synthesized
  source 1..20: mol_type = other DNA
acaaatgtttcattgactat

SEQ ID NO: 26881 - DNA, 20 bp, synthetic construct
  misc_feature 1..20: note = chemically synthesized
  source 1..20: mol_type = other DNA
gactattagattcattttat

SEQ ID NO: 26882 - DNA, 20 bp, synthetic construct
  misc_feature 1..20: note = chemically synthesized
  source 1..20: mol_type = other DNA
tagattcattttattagtgt

SEQ ID NO: 26883 - DNA, 20 bp, synthetic construct
  misc_feature 1..20: note = chemically synthesized
  source 1..20: mol_type = other DNA
attcattttattagtgtgag

SEQ ID NO: 26884 - DNA, 20 bp, synthetic construct
  misc_feature 1..20: note = chemically synthesized
  source 1..20: mol_type = other DNA
gagaagtcacttgtcttcac

SEQ ID NO: 26885 - DNA, 20 bp, synthetic construct
  misc_feature 1..20: note = chemically synthesized
  source 1..20: mol_type = other DNA
gaagtcacttgtcttcacca

SEQ ID NO: 26886 - DNA, 20 bp, synthetic construct
  misc_feature 1..20: note = chemically synthesized
  source 1..20: mol_type = other DNA
gtcttcaccagagtacaaca

SEQ ID NO: 26887 - DNA, 20 bp, synthetic construct
  misc_feature 1..20: note = chemically synthesized
  source 1..20: mol_type = other DNA
caccagagtacaacaaagtg

SEQ ID NO: 26888 - DNA, 20 bp, synthetic construct
  misc_feature 1..20: note = chemically synthesized
  source 1..20: mol_type = other DNA
tacaacaaagtgcagtaaaa

SEQ ID NO: 26889 - DNA, 20 bp, synthetic construct
  misc_feature 1..20: note = chemically synthesized
  source 1..20: mol_type = other DNA
caaagtgcagtaaaatggtg

SEQ ID NO: 26890 - DNA, 20 bp, synthetic construct
  misc_feature 1..20: note = chemically synthesized
  source 1..20: mol_type = other DNA
gtgcagtaaaatggtgaaga

SEQ ID NO: 26891 - DNA, 20 bp, synthetic construct
  misc_feature 1..20: note = chemically synthesized
  source 1..20: mol_type = other DNA
tgcagtaaaatggtgaagat

SEQ ID NO: 26892 - DNA, 20 bp, synthetic construct
  misc_feature 1..20: note = chemically synthesized
  source 1..20: mol_type = other DNA
gtaaaatggtgaagatgggt

SEQ ID NO: 26893 - DNA, 20 bp, synthetic construct
  misc_feature 1..20: note = chemically synthesized
  source 1..20: mol_type = other DNA
taaaatggtgaagatgggtc

SEQ ID NO: 26894 - DNA, 20 bp, synthetic construct
  misc_feature 1..20: note = chemically synthesized
  source 1..20: mol_type = other DNA
aaaatggtgaagatgggtca

SEQ ID NO: 26895 - DNA, 20 bp, synthetic construct
  misc_feature 1..20: note = chemically synthesized
  source 1..20: mol_type = other DNA
tgaagatgggtcagggtttc

SEQ ID NO: 26896 - DNA, 20 bp, synthetic construct
  misc_feature 1..20: note = chemically synthesized
  source 1..20: mol_type = other DNA
gaagatgggtcagggtttct

SEQ ID NO: 26897 - DNA, 20 bp, synthetic construct
  misc_feature 1..20: note = chemically synthesized
  source 1..20: mol_type = other DNA
gggtcagggtttctgggtgc

SEQ ID NO: 26898 - DNA, 20 bp, synthetic construct
  misc_feature 1..20: note = chemically synthesized
  source 1..20: mol_type = other DNA
tttctgggtgctggcattat

SEQ ID NO: 26899 - DNA, 20 bp, synthetic construct
  misc_feature 1..20: note = chemically synthesized
  source 1..20: mol_type = other DNA
tgctggcattattggaatgc

SEQ ID NO: 26900 - DNA, 20 bp, synthetic construct
  misc_feature 1..20: note = chemically synthesized
  source 1..20: mol_type = other DNA
gttctttccttgtcatttaa

SEQ ID NO: 26901 - DNA, 20 bp, synthetic construct
  misc_feature 1..20: note = chemically synthesized
  source 1..20: mol_type = other DNA
tccttgtcatttaatggtca

SEQ ID NO: 26902 - DNA, 20 bp, synthetic construct
  misc_feature 1..20: note = chemically synthesized
  source 1..20: mol_type = other DNA
atttaatggtcaaagttatt

SEQ ID NO: 26903 - DNA, 20 bp, synthetic construct
  misc_feature 1..20: note = chemically synthesized
  source 1..20: mol_type = other DNA
ggtcaaagttatttggaccc

SEQ ID NO: 26904 - DNA, 20 bp, synthetic construct
  misc_feature 1..20: note = chemically synthesized
  source 1..20: mol_type = other DNA
caaagttatttggaccccag

SEQ ID NO: 26905 - DNA, 20 bp, synthetic construct
  misc_feature 1..20: note = chemically synthesized
  source 1..20: mol_type = other DNA
cttccattgctttgtattgt

SEQ ID NO: 26906 - DNA, 20 bp, synthetic construct
  misc_feature 1..20: note = chemically synthesized
  source 1..20: mol_type = other DNA
ccattgctttgtattgtgag

SEQ ID NO: 26907 - DNA, 20 bp, synthetic construct
  misc_feature 1..20: note = chemically synthesized
  source 1..20: mol_type = other DNA
gtgagaagccacatctgtgt

SEQ ID NO: 26908 - DNA, 20 bp, synthetic construct
  misc_feature 1..20: note = chemically synthesized
  source 1..20: mol_type = other DNA
tgagaagccacatctgtgta

SEQ ID NO: 26909 - DNA, 20 bp, synthetic construct
  misc_feature 1..20: note = chemically synthesized
  source 1..20: mol_type = other DNA
ccacatctgtgtaaggtttc

SEQ ID NO: 26910 - DNA, 20 bp, synthetic construct
  misc_feature 1..20: note = chemically synthesized
  source 1..20: mol_type = other DNA
tgtgtaaggtttccagttga

SEQ ID NO: 26911 - DNA, 20 bp, synthetic construct
  misc_feature 1..20: note = chemically synthesized
  source 1..20: mol_type = other DNA
gtgtaaggtttccagttgac

SEQ ID NO: 26912 - DNA, 20 bp, synthetic construct
  misc_feature 1..20: note = chemically synthesized
  source 1..20: mol_type = other DNA
gtttccagttgacaggattc

SEQ ID NO: 26913 - DNA, 20 bp, synthetic construct
  misc_feature 1..20: note = chemically synthesized
  source 1..20: mol_type = other DNA
ttccagttgacaggattcta

SEQ ID NO: 26914 - DNA, 20 bp, synthetic construct
  misc_feature 1..20: note = chemically synthesized
  source 1..20: mol_type = other DNA
gttgacaggattctagagta

SEQ ID NO: 26915 - DNA, 20 bp, synthetic construct
  misc_feature 1..20: note = chemically synthesized
  source 1..20: mol_type = other DNA
caggattctagagtatggcc

SEQ ID NO: 26916 - DNA, 20 bp, synthetic construct
  misc_feature 1..20: note = chemically synthesized
  source 1..20: mol_type = other DNA
ttctagagtatggcccagct

SEQ ID NO: 26917 - DNA, 20 bp, synthetic construct
  misc_feature 1..20: note = chemically synthesized
  source 1..20: mol_type = other DNA
gagtatggcccagctcagtc

SEQ ID NO: 26918 - DNA, 20 bp, synthetic construct
  misc_feature 1..20: note = chemically synthesized
  source 1..20: mol_type = other DNA
cagctcagtccagaaatgcc

SEQ ID NO: 26919 - DNA, 20 bp, synthetic construct
  misc_feature 1..20: note = chemically synthesized
  source 1..20: mol_type = other DNA
agctcagtccagaaatgccc

SEQ ID NO: 26920 - DNA, 20 bp, synthetic construct
  misc_feature 1..20: note = chemically synthesized
  source 1..20: mol_type = other DNA
ccaggtttcccctatcactg

SEQ ID NO: 26921 - DNA, 20 bp, synthetic construct
  misc_feature 1..20: note = chemically synthesized
  source 1..20: mol_type = other DNA
caggtttcccctatcactga

SEQ ID NO: 26922 - DNA, 20 bp, synthetic construct
  misc_feature 1..20: note = chemically synthesized
  source 1..20: mol_type = other DNA
tgaaggcgctatcataaata

SEQ ID NO: 26923 - DNA, 20 bp, synthetic construct
  misc_feature 1..20: note = chemically synthesized
  source 1..20: mol_type = other DNA
gcgctatcataaatatagca

SEQ ID NO: 26924 - DNA, 20 bp, synthetic construct
  misc_feature 1..20: note = chemically synthesized
  source 1..20: mol_type = other DNA
cgctatcataaatatagcat

SEQ ID NO: 26925 - DNA, 20 bp, synthetic construct
  misc_feature 1..20: note = chemically synthesized
  source 1..20: mol_type = other DNA
tatcataaatatagcatggg

SEQ ID NO: 26926 - DNA, 20 bp, synthetic construct
  misc_feature 1..20: note = chemically synthesized
  source 1..20: mol_type = other DNA
tcataaatatagcatgggaa

SEQ ID NO: 26927 - DNA, 20 bp, synthetic construct
  misc_feature 1..20: note = chemically synthesized
  source 1..20: mol_type = other DNA
cataaatatagcatgggaag

SEQ ID NO: 26928 - DNA, 20 bp, synthetic construct
  misc_feature 1..20: note = chemically synthesized
  source 1..20: mol_type = other DNA
ataaatatagcatgggaaga

SEQ ID NO: 26929 - DNA, 20 bp, synthetic construct
  misc_feature 1..20: note = chemically synthesized
  source 1..20: mol_type = other DNA
taaatatagcatgggaagag

SEQ ID NO: 26930 - DNA, 20 bp, synthetic construct
  misc_feature 1..20: note = chemically synthesized
  source 1..20: mol_type = other DNA
aaatatagcatgggaagagg

SEQ ID NO: 26931 - DNA, 20 bp, synthetic construct
  misc_feature 1..20: note = chemically synthesized
  source 1..20: mol_type = other DNA
aatatagcatgggaagaggg

SEQ ID NO: 26932 - DNA, 20 bp, synthetic construct
  misc_feature 1..20: note = chemically synthesized
  source 1..20: mol_type = other DNA
atagcatgggaagagggggg

SEQ ID NO: 26933 - DNA, 20 bp, synthetic construct
  misc_feature 1..20: note = chemically synthesized
  source 1..20: mol_type = other DNA
agcatgggaagaggggggca

SEQ ID NO: 26934 - DNA, 20 bp, synthetic construct
  misc_feature 1..20: note = chemically synthesized
  source 1..20: mol_type = other DNA
gcatgggaagaggggggcag

SEQ ID NO: 26935 - DNA, 20 bp, synthetic construct
  misc_feature 1..20: note = chemically synthesized
  source 1..20: mol_type = other DNA
catgggaagaggggggcaga

SEQ ID NO: 26936 - DNA, 20 bp, synthetic construct
  misc_feature 1..20: note = chemically synthesized
  source 1..20: mol_type = other DNA
ggaagaggggggcagaggga

SEQ ID NO: 26937 - DNA, 20 bp, synthetic construct
  misc_feature 1..20: note = chemically synthesized
  source 1..20: mol_type = other DNA
aagaggggggcagagggaca

SEQ ID NO: 26938 - DNA, 20 bp, synthetic construct
  misc_feature 1..20: note = chemically synthesized
  source 1..20: mol_type = other DNA
ggggggcagagggacagaga

SEQ ID NO: 26939 - DNA, 20 bp, synthetic construct
  misc_feature 1..20: note = chemically synthesized
  source 1..20: mol_type = other DNA
gcagagggacagagaaagca

SEQ ID NO: 26940 - DNA, 20 bp, synthetic construct
  misc_feature 1..20: note = chemically synthesized
  source 1..20: mol_type = other DNA
gagggacagagaaagcaaag

SEQ ID NO: 26941 - DNA, 20 bp, synthetic construct
  misc_feature 1..20: note = chemically synthesized
  source 1..20: mol_type = other DNA
agggacagagaaagcaaagt

SEQ ID NO: 26942 - DNA, 20 bp, synthetic construct
  misc_feature 1..20: note = chemically synthesized
  source 1..20: mol_type = other DNA
caaatctactcatttcctat

SEQ ID NO: 26943 - DNA, 20 bp, synthetic construct
  misc_feature 1..20: note = chemically synthesized
  source 1..20: mol_type = other DNA
tcagcattttgctttttgct

SEQ ID NO: 26944 - DNA, 20 bp, synthetic construct
  misc_feature 1..20: note = chemically synthesized
  source 1..20: mol_type = other DNA
cagcattttgctttttgctt

SEQ ID NO: 26945 - DNA, 20 bp, synthetic construct
  misc_feature 1..20: note = chemically synthesized
  source 1..20: mol_type = other DNA
tttgcttgggtttgtctata

SEQ ID NO: 26946 - DNA, 20 bp, synthetic construct
  misc_feature 1..20: note = chemically synthesized
  source 1..20: mol_type = other DNA
ttgggtttgtctataaagta

SEQ ID NO: 26947 - DNA, 20 bp, synthetic construct
  misc_feature 1..20: note = chemically synthesized
  source 1..20: mol_type = other DNA
gttaatgtatgcatgtaaac

SEQ ID NO: 26948 - DNA, 20 bp, synthetic construct
  misc_feature 1..20: note = chemically synthesized
  source 1..20: mol_type = other DNA
atgcatgtaaaccagccttg

SEQ ID NO: 26949 - DNA, 20 bp, synthetic construct
  misc_feature 1..20: note = chemically synthesized
  source 1..20: mol_type = other DNA
ataaaatccccccatgtttc

SEQ ID NO: 26950 - DNA, 20 bp, synthetic construct
  misc_feature 1..20: note = chemically synthesized
  source 1..20: mol_type = other DNA
taaaatccccccatgtttcc

SEQ ID NO: 26951 - DNA, 20 bp, synthetic construct
  misc_feature 1..20: note = chemically synthesized
  source 1..20: mol_type = other DNA
caggctacccacaatattac

SEQ ID NO: 26952 - DNA, 20 bp, synthetic construct
  misc_feature 1..20: note = chemically synthesized
  source 1..20: mol_type = other DNA
cttacacatcttctttccac

SEQ ID NO: 26953 - DNA, 20 bp, synthetic construct
  misc_feature 1..20: note = chemically synthesized
  source 1..20: mol_type = other DNA
tcaaacaacaacaaataaat

SEQ ID NO: 26954 - DNA, 20 bp, synthetic construct
  misc_feature 1..20: note = chemically synthesized
  source 1..20: mol_type = other DNA
ataaataagcaaatgaacca

SEQ ID NO: 26955 - DNA, 20 bp, synthetic construct
  misc_feature 1..20: note = chemically synthesized
  source 1..20: mol_type = other DNA
accctttcacttttgtcaaa

SEQ ID NO: 26956 - DNA, 20 bp, synthetic construct
  misc_feature 1..20: note = chemically synthesized
  source 1..20: mol_type = other DNA
gaccgaaattgaaaacaaaa

SEQ ID NO: 26957 - DNA, 20 bp, synthetic construct
  misc_feature 1..20: note = chemically synthesized
  source 1..20: mol_type = other DNA
tgaaaacaaaacagaaactc

SEQ ID NO: 26958 - DNA, 20 bp, synthetic construct
  misc_feature 1..20: note = chemically synthesized
  source 1..20: mol_type = other DNA
gaaaacaaaacagaaactct

SEQ ID NO: 26959 - DNA, 20 bp, synthetic construct
  misc_feature 1..20: note = chemically synthesized
  source 1..20: mol_type = other DNA
tcaccactcttcttttgttt

SEQ ID NO: 26960 - DNA, 20 bp, synthetic construct
  misc_feature 1..20: note = chemically synthesized
  source 1..20: mol_type = other DNA
caccactcttcttttgtttc

SEQ ID NO: 26961 - DNA, 20 bp, synthetic construct
  misc_feature 1..20: note = chemically synthesized
  source 1..20: mol_type = other DNA
tcttcttttgtttcaggcct

SEQ ID NO: 26962 - DNA, 20 bp, synthetic construct
  misc_feature 1..20: note = chemically synthesized
  source 1..20: mol_type = other DNA
cttcttttgtttcaggcctt

SEQ ID NO: 26963 - DNA, 20 bp, synthetic construct
  misc_feature 1..20: note = chemically synthesized
  source 1..20: mol_type = other DNA
tgggcctgttaactatctgc

SEQ ID NO: 26964 - DNA, 20 bp, synthetic construct
  misc_feature 1..20: note = chemically synthesized
  source 1..20: mol_type = other DNA
gggcctgttaactatctgca

SEQ ID NO: 26965 - DNA, 20 bp, synthetic construct
  misc_feature 1..20: note = chemically synthesized
  source 1..20: mol_type = other DNA
gatgttgtaatctattttaa

SEQ ID NO: 26966 - DNA, 20 bp, synthetic construct
  misc_feature 1..20: note = chemically synthesized
  source 1..20: mol_type = other DNA
aattgaaatgtgatatcctg

SEQ ID NO: 26967 - DNA, 20 bp, synthetic construct
  misc_feature 1..20: note = chemically synthesized
  source 1..20: mol_type = other DNA
tttatgatgcacgttgtttg

SEQ ID NO: 26968 - DNA, 20 bp, synthetic construct
  misc_feature 1..20: note = chemically synthesized
  source 1..20: mol_type = other DNA
atgcacgttgtttgtagctg

SEQ ID NO: 26969 - DNA, 20 bp, synthetic construct
  misc_feature 1..20: note = chemically synthesized
  source 1..20: mol_type = other DNA
gtagctgtagtgcttgattt

SEQ ID NO: 26970 - DNA, 20 bp, synthetic construct
  misc_feature 1..20: note = chemically synthesized
  source 1..20: mol_type = other DNA
tagctgtagtgcttgatttt

SEQ ID NO: 26971 - DNA, 20 bp, synthetic construct
  misc_feature 1..20: note = chemically synthesized
  source 1..20: mol_type = other DNA
ttgattttgggtttctttca

SEQ ID NO: 26972 - DNA, 20 bp, synthetic construct
  misc_feature 1..20: note = chemically synthesized
  source 1..20: mol_type = other DNA
tcacagataaacttctgcac

SEQ ID NO: 26973 - DNA, 20 bp, synthetic construct
  misc_feature 1..20: note = chemically synthesized
  source 1..20: mol_type = other DNA
acagataaacttctgcactg

SEQ ID NO: 26974 - DNA, 20 bp, synthetic construct
  misc_feature 1..20: note = chemically synthesized
  source 1..20: mol_type = other DNA
cagataaacttctgcactgg

SEQ ID NO: 26975 - DNA, 20 bp, synthetic construct
  misc_feature 1..20: note = chemically synthesized
  source 1..20: mol_type = other DNA
agataaacttctgcactgga

SEQ ID NO: 26976 - DNA, 20 bp, synthetic construct
  misc_feature 1..20: note = chemically synthesized
  source 1..20: mol_type = other DNA
gataaacttctgcactggag

SEQ ID NO: 26977 - DNA, 20 bp, synthetic construct
  misc_feature 1..20: note = chemically synthesized
  source 1..20: mol_type = other DNA
tcctcccctcgttctgcaca

SEQ ID NO: 26978 - DNA, 20 bp, synthetic construct
  misc_feature 1..20: note = chemically synthesized
  source 1..20: mol_type = other DNA
ctcccctcgttctgcacatg

SEQ ID NO: 26979 - DNA, 20 bp, synthetic construct
  misc_feature 1..20: note = chemically synthesized
  source 1..20: mol_type = other DNA
ggagctctaatccccacgcc

SEQ ID NO: 26980 - DNA, 20 bp, synthetic construct
  misc_feature 1..20: note = chemically synthesized
  source 1..20: mol_type = other DNA
gagctctaatccccacgcct

SEQ ID NO: 26981 - DNA, 20 bp, synthetic construct
  misc_feature 1..20: note = chemically synthesized
  source 1..20: mol_type = other DNA
ctaatccccacgcctgggat

SEQ ID NO: 26982 - DNA, 20 bp, synthetic construct
  misc_feature 1..20: note = chemically synthesized
  source 1..20: mol_type = other DNA
ccccacgcctgggatgagtg

SEQ ID NO: 26983 - DNA, 20 bp, synthetic construct
  misc_feature 1..20: note = chemically synthesized
  source 1..20: mol_type = other DNA
tgagtgcagaatatgccccg

SEQ ID NO: 26984 - DNA, 20 bp, synthetic construct
  misc_feature 1..20: note = chemically synthesized
  source 1..20: mol_type = other DNA
gagtgcagaatatgccccgc

SEQ ID NO: 26985 - DNA, 20 bp, synthetic construct
  misc_feature 1..20: note = chemically synthesized
  source 1..20: mol_type = other DNA
agtgcagaatatgccccgca

SEQ ID NO: 26986 - DNA, 20 bp, synthetic construct
  misc_feature 1..20: note = chemically synthesized
  source 1..20: mol_type = other DNA
atgccccgcagggtatttgt

SEQ ID NO: 26987 - DNA, 20 bp, synthetic construct
  misc_feature 1..20: note = chemically synthesized
  source 1..20: mol_type = other DNA
ccgcagggtatttgtaagtt

SEQ ID NO: 26988 - DNA, 20 bp, synthetic construct
  misc_feature 1..20: note = chemically synthesized
  source 1..20: mol_type = other DNA
tctacaaatgtccatgtgta

SEQ ID NO: 26989 - DNA, 20 bp, synthetic construct
  misc_feature 1..20: note = chemically synthesized
  source 1..20: mol_type = other DNA
tacaaatgtccatgtgtata

SEQ ID NO: 26990 - DNA, 20 bp, synthetic construct
  misc_feature 1..20: note = chemically synthesized
  source 1..20: mol_type = other DNA
atgtccatgtgtatagagat

SEQ ID NO: 26991 - DNA, 20 bp, synthetic construct
  misc_feature 1..20: note = chemically synthesized
  source 1..20: mol_type = other DNA
tgtatagagatgagaatttc

SEQ ID NO: 26992 - DNA, 20 bp, synthetic construct
  misc_feature 1..20: note = chemically synthesized
  source 1..20: mol_type = other DNA
ggaaattgcccttacttttt

SEQ ID NO: 26993 - DNA, 20 bp, synthetic construct
  misc_feature 1..20: note = chemically synthesized
  source 1..20: mol_type = other DNA
cccttactttttaagtactg

SEQ ID NO: 26994 - DNA, 20 bp, synthetic construct
  misc_feature 1..20: note = chemically synthesized
  source 1..20: mol_type = other DNA
ccttactttttaagtactga

SEQ ID NO: 26995 - DNA, 20 bp, synthetic construct
  misc_feature 1..20: note = chemically synthesized
  source 1..20: mol_type = other DNA
ttactttttaagtactgaag

SEQ ID NO: 26996 - DNA, 20 bp, synthetic construct
  misc_feature 1..20: note = chemically synthesized
  source 1..20: mol_type = other DNA
tgaaggagttacttccaaaa

SEQ ID NO: 26997 - DNA, 20 bp, synthetic construct
  misc_feature 1..20: note = chemically synthesized
  source 1..20: mol_type = other DNA
gtattattccattactcact

SEQ ID NO: 26998 - DNA, 20 bp, synthetic construct
  misc_feature 1..20: note = chemically synthesized
  source 1..20: mol_type = other DNA
ttattccattactcacttgg

SEQ ID NO: 26999 - DNA, 20 bp, synthetic construct
  misc_feature 1..20: note = chemically synthesized
  source 1..20: mol_type = other DNA
cagccgctccccactccact

SEQ ID NO: 27000 - DNA, 20 bp, synthetic construct
  misc_feature 1..20: note = chemically synthesized
  source 1..20: mol_type = other DNA
ctccccactccactcagccc

SEQ ID NO: 27001 - DNA, 20 bp, synthetic construct
  misc_feature 1..20: note = chemically synthesized
  source 1..20: mol_type = other DNA
ccccactccactcagcccca

SEQ ID NO: 27002 - DNA, 20 bp, synthetic construct
  misc_feature 1..20: note = chemically synthesized
  source 1..20: mol_type = other DNA
cccactccactcagccccag

SEQ ID NO: 27003 - DNA, 20 bp, synthetic construct
  misc_feature 1..20: note = chemically synthesized
  source 1..20: mol_type = other DNA
ccactccactcagccccaga

SEQ ID NO: 27004 - DNA, 20 bp, synthetic construct
  misc_feature 1..20: note = chemically synthesized
  source 1..20: mol_type = other DNA
tcccctttttctttcctcac

SEQ ID NO: 27005 - DNA, 20 bp, synthetic construct
  misc_feature 1..20: note = chemically synthesized
  source 1..20: mol_type = other DNA
ccctttttctttcctcactg

SEQ ID NO: 27006 - DNA, 20 bp, synthetic construct
  misc_feature 1..20: note = chemically synthesized
  source 1..20: mol_type = other DNA
cctttttctttcctcactgg

SEQ ID NO: 27007 - DNA, 20 bp, synthetic construct
  misc_feature 1..20: note = chemically synthesized
  source 1..20: mol_type = other DNA
tttctttcctcactggaggc

SEQ ID NO: 27008 - DNA, 20 bp, synthetic construct
  misc_feature 1..20: note = chemically synthesized
  source 1..20: mol_type = other DNA
ttctttcctcactggaggct

SEQ ID NO: 27009 - DNA, 20 bp, synthetic construct
  misc_feature 1..20: note = chemically synthesized
  source 1..20: mol_type = other DNA
ctttcctcactggaggctgg

SEQ ID NO: 27010 - DNA, 20 bp, synthetic construct
  misc_feature 1..20: note = chemically synthesized
  source 1..20: mol_type = other DNA
cactggaggctgggagctga

SEQ ID NO: 27011 - DNA, 20 bp, synthetic construct
  misc_feature 1..20: note = chemically synthesized
  source 1..20: mol_type = other DNA
tggaggctgggagctgatag

SEQ ID NO: 27012 - DNA, 20 bp, synthetic construct
  misc_feature 1..20: note = chemically synthesized
  source 1..20: mol_type = other DNA
ctgatagtagctcatccctg

SEQ ID NO: 27013 - DNA, 20 bp, synthetic construct
  misc_feature 1..20: note = chemically synthesized
  source 1..20: mol_type = other DNA
tgatagtagctcatccctgt

SEQ ID NO: 27014 - DNA, 20 bp, synthetic construct
  misc_feature 1..20: note = chemically synthesized
  source 1..20: mol_type = other DNA
atccctgtgggtcttctccc

SEQ ID NO: 27015 - DNA, 20 bp, synthetic construct
  misc_feature 1..20: note = chemically synthesized
  source 1..20: mol_type = other DNA
tccctgtgggtcttctcccc

SEQ ID NO: 27016 - DNA, 20 bp, synthetic construct
  misc_feature 1..20: note = chemically synthesized
  source 1..20: mol_type = other DNA
ccctgtgggtcttctcccca

SEQ ID NO: 27017 - DNA, 20 bp, synthetic construct
  misc_feature 1..20: note = chemically synthesized
  source 1..20: mol_type = other DNA
cagggtcttgtcttgctccg

SEQ ID NO: 27018 - DNA, 20 bp, synthetic construct
  misc_feature 1..20: note = chemically synthesized
  source 1..20: mol_type = other DNA
gtcttgtcttgctccgtggc

SEQ ID NO: 27019 - DNA, 20 bp, synthetic construct
  misc_feature 1..20: note = chemically synthesized
  source 1..20: mol_type = other DNA
tgctccgtggctagtgattg

SEQ ID NO: 27020 - DNA, 20 bp, synthetic construct
  misc_feature 1..20: note = chemically synthesized
  source 1..20: mol_type = other DNA
attgaagatgcctgtgcctc

SEQ ID NO: 27021 - DNA, 20 bp, synthetic construct
  misc_feature 1..20: note = chemically synthesized
  source 1..20: mol_type = other DNA
tgaagatgcctgtgcctctg

SEQ ID NO: 27022 - DNA, 20 bp, synthetic construct
  misc_feature 1..20: note = chemically synthesized
  source 1..20: mol_type = other DNA
tctggagcccattttattac

SEQ ID NO: 27023 - DNA, 20 bp, synthetic construct
  misc_feature 1..20: note = chemically synthesized
  source 1..20: mol_type = other DNA
ttactggacattcactcctg

SEQ ID NO: 27024 - DNA, 20 bp, synthetic construct
  misc_feature 1..20: note = chemically synthesized
  source 1..20: mol_type = other DNA
ttcactcctgtggcctcatt

SEQ ID NO: 27025 - DNA, 20 bp, synthetic construct
  misc_feature 1..20: note = chemically synthesized
  source 1..20: mol_type = other DNA
tcactcctgtggcctcattt

SEQ ID NO: 27026 - DNA, 20 bp, synthetic construct
  misc_feature 1..20: note = chemically synthesized
  source 1..20: mol_type = other DNA
tgtggcctcatttaggactt

SEQ ID NO: 27027 - DNA, 20 bp, synthetic construct
  misc_feature 1..20: note = chemically synthesized
  source 1..20: mol_type = other DNA
gtggcctcatttaggacttt

SEQ ID NO: 27028 - DNA, 20 bp, synthetic construct
  misc_feature 1..20: note = chemically synthesized
  source 1..20: mol_type = other DNA
ctcatttaggactttgggta

SEQ ID NO: 27029 - DNA, 20 bp, synthetic construct
  misc_feature 1..20: note = chemically synthesized
  source 1..20: mol_type = other DNA
aggactttgggtatagtcca

SEQ ID NO: 27030 - DNA, 20 bp, synthetic construct
  misc_feature 1..20: note = chemically synthesized
  source 1..20: mol_type = other DNA
tagtccatggcacacatctt

SEQ ID NO: 27031 - DNA, 20 bp, synthetic construct
  misc_feature 1..20: note = chemically synthesized
  source 1..20: mol_type = other DNA
catggcacacatctttagcc

SEQ ID NO: 27032 - DNA, 20 bp, synthetic construct
  misc_feature 1..20: note = chemically synthesized
  source 1..20: mol_type = other DNA
atggcacacatctttagcca

SEQ ID NO: 27033 - DNA, 20 bp, synthetic construct
  misc_feature 1..20: note = chemically synthesized
  source 1..20: mol_type = other DNA
cacacatctttagccaaggc

SEQ ID NO: 27034 - DNA, 20 bp, synthetic construct
  misc_feature 1..20: note = chemically synthesized
  source 1..20: mol_type = other DNA
ttagccaaggccagaatcaa

SEQ ID NO: 27035 - DNA, 20 bp, synthetic construct
  misc_feature 1..20: note = chemically synthesized
  source 1..20: mol_type = other DNA
tagccaaggccagaatcaaa

SEQ ID NO: 27036 - DNA, 20 bp, synthetic construct
  misc_feature 1..20: note = chemically synthesized
  source 1..20: mol_type = other DNA
gccaaggccagaatcaaaag

SEQ ID NO: 27037 - DNA, 20 bp, synthetic construct
  misc_feature 1..20: note = chemically synthesized
  source 1..20: mol_type = other DNA
aggccagaatcaaaaggagt

SEQ ID NO: 27038 - DNA, 20 bp, synthetic construct
  misc_feature 1..20: note = chemically synthesized
  source 1..20: mol_type = other DNA
agaatcaaaaggagtcagtt

SEQ ID NO: 27039 - DNA, 20 bp, synthetic construct
  misc_feature 1..20: note = chemically synthesized
  source 1..20: mol_type = other DNA
gaatcaaaaggagtcagttt

SEQ ID NO: 27040 - DNA, 20 bp, synthetic construct
  misc_feature 1..20: note = chemically synthesized
  source 1..20: mol_type = other DNA
aatcaaaaggagtcagttta

SEQ ID NO: 27041 - DNA, 20 bp, synthetic construct
  misc_feature 1..20: note = chemically synthesized
  source 1..20: mol_type = other DNA
gagtcagtttagggttattc

SEQ ID NO: 27042 - DNA, 20 bp, synthetic construct
  misc_feature 1..20: note = chemically synthesized
  source 1..20: mol_type = other DNA
gtcagtttagggttattcca

SEQ ID NO: 27043 - DNA, 20 bp, synthetic construct
  misc_feature 1..20: note = chemically synthesized
  source 1..20: mol_type = other DNA
tttacatgtgtatttgaaca

SEQ ID NO: 27044 - DNA, 20 bp, synthetic construct
  misc_feature 1..20: note = chemically synthesized
  source 1..20: mol_type = other DNA
attttgactaatttttctcc

SEQ ID NO: 27045 - DNA, 20 bp, synthetic construct
  misc_feature 1..20: note = chemically synthesized
  source 1..20: mol_type = other DNA
actaatttttctcctggttt

SEQ ID NO: 27046 - DNA, 20 bp, synthetic construct
  misc_feature 1..20: note = chemically synthesized
  source 1..20: mol_type = other DNA
taatttttctcctggtttta

SEQ ID NO: 27047 - DNA, 20 bp, synthetic construct
  misc_feature 1..20: note = chemically synthesized
  source 1..20: mol_type = other DNA
gagaaaaatgcacatcattg

SEQ ID NO: 27048 - DNA, 20 bp, synthetic construct
  misc_feature 1..20: note = chemically synthesized
  source 1..20: mol_type = other DNA
atcattgtagttaaaatgtg

SEQ ID NO: 27049 - DNA, 20 bp, synthetic construct
  misc_feature 1..20: note = chemically synthesized
  source 1..20: mol_type = other DNA
tcattgtagttaaaatgtga

SEQ ID NO: 27050 - DNA, 20 bp, synthetic construct
  misc_feature 1..20: note = chemically synthesized
  source 1..20: mol_type = other DNA
accaccaccaccatcaccac

SEQ ID NO: 27051 - DNA, 20 bp, synthetic construct
  misc_feature 1..20: note = chemically synthesized
  source 1..20: mol_type = other DNA
accaccaccaccatcaccac

SEQ ID NO: 27052 - DNA, 20 bp, synthetic construct
  misc_feature 1..20: note = chemically synthesized
  source 1..20: mol_type = other DNA
accaccaccaccatcaccac

SEQ ID NO: 27053 - DNA, 20 bp, synthetic construct
  misc_feature 1..20: note = chemically synthesized
  source 1..20: mol_type = other DNA
accaccagtaccatcaccac

SEQ ID NO: 27054 - DNA, 20 bp, synthetic construct
  misc_feature 1..20: note = chemically synthesized
  source 1..20: mol_type = other DNA
accagtaccatcaccaccag

SEQ ID NO: 27055 - DNA, 20 bp, synthetic construct
  misc_feature 1..20: note = chemically synthesized
  source 1..20: mol_type = other DNA
accaccatcaccatcaccac

SEQ ID NO: 27056 - DNA, 20 bp, synthetic construct
  misc_feature 1..20: note = chemically synthesized
  source 1..20: mol_type = other DNA
accaccagtaccatcaccac

SEQ ID NO: 27057 - DNA, 20 bp, synthetic construct
  misc_feature 1..20: note = chemically synthesized
  source 1..20: mol_type = other DNA
accaccaccaccatcaccac

SEQ ID NO: 27058 - DNA, 20 bp, synthetic construct
  misc_feature 1..20: note = chemically synthesized
  source 1..20: mol_type = other DNA
accaccagtaccatcaccac

SEQ ID NO: 27059 - DNA, 20 bp, synthetic construct
  misc_feature 1..20: note = chemically synthesized
  source 1..20: mol_type = other DNA
accaccatcaccatcaccac

SEQ ID NO: 27060 - DNA, 20 bp, synthetic construct
  misc_feature 1..20: note = chemically synthesized
  source 1..20: mol_type = other DNA
actaccaccaccaccatcac

SEQ ID NO: 27061 - DNA, 20 bp, synthetic construct
  misc_feature 1..20: note = chemically synthesized
  source 1..20: mol_type = other DNA
atcaccatcaccatcaccac

SEQ ID NO: 27062 - DNA, 20 bp, synthetic construct
  misc_feature 1..20: note = chemically synthesized
  source 1..20: mol_type = other DNA
actaccaccaccaccatcac

SEQ ID NO: 27063 - DNA, 20 bp, synthetic construct
  misc_feature 1..20: note = chemically synthesized
  source 1..20: mol_type = other DNA
atcaccatcaccatcaccac

SEQ ID NO: 27064 - DNA, 20 bp, synthetic construct
  misc_feature 1..20: note = chemically synthesized
  source 1..20: mol_type = other DNA
actaccaccaccaccatcac

SEQ ID NO: 27065 - DNA, 20 bp, synthetic construct
  misc_feature 1..20: note = chemically synthesized
  source 1..20: mol_type = other DNA
ccaccaccatttacttgttc

SEQ ID NO: 27066 - DNA, 20 bp, synthetic construct
  misc_feature 1..20: note = chemically synthesized
  source 1..20: mol_type = other DNA
caccatttacttgttcaagt

SEQ ID NO: 27067 - DNA, 20 bp, synthetic construct
  misc_feature 1..20: note = chemically synthesized
  source 1..20: mol_type = other DNA
cttgttcaagtgagctttta

SEQ ID NO: 27068 - DNA, 20 bp, synthetic construct
  misc_feature 1..20: note = chemically synthesized
  source 1..20: mol_type = other DNA
gttcaagtgagcttttatag

SEQ ID NO: 27069 - DNA, 20 bp, synthetic construct
  misc_feature 1..20: note = chemically synthesized
  source 1..20: mol_type = other DNA
ttcaagtgagcttttatagt

SEQ ID NO: 27070 - DNA, 20 bp, synthetic construct
  misc_feature 1..20: note = chemically synthesized
  source 1..20: mol_type = other DNA
tcaagtgagcttttatagta

SEQ ID NO: 27071 - DNA, 20 bp, synthetic construct
  misc_feature 1..20: note = chemically synthesized
  source 1..20: mol_type = other DNA
tttatacaaatgttttctga

SEQ ID NO: 27072 - DNA, 20 bp, synthetic construct
  misc_feature 1..20: note = chemically synthesized
  source 1..20: mol_type = other DNA
ttttctgaaagatactgttt

SEQ ID NO: 27073 - DNA, 20 bp, synthetic construct
  misc_feature 1..20: note = chemically synthesized
  source 1..20: mol_type = other DNA
tactgttttagaaaataata

SEQ ID NO: 27074 - DNA, 20 bp, synthetic construct
  misc_feature 1..20: note = chemically synthesized
  source 1..20: mol_type = other DNA
atacagtttgcttctctgtg

SEQ ID NO: 27075 - DNA, 20 bp, synthetic construct
  misc_feature 1..20: note = chemically synthesized
  source 1..20: mol_type = other DNA
tacagtttgcttctctgtgt

SEQ ID NO: 27076 - DNA, 20 bp, synthetic construct
  misc_feature 1..20: note = chemically synthesized
  source 1..20: mol_type = other DNA
cttctctgtgtaggaacaca

SEQ ID NO: 27077 - DNA, 20 bp, synthetic construct
  misc_feature 1..20: note = chemically synthesized
  source 1..20: mol_type = other DNA
cacatggtatgaatcatgca

SEQ ID NO: 27078 - DNA, 20 bp, synthetic construct
  misc_feature 1..20: note = chemically synthesized
  source 1..20: mol_type = other DNA
tatgaatcatgcatggctaa

SEQ ID NO: 27079 - DNA, 20 bp, synthetic construct
  misc_feature 1..20: note = chemically synthesized
  source 1..20: mol_type = other DNA
atgaatcatgcatggctaaa

SEQ ID NO: 27080 - DNA, 20 bp, synthetic construct
  misc_feature 1..20: note = chemically synthesized
  source 1..20: mol_type = other DNA
atcatgcatggctaaaaggt

SEQ ID NO: 27081 - DNA, 20 bp, synthetic construct
  misc_feature 1..20: note = chemically synthesized
  source 1..20: mol_type = other DNA
tcatgcatggctaaaaggtt

SEQ ID NO: 27082 - DNA, 20 bp, synthetic construct
  misc_feature 1..20: note = chemically synthesized
  source 1..20: mol_type = other DNA
catgcatggctaaaaggtta

SEQ ID NO: 27083 - DNA, 20 bp, synthetic construct
  misc_feature 1..20: note = chemically synthesized
  source 1..20: mol_type = other DNA
atgcatggctaaaaggttag

SEQ ID NO: 27084 - DNA, 20 bp, synthetic construct
  misc_feature 1..20: note = chemically synthesized
  source 1..20: mol_type = other DNA
tgcatggctaaaaggttagg

SEQ ID NO: 27085 - DNA, 20 bp, synthetic construct
  misc_feature 1..20: note = chemically synthesized
  source 1..20: mol_type = other DNA
atggctaaaaggttaggggg

SEQ ID NO: 27086 - DNA, 20 bp, synthetic construct
  misc_feature 1..20: note = chemically synthesized
  source 1..20: mol_type = other DNA
tggctaaaaggttagggggt

SEQ ID NO: 27087 - DNA, 20 bp, synthetic construct
  misc_feature 1..20: note = chemically synthesized
  source 1..20: mol_type = other DNA
ctaaaaggttagggggtggg

SEQ ID NO: 27088 - DNA, 20 bp, synthetic construct
  misc_feature 1..20: note = chemically synthesized
  source 1..20: mol_type = other DNA
attccaccctaaacacaaaa

SEQ ID NO: 27089 - DNA, 20 bp, synthetic construct
  misc_feature 1..20: note = chemically synthesized
  source 1..20: mol_type = other DNA
ccaccctaaacacaaaaaag

SEQ ID NO: 27090 - DNA, 20 bp, synthetic construct
  misc_feature 1..20: note = chemically synthesized
  source 1..20: mol_type = other DNA
caccctaaacacaaaaaagc

SEQ ID NO: 27091 - DNA, 20 bp, synthetic construct
  misc_feature 1..20: note = chemically synthesized
  source 1..20: mol_type = other DNA
aaacacaaaaaagcaggttc

SEQ ID NO: 27092 - DNA, 20 bp, synthetic construct
  misc_feature 1..20: note = chemically synthesized
  source 1..20: mol_type = other DNA
cacaaaaaagcaggttcaag

SEQ ID NO: 27093 - DNA, 20 bp, synthetic construct
  misc_feature 1..20: note = chemically synthesized
  source 1..20: mol_type = other DNA
aaaagcaggttcaagaagaa

SEQ ID NO: 27094 - DNA, 20 bp, synthetic construct
  misc_feature 1..20: note = chemically synthesized
  source 1..20: mol_type = other DNA
agcaggttcaagaagaaaag

SEQ ID NO: 27095 - DNA, 20 bp, synthetic construct
  misc_feature 1..20: note = chemically synthesized
  source 1..20: mol_type = other DNA
gacatctaatttttatttga

SEQ ID NO: 27096 - DNA, 20 bp, synthetic construct
  misc_feature 1..20: note = chemically synthesized
  source 1..20: mol_type = other DNA
aaatgaaaaataacctgctg

SEQ ID NO: 27097 - DNA, 20 bp, synthetic construct
  misc_feature 1..20: note = chemically synthesized
  source 1..20: mol_type = other DNA
gaaaaataacctgctgtgga

SEQ ID NO: 27098 - DNA, 20 bp, synthetic construct
  misc_feature 1..20: note = chemically synthesized
  source 1..20: mol_type = other DNA
ctgctgtggaaagaaaaaaa

SEQ ID NO: 27099 - DNA, 20 bp, synthetic construct
  misc_feature 1..20: note = chemically synthesized
  source 1..20: mol_type = other DNA
gtggaaagaaaaaaaaagaa

SEQ ID NO: 27100 - DNA, 20 bp, synthetic construct
  misc_feature 1..20: note = chemically synthesized
  source 1..20: mol_type = other DNA
tggaaagaaaaaaaaagaaa

SEQ ID NO: 27101 - DNA, 20 bp, synthetic construct
  misc_feature 1..20: note = chemically synthesized
  source 1..20: mol_type = other DNA
gaaaaaaaaagaaaaggaaa

SEQ ID NO: 27102 - DNA, 20 bp, synthetic construct
  misc_feature 1..20: note = chemically synthesized
  source 1..20: mol_type = other DNA
aaaaaaaaagaaaaggaaaa

SEQ ID NO: 27103 - DNA, 20 bp, synthetic construct
  misc_feature 1..20: note = chemically synthesized
  source 1..20: mol_type = other DNA
aaagaaaaggaaaaaggtca

SEQ ID NO: 27104 - DNA, 20 bp, synthetic construct
  misc_feature 1..20: note = chemically synthesized
  source 1..20: mol_type = other DNA
agaaaaggaaaaaggtcatg

SEQ ID NO: 27105 - DNA, 20 bp, synthetic construct
  misc_feature 1..20: note = chemically synthesized
  source 1..20: mol_type = other DNA
aaaaggaaaaaggtcatgga

SEQ ID NO: 27106 - DNA, 20 bp, synthetic construct
  misc_feature 1..20: note = chemically synthesized
  source 1..20: mol_type = other DNA
aaggaaaaaggtcatggaga

SEQ ID NO: 27107 - DNA, 20 bp, synthetic construct
  misc_feature 1..20: note = chemically synthesized
  source 1..20: mol_type = other DNA
gtcatggagagagaataaca

SEQ ID NO: 27108 - DNA, 20 bp, synthetic construct
  misc_feature 1..20: note = chemically synthesized
  source 1..20: mol_type = other DNA
catggagagagaataacaaa

SEQ ID NO: 27109 - DNA, 20 bp, synthetic construct
  misc_feature 1..20: note = chemically synthesized
  source 1..20: mol_type = other DNA
gagagagaataacaaagagc

SEQ ID NO: 27110 - DNA, 20 bp, synthetic construct
  misc_feature 1..20: note = chemically synthesized
  source 1..20: mol_type = other DNA
aataacaaagagcaagatgc

SEQ ID NO: 27111 - DNA, 20 bp, synthetic construct
  misc_feature 1..20: note = chemically synthesized
  source 1..20: mol_type = other DNA
taacaaagagcaagatgcca

SEQ ID NO: 27112 - DNA, 20 bp, synthetic construct
  misc_feature 1..20: note = chemically synthesized
  source 1..20: mol_type = other DNA
aagagcaagatgccagagtt

SEQ ID NO: 27113 - DNA, 20 bp, synthetic construct
  misc_feature 1..20: note = chemically synthesized
  source 1..20: mol_type = other DNA
agagcaagatgccagagtta

SEQ ID NO: 27114 - DNA, 20 bp, synthetic construct
  misc_feature 1..20: note = chemically synthesized
  source 1..20: mol_type = other DNA
gatgccagagttaaggctct

SEQ ID NO: 27115 - DNA, 20 bp, synthetic construct
  misc_feature 1..20: note = chemically synthesized
  source 1..20: mol_type = other DNA
atgccagagttaaggctcta

SEQ ID NO: 27116 - DNA, 20 bp, synthetic construct
  misc_feature 1..20: note = chemically synthesized
  source 1..20: mol_type = other DNA
tgccagagttaaggctctaa

SEQ ID NO: 27117 - DNA, 20 bp, synthetic construct
  misc_feature 1..20: note = chemically synthesized
  source 1..20: mol_type = other DNA
gccagagttaaggctctaag

SEQ ID NO: 27118 - DNA, 20 bp, synthetic construct
  misc_feature 1..20: note = chemically synthesized
  source 1..20: mol_type = other DNA
ccagagttaaggctctaagg

SEQ ID NO: 27119 - DNA, 20 bp, synthetic construct
  misc_feature 1..20: note = chemically synthesized
  source 1..20: mol_type = other DNA
gctctaagggggactgtttt

SEQ ID NO: 27120 - DNA, 20 bp, synthetic construct
  misc_feature 1..20: note = chemically synthesized
  source 1..20: mol_type = other DNA
taagggggactgtttttaga

SEQ ID NO: 27121 - DNA, 20 bp, synthetic construct
  misc_feature 1..20: note = chemically synthesized
  source 1..20: mol_type = other DNA
aagggggactgtttttagat

SEQ ID NO: 27122 - DNA, 20 bp, synthetic construct
  misc_feature 1..20: note = chemically synthesized
  source 1..20: mol_type = other DNA
gggggactgtttttagatgg

SEQ ID NO: 27123 - DNA, 20 bp, synthetic construct
  misc_feature 1..20: note = chemically synthesized
  source 1..20: mol_type = other DNA
ggggactgtttttagatggg

SEQ ID NO: 27124 - DNA, 20 bp, synthetic construct
  misc_feature 1..20: note = chemically synthesized
  source 1..20: mol_type = other DNA
gggactgtttttagatggga

SEQ ID NO: 27125 - DNA, 20 bp, synthetic construct
  misc_feature 1..20: note = chemically synthesized
  source 1..20: mol_type = other DNA
gactgtttttagatgggagg

SEQ ID NO: 27126 - DNA, 20 bp, synthetic construct
  misc_feature 1..20: note = chemically synthesized
  source 1..20: mol_type = other DNA
acacttacccatcttgtaaa

SEQ ID NO: 27127 - DNA, 20 bp, synthetic construct
  misc_feature 1..20: note = chemically synthesized
  source 1..20: mol_type = other DNA
catcttgtaaatggtatctg

SEQ ID NO: 27128 - DNA, 20 bp, synthetic construct
  misc_feature 1..20: note = chemically synthesized
  source 1..20: mol_type = other DNA
tcttgtaaatggtatctgaa

SEQ ID NO: 27129 - DNA, 20 bp, synthetic construct
  misc_feature 1..20: note = chemically synthesized
  source 1..20: mol_type = other DNA
tgtaaatggtatctgaagag

SEQ ID NO: 27130 - DNA, 20 bp, synthetic construct
  misc_feature 1..20: note = chemically synthesized
  source 1..20: mol_type = other DNA
gtaaatggtatctgaagagc

SEQ ID NO: 27131 - DNA, 20 bp, synthetic construct
  misc_feature 1..20: note = chemically synthesized
  source 1..20: mol_type = other DNA
taaatggtatctgaagagca

SEQ ID NO: 27132 - DNA, 20 bp, synthetic construct
  misc_feature 1..20: note = chemically synthesized
  source 1..20: mol_type = other DNA
aagagcagggcatgcaccct

SEQ ID NO: 27133 - DNA, 20 bp, synthetic construct
  misc_feature 1..20: note = chemically synthesized
  source 1..20: mol_type = other DNA
cagggcatgcaccctgagac

SEQ ID NO: 27134 - DNA, 20 bp, synthetic construct
  misc_feature 1..20: note = chemically synthesized
  source 1..20: mol_type = other DNA
gcaccctgagaccagattca

SEQ ID NO: 27135 - DNA, 20 bp, synthetic construct
  misc_feature 1..20: note = chemically synthesized
  source 1..20: mol_type = other DNA
cctgagaccagattcaaagc

SEQ ID NO: 27136 - DNA, 20 bp, synthetic construct
  misc_feature 1..20: note = chemically synthesized
  source 1..20: mol_type = other DNA
tgtttatttttgttaactcc

SEQ ID NO: 27137 - DNA, 20 bp, synthetic construct
  misc_feature 1..20: note = chemically synthesized
  source 1..20: mol_type = other DNA
gtttatttttgttaactcct

SEQ ID NO: 27138 - DNA, 20 bp, synthetic construct
  misc_feature 1..20: note = chemically synthesized
  source 1..20: mol_type = other DNA
tgttaactcctaggtaatcc

SEQ ID NO: 27139 - DNA, 20 bp, synthetic construct
  misc_feature 1..20: note = chemically synthesized
  source 1..20: mol_type = other DNA
gttaactcctaggtaatcct

SEQ ID NO: 27140 - DNA, 20 bp, synthetic construct
  misc_feature 1..20: note = chemically synthesized
  source 1..20: mol_type = other DNA
ctaggtaatcctaggtaaca

SEQ ID NO: 27141 - DNA, 20 bp, synthetic construct
  misc_feature 1..20: note = chemically synthesized
  source 1..20: mol_type = other DNA
aggtaatcctaggtaacaaa

SEQ ID NO: 27142 - DNA, 20 bp, synthetic construct
  misc_feature 1..20: note = chemically synthesized
  source 1..20: mol_type = other DNA
agttattgtgtgaatttcat

SEQ ID NO: 27143 - DNA, 20 bp, synthetic construct
  misc_feature 1..20: note = chemically synthesized
  source 1..20: mol_type = other DNA
gtgtgaatttcataagccct

SEQ ID NO: 27144 - DNA, 20 bp, synthetic construct
  misc_feature 1..20: note = chemically synthesized
  source 1..20: mol_type = other DNA
tgtgaatttcataagccctc

SEQ ID NO: 27145 - DNA, 20 bp, synthetic construct
  misc_feature 1..20: note = chemically synthesized
  source 1..20: mol_type = other DNA
ttcataagccctcaggtcct

SEQ ID NO: 27146 - DNA, 20 bp, synthetic construct
  misc_feature 1..20: note = chemically synthesized
  source 1..20: mol_type = other DNA
tcataagccctcaggtcctg

SEQ ID NO: 27147 - DNA, 20 bp, synthetic construct
  misc_feature 1..20: note = chemically synthesized
  source 1..20: mol_type = other DNA
cataagccctcaggtcctga

SEQ ID NO: 27148 - DNA, 20 bp, synthetic construct
  misc_feature 1..20: note = chemically synthesized
  source 1..20: mol_type = other DNA
agccctcaggtcctgagggc

SEQ ID NO: 27149 - DNA, 20 bp, synthetic construct
  misc_feature 1..20: note = chemically synthesized
  source 1..20: mol_type = other DNA
gccctcaggtcctgagggct

SEQ ID NO: 27150 - DNA, 20 bp, synthetic construct
  misc_feature 1..20: note = chemically synthesized
  source 1..20: mol_type = other DNA
ctcaggtcctgagggctggg

SEQ ID NO: 27151 - DNA, 20 bp, synthetic construct
  misc_feature 1..20: note = chemically synthesized
  source 1..20: mol_type = other DNA
gtcctgagggctgggtggtt

SEQ ID NO: 27152 - DNA, 20 bp, synthetic construct
  misc_feature 1..20: note = chemically synthesized
  source 1..20: mol_type = other DNA
tcctgagggctgggtggttc

SEQ ID NO: 27153 - DNA, 20 bp, synthetic construct
  misc_feature 1..20: note = chemically synthesized
  source 1..20: mol_type = other DNA
cctgagggctgggtggttca

SEQ ID NO: 27154 - DNA, 20 bp, synthetic construct
  misc_feature 1..20: note = chemically synthesized
  source 1..20: mol_type = other DNA
ctgagggctgggtggttcag

SEQ ID NO: 27155 - DNA, 20 bp, synthetic construct
  misc_feature 1..20: note = chemically synthesized
  source 1..20: mol_type = other DNA
ctgggtggttcaggggttaa

SEQ ID NO: 27156 - DNA, 20 bp, synthetic construct
  misc_feature 1..20: note = chemically synthesized
  source 1..20: mol_type = other DNA
ctcatctgctcccttccccc

SEQ ID NO: 27157 - DNA, 20 bp, synthetic construct
  misc_feature 1..20: note = chemically synthesized
  source 1..20: mol_type = other DNA
tctgctcccttcccccaagc

SEQ ID NO: 27158 - DNA, 20 bp, synthetic construct
  misc_feature 1..20: note = chemically synthesized
  source 1..20: mol_type = other DNA
ctgctcccttcccccaagct

SEQ ID NO: 27159 - DNA, 20 bp, synthetic construct
  misc_feature 1..20: note = chemically synthesized
  source 1..20: mol_type = other DNA
ccttcccccaagctgggcct

SEQ ID NO: 27160 - DNA, 20 bp, synthetic construct
  misc_feature 1..20: note = chemically synthesized
  source 1..20: mol_type = other DNA
ccccaagctgggcctaagcc

SEQ ID NO: 27161 - DNA, 20 bp, synthetic construct
  misc_feature 1..20: note = chemically synthesized
  source 1..20: mol_type = other DNA
cccaagctgggcctaagcct

SEQ ID NO: 27162 - DNA, 20 bp, synthetic construct
  misc_feature 1..20: note = chemically synthesized
  source 1..20: mol_type = other DNA
agctgggcctaagcctgggt

SEQ ID NO: 27163 - DNA, 20 bp, synthetic construct
  misc_feature 1..20: note = chemically synthesized
  source 1..20: mol_type = other DNA
gctgggcctaagcctgggtt

SEQ ID NO: 27164 - DNA, 20 bp, synthetic construct
  misc_feature 1..20: note = chemically synthesized
  source 1..20: mol_type = other DNA
cctaagcctgggttaggtca

SEQ ID NO: 27165 - DNA, 20 bp, synthetic construct
  misc_feature 1..20: note = chemically synthesized
  source 1..20: mol_type = other DNA
ctgggttaggtcacagattg

SEQ ID NO: 27166 - DNA, 20 bp, synthetic construct
  misc_feature 1..20: note = chemically synthesized
  source 1..20: mol_type = other DNA
ggttaggtcacagattgcag

SEQ ID NO: 27167 - DNA, 20 bp, synthetic construct
  misc_feature 1..20: note = chemically synthesized
  source 1..20: mol_type = other DNA
gttaggtcacagattgcaga

SEQ ID NO: 27168 - DNA, 20 bp, synthetic construct
  misc_feature 1..20: note = chemically synthesized
  source 1..20: mol_type = other DNA
gtcacagattgcagaaggtt

SEQ ID NO: 27169 - DNA, 20 bp, synthetic construct
  misc_feature 1..20: note = chemically synthesized
  source 1..20: mol_type = other DNA
tcacagattgcagaaggttt

SEQ ID NO: 27170 - DNA, 20 bp, synthetic construct
  misc_feature 1..20: note = chemically synthesized
  source 1..20: mol_type = other DNA
acagattgcagaaggtttag

SEQ ID NO: 27171 - DNA, 20 bp, synthetic construct
  misc_feature 1..20: note = chemically synthesized
  source 1..20: mol_type = other DNA
cagattgcagaaggtttagg

SEQ ID NO: 27172 - DNA, 20 bp, synthetic construct
  misc_feature 1..20: note = chemically synthesized
  source 1..20: mol_type = other DNA
ttgcagaaggtttaggaggt

SEQ ID NO: 27173 - DNA, 20 bp, synthetic construct
  misc_feature 1..20: note = chemically synthesized
  source 1..20: mol_type = other DNA
tgcagaaggtttaggaggtt

SEQ ID NO: 27174 - DNA, 20 bp, synthetic construct
  misc_feature 1..20: note = chemically synthesized
  source 1..20: mol_type = other DNA
ggtttaggaggttgggctca

SEQ ID NO: 27175 - DNA, 20 bp, synthetic construct
  misc_feature 1..20: note = chemically synthesized
  source 1..20: mol_type = other DNA
gaggttgggctcacggtttc

SEQ ID NO: 27176 - DNA, 20 bp, synthetic construct
  misc_feature 1..20: note = chemically synthesized
  source 1..20: mol_type = other DNA
ggtttctagtccctgcatgc

SEQ ID NO: 27177 - DNA, 20 bp, synthetic construct
  misc_feature 1..20: note = chemically synthesized
  source 1..20: mol_type = other DNA
tctagtccctgcatgctggc

SEQ ID NO: 27178 - DNA, 20 bp, synthetic construct
  misc_feature 1..20: note = chemically synthesized
  source 1..20: mol_type = other DNA
ctagtccctgcatgctggct

SEQ ID NO: 27179 - DNA, 20 bp, synthetic construct
  misc_feature 1..20: note = chemically synthesized
  source 1..20: mol_type = other DNA
gtccctgcatgctggctggg

SEQ ID NO: 27180 - DNA, 20 bp, synthetic construct
  misc_feature 1..20: note = chemically synthesized
  source 1..20: mol_type = other DNA
tccctgcatgctggctgggt

SEQ ID NO: 27181 - DNA, 20 bp, synthetic construct
  misc_feature 1..20: note = chemically synthesized
  source 1..20: mol_type = other DNA
ccctgcatgctggctgggtg

SEQ ID NO: 27182 - DNA, 20 bp, synthetic construct
  misc_feature 1..20: note = chemically synthesized
  source 1..20: mol_type = other DNA
ctgcatgctggctgggtggg

SEQ ID NO: 27183 - DNA, 20 bp, synthetic construct
  misc_feature 1..20: note = chemically synthesized
  source 1..20: mol_type = other DNA
gcatgctggctgggtgggga

SEQ ID NO: 27184 - DNA, 20 bp, synthetic construct
  misc_feature 1..20: note = chemically synthesized
  source 1..20: mol_type = other DNA
ggggagagctctcctgttgc

SEQ ID NO: 27185 - DNA, 20 bp, synthetic construct
  misc_feature 1..20: note = chemically synthesized
  source 1..20: mol_type = other DNA
gggagagctctcctgttgct

SEQ ID NO: 27186 - DNA, 20 bp, synthetic construct
  misc_feature 1..20: note = chemically synthesized
  source 1..20: mol_type = other DNA
ggagagctctcctgttgctg

SEQ ID NO: 27187 - DNA, 20 bp, synthetic construct
  misc_feature 1..20: note = chemically synthesized
  source 1..20: mol_type = other DNA
gagagctctcctgttgctgg

SEQ ID NO: 27188 - DNA, 20 bp, synthetic construct
  misc_feature 1..20: note = chemically synthesized
  source 1..20: mol_type = other DNA
ctcctgttgctgggggcatc

SEQ ID NO: 27189 - DNA, 20 bp, synthetic construct
  misc_feature 1..20: note = chemically synthesized
  source 1..20: mol_type = other DNA
tcctgttgctgggggcatct

SEQ ID NO: 27190 - DNA, 20 bp, synthetic construct
  misc_feature 1..20: note = chemically synthesized
  source 1..20: mol_type = other DNA
cctgttgctgggggcatctg

SEQ ID NO: 27191 - DNA, 20 bp, synthetic construct
  misc_feature 1..20: note = chemically synthesized
  source 1..20: mol_type = other DNA
gggggcatctggggcctgca

SEQ ID NO: 27192 - DNA, 20 bp, synthetic construct
  misc_feature 1..20: note = chemically synthesized
  source 1..20: mol_type = other DNA
ggggcatctggggcctgcat

SEQ ID NO: 27193 - DNA, 20 bp, synthetic construct
  misc_feature 1..20: note = chemically synthesized
  source 1..20: mol_type = other DNA
gggcatctggggcctgcatg

SEQ ID NO: 27194 - DNA, 20 bp, synthetic construct
  misc_feature 1..20: note = chemically synthesized
  source 1..20: mol_type = other DNA
ctggggcctgcatggggctg

SEQ ID NO: 27195 - DNA, 20 bp, synthetic construct
  misc_feature 1..20: note = chemically synthesized
  source 1..20: mol_type = other DNA
cctgcatggggctgtggaaa

SEQ ID NO: 27196 - DNA, 20 bp, synthetic construct
  misc_feature 1..20: note = chemically synthesized
  source 1..20: mol_type = other DNA
tgcatggggctgtggaaacg

SEQ ID NO: 27197 - DNA, 20 bp, synthetic construct
  misc_feature 1..20: note = chemically synthesized
  source 1..20: mol_type = other DNA
tgtggaaacggagccacttt

SEQ ID NO: 27198 - DNA, 20 bp, synthetic construct
  misc_feature 1..20: note = chemically synthesized
  source 1..20: mol_type = other DNA
tggaaacggagccacttttg

SEQ ID NO: 27199 - DNA, 20 bp, synthetic construct
  misc_feature 1..20: note = chemically synthesized
  source 1..20: mol_type = other DNA
ggaaacggagccacttttgg

SEQ ID NO: 27200 - DNA, 20 bp, synthetic construct
  misc_feature 1..20: note = chemically synthesized
  source 1..20: mol_type = other DNA
gaaacggagccacttttgga

SEQ ID NO: 27201 - DNA, 20 bp, synthetic construct
  misc_feature 1..20: note = chemically synthesized
  source 1..20: mol_type = other DNA
acggagccacttttggaggg

SEQ ID NO: 27202 - DNA, 20 bp, synthetic construct
  misc_feature 1..20: note = chemically synthesized
  source 1..20: mol_type = other DNA
cggagccacttttggaggga

SEQ ID NO: 27203 - DNA, 20 bp, synthetic construct
  misc_feature 1..20: note = chemically synthesized
  source 1..20: mol_type = other DNA
ggagccacttttggagggaa

SEQ ID NO: 27204 - DNA, 20 bp, synthetic construct
  misc_feature 1..20: note = chemically synthesized
  source 1..20: mol_type = other DNA
ccacttttggagggaaggga

SEQ ID NO: 27205 - DNA, 20 bp, synthetic construct
  misc_feature 1..20: note = chemically synthesized
  source 1..20: mol_type = other DNA
cttttggagggaagggatag

SEQ ID NO: 27206 - DNA, 20 bp, synthetic construct
  misc_feature 1..20: note = chemically synthesized
  source 1..20: mol_type = other DNA
ttttggagggaagggataga

SEQ ID NO: 27207 - DNA, 20 bp, synthetic construct
  misc_feature 1..20: note = chemically synthesized
  source 1..20: mol_type = other DNA
tttggagggaagggatagaa

SEQ ID NO: 27208 - DNA, 20 bp, synthetic construct
  misc_feature 1..20: note = chemically synthesized
  source 1..20: mol_type = other DNA
tggagggaagggatagaagg

SEQ ID NO: 27209 - DNA, 20 bp, synthetic construct
  misc_feature 1..20: note = chemically synthesized
  source 1..20: mol_type = other DNA
ggaagggatagaagggagtt

SEQ ID NO: 27210 - DNA, 20 bp, synthetic construct
  misc_feature 1..20: note = chemically synthesized
  source 1..20: mol_type = other DNA
agggatagaagggagttgag

SEQ ID NO: 27211 - DNA, 20 bp, synthetic construct
  misc_feature 1..20: note = chemically synthesized
  source 1..20: mol_type = other DNA
tagaagggagttgagcagtt

SEQ ID NO: 27212 - DNA, 20 bp, synthetic construct
  misc_feature 1..20: note = chemically synthesized
  source 1..20: mol_type = other DNA
gaagggagttgagcagttca

SEQ ID NO: 27213 - DNA, 20 bp, synthetic construct
  misc_feature 1..20: note = chemically synthesized
  source 1..20: mol_type = other DNA
aagggagttgagcagttcag

SEQ ID NO: 27214 - DNA, 20 bp, synthetic construct
  misc_feature 1..20: note = chemically synthesized
  source 1..20: mol_type = other DNA
gggagttgagcagttcagag

SEQ ID NO: 27215 - DNA, 20 bp, synthetic construct
  misc_feature 1..20: note = chemically synthesized
  source 1..20: mol_type = other DNA
ggagttgagcagttcagagg

SEQ ID NO: 27216 - DNA, 20 bp, synthetic construct
  misc_feature 1..20: note = chemically synthesized
  source 1..20: mol_type = other DNA
gagttgagcagttcagagga

SEQ ID NO: 27217 - DNA, 20 bp, synthetic construct
  misc_feature 1..20: note = chemically synthesized
  source 1..20: mol_type = other DNA
ttgagcagttcagaggaggg

SEQ ID NO: 27218 - DNA, 20 bp, synthetic construct
  misc_feature 1..20: note = chemically synthesized
  source 1..20: mol_type = other DNA
gagcagttcagaggagggtg

SEQ ID NO: 27219 - DNA, 20 bp, synthetic construct
  misc_feature 1..20: note = chemically synthesized
  source 1..20: mol_type = other DNA
gttcagaggagggtggagtt

SEQ ID NO: 27220 - DNA, 20 bp, synthetic construct
  misc_feature 1..20: note = chemically synthesized
  source 1..20: mol_type = other DNA
tcagaggagggtggagttga

SEQ ID NO: 27221 - DNA, 20 bp, synthetic construct
  misc_feature 1..20: note = chemically synthesized
  source 1..20: mol_type = other DNA
cagaggagggtggagttgag

SEQ ID NO: 27222 - DNA, 20 bp, synthetic construct
  misc_feature 1..20: note = chemically synthesized
  source 1..20: mol_type = other DNA
gagggtggagttgagaggcc

SEQ ID NO: 27223 - DNA, 20 bp, synthetic construct
  misc_feature 1..20: note = chemically synthesized
  source 1..20: mol_type = other DNA
agggtggagttgagaggcca

SEQ ID NO: 27224 - DNA, 20 bp, synthetic construct
  misc_feature 1..20: note = chemically synthesized
  source 1..20: mol_type = other DNA
gggtggagttgagaggccaa

SEQ ID NO: 27225 - DNA, 20 bp, synthetic construct
  misc_feature 1..20: note = chemically synthesized
  source 1..20: mol_type = other DNA
gagaggccaagggctgttgc

SEQ ID NO: 27226 - DNA, 20 bp, synthetic construct
  misc_feature 1..20: note = chemically synthesized
  source 1..20: mol_type = other DNA
agaggccaagggctgttgcc

SEQ ID NO: 27227 - DNA, 20 bp, synthetic construct
  misc_feature 1..20: note = chemically synthesized
  source 1..20: mol_type = other DNA
gaggccaagggctgttgcca

SEQ ID NO: 27228 - DNA, 20 bp, synthetic construct
  misc_feature 1..20: note = chemically synthesized
  source 1..20: mol_type = other DNA
gggctgttgccagggaaaca

SEQ ID NO: 27229 - DNA, 20 bp, synthetic construct
  misc_feature 1..20: note = chemically synthesized
  source 1..20: mol_type = other DNA
tgccagggaaacatagttct

SEQ ID NO: 27230 - DNA, 20 bp, synthetic construct
  misc_feature 1..20: note = chemically synthesized
  source 1..20: mol_type = other DNA
gaaacatagttctcggtctt

SEQ ID NO: 27231 - DNA, 20 bp, synthetic construct
  misc_feature 1..20: note = chemically synthesized
  source 1..20: mol_type = other DNA
atagttctcggtcttcagcc

SEQ ID NO: 27232 - DNA, 20 bp, synthetic construct
  misc_feature 1..20: note = chemically synthesized
  source 1..20: mol_type = other DNA
gtcttcagcctggtcttcct

SEQ ID NO: 27233 - DNA, 20 bp, synthetic construct
  misc_feature 1..20: note = chemically synthesized
  source 1..20: mol_type = other DNA
tcttcagcctggtcttcctg

SEQ ID NO: 27234 - DNA, 20 bp, synthetic construct
  misc_feature 1..20: note = chemically synthesized
  source 1..20: mol_type = other DNA
cttcagcctggtcttcctga

SEQ ID NO: 27235 - DNA, 20 bp, synthetic construct
  misc_feature 1..20: note = chemically synthesized
  source 1..20: mol_type = other DNA
agcctggtcttcctgagggc

SEQ ID NO: 27236 - DNA, 20 bp, synthetic construct
  misc_feature 1..20: note = chemically synthesized
  source 1..20: mol_type = other DNA
gcctggtcttcctgagggct

SEQ ID NO: 27237 - DNA, 20 bp, synthetic construct
  misc_feature 1..20: note = chemically synthesized
  source 1..20: mol_type = other DNA
ctggtcttcctgagggctgg

SEQ ID NO: 27238 - DNA, 20 bp, synthetic construct
  misc_feature 1..20: note = chemically synthesized
  source 1..20: mol_type = other DNA
ggctgggagtttgatttgac

SEQ ID NO: 27239 - DNA, 20 bp, synthetic construct
  misc_feature 1..20: note = chemically synthesized
  source 1..20: mol_type = other DNA
tgggagtttgatttgactgg

SEQ ID NO: 27240 - DNA, 20 bp, synthetic construct
  misc_feature 1..20: note = chemically synthesized
  source 1..20: mol_type = other DNA
gggagtttgatttgactggt

SEQ ID NO: 27241 - DNA, 20 bp, synthetic construct
  misc_feature 1..20: note = chemically synthesized
  source 1..20: mol_type = other DNA
gtttgatttgactggtagga

SEQ ID NO: 27242 - DNA, 20 bp, synthetic construct
  misc_feature 1..20: note = chemically synthesized
  source 1..20: mol_type = other DNA
tttgactggtaggaaagtct

SEQ ID NO: 27243 - DNA, 20 bp, synthetic construct
  misc_feature 1..20: note = chemically synthesized
  source 1..20: mol_type = other DNA
gtaggaaagtctgagcttga

SEQ ID NO: 27244 - DNA, 20 bp, synthetic construct
  misc_feature 1..20: note = chemically synthesized
  source 1..20: mol_type = other DNA
taggaaagtctgagcttgat

SEQ ID NO: 27245 - DNA, 20 bp, synthetic construct
  misc_feature 1..20: note = chemically synthesized
  source 1..20: mol_type = other DNA
aggaaagtctgagcttgata

SEQ ID NO: 27246 - DNA, 20 bp, synthetic construct
  misc_feature 1..20: note = chemically synthesized
  source 1..20: mol_type = other DNA
tcctctcccaccttcccaca

SEQ ID NO: 27247 - DNA, 20 bp, synthetic construct
  misc_feature 1..20: note = chemically synthesized
  source 1..20: mol_type = other DNA
cctctcccaccttcccacaa

SEQ ID NO: 27248 - DNA, 20 bp, synthetic construct
  misc_feature 1..20: note = chemically synthesized
  source 1..20: mol_type = other DNA
ctctcccaccttcccacaaa

SEQ ID NO: 27249 - DNA, 20 bp, synthetic construct
  misc_feature 1..20: note = chemically synthesized
  source 1..20: mol_type = other DNA
ctcccaccttcccacaaagg

SEQ ID NO: 27250 - DNA, 20 bp, synthetic construct
  misc_feature 1..20: note = chemically synthesized
  source 1..20: mol_type = other DNA
tcccaccttcccacaaaggg

SEQ ID NO: 27251 - DNA, 20 bp, synthetic construct
  misc_feature 1..20: note = chemically synthesized
  source 1..20: mol_type = other DNA
cccaccttcccacaaaggga

SEQ ID NO: 27252 - DNA, 20 bp, synthetic construct
  misc_feature 1..20: note = chemically synthesized
  source 1..20: mol_type = other DNA
tcccacaaagggagggtaca

SEQ ID NO: 27253 - DNA, 20 bp, synthetic construct
  misc_feature 1..20: note = chemically synthesized
  source 1..20: mol_type = other DNA
agggagggtacatagtttgc

SEQ ID NO: 27254 - DNA, 20 bp, synthetic construct
  misc_feature 1..20: note = chemically synthesized
  source 1..20: mol_type = other DNA
tagtttgctggtgcccctgc

SEQ ID NO: 27255 - DNA, 20 bp, synthetic construct
  misc_feature 1..20: note = chemically synthesized
  source 1..20: mol_type = other DNA
tttgctggtgcccctgctgg

SEQ ID NO: 27256 - DNA, 20 bp, synthetic construct
  misc_feature 1..20: note = chemically synthesized
  source 1..20: mol_type = other DNA
ttgctggtgcccctgctggc

SEQ ID NO: 27257 - DNA, 20 bp, synthetic construct
  misc_feature 1..20: note = chemically synthesized
  source 1..20: mol_type = other DNA
ccctgctggcaggaccaatt

SEQ ID NO: 27258 - DNA, 20 bp, synthetic construct
  misc_feature 1..20: note = chemically synthesized
  source 1..20: mol_type = other DNA
cctgctggcaggaccaattt

SEQ ID NO: 27259 - DNA, 20 bp, synthetic construct
  misc_feature 1..20: note = chemically synthesized
  source 1..20: mol_type = other DNA
tgctggcaggaccaatttag

SEQ ID NO: 27260 - DNA, 20 bp, synthetic construct
  misc_feature 1..20: note = chemically synthesized
  source 1..20: mol_type = other DNA
aggaccaatttaggagtgac

SEQ ID NO: 27261 - DNA, 20 bp, synthetic construct
  misc_feature 1..20: note = chemically synthesized
  source 1..20: mol_type = other DNA
aatttaggagtgaccagaac

SEQ ID NO: 27262 - DNA, 20 bp, synthetic construct
  misc_feature 1..20: note = chemically synthesized
  source 1..20: mol_type = other DNA
atttaggagtgaccagaaca

SEQ ID NO: 27263 - DNA, 20 bp, synthetic construct
  misc_feature 1..20: note = chemically synthesized
  source 1..20: mol_type = other DNA
agtgaccagaacaaggtatg

SEQ ID NO: 27264 - DNA, 20 bp, synthetic construct
  misc_feature 1..20: note = chemically synthesized
  source 1..20: mol_type = other DNA
gaccagaacaaggtatgtgg

SEQ ID NO: 27265 - DNA, 20 bp, synthetic construct
  misc_feature 1..20: note = chemically synthesized
  source 1..20: mol_type = other DNA
cagaacaaggtatgtggaag

SEQ ID NO: 27266 - DNA, 20 bp, synthetic construct
  misc_feature 1..20: note = chemically synthesized
  source 1..20: mol_type = other DNA
agaacaaggtatgtggaagt

SEQ ID NO: 27267 - DNA, 20 bp, synthetic construct
  misc_feature 1..20: note = chemically synthesized
  source 1..20: mol_type = other DNA
aggtatgtggaagtgggttg

SEQ ID NO: 27268 - DNA, 20 bp, synthetic construct
  misc_feature 1..20: note = chemically synthesized
  source 1..20: mol_type = other DNA
ggtatgtggaagtgggttgt

SEQ ID NO: 27269 - DNA, 20 bp, synthetic construct
  misc_feature 1..20: note = chemically synthesized
  source 1..20: mol_type = other DNA
gtatgtggaagtgggttgtg

SEQ ID NO: 27270 - DNA, 20 bp, synthetic construct
  misc_feature 1..20: note = chemically synthesized
  source 1..20: mol_type = other DNA
tatgtggaagtgggttgtgg

SEQ ID NO: 27271 - DNA, 20 bp, synthetic construct
  misc_feature 1..20: note = chemically synthesized
  source 1..20: mol_type = other DNA
ggaagtgggttgtgggggtc

SEQ ID NO: 27272 - DNA, 20 bp, synthetic construct
  misc_feature 1..20: note = chemically synthesized
  source 1..20: mol_type = other DNA
gtgggttgtgggggtccaga

SEQ ID NO: 27273 - DNA, 20 bp, synthetic construct
  misc_feature 1..20: note = chemically synthesized
  source 1..20: mol_type = other DNA
tgtgggggtccagaaagctc

SEQ ID NO: 27274 - DNA, 20 bp, synthetic construct
  misc_feature 1..20: note = chemically synthesized
  source 1..20: mol_type = other DNA
aacctgatgcccattccact

SEQ ID NO: 27275 - DNA, 20 bp, synthetic construct
  misc_feature 1..20: note = chemically synthesized
  source 1..20: mol_type = other DNA
ctgatgcccattccacttgg

SEQ ID NO: 27276 - DNA, 20 bp, synthetic construct
  misc_feature 1..20: note = chemically synthesized
  source 1..20: mol_type = other DNA
cggcattaacctgctgcccc

SEQ ID NO: 27277 - DNA, 20 bp, synthetic construct
  misc_feature 1..20: note = chemically synthesized
  source 1..20: mol_type = other DNA
aacctgctgcccctggcttc

SEQ ID NO: 27278 - DNA, 20 bp, synthetic construct
  misc_feature 1..20: note = chemically synthesized
  source 1..20: mol_type = other DNA
cctgctgcccctggcttcca

SEQ ID NO: 27279 - DNA, 20 bp, synthetic construct
  misc_feature 1..20: note = chemically synthesized
  source 1..20: mol_type = other DNA
cccctggcttccagagctca

SEQ ID NO: 27280 - DNA, 20 bp, synthetic construct
  misc_feature 1..20: note = chemically synthesized
  source 1..20: mol_type = other DNA
gagctcatagcacttccctg

SEQ ID NO: 27281 - DNA, 20 bp, synthetic construct
  misc_feature 1..20: note = chemically synthesized
  source 1..20: mol_type = other DNA
gtggccactctgctgtgtgc

SEQ ID NO: 27282 - DNA, 20 bp, synthetic construct
  misc_feature 1..20: note = chemically synthesized
  source 1..20: mol_type = other DNA
agtcacccctgctctttaac

SEQ ID NO: 27283 - DNA, 20 bp, synthetic construct
  misc_feature 1..20: note = chemically synthesized
  source 1..20: mol_type = other DNA
tcacccctgctctttaacta

SEQ ID NO: 27284 - DNA, 20 bp, synthetic construct
  misc_feature 1..20: note = chemically synthesized
  source 1..20: mol_type = other DNA
ctttaactagagcctccttt

SEQ ID NO: 27285 - DNA, 20 bp, synthetic construct
  misc_feature 1..20: note = chemically synthesized
  source 1..20: mol_type = other DNA
actagagcctccttttggcc

SEQ ID NO: 27286 - DNA, 20 bp, synthetic construct
  misc_feature 1..20: note = chemically synthesized
  source 1..20: mol_type = other DNA
ctagagcctccttttggcct

SEQ ID NO: 27287 - DNA, 20 bp, synthetic construct
  misc_feature 1..20: note = chemically synthesized
  source 1..20: mol_type = other DNA
gcctccttttggcctgggtt

SEQ ID NO: 27288 - DNA, 20 bp, synthetic construct
  misc_feature 1..20: note = chemically synthesized
  source 1..20: mol_type = other DNA
cctccttttggcctgggtta

SEQ ID NO: 27289 - DNA, 20 bp, synthetic construct
  misc_feature 1..20: note = chemically synthesized
  source 1..20: mol_type = other DNA
ttttggcctgggttaaggcc

SEQ ID NO: 27290 - DNA, 20 bp, synthetic construct
  misc_feature 1..20: note = chemically synthesized
  source 1..20: mol_type = other DNA
gcctgggttaaggcctggac

SEQ ID NO: 27291 - DNA, 20 bp, synthetic construct
  misc_feature 1..20: note = chemically synthesized
  source 1..20: mol_type = other DNA
cctgggttaaggcctggact

SEQ ID NO: 27292 - DNA, 20 bp, synthetic construct
  misc_feature 1..20: note = chemically synthesized
  source 1..20: mol_type = other DNA
cctggactgggaccttcctc

SEQ ID NO: 27293 - DNA, 20 bp, synthetic construct
  misc_feature 1..20: note = chemically synthesized
  source 1..20: mol_type = other DNA
ggactgggaccttcctctgg

SEQ ID NO: 27294 - DNA, 20 bp, synthetic construct
  misc_feature 1..20: note = chemically synthesized
  source 1..20: mol_type = other DNA
accttcctctggaagccgtt

SEQ ID NO: 27295 - DNA, 20 bp, synthetic construct
  misc_feature 1..20: note = chemically synthesized
  source 1..20: mol_type = other DNA
ccttcctctggaagccgttc

SEQ ID NO: 27296 - DNA, 20 bp, synthetic construct
  misc_feature 1..20: note = chemically synthesized
  source 1..20: mol_type = other DNA
cttcctctggaagccgttcg

SEQ ID NO: 27297 - DNA, 20 bp, synthetic construct
  misc_feature 1..20: note = chemically synthesized
  source 1..20: mol_type = other DNA
gccgttcggggtgtgtaatg

SEQ ID NO: 27298 - DNA, 20 bp, synthetic construct
  misc_feature 1..20: note = chemically synthesized
  source 1..20: mol_type = other DNA
ttcggggtgtgtaatgtggt

SEQ ID NO: 27299 - DNA, 20 bp, synthetic construct
  misc_feature 1..20: note = chemically synthesized
  source 1..20: mol_type = other DNA
atgtggttagtcattaccct

SEQ ID NO: 27300 - DNA, 20 bp, synthetic construct
  misc_feature 1..20: note = chemically synthesized
  source 1..20: mol_type = other DNA
cctcagtaattaatcacccc

SEQ ID NO: 27301 - DNA, 20 bp, synthetic construct
  misc_feature 1..20: note = chemically synthesized
  source 1..20: mol_type = other DNA
cagtaattaatcacccctgg

SEQ ID NO: 27302 - DNA, 20 bp, synthetic construct
  misc_feature 1..20: note = chemically synthesized
  source 1..20: mol_type = other DNA
cacattcacattcgacctga

SEQ ID NO: 27303 - DNA, 20 bp, synthetic construct
  misc_feature 1..20: note = chemically synthesized
  source 1..20: mol_type = other DNA
acattcgacctgatagttta

SEQ ID NO: 27304 - DNA, 20 bp, synthetic construct
  misc_feature 1..20: note = chemically synthesized
  source 1..20: mol_type = other DNA
attcgacctgatagtttaca

SEQ ID NO: 27305 - DNA, 20 bp, synthetic construct
  misc_feature 1..20: note = chemically synthesized
  source 1..20: mol_type = other DNA
ttcgacctgatagtttacag

SEQ ID NO: 27306 - DNA, 20 bp, synthetic construct
  misc_feature 1..20: note = chemically synthesized
  source 1..20: mol_type = other DNA
tcgacctgatagtttacaga

SEQ ID NO: 27307 - DNA, 20 bp, synthetic construct
  misc_feature 1..20: note = chemically synthesized
  source 1..20: mol_type = other DNA
gaacttcccaacaattctta

SEQ ID NO: 27308 - DNA, 20 bp, synthetic construct
  misc_feature 1..20: note = chemically synthesized
  source 1..20: mol_type = other DNA
aacttcccaacaattcttac

SEQ ID NO: 27309 - DNA, 20 bp, synthetic construct
  misc_feature 1..20: note = chemically synthesized
  source 1..20: mol_type = other DNA
ctgtttttatgctcatttta

SEQ ID NO: 27310 - DNA, 20 bp, synthetic construct
  misc_feature 1..20: note = chemically synthesized
  source 1..20: mol_type = other DNA
ttttatgctcattttacaga

SEQ ID NO: 27311 - DNA, 20 bp, synthetic construct
  misc_feature 1..20: note = chemically synthesized
  source 1..20: mol_type = other DNA
tttatgctcattttacagat

SEQ ID NO: 27312 - DNA, 20 bp, synthetic construct
  misc_feature 1..20: note = chemically synthesized
  source 1..20: mol_type = other DNA
attttacagataggaattcc

SEQ ID NO: 27313 - DNA, 20 bp, synthetic construct
  misc_feature 1..20: note = chemically synthesized
  source 1..20: mol_type = other DNA
cagataggaattccaagact

SEQ ID NO: 27314 - DNA, 20 bp, synthetic construct
  misc_feature 1..20: note = chemically synthesized
  source 1..20: mol_type = other DNA
gataggaattccaagactca

SEQ ID NO: 27315 - DNA, 20 bp, synthetic construct
  misc_feature 1..20: note = chemically synthesized
  source 1..20: mol_type = other DNA
gagaaatcaaatgactatcc

SEQ ID NO: 27316 - DNA, 20 bp, synthetic construct
  misc_feature 1..20: note = chemically synthesized
  source 1..20: mol_type = other DNA
gaaatcaaatgactatccca

SEQ ID NO: 27317 - DNA, 20 bp, synthetic construct
  misc_feature 1..20: note = chemically synthesized
  source 1..20: mol_type = other DNA
actatcccagagttacaatc

SEQ ID NO: 27318 - DNA, 20 bp, synthetic construct
  misc_feature 1..20: note = chemically synthesized
  source 1..20: mol_type = other DNA
atcccagagttacaatctag

SEQ ID NO: 27319 - DNA, 20 bp, synthetic construct
  misc_feature 1..20: note = chemically synthesized
  source 1..20: mol_type = other DNA
agttacaatctagtggataa

SEQ ID NO: 27320 - DNA, 20 bp, synthetic construct
  misc_feature 1..20: note = chemically synthesized
  source 1..20: mol_type = other DNA
ttacaatctagtggataata

SEQ ID NO: 27321 - DNA, 20 bp, synthetic construct
  misc_feature 1..20: note = chemically synthesized
  source 1..20: mol_type = other DNA
aatctagtggataatagagc

SEQ ID NO: 27322 - DNA, 20 bp, synthetic construct
  misc_feature 1..20: note = chemically synthesized
  source 1..20: mol_type = other DNA
atctagtggataatagagct

SEQ ID NO: 27323 - DNA, 20 bp, synthetic construct
  misc_feature 1..20: note = chemically synthesized
  source 1..20: mol_type = other DNA
ggataatagagctaggcctc

SEQ ID NO: 27324 - DNA, 20 bp, synthetic construct
  misc_feature 1..20: note = chemically synthesized
  source 1..20: mol_type = other DNA
tagagctaggcctccagtct

SEQ ID NO: 27325 - DNA, 20 bp, synthetic construct
  misc_feature 1..20: note = chemically synthesized
  source 1..20: mol_type = other DNA
tccttgttcttctgaatctt

SEQ ID NO: 27326 - DNA, 20 bp, synthetic construct
  misc_feature 1..20: note = chemically synthesized
  source 1..20: mol_type = other DNA
ccttgttcttctgaatcttg

SEQ ID NO: 27327 - DNA, 20 bp, synthetic construct
  misc_feature 1..20: note = chemically synthesized
  source 1..20: mol_type = other DNA
ttcttctgaatcttgaggct

SEQ ID NO: 27328 - DNA, 20 bp, synthetic construct
  misc_feature 1..20: note = chemically synthesized
  source 1..20: mol_type = other DNA
atcacatgactttttcacat

SEQ ID NO: 27329 - DNA, 20 bp, synthetic construct
  misc_feature 1..20: note = chemically synthesized
  source 1..20: mol_type = other DNA
ttttcacattggtgacatac

SEQ ID NO: 27330 - DNA, 20 bp, synthetic construct
  misc_feature 1..20: note = chemically synthesized
  source 1..20: mol_type = other DNA
cattggtgacatactagaaa

SEQ ID NO: 27331 - DNA, 20 bp, synthetic construct
  misc_feature 1..20: note = chemically synthesized
  source 1..20: mol_type = other DNA
attggtgacatactagaaat

SEQ ID NO: 27332 - DNA, 20 bp, synthetic construct
  misc_feature 1..20: note = chemically synthesized
  source 1..20: mol_type = other DNA
ttggtgacatactagaaatg

SEQ ID NO: 27333 - DNA, 20 bp, synthetic construct
  misc_feature 1..20: note = chemically synthesized
  source 1..20: mol_type = other DNA
tggtgacatactagaaatgg

SEQ ID NO: 27334 - DNA, 20 bp, synthetic construct
  misc_feature 1..20: note = chemically synthesized
  source 1..20: mol_type = other DNA
gggggtcattccttcccata

SEQ ID NO: 27335 - DNA, 20 bp, synthetic construct
  misc_feature 1..20: note = chemically synthesized
  source 1..20: mol_type = other DNA
agtaaaatgaaataaaataa

SEQ ID NO: 27336 - DNA, 20 bp, synthetic construct
  misc_feature 1..20: note = chemically synthesized
  source 1..20: mol_type = other DNA
aaatgaaataaaataaaagc

SEQ ID NO: 27337 - DNA, 20 bp, synthetic construct
  misc_feature 1..20: note = chemically synthesized
  source 1..20: mol_type = other DNA
tgaaataaaataaaagccag

SEQ ID NO: 27338 - DNA, 20 bp, synthetic construct
  misc_feature 1..20: note = chemically synthesized
  source 1..20: mol_type = other DNA
gaaataaaataaaagccagt

SEQ ID NO: 27339 - DNA, 20 bp, synthetic construct
  misc_feature 1..20: note = chemically synthesized
  source 1..20: mol_type = other DNA
ataaaataaaagccagtagg

SEQ ID NO: 27340 - DNA, 20 bp, synthetic construct
  misc_feature 1..20: note = chemically synthesized
  source 1..20: mol_type = other DNA
taaaataaaagccagtaggt

SEQ ID NO: 27341 - DNA, 20 bp, synthetic construct
  misc_feature 1..20: note = chemically synthesized
  source 1..20: mol_type = other DNA
aaagccagtaggtgggctaa

SEQ ID NO: 27342 - DNA, 20 bp, synthetic construct
  misc_feature 1..20: note = chemically synthesized
  source 1..20: mol_type = other DNA
tttaacccttttgatgtctc

SEQ ID NO: 27343 - DNA, 20 bp, synthetic construct
  misc_feature 1..20: note = chemically synthesized
  source 1..20: mol_type = other DNA
atgtctcaagttcctatgct

SEQ ID NO: 27344 - DNA, 20 bp, synthetic construct
  misc_feature 1..20: note = chemically synthesized
  source 1..20: mol_type = other DNA
tgtctcaagttcctatgctt

SEQ ID NO: 27345 - DNA, 20 bp, synthetic construct
  misc_feature 1..20: note = chemically synthesized
  source 1..20: mol_type = other DNA
gtctcaagttcctatgctta

SEQ ID NO: 27346 - DNA, 20 bp, synthetic construct
  misc_feature 1..20: note = chemically synthesized
  source 1..20: mol_type = other DNA
tctcaagttcctatgcttag

SEQ ID NO: 27347 - DNA, 20 bp, synthetic construct
  misc_feature 1..20: note = chemically synthesized
  source 1..20: mol_type = other DNA
aagttcctatgcttaggggc

SEQ ID NO: 27348 - DNA, 20 bp, synthetic construct
  misc_feature 1..20: note = chemically synthesized
  source 1..20: mol_type = other DNA
agttcctatgcttaggggcc

SEQ ID NO: 27349 - DNA, 20 bp, synthetic construct
  misc_feature 1..20: note = chemically synthesized
  source 1..20: mol_type = other DNA
tatgcttaggggccaggtgt

SEQ ID NO: 27350 - DNA, 20 bp, synthetic construct
  misc_feature 1..20: note = chemically synthesized
  source 1..20: mol_type = other DNA
aatccccgtaaatgcccaat

SEQ ID NO: 27351 - DNA, 20 bp, synthetic construct
  misc_feature 1..20: note = chemically synthesized
  source 1..20: mol_type = other DNA
atccccgtaaatgcccaatg

SEQ ID NO: 27352 - DNA, 20 bp, synthetic construct
  misc_feature 1..20: note = chemically synthesized
  source 1..20: mol_type = other DNA
cccaatgaggctctcaaatt

SEQ ID NO: 27353 - DNA, 20 bp, synthetic construct
  misc_feature 1..20: note = chemically synthesized
  source 1..20: mol_type = other DNA
aatgaggctctcaaattgag

SEQ ID NO: 27354 - DNA, 20 bp, synthetic construct
  misc_feature 1..20: note = chemically synthesized
  source 1..20: mol_type = other DNA
attgagaagttgattttcat

SEQ ID NO: 27355 - DNA, 20 bp, synthetic construct
  misc_feature 1..20: note = chemically synthesized
  source 1..20: mol_type = other DNA
tgagaagttgattttcatca

SEQ ID NO: 27356 - DNA, 20 bp, synthetic construct
  misc_feature 1..20: note = chemically synthesized
  source 1..20: mol_type = other DNA
gattttcatcagagtaaatg

SEQ ID NO: 27357 - DNA, 20 bp, synthetic construct
  misc_feature 1..20: note = chemically synthesized
  source 1..20: mol_type = other DNA
tacacatcaataaatcaatg

SEQ ID NO: 27358 - DNA, 20 bp, synthetic construct
  misc_feature 1..20: note = chemically synthesized
  source 1..20: mol_type = other DNA
gtagccctaattttgccaca

SEQ ID NO: 27359 - DNA, 20 bp, synthetic construct
  misc_feature 1..20: note = chemically synthesized
  source 1..20: mol_type = other DNA
tagccctaattttgccacac

SEQ ID NO: 27360 - DNA, 20 bp, synthetic construct
  misc_feature 1..20: note = chemically synthesized
  source 1..20: mol_type = other DNA
gccacacaggaaatcaattc

SEQ ID NO: 27361 - DNA, 20 bp, synthetic construct
  misc_feature 1..20: note = chemically synthesized
  source 1..20: mol_type = other DNA
ccagtctttctaaatcatca

SEQ ID NO: 27362 - DNA, 20 bp, synthetic construct
  misc_feature 1..20: note = chemically synthesized
  source 1..20: mol_type = other DNA
catcaaagatgttatgaaca

SEQ ID NO: 27363 - DNA, 20 bp, synthetic construct
  misc_feature 1..20: note = chemically synthesized
  source 1..20: mol_type = other DNA
caaagtaatttcacaaatta

SEQ ID NO: 27364 - DNA, 20 bp, synthetic construct
  misc_feature 1..20: note = chemically synthesized
  source 1..20: mol_type = other DNA
gtaatttcacaaattatggc

SEQ ID NO: 27365 - DNA, 20 bp, synthetic construct
  misc_feature 1..20: note = chemically synthesized
  source 1..20: mol_type = other DNA
aacacatttattgatgactg

SEQ ID NO: 27366 - DNA, 20 bp, synthetic construct
  misc_feature 1..20: note = chemically synthesized
  source 1..20: mol_type = other DNA
atttattgatgactgcagtt

SEQ ID NO: 27367 - DNA, 20 bp, synthetic construct
  misc_feature 1..20: note = chemically synthesized
  source 1..20: mol_type = other DNA
tttattgatgactgcagttt

SEQ ID NO: 27368 - DNA, 20 bp, synthetic construct
  misc_feature 1..20: note = chemically synthesized
  source 1..20: mol_type = other DNA
atgactgcagtttaggaatt

SEQ ID NO: 27369 - DNA, 20 bp, synthetic construct
  misc_feature 1..20: note = chemically synthesized
  source 1..20: mol_type = other DNA
tttaggaatttagaatctgt

SEQ ID NO: 27370 - DNA, 20 bp, synthetic construct
  misc_feature 1..20: note = chemically synthesized
  source 1..20: mol_type = other DNA
gtgagcactgtaatataata

SEQ ID NO: 27371 - DNA, 20 bp, synthetic construct
  misc_feature 1..20: note = chemically synthesized
  source 1..20: mol_type = other DNA
tgtaatataatatggtacac

SEQ ID NO: 27372 - DNA, 20 bp, synthetic construct
  misc_feature 1..20: note = chemically synthesized
  source 1..20: mol_type = other DNA
ataatatggtacaccggcat

SEQ ID NO: 27373 - DNA, 20 bp, synthetic construct
  misc_feature 1..20: note = chemically synthesized
  source 1..20: mol_type = other DNA
atggtacaccggcatgagct

SEQ ID NO: 27374 - DNA, 20 bp, synthetic construct
  misc_feature 1..20: note = chemically synthesized
  source 1..20: mol_type = other DNA
ggcatgagctgagtgaaata

SEQ ID NO: 27375 - DNA, 20 bp, synthetic construct
  misc_feature 1..20: note = chemically synthesized
  source 1..20: mol_type = other DNA
tgagtgaaatacagattata

SEQ ID NO: 27376 - DNA, 20 bp, synthetic construct
  misc_feature 1..20: note = chemically synthesized
  source 1..20: mol_type = other DNA
tgtaatgcatcatttgctat

SEQ ID NO: 27377 - DNA, 20 bp, synthetic construct
  misc_feature 1..20: note = chemically synthesized
  source 1..20: mol_type = other DNA
aatgcatcatttgctattag

SEQ ID NO: 27378 - DNA, 20 bp, synthetic construct
  misc_feature 1..20: note = chemically synthesized
  source 1..20: mol_type = other DNA
atcatttgctattagtggac

SEQ ID NO: 27379 - DNA, 20 bp, synthetic construct
  misc_feature 1..20: note = chemically synthesized
  source 1..20: mol_type = other DNA
agtggactggtaataattac

SEQ ID NO: 27380 - DNA, 20 bp, synthetic construct
  misc_feature 1..20: note = chemically synthesized
  source 1..20: mol_type = other DNA
ggtaataattaccagtttca

SEQ ID NO: 27381 - DNA, 20 bp, synthetic construct
  misc_feature 1..20: note = chemically synthesized
  source 1..20: mol_type = other DNA
aataattaccagtttcaaag

SEQ ID NO: 27382 - DNA, 20 bp, synthetic construct
  misc_feature 1..20: note = chemically synthesized
  source 1..20: mol_type = other DNA
agctctctccatgtaatctt

SEQ ID NO: 27383 - DNA, 20 bp, synthetic construct
  misc_feature 1..20: note = chemically synthesized
  source 1..20: mol_type = other DNA
atctttagtctcaatcgtaa

SEQ ID NO: 27384 - DNA, 20 bp, synthetic construct
  misc_feature 1..20: note = chemically synthesized
  source 1..20: mol_type = other DNA
cattgacattatgattacac

SEQ ID NO: 27385 - DNA, 20 bp, synthetic construct
  misc_feature 1..20: note = chemically synthesized
  source 1..20: mol_type = other DNA
cactagctgccctcatgatc

SEQ ID NO: 27386 - DNA, 20 bp, synthetic construct
  misc_feature 1..20: note = chemically synthesized
  source 1..20: mol_type = other DNA
ccctcatgatctagaatatc

SEQ ID NO: 27387 - DNA, 20 bp, synthetic construct
  misc_feature 1..20: note = chemically synthesized
  source 1..20: mol_type = other DNA
gatctagaatatctagttga

SEQ ID NO: 27388 - DNA, 20 bp, synthetic construct
  misc_feature 1..20: note = chemically synthesized
  source 1..20: mol_type = other DNA
atctagaatatctagttgat

SEQ ID NO: 27389 - DNA, 20 bp, synthetic construct
  misc_feature 1..20: note = chemically synthesized
  source 1..20: mol_type = other DNA
atgggaatactaaaatgcga

SEQ ID NO: 27390 - DNA, 20 bp, synthetic construct
  misc_feature 1..20: note = chemically synthesized
  source 1..20: mol_type = other DNA
gtatgttgtatgctcattat

SEQ ID NO: 27391 - DNA, 20 bp, synthetic construct
  misc_feature 1..20: note = chemically synthesized
  source 1..20: mol_type = other DNA
ttttctctgacctgatgtat

SEQ ID NO: 27392 - DNA, 20 bp, synthetic construct
  misc_feature 1..20: note = chemically synthesized
  source 1..20: mol_type = other DNA
ttctctgacctgatgtatga

SEQ ID NO: 27393 - DNA, 20 bp, synthetic construct
  misc_feature 1..20: note = chemically synthesized
  source 1..20: mol_type = other DNA
ctctgacctgatgtatgaga

SEQ ID NO: 27394 - DNA, 20 bp, synthetic construct
  misc_feature 1..20: note = chemically synthesized
  source 1..20: mol_type = other DNA
ctgacctgatgtatgagaga

SEQ ID NO: 27395 - DNA, 20 bp, synthetic construct
  misc_feature 1..20: note = chemically synthesized
  source 1..20: mol_type = other DNA
tgacctgatgtatgagagag

SEQ ID NO: 27396 - DNA, 20 bp, synthetic construct
  misc_feature 1..20: note = chemically synthesized
  source 1..20: mol_type = other DNA
gacctgatgtatgagagaga

SEQ ID NO: 27397 - DNA, 20 bp, synthetic construct
  misc_feature 1..20: note = chemically synthesized
  source 1..20: mol_type = other DNA
acctgatgtatgagagagag

SEQ ID NO: 27398 - DNA, 20 bp, synthetic construct
  misc_feature 1..20: note = chemically synthesized
  source 1..20: mol_type = other DNA
ctgatgtatgagagagaggg

SEQ ID NO: 27399 - DNA, 20 bp, synthetic construct
  misc_feature 1..20: note = chemically synthesized
  source 1..20: mol_type = other DNA
tgatgtatgagagagagggg

SEQ ID NO: 27400 - DNA, 20 bp, synthetic construct
  misc_feature 1..20: note = chemically synthesized
  source 1..20: mol_type = other DNA
gagaggggaggataacatca

SEQ ID NO: 27401 - DNA, 20 bp, synthetic construct
  misc_feature 1..20: note = chemically synthesized
  source 1..20: mol_type = other DNA
atcacagtgttaacatactg

SEQ ID NO: 27402 - DNA, 20 bp, synthetic construct
  misc_feature 1..20: note = chemically synthesized
  source 1..20: mol_type = other DNA
ctgtagcatgatcacataac

SEQ ID NO: 27403 - DNA, 20 bp, synthetic construct
  misc_feature 1..20: note = chemically synthesized
  source 1..20: mol_type = other DNA
acataactggctctgaaaaa

SEQ ID NO: 27404 - DNA, 20 bp, synthetic construct
  misc_feature 1..20: note = chemically synthesized
  source 1..20: mol_type = other DNA
actggctctgaaaaaaagtt

SEQ ID NO: 27405 - DNA, 20 bp, synthetic construct
  misc_feature 1..20: note = chemically synthesized
  source 1..20: mol_type = other DNA
ctggctctgaaaaaaagttt

SEQ ID NO: 27406 - DNA, 20 bp, synthetic construct
  misc_feature 1..20: note = chemically synthesized
  source 1..20: mol_type = other DNA
gaaaaaaagtttaggatgct

SEQ ID NO: 27407 - DNA, 20 bp, synthetic construct
  misc_feature 1..20: note = chemically synthesized
  source 1..20: mol_type = other DNA
aaaaaaagtttaggatgctc

SEQ ID NO: 27408 - DNA, 20 bp, synthetic construct
  misc_feature 1..20: note = chemically synthesized
  source 1..20: mol_type = other DNA
aaaaaagtttaggatgctca

SEQ ID NO: 27409 - DNA, 20 bp, synthetic construct
  misc_feature 1..20: note = chemically synthesized
  source 1..20: mol_type = other DNA
aaagtttaggatgctcaggg

SEQ ID NO: 27410 - DNA, 20 bp, synthetic construct
  misc_feature 1..20: note = chemically synthesized
  source 1..20: mol_type = other DNA
ctcagggcagcaaaataaaa

SEQ ID NO: 27411 - DNA, 20 bp, synthetic construct
  misc_feature 1..20: note = chemically synthesized
  source 1..20: mol_type = other DNA
aaaatggacttttctcattt

SEQ ID NO: 27412 - DNA, 20 bp, synthetic construct
  misc_feature 1..20: note = chemically synthesized
  source 1..20: mol_type = other DNA
tctcatttaagcctttttga

SEQ ID NO: 27413 - DNA, 20 bp, synthetic construct
  misc_feature 1..20: note = chemically synthesized
  source 1..20: mol_type = other DNA
ctcatttaagcctttttgaa

SEQ ID NO: 27414 - DNA, 20 bp, synthetic construct
  misc_feature 1..20: note = chemically synthesized
  source 1..20: mol_type = other DNA
ctttttgaaaggatacaaat

SEQ ID NO: 27415 - DNA, 20 bp, synthetic construct
  misc_feature 1..20: note = chemically synthesized
  source 1..20: mol_type = other DNA
tacaaatgagatccttgatg

SEQ ID NO: 27416 - DNA, 20 bp, synthetic construct
  misc_feature 1..20: note = chemically synthesized
  source 1..20: mol_type = other DNA
tgatgtagtgctgtatgcca

SEQ ID NO: 27417 - DNA, 20 bp, synthetic construct
  misc_feature 1..20: note = chemically synthesized
  source 1..20: mol_type = other DNA
gtgctgtatgccacagattt

SEQ ID NO: 27418 - DNA, 20 bp, synthetic construct
  misc_feature 1..20: note = chemically synthesized
  source 1..20: mol_type = other DNA
ttatcaatgactacaattca

SEQ ID NO: 27419 - DNA, 20 bp, synthetic construct
  misc_feature 1..20: note = chemically synthesized
  source 1..20: mol_type = other DNA
attcatggcacatgtgaaac

SEQ ID NO: 27420 - DNA, 20 bp, synthetic construct
  misc_feature 1..20: note = chemically synthesized
  source 1..20: mol_type = other DNA
aaaccagcaccactaattat

SEQ ID NO: 27421 - DNA, 20 bp, synthetic construct
  misc_feature 1..20: note = chemically synthesized
  source 1..20: mol_type = other DNA
agcaccactaattatgagtc

SEQ ID NO: 27422 - DNA, 20 bp, synthetic construct
  misc_feature 1..20: note = chemically synthesized
  source 1..20: mol_type = other DNA
actaattatgagtctagtcc

SEQ ID NO: 27423 - DNA, 20 bp, synthetic construct
  misc_feature 1..20: note = chemically synthesized
  source 1..20: mol_type = other DNA
gatttcaatcgatgttttat

SEQ ID NO: 27424 - DNA, 20 bp, synthetic construct
  misc_feature 1..20: note = chemically synthesized
  source 1..20: mol_type = other DNA
atttcaatcgatgttttata

SEQ ID NO: 27425 - DNA, 20 bp, synthetic construct
  misc_feature 1..20: note = chemically synthesized
  source 1..20: mol_type = other DNA
ataaggtaaaatataatttt

SEQ ID NO: 27426 - DNA, 20 bp, synthetic construct
  misc_feature 1..20: note = chemically synthesized
  source 1..20: mol_type = other DNA
taaggtaaaatataatttta

SEQ ID NO: 27427 - DNA, 20 bp, synthetic construct
  misc_feature 1..20: note = chemically synthesized
  source 1..20: mol_type = other DNA
aaatataattttaaggcatt

SEQ ID NO: 27428 - DNA, 20 bp, synthetic construct
  misc_feature 1..20: note = chemically synthesized
  source 1..20: mol_type = other DNA
atataattttaaggcatttg

SEQ ID NO: 27429 - DNA, 20 bp, synthetic construct
  misc_feature 1..20: note = chemically synthesized
  source 1..20: mol_type = other DNA
tttggagtgatgaacgtgtt

SEQ ID NO: 27430 - DNA, 20 bp, synthetic construct
  misc_feature 1..20: note = chemically synthesized
  source 1..20: mol_type = other DNA
ttggagtgatgaacgtgtta

SEQ ID NO: 27431 - DNA, 20 bp, synthetic construct
  misc_feature 1..20: note = chemically synthesized
  source 1..20: mol_type = other DNA
tgatgaacgtgttaaggact

SEQ ID NO: 27432 - DNA, 20 bp, synthetic construct
  misc_feature 1..20: note = chemically synthesized
  source 1..20: mol_type = other DNA
gtgttaaggacttggattat

SEQ ID NO: 27433 - DNA, 20 bp, synthetic construct
  misc_feature 1..20: note = chemically synthesized
  source 1..20: mol_type = other DNA
atctttttacttgcccaact

SEQ ID NO: 27434 - DNA, 20 bp, synthetic construct
  misc_feature 1..20: note = chemically synthesized
  source 1..20: mol_type = other DNA
acttgcccaactcagatcgt

SEQ ID NO: 27435 - DNA, 20 bp, synthetic construct
  misc_feature 1..20: note = chemically synthesized
  source 1..20: mol_type = other DNA
cttgcccaactcagatcgtc

SEQ ID NO: 27436 - DNA, 20 bp, synthetic construct
  misc_feature 1..20: note = chemically synthesized
  source 1..20: mol_type = other DNA
actcagatcgtcaggctaaa

SEQ ID NO: 27437 - DNA, 20 bp, synthetic construct
  misc_feature 1..20: note = chemically synthesized
  source 1..20: mol_type = other DNA
ctcagatcgtcaggctaaat

SEQ ID NO: 27438 - DNA, 20 bp, synthetic construct
  misc_feature 1..20: note = chemically synthesized
  source 1..20: mol_type = other DNA
gtcaggctaaataggaatga

SEQ ID NO: 27439 - DNA, 20 bp, synthetic construct
  misc_feature 1..20: note = chemically synthesized
  source 1..20: mol_type = other DNA
aaataggaatgatagtcacc

SEQ ID NO: 27440 - DNA, 20 bp, synthetic construct
  misc_feature 1..20: note = chemically synthesized
  source 1..20: mol_type = other DNA
ataggaatgatagtcaccca

SEQ ID NO: 27441 - DNA, 20 bp, synthetic construct
  misc_feature 1..20: note = chemically synthesized
  source 1..20: mol_type = other DNA
atgatagtcacccagagatc

SEQ ID NO: 27442 - DNA, 20 bp, synthetic construct
  misc_feature 1..20: note = chemically synthesized
  source 1..20: mol_type = other DNA
tgatagtcacccagagatct

SEQ ID NO: 27443 - DNA, 20 bp, synthetic construct
  misc_feature 1..20: note = chemically synthesized
  source 1..20: mol_type = other DNA
gatagtcacccagagatcta

SEQ ID NO: 27444 - DNA, 20 bp, synthetic construct
  misc_feature 1..20: note = chemically synthesized
  source 1..20: mol_type = other DNA
tagtcacccagagatctagg

SEQ ID NO: 27445 - DNA, 20 bp, synthetic construct
  misc_feature 1..20: note = chemically synthesized
  source 1..20: mol_type = other DNA
agtcacccagagatctaggg

SEQ ID NO: 27446 - DNA, 20 bp, synthetic construct
  misc_feature 1..20: note = chemically synthesized
  source 1..20: mol_type = other DNA
cccagagatctagggaggac

SEQ ID NO: 27447 - DNA, 20 bp, synthetic construct
  misc_feature 1..20: note = chemically synthesized
  source 1..20: mol_type = other DNA
ccagagatctagggaggaca

SEQ ID NO: 27448 - DNA, 20 bp, synthetic construct
  misc_feature 1..20: note = chemically synthesized
  source 1..20: mol_type = other DNA
agagatctagggaggacaag

SEQ ID NO: 27449 - DNA, 20 bp, synthetic construct
  misc_feature 1..20: note = chemically synthesized
  source 1..20: mol_type = other DNA
gagatctagggaggacaagg

SEQ ID NO: 27450 - DNA, 20 bp, synthetic construct
  misc_feature 1..20: note = chemically synthesized
  source 1..20: mol_type = other DNA
atctagggaggacaaggagg

SEQ ID NO: 27451 - DNA, 20 bp, synthetic construct
  misc_feature 1..20: note = chemically synthesized
  source 1..20: mol_type = other DNA
ggaggacaaggaggaagcca

SEQ ID NO: 27452 - DNA, 20 bp, synthetic construct
  misc_feature 1..20: note = chemically synthesized
  source 1..20: mol_type = other DNA
aggacaaggaggaagccaca

SEQ ID NO: 27453 - DNA, 20 bp, synthetic construct
  misc_feature 1..20: note = chemically synthesized
  source 1..20: mol_type = other DNA
ggacaaggaggaagccacag

SEQ ID NO: 27454 - DNA, 20 bp, synthetic construct
  misc_feature 1..20: note = chemically synthesized
  source 1..20: mol_type = other DNA
ggaagccacagaggatcatg

SEQ ID NO: 27455 - DNA, 20 bp, synthetic construct
  misc_feature 1..20: note = chemically synthesized
  source 1..20: mol_type = other DNA
gccacagaggatcatgtagt

SEQ ID NO: 27456 - DNA, 20 bp, synthetic construct
  misc_feature 1..20: note = chemically synthesized
  source 1..20: mol_type = other DNA
gaggatcatgtagttggaac

SEQ ID NO: 27457 - DNA, 20 bp, synthetic construct
  misc_feature 1..20: note = chemically synthesized
  source 1..20: mol_type = other DNA
atcatgtagttggaaccaga

SEQ ID NO: 27458 - DNA, 20 bp, synthetic construct
  misc_feature 1..20: note = chemically synthesized
  source 1..20: mol_type = other DNA
gaaccagatagttttttttc

SEQ ID NO: 27459 - DNA, 20 bp, synthetic construct
  misc_feature 1..20: note = chemically synthesized
  source 1..20: mol_type = other DNA
agttttttttccagcctatt

SEQ ID NO: 27460 - DNA, 20 bp, synthetic construct
  misc_feature 1..20: note = chemically synthesized
  source 1..20: mol_type = other DNA
gttttttttccagcctattt

SEQ ID NO: 27461 - DNA, 20 bp, synthetic construct
  misc_feature 1..20: note = chemically synthesized
  source 1..20: mol_type = other DNA
ttccagcctatttgggaccc

SEQ ID NO: 27462 - DNA, 20 bp, synthetic construct
  misc_feature 1..20: note = chemically synthesized
  source 1..20: mol_type = other DNA
ttataaaaatgttctcaatg

SEQ ID NO: 27463 - DNA, 20 bp, synthetic construct
  misc_feature 1..20: note = chemically synthesized
  source 1..20: mol_type = other DNA
aagctttttatttccctttg

SEQ ID NO: 27464 - DNA, 20 bp, synthetic construct
  misc_feature 1..20: note = chemically synthesized
  source 1..20: mol_type = other DNA
gctttttatttccctttgaa

SEQ ID NO: 27465 - DNA, 20 bp, synthetic construct
  misc_feature 1..20: note = chemically synthesized
  source 1..20: mol_type = other DNA
tttttatttccctttgaaga

SEQ ID NO: 27466 - DNA, 20 bp, synthetic construct
  misc_feature 1..20: note = chemically synthesized
  source 1..20: mol_type = other DNA
ttttatttccctttgaagag

SEQ ID NO: 27467 - DNA, 20 bp, synthetic construct
  misc_feature 1..20: note = chemically synthesized
  source 1..20: mol_type = other DNA
ttatttccctttgaagagag

SEQ ID NO: 27468 - DNA, 20 bp, synthetic construct
  misc_feature 1..20: note = chemically synthesized
  source 1..20: mol_type = other DNA
tatttccctttgaagagagg

SEQ ID NO: 27469 - DNA, 20 bp, synthetic construct
  misc_feature 1..20: note = chemically synthesized
  source 1..20: mol_type = other DNA
agagaggaggcaaacaaaaa

SEQ ID NO: 27470 - DNA, 20 bp, synthetic construct
  misc_feature 1..20: note = chemically synthesized
  source 1..20: mol_type = other DNA
gagaggaggcaaacaaaaat

SEQ ID NO: 27471 - DNA, 20 bp, synthetic construct
  misc_feature 1..20: note = chemically synthesized
  source 1..20: mol_type = other DNA
aggaggcaaacaaaaatagg

SEQ ID NO: 27472 - DNA, 20 bp, synthetic construct
  misc_feature 1..20: note = chemically synthesized
  source 1..20: mol_type = other DNA
agataatgtgatactaatgt

SEQ ID NO: 27473 - DNA, 20 bp, synthetic construct
  misc_feature 1..20: note = chemically synthesized
  source 1..20: mol_type = other DNA
cttttttcccccttccacat

SEQ ID NO: 27474 - DNA, 20 bp, synthetic construct
  misc_feature 1..20: note = chemically synthesized
  source 1..20: mol_type = other DNA
aaatgtttgaaacctaattt

SEQ ID NO: 27475 - DNA, 20 bp, synthetic construct
  misc_feature 1..20: note = chemically synthesized
  source 1..20: mol_type = other DNA
cttaccatctaatcttgttt

SEQ ID NO: 27476 - DNA, 20 bp, synthetic construct
  misc_feature 1..20: note = chemically synthesized
  source 1..20: mol_type = other DNA
taccatctaatcttgtttaa

SEQ ID NO: 27477 - DNA, 20 bp, synthetic construct
  misc_feature 1..20: note = chemically synthesized
  source 1..20: mol_type = other DNA
tcttgtttaagagatttacc

SEQ ID NO: 27478 - DNA, 20 bp, synthetic construct
  misc_feature 1..20: note = chemically synthesized
  source 1..20: mol_type = other DNA
cttgtttaagagatttaccc

SEQ ID NO: 27479 - DNA, 20 bp, synthetic construct
  misc_feature 1..20: note = chemically synthesized
  source 1..20: mol_type = other DNA
tgtttaagagatttacccag

SEQ ID NO: 27480 - DNA, 20 bp, synthetic construct
  misc_feature 1..20: note = chemically synthesized
  source 1..20: mol_type = other DNA
taagagatttacccaggagt

SEQ ID NO: 27481 - DNA, 20 bp, synthetic construct
  misc_feature 1..20: note = chemically synthesized
  source 1..20: mol_type = other DNA
acccaggagtgagatatatt

SEQ ID NO: 27482 - DNA, 20 bp, synthetic construct
  misc_feature 1..20: note = chemically synthesized
  source 1..20: mol_type = other DNA
caggagtgagatatattgag

SEQ ID NO: 27483 - DNA, 20 bp, synthetic construct
  misc_feature 1..20: note = chemically synthesized
  source 1..20: mol_type = other DNA
aggagtgagatatattgagt

SEQ ID NO: 27484 - DNA, 20 bp, synthetic construct
  misc_feature 1..20: note = chemically synthesized
  source 1..20: mol_type = other DNA
gggattataaatgcgttgta

SEQ ID NO: 27485 - DNA, 20 bp, synthetic construct
  misc_feature 1..20: note = chemically synthesized
  source 1..20: mol_type = other DNA
tgcgttgtaaagtaaattac

SEQ ID NO: 27486 - DNA, 20 bp, synthetic construct
  misc_feature 1..20: note = chemically synthesized
  source 1..20: mol_type = other DNA
gcgttgtaaagtaaattaca

SEQ ID NO: 27487 - DNA, 20 bp, synthetic construct
  misc_feature 1..20: note = chemically synthesized
  source 1..20: mol_type = other DNA
tgtaaagtaaattacaaggt

SEQ ID NO: 27488 - DNA, 20 bp, synthetic construct
  misc_feature 1..20: note = chemically synthesized
  source 1..20: mol_type = other DNA
gtaaagtaaattacaaggtc

SEQ ID NO: 27489 - DNA, 20 bp, synthetic construct
  misc_feature 1..20: note = chemically synthesized
  source 1..20: mol_type = other DNA
taaagtaaattacaaggtca

SEQ ID NO: 27490 - DNA, 20 bp, synthetic construct
  misc_feature 1..20: note = chemically synthesized
  source 1..20: mol_type = other DNA
agtaaattacaaggtcaggg

SEQ ID NO: 27491 - DNA, 20 bp, synthetic construct
  misc_feature 1..20: note = chemically synthesized
  source 1..20: mol_type = other DNA
gtaaattacaaggtcagggc

SEQ ID NO: 27492 - DNA, 20 bp, synthetic construct
  misc_feature 1..20: note = chemically synthesized
  source 1..20: mol_type = other DNA
aaattacaaggtcagggcag

SEQ ID NO: 27493 - DNA, 20 bp, synthetic construct
  misc_feature 1..20: note = chemically synthesized
  source 1..20: mol_type = other DNA
cagggcaggagtccattatt

SEQ ID NO: 27494 - DNA, 20 bp, synthetic construct
  misc_feature 1..20: note = chemically synthesized
  source 1..20: mol_type = other DNA
caggagtccattatttagac

SEQ ID NO: 27495 - DNA, 20 bp, synthetic construct
  misc_feature 1..20: note = chemically synthesized
  source 1..20: mol_type = other DNA
cattatttagacaagtgctt

SEQ ID NO: 27496 - DNA, 20 bp, synthetic construct
  misc_feature 1..20: note = chemically synthesized
  source 1..20: mol_type = other DNA
atttagacaagtgcttgagc

SEQ ID NO: 27497 - DNA, 20 bp, synthetic construct
  misc_feature 1..20: note = chemically synthesized
  source 1..20: mol_type = other DNA
tttagacaagtgcttgagcg

SEQ ID NO: 27498 - DNA, 20 bp, synthetic construct
  misc_feature 1..20: note = chemically synthesized
  source 1..20: mol_type = other DNA
gacaagtgcttgagcgaggc

SEQ ID NO: 27499 - DNA, 20 bp, synthetic construct
  misc_feature 1..20: note = chemically synthesized
  source 1..20: mol_type = other DNA
tgagcgaggctggcttattt

SEQ ID NO: 27500 - DNA, 20 bp, synthetic construct
  misc_feature 1..20: note = chemically synthesized
  source 1..20: mol_type = other DNA
gctggcttattttggaatac

SEQ ID NO: 27501 - DNA, 20 bp, synthetic construct
  misc_feature 1..20: note = chemically synthesized
  source 1..20: mol_type = other DNA
tattttggaataccagtgtt

SEQ ID NO: 27502 - DNA, 20 bp, synthetic construct
  misc_feature 1..20: note = chemically synthesized
  source 1..20: mol_type = other DNA
attttggaataccagtgttt

SEQ ID NO: 27503 - DNA, 20 bp, synthetic construct
  misc_feature 1..20: note = chemically synthesized
  source 1..20: mol_type = other DNA
ttttggaataccagtgtttg

SEQ ID NO: 27504 - DNA, 20 bp, synthetic construct
  misc_feature 1..20: note = chemically synthesized
  source 1..20: mol_type = other DNA
tttggaataccagtgtttgg

SEQ ID NO: 27505 - DNA, 20 bp, synthetic construct
  misc_feature 1..20: note = chemically synthesized
  source 1..20: mol_type = other DNA
accagtgtttgggggctcct

SEQ ID NO: 27506 - DNA, 20 bp, synthetic construct
  misc_feature 1..20: note = chemically synthesized
  source 1..20: mol_type = other DNA
agtgtttgggggctcctgag

SEQ ID NO: 27507 - DNA, 20 bp, synthetic construct
  misc_feature 1..20: note = chemically synthesized
  source 1..20: mol_type = other DNA
ggctcctgagaagaccctgc

SEQ ID NO: 27508 - DNA, 20 bp, synthetic construct
  misc_feature 1..20: note = chemically synthesized
  source 1..20: mol_type = other DNA
tttctttctgacttgctaaa

SEQ ID NO: 27509 - DNA, 20 bp, synthetic construct
  misc_feature 1..20: note = chemically synthesized
  source 1..20: mol_type = other DNA
tctttctgacttgctaaatg

SEQ ID NO: 27510 - DNA, 20 bp, synthetic construct
  misc_feature 1..20: note = chemically synthesized
  source 1..20: mol_type = other DNA
ctttctgacttgctaaatgg

SEQ ID NO: 27511 - DNA, 20 bp, synthetic construct
  misc_feature 1..20: note = chemically synthesized
  source 1..20: mol_type = other DNA
attctcactcttaacctccc

SEQ ID NO: 27512 - DNA, 20 bp, synthetic construct
  misc_feature 1..20: note = chemically synthesized
  source 1..20: mol_type = other DNA
ctcactcttaacctccctgg

SEQ ID NO: 27513 - DNA, 20 bp, synthetic construct
  misc_feature 1..20: note = chemically synthesized
  source 1..20: mol_type = other DNA
ttttttttttttttccttct

SEQ ID NO: 27514 - DNA, 20 bp, synthetic construct
  misc_feature 1..20: note = chemically synthesized
  source 1..20: mol_type = other DNA
ttttttttttccttcttaga

SEQ ID NO: 27515 - DNA, 20 bp, synthetic construct
  misc_feature 1..20: note = chemically synthesized
  source 1..20: mol_type = other DNA
agaaagttactgacaaatac

SEQ ID NO: 27516 - DNA, 20 bp, synthetic construct
  misc_feature 1..20: note = chemically synthesized
  source 1..20: mol_type = other DNA
ttactgacaaatactagctg

SEQ ID NO: 27517 - DNA, 20 bp, synthetic construct
  misc_feature 1..20: note = chemically synthesized
  source 1..20: mol_type = other DNA
aaatactagctgtggcctta

SEQ ID NO: 27518 - DNA, 20 bp, synthetic construct
  misc_feature 1..20: note = chemically synthesized
  source 1..20: mol_type = other DNA
gtggccttaaagaactcttg

SEQ ID NO: 27519 - DNA, 20 bp, synthetic construct
  misc_feature 1..20: note = chemically synthesized
  source 1..20: mol_type = other DNA
tcttgcagcccttcttttaa

SEQ ID NO: 27520 - DNA, 20 bp, synthetic construct
  misc_feature 1..20: note = chemically synthesized
  source 1..20: mol_type = other DNA
tgcagcccttcttttaaaag

SEQ ID NO: 27521 - DNA, 20 bp, synthetic construct
  misc_feature 1..20: note = chemically synthesized
  source 1..20: mol_type = other DNA
gcagcccttcttttaaaaga

SEQ ID NO: 27522 - DNA, 20 bp, synthetic construct
  misc_feature 1..20: note = chemically synthesized
  source 1..20: mol_type = other DNA
agcccttcttttaaaagaag

SEQ ID NO: 27523 - DNA, 20 bp, synthetic construct
  misc_feature 1..20: note = chemically synthesized
  source 1..20: mol_type = other DNA
ttcttttaaaagaaggagaa

SEQ ID NO: 27524 - DNA, 20 bp, synthetic construct
  misc_feature 1..20: note = chemically synthesized
  source 1..20: mol_type = other DNA
gagaaaagtttgttatttct

SEQ ID NO: 27525 - DNA, 20 bp, synthetic construct
  misc_feature 1..20: note = chemically synthesized
  source 1..20: mol_type = other DNA
ttatttctcagttatatttt

SEQ ID NO: 27526 - DNA, 20 bp, synthetic construct
  misc_feature 1..20: note = chemically synthesized
  source 1..20: mol_type = other DNA
tatttctcagttatatttta

SEQ ID NO: 27527 - DNA, 20 bp, synthetic construct
  misc_feature 1..20: note = chemically synthesized
  source 1..20: mol_type = other DNA
tattttaaggcttttttttt

SEQ ID NO: 27528 - DNA, 20 bp, synthetic construct
  misc_feature 1..20: note = chemically synthesized
  source 1..20: mol_type = other DNA
gctttttttttcagaatctc

SEQ ID NO: 27529 - DNA, 20 bp, synthetic construct
  misc_feature 1..20: note = chemically synthesized
  source 1..20: mol_type = other DNA
ctttttttttcagaatctct

SEQ ID NO: 27530 - DNA, 20 bp, synthetic construct
  misc_feature 1..20: note = chemically synthesized
  source 1..20: mol_type = other DNA
tttttttcagaatctctggg

SEQ ID NO: 27531 - DNA, 20 bp, synthetic construct
  misc_feature 1..20: note = chemically synthesized
  source 1..20: mol_type = other DNA
tttttctcatcctcgtcctt

SEQ ID NO: 27532 - DNA, 20 bp, synthetic construct
  misc_feature 1..20: note = chemically synthesized
  source 1..20: mol_type = other DNA
ttctgccctttttaatgttg

SEQ ID NO: 27533 - DNA, 20 bp, synthetic construct
  misc_feature 1..20: note = chemically synthesized
  source 1..20: mol_type = other DNA
tttttaatgttgcagttgac

SEQ ID NO: 27534 - DNA, 20 bp, synthetic construct
  misc_feature 1..20: note = chemically synthesized
  source 1..20: mol_type = other DNA
gcagttgactagtaaactgt

SEQ ID NO: 27535 - DNA, 20 bp, synthetic construct
  misc_feature 1..20: note = chemically synthesized
  source 1..20: mol_type = other DNA
ttgactagtaaactgttggt

SEQ ID NO: 27536 - DNA, 20 bp, synthetic construct
  misc_feature 1..20: note = chemically synthesized
  source 1..20: mol_type = other DNA
atatatatatatatttaatg

SEQ ID NO: 27537 - DNA, 20 bp, synthetic construct
  misc_feature 1..20: note = chemically synthesized
  source 1..20: mol_type = other DNA
ctccccatatatatttaatt

SEQ ID NO: 27538 - DNA, 20 bp, synthetic construct
  misc_feature 1..20: note = chemically synthesized
  source 1..20: mol_type = other DNA
cccaaatgaaatattttgtg

SEQ ID NO: 27539 - DNA, 20 bp, synthetic construct
  misc_feature 1..20: note = chemically synthesized
  source 1..20: mol_type = other DNA
atgaaatattttgtgaagtc

SEQ ID NO: 27540 - DNA, 20 bp, synthetic construct
  misc_feature 1..20: note = chemically synthesized
  source 1..20: mol_type = other DNA
aatattttgtgaagtcaagc

SEQ ID NO: 27541 - DNA, 20 bp, synthetic construct
  misc_feature 1..20: note = chemically synthesized
  source 1..20: mol_type = other DNA
aagctggcccttctttgcca

SEQ ID NO: 27542 - DNA, 20 bp, synthetic construct
  misc_feature 1..20: note = chemically synthesized
  source 1..20: mol_type = other DNA
ctggcccttctttgccaaag

SEQ ID NO: 27543 - DNA, 20 bp, synthetic construct
  misc_feature 1..20: note = chemically synthesized
  source 1..20: mol_type = other DNA
aaagtggcatttaccactct

SEQ ID NO: 27544 - DNA, 20 bp, synthetic construct
  misc_feature 1..20: note = chemically synthesized
  source 1..20: mol_type = other DNA
aagtggcatttaccactctt

SEQ ID NO: 27545 - DNA, 20 bp, synthetic construct
  misc_feature 1..20: note = chemically synthesized
  source 1..20: mol_type = other DNA
taccactcttgggttctttt

SEQ ID NO: 27546 - DNA, 20 bp, synthetic construct
  misc_feature 1..20: note = chemically synthesized
  source 1..20: mol_type = other DNA
actcttgggttcttttcagc

SEQ ID NO: 27547 - DNA, 20 bp, synthetic construct
  misc_feature 1..20: note = chemically synthesized
  source 1..20: mol_type = other DNA
ctcttgggttcttttcagca

SEQ ID NO: 27548 - DNA, 20 bp, synthetic construct
  misc_feature 1..20: note = chemically synthesized
  source 1..20: mol_type = other DNA
tcttgggttcttttcagcaa

SEQ ID NO: 27549 - DNA, 20 bp, synthetic construct
  misc_feature 1..20: note = chemically synthesized
  source 1..20: mol_type = other DNA
caagggaaataatgtgactt

SEQ ID NO: 27550 - DNA, 20 bp, synthetic construct
  misc_feature 1..20: note = chemically synthesized
  source 1..20: mol_type = other DNA
gggaaataatgtgacttaag

SEQ ID NO: 27551 - DNA, 20 bp, synthetic construct
  misc_feature 1..20: note = chemically synthesized
  source 1..20: mol_type = other DNA
ggaaataatgtgacttaagc

SEQ ID NO: 27552 - DNA, 20 bp, synthetic construct
  misc_feature 1..20: note = chemically synthesized
  source 1..20: mol_type = other DNA
gaaataatgtgacttaagca

SEQ ID NO: 27553 - DNA, 20 bp, synthetic construct
  misc_feature 1..20: note = chemically synthesized
  source 1..20: mol_type = other DNA
acttaagcagggcccctctc

SEQ ID NO: 27554 - DNA, 20 bp, synthetic construct
  misc_feature 1..20: note = chemically synthesized
  source 1..20: mol_type = other DNA
aagcagggcccctctccaga

SEQ ID NO: 27555 - DNA, 20 bp, synthetic construct
  misc_feature 1..20: note = chemically synthesized
  source 1..20: mol_type = other DNA
gggcccctctccagacggct

SEQ ID NO: 27556 - DNA, 20 bp, synthetic construct
  misc_feature 1..20: note = chemically synthesized
  source 1..20: mol_type = other DNA
tctccagacggcttggctac

SEQ ID NO: 27557 - DNA, 20 bp, synthetic construct
  misc_feature 1..20: note = chemically synthesized
  source 1..20: mol_type = other DNA
cagacggcttggctactggc

SEQ ID NO: 27558 - DNA, 20 bp, synthetic construct
  misc_feature 1..20: note = chemically synthesized
  source 1..20: mol_type = other DNA
gacggcttggctactggcca

SEQ ID NO: 27559 - DNA, 20 bp, synthetic construct
  misc_feature 1..20: note = chemically synthesized
  source 1..20: mol_type = other DNA
ggctactggccagagttgac

SEQ ID NO: 27560 - DNA, 20 bp, synthetic construct
  misc_feature 1..20: note = chemically synthesized
  source 1..20: mol_type = other DNA
ctttctgtttctttctcaac

SEQ ID NO: 27561 - DNA, 20 bp, synthetic construct
  misc_feature 1..20: note = chemically synthesized
  source 1..20: mol_type = other DNA
ttctgtttctttctcaactg

SEQ ID NO: 27562 - DNA, 20 bp, synthetic construct
  misc_feature 1..20: note = chemically synthesized
  source 1..20: mol_type = other DNA
tttctttctcaactggagct

SEQ ID NO: 27563 - DNA, 20 bp, synthetic construct
  misc_feature 1..20: note = chemically synthesized
  source 1..20: mol_type = other DNA
tctcaactggagctgagtcc

SEQ ID NO: 27564 - DNA, 20 bp, synthetic construct
  misc_feature 1..20: note = chemically synthesized
  source 1..20: mol_type = other DNA
actggagctgagtcccagcc

SEQ ID NO: 27565 - DNA, 20 bp, synthetic construct
  misc_feature 1..20: note = chemically synthesized
  source 1..20: mol_type = other DNA
ctggagctgagtcccagccg

SEQ ID NO: 27566 - DNA, 20 bp, synthetic construct
  misc_feature 1..20: note = chemically synthesized
  source 1..20: mol_type = other DNA
tggagctgagtcccagccga

SEQ ID NO: 27567 - DNA, 20 bp, synthetic construct
  misc_feature 1..20: note = chemically synthesized
  source 1..20: mol_type = other DNA
ctgagtcccagccgagggcg

SEQ ID NO: 27568 - DNA, 20 bp, synthetic construct
  misc_feature 1..20: note = chemically synthesized
  source 1..20: mol_type = other DNA
tgagtcccagccgagggcgc

SEQ ID NO: 27569 - DNA, 20 bp, synthetic construct
  misc_feature 1..20: note = chemically synthesized
  source 1..20: mol_type = other DNA
gcgcaggatgttgtataatt

SEQ ID NO: 27570 - DNA, 20 bp, synthetic construct
  misc_feature 1..20: note = chemically synthesized
  source 1..20: mol_type = other DNA
tataatttggttcacgttgt

SEQ ID NO: 27571 - DNA, 20 bp, synthetic construct
  misc_feature 1..20: note = chemically synthesized
  source 1..20: mol_type = other DNA
tgttagcctctcaaaacaat

SEQ ID NO: 27572 - DNA, 20 bp, synthetic construct
  misc_feature 1..20: note = chemically synthesized
  source 1..20: mol_type = other DNA
gttagcctctcaaaacaatg

SEQ ID NO: 27573 - DNA, 20 bp, synthetic construct
  misc_feature 1..20: note = chemically synthesized
  source 1..20: mol_type = other DNA
tagcctctcaaaacaatgag

SEQ ID NO: 27574 - DNA, 20 bp, synthetic construct
  misc_feature 1..20: note = chemically synthesized
  source 1..20: mol_type = other DNA
agcctctcaaaacaatgagg

SEQ ID NO: 27575 - DNA, 20 bp, synthetic construct
  misc_feature 1..20: note = chemically synthesized
  source 1..20: mol_type = other DNA
cctctcaaaacaatgaggag

SEQ ID NO: 27576 - DNA, 20 bp, synthetic construct
  misc_feature 1..20: note = chemically synthesized
  source 1..20: mol_type = other DNA
ctctcaaaacaatgaggagg

SEQ ID NO: 27577 - DNA, 20 bp, synthetic construct
  misc_feature 1..20: note = chemically synthesized
  source 1..20: mol_type = other DNA
caaaacaatgaggaggagga

SEQ ID NO: 27578 - DNA, 20 bp, synthetic construct
  misc_feature 1..20: note = chemically synthesized
  source 1..20: mol_type = other DNA
caatgaggaggaggatagtg

SEQ ID NO: 27579 - DNA, 20 bp, synthetic construct
  misc_feature 1..20: note = chemically synthesized
  source 1..20: mol_type = other DNA
gaggatagtgtagcatttct

SEQ ID NO: 27580 - DNA, 20 bp, synthetic construct
  misc_feature 1..20: note = chemically synthesized
  source 1..20: mol_type = other DNA
tctcagcctgctgcctgtca

SEQ ID NO: 27581 - DNA, 20 bp, synthetic construct
  misc_feature 1..20: note = chemically synthesized
  source 1..20: mol_type = other DNA
cctgctgcctgtcatggcgc

SEQ ID NO: 27582 - DNA, 20 bp, synthetic construct
  misc_feature 1..20: note = chemically synthesized
  source 1..20: mol_type = other DNA
gttttaactgttccttaaac

SEQ ID NO: 27583 - DNA, 20 bp, synthetic construct
  misc_feature 1..20: note = chemically synthesized
  source 1..20: mol_type = other DNA
ttttaactgttccttaaact

SEQ ID NO: 27584 - DNA, 20 bp, synthetic construct
  misc_feature 1..20: note = chemically synthesized
  source 1..20: mol_type = other DNA
ctaggatgctgtgtctgctt

SEQ ID NO: 27585 - DNA, 20 bp, synthetic construct
  misc_feature 1..20: note = chemically synthesized
  source 1..20: mol_type = other DNA
gatgctgtgtctgcttaagt

SEQ ID NO: 27586 - DNA, 20 bp, synthetic construct
  misc_feature 1..20: note = chemically synthesized
  source 1..20: mol_type = other DNA
gtgtctgcttaagtcggcac

SEQ ID NO: 27587 - DNA, 20 bp, synthetic construct
  misc_feature 1..20: note = chemically synthesized
  source 1..20: mol_type = other DNA
gccactcctcctaacttttc

SEQ ID NO: 27588 - DNA, 20 bp, synthetic construct
  misc_feature 1..20: note = chemically synthesized
  source 1..20: mol_type = other DNA
cagacttgcatttgtctgac

SEQ ID NO: 27589 - DNA, 20 bp, synthetic construct
  misc_feature 1..20: note = chemically synthesized
  source 1..20: mol_type = other DNA
agacttgcatttgtctgacc

SEQ ID NO: 27590 - DNA, 20 bp, synthetic construct
  misc_feature 1..20: note = chemically synthesized
  source 1..20: mol_type = other DNA
gacttgcatttgtctgaccg

SEQ ID NO: 27591 - DNA, 20 bp, synthetic construct
  misc_feature 1..20: note = chemically synthesized
  source 1..20: mol_type = other DNA
acttgcatttgtctgaccgg

SEQ ID NO: 27592 - DNA, 20 bp, synthetic construct
  misc_feature 1..20: note = chemically synthesized
  source 1..20: mol_type = other DNA
tgaccgggggacaactccta

SEQ ID NO: 27593 - DNA, 20 bp, synthetic construct
  misc_feature 1..20: note = chemically synthesized
  source 1..20: mol_type = other DNA
gggggacaactcctaaagat

SEQ ID NO: 27594 - DNA, 20 bp, synthetic construct
  misc_feature 1..20: note = chemically synthesized
  source 1..20: mol_type = other DNA
caactcctaaagattggata

SEQ ID NO: 27595 - DNA, 20 bp, synthetic construct
  misc_feature 1..20: note = chemically synthesized
  source 1..20: mol_type = other DNA
ctatccgttaaatctgaatg

SEQ ID NO: 27596 - DNA, 20 bp, synthetic construct
  misc_feature 1..20: note = chemically synthesized
  source 1..20: mol_type = other DNA
tctgaatgaagtttttcttt

SEQ ID NO: 27597 - DNA, 20 bp, synthetic construct
  misc_feature 1..20: note = chemically synthesized
  source 1..20: mol_type = other DNA
agattttttaaacattcttt

SEQ ID NO: 27598 - DNA, 20 bp, synthetic construct
  misc_feature 1..20: note = chemically synthesized
  source 1..20: mol_type = other DNA
aacattctttgagataaaaa

SEQ ID NO: 27599 - DNA, 20 bp, synthetic construct
  misc_feature 1..20: note = chemically synthesized
  source 1..20: mol_type = other DNA
gataaaaatggacgtcccca

SEQ ID NO: 27600 - DNA, 20 bp, synthetic construct
  misc_feature 1..20: note = chemically synthesized
  source 1..20: mol_type = other DNA
ataaaaatggacgtccccat

SEQ ID NO: 27601 - DNA, 20 bp, synthetic construct
  misc_feature 1..20: note = chemically synthesized
  source 1..20: mol_type = other DNA
taaaaatggacgtccccatg

SEQ ID NO: 27602 - DNA, 20 bp, synthetic construct
  misc_feature 1..20: note = chemically synthesized
  source 1..20: mol_type = other DNA
gacgtccccatggggtgttg

SEQ ID NO: 27603 - DNA, 20 bp, synthetic construct
  misc_feature 1..20: note = chemically synthesized
  source 1..20: mol_type = other DNA
gggtgttgtggaaccaaaat

SEQ ID NO: 27604 - DNA, 20 bp, synthetic construct
  misc_feature 1..20: note = chemically synthesized
  source 1..20: mol_type = other DNA
ggtgttgtggaaccaaaatt

SEQ ID NO: 27605 - DNA, 20 bp, synthetic construct
  misc_feature 1..20: note = chemically synthesized
  source 1..20: mol_type = other DNA
gggactcactgatcctccca

SEQ ID NO: 27606 - DNA, 20 bp, synthetic construct
  misc_feature 1..20: note = chemically synthesized
  source 1..20: mol_type = other DNA
tcactgatcctcccacagtc

SEQ ID NO: 27607 - DNA, 20 bp, synthetic construct
  misc_feature 1..20: note = chemically synthesized
  source 1..20: mol_type = other DNA
cactgatcctcccacagtct

SEQ ID NO: 27608 - DNA, 20 bp, synthetic construct
  misc_feature 1..20: note = chemically synthesized
  source 1..20: mol_type = other DNA
actgatcctcccacagtctg

SEQ ID NO: 27609 - DNA, 20 bp, synthetic construct
  misc_feature 1..20: note = chemically synthesized
  source 1..20: mol_type = other DNA
cctcccacagtctggggtgt

SEQ ID NO: 27610 - DNA, 20 bp, synthetic construct
  misc_feature 1..20: note = chemically synthesized
  source 1..20: mol_type = other DNA
ctggggtgtgagaatgttgc

SEQ ID NO: 27611 - DNA, 20 bp, synthetic construct
  misc_feature 1..20: note = chemically synthesized
  source 1..20: mol_type = other DNA
tgttgctagtcttttttcca

SEQ ID NO: 27612 - DNA, 20 bp, synthetic construct
  misc_feature 1..20: note = chemically synthesized
  source 1..20: mol_type = other DNA
tgctagtcttttttccacgg

SEQ ID NO: 27613 - DNA, 20 bp, synthetic construct
  misc_feature 1..20: note = chemically synthesized
  source 1..20: mol_type = other DNA
tttccacggaagtattttat

SEQ ID NO: 27614 - DNA, 20 bp, synthetic construct
  misc_feature 1..20: note = chemically synthesized
  source 1..20: mol_type = other DNA
attttaacaatatcaacaat

SEQ ID NO: 27615 - DNA, 20 bp, synthetic construct
  misc_feature 1..20: note = chemically synthesized
  source 1..20: mol_type = other DNA
tatcaacaattagtgtgttt

SEQ ID NO: 27616 - DNA, 20 bp, synthetic construct
  misc_feature 1..20: note = chemically synthesized
  source 1..20: mol_type = other DNA
atcaacaattagtgtgtttc

SEQ ID NO: 27617 - DNA, 20 bp, synthetic construct
  misc_feature 1..20: note = chemically synthesized
  source 1..20: mol_type = other DNA
gtgtttcaggctaatgctga

SEQ ID NO: 27618 - DNA, 20 bp, synthetic construct
  misc_feature 1..20: note = chemically synthesized
  source 1..20: mol_type = other DNA
gctaatgctgaaagcatctt

SEQ ID NO: 27619 - DNA, 20 bp, synthetic construct
  misc_feature 1..20: note = chemically synthesized
  source 1..20: mol_type = other DNA
ctaatgctgaaagcatcttt

SEQ ID NO: 27620 - DNA, 20 bp, synthetic construct
  misc_feature 1..20: note = chemically synthesized
  source 1..20: mol_type = other DNA
taatgctgaaagcatcttta

SEQ ID NO: 27621 - DNA, 20 bp, synthetic construct
  misc_feature 1..20: note = chemically synthesized
  source 1..20: mol_type = other DNA
tgaaagcatctttagggcca

SEQ ID NO: 27622 - DNA, 20 bp, synthetic construct
  misc_feature 1..20: note = chemically synthesized
  source 1..20: mol_type = other DNA
tttagggccatagaacattg

SEQ ID NO: 27623 - DNA, 20 bp, synthetic construct
  misc_feature 1..20: note = chemically synthesized
  source 1..20: mol_type = other DNA
gggccatagaacattgtagt

SEQ ID NO: 27624 - DNA, 20 bp, synthetic construct
  misc_feature 1..20: note = chemically synthesized
  source 1..20: mol_type = other DNA
ctatgaaatgtttgcctatt

SEQ ID NO: 27625 - DNA, 20 bp, synthetic construct
  misc_feature 1..20: note = chemically synthesized
  source 1..20: mol_type = other DNA
gaaatgtttgcctatttaga

SEQ ID NO: 27626 - DNA, 20 bp, synthetic construct
  misc_feature 1..20: note = chemically synthesized
  source 1..20: mol_type = other DNA
tagaaagttcacctgtcacc

SEQ ID NO: 27627 - DNA, 20 bp, synthetic construct
  misc_feature 1..20: note = chemically synthesized
  source 1..20: mol_type = other DNA
agaaagttcacctgtcaccc

SEQ ID NO: 27628 - DNA, 20 bp, synthetic construct
  misc_feature 1..20: note = chemically synthesized
  source 1..20: mol_type = other DNA
gaaagttcacctgtcaccca

SEQ ID NO: 27629 - DNA, 20 bp, synthetic construct
  misc_feature 1..20: note = chemically synthesized
  source 1..20: mol_type = other DNA
aaagttcacctgtcacccag

SEQ ID NO: 27630 - DNA, 20 bp, synthetic construct
  misc_feature 1..20: note = chemically synthesized
  source 1..20: mol_type = other DNA
aagttcacctgtcacccagg

SEQ ID NO: 27631 - DNA, 20 bp, synthetic construct
  misc_feature 1..20: note = chemically synthesized
  source 1..20: mol_type = other DNA
agttcacctgtcacccaggg

SEQ ID NO: 27632 - DNA, 20 bp, synthetic construct
  misc_feature 1..20: note = chemically synthesized
  source 1..20: mol_type = other DNA
acctgtcacccaggggggaa

SEQ ID NO: 27633 - DNA, 20 bp, synthetic construct
  misc_feature 1..20: note = chemically synthesized
  source 1..20: mol_type = other DNA
gtcacccaggggggaataga

SEQ ID NO: 27634 - DNA, 20 bp, synthetic construct
  misc_feature 1..20: note = chemically synthesized
  source 1..20: mol_type = other DNA
cccaggggggaatagaaagc

SEQ ID NO: 27635 - DNA, 20 bp, synthetic construct
  misc_feature 1..20: note = chemically synthesized
  source 1..20: mol_type = other DNA
ccaggggggaatagaaagct

SEQ ID NO: 27636 - DNA, 20 bp, synthetic construct
  misc_feature 1..20: note = chemically synthesized
  source 1..20: mol_type = other DNA
gggaatagaaagctgggatt

SEQ ID NO: 27637 - DNA, 20 bp, synthetic construct
  misc_feature 1..20: note = chemically synthesized
  source 1..20: mol_type = other DNA
ggaatagaaagctgggattt

SEQ ID NO: 27638 - DNA, 20 bp, synthetic construct
  misc_feature 1..20: note = chemically synthesized
  source 1..20: mol_type = other DNA
atagaaagctgggatttagg

SEQ ID NO: 27639 - DNA, 20 bp, synthetic construct
  misc_feature 1..20: note = chemically synthesized
  source 1..20: mol_type = other DNA
ctgggatttaggaagccaaa

SEQ ID NO: 27640 - DNA, 20 bp, synthetic construct
  misc_feature 1..20: note = chemically synthesized
  source 1..20: mol_type = other DNA
aggaagccaaaaagtttcct

SEQ ID NO: 27641 - DNA, 20 bp, synthetic construct
  misc_feature 1..20: note = chemically synthesized
  source 1..20: mol_type = other DNA
ggaagccaaaaagtttcctt

SEQ ID NO: 27642 - DNA, 20 bp, synthetic construct
  misc_feature 1..20: note = chemically synthesized
  source 1..20: mol_type = other DNA
ttccttgggtcaccttgtcc

SEQ ID NO: 27643 - DNA, 20 bp, synthetic construct
  misc_feature 1..20: note = chemically synthesized
  source 1..20: mol_type = other DNA
gtccaagtttctcacttaac

SEQ ID NO: 27644 - DNA, 20 bp, synthetic construct
  misc_feature 1..20: note = chemically synthesized
  source 1..20: mol_type = other DNA
tccaagtttctcacttaaca

SEQ ID NO: 27645 - DNA, 20 bp, synthetic construct
  misc_feature 1..20: note = chemically synthesized
  source 1..20: mol_type = other DNA
caagtttctcacttaacaag

SEQ ID NO: 27646 - DNA, 20 bp, synthetic construct
  misc_feature 1..20: note = chemically synthesized
  source 1..20: mol_type = other DNA
aagtttctcacttaacaagg

SEQ ID NO: 27647 - DNA, 20 bp, synthetic construct
  misc_feature 1..20: note = chemically synthesized
  source 1..20: mol_type = other DNA
ctcacttaacaaggaggaaa

SEQ ID NO: 27648 - DNA, 20 bp, synthetic construct
  misc_feature 1..20: note = chemically synthesized
  source 1..20: mol_type = other DNA
cacttaacaaggaggaaaca

SEQ ID NO: 27649 - DNA, 20 bp, synthetic construct
  misc_feature 1..20: note = chemically synthesized
  source 1..20: mol_type = other DNA
acttaacaaggaggaaacag

SEQ ID NO: 27650 - DNA, 20 bp, synthetic construct
  misc_feature 1..20: note = chemically synthesized
  source 1..20: mol_type = other DNA
aaggaggaaacagaggcaca

SEQ ID NO: 27651 - DNA, 20 bp, synthetic construct
  misc_feature 1..20: note = chemically synthesized
  source 1..20: mol_type = other DNA
ggaggaaacagaggcacatg

SEQ ID NO: 27652 - DNA, 20 bp, synthetic construct
  misc_feature 1..20: note = chemically synthesized
  source 1..20: mol_type = other DNA
aaacagaggcacatggagat

SEQ ID NO: 27653 - DNA, 20 bp, synthetic construct
  misc_feature 1..20: note = chemically synthesized
  source 1..20: mol_type = other DNA
agaggcacatggagatgaga

SEQ ID NO: 27654 - DNA, 20 bp, synthetic construct
  misc_feature 1..20: note = chemically synthesized
  source 1..20: mol_type = other DNA
agatggcttgccccaaacta

SEQ ID NO: 27655 - DNA, 20 bp, synthetic construct
  misc_feature 1..20: note = chemically synthesized
  source 1..20: mol_type = other DNA
ttgccccaaactacagctga

SEQ ID NO: 27656 - DNA, 20 bp, synthetic construct
  misc_feature 1..20: note = chemically synthesized
  source 1..20: mol_type = other DNA
caaactacagctgatggaac

SEQ ID NO: 27657 - DNA, 20 bp, synthetic construct
  misc_feature 1..20: note = chemically synthesized
  source 1..20: mol_type = other DNA
ctacagctgatggaactgga

SEQ ID NO: 27658 - DNA, 20 bp, synthetic construct
  misc_feature 1..20: note = chemically synthesized
  source 1..20: mol_type = other DNA
gctgatggaactggaaagtt

SEQ ID NO: 27659 - DNA, 20 bp, synthetic construct
  misc_feature 1..20: note = chemically synthesized
  source 1..20: mol_type = other DNA
gatggaactggaaagtttag

SEQ ID NO: 27660 - DNA, 20 bp, synthetic construct
  misc_feature 1..20: note = chemically synthesized
  source 1..20: mol_type = other DNA
aagtttagaagacatttgtt

SEQ ID NO: 27661 - DNA, 20 bp, synthetic construct
  misc_feature 1..20: note = chemically synthesized
  source 1..20: mol_type = other DNA
agtttagaagacatttgttg

SEQ ID NO: 27662 - DNA, 20 bp, synthetic construct
  misc_feature 1..20: note = chemically synthesized
  source 1..20: mol_type = other DNA
aagacatttgttgaggtgcc

SEQ ID NO: 27663 - DNA, 20 bp, synthetic construct
  misc_feature 1..20: note = chemically synthesized
  source 1..20: mol_type = other DNA
ttgttgaggtgcctagaatg

SEQ ID NO: 27664 - DNA, 20 bp, synthetic construct
  misc_feature 1..20: note = chemically synthesized
  source 1..20: mol_type = other DNA
tgttgaggtgcctagaatgt

SEQ ID NO: 27665 - DNA, 20 bp, synthetic construct
  misc_feature 1..20: note = chemically synthesized
  source 1..20: mol_type = other DNA
gttgaggtgcctagaatgta

SEQ ID NO: 27666 - DNA, 20 bp, synthetic construct
  misc_feature 1..20: note = chemically synthesized
  source 1..20: mol_type = other DNA
atgtagggaccttcatcctc

SEQ ID NO: 27667 - DNA, 20 bp, synthetic construct
  misc_feature 1..20: note = chemically synthesized
  source 1..20: mol_type = other DNA
agggaccttcatcctcaagc

SEQ ID NO: 27668 - DNA, 20 bp, synthetic construct
  misc_feature 1..20: note = chemically synthesized
  source 1..20: mol_type = other DNA
cttcatcctcaagccagaac

SEQ ID NO: 27669 - DNA, 20 bp, synthetic construct
  misc_feature 1..20: note = chemically synthesized
  source 1..20: mol_type = other DNA
atcctcaagccagaactggt

SEQ ID NO: 27670 - DNA, 20 bp, synthetic construct
  misc_feature 1..20: note = chemically synthesized
  source 1..20: mol_type = other DNA
tcctcaagccagaactggtc

SEQ ID NO: 27671 - DNA, 20 bp, synthetic construct
  misc_feature 1..20: note = chemically synthesized
  source 1..20: mol_type = other DNA
tggtcaggatttttctgctt

SEQ ID NO: 27672 - DNA, 20 bp, synthetic construct
  misc_feature 1..20: note = chemically synthesized
  source 1..20: mol_type = other DNA
ggtcaggatttttctgcttt

SEQ ID NO: 27673 - DNA, 20 bp, synthetic construct
  misc_feature 1..20: note = chemically synthesized
  source 1..20: mol_type = other DNA
gtcaggatttttctgctttg

SEQ ID NO: 27674 - DNA, 20 bp, synthetic construct
  misc_feature 1..20: note = chemically synthesized
  source 1..20: mol_type = other DNA
gatttttctgctttggggat

SEQ ID NO: 27675 - DNA, 20 bp, synthetic construct
  misc_feature 1..20: note = chemically synthesized
  source 1..20: mol_type = other DNA
gggattggatataaaatttc

SEQ ID NO: 27676 - DNA, 20 bp, synthetic construct
  misc_feature 1..20: note = chemically synthesized
  source 1..20: mol_type = other DNA
gatataaaatttctagaact

SEQ ID NO: 27677 - DNA, 20 bp, synthetic construct
  misc_feature 1..20: note = chemically synthesized
  source 1..20: mol_type = other DNA
atttctagaactgagtttaa

SEQ ID NO: 27678 - DNA, 20 bp, synthetic construct
  misc_feature 1..20: note = chemically synthesized
  source 1..20: mol_type = other DNA
tctagaactgagtttaatgg

SEQ ID NO: 27679 - DNA, 20 bp, synthetic construct
  misc_feature 1..20: note = chemically synthesized
  source 1..20: mol_type = other DNA
ctagaactgagtttaatggc

SEQ ID NO: 27680 - DNA, 20 bp, synthetic construct
  misc_feature 1..20: note = chemically synthesized
  source 1..20: mol_type = other DNA
gaactgagtttaatggcagg

SEQ ID NO: 27681 - DNA, 20 bp, synthetic construct
  misc_feature 1..20: note = chemically synthesized
  source 1..20: mol_type = other DNA
ttaatggcaggaagatcaat

SEQ ID NO: 27682 - DNA, 20 bp, synthetic construct
  misc_feature 1..20: note = chemically synthesized
  source 1..20: mol_type = other DNA
tcaattggaccaatatttac

SEQ ID NO: 27683 - DNA, 20 bp, synthetic construct
  misc_feature 1..20: note = chemically synthesized
  source 1..20: mol_type = other DNA
caattggaccaatatttact

SEQ ID NO: 27684 - DNA, 20 bp, synthetic construct
  misc_feature 1..20: note = chemically synthesized
  source 1..20: mol_type = other DNA
atttactgggtacccatgct

SEQ ID NO: 27685 - DNA, 20 bp, synthetic construct
  misc_feature 1..20: note = chemically synthesized
  source 1..20: mol_type = other DNA
gtacccatgctcagacgtgc

SEQ ID NO: 27686 - DNA, 20 bp, synthetic construct
  misc_feature 1..20: note = chemically synthesized
  source 1..20: mol_type = other DNA
tacccatgctcagacgtgcc

SEQ ID NO: 27687 - DNA, 20 bp, synthetic construct
  misc_feature 1..20: note = chemically synthesized
  source 1..20: mol_type = other DNA
atgctcagacgtgccaggca

SEQ ID NO: 27688 - DNA, 20 bp, synthetic construct
  misc_feature 1..20: note = chemically synthesized
  source 1..20: mol_type = other DNA
tgctcagacgtgccaggcac

SEQ ID NO: 27689 - DNA, 20 bp, synthetic construct
  misc_feature 1..20: note = chemically synthesized
  source 1..20: mol_type = other DNA
gctcagacgtgccaggcaca

SEQ ID NO: 27690 - DNA, 20 bp, synthetic construct
  misc_feature 1..20: note = chemically synthesized
  source 1..20: mol_type = other DNA
ctcagacgtgccaggcacag

SEQ ID NO: 27691 - DNA, 20 bp, synthetic construct
  misc_feature 1..20: note = chemically synthesized
  source 1..20: mol_type = other DNA
tcagacgtgccaggcacagg

SEQ ID NO: 27692 - DNA, 20 bp, synthetic construct
  misc_feature 1..20: note = chemically synthesized
  source 1..20: mol_type = other DNA
gacgtgccaggcacaggggg

SEQ ID NO: 27693 - DNA, 20 bp, synthetic construct
  misc_feature 1..20: note = chemically synthesized
  source 1..20: mol_type = other DNA
acgtgccaggcacagggggt

SEQ ID NO: 27694 - DNA, 20 bp, synthetic construct
  misc_feature 1..20: note = chemically synthesized
  source 1..20: mol_type = other DNA
gccaggcacagggggtaggt

SEQ ID NO: 27695 - DNA, 20 bp, synthetic construct
  misc_feature 1..20: note = chemically synthesized
  source 1..20: mol_type = other DNA
ggcacagggggtaggtcagt

SEQ ID NO: 27696 - DNA, 20 bp, synthetic construct
  misc_feature 1..20: note = chemically synthesized
  source 1..20: mol_type = other DNA
gcacagggggtaggtcagtg

SEQ ID NO: 27697 - DNA, 20 bp, synthetic construct
  misc_feature 1..20: note = chemically synthesized
  source 1..20: mol_type = other DNA
cacagggggtaggtcagtga

SEQ ID NO: 27698 - DNA, 20 bp, synthetic construct
  misc_feature 1..20: note = chemically synthesized
  source 1..20: mol_type = other DNA
ggggtaggtcagtgagggct

SEQ ID NO: 27699 - DNA, 20 bp, synthetic construct
  misc_feature 1..20: note = chemically synthesized
  source 1..20: mol_type = other DNA
gggtaggtcagtgagggctt

SEQ ID NO: 27700 - DNA, 20 bp, synthetic construct
  misc_feature 1..20: note = chemically synthesized
  source 1..20: mol_type = other DNA
gtcagtgagggcttaggcct

SEQ ID NO: 27701 - DNA, 20 bp, synthetic construct
  misc_feature 1..20: note = chemically synthesized
  source 1..20: mol_type = other DNA
tcagtgagggcttaggcctt

SEQ ID NO: 27702 - DNA, 20 bp, synthetic construct
  misc_feature 1..20: note = chemically synthesized
  source 1..20: mol_type = other DNA
cagtgagggcttaggccttg

SEQ ID NO: 27703 - DNA, 20 bp, synthetic construct
  misc_feature 1..20: note = chemically synthesized
  source 1..20: mol_type = other DNA
agggcttaggccttggggtt

SEQ ID NO: 27704 - DNA, 20 bp, synthetic construct
  misc_feature 1..20: note = chemically synthesized
  source 1..20: mol_type = other DNA
gggcttaggccttggggttg

SEQ ID NO: 27705 - DNA, 20 bp, synthetic construct
  misc_feature 1..20: note = chemically synthesized
  source 1..20: mol_type = other DNA
ggcttaggccttggggttga

SEQ ID NO: 27706 - DNA, 20 bp, synthetic construct
  misc_feature 1..20: note = chemically synthesized
  source 1..20: mol_type = other DNA
gcttaggccttggggttgag

SEQ ID NO: 27707 - DNA, 20 bp, synthetic construct
  misc_feature 1..20: note = chemically synthesized
  source 1..20: mol_type = other DNA
taggccttggggttgagggg

SEQ ID NO: 27708 - DNA, 20 bp, synthetic construct
  misc_feature 1..20: note = chemically synthesized
  source 1..20: mol_type = other DNA
aggccttggggttgaggggt

SEQ ID NO: 27709 - DNA, 20 bp, synthetic construct
  misc_feature 1..20: note = chemically synthesized
  source 1..20: mol_type = other DNA
ggccttggggttgaggggtg

SEQ ID NO: 27710 - DNA, 20 bp, synthetic construct
  misc_feature 1..20: note = chemically synthesized
  source 1..20: mol_type = other DNA
gccttggggttgaggggtgg

SEQ ID NO: 27711 - DNA, 20 bp, synthetic construct
  misc_feature 1..20: note = chemically synthesized
  source 1..20: mol_type = other DNA
ttggggttgaggggtggggg

SEQ ID NO: 27712 - DNA, 20 bp, synthetic construct
  misc_feature 1..20: note = chemically synthesized
  source 1..20: mol_type = other DNA
tggggttgaggggtgggggc

SEQ ID NO: 27713 - DNA, 20 bp, synthetic construct
  misc_feature 1..20: note = chemically synthesized
  source 1..20: mol_type = other DNA
ggggttgaggggtgggggca

SEQ ID NO: 27714 - DNA, 20 bp, synthetic construct
  misc_feature 1..20: note = chemically synthesized
  source 1..20: mol_type = other DNA
gttgaggggtgggggcaggg

SEQ ID NO: 27715 - DNA, 20 bp, synthetic construct
  misc_feature 1..20: note = chemically synthesized
  source 1..20: mol_type = other DNA
ttgaggggtgggggcaggga

SEQ ID NO: 27716 - DNA, 20 bp, synthetic construct
  misc_feature 1..20: note = chemically synthesized
  source 1..20: mol_type = other DNA
ggggtgggggcagggaaggc

SEQ ID NO: 27717 - DNA, 20 bp, synthetic construct
  misc_feature 1..20: note = chemically synthesized
  source 1..20: mol_type = other DNA
ggtgggggcagggaaggctg

SEQ ID NO: 27718 - DNA, 20 bp, synthetic construct
  misc_feature 1..20: note = chemically synthesized
  source 1..20: mol_type = other DNA
gtgggggcagggaaggctgg

SEQ ID NO: 27719 - DNA, 20 bp, synthetic construct
  misc_feature 1..20: note = chemically synthesized
  source 1..20: mol_type = other DNA
ggggcagggaaggctggagg

SEQ ID NO: 27720 - DNA, 20 bp, synthetic construct
  misc_feature 1..20: note = chemically synthesized
  source 1..20: mol_type = other DNA
gctggaggtggaacataaat

SEQ ID NO: 27721 - DNA, 20 bp, synthetic construct
  misc_feature 1..20: note = chemically synthesized
  source 1..20: mol_type = other DNA
gcaattgctgatgcccgcct

SEQ ID NO: 27722 - DNA, 20 bp, synthetic construct
  misc_feature 1..20: note = chemically synthesized
  source 1..20: mol_type = other DNA
cagtgattaaacattgatgt

SEQ ID NO: 27723 - DNA, 20 bp, synthetic construct
  misc_feature 1..20: note = chemically synthesized
  source 1..20: mol_type = other DNA
gttggtgttgtattattttg

SEQ ID NO: 27724 - DNA, 20 bp, synthetic construct
  misc_feature 1..20: note = chemically synthesized
  source 1..20: mol_type = other DNA
ttggtgttgtattattttgc

SEQ ID NO: 27725 - DNA, 20 bp, synthetic construct
  misc_feature 1..20: note = chemically synthesized
  source 1..20: mol_type = other DNA
gttgtattattttgcaggta

SEQ ID NO: 27726 - DNA, 20 bp, synthetic construct
  misc_feature 1..20: note = chemically synthesized
  source 1..20: mol_type = other DNA
attattttgcaggtaaagat

SEQ ID NO: 27727 - DNA, 20 bp, synthetic construct
  misc_feature 1..20: note = chemically synthesized
  source 1..20: mol_type = other DNA
tttgcaggtaaagatgagcc

SEQ ID NO: 27728 - DNA, 20 bp, synthetic construct
  misc_feature 1..20: note = chemically synthesized
  source 1..20: mol_type = other DNA
gcaggtaaagatgagcccag

SEQ ID NO: 27729 - DNA, 20 bp, synthetic construct
  misc_feature 1..20: note = chemically synthesized
  source 1..20: mol_type = other DNA
acacatgtacaacttgcaaa

SEQ ID NO: 27730 - DNA, 20 bp, synthetic construct
  misc_feature 1..20: note = chemically synthesized
  source 1..20: mol_type = other DNA
acttgcaaacagccattcac

SEQ ID NO: 27731 - DNA, 20 bp, synthetic construct
  misc_feature 1..20: note = chemically synthesized
  source 1..20: mol_type = other DNA
aacagccattcaccagtgca

SEQ ID NO: 27732 - DNA, 20 bp, synthetic construct
  misc_feature 1..20: note = chemically synthesized
  source 1..20: mol_type = other DNA
ggtttctcttgcaacacgca

SEQ ID NO: 27733 - DNA, 20 bp, synthetic construct
  misc_feature 1..20: note = chemically synthesized
  source 1..20: mol_type = other DNA
caacacgcacagaacactca

SEQ ID NO: 27734 - DNA, 20 bp, synthetic construct
  misc_feature 1..20: note = chemically synthesized
  source 1..20: mol_type = other DNA
gcacagaacactcatggatt

SEQ ID NO: 27735 - DNA, 20 bp, synthetic construct
  misc_feature 1..20: note = chemically synthesized
  source 1..20: mol_type = other DNA
tcatggattaagaatctact

SEQ ID NO: 27736 - DNA, 20 bp, synthetic construct
  misc_feature 1..20: note = chemically synthesized
  source 1..20: mol_type = other DNA
ggattaagaatctacttaga

SEQ ID NO: 27737 - DNA, 20 bp, synthetic construct
  misc_feature 1..20: note = chemically synthesized
  source 1..20: mol_type = other DNA
atctacttagaaagcgaaca

SEQ ID NO: 27738 - DNA, 20 bp, synthetic construct
  misc_feature 1..20: note = chemically synthesized
  source 1..20: mol_type = other DNA
tacttagaaagcgaacacgg

SEQ ID NO: 27739 - DNA, 20 bp, synthetic construct
  misc_feature 1..20: note = chemically synthesized
  source 1..20: mol_type = other DNA
acggaagtcccctgaccccg

SEQ ID NO: 27740 - DNA, 20 bp, synthetic construct
  misc_feature 1..20: note = chemically synthesized
  source 1..20: mol_type = other DNA
cggaagtcccctgaccccgc

SEQ ID NO: 27741 - DNA, 20 bp, synthetic construct
  misc_feature 1..20: note = chemically synthesized
  source 1..20: mol_type = other DNA
agtcccctgaccccgcgggt

SEQ ID NO: 27742 - DNA, 20 bp, synthetic construct
  misc_feature 1..20: note = chemically synthesized
  source 1..20: mol_type = other DNA
cccgcgggttggtatccctt

SEQ ID NO: 27743 - DNA, 20 bp, synthetic construct
  misc_feature 1..20: note = chemically synthesized
  source 1..20: mol_type = other DNA
ccgcgggttggtatcccttc

SEQ ID NO: 27744 - DNA, 20 bp, synthetic construct
  misc_feature 1..20: note = chemically synthesized
  source 1..20: mol_type = other DNA
ggttggtatcccttcaggac

SEQ ID NO: 27745 - DNA, 20 bp, synthetic construct
  misc_feature 1..20: note = chemically synthesized
  source 1..20: mol_type = other DNA
gttggtatcccttcaggact

SEQ ID NO: 27746 - DNA, 20 bp, synthetic construct
  misc_feature 1..20: note = chemically synthesized
  source 1..20: mol_type = other DNA
tatcccttcaggactaggtg

SEQ ID NO: 27747 - DNA, 20 bp, synthetic construct
  misc_feature 1..20: note = chemically synthesized
  source 1..20: mol_type = other DNA
taggtgcagaatgtccttcc

SEQ ID NO: 27748 - DNA, 20 bp, synthetic construct
  misc_feature 1..20: note = chemically synthesized
  source 1..20: mol_type = other DNA
ccttcccagccacctctcca

SEQ ID NO: 27749 - DNA, 20 bp, synthetic construct
  misc_feature 1..20: note = chemically synthesized
  source 1..20: mol_type = other DNA
cttcccagccacctctccat

SEQ ID NO: 27750 - DNA, 20 bp, synthetic construct
  misc_feature 1..20: note = chemically synthesized
  source 1..20: mol_type = other DNA
tctccatgggattcatattg

SEQ ID NO: 27751 - DNA, 20 bp, synthetic construct
  misc_feature 1..20: note = chemically synthesized
  source 1..20: mol_type = other DNA
aataacccctttaacctgct

SEQ ID NO: 27752 - DNA, 20 bp, synthetic construct
  misc_feature 1..20: note = chemically synthesized
  source 1..20: mol_type = other DNA
ctttaacctgctaagaatac

SEQ ID NO: 27753 - DNA, 20 bp, synthetic construct
  misc_feature 1..20: note = chemically synthesized
  source 1..20: mol_type = other DNA
tttaacctgctaagaatacc

SEQ ID NO: 27754 - DNA, 20 bp, synthetic construct
  misc_feature 1..20: note = chemically synthesized
  source 1..20: mol_type = other DNA
cctgctaagaataccaggat

SEQ ID NO: 27755 - DNA, 20 bp, synthetic construct
  misc_feature 1..20: note = chemically synthesized
  source 1..20: mol_type = other DNA
agaataccaggatcagtatc

SEQ ID NO: 27756 - DNA, 20 bp, synthetic construct
  misc_feature 1..20: note = chemically synthesized
  source 1..20: mol_type = other DNA
aataccaggatcagtatcga

SEQ ID NO: 27757 - DNA, 20 bp, synthetic construct
  misc_feature 1..20: note = chemically synthesized
  source 1..20: mol_type = other DNA
taccaggatcagtatcgaga

SEQ ID NO: 27758 - DNA, 20 bp, synthetic construct
  misc_feature 1..20: note = chemically synthesized
  source 1..20: mol_type = other DNA
accaggatcagtatcgagag

SEQ ID NO: 27759 - DNA, 20 bp, synthetic construct
  misc_feature 1..20: note = chemically synthesized
  source 1..20: mol_type = other DNA
tcagtatcgagagaggcttc

SEQ ID NO: 27760 - DNA, 20 bp, synthetic construct
  misc_feature 1..20: note = chemically synthesized
  source 1..20: mol_type = other DNA
atcgagagaggcttccggcc

SEQ ID NO: 27761 - DNA, 20 bp, synthetic construct
  misc_feature 1..20: note = chemically synthesized
  source 1..20: mol_type = other DNA
gagagaggcttccggcctgg

SEQ ID NO: 27762 - DNA, 20 bp, synthetic construct
  misc_feature 1..20: note = chemically synthesized
  source 1..20: mol_type = other DNA
agaggcttccggcctggcag

SEQ ID NO: 27763 - DNA, 20 bp, synthetic construct
  misc_feature 1..20: note = chemically synthesized
  source 1..20: mol_type = other DNA
gaggcttccggcctggcaga

SEQ ID NO: 27764 - DNA, 20 bp, synthetic construct
  misc_feature 1..20: note = chemically synthesized
  source 1..20: mol_type = other DNA
aggcttccggcctggcagaa

SEQ ID NO: 27765 - DNA, 20 bp, synthetic construct
  misc_feature 1..20: note = chemically synthesized
  source 1..20: mol_type = other DNA
ccacccactccccccctgtt

SEQ ID NO: 27766 - DNA, 20 bp, synthetic construct
  misc_feature 1..20: note = chemically synthesized
  source 1..20: mol_type = other DNA
cccctgtttagtccaccacc

SEQ ID NO: 27767 - DNA, 20 bp, synthetic construct
  misc_feature 1..20: note = chemically synthesized
  source 1..20: mol_type = other DNA
tccaccaccgagacatcact

SEQ ID NO: 27768 - DNA, 20 bp, synthetic construct
  misc_feature 1..20: note = chemically synthesized
  source 1..20: mol_type = other DNA
tcacttggacccccaccgca

SEQ ID NO: 27769 - DNA, 20 bp, synthetic construct
  misc_feature 1..20: note = chemically synthesized
  source 1..20: mol_type = other DNA
acttggacccccaccgcata

SEQ ID NO: 27770 - DNA, 20 bp, synthetic construct
  misc_feature 1..20: note = chemically synthesized
  source 1..20: mol_type = other DNA
cccccaccgcatagagcgcc

SEQ ID NO: 27771 - DNA, 20 bp, synthetic construct
  misc_feature 1..20: note = chemically synthesized
  source 1..20: mol_type = other DNA
ccccaccgcatagagcgcct

SEQ ID NO: 27772 - DNA, 20 bp, synthetic construct
  misc_feature 1..20: note = chemically synthesized
  source 1..20: mol_type = other DNA
cccaccgcatagagcgcctg

SEQ ID NO: 27773 - DNA, 20 bp, synthetic construct
  misc_feature 1..20: note = chemically synthesized
  source 1..20: mol_type = other DNA
ccaccgcatagagcgcctgg

SEQ ID NO: 27774 - DNA, 20 bp, synthetic construct
  misc_feature 1..20: note = chemically synthesized
  source 1..20: mol_type = other DNA
ccgcatagagcgcctggggg

SEQ ID NO: 27775 - DNA, 20 bp, synthetic construct
  misc_feature 1..20: note = chemically synthesized
  source 1..20: mol_type = other DNA
catagagcgcctgggggcgg

SEQ ID NO: 27776 - DNA, 20 bp, synthetic construct
  misc_feature 1..20: note = chemically synthesized
  source 1..20: mol_type = other DNA
tagagcgcctgggggcggaa

SEQ ID NO: 27777 - DNA, 20 bp, synthetic construct
  misc_feature 1..20: note = chemically synthesized
  source 1..20: mol_type = other DNA
gcgcctgggggcggaagaga

SEQ ID NO: 27778 - DNA, 20 bp, synthetic construct
  misc_feature 1..20: note = chemically synthesized
  source 1..20: mol_type = other DNA
gggggcggaagagatggccc

SEQ ID NO: 27779 - DNA, 20 bp, synthetic construct
  misc_feature 1..20: note = chemically synthesized
  source 1..20: mol_type = other DNA
gccctggccacccatcaccc

SEQ ID NO: 27780 - DNA, 20 bp, synthetic construct
  misc_feature 1..20: note = chemically synthesized
  source 1..20: mol_type = other DNA
catcacccgagtgcctttga

SEQ ID NO: 27781 - DNA, 20 bp, synthetic construct
  misc_feature 1..20: note = chemically synthesized
  source 1..20: mol_type = other DNA
atcacccgagtgcctttgac

SEQ ID NO: 27782 - DNA, 20 bp, synthetic construct
  misc_feature 1..20: note = chemically synthesized
  source 1..20: mol_type = other DNA
tcacccgagtgcctttgaca

SEQ ID NO: 27783 - DNA, 20 bp, synthetic construct
  misc_feature 1..20: note = chemically synthesized
  source 1..20: mol_type = other DNA
gtgcctttgacagggtgctg

SEQ ID NO: 27784 - DNA, 20 bp, synthetic construct
  misc_feature 1..20: note = chemically synthesized
  source 1..20: mol_type = other DNA
ggtgctgcggttgaatccaa

SEQ ID NO: 27785 - DNA, 20 bp, synthetic construct
  misc_feature 1..20: note = chemically synthesized
  source 1..20: mol_type = other DNA
gcggttgaatccaatggcta

SEQ ID NO: 27786 - DNA, 20 bp, synthetic construct
  misc_feature 1..20: note = chemically synthesized
  source 1..20: mol_type = other DNA
ggttgaatccaatggctatg

SEQ ID NO: 27787 - DNA, 20 bp, synthetic construct
  misc_feature 1..20: note = chemically synthesized
  source 1..20: mol_type = other DNA
ggctatggagcctcccgcca

SEQ ID NO: 27788 - DNA, 20 bp, synthetic construct
  misc_feature 1..20: note = chemically synthesized
  source 1..20: mol_type = other DNA
cctcccgccatggatttctc

SEQ ID NO: 27789 - DNA, 20 bp, synthetic construct
  misc_feature 1..20: note = chemically synthesized
  source 1..20: mol_type = other DNA
ctcccgccatggatttctct

SEQ ID NO: 27790 - DNA, 20 bp, synthetic construct
  misc_feature 1..20: note = chemically synthesized
  source 1..20: mol_type = other DNA
cccgccatggatttctctag

SEQ ID NO: 27791 - DNA, 20 bp, synthetic construct
  misc_feature 1..20: note = chemically synthesized
  source 1..20: mol_type = other DNA
atggatttctctaggagact

SEQ ID NO: 27792 - DNA, 20 bp, synthetic construct
  misc_feature 1..20: note = chemically synthesized
  source 1..20: mol_type = other DNA
ggatttctctaggagactta

SEQ ID NO: 27793 - DNA, 20 bp, synthetic construct
  misc_feature 1..20: note = chemically synthesized
  source 1..20: mol_type = other DNA
atttctctaggagacttaga

SEQ ID NO: 27794 - DNA, 20 bp, synthetic construct
  misc_feature 1..20: note = chemically synthesized
  source 1..20: mol_type = other DNA
ctctaggagacttagagagc

SEQ ID NO: 27795 - DNA, 20 bp, synthetic construct
  misc_feature 1..20: note = chemically synthesized
  source 1..20: mol_type = other DNA
taggagacttagagagctgg

SEQ ID NO: 27796 - DNA, 20 bp, synthetic construct
  misc_feature 1..20: note = chemically synthesized
  source 1..20: mol_type = other DNA
aggagacttagagagctggc

SEQ ID NO: 27797 - DNA, 20 bp, synthetic construct
  misc_feature 1..20: note = chemically synthesized
  source 1..20: mol_type = other DNA
ggagacttagagagctggca

SEQ ID NO: 27798 - DNA, 20 bp, synthetic construct
  misc_feature 1..20: note = chemically synthesized
  source 1..20: mol_type = other DNA
gagctggcagggaacacgtc

SEQ ID NO: 27799 - DNA, 20 bp, synthetic construct
  misc_feature 1..20: note = chemically synthesized
  source 1..20: mol_type = other DNA
gtctagcccaccgctgtccc

SEQ ID NO: 27800 - DNA, 20 bp, synthetic construct
  misc_feature 1..20: note = chemically synthesized
  source 1..20: mol_type = other DNA
tctagcccaccgctgtcccc

SEQ ID NO: 27801 - DNA, 20 bp, synthetic construct
  misc_feature 1..20: note = chemically synthesized
  source 1..20: mol_type = other DNA
gcccaccgctgtccccaggc

SEQ ID NO: 27802 - DNA, 20 bp, synthetic construct
  misc_feature 1..20: note = chemically synthesized
  source 1..20: mol_type = other DNA
ccgctgtccccaggccggcc

SEQ ID NO: 27803 - DNA, 20 bp, synthetic construct
  misc_feature 1..20: note = chemically synthesized
  source 1..20: mol_type = other DNA
ggccggcccagccctatgca

SEQ ID NO: 27804 - DNA, 20 bp, synthetic construct
  misc_feature 1..20: note = chemically synthesized
  source 1..20: mol_type = other DNA
gccggcccagccctatgcaa

SEQ ID NO: 27805 - DNA, 20 bp, synthetic construct
  misc_feature 1..20: note = chemically synthesized
  source 1..20: mol_type = other DNA
aaaggttactgcaaccattc

SEQ ID NO: 27806 - DNA, 20 bp, synthetic construct
  misc_feature 1..20: note = chemically synthesized
  source 1..20: mol_type = other DNA
gttactgcaaccattccagc

SEQ ID NO: 27807 - DNA, 20 bp, synthetic construct
  misc_feature 1..20: note = chemically synthesized
  source 1..20: mol_type = other DNA
ttactgcaaccattccagcc

SEQ ID NO: 27808 - DNA, 20 bp, synthetic construct
  misc_feature 1..20: note = chemically synthesized
  source 1..20: mol_type = other DNA
ctgcaaccattccagccagg

SEQ ID NO: 27809 - DNA, 20 bp, synthetic construct
  misc_feature 1..20: note = chemically synthesized
  source 1..20: mol_type = other DNA
aaccattccagccaggtagc

SEQ ID NO: 27810 - DNA, 20 bp, synthetic construct
  misc_feature 1..20: note = chemically synthesized
  source 1..20: mol_type = other DNA
aggtagcaagccgcccttcc

SEQ ID NO: 27811 - DNA, 20 bp, synthetic construct
  misc_feature 1..20: note = chemically synthesized
  source 1..20: mol_type = other DNA
aatccgcccctcctccctcc

SEQ ID NO: 27812 - DNA, 20 bp, synthetic construct
  misc_feature 1..20: note = chemically synthesized
  source 1..20: mol_type = other DNA
ccctcctccctcccagcccc

SEQ ID NO: 27813 - DNA, 20 bp, synthetic construct
  misc_feature 1..20: note = chemically synthesized
  source 1..20: mol_type = other DNA
ctccctcccagcccccggtc

SEQ ID NO: 27814 - DNA, 20 bp, synthetic construct
  misc_feature 1..20: note = chemically synthesized
  source 1..20: mol_type = other DNA
cccagcccccggtcaagtcc

SEQ ID NO: 27815 - DNA, 20 bp, synthetic construct
  misc_feature 1..20: note = chemically synthesized
  source 1..20: mol_type = other DNA
cggtcaagtccaagtcatgc

SEQ ID NO: 27816 - DNA, 20 bp, synthetic construct
  misc_feature 1..20: note = chemically synthesized
  source 1..20: mol_type = other DNA
tccaagtcatgcgagttctg

SEQ ID NO: 27817 - DNA, 20 bp, synthetic construct
  misc_feature 1..20: note = chemically synthesized
  source 1..20: mol_type = other DNA
agtcatgcgagttctgcggc

SEQ ID NO: 27818 - DNA, 20 bp, synthetic construct
  misc_feature 1..20: note = chemically synthesized
  source 1..20: mol_type = other DNA
gcggcaagacgttcaaattt

SEQ ID NO: 27819 - DNA, 20 bp, synthetic construct
  misc_feature 1..20: note = chemically synthesized
  source 1..20: mol_type = other DNA
ggcaagacgttcaaatttca

SEQ ID NO: 27820 - DNA, 20 bp, synthetic construct
  misc_feature 1..20: note = chemically synthesized
  source 1..20: mol_type = other DNA
gttcaaatttcagagcaacc

SEQ ID NO: 27821 - DNA, 20 bp, synthetic construct
  misc_feature 1..20: note = chemically synthesized
  source 1..20: mol_type = other DNA
caaatttcagagcaacctgg

SEQ ID NO: 27822 - DNA, 20 bp, synthetic construct
  misc_feature 1..20: note = chemically synthesized
  source 1..20: mol_type = other DNA
agagcaacctggtggtgcac

SEQ ID NO: 27823 - DNA, 20 bp, synthetic construct
  misc_feature 1..20: note = chemically synthesized
  source 1..20: mol_type = other DNA
aacctggtggtgcaccggcg

SEQ ID NO: 27824 - DNA, 20 bp, synthetic construct
  misc_feature 1..20: note = chemically synthesized
  source 1..20: mol_type = other DNA
ggtgcaccggcgcagccaca

SEQ ID NO: 27825 - DNA, 20 bp, synthetic construct
  misc_feature 1..20: note = chemically synthesized
  source 1..20: mol_type = other DNA
gtgcaccggcgcagccacac

SEQ ID NO: 27826 - DNA, 20 bp, synthetic construct
  misc_feature 1..20: note = chemically synthesized
  source 1..20: mol_type = other DNA
accggcgcagccacacgggc

SEQ ID NO: 27827 - DNA, 20 bp, synthetic construct
  misc_feature 1..20: note = chemically synthesized
  source 1..20: mol_type = other DNA
ggcgcagccacacgggcgag

SEQ ID NO: 27828 - DNA, 20 bp, synthetic construct
  misc_feature 1..20: note = chemically synthesized
  source 1..20: mol_type = other DNA
acacgggcgagaagccctac

SEQ ID NO: 27829 - DNA, 20 bp, synthetic construct
  misc_feature 1..20: note = chemically synthesized
  source 1..20: mol_type = other DNA
tgtgcgaccacgcgtgcacc

SEQ ID NO: 27830 - DNA, 20 bp, synthetic construct
  misc_feature 1..20: note = chemically synthesized
  source 1..20: mol_type = other DNA
gtgcgaccacgcgtgcaccc

SEQ ID NO: 27831 - DNA, 20 bp, synthetic construct
  misc_feature 1..20: note = chemically synthesized
  source 1..20: mol_type = other DNA
gaccacgcgtgcacccaggc

SEQ ID NO: 27832 - DNA, 20 bp, synthetic construct
  misc_feature 1..20: note = chemically synthesized
  source 1..20: mol_type = other DNA
acgcgtgcacccaggccagc

SEQ ID NO: 27833 - DNA, 20 bp, synthetic construct
  misc_feature 1..20: note = chemically synthesized
  source 1..20: mol_type = other DNA
gcacccaggccagcaagctg

SEQ ID NO: 27834 - DNA, 20 bp, synthetic construct
  misc_feature 1..20: note = chemically synthesized
  source 1..20: mol_type = other DNA
gcaagctgaagcgccacatg

SEQ ID NO: 27835 - DNA, 20 bp, synthetic construct
  misc_feature 1..20: note = chemically synthesized
  source 1..20: mol_type = other DNA
gcacaaatcgtcccccatga

SEQ ID NO: 27836 - DNA, 20 bp, synthetic construct
  misc_feature 1..20: note = chemically synthesized
  source 1..20: mol_type = other DNA
aatcgtcccccatgacggtc

SEQ ID NO: 27837 - DNA, 20 bp, synthetic construct
  misc_feature 1..20: note = chemically synthesized
  source 1..20: mol_type = other DNA
atgacggtcaagtccgacga

SEQ ID NO: 27838 - DNA, 20 bp, synthetic construct
  misc_feature 1..20: note = chemically synthesized
  source 1..20: mol_type = other DNA
gacgacggtctctccaccgc

SEQ ID NO: 27839 - DNA, 20 bp, synthetic construct
  misc_feature 1..20: note = chemically synthesized
  source 1..20: mol_type = other DNA
tctctccaccgccagctccc

SEQ ID NO: 27840 - DNA, 20 bp, synthetic construct
  misc_feature 1..20: note = chemically synthesized
  source 1..20: mol_type = other DNA
accgccagctccccggaacc

SEQ ID NO: 27841 - DNA, 20 bp, synthetic construct
  misc_feature 1..20: note = chemically synthesized
  source 1..20: mol_type = other DNA
agctccccggaacccggcac

SEQ ID NO: 27842 - DNA, 20 bp, synthetic construct
  misc_feature 1..20: note = chemically synthesized
  source 1..20: mol_type = other DNA
ggaacccggcaccagcgact

SEQ ID NO: 27843 - DNA, 20 bp, synthetic construct
  misc_feature 1..20: note = chemically synthesized
  source 1..20: mol_type = other DNA
acccggcaccagcgacttgg

SEQ ID NO: 27844 - DNA, 20 bp, synthetic construct
  misc_feature 1..20: note = chemically synthesized
  source 1..20: mol_type = other DNA
cccggcaccagcgacttggt

SEQ ID NO: 27845 - DNA, 20 bp, synthetic construct
  misc_feature 1..20: note = chemically synthesized
  source 1..20: mol_type = other DNA
ggcaccagcgacttggtggg

SEQ ID NO: 27846 - DNA, 20 bp, synthetic construct
  misc_feature 1..20: note = chemically synthesized
  source 1..20: mol_type = other DNA
agcgacttggtgggcagcgc

SEQ ID NO: 27847 - DNA, 20 bp, synthetic construct
  misc_feature 1..20: note = chemically synthesized
  source 1..20: mol_type = other DNA
gacttggtgggcagcgccag

SEQ ID NO: 27848 - DNA, 20 bp, synthetic construct
  misc_feature 1..20: note = chemically synthesized
  source 1..20: mol_type = other DNA
gcagcgccagcagcgcgctc

SEQ ID NO: 27849 - DNA, 20 bp, synthetic construct
  misc_feature 1..20: note = chemically synthesized
  source 1..20: mol_type = other DNA
cagcagcgcgctcaagtccg

SEQ ID NO: 27850 - DNA, 20 bp, synthetic construct
  misc_feature 1..20: note = chemically synthesized
  source 1..20: mol_type = other DNA
cagcgcgctcaagtccgtgg

SEQ ID NO: 27851 - DNA, 20 bp, synthetic construct
  misc_feature 1..20: note = chemically synthesized
  source 1..20: mol_type = other DNA
cgctcaagtccgtggtggcc

SEQ ID NO: 27852 - DNA, 20 bp, synthetic construct
  misc_feature 1..20: note = chemically synthesized
  source 1..20: mol_type = other DNA
agtccgtggtggccaagttc

SEQ ID NO: 27853 - DNA, 20 bp, synthetic construct
  misc_feature 1..20: note = chemically synthesized
  source 1..20: mol_type = other DNA
tccgtggtggccaagttcaa

SEQ ID NO: 27854 - DNA, 20 bp, synthetic construct
  misc_feature 1..20: note = chemically synthesized
  source 1..20: mol_type = other DNA
tggtggccaagttcaagagc

SEQ ID NO: 27855 - DNA, 20 bp, synthetic construct
  misc_feature 1..20: note = chemically synthesized
  source 1..20: mol_type = other DNA
gaacgaccccaacctgatcc

SEQ ID NO: 27856 - DNA, 20 bp, synthetic construct
  misc_feature 1..20: note = chemically synthesized
  source 1..20: mol_type = other DNA
acgaccccaacctgatcccg

SEQ ID NO: 27857 - DNA, 20 bp, synthetic construct
  misc_feature 1..20: note = chemically synthesized
  source 1..20: mol_type = other DNA
cccaacctgatcccggagaa

SEQ ID NO: 27858 - DNA, 20 bp, synthetic construct
  misc_feature 1..20: note = chemically synthesized
  source 1..20: mol_type = other DNA
ccaacctgatcccggagaac

SEQ ID NO: 27859 - DNA, 20 bp, synthetic construct
  misc_feature 1..20: note = chemically synthesized
  source 1..20: mol_type = other DNA
caacctgatcccggagaacg

SEQ ID NO: 27860 - DNA, 20 bp, synthetic construct
  misc_feature 1..20: note = chemically synthesized
  source 1..20: mol_type = other DNA
tgatcccggagaacggggac

SEQ ID NO: 27861 - DNA, 20 bp, synthetic construct
  misc_feature 1..20: note = chemically synthesized
  source 1..20: mol_type = other DNA
gatcccggagaacggggacg

SEQ ID NO: 27862 - DNA, 20 bp, synthetic construct
  misc_feature 1..20: note = chemically synthesized
  source 1..20: mol_type = other DNA
tcccggagaacggggacgag

SEQ ID NO: 27863 - DNA, 20 bp, synthetic construct
  misc_feature 1..20: note = chemically synthesized
  source 1..20: mol_type = other DNA
cccggagaacggggacgagg

SEQ ID NO: 27864 - DNA, 20 bp, synthetic construct
  misc_feature 1..20: note = chemically synthesized
  source 1..20: mol_type = other DNA
ggagaacggggacgaggagg

SEQ ID NO: 27865 - DNA, 20 bp, synthetic construct
  misc_feature 1..20: note = chemically synthesized
  source 1..20: mol_type = other DNA
agaacggggacgaggaggaa

SEQ ID NO: 27866 - DNA, 20 bp, synthetic construct
  misc_feature 1..20: note = chemically synthesized
  source 1..20: mol_type = other DNA
gaacggggacgaggaggaag

SEQ ID NO: 27867 - DNA, 20 bp, synthetic construct
  misc_feature 1..20: note = chemically synthesized
  source 1..20: mol_type = other DNA
acggggacgaggaggaagag

SEQ ID NO: 27868 - DNA, 20 bp, synthetic construct
  misc_feature 1..20: note = chemically synthesized
  source 1..20: mol_type = other DNA
cggggacgaggaggaagagg

SEQ ID NO: 27869 - DNA, 20 bp, synthetic construct
  misc_feature 1..20: note = chemically synthesized
  source 1..20: mol_type = other DNA
aggaggaagaggaggacgac

SEQ ID NO: 27870 - DNA, 20 bp, synthetic construct
  misc_feature 1..20: note = chemically synthesized
  source 1..20: mol_type = other DNA
ggaggaagaggaggacgacg

SEQ ID NO: 27871 - DNA, 20 bp, synthetic construct
  misc_feature 1..20: note = chemically synthesized
  source 1..20: mol_type = other DNA
ggaagaggaggacgacgagg

SEQ ID NO: 27872 - DNA, 20 bp, synthetic construct
  misc_feature 1..20: note = chemically synthesized
  source 1..20: mol_type = other DNA
aagaggaggacgacgaggaa

SEQ ID NO: 27873 - DNA, 20 bp, synthetic construct
  misc_feature 1..20: note = chemically synthesized
  source 1..20: mol_type = other DNA
agaggaggacgacgaggaag

SEQ ID NO: 27874 - DNA, 20 bp, synthetic construct
  misc_feature 1..20: note = chemically synthesized
  source 1..20: mol_type = other DNA
ggaggacgacgaggaagagg

SEQ ID NO: 27875 - DNA, 20 bp, synthetic construct
  misc_feature 1..20: note = chemically synthesized
  source 1..20: mol_type = other DNA
ggacgacgaggaagaggaag

SEQ ID NO: 27876 - DNA, 20 bp, synthetic construct
  misc_feature 1..20: note = chemically synthesized
  source 1..20: mol_type = other DNA
acgacgaggaagaggaagaa

SEQ ID NO: 27877 - DNA, 20 bp, synthetic construct
  misc_feature 1..20: note = chemically synthesized
  source 1..20: mol_type = other DNA
cgacgaggaagaggaagaag

SEQ ID NO: 27878 - DNA, 20 bp, synthetic construct
  misc_feature 1..20: note = chemically synthesized
  source 1..20: mol_type = other DNA
acgaggaagaggaagaagag

SEQ ID NO: 27879 - DNA, 20 bp, synthetic construct
  misc_feature 1..20: note = chemically synthesized
  source 1..20: mol_type = other DNA
cgaggaagaggaagaagagg

SEQ ID NO: 27880 - DNA, 20 bp, synthetic construct
  misc_feature 1..20: note = chemically synthesized
  source 1..20: mol_type = other DNA
ggaagaggaagaagaggagg

SEQ ID NO: 27881 - DNA, 20 bp, synthetic construct
  misc_feature 1..20: note = chemically synthesized
  source 1..20: mol_type = other DNA
aagaggaagaagaggaggaa

SEQ ID NO: 27882 - DNA, 20 bp, synthetic construct
  misc_feature 1..20: note = chemically synthesized
  source 1..20: mol_type = other DNA
agaggaagaagaggaggaag

SEQ ID NO: 27883 - DNA, 20 bp, synthetic construct
  misc_feature 1..20: note = chemically synthesized
  source 1..20: mol_type = other DNA
aggaagaagaggaggaagag

SEQ ID NO: 27884 - DNA, 20 bp, synthetic construct
  misc_feature 1..20: note = chemically synthesized
  source 1..20: mol_type = other DNA
ggaagaagaggaggaagagg

SEQ ID NO: 27885 - DNA, 20 bp, synthetic construct
  misc_feature 1..20: note = chemically synthesized
  source 1..20: mol_type = other DNA
aagaagaggaggaagaggag

SEQ ID NO: 27886 - DNA, 20 bp, synthetic construct
  misc_feature 1..20: note = chemically synthesized
  source 1..20: mol_type = other DNA
agaagaggaggaagaggagg

SEQ ID NO: 27887 - DNA, 20 bp, synthetic construct
  misc_feature 1..20: note = chemically synthesized
  source 1..20: mol_type = other DNA
aagaggaggaagaggaggag

SEQ ID NO: 27888 - DNA, 20 bp, synthetic construct
  misc_feature 1..20: note = chemically synthesized
  source 1..20: mol_type = other DNA
agaggaggaagaggaggagg

SEQ ID NO: 27889 - DNA, 20 bp, synthetic construct
  misc_feature 1..20: note = chemically synthesized
  source 1..20: mol_type = other DNA
aggaggaagaggaggaggag

SEQ ID NO: 27890 - DNA, 20 bp, synthetic construct
  misc_feature 1..20: note = chemically synthesized
  source 1..20: mol_type = other DNA
agaggaggaggaggagctga

SEQ ID NO: 27891 - DNA, 20 bp, synthetic construct
  misc_feature 1..20: note = chemically synthesized
  source 1..20: mol_type = other DNA
aggaggaggaggagctgacg

SEQ ID NO: 27892 - DNA, 20 bp, synthetic construct
  misc_feature 1..20: note = chemically synthesized
  source 1..20: mol_type = other DNA
gaggaggaggagctgacgga

SEQ ID NO: 27893 - DNA, 20 bp, synthetic construct
  misc_feature 1..20: note = chemically synthesized
  source 1..20: mol_type = other DNA
aggaggagctgacggagagc

SEQ ID NO: 27894 - DNA, 20 bp, synthetic construct
  misc_feature 1..20: note = chemically synthesized
  source 1..20: mol_type = other DNA
gaggagctgacggagagcga

SEQ ID NO: 27895 - DNA, 20 bp, synthetic construct
  misc_feature 1..20: note = chemically synthesized
  source 1..20: mol_type = other DNA
aggagctgacggagagcgag

SEQ ID NO: 27896 - DNA, 20 bp, synthetic construct
  misc_feature 1..20: note = chemically synthesized
  source 1..20: mol_type = other DNA
ggagctgacggagagcgaga

SEQ ID NO: 27897 - DNA, 20 bp, synthetic construct
  misc_feature 1..20: note = chemically synthesized
  source 1..20: mol_type = other DNA
gctgacggagagcgagaggg

SEQ ID NO: 27898 - DNA, 20 bp, synthetic construct
  misc_feature 1..20: note = chemically synthesized
  source 1..20: mol_type = other DNA
gagagcgagagggtggacta

SEQ ID NO: 27899 - DNA, 20 bp, synthetic construct
  misc_feature 1..20: note = chemically synthesized
  source 1..20: mol_type = other DNA
gagagggtggactacggctt

SEQ ID NO: 27900 - DNA, 20 bp, synthetic construct
  misc_feature 1..20: note = chemically synthesized
  source 1..20: mol_type = other DNA
agagggtggactacggcttc

SEQ ID NO: 27901 - DNA, 20 bp, synthetic construct
  misc_feature 1..20: note = chemically synthesized
  source 1..20: mol_type = other DNA
gtggactacggcttcgggct

SEQ ID NO: 27902 - DNA, 20 bp, synthetic construct
  misc_feature 1..20: note = chemically synthesized
  source 1..20: mol_type = other DNA
ctacggcttcgggctgagcc

SEQ ID NO: 27903 - DNA, 20 bp, synthetic construct
  misc_feature 1..20: note = chemically synthesized
  source 1..20: mol_type = other DNA
acggcttcgggctgagcctg

SEQ ID NO: 27904 - DNA, 20 bp, synthetic construct
  misc_feature 1..20: note = chemically synthesized
  source 1..20: mol_type = other DNA
cggcttcgggctgagcctgg

SEQ ID NO: 27905 - DNA, 20 bp, synthetic construct
  misc_feature 1..20: note = chemically synthesized
  source 1..20: mol_type = other DNA
cttcgggctgagcctggagg

SEQ ID NO: 27906 - DNA, 20 bp, synthetic construct
  misc_feature 1..20: note = chemically synthesized
  source 1..20: mol_type = other DNA
tggaggcggcgcgccaccac

SEQ ID NO: 27907 - DNA, 20 bp, synthetic construct
  misc_feature 1..20: note = chemically synthesized
  source 1..20: mol_type = other DNA
gcggcgcgccaccacgagaa

SEQ ID NO: 27908 - DNA, 20 bp, synthetic construct
  misc_feature 1..20: note = chemically synthesized
  source 1..20: mol_type = other DNA
gccaccacgagaacagctcg

SEQ ID NO: 27909 - DNA, 20 bp, synthetic construct
  misc_feature 1..20: note = chemically synthesized
  source 1..20: mol_type = other DNA
ccaccacgagaacagctcgc

SEQ ID NO: 27910 - DNA, 20 bp, synthetic construct
  misc_feature 1..20: note = chemically synthesized
  source 1..20: mol_type = other DNA
caccacgagaacagctcgcg

SEQ ID NO: 27911 - DNA, 20 bp, synthetic construct
  misc_feature 1..20: note = chemically synthesized
  source 1..20: mol_type = other DNA
cgagaacagctcgcggggcg

SEQ ID NO: 27912 - DNA, 20 bp, synthetic construct
  misc_feature 1..20: note = chemically synthesized
  source 1..20: mol_type = other DNA
cagctcgcggggcgcggtcg

SEQ ID NO: 27913 - DNA, 20 bp, synthetic construct
  misc_feature 1..20: note = chemically synthesized
  source 1..20: mol_type = other DNA
agctcgcggggcgcggtcgt

SEQ ID NO: 27914 - DNA, 20 bp, synthetic construct
  misc_feature 1..20: note = chemically synthesized
  source 1..20: mol_type = other DNA
gcggggcgcggtcgtgggcg

SEQ ID NO: 27915 - DNA, 20 bp, synthetic construct
  misc_feature 1..20: note = chemically synthesized
  source 1..20: mol_type = other DNA
cggggcgcggtcgtgggcgt

SEQ ID NO: 27916 - DNA, 20 bp, synthetic construct
  misc_feature 1..20: note = chemically synthesized
  source 1..20: mol_type = other DNA
cggtcgtgggcgtgggcgac

SEQ ID NO: 27917 - DNA, 20 bp, synthetic construct
  misc_feature 1..20: note = chemically synthesized
  source 1..20: mol_type = other DNA
gtcgtgggcgtgggcgacga

SEQ ID NO: 27918 - DNA, 20 bp, synthetic construct
  misc_feature 1..20: note = chemically synthesized
  source 1..20: mol_type = other DNA
gcgccctgcccgacgtcatg

SEQ ID NO: 27919 - DNA, 20 bp, synthetic construct
  misc_feature 1..20: note = chemically synthesized
  source 1..20: mol_type = other DNA
cgccctgcccgacgtcatgc

SEQ ID NO: 27920 - DNA, 20 bp, synthetic construct
  misc_feature 1..20: note = chemically synthesized
  source 1..20: mol_type = other DNA
gccctgcccgacgtcatgca

SEQ ID NO: 27921 - DNA, 20 bp, synthetic construct
  misc_feature 1..20: note = chemically synthesized
  source 1..20: mol_type = other DNA
gcccgacgtcatgcagggca

SEQ ID NO: 27922 - DNA, 20 bp, synthetic construct
  misc_feature 1..20: note = chemically synthesized
  source 1..20: mol_type = other DNA
gtcatgcagggcatggtgct

SEQ ID NO: 27923 - DNA, 20 bp, synthetic construct
  misc_feature 1..20: note = chemically synthesized
  source 1..20: mol_type = other DNA
gcatggtgctcagctccatg

SEQ ID NO: 27924 - DNA, 20 bp, synthetic construct
  misc_feature 1..20: note = chemically synthesized
  source 1..20: mol_type = other DNA
ctcagctccatgcagcactt

SEQ ID NO: 27925 - DNA, 20 bp, synthetic construct
  misc_feature 1..20: note = chemically synthesized
  source 1..20: mol_type = other DNA
gctccatgcagcacttcagc

SEQ ID NO: 27926 - DNA, 20 bp, synthetic construct
  misc_feature 1..20: note = chemically synthesized
  source 1..20: mol_type = other DNA
ctccatgcagcacttcagcg

SEQ ID NO: 27927 - DNA, 20 bp, synthetic construct
  misc_feature 1..20: note = chemically synthesized
  source 1..20: mol_type = other DNA
acttcagcgaggccttccac

SEQ ID NO: 27928 - DNA, 20 bp, synthetic construct
  misc_feature 1..20: note = chemically synthesized
  source 1..20: mol_type = other DNA
cttcagcgaggccttccacc

SEQ ID NO: 27929 - DNA, 20 bp, synthetic construct
  misc_feature 1..20: note = chemically synthesized
  source 1..20: mol_type = other DNA
cgaggccttccaccaggtcc

SEQ ID NO: 27930 - DNA, 20 bp, synthetic construct
  misc_feature 1..20: note = chemically synthesized
  source 1..20: mol_type = other DNA
gaggccttccaccaggtcct

SEQ ID NO: 27931 - DNA, 20 bp, synthetic construct
  misc_feature 1..20: note = chemically synthesized
  source 1..20: mol_type = other DNA
ccttccaccaggtcctgggc

SEQ ID NO: 27932 - DNA, 20 bp, synthetic construct
  misc_feature 1..20: note = chemically synthesized
  source 1..20: mol_type = other DNA
tccaccaggtcctgggcgag

SEQ ID NO: 27933 - DNA, 20 bp, synthetic construct
  misc_feature 1..20: note = chemically synthesized
  source 1..20: mol_type = other DNA
aggtcctgggcgagaagcat

SEQ ID NO: 27934 - DNA, 20 bp, synthetic construct
  misc_feature 1..20: note = chemically synthesized
  source 1..20: mol_type = other DNA
ctgggcgagaagcataagcg

SEQ ID NO: 27935 - DNA, 20 bp, synthetic construct
  misc_feature 1..20: note = chemically synthesized
  source 1..20: mol_type = other DNA
gaagcataagcgcggccacc

SEQ ID NO: 27936 - DNA, 20 bp, synthetic construct
  misc_feature 1..20: note = chemically synthesized
  source 1..20: mol_type = other DNA
ataagcgcggccacctggcc

SEQ ID NO: 27937 - DNA, 20 bp, synthetic construct
  misc_feature 1..20: note = chemically synthesized
  source 1..20: mol_type = other DNA
taagcgcggccacctggccg

SEQ ID NO: 27938 - DNA, 20 bp, synthetic construct
  misc_feature 1..20: note = chemically synthesized
  source 1..20: mol_type = other DNA
gcggccacctggccgaggcc

SEQ ID NO: 27939 - DNA, 20 bp, synthetic construct
  misc_feature 1..20: note = chemically synthesized
  source 1..20: mol_type = other DNA
cggccacctggccgaggccg

SEQ ID NO: 27940 - DNA, 20 bp, synthetic construct
  misc_feature 1..20: note = chemically synthesized
  source 1..20: mol_type = other DNA
ggccacctggccgaggccga

SEQ ID NO: 27941 - DNA, 20 bp, synthetic construct
  misc_feature 1..20: note = chemically synthesized
  source 1..20: mol_type = other DNA
ctggccgaggccgagggcca

SEQ ID NO: 27942 - DNA, 20 bp, synthetic construct
  misc_feature 1..20: note = chemically synthesized
  source 1..20: mol_type = other DNA
tggccgaggccgagggccac

SEQ ID NO: 27943 - DNA, 20 bp, synthetic construct
  misc_feature 1..20: note = chemically synthesized
  source 1..20: mol_type = other DNA
ggccgaggccgagggccaca

SEQ ID NO: 27944 - DNA, 20 bp, synthetic construct
  misc_feature 1..20: note = chemically synthesized
  source 1..20: mol_type = other DNA
ccacagggacacttgcgacg

SEQ ID NO: 27945 - DNA, 20 bp, synthetic construct
  misc_feature 1..20: note = chemically synthesized
  source 1..20: mol_type = other DNA
ggacacttgcgacgaagact

SEQ ID NO: 27946 - DNA, 20 bp, synthetic construct
  misc_feature 1..20: note = chemically synthesized
  source 1..20: mol_type = other DNA
cacttgcgacgaagactcgg

SEQ ID NO: 27947 - DNA, 20 bp, synthetic construct
  misc_feature 1..20: note = chemically synthesized
  source 1..20: mol_type = other DNA
tgcgacgaagactcggtggc

SEQ ID NO: 27948 - DNA, 20 bp, synthetic construct
  misc_feature 1..20: note = chemically synthesized
  source 1..20: mol_type = other DNA
acgaagactcggtggccggc

SEQ ID NO: 27949 - DNA, 20 bp, synthetic construct
  misc_feature 1..20: note = chemically synthesized
  source 1..20: mol_type = other DNA
agactcggtggccggcgagt

SEQ ID NO: 27950 - DNA, 20 bp, synthetic construct
  misc_feature 1..20: note = chemically synthesized
  source 1..20: mol_type = other DNA
ggccggcgagtcggaccgca

SEQ ID NO: 27951 - DNA, 20 bp, synthetic construct
  misc_feature 1..20: note = chemically synthesized
  source 1..20: mol_type = other DNA
gagtcggaccgcatagacga

SEQ ID NO: 27952 - DNA, 20 bp, synthetic construct
  misc_feature 1..20: note = chemically synthesized
  source 1..20: mol_type = other DNA
atagacgatggcactgttaa

SEQ ID NO: 27953 - DNA, 20 bp, synthetic construct
  misc_feature 1..20: note = chemically synthesized
  source 1..20: mol_type = other DNA
gatggcactgttaatggccg

SEQ ID NO: 27954 - DNA, 20 bp, synthetic construct
  misc_feature 1..20: note = chemically synthesized
  source 1..20: mol_type = other DNA
taatggccgcggctgctccc

SEQ ID NO: 27955 - DNA, 20 bp, synthetic construct
  misc_feature 1..20: note = chemically synthesized
  source 1..20: mol_type = other DNA
aatggccgcggctgctcccc

SEQ ID NO: 27956 - DNA, 20 bp, synthetic construct
  misc_feature 1..20: note = chemically synthesized
  source 1..20: mol_type = other DNA
gccgcggctgctccccgggc

SEQ ID NO: 27957 - DNA, 20 bp, synthetic construct
  misc_feature 1..20: note = chemically synthesized
  source 1..20: mol_type = other DNA
cggctgctccccgggcgagt

SEQ ID NO: 27958 - DNA, 20 bp, synthetic construct
  misc_feature 1..20: note = chemically synthesized
  source 1..20: mol_type = other DNA
ctccccgggcgagtcggcct

SEQ ID NO: 27959 - DNA, 20 bp, synthetic construct
  misc_feature 1..20: note = chemically synthesized
  source 1..20: mol_type = other DNA
tccccgggcgagtcggcctc

SEQ ID NO: 27960 - DNA, 20 bp, synthetic construct
  misc_feature 1..20: note = chemically synthesized
  source 1..20: mol_type = other DNA
ccccgggcgagtcggcctcg

SEQ ID NO: 27961 - DNA, 20 bp, synthetic construct
  misc_feature 1..20: note = chemically synthesized
  source 1..20: mol_type = other DNA
cccgggcgagtcggcctcgg

SEQ ID NO: 27962 - DNA, 20 bp, synthetic construct
  misc_feature 1..20: note = chemically synthesized
  source 1..20: mol_type = other DNA
ccgggcgagtcggcctcggg

SEQ ID NO: 27963 - DNA, 20 bp, synthetic construct
  misc_feature 1..20: note = chemically synthesized
  source 1..20: mol_type = other DNA
cctcggggggcctgtccaaa

SEQ ID NO: 27964 - DNA, 20 bp, synthetic construct
  misc_feature 1..20: note = chemically synthesized
  source 1..20: mol_type = other DNA
cctgtccaaaaagctgctgc

SEQ ID NO: 27965 - DNA, 20 bp, synthetic construct
  misc_feature 1..20: note = chemically synthesized
  source 1..20: mol_type = other DNA
ctgtccaaaaagctgctgct

SEQ ID NO: 27966 - DNA, 20 bp, synthetic construct
  misc_feature 1..20: note = chemically synthesized
  source 1..20: mol_type = other DNA
tccaaaaagctgctgctggg

SEQ ID NO: 27967 - DNA, 20 bp, synthetic construct
  misc_feature 1..20: note = chemically synthesized
  source 1..20: mol_type = other DNA
aagctgctgctgggcagccc

SEQ ID NO: 27968 - DNA, 20 bp, synthetic construct
  misc_feature 1..20: note = chemically synthesized
  source 1..20: mol_type = other DNA
ctgggcagccccagctcgct

SEQ ID NO: 27969 - DNA, 20 bp, synthetic construct
  misc_feature 1..20: note = chemically synthesized
  source 1..20: mol_type = other DNA
gctcgctgagccccttctct

SEQ ID NO: 27970 - DNA, 20 bp, synthetic construct
  misc_feature 1..20: note = chemically synthesized
  source 1..20: mol_type = other DNA
gccccttctctaagcgcatc

SEQ ID NO: 27971 - DNA, 20 bp, synthetic construct
  misc_feature 1..20: note = chemically synthesized
  source 1..20: mol_type = other DNA
tctctaagcgcatcaagctc

SEQ ID NO: 27972 - DNA, 20 bp, synthetic construct
  misc_feature 1..20: note = chemically synthesized
  source 1..20: mol_type = other DNA
ctaagcgcatcaagctcgag

SEQ ID NO: 27973 - DNA, 20 bp, synthetic construct
  misc_feature 1..20: note = chemically synthesized
  source 1..20: mol_type = other DNA
taagcgcatcaagctcgaga

SEQ ID NO: 27974 - DNA, 20 bp, synthetic construct
  misc_feature 1..20: note = chemically synthesized
  source 1..20: mol_type = other DNA
agcgcatcaagctcgagaag

SEQ ID NO: 27975 - DNA, 20 bp, synthetic construct
  misc_feature 1..20: note = chemically synthesized
  source 1..20: mol_type = other DNA
gaaggagttcgacctgcccc

SEQ ID NO: 27976 - DNA, 20 bp, synthetic construct
  misc_feature 1..20: note = chemically synthesized
  source 1..20: mol_type = other DNA
cccggccgcgatgcccaaca

SEQ ID NO: 27977 - DNA, 20 bp, synthetic construct
  misc_feature 1..20: note = chemically synthesized
  source 1..20: mol_type = other DNA
cggccgcgatgcccaacacg

SEQ ID NO: 27978 - DNA, 20 bp, synthetic construct
  misc_feature 1..20: note = chemically synthesized
  source 1..20: mol_type = other DNA
acacggagaacgtgtactcg

SEQ ID NO: 27979 - DNA, 20 bp, synthetic construct
  misc_feature 1..20: note = chemically synthesized
  source 1..20: mol_type = other DNA
cggagaacgtgtactcgcag

SEQ ID NO: 27980 - DNA, 20 bp, synthetic construct
  misc_feature 1..20: note = chemically synthesized
  source 1..20: mol_type = other DNA
gtgtactcgcagtggctcgc

SEQ ID NO: 27981 - DNA, 20 bp, synthetic construct
  misc_feature 1..20: note = chemically synthesized
  source 1..20: mol_type = other DNA
gcagtggctcgccggctacg

SEQ ID NO: 27982 - DNA, 20 bp, synthetic construct
  misc_feature 1..20: note = chemically synthesized
  source 1..20: mol_type = other DNA
ctcgccggctacgcggcctc

SEQ ID NO: 27983 - DNA, 20 bp, synthetic construct
  misc_feature 1..20: note = chemically synthesized
  source 1..20: mol_type = other DNA
tcgccggctacgcggcctcc

SEQ ID NO: 27984 - DNA, 20 bp, synthetic construct
  misc_feature 1..20: note = chemically synthesized
  source 1..20: mol_type = other DNA
ccggctacgcggcctccagg

SEQ ID NO: 27985 - DNA, 20 bp, synthetic construct
  misc_feature 1..20: note = chemically synthesized
  source 1..20: mol_type = other DNA
cgcggcctccaggcagctca

SEQ ID NO: 27986 - DNA, 20 bp, synthetic construct
  misc_feature 1..20: note = chemically synthesized
  source 1..20: mol_type = other DNA
cagctcaaagatcccttcct

SEQ ID NO: 27987 - DNA, 20 bp, synthetic construct
  misc_feature 1..20: note = chemically synthesized
  source 1..20: mol_type = other DNA
aaagatcccttccttagctt

SEQ ID NO: 27988 - DNA, 20 bp, synthetic construct
  misc_feature 1..20: note = chemically synthesized
  source 1..20: mol_type = other DNA
agatcccttccttagcttcg

SEQ ID NO: 27989 - DNA, 20 bp, synthetic construct
  misc_feature 1..20: note = chemically synthesized
  source 1..20: mol_type = other DNA
ttccttagcttcggagactc

SEQ ID NO: 27990 - DNA, 20 bp, synthetic construct
  misc_feature 1..20: note = chemically synthesized
  source 1..20: mol_type = other DNA
atcgccttttgcctcctcgt

SEQ ID NO: 27991 - DNA, 20 bp, synthetic construct
  misc_feature 1..20: note = chemically synthesized
  source 1..20: mol_type = other DNA
cgccttttgcctcctcgtcg

SEQ ID NO: 27992 - DNA, 20 bp, synthetic construct
  misc_feature 1..20: note = chemically synthesized
  source 1..20: mol_type = other DNA
ctcctcgtcggagcactcct

SEQ ID NO: 27993 - DNA, 20 bp, synthetic construct
  misc_feature 1..20: note = chemically synthesized
  source 1..20: mol_type = other DNA
cctcgtcggagcactcctcg

SEQ ID NO: 27994 - DNA, 20 bp, synthetic construct
  misc_feature 1..20: note = chemically synthesized
  source 1..20: mol_type = other DNA
tcggagcactcctcggagaa

SEQ ID NO: 27995 - DNA, 20 bp, synthetic construct
  misc_feature 1..20: note = chemically synthesized
  source 1..20: mol_type = other DNA
cggagcactcctcggagaac

SEQ ID NO: 27996 - DNA, 20 bp, synthetic construct
  misc_feature 1..20: note = chemically synthesized
  source 1..20: mol_type = other DNA
gagcactcctcggagaacgg

SEQ ID NO: 27997 - DNA, 20 bp, synthetic construct
  misc_feature 1..20: note = chemically synthesized
  source 1..20: mol_type = other DNA
ttgcgcttctccacaccgcc

SEQ ID NO: 27998 - DNA, 20 bp, synthetic construct
  misc_feature 1..20: note = chemically synthesized
  source 1..20: mol_type = other DNA
tgcgcttctccacaccgccc

SEQ ID NO: 27999 - DNA, 20 bp, synthetic construct
  misc_feature 1..20: note = chemically synthesized
  source 1..20: mol_type = other DNA
gcgcttctccacaccgcccg

SEQ ID NO: 28000 - DNA, 20 bp, synthetic construct
  misc_feature 1..20: note = chemically synthesized
  source 1..20: mol_type = other DNA
gcttctccacaccgcccggg

SEQ ID NO: 28001 - DNA, 20 bp, synthetic construct
  misc_feature 1..20: note = chemically synthesized
  source 1..20: mol_type = other DNA
ctccacaccgcccggggagc

SEQ ID NO: 28002 - DNA, 20 bp, synthetic construct
  misc_feature 1..20: note = chemically synthesized
  source 1..20: mol_type = other DNA
acaccgcccggggagctgga

SEQ ID NO: 28003 - DNA, 20 bp, synthetic construct
  misc_feature 1..20: note = chemically synthesized
  source 1..20: mol_type = other DNA
accgcccggggagctggacg

SEQ ID NO: 28004 - DNA, 20 bp, synthetic construct
  misc_feature 1..20: note = chemically synthesized
  source 1..20: mol_type = other DNA
ccgcccggggagctggacgg

SEQ ID NO: 28005 - DNA, 20 bp, synthetic construct
  misc_feature 1..20: note = chemically synthesized
  source 1..20: mol_type = other DNA
cgcccggggagctggacgga

SEQ ID NO: 28006 - DNA, 20 bp, synthetic construct
  misc_feature 1..20: note = chemically synthesized
  source 1..20: mol_type = other DNA
ggagctggacggagggatct

SEQ ID NO: 28007 - DNA, 20 bp, synthetic construct
  misc_feature 1..20: note = chemically synthesized
  source 1..20: mol_type = other DNA
gagctggacggagggatctc

SEQ ID NO: 28008 - DNA, 20 bp, synthetic construct
  misc_feature 1..20: note = chemically synthesized
  source 1..20: mol_type = other DNA
agctggacggagggatctcg

SEQ ID NO: 28009 - DNA, 20 bp, synthetic construct
  misc_feature 1..20: note = chemically synthesized
  source 1..20: mol_type = other DNA
gacggagggatctcggggcg

SEQ ID NO: 28010 - DNA, 20 bp, synthetic construct
  misc_feature 1..20: note = chemically synthesized
  source 1..20: mol_type = other DNA
ggagggatctcggggcgcag

SEQ ID NO: 28011 - DNA, 20 bp, synthetic construct
  misc_feature 1..20: note = chemically synthesized
  source 1..20: mol_type = other DNA
gatctcggggcgcagcggca

SEQ ID NO: 28012 - DNA, 20 bp, synthetic construct
  misc_feature 1..20: note = chemically synthesized
  source 1..20: mol_type = other DNA
atctcggggcgcagcggcac

SEQ ID NO: 28013 - DNA, 20 bp, synthetic construct
  misc_feature 1..20: note = chemically synthesized
  source 1..20: mol_type = other DNA
tcggggcgcagcggcacggg

SEQ ID NO: 28014 - DNA, 20 bp, synthetic construct
  misc_feature 1..20: note = chemically synthesized
  source 1..20: mol_type = other DNA
gggcgcagcggcacgggaag

SEQ ID NO: 28015 - DNA, 20 bp, synthetic construct
  misc_feature 1..20: note = chemically synthesized
  source 1..20: mol_type = other DNA
gcgcagcggcacgggaagtg

SEQ ID NO: 28016 - DNA, 20 bp, synthetic construct
  misc_feature 1..20: note = chemically synthesized
  source 1..20: mol_type = other DNA
cgcagcggcacgggaagtgg

SEQ ID NO: 28017 - DNA, 20 bp, synthetic construct
  misc_feature 1..20: note = chemically synthesized
  source 1..20: mol_type = other DNA
gcagcggcacgggaagtgga

SEQ ID NO: 28018 - DNA, 20 bp, synthetic construct
  misc_feature 1..20: note = chemically synthesized
  source 1..20: mol_type = other DNA
agcggcacgggaagtggagg

SEQ ID NO: 28019 - DNA, 20 bp, synthetic construct
  misc_feature 1..20: note = chemically synthesized
  source 1..20: mol_type = other DNA
ggagggagcacgccccatat

SEQ ID NO: 28020 - DNA, 20 bp, synthetic construct
  misc_feature 1..20: note = chemically synthesized
  source 1..20: mol_type = other DNA
gggagcacgccccatattag

SEQ ID NO: 28021 - DNA, 20 bp, synthetic construct
  misc_feature 1..20: note = chemically synthesized
  source 1..20: mol_type = other DNA
cacgccccatattagtggtc

SEQ ID NO: 28022 - DNA, 20 bp, synthetic construct
  misc_feature 1..20: note = chemically synthesized
  source 1..20: mol_type = other DNA
acgccccatattagtggtcc

SEQ ID NO: 28023 - DNA, 20 bp, synthetic construct
  misc_feature 1..20: note = chemically synthesized
  source 1..20: mol_type = other DNA
ccatattagtggtccgggcc

SEQ ID NO: 28024 - DNA, 20 bp, synthetic construct
  misc_feature 1..20: note = chemically synthesized
  source 1..20: mol_type = other DNA
catattagtggtccgggccc

SEQ ID NO: 28025 - DNA, 20 bp, synthetic construct
  misc_feature 1..20: note = chemically synthesized
  source 1..20: mol_type = other DNA
attagtggtccgggcccggg

SEQ ID NO: 28026 - DNA, 20 bp, synthetic construct
  misc_feature 1..20: note = chemically synthesized
  source 1..20: mol_type = other DNA
ttagtggtccgggcccgggc

SEQ ID NO: 28027 - DNA, 20 bp, synthetic construct
  misc_feature 1..20: note = chemically synthesized
  source 1..20: mol_type = other DNA
ggtccgggcccgggcaggcc

SEQ ID NO: 28028 - DNA, 20 bp, synthetic construct
  misc_feature 1..20: note = chemically synthesized
  source 1..20: mol_type = other DNA
cccgggcaggcccagctcaa

SEQ ID NO: 28029 - DNA, 20 bp, synthetic construct
  misc_feature 1..20: note = chemically synthesized
  source 1..20: mol_type = other DNA
cgggcaggcccagctcaaaa

SEQ ID NO: 28030 - DNA, 20 bp, synthetic construct
  misc_feature 1..20: note = chemically synthesized
  source 1..20: mol_type = other DNA
gggcaggcccagctcaaaag

SEQ ID NO: 28031 - DNA, 20 bp, synthetic construct
  misc_feature 1..20: note = chemically synthesized
  source 1..20: mol_type = other DNA
ggcaggcccagctcaaaaga

SEQ ID NO: 28032 - DNA, 20 bp, synthetic construct
  misc_feature 1..20: note = chemically synthesized
  source 1..20: mol_type = other DNA
aggcccagctcaaaagaggg

SEQ ID NO: 28033 - DNA, 20 bp, synthetic construct
  misc_feature 1..20: note = chemically synthesized
  source 1..20: mol_type = other DNA
agctcaaaagagggcagacg

SEQ ID NO: 28034 - DNA, 20 bp, synthetic construct
  misc_feature 1..20: note = chemically synthesized
  source 1..20: mol_type = other DNA
gcagacgcagcgacacttgt

SEQ ID NO: 28035 - DNA, 20 bp, synthetic construct
  misc_feature 1..20: note = chemically synthesized
  source 1..20: mol_type = other DNA
agcgacacttgtgagtactg

SEQ ID NO: 28036 - DNA, 20 bp, synthetic construct
  misc_feature 1..20: note = chemically synthesized
  source 1..20: mol_type = other DNA
gcgacacttgtgagtactgt

SEQ ID NO: 28037 - DNA, 20 bp, synthetic construct
  misc_feature 1..20: note = chemically synthesized
  source 1..20: mol_type = other DNA
cacttgtgagtactgtggga

SEQ ID NO: 28038 - DNA, 20 bp, synthetic construct
  misc_feature 1..20: note = chemically synthesized
  source 1..20: mol_type = other DNA
agtactgtgggaaagtcttc

SEQ ID NO: 28039 - DNA, 20 bp, synthetic construct
  misc_feature 1..20: note = chemically synthesized
  source 1..20: mol_type = other DNA
gggaaagtcttcaagaactg

SEQ ID NO: 28040 - DNA, 20 bp, synthetic construct
  misc_feature 1..20: note = chemically synthesized
  source 1..20: mol_type = other DNA
tgtagcaatctcactgtcca

SEQ ID NO: 28041 - DNA, 20 bp, synthetic construct
  misc_feature 1..20: note = chemically synthesized
  source 1..20: mol_type = other DNA
gtagcaatctcactgtccac

SEQ ID NO: 28042 - DNA, 20 bp, synthetic construct
  misc_feature 1..20: note = chemically synthesized
  source 1..20: mol_type = other DNA
agcaatctcactgtccacag

SEQ ID NO: 28043 - DNA, 20 bp, synthetic construct
  misc_feature 1..20: note = chemically synthesized
  source 1..20: mol_type = other DNA
aatctcactgtccacaggag

SEQ ID NO: 28044 - DNA, 20 bp, synthetic construct
  misc_feature 1..20: note = chemically synthesized
  source 1..20: mol_type = other DNA
tgtccacaggagaagccaca

SEQ ID NO: 28045 - DNA, 20 bp, synthetic construct
  misc_feature 1..20: note = chemically synthesized
  source 1..20: mol_type = other DNA
gtccacaggagaagccacac

SEQ ID NO: 28046 - DNA, 20 bp, synthetic construct
  misc_feature 1..20: note = chemically synthesized
  source 1..20: mol_type = other DNA
aggagaagccacacgggcga

SEQ ID NO: 28047 - DNA, 20 bp, synthetic construct
  misc_feature 1..20: note = chemically synthesized
  source 1..20: mol_type = other DNA
ggagaagccacacgggcgaa

SEQ ID NO: 28048 - DNA, 20 bp, synthetic construct
  misc_feature 1..20: note = chemically synthesized
  source 1..20: mol_type = other DNA
gcgaaaggccttataaatgc

SEQ ID NO: 28049 - DNA, 20 bp, synthetic construct
  misc_feature 1..20: note = chemically synthesized
  source 1..20: mol_type = other DNA
tgtgcaactatgcctgtgcc

SEQ ID NO: 28050 - DNA, 20 bp, synthetic construct
  misc_feature 1..20: note = chemically synthesized
  source 1..20: mol_type = other DNA
tgcaactatgcctgtgccca

SEQ ID NO: 28051 - DNA, 20 bp, synthetic construct
  misc_feature 1..20: note = chemically synthesized
  source 1..20: mol_type = other DNA
aactatgcctgtgcccagag

SEQ ID NO: 28052 - DNA, 20 bp, synthetic construct
  misc_feature 1..20: note = chemically synthesized
  source 1..20: mol_type = other DNA
atgcctgtgcccagagtagc

SEQ ID NO: 28053 - DNA, 20 bp, synthetic construct
  misc_feature 1..20: note = chemically synthesized
  source 1..20: mol_type = other DNA
gcccagagtagcaagctcac

SEQ ID NO: 28054 - DNA, 20 bp, synthetic construct
  misc_feature 1..20: note = chemically synthesized
  source 1..20: mol_type = other DNA
cccagagtagcaagctcacc

SEQ ID NO: 28055 - DNA, 20 bp, synthetic construct
  misc_feature 1..20: note = chemically synthesized
  source 1..20: mol_type = other DNA
accaggcacatgaaaacgca

SEQ ID NO: 28056 - DNA, 20 bp, synthetic construct
  misc_feature 1..20: note = chemically synthesized
  source 1..20: mol_type = other DNA
ggcacatgaaaacgcatggc

SEQ ID NO: 28057 - DNA, 20 bp, synthetic construct
  misc_feature 1..20: note = chemically synthesized
  source 1..20: mol_type = other DNA
gcacatgaaaacgcatggcc

SEQ ID NO: 28058 - DNA, 20 bp, synthetic construct
  misc_feature 1..20: note = chemically synthesized
  source 1..20: mol_type = other DNA
catgaaaacgcatggccagg

SEQ ID NO: 28059 - DNA, 20 bp, synthetic construct
  misc_feature 1..20: note = chemically synthesized
  source 1..20: mol_type = other DNA
atgaaaacgcatggccaggt

SEQ ID NO: 28060 - DNA, 20 bp, synthetic construct
  misc_feature 1..20: note = chemically synthesized
  source 1..20: mol_type = other DNA
tgaaaacgcatggccaggtg

SEQ ID NO: 28061 - DNA, 20 bp, synthetic construct
  misc_feature 1..20: note = chemically synthesized
  source 1..20: mol_type = other DNA
aaacgcatggccaggtgggg

SEQ ID NO: 28062 - DNA, 20 bp, synthetic construct
  misc_feature 1..20: note = chemically synthesized
  source 1..20: mol_type = other DNA
aacgcatggccaggtgggga

SEQ ID NO: 28063 - DNA, 20 bp, synthetic construct
  misc_feature 1..20: note = chemically synthesized
  source 1..20: mol_type = other DNA
tttacaaatgtgaaatttgt

SEQ ID NO: 28064 - DNA, 20 bp, synthetic construct
  misc_feature 1..20: note = chemically synthesized
  source 1..20: mol_type = other DNA
gaaatttgtaagatgccttt

SEQ ID NO: 28065 - DNA, 20 bp, synthetic construct
  misc_feature 1..20: note = chemically synthesized
  source 1..20: mol_type = other DNA
aagatgccttttagcgtgta

SEQ ID NO: 28066 - DNA, 20 bp, synthetic construct
  misc_feature 1..20: note = chemically synthesized
  source 1..20: mol_type = other DNA
ttttagcgtgtacagtaccc

SEQ ID NO: 28067 - DNA, 20 bp, synthetic construct
  misc_feature 1..20: note = chemically synthesized
  source 1..20: mol_type = other DNA
ttagcgtgtacagtaccctg

SEQ ID NO: 28068 - DNA, 20 bp, synthetic construct
  misc_feature 1..20: note = chemically synthesized
  source 1..20: mol_type = other DNA
tggagaaacacatgaaaaaa

SEQ ID NO: 28069 - DNA, 20 bp, synthetic construct
  misc_feature 1..20: note = chemically synthesized
  source 1..20: mol_type = other DNA
aaacacatgaaaaaatggca

SEQ ID NO: 28070 - DNA, 20 bp, synthetic construct
  misc_feature 1..20: note = chemically synthesized
  source 1..20: mol_type = other DNA
gaaaaaatggcacagtgatc

SEQ ID NO: 28071 - DNA, 20 bp, synthetic construct
  misc_feature 1..20: note = chemically synthesized
  source 1..20: mol_type = other DNA
ataatgatataaaaactgaa

SEQ ID NO: 28072 - DNA, 20 bp, synthetic construct
  misc_feature 1..20: note = chemically synthesized
  source 1..20: mol_type = other DNA
aatgatataaaaactgaata

SEQ ID NO: 28073 - DNA, 20 bp, synthetic construct
  misc_feature 1..20: note = chemically synthesized
  source 1..20: mol_type = other DNA
atgatataaaaactgaatag

SEQ ID NO: 28074 - DNA, 20 bp, synthetic construct
  misc_feature 1..20: note = chemically synthesized
  source 1..20: mol_type = other DNA
tccccttccccatcgccctc

SEQ ID NO: 28075 - DNA, 20 bp, synthetic construct
  misc_feature 1..20: note = chemically synthesized
  source 1..20: mol_type = other DNA
ccctccagccccactccctg

SEQ ID NO: 28076 - DNA, 20 bp, synthetic construct
  misc_feature 1..20: note = chemically synthesized
  source 1..20: mol_type = other DNA
cctccagccccactccctgt

SEQ ID NO: 28077 - DNA, 20 bp, synthetic construct
  misc_feature 1..20: note = chemically synthesized
  source 1..20: mol_type = other DNA
ctccctgtaggatttttttc

SEQ ID NO: 28078 - DNA, 20 bp, synthetic construct
  misc_feature 1..20: note = chemically synthesized
  source 1..20: mol_type = other DNA
taaacaaacaaacaaacaaa

SEQ ID NO: 28079 - DNA, 20 bp, synthetic construct
  misc_feature 1..20: note = chemically synthesized
  source 1..20: mol_type = other DNA
acaaacaaacaaacaaacag

SEQ ID NO: 28080 - DNA, 20 bp, synthetic construct
  misc_feature 1..20: note = chemically synthesized
  source 1..20: mol_type = other DNA
acaaacaaacagaagtaacg

SEQ ID NO: 28081 - DNA, 20 bp, synthetic construct
  misc_feature 1..20: note = chemically synthesized
  source 1..20: mol_type = other DNA
caaacagaagtaacgaagct

SEQ ID NO: 28082 - DNA, 20 bp, synthetic construct
  misc_feature 1..20: note = chemically synthesized
  source 1..20: mol_type = other DNA
agtaacgaagctaagaatat

SEQ ID NO: 28083 - DNA, 20 bp, synthetic construct
  misc_feature 1..20: note = chemically synthesized
  source 1..20: mol_type = other DNA
taacgaagctaagaatatga

SEQ ID NO: 28084 - DNA, 20 bp, synthetic construct
  misc_feature 1..20: note = chemically synthesized
  source 1..20: mol_type = other DNA
aatatgagagtgcttgtcac

SEQ ID NO: 28085 - DNA, 20 bp, synthetic construct
  misc_feature 1..20: note = chemically synthesized
  source 1..20: mol_type = other DNA
gtttgaatgcatgatctgta

SEQ ID NO: 28086 - DNA, 20 bp, synthetic construct
  misc_feature 1..20: note = chemically synthesized
  source 1..20: mol_type = other DNA
tttgaatgcatgatctgtat

SEQ ID NO: 28087 - DNA, 20 bp, synthetic construct
  misc_feature 1..20: note = chemically synthesized
  source 1..20: mol_type = other DNA
ttgaatgcatgatctgtatg

SEQ ID NO: 28088 - DNA, 20 bp, synthetic construct
  misc_feature 1..20: note = chemically synthesized
  source 1..20: mol_type = other DNA
ttgcattttacgcaaacttt

SEQ ID NO: 28089 - DNA, 20 bp, synthetic construct
  misc_feature 1..20: note = chemically synthesized
  source 1..20: mol_type = other DNA
tgtatgtttttttttaaact

SEQ ID NO: 28090 - DNA, 20 bp, synthetic construct
  misc_feature 1..20: note = chemically synthesized
  source 1..20: mol_type = other DNA
tgtttttttttaaacttaga

SEQ ID NO: 28091 - DNA, 20 bp, synthetic construct
  misc_feature 1..20: note = chemically synthesized
  source 1..20: mol_type = other DNA
ttaaacttagacagcatgta

SEQ ID NO: 28092 - DNA, 20 bp, synthetic construct
  misc_feature 1..20: note = chemically synthesized
  source 1..20: mol_type = other DNA
acagcatgtatggtatgtta

SEQ ID NO: 28093 - DNA, 20 bp, synthetic construct
  misc_feature 1..20: note = chemically synthesized
  source 1..20: mol_type = other DNA
attgtccctaattcgttgct

SEQ ID NO: 28094 - DNA, 20 bp, synthetic construct
  misc_feature 1..20: note = chemically synthesized
  source 1..20: mol_type = other DNA
agcaaacatgttgctgtttc

SEQ ID NO: 28095 - DNA, 20 bp, synthetic construct
  misc_feature 1..20: note = chemically synthesized
  source 1..20: mol_type = other DNA
gctgtttccagttccgttct

SEQ ID NO: 28096 - DNA, 20 bp, synthetic construct
  misc_feature 1..20: note = chemically synthesized
  source 1..20: mol_type = other DNA
tgtttccagttccgttctga

SEQ ID NO: 28097 - DNA, 20 bp, synthetic construct
  misc_feature 1..20: note = chemically synthesized
  source 1..20: mol_type = other DNA
cagttccgttctgagagaaa

SEQ ID NO: 28098 - DNA, 20 bp, synthetic construct
  misc_feature 1..20: note = chemically synthesized
  source 1..20: mol_type = other DNA
gttccgttctgagagaaaaa

SEQ ID NO: 28099 - DNA, 20 bp, synthetic construct
  misc_feature 1..20: note = chemically synthesized
  source 1..20: mol_type = other DNA
tccgttctgagagaaaaaga

SEQ ID NO: 28100 - DNA, 20 bp, synthetic construct
  misc_feature 1..20: note = chemically synthesized
  source 1..20: mol_type = other DNA
cgttctgagagaaaaagaga

SEQ ID NO: 28101 - DNA, 20 bp, synthetic construct
  misc_feature 1..20: note = chemically synthesized
  source 1..20: mol_type = other DNA
ttctgagagaaaaagagaga

SEQ ID NO: 28102 - DNA, 20 bp, synthetic construct
  misc_feature 1..20: note = chemically synthesized
  source 1..20: mol_type = other DNA
ctgagagaaaaagagagaga

SEQ ID NO: 28103 - DNA, 20 bp, synthetic construct
  misc_feature 1..20: note = chemically synthesized
  source 1..20: mol_type = other DNA
gagagaaaaagagagagaga

SEQ ID NO: 28104 - DNA, 20 bp, synthetic construct
  misc_feature 1..20: note = chemically synthesized
  source 1..20: mol_type = other DNA
aaaagagagagagagagaaa

SEQ ID NO: 28105 - DNA, 20 bp, synthetic construct
  misc_feature 1..20: note = chemically synthesized
  source 1..20: mol_type = other DNA
tctgtaatacatatcatgta

SEQ ID NO: 28106 - DNA, 20 bp, synthetic construct
  misc_feature 1..20: note = chemically synthesized
  source 1..20: mol_type = other DNA
acagttttattttataacgt

SEQ ID NO: 28107 - DNA, 20 bp, synthetic construct
  misc_feature 1..20: note = chemically synthesized
  source 1..20: mol_type = other DNA
cagttttattttataacgtg

SEQ ID NO: 28108 - DNA, 20 bp, synthetic construct
  misc_feature 1..20: note = chemically synthesized
  source 1..20: mol_type = other DNA
gttttattttataacgtgag

SEQ ID NO: 28109 - DNA, 20 bp, synthetic construct
  misc_feature 1..20: note = chemically synthesized
  source 1..20: mol_type = other DNA
ttttattttataacgtgagg

SEQ ID NO: 28110 - DNA, 20 bp, synthetic construct
  misc_feature 1..20: note = chemically synthesized
  source 1..20: mol_type = other DNA
tataacgtgaggaggaaaaa

SEQ ID NO: 28111 - DNA, 20 bp, synthetic construct
  misc_feature 1..20: note = chemically synthesized
  source 1..20: mol_type = other DNA
tgaggaggaaaaacagtctt

SEQ ID NO: 28112 - DNA, 20 bp, synthetic construct
  misc_feature 1..20: note = chemically synthesized
  source 1..20: mol_type = other DNA
gtctttggattaaccctcta

SEQ ID NO: 28113 - DNA, 20 bp, synthetic construct
  misc_feature 1..20: note = chemically synthesized
  source 1..20: mol_type = other DNA
ttggattaaccctctataga

SEQ ID NO: 28114 - DNA, 20 bp, synthetic construct
  misc_feature 1..20: note = chemically synthesized
  source 1..20: mol_type = other DNA
ttaaccctctatagacagaa

SEQ ID NO: 28115 - DNA, 20 bp, synthetic construct
  misc_feature 1..20: note = chemically synthesized
  source 1..20: mol_type = other DNA
ccctctatagacagaataga

SEQ ID NO: 28116 - DNA, 20 bp, synthetic construct
  misc_feature 1..20: note = chemically synthesized
  source 1..20: mol_type = other DNA
cactgaaaaaaaatctctat

SEQ ID NO: 28117 - DNA, 20 bp, synthetic construct
  misc_feature 1..20: note = chemically synthesized
  source 1..20: mol_type = other DNA
gagctaaatgtctgtctcta

SEQ ID NO: 28118 - DNA, 20 bp, synthetic construct
  misc_feature 1..20: note = chemically synthesized
  source 1..20: mol_type = other DNA
agctaaatgtctgtctctaa

SEQ ID NO: 28119 - DNA, 20 bp, synthetic construct
  misc_feature 1..20: note = chemically synthesized
  source 1..20: mol_type = other DNA
gctaaatgtctgtctctaaa

SEQ ID NO: 28120 - DNA, 20 bp, synthetic construct
  misc_feature 1..20: note = chemically synthesized
  source 1..20: mol_type = other DNA
aaagggttaaatgtatcaat

SEQ ID NO: 28121 - DNA, 20 bp, synthetic construct
  misc_feature 1..20: note = chemically synthesized
  source 1..20: mol_type = other DNA
ggttaaatgtatcaattgga

SEQ ID NO: 28122 - DNA, 20 bp, synthetic construct
  misc_feature 1..20: note = chemically synthesized
  source 1..20: mol_type = other DNA
gttaaatgtatcaattggaa

SEQ ID NO: 28123 - DNA, 20 bp, synthetic construct
  misc_feature 1..20: note = chemically synthesized
  source 1..20: mol_type = other DNA
aaatgtatcaattggaaagg

SEQ ID NO: 28124 - DNA, 20 bp, synthetic construct
  misc_feature 1..20: note = chemically synthesized
  source 1..20: mol_type = other DNA
tcaattggaaaggaagaaaa

SEQ ID NO: 28125 - DNA, 20 bp, synthetic construct
  misc_feature 1..20: note = chemically synthesized
  source 1..20: mol_type = other DNA
caattggaaaggaagaaaaa

SEQ ID NO: 28126 - DNA, 20 bp, synthetic construct
  misc_feature 1..20: note = chemically synthesized
  source 1..20: mol_type = other DNA
gccttgaattgacaaattaa

SEQ ID NO: 28127 - DNA, 20 bp, synthetic construct
  misc_feature 1..20: note = chemically synthesized
  source 1..20: mol_type = other DNA
ttgacaaattaacagaaaaa

SEQ ID NO: 28128 - DNA, 20 bp, synthetic construct
  misc_feature 1..20: note = chemically synthesized
  source 1..20: mol_type = other DNA
aattaacagaaaaacagaac

SEQ ID NO: 28129 - DNA, 20 bp, synthetic construct
  misc_feature 1..20: note = chemically synthesized
  source 1..20: mol_type = other DNA
aacaagtttattctatcatt

SEQ ID NO: 28130 - DNA, 20 bp, synthetic construct
  misc_feature 1..20: note = chemically synthesized
  source 1..20: mol_type = other DNA
atcatttggttttaaaatat

SEQ ID NO: 28131 - DNA, 20 bp, synthetic construct
  misc_feature 1..20: note = chemically synthesized
  source 1..20: mol_type = other DNA
gttttaaaatatgagtgcct

SEQ ID NO: 28132 - DNA, 20 bp, synthetic construct
  misc_feature 1..20: note = chemically synthesized
  source 1..20: mol_type = other DNA
atctattaaaaccacatcga

SEQ ID NO: 28133 - DNA, 20 bp, synthetic construct
  misc_feature 1..20: note = chemically synthesized
  source 1..20: mol_type = other DNA
ttctacttgttataaacttg

SEQ ID NO: 28134 - DNA, 20 bp, synthetic construct
  misc_feature 1..20: note = chemically synthesized
  source 1..20: mol_type = other DNA
tataaacttgtagcttaatt

SEQ ID NO: 28135 - DNA, 20 bp, synthetic construct
  misc_feature 1..20: note = chemically synthesized
  source 1..20: mol_type = other DNA
cttgtagcttaattcagcat

SEQ ID NO: 28136 - DNA, 20 bp, synthetic construct
  misc_feature 1..20: note = chemically synthesized
  source 1..20: mol_type = other DNA
ttgtagcttaattcagcatt

SEQ ID NO: 28137 - DNA, 20 bp, synthetic construct
  misc_feature 1..20: note = chemically synthesized
  source 1..20: mol_type = other DNA
agcttaattcagcattgggt

SEQ ID NO: 28138 - DNA, 20 bp, synthetic construct
  misc_feature 1..20: note = chemically synthesized
  source 1..20: mol_type = other DNA
gcttaattcagcattgggtg

SEQ ID NO: 28139 - DNA, 20 bp, synthetic construct
  misc_feature 1..20: note = chemically synthesized
  source 1..20: mol_type = other DNA
ttgggtgaggtaataaacct

SEQ ID NO: 28140 - DNA, 20 bp, synthetic construct
  misc_feature 1..20: note = chemically synthesized
  source 1..20: mol_type = other DNA
tgggtgaggtaataaacctt

SEQ ID NO: 28141 - DNA, 20 bp, synthetic construct
  misc_feature 1..20: note = chemically synthesized
  source 1..20: mol_type = other DNA
aggtaataaaccttaggaac

SEQ ID NO: 28142 - DNA, 20 bp, synthetic construct
  misc_feature 1..20: note = chemically synthesized
  source 1..20: mol_type = other DNA
tattgtatttctcacaacaa

SEQ ID NO: 28143 - DNA, 20 bp, synthetic construct
  misc_feature 1..20: note = chemically synthesized
  source 1..20: mol_type = other DNA
cacaacaatggctacctaaa

SEQ ID NO: 28144 - DNA, 20 bp, synthetic construct
  misc_feature 1..20: note = chemically synthesized
  source 1..20: mol_type = other DNA
aaagatgacccattatgtcc

SEQ ID NO: 28145 - DNA, 20 bp, synthetic construct
  misc_feature 1..20: note = chemically synthesized
  source 1..20: mol_type = other DNA
gttaatcatcatttttcctt

SEQ ID NO: 28146 - DNA, 20 bp, synthetic construct
  misc_feature 1..20: note = chemically synthesized
  source 1..20: mol_type = other DNA
ataaacaaaactgattatac

SEQ ID NO: 28147 - DNA, 20 bp, synthetic construct
  misc_feature 1..20: note = chemically synthesized
  source 1..20: mol_type = other DNA
aactgattataccagtataa

SEQ ID NO: 28148 - DNA, 20 bp, synthetic construct
  misc_feature 1..20: note = chemically synthesized
  source 1..20: mol_type = other DNA
tataaaagctactttgctcc

SEQ ID NO: 28149 - DNA, 20 bp, synthetic construct
  misc_feature 1..20: note = chemically synthesized
  source 1..20: mol_type = other DNA
aaagctactttgctcctggt

SEQ ID NO: 28150 - DNA, 20 bp, synthetic construct
  misc_feature 1..20: note = chemically synthesized
  source 1..20: mol_type = other DNA
agctactttgctcctggtga

SEQ ID NO: 28151 - DNA, 20 bp, synthetic construct
  misc_feature 1..20: note = chemically synthesized
  source 1..20: mol_type = other DNA
tgctcctggtgagagcttaa

SEQ ID NO: 28152 - DNA, 20 bp, synthetic construct
  misc_feature 1..20: note = chemically synthesized
  source 1..20: mol_type = other DNA
tggtgagagcttaaaagaaa

SEQ ID NO: 28153 - DNA, 20 bp, synthetic construct
  misc_feature 1..20: note = chemically synthesized
  source 1..20: mol_type = other DNA
ggtgagagcttaaaagaaat

SEQ ID NO: 28154 - DNA, 20 bp, synthetic construct
  misc_feature 1..20: note = chemically synthesized
  source 1..20: mol_type = other DNA
gaaatgggctgttttgccca

SEQ ID NO: 28155 - DNA, 20 bp, synthetic construct
  misc_feature 1..20: note = chemically synthesized
  source 1..20: mol_type = other DNA
attgaatgtgtaatgtgcaa

SEQ ID NO: 28156 - DNA, 20 bp, synthetic construct
  misc_feature 1..20: note = chemically synthesized
  source 1..20: mol_type = other DNA
tgtgtaatgtgcaaaagccc

SEQ ID NO: 28157 - DNA, 20 bp, synthetic construct
  misc_feature 1..20: note = chemically synthesized
  source 1..20: mol_type = other DNA
tggaacgcaattaaatacac

SEQ ID NO: 28158 - DNA, 20 bp, synthetic construct
  misc_feature 1..20: note = chemically synthesized
  source 1..20: mol_type = other DNA
acgcaattaaatacactagt

SEQ ID NO: 28159 - DNA, 20 bp, synthetic construct
  misc_feature 1..20: note = chemically synthesized
  source 1..20: mol_type = other DNA
cgcaattaaatacactagta

SEQ ID NO: 28160 - DNA, 20 bp, synthetic construct
  misc_feature 1..20: note = chemically synthesized
  source 1..20: mol_type = other DNA
caattaaatacactagtaag

SEQ ID NO: 28161 - DNA, 20 bp, synthetic construct
  misc_feature 1..20: note = chemically synthesized
  source 1..20: mol_type = other DNA
agtaaggagttcattttatg

SEQ ID NO: 28162 - DNA, 20 bp, synthetic construct
  misc_feature 1..20: note = chemically synthesized
  source 1..20: mol_type = other DNA
taatgtctttttaaaaatac

SEQ ID NO: 28163 - DNA, 20 bp, synthetic construct
  misc_feature 1..20: note = chemically synthesized
  source 1..20: mol_type = other DNA
tttaaaaatactggcaccaa

SEQ ID NO: 28164 - DNA, 20 bp, synthetic construct
  misc_feature 1..20: note = chemically synthesized
  source 1..20: mol_type = other DNA
aatactggcaccaaaagaaa

SEQ ID NO: 28165 - DNA, 20 bp, synthetic construct
  misc_feature 1..20: note = chemically synthesized
  source 1..20: mol_type = other DNA
ggcaccaaaagaaatagatc

SEQ ID NO: 28166 - DNA, 20 bp, synthetic construct
  misc_feature 1..20: note = chemically synthesized
  source 1..20: mol_type = other DNA
gaaatagatccagatctact

SEQ ID NO: 28167 - DNA, 20 bp, synthetic construct
  misc_feature 1..20: note = chemically synthesized
  source 1..20: mol_type = other DNA
tccagatctacttggttgtc

SEQ ID NO: 28168 - DNA, 20 bp, synthetic construct
  misc_feature 1..20: note = chemically synthesized
  source 1..20: mol_type = other DNA
agatctacttggttgtcaag

SEQ ID NO: 28169 - DNA, 20 bp, synthetic construct
  misc_feature 1..20: note = chemically synthesized
  source 1..20: mol_type = other DNA
acaatcaaatgataaacttt

SEQ ID NO: 28170 - DNA, 20 bp, synthetic construct
  misc_feature 1..20: note = chemically synthesized
  source 1..20: mol_type = other DNA
gaccttgtataccatattga

SEQ ID NO: 28171 - DNA, 20 bp, synthetic construct
  misc_feature 1..20: note = chemically synthesized
  source 1..20: mol_type = other DNA
accttgtataccatattgaa

SEQ ID NO: 28172 - DNA, 20 bp, synthetic construct
  misc_feature 1..20: note = chemically synthesized
  source 1..20: mol_type = other DNA
ttgtataccatattgaaagg

SEQ ID NO: 28173 - DNA, 20 bp, synthetic construct
  misc_feature 1..20: note = chemically synthesized
  source 1..20: mol_type = other DNA
gtataccatattgaaaggaa

SEQ ID NO: 28174 - DNA, 20 bp, synthetic construct
  misc_feature 1..20: note = chemically synthesized
  source 1..20: mol_type = other DNA
tataccatattgaaaggaag

SEQ ID NO: 28175 - DNA, 20 bp, synthetic construct
  misc_feature 1..20: note = chemically synthesized
  source 1..20: mol_type = other DNA
gaaaggaagaggctgacaat

SEQ ID NO: 28176 - DNA, 20 bp, synthetic construct
  misc_feature 1..20: note = chemically synthesized
  source 1..20: mol_type = other DNA
aaaggaagaggctgacaata

SEQ ID NO: 28177 - DNA, 20 bp, synthetic construct
  misc_feature 1..20: note = chemically synthesized
  source 1..20: mol_type = other DNA
aggctgacaataaggtttga

SEQ ID NO: 28178 - DNA, 20 bp, synthetic construct
  misc_feature 1..20: note = chemically synthesized
  source 1..20: mol_type = other DNA
gctgacaataaggtttgaca

SEQ ID NO: 28179 - DNA, 20 bp, synthetic construct
  misc_feature 1..20: note = chemically synthesized
  source 1..20: mol_type = other DNA
ctgacaataaggtttgacag

SEQ ID NO: 28180 - DNA, 20 bp, synthetic construct
  misc_feature 1..20: note = chemically synthesized
  source 1..20: mol_type = other DNA
tgacaataaggtttgacaga

SEQ ID NO: 28181 - DNA, 20 bp, synthetic construct
  misc_feature 1..20: note = chemically synthesized
  source 1..20: mol_type = other DNA
gacaataaggtttgacagag

SEQ ID NO: 28182 - DNA, 20 bp, synthetic construct
  misc_feature 1..20: note = chemically synthesized
  source 1..20: mol_type = other DNA
taaggtttgacagaggggaa

SEQ ID NO: 28183 - DNA, 20 bp, synthetic construct
  misc_feature 1..20: note = chemically synthesized
  source 1..20: mol_type = other DNA
ggtttgacagaggggaacag

SEQ ID NO: 28184 - DNA, 20 bp, synthetic construct
  misc_feature 1..20: note = chemically synthesized
  source 1..20: mol_type = other DNA
aagaaaataatatgatttat

SEQ ID NO: 28185 - DNA, 20 bp, synthetic construct
  misc_feature 1..20: note = chemically synthesized
  source 1..20: mol_type = other DNA
tatgatttattagcacaacg

SEQ ID NO: 28186 - DNA, 20 bp, synthetic construct
  misc_feature 1..20: note = chemically synthesized
  source 1..20: mol_type = other DNA
tactatttgccatttaaaac

SEQ ID NO: 28187 - DNA, 20 bp, synthetic construct
  misc_feature 1..20: note = chemically synthesized
  source 1..20: mol_type = other DNA
tttgccatttaaaactagaa

SEQ ID NO: 28188 - DNA, 20 bp, synthetic construct
  misc_feature 1..20: note = chemically synthesized
  source 1..20: mol_type = other DNA
ttgccatttaaaactagaac

SEQ ID NO: 28189 - DNA, 20 bp, synthetic construct
  misc_feature 1..20: note = chemically synthesized
  source 1..20: mol_type = other DNA
taaaactagaacaggtatat

SEQ ID NO: 28190 - DNA, 20 bp, synthetic construct
  misc_feature 1..20: note = chemically synthesized
  source 1..20: mol_type = other DNA
atgattaactatgaattctt

SEQ ID NO: 28191 - DNA, 20 bp, synthetic construct
  misc_feature 1..20: note = chemically synthesized
  source 1..20: mol_type = other DNA
aaatgtgacattcttaaaaa

SEQ ID NO: 28192 - DNA, 20 bp, synthetic construct
  misc_feature 1..20: note = chemically synthesized
  source 1..20: mol_type = other DNA
tgtgacattcttaaaaaaag

SEQ ID NO: 28193 - DNA, 20 bp, synthetic construct
  misc_feature 1..20: note = chemically synthesized
  source 1..20: mol_type = other DNA
tgacattcttaaaaaaagaa

SEQ ID NO: 28194 - DNA, 20 bp, synthetic construct
  misc_feature 1..20: note = chemically synthesized
  source 1..20: mol_type = other DNA
attcttaaaaaaagaagaga

SEQ ID NO: 28195 - DNA, 20 bp, synthetic construct
  misc_feature 1..20: note = chemically synthesized
  source 1..20: mol_type = other DNA
aaaagaagagaaagaatttt

SEQ ID NO: 28196 - DNA, 20 bp, synthetic construct
  misc_feature 1..20: note = chemically synthesized
  source 1..20: mol_type = other DNA
aagaagagaaagaattttaa

SEQ ID NO: 28197 - DNA, 20 bp, synthetic construct
  misc_feature 1..20: note = chemically synthesized
  source 1..20: mol_type = other DNA
aagagaaagaattttaagag

SEQ ID NO: 28198 - DNA, 20 bp, synthetic construct
  misc_feature 1..20: note = chemically synthesized
  source 1..20: mol_type = other DNA
agaaagaattttaagagtag

SEQ ID NO: 28199 - DNA, 20 bp, synthetic construct
  misc_feature 1..20: note = chemically synthesized
  source 1..20: mol_type = other DNA
tatatgtctgtgctccctaa

SEQ ID NO: 28200 - DNA, 20 bp, synthetic construct
  misc_feature 1..20: note = chemically synthesized
  source 1..20: mol_type = other DNA
gtgtgctatttgtgttaaca

SEQ ID NO: 28201 - DNA, 20 bp, synthetic construct
  misc_feature 1..20: note = chemically synthesized
  source 1..20: mol_type = other DNA
tgctatttgtgttaacatgg

SEQ ID NO: 28202 - DNA, 20 bp, synthetic construct
  misc_feature 1..20: note = chemically synthesized
  source 1..20: mol_type = other DNA
ctatttgtgttaacatggaa

SEQ ID NO: 28203 - DNA, 20 bp, synthetic construct
  misc_feature 1..20: note = chemically synthesized
  source 1..20: mol_type = other DNA
tatttgtgttaacatggaag

SEQ ID NO: 28204 - DNA, 20 bp, synthetic construct
  misc_feature 1..20: note = chemically synthesized
  source 1..20: mol_type = other DNA
ttaattttttcttttttatt

SEQ ID NO: 28205 - DNA, 20 bp, synthetic construct
  misc_feature 1..20: note = chemically synthesized
  source 1..20: mol_type = other DNA
ttttttcttttttattaagc

SEQ ID NO: 28206 - DNA, 20 bp, synthetic construct
  misc_feature 1..20: note = chemically synthesized
  source 1..20: mol_type = other DNA
tattaagctagcatctgccc

SEQ ID NO: 28207 - DNA, 20 bp, synthetic construct
  misc_feature 1..20: note = chemically synthesized
  source 1..20: mol_type = other DNA
aagctagcatctgccccagt

SEQ ID NO: 28208 - DNA, 20 bp, synthetic construct
  misc_feature 1..20: note = chemically synthesized
  source 1..20: mol_type = other DNA
tgccccagttggtgttcaaa

SEQ ID NO: 28209 - DNA, 20 bp, synthetic construct
  misc_feature 1..20: note = chemically synthesized
  source 1..20: mol_type = other DNA
atctgtatcttttctctaat

SEQ ID NO: 28210 - DNA, 20 bp, synthetic construct
  misc_feature 1..20: note = chemically synthesized
  source 1..20: mol_type = other DNA
ctgtatcttttctctaatca

SEQ ID NO: 28211 - DNA, 20 bp, synthetic construct
  misc_feature 1..20: note = chemically synthesized
  source 1..20: mol_type = other DNA
cttttctctaatcagagata

SEQ ID NO: 28212 - DNA, 20 bp, synthetic construct
  misc_feature 1..20: note = chemically synthesized
  source 1..20: mol_type = other DNA
tttctctaatcagagataca

SEQ ID NO: 28213 - DNA, 20 bp, synthetic construct
  misc_feature 1..20: note = chemically synthesized
  source 1..20: mol_type = other DNA
ttctctaatcagagatacag

SEQ ID NO: 28214 - DNA, 20 bp, synthetic construct
  misc_feature 1..20: note = chemically synthesized
  source 1..20: mol_type = other DNA
taatcagagatacagaggtt

SEQ ID NO: 28215 - DNA, 20 bp, synthetic construct
  misc_feature 1..20: note = chemically synthesized
  source 1..20: mol_type = other DNA
gagtataaaataaacctgct

SEQ ID NO: 28216 - DNA, 20 bp, synthetic construct
  misc_feature 1..20: note = chemically synthesized
  source 1..20: mol_type = other DNA
ataaaataaacctgctcaga

SEQ ID NO: 28217 - DNA, 20 bp, synthetic construct
  misc_feature 1..20: note = chemically synthesized
  source 1..20: mol_type = other DNA
taaaataaacctgctcagat

SEQ ID NO: 28218 - DNA, 20 bp, synthetic construct
  misc_feature 1..20: note = chemically synthesized
  source 1..20: mol_type = other DNA
cctgctcagataggacaatt

SEQ ID NO: 28219 - DNA, 20 bp, synthetic construct
  misc_feature 1..20: note = chemically synthesized
  source 1..20: mol_type = other DNA
agtgcactgtacaattttcc

SEQ ID NO: 28220 - DNA, 20 bp, synthetic construct
  misc_feature 1..20: note = chemically synthesized
  source 1..20: mol_type = other DNA
tgtacaattttcccagttta

SEQ ID NO: 28221 - DNA, 20 bp, synthetic construct
  misc_feature 1..20: note = chemically synthesized
  source 1..20: mol_type = other DNA
gtacaattttcccagtttac

SEQ ID NO: 28222 - DNA, 20 bp, synthetic construct
  misc_feature 1..20: note = chemically synthesized
  source 1..20: mol_type = other DNA
cagtttacaggtctatactt

SEQ ID NO: 28223 - DNA, 20 bp, synthetic construct
  misc_feature 1..20: note = chemically synthesized
  source 1..20: mol_type = other DNA
agtttacaggtctatactta

SEQ ID NO: 28224 - DNA, 20 bp, synthetic construct
  misc_feature 1..20: note = chemically synthesized
  source 1..20: mol_type = other DNA
gtttacaggtctatacttaa

SEQ ID NO: 28225 - DNA, 20 bp, synthetic construct
  misc_feature 1..20: note = chemically synthesized
  source 1..20: mol_type = other DNA
caggtctatacttaagggaa

SEQ ID NO: 28226 - DNA, 20 bp, synthetic construct
  misc_feature 1..20: note = chemically synthesized
  source 1..20: mol_type = other DNA
atacttaagggaaaagttgc

SEQ ID NO: 28227 - DNA, 20 bp, synthetic construct
  misc_feature 1..20: note = chemically synthesized
  source 1..20: mol_type = other DNA
aaattgaacacaatctcatt

SEQ ID NO: 28228 - DNA, 20 bp, synthetic construct
  misc_feature 1..20: note = chemically synthesized
  source 1..20: mol_type = other DNA
aattgaacacaatctcattg

SEQ ID NO: 28229 - DNA, 20 bp, synthetic construct
  misc_feature 1..20: note = chemically synthesized
  source 1..20: mol_type = other DNA
ttgaacacaatctcattgag

SEQ ID NO: 28230 - DNA, 20 bp, synthetic construct
  misc_feature 1..20: note = chemically synthesized
  source 1..20: mol_type = other DNA
taaaaaaaaaaaaactttgc

SEQ ID NO: 28231 - DNA, 20 bp, synthetic construct
  misc_feature 1..20: note = chemically synthesized
  source 1..20: mol_type = other DNA
cagccatttacttgactatt

SEQ ID NO: 28232 - DNA, 20 bp, synthetic construct
  misc_feature 1..20: note = chemically synthesized
  source 1..20: mol_type = other DNA
gactattgagcttacttact

SEQ ID NO: 28233 - DNA, 20 bp, synthetic construct
  misc_feature 1..20: note = chemically synthesized
  source 1..20: mol_type = other DNA
ttacttggacgcaacattgc

SEQ ID NO: 28234 - DNA, 20 bp, synthetic construct
  misc_feature 1..20: note = chemically synthesized
  source 1..20: mol_type = other DNA
aacattgcaagcgctgtgaa

SEQ ID NO: 28235 - DNA, 20 bp, synthetic construct
  misc_feature 1..20: note = chemically synthesized
  source 1..20: mol_type = other DNA
gcaagcgctgtgaatggaaa

SEQ ID NO: 28236 - DNA, 20 bp, synthetic construct
  misc_feature 1..20: note = chemically synthesized
  source 1..20: mol_type = other DNA
gaaacagaatacacttaaca

SEQ ID NO: 28237 - DNA, 20 bp, synthetic construct
  misc_feature 1..20: note = chemically synthesized
  source 1..20: mol_type = other DNA
aatgattgctttcgcttcta

SEQ ID NO: 28238 - DNA, 20 bp, synthetic construct
  misc_feature 1..20: note = chemically synthesized
  source 1..20: mol_type = other DNA
tgctttcgcttctacagtgc

SEQ ID NO: 28239 - DNA, 20 bp, synthetic construct
  misc_feature 1..20: note = chemically synthesized
  source 1..20: mol_type = other DNA
gctttcgcttctacagtgca

SEQ ID NO: 28240 - DNA, 20 bp, synthetic construct
  misc_feature 1..20: note = chemically synthesized
  source 1..20: mol_type = other DNA
cttttttaaatataaatgtt

SEQ ID NO: 28241 - DNA, 20 bp, synthetic construct
  misc_feature 1..20: note = chemically synthesized
  source 1..20: mol_type = other DNA
aaaaaacacttcattatgtt

SEQ ID NO: 28242 - DNA, 20 bp, synthetic construct
  misc_feature 1..20: note = chemically synthesized
  source 1..20: mol_type = other DNA
aaaaacacttcattatgttt

SEQ ID NO: 28243 - DNA, 20 bp, synthetic construct
  misc_feature 1..20: note = chemically synthesized
  source 1..20: mol_type = other DNA
aaaacacttcattatgttta

SEQ ID NO: 28244 - DNA, 20 bp, synthetic construct
  misc_feature 1..20: note = chemically synthesized
  source 1..20: mol_type = other DNA
aaacacttcattatgtttag

SEQ ID NO: 28245 - DNA, 20 bp, synthetic construct
  misc_feature 1..20: note = chemically synthesized
  source 1..20: mol_type = other DNA
aacacttcattatgtttagg

SEQ ID NO: 28246 - DNA, 20 bp, synthetic construct
  misc_feature 1..20: note = chemically synthesized
  source 1..20: mol_type = other DNA
acacttcattatgtttaggg

SEQ ID NO: 28247 - DNA, 20 bp, synthetic construct
  misc_feature 1..20: note = chemically synthesized
  source 1..20: mol_type = other DNA
tttaggggggaactgcattt

SEQ ID NO: 28248 - DNA, 20 bp, synthetic construct
  misc_feature 1..20: note = chemically synthesized
  source 1..20: mol_type = other DNA
ttaggggggaactgcatttt

SEQ ID NO: 28249 - DNA, 20 bp, synthetic construct
  misc_feature 1..20: note = chemically synthesized
  source 1..20: mol_type = other DNA
taggggggaactgcatttta

SEQ ID NO: 28250 - DNA, 20 bp, synthetic construct
  misc_feature 1..20: note = chemically synthesized
  source 1..20: mol_type = other DNA
attttagggttccattgtct

SEQ ID NO: 28251 - DNA, 20 bp, synthetic construct
  misc_feature 1..20: note = chemically synthesized
  source 1..20: mol_type = other DNA
ttagggttccattgtcttgg

SEQ ID NO: 28252 - DNA, 20 bp, synthetic construct
  misc_feature 1..20: note = chemically synthesized
  source 1..20: mol_type = other DNA
cattgtcttggtggtgttac

SEQ ID NO: 28253 - DNA, 20 bp, synthetic construct
  misc_feature 1..20: note = chemically synthesized
  source 1..20: mol_type = other DNA
acttgttatccatttaaaaa

SEQ ID NO: 28254 - DNA, 20 bp, synthetic construct
  misc_feature 1..20: note = chemically synthesized
  source 1..20: mol_type = other DNA
tgttatccatttaaaaatgg

SEQ ID NO: 28255 - DNA, 20 bp, synthetic construct
  misc_feature 1..20: note = chemically synthesized
  source 1..20: mol_type = other DNA
tatccatttaaaaatggtag

SEQ ID NO: 28256 - DNA, 20 bp, synthetic construct
  misc_feature 1..20: note = chemically synthesized
  source 1..20: mol_type = other DNA
gtagtggaaattctatgcct

SEQ ID NO: 28257 - DNA, 20 bp, synthetic construct
  misc_feature 1..20: note = chemically synthesized
  source 1..20: mol_type = other DNA
cttggatacacaccgctctt

SEQ ID NO: 28258 - DNA, 20 bp, synthetic construct
  misc_feature 1..20: note = chemically synthesized
  source 1..20: mol_type = other DNA
ttggatacacaccgctcttc

SEQ ID NO: 28259 - DNA, 20 bp, synthetic construct
  misc_feature 1..20: note = chemically synthesized
  source 1..20: mol_type = other DNA
taaaaaaaaaaaacatacat

SEQ ID NO: 28260 - DNA, 20 bp, synthetic construct
  misc_feature 1..20: note = chemically synthesized
  source 1..20: mol_type = other DNA
aaaaaaaaaaaacatacatt

SEQ ID NO: 28261 - DNA, 20 bp, synthetic construct
  misc_feature 1..20: note = chemically synthesized
  source 1..20: mol_type = other DNA
aaaaaaaaaaacatacattg

SEQ ID NO: 28262 - DNA, 20 bp, synthetic construct
  misc_feature 1..20: note = chemically synthesized
  source 1..20: mol_type = other DNA
aaaaaaacatacattgggga

SEQ ID NO: 28263 - DNA, 20 bp, synthetic construct
  misc_feature 1..20: note = chemically synthesized
  source 1..20: mol_type = other DNA
aaaaaacatacattggggaa

SEQ ID NO: 28264 - DNA, 20 bp, synthetic construct
  misc_feature 1..20: note = chemically synthesized
  source 1..20: mol_type = other DNA
catacattggggaaaggttt

SEQ ID NO: 28265 - DNA, 20 bp, synthetic construct
  misc_feature 1..20: note = chemically synthesized
  source 1..20: mol_type = other DNA
gggaaaggtttaagattata

SEQ ID NO: 28266 - DNA, 20 bp, synthetic construct
  misc_feature 1..20: note = chemically synthesized
  source 1..20: mol_type = other DNA
gattatatagtacttaaata

SEQ ID NO: 28267 - DNA, 20 bp, synthetic construct
  misc_feature 1..20: note = chemically synthesized
  source 1..20: mol_type = other DNA
attatatagtacttaaatat

SEQ ID NO: 28268 - DNA, 20 bp, synthetic construct
  misc_feature 1..20: note = chemically synthesized
  source 1..20: mol_type = other DNA
cctatgctaaaatacattta

SEQ ID NO: 28269 - DNA, 20 bp, synthetic construct
  misc_feature 1..20: note = chemically synthesized
  source 1..20: mol_type = other DNA
tggtcttttttctgtatttc

SEQ ID NO: 28270 - DNA, 20 bp, synthetic construct
  misc_feature 1..20: note = chemically synthesized
  source 1..20: mol_type = other DNA
ttttttctgtatttctagaa

SEQ ID NO: 28271 - DNA, 20 bp, synthetic construct
  misc_feature 1..20: note = chemically synthesized
  source 1..20: mol_type = other DNA
atttgaattaaatgttcatc

SEQ ID NO: 28272 - DNA, 20 bp, synthetic construct
  misc_feature 1..20: note = chemically synthesized
  source 1..20: mol_type = other DNA
attaaatgttcatctagtgt

SEQ ID NO: 28273 - DNA, 20 bp, synthetic construct
  misc_feature 1..20: note = chemically synthesized
  source 1..20: mol_type = other DNA
ttaaatgttcatctagtgtt

SEQ ID NO: 28274 - DNA, 20 bp, synthetic construct
  misc_feature 1..20: note = chemically synthesized
  source 1..20: mol_type = other DNA
tcatctagtgttaggcacta

SEQ ID NO: 28275 - DNA, 20 bp, synthetic construct
  misc_feature 1..20: note = chemically synthesized
  source 1..20: mol_type = other DNA
gcactatagtatttatattg

SEQ ID NO: 28276 - DNA, 20 bp, synthetic construct
  misc_feature 1..20: note = chemically synthesized
  source 1..20: mol_type = other DNA
actgttgcttgttctcttaa

SEQ ID NO: 28277 - DNA, 20 bp, synthetic construct
  misc_feature 1..20: note = chemically synthesized
  source 1..20: mol_type = other DNA
ctgttgcttgttctcttaaa

SEQ ID NO: 28278 - DNA, 20 bp, synthetic construct
  misc_feature 1..20: note = chemically synthesized
  source 1..20: mol_type = other DNA
aggtatcaatgtaccttttt

SEQ ID NO: 28279 - DNA, 20 bp, synthetic construct
  misc_feature 1..20: note = chemically synthesized
  source 1..20: mol_type = other DNA
tatcaatgtaccttttttgg

SEQ ID NO: 28280 - DNA, 20 bp, synthetic construct
  misc_feature 1..20: note = chemically synthesized
  source 1..20: mol_type = other DNA
caatgtaccttttttggtag

SEQ ID NO: 28281 - DNA, 20 bp, synthetic construct
  misc_feature 1..20: note = chemically synthesized
  source 1..20: mol_type = other DNA
ttttggtagtggaaaaaaaa

SEQ ID NO: 28282 - DNA, 20 bp, synthetic construct
  misc_feature 1..20: note = chemically synthesized
  source 1..20: mol_type = other DNA
ggtagtggaaaaaaaaaaga

SEQ ID NO: 28283 - DNA, 20 bp, synthetic construct
  misc_feature 1..20: note = chemically synthesized
  source 1..20: mol_type = other DNA
gtagtggaaaaaaaaaagac

SEQ ID NO: 28284 - DNA, 20 bp, synthetic construct
  misc_feature 1..20: note = chemically synthesized
  source 1..20: mol_type = other DNA
aaaaaaaagacaggctgcca

SEQ ID NO: 28285 - DNA, 20 bp, synthetic construct
  misc_feature 1..20: note = chemically synthesized
  source 1..20: mol_type = other DNA
cacagtatatttttttaatt

SEQ ID NO: 28286 - DNA, 20 bp, synthetic construct
  misc_feature 1..20: note = chemically synthesized
  source 1..20: mol_type = other DNA
agtatatttttttaatttgg

SEQ ID NO: 28287 - DNA, 20 bp, synthetic construct
  misc_feature 1..20: note = chemically synthesized
  source 1..20: mol_type = other DNA
gtatatttttttaatttggc

SEQ ID NO: 28288 - DNA, 20 bp, synthetic construct
  misc_feature 1..20: note = chemically synthesized
  source 1..20: mol_type = other DNA
tttaatttggcaggataata

SEQ ID NO: 28289 - DNA, 20 bp, synthetic construct
  misc_feature 1..20: note = chemically synthesized
  source 1..20: mol_type = other DNA
tatgcttcaaaaaaaaaaaa

SEQ ID NO: 28290 - DNA, 20 bp, synthetic construct
  misc_feature 1..20: note = chemically synthesized
  source 1..20: mol_type = other DNA
tgcttcaaaaaaaaaaaaaa

SEQ ID NO: 28291 - DNA, 20 bp, synthetic construct
  misc_feature 1..20: note = chemically synthesized
  source 1..20: mol_type = other DNA
cttcaaaaaaaaaaaaaaga

SEQ ID NO: 28292 - DNA, 20 bp, synthetic construct
  misc_feature 1..20: note = chemically synthesized
  source 1..20: mol_type = other DNA
aaaaaaagagagaaacaaaa

SEQ ID NO: 28293 - DNA, 20 bp, synthetic construct
  misc_feature 1..20: note = chemically synthesized
  source 1..20: mol_type = other DNA
aacaaaaaagtgtgacatta

SEQ ID NO: 28294 - DNA, 20 bp, synthetic construct
  misc_feature 1..20: note = chemically synthesized
  source 1..20: mol_type = other DNA
aaaagtgtgacattacagat

SEQ ID NO: 28295 - DNA, 20 bp, synthetic construct
  misc_feature 1..20: note = chemically synthesized
  source 1..20: mol_type = other DNA
agtgtgacattacagatgag

SEQ ID NO: 28296 - DNA, 20 bp, synthetic construct
  misc_feature 1..20: note = chemically synthesized
  source 1..20: mol_type = other DNA
acagatgagaagccatataa

SEQ ID NO: 28297 - DNA, 20 bp, synthetic construct
  misc_feature 1..20: note = chemically synthesized
  source 1..20: mol_type = other DNA
gatgagaagccatataatgg

SEQ ID NO: 28298 - DNA, 20 bp, synthetic construct
  misc_feature 1..20: note = chemically synthesized
  source 1..20: mol_type = other DNA
gaagccatataatggcggtt

SEQ ID NO: 28299 - DNA, 20 bp, synthetic construct
  misc_feature 1..20: note = chemically synthesized
  source 1..20: mol_type = other DNA
aagccatataatggcggttt

SEQ ID NO: 28300 - DNA, 20 bp, synthetic construct
  misc_feature 1..20: note = chemically synthesized
  source 1..20: mol_type = other DNA
agccatataatggcggtttg

SEQ ID NO: 28301 - DNA, 20 bp, synthetic construct
  misc_feature 1..20: note = chemically synthesized
  source 1..20: mol_type = other DNA
gccatataatggcggtttgg

SEQ ID NO: 28302 - DNA, 20 bp, synthetic construct
  misc_feature 1..20: note = chemically synthesized
  source 1..20: mol_type = other DNA
catataatggcggtttgggg

SEQ ID NO: 28303 - DNA, 20 bp, synthetic construct
  misc_feature 1..20: note = chemically synthesized
  source 1..20: mol_type = other DNA
ggcggtttgggggagcctgc

SEQ ID NO: 28304 - DNA, 20 bp, synthetic construct
  misc_feature 1..20: note = chemically synthesized
  source 1..20: mol_type = other DNA
gagcctgctagaatgtcaca

SEQ ID NO: 28305 - DNA, 20 bp, synthetic construct
  misc_feature 1..20: note = chemically synthesized
  source 1..20: mol_type = other DNA
ctgctagaatgtcacatgga

SEQ ID NO: 28306 - DNA, 20 bp, synthetic construct
  misc_feature 1..20: note = chemically synthesized
  source 1..20: mol_type = other DNA
tgtcacatggatggctgtca

SEQ ID NO: 28307 - DNA, 20 bp, synthetic construct
  misc_feature 1..20: note = chemically synthesized
  source 1..20: mol_type = other DNA
gtcacatggatggctgtcat

SEQ ID NO: 28308 - DNA, 20 bp, synthetic construct
  misc_feature 1..20: note = chemically synthesized
  source 1..20: mol_type = other DNA
tcacatggatggctgtcata

SEQ ID NO: 28309 - DNA, 20 bp, synthetic construct
  misc_feature 1..20: note = chemically synthesized
  source 1..20: mol_type = other DNA
cacatggatggctgtcatag

SEQ ID NO: 28310 - DNA, 20 bp, synthetic construct
  misc_feature 1..20: note = chemically synthesized
  source 1..20: mol_type = other DNA
tcctgctgccatactgtatg

SEQ ID NO: 28311 - DNA, 20 bp, synthetic construct
  misc_feature 1..20: note = chemically synthesized
  source 1..20: mol_type = other DNA
catactgtatgcagtactgc

SEQ ID NO: 28312 - DNA, 20 bp, synthetic construct
  misc_feature 1..20: note = chemically synthesized
  source 1..20: mol_type = other DNA
gtactgcaagctaataacgt

SEQ ID NO: 28313 - DNA, 20 bp, synthetic construct
  misc_feature 1..20: note = chemically synthesized
  source 1..20: mol_type = other DNA
aataacgttggtttgttatg

SEQ ID NO: 28314 - DNA, 20 bp, synthetic construct
  misc_feature 1..20: note = chemically synthesized
  source 1..20: mol_type = other DNA
ccttctatcaccctacattc

SEQ ID NO: 28315 - DNA, 20 bp, synthetic construct
  misc_feature 1..20: note = chemically synthesized
  source 1..20: mol_type = other DNA
cagcatcttaccttcatatg

SEQ ID NO: 28316 - DNA, 20 bp, synthetic construct
  misc_feature 1..20: note = chemically synthesized
  source 1..20: mol_type = other DNA
cttaccttcatatgcagtaa

SEQ ID NO: 28317 - DNA, 20 bp, synthetic construct
  misc_feature 1..20: note = chemically synthesized
  source 1..20: mol_type = other DNA
ccttcatatgcagtaaaaga

SEQ ID NO: 28318 - DNA, 20 bp, synthetic construct
  misc_feature 1..20: note = chemically synthesized
  source 1..20: mol_type = other DNA
catatgcagtaaaagaaaga

SEQ ID NO: 28319 - DNA, 20 bp, synthetic construct
  misc_feature 1..20: note = chemically synthesized
  source 1..20: mol_type = other DNA
aaaagaaagaaagaaaaaaa

SEQ ID NO: 28320 - DNA, 20 bp, synthetic construct
  misc_feature 1..20: note = chemically synthesized
  source 1..20: mol_type = other DNA
aaagaaagaaagaaaaaaaa

SEQ ID NO: 28321 - DNA, 20 bp, synthetic construct
  misc_feature 1..20: note = chemically synthesized
  source 1..20: mol_type = other DNA
aaaaaaaaaccaatgttttg

SEQ ID NO: 28322 - DNA, 20 bp, synthetic construct
  misc_feature 1..20: note = chemically synthesized
  source 1..20: mol_type = other DNA
tttcattgccaaaaactaaa

SEQ ID NO: 28323 - DNA, 20 bp, synthetic construct
  misc_feature 1..20: note = chemically synthesized
  source 1..20: mol_type = other DNA
actaaatggtgctttatatt

SEQ ID NO: 28324 - DNA, 20 bp, synthetic construct
  misc_feature 1..20: note = chemically synthesized
  source 1..20: mol_type = other DNA
atggtgctttatatttagat

SEQ ID NO: 28325 - DNA, 20 bp, synthetic construct
  misc_feature 1..20: note = chemically synthesized
  source 1..20: mol_type = other DNA
tgctttatatttagattgga

SEQ ID NO: 28326 - DNA, 20 bp, synthetic construct
  misc_feature 1..20: note = chemically synthesized
  source 1..20: mol_type = other DNA
tggaaagaatttcatatgca

SEQ ID NO: 28327 - DNA, 20 bp, synthetic construct
  misc_feature 1..20: note = chemically synthesized
  source 1..20: mol_type = other DNA
ttcatatgcaaagcatatta

SEQ ID NO: 28328 - DNA, 20 bp, synthetic construct
  misc_feature 1..20: note = chemically synthesized
  source 1..20: mol_type = other DNA
catatgcaaagcatattaaa

SEQ ID NO: 28329 - DNA, 20 bp, synthetic construct
  misc_feature 1..20: note = chemically synthesized
  source 1..20: mol_type = other DNA
tgcaaagcatattaaagaga

SEQ ID NO: 28330 - DNA, 20 bp, synthetic construct
  misc_feature 1..20: note = chemically synthesized
  source 1..20: mol_type = other DNA
attaaagagaaagcccgctt

SEQ ID NO: 28331 - DNA, 20 bp, synthetic construct
  misc_feature 1..20: note = chemically synthesized
  source 1..20: mol_type = other DNA
agtcaatacttttttgtaaa

SEQ ID NO: 28332 - DNA, 20 bp, synthetic construct
  misc_feature 1..20: note = chemically synthesized
  source 1..20: mol_type = other DNA
cttttttgtaaatggcaatg

SEQ ID NO: 28333 - DNA, 20 bp, synthetic construct
  misc_feature 1..20: note = chemically synthesized
  source 1..20: mol_type = other DNA
aatgcagaatattttgttat

SEQ ID NO: 28334 - DNA, 20 bp, synthetic construct
  misc_feature 1..20: note = chemically synthesized
  source 1..20: mol_type = other DNA
cttttctattcctgtaatga

SEQ ID NO: 28335 - DNA, 20 bp, synthetic construct
  misc_feature 1..20: note = chemically synthesized
  source 1..20: mol_type = other DNA
tgaaattttatcttttacta

SEQ ID NO: 28336 - DNA, 20 bp, synthetic construct
  misc_feature 1..20: note = chemically synthesized
  source 1..20: mol_type = other DNA
gaaattttatcttttactat

SEQ ID NO: 28337 - DNA, 20 bp, synthetic construct
  misc_feature 1..20: note = chemically synthesized
  source 1..20: mol_type = other DNA
aattttatcttttactatgg

SEQ ID NO: 28338 - DNA, 20 bp, synthetic construct
  misc_feature 1..20: note = chemically synthesized
  source 1..20: mol_type = other DNA
cttatgtgccctgttcaaaa

SEQ ID NO: 28339 - DNA, 20 bp, synthetic construct
  misc_feature 1..20: note = chemically synthesized
  source 1..20: mol_type = other DNA
tatgtgccctgttcaaaaca

SEQ ID NO: 28340 - DNA, 20 bp, synthetic construct
  misc_feature 1..20: note = chemically synthesized
  source 1..20: mol_type = other DNA
atgtgccctgttcaaaacag

SEQ ID NO: 28341 - DNA, 20 bp, synthetic construct
  misc_feature 1..20: note = chemically synthesized
  source 1..20: mol_type = other DNA
tttttatttttttttttatt

SEQ ID NO: 28342 - DNA, 20 bp, synthetic construct
  misc_feature 1..20: note = chemically synthesized
  source 1..20: mol_type = other DNA
tttttttatttagatgacca

SEQ ID NO: 28343 - DNA, 20 bp, synthetic construct
  misc_feature 1..20: note = chemically synthesized
  source 1..20: mol_type = other DNA
ttttttatttagatgaccaa

SEQ ID NO: 28344 - DNA, 20 bp, synthetic construct
  misc_feature 1..20: note = chemically synthesized
  source 1..20: mol_type = other DNA
gaccaaaggtcattacaacc

SEQ ID NO: 28345 - DNA, 20 bp, synthetic construct
  misc_feature 1..20: note = chemically synthesized
  source 1..20: mol_type = other DNA
ctttttattgtatttgtttc

SEQ ID NO: 28346 - DNA, 20 bp, synthetic construct
  misc_feature 1..20: note = chemically synthesized
  source 1..20: mol_type = other DNA
atttgtttctggtctttgtt

SEQ ID NO: 28347 - DNA, 20 bp, synthetic construct
  misc_feature 1..20: note = chemically synthesized
  source 1..20: mol_type = other DNA
tggtctttgttaagttctat

SEQ ID NO: 28348 - DNA, 20 bp, synthetic construct
  misc_feature 1..20: note = chemically synthesized
  source 1..20: mol_type = other DNA
aaccactgtctgtgtttttt

SEQ ID NO: 28349 - DNA, 20 bp, synthetic construct
  misc_feature 1..20: note = chemically synthesized
  source 1..20: mol_type = other DNA
cactgtctgtgtttttttgg

SEQ ID NO: 28350 - DNA, 20 bp, synthetic construct
  misc_feature 1..20: note = chemically synthesized
  source 1..20: mol_type = other DNA
tgaaaaaataaaaaaaatta

SEQ ID NO: 28351 - DNA, 20 bp, synthetic construct
  misc_feature 1..20: note = chemically synthesized
  source 1..20: mol_type = other DNA
aaaattaaagtacacattgt

SEQ ID NO: 28352 - DNA, 20 bp, synthetic construct
  misc_feature 1..20: note = chemically synthesized
  source 1..20: mol_type = other DNA
acactctgtaaattacttgc

SEQ ID NO: 28353 - DNA, 20 bp, synthetic construct
  misc_feature 1..20: note = chemically synthesized
  source 1..20: mol_type = other DNA
aattacttgcaagaaaataa

SEQ ID NO: 28354 - DNA, 20 bp, synthetic construct
  misc_feature 1..20: note = chemically synthesized
  source 1..20: mol_type = other DNA
attacttgcaagaaaataac

SEQ ID NO: 28355 - DNA, 20 bp, synthetic construct
  misc_feature 1..20: note = chemically synthesized
  source 1..20: mol_type = other DNA
gcaagaaaataacaggtttt

SEQ ID NO: 28356 - DNA, 20 bp, synthetic construct
  misc_feature 1..20: note = chemically synthesized
  source 1..20: mol_type = other DNA
aagaaaataacaggttttaa

SEQ ID NO: 28357 - DNA, 20 bp, synthetic construct
  misc_feature 1..20: note = chemically synthesized
  source 1..20: mol_type = other DNA
aaaataacaggttttaagag

SEQ ID NO: 28358 - DNA, 20 bp, synthetic construct
  misc_feature 1..20: note = chemically synthesized
  source 1..20: mol_type = other DNA
aaataacaggttttaagaga

SEQ ID NO: 28359 - DNA, 20 bp, synthetic construct
  misc_feature 1..20: note = chemically synthesized
  source 1..20: mol_type = other DNA
aacaggttttaagagaaggc

SEQ ID NO: 28360 - DNA, 20 bp, synthetic construct
  misc_feature 1..20: note = chemically synthesized
  source 1..20: mol_type = other DNA
ggttttaagagaaggccagt

SEQ ID NO: 28361 - DNA, 20 bp, synthetic construct
  misc_feature 1..20: note = chemically synthesized
  source 1..20: mol_type = other DNA
gaaggccagtcagtcttttt

SEQ ID NO: 28362 - DNA, 20 bp, synthetic construct
  misc_feature 1..20: note = chemically synthesized
  source 1..20: mol_type = other DNA
aaggccagtcagtctttttc

SEQ ID NO: 28363 - DNA, 20 bp, synthetic construct
  misc_feature 1..20: note = chemically synthesized
  source 1..20: mol_type = other DNA
ctttttcaggattatttcta

SEQ ID NO: 28364 - DNA, 20 bp, synthetic construct
  misc_feature 1..20: note = chemically synthesized
  source 1..20: mol_type = other DNA
tttttcaggattatttctat

SEQ ID NO: 28365 - DNA, 20 bp, synthetic construct
  misc_feature 1..20: note = chemically synthesized
  source 1..20: mol_type = other DNA
gatgcgtgtattatacccta

SEQ ID NO: 28366 - DNA, 20 bp, synthetic construct
  misc_feature 1..20: note = chemically synthesized
  source 1..20: mol_type = other DNA
atgcgtgtattataccctaa

SEQ ID NO: 28367 - DNA, 20 bp, synthetic construct
  misc_feature 1..20: note = chemically synthesized
  source 1..20: mol_type = other DNA
ttataccctaaaggaacata

SEQ ID NO: 28368 - DNA, 20 bp, synthetic construct
  misc_feature 1..20: note = chemically synthesized
  source 1..20: mol_type = other DNA
aagtacttactatattaaaa

SEQ ID NO: 28369 - DNA, 20 bp, synthetic construct
  misc_feature 1..20: note = chemically synthesized
  source 1..20: mol_type = other DNA
aatagacatatctcaaaccc

SEQ ID NO: 28370 - DNA, 20 bp, synthetic construct
  misc_feature 1..20: note = chemically synthesized
  source 1..20: mol_type = other DNA
catatctcaaaccctggaca

SEQ ID NO: 28371 - DNA, 20 bp, synthetic construct
  misc_feature 1..20: note = chemically synthesized
  source 1..20: mol_type = other DNA
caaaccctggacatagtttt

SEQ ID NO: 28372 - DNA, 20 bp, synthetic construct
  misc_feature 1..20: note = chemically synthesized
  source 1..20: mol_type = other DNA
aaaccctggacatagtttta

SEQ ID NO: 28373 - DNA, 20 bp, synthetic construct
  misc_feature 1..20: note = chemically synthesized
  source 1..20: mol_type = other DNA
gacatagttttaaggctttc

SEQ ID NO: 28374 - DNA, 20 bp, synthetic construct
  misc_feature 1..20: note = chemically synthesized
  source 1..20: mol_type = other DNA
agttttaaggctttccagtt

SEQ ID NO: 28375 - DNA, 20 bp, synthetic construct
  misc_feature 1..20: note = chemically synthesized
  source 1..20: mol_type = other DNA
taaggctttccagtttagaa

SEQ ID NO: 28376 - DNA, 20 bp, synthetic construct
  misc_feature 1..20: note = chemically synthesized
  source 1..20: mol_type = other DNA
tccagtttagaatagttttc

SEQ ID NO: 28377 - DNA, 20 bp, synthetic construct
  misc_feature 1..20: note = chemically synthesized
  source 1..20: mol_type = other DNA
ttagaatagttttcaagaaa

SEQ ID NO: 28378 - DNA, 20 bp, synthetic construct
  misc_feature 1..20: note = chemically synthesized
  source 1..20: mol_type = other DNA
gaatagttttcaagaaatgg

SEQ ID NO: 28379 - DNA, 20 bp, synthetic construct
  misc_feature 1..20: note = chemically synthesized
  source 1..20: mol_type = other DNA
aatagttttcaagaaatgga

SEQ ID NO: 28380 - DNA, 20 bp, synthetic construct
  misc_feature 1..20: note = chemically synthesized
  source 1..20: mol_type = other DNA
caagaaatggaaggtgtttt

SEQ ID NO: 28381 - DNA, 20 bp, synthetic construct
  misc_feature 1..20: note = chemically synthesized
  source 1..20: mol_type = other DNA
taaaaacttactccatctct

SEQ ID NO: 28382 - DNA, 20 bp, synthetic construct
  misc_feature 1..20: note = chemically synthesized
  source 1..20: mol_type = other DNA
aaacttactccatctcttag

SEQ ID NO: 28383 - DNA, 20 bp, synthetic construct
  misc_feature 1..20: note = chemically synthesized
  source 1..20: mol_type = other DNA
gcagaaatccattcaaacat

SEQ ID NO: 28384 - DNA, 20 bp, synthetic construct
  misc_feature 1..20: note = chemically synthesized
  source 1..20: mol_type = other DNA
acataagtgaaaaaacttgc

SEQ ID NO: 28385 - DNA, 20 bp, synthetic construct
  misc_feature 1..20: note = chemically synthesized
  source 1..20: mol_type = other DNA
gtgaaaaaacttgctggtaa

SEQ ID NO: 28386 - DNA, 20 bp, synthetic construct
  misc_feature 1..20: note = chemically synthesized
  source 1..20: mol_type = other DNA
ttgctgttcttgttgtctaa

SEQ ID NO: 28387 - DNA, 20 bp, synthetic construct
  misc_feature 1..20: note = chemically synthesized
  source 1..20: mol_type = other DNA
ctcccatccttgctttatct

SEQ ID NO: 28388 - DNA, 20 bp, synthetic construct
  misc_feature 1..20: note = chemically synthesized
  source 1..20: mol_type = other DNA
tcttagaacataatgtaaaa

SEQ ID NO: 28389 - DNA, 20 bp, synthetic construct
  misc_feature 1..20: note = chemically synthesized
  source 1..20: mol_type = other DNA
aagatttttttaaaaaaaat

SEQ ID NO: 28390 - DNA, 20 bp, synthetic construct
  misc_feature 1..20: note = chemically synthesized
  source 1..20: mol_type = other DNA
tttaaaaaaaatcagctctt

SEQ ID NO: 28391 - DNA, 20 bp, synthetic construct
  misc_feature 1..20: note = chemically synthesized
  source 1..20: mol_type = other DNA
cagctctttggtttccatgt

SEQ ID NO: 28392 - DNA, 20 bp, synthetic construct
  misc_feature 1..20: note = chemically synthesized
  source 1..20: mol_type = other DNA
gctctttggtttccatgtaa

SEQ ID NO: 28393 - DNA, 20 bp, synthetic construct
  misc_feature 1..20: note = chemically synthesized
  source 1..20: mol_type = other DNA
acttttgaaatctaaaaatc

SEQ ID NO: 28394 - DNA, 20 bp, synthetic construct
  misc_feature 1..20: note = chemically synthesized
  source 1..20: mol_type = other DNA
aatctaaaaatctggaaaca

SEQ ID NO: 28395 - DNA, 20 bp, synthetic construct
  misc_feature 1..20: note = chemically synthesized
  source 1..20: mol_type = other DNA
atctaaaaatctggaaacaa

SEQ ID NO: 28396 - DNA, 20 bp, synthetic construct
  misc_feature 1..20: note = chemically synthesized
  source 1..20: mol_type = other DNA
aaatctggaaacaaaggcat

SEQ ID NO: 28397 - DNA, 20 bp, synthetic construct
  misc_feature 1..20: note = chemically synthesized
  source 1..20: mol_type = other DNA
aatctggaaacaaaggcatc

SEQ ID NO: 28398 - DNA, 20 bp, synthetic construct
  misc_feature 1..20: note = chemically synthesized
  source 1..20: mol_type = other DNA
ttgttttgttttgtttaaaa

SEQ ID NO: 28399 - DNA, 20 bp, synthetic construct
  misc_feature 1..20: note = chemically synthesized
  source 1..20: mol_type = other DNA
gttttgttttgtttaaaaaa

SEQ ID NO: 28400 - DNA, 20 bp, synthetic construct
  misc_feature 1..20: note = chemically synthesized
  source 1..20: mol_type = other DNA
ttttgttttgtttaaaaaag

SEQ ID NO: 28401 - DNA, 20 bp, synthetic construct
  misc_feature 1..20: note = chemically synthesized
  source 1..20: mol_type = other DNA
tttgttttgtttaaaaaaga

SEQ ID NO: 28402 - DNA, 20 bp, synthetic construct
  misc_feature 1..20: note = chemically synthesized
  source 1..20: mol_type = other DNA
tgttttgtttaaaaaagagg

SEQ ID NO: 28403 - DNA, 20 bp, synthetic construct
  misc_feature 1..20: note = chemically synthesized
  source 1..20: mol_type = other DNA
ttaaaaaagagggagaaaaa

SEQ ID NO: 28404 - DNA, 20 bp, synthetic construct
  misc_feature 1..20: note = chemically synthesized
  source 1..20: mol_type = other DNA
aaaaaagagggagaaaaaaa

SEQ ID NO: 28405 - DNA, 20 bp, synthetic construct
  misc_feature 1..20: note = chemically synthesized
  source 1..20: mol_type = other DNA
aaaagagggagaaaaaaaga

SEQ ID NO: 28406 - DNA, 20 bp, synthetic construct
  misc_feature 1..20: note = chemically synthesized
  source 1..20: mol_type = other DNA
aagagggagaaaaaaagaga

SEQ ID NO: 28407 - DNA, 20 bp, synthetic construct
  misc_feature 1..20: note = chemically synthesized
  source 1..20: mol_type = other DNA
agaaaaaaagagagagacga

SEQ ID NO: 28408 - DNA, 20 bp, synthetic construct
  misc_feature 1..20: note = chemically synthesized
  source 1..20: mol_type = other DNA
aaaagagagagacgaaagaa

SEQ ID NO: 28409 - DNA, 20 bp, synthetic construct
  misc_feature 1..20: note = chemically synthesized
  source 1..20: mol_type = other DNA
gagagagacgaaagaaaaga

SEQ ID NO: 28410 - DNA, 20 bp, synthetic construct
  misc_feature 1..20: note = chemically synthesized
  source 1..20: mol_type = other DNA
agagacgaaagaaaagaaag

SEQ ID NO: 28411 - DNA, 20 bp, synthetic construct
  misc_feature 1..20: note = chemically synthesized
  source 1..20: mol_type = other DNA
aaagaaaagaaagcagccac

SEQ ID NO: 28412 - DNA, 20 bp, synthetic construct
  misc_feature 1..20: note = chemically synthesized
  source 1..20: mol_type = other DNA
aagaaaagaaagcagccact

SEQ ID NO: 28413 - DNA, 20 bp, synthetic construct
  misc_feature 1..20: note = chemically synthesized
  source 1..20: mol_type = other DNA
agaaaagaaagcagccacta

SEQ ID NO: 28414 - DNA, 20 bp, synthetic construct
  misc_feature 1..20: note = chemically synthesized
  source 1..20: mol_type = other DNA
gaaaagaaagcagccactag

SEQ ID NO: 28415 - DNA, 20 bp, synthetic construct
  misc_feature 1..20: note = chemically synthesized
  source 1..20: mol_type = other DNA
gaaagcagccactaggggtg

SEQ ID NO: 28416 - DNA, 20 bp, synthetic construct
  misc_feature 1..20: note = chemically synthesized
  source 1..20: mol_type = other DNA
gcagccactaggggtgtagc

SEQ ID NO: 28417 - DNA, 20 bp, synthetic construct
  misc_feature 1..20: note = chemically synthesized
  source 1..20: mol_type = other DNA
actaggggtgtagccagaca

SEQ ID NO: 28418 - DNA, 20 bp, synthetic construct
  misc_feature 1..20: note = chemically synthesized
  source 1..20: mol_type = other DNA
gccagacatagtgaaatctt

SEQ ID NO: 28419 - DNA, 20 bp, synthetic construct
  misc_feature 1..20: note = chemically synthesized
  source 1..20: mol_type = other DNA
catagtgaaatctttggaat

SEQ ID NO: 28420 - DNA, 20 bp, synthetic construct
  misc_feature 1..20: note = chemically synthesized
  source 1..20: mol_type = other DNA
gaatcagccactgatttcct

SEQ ID NO: 28421 - DNA, 20 bp, synthetic construct
  misc_feature 1..20: note = chemically synthesized
  source 1..20: mol_type = other DNA
cactgatttcctgagatgca

SEQ ID NO: 28422 - DNA, 20 bp, synthetic construct
  misc_feature 1..20: note = chemically synthesized
  source 1..20: mol_type = other DNA
tgatttcctgagatgcatag

SEQ ID NO: 28423 - DNA, 20 bp, synthetic construct
  misc_feature 1..20: note = chemically synthesized
  source 1..20: mol_type = other DNA
atgcatagtggtttgccttg

SEQ ID NO: 28424 - DNA, 20 bp, synthetic construct
  misc_feature 1..20: note = chemically synthesized
  source 1..20: mol_type = other DNA
gtggtttgccttgtggttct

SEQ ID NO: 28425 - DNA, 20 bp, synthetic construct
  misc_feature 1..20: note = chemically synthesized
  source 1..20: mol_type = other DNA
gccttgtggttctgagatcc

SEQ ID NO: 28426 - DNA, 20 bp, synthetic construct
  misc_feature 1..20: note = chemically synthesized
  source 1..20: mol_type = other DNA
ccttgtggttctgagatccc

SEQ ID NO: 28427 - DNA, 20 bp, synthetic construct
  misc_feature 1..20: note = chemically synthesized
  source 1..20: mol_type = other DNA
ttctgagatcccaggaaccc

SEQ ID NO: 28428 - DNA, 20 bp, synthetic construct
  misc_feature 1..20: note = chemically synthesized
  source 1..20: mol_type = other DNA
cccaggaaccctagatgcta

SEQ ID NO: 28429 - DNA, 20 bp, synthetic construct
  misc_feature 1..20: note = chemically synthesized
  source 1..20: mol_type = other DNA
ctagatgctacagattactt

SEQ ID NO: 28430 - DNA, 20 bp, synthetic construct
  misc_feature 1..20: note = chemically synthesized
  source 1..20: mol_type = other DNA
tagatgctacagattacttt

SEQ ID NO: 28431 - DNA, 20 bp, synthetic construct
  misc_feature 1..20: note = chemically synthesized
  source 1..20: mol_type = other DNA
gattactttaggtgttttga

SEQ ID NO: 28432 - DNA, 20 bp, synthetic construct
  misc_feature 1..20: note = chemically synthesized
  source 1..20: mol_type = other DNA
attactttaggtgttttgat

SEQ ID NO: 28433 - DNA, 20 bp, synthetic construct
  misc_feature 1..20: note = chemically synthesized
  source 1..20: mol_type = other DNA
ttactttaggtgttttgata

SEQ ID NO: 28434 - DNA, 20 bp, synthetic construct
  misc_feature 1..20: note = chemically synthesized
  source 1..20: mol_type = other DNA
gtgttttgatagggtcttcc

SEQ ID NO: 28435 - DNA, 20 bp, synthetic construct
  misc_feature 1..20: note = chemically synthesized
  source 1..20: mol_type = other DNA
gatagggtcttcctggatga

SEQ ID NO: 28436 - DNA, 20 bp, synthetic construct
  misc_feature 1..20: note = chemically synthesized
  source 1..20: mol_type = other DNA
cttcctggatgacagcaaat

SEQ ID NO: 28437 - DNA, 20 bp, synthetic construct
  misc_feature 1..20: note = chemically synthesized
  source 1..20: mol_type = other DNA
ttcctggatgacagcaaata

SEQ ID NO: 28438 - DNA, 20 bp, synthetic construct
  misc_feature 1..20: note = chemically synthesized
  source 1..20: mol_type = other DNA
tcctggatgacagcaaataa

SEQ ID NO: 28439 - DNA, 20 bp, synthetic construct
  misc_feature 1..20: note = chemically synthesized
  source 1..20: mol_type = other DNA
tggatgacagcaaataaggg

SEQ ID NO: 28440 - DNA, 20 bp, synthetic construct
  misc_feature 1..20: note = chemically synthesized
  source 1..20: mol_type = other DNA
ggatgacagcaaataagggc

SEQ ID NO: 28441 - DNA, 20 bp, synthetic construct
  misc_feature 1..20: note = chemically synthesized
  source 1..20: mol_type = other DNA
cccttcaattatcttctgac

SEQ ID NO: 28442 - DNA, 20 bp, synthetic construct
  misc_feature 1..20: note = chemically synthesized
  source 1..20: mol_type = other DNA
tcaattatcttctgaccagc

SEQ ID NO: 28443 - DNA, 20 bp, synthetic construct
  misc_feature 1..20: note = chemically synthesized
  source 1..20: mol_type = other DNA
ttatcttctgaccagccagt

SEQ ID NO: 28444 - DNA, 20 bp, synthetic construct
  misc_feature 1..20: note = chemically synthesized
  source 1..20: mol_type = other DNA
tatcttctgaccagccagtt

SEQ ID NO: 28445 - DNA, 20 bp, synthetic construct
  misc_feature 1..20: note = chemically synthesized
  source 1..20: mol_type = other DNA
aggtctattttaaaaatcct

SEQ ID NO: 28446 - DNA, 20 bp, synthetic construct
  misc_feature 1..20: note = chemically synthesized
  source 1..20: mol_type = other DNA
tttacaaatactgcatgttg

SEQ ID NO: 28447 - DNA, 20 bp, synthetic construct
  misc_feature 1..20: note = chemically synthesized
  source 1..20: mol_type = other DNA
tgatatcgtgtccctgttcc

SEQ ID NO: 28448 - DNA, 20 bp, synthetic construct
  misc_feature 1..20: note = chemically synthesized
  source 1..20: mol_type = other DNA
tcgtgtccctgttcccagtg

SEQ ID NO: 28449 - DNA, 20 bp, synthetic construct
  misc_feature 1..20: note = chemically synthesized
  source 1..20: mol_type = other DNA
tttgtaaaaaaccaaaacaa

SEQ ID NO: 28450 - DNA, 20 bp, synthetic construct
  misc_feature 1..20: note = chemically synthesized
  source 1..20: mol_type = other DNA
gccgttctgttgtcttcttg

SEQ ID NO: 28451 - DNA, 20 bp, synthetic construct
  misc_feature 1..20: note = chemically synthesized
  source 1..20: mol_type = other DNA
gttctgttgtcttcttgtgg

SEQ ID NO: 28452 - DNA, 20 bp, synthetic construct
  misc_feature 1..20: note = chemically synthesized
  source 1..20: mol_type = other DNA
tggtagcattttttgtcgct

SEQ ID NO: 28453 - DNA, 20 bp, synthetic construct
  misc_feature 1..20: note = chemically synthesized
  source 1..20: mol_type = other DNA
gtcgctcagttcttatgccc

SEQ ID NO: 28454 - DNA, 20 bp, synthetic construct
  misc_feature 1..20: note = chemically synthesized
  source 1..20: mol_type = other DNA
tcttatgccctagtgcctgt

SEQ ID NO: 28455 - DNA, 20 bp, synthetic construct
  misc_feature 1..20: note = chemically synthesized
  source 1..20: mol_type = other DNA
cttatgccctagtgcctgtg

SEQ ID NO: 28456 - DNA, 20 bp, synthetic construct
  misc_feature 1..20: note = chemically synthesized
  source 1..20: mol_type = other DNA
atgccctagtgcctgtgagg

SEQ ID NO: 28457 - DNA, 20 bp, synthetic construct
  misc_feature 1..20: note = chemically synthesized
  source 1..20: mol_type = other DNA
tcatgtcatgccttttatct

SEQ ID NO: 28458 - DNA, 20 bp, synthetic construct
  misc_feature 1..20: note = chemically synthesized
  source 1..20: mol_type = other DNA
catgtcatgccttttatctg

SEQ ID NO: 28459 - DNA, 20 bp, synthetic construct
  misc_feature 1..20: note = chemically synthesized
  source 1..20: mol_type = other DNA
tcatgccttttatctgaggc

SEQ ID NO: 28460 - DNA, 20 bp, synthetic construct
  misc_feature 1..20: note = chemically synthesized
  source 1..20: mol_type = other DNA
ccttttatctgaggcaagaa

SEQ ID NO: 28461 - DNA, 20 bp, synthetic construct
  misc_feature 1..20: note = chemically synthesized
  source 1..20: mol_type = other DNA
agaatagttttatctttcta

SEQ ID NO: 28462 - DNA, 20 bp, synthetic construct
  misc_feature 1..20: note = chemically synthesized
  source 1..20: mol_type = other DNA
ttttatctttctaaagtata

SEQ ID NO: 28463 - DNA, 20 bp, synthetic construct
  misc_feature 1..20: note = chemically synthesized
  source 1..20: mol_type = other DNA
atctttctaaagtataaaga

SEQ ID NO: 28464 - DNA, 20 bp, synthetic construct
  misc_feature 1..20: note = chemically synthesized
  source 1..20: mol_type = other DNA
gaaagtcaatgttttctgaa

SEQ ID NO: 28465 - DNA, 20 bp, synthetic construct
  misc_feature 1..20: note = chemically synthesized
  source 1..20: mol_type = other DNA
gtcaatgttttctgaaaagc

SEQ ID NO: 28466 - DNA, 20 bp, synthetic construct
  misc_feature 1..20: note = chemically synthesized
  source 1..20: mol_type = other DNA
tgttttctgaaaagccagtt

SEQ ID NO: 28467 - DNA, 20 bp, synthetic construct
  misc_feature 1..20: note = chemically synthesized
  source 1..20: mol_type = other DNA
gttttctgaaaagccagttt

SEQ ID NO: 28468 - DNA, 20 bp, synthetic construct
  misc_feature 1..20: note = chemically synthesized
  source 1..20: mol_type = other DNA
ttctgaaaagccagtttggg

SEQ ID NO: 28469 - DNA, 20 bp, synthetic construct
  misc_feature 1..20: note = chemically synthesized
  source 1..20: mol_type = other DNA
tctgaaaagccagtttgggt

SEQ ID NO: 28470 - DNA, 20 bp, synthetic construct
  misc_feature 1..20: note = chemically synthesized
  source 1..20: mol_type = other DNA
gaaaagccagtttgggtggg

SEQ ID NO: 28471 - DNA, 20 bp, synthetic construct
  misc_feature 1..20: note = chemically synthesized
  source 1..20: mol_type = other DNA
aaaagccagtttgggtggga

SEQ ID NO: 28472 - DNA, 20 bp, synthetic construct
  misc_feature 1..20: note = chemically synthesized
  source 1..20: mol_type = other DNA
aagccagtttgggtgggaag

SEQ ID NO: 28473 - DNA, 20 bp, synthetic construct
  misc_feature 1..20: note = chemically synthesized
  source 1..20: mol_type = other DNA
gccagtttgggtgggaagga

SEQ ID NO: 28474 - DNA, 20 bp, synthetic construct
  misc_feature 1..20: note = chemically synthesized
  source 1..20: mol_type = other DNA
cagtttgggtgggaaggaga

SEQ ID NO: 28475 - DNA, 20 bp, synthetic construct
  misc_feature 1..20: note = chemically synthesized
  source 1..20: mol_type = other DNA
tttgggtgggaaggagagag

SEQ ID NO: 28476 - DNA, 20 bp, synthetic construct
  misc_feature 1..20: note = chemically synthesized
  source 1..20: mol_type = other DNA
ttgggtgggaaggagagagt

SEQ ID NO: 28477 - DNA, 20 bp, synthetic construct
  misc_feature 1..20: note = chemically synthesized
  source 1..20: mol_type = other DNA
tgggtgggaaggagagagtg

SEQ ID NO: 28478 - DNA, 20 bp, synthetic construct
  misc_feature 1..20: note = chemically synthesized
  source 1..20: mol_type = other DNA
tgggaaggagagagtggggc

SEQ ID NO: 28479 - DNA, 20 bp, synthetic construct
  misc_feature 1..20: note = chemically synthesized
  source 1..20: mol_type = other DNA
ggaaggagagagtggggcta

SEQ ID NO: 28480 - DNA, 20 bp, synthetic construct
  misc_feature 1..20: note = chemically synthesized
  source 1..20: mol_type = other DNA
gaaggagagagtggggctag

SEQ ID NO: 28481 - DNA, 20 bp, synthetic construct
  misc_feature 1..20: note = chemically synthesized
  source 1..20: mol_type = other DNA
tggggctagaggaatccact

SEQ ID NO: 28482 - DNA, 20 bp, synthetic construct
  misc_feature 1..20: note = chemically synthesized
  source 1..20: mol_type = other DNA
gctagaggaatccactgaga

SEQ ID NO: 28483 - DNA, 20 bp, synthetic construct
  misc_feature 1..20: note = chemically synthesized
  source 1..20: mol_type = other DNA
ctagaggaatccactgagaa

SEQ ID NO: 28484 - DNA, 20 bp, synthetic construct
  misc_feature 1..20: note = chemically synthesized
  source 1..20: mol_type = other DNA
aatccactgagaaaggatgt

SEQ ID NO: 28485 - DNA, 20 bp, synthetic construct
  misc_feature 1..20: note = chemically synthesized
  source 1..20: mol_type = other DNA
tccactgagaaaggatgttg

SEQ ID NO: 28486 - DNA, 20 bp, synthetic construct
  misc_feature 1..20: note = chemically synthesized
  source 1..20: mol_type = other DNA
ggatgttggagaatattaca

SEQ ID NO: 28487 - DNA, 20 bp, synthetic construct
  misc_feature 1..20: note = chemically synthesized
  source 1..20: mol_type = other DNA
gatgttggagaatattacat

SEQ ID NO: 28488 - DNA, 20 bp, synthetic construct
  misc_feature 1..20: note = chemically synthesized
  source 1..20: mol_type = other DNA
tgttggagaatattacatag

SEQ ID NO: 28489 - DNA, 20 bp, synthetic construct
  misc_feature 1..20: note = chemically synthesized
  source 1..20: mol_type = other DNA
gttggagaatattacatagg

SEQ ID NO: 28490 - DNA, 20 bp, synthetic construct
  misc_feature 1..20: note = chemically synthesized
  source 1..20: mol_type = other DNA
ggagaatattacataggagg

SEQ ID NO: 28491 - DNA, 20 bp, synthetic construct
  misc_feature 1..20: note = chemically synthesized
  source 1..20: mol_type = other DNA
gagaatattacataggaggt

SEQ ID NO: 28492 - DNA, 20 bp, synthetic construct
  misc_feature 1..20: note = chemically synthesized
  source 1..20: mol_type = other DNA
agaatattacataggaggtg

SEQ ID NO: 28493 - DNA, 20 bp, synthetic construct
  misc_feature 1..20: note = chemically synthesized
  source 1..20: mol_type = other DNA
atattacataggaggtgggg

SEQ ID NO: 28494 - DNA, 20 bp, synthetic construct
  misc_feature 1..20: note = chemically synthesized
  source 1..20: mol_type = other DNA
tattacataggaggtggggt

SEQ ID NO: 28495 - DNA, 20 bp, synthetic construct
  misc_feature 1..20: note = chemically synthesized
  source 1..20: mol_type = other DNA
attacataggaggtggggtg

SEQ ID NO: 28496 - DNA, 20 bp, synthetic construct
  misc_feature 1..20: note = chemically synthesized
  source 1..20: mol_type = other DNA
acataggaggtggggtgggg

SEQ ID NO: 28497 - DNA, 20 bp, synthetic construct
  misc_feature 1..20: note = chemically synthesized
  source 1..20: mol_type = other DNA
cataggaggtggggtggggt

SEQ ID NO: 28498 - DNA, 20 bp, synthetic construct
  misc_feature 1..20: note = chemically synthesized
  source 1..20: mol_type = other DNA
ggtggggtggggtgggcgtg

SEQ ID NO: 28499 - DNA, 20 bp, synthetic construct
  misc_feature 1..20: note = chemically synthesized
  source 1..20: mol_type = other DNA
gggtgggcgtgcggtacctt

SEQ ID NO: 28500 - DNA, 20 bp, synthetic construct
  misc_feature 1..20: note = chemically synthesized
  source 1..20: mol_type = other DNA
ttgatgtttgtcactgaact

SEQ ID NO: 28501 - DNA, 20 bp, synthetic construct
  misc_feature 1..20: note = chemically synthesized
  source 1..20: mol_type = other DNA
gtttgtcactgaacttagaa

SEQ ID NO: 28502 - DNA, 20 bp, synthetic construct
  misc_feature 1..20: note = chemically synthesized
  source 1..20: mol_type = other DNA
aagatatactgtatgtgttt

SEQ ID NO: 28503 - DNA, 20 bp, synthetic construct
  misc_feature 1..20: note = chemically synthesized
  source 1..20: mol_type = other DNA
atactgtatgtgttttggat

SEQ ID NO: 28504 - DNA, 20 bp, synthetic construct
  misc_feature 1..20: note = chemically synthesized
  source 1..20: mol_type = other DNA
tactgtatgtgttttggatt

SEQ ID NO: 28505 - DNA, 20 bp, synthetic construct
  misc_feature 1..20: note = chemically synthesized
  source 1..20: mol_type = other DNA
ctgaatccaaaatgctgctc

SEQ ID NO: 28506 - DNA, 20 bp, synthetic construct
  misc_feature 1..20: note = chemically synthesized
  source 1..20: mol_type = other DNA
atccaaaatgctgctcaaga

SEQ ID NO: 28507 - DNA, 20 bp, synthetic construct
  misc_feature 1..20: note = chemically synthesized
  source 1..20: mol_type = other DNA
aaaatgctgctcaagacaga

SEQ ID NO: 28508 - DNA, 20 bp, synthetic construct
  misc_feature 1..20: note = chemically synthesized
  source 1..20: mol_type = other DNA
gacagatagaaataattccc

SEQ ID NO: 28509 - DNA, 20 bp, synthetic construct
  misc_feature 1..20: note = chemically synthesized
  source 1..20: mol_type = other DNA
ataattccccagtgccatgc

SEQ ID NO: 28510 - DNA, 20 bp, synthetic construct
  misc_feature 1..20: note = chemically synthesized
  source 1..20: mol_type = other DNA
ccccagtgccatgccagctt

SEQ ID NO: 28511 - DNA, 20 bp, synthetic construct
  misc_feature 1..20: note = chemically synthesized
  source 1..20: mol_type = other DNA
tgccatgccagctttagatg

SEQ ID NO: 28512 - DNA, 20 bp, synthetic construct
  misc_feature 1..20: note = chemically synthesized
  source 1..20: mol_type = other DNA
tgtccctattactcttttat

SEQ ID NO: 28513 - DNA, 20 bp, synthetic construct
  misc_feature 1..20: note = chemically synthesized
  source 1..20: mol_type = other DNA
gtccctattactcttttatt

SEQ ID NO: 28514 - DNA, 20 bp, synthetic construct
  misc_feature 1..20: note = chemically synthesized
  source 1..20: mol_type = other DNA
ccctattactcttttattag

SEQ ID NO: 28515 - DNA, 20 bp, synthetic construct
  misc_feature 1..20: note = chemically synthesized
  source 1..20: mol_type = other DNA
actcttttattaggagctat

SEQ ID NO: 28516 - DNA, 20 bp, synthetic construct
  misc_feature 1..20: note = chemically synthesized
  source 1..20: mol_type = other DNA
gagctatgagtgcaactgtg

SEQ ID NO: 28517 - DNA, 20 bp, synthetic construct
  misc_feature 1..20: note = chemically synthesized
  source 1..20: mol_type = other DNA
agctatgagtgcaactgtgt

SEQ ID NO: 28518 - DNA, 20 bp, synthetic construct
  misc_feature 1..20: note = chemically synthesized
  source 1..20: mol_type = other DNA
aactgtgtaggttttatata

SEQ ID NO: 28519 - DNA, 20 bp, synthetic construct
  misc_feature 1..20: note = chemically synthesized
  source 1..20: mol_type = other DNA
cagtattcattttaatttct

SEQ ID NO: 28520 - DNA, 20 bp, synthetic construct
  misc_feature 1..20: note = chemically synthesized
  source 1..20: mol_type = other DNA
ttctcagtatatgctgctct

SEQ ID NO: 28521 - DNA, 20 bp, synthetic construct
  misc_feature 1..20: note = chemically synthesized
  source 1..20: mol_type = other DNA
tatgctgctcttagcgtaat

SEQ ID NO: 28522 - DNA, 20 bp, synthetic construct
  misc_feature 1..20: note = chemically synthesized
  source 1..20: mol_type = other DNA
atgctgctcttagcgtaatt

SEQ ID NO: 28523 - DNA, 20 bp, synthetic construct
  misc_feature 1..20: note = chemically synthesized
  source 1..20: mol_type = other DNA
aattaggttttgcatcctga

SEQ ID NO: 28524 - DNA, 20 bp, synthetic construct
  misc_feature 1..20: note = chemically synthesized
  source 1..20: mol_type = other DNA
aggttttgcatcctgacaga

SEQ ID NO: 28525 - DNA, 20 bp, synthetic construct
  misc_feature 1..20: note = chemically synthesized
  source 1..20: mol_type = other DNA
atcctgacagacagaattaa

SEQ ID NO: 28526 - DNA, 20 bp, synthetic construct
  misc_feature 1..20: note = chemically synthesized
  source 1..20: mol_type = other DNA
ctgacagacagaattaatgg

SEQ ID NO: 28527 - DNA, 20 bp, synthetic construct
  misc_feature 1..20: note = chemically synthesized
  source 1..20: mol_type = other DNA
ttcaaatttcttaaatcaaa

SEQ ID NO: 28528 - DNA, 20 bp, synthetic construct
  misc_feature 1..20: note = chemically synthesized
  source 1..20: mol_type = other DNA
tcaaatttcttaaatcaaat

SEQ ID NO: 28529 - DNA, 20 bp, synthetic construct
  misc_feature 1..20: note = chemically synthesized
  source 1..20: mol_type = other DNA
caaatttcttaaatcaaatg

SEQ ID NO: 28530 - DNA, 20 bp, synthetic construct
  misc_feature 1..20: note = chemically synthesized
  source 1..20: mol_type = other DNA
ttcttaaatcaaatggggaa

SEQ ID NO: 28531 - DNA, 20 bp, synthetic construct
  misc_feature 1..20: note = chemically synthesized
  source 1..20: mol_type = other DNA
tcttaaatcaaatggggaat

SEQ ID NO: 28532 - DNA, 20 bp, synthetic construct
  misc_feature 1..20: note = chemically synthesized
  source 1..20: mol_type = other DNA
cttaaatcaaatggggaatg

SEQ ID NO: 28533 - DNA, 20 bp, synthetic construct
  misc_feature 1..20: note = chemically synthesized
  source 1..20: mol_type = other DNA
taaatcaaatggggaatggg

SEQ ID NO: 28534 - DNA, 20 bp, synthetic construct
  misc_feature 1..20: note = chemically synthesized
  source 1..20: mol_type = other DNA
aaatcaaatggggaatgggg

SEQ ID NO: 28535 - DNA, 20 bp, synthetic construct
  misc_feature 1..20: note = chemically synthesized
  source 1..20: mol_type = other DNA
atcaaatggggaatggggag

SEQ ID NO: 28536 - DNA, 20 bp, synthetic construct
  misc_feature 1..20: note = chemically synthesized
  source 1..20: mol_type = other DNA
tggggaggagtgcaaacatc

SEQ ID NO: 28537 - DNA, 20 bp, synthetic construct
  misc_feature 1..20: note = chemically synthesized
  source 1..20: mol_type = other DNA
aaacatctggtgataaatca

SEQ ID NO: 28538 - DNA, 20 bp, synthetic construct
  misc_feature 1..20: note = chemically synthesized
  source 1..20: mol_type = other DNA
cagattatgtttgatttaca

SEQ ID NO: 28539 - DNA, 20 bp, synthetic construct
  misc_feature 1..20: note = chemically synthesized
  source 1..20: mol_type = other DNA
gtttgatttacatggtccca

SEQ ID NO: 28540 - DNA, 20 bp, synthetic construct
  misc_feature 1..20: note = chemically synthesized
  source 1..20: mol_type = other DNA
ccaaagttaaataaatttac

SEQ ID NO: 28541 - DNA, 20 bp, synthetic construct
  misc_feature 1..20: note = chemically synthesized
  source 1..20: mol_type = other DNA
caaagttaaataaatttact

SEQ ID NO: 28542 - DNA, 20 bp, synthetic construct
  misc_feature 1..20: note = chemically synthesized
  source 1..20: mol_type = other DNA
aagttaaataaatttactgg

SEQ ID NO: 28543 - DNA, 20 bp, synthetic construct
  misc_feature 1..20: note = chemically synthesized
  source 1..20: mol_type = other DNA
taaataaatttactgggaga

SEQ ID NO: 28544 - DNA, 20 bp, synthetic construct
  misc_feature 1..20: note = chemically synthesized
  source 1..20: mol_type = other DNA
aaataaatttactgggagat

SEQ ID NO: 28545 - DNA, 20 bp, synthetic construct
  misc_feature 1..20: note = chemically synthesized
  source 1..20: mol_type = other DNA
ttactgggagatgggttctt

SEQ ID NO: 28546 - DNA, 20 bp, synthetic construct
  misc_feature 1..20: note = chemically synthesized
  source 1..20: mol_type = other DNA
tactgggagatgggttcttc

SEQ ID NO: 28547 - DNA, 20 bp, synthetic construct
  misc_feature 1..20: note = chemically synthesized
  source 1..20: mol_type = other DNA
gatgggttcttcaggttact

SEQ ID NO: 28548 - DNA, 20 bp, synthetic construct
  misc_feature 1..20: note = chemically synthesized
  source 1..20: mol_type = other DNA
ctgataaaatattatttctg

SEQ ID NO: 28549 - DNA, 20 bp, synthetic construct
  misc_feature 1..20: note = chemically synthesized
  source 1..20: mol_type = other DNA
tttctgaagctgatgaacaa

SEQ ID NO: 28550 - DNA, 20 bp, synthetic construct
  misc_feature 1..20: note = chemically synthesized
  source 1..20: mol_type = other DNA
ctgatgaacaatagaaacat

SEQ ID NO: 28551 - DNA, 20 bp, synthetic construct
  misc_feature 1..20: note = chemically synthesized
  source 1..20: mol_type = other DNA
acaatagaaacatgagaacc

SEQ ID NO: 28552 - DNA, 20 bp, synthetic construct
  misc_feature 1..20: note = chemically synthesized
  source 1..20: mol_type = other DNA
tataaatgatattttgtatc

SEQ ID NO: 28553 - DNA, 20 bp, synthetic construct
  misc_feature 1..20: note = chemically synthesized
  source 1..20: mol_type = other DNA
aataacatgcacatttccaa

SEQ ID NO: 28554 - DNA, 20 bp, synthetic construct
  misc_feature 1..20: note = chemically synthesized
  source 1..20: mol_type = other DNA
acatgcacatttccaatagt

SEQ ID NO: 28555 - DNA, 20 bp, synthetic construct
  misc_feature 1..20: note = chemically synthesized
  source 1..20: mol_type = other DNA
atgatcttttttttttaaat

SEQ ID NO: 28556 - DNA, 20 bp, synthetic construct
  misc_feature 1..20: note = chemically synthesized
  source 1..20: mol_type = other DNA
tgatcttttttttttaaatg

SEQ ID NO: 28557 - DNA, 20 bp, synthetic construct
  misc_feature 1..20: note = chemically synthesized
  source 1..20: mol_type = other DNA
tttttaaatgaggaactact

SEQ ID NO: 28558 - DNA, 20 bp, synthetic construct
  misc_feature 1..20: note = chemically synthesized
  source 1..20: mol_type = other DNA
taatgtctcttaaaatcctc

SEQ ID NO: 28559 - DNA, 20 bp, synthetic construct
  misc_feature 1..20: note = chemically synthesized
  source 1..20: mol_type = other DNA
gtctcttaaaatcctcaagt

SEQ ID NO: 28560 - DNA, 20 bp, synthetic construct
  misc_feature 1..20: note = chemically synthesized
  source 1..20: mol_type = other DNA
cctcaagtaagtttttgtaa

SEQ ID NO: 28561 - DNA, 20 bp, synthetic construct
  misc_feature 1..20: note = chemically synthesized
  source 1..20: mol_type = other DNA
ctcaagtaagtttttgtaac

SEQ ID NO: 28562 - DNA, 20 bp, synthetic construct
  misc_feature 1..20: note = chemically synthesized
  source 1..20: mol_type = other DNA
taacaggcttgacgtgctga

SEQ ID NO: 28563 - DNA, 20 bp, synthetic construct
  misc_feature 1..20: note = chemically synthesized
  source 1..20: mol_type = other DNA
gttctttttaatcttcattt

SEQ ID NO: 28564 - DNA, 20 bp, synthetic construct
  misc_feature 1..20: note = chemically synthesized
  source 1..20: mol_type = other DNA
tttgagaacaacttaataaa

SEQ ID NO: 28565 - DNA, 20 bp, synthetic construct
  misc_feature 1..20: note = chemically synthesized
  source 1..20: mol_type = other DNA
ttgagaacaacttaataaac

SEQ ID NO: 28566 - DNA, 20 bp, synthetic construct
  misc_feature 1..20: note = chemically synthesized
  source 1..20: mol_type = other DNA
accgcaaattctatttctca

SEQ ID NO: 28567 - DNA, 20 bp, synthetic construct
  misc_feature 1..20: note = chemically synthesized
  source 1..20: mol_type = other DNA
atttctcacagattttaaac

SEQ ID NO: 28568 - DNA, 20 bp, synthetic construct
  misc_feature 1..20: note = chemically synthesized
  source 1..20: mol_type = other DNA
ttttaaaccagaaactcttc

SEQ ID NO: 28569 - DNA, 20 bp, synthetic construct
  misc_feature 1..20: note = chemically synthesized
  source 1..20: mol_type = other DNA
tttgctatcctctctttgtt

SEQ ID NO: 28570 - DNA, 20 bp, synthetic construct
  misc_feature 1..20: note = chemically synthesized
  source 1..20: mol_type = other DNA
ttgctatcctctctttgttt

SEQ ID NO: 28571 - DNA, 20 bp, synthetic construct
  misc_feature 1..20: note = chemically synthesized
  source 1..20: mol_type = other DNA
ctttgtttaggacctacaaa

SEQ ID NO: 28572 - DNA, 20 bp, synthetic construct
  misc_feature 1..20: note = chemically synthesized
  source 1..20: mol_type = other DNA
tttgtttaggacctacaaaa

SEQ ID NO: 28573 - DNA, 20 bp, synthetic construct
  misc_feature 1..20: note = chemically synthesized
  source 1..20: mol_type = other DNA
tttaggacctacaaaaaggc

SEQ ID NO: 28574 - DNA, 20 bp, synthetic construct
  misc_feature 1..20: note = chemically synthesized
  source 1..20: mol_type = other DNA
gctggaaccaacacattaca

SEQ ID NO: 28575 - DNA, 20 bp, synthetic construct
  misc_feature 1..20: note = chemically synthesized
  source 1..20: mol_type = other DNA
ctggaaccaacacattacaa

SEQ ID NO: 28576 - DNA, 20 bp, synthetic construct
  misc_feature 1..20: note = chemically synthesized
  source 1..20: mol_type = other DNA
aacacattacaaaggttgct

SEQ ID NO: 28577 - DNA, 20 bp, synthetic construct
  misc_feature 1..20: note = chemically synthesized
  source 1..20: mol_type = other DNA
acattacaaaggttgctaag

SEQ ID NO: 28578 - DNA, 20 bp, synthetic construct
  misc_feature 1..20: note = chemically synthesized
  source 1..20: mol_type = other DNA
tacaaaggttgctaagaagt

SEQ ID NO: 28579 - DNA, 20 bp, synthetic construct
  misc_feature 1..20: note = chemically synthesized
  source 1..20: mol_type = other DNA
acaaaggttgctaagaagtg

SEQ ID NO: 28580 - DNA, 20 bp, synthetic construct
  misc_feature 1..20: note = chemically synthesized
  source 1..20: mol_type = other DNA
gctaagaagtgaggtgaaca

SEQ ID NO: 28581 - DNA, 20 bp, synthetic construct
  misc_feature 1..20: note = chemically synthesized
  source 1..20: mol_type = other DNA
acacagttcttcatttgcac

SEQ ID NO: 28582 - DNA, 20 bp, synthetic construct
  misc_feature 1..20: note = chemically synthesized
  source 1..20: mol_type = other DNA
ttcttcatttgcactggcca

SEQ ID NO: 28583 - DNA, 20 bp, synthetic construct
  misc_feature 1..20: note = chemically synthesized
  source 1..20: mol_type = other DNA
ttcatttgcactggccatgg

SEQ ID NO: 28584 - DNA, 20 bp, synthetic construct
  misc_feature 1..20: note = chemically synthesized
  source 1..20: mol_type = other DNA
tttgcactggccatggcaga

SEQ ID NO: 28585 - DNA, 20 bp, synthetic construct
  misc_feature 1..20: note = chemically synthesized
  source 1..20: mol_type = other DNA
tggccatggcagaaagtgtg

SEQ ID NO: 28586 - DNA, 20 bp, synthetic construct
  misc_feature 1..20: note = chemically synthesized
  source 1..20: mol_type = other DNA
ccatggcagaaagtgtgaag

SEQ ID NO: 28587 - DNA, 20 bp, synthetic construct
  misc_feature 1..20: note = chemically synthesized
  source 1..20: mol_type = other DNA
gcagaaagtgtgaagtagtt

SEQ ID NO: 28588 - DNA, 20 bp, synthetic construct
  misc_feature 1..20: note = chemically synthesized
  source 1..20: mol_type = other DNA
tgaagtagttgagtttttcc

SEQ ID NO: 28589 - DNA, 20 bp, synthetic construct
  misc_feature 1..20: note = chemically synthesized
  source 1..20: mol_type = other DNA
gaagtagttgagtttttccc

SEQ ID NO: 28590 - DNA, 20 bp, synthetic construct
  misc_feature 1..20: note = chemically synthesized
  source 1..20: mol_type = other DNA
aagtagttgagtttttccca

SEQ ID NO: 28591 - DNA, 20 bp, synthetic construct
  misc_feature 1..20: note = chemically synthesized
  source 1..20: mol_type = other DNA
gtttttcccagggcattctg

SEQ ID NO: 28592 - DNA, 20 bp, synthetic construct
  misc_feature 1..20: note = chemically synthesized
  source 1..20: mol_type = other DNA
cccagggcattctgtagata

SEQ ID NO: 28593 - DNA, 20 bp, synthetic construct
  misc_feature 1..20: note = chemically synthesized
  source 1..20: mol_type = other DNA
accatttttgtatatgcaat

SEQ ID NO: 28594 - DNA, 20 bp, synthetic construct
  misc_feature 1..20: note = chemically synthesized
  source 1..20: mol_type = other DNA
attgtatataatcataatgc

SEQ ID NO: 28595 - DNA, 20 bp, synthetic construct
  misc_feature 1..20: note = chemically synthesized
  source 1..20: mol_type = other DNA
gtatataatcataatgctag

SEQ ID NO: 28596 - DNA, 20 bp, synthetic construct
  misc_feature 1..20: note = chemically synthesized
  source 1..20: mol_type = other DNA
ataatcataatgctagaagt

SEQ ID NO: 28597 - DNA, 20 bp, synthetic construct
  misc_feature 1..20: note = chemically synthesized
  source 1..20: mol_type = other DNA
tgctagaagtgagaacttga

SEQ ID NO: 28598 - DNA, 20 bp, synthetic construct
  misc_feature 1..20: note = chemically synthesized
  source 1..20: mol_type = other DNA
gctagaagtgagaacttgaa

SEQ ID NO: 28599 - DNA, 20 bp, synthetic construct
  misc_feature 1..20: note = chemically synthesized
  source 1..20: mol_type = other DNA
agaagtgagaacttgaaagg

SEQ ID NO: 28600 - DNA, 20 bp, synthetic construct
  misc_feature 1..20: note = chemically synthesized
  source 1..20: mol_type = other DNA
agtgagaacttgaaaggaag

SEQ ID NO: 28601 - DNA, 20 bp, synthetic construct
  misc_feature 1..20: note = chemically synthesized
  source 1..20: mol_type = other DNA
gagaacttgaaaggaagtgg

SEQ ID NO: 28602 - DNA, 20 bp, synthetic construct
  misc_feature 1..20: note = chemically synthesized
  source 1..20: mol_type = other DNA
agaacttgaaaggaagtggc

SEQ ID NO: 28603 - DNA, 20 bp, synthetic construct
  misc_feature 1..20: note = chemically synthesized
  source 1..20: mol_type = other DNA
aacttgaaaggaagtggcgg

SEQ ID NO: 28604 - DNA, 20 bp, synthetic construct
  misc_feature 1..20: note = chemically synthesized
  source 1..20: mol_type = other DNA
tgaaaggaagtggcgggaga

SEQ ID NO: 28605 - DNA, 20 bp, synthetic construct
  misc_feature 1..20: note = chemically synthesized
  source 1..20: mol_type = other DNA
ggaagtggcgggagatggct

SEQ ID NO: 28606 - DNA, 20 bp, synthetic construct
  misc_feature 1..20: note = chemically synthesized
  source 1..20: mol_type = other DNA
gaagtggcgggagatggctt

SEQ ID NO: 28607 - DNA, 20 bp, synthetic construct
  misc_feature 1..20: note = chemically synthesized
  source 1..20: mol_type = other DNA
ggcttaggtataattccaat

SEQ ID NO: 28608 - DNA, 20 bp, synthetic construct
  misc_feature 1..20: note = chemically synthesized
  source 1..20: mol_type = other DNA
cttaggtataattccaattg

SEQ ID NO: 28609 - DNA, 20 bp, synthetic construct
  misc_feature 1..20: note = chemically synthesized
  source 1..20: mol_type = other DNA
ataattccaattggagaaat

SEQ ID NO: 28610 - DNA, 20 bp, synthetic construct
  misc_feature 1..20: note = chemically synthesized
  source 1..20: mol_type = other DNA
taattccaattggagaaata

SEQ ID NO: 28611 - DNA, 20 bp, synthetic construct
  misc_feature 1..20: note = chemically synthesized
  source 1..20: mol_type = other DNA
aattggagaaataaggaaat

SEQ ID NO: 28612 - DNA, 20 bp, synthetic construct
  misc_feature 1..20: note = chemically synthesized
  source 1..20: mol_type = other DNA
attggagaaataaggaaatg

SEQ ID NO: 28613 - DNA, 20 bp, synthetic construct
  misc_feature 1..20: note = chemically synthesized
  source 1..20: mol_type = other DNA
ggagaaataaggaaatgagg

SEQ ID NO: 28614 - DNA, 20 bp, synthetic construct
  misc_feature 1..20: note = chemically synthesized
  source 1..20: mol_type = other DNA
gaaatgaggtggtttattca

SEQ ID NO: 28615 - DNA, 20 bp, synthetic construct
  misc_feature 1..20: note = chemically synthesized
  source 1..20: mol_type = other DNA
aggtggtttattcacagaca

SEQ ID NO: 28616 - DNA, 20 bp, synthetic construct
  misc_feature 1..20: note = chemically synthesized
  source 1..20: mol_type = other DNA
tcacagacacagtttgctga

SEQ ID NO: 28617 - DNA, 20 bp, synthetic construct
  misc_feature 1..20: note = chemically synthesized
  source 1..20: mol_type = other DNA
cacagacacagtttgctgaa

SEQ ID NO: 28618 - DNA, 20 bp, synthetic construct
  misc_feature 1..20: note = chemically synthesized
  source 1..20: mol_type = other DNA
cacagtttgctgaaaggtac

SEQ ID NO: 28619 - DNA, 20 bp, synthetic construct
  misc_feature 1..20: note = chemically synthesized
  source 1..20: mol_type = other DNA
acagtttgctgaaaggtact

SEQ ID NO: 28620 - DNA, 20 bp, synthetic construct
  misc_feature 1..20: note = chemically synthesized
  source 1..20: mol_type = other DNA
gaaaggtactgggattattt

SEQ ID NO: 28621 - DNA, 20 bp, synthetic construct
  misc_feature 1..20: note = chemically synthesized
  source 1..20: mol_type = other DNA
aaaggtactgggattatttc

SEQ ID NO: 28622 - DNA, 20 bp, synthetic construct
  misc_feature 1..20: note = chemically synthesized
  source 1..20: mol_type = other DNA
ttatttcgggccttcctgaa

SEQ ID NO: 28623 - DNA, 20 bp, synthetic construct
  misc_feature 1..20: note = chemically synthesized
  source 1..20: mol_type = other DNA
tatttcgggccttcctgaaa

SEQ ID NO: 28624 - DNA, 20 bp, synthetic construct
  misc_feature 1..20: note = chemically synthesized
  source 1..20: mol_type = other DNA
tttcgggccttcctgaaaag

SEQ ID NO: 28625 - DNA, 20 bp, synthetic construct
  misc_feature 1..20: note = chemically synthesized
  source 1..20: mol_type = other DNA
ggccttcctgaaaaggagtt

SEQ ID NO: 28626 - DNA, 20 bp, synthetic construct
  misc_feature 1..20: note = chemically synthesized
  source 1..20: mol_type = other DNA
cttcctgaaaaggagttgag

SEQ ID NO: 28627 - DNA, 20 bp, synthetic construct
  misc_feature 1..20: note = chemically synthesized
  source 1..20: mol_type = other DNA
gaaaaggagttgagaagcct

SEQ ID NO: 28628 - DNA, 20 bp, synthetic construct
  misc_feature 1..20: note = chemically synthesized
  source 1..20: mol_type = other DNA
aaaaggagttgagaagcctc

SEQ ID NO: 28629 - DNA, 20 bp, synthetic construct
  misc_feature 1..20: note = chemically synthesized
  source 1..20: mol_type = other DNA
gccccatcctctcctgcttg

SEQ ID NO: 28630 - DNA, 20 bp, synthetic construct
  misc_feature 1..20: note = chemically synthesized
  source 1..20: mol_type = other DNA
tgcttgtagtactttgctca

SEQ ID NO: 28631 - DNA, 20 bp, synthetic construct
  misc_feature 1..20: note = chemically synthesized
  source 1..20: mol_type = other DNA
cttgtagtactttgctcaca

SEQ ID NO: 28632 - DNA, 20 bp, synthetic construct
  misc_feature 1..20: note = chemically synthesized
  source 1..20: mol_type = other DNA
gtactttgctcacagagact

SEQ ID NO: 28633 - DNA, 20 bp, synthetic construct
  misc_feature 1..20: note = chemically synthesized
  source 1..20: mol_type = other DNA
tactttgctcacagagactg

SEQ ID NO: 28634 - DNA, 20 bp, synthetic construct
  misc_feature 1..20: note = chemically synthesized
  source 1..20: mol_type = other DNA
actttgctcacagagactga

SEQ ID NO: 28635 - DNA, 20 bp, synthetic construct
  misc_feature 1..20: note = chemically synthesized
  source 1..20: mol_type = other DNA
tttgctcacagagactgagg

SEQ ID NO: 28636 - DNA, 20 bp, synthetic construct
  misc_feature 1..20: note = chemically synthesized
  source 1..20: mol_type = other DNA
ttgctcacagagactgaggg

SEQ ID NO: 28637 - DNA, 20 bp, synthetic construct
  misc_feature 1..20: note = chemically synthesized
  source 1..20: mol_type = other DNA
agagactgagggaggaaata

SEQ ID NO: 28638 - DNA, 20 bp, synthetic construct
  misc_feature 1..20: note = chemically synthesized
  source 1..20: mol_type = other DNA
atacagtgttttcttgtttt

SEQ ID NO: 28639 - DNA, 20 bp, synthetic construct
  misc_feature 1..20: note = chemically synthesized
  source 1..20: mol_type = other DNA
ttctgttactccattgtccc

SEQ ID NO: 28640 - DNA, 20 bp, synthetic construct
  misc_feature 1..20: note = chemically synthesized
  source 1..20: mol_type = other DNA
tctgttactccattgtccct

SEQ ID NO: 28641 - DNA, 20 bp, synthetic construct
  misc_feature 1..20: note = chemically synthesized
  source 1..20: mol_type = other DNA
tactccattgtccctgggcc

SEQ ID NO: 28642 - DNA, 20 bp, synthetic construct
  misc_feature 1..20: note = chemically synthesized
  source 1..20: mol_type = other DNA
gtccctgggcctggtgtgtt

SEQ ID NO: 28643 - DNA, 20 bp, synthetic construct
  misc_feature 1..20: note = chemically synthesized
  source 1..20: mol_type = other DNA
tccctgggcctggtgtgttc

SEQ ID NO: 28644 - DNA, 20 bp, synthetic construct
  misc_feature 1..20: note = chemically synthesized
  source 1..20: mol_type = other DNA
ccatcccattctcttttttt

SEQ ID NO: 28645 - DNA, 20 bp, synthetic construct
  misc_feature 1..20: note = chemically synthesized
  source 1..20: mol_type = other DNA
ttcccataaaaaaaaaattg

SEQ ID NO: 28646 - DNA, 20 bp, synthetic construct
  misc_feature 1..20: note = chemically synthesized
  source 1..20: mol_type = other DNA
tcccataaaaaaaaaattgt

SEQ ID NO: 28647 - DNA, 20 bp, synthetic construct
  misc_feature 1..20: note = chemically synthesized
  source 1..20: mol_type = other DNA
tgtgggaactttgccgatat

SEQ ID NO: 28648 - DNA, 20 bp, synthetic construct
  misc_feature 1..20: note = chemically synthesized
  source 1..20: mol_type = other DNA
gtgggaactttgccgatatg

SEQ ID NO: 28649 - DNA, 20 bp, synthetic construct
  misc_feature 1..20: note = chemically synthesized
  source 1..20: mol_type = other DNA
gaactttgccgatatgagga

SEQ ID NO: 28650 - DNA, 20 bp, synthetic construct
  misc_feature 1..20: note = chemically synthesized
  source 1..20: mol_type = other DNA
aactttgccgatatgaggat

SEQ ID NO: 28651 - DNA, 20 bp, synthetic construct
  misc_feature 1..20: note = chemically synthesized
  source 1..20: mol_type = other DNA
tgccgatatgaggatgggat

SEQ ID NO: 28652 - DNA, 20 bp, synthetic construct
  misc_feature 1..20: note = chemically synthesized
  source 1..20: mol_type = other DNA
cgatatgaggatgggattgg

SEQ ID NO: 28653 - DNA, 20 bp, synthetic construct
  misc_feature 1..20: note = chemically synthesized
  source 1..20: mol_type = other DNA
atatgaggatgggattggca

SEQ ID NO: 28654 - DNA, 20 bp, synthetic construct
  misc_feature 1..20: note = chemically synthesized
  source 1..20: mol_type = other DNA
cagagttctctcaacctgct

SEQ ID NO: 28655 - DNA, 20 bp, synthetic construct
  misc_feature 1..20: note = chemically synthesized
  source 1..20: mol_type = other DNA
cttggaaaaatgtttcttaa

SEQ ID NO: 28656 - DNA, 20 bp, synthetic construct
  misc_feature 1..20: note = chemically synthesized
  source 1..20: mol_type = other DNA
aaaagactgctaacttttaa

SEQ ID NO: 28657 - DNA, 20 bp, synthetic construct
  misc_feature 1..20: note = chemically synthesized
  source 1..20: mol_type = other DNA
aaagactgctaacttttaaa

SEQ ID NO: 28658 - DNA, 20 bp, synthetic construct
  misc_feature 1..20: note = chemically synthesized
  source 1..20: mol_type = other DNA
tgctaacttttaaaaggcat

SEQ ID NO: 28659 - DNA, 20 bp, synthetic construct
  misc_feature 1..20: note = chemically synthesized
  source 1..20: mol_type = other DNA
tttaaaaggcatgagccatc

SEQ ID NO: 28660 - DNA, 20 bp, synthetic construct
  misc_feature 1..20: note = chemically synthesized
  source 1..20: mol_type = other DNA
aaaaggcatgagccatctag

SEQ ID NO: 28661 - DNA, 20 bp, synthetic construct
  misc_feature 1..20: note = chemically synthesized
  source 1..20: mol_type = other DNA
agccatctagcagattttcc

SEQ ID NO: 28662 - DNA, 20 bp, synthetic construct
  misc_feature 1..20: note = chemically synthesized
  source 1..20: mol_type = other DNA
attttcctagttgtctccta

SEQ ID NO: 28663 - DNA, 20 bp, synthetic construct
  misc_feature 1..20: note = chemically synthesized
  source 1..20: mol_type = other DNA
aagccctgcatatttcccaa

SEQ ID NO: 28664 - DNA, 20 bp, synthetic construct
  misc_feature 1..20: note = chemically synthesized
  source 1..20: mol_type = other DNA
aaaataaacgaacccattgt

SEQ ID NO: 28665 - DNA, 20 bp, synthetic construct
  misc_feature 1..20: note = chemically synthesized
  source 1..20: mol_type = other DNA
aataaacgaacccattgtta

SEQ ID NO: 28666 - DNA, 20 bp, synthetic construct
  misc_feature 1..20: note = chemically synthesized
  source 1..20: mol_type = other DNA
cgaacccattgttagagaaa

SEQ ID NO: 28667 - DNA, 20 bp, synthetic construct
  misc_feature 1..20: note = chemically synthesized
  source 1..20: mol_type = other DNA
attgttagagaaatggacat

SEQ ID NO: 28668 - DNA, 20 bp, synthetic construct
  misc_feature 1..20: note = chemically synthesized
  source 1..20: mol_type = other DNA
gaaatggacatcagaacaca

SEQ ID NO: 28669 - DNA, 20 bp, synthetic construct
  misc_feature 1..20: note = chemically synthesized
  source 1..20: mol_type = other DNA
aatggacatcagaacacata

SEQ ID NO: 28670 - DNA, 20 bp, synthetic construct
  misc_feature 1..20: note = chemically synthesized
  source 1..20: mol_type = other DNA
atggacatcagaacacatag

SEQ ID NO: 28671 - DNA, 20 bp, synthetic construct
  misc_feature 1..20: note = chemically synthesized
  source 1..20: mol_type = other DNA
tggacatcagaacacataga

SEQ ID NO: 28672 - DNA, 20 bp, synthetic construct
  misc_feature 1..20: note = chemically synthesized
  source 1..20: mol_type = other DNA
tcagaacacatagagggaat

SEQ ID NO: 28673 - DNA, 20 bp, synthetic construct
  misc_feature 1..20: note = chemically synthesized
  source 1..20: mol_type = other DNA
ggtatgatgtgtatttactc

SEQ ID NO: 28674 - DNA, 20 bp, synthetic construct
  misc_feature 1..20: note = chemically synthesized
  source 1..20: mol_type = other DNA
gtatgatgtgtatttactct

SEQ ID NO: 28675 - DNA, 20 bp, synthetic construct
  misc_feature 1..20: note = chemically synthesized
  source 1..20: mol_type = other DNA
tatgatgtgtatttactcta

SEQ ID NO: 28676 - DNA, 20 bp, synthetic construct
  misc_feature 1..20: note = chemically synthesized
  source 1..20: mol_type = other DNA
tatttactctagggctgcta

SEQ ID NO: 28677 - DNA, 20 bp, synthetic construct
  misc_feature 1..20: note = chemically synthesized
  source 1..20: mol_type = other DNA
gctgctatagctatgaactg

SEQ ID NO: 28678 - DNA, 20 bp, synthetic construct
  misc_feature 1..20: note = chemically synthesized
  source 1..20: mol_type = other DNA
atagctatgaactgtggaca

SEQ ID NO: 28679 - DNA, 20 bp, synthetic construct
  misc_feature 1..20: note = chemically synthesized
  source 1..20: mol_type = other DNA
tagctatgaactgtggacat

SEQ ID NO: 28680 - DNA, 20 bp, synthetic construct
  misc_feature 1..20: note = chemically synthesized
  source 1..20: mol_type = other DNA
aactgtggacatgggttgtc

SEQ ID NO: 28681 - DNA, 20 bp, synthetic construct
  misc_feature 1..20: note = chemically synthesized
  source 1..20: mol_type = other DNA
cggtctgcacttctgcttgc

SEQ ID NO: 28682 - DNA, 20 bp, synthetic construct
  misc_feature 1..20: note = chemically synthesized
  source 1..20: mol_type = other DNA
ctggcatctcgttatcccat

SEQ ID NO: 28683 - DNA, 20 bp, synthetic construct
  misc_feature 1..20: note = chemically synthesized
  source 1..20: mol_type = other DNA
gctgtttaatttactacata

SEQ ID NO: 28684 - DNA, 20 bp, synthetic construct
  misc_feature 1..20: note = chemically synthesized
  source 1..20: mol_type = other DNA
taatttactacatacagcac

SEQ ID NO: 28685 - DNA, 20 bp, synthetic construct
  misc_feature 1..20: note = chemically synthesized
  source 1..20: mol_type = other DNA
aatttactacatacagcacg

SEQ ID NO: 28686 - DNA, 20 bp, synthetic construct
  misc_feature 1..20: note = chemically synthesized
  source 1..20: mol_type = other DNA
tactacatacagcacgaggc

SEQ ID NO: 28687 - DNA, 20 bp, synthetic construct
  misc_feature 1..20: note = chemically synthesized
  source 1..20: mol_type = other DNA
acagcacgaggccagtgact

SEQ ID NO: 28688 - DNA, 20 bp, synthetic construct
  misc_feature 1..20: note = chemically synthesized
  source 1..20: mol_type = other DNA
gaggccagtgactcagcctt

SEQ ID NO: 28689 - DNA, 20 bp, synthetic construct
  misc_feature 1..20: note = chemically synthesized
  source 1..20: mol_type = other DNA
aggccagtgactcagccttt

SEQ ID NO: 28690 - DNA, 20 bp, synthetic construct
  misc_feature 1..20: note = chemically synthesized
  source 1..20: mol_type = other DNA
ggccagtgactcagccttta

SEQ ID NO: 28691 - DNA, 20 bp, synthetic construct
  misc_feature 1..20: note = chemically synthesized
  source 1..20: mol_type = other DNA
gccagtgactcagcctttag

SEQ ID NO: 28692 - DNA, 20 bp, synthetic construct
  misc_feature 1..20: note = chemically synthesized
  source 1..20: mol_type = other DNA
tgactcagcctttaggggaa

SEQ ID NO: 28693 - DNA, 20 bp, synthetic construct
  misc_feature 1..20: note = chemically synthesized
  source 1..20: mol_type = other DNA
gactcagcctttaggggaat

SEQ ID NO: 28694 - DNA, 20 bp, synthetic construct
  misc_feature 1..20: note = chemically synthesized
  source 1..20: mol_type = other DNA
actcagcctttaggggaatg

SEQ ID NO: 28695 - DNA, 20 bp, synthetic construct
  misc_feature 1..20: note = chemically synthesized
  source 1..20: mol_type = other DNA
ctttctctctctctatttcc

SEQ ID NO: 28696 - DNA, 20 bp, synthetic construct
  misc_feature 1..20: note = chemically synthesized
  source 1..20: mol_type = other DNA
ctatttcccagcgtcatcta

SEQ ID NO: 28697 - DNA, 20 bp, synthetic construct
  misc_feature 1..20: note = chemically synthesized
  source 1..20: mol_type = other DNA
cccagcgtcatctacggtca

SEQ ID NO: 28698 - DNA, 20 bp, synthetic construct
  misc_feature 1..20: note = chemically synthesized
  source 1..20: mol_type = other DNA
ccagcgtcatctacggtcat

SEQ ID NO: 28699 - DNA, 20 bp, synthetic construct
  misc_feature 1..20: note = chemically synthesized
  source 1..20: mol_type = other DNA
attaattcctcccttccaaa

SEQ ID NO: 28700 - DNA, 20 bp, synthetic construct
  misc_feature 1..20: note = chemically synthesized
  source 1..20: mol_type = other DNA
ttaattcctcccttccaaat

SEQ ID NO: 28701 - DNA, 20 bp, synthetic construct
  misc_feature 1..20: note = chemically synthesized
  source 1..20: mol_type = other DNA
ttcctcccttccaaatggga

SEQ ID NO: 28702 - DNA, 20 bp, synthetic construct
  misc_feature 1..20: note = chemically synthesized
  source 1..20: mol_type = other DNA
cctcccttccaaatgggaaa

SEQ ID NO: 28703 - DNA, 20 bp, synthetic construct
  misc_feature 1..20: note = chemically synthesized
  source 1..20: mol_type = other DNA
aaatgggaaagagaccaatc

SEQ ID NO: 28704 - DNA, 20 bp, synthetic construct
  misc_feature 1..20: note = chemically synthesized
  source 1..20: mol_type = other DNA
agagaccaatccagttcaca

SEQ ID NO: 28705 - DNA, 20 bp, synthetic construct
  misc_feature 1..20: note = chemically synthesized
  source 1..20: mol_type = other DNA
gagaccaatccagttcacac

SEQ ID NO: 28706 - DNA, 20 bp, synthetic construct
  misc_feature 1..20: note = chemically synthesized
  source 1..20: mol_type = other DNA
tcacacgggtcattgtactt

SEQ ID NO: 28707 - DNA, 20 bp, synthetic construct
  misc_feature 1..20: note = chemically synthesized
  source 1..20: mol_type = other DNA
tgtacttgagaacctaaact

SEQ ID NO: 28708 - DNA, 20 bp, synthetic construct
  misc_feature 1..20: note = chemically synthesized
  source 1..20: mol_type = other DNA
aacctaaacttggctgaaca

SEQ ID NO: 28709 - DNA, 20 bp, synthetic construct
  misc_feature 1..20: note = chemically synthesized
  source 1..20: mol_type = other DNA
cttggctgaacacagctcga

SEQ ID NO: 28710 - DNA, 20 bp, synthetic construct
  misc_feature 1..20: note = chemically synthesized
  source 1..20: mol_type = other DNA
atacgtttttcctttctgta

SEQ ID NO: 28711 - DNA, 20 bp, synthetic construct
  misc_feature 1..20: note = chemically synthesized
  source 1..20: mol_type = other DNA
cgtttttcctttctgtaaag

SEQ ID NO: 28712 - DNA, 20 bp, synthetic construct
  misc_feature 1..20: note = chemically synthesized
  source 1..20: mol_type = other DNA
aaagtggcaaaaactatttc

SEQ ID NO: 28713 - DNA, 20 bp, synthetic construct
  misc_feature 1..20: note = chemically synthesized
  source 1..20: mol_type = other DNA
aagtggcaaaaactatttca

SEQ ID NO: 28714 - DNA, 20 bp, synthetic construct
  misc_feature 1..20: note = chemically synthesized
  source 1..20: mol_type = other DNA
agtggcaaaaactatttcaa

SEQ ID NO: 28715 - DNA, 20 bp, synthetic construct
  misc_feature 1..20: note = chemically synthesized
  source 1..20: mol_type = other DNA
tggcaaaaactatttcaagg

SEQ ID NO: 28716 - DNA, 20 bp, synthetic construct
  misc_feature 1..20: note = chemically synthesized
  source 1..20: mol_type = other DNA
tttcaagggagcacgtgtat

SEQ ID NO: 28717 - DNA, 20 bp, synthetic construct
  misc_feature 1..20: note = chemically synthesized
  source 1..20: mol_type = other DNA
cacgtgtatcagatctttca

SEQ ID NO: 28718 - DNA, 20 bp, synthetic construct
  misc_feature 1..20: note = chemically synthesized
  source 1..20: mol_type = other DNA
acgtgtatcagatctttcat

SEQ ID NO: 28719 - DNA, 20 bp, synthetic construct
  misc_feature 1..20: note = chemically synthesized
  source 1..20: mol_type = other DNA
cgtgtatcagatctttcata

SEQ ID NO: 28720 - DNA, 20 bp, synthetic construct
  misc_feature 1..20: note = chemically synthesized
  source 1..20: mol_type = other DNA
tatcagatctttcataggga

SEQ ID NO: 28721 - DNA, 20 bp, synthetic construct
  misc_feature 1..20: note = chemically synthesized
  source 1..20: mol_type = other DNA
cagatctttcatagggatgg

SEQ ID NO: 28722 - DNA, 20 bp, synthetic construct
  misc_feature 1..20: note = chemically synthesized
  source 1..20: mol_type = other DNA
ctttcatagggatggtagaa

SEQ ID NO: 28723 - DNA, 20 bp, synthetic construct
  misc_feature 1..20: note = chemically synthesized
  source 1..20: mol_type = other DNA
tttcatagggatggtagaaa

SEQ ID NO: 28724 - DNA, 20 bp, synthetic construct
  misc_feature 1..20: note = chemically synthesized
  source 1..20: mol_type = other DNA
gatggtagaaaaggcaaatt

SEQ ID NO: 28725 - DNA, 20 bp, synthetic construct
  misc_feature 1..20: note = chemically synthesized
  source 1..20: mol_type = other DNA
gcaaattaagccatttcccc

SEQ ID NO: 28726 - DNA, 20 bp, synthetic construct
  misc_feature 1..20: note = chemically synthesized
  source 1..20: mol_type = other DNA
atttccccaagtatcctcta

SEQ ID NO: 28727 - DNA, 20 bp, synthetic construct
  misc_feature 1..20: note = chemically synthesized
  source 1..20: mol_type = other DNA
tccccaagtatcctctaaag

SEQ ID NO: 28728 - DNA, 20 bp, synthetic construct
  misc_feature 1..20: note = chemically synthesized
  source 1..20: mol_type = other DNA
ccccaagtatcctctaaagc

SEQ ID NO: 28729 - DNA, 20 bp, synthetic construct
  misc_feature 1..20: note = chemically synthesized
  source 1..20: mol_type = other DNA
ccaagtatcctctaaagcgg

SEQ ID NO: 28730 - DNA, 20 bp, synthetic construct
  misc_feature 1..20: note = chemically synthesized
  source 1..20: mol_type = other DNA
agcgggagcccctaaaccca

SEQ ID NO: 28731 - DNA, 20 bp, synthetic construct
  misc_feature 1..20: note = chemically synthesized
  source 1..20: mol_type = other DNA
gcgggagcccctaaacccat

SEQ ID NO: 28732 - DNA, 20 bp, synthetic construct
  misc_feature 1..20: note = chemically synthesized
  source 1..20: mol_type = other DNA
cgggagcccctaaacccata

SEQ ID NO: 28733 - DNA, 20 bp, synthetic construct
  misc_feature 1..20: note = chemically synthesized
  source 1..20: mol_type = other DNA
gggagcccctaaacccatag

SEQ ID NO: 28734 - DNA, 20 bp, synthetic construct
  misc_feature 1..20: note = chemically synthesized
  source 1..20: mol_type = other DNA
ggagcccctaaacccatagg

SEQ ID NO: 28735 - DNA, 20 bp, synthetic construct
  misc_feature 1..20: note = chemically synthesized
  source 1..20: mol_type = other DNA
gagcccctaaacccataggg

SEQ ID NO: 28736 - DNA, 20 bp, synthetic construct
  misc_feature 1..20: note = chemically synthesized
  source 1..20: mol_type = other DNA
aggggggctgtgcttttaaa

SEQ ID NO: 28737 - DNA, 20 bp, synthetic construct
  misc_feature 1..20: note = chemically synthesized
  source 1..20: mol_type = other DNA
cttttaaatagctgtgaacg

SEQ ID NO: 28738 - DNA, 20 bp, synthetic construct
  misc_feature 1..20: note = chemically synthesized
  source 1..20: mol_type = other DNA
ccatgatatactttgtctat

SEQ ID NO: 28739 - DNA, 20 bp, synthetic construct
  misc_feature 1..20: note = chemically synthesized
  source 1..20: mol_type = other DNA
gtctattagaatttgaatat

SEQ ID NO: 28740 - DNA, 20 bp, synthetic construct
  misc_feature 1..20: note = chemically synthesized
  source 1..20: mol_type = other DNA
tattagaatttgaatattgg

SEQ ID NO: 28741 - DNA, 20 bp, synthetic construct
  misc_feature 1..20: note = chemically synthesized
  source 1..20: mol_type = other DNA
tagaatttgaatattggtag

SEQ ID NO: 28742 - DNA, 20 bp, synthetic construct
  misc_feature 1..20: note = chemically synthesized
  source 1..20: mol_type = other DNA
agaatttgaatattggtagc

SEQ ID NO: 28743 - DNA, 20 bp, synthetic construct
  misc_feature 1..20: note = chemically synthesized
  source 1..20: mol_type = other DNA
tttgaatattggtagcaggt

SEQ ID NO: 28744 - DNA, 20 bp, synthetic construct
  misc_feature 1..20: note = chemically synthesized
  source 1..20: mol_type = other DNA
attggtagcaggttggacga

SEQ ID NO: 28745 - DNA, 20 bp, synthetic construct
  misc_feature 1..20: note = chemically synthesized
  source 1..20: mol_type = other DNA
ttggtagcaggttggacgaa

SEQ ID NO: 28746 - DNA, 20 bp, synthetic construct
  misc_feature 1..20: note = chemically synthesized
  source 1..20: mol_type = other DNA
tggtagcaggttggacgaaa

SEQ ID NO: 28747 - DNA, 20 bp, synthetic construct
  misc_feature 1..20: note = chemically synthesized
  source 1..20: mol_type = other DNA
gttggacgaaagggtttgat

SEQ ID NO: 28748 - DNA, 20 bp, synthetic construct
  misc_feature 1..20: note = chemically synthesized
  source 1..20: mol_type = other DNA
ttggacgaaagggtttgatt

SEQ ID NO: 28749 - DNA, 20 bp, synthetic construct
  misc_feature 1..20: note = chemically synthesized
  source 1..20: mol_type = other DNA
tggacgaaagggtttgattg

SEQ ID NO: 28750 - DNA, 20 bp, synthetic construct
  misc_feature 1..20: note = chemically synthesized
  source 1..20: mol_type = other DNA
aaagggtttgattggggtat

SEQ ID NO: 28751 - DNA, 20 bp, synthetic construct
  misc_feature 1..20: note = chemically synthesized
  source 1..20: mol_type = other DNA
tttgattggggtatcagcta

SEQ ID NO: 28752 - DNA, 20 bp, synthetic construct
  misc_feature 1..20: note = chemically synthesized
  source 1..20: mol_type = other DNA
ttgattggggtatcagctaa

SEQ ID NO: 28753 - DNA, 20 bp, synthetic construct
  misc_feature 1..20: note = chemically synthesized
  source 1..20: mol_type = other DNA
tgattggggtatcagctaaa

SEQ ID NO: 28754 - DNA, 20 bp, synthetic construct
  misc_feature 1..20: note = chemically synthesized
  source 1..20: mol_type = other DNA
gattggggtatcagctaaag

SEQ ID NO: 28755 - DNA, 20 bp, synthetic construct
  misc_feature 1..20: note = chemically synthesized
  source 1..20: mol_type = other DNA
agctaaaggggcctcgacga

SEQ ID NO: 28756 - DNA, 20 bp, synthetic construct
  misc_feature 1..20: note = chemically synthesized
  source 1..20: mol_type = other DNA
gggcctcgacgacagtgact

SEQ ID NO: 28757 - DNA, 20 bp, synthetic construct
  misc_feature 1..20: note = chemically synthesized
  source 1..20: mol_type = other DNA
cgacgacagtgacttagcgc

SEQ ID NO: 28758 - DNA, 20 bp, synthetic construct
  misc_feature 1..20: note = chemically synthesized
  source 1..20: mol_type = other DNA
acagtgacttagcgctggac

SEQ ID NO: 28759 - DNA, 20 bp, synthetic construct
  misc_feature 1..20: note = chemically synthesized
  source 1..20: mol_type = other DNA
cagtgacttagcgctggact

SEQ ID NO: 28760 - DNA, 20 bp, synthetic construct
  misc_feature 1..20: note = chemically synthesized
  source 1..20: mol_type = other DNA
acttagcgctggactgggaa

SEQ ID NO: 28761 - DNA, 20 bp, synthetic construct
  misc_feature 1..20: note = chemically synthesized
  source 1..20: mol_type = other DNA
cttagcgctggactgggaat

SEQ ID NO: 28762 - DNA, 20 bp, synthetic construct
  misc_feature 1..20: note = chemically synthesized
  source 1..20: mol_type = other DNA
ggactgggaatgggattccc

SEQ ID NO: 28763 - DNA, 20 bp, synthetic construct
  misc_feature 1..20: note = chemically synthesized
  source 1..20: mol_type = other DNA
gggattccccagaacccacc

SEQ ID NO: 28764 - DNA, 20 bp, synthetic construct
  misc_feature 1..20: note = chemically synthesized
  source 1..20: mol_type = other DNA
ccccagaacccacctggacg

SEQ ID NO: 28765 - DNA, 20 bp, synthetic construct
  misc_feature 1..20: note = chemically synthesized
  source 1..20: mol_type = other DNA
cctggacgcagcatgcccct

SEQ ID NO: 28766 - DNA, 20 bp, synthetic construct
  misc_feature 1..20: note = chemically synthesized
  source 1..20: mol_type = other DNA
acgcagcatgcccctcagcc

SEQ ID NO: 28767 - DNA, 20 bp, synthetic construct
  misc_feature 1..20: note = chemically synthesized
  source 1..20: mol_type = other DNA
cgcagcatgcccctcagccc

SEQ ID NO: 28768 - DNA, 20 bp, synthetic construct
  misc_feature 1..20: note = chemically synthesized
  source 1..20: mol_type = other DNA
caggtctccgctgctctgct

SEQ ID NO: 28769 - DNA, 20 bp, synthetic construct
  misc_feature 1..20: note = chemically synthesized
  source 1..20: mol_type = other DNA
aggtctccgctgctctgctc

SEQ ID NO: 28770 - DNA, 20 bp, synthetic construct
  misc_feature 1..20: note = chemically synthesized
  source 1..20: mol_type = other DNA
ggtctccgctgctctgctca

SEQ ID NO: 28771 - DNA, 20 bp, synthetic construct
  misc_feature 1..20: note = chemically synthesized
  source 1..20: mol_type = other DNA
gtctccgctgctctgctcag

SEQ ID NO: 28772 - DNA, 20 bp, synthetic construct
  misc_feature 1..20: note = chemically synthesized
  source 1..20: mol_type = other DNA
tccgctgctctgctcagggg

SEQ ID NO: 28773 - DNA, 20 bp, synthetic construct
  misc_feature 1..20: note = chemically synthesized
  source 1..20: mol_type = other DNA
ccgctgctctgctcaggggt

SEQ ID NO: 28774 - DNA, 20 bp, synthetic construct
  misc_feature 1..20: note = chemically synthesized
  source 1..20: mol_type = other DNA
tgctcaggggtgggatgcgt

SEQ ID NO: 28775 - DNA, 20 bp, synthetic construct
  misc_feature 1..20: note = chemically synthesized
  source 1..20: mol_type = other DNA
ctcaggggtgggatgcgtga

SEQ ID NO: 28776 - DNA, 20 bp, synthetic construct
  misc_feature 1..20: note = chemically synthesized
  source 1..20: mol_type = other DNA
aggggtgggatgcgtgagag

SEQ ID NO: 28777 - DNA, 20 bp, synthetic construct
  misc_feature 1..20: note = chemically synthesized
  source 1..20: mol_type = other DNA
tgggatgcgtgagagcagct

SEQ ID NO: 28778 - DNA, 20 bp, synthetic construct
  misc_feature 1..20: note = chemically synthesized
  source 1..20: mol_type = other DNA
gcgtgagagcagctgagatc

SEQ ID NO: 28779 - DNA, 20 bp, synthetic construct
  misc_feature 1..20: note = chemically synthesized
  source 1..20: mol_type = other DNA
agcagctgagatccagaccc

SEQ ID NO: 28780 - DNA, 20 bp, synthetic construct
  misc_feature 1..20: note = chemically synthesized
  source 1..20: mol_type = other DNA
gcagctgagatccagacccc

SEQ ID NO: 28781 - DNA, 20 bp, synthetic construct
  misc_feature 1..20: note = chemically synthesized
  source 1..20: mol_type = other DNA
tccagaccccgggcctcctg

SEQ ID NO: 28782 - DNA, 20 bp, synthetic construct
  misc_feature 1..20: note = chemically synthesized
  source 1..20: mol_type = other DNA
cccgggcctcctgcggcgcc

SEQ ID NO: 28783 - DNA, 20 bp, synthetic construct
  misc_feature 1..20: note = chemically synthesized
  source 1..20: mol_type = other DNA
ggcctcctgcggcgccaagt

SEQ ID NO: 28784 - DNA, 20 bp, synthetic construct
  misc_feature 1..20: note = chemically synthesized
  source 1..20: mol_type = other DNA
gcctcctgcggcgccaagtc

SEQ ID NO: 28785 - DNA, 20 bp, synthetic construct
  misc_feature 1..20: note = chemically synthesized
  source 1..20: mol_type = other DNA
cctcctgcggcgccaagtca

SEQ ID NO: 28786 - DNA, 20 bp, synthetic construct
  misc_feature 1..20: note = chemically synthesized
  source 1..20: mol_type = other DNA
ctcctgcggcgccaagtcag

SEQ ID NO: 28787 - DNA, 20 bp, synthetic construct
  misc_feature 1..20: note = chemically synthesized
  source 1..20: mol_type = other DNA
cctgcggcgccaagtcaggg

SEQ ID NO: 28788 - DNA, 20 bp, synthetic construct
  misc_feature 1..20: note = chemically synthesized
  source 1..20: mol_type = other DNA
tgcggcgccaagtcagggga

SEQ ID NO: 28789 - DNA, 20 bp, synthetic construct
  misc_feature 1..20: note = chemically synthesized
  source 1..20: mol_type = other DNA
gcggcgccaagtcaggggag

SEQ ID NO: 28790 - DNA, 20 bp, synthetic construct
  misc_feature 1..20: note = chemically synthesized
  source 1..20: mol_type = other DNA
ggcgccaagtcaggggagag

SEQ ID NO: 28791 - DNA, 20 bp, synthetic construct
  misc_feature 1..20: note = chemically synthesized
  source 1..20: mol_type = other DNA
gcgccaagtcaggggagagg

SEQ ID NO: 28792 - DNA, 20 bp, synthetic construct
  misc_feature 1..20: note = chemically synthesized
  source 1..20: mol_type = other DNA
agtcaggggagaggaggccc

SEQ ID NO: 28793 - DNA, 20 bp, synthetic construct
  misc_feature 1..20: note = chemically synthesized
  source 1..20: mol_type = other DNA
gtcaggggagaggaggcccc

SEQ ID NO: 28794 - DNA, 20 bp, synthetic construct
  misc_feature 1..20: note = chemically synthesized
  source 1..20: mol_type = other DNA
gaggccccaggcccctgctt

SEQ ID NO: 28795 - DNA, 20 bp, synthetic construct
  misc_feature 1..20: note = chemically synthesized
  source 1..20: mol_type = other DNA
aggccccaggcccctgcttc

SEQ ID NO: 28796 - DNA, 20 bp, synthetic construct
  misc_feature 1..20: note = chemically synthesized
  source 1..20: mol_type = other DNA
gcccctgcttcgggtcgcca

SEQ ID NO: 28797 - DNA, 20 bp, synthetic construct
  misc_feature 1..20: note = chemically synthesized
  source 1..20: mol_type = other DNA
cttcgggtcgccatggcaac

SEQ ID NO: 28798 - DNA, 20 bp, synthetic construct
  misc_feature 1..20: note = chemically synthesized
  source 1..20: mol_type = other DNA
ttcgggtcgccatggcaacg

SEQ ID NO: 28799 - DNA, 20 bp, synthetic construct
  misc_feature 1..20: note = chemically synthesized
  source 1..20: mol_type = other DNA
gtcgccatggcaacgaggcc

SEQ ID NO: 28800 - DNA, 20 bp, synthetic construct
  misc_feature 1..20: note = chemically synthesized
  source 1..20: mol_type = other DNA
caacgaggcctggaatgcca

SEQ ID NO: 28801 - DNA, 20 bp, synthetic construct
  misc_feature 1..20: note = chemically synthesized
  source 1..20: mol_type = other DNA
cgaggcctggaatgccacag

SEQ ID NO: 28802 - DNA, 20 bp, synthetic construct
  misc_feature 1..20: note = chemically synthesized
  source 1..20: mol_type = other DNA
ggcctggaatgccacagtgg

SEQ ID NO: 28803 - DNA, 20 bp, synthetic construct
  misc_feature 1..20: note = chemically synthesized
  source 1..20: mol_type = other DNA
acagtggtagccctcttcct

SEQ ID NO: 28804 - DNA, 20 bp, synthetic construct
  misc_feature 1..20: note = chemically synthesized
  source 1..20: mol_type = other DNA
gccctcttcctcggcacatc

SEQ ID NO: 28805 - DNA, 20 bp, synthetic construct
  misc_feature 1..20: note = chemically synthesized
  source 1..20: mol_type = other DNA
cctcggcacatccggactcc

SEQ ID NO: 28806 - DNA, 20 bp, synthetic construct
  misc_feature 1..20: note = chemically synthesized
  source 1..20: mol_type = other DNA
actcccagttctgctgcttc

SEQ ID NO: 28807 - DNA, 20 bp, synthetic construct
  misc_feature 1..20: note = chemically synthesized
  source 1..20: mol_type = other DNA
ctgcttcaagtcaatgtcca

SEQ ID NO: 28808 - DNA, 20 bp, synthetic construct
  misc_feature 1..20: note = chemically synthesized
  source 1..20: mol_type = other DNA
ttcaagtcaatgtccacagc

SEQ ID NO: 28809 - DNA, 20 bp, synthetic construct
  misc_feature 1..20: note = chemically synthesized
  source 1..20: mol_type = other DNA
tcaagtcaatgtccacagca

SEQ ID NO: 28810 - DNA, 20 bp, synthetic construct
  misc_feature 1..20: note = chemically synthesized
  source 1..20: mol_type = other DNA
caagtcaatgtccacagcaa

SEQ ID NO: 28811 - DNA, 20 bp, synthetic construct
  misc_feature 1..20: note = chemically synthesized
  source 1..20: mol_type = other DNA
agtcaatgtccacagcaagg

SEQ ID NO: 28812 - DNA, 20 bp, synthetic construct
  misc_feature 1..20: note = chemically synthesized
  source 1..20: mol_type = other DNA
gtcaatgtccacagcaaggg

SEQ ID NO: 28813 - DNA, 20 bp, synthetic construct
  misc_feature 1..20: note = chemically synthesized
  source 1..20: mol_type = other DNA
ccacagcaagggaggaaccc

SEQ ID NO: 28814 - DNA, 20 bp, synthetic construct
  misc_feature 1..20: note = chemically synthesized
  source 1..20: mol_type = other DNA
acagcaagggaggaaccccg

SEQ ID NO: 28815 - DNA, 20 bp, synthetic construct
  misc_feature 1..20: note = chemically synthesized
  source 1..20: mol_type = other DNA
cagcaagggaggaaccccgg

SEQ ID NO: 28816 - DNA, 20 bp, synthetic construct
  misc_feature 1..20: note = chemically synthesized
  source 1..20: mol_type = other DNA
ttgccttcccccttccaaaa

SEQ ID NO: 28817 - DNA, 20 bp, synthetic construct
  misc_feature 1..20: note = chemically synthesized
  source 1..20: mol_type = other DNA
ttcccccttccaaaaaagaa

SEQ ID NO: 28818 - DNA, 20 bp, synthetic construct
  misc_feature 1..20: note = chemically synthesized
  source 1..20: mol_type = other DNA
aaagaaaactgcatgtttga

SEQ ID NO: 28819 - DNA, 20 bp, synthetic construct
  misc_feature 1..20: note = chemically synthesized
  source 1..20: mol_type = other DNA
tgcatgtttgaaagaaacta

SEQ ID NO: 28820 - DNA, 20 bp, synthetic construct
  misc_feature 1..20: note = chemically synthesized
  source 1..20: mol_type = other DNA
gcatgtttgaaagaaactac

SEQ ID NO: 28821 - DNA, 20 bp, synthetic construct
  misc_feature 1..20: note = chemically synthesized
  source 1..20: mol_type = other DNA
tgtttgaaagaaactacagg

SEQ ID NO: 28822 - DNA, 20 bp, synthetic construct
  misc_feature 1..20: note = chemically synthesized
  source 1..20: mol_type = other DNA
aagaaactacaggcagtttt

SEQ ID NO: 28823 - DNA, 20 bp, synthetic construct
  misc_feature 1..20: note = chemically synthesized
  source 1..20: mol_type = other DNA
ggcagtttttggtgcaattt

SEQ ID NO: 28824 - DNA, 20 bp, synthetic construct
  misc_feature 1..20: note = chemically synthesized
  source 1..20: mol_type = other DNA
cagtttttggtgcaatttga

SEQ ID NO: 28825 - DNA, 20 bp, synthetic construct
  misc_feature 1..20: note = chemically synthesized
  source 1..20: mol_type = other DNA
caatttgagagcaactcttt

SEQ ID NO: 28826 - DNA, 20 bp, synthetic construct
  misc_feature 1..20: note = chemically synthesized
  source 1..20: mol_type = other DNA
aatttgagagcaactctttt

SEQ ID NO: 28827 - DNA, 20 bp, synthetic construct
  misc_feature 1..20: note = chemically synthesized
  source 1..20: mol_type = other DNA
agagcaactcttttgggttc

SEQ ID NO: 28828 - DNA, 20 bp, synthetic construct
  misc_feature 1..20: note = chemically synthesized
  source 1..20: mol_type = other DNA
ttgggttctggttttctctt

SEQ ID NO: 28829 - DNA, 20 bp, synthetic construct
  misc_feature 1..20: note = chemically synthesized
  source 1..20: mol_type = other DNA
gggttctggttttctcttca

SEQ ID NO: 28830 - DNA, 20 bp, synthetic construct
  misc_feature 1..20: note = chemically synthesized
  source 1..20: mol_type = other DNA
gttcgcctcttgtaaatcat

SEQ ID NO: 28831 - DNA, 20 bp, synthetic construct
  misc_feature 1..20: note = chemically synthesized
  source 1..20: mol_type = other DNA
tcgttgtgctgcttttacat

SEQ ID NO: 28832 - DNA, 20 bp, synthetic construct
  misc_feature 1..20: note = chemically synthesized
  source 1..20: mol_type = other DNA
tataattttattattatttt

SEQ ID NO: 28833 - DNA, 20 bp, synthetic construct
  misc_feature 1..20: note = chemically synthesized
  source 1..20: mol_type = other DNA
aattttattattattttgag

SEQ ID NO: 28834 - DNA, 20 bp, synthetic construct
  misc_feature 1..20: note = chemically synthesized
  source 1..20: mol_type = other DNA
attttattattattttgaga

SEQ ID NO: 28835 - DNA, 20 bp, synthetic construct
  misc_feature 1..20: note = chemically synthesized
  source 1..20: mol_type = other DNA
tctcccgctctcctcaacca

SEQ ID NO: 28836 - DNA, 20 bp, synthetic construct
  misc_feature 1..20: note = chemically synthesized
  source 1..20: mol_type = other DNA
ctcccgctctcctcaaccaa

SEQ ID NO: 28837 - DNA, 20 bp, synthetic construct
  misc_feature 1..20: note = chemically synthesized
  source 1..20: mol_type = other DNA
ccaaaggactgtttcttact

SEQ ID NO: 28838 - DNA, 20 bp, synthetic construct
  misc_feature 1..20: note = chemically synthesized
  source 1..20: mol_type = other DNA
tgtttcttactaagttttct

SEQ ID NO: 28839 - DNA, 20 bp, synthetic construct
  misc_feature 1..20: note = chemically synthesized
  source 1..20: mol_type = other DNA
tactaagttttctcagtcat

SEQ ID NO: 28840 - DNA, 20 bp, synthetic construct
  misc_feature 1..20: note = chemically synthesized
  source 1..20: mol_type = other DNA
actaagttttctcagtcata

SEQ ID NO: 28841 - DNA, 20 bp, synthetic construct
  misc_feature 1..20: note = chemically synthesized
  source 1..20: mol_type = other DNA
ctaagttttctcagtcataa

SEQ ID NO: 28842 - DNA, 20 bp, synthetic construct
  misc_feature 1..20: note = chemically synthesized
  source 1..20: mol_type = other DNA
gttttctcagtcataagggc

SEQ ID NO: 28843 - DNA, 20 bp, synthetic construct
  misc_feature 1..20: note = chemically synthesized
  source 1..20: mol_type = other DNA
taagggcaagtgtttccttc

SEQ ID NO: 28844 - DNA, 20 bp, synthetic construct
  misc_feature 1..20: note = chemically synthesized
  source 1..20: mol_type = other DNA
aagggcaagtgtttccttcc

SEQ ID NO: 28845 - DNA, 20 bp, synthetic construct
  misc_feature 1..20: note = chemically synthesized
  source 1..20: mol_type = other DNA
tttccttccaggtgtgtccc

SEQ ID NO: 28846 - DNA, 20 bp, synthetic construct
  misc_feature 1..20: note = chemically synthesized
  source 1..20: mol_type = other DNA
caggtgtgtcccgagtttat

SEQ ID NO: 28847 - DNA, 20 bp, synthetic construct
  misc_feature 1..20: note = chemically synthesized
  source 1..20: mol_type = other DNA
aggtgtgtcccgagtttatt

SEQ ID NO: 28848 - DNA, 20 bp, synthetic construct
  misc_feature 1..20: note = chemically synthesized
  source 1..20: mol_type = other DNA
tattaggactatcatacaat

SEQ ID NO: 28849 - DNA, 20 bp, synthetic construct
  misc_feature 1..20: note = chemically synthesized
  source 1..20: mol_type = other DNA
attaggactatcatacaatt

SEQ ID NO: 28850 - DNA, 20 bp, synthetic construct
  misc_feature 1..20: note = chemically synthesized
  source 1..20: mol_type = other DNA
aggactatcatacaattggg

SEQ ID NO: 28851 - DNA, 20 bp, synthetic construct
  misc_feature 1..20: note = chemically synthesized
  source 1..20: mol_type = other DNA
ggactatcatacaattgggc

SEQ ID NO: 28852 - DNA, 20 bp, synthetic construct
  misc_feature 1..20: note = chemically synthesized
  source 1..20: mol_type = other DNA
gactatcatacaattgggca

SEQ ID NO: 28853 - DNA, 20 bp, synthetic construct
  misc_feature 1..20: note = chemically synthesized
  source 1..20: mol_type = other DNA
actatcatacaattgggcag

SEQ ID NO: 28854 - DNA, 20 bp, synthetic construct
  misc_feature 1..20: note = chemically synthesized
  source 1..20: mol_type = other DNA
atcatacaattgggcagggg

SEQ ID NO: 28855 - DNA, 20 bp, synthetic construct
  misc_feature 1..20: note = chemically synthesized
  source 1..20: mol_type = other DNA
tcatacaattgggcaggggt

SEQ ID NO: 28856 - DNA, 20 bp, synthetic construct
  misc_feature 1..20: note = chemically synthesized
  source 1..20: mol_type = other DNA
catacaattgggcaggggtg

SEQ ID NO: 28857 - DNA, 20 bp, synthetic construct
  misc_feature 1..20: note = chemically synthesized
  source 1..20: mol_type = other DNA
atacaattgggcaggggtgg

SEQ ID NO: 28858 - DNA, 20 bp, synthetic construct
  misc_feature 1..20: note = chemically synthesized
  source 1..20: mol_type = other DNA
tacaattgggcaggggtggg

SEQ ID NO: 28859 - DNA, 20 bp, synthetic construct
  misc_feature 1..20: note = chemically synthesized
  source 1..20: mol_type = other DNA
tgggcaggggtggggggacc

SEQ ID NO: 28860 - DNA, 20 bp, synthetic construct
  misc_feature 1..20: note = chemically synthesized
  source 1..20: mol_type = other DNA
gggcaggggtggggggacct

SEQ ID NO: 28861 - DNA, 20 bp, synthetic construct
  misc_feature 1..20: note = chemically synthesized
  source 1..20: mol_type = other DNA
ggggggacctgggtcctcct

SEQ ID NO: 28862 - DNA, 20 bp, synthetic construct
  misc_feature 1..20: note = chemically synthesized
  source 1..20: mol_type = other DNA
gggggacctgggtcctcctt

SEQ ID NO: 28863 - DNA, 20 bp, synthetic construct
  misc_feature 1..20: note = chemically synthesized
  source 1..20: mol_type = other DNA
ggggacctgggtcctccttg

SEQ ID NO: 28864 - DNA, 20 bp, synthetic construct
  misc_feature 1..20: note = chemically synthesized
  source 1..20: mol_type = other DNA
gggacctgggtcctccttgg

SEQ ID NO: 28865 - DNA, 20 bp, synthetic construct
  misc_feature 1..20: note = chemically synthesized
  source 1..20: mol_type = other DNA
ggacctgggtcctccttggg

SEQ ID NO: 28866 - DNA, 20 bp, synthetic construct
  misc_feature 1..20: note = chemically synthesized
  source 1..20: mol_type = other DNA
ctgggtcctccttgggggga

SEQ ID NO: 28867 - DNA, 20 bp, synthetic construct
  misc_feature 1..20: note = chemically synthesized
  source 1..20: mol_type = other DNA
ggtcctccttggggggacgg

SEQ ID NO: 28868 - DNA, 20 bp, synthetic construct
  misc_feature 1..20: note = chemically synthesized
  source 1..20: mol_type = other DNA
gtcctccttggggggacgga

SEQ ID NO: 28869 - DNA, 20 bp, synthetic construct
  misc_feature 1..20: note = chemically synthesized
  source 1..20: mol_type = other DNA
tcctccttggggggacggaa

SEQ ID NO: 28870 - DNA, 20 bp, synthetic construct
  misc_feature 1..20: note = chemically synthesized
  source 1..20: mol_type = other DNA
ctccttggggggacggaagg

SEQ ID NO: 28871 - DNA, 20 bp, synthetic construct
  misc_feature 1..20: note = chemically synthesized
  source 1..20: mol_type = other DNA
tccttggggggacggaaggg

SEQ ID NO: 28872 - DNA, 20 bp, synthetic construct
  misc_feature 1..20: note = chemically synthesized
  source 1..20: mol_type = other DNA
ccttggggggacggaaggga

SEQ ID NO: 28873 - DNA, 20 bp, synthetic construct
  misc_feature 1..20: note = chemically synthesized
  source 1..20: mol_type = other DNA
ttggggggacggaagggagg

SEQ ID NO: 28874 - DNA, 20 bp, synthetic construct
  misc_feature 1..20: note = chemically synthesized
  source 1..20: mol_type = other DNA
tggggggacggaagggaggg

SEQ ID NO: 28875 - DNA, 20 bp, synthetic construct
  misc_feature 1..20: note = chemically synthesized
  source 1..20: mol_type = other DNA
ggacggaagggagggaggca

SEQ ID NO: 28876 - DNA, 20 bp, synthetic construct
  misc_feature 1..20: note = chemically synthesized
  source 1..20: mol_type = other DNA
gacggaagggagggaggcat

SEQ ID NO: 28877 - DNA, 20 bp, synthetic construct
  misc_feature 1..20: note = chemically synthesized
  source 1..20: mol_type = other DNA
ggaagggagggaggcatggg

SEQ ID NO: 28878 - DNA, 20 bp, synthetic construct
  misc_feature 1..20: note = chemically synthesized
  source 1..20: mol_type = other DNA
ggaggcatgggaagacgact

SEQ ID NO: 28879 - DNA, 20 bp, synthetic construct
  misc_feature 1..20: note = chemically synthesized
  source 1..20: mol_type = other DNA
aggcatgggaagacgactca

SEQ ID NO: 28880 - DNA, 20 bp, synthetic construct
  misc_feature 1..20: note = chemically synthesized
  source 1..20: mol_type = other DNA
ggcatgggaagacgactcag

SEQ ID NO: 28881 - DNA, 20 bp, synthetic construct
  misc_feature 1..20: note = chemically synthesized
  source 1..20: mol_type = other DNA
tgggaagacgactcagaggt

SEQ ID NO: 28882 - DNA, 20 bp, synthetic construct
  misc_feature 1..20: note = chemically synthesized
  source 1..20: mol_type = other DNA
ggaagacgactcagaggtca

SEQ ID NO: 28883 - DNA, 20 bp, synthetic construct
  misc_feature 1..20: note = chemically synthesized
  source 1..20: mol_type = other DNA
actcagaggtcagagatact

SEQ ID NO: 28884 - DNA, 20 bp, synthetic construct
  misc_feature 1..20: note = chemically synthesized
  source 1..20: mol_type = other DNA
ctcagaggtcagagatactt

SEQ ID NO: 28885 - DNA, 20 bp, synthetic construct
  misc_feature 1..20: note = chemically synthesized
  source 1..20: mol_type = other DNA
tcagaggtcagagatacttg

SEQ ID NO: 28886 - DNA, 20 bp, synthetic construct
  misc_feature 1..20: note = chemically synthesized
  source 1..20: mol_type = other DNA
agaggtcagagatacttggg

SEQ ID NO: 28887 - DNA, 20 bp, synthetic construct
  misc_feature 1..20: note = chemically synthesized
  source 1..20: mol_type = other DNA
gaggtcagagatacttgggg

SEQ ID NO: 28888 - DNA, 20 bp, synthetic construct
  misc_feature 1..20: note = chemically synthesized
  source 1..20: mol_type = other DNA
aggtcagagatacttgggga

SEQ ID NO: 28889 - DNA, 20 bp, synthetic construct
  misc_feature 1..20: note = chemically synthesized
  source 1..20: mol_type = other DNA
ggtcagagatacttggggag

SEQ ID NO: 28890 - DNA, 20 bp, synthetic construct
  misc_feature 1..20: note = chemically synthesized
  source 1..20: mol_type = other DNA
tcagagatacttggggaggg

SEQ ID NO: 28891 - DNA, 20 bp, synthetic construct
  misc_feature 1..20: note = chemically synthesized
  source 1..20: mol_type = other DNA
cagagatacttggggagggg

SEQ ID NO: 28892 - DNA, 20 bp, synthetic construct
  misc_feature 1..20: note = chemically synthesized
  source 1..20: mol_type = other DNA
atacttggggaggggaggct

SEQ ID NO: 28893 - DNA, 20 bp, synthetic construct
  misc_feature 1..20: note = chemically synthesized
  source 1..20: mol_type = other DNA
ctgagtttgaaatcatgctt

SEQ ID NO: 28894 - DNA, 20 bp, synthetic construct
  misc_feature 1..20: note = chemically synthesized
  source 1..20: mol_type = other DNA
tgaaatcatgcttaagatgc

SEQ ID NO: 28895 - DNA, 20 bp, synthetic construct
  misc_feature 1..20: note = chemically synthesized
  source 1..20: mol_type = other DNA
aatcatgcttaagatgccag

SEQ ID NO: 28896 - DNA, 20 bp, synthetic construct
  misc_feature 1..20: note = chemically synthesized
  source 1..20: mol_type = other DNA
gatgccagtggctcgacctg

SEQ ID NO: 28897 - DNA, 20 bp, synthetic construct
  misc_feature 1..20: note = chemically synthesized
  source 1..20: mol_type = other DNA
ccagtggctcgacctgtggt

SEQ ID NO: 28898 - DNA, 20 bp, synthetic construct
  misc_feature 1..20: note = chemically synthesized
  source 1..20: mol_type = other DNA
gctcgacctgtggttggttt

SEQ ID NO: 28899 - DNA, 20 bp, synthetic construct
  misc_feature 1..20: note = chemically synthesized
  source 1..20: mol_type = other DNA
tttaagttctaatttttaaa

SEQ ID NO: 28900 - DNA, 20 bp, synthetic construct
  misc_feature 1..20: note = chemically synthesized
  source 1..20: mol_type = other DNA
agttctaatttttaaaaagc

SEQ ID NO: 28901 - DNA, 20 bp, synthetic construct
  misc_feature 1..20: note = chemically synthesized
  source 1..20: mol_type = other DNA
ctaatttttaaaaagctagt

SEQ ID NO: 28902 - DNA, 20 bp, synthetic construct
  misc_feature 1..20: note = chemically synthesized
  source 1..20: mol_type = other DNA
aatttttaaaaagctagtta

SEQ ID NO: 28903 - DNA, 20 bp, synthetic construct
  misc_feature 1..20: note = chemically synthesized
  source 1..20: mol_type = other DNA
ttaaaaagctagttagagaa

SEQ ID NO: 28904 - DNA, 20 bp, synthetic construct
  misc_feature 1..20: note = chemically synthesized
  source 1..20: mol_type = other DNA
gttagagaacagaaaatcat

SEQ ID NO: 28905 - DNA, 20 bp, synthetic construct
  misc_feature 1..20: note = chemically synthesized
  source 1..20: mol_type = other DNA
ttagagaacagaaaatcatt

SEQ ID NO: 28906 - DNA, 20 bp, synthetic construct
  misc_feature 1..20: note = chemically synthesized
  source 1..20: mol_type = other DNA
gaacagaaaatcattgggcc

SEQ ID NO: 28907 - DNA, 20 bp, synthetic construct
  misc_feature 1..20: note = chemically synthesized
  source 1..20: mol_type = other DNA
ctctgtctccaacctctttc

SEQ ID NO: 28908 - DNA, 20 bp, synthetic construct
  misc_feature 1..20: note = chemically synthesized
  source 1..20: mol_type = other DNA
tctgtctccaacctctttct

SEQ ID NO: 28909 - DNA, 20 bp, synthetic construct
  misc_feature 1..20: note = chemically synthesized
  source 1..20: mol_type = other DNA
gttcttcacacacccccatt

SEQ ID NO: 28910 - DNA, 20 bp, synthetic construct
  misc_feature 1..20: note = chemically synthesized
  source 1..20: mol_type = other DNA
tcacacacccccattcggcg

SEQ ID NO: 28911 - DNA, 20 bp, synthetic construct
  misc_feature 1..20: note = chemically synthesized
  source 1..20: mol_type = other DNA
cccccattcggcgtagtacc

SEQ ID NO: 28912 - DNA, 20 bp, synthetic construct
  misc_feature 1..20: note = chemically synthesized
  source 1..20: mol_type = other DNA
cccattcggcgtagtaccca

SEQ ID NO: 28913 - DNA, 20 bp, synthetic construct
  misc_feature 1..20: note = chemically synthesized
  source 1..20: mol_type = other DNA
cattcggcgtagtacccaga

SEQ ID NO: 28914 - DNA, 20 bp, synthetic construct
  misc_feature 1..20: note = chemically synthesized
  source 1..20: mol_type = other DNA
gcgtagtacccagagagctc

SEQ ID NO: 28915 - DNA, 20 bp, synthetic construct
  misc_feature 1..20: note = chemically synthesized
  source 1..20: mol_type = other DNA
cccagagagctcaagatgtg

SEQ ID NO: 28916 - DNA, 20 bp, synthetic construct
  misc_feature 1..20: note = chemically synthesized
  source 1..20: mol_type = other DNA
agagagctcaagatgtgtgg

SEQ ID NO: 28917 - DNA, 20 bp, synthetic construct
  misc_feature 1..20: note = chemically synthesized
  source 1..20: mol_type = other DNA
tcaagatgtgtggcagtttt

SEQ ID NO: 28918 - DNA, 20 bp, synthetic construct
  misc_feature 1..20: note = chemically synthesized
  source 1..20: mol_type = other DNA
gatgtgtggcagttttcgga

SEQ ID NO: 28919 - DNA, 20 bp, synthetic construct
  misc_feature 1..20: note = chemically synthesized
  source 1..20: mol_type = other DNA
gtgtggcagttttcggatgg

SEQ ID NO: 28920 - DNA, 20 bp, synthetic construct
  misc_feature 1..20: note = chemically synthesized
  source 1..20: mol_type = other DNA
cagttttcggatggaagctc

SEQ ID NO: 28921 - DNA, 20 bp, synthetic construct
  misc_feature 1..20: note = chemically synthesized
  source 1..20: mol_type = other DNA
gttttcggatggaagctcga

SEQ ID NO: 28922 - DNA, 20 bp, synthetic construct
  misc_feature 1..20: note = chemically synthesized
  source 1..20: mol_type = other DNA
atggaagctcgagagccctt

SEQ ID NO: 28923 - DNA, 20 bp, synthetic construct
  misc_feature 1..20: note = chemically synthesized
  source 1..20: mol_type = other DNA
ctcgagagcccttaagttct

SEQ ID NO: 28924 - DNA, 20 bp, synthetic construct
  misc_feature 1..20: note = chemically synthesized
  source 1..20: mol_type = other DNA
ttaagttctgagaaaatttg

SEQ ID NO: 28925 - DNA, 20 bp, synthetic construct
  misc_feature 1..20: note = chemically synthesized
  source 1..20: mol_type = other DNA
ctgagaaaatttgaagcccc

SEQ ID NO: 28926 - DNA, 20 bp, synthetic construct
  misc_feature 1..20: note = chemically synthesized
  source 1..20: mol_type = other DNA
tgagaaaatttgaagccccc

SEQ ID NO: 28927 - DNA, 20 bp, synthetic construct
  misc_feature 1..20: note = chemically synthesized
  source 1..20: mol_type = other DNA
gagaaaatttgaagccccca

SEQ ID NO: 28928 - DNA, 20 bp, synthetic construct
  misc_feature 1..20: note = chemically synthesized
  source 1..20: mol_type = other DNA
agaaaatttgaagcccccag

SEQ ID NO: 28929 - DNA, 20 bp, synthetic construct
  misc_feature 1..20: note = chemically synthesized
  source 1..20: mol_type = other DNA
aaatttgaagcccccagggg

SEQ ID NO: 28930 - DNA, 20 bp, synthetic construct
  misc_feature 1..20: note = chemically synthesized
  source 1..20: mol_type = other DNA
aatttgaagcccccaggggt

SEQ ID NO: 28931 - DNA, 20 bp, synthetic construct
  misc_feature 1..20: note = chemically synthesized
  source 1..20: mol_type = other DNA
atttgaagcccccaggggtg

SEQ ID NO: 28932 - DNA, 20 bp, synthetic construct
  misc_feature 1..20: note = chemically synthesized
  source 1..20: mol_type = other DNA
tgaagcccccaggggtgggg

SEQ ID NO: 28933 - DNA, 20 bp, synthetic construct
  misc_feature 1..20: note = chemically synthesized
  source 1..20: mol_type = other DNA
tggggtggacgcgtgccgcc

SEQ ID NO: 28934 - DNA, 20 bp, synthetic construct
  misc_feature 1..20: note = chemically synthesized
  source 1..20: mol_type = other DNA
gcgtgccgcccagtcgacgt

SEQ ID NO: 28935 - DNA, 20 bp, synthetic construct
  misc_feature 1..20: note = chemically synthesized
  source 1..20: mol_type = other DNA
ccgcccagtcgacgtcagcg

SEQ ID NO: 28936 - DNA, 20 bp, synthetic construct
  misc_feature 1..20: note = chemically synthesized
  source 1..20: mol_type = other DNA
agcgtggtctgtcatcctgc

SEQ ID NO: 28937 - DNA, 20 bp, synthetic construct
  misc_feature 1..20: note = chemically synthesized
  source 1..20: mol_type = other DNA
tagtttgtgatgttttctga

SEQ ID NO: 28938 - DNA, 20 bp, synthetic construct
  misc_feature 1..20: note = chemically synthesized
  source 1..20: mol_type = other DNA
tttgtgatgttttctgacag

SEQ ID NO: 28939 - DNA, 20 bp, synthetic construct
  misc_feature 1..20: note = chemically synthesized
  source 1..20: mol_type = other DNA
gttttctgacagtagcctcc

SEQ ID NO: 28940 - DNA, 20 bp, synthetic construct
  misc_feature 1..20: note = chemically synthesized
  source 1..20: mol_type = other DNA
ttctgacagtagcctccaag

SEQ ID NO: 28941 - DNA, 20 bp, synthetic construct
  misc_feature 1..20: note = chemically synthesized
  source 1..20: mol_type = other DNA
ctccaagaagccgttgtgcg

SEQ ID NO: 28942 - DNA, 20 bp, synthetic construct
  misc_feature 1..20: note = chemically synthesized
  source 1..20: mol_type = other DNA
aagaagccgttgtgcgaaga

SEQ ID NO: 28943 - DNA, 20 bp, synthetic construct
  misc_feature 1..20: note = chemically synthesized
  source 1..20: mol_type = other DNA
gaagccgttgtgcgaagaca

SEQ ID NO: 28944 - DNA, 20 bp, synthetic construct
  misc_feature 1..20: note = chemically synthesized
  source 1..20: mol_type = other DNA
tgtgcgaagacagagtcctg

SEQ ID NO: 28945 - DNA, 20 bp, synthetic construct
  misc_feature 1..20: note = chemically synthesized
  source 1..20: mol_type = other DNA
tgcgaagacagagtcctgca

SEQ ID NO: 28946 - DNA, 20 bp, synthetic construct
  misc_feature 1..20: note = chemically synthesized
  source 1..20: mol_type = other DNA
agagtcctgcagagtccttc

SEQ ID NO: 28947 - DNA, 20 bp, synthetic construct
  misc_feature 1..20: note = chemically synthesized
  source 1..20: mol_type = other DNA
cctgcagagtccttccagcc

SEQ ID NO: 28948 - DNA, 20 bp, synthetic construct
  misc_feature 1..20: note = chemically synthesized
  source 1..20: mol_type = other DNA
ctgcagagtccttccagcct

SEQ ID NO: 28949 - DNA, 20 bp, synthetic construct
  misc_feature 1..20: note = chemically synthesized
  source 1..20: mol_type = other DNA
gtccttccagcctaggcctg

SEQ ID NO: 28950 - DNA, 20 bp, synthetic construct
  misc_feature 1..20: note = chemically synthesized
  source 1..20: mol_type = other DNA
tatttatattttttaataaa

SEQ ID NO: 28951 - DNA, 20 bp, synthetic construct
  misc_feature 1..20: note = chemically synthesized
  source 1..20: mol_type = other DNA
aaaaagtaaaaacaaaaaaa

SEQ ID NO: 28952 - DNA, 20 bp, synthetic construct
  misc_feature 1..20: note = chemically synthesized
  source 1..20: mol_type = other DNA
acaaaaaaacagacccacat

SEQ ID NO: 28953 - DNA, 20 bp, synthetic construct
  misc_feature 1..20: note = chemically synthesized
  source 1..20: mol_type = other DNA
aaaacagacccacattggaa

SEQ ID NO: 28954 - DNA, 20 bp, synthetic construct
  misc_feature 1..20: note = chemically synthesized
  source 1..20: mol_type = other DNA
cccacattggaacagtgaat

SEQ ID NO: 28955 - DNA, 20 bp, synthetic construct
  misc_feature 1..20: note = chemically synthesized
  source 1..20: mol_type = other DNA
ggaacagtgaatcagtccca

SEQ ID NO: 28956 - DNA, 20 bp, synthetic construct
  misc_feature 1..20: note = chemically synthesized
  source 1..20: mol_type = other DNA
aacagtgaatcagtcccata

SEQ ID NO: 28957 - DNA, 20 bp, synthetic construct
  misc_feature 1..20: note = chemically synthesized
  source 1..20: mol_type = other DNA
cagtgaatcagtcccataga

SEQ ID NO: 28958 - DNA, 20 bp, synthetic construct
  misc_feature 1..20: note = chemically synthesized
  source 1..20: mol_type = other DNA
agtgaatcagtcccatagag

SEQ ID NO: 28959 - DNA, 20 bp, synthetic construct
  misc_feature 1..20: note = chemically synthesized
  source 1..20: mol_type = other DNA
gtgaatcagtcccatagaga

SEQ ID NO: 28960 - DNA, 20 bp, synthetic construct
  misc_feature 1..20: note = chemically synthesized
  source 1..20: mol_type = other DNA
agtcccatagagagggcccg

SEQ ID NO: 28961 - DNA, 20 bp, synthetic construct
  misc_feature 1..20: note = chemically synthesized
  source 1..20: mol_type = other DNA
ccgtggaccatcgctgtcat

SEQ ID NO: 28962 - DNA, 20 bp, synthetic construct
  misc_feature 1..20: note = chemically synthesized
  source 1..20: mol_type = other DNA
cgctgtcatgagtgatgccc

SEQ ID NO: 28963 - DNA, 20 bp, synthetic construct
  misc_feature 1..20: note = chemically synthesized
  source 1..20: mol_type = other DNA
tgccctggcccttctgaaac

SEQ ID NO: 28964 - DNA, 20 bp, synthetic construct
  misc_feature 1..20: note = chemically synthesized
  source 1..20: mol_type = other DNA
caacctaattacctgtattg

SEQ ID NO: 28965 - DNA, 20 bp, synthetic construct
  misc_feature 1..20: note = chemically synthesized
  source 1..20: mol_type = other DNA
tgtattgtggaaatgcgcat

SEQ ID NO: 28966 - DNA, 20 bp, synthetic construct
  misc_feature 1..20: note = chemically synthesized
  source 1..20: mol_type = other DNA
attctatgttgtcttttaaa

SEQ ID NO: 28967 - DNA, 20 bp, synthetic construct
  misc_feature 1..20: note = chemically synthesized
  source 1..20: mol_type = other DNA
aacattgacacaataaatgt

SEQ ID NO: 28968 - DNA, 20 bp, synthetic construct
  misc_feature 1..20: note = chemically synthesized
  source 1..20: mol_type = other DNA
cattgacacaataaatgttg

SEQ ID NO: 28969 - DNA, 20 bp, synthetic construct
  misc_feature 1..20: note = chemically synthesized
  source 1..20: mol_type = other DNA
cacaataaatgttggagctt

SEQ ID NO: 28970 - DNA, 20 bp, synthetic construct
  misc_feature 1..20: note = chemically synthesized
  source 1..20: mol_type = other DNA
acaataaatgttggagcttt

SEQ ID NO: 28971 - DNA, 20 bp, synthetic construct
  misc_feature 1..20: note = chemically synthesized
  source 1..20: mol_type = other DNA
ataaatgttggagctttagg

SEQ ID NO: 28972 - DNA, 20 bp, synthetic construct
  misc_feature 1..20: note = chemically synthesized
  source 1..20: mol_type = other DNA
ctttaatttttaatgcttat

SEQ ID NO: 28973 - DNA, 20 bp, synthetic construct
  misc_feature 1..20: note = chemically synthesized
  source 1..20: mol_type = other DNA
tttaatgcttataagacaat

SEQ ID NO: 28974 - DNA, 20 bp, synthetic construct
  misc_feature 1..20: note = chemically synthesized
  source 1..20: mol_type = other DNA
ttaatgcttataagacaatg

SEQ ID NO: 28975 - DNA, 20 bp, synthetic construct
  misc_feature 1..20: note = chemically synthesized
  source 1..20: mol_type = other DNA
acttctgtacctgtttccta

SEQ ID NO: 28976 - DNA, 20 bp, synthetic construct
  misc_feature 1..20: note = chemically synthesized
  source 1..20: mol_type = other DNA
tgtttcctacagacacccat

SEQ ID NO: 28977 - DNA, 20 bp, synthetic construct
  misc_feature 1..20: note = chemically synthesized
  source 1..20: mol_type = other DNA
gtttcctacagacacccatc

SEQ ID NO: 28978 - DNA, 20 bp, synthetic construct
  misc_feature 1..20: note = chemically synthesized
  source 1..20: mol_type = other DNA
tcctacagacacccatcggg

SEQ ID NO: 28979 - DNA, 20 bp, synthetic construct
  misc_feature 1..20: note = chemically synthesized
  source 1..20: mol_type = other DNA
cctacagacacccatcgggt

SEQ ID NO: 28980 - DNA, 20 bp, synthetic construct
  misc_feature 1..20: note = chemically synthesized
  source 1..20: mol_type = other DNA
acagacacccatcgggtggg

SEQ ID NO: 28981 - DNA, 20 bp, synthetic construct
  misc_feature 1..20: note = chemically synthesized
  source 1..20: mol_type = other DNA
cagacacccatcgggtgggt

SEQ ID NO: 28982 - DNA, 20 bp, synthetic construct
  misc_feature 1..20: note = chemically synthesized
  source 1..20: mol_type = other DNA
gacacccatcgggtgggtag

SEQ ID NO: 28983 - DNA, 20 bp, synthetic construct
  misc_feature 1..20: note = chemically synthesized
  source 1..20: mol_type = other DNA
acacccatcgggtgggtagg

SEQ ID NO: 28984 - DNA, 20 bp, synthetic construct
  misc_feature 1..20: note = chemically synthesized
  source 1..20: mol_type = other DNA
catcgggtgggtaggaggaa

SEQ ID NO: 28985 - DNA, 20 bp, synthetic construct
  misc_feature 1..20: note = chemically synthesized
  source 1..20: mol_type = other DNA
tgggtaggaggaacagattt

SEQ ID NO: 28986 - DNA, 20 bp, synthetic construct
  misc_feature 1..20: note = chemically synthesized
  source 1..20: mol_type = other DNA
ggaggaacagatttgagaaa

SEQ ID NO: 28987 - DNA, 20 bp, synthetic construct
  misc_feature 1..20: note = chemically synthesized
  source 1..20: mol_type = other DNA
gaggaacagatttgagaaat

SEQ ID NO: 28988 - DNA, 20 bp, synthetic construct
  misc_feature 1..20: note = chemically synthesized
  source 1..20: mol_type = other DNA
gaacagatttgagaaatggg

SEQ ID NO: 28989 - DNA, 20 bp, synthetic construct
  misc_feature 1..20: note = chemically synthesized
  source 1..20: mol_type = other DNA
aacagatttgagaaatgggc

SEQ ID NO: 28990 - DNA, 20 bp, synthetic construct
  misc_feature 1..20: note = chemically synthesized
  source 1..20: mol_type = other DNA
cagatttgagaaatgggcag

SEQ ID NO: 28991 - DNA, 20 bp, synthetic construct
  misc_feature 1..20: note = chemically synthesized
  source 1..20: mol_type = other DNA
tgagaaatgggcaggagatg

SEQ ID NO: 28992 - DNA, 20 bp, synthetic construct
  misc_feature 1..20: note = chemically synthesized
  source 1..20: mol_type = other DNA
gagaaatgggcaggagatgt

SEQ ID NO: 28993 - DNA, 20 bp, synthetic construct
  misc_feature 1..20: note = chemically synthesized
  source 1..20: mol_type = other DNA
gaaatgggcaggagatgtag

SEQ ID NO: 28994 - DNA, 20 bp, synthetic construct
  misc_feature 1..20: note = chemically synthesized
  source 1..20: mol_type = other DNA
aaatgggcaggagatgtagg

SEQ ID NO: 28995 - DNA, 20 bp, synthetic construct
  misc_feature 1..20: note = chemically synthesized
  source 1..20: mol_type = other DNA
aatgggcaggagatgtagga

SEQ ID NO: 28996 - DNA, 20 bp, synthetic construct
  misc_feature 1..20: note = chemically synthesized
  source 1..20: mol_type = other DNA
atgggcaggagatgtaggag

SEQ ID NO: 28997 - DNA, 20 bp, synthetic construct
  misc_feature 1..20: note = chemically synthesized
  source 1..20: mol_type = other DNA
aggagatgtaggaggggaac

SEQ ID NO: 28998 - DNA, 20 bp, synthetic construct
  misc_feature 1..20: note = chemically synthesized
  source 1..20: mol_type = other DNA
ggagatgtaggaggggaact

SEQ ID NO: 28999 - DNA, 20 bp, synthetic construct
  misc_feature 1..20: note = chemically synthesized
  source 1..20: mol_type = other DNA
ggaactaggttaccgcttat

SEQ ID NO: 29000 - DNA, 20 bp, synthetic construct
  misc_feature 1..20: note = chemically synthesized
  source 1..20: mol_type = other DNA
ctaggttaccgcttatcaga

SEQ ID NO: 29001 - DNA, 20 bp, synthetic construct
  misc_feature 1..20: note = chemically synthesized
  source 1..20: mol_type = other DNA
atcagatggcataaattttc

SEQ ID NO: 29002 - DNA, 20 bp, synthetic construct
  misc_feature 1..20: note = chemically synthesized
  source 1..20: mol_type = other DNA
tcagatggcataaattttca

SEQ ID NO: 29003 - DNA, 20 bp, synthetic construct
  misc_feature 1..20: note = chemically synthesized
  source 1..20: mol_type = other DNA
agatggcataaattttcaag

SEQ ID NO: 29004 - DNA, 20 bp, synthetic construct
  misc_feature 1..20: note = chemically synthesized
  source 1..20: mol_type = other DNA
gagaatcaaaatgcaaaact

SEQ ID NO: 29005 - DNA, 20 bp, synthetic construct
  misc_feature 1..20: note = chemically synthesized
  source 1..20: mol_type = other DNA
agaatcaaaatgcaaaactt

SEQ ID NO: 29006 - DNA, 20 bp, synthetic construct
  misc_feature 1..20: note = chemically synthesized
  source 1..20: mol_type = other DNA
caaaacttgggaataaatca

SEQ ID NO: 29007 - DNA, 20 bp, synthetic construct
  misc_feature 1..20: note = chemically synthesized
  source 1..20: mol_type = other DNA
tagcaatatcataattaatg

SEQ ID NO: 29008 - DNA, 20 bp, synthetic construct
  misc_feature 1..20: note = chemically synthesized
  source 1..20: mol_type = other DNA
caatatcataattaatgtag

SEQ ID NO: 29009 - DNA, 20 bp, synthetic construct
  misc_feature 1..20: note = chemically synthesized
  source 1..20: mol_type = other DNA
attgctgtttattaatgctg

SEQ ID NO: 29010 - DNA, 20 bp, synthetic construct
  misc_feature 1..20: note = chemically synthesized
  source 1..20: mol_type = other DNA
tgtttattaatgctgaagtg

SEQ ID NO: 29011 - DNA, 20 bp, synthetic construct
  misc_feature 1..20: note = chemically synthesized
  source 1..20: mol_type = other DNA
ccattaaataatgcataata

SEQ ID NO: 29012 - DNA, 20 bp, synthetic construct
  misc_feature 1..20: note = chemically synthesized
  source 1..20: mol_type = other DNA
gtttttcaaatatatgcttt

SEQ ID NO: 29013 - DNA, 20 bp, synthetic construct
  misc_feature 1..20: note = chemically synthesized
  source 1..20: mol_type = other DNA
tttcaaatatatgcttttgg

SEQ ID NO: 29014 - DNA, 20 bp, synthetic construct
  misc_feature 1..20: note = chemically synthesized
  source 1..20: mol_type = other DNA
tgcttttggtggctaccatg

SEQ ID NO: 29015 - DNA, 20 bp, synthetic construct
  misc_feature 1..20: note = chemically synthesized
  source 1..20: mol_type = other DNA
gcttttggtggctaccatgc

SEQ ID NO: 29016 - DNA, 20 bp, synthetic construct
  misc_feature 1..20: note = chemically synthesized
  source 1..20: mol_type = other DNA
tttgaatttgtcttttaatt

SEQ ID NO: 29017 - DNA, 20 bp, synthetic construct
  misc_feature 1..20: note = chemically synthesized
  source 1..20: mol_type = other DNA
atttgtcttttaatttagct

SEQ ID NO: 29018 - DNA, 20 bp, synthetic construct
  misc_feature 1..20: note = chemically synthesized
  source 1..20: mol_type = other DNA
tttgtcttttaatttagctt

SEQ ID NO: 29019 - DNA, 20 bp, synthetic construct
  misc_feature 1..20: note = chemically synthesized
  source 1..20: mol_type = other DNA
tcttttaatttagcttagga

SEQ ID NO: 29020 - DNA, 20 bp, synthetic construct
  misc_feature 1..20: note = chemically synthesized
  source 1..20: mol_type = other DNA
agcttaggaaagaacatcac

SEQ ID NO: 29021 - DNA, 20 bp, synthetic construct
  misc_feature 1..20: note = chemically synthesized
  source 1..20: mol_type = other DNA
gcttaggaaagaacatcact

SEQ ID NO: 29022 - DNA, 20 bp, synthetic construct
  misc_feature 1..20: note = chemically synthesized
  source 1..20: mol_type = other DNA
aggaaagaacatcactgggc

SEQ ID NO: 29023 - DNA, 20 bp, synthetic construct
  misc_feature 1..20: note = chemically synthesized
  source 1..20: mol_type = other DNA
aaagaacatcactgggcgag

SEQ ID NO: 29024 - DNA, 20 bp, synthetic construct
  misc_feature 1..20: note = chemically synthesized
  source 1..20: mol_type = other DNA
tgggcgagcggtaaatccta

SEQ ID NO: 29025 - DNA, 20 bp, synthetic construct
  misc_feature 1..20: note = chemically synthesized
  source 1..20: mol_type = other DNA
gcgagcggtaaatcctaaag

SEQ ID NO: 29026 - DNA, 20 bp, synthetic construct
  misc_feature 1..20: note = chemically synthesized
  source 1..20: mol_type = other DNA
cgagcggtaaatcctaaaga

SEQ ID NO: 29027 - DNA, 20 bp, synthetic construct
  misc_feature 1..20: note = chemically synthesized
  source 1..20: mol_type = other DNA
ctaaagaaggtgataaatgt

SEQ ID NO: 29028 - DNA, 20 bp, synthetic construct
  misc_feature 1..20: note = chemically synthesized
  source 1..20: mol_type = other DNA
aagaaggtgataaatgtcag

SEQ ID NO: 29029 - DNA, 20 bp, synthetic construct
  misc_feature 1..20: note = chemically synthesized
  source 1..20: mol_type = other DNA
cttattaaatattctaattt

SEQ ID NO: 29030 - DNA, 20 bp, synthetic construct
  misc_feature 1..20: note = chemically synthesized
  source 1..20: mol_type = other DNA
ttattaaatattctaatttt

SEQ ID NO: 29031 - DNA, 20 bp, synthetic construct
  misc_feature 1..20: note = chemically synthesized
  source 1..20: mol_type = other DNA
attttaggttcccaaacctt

SEQ ID NO: 29032 - DNA, 20 bp, synthetic construct
  misc_feature 1..20: note = chemically synthesized
  source 1..20: mol_type = other DNA
ttttaggttcccaaaccttc

SEQ ID NO: 29033 - DNA, 20 bp, synthetic construct
  misc_feature 1..20: note = chemically synthesized
  source 1..20: mol_type = other DNA
tcaggaaatatatcttaatg

SEQ ID NO: 29034 - DNA, 20 bp, synthetic construct
  misc_feature 1..20: note = chemically synthesized
  source 1..20: mol_type = other DNA
aaacaaacataaaacttctt

SEQ ID NO: 29035 - DNA, 20 bp, synthetic construct
  misc_feature 1..20: note = chemically synthesized
  source 1..20: mol_type = other DNA
aacttctttagtacttacat

SEQ ID NO: 29036 - DNA, 20 bp, synthetic construct
  misc_feature 1..20: note = chemically synthesized
  source 1..20: mol_type = other DNA
acttctttagtacttacatc

SEQ ID NO: 29037 - DNA, 20 bp, synthetic construct
  misc_feature 1..20: note = chemically synthesized
  source 1..20: mol_type = other DNA
agtacttacatcaggaaatt

SEQ ID NO: 29038 - DNA, 20 bp, synthetic construct
  misc_feature 1..20: note = chemically synthesized
  source 1..20: mol_type = other DNA
gtacttacatcaggaaattt

SEQ ID NO: 29039 - DNA, 20 bp, synthetic construct
  misc_feature 1..20: note = chemically synthesized
  source 1..20: mol_type = other DNA
tacttacatcaggaaatttg

SEQ ID NO: 29040 - DNA, 20 bp, synthetic construct
  misc_feature 1..20: note = chemically synthesized
  source 1..20: mol_type = other DNA
ttacatcaggaaatttgggg

SEQ ID NO: 29041 - DNA, 20 bp, synthetic construct
  misc_feature 1..20: note = chemically synthesized
  source 1..20: mol_type = other DNA
aggaaatttggggcagattt

SEQ ID NO: 29042 - DNA, 20 bp, synthetic construct
  misc_feature 1..20: note = chemically synthesized
  source 1..20: mol_type = other DNA
gaaatttggggcagatttta

SEQ ID NO: 29043 - DNA, 20 bp, synthetic construct
  misc_feature 1..20: note = chemically synthesized
  source 1..20: mol_type = other DNA
aaatttggggcagattttag

SEQ ID NO: 29044 - DNA, 20 bp, synthetic construct
  misc_feature 1..20: note = chemically synthesized
  source 1..20: mol_type = other DNA
aatttggggcagattttaga

SEQ ID NO: 29045 - DNA, 20 bp, synthetic construct
  misc_feature 1..20: note = chemically synthesized
  source 1..20: mol_type = other DNA
atttggggcagattttagag

SEQ ID NO: 29046 - DNA, 20 bp, synthetic construct
  misc_feature 1..20: note = chemically synthesized
  source 1..20: mol_type = other DNA
tttggggcagattttagagg

SEQ ID NO: 29047 - DNA, 20 bp, synthetic construct
  misc_feature 1..20: note = chemically synthesized
  source 1..20: mol_type = other DNA
ttggggcagattttagaggg

SEQ ID NO: 29048 - DNA, 20 bp, synthetic construct
  misc_feature 1..20: note = chemically synthesized
  source 1..20: mol_type = other DNA
attttagaggggggaaatta

SEQ ID NO: 29049 - DNA, 20 bp, synthetic construct
  misc_feature 1..20: note = chemically synthesized
  source 1..20: mol_type = other DNA
ttttagaggggggaaattat

SEQ ID NO: 29050 - DNA, 20 bp, synthetic construct
  misc_feature 1..20: note = chemically synthesized
  source 1..20: mol_type = other DNA
ttagaggggggaaattatag

SEQ ID NO: 29051 - DNA, 20 bp, synthetic construct
  misc_feature 1..20: note = chemically synthesized
  source 1..20: mol_type = other DNA
tagaggggggaaattatagg

SEQ ID NO: 29052 - DNA, 20 bp, synthetic construct
  misc_feature 1..20: note = chemically synthesized
  source 1..20: mol_type = other DNA
ggggggaaattataggagga

SEQ ID NO: 29053 - DNA, 20 bp, synthetic construct
  misc_feature 1..20: note = chemically synthesized
  source 1..20: mol_type = other DNA
gggaaattataggaggaaag

SEQ ID NO: 29054 - DNA, 20 bp, synthetic construct
  misc_feature 1..20: note = chemically synthesized
  source 1..20: mol_type = other DNA
aggaggaaagaagttcacat

SEQ ID NO: 29055 - DNA, 20 bp, synthetic construct
  misc_feature 1..20: note = chemically synthesized
  source 1..20: mol_type = other DNA
gaaagaagttcacatcagaa

SEQ ID NO: 29056 - DNA, 20 bp, synthetic construct
  misc_feature 1..20: note = chemically synthesized
  source 1..20: mol_type = other DNA
cacatcagaacagacaatca

SEQ ID NO: 29057 - DNA, 20 bp, synthetic construct
  misc_feature 1..20: note = chemically synthesized
  source 1..20: mol_type = other DNA
cacagcaatgctctattcct

SEQ ID NO: 29058 - DNA, 20 bp, synthetic construct
  misc_feature 1..20: note = chemically synthesized
  source 1..20: mol_type = other DNA
atgctctattccttagaaat

SEQ ID NO: 29059 - DNA, 20 bp, synthetic construct
  misc_feature 1..20: note = chemically synthesized
  source 1..20: mol_type = other DNA
tagaaattagtgccacaaat

SEQ ID NO: 29060 - DNA, 20 bp, synthetic construct
  misc_feature 1..20: note = chemically synthesized
  source 1..20: mol_type = other DNA
aaataagttacatctacaaa

SEQ ID NO: 29061 - DNA, 20 bp, synthetic construct
  misc_feature 1..20: note = chemically synthesized
  source 1..20: mol_type = other DNA
aataagttacatctacaaac

SEQ ID NO: 29062 - DNA, 20 bp, synthetic construct
  misc_feature 1..20: note = chemically synthesized
  source 1..20: mol_type = other DNA
aagttacatctacaaacagg

SEQ ID NO: 29063 - DNA, 20 bp, synthetic construct
  misc_feature 1..20: note = chemically synthesized
  source 1..20: mol_type = other DNA
caggtggtaaaaattctttc

SEQ ID NO: 29064 - DNA, 20 bp, synthetic construct
  misc_feature 1..20: note = chemically synthesized
  source 1..20: mol_type = other DNA
ggtaaaaattctttctggcc

SEQ ID NO: 29065 - DNA, 20 bp, synthetic construct
  misc_feature 1..20: note = chemically synthesized
  source 1..20: mol_type = other DNA
tctggcccagttaatttgca

SEQ ID NO: 29066 - DNA, 20 bp, synthetic construct
  misc_feature 1..20: note = chemically synthesized
  source 1..20: mol_type = other DNA
aatttgcacagaacttttct

SEQ ID NO: 29067 - DNA, 20 bp, synthetic construct
  misc_feature 1..20: note = chemically synthesized
  source 1..20: mol_type = other DNA
gcacagaacttttctcagtt

SEQ ID NO: 29068 - DNA, 20 bp, synthetic construct
  misc_feature 1..20: note = chemically synthesized
  source 1..20: mol_type = other DNA
gtttggtattttttactgct

SEQ ID NO: 29069 - DNA, 20 bp, synthetic construct
  misc_feature 1..20: note = chemically synthesized
  source 1..20: mol_type = other DNA
ttggtattttttactgcttg

SEQ ID NO: 29070 - DNA, 20 bp, synthetic construct
  misc_feature 1..20: note = chemically synthesized
  source 1..20: mol_type = other DNA
ttttttactgcttggagatc

SEQ ID NO: 29071 - DNA, 20 bp, synthetic construct
  misc_feature 1..20: note = chemically synthesized
  source 1..20: mol_type = other DNA
tttactgcttggagatccag

SEQ ID NO: 29072 - DNA, 20 bp, synthetic construct
  misc_feature 1..20: note = chemically synthesized
  source 1..20: mol_type = other DNA
tactgcttggagatccagaa

SEQ ID NO: 29073 - DNA, 20 bp, synthetic construct
  misc_feature 1..20: note = chemically synthesized
  source 1..20: mol_type = other DNA
ttggagatccagaagagaat

SEQ ID NO: 29074 - DNA, 20 bp, synthetic construct
  misc_feature 1..20: note = chemically synthesized
  source 1..20: mol_type = other DNA
gaagagaattagaaacaaca

SEQ ID NO: 29075 - DNA, 20 bp, synthetic construct
  misc_feature 1..20: note = chemically synthesized
  source 1..20: mol_type = other DNA
aacaacatagcaaattaaaa

SEQ ID NO: 29076 - DNA, 20 bp, synthetic construct
  misc_feature 1..20: note = chemically synthesized
  source 1..20: mol_type = other DNA
acaacatagcaaattaaaat

SEQ ID NO: 29077 - DNA, 20 bp, synthetic construct
  misc_feature 1..20: note = chemically synthesized
  source 1..20: mol_type = other DNA
taaaataggtttgtcaataa

SEQ ID NO: 29078 - DNA, 20 bp, synthetic construct
  misc_feature 1..20: note = chemically synthesized
  source 1..20: mol_type = other DNA
aaataggtttgtcaataata

SEQ ID NO: 29079 - DNA, 20 bp, synthetic construct
  misc_feature 1..20: note = chemically synthesized
  source 1..20: mol_type = other DNA
ggtttgtcaataatagagct

SEQ ID NO: 29080 - DNA, 20 bp, synthetic construct
  misc_feature 1..20: note = chemically synthesized
  source 1..20: mol_type = other DNA
gctcagacacctgtgtgctg

SEQ ID NO: 29081 - DNA, 20 bp, synthetic construct
  misc_feature 1..20: note = chemically synthesized
  source 1..20: mol_type = other DNA
gtgtgctgtagattcacata

SEQ ID NO: 29082 - DNA, 20 bp, synthetic construct
  misc_feature 1..20: note = chemically synthesized
  source 1..20: mol_type = other DNA
tgtgctgtagattcacatac

SEQ ID NO: 29083 - DNA, 20 bp, synthetic construct
  misc_feature 1..20: note = chemically synthesized
  source 1..20: mol_type = other DNA
cacatacaggccgtgaacct

SEQ ID NO: 29084 - DNA, 20 bp, synthetic construct
  misc_feature 1..20: note = chemically synthesized
  source 1..20: mol_type = other DNA
atacaggccgtgaacctaag

SEQ ID NO: 29085 - DNA, 20 bp, synthetic construct
  misc_feature 1..20: note = chemically synthesized
  source 1..20: mol_type = other DNA
tacaggccgtgaacctaagt

SEQ ID NO: 29086 - DNA, 20 bp, synthetic construct
  misc_feature 1..20: note = chemically synthesized
  source 1..20: mol_type = other DNA
acaggccgtgaacctaagtg

SEQ ID NO: 29087 - DNA, 20 bp, synthetic construct
  misc_feature 1..20: note = chemically synthesized
  source 1..20: mol_type = other DNA
aatcctacctatccaccttc

SEQ ID NO: 29088 - DNA, 20 bp, synthetic construct
  misc_feature 1..20: note = chemically synthesized
  source 1..20: mol_type = other DNA
ctacctatccaccttctggc

SEQ ID NO: 29089 - DNA, 20 bp, synthetic construct
  misc_feature 1..20: note = chemically synthesized
  source 1..20: mol_type = other DNA
caccttctggctagattacc

SEQ ID NO: 29090 - DNA, 20 bp, synthetic construct
  misc_feature 1..20: note = chemically synthesized
  source 1..20: mol_type = other DNA
tctggctagattacctagct

SEQ ID NO: 29091 - DNA, 20 bp, synthetic construct
  misc_feature 1..20: note = chemically synthesized
  source 1..20: mol_type = other DNA
agattacctagcttagtgaa

SEQ ID NO: 29092 - DNA, 20 bp, synthetic construct
  misc_feature 1..20: note = chemically synthesized
  source 1..20: mol_type = other DNA
tacctagcttagtgaaaaga

SEQ ID NO: 29093 - DNA, 20 bp, synthetic construct
  misc_feature 1..20: note = chemically synthesized
  source 1..20: mol_type = other DNA
tgaaaagatagccaaataat

SEQ ID NO: 29094 - DNA, 20 bp, synthetic construct
  misc_feature 1..20: note = chemically synthesized
  source 1..20: mol_type = other DNA
taataaataatgactgtcta

SEQ ID NO: 29095 - DNA, 20 bp, synthetic construct
  misc_feature 1..20: note = chemically synthesized
  source 1..20: mol_type = other DNA
taaataatgactgtctacag

SEQ ID NO: 29096 - DNA, 20 bp, synthetic construct
  misc_feature 1..20: note = chemically synthesized
  source 1..20: mol_type = other DNA
gaactaccttatactgtata

SEQ ID NO: 29097 - DNA, 20 bp, synthetic construct
  misc_feature 1..20: note = chemically synthesized
  source 1..20: mol_type = other DNA
gcattatttcacctgctctc

SEQ ID NO: 29098 - DNA, 20 bp, synthetic construct
  misc_feature 1..20: note = chemically synthesized
  source 1..20: mol_type = other DNA
cattatttcacctgctctct

SEQ ID NO: 29099 - DNA, 20 bp, synthetic construct
  misc_feature 1..20: note = chemically synthesized
  source 1..20: mol_type = other DNA
atttcacctgctctctggga

SEQ ID NO: 29100 - DNA, 20 bp, synthetic construct
  misc_feature 1..20: note = chemically synthesized
  source 1..20: mol_type = other DNA
atctcacgacttctacttta

SEQ ID NO: 29101 - DNA, 20 bp, synthetic construct
  misc_feature 1..20: note = chemically synthesized
  source 1..20: mol_type = other DNA
ctcacgacttctactttatg

SEQ ID NO: 29102 - DNA, 20 bp, synthetic construct
  misc_feature 1..20: note = chemically synthesized
  source 1..20: mol_type = other DNA
tcacgacttctactttatgg

SEQ ID NO: 29103 - DNA, 20 bp, synthetic construct
  misc_feature 1..20: note = chemically synthesized
  source 1..20: mol_type = other DNA
cgacttctactttatggagg

SEQ ID NO: 29104 - DNA, 20 bp, synthetic construct
  misc_feature 1..20: note = chemically synthesized
  source 1..20: mol_type = other DNA
acttctactttatggaggtg

SEQ ID NO: 29105 - DNA, 20 bp, synthetic construct
  misc_feature 1..20: note = chemically synthesized
  source 1..20: mol_type = other DNA
actttatggaggtggagatt

SEQ ID NO: 29106 - DNA, 20 bp, synthetic construct
  misc_feature 1..20: note = chemically synthesized
  source 1..20: mol_type = other DNA
ctttatggaggtggagattg

SEQ ID NO: 29107 - DNA, 20 bp, synthetic construct
  misc_feature 1..20: note = chemically synthesized
  source 1..20: mol_type = other DNA
ggtggagattgaggcttacc

SEQ ID NO: 29108 - DNA, 20 bp, synthetic construct
  misc_feature 1..20: note = chemically synthesized
  source 1..20: mol_type = other DNA
gtggagattgaggcttacca

SEQ ID NO: 29109 - DNA, 20 bp, synthetic construct
  misc_feature 1..20: note = chemically synthesized
  source 1..20: mol_type = other DNA
gattgaggcttaccaaggtt

SEQ ID NO: 29110 - DNA, 20 bp, synthetic construct
  misc_feature 1..20: note = chemically synthesized
  source 1..20: mol_type = other DNA
attgaggcttaccaaggtta

SEQ ID NO: 29111 - DNA, 20 bp, synthetic construct
  misc_feature 1..20: note = chemically synthesized
  source 1..20: mol_type = other DNA
ttgaggcttaccaaggttaa

SEQ ID NO: 29112 - DNA, 20 bp, synthetic construct
  misc_feature 1..20: note = chemically synthesized
  source 1..20: mol_type = other DNA
taccaaggttaagggcttgc

SEQ ID NO: 29113 - DNA, 20 bp, synthetic construct
  misc_feature 1..20: note = chemically synthesized
  source 1..20: mol_type = other DNA
ccaaggttaagggcttgcca

SEQ ID NO: 29114 - DNA, 20 bp, synthetic construct
  misc_feature 1..20: note = chemically synthesized
  source 1..20: mol_type = other DNA
caaggttaagggcttgccag

SEQ ID NO: 29115 - DNA, 20 bp, synthetic construct
  misc_feature 1..20: note = chemically synthesized
  source 1..20: mol_type = other DNA
gggcttgccagaggccacat

SEQ ID NO: 29116 - DNA, 20 bp, synthetic construct
  misc_feature 1..20: note = chemically synthesized
  source 1..20: mol_type = other DNA
ttgccagaggccacatcagt

SEQ ID NO: 29117 - DNA, 20 bp, synthetic construct
  misc_feature 1..20: note = chemically synthesized
  source 1..20: mol_type = other DNA
gccagaggccacatcagtaa

SEQ ID NO: 29118 - DNA, 20 bp, synthetic construct
  misc_feature 1..20: note = chemically synthesized
  source 1..20: mol_type = other DNA
cagaggccacatcagtaaga

SEQ ID NO: 29119 - DNA, 20 bp, synthetic construct
  misc_feature 1..20: note = chemically synthesized
  source 1..20: mol_type = other DNA
ggccacatcagtaagagaga

SEQ ID NO: 29120 - DNA, 20 bp, synthetic construct
  misc_feature 1..20: note = chemically synthesized
  source 1..20: mol_type = other DNA
cacatcagtaagagagaaag

SEQ ID NO: 29121 - DNA, 20 bp, synthetic construct
  misc_feature 1..20: note = chemically synthesized
  source 1..20: mol_type = other DNA
catcagtaagagagaaagca

SEQ ID NO: 29122 - DNA, 20 bp, synthetic construct
  misc_feature 1..20: note = chemically synthesized
  source 1..20: mol_type = other DNA
cagtaagagagaaagcagag

SEQ ID NO: 29123 - DNA, 20 bp, synthetic construct
  misc_feature 1..20: note = chemically synthesized
  source 1..20: mol_type = other DNA
aagagagaaagcagagaagc

SEQ ID NO: 29124 - DNA, 20 bp, synthetic construct
  misc_feature 1..20: note = chemically synthesized
  source 1..20: mol_type = other DNA
agagagaaagcagagaagcc

SEQ ID NO: 29125 - DNA, 20 bp, synthetic construct
  misc_feature 1..20: note = chemically synthesized
  source 1..20: mol_type = other DNA
agcagagaagccaggttttc

SEQ ID NO: 29126 - DNA, 20 bp, synthetic construct
  misc_feature 1..20: note = chemically synthesized
  source 1..20: mol_type = other DNA
aggttttctggtttcttgtc

SEQ ID NO: 29127 - DNA, 20 bp, synthetic construct
  misc_feature 1..20: note = chemically synthesized
  source 1..20: mol_type = other DNA
gttttctggtttcttgtcca

SEQ ID NO: 29128 - DNA, 20 bp, synthetic construct
  misc_feature 1..20: note = chemically synthesized
  source 1..20: mol_type = other DNA
aaactctgtttaactgatca

SEQ ID NO: 29129 - DNA, 20 bp, synthetic construct
  misc_feature 1..20: note = chemically synthesized
  source 1..20: mol_type = other DNA
aactctgtttaactgatcaa

SEQ ID NO: 29130 - DNA, 20 bp, synthetic construct
  misc_feature 1..20: note = chemically synthesized
  source 1..20: mol_type = other DNA
actctgtttaactgatcaaa

SEQ ID NO: 29131 - DNA, 20 bp, synthetic construct
  misc_feature 1..20: note = chemically synthesized
  source 1..20: mol_type = other DNA
tctgtttaactgatcaaagg

SEQ ID NO: 29132 - DNA, 20 bp, synthetic construct
  misc_feature 1..20: note = chemically synthesized
  source 1..20: mol_type = other DNA
gggagtatcttttcctgtgt

SEQ ID NO: 29133 - DNA, 20 bp, synthetic construct
  misc_feature 1..20: note = chemically synthesized
  source 1..20: mol_type = other DNA
cttttcctgtgttagcacat

SEQ ID NO: 29134 - DNA, 20 bp, synthetic construct
  misc_feature 1..20: note = chemically synthesized
  source 1..20: mol_type = other DNA
acataagtcataaatgttca

SEQ ID NO: 29135 - DNA, 20 bp, synthetic construct
  misc_feature 1..20: note = chemically synthesized
  source 1..20: mol_type = other DNA
tgttcacagacacacacatg

SEQ ID NO: 29136 - DNA, 20 bp, synthetic construct
  misc_feature 1..20: note = chemically synthesized
  source 1..20: mol_type = other DNA
acacatgtggcttacacata

SEQ ID NO: 29137 - DNA, 20 bp, synthetic construct
  misc_feature 1..20: note = chemically synthesized
  source 1..20: mol_type = other DNA
gtggcttacacatacagacc

SEQ ID NO: 29138 - DNA, 20 bp, synthetic construct
  misc_feature 1..20: note = chemically synthesized
  source 1..20: mol_type = other DNA
tggcttacacatacagaccc

SEQ ID NO: 29139 - DNA, 20 bp, synthetic construct
  misc_feature 1..20: note = chemically synthesized
  source 1..20: mol_type = other DNA
ttacacatacagacccagga

SEQ ID NO: 29140 - DNA, 20 bp, synthetic construct
  misc_feature 1..20: note = chemically synthesized
  source 1..20: mol_type = other DNA
tacagacccaggatggcctt

SEQ ID NO: 29141 - DNA, 20 bp, synthetic construct
  misc_feature 1..20: note = chemically synthesized
  source 1..20: mol_type = other DNA
acccaggatggcctttggta

SEQ ID NO: 29142 - DNA, 20 bp, synthetic construct
  misc_feature 1..20: note = chemically synthesized
  source 1..20: mol_type = other DNA
cccaggatggcctttggtaa

SEQ ID NO: 29143 - DNA, 20 bp, synthetic construct
  misc_feature 1..20: note = chemically synthesized
  source 1..20: mol_type = other DNA
tggcctttggtaaaggcatg

SEQ ID NO: 29144 - DNA, 20 bp, synthetic construct
  misc_feature 1..20: note = chemically synthesized
  source 1..20: mol_type = other DNA
gcctttggtaaaggcatgca

SEQ ID NO: 29145 - DNA, 20 bp, synthetic construct
  misc_feature 1..20: note = chemically synthesized
  source 1..20: mol_type = other DNA
gagttgcctcttcctaccaa

SEQ ID NO: 29146 - DNA, 20 bp, synthetic construct
  misc_feature 1..20: note = chemically synthesized
  source 1..20: mol_type = other DNA
taccaacagatgtgtgcact

SEQ ID NO: 29147 - DNA, 20 bp, synthetic construct
  misc_feature 1..20: note = chemically synthesized
  source 1..20: mol_type = other DNA
aacagatgtgtgcactgaga

SEQ ID NO: 29148 - DNA, 20 bp, synthetic construct
  misc_feature 1..20: note = chemically synthesized
  source 1..20: mol_type = other DNA
acagatgtgtgcactgagaa

SEQ ID NO: 29149 - DNA, 20 bp, synthetic construct
  misc_feature 1..20: note = chemically synthesized
  source 1..20: mol_type = other DNA
cagatgtgtgcactgagaaa

SEQ ID NO: 29150 - DNA, 20 bp, synthetic construct
  misc_feature 1..20: note = chemically synthesized
  source 1..20: mol_type = other DNA
gatgtgtgcactgagaaagg

SEQ ID NO: 29151 - DNA, 20 bp, synthetic construct
  misc_feature 1..20: note = chemically synthesized
  source 1..20: mol_type = other DNA
atgtgtgcactgagaaaggg

SEQ ID NO: 29152 - DNA, 20 bp, synthetic construct
  misc_feature 1..20: note = chemically synthesized
  source 1..20: mol_type = other DNA
gcactgagaaagggaggttg

SEQ ID NO: 29153 - DNA, 20 bp, synthetic construct
  misc_feature 1..20: note = chemically synthesized
  source 1..20: mol_type = other DNA
ttgccatcacctttcccctg

SEQ ID NO: 29154 - DNA, 20 bp, synthetic construct
  misc_feature 1..20: note = chemically synthesized
  source 1..20: mol_type = other DNA
acaaataaccctgattgcac

SEQ ID NO: 29155 - DNA, 20 bp, synthetic construct
  misc_feature 1..20: note = chemically synthesized
  source 1..20: mol_type = other DNA
aataaccctgattgcacgag

SEQ ID NO: 29156 - DNA, 20 bp, synthetic construct
  misc_feature 1..20: note = chemically synthesized
  source 1..20: mol_type = other DNA
gtttgtgacttcctatcaat

SEQ ID NO: 29157 - DNA, 20 bp, synthetic construct
  misc_feature 1..20: note = chemically synthesized
  source 1..20: mol_type = other DNA
gtgacttcctatcaattagt

SEQ ID NO: 29158 - DNA, 20 bp, synthetic construct
  misc_feature 1..20: note = chemically synthesized
  source 1..20: mol_type = other DNA
tgacttcctatcaattagtt

SEQ ID NO: 29159 - DNA, 20 bp, synthetic construct
  misc_feature 1..20: note = chemically synthesized
  source 1..20: mol_type = other DNA
tatcaattagttgggacttc

SEQ ID NO: 29160 - DNA, 20 bp, synthetic construct
  misc_feature 1..20: note = chemically synthesized
  source 1..20: mol_type = other DNA
attagttgggacttccagac

SEQ ID NO: 29161 - DNA, 20 bp, synthetic construct
  misc_feature 1..20: note = chemically synthesized
  source 1..20: mol_type = other DNA
agttgggacttccagacaag

SEQ ID NO: 29162 - DNA, 20 bp, synthetic construct
  misc_feature 1..20: note = chemically synthesized
  source 1..20: mol_type = other DNA
agacaagaagttatttcata

SEQ ID NO: 29163 - DNA, 20 bp, synthetic construct
  misc_feature 1..20: note = chemically synthesized
  source 1..20: mol_type = other DNA
cctatgtgttgctgaaacat

SEQ ID NO: 29164 - DNA, 20 bp, synthetic construct
  misc_feature 1..20: note = chemically synthesized
  source 1..20: mol_type = other DNA
ttgctgaaacataagaccat

SEQ ID NO: 29165 - DNA, 20 bp, synthetic construct
  misc_feature 1..20: note = chemically synthesized
  source 1..20: mol_type = other DNA
tgctgaaacataagaccatt

SEQ ID NO: 29166 - DNA, 20 bp, synthetic construct
  misc_feature 1..20: note = chemically synthesized
  source 1..20: mol_type = other DNA
gctgaaacataagaccatta

SEQ ID NO: 29167 - DNA, 20 bp, synthetic construct
  misc_feature 1..20: note = chemically synthesized
  source 1..20: mol_type = other DNA
gaccattagggtttctgtga

SEQ ID NO: 29168 - DNA, 20 bp, synthetic construct
  misc_feature 1..20: note = chemically synthesized
  source 1..20: mol_type = other DNA
ctgaactccttgctgatgcc

SEQ ID NO: 29169 - DNA, 20 bp, synthetic construct
  misc_feature 1..20: note = chemically synthesized
  source 1..20: mol_type = other DNA
actccttgctgatgcctaga

SEQ ID NO: 29170 - DNA, 20 bp, synthetic construct
  misc_feature 1..20: note = chemically synthesized
  source 1..20: mol_type = other DNA
tccttgctgatgcctagaaa

SEQ ID NO: 29171 - DNA, 20 bp, synthetic construct
  misc_feature 1..20: note = chemically synthesized
  source 1..20: mol_type = other DNA
aaagagtgacaccacttcca

SEQ ID NO: 29172 - DNA, 20 bp, synthetic construct
  misc_feature 1..20: note = chemically synthesized
  source 1..20: mol_type = other DNA
aagagtgacaccacttccaa

SEQ ID NO: 29173 - DNA, 20 bp, synthetic construct
  misc_feature 1..20: note = chemically synthesized
  source 1..20: mol_type = other DNA
agagtgacaccacttccaaa

SEQ ID NO: 29174 - DNA, 20 bp, synthetic construct
  misc_feature 1..20: note = chemically synthesized
  source 1..20: mol_type = other DNA
agtgacaccacttccaaagg

SEQ ID NO: 29175 - DNA, 20 bp, synthetic construct
  misc_feature 1..20: note = chemically synthesized
  source 1..20: mol_type = other DNA
gtgacaccacttccaaaggg

SEQ ID NO: 29176 - DNA, 20 bp, synthetic construct
  misc_feature 1..20: note = chemically synthesized
  source 1..20: mol_type = other DNA
caccacttccaaagggaggc

SEQ ID NO: 29177 - DNA, 20 bp, synthetic construct
  misc_feature 1..20: note = chemically synthesized
  source 1..20: mol_type = other DNA
cagaactgaaacaacaatcc

SEQ ID NO: 29178 - DNA, 20 bp, synthetic construct
  misc_feature 1..20: note = chemically synthesized
  source 1..20: mol_type = other DNA
agaactgaaacaacaatcct

SEQ ID NO: 29179 - DNA, 20 bp, synthetic construct
  misc_feature 1..20: note = chemically synthesized
  source 1..20: mol_type = other DNA
aaacaacaatcctgggtctt

SEQ ID NO: 29180 - DNA, 20 bp, synthetic construct
  misc_feature 1..20: note = chemically synthesized
  source 1..20: mol_type = other DNA
acaatcctgggtcttgagac

SEQ ID NO: 29181 - DNA, 20 bp, synthetic construct
  misc_feature 1..20: note = chemically synthesized
  source 1..20: mol_type = other DNA
cctgggtcttgagacaagtt

SEQ ID NO: 29182 - DNA, 20 bp, synthetic construct
  misc_feature 1..20: note = chemically synthesized
  source 1..20: mol_type = other DNA
tcagcctttgtaactgcact

SEQ ID NO: 29183 - DNA, 20 bp, synthetic construct
  misc_feature 1..20: note = chemically synthesized
  source 1..20: mol_type = other DNA
gcctttgtaactgcacttgg

SEQ ID NO: 29184 - DNA, 20 bp, synthetic construct
  misc_feature 1..20: note = chemically synthesized
  source 1..20: mol_type = other DNA
ggtcactacactttcatttc

SEQ ID NO: 29185 - DNA, 20 bp, synthetic construct
  misc_feature 1..20: note = chemically synthesized
  source 1..20: mol_type = other DNA
actttttatatatttcttct

SEQ ID NO: 29186 - DNA, 20 bp, synthetic construct
  misc_feature 1..20: note = chemically synthesized
  source 1..20: mol_type = other DNA
tttttatatatttcttctca

SEQ ID NO: 29187 - DNA, 20 bp, synthetic construct
  misc_feature 1..20: note = chemically synthesized
  source 1..20: mol_type = other DNA
tatatatttcttctcagagt

SEQ ID NO: 29188 - DNA, 20 bp, synthetic construct
  misc_feature 1..20: note = chemically synthesized
  source 1..20: mol_type = other DNA
ctcagagtcagtttgtaaat

SEQ ID NO: 29189 - DNA, 20 bp, synthetic construct
  misc_feature 1..20: note = chemically synthesized
  source 1..20: mol_type = other DNA
agagtcagtttgtaaataag

SEQ ID NO: 29190 - DNA, 20 bp, synthetic construct
  misc_feature 1..20: note = chemically synthesized
  source 1..20: mol_type = other DNA
aaataagtggatatctctaa

SEQ ID NO: 29191 - DNA, 20 bp, synthetic construct
  misc_feature 1..20: note = chemically synthesized
  source 1..20: mol_type = other DNA
taagtggatatctctaaaag

SEQ ID NO: 29192 - DNA, 20 bp, synthetic construct
  misc_feature 1..20: note = chemically synthesized
  source 1..20: mol_type = other DNA
aagtggatatctctaaaagt

SEQ ID NO: 29193 - DNA, 20 bp, synthetic construct
  misc_feature 1..20: note = chemically synthesized
  source 1..20: mol_type = other DNA
tctctaaaagtgggattttt

SEQ ID NO: 29194 - DNA, 20 bp, synthetic construct
  misc_feature 1..20: note = chemically synthesized
  source 1..20: mol_type = other DNA
ctctaaaagtgggattttta

SEQ ID NO: 29195 - DNA, 20 bp, synthetic construct
  misc_feature 1..20: note = chemically synthesized
  source 1..20: mol_type = other DNA
tctaaaagtgggatttttaa

SEQ ID NO: 29196 - DNA, 20 bp, synthetic construct
  misc_feature 1..20: note = chemically synthesized
  source 1..20: mol_type = other DNA
ctaaaagtgggatttttaag

SEQ ID NO: 29197 - DNA, 20 bp, synthetic construct
  misc_feature 1..20: note = chemically synthesized
  source 1..20: mol_type = other DNA
aagtgggatttttaaggggc

SEQ ID NO: 29198 - DNA, 20 bp, synthetic construct
  misc_feature 1..20: note = chemically synthesized
  source 1..20: mol_type = other DNA
gtgggatttttaaggggcaa

SEQ ID NO: 29199 - DNA, 20 bp, synthetic construct
  misc_feature 1..20: note = chemically synthesized
  source 1..20: mol_type = other DNA
tgggatttttaaggggcaag

SEQ ID NO: 29200 - DNA, 20 bp, synthetic construct
  misc_feature 1..20: note = chemically synthesized
  source 1..20: mol_type = other DNA
tttaaggggcaagaggataa

SEQ ID NO: 29201 - DNA, 20 bp, synthetic construct
  misc_feature 1..20: note = chemically synthesized
  source 1..20: mol_type = other DNA
aaggggcaagaggataacag

SEQ ID NO: 29202 - DNA, 20 bp, synthetic construct
  misc_feature 1..20: note = chemically synthesized
  source 1..20: mol_type = other DNA
gggcaagaggataacagaag

SEQ ID NO: 29203 - DNA, 20 bp, synthetic construct
  misc_feature 1..20: note = chemically synthesized
  source 1..20: mol_type = other DNA
gaggataacagaagtggata

SEQ ID NO: 29204 - DNA, 20 bp, synthetic construct
  misc_feature 1..20: note = chemically synthesized
  source 1..20: mol_type = other DNA
aggataacagaagtggataa

SEQ ID NO: 29205 - DNA, 20 bp, synthetic construct
  misc_feature 1..20: note = chemically synthesized
  source 1..20: mol_type = other DNA
ttgttttatcctcttcactg

SEQ ID NO: 29206 - DNA, 20 bp, synthetic construct
  misc_feature 1..20: note = chemically synthesized
  source 1..20: mol_type = other DNA
gttttatcctcttcactgtg

SEQ ID NO: 29207 - DNA, 20 bp, synthetic construct
  misc_feature 1..20: note = chemically synthesized
  source 1..20: mol_type = other DNA
ttatcctcttcactgtggag

SEQ ID NO: 29208 - DNA, 20 bp, synthetic construct
  misc_feature 1..20: note = chemically synthesized
  source 1..20: mol_type = other DNA
aagaaccccctcaaaacaaa

SEQ ID NO: 29209 - DNA, 20 bp, synthetic construct
  misc_feature 1..20: note = chemically synthesized
  source 1..20: mol_type = other DNA
ctcaaaacaaacagaacaaa

SEQ ID NO: 29210 - DNA, 20 bp, synthetic construct
  misc_feature 1..20: note = chemically synthesized
  source 1..20: mol_type = other DNA
aaaaagactgtcttttccca

SEQ ID NO: 29211 - DNA, 20 bp, synthetic construct
  misc_feature 1..20: note = chemically synthesized
  source 1..20: mol_type = other DNA
gtcttttcccatggctttta

SEQ ID NO: 29212 - DNA, 20 bp, synthetic construct
  misc_feature 1..20: note = chemically synthesized
  source 1..20: mol_type = other DNA
cccatggcttttaaagttga

SEQ ID NO: 29213 - DNA, 20 bp, synthetic construct
  misc_feature 1..20: note = chemically synthesized
  source 1..20: mol_type = other DNA
agacaacaaaaatttattta

SEQ ID NO: 29214 - DNA, 20 bp, synthetic construct
  misc_feature 1..20: note = chemically synthesized
  source 1..20: mol_type = other DNA
aatttatttacagaatttat

SEQ ID NO: 29215 - DNA, 20 bp, synthetic construct
  misc_feature 1..20: note = chemically synthesized
  source 1..20: mol_type = other DNA
atttatttacagaatttatt

SEQ ID NO: 29216 - DNA, 20 bp, synthetic construct
  misc_feature 1..20: note = chemically synthesized
  source 1..20: mol_type = other DNA
ttacagaatttattaggaaa

SEQ ID NO: 29217 - DNA, 20 bp, synthetic construct
  misc_feature 1..20: note = chemically synthesized
  source 1..20: mol_type = other DNA
attaggaaacggtattgtgt

SEQ ID NO: 29218 - DNA, 20 bp, synthetic construct
  misc_feature 1..20: note = chemically synthesized
  source 1..20: mol_type = other DNA
ttaggaaacggtattgtgtt

SEQ ID NO: 29219 - DNA, 20 bp, synthetic construct
  misc_feature 1..20: note = chemically synthesized
  source 1..20: mol_type = other DNA
taggaaacggtattgtgtta

SEQ ID NO: 29220 - DNA, 20 bp, synthetic construct
  misc_feature 1..20: note = chemically synthesized
  source 1..20: mol_type = other DNA
aaacggtattgtgttagggc

SEQ ID NO: 29221 - DNA, 20 bp, synthetic construct
  misc_feature 1..20: note = chemically synthesized
  source 1..20: mol_type = other DNA
tttttttttttttttttttt

SEQ ID NO: 29222 - DNA, 20 bp, synthetic construct
  misc_feature 1..20: note = chemically synthesized
  source 1..20: mol_type = other DNA
ttttttttttttttttaaga

SEQ ID NO: 29223 - DNA, 20 bp, synthetic construct
  misc_feature 1..20: note = chemically synthesized
  source 1..20: mol_type = other DNA
cagaatctcgctctgtcacc

SEQ ID NO: 29224 - DNA, 20 bp, synthetic construct
  misc_feature 1..20: note = chemically synthesized
  source 1..20: mol_type = other DNA
agaatctcgctctgtcaccc

SEQ ID NO: 29225 - DNA, 20 bp, synthetic construct
  misc_feature 1..20: note = chemically synthesized
  source 1..20: mol_type = other DNA
tctcgctctgtcacccaggc

SEQ ID NO: 29226 - DNA, 20 bp, synthetic construct
  misc_feature 1..20: note = chemically synthesized
  source 1..20: mol_type = other DNA
tcgctctgtcacccaggctg

SEQ ID NO: 29227 - DNA, 20 bp, synthetic construct
  misc_feature 1..20: note = chemically synthesized
  source 1..20: mol_type = other DNA
ctgtcacccaggctggagtg

SEQ ID NO: 29228 - DNA, 20 bp, synthetic construct
  misc_feature 1..20: note = chemically synthesized
  source 1..20: mol_type = other DNA
tcacccaggctggagtgcag

SEQ ID NO: 29229 - DNA, 20 bp, synthetic construct
  misc_feature 1..20: note = chemically synthesized
  source 1..20: mol_type = other DNA
ccaggctggagtgcagtggc

SEQ ID NO: 29230 - DNA, 20 bp, synthetic construct
  misc_feature 1..20: note = chemically synthesized
  source 1..20: mol_type = other DNA
caggctggagtgcagtggca

SEQ ID NO: 29231 - DNA, 20 bp, synthetic construct
  misc_feature 1..20: note = chemically synthesized
  source 1..20: mol_type = other DNA
ggagtgcagtggcaaggact

SEQ ID NO: 29232 - DNA, 20 bp, synthetic construct
  misc_feature 1..20: note = chemically synthesized
  source 1..20: mol_type = other DNA
tcaccacaacctccgcctac

SEQ ID NO: 29233 - DNA, 20 bp, synthetic construct
  misc_feature 1..20: note = chemically synthesized
  source 1..20: mol_type = other DNA
caccacaacctccgcctact

SEQ ID NO: 29234 - DNA, 20 bp, synthetic construct
  misc_feature 1..20: note = chemically synthesized
  source 1..20: mol_type = other DNA
aacctccgcctactgggttc

SEQ ID NO: 29235 - DNA, 20 bp, synthetic construct
  misc_feature 1..20: note = chemically synthesized
  source 1..20: mol_type = other DNA
acctccgcctactgggttca

SEQ ID NO: 29236 - DNA, 20 bp, synthetic construct
  misc_feature 1..20: note = chemically synthesized
  source 1..20: mol_type = other DNA
cctccgcctactgggttcaa

SEQ ID NO: 29237 - DNA, 20 bp, synthetic construct
  misc_feature 1..20: note = chemically synthesized
  source 1..20: mol_type = other DNA
ttcaagggatcctcctgcct

SEQ ID NO: 29238 - DNA, 20 bp, synthetic construct
  misc_feature 1..20: note = chemically synthesized
  source 1..20: mol_type = other DNA
tcctcctgcctcagcttccc

SEQ ID NO: 29239 - DNA, 20 bp, synthetic construct
  misc_feature 1..20: note = chemically synthesized
  source 1..20: mol_type = other DNA
tcctgcctcagcttcccaag

SEQ ID NO: 29240 - DNA, 20 bp, synthetic construct
  misc_feature 1..20: note = chemically synthesized
  source 1..20: mol_type = other DNA
gcctcagcttcccaagtagc

SEQ ID NO: 29241 - DNA, 20 bp, synthetic construct
  misc_feature 1..20: note = chemically synthesized
  source 1..20: mol_type = other DNA
cctcagcttcccaagtagct

SEQ ID NO: 29242 - DNA, 20 bp, synthetic construct
  misc_feature 1..20: note = chemically synthesized
  source 1..20: mol_type = other DNA
ttcccaagtagctgggacta

SEQ ID NO: 29243 - DNA, 20 bp, synthetic construct
  misc_feature 1..20: note = chemically synthesized
  source 1..20: mol_type = other DNA
tcccaagtagctgggactac

SEQ ID NO: 29244 - DNA, 20 bp, synthetic construct
  misc_feature 1..20: note = chemically synthesized
  source 1..20: mol_type = other DNA
caggcacgcgccaccacgcc

SEQ ID NO: 29245 - DNA, 20 bp, synthetic construct
  misc_feature 1..20: note = chemically synthesized
  source 1..20: mol_type = other DNA
gctaatattttttgtatttt

SEQ ID NO: 29246 - DNA, 20 bp, synthetic construct
  misc_feature 1..20: note = chemically synthesized
  source 1..20: mol_type = other DNA
aatattttttgtatttttag

SEQ ID NO: 29247 - DNA, 20 bp, synthetic construct
  misc_feature 1..20: note = chemically synthesized
  source 1..20: mol_type = other DNA
ttttgtatttttagtagata

SEQ ID NO: 29248 - DNA, 20 bp, synthetic construct
  misc_feature 1..20: note = chemically synthesized
  source 1..20: mol_type = other DNA
gatacggcgtttcaccgtgt

SEQ ID NO: 29249 - DNA, 20 bp, synthetic construct
  misc_feature 1..20: note = chemically synthesized
  source 1..20: mol_type = other DNA
cggcgtttcaccgtgttagc

SEQ ID NO: 29250 - DNA, 20 bp, synthetic construct
  misc_feature 1..20: note = chemically synthesized
  source 1..20: mol_type = other DNA
ggcgtttcaccgtgttagcc

SEQ ID NO: 29251 - DNA, 20 bp, synthetic construct
  misc_feature 1..20: note = chemically synthesized
  source 1..20: mol_type = other DNA
tttcaccgtgttagccagga

SEQ ID NO: 29252 - DNA, 20 bp, synthetic construct
  misc_feature 1..20: note = chemically synthesized
  source 1..20: mol_type = other DNA
gatctcgtgatccaccctcc

SEQ ID NO: 29253 - DNA, 20 bp, synthetic construct
  misc_feature 1..20: note = chemically synthesized
  source 1..20: mol_type = other DNA
atctcgtgatccaccctcct

SEQ ID NO: 29254 - DNA, 20 bp, synthetic construct
  misc_feature 1..20: note = chemically synthesized
  source 1..20: mol_type = other DNA
ccaccctcctaggcctccca

SEQ ID NO: 29255 - DNA, 20 bp, synthetic construct
  misc_feature 1..20: note = chemically synthesized
  source 1..20: mol_type = other DNA
tcctaggcctcccatagtgc

SEQ ID NO: 29256 - DNA, 20 bp, synthetic construct
  misc_feature 1..20: note = chemically synthesized
  source 1..20: mol_type = other DNA
cctaggcctcccatagtgct

SEQ ID NO: 29257 - DNA, 20 bp, synthetic construct
  misc_feature 1..20: note = chemically synthesized
  source 1..20: mol_type = other DNA
gcctcccatagtgctgggat

SEQ ID NO: 29258 - DNA, 20 bp, synthetic construct
  misc_feature 1..20: note = chemically synthesized
  source 1..20: mol_type = other DNA
ctcccatagtgctgggatta

SEQ ID NO: 29259 - DNA, 20 bp, synthetic construct
  misc_feature 1..20: note = chemically synthesized
  source 1..20: mol_type = other DNA
tcccatagtgctgggattag

SEQ ID NO: 29260 - DNA, 20 bp, synthetic construct
  misc_feature 1..20: note = chemically synthesized
  source 1..20: mol_type = other DNA
aggcattgcactacctcacc

SEQ ID NO: 29261 - DNA, 20 bp, synthetic construct
  misc_feature 1..20: note = chemically synthesized
  source 1..20: mol_type = other DNA
ttgcactacctcacctggcc

SEQ ID NO: 29262 - DNA, 20 bp, synthetic construct
  misc_feature 1..20: note = chemically synthesized
  source 1..20: mol_type = other DNA
tgcactacctcacctggcct

SEQ ID NO: 29263 - DNA, 20 bp, synthetic construct
  misc_feature 1..20: note = chemically synthesized
  source 1..20: mol_type = other DNA
gcactacctcacctggccta

SEQ ID NO: 29264 - DNA, 20 bp, synthetic construct
  misc_feature 1..20: note = chemically synthesized
  source 1..20: mol_type = other DNA
tacctcacctggcctagggc

SEQ ID NO: 29265 - DNA, 20 bp, synthetic construct
  misc_feature 1..20: note = chemically synthesized
  source 1..20: mol_type = other DNA
agacttttgaaaccccatac

SEQ ID NO: 29266 - DNA, 20 bp, synthetic construct
  misc_feature 1..20: note = chemically synthesized
  source 1..20: mol_type = other DNA
cccatacaagattgacaatt

SEQ ID NO: 29267 - DNA, 20 bp, synthetic construct
  misc_feature 1..20: note = chemically synthesized
  source 1..20: mol_type = other DNA
ccatacaagattgacaattt

SEQ ID NO: 29268 - DNA, 20 bp, synthetic construct
  misc_feature 1..20: note = chemically synthesized
  source 1..20: mol_type = other DNA
tacaagattgacaatttggg

SEQ ID NO: 29269 - DNA, 20 bp, synthetic construct
  misc_feature 1..20: note = chemically synthesized
  source 1..20: mol_type = other DNA
aagacatctctctgtgtgat

SEQ ID NO: 29270 - DNA, 20 bp, synthetic construct
  misc_feature 1..20: note = chemically synthesized
  source 1..20: mol_type = other DNA
atctctctgtgtgatgagtc

SEQ ID NO: 29271 - DNA, 20 bp, synthetic construct
  misc_feature 1..20: note = chemically synthesized
  source 1..20: mol_type = other DNA
tgtgtgatgagtcaagatca

SEQ ID NO: 29272 - DNA, 20 bp, synthetic construct
  misc_feature 1..20: note = chemically synthesized
  source 1..20: mol_type = other DNA
agatcatggttatccatgaa

SEQ ID NO: 29273 - DNA, 20 bp, synthetic construct
  misc_feature 1..20: note = chemically synthesized
  source 1..20: mol_type = other DNA
tcatggttatccatgaatgg

SEQ ID NO: 29274 - DNA, 20 bp, synthetic construct
  misc_feature 1..20: note = chemically synthesized
  source 1..20: mol_type = other DNA
tggttatccatgaatggcag

SEQ ID NO: 29275 - DNA, 20 bp, synthetic construct
  misc_feature 1..20: note = chemically synthesized
  source 1..20: mol_type = other DNA
ttatccatgaatggcagaag

SEQ ID NO: 29276 - DNA, 20 bp, synthetic construct
  misc_feature 1..20: note = chemically synthesized
  source 1..20: mol_type = other DNA
tatccatgaatggcagaagc

SEQ ID NO: 29277 - DNA, 20 bp, synthetic construct
  misc_feature 1..20: note = chemically synthesized
  source 1..20: mol_type = other DNA
atccatgaatggcagaagca

SEQ ID NO: 29278 - DNA, 20 bp, synthetic construct
  misc_feature 1..20: note = chemically synthesized
  source 1..20: mol_type = other DNA
catgaatggcagaagcaggg

SEQ ID NO: 29279 - DNA, 20 bp, synthetic construct
  misc_feature 1..20: note = chemically synthesized
  source 1..20: mol_type = other DNA
tgaatggcagaagcagggaa

SEQ ID NO: 29280 - DNA, 20 bp, synthetic construct
  misc_feature 1..20: note = chemically synthesized
  source 1..20: mol_type = other DNA
gaatggcagaagcagggaag

SEQ ID NO: 29281 - DNA, 20 bp, synthetic construct
  misc_feature 1..20: note = chemically synthesized
  source 1..20: mol_type = other DNA
gaagaggctcacaaatctgc

SEQ ID NO: 29282 - DNA, 20 bp, synthetic construct
  misc_feature 1..20: note = chemically synthesized
  source 1..20: mol_type = other DNA
aagaggctcacaaatctgcc

SEQ ID NO: 29283 - DNA, 20 bp, synthetic construct
  misc_feature 1..20: note = chemically synthesized
  source 1..20: mol_type = other DNA
agaggctcacaaatctgcca

SEQ ID NO: 29284 - DNA, 20 bp, synthetic construct
  misc_feature 1..20: note = chemically synthesized
  source 1..20: mol_type = other DNA
gaggctcacaaatctgccag

SEQ ID NO: 29285 - DNA, 20 bp, synthetic construct
  misc_feature 1..20: note = chemically synthesized
  source 1..20: mol_type = other DNA
ttctcactgtgtcctctctg

SEQ ID NO: 29286 - DNA, 20 bp, synthetic construct
  misc_feature 1..20: note = chemically synthesized
  source 1..20: mol_type = other DNA
ctcactgtgtcctctctgca

SEQ ID NO: 29287 - DNA, 20 bp, synthetic construct
  misc_feature 1..20: note = chemically synthesized
  source 1..20: mol_type = other DNA
actgtgtcctctctgcagag

SEQ ID NO: 29288 - DNA, 20 bp, synthetic construct
  misc_feature 1..20: note = chemically synthesized
  source 1..20: mol_type = other DNA
ctctctgcagagtggaactt

SEQ ID NO: 29289 - DNA, 20 bp, synthetic construct
  misc_feature 1..20: note = chemically synthesized
  source 1..20: mol_type = other DNA
cagagtggaacttcagattg

SEQ ID NO: 29290 - DNA, 20 bp, synthetic construct
  misc_feature 1..20: note = chemically synthesized
  source 1..20: mol_type = other DNA
gagtggaacttcagattgca

SEQ ID NO: 29291 - DNA, 20 bp, synthetic construct
  misc_feature 1..20: note = chemically synthesized
  source 1..20: mol_type = other DNA
gtggaacttcagattgcaga

SEQ ID NO: 29292 - DNA, 20 bp, synthetic construct
  misc_feature 1..20: note = chemically synthesized
  source 1..20: mol_type = other DNA
cagattgcagagagataaat

SEQ ID NO: 29293 - DNA, 20 bp, synthetic construct
  misc_feature 1..20: note = chemically synthesized
  source 1..20: mol_type = other DNA
ataaattggttgcctgacat

SEQ ID NO: 29294 - DNA, 20 bp, synthetic construct
  misc_feature 1..20: note = chemically synthesized
  source 1..20: mol_type = other DNA
ttggttgcctgacatgagca

SEQ ID NO: 29295 - DNA, 20 bp, synthetic construct
  misc_feature 1..20: note = chemically synthesized
  source 1..20: mol_type = other DNA
tgcctgacatgagcacagac

SEQ ID NO: 29296 - DNA, 20 bp, synthetic construct
  misc_feature 1..20: note = chemically synthesized
  source 1..20: mol_type = other DNA
cctgacatgagcacagacta

SEQ ID NO: 29297 - DNA, 20 bp, synthetic construct
  misc_feature 1..20: note = chemically synthesized
  source 1..20: mol_type = other DNA
ctgacatgagcacagactag

SEQ ID NO: 29298 - DNA, 20 bp, synthetic construct
  misc_feature 1..20: note = chemically synthesized
  source 1..20: mol_type = other DNA
catgagcacagactagagga

SEQ ID NO: 29299 - DNA, 20 bp, synthetic construct
  misc_feature 1..20: note = chemically synthesized
  source 1..20: mol_type = other DNA
tgagcacagactagaggaca

SEQ ID NO: 29300 - DNA, 20 bp, synthetic construct
  misc_feature 1..20: note = chemically synthesized
  source 1..20: mol_type = other DNA
cagactagaggacagagtcc

SEQ ID NO: 29301 - DNA, 20 bp, synthetic construct
  misc_feature 1..20: note = chemically synthesized
  source 1..20: mol_type = other DNA
aggacagagtcccagccact

SEQ ID NO: 29302 - DNA, 20 bp, synthetic construct
  misc_feature 1..20: note = chemically synthesized
  source 1..20: mol_type = other DNA
cagagtcccagccacttgga

SEQ ID NO: 29303 - DNA, 20 bp, synthetic construct
  misc_feature 1..20: note = chemically synthesized
  source 1..20: mol_type = other DNA
gagtcccagccacttggatg

SEQ ID NO: 29304 - DNA, 20 bp, synthetic construct
  misc_feature 1..20: note = chemically synthesized
  source 1..20: mol_type = other DNA
agtcccagccacttggatgg

SEQ ID NO: 29305 - DNA, 20 bp, synthetic construct
  misc_feature 1..20: note = chemically synthesized
  source 1..20: mol_type = other DNA
tcccagccacttggatggag

SEQ ID NO: 29306 - DNA, 20 bp, synthetic construct
  misc_feature 1..20: note = chemically synthesized
  source 1..20: mol_type = other DNA
tggatggaggagaccaaata

SEQ ID NO: 29307 - DNA, 20 bp, synthetic construct
  misc_feature 1..20: note = chemically synthesized
  source 1..20: mol_type = other DNA
ggatggaggagaccaaatac

SEQ ID NO: 29308 - DNA, 20 bp, synthetic construct
  misc_feature 1..20: note = chemically synthesized
  source 1..20: mol_type = other DNA
gatggaggagaccaaataca

SEQ ID NO: 29309 - DNA, 20 bp, synthetic construct
  misc_feature 1..20: note = chemically synthesized
  source 1..20: mol_type = other DNA
ggcattgtttttactttccc

SEQ ID NO: 29310 - DNA, 20 bp, synthetic construct
  misc_feature 1..20: note = chemically synthesized
  source 1..20: mol_type = other DNA
ttactttcccaagccttttg

SEQ ID NO: 29311 - DNA, 20 bp, synthetic construct
  misc_feature 1..20: note = chemically synthesized
  source 1..20: mol_type = other DNA
tactttcccaagccttttgt

SEQ ID NO: 29312 - DNA, 20 bp, synthetic construct
  misc_feature 1..20: note = chemically synthesized
  source 1..20: mol_type = other DNA
caagccttttgtgggctgtt

SEQ ID NO: 29313 - DNA, 20 bp, synthetic construct
  misc_feature 1..20: note = chemically synthesized
  source 1..20: mol_type = other DNA
ttattattattattattgtt

SEQ ID NO: 29314 - DNA, 20 bp, synthetic construct
  misc_feature 1..20: note = chemically synthesized
  source 1..20: mol_type = other DNA
tattattattattgttgaga

SEQ ID NO: 29315 - DNA, 20 bp, synthetic construct
  misc_feature 1..20: note = chemically synthesized
  source 1..20: mol_type = other DNA
ttattattattgttgagatg

SEQ ID NO: 29316 - DNA, 20 bp, synthetic construct
  misc_feature 1..20: note = chemically synthesized
  source 1..20: mol_type = other DNA
tggagtctcactctattgcc

SEQ ID NO: 29317 - DNA, 20 bp, synthetic construct
  misc_feature 1..20: note = chemically synthesized
  source 1..20: mol_type = other DNA
ggagtctcactctattgccc

SEQ ID NO: 29318 - DNA, 20 bp, synthetic construct
  misc_feature 1..20: note = chemically synthesized
  source 1..20: mol_type = other DNA
tctcactctattgcccaggc

SEQ ID NO: 29319 - DNA, 20 bp, synthetic construct
  misc_feature 1..20: note = chemically synthesized
  source 1..20: mol_type = other DNA
tcactctattgcccaggctg

SEQ ID NO: 29320 - DNA, 20 bp, synthetic construct
  misc_feature 1..20: note = chemically synthesized
  source 1..20: mol_type = other DNA
ttgcccaggctggagtgcaa

SEQ ID NO: 29321 - DNA, 20 bp, synthetic construct
  misc_feature 1..20: note = chemically synthesized
  source 1..20: mol_type = other DNA
ggagtgcaatggcacgatct

SEQ ID NO: 29322 - DNA, 20 bp, synthetic construct
  misc_feature 1..20: note = chemically synthesized
  source 1..20: mol_type = other DNA
tcactgcaacctctacctcc

SEQ ID NO: 29323 - DNA, 20 bp, synthetic construct
  misc_feature 1..20: note = chemically synthesized
  source 1..20: mol_type = other DNA
cactgcaacctctacctccc

SEQ ID NO: 29324 - DNA, 20 bp, synthetic construct
  misc_feature 1..20: note = chemically synthesized
  source 1..20: mol_type = other DNA
aacctctacctcccgggttc

SEQ ID NO: 29325 - DNA, 20 bp, synthetic construct
  misc_feature 1..20: note = chemically synthesized
  source 1..20: mol_type = other DNA
ctctacctcccgggttcaag

SEQ ID NO: 29326 - DNA, 20 bp, synthetic construct
  misc_feature 1..20: note = chemically synthesized
  source 1..20: mol_type = other DNA
ttcaagtggttctcctgcct

SEQ ID NO: 29327 - DNA, 20 bp, synthetic construct
  misc_feature 1..20: note = chemically synthesized
  source 1..20: mol_type = other DNA
ttctcctgcctcagcctcct

SEQ ID NO: 29328 - DNA, 20 bp, synthetic construct
  misc_feature 1..20: note = chemically synthesized
  source 1..20: mol_type = other DNA
tcctgcctcagcctcctgag

SEQ ID NO: 29329 - DNA, 20 bp, synthetic construct
  misc_feature 1..20: note = chemically synthesized
  source 1..20: mol_type = other DNA
gcctcagcctcctgagtggc

SEQ ID NO: 29330 - DNA, 20 bp, synthetic construct
  misc_feature 1..20: note = chemically synthesized
  source 1..20: mol_type = other DNA
cctcagcctcctgagtggct

SEQ ID NO: 29331 - DNA, 20 bp, synthetic construct
  misc_feature 1..20: note = chemically synthesized
  source 1..20: mol_type = other DNA
ctcctgagtggctgggatta

SEQ ID NO: 29332 - DNA, 20 bp, synthetic construct
  misc_feature 1..20: note = chemically synthesized
  source 1..20: mol_type = other DNA
tcctgagtggctgggattac

SEQ ID NO: 29333 - DNA, 20 bp, synthetic construct
  misc_feature 1..20: note = chemically synthesized
  source 1..20: mol_type = other DNA
gattacaggtgcgtaccacc

SEQ ID NO: 29334 - DNA, 20 bp, synthetic construct
  misc_feature 1..20: note = chemically synthesized
  source 1..20: mol_type = other DNA
ctggctaatttttgtatttt

SEQ ID NO: 29335 - DNA, 20 bp, synthetic construct
  misc_feature 1..20: note = chemically synthesized
  source 1..20: mol_type = other DNA
gctaatttttgtatttttag

SEQ ID NO: 29336 - DNA, 20 bp, synthetic construct
  misc_feature 1..20: note = chemically synthesized
  source 1..20: mol_type = other DNA
taatttttgtatttttagta

SEQ ID NO: 29337 - DNA, 20 bp, synthetic construct
  misc_feature 1..20: note = chemically synthesized
  source 1..20: mol_type = other DNA
ttttgtatttttagtagaga

SEQ ID NO: 29338 - DNA, 20 bp, synthetic construct
  misc_feature 1..20: note = chemically synthesized
  source 1..20: mol_type = other DNA
tttgtatttttagtagagac

SEQ ID NO: 29339 - DNA, 20 bp, synthetic construct
  misc_feature 1..20: note = chemically synthesized
  source 1..20: mol_type = other DNA
ttgtatttttagtagagacg

SEQ ID NO: 29340 - DNA, 20 bp, synthetic construct
  misc_feature 1..20: note = chemically synthesized
  source 1..20: mol_type = other DNA
gagacggggtttcaccatgt

SEQ ID NO: 29341 - DNA, 20 bp, synthetic construct
  misc_feature 1..20: note = chemically synthesized
  source 1..20: mol_type = other DNA
cggggtttcaccatgttggt

SEQ ID NO: 29342 - DNA, 20 bp, synthetic construct
  misc_feature 1..20: note = chemically synthesized
  source 1..20: mol_type = other DNA
ggggtttcaccatgttggtc

SEQ ID NO: 29343 - DNA, 20 bp, synthetic construct
  misc_feature 1..20: note = chemically synthesized
  source 1..20: mol_type = other DNA
tttcaccatgttggtcaggc

SEQ ID NO: 29344 - DNA, 20 bp, synthetic construct
  misc_feature 1..20: note = chemically synthesized
  source 1..20: mol_type = other DNA
tctcgaactcctgacctcat

SEQ ID NO: 29345 - DNA, 20 bp, synthetic construct
  misc_feature 1..20: note = chemically synthesized
  source 1..20: mol_type = other DNA
acctcatgagccacctgcct

SEQ ID NO: 29346 - DNA, 20 bp, synthetic construct
  misc_feature 1..20: note = chemically synthesized
  source 1..20: mol_type = other DNA
ccacctgcctcggcctccca

SEQ ID NO: 29347 - DNA, 20 bp, synthetic construct
  misc_feature 1..20: note = chemically synthesized
  source 1..20: mol_type = other DNA
gcctcggcctcccaaagtgc

SEQ ID NO: 29348 - DNA, 20 bp, synthetic construct
  misc_feature 1..20: note = chemically synthesized
  source 1..20: mol_type = other DNA
cctcggcctcccaaagtgct

SEQ ID NO: 29349 - DNA, 20 bp, synthetic construct
  misc_feature 1..20: note = chemically synthesized
  source 1..20: mol_type = other DNA
ctcccaaagtgctgggatta

SEQ ID NO: 29350 - DNA, 20 bp, synthetic construct
  misc_feature 1..20: note = chemically synthesized
  source 1..20: mol_type = other DNA
tcccaaagtgctgggattac

SEQ ID NO: 29351 - DNA, 20 bp, synthetic construct
  misc_feature 1..20: note = chemically synthesized
  source 1..20: mol_type = other DNA
agtgctgggattacaggtgt

SEQ ID NO: 29352 - DNA, 20 bp, synthetic construct
  misc_feature 1..20: note = chemically synthesized
  source 1..20: mol_type = other DNA
caggtgtaagccaccgcgcc

SEQ ID NO: 29353 - DNA, 20 bp, synthetic construct
  misc_feature 1..20: note = chemically synthesized
  source 1..20: mol_type = other DNA
tgtaagccaccgcgcccgga

SEQ ID NO: 29354 - DNA, 20 bp, synthetic construct
  misc_feature 1..20: note = chemically synthesized
  source 1..20: mol_type = other DNA
gattattacactgtataaaa

SEQ ID NO: 29355 - DNA, 20 bp, synthetic construct
  misc_feature 1..20: note = chemically synthesized
  source 1..20: mol_type = other DNA
attattacactgtataaaaa

SEQ ID NO: 29356 - DNA, 20 bp, synthetic construct
  misc_feature 1..20: note = chemically synthesized
  source 1..20: mol_type = other DNA
actgtataaaaaaggtctgt

SEQ ID NO: 29357 - DNA, 20 bp, synthetic construct
  misc_feature 1..20: note = chemically synthesized
  source 1..20: mol_type = other DNA
taaaaaaggtctgttagaat

SEQ ID NO: 29358 - DNA, 20 bp, synthetic construct
  misc_feature 1..20: note = chemically synthesized
  source 1..20: mol_type = other DNA
aaaaaaggtctgttagaatt

SEQ ID NO: 29359 - DNA, 20 bp, synthetic construct
  misc_feature 1..20: note = chemically synthesized
  source 1..20: mol_type = other DNA
aaaaaggtctgttagaattg

SEQ ID NO: 29360 - DNA, 20 bp, synthetic construct
  misc_feature 1..20: note = chemically synthesized
  source 1..20: mol_type = other DNA
gttagaattggggtccatga

SEQ ID NO: 29361 - DNA, 20 bp, synthetic construct
  misc_feature 1..20: note = chemically synthesized
  source 1..20: mol_type = other DNA
ttagaattggggtccatgat

SEQ ID NO: 29362 - DNA, 20 bp, synthetic construct
  misc_feature 1..20: note = chemically synthesized
  source 1..20: mol_type = other DNA
agaattggggtccatgatgg

SEQ ID NO: 29363 - DNA, 20 bp, synthetic construct
  misc_feature 1..20: note = chemically synthesized
  source 1..20: mol_type = other DNA
aattggggtccatgatggga

SEQ ID NO: 29364 - DNA, 20 bp, synthetic construct
  misc_feature 1..20: note = chemically synthesized
  source 1..20: mol_type = other DNA
ggggtccatgatgggagaga

SEQ ID NO: 29365 - DNA, 20 bp, synthetic construct
  misc_feature 1..20: note = chemically synthesized
  source 1..20: mol_type = other DNA
atgggagagaaagacactca

SEQ ID NO: 29366 - DNA, 20 bp, synthetic construct
  misc_feature 1..20: note = chemically synthesized
  source 1..20: mol_type = other DNA
aaagacactcaaagcccctg

SEQ ID NO: 29367 - DNA, 20 bp, synthetic construct
  misc_feature 1..20: note = chemically synthesized
  source 1..20: mol_type = other DNA
ctcaaagcccctgcagcacc

SEQ ID NO: 29368 - DNA, 20 bp, synthetic construct
  misc_feature 1..20: note = chemically synthesized
  source 1..20: mol_type = other DNA
cccctgcagcacccagcatc

SEQ ID NO: 29369 - DNA, 20 bp, synthetic construct
  misc_feature 1..20: note = chemically synthesized
  source 1..20: mol_type = other DNA
gcatccagcatgttgaatat

SEQ ID NO: 29370 - DNA, 20 bp, synthetic construct
  misc_feature 1..20: note = chemically synthesized
  source 1..20: mol_type = other DNA
tgttgaatatcagcctgttt

SEQ ID NO: 29371 - DNA, 20 bp, synthetic construct
  misc_feature 1..20: note = chemically synthesized
  source 1..20: mol_type = other DNA
gaaataattgtttcaaaaac

SEQ ID NO: 29372 - DNA, 20 bp, synthetic construct
  misc_feature 1..20: note = chemically synthesized
  source 1..20: mol_type = other DNA
caaaaaccagtgatcattta

SEQ ID NO: 29373 - DNA, 20 bp, synthetic construct
  misc_feature 1..20: note = chemically synthesized
  source 1..20: mol_type = other DNA
gatcatttaaagaaaactct

SEQ ID NO: 29374 - DNA, 20 bp, synthetic construct
  misc_feature 1..20: note = chemically synthesized
  source 1..20: mol_type = other DNA
atcatttaaagaaaactctt

SEQ ID NO: 29375 - DNA, 20 bp, synthetic construct
  misc_feature 1..20: note = chemically synthesized
  source 1..20: mol_type = other DNA
tttaaagaaaactcttaggc

SEQ ID NO: 29376 - DNA, 20 bp, synthetic construct
  misc_feature 1..20: note = chemically synthesized
  source 1..20: mol_type = other DNA
ttaaagaaaactcttaggca

SEQ ID NO: 29377 - DNA, 20 bp, synthetic construct
  misc_feature 1..20: note = chemically synthesized
  source 1..20: mol_type = other DNA
aaagaaaactcttaggcaag

SEQ ID NO: 29378 - DNA, 20 bp, synthetic construct
  misc_feature 1..20: note = chemically synthesized
  source 1..20: mol_type = other DNA
ttaggcaaggagtgcaatct

SEQ ID NO: 29379 - DNA, 20 bp, synthetic construct
  misc_feature 1..20: note = chemically synthesized
  source 1..20: mol_type = other DNA
gtgcaatcttggaatctgct

SEQ ID NO: 29380 - DNA, 20 bp, synthetic construct
  misc_feature 1..20: note = chemically synthesized
  source 1..20: mol_type = other DNA
tgcaatcttggaatctgctg

SEQ ID NO: 29381 - DNA, 20 bp, synthetic construct
  misc_feature 1..20: note = chemically synthesized
  source 1..20: mol_type = other DNA
gaatctgctgaggtctaact

SEQ ID NO: 29382 - DNA, 20 bp, synthetic construct
  misc_feature 1..20: note = chemically synthesized
  source 1..20: mol_type = other DNA
taactgagtgccccaaacct

SEQ ID NO: 29383 - DNA, 20 bp, synthetic construct
  misc_feature 1..20: note = chemically synthesized
  source 1..20: mol_type = other DNA
ctgagtgccccaaaccttgg

SEQ ID NO: 29384 - DNA, 20 bp, synthetic construct
  misc_feature 1..20: note = chemically synthesized
  source 1..20: mol_type = other DNA
aaccttggcagcatattttc

SEQ ID NO: 29385 - DNA, 20 bp, synthetic construct
  misc_feature 1..20: note = chemically synthesized
  source 1..20: mol_type = other DNA
accttggcagcatattttct

SEQ ID NO: 29386 - DNA, 20 bp, synthetic construct
  misc_feature 1..20: note = chemically synthesized
  source 1..20: mol_type = other DNA
attttctgggcacttttgct

SEQ ID NO: 29387 - DNA, 20 bp, synthetic construct
  misc_feature 1..20: note = chemically synthesized
  source 1..20: mol_type = other DNA
tttctgggcacttttgcttg

SEQ ID NO: 29388 - DNA, 20 bp, synthetic construct
  misc_feature 1..20: note = chemically synthesized
  source 1..20: mol_type = other DNA
cacttttgcttggagtttcc

SEQ ID NO: 29389 - DNA, 20 bp, synthetic construct
  misc_feature 1..20: note = chemically synthesized
  source 1..20: mol_type = other DNA
cttttgcttggagtttccaa

SEQ ID NO: 29390 - DNA, 20 bp, synthetic construct
  misc_feature 1..20: note = chemically synthesized
  source 1..20: mol_type = other DNA
ttggagtttccaagagcatt

SEQ ID NO: 29391 - DNA, 20 bp, synthetic construct
  misc_feature 1..20: note = chemically synthesized
  source 1..20: mol_type = other DNA
agagcattcagattaaaacc

SEQ ID NO: 29392 - DNA, 20 bp, synthetic construct
  misc_feature 1..20: note = chemically synthesized
  source 1..20: mol_type = other DNA
agattaaaaccaagcccttc

SEQ ID NO: 29393 - DNA, 20 bp, synthetic construct
  misc_feature 1..20: note = chemically synthesized
  source 1..20: mol_type = other DNA
ttaaaaccaagcccttcaag

SEQ ID NO: 29394 - DNA, 20 bp, synthetic construct
  misc_feature 1..20: note = chemically synthesized
  source 1..20: mol_type = other DNA
aaccaagcccttcaagtggt

SEQ ID NO: 29395 - DNA, 20 bp, synthetic construct
  misc_feature 1..20: note = chemically synthesized
  source 1..20: mol_type = other DNA
accaagcccttcaagtggtc

SEQ ID NO: 29396 - DNA, 20 bp, synthetic construct
  misc_feature 1..20: note = chemically synthesized
  source 1..20: mol_type = other DNA
aagtggtcaggaatatcttt

SEQ ID NO: 29397 - DNA, 20 bp, synthetic construct
  misc_feature 1..20: note = chemically synthesized
  source 1..20: mol_type = other DNA
agtggtcaggaatatctttc

SEQ ID NO: 29398 - DNA, 20 bp, synthetic construct
  misc_feature 1..20: note = chemically synthesized
  source 1..20: mol_type = other DNA
tgatttttttttttttttga

SEQ ID NO: 29399 - DNA, 20 bp, synthetic construct
  misc_feature 1..20: note = chemically synthesized
  source 1..20: mol_type = other DNA
ttttttttttttttgatagt

SEQ ID NO: 29400 - DNA, 20 bp, synthetic construct
  misc_feature 1..20: note = chemically synthesized
  source 1..20: mol_type = other DNA
tttttttttttttgatagtg

SEQ ID NO: 29401 - DNA, 20 bp, synthetic construct
  misc_feature 1..20: note = chemically synthesized
  source 1..20: mol_type = other DNA
tagtgaggttaacattgacg

SEQ ID NO: 29402 - DNA, 20 bp, synthetic construct
  misc_feature 1..20: note = chemically synthesized
  source 1..20: mol_type = other DNA
gaggttaacattgacgaaga

SEQ ID NO: 29403 - DNA, 20 bp, synthetic construct
  misc_feature 1..20: note = chemically synthesized
  source 1..20: mol_type = other DNA
ataattcttattttataaat

SEQ ID NO: 29404 - DNA, 20 bp, synthetic construct
  misc_feature 1..20: note = chemically synthesized
  source 1..20: mol_type = other DNA
attttataaatcagtgtccc

SEQ ID NO: 29405 - DNA, 20 bp, synthetic construct
  misc_feature 1..20: note = chemically synthesized
  source 1..20: mol_type = other DNA
ttataaatcagtgtccccgg

SEQ ID NO: 29406 - DNA, 20 bp, synthetic construct
  misc_feature 1..20: note = chemically synthesized
  source 1..20: mol_type = other DNA
atcagtgtccccggaagtaa

SEQ ID NO: 29407 - DNA, 20 bp, synthetic construct
  misc_feature 1..20: note = chemically synthesized
  source 1..20: mol_type = other DNA
agtgtccccggaagtaatag

SEQ ID NO: 29408 - DNA, 20 bp, synthetic construct
  misc_feature 1..20: note = chemically synthesized
  source 1..20: mol_type = other DNA
gtgtccccggaagtaatagt

SEQ ID NO: 29409 - DNA, 20 bp, synthetic construct
  misc_feature 1..20: note = chemically synthesized
  source 1..20: mol_type = other DNA
cccggaagtaatagtaggat

SEQ ID NO: 29410 - DNA, 20 bp, synthetic construct
  misc_feature 1..20: note = chemically synthesized
  source 1..20: mol_type = other DNA
aagtaatagtaggattagaa

SEQ ID NO: 29411 - DNA, 20 bp, synthetic construct
  misc_feature 1..20: note = chemically synthesized
  source 1..20: mol_type = other DNA
taatagtaggattagaatgg

SEQ ID NO: 29412 - DNA, 20 bp, synthetic construct
  misc_feature 1..20: note = chemically synthesized
  source 1..20: mol_type = other DNA
attagaatggaagtattttg

SEQ ID NO: 29413 - DNA, 20 bp, synthetic construct
  misc_feature 1..20: note = chemically synthesized
  source 1..20: mol_type = other DNA
ttagaatggaagtattttgt

SEQ ID NO: 29414 - DNA, 20 bp, synthetic construct
  misc_feature 1..20: note = chemically synthesized
  source 1..20: mol_type = other DNA
ggaagtattttgtaggctgt

SEQ ID NO: 29415 - DNA, 20 bp, synthetic construct
  misc_feature 1..20: note = chemically synthesized
  source 1..20: mol_type = other DNA
ggctgttggttctgttctta

SEQ ID NO: 29416 - DNA, 20 bp, synthetic construct
  misc_feature 1..20: note = chemically synthesized
  source 1..20: mol_type = other DNA
tgttcttacagtatgccaca

SEQ ID NO: 29417 - DNA, 20 bp, synthetic construct
  misc_feature 1..20: note = chemically synthesized
  source 1..20: mol_type = other DNA
cacatagctttgactccttt

SEQ ID NO: 29418 - DNA, 20 bp, synthetic construct
  misc_feature 1..20: note = chemically synthesized
  source 1..20: mol_type = other DNA
catagctttgactccttttg

SEQ ID NO: 29419 - DNA, 20 bp, synthetic construct
  misc_feature 1..20: note = chemically synthesized
  source 1..20: mol_type = other DNA
ctttgactccttttggagta

SEQ ID NO: 29420 - DNA, 20 bp, synthetic construct
  misc_feature 1..20: note = chemically synthesized
  source 1..20: mol_type = other DNA
tccttttggagtatagtgtg

SEQ ID NO: 29421 - DNA, 20 bp, synthetic construct
  misc_feature 1..20: note = chemically synthesized
  source 1..20: mol_type = other DNA
ccttttggagtatagtgtga

SEQ ID NO: 29422 - DNA, 20 bp, synthetic construct
  misc_feature 1..20: note = chemically synthesized
  source 1..20: mol_type = other DNA
tttggagtatagtgtgaagg

SEQ ID NO: 29423 - DNA, 20 bp, synthetic construct
  misc_feature 1..20: note = chemically synthesized
  source 1..20: mol_type = other DNA
ggagtatagtgtgaaggaag

SEQ ID NO: 29424 - DNA, 20 bp, synthetic construct
  misc_feature 1..20: note = chemically synthesized
  source 1..20: mol_type = other DNA
agtgtgaaggaagcagattt

SEQ ID NO: 29425 - DNA, 20 bp, synthetic construct
  misc_feature 1..20: note = chemically synthesized
  source 1..20: mol_type = other DNA
gtgtgaaggaagcagatttg

SEQ ID NO: 29426 - DNA, 20 bp, synthetic construct
  misc_feature 1..20: note = chemically synthesized
  source 1..20: mol_type = other DNA
aagcagatttgaggaatttt

SEQ ID NO: 29427 - DNA, 20 bp, synthetic construct
  misc_feature 1..20: note = chemically synthesized
  source 1..20: mol_type = other DNA
gatttgaggaattttgagtc

SEQ ID NO: 29428 - DNA, 20 bp, synthetic construct
  misc_feature 1..20: note = chemically synthesized
  source 1..20: mol_type = other DNA
ttgaggaattttgagtctgg

SEQ ID NO: 29429 - DNA, 20 bp, synthetic construct
  misc_feature 1..20: note = chemically synthesized
  source 1..20: mol_type = other DNA
aggaattttgagtctggtgg

SEQ ID NO: 29430 - DNA, 20 bp, synthetic construct
  misc_feature 1..20: note = chemically synthesized
  source 1..20: mol_type = other DNA
ggtggaagttccaaaataac

SEQ ID NO: 29431 - DNA, 20 bp, synthetic construct
  misc_feature 1..20: note = chemically synthesized
  source 1..20: mol_type = other DNA
tccaaaataactggtgatgc

SEQ ID NO: 29432 - DNA, 20 bp, synthetic construct
  misc_feature 1..20: note = chemically synthesized
  source 1..20: mol_type = other DNA
caagcacaccttccttcttc

SEQ ID NO: 29433 - DNA, 20 bp, synthetic construct
  misc_feature 1..20: note = chemically synthesized
  source 1..20: mol_type = other DNA
agcacaccttccttcttcaa

SEQ ID NO: 29434 - DNA, 20 bp, synthetic construct
  misc_feature 1..20: note = chemically synthesized
  source 1..20: mol_type = other DNA
cttcttcaagagttcatctt

SEQ ID NO: 29435 - DNA, 20 bp, synthetic construct
  misc_feature 1..20: note = chemically synthesized
  source 1..20: mol_type = other DNA
gttcatcttgagttcctaac

SEQ ID NO: 29436 - DNA, 20 bp, synthetic construct
  misc_feature 1..20: note = chemically synthesized
  source 1..20: mol_type = other DNA
catcttgagttcctaaccag

SEQ ID NO: 29437 - DNA, 20 bp, synthetic construct
  misc_feature 1..20: note = chemically synthesized
  source 1..20: mol_type = other DNA
tcttgagttcctaaccagca

SEQ ID NO: 29438 - DNA, 20 bp, synthetic construct
  misc_feature 1..20: note = chemically synthesized
  source 1..20: mol_type = other DNA
atttctttcctctgactgcc

SEQ ID NO: 29439 - DNA, 20 bp, synthetic construct
  misc_feature 1..20: note = chemically synthesized
  source 1..20: mol_type = other DNA
tttctttcctctgactgcct

SEQ ID NO: 29440 - DNA, 20 bp, synthetic construct
  misc_feature 1..20: note = chemically synthesized
  source 1..20: mol_type = other DNA
tctttcctctgactgcctag

SEQ ID NO: 29441 - DNA, 20 bp, synthetic construct
  misc_feature 1..20: note = chemically synthesized
  source 1..20: mol_type = other DNA
tttcctctgactgcctagga

SEQ ID NO: 29442 - DNA, 20 bp, synthetic construct
  misc_feature 1..20: note = chemically synthesized
  source 1..20: mol_type = other DNA
ctctgactgcctaggagaga

SEQ ID NO: 29443 - DNA, 20 bp, synthetic construct
  misc_feature 1..20: note = chemically synthesized
  source 1..20: mol_type = other DNA
ctaggagagacagtactctt

SEQ ID NO: 29444 - DNA, 20 bp, synthetic construct
  misc_feature 1..20: note = chemically synthesized
  source 1..20: mol_type = other DNA
ctcttcagtttgcattcccc

SEQ ID NO: 29445 - DNA, 20 bp, synthetic construct
  misc_feature 1..20: note = chemically synthesized
  source 1..20: mol_type = other DNA
cttcagtttgcattcccctg

SEQ ID NO: 29446 - DNA, 20 bp, synthetic construct
  misc_feature 1..20: note = chemically synthesized
  source 1..20: mol_type = other DNA
cattcccctggagttacatt

SEQ ID NO: 29447 - DNA, 20 bp, synthetic construct
  misc_feature 1..20: note = chemically synthesized
  source 1..20: mol_type = other DNA
cctggagttacattaagtca

SEQ ID NO: 29448 - DNA, 20 bp, synthetic construct
  misc_feature 1..20: note = chemically synthesized
  source 1..20: mol_type = other DNA
gtcatggaacttctcacttc

SEQ ID NO: 29449 - DNA, 20 bp, synthetic construct
  misc_feature 1..20: note = chemically synthesized
  source 1..20: mol_type = other DNA
ttctcacttccagtaaaatc

SEQ ID NO: 29450 - DNA, 20 bp, synthetic construct
  misc_feature 1..20: note = chemically synthesized
  source 1..20: mol_type = other DNA
tcacttccagtaaaatccag

SEQ ID NO: 29451 - DNA, 20 bp, synthetic construct
  misc_feature 1..20: note = chemically synthesized
  source 1..20: mol_type = other DNA
cttccagtaaaatccagaag

SEQ ID NO: 29452 - DNA, 20 bp, synthetic construct
  misc_feature 1..20: note = chemically synthesized
  source 1..20: mol_type = other DNA
cattgtctgtttttctatct

SEQ ID NO: 29453 - DNA, 20 bp, synthetic construct
  misc_feature 1..20: note = chemically synthesized
  source 1..20: mol_type = other DNA
ttttctatcttagtttaaat

SEQ ID NO: 29454 - DNA, 20 bp, synthetic construct
  misc_feature 1..20: note = chemically synthesized
  source 1..20: mol_type = other DNA
tttctatcttagtttaaatt

SEQ ID NO: 29455 - DNA, 20 bp, synthetic construct
  misc_feature 1..20: note = chemically synthesized
  source 1..20: mol_type = other DNA
atatcttattacgaaccaca

SEQ ID NO: 29456 - DNA, 20 bp, synthetic construct
  misc_feature 1..20: note = chemically synthesized
  source 1..20: mol_type = other DNA
tgtattttaaaaaatgctcc

SEQ ID NO: 29457 - DNA, 20 bp, synthetic construct
  misc_feature 1..20: note = chemically synthesized
  source 1..20: mol_type = other DNA
gtattttaaaaaatgctccc

SEQ ID NO: 29458 - DNA, 20 bp, synthetic construct
  misc_feature 1..20: note = chemically synthesized
  source 1..20: mol_type = other DNA
ttttaaaaaatgctcccagg

SEQ ID NO: 29459 - DNA, 20 bp, synthetic construct
  misc_feature 1..20: note = chemically synthesized
  source 1..20: mol_type = other DNA
aatgctcccaggaagtactt

SEQ ID NO: 29460 - DNA, 20 bp, synthetic construct
  misc_feature 1..20: note = chemically synthesized
  source 1..20: mol_type = other DNA
caggaagtacttaagcttta

SEQ ID NO: 29461 - DNA, 20 bp, synthetic construct
  misc_feature 1..20: note = chemically synthesized
  source 1..20: mol_type = other DNA
gaatacttttatatacatga

SEQ ID NO: 29462 - DNA, 20 bp, synthetic construct
  misc_feature 1..20: note = chemically synthesized
  source 1..20: mol_type = other DNA
ttccttgtgattctataaat

SEQ ID NO: 29463 - DNA, 20 bp, synthetic construct
  misc_feature 1..20: note = chemically synthesized
  source 1..20: mol_type = other DNA
tgtgattctataaattagat

SEQ ID NO: 29464 - DNA, 20 bp, synthetic construct
  misc_feature 1..20: note = chemically synthesized
  source 1..20: mol_type = other DNA
ttctataaattagataagaa

SEQ ID NO: 29465 - DNA, 20 bp, synthetic construct
  misc_feature 1..20: note = chemically synthesized
  source 1..20: mol_type = other DNA
taaattagataagaaaagaa

SEQ ID NO: 29466 - DNA, 20 bp, synthetic construct
  misc_feature 1..20: note = chemically synthesized
  source 1..20: mol_type = other DNA
gataagaaaagaatagactg

SEQ ID NO: 29467 - DNA, 20 bp, synthetic construct
  misc_feature 1..20: note = chemically synthesized
  source 1..20: mol_type = other DNA
aaagaatagactgaagttga

SEQ ID NO: 29468 - DNA, 20 bp, synthetic construct
  misc_feature 1..20: note = chemically synthesized
  source 1..20: mol_type = other DNA
aagaatagactgaagttgaa

SEQ ID NO: 29469 - DNA, 20 bp, synthetic construct
  misc_feature 1..20: note = chemically synthesized
  source 1..20: mol_type = other DNA
actgaagttgaaaggaatcc

SEQ ID NO: 29470 - DNA, 20 bp, synthetic construct
  misc_feature 1..20: note = chemically synthesized
  source 1..20: mol_type = other DNA
atcctagtaatcactcattt

SEQ ID NO: 29471 - DNA, 20 bp, synthetic construct
  misc_feature 1..20: note = chemically synthesized
  source 1..20: mol_type = other DNA
cctagtaatcactcatttta

SEQ ID NO: 29472 - DNA, 20 bp, synthetic construct
  misc_feature 1..20: note = chemically synthesized
  source 1..20: mol_type = other DNA
taatcactcattttagagat

SEQ ID NO: 29473 - DNA, 20 bp, synthetic construct
  misc_feature 1..20: note = chemically synthesized
  source 1..20: mol_type = other DNA
attttagagatcagaataat

SEQ ID NO: 29474 - DNA, 20 bp, synthetic construct
  misc_feature 1..20: note = chemically synthesized
  source 1..20: mol_type = other DNA
ttttagagatcagaataata

SEQ ID NO: 29475 - DNA, 20 bp, synthetic construct
  misc_feature 1..20: note = chemically synthesized
  source 1..20: mol_type = other DNA
tttagagatcagaataataa

SEQ ID NO: 29476 - DNA, 20 bp, synthetic construct
  misc_feature 1..20: note = chemically synthesized
  source 1..20: mol_type = other DNA
atcagaataataagggccca

SEQ ID NO: 29477 - DNA, 20 bp, synthetic construct
  misc_feature 1..20: note = chemically synthesized
  source 1..20: mol_type = other DNA
ataataagggcccaaagatt

SEQ ID NO: 29478 - DNA, 20 bp, synthetic construct
  misc_feature 1..20: note = chemically synthesized
  source 1..20: mol_type = other DNA
aagggcccaaagattaagtg

SEQ ID NO: 29479 - DNA, 20 bp, synthetic construct
  misc_feature 1..20: note = chemically synthesized
  source 1..20: mol_type = other DNA
aaagattaagtgaagtacct

SEQ ID NO: 29480 - DNA, 20 bp, synthetic construct
  misc_feature 1..20: note = chemically synthesized
  source 1..20: mol_type = other DNA
aagtgaagtacctaagatca

SEQ ID NO: 29481 - DNA, 20 bp, synthetic construct
  misc_feature 1..20: note = chemically synthesized
  source 1..20: mol_type = other DNA
acagtgtgaaaaaaacatca

SEQ ID NO: 29482 - DNA, 20 bp, synthetic construct
  misc_feature 1..20: note = chemically synthesized
  source 1..20: mol_type = other DNA
gtgaaaaaaacatcatagcc

SEQ ID NO: 29483 - DNA, 20 bp, synthetic construct
  misc_feature 1..20: note = chemically synthesized
  source 1..20: mol_type = other DNA
ttattattctgatctctaaa

SEQ ID NO: 29484 - DNA, 20 bp, synthetic construct
  misc_feature 1..20: note = chemically synthesized
  source 1..20: mol_type = other DNA
tctctaaaatgagtgattac

SEQ ID NO: 29485 - DNA, 20 bp, synthetic construct
  misc_feature 1..20: note = chemically synthesized
  source 1..20: mol_type = other DNA
ttcttttcttatctaattta

SEQ ID NO: 29486 - DNA, 20 bp, synthetic construct
  misc_feature 1..20: note = chemically synthesized
  source 1..20: mol_type = other DNA
aaaacagacaatgactgctt

SEQ ID NO: 29487 - DNA, 20 bp, synthetic construct
  misc_feature 1..20: note = chemically synthesized
  source 1..20: mol_type = other DNA
atgacttaatgtaactccag

SEQ ID NO: 29488 - DNA, 20 bp, synthetic construct
  misc_feature 1..20: note = chemically synthesized
  source 1..20: mol_type = other DNA
ctccaggggaatgcaaactg

SEQ ID NO: 29489 - DNA, 20 bp, synthetic construct
  misc_feature 1..20: note = chemically synthesized
  source 1..20: mol_type = other DNA
ccttcacactatactccaaa

SEQ ID NO: 29490 - DNA, 20 bp, synthetic construct
  misc_feature 1..20: note = chemically synthesized
  source 1..20: mol_type = other DNA
gggacactgatttataaaat

SEQ ID NO: 29491 - DNA, 20 bp, synthetic construct
  misc_feature 1..20: note = chemically synthesized
  source 1..20: mol_type = other DNA
taaaataagaattataaaat

SEQ ID NO: 29492 - DNA, 20 bp, synthetic construct
  misc_feature 1..20: note = chemically synthesized
  source 1..20: mol_type = other DNA
aaataagaatttttaaaaat

SEQ ID NO: 29493 - DNA, 20 bp, synthetic construct
  misc_feature 1..20: note = chemically synthesized
  source 1..20: mol_type = other DNA
ttgaagggcttggttttaat

SEQ ID NO: 29494 - DNA, 20 bp, synthetic construct
  misc_feature 1..20: note = chemically synthesized
  source 1..20: mol_type = other DNA
caagattgcactccttgcct

SEQ ID NO: 29495 - DNA, 20 bp, synthetic construct
  misc_feature 1..20: note = chemically synthesized
  source 1..20: mol_type = other DNA
acaggctgatattcaacatg

SEQ ID NO: 29496 - DNA, 20 bp, synthetic construct
  misc_feature 1..20: note = chemically synthesized
  source 1..20: mol_type = other DNA
gatattcaacatgctggatg

SEQ ID NO: 29497 - DNA, 20 bp, synthetic construct
  misc_feature 1..20: note = chemically synthesized
  source 1..20: mol_type = other DNA
tgctgggtgctgcaggggct

SEQ ID NO: 29498 - DNA, 20 bp, synthetic construct
  misc_feature 1..20: note = chemically synthesized
  source 1..20: mol_type = other DNA
ggcaggtggctcatgaggtc

SEQ ID NO: 29499 - DNA, 20 bp, synthetic construct
  misc_feature 1..20: note = chemically synthesized
  source 1..20: mol_type = other DNA
ttgcactccagcctgggcaa

SEQ ID NO: 29500 - DNA, 20 bp, synthetic construct
  misc_feature 1..20: note = chemically synthesized
  source 1..20: mol_type = other DNA
cttccctgcttctgccattc

SEQ ID NO: 29501 - DNA, 20 bp, synthetic construct
  misc_feature 1..20: note = chemically synthesized
  source 1..20: mol_type = other DNA
cccaaattgtcaatcttgta

SEQ ID NO: 29502 - DNA, 20 bp, synthetic construct
  misc_feature 1..20: note = chemically synthesized
  source 1..20: mol_type = other DNA
cagcactatgggaggcctag

SEQ ID NO: 29503 - DNA, 20 bp, synthetic construct
  misc_feature 1..20: note = chemically synthesized
  source 1..20: mol_type = other DNA
actatgggaggcctaggagg

SEQ ID NO: 29504 - DNA, 20 bp, synthetic construct
  misc_feature 1..20: note = chemically synthesized
  source 1..20: mol_type = other DNA
tacttgggaagctgaggcag

SEQ ID NO: 29505 - DNA, 20 bp, synthetic construct
  misc_feature 1..20: note = chemically synthesized
  source 1..20: mol_type = other DNA
taggcggaggttgtggtgag

SEQ ID NO: 29506 - DNA, 20 bp, synthetic construct
  misc_feature 1..20: note = chemically synthesized
  source 1..20: mol_type = other DNA
ccttgccactgcactccagc

SEQ ID NO: 29507 - DNA, 20 bp, synthetic construct
  misc_feature 1..20: note = chemically synthesized
  source 1..20: mol_type = other DNA
ttttgttctgtttgttttga

SEQ ID NO: 29508 - DNA, 20 bp, synthetic construct
  misc_feature 1..20: note = chemically synthesized
  source 1..20: mol_type = other DNA
gggttcttctccacagtgaa

SEQ ID NO: 29509 - DNA, 20 bp, synthetic construct
  misc_feature 1..20: note = chemically synthesized
  source 1..20: mol_type = other DNA
agaagaaatatataaaaagt

SEQ ID NO: 29510 - DNA, 20 bp, synthetic construct
  misc_feature 1..20: note = chemically synthesized
  source 1..20: mol_type = other DNA
gctgaacttgtctcaagacc

SEQ ID NO: 29511 - DNA, 20 bp, synthetic construct
  misc_feature 1..20: note = chemically synthesized
  source 1..20: mol_type = other DNA
actctttctaggcatcagca

SEQ ID NO: 29512 - DNA, 20 bp, synthetic construct
  misc_feature 1..20: note = chemically synthesized
  source 1..20: mol_type = other DNA
ggcagagcatggggcaggga

SEQ ID NO: 29513 - DNA, 20 bp, synthetic construct
  misc_feature 1..20: note = chemically synthesized
  source 1..20: mol_type = other DNA
aaacaggccactcgtgcaat

SEQ ID NO: 29514 - DNA, 20 bp, synthetic construct
  misc_feature 1..20: note = chemically synthesized
  source 1..20: mol_type = other DNA
tgcctttaccaaaggccatc

SEQ ID NO: 29515 - DNA, 20 bp, synthetic construct
  misc_feature 1..20: note = chemically synthesized
  source 1..20: mol_type = other DNA
actccctttgatcagttaaa

SEQ ID NO: 29516 - DNA, 20 bp, synthetic construct
  misc_feature 1..20: note = chemically synthesized
  source 1..20: mol_type = other DNA
gtagacagtcattatttatt

SEQ ID NO: 29517 - DNA, 20 bp, synthetic construct
  misc_feature 1..20: note = chemically synthesized
  source 1..20: mol_type = other DNA
ctaggtaatctagccagaag

SEQ ID NO: 29518 - DNA, 20 bp, synthetic construct
  misc_feature 1..20: note = chemically synthesized
  source 1..20: mol_type = other DNA
ctagccagaaggtggatagg

SEQ ID NO: 29519 - DNA, 20 bp, synthetic construct
  misc_feature 1..20: note = chemically synthesized
  source 1..20: mol_type = other DNA
cttaggttcacggcctgtat

SEQ ID NO: 29520 - DNA, 20 bp, synthetic construct
  misc_feature 1..20: note = chemically synthesized
  source 1..20: mol_type = other DNA
atgttgtttctaattctctt

SEQ ID NO: 29521 - DNA, 20 bp, synthetic construct
  misc_feature 1..20: note = chemically synthesized
  source 1..20: mol_type = other DNA
tgcaaattaactgggccaga

SEQ ID NO: 29522 - DNA, 20 bp, synthetic construct
  misc_feature 1..20: note = chemically synthesized
  source 1..20: mol_type = other DNA
atttgtggcactaatttcta

SEQ ID NO: 29523 - DNA, 20 bp, synthetic construct
  misc_feature 1..20: note = chemically synthesized
  source 1..20: mol_type = other DNA
aaggtttgggaacctaaaat

SEQ ID NO: 29524 - DNA, 20 bp, synthetic construct
  misc_feature 1..20: note = chemically synthesized
  source 1..20: mol_type = other DNA
ctgacatttatcaccttctt

SEQ ID NO: 29525 - DNA, 20 bp, synthetic construct
  misc_feature 1..20: note = chemically synthesized
  source 1..20: mol_type = other DNA
aaaagcatatatttgaaaaa

SEQ ID NO: 29526 - DNA, 20 bp, synthetic construct
  misc_feature 1..20: note = chemically synthesized
  source 1..20: mol_type = other DNA
ctgttcctcctacccacccg

SEQ ID NO: 29527 - DNA, 20 bp, synthetic construct
  misc_feature 1..20: note = chemically synthesized
  source 1..20: mol_type = other DNA
acactttttaaaagacaaca

SEQ ID NO: 29528 - DNA, 20 bp, synthetic construct
  misc_feature 1..20: note = chemically synthesized
  source 1..20: mol_type = other DNA
acatagaatgtatagaaaca

SEQ ID NO: 29529 - DNA, 20 bp, synthetic construct
  misc_feature 1..20: note = chemically synthesized
  source 1..20: mol_type = other DNA
gactgattcactgttccaat

SEQ ID NO: 29530 - DNA, 20 bp, synthetic construct
  misc_feature 1..20: note = chemically synthesized
  source 1..20: mol_type = other DNA
cagaaaacatcacaaactag

SEQ ID NO: 29531 - DNA, 20 bp, synthetic construct
  misc_feature 1..20: note = chemically synthesized
  source 1..20: mol_type = other DNA
tgccacacatcttgagctct

SEQ ID NO: 29532 - DNA, 20 bp, synthetic construct
  misc_feature 1..20: note = chemically synthesized
  source 1..20: mol_type = other DNA
tgagctctctgggtactacg

SEQ ID NO: 29533 - DNA, 20 bp, synthetic construct
  misc_feature 1..20: note = chemically synthesized
  source 1..20: mol_type = other DNA
ctctgggtactacgccgaat

SEQ ID NO: 29534 - DNA, 20 bp, synthetic construct
  misc_feature 1..20: note = chemically synthesized
  source 1..20: mol_type = other DNA
tccccaagtatctctgacct

SEQ ID NO: 29535 - DNA, 20 bp, synthetic construct
  misc_feature 1..20: note = chemically synthesized
  source 1..20: mol_type = other DNA
aagagaaaaccagaacccaa

SEQ ID NO: 29536 - DNA, 20 bp, synthetic construct
  misc_feature 1..20: note = chemically synthesized
  source 1..20: mol_type = other DNA
ggcaatggtgaagggaagaa

SEQ ID NO: 29537 - DNA, 20 bp, synthetic construct
  misc_feature 1..20: note = chemically synthesized
  source 1..20: mol_type = other DNA
agggagtggttattttcctc

SEQ ID NO: 29538 - DNA, 20 bp, synthetic construct
  misc_feature 1..20: note = chemically synthesized
  source 1..20: mol_type = other DNA
tgacttgaagcagcagaact

SEQ ID NO: 29539 - DNA, 20 bp, synthetic construct
  misc_feature 1..20: note = chemically synthesized
  source 1..20: mol_type = other DNA
gaagcagcagaactgggagt

SEQ ID NO: 29540 - DNA, 20 bp, synthetic construct
  misc_feature 1..20: note = chemically synthesized
  source 1..20: mol_type = other DNA
acttggcgccgcaggaggcc

SEQ ID NO: 29541 - DNA, 20 bp, synthetic construct
  misc_feature 1..20: note = chemically synthesized
  source 1..20: mol_type = other DNA
cgccgcaggaggcccggggt

SEQ ID NO: 29542 - DNA, 20 bp, synthetic construct
  misc_feature 1..20: note = chemically synthesized
  source 1..20: mol_type = other DNA
gaggggcatgctgcgtccag

SEQ ID NO: 29543 - DNA, 20 bp, synthetic construct
  misc_feature 1..20: note = chemically synthesized
  source 1..20: mol_type = other DNA
ctgcgtccaggtgggttctg

SEQ ID NO: 29544 - DNA, 20 bp, synthetic construct
  misc_feature 1..20: note = chemically synthesized
  source 1..20: mol_type = other DNA
tttaaaagcacagcccccct

SEQ ID NO: 29545 - DNA, 20 bp, synthetic construct
  misc_feature 1..20: note = chemically synthesized
  source 1..20: mol_type = other DNA
gtttaggggctcccgcttta

SEQ ID NO: 29546 - DNA, 20 bp, synthetic construct
  misc_feature 1..20: note = chemically synthesized
  source 1..20: mol_type = other DNA
tacagaaaggaaaaacgtat

SEQ ID NO: 29547 - DNA, 20 bp, synthetic construct
  misc_feature 1..20: note = chemically synthesized
  source 1..20: mol_type = other DNA
agtacaatgacccgtgtgaa

SEQ ID NO: 29548 - DNA, 20 bp, synthetic construct
  misc_feature 1..20: note = chemically synthesized
  source 1..20: mol_type = other DNA
ctctttcccatttggaaggg

SEQ ID NO: 29549 - DNA, 20 bp, synthetic construct
  misc_feature 1..20: note = chemically synthesized
  source 1..20: mol_type = other DNA
cagccccattcccctaaagg

SEQ ID NO: 29550 - DNA, 20 bp, synthetic construct
  misc_feature 1..20: note = chemically synthesized
  source 1..20: mol_type = other DNA
taaattaaacagcgggctaa

SEQ ID NO: 29551 - DNA, 20 bp, synthetic construct
  misc_feature 1..20: note = chemically synthesized
  source 1..20: mol_type = other DNA
gttcatagctatagcagccc

SEQ ID NO: 29552 - DNA, 20 bp, synthetic construct
  misc_feature 1..20: note = chemically synthesized
  source 1..20: mol_type = other DNA
tgatgtccatttctctaaca

SEQ ID NO: 29553 - DNA, 20 bp, synthetic construct
  misc_feature 1..20: note = chemically synthesized
  source 1..20: mol_type = other DNA
gggaagttgtctgaaaaaaa

SEQ ID NO: 29554 - DNA, 20 bp, synthetic construct
  misc_feature 1..20: note = chemically synthesized
  source 1..20: mol_type = other DNA
gttgtctgaaaaaaagagaa

SEQ ID NO: 29555 - DNA, 20 bp, synthetic construct
  misc_feature 1..20: note = chemically synthesized
  source 1..20: mol_type = other DNA
tctgaaaaaaagagaatggg

SEQ ID NO: 29556 - DNA, 20 bp, synthetic construct
  misc_feature 1..20: note = chemically synthesized
  source 1..20: mol_type = other DNA
cacaccaggcccagggacaa

SEQ ID NO: 29557 - DNA, 20 bp, synthetic construct
  misc_feature 1..20: note = chemically synthesized
  source 1..20: mol_type = other DNA
gcccagggacaatggagtaa

SEQ ID NO: 29558 - DNA, 20 bp, synthetic construct
  misc_feature 1..20: note = chemically synthesized
  source 1..20: mol_type = other DNA
gcaaagtactacaagcagga

SEQ ID NO: 29559 - DNA, 20 bp, synthetic construct
  misc_feature 1..20: note = chemically synthesized
  source 1..20: mol_type = other DNA
cctttcagcaaactgtgtct

SEQ ID NO: 29560 - DNA, 20 bp, synthetic construct
  misc_feature 1..20: note = chemically synthesized
  source 1..20: mol_type = other DNA
catttccttatttctccaat

SEQ ID NO: 29561 - DNA, 20 bp, synthetic construct
  misc_feature 1..20: note = chemically synthesized
  source 1..20: mol_type = other DNA
aataaacagttctatatcta

SEQ ID NO: 29562 - DNA, 20 bp, synthetic construct
  misc_feature 1..20: note = chemically synthesized
  source 1..20: mol_type = other DNA
ttgtaggtcctaaacaaaga

SEQ ID NO: 29563 - DNA, 20 bp, synthetic construct
  misc_feature 1..20: note = chemically synthesized
  source 1..20: mol_type = other DNA
aaacaaagagaggatagcaa

SEQ ID NO: 29564 - DNA, 20 bp, synthetic construct
  misc_feature 1..20: note = chemically synthesized
  source 1..20: mol_type = other DNA
ggaggtaatataggcactgg

SEQ ID NO: 29565 - DNA, 20 bp, synthetic construct
  misc_feature 1..20: note = chemically synthesized
  source 1..20: mol_type = other DNA
ggtttaaaatctgtgagaaa

SEQ ID NO: 29566 - DNA, 20 bp, synthetic construct
  misc_feature 1..20: note = chemically synthesized
  source 1..20: mol_type = other DNA
cctgttacaaaaacttactt

SEQ ID NO: 29567 - DNA, 20 bp, synthetic construct
  misc_feature 1..20: note = chemically synthesized
  source 1..20: mol_type = other DNA
tcatttaaaaaaaaaagatc

SEQ ID NO: 29568 - DNA, 20 bp, synthetic construct
  misc_feature 1..20: note = chemically synthesized
  source 1..20: mol_type = other DNA
tatattaagattttaaattt

SEQ ID NO: 29569 - DNA, 20 bp, synthetic construct
  misc_feature 1..20: note = chemically synthesized
  source 1..20: mol_type = other DNA
agattttaaattttagagtt

SEQ ID NO: 29570 - DNA, 20 bp, synthetic construct
  misc_feature 1..20: note = chemically synthesized
  source 1..20: mol_type = other DNA
ccaccattaattctgtctgt

SEQ ID NO: 29571 - DNA, 20 bp, synthetic construct
  misc_feature 1..20: note = chemically synthesized
  source 1..20: mol_type = other DNA
gcatatactgagaaattaaa

SEQ ID NO: 29572 - DNA, 20 bp, synthetic construct
  misc_feature 1..20: note = chemically synthesized
  source 1..20: mol_type = other DNA
gcactcatagctcctaataa

SEQ ID NO: 29573 - DNA, 20 bp, synthetic construct
  misc_feature 1..20: note = chemically synthesized
  source 1..20: mol_type = other DNA
gaggttttatggacatttaa

SEQ ID NO: 29574 - DNA, 20 bp, synthetic construct
  misc_feature 1..20: note = chemically synthesized
  source 1..20: mol_type = other DNA
tttatggacatttaataggg

SEQ ID NO: 29575 - DNA, 20 bp, synthetic construct
  misc_feature 1..20: note = chemically synthesized
  source 1..20: mol_type = other DNA
ctaaagctggcatggcactg

SEQ ID NO: 29576 - DNA, 20 bp, synthetic construct
  misc_feature 1..20: note = chemically synthesized
  source 1..20: mol_type = other DNA
tatctgtcttgagcagcatt

SEQ ID NO: 29577 - DNA, 20 bp, synthetic construct
  misc_feature 1..20: note = chemically synthesized
  source 1..20: mol_type = other DNA
ttctccaacatcctttctca

SEQ ID NO: 29578 - DNA, 20 bp, synthetic construct
  misc_feature 1..20: note = chemically synthesized
  source 1..20: mol_type = other DNA
aagtgacaacacagatttct

SEQ ID NO: 29579 - DNA, 20 bp, synthetic construct
  misc_feature 1..20: note = chemically synthesized
  source 1..20: mol_type = other DNA
ggctggtcagaagataattg

SEQ ID NO: 29580 - DNA, 20 bp, synthetic construct
  misc_feature 1..20: note = chemically synthesized
  source 1..20: mol_type = other DNA
ctaaagtaatctgtagcatc

SEQ ID NO: 29581 - DNA, 20 bp, synthetic construct
  misc_feature 1..20: note = chemically synthesized
  source 1..20: mol_type = other DNA
tctgtagcatctagggttcc

SEQ ID NO: 29582 - DNA, 20 bp, synthetic construct
  misc_feature 1..20: note = chemically synthesized
  source 1..20: mol_type = other DNA
agatttttagatttcaaaag

SEQ ID NO: 29583 - DNA, 20 bp, synthetic construct
  misc_feature 1..20: note = chemically synthesized
  source 1..20: mol_type = other DNA
attatgttctaagataaagc

SEQ ID NO: 29584 - DNA, 20 bp, synthetic construct
  misc_feature 1..20: note = chemically synthesized
  source 1..20: mol_type = other DNA
ctaagataaagcaaggatgg

SEQ ID NO: 29585 - DNA, 20 bp, synthetic construct
  misc_feature 1..20: note = chemically synthesized
  source 1..20: mol_type = other DNA
gcaagttttttcacttatgt

SEQ ID NO: 29586 - DNA, 20 bp, synthetic construct
  misc_feature 1..20: note = chemically synthesized
  source 1..20: mol_type = other DNA
gttttttcacttatgtttga

SEQ ID NO: 29587 - DNA, 20 bp, synthetic construct
  misc_feature 1..20: note = chemically synthesized
  source 1..20: mol_type = other DNA
aatggatttctgctaagaga

SEQ ID NO: 29588 - DNA, 20 bp, synthetic construct
  misc_feature 1..20: note = chemically synthesized
  source 1..20: mol_type = other DNA
gaaagccttaaaactatgtc

SEQ ID NO: 29589 - DNA, 20 bp, synthetic construct
  misc_feature 1..20: note = chemically synthesized
  source 1..20: mol_type = other DNA
gtaagtactttatgttcctt

SEQ ID NO: 29590 - DNA, 20 bp, synthetic construct
  misc_feature 1..20: note = chemically synthesized
  source 1..20: mol_type = other DNA
ttagggtataatacacgcat

SEQ ID NO: 29591 - DNA, 20 bp, synthetic construct
  misc_feature 1..20: note = chemically synthesized
  source 1..20: mol_type = other DNA
attttcttgcaagtaattta

SEQ ID NO: 29592 - DNA, 20 bp, synthetic construct
  misc_feature 1..20: note = chemically synthesized
  source 1..20: mol_type = other DNA
tttttcaataaagggacaaa

SEQ ID NO: 29593 - DNA, 20 bp, synthetic construct
  misc_feature 1..20: note = chemically synthesized
  source 1..20: mol_type = other DNA
cgacaaacagctttcattac

SEQ ID NO: 29594 - DNA, 20 bp, synthetic construct
  misc_feature 1..20: note = chemically synthesized
  source 1..20: mol_type = other DNA
tgcatatgaaggtaagatgc

SEQ ID NO: 29595 - DNA, 20 bp, synthetic construct
  misc_feature 1..20: note = chemically synthesized
  source 1..20: mol_type = other DNA
gaaggtaagatgctggaatg

SEQ ID NO: 29596 - DNA, 20 bp, synthetic construct
  misc_feature 1..20: note = chemically synthesized
  source 1..20: mol_type = other DNA
agcaggaaaaaggaacaaaa

SEQ ID NO: 29597 - DNA, 20 bp, synthetic construct
  misc_feature 1..20: note = chemically synthesized
  source 1..20: mol_type = other DNA
ccataaatgtattttagcat

SEQ ID NO: 29598 - DNA, 20 bp, synthetic construct
  misc_feature 1..20: note = chemically synthesized
  source 1..20: mol_type = other DNA
attttagcataggaatcaac

SEQ ID NO: 29599 - DNA, 20 bp, synthetic construct
  misc_feature 1..20: note = chemically synthesized
  source 1..20: mol_type = other DNA
agcggtgtgtatccaaggca

SEQ ID NO: 29600 - DNA, 20 bp, synthetic construct
  misc_feature 1..20: note = chemically synthesized
  source 1..20: mol_type = other DNA
atttccactaccatttttaa

SEQ ID NO: 29601 - DNA, 20 bp, synthetic construct
  misc_feature 1..20: note = chemically synthesized
  source 1..20: mol_type = other DNA
aaagatacagatatcacagg

SEQ ID NO: 29602 - DNA, 20 bp, synthetic construct
  misc_feature 1..20: note = chemically synthesized
  source 1..20: mol_type = other DNA
aaaaaataaaaataaaaaca

SEQ ID NO: 29603 - DNA, 20 bp, synthetic construct
  misc_feature 1..20: note = chemically synthesized
  source 1..20: mol_type = other DNA
attctttctcttcttttttt

SEQ ID NO: 29604 - DNA, 20 bp, synthetic construct
  misc_feature 1..20: note = chemically synthesized
  source 1..20: mol_type = other DNA
cacatttaaatgcaagtctt

SEQ ID NO: 29605 - DNA, 20 bp, synthetic construct
  misc_feature 1..20: note = chemically synthesized
  source 1..20: mol_type = other DNA
cacttgacaaccaagtagat

SEQ ID NO: 29606 - DNA, 20 bp, synthetic construct
  misc_feature 1..20: note = chemically synthesized
  source 1..20: mol_type = other DNA
tgatgattaactaggacata

SEQ ID NO: 29607 - DNA, 20 bp, synthetic construct
  misc_feature 1..20: note = chemically synthesized
  source 1..20: mol_type = other DNA
ttgttgtgagaaatacaata

SEQ ID NO: 29608 - DNA, 20 bp, synthetic construct
  misc_feature 1..20: note = chemically synthesized
  source 1..20: mol_type = other DNA
gtttattacctcacccaatg

SEQ ID NO: 29609 - DNA, 20 bp, synthetic construct
  misc_feature 1..20: note = chemically synthesized
  source 1..20: mol_type = other DNA
catattttaaaaccaaatga

SEQ ID NO: 29610 - DNA, 20 bp, synthetic construct
  misc_feature 1..20: note = chemically synthesized
  source 1..20: mol_type = other DNA
tgctatctattctgtctata

SEQ ID NO: 29611 - DNA, 20 bp, synthetic construct
  misc_feature 1..20: note = chemically synthesized
  source 1..20: mol_type = other DNA
actgtacatgatatgtatta

SEQ ID NO: 29612 - DNA, 20 bp, synthetic construct
  misc_feature 1..20: note = chemically synthesized
  source 1..20: mol_type = other DNA
agcaacatgtttgctcagca

SEQ ID NO: 29613 - DNA, 20 bp, synthetic construct
  misc_feature 1..20: note = chemically synthesized
  source 1..20: mol_type = other DNA
gactagaaaaaaatcctaca

SEQ ID NO: 29614 - DNA, 20 bp, synthetic construct
  misc_feature 1..20: note = chemically synthesized
  source 1..20: mol_type = other DNA
gctggagggcgatggggaag

SEQ ID NO: 29615 - DNA, 20 bp, synthetic construct
  misc_feature 1..20: note = chemically synthesized
  source 1..20: mol_type = other DNA
ggaaggggagtggtgaaaaa

SEQ ID NO: 29616 - DNA, 20 bp, synthetic construct
  misc_feature 1..20: note = chemically synthesized
  source 1..20: mol_type = other DNA
tgaaaaagggggtgtcaggt

SEQ ID NO: 29617 - DNA, 20 bp, synthetic construct
  misc_feature 1..20: note = chemically synthesized
  source 1..20: mol_type = other DNA
gtgtcaggtgggagtgaggg

SEQ ID NO: 29618 - DNA, 20 bp, synthetic construct
  misc_feature 1..20: note = chemically synthesized
  source 1..20: mol_type = other DNA
cattttttcatgtgtttctc

SEQ ID NO: 29619 - DNA, 20 bp, synthetic construct
  misc_feature 1..20: note = chemically synthesized
  source 1..20: mol_type = other DNA
gcgcaaactcccgttctccg

SEQ ID NO: 29620 - DNA, 20 bp, synthetic construct
  misc_feature 1..20: note = chemically synthesized
  source 1..20: mol_type = other DNA
ggaggcaaaaggcgattgtc

SEQ ID NO: 29621 - DNA, 20 bp, synthetic construct
  misc_feature 1..20: note = chemically synthesized
  source 1..20: mol_type = other DNA
ggagtctccgaagctaagga

SEQ ID NO: 29622 - DNA, 20 bp, synthetic construct
  misc_feature 1..20: note = chemically synthesized
  source 1..20: mol_type = other DNA
cgcgtagccggcgagccact

SEQ ID NO: 29623 - DNA, 20 bp, synthetic construct
  misc_feature 1..20: note = chemically synthesized
  source 1..20: mol_type = other DNA
gcggtccgactcgccggcca

SEQ ID NO: 29624 - DNA, 20 bp, synthetic construct
  misc_feature 1..20: note = chemically synthesized
  source 1..20: mol_type = other DNA
tcctcctcgtccccgttctc

SEQ ID NO: 29625 - DNA, 20 bp, synthetic construct
  misc_feature 1..20: note = chemically synthesized
  source 1..20: mol_type = other DNA
cccgttctccgggatcaggt

SEQ ID NO: 29626 - DNA, 20 bp, synthetic construct
  misc_feature 1..20: note = chemically synthesized
  source 1..20: mol_type = other DNA
tgcccaccaagtcgctggtg

SEQ ID NO: 29627 - DNA, 20 bp, synthetic construct
  misc_feature 1..20: note = chemically synthesized
  source 1..20: mol_type = other DNA
tggcgcttcagcttgctggc

SEQ ID NO: 29628 - DNA, 20 bp, synthetic construct
  misc_feature 1..20: note = chemically synthesized
  source 1..20: mol_type = other DNA
ggggctgggagggaggaggg

SEQ ID NO: 29629 - DNA, 20 bp, synthetic construct
  misc_feature 1..20: note = chemically synthesized
  source 1..20: mol_type = other DNA
agggcggcttgctacctggc

SEQ ID NO: 29630 - DNA, 20 bp, synthetic construct
  misc_feature 1..20: note = chemically synthesized
  source 1..20: mol_type = other DNA
ggcgggaggctccatagcca

SEQ ID NO: 29631 - DNA, 20 bp, synthetic construct
  misc_feature 1..20: note = chemically synthesized
  source 1..20: mol_type = other DNA
cagcaccctgtcaaaggcac

SEQ ID NO: 29632 - DNA, 20 bp, synthetic construct
  misc_feature 1..20: note = chemically synthesized
  source 1..20: mol_type = other DNA
ctgtcaaaggcactcgggtg

SEQ ID NO: 29633 - DNA, 20 bp, synthetic construct
  misc_feature 1..20: note = chemically synthesized
  source 1..20: mol_type = other DNA
ccccaggcgctctatgcggt

SEQ ID NO: 29634 - DNA, 20 bp, synthetic construct
  misc_feature 1..20: note = chemically synthesized
  source 1..20: mol_type = other DNA
ggtggtggactaaacagggg

SEQ ID NO: 29635 - DNA, 20 bp, synthetic construct
  misc_feature 1..20: note = chemically synthesized
  source 1..20: mol_type = other DNA
gtggactaaacaggggggga

SEQ ID NO: 29636 - DNA, 20 bp, synthetic construct
  misc_feature 1..20: note = chemically synthesized
  source 1..20: mol_type = other DNA
tggtattcttagcaggttaa

SEQ ID NO: 29637 - DNA, 20 bp, synthetic construct
  misc_feature 1..20: note = chemically synthesized
  source 1..20: mol_type = other DNA
aaggggttattgtctgcaat

SEQ ID NO: 29638 - DNA, 20 bp, synthetic construct
  misc_feature 1..20: note = chemically synthesized
  source 1..20: mol_type = other DNA
cattctgcacctagtcctga

SEQ ID NO: 29639 - DNA, 20 bp, synthetic construct
  misc_feature 1..20: note = chemically synthesized
  source 1..20: mol_type = other DNA
cctgaagggataccaacccg

SEQ ID NO: 29640 - DNA, 20 bp, synthetic construct
  misc_feature 1..20: note = chemically synthesized
  source 1..20: mol_type = other DNA
tctaagtagattcttaatcc

SEQ ID NO: 29641 - DNA, 20 bp, synthetic construct
  misc_feature 1..20: note = chemically synthesized
  source 1..20: mol_type = other DNA
gcaagagaaaccatgcactg

SEQ ID NO: 29642 - DNA, 20 bp, synthetic construct
  misc_feature 1..20: note = chemically synthesized
  source 1..20: mol_type = other DNA
tgtgcctggcacgtctgagc

SEQ ID NO: 29643 - DNA, 20 bp, synthetic construct
  misc_feature 1..20: note = chemically synthesized
  source 1..20: mol_type = other DNA
atcctgaccagttctggctt

SEQ ID NO: 29644 - DNA, 20 bp, synthetic construct
  misc_feature 1..20: note = chemically synthesized
  source 1..20: mol_type = other DNA
tcccagctttctattccccc

SEQ ID NO: 29645 - DNA, 20 bp, synthetic construct
  misc_feature 1..20: note = chemically synthesized
  source 1..20: mol_type = other DNA
tgttgatattgttaaaatga

SEQ ID NO: 29646 - DNA, 20 bp, synthetic construct
  misc_feature 1..20: note = chemically synthesized
  source 1..20: mol_type = other DNA
tctcacaccccagactgtgg

SEQ ID NO: 29647 - DNA, 20 bp, synthetic construct
  misc_feature 1..20: note = chemically synthesized
  source 1..20: mol_type = other DNA
cccagactgtgggaggatca

SEQ ID NO: 29648 - DNA, 20 bp, synthetic construct
  misc_feature 1..20: note = chemically synthesized
  source 1..20: mol_type = other DNA
ggacgtccatttttatctca

SEQ ID NO: 29649 - DNA, 20 bp, synthetic construct
  misc_feature 1..20: note = chemically synthesized
  source 1..20: mol_type = other DNA
aaaaacttcattcagattta

SEQ ID NO: 29650 - DNA, 20 bp, synthetic construct
  misc_feature 1..20: note = chemically synthesized
  source 1..20: mol_type = other DNA
ataggctgtatccaatcttt

SEQ ID NO: 29651 - DNA, 20 bp, synthetic construct
  misc_feature 1..20: note = chemically synthesized
  source 1..20: mol_type = other DNA
gcaagtctggaaaagttagg

SEQ ID NO: 29652 - DNA, 20 bp, synthetic construct
  misc_feature 1..20: note = chemically synthesized
  source 1..20: mol_type = other DNA
tcccttgctgaaaagaaccc

SEQ ID NO: 29653 - DNA, 20 bp, synthetic construct
  misc_feature 1..20: note = chemically synthesized
  source 1..20: mol_type = other DNA
acattaaatatatatatata

SEQ ID NO: 29654 - DNA, 20 bp, synthetic construct
  misc_feature 1..20: note = chemically synthesized
  source 1..20: mol_type = other DNA
agtaatggtagccaaaggac

SEQ ID NO: 29655 - DNA, 20 bp, synthetic construct
  misc_feature 1..20: note = chemically synthesized
  source 1..20: mol_type = other DNA
tcttttaaaagaagggctgc

SEQ ID NO: 29656 - DNA, 20 bp, synthetic construct
  misc_feature 1..20: note = chemically synthesized
  source 1..20: mol_type = other DNA
aaaaatctaccagggaggtt

SEQ ID NO: 29657 - DNA, 20 bp, synthetic construct
  misc_feature 1..20: note = chemically synthesized
  source 1..20: mol_type = other DNA
ctaccagggaggttaagagt

SEQ ID NO: 29658 - DNA, 20 bp, synthetic construct
  misc_feature 1..20: note = chemically synthesized
  source 1..20: mol_type = other DNA
ggaggttaagagtgagaatg

SEQ ID NO: 29659 - DNA, 20 bp, synthetic construct
  misc_feature 1..20: note = chemically synthesized
  source 1..20: mol_type = other DNA
aagtcagaaagaaaagccgg

SEQ ID NO: 29660 - DNA, 20 bp, synthetic construct
  misc_feature 1..20: note = chemically synthesized
  source 1..20: mol_type = other DNA
ccactcaatatatctcactc

SEQ ID NO: 29661 - DNA, 20 bp, synthetic construct
  misc_feature 1..20: note = chemically synthesized
  source 1..20: mol_type = other DNA
tgttgttgttgaacaataac

SEQ ID NO: 29662 - DNA, 20 bp, synthetic construct
  misc_feature 1..20: note = chemically synthesized
  source 1..20: mol_type = other DNA
tccttgtcctccctagatct

SEQ ID NO: 29663 - DNA, 20 bp, synthetic construct
  misc_feature 1..20: note = chemically synthesized
  source 1..20: mol_type = other DNA
ttcctatttagcctgacgat

SEQ ID NO: 29664 - DNA, 20 bp, synthetic construct
  misc_feature 1..20: note = chemically synthesized
  source 1..20: mol_type = other DNA
gtgctggtttcacatgtgcc

SEQ ID NO: 29665 - DNA, 20 bp, synthetic construct
  misc_feature 1..20: note = chemically synthesized
  source 1..20: mol_type = other DNA
gtggcatacagcactacatc

SEQ ID NO: 29666 - DNA, 20 bp, synthetic construct
  misc_feature 1..20: note = chemically synthesized
  source 1..20: mol_type = other DNA
ctttgatgatttagaaagac

SEQ ID NO: 29667 - DNA, 20 bp, synthetic construct
  misc_feature 1..20: note = chemically synthesized
  source 1..20: mol_type = other DNA
gagcctcattgggcatttac

SEQ ID NO: 29668 - DNA, 20 bp, synthetic construct
  misc_feature 1..20: note = chemically synthesized
  source 1..20: mol_type = other DNA
ataggaacttgagacatcaa

SEQ ID NO: 29669 - DNA, 20 bp, synthetic construct
  misc_feature 1..20: note = chemically synthesized
  source 1..20: mol_type = other DNA
tttcattttactttatggga

SEQ ID NO: 29670 - DNA, 20 bp, synthetic construct
  misc_feature 1..20: note = chemically synthesized
  source 1..20: mol_type = other DNA
tatccactagattgtaactc

SEQ ID NO: 29671 - DNA, 20 bp, synthetic construct
  misc_feature 1..20: note = chemically synthesized
  source 1..20: mol_type = other DNA
gggatagtcatttgatttct

SEQ ID NO: 29672 - DNA, 20 bp, synthetic construct
  misc_feature 1..20: note = chemically synthesized
  source 1..20: mol_type = other DNA
catttgatttctctgagtct

SEQ ID NO: 29673 - DNA, 20 bp, synthetic construct
  misc_feature 1..20: note = chemically synthesized
  source 1..20: mol_type = other DNA
agcataaaaacagtacctgt

SEQ ID NO: 29674 - DNA, 20 bp, synthetic construct
  misc_feature 1..20: note = chemically synthesized
  source 1..20: mol_type = other DNA
gccctctgtaaactatcagg

SEQ ID NO: 29675 - DNA, 20 bp, synthetic construct
  misc_feature 1..20: note = chemically synthesized
  source 1..20: mol_type = other DNA
tgtaaactatcaggtcgaat

SEQ ID NO: 29676 - DNA, 20 bp, synthetic construct
  misc_feature 1..20: note = chemically synthesized
  source 1..20: mol_type = other DNA
ctatcaggtcgaatgtgaat

SEQ ID NO: 29677 - DNA, 20 bp, synthetic construct
  misc_feature 1..20: note = chemically synthesized
  source 1..20: mol_type = other DNA
tgtgagttttcattactacc

SEQ ID NO: 29678 - DNA, 20 bp, synthetic construct
  misc_feature 1..20: note = chemically synthesized
  source 1..20: mol_type = other DNA
accaggggtgattaattact

SEQ ID NO: 29679 - DNA, 20 bp, synthetic construct
  misc_feature 1..20: note = chemically synthesized
  source 1..20: mol_type = other DNA
ggaggctctagttaaagagc

SEQ ID NO: 29680 - DNA, 20 bp, synthetic construct
  misc_feature 1..20: note = chemically synthesized
  source 1..20: mol_type = other DNA
caggggtgactggcacacag

SEQ ID NO: 29681 - DNA, 20 bp, synthetic construct
  misc_feature 1..20: note = chemically synthesized
  source 1..20: mol_type = other DNA
agcaggttaatgccgccaag

SEQ ID NO: 29682 - DNA, 20 bp, synthetic construct
  misc_feature 1..20: note = chemically synthesized
  source 1..20: mol_type = other DNA
gtgggaaggtgggagaggac

SEQ ID NO: 29683 - DNA, 20 bp, synthetic construct
  misc_feature 1..20: note = chemically synthesized
  source 1..20: mol_type = other DNA
cacaataactctttgttacc

SEQ ID NO: 29684 - DNA, 20 bp, synthetic construct
  misc_feature 1..20: note = chemically synthesized
  source 1..20: mol_type = other DNA
tttgttacctaggattacct

SEQ ID NO: 29685 - DNA, 20 bp, synthetic construct
  misc_feature 1..20: note = chemically synthesized
  source 1..20: mol_type = other DNA
acaaaaataaacaactggct

SEQ ID NO: 29686 - DNA, 20 bp, synthetic construct
  misc_feature 1..20: note = chemically synthesized
  source 1..20: mol_type = other DNA
actggctttgaatctggtct

SEQ ID NO: 29687 - DNA, 20 bp, synthetic construct
  misc_feature 1..20: note = chemically synthesized
  source 1..20: mol_type = other DNA
cttcagataccatttacaag

SEQ ID NO: 29688 - DNA, 20 bp, synthetic construct
  misc_feature 1..20: note = chemically synthesized
  source 1..20: mol_type = other DNA
tgaacctgcttttttgtgtt

SEQ ID NO: 29689 - DNA, 20 bp, synthetic construct
  misc_feature 1..20: note = chemically synthesized
  source 1..20: mol_type = other DNA
ctgcttttttgtgtttaggg

SEQ ID NO: 29690 - DNA, 20 bp, synthetic construct
  misc_feature 1..20: note = chemically synthesized
  source 1..20: mol_type = other DNA
agtcaaaattatgtgtgggc

SEQ ID NO: 29691 - DNA, 20 bp, synthetic construct
  misc_feature 1..20: note = chemically synthesized
  source 1..20: mol_type = other DNA
aatacacatgtaaatacata

SEQ ID NO: 29692 - DNA, 20 bp, synthetic construct
  misc_feature 1..20: note = chemically synthesized
  source 1..20: mol_type = other DNA
aatacataaggaatatgcat

SEQ ID NO: 29693 - DNA, 20 bp, synthetic construct
  misc_feature 1..20: note = chemically synthesized
  source 1..20: mol_type = other DNA
aatatgcattggaataactc

SEQ ID NO: 29694 - DNA, 20 bp, synthetic construct
  misc_feature 1..20: note = chemically synthesized
  source 1..20: mol_type = other DNA
aaagtcctaaatgaggccac

SEQ ID NO: 29695 - DNA, 20 bp, synthetic construct
  misc_feature 1..20: note = chemically synthesized
  source 1..20: mol_type = other DNA
tcctaaatgaggccacagga

SEQ ID NO: 29696 - DNA, 20 bp, synthetic construct
  misc_feature 1..20: note = chemically synthesized
  source 1..20: mol_type = other DNA
accctggggagaagacccac

SEQ ID NO: 29697 - DNA, 20 bp, synthetic construct
  misc_feature 1..20: note = chemically synthesized
  source 1..20: mol_type = other DNA
gggaagaagtccctctgggg

SEQ ID NO: 29698 - DNA, 20 bp, synthetic construct
  misc_feature 1..20: note = chemically synthesized
  source 1..20: mol_type = other DNA
gaagtccctctggggctgag

SEQ ID NO: 29699 - DNA, 20 bp, synthetic construct
  misc_feature 1..20: note = chemically synthesized
  source 1..20: mol_type = other DNA
gagtggggagcggctgccaa

SEQ ID NO: 29700 - DNA, 20 bp, synthetic construct
  misc_feature 1..20: note = chemically synthesized
  source 1..20: mol_type = other DNA
agcggctgccaagtgagtaa

SEQ ID NO: 29701 - DNA, 20 bp, synthetic construct
  misc_feature 1..20: note = chemically synthesized
  source 1..20: mol_type = other DNA
tctgcactcatcccaggcgt

SEQ ID NO: 29702 - DNA, 20 bp, synthetic construct
  misc_feature 1..20: note = chemically synthesized
  source 1..20: mol_type = other DNA
acaacgtgcatcataaacca

SEQ ID NO: 29703 - DNA, 20 bp, synthetic construct
  misc_feature 1..20: note = chemically synthesized
  source 1..20: mol_type = other DNA
cccaaggcctgaaacaaaag

SEQ ID NO: 29704 - DNA, 20 bp, synthetic construct
  misc_feature 1..20: note = chemically synthesized
  source 1..20: mol_type = other DNA
cctgaaacaaaagaagagtg

SEQ ID NO: 29705 - DNA, 20 bp, synthetic construct
  misc_feature 1..20: note = chemically synthesized
  source 1..20: mol_type = other DNA
aagagtggtgagttatttcc

SEQ ID NO: 29706 - DNA, 20 bp, synthetic construct
  misc_feature 1..20: note = chemically synthesized
  source 1..20: mol_type = other DNA
ggtctttttgacaaaagtga

SEQ ID NO: 29707 - DNA, 20 bp, synthetic construct
  misc_feature 1..20: note = chemically synthesized
  source 1..20: mol_type = other DNA
aggggaaaactggtaatatt

SEQ ID NO: 29708 - DNA, 20 bp, synthetic construct
  misc_feature 1..20: note = chemically synthesized
  source 1..20: mol_type = other DNA
tgggtagcctggaaacatgg

SEQ ID NO: 29709 - DNA, 20 bp, synthetic construct
  misc_feature 1..20: note = chemically synthesized
  source 1..20: mol_type = other DNA
aagcaaaatgctgataggaa

SEQ ID NO: 29710 - DNA, 20 bp, synthetic construct
  misc_feature 1..20: note = chemically synthesized
  source 1..20: mol_type = other DNA
gataggaaatgagtagattt

SEQ ID NO: 29711 - DNA, 20 bp, synthetic construct
  misc_feature 1..20: note = chemically synthesized
  source 1..20: mol_type = other DNA
gtgaatcgttttttatggga

SEQ ID NO: 29712 - DNA, 20 bp, synthetic construct
  misc_feature 1..20: note = chemically synthesized
  source 1..20: mol_type = other DNA
gactgagctgggccatactc

SEQ ID NO: 29713 - DNA, 20 bp, synthetic construct
  misc_feature 1..20: note = chemically synthesized
  source 1..20: mol_type = other DNA
gaagataaagattagacttc

SEQ ID NO: 29714 - DNA, 20 bp, synthetic construct
  misc_feature 1..20: note = chemically synthesized
  source 1..20: mol_type = other DNA
tgacttctcacactaataaa

SEQ ID NO: 29715 - DNA, 20 bp, synthetic construct
  misc_feature 1..20: note = chemically synthesized
  source 1..20: mol_type = other DNA
aaatttggtttgtgcaatct

SEQ ID NO: 29716 - DNA, 20 bp, synthetic construct
  misc_feature 1..20: note = chemically synthesized
  source 1..20: mol_type = other DNA
gtccatcttgagacagactg

SEQ ID NO: 29717 - DNA, 20 bp, synthetic construct
  misc_feature 1..20: note = chemically synthesized
  source 1..20: mol_type = other DNA
ctctgtgtgttctagaggtt

SEQ ID NO: 29718 - DNA, 20 bp, synthetic construct
  misc_feature 1..20: note = chemically synthesized
  source 1..20: mol_type = other DNA
gaagtgttgttgttgtactc

SEQ ID NO: 29719 - DNA, 20 bp, synthetic construct
  misc_feature 1..20: note = chemically synthesized
  source 1..20: mol_type = other DNA
ttcctttcgcaaggagcctg

SEQ ID NO: 29720 - DNA, 20 bp, synthetic construct
  misc_feature 1..20: note = chemically synthesized
  source 1..20: mol_type = other DNA
catttgactgtttacgtcaa

SEQ ID NO: 29721 - DNA, 20 bp, synthetic construct
  misc_feature 1..20: note = chemically synthesized
  source 1..20: mol_type = other DNA
ctgtttacgtcaagtgaatt

SEQ ID NO: 29722 - DNA, 20 bp, synthetic construct
  misc_feature 1..20: note = chemically synthesized
  source 1..20: mol_type = other DNA
tatttttcaatgagaaatct

SEQ ID NO: 29723 - DNA, 20 bp, synthetic construct
  misc_feature 1..20: note = chemically synthesized
  source 1..20: mol_type = other DNA
agcataaacgcaacaggtac

SEQ ID NO: 29724 - DNA, 20 bp, synthetic construct
  misc_feature 1..20: note = chemically synthesized
  source 1..20: mol_type = other DNA
ggtacttggatccttgtatg

SEQ ID NO: 29725 - DNA, 20 bp, synthetic construct
  misc_feature 1..20: note = chemically synthesized
  source 1..20: mol_type = other DNA
atccatgcctagcccctcgc

SEQ ID NO: 29726 - DNA, 20 bp, synthetic construct
  misc_feature 1..20: note = chemically synthesized
  source 1..20: mol_type = other DNA
attaaccacaatgtgaagat

SEQ ID NO: 29727 - DNA, 20 bp, synthetic construct
  misc_feature 1..20: note = chemically synthesized
  source 1..20: mol_type = other DNA
ctgatccagtggtctttcct

SEQ ID NO: 29728 - DNA, 20 bp, synthetic construct
  misc_feature 1..20: note = chemically synthesized
  source 1..20: mol_type = other DNA
agtacttaaccgtcttgggg

SEQ ID NO: 29729 - DNA, 20 bp, synthetic construct
  misc_feature 1..20: note = chemically synthesized
  source 1..20: mol_type = other DNA
ctctacctctgcttcccctg

SEQ ID NO: 29730 - DNA, 20 bp, synthetic construct
  misc_feature 1..20: note = chemically synthesized
  source 1..20: mol_type = other DNA
catttatcttccttcaggaa

SEQ ID NO: 29731 - DNA, 20 bp, synthetic construct
  misc_feature 1..20: note = chemically synthesized
  source 1..20: mol_type = other DNA
ctctggttgctggctaggaa

SEQ ID NO: 29732 - DNA, 20 bp, synthetic construct
  misc_feature 1..20: note = chemically synthesized
  source 1..20: mol_type = other DNA
acccccgatcagcatcacct

SEQ ID NO: 29733 - DNA, 20 bp, synthetic construct
  misc_feature 1..20: note = chemically synthesized
  source 1..20: mol_type = other DNA
tgggcaccacctcagactta

SEQ ID NO: 29734 - DNA, 20 bp, synthetic construct
  misc_feature 1..20: note = chemically synthesized
  source 1..20: mol_type = other DNA
gacttactgaatcagaaatt

SEQ ID NO: 29735 - DNA, 20 bp, synthetic construct
  misc_feature 1..20: note = chemically synthesized
  source 1..20: mol_type = other DNA
tggggaagcagccttctatg

SEQ ID NO: 29736 - DNA, 20 bp, synthetic construct
  misc_feature 1..20: note = chemically synthesized
  source 1..20: mol_type = other DNA
gattctcatgcacactcaag

SEQ ID NO: 29737 - DNA, 20 bp, synthetic construct
  misc_feature 1..20: note = chemically synthesized
  source 1..20: mol_type = other DNA
ctgaatcagcactgctgtct

SEQ ID NO: 29738 - DNA, 20 bp, synthetic construct
  misc_feature 1..20: note = chemically synthesized
  source 1..20: mol_type = other DNA
tcaaaaacaaattaagctta

SEQ ID NO: 29739 - DNA, 20 bp, synthetic construct
  misc_feature 1..20: note = chemically synthesized
  source 1..20: mol_type = other DNA
attaagcttagggaatccct

SEQ ID NO: 29740 - DNA, 20 bp, synthetic construct
  misc_feature 1..20: note = chemically synthesized
  source 1..20: mol_type = other DNA
gttgcaaagtttccttatgg

SEQ ID NO: 29741 - DNA, 20 bp, synthetic construct
  misc_feature 1..20: note = chemically synthesized
  source 1..20: mol_type = other DNA
taaaaaatatgcagcaaact

SEQ ID NO: 29742 - DNA, 20 bp, synthetic construct
  misc_feature 1..20: note = chemically synthesized
  source 1..20: mol_type = other DNA
actttacatttctacatata

SEQ ID NO: 29743 - DNA, 20 bp, synthetic construct
  misc_feature 1..20: note = chemically synthesized
  source 1..20: mol_type = other DNA
acaaagagctctaagcccag

SEQ ID NO: 29744 - DNA, 20 bp, synthetic construct
  misc_feature 1..20: note = chemically synthesized
  source 1..20: mol_type = other DNA
taagcccagtgggatgttcc

SEQ ID NO: 29745 - DNA, 20 bp, synthetic construct
  misc_feature 1..20: note = chemically synthesized
  source 1..20: mol_type = other DNA
tttgtttctgaaactaatca

SEQ ID NO: 29746 - DNA, 20 bp, synthetic construct
  misc_feature 1..20: note = chemically synthesized
  source 1..20: mol_type = other DNA
aaaaccacaggactctccac

SEQ ID NO: 29747 - DNA, 20 bp, synthetic construct
  misc_feature 1..20: note = chemically synthesized
  source 1..20: mol_type = other DNA
gtgttcatgtgtgtgtatat

SEQ ID NO: 29748 - DNA, 20 bp, synthetic construct
  misc_feature 1..20: note = chemically synthesized
  source 1..20: mol_type = other DNA
atatgtgtctgtgtacgtgt

SEQ ID NO: 29749 - DNA, 20 bp, synthetic construct
  misc_feature 1..20: note = chemically synthesized
  source 1..20: mol_type = other DNA
agcagtagagctgtcccacg

SEQ ID NO: 29750 - DNA, 20 bp, synthetic construct
  misc_feature 1..20: note = chemically synthesized
  source 1..20: mol_type = other DNA
gtgaccccctttctttcacc

SEQ ID NO: 29751 - DNA, 20 bp, synthetic construct
  misc_feature 1..20: note = chemically synthesized
  source 1..20: mol_type = other DNA
tcaccctgggtcttcaaaaa

SEQ ID NO: 29752 - DNA, 20 bp, synthetic construct
  misc_feature 1..20: note = chemically synthesized
  source 1..20: mol_type = other DNA
cctgggtcttcaaaaagaga

SEQ ID NO: 29753 - DNA, 20 bp, synthetic construct
  misc_feature 1..20: note = chemically synthesized
  source 1..20: mol_type = other DNA
tggatgacactatgatgagg

SEQ ID NO: 29754 - DNA, 20 bp, synthetic construct
  misc_feature 1..20: note = chemically synthesized
  source 1..20: mol_type = other DNA
tgaaggaacccattccagtt

SEQ ID NO: 29755 - DNA, 20 bp, synthetic construct
  misc_feature 1..20: note = chemically synthesized
  source 1..20: mol_type = other DNA
acttagattctctgacttat

SEQ ID NO: 29756 - DNA, 20 bp, synthetic construct
  misc_feature 1..20: note = chemically synthesized
  source 1..20: mol_type = other DNA
acattagctatgcctgtgac

SEQ ID NO: 29757 - DNA, 20 bp, synthetic construct
  misc_feature 1..20: note = chemically synthesized
  source 1..20: mol_type = other DNA
taattatagacactacaata

SEQ ID NO: 29758 - DNA, 20 bp, synthetic construct
  misc_feature 1..20: note = chemically synthesized
  source 1..20: mol_type = other DNA
ggttactaacttcacctttt

SEQ ID NO: 29759 - DNA, 20 bp, synthetic construct
  misc_feature 1..20: note = chemically synthesized
  source 1..20: mol_type = other DNA
aaatccttcatttcaaaagg

SEQ ID NO: 29760 - DNA, 20 bp, synthetic construct
  misc_feature 1..20: note = chemically synthesized
  source 1..20: mol_type = other DNA
cttcatttcaaaaggttgaa

SEQ ID NO: 29761 - DNA, 20 bp, synthetic construct
  misc_feature 1..20: note = chemically synthesized
  source 1..20: mol_type = other DNA
aataggatggtacttaaaaa

SEQ ID NO: 29762 - DNA, 20 bp, synthetic construct
  misc_feature 1..20: note = chemically synthesized
  source 1..20: mol_type = other DNA
gaattccagctggttaaatt

SEQ ID NO: 29763 - DNA, 20 bp, synthetic construct
  misc_feature 1..20: note = chemically synthesized
  source 1..20: mol_type = other DNA
caaagtattttcacttgatc

SEQ ID NO: 29764 - DNA, 20 bp, synthetic construct
  misc_feature 1..20: note = chemically synthesized
  source 1..20: mol_type = other DNA
tacactttaagcttttgcct

SEQ ID NO: 29765 - DNA, 20 bp, synthetic construct
  misc_feature 1..20: note = chemically synthesized
  source 1..20: mol_type = other DNA
ctatgcaaaatgtgtgttcc

SEQ ID NO: 29766 - DNA, 20 bp, synthetic construct
  misc_feature 1..20: note = chemically synthesized
  source 1..20: mol_type = other DNA
attcattcaacaaatattta

SEQ ID NO: 29767 - DNA, 20 bp, synthetic construct
  misc_feature 1..20: note = chemically synthesized
  source 1..20: mol_type = other DNA
tttgggaaagaggaaaactt

SEQ ID NO: 29768 - DNA, 20 bp, synthetic construct
  misc_feature 1..20: note = chemically synthesized
  source 1..20: mol_type = other DNA
aaacctggagagccaagaga

SEQ ID NO: 29769 - DNA, 20 bp, synthetic construct
  misc_feature 1..20: note = chemically synthesized
  source 1..20: mol_type = other DNA
agcaaagcccaaggtgggca

SEQ ID NO: 29770 - DNA, 20 bp, synthetic construct
  misc_feature 1..20: note = chemically synthesized
  source 1..20: mol_type = other DNA
gattcatccagttgacagcg

SEQ ID NO: 29771 - DNA, 20 bp, synthetic construct
  misc_feature 1..20: note = chemically synthesized
  source 1..20: mol_type = other DNA
ctcaattgtttcttccccca

SEQ ID NO: 29772 - DNA, 20 bp, synthetic construct
  misc_feature 1..20: note = chemically synthesized
  source 1..20: mol_type = other DNA
tgtttcttcccccaatgaat

SEQ ID NO: 29773 - DNA, 20 bp, synthetic construct
  misc_feature 1..20: note = chemically synthesized
  source 1..20: mol_type = other DNA
atttactatgttttattcct

SEQ ID NO: 29774 - DNA, 20 bp, synthetic construct
  misc_feature 1..20: note = chemically synthesized
  source 1..20: mol_type = other DNA
cttcttttcaaagccatggg

SEQ ID NO: 29775 - DNA, 20 bp, synthetic construct
  misc_feature 1..20: note = chemically synthesized
  source 1..20: mol_type = other DNA
ttcaaagccatggggaggat

SEQ ID NO: 29776 - DNA, 20 bp, synthetic construct
  misc_feature 1..20: note = chemically synthesized
  source 1..20: mol_type = other DNA
ggggtgcccttactcctgct

SEQ ID NO: 29777 - DNA, 20 bp, synthetic construct
  misc_feature 1..20: note = chemically synthesized
  source 1..20: mol_type = other DNA
cctgctctgagtcctcagct

SEQ ID NO: 29778 - DNA, 20 bp, synthetic construct
  misc_feature 1..20: note = chemically synthesized
  source 1..20: mol_type = other DNA
tgtgtagtgggggcaggggg

SEQ ID NO: 29779 - DNA, 20 bp, synthetic construct
  misc_feature 1..20: note = chemically synthesized
  source 1..20: mol_type = other DNA
attcccactgccaccactcc

SEQ ID NO: 29780 - DNA, 20 bp, synthetic construct
  misc_feature 1..20: note = chemically synthesized
  source 1..20: mol_type = other DNA
tcaccagctgtttcgtgact

SEQ ID NO: 29781 - DNA, 20 bp, synthetic construct
  misc_feature 1..20: note = chemically synthesized
  source 1..20: mol_type = other DNA
ccatctttaaaaggagaaga

SEQ ID NO: 29782 - DNA, 20 bp, synthetic construct
  misc_feature 1..20: note = chemically synthesized
  source 1..20: mol_type = other DNA
aaggagaagactggattaga

SEQ ID NO: 29783 - DNA, 20 bp, synthetic construct
  misc_feature 1..20: note = chemically synthesized
  source 1..20: mol_type = other DNA
aggccgtgctagaagctggc

SEQ ID NO: 29784 - DNA, 20 bp, synthetic construct
  misc_feature 1..20: note = chemically synthesized
  source 1..20: mol_type = other DNA
gttcccctcatgaccttgac

SEQ ID NO: 29785 - DNA, 20 bp, synthetic construct
  misc_feature 1..20: note = chemically synthesized
  source 1..20: mol_type = other DNA
ggatgaggagggccttatag

SEQ ID NO: 29786 - DNA, 20 bp, synthetic construct
  misc_feature 1..20: note = chemically synthesized
  source 1..20: mol_type = other DNA
caggctaatccttaggctta

SEQ ID NO: 29787 - DNA, 20 bp, synthetic construct
  misc_feature 1..20: note = chemically synthesized
  source 1..20: mol_type = other DNA
cttagagagtgagcctgatg

SEQ ID NO: 29788 - DNA, 20 bp, synthetic construct
  misc_feature 1..20: note = chemically synthesized
  source 1..20: mol_type = other DNA
cacacaggactctaagaaaa

SEQ ID NO: 29789 - DNA, 20 bp, synthetic construct
  misc_feature 1..20: note = chemically synthesized
  source 1..20: mol_type = other DNA
caccacaccccatcagcatg

SEQ ID NO: 29790 - DNA, 20 bp, synthetic construct
  misc_feature 1..20: note = chemically synthesized
  source 1..20: mol_type = other DNA
cttggaaagccatgtgtaaa

SEQ ID NO: 29791 - DNA, 20 bp, synthetic construct
  misc_feature 1..20: note = chemically synthesized
  source 1..20: mol_type = other DNA
cctgaacatatttctgtcac

SEQ ID NO: 29792 - DNA, 20 bp, synthetic construct
  misc_feature 1..20: note = chemically synthesized
  source 1..20: mol_type = other DNA
cccactcgagaaatgaagaa

SEQ ID NO: 29793 - DNA, 20 bp, synthetic construct
  misc_feature 1..20: note = chemically synthesized
  source 1..20: mol_type = other DNA
agaggcatggggctgtgaag

SEQ ID NO: 29794 - DNA, 20 bp, synthetic construct
  misc_feature 1..20: note = chemically synthesized
  source 1..20: mol_type = other DNA
gctgtgaagatggatgcgat

SEQ ID NO: 29795 - DNA, 20 bp, synthetic construct
  misc_feature 1..20: note = chemically synthesized
  source 1..20: mol_type = other DNA
gatcggtcttgagaaaatac

SEQ ID NO: 29796 - DNA, 20 bp, synthetic construct
  misc_feature 1..20: note = chemically synthesized
  source 1..20: mol_type = other DNA
taagctaaagaaaaccaaac

SEQ ID NO: 29797 - DNA, 20 bp, synthetic construct
  misc_feature 1..20: note = chemically synthesized
  source 1..20: mol_type = other DNA
atgggtggaggggcaagggg

SEQ ID NO: 29798 - DNA, 20 bp, synthetic construct
  misc_feature 1..20: note = chemically synthesized
  source 1..20: mol_type = other DNA
agaaatgcctaatgtagatg

SEQ ID NO: 29799 - DNA, 20 bp, synthetic construct
  misc_feature 1..20: note = chemically synthesized
  source 1..20: mol_type = other DNA
tgcacatgtatcccagaact

SEQ ID NO: 29800 - DNA, 20 bp, synthetic construct
  misc_feature 1..20: note = chemically synthesized
  source 1..20: mol_type = other DNA
agtggtgctgtgagagacaa

SEQ ID NO: 29801 - DNA, 20 bp, synthetic construct
  misc_feature 1..20: note = chemically synthesized
  source 1..20: mol_type = other DNA
tctcactctgttgcccaggc

SEQ ID NO: 29802 - DNA, 20 bp, synthetic construct
  misc_feature 1..20: note = chemically synthesized
  source 1..20: mol_type = other DNA
ctcactgcaacctccgcctc

SEQ ID NO: 29803 - DNA, 20 bp, synthetic construct
  misc_feature 1..20: note = chemically synthesized
  source 1..20: mol_type = other DNA
ttttgtattttttgtagaga

SEQ ID NO: 29804 - DNA, 20 bp, synthetic construct
  misc_feature 1..20: note = chemically synthesized
  source 1..20: mol_type = other DNA
atctcaccatgttgcccagg

SEQ ID NO: 29805 - DNA, 20 bp, synthetic construct
  misc_feature 1..20: note = chemically synthesized
  source 1..20: mol_type = other DNA
ctgccccaacagtcgccctg

SEQ ID NO: 29806 - DNA, 20 bp, synthetic construct
  misc_feature 1..20: note = chemically synthesized
  source 1..20: mol_type = other DNA
cacttgcctttctggcacta

SEQ ID NO: 29807 - DNA, 20 bp, synthetic construct
  misc_feature 1..20: note = chemically synthesized
  source 1..20: mol_type = other DNA
aaccagaactggccattctc

SEQ ID NO: 29808 - DNA, 20 bp, synthetic construct
  misc_feature 1..20: note = chemically synthesized
  source 1..20: mol_type = other DNA
tcaggctctaacatttcttc

SEQ ID NO: 29809 - DNA, 20 bp, synthetic construct
  misc_feature 1..20: note = chemically synthesized
  source 1..20: mol_type = other DNA
ccctctcgcctgaggtgagg

SEQ ID NO: 29810 - DNA, 20 bp, synthetic construct
  misc_feature 1..20: note = chemically synthesized
  source 1..20: mol_type = other DNA
ataccactgaccaatctgga

SEQ ID NO: 29811 - DNA, 20 bp, synthetic construct
  misc_feature 1..20: note = chemically synthesized
  source 1..20: mol_type = other DNA
gagcagcctcagtccagcca

SEQ ID NO: 29812 - DNA, 20 bp, synthetic construct
  misc_feature 1..20: note = chemically synthesized
  source 1..20: mol_type = other DNA
actaattctgctgattccat

SEQ ID NO: 29813 - DNA, 20 bp, synthetic construct
  misc_feature 1..20: note = chemically synthesized
  source 1..20: mol_type = other DNA
cccggagaccattttttgtt

SEQ ID NO: 29814 - DNA, 20 bp, synthetic construct
  misc_feature 1..20: note = chemically synthesized
  source 1..20: mol_type = other DNA
caggtctactaggaacagga

SEQ ID NO: 29815 - DNA, 20 bp, synthetic construct
  misc_feature 1..20: note = chemically synthesized
  source 1..20: mol_type = other DNA
agggcctcaaccttctactg

SEQ ID NO: 29816 - DNA, 20 bp, synthetic construct
  misc_feature 1..20: note = chemically synthesized
  source 1..20: mol_type = other DNA
tcaaaccctgtcaggcggtg

SEQ ID NO: 29817 - DNA, 20 bp, synthetic construct
  misc_feature 1..20: note = chemically synthesized
  source 1..20: mol_type = other DNA
tatcaatgtaattcaaggca

SEQ ID NO: 29818 - DNA, 20 bp, synthetic construct
  misc_feature 1..20: note = chemically synthesized
  source 1..20: mol_type = other DNA
gtaattcaaggcaaagagtc

SEQ ID NO: 29819 - DNA, 20 bp, synthetic construct
  misc_feature 1..20: note = chemically synthesized
  source 1..20: mol_type = other DNA
cagcgaggaggggggaaggt

SEQ ID NO: 29820 - DNA, 20 bp, synthetic construct
  misc_feature 1..20: note = chemically synthesized
  source 1..20: mol_type = other DNA
aggtaacacaaaggcctgta

SEQ ID NO: 29821 - DNA, 20 bp, synthetic construct
  misc_feature 1..20: note = chemically synthesized
  source 1..20: mol_type = other DNA
ggctctccactccatttctc

SEQ ID NO: 29822 - DNA, 20 bp, synthetic construct
  misc_feature 1..20: note = chemically synthesized
  source 1..20: mol_type = other DNA
agagcccctcaataaataat

SEQ ID NO: 29823 - DNA, 20 bp, synthetic construct
  misc_feature 1..20: note = chemically synthesized
  source 1..20: mol_type = other DNA
attcactaaccaaggagcct

SEQ ID NO: 29824 - DNA, 20 bp, synthetic construct
  misc_feature 1..20: note = chemically synthesized
  source 1..20: mol_type = other DNA
gggtcagccttgacccagga

SEQ ID NO: 29825 - DNA, 20 bp, synthetic construct
  misc_feature 1..20: note = chemically synthesized
  source 1..20: mol_type = other DNA
acacagttaaaagagctaca

SEQ ID NO: 29826 - DNA, 20 bp, synthetic construct
  misc_feature 1..20: note = chemically synthesized
  source 1..20: mol_type = other DNA
aaatttccttaagtcttctg

SEQ ID NO: 29827 - DNA, 20 bp, synthetic construct
  misc_feature 1..20: note = chemically synthesized
  source 1..20: mol_type = other DNA
aattggtctcaattactagt

SEQ ID NO: 29828 - DNA, 20 bp, synthetic construct
  misc_feature 1..20: note = chemically synthesized
  source 1..20: mol_type = other DNA
acagtgtgaagtacctccgc

SEQ ID NO: 29829 - DNA, 20 bp, synthetic construct
  misc_feature 1..20: note = chemically synthesized
  source 1..20: mol_type = other DNA
cccaaaactgggaagggccc

SEQ ID NO: 29830 - DNA, 20 bp, synthetic construct
  misc_feature 1..20: note = chemically synthesized
  source 1..20: mol_type = other DNA
aactgggaagggccctggaa

SEQ ID NO: 29831 - DNA, 20 bp, synthetic construct
  misc_feature 1..20: note = chemically synthesized
  source 1..20: mol_type = other DNA
cttgaaaacaaaaatgaagc

SEQ ID NO: 29832 - DNA, 20 bp, synthetic construct
  misc_feature 1..20: note = chemically synthesized
  source 1..20: mol_type = other DNA
aagcacatacacatgctctc

SEQ ID NO: 29833 - DNA, 20 bp, synthetic construct
  misc_feature 1..20: note = chemically synthesized
  source 1..20: mol_type = other DNA
acacatgctctcaggagtca

SEQ ID NO: 29834 - DNA, 20 bp, synthetic construct
  misc_feature 1..20: note = chemically synthesized
  source 1..20: mol_type = other DNA
gctggcaggtgaaggaggac

SEQ ID NO: 29835 - DNA, 20 bp, synthetic construct
  misc_feature 1..20: note = chemically synthesized
  source 1..20: mol_type = other DNA
cttctccatttccatggctc

SEQ ID NO: 29836 - DNA, 20 bp, synthetic construct
  misc_feature 1..20: note = chemically synthesized
  source 1..20: mol_type = other DNA
ttttgaccatcacagtgtcc

SEQ ID NO: 29837 - DNA, 20 bp, synthetic construct
  misc_feature 1..20: note = chemically synthesized
  source 1..20: mol_type = other DNA
ctcagcatgctctctgggaa

SEQ ID NO: 29838 - DNA, 20 bp, synthetic construct
  misc_feature 1..20: note = chemically synthesized
  source 1..20: mol_type = other DNA
ctgggaagtgaattgggaaa

SEQ ID NO: 29839 - DNA, 20 bp, synthetic construct
  misc_feature 1..20: note = chemically synthesized
  source 1..20: mol_type = other DNA
tagtcctgctgtcaaaagaa

SEQ ID NO: 29840 - DNA, 20 bp, synthetic construct
  misc_feature 1..20: note = chemically synthesized
  source 1..20: mol_type = other DNA
agaggcagacctgttaaggg

SEQ ID NO: 29841 - DNA, 20 bp, synthetic construct
  misc_feature 1..20: note = chemically synthesized
  source 1..20: mol_type = other DNA
atctctcatgattctatctt

SEQ ID NO: 29842 - DNA, 20 bp, synthetic construct
  misc_feature 1..20: note = chemically synthesized
  source 1..20: mol_type = other DNA
tcttgagagtttagtttggt

SEQ ID NO: 29843 - DNA, 20 bp, synthetic construct
  misc_feature 1..20: note = chemically synthesized
  source 1..20: mol_type = other DNA
gtttggttggagtttagttt

SEQ ID NO: 29844 - DNA, 20 bp, synthetic construct
  misc_feature 1..20: note = chemically synthesized
  source 1..20: mol_type = other DNA
ttagtttttgagttttttgt

SEQ ID NO: 29845 - DNA, 20 bp, synthetic construct
  misc_feature 1..20: note = chemically synthesized
  source 1..20: mol_type = other DNA
gttcacggagcggacagaag

SEQ ID NO: 29846 - DNA, 20 bp, synthetic construct
  misc_feature 1..20: note = chemically synthesized
  source 1..20: mol_type = other DNA
ctgatacatggagcagagcc

SEQ ID NO: 29847 - DNA, 20 bp, synthetic construct
  misc_feature 1..20: note = chemically synthesized
  source 1..20: mol_type = other DNA
gttcctgggcaccaggcata

SEQ ID NO: 29848 - DNA, 20 bp, synthetic construct
  misc_feature 1..20: note = chemically synthesized
  source 1..20: mol_type = other DNA
gtgacaactttgccacaaat

SEQ ID NO: 29849 - DNA, 20 bp, synthetic construct
  misc_feature 1..20: note = chemically synthesized
  source 1..20: mol_type = other DNA
ttaaatccacaggaagcaag

SEQ ID NO: 29850 - DNA, 20 bp, synthetic construct
  misc_feature 1..20: note = chemically synthesized
  source 1..20: mol_type = other DNA
gcttatttatagatttgcag

SEQ ID NO: 29851 - DNA, 20 bp, synthetic construct
  misc_feature 1..20: note = chemically synthesized
  source 1..20: mol_type = other DNA
tagtaccacactacatttaa

SEQ ID NO: 29852 - DNA, 20 bp, synthetic construct
  misc_feature 1..20: note = chemically synthesized
  source 1..20: mol_type = other DNA
ttatacagtgccttgctttc

SEQ ID NO: 29853 - DNA, 20 bp, synthetic construct
  misc_feature 1..20: note = chemically synthesized
  source 1..20: mol_type = other DNA
attgcagcaataattgatag

SEQ ID NO: 29854 - DNA, 20 bp, synthetic construct
  misc_feature 1..20: note = chemically synthesized
  source 1..20: mol_type = other DNA
gctggaagatcattgattgg

SEQ ID NO: 29855 - DNA, 20 bp, synthetic construct
  misc_feature 1..20: note = chemically synthesized
  source 1..20: mol_type = other DNA
tactttgcgagatgtttgag

SEQ ID NO: 29856 - DNA, 20 bp, synthetic construct
  misc_feature 1..20: note = chemically synthesized
  source 1..20: mol_type = other DNA
tgtgatttatattatttccc

SEQ ID NO: 29857 - DNA, 20 bp, synthetic construct
  misc_feature 1..20: note = chemically synthesized
  source 1..20: mol_type = other DNA
tatttcccatgaataactgc

SEQ ID NO: 29858 - DNA, 20 bp, synthetic construct
  misc_feature 1..20: note = chemically synthesized
  source 1..20: mol_type = other DNA
tgaataactgcaaggatagt

SEQ ID NO: 29859 - DNA, 20 bp, synthetic construct
  misc_feature 1..20: note = chemically synthesized
  source 1..20: mol_type = other DNA
gatagtgtgggtagttggag

SEQ ID NO: 29860 - DNA, 20 bp, synthetic construct
  misc_feature 1..20: note = chemically synthesized
  source 1..20: mol_type = other DNA
gaacaatgctagccaacaat

SEQ ID NO: 29861 - DNA, 20 bp, synthetic construct
  misc_feature 1..20: note = chemically synthesized
  source 1..20: mol_type = other DNA
gttcaacaactcagaccctg

SEQ ID NO: 29862 - DNA, 20 bp, synthetic construct
  misc_feature 1..20: note = chemically synthesized
  source 1..20: mol_type = other DNA
ttgtcagaaataactcaaga

SEQ ID NO: 29863 - DNA, 20 bp, synthetic construct
  misc_feature 1..20: note = chemically synthesized
  source 1..20: mol_type = other DNA
tcgtccccaggaaacatcaa

SEQ ID NO: 29864 - DNA, 20 bp, synthetic construct
  misc_feature 1..20: note = chemically synthesized
  source 1..20: mol_type = other DNA
gagctggcatattagcagac

SEQ ID NO: 29865 - DNA, 20 bp, synthetic construct
  misc_feature 1..20: note = chemically synthesized
  source 1..20: mol_type = other DNA
atctaaaacagaagatgtat

SEQ ID NO: 29866 - DNA, 20 bp, synthetic construct
  misc_feature 1..20: note = chemically synthesized
  source 1..20: mol_type = other DNA
gcttcagcagacaacaaagg

SEQ ID NO: 29867 - DNA, 20 bp, synthetic construct
  misc_feature 1..20: note = chemically synthesized
  source 1..20: mol_type = other DNA
acaaaggaagaatttgggga

SEQ ID NO: 29868 - DNA, 20 bp, synthetic construct
  misc_feature 1..20: note = chemically synthesized
  source 1..20: mol_type = other DNA
ctcgcccaaagcactagaag

SEQ ID NO: 29869 - DNA, 20 bp, synthetic construct
  misc_feature 1..20: note = chemically synthesized
  source 1..20: mol_type = other DNA
ttgaaactgaaccattataa

SEQ ID NO: 29870 - DNA, 20 bp, synthetic construct
  misc_feature 1..20: note = chemically synthesized
  source 1..20: mol_type = other DNA
tgtgacacttaccgcgtatg

SEQ ID NO: 29871 - DNA, 20 bp, synthetic construct
  misc_feature 1..20: note = chemically synthesized
  source 1..20: mol_type = other DNA
tgcttcgtctgtgacagttg

SEQ ID NO: 29872 - DNA, 20 bp, synthetic construct
  misc_feature 1..20: note = chemically synthesized
  source 1..20: mol_type = other DNA
gttgcccttctaggagctgg

SEQ ID NO: 29873 - DNA, 20 bp, synthetic construct
  misc_feature 1..20: note = chemically synthesized
  source 1..20: mol_type = other DNA
cacattcagctgaaaatagc

SEQ ID NO: 29874 - DNA, 20 bp, synthetic construct
  misc_feature 1..20: note = chemically synthesized
  source 1..20: mol_type = other DNA
tctctttagtcctcaacaac

SEQ ID NO: 29875 - DNA, 20 bp, synthetic construct
  misc_feature 1..20: note = chemically synthesized
  source 1..20: mol_type = other DNA
aagtaggttttacagataaa

SEQ ID NO: 29876 - DNA, 20 bp, synthetic construct
  misc_feature 1..20: note = chemically synthesized
  source 1..20: mol_type = other DNA
tgttttttcttaagagaagg

SEQ ID NO: 29877 - DNA, 20 bp, synthetic construct
  misc_feature 1..20: note = chemically synthesized
  source 1..20: mol_type = other DNA
agtataaaacctcaaattat

SEQ ID NO: 29878 - DNA, 20 bp, synthetic construct
  misc_feature 1..20: note = chemically synthesized
  source 1..20: mol_type = other DNA
cattatggaacatatgtgct

SEQ ID NO: 29879 - DNA, 20 bp, synthetic construct
  misc_feature 1..20: note = chemically synthesized
  source 1..20: mol_type = other DNA
gggtctggggagatgggaga

SEQ ID NO: 29880 - DNA, 20 bp, synthetic construct
  misc_feature 1..20: note = chemically synthesized
  source 1..20: mol_type = other DNA
tgcaaataaatgcagtcatc

SEQ ID NO: 29881 - DNA, 20 bp, synthetic construct
  misc_feature 1..20: note = chemically synthesized
  source 1..20: mol_type = other DNA
gtgtaatggaagtctggcct

SEQ ID NO: 29882 - DNA, 20 bp, synthetic construct
  misc_feature 1..20: note = chemically synthesized
  source 1..20: mol_type = other DNA
tactggcttatgaaatgcaa

SEQ ID NO: 29883 - DNA, 20 bp, synthetic construct
  misc_feature 1..20: note = chemically synthesized
  source 1..20: mol_type = other DNA
tgaaatgcaatgggatgagg

SEQ ID NO: 29884 - DNA, 20 bp, synthetic construct
  misc_feature 1..20: note = chemically synthesized
  source 1..20: mol_type = other DNA
tgaacggcacagtgaccagg

SEQ ID NO: 29885 - DNA, 20 bp, synthetic construct
  misc_feature 1..20: note = chemically synthesized
  source 1..20: mol_type = other DNA
tggagcaaggccactccagc

SEQ ID NO: 29886 - DNA, 20 bp, synthetic construct
  misc_feature 1..20: note = chemically synthesized
  source 1..20: mol_type = other DNA
gccactccagcaagaatgcc

SEQ ID NO: 29887 - DNA, 20 bp, synthetic construct
  misc_feature 1..20: note = chemically synthesized
  source 1..20: mol_type = other DNA
aatgccaaggatagcctgca

SEQ ID NO: 29888 - DNA, 20 bp, synthetic construct
  misc_feature 1..20: note = chemically synthesized
  source 1..20: mol_type = other DNA
ggctagcagatgctagtccc

SEQ ID NO: 29889 - DNA, 20 bp, synthetic construct
  misc_feature 1..20: note = chemically synthesized
  source 1..20: mol_type = other DNA
catccaacgtcacgaagctg

SEQ ID NO: 29890 - DNA, 20 bp, synthetic construct
  misc_feature 1..20: note = chemically synthesized
  source 1..20: mol_type = other DNA
agaaacaacgcttgctattc

SEQ ID NO: 29891 - DNA, 20 bp, synthetic construct
  misc_feature 1..20: note = chemically synthesized
  source 1..20: mol_type = other DNA
cagaagtagcccttcaccag

SEQ ID NO: 29892 - DNA, 20 bp, synthetic construct
  misc_feature 1..20: note = chemically synthesized
  source 1..20: mol_type = other DNA
cattttcaacaagaaggctg

SEQ ID NO: 29893 - DNA, 20 bp, synthetic construct
  misc_feature 1..20: note = chemically synthesized
  source 1..20: mol_type = other DNA
aaaatctttttagtatgttt

SEQ ID NO: 29894 - DNA, 20 bp, synthetic construct
  misc_feature 1..20: note = chemically synthesized
  source 1..20: mol_type = other DNA
ccttgttctatcagcaggtc

SEQ ID NO: 29895 - DNA, 20 bp, synthetic construct
  misc_feature 1..20: note = chemically synthesized
  source 1..20: mol_type = other DNA
aagctgttctccattctgaa

SEQ ID NO: 29896 - DNA, 20 bp, synthetic construct
  misc_feature 1..20: note = chemically synthesized
  source 1..20: mol_type = other DNA
atcctagggagactggtact

SEQ ID NO: 29897 - DNA, 20 bp, synthetic construct
  misc_feature 1..20: note = chemically synthesized
  source 1..20: mol_type = other DNA
gagactggtactggggattt

SEQ ID NO: 29898 - DNA, 20 bp, synthetic construct
  misc_feature 1..20: note = chemically synthesized
  source 1..20: mol_type = other DNA
gatttcagggtccttgttct

SEQ ID NO: 29899 - DNA, 20 bp, synthetic construct
  misc_feature 1..20: note = chemically synthesized
  source 1..20: mol_type = other DNA
tggaccatggctcctttcca

SEQ ID NO: 29900 - DNA, 20 bp, synthetic construct
  misc_feature 1..20: note = chemically synthesized
  source 1..20: mol_type = other DNA
ttctcacacaatgagaaaga

SEQ ID NO: 29901 - DNA, 20 bp, synthetic construct
  misc_feature 1..20: note = chemically synthesized
  source 1..20: mol_type = other DNA
agaacggatagccaaattct

SEQ ID NO: 29902 - DNA, 20 bp, synthetic construct
  misc_feature 1..20: note = chemically synthesized
  source 1..20: mol_type = other DNA
tgagatcctctggctttgag

SEQ ID NO: 29903 - DNA, 20 bp, synthetic construct
  misc_feature 1..20: note = chemically synthesized
  source 1..20: mol_type = other DNA
gcacagaaatgagcagcatg

SEQ ID NO: 29904 - DNA, 20 bp, synthetic construct
  misc_feature 1..20: note = chemically synthesized
  source 1..20: mol_type = other DNA
tgaacatgccaactcaacat

SEQ ID NO: 29905 - DNA, 20 bp, synthetic construct
  misc_feature 1..20: note = chemically synthesized
  source 1..20: mol_type = other DNA
acagaggtattacagtgtga

SEQ ID NO: 29906 - DNA, 20 bp, synthetic construct
  misc_feature 1..20: note = chemically synthesized
  source 1..20: mol_type = other DNA
agagtctgagcccacagtct

SEQ ID NO: 29907 - DNA, 20 bp, synthetic construct
  misc_feature 1..20: note = chemically synthesized
  source 1..20: mol_type = other DNA
aacaccctgggaagactact

SEQ ID NO: 29908 - DNA, 20 bp, synthetic construct
  misc_feature 1..20: note = chemically synthesized
  source 1..20: mol_type = other DNA
cttttccctgctaacagaaa

SEQ ID NO: 29909 - DNA, 20 bp, synthetic construct
  misc_feature 1..20: note = chemically synthesized
  source 1..20: mol_type = other DNA
ttttaagattactattctat

SEQ ID NO: 29910 - DNA, 20 bp, synthetic construct
  misc_feature 1..20: note = chemically synthesized
  source 1..20: mol_type = other DNA
atttaggagcgctagacaca

SEQ ID NO: 29911 - DNA, 20 bp, synthetic construct
  misc_feature 1..20: note = chemically synthesized
  source 1..20: mol_type = other DNA
tgccacaaggcaggaagggg

SEQ ID NO: 29912 - DNA, 20 bp, synthetic construct
  misc_feature 1..20: note = chemically synthesized
  source 1..20: mol_type = other DNA
attttgcctttaatcaatga

SEQ ID NO: 29913 - DNA, 20 bp, synthetic construct
  misc_feature 1..20: note = chemically synthesized
  source 1..20: mol_type = other DNA
accccacaatgccacacacc

SEQ ID NO: 29914 - DNA, 20 bp, synthetic construct
  misc_feature 1..20: note = chemically synthesized
  source 1..20: mol_type = other DNA
aaatgtagattatcttccct

SEQ ID NO: 29915 - DNA, 20 bp, synthetic construct
  misc_feature 1..20: note = chemically synthesized
  source 1..20: mol_type = other DNA
tcaacattagatatttaaaa

SEQ ID NO: 29916 - DNA, 20 bp, synthetic construct
  misc_feature 1..20: note = chemically synthesized
  source 1..20: mol_type = other DNA
ggcatgaaaaagaaggctta

SEQ ID NO: 29917 - DNA, 20 bp, synthetic construct
  misc_feature 1..20: note = chemically synthesized
  source 1..20: mol_type = other DNA
caaccacaccagcctttaac

SEQ ID NO: 29918 - DNA, 20 bp, synthetic construct
  misc_feature 1..20: note = chemically synthesized
  source 1..20: mol_type = other DNA
actcccttatttatgagcag

SEQ ID NO: 29919 - DNA, 20 bp, synthetic construct
  misc_feature 1..20: note = chemically synthesized
  source 1..20: mol_type = other DNA
atgaacctttaatgggaaat

SEQ ID NO: 29920 - DNA, 20 bp, synthetic construct
  misc_feature 1..20: note = chemically synthesized
  source 1..20: mol_type = other DNA
ctttaatgggaaatctggat

SEQ ID NO: 29921 - DNA, 20 bp, synthetic construct
  misc_feature 1..20: note = chemically synthesized
  source 1..20: mol_type = other DNA
tgacttggttttcccaactc

SEQ ID NO: 29922 - DNA, 20 bp, synthetic construct
  misc_feature 1..20: note = chemically synthesized
  source 1..20: mol_type = other DNA
tctgtgctattacttttgac

SEQ ID NO: 29923 - DNA, 20 bp, synthetic construct
  misc_feature 1..20: note = chemically synthesized
  source 1..20: mol_type = other DNA
aaacatttaaattatcctgg

SEQ ID NO: 29924 - DNA, 20 bp, synthetic construct
  misc_feature 1..20: note = chemically synthesized
  source 1..20: mol_type = other DNA
tttgtctcacgggctgttca

SEQ ID NO: 29925 - DNA, 20 bp, synthetic construct
  misc_feature 1..20: note = chemically synthesized
  source 1..20: mol_type = other DNA
cctttccttctaggaacatg

SEQ ID NO: 29926 - DNA, 20 bp, synthetic construct
  misc_feature 1..20: note = chemically synthesized
  source 1..20: mol_type = other DNA
tccttctaggaacatgagga

SEQ ID NO: 29927 - DNA, 20 bp, synthetic construct
  misc_feature 1..20: note = chemically synthesized
  source 1..20: mol_type = other DNA
tcaaagcctgtaaaagatac

SEQ ID NO: 29928 - DNA, 20 bp, synthetic construct
  misc_feature 1..20: note = chemically synthesized
  source 1..20: mol_type = other DNA
tttaactgaacaatgtctcc

SEQ ID NO: 29929 - DNA, 20 bp, synthetic construct
  misc_feature 1..20: note = chemically synthesized
  source 1..20: mol_type = other DNA
gaccgtctctttggtgcagt

SEQ ID NO: 29930 - DNA, 20 bp, synthetic construct
  misc_feature 1..20: note = chemically synthesized
  source 1..20: mol_type = other DNA
ataataggacaatgccataa

SEQ ID NO: 29931 - DNA, 20 bp, synthetic construct
  misc_feature 1..20: note = chemically synthesized
  source 1..20: mol_type = other DNA
aaatacttactgtactgcag

SEQ ID NO: 29932 - DNA, 20 bp, synthetic construct
  misc_feature 1..20: note = chemically synthesized
  source 1..20: mol_type = other DNA
tttgttttttgtttctgagg

SEQ ID NO: 29933 - DNA, 20 bp, synthetic construct
  misc_feature 1..20: note = chemically synthesized
  source 1..20: mol_type = other DNA
ttcgctcttgttgcccgggc

SEQ ID NO: 29934 - DNA, 20 bp, synthetic construct
  misc_feature 1..20: note = chemically synthesized
  source 1..20: mol_type = other DNA
ctcaccgcaatctccgcctc

SEQ ID NO: 29935 - DNA, 20 bp, synthetic construct
  misc_feature 1..20: note = chemically synthesized
  source 1..20: mol_type = other DNA
gcctcagcctcccaagtagc

SEQ ID NO: 29936 - DNA, 20 bp, synthetic construct
  misc_feature 1..20: note = chemically synthesized
  source 1..20: mol_type = other DNA
ttctgtatttttggtagaga

SEQ ID NO: 29937 - DNA, 20 bp, synthetic construct
  misc_feature 1..20: note = chemically synthesized
  source 1..20: mol_type = other DNA
acctcagcctcccaaagtgc

SEQ ID NO: 29938 - DNA, 20 bp, synthetic construct
  misc_feature 1..20: note = chemically synthesized
  source 1..20: mol_type = other DNA
aggtggtcaaaatgtttcta

SEQ ID NO: 29939 - DNA, 20 bp, synthetic construct
  misc_feature 1..20: note = chemically synthesized
  source 1..20: mol_type = other DNA
ccccaattaaactgttgctt

SEQ ID NO: 29940 - DNA, 20 bp, synthetic construct
  misc_feature 1..20: note = chemically synthesized
  source 1..20: mol_type = other DNA
aacactagcccacatgccaa

SEQ ID NO: 29941 - DNA, 20 bp, synthetic construct
  misc_feature 1..20: note = chemically synthesized
  source 1..20: mol_type = other DNA
aaaatagctgcctcatcatc

SEQ ID NO: 29942 - DNA, 20 bp, synthetic construct
  misc_feature 1..20: note = chemically synthesized
  source 1..20: mol_type = other DNA
acctatctcaaaagaaaatt

SEQ ID NO: 29943 - DNA, 20 bp, synthetic construct
  misc_feature 1..20: note = chemically synthesized
  source 1..20: mol_type = other DNA
tctttcccctctaggacact

SEQ ID NO: 29944 - DNA, 20 bp, synthetic construct
  misc_feature 1..20: note = chemically synthesized
  source 1..20: mol_type = other DNA
cactattaaagagagatcac

SEQ ID NO: 29945 - DNA, 20 bp, synthetic construct
  misc_feature 1..20: note = chemically synthesized
  source 1..20: mol_type = other DNA
taaagagagatcacagggat

SEQ ID NO: 29946 - DNA, 20 bp, synthetic construct
  misc_feature 1..20: note = chemically synthesized
  source 1..20: mol_type = other DNA
catgaaacaccatccatgcc

SEQ ID NO: 29947 - DNA, 20 bp, synthetic construct
  misc_feature 1..20: note = chemically synthesized
  source 1..20: mol_type = other DNA
catgccctgagtatcccaac

SEQ ID NO: 29948 - DNA, 20 bp, synthetic construct
  misc_feature 1..20: note = chemically synthesized
  source 1..20: mol_type = other DNA
acaggggagaactcggcatg

SEQ ID NO: 29949 - DNA, 20 bp, synthetic construct
  misc_feature 1..20: note = chemically synthesized
  source 1..20: mol_type = other DNA
tcggcatgaagggtataaca

SEQ ID NO: 29950 - DNA, 20 bp, synthetic construct
  misc_feature 1..20: note = chemically synthesized
  source 1..20: mol_type = other DNA
caactcatccaccccctttg

SEQ ID NO: 29951 - DNA, 20 bp, synthetic construct
  misc_feature 1..20: note = chemically synthesized
  source 1..20: mol_type = other DNA
tgctgcctttgtcttctgat

SEQ ID NO: 29952 - DNA, 20 bp, synthetic construct
  misc_feature 1..20: note = chemically synthesized
  source 1..20: mol_type = other DNA
cagcagccctctgtgatcta

SEQ ID NO: 29953 - DNA, 20 bp, synthetic construct
  misc_feature 1..20: note = chemically synthesized
  source 1..20: mol_type = other DNA
cttcttcttctcttacctcc

SEQ ID NO: 29954 - DNA, 20 bp, synthetic construct
  misc_feature 1..20: note = chemically synthesized
  source 1..20: mol_type = other DNA
tacctagtcaccttagcaag

SEQ ID NO: 29955 - DNA, 20 bp, synthetic construct
  misc_feature 1..20: note = chemically synthesized
  source 1..20: mol_type = other DNA
attaatttcatgtgttccca

SEQ ID NO: 29956 - DNA, 20 bp, synthetic construct
  misc_feature 1..20: note = chemically synthesized
  source 1..20: mol_type = other DNA
acatgatattcatatattct

SEQ ID NO: 29957 - DNA, 20 bp, synthetic construct
  misc_feature 1..20: note = chemically synthesized
  source 1..20: mol_type = other DNA
tatgctacacaaagattagc

SEQ ID NO: 29958 - DNA, 20 bp, synthetic construct
  misc_feature 1..20: note = chemically synthesized
  source 1..20: mol_type = other DNA
gccaggttggtaaagtctga

SEQ ID NO: 29959 - DNA, 20 bp, synthetic construct
  misc_feature 1..20: note = chemically synthesized
  source 1..20: mol_type = other DNA
actttgggaggccggggcag

SEQ ID NO: 29960 - DNA, 20 bp, synthetic construct
  misc_feature 1..20: note = chemically synthesized
  source 1..20: mol_type = other DNA
caggaggatcacctgaggtc

SEQ ID NO: 29961 - DNA, 20 bp, synthetic construct
  misc_feature 1..20: note = chemically synthesized
  source 1..20: mol_type = other DNA
tgcattccagcccgggcaac

SEQ ID NO: 29962 - DNA, 20 bp, synthetic construct
  misc_feature 1..20: note = chemically synthesized
  source 1..20: mol_type = other DNA
aaataccttggaaattgaga

SEQ ID NO: 29963 - DNA, 20 bp, synthetic construct
  misc_feature 1..20: note = chemically synthesized
  source 1..20: mol_type = other DNA
gagggaatctggagaggaag

SEQ ID NO: 29964 - DNA, 20 bp, synthetic construct
  misc_feature 1..20: note = chemically synthesized
  source 1..20: mol_type = other DNA
aacaaaaaccctcactttac

SEQ ID NO: 29965 - DNA, 20 bp, synthetic construct
  misc_feature 1..20: note = chemically synthesized
  source 1..20: mol_type = other DNA
cttaaggagaagacatactg

SEQ ID NO: 29966 - DNA, 20 bp, synthetic construct
  misc_feature 1..20: note = chemically synthesized
  source 1..20: mol_type = other DNA
agacatactgatgaataaga

SEQ ID NO: 29967 - DNA, 20 bp, synthetic construct
  misc_feature 1..20: note = chemically synthesized
  source 1..20: mol_type = other DNA
actttgggaggtcaaggcag

SEQ ID NO: 29968 - DNA, 20 bp, synthetic construct
  misc_feature 1..20: note = chemically synthesized
  source 1..20: mol_type = other DNA
caggaggatcactggagccc

SEQ ID NO: 29969 - DNA, 20 bp, synthetic construct
  misc_feature 1..20: note = chemically synthesized
  source 1..20: mol_type = other DNA
tactcaggaggctgaggtga

SEQ ID NO: 29970 - DNA, 20 bp, synthetic construct
  misc_feature 1..20: note = chemically synthesized
  source 1..20: mol_type = other DNA
caactaattgggctaatgtt

SEQ ID NO: 29971 - DNA, 20 bp, synthetic construct
  misc_feature 1..20: note = chemically synthesized
  source 1..20: mol_type = other DNA
tagggaagaaaaaaacttag

SEQ ID NO: 29972 - DNA, 20 bp, synthetic construct
  misc_feature 1..20: note = chemically synthesized
  source 1..20: mol_type = other DNA
ttttactttttgaagcctgc

SEQ ID NO: 29973 - DNA, 20 bp, synthetic construct
  misc_feature 1..20: note = chemically synthesized
  source 1..20: mol_type = other DNA
acccaaatgctctgcttatg

SEQ ID NO: 29974 - DNA, 20 bp, synthetic construct
  misc_feature 1..20: note = chemically synthesized
  source 1..20: mol_type = other DNA
taccaacttctataaaatct

SEQ ID NO: 29975 - DNA, 20 bp, synthetic construct
  misc_feature 1..20: note = chemically synthesized
  source 1..20: mol_type = other DNA
gtgctaccctgaaagacggc

SEQ ID NO: 29976 - DNA, 20 bp, synthetic construct
  misc_feature 1..20: note = chemically synthesized
  source 1..20: mol_type = other DNA
gacttggttccactccagtg

SEQ ID NO: 29977 - DNA, 20 bp, synthetic construct
  misc_feature 1..20: note = chemically synthesized
  source 1..20: mol_type = other DNA
cattcattttaagtgtacag

SEQ ID NO: 29978 - DNA, 20 bp, synthetic construct
  misc_feature 1..20: note = chemically synthesized
  source 1..20: mol_type = other DNA
ccacctaccaccacagtgtt

SEQ ID NO: 29979 - DNA, 20 bp, synthetic construct
  misc_feature 1..20: note = chemically synthesized
  source 1..20: mol_type = other DNA
caccacagtgttgagaattc

SEQ ID NO: 29980 - DNA, 20 bp, synthetic construct
  misc_feature 1..20: note = chemically synthesized
  source 1..20: mol_type = other DNA
ttgttacaaatggactcata

SEQ ID NO: 29981 - DNA, 20 bp, synthetic construct
  misc_feature 1..20: note = chemically synthesized
  source 1..20: mol_type = other DNA
gtttaatttcttccacagag

SEQ ID NO: 29982 - DNA, 20 bp, synthetic construct
  misc_feature 1..20: note = chemically synthesized
  source 1..20: mol_type = other DNA
tccacagagcagaatgattc

SEQ ID NO: 29983 - DNA, 20 bp, synthetic construct
  misc_feature 1..20: note = chemically synthesized
  source 1..20: mol_type = other DNA
tctgggattcatccatggtg

SEQ ID NO: 29984 - DNA, 20 bp, synthetic construct
  misc_feature 1..20: note = chemically synthesized
  source 1..20: mol_type = other DNA
actctttcattcttctactg

SEQ ID NO: 29985 - DNA, 20 bp, synthetic construct
  misc_feature 1..20: note = chemically synthesized
  source 1..20: mol_type = other DNA
ttcaacctattggttgccat

SEQ ID NO: 29986 - DNA, 20 bp, synthetic construct
  misc_feature 1..20: note = chemically synthesized
  source 1..20: mol_type = other DNA
cactgtgtagatgtgtttat

SEQ ID NO: 29987 - DNA, 20 bp, synthetic construct
  misc_feature 1..20: note = chemically synthesized
  source 1..20: mol_type = other DNA
tcgagaacacagaaaaggtt

SEQ ID NO: 29988 - DNA, 20 bp, synthetic construct
  misc_feature 1..20: note = chemically synthesized
  source 1..20: mol_type = other DNA
acacagaaaaggttttgagt

SEQ ID NO: 29989 - DNA, 20 bp, synthetic construct
  misc_feature 1..20: note = chemically synthesized
  source 1..20: mol_type = other DNA
ccctcccaccccattccctg

SEQ ID NO: 29990 - DNA, 20 bp, synthetic construct
  misc_feature 1..20: note = chemically synthesized
  source 1..20: mol_type = other DNA
ctaccaaatgtcatcctatt

SEQ ID NO: 29991 - DNA, 20 bp, synthetic construct
  misc_feature 1..20: note = chemically synthesized
  source 1..20: mol_type = other DNA
ttcttaaaatgggcattcat

SEQ ID NO: 29992 - DNA, 20 bp, synthetic construct
  misc_feature 1..20: note = chemically synthesized
  source 1..20: mol_type = other DNA
caggccaaataaattggact

SEQ ID NO: 29993 - DNA, 20 bp, synthetic construct
  misc_feature 1..20: note = chemically synthesized
  source 1..20: mol_type = other DNA
gataacttaagtgtggtgtt

SEQ ID NO: 29994 - DNA, 20 bp, synthetic construct
  misc_feature 1..20: note = chemically synthesized
  source 1..20: mol_type = other DNA
cctcccccattagcagcatg

SEQ ID NO: 29995 - DNA, 20 bp, synthetic construct
  misc_feature 1..20: note = chemically synthesized
  source 1..20: mol_type = other DNA
gcttggccatggcagggctg

SEQ ID NO: 29996 - DNA, 20 bp, synthetic construct
  misc_feature 1..20: note = chemically synthesized
  source 1..20: mol_type = other DNA
ggcctccagtgggaccagag

SEQ ID NO: 29997 - DNA, 20 bp, synthetic construct
  misc_feature 1..20: note = chemically synthesized
  source 1..20: mol_type = other DNA
gctgattaaaggaaggtacg

SEQ ID NO: 29998 - DNA, 20 bp, synthetic construct
  misc_feature 1..20: note = chemically synthesized
  source 1..20: mol_type = other DNA
cagagagaaagtgaagcccc

SEQ ID NO: 29999 - DNA, 20 bp, synthetic construct
  misc_feature 1..20: note = chemically synthesized
  source 1..20: mol_type = other DNA
ttgagctacacaggctaagc

SEQ ID NO: 30000 - DNA, 20 bp, synthetic construct
  misc_feature 1..20: note = chemically synthesized
  source 1..20: mol_type = other DNA
caggctaagcaagagtgaga

SEQ ID NO: 30001 - DNA, 20 bp, synthetic construct
  misc_feature 1..20: note = chemically synthesized
  source 1..20: mol_type = other DNA
gatgctgacaggccacatgg

SEQ ID NO: 30002 - DNA, 20 bp, synthetic construct
  misc_feature 1..20: note = chemically synthesized
  source 1..20: mol_type = other DNA
gaagacgtgggctgggagct

SEQ ID NO: 30003 - DNA, 20 bp, synthetic construct
  misc_feature 1..20: note = chemically synthesized
  source 1..20: mol_type = other DNA
gtcacctccccactctggac

SEQ ID NO: 30004 - DNA, 20 bp, synthetic construct
  misc_feature 1..20: note = chemically synthesized
  source 1..20: mol_type = other DNA
tatgcaatttttgccaagat

SEQ ID NO: 30005 - DNA, 20 bp, synthetic construct
  misc_feature 1..20: note = chemically synthesized
  source 1..20: mol_type = other DNA
agatgggagtatggggagag

SEQ ID NO: 30006 - DNA, 20 bp, synthetic construct
  misc_feature 1..20: note = chemically synthesized
  source 1..20: mol_type = other DNA
ccaaatgttctttcttcagc

SEQ ID NO: 30007 - DNA, 20 bp, synthetic construct
  misc_feature 1..20: note = chemically synthesized
  source 1..20: mol_type = other DNA
tatggactcatccgtaaaat

SEQ ID NO: 30008 - DNA, 20 bp, synthetic construct
  misc_feature 1..20: note = chemically synthesized
  source 1..20: mol_type = other DNA
taataatagtatatgcttca

SEQ ID NO: 30009 - DNA, 20 bp, synthetic construct
  misc_feature 1..20: note = chemically synthesized
  source 1..20: mol_type = other DNA
agggtttgtatgaaaataaa

SEQ ID NO: 30010 - DNA, 20 bp, synthetic construct
  misc_feature 1..20: note = chemically synthesized
  source 1..20: mol_type = other DNA
tatttgtaaagttcctagag

SEQ ID NO: 30011 - DNA, 20 bp, synthetic construct
  misc_feature 1..20: note = chemically synthesized
  source 1..20: mol_type = other DNA
ccctttccccaattcctagt

SEQ ID NO: 30012 - DNA, 20 bp, synthetic construct
  misc_feature 1..20: note = chemically synthesized
  source 1..20: mol_type = other DNA
aaagggagaggaaaaaggaa

SEQ ID NO: 30013 - DNA, 20 bp, synthetic construct
  misc_feature 1..20: note = chemically synthesized
  source 1..20: mol_type = other DNA
ctgataggtgcctatatgtg

SEQ ID NO: 30014 - DNA, 20 bp, synthetic construct
  misc_feature 1..20: note = chemically synthesized
  source 1..20: mol_type = other DNA
taggtgcctatatgtgatgg

SEQ ID NO: 30015 - DNA, 20 bp, synthetic construct
  misc_feature 1..20: note = chemically synthesized
  source 1..20: mol_type = other DNA
atggacaattatgaggaggg

SEQ ID NO: 30016 - DNA, 20 bp, synthetic construct
  misc_feature 1..20: note = chemically synthesized
  source 1..20: mol_type = other DNA
ttcacctcctttacaatttt

SEQ ID NO: 30017 - DNA, 20 bp, synthetic construct
  misc_feature 1..20: note = chemically synthesized
  source 1..20: mol_type = other DNA
gaccctggtgtgttatgtct

SEQ ID NO: 30018 - DNA, 20 bp, synthetic construct
  misc_feature 1..20: note = chemically synthesized
  source 1..20: mol_type = other DNA
tacctgtatggactttgcac

SEQ ID NO: 30019 - DNA, 20 bp, synthetic construct
  misc_feature 1..20: note = chemically synthesized
  source 1..20: mol_type = other DNA
ctagctgccttccttatcac

SEQ ID NO: 30020 - DNA, 20 bp, synthetic construct
  misc_feature 1..20: note = chemically synthesized
  source 1..20: mol_type = other DNA
cccaaggtccatcagtacct

SEQ ID NO: 30021 - DNA, 20 bp, synthetic construct
  misc_feature 1..20: note = chemically synthesized
  source 1..20: mol_type = other DNA
ggcacagtcaggctgttttc

SEQ ID NO: 30022 - DNA, 20 bp, synthetic construct
  misc_feature 1..20: note = chemically synthesized
  source 1..20: mol_type = other DNA
agtcaggctgttttccaggg

SEQ ID NO: 30023 - DNA, 20 bp, synthetic construct
  misc_feature 1..20: note = chemically synthesized
  source 1..20: mol_type = other DNA
tgttgtgatccctgtggttt

SEQ ID NO: 30024 - DNA, 20 bp, synthetic construct
  misc_feature 1..20: note = chemically synthesized
  source 1..20: mol_type = other DNA
aatggtgctgtcatttttct

SEQ ID NO: 30025 - DNA, 20 bp, synthetic construct
  misc_feature 1..20: note = chemically synthesized
  source 1..20: mol_type = other DNA
tctgagagtctctaaattac

SEQ ID NO: 30026 - DNA, 20 bp, synthetic construct
  misc_feature 1..20: note = chemically synthesized
  source 1..20: mol_type = other DNA
gaacaaacaaaccaaagaga

SEQ ID NO: 30027 - DNA, 20 bp, synthetic construct
  misc_feature 1..20: note = chemically synthesized
  source 1..20: mol_type = other DNA
tcaattgataatgaaggctt

SEQ ID NO: 30028 - DNA, 20 bp, synthetic construct
  misc_feature 1..20: note = chemically synthesized
  source 1..20: mol_type = other DNA
gcaatgcacctgtgcaggaa

SEQ ID NO: 30029 - DNA, 20 bp, synthetic construct
  misc_feature 1..20: note = chemically synthesized
  source 1..20: mol_type = other DNA
ggaaatggattacggaaaca

SEQ ID NO: 30030 - DNA, 20 bp, synthetic construct
  misc_feature 1..20: note = chemically synthesized
  source 1..20: mol_type = other DNA
ggaagtccaatacacgttta

SEQ ID NO: 30031 - DNA, 20 bp, synthetic construct
  misc_feature 1..20: note = chemically synthesized
  source 1..20: mol_type = other DNA
aggctaccacagatggggga

SEQ ID NO: 30032 - DNA, 20 bp, synthetic construct
  misc_feature 1..20: note = chemically synthesized
  source 1..20: mol_type = other DNA
ccacagatgggggacagggt

SEQ ID NO: 30033 - DNA, 20 bp, synthetic construct
  misc_feature 1..20: note = chemically synthesized
  source 1..20: mol_type = other DNA
gtggtgttactgaggggcaa

SEQ ID NO: 30034 - DNA, 20 bp, synthetic construct
  misc_feature 1..20: note = chemically synthesized
  source 1..20: mol_type = other DNA
gctctggacacacagcaaaa

SEQ ID NO: 30035 - DNA, 20 bp, synthetic construct
  misc_feature 1..20: note = chemically synthesized
  source 1..20: mol_type = other DNA
acacacagcaaaagtgagtt

SEQ ID NO: 30036 - DNA, 20 bp, synthetic construct
  misc_feature 1..20: note = chemically synthesized
  source 1..20: mol_type = other DNA
gcaggaaagagggaagagag

SEQ ID NO: 30037 - DNA, 20 bp, synthetic construct
  misc_feature 1..20: note = chemically synthesized
  source 1..20: mol_type = other DNA
ctttgctgcaggttcaaggc

SEQ ID NO: 30038 - DNA, 20 bp, synthetic construct
  misc_feature 1..20: note = chemically synthesized
  source 1..20: mol_type = other DNA
accccttctggaagagcctg

SEQ ID NO: 30039 - DNA, 20 bp, synthetic construct
  misc_feature 1..20: note = chemically synthesized
  source 1..20: mol_type = other DNA
gcaggggcctgggccattta

SEQ ID NO: 30040 - DNA, 20 bp, synthetic construct
  misc_feature 1..20: note = chemically synthesized
  source 1..20: mol_type = other DNA
ttcccactctaggttccact

SEQ ID NO: 30041 - DNA, 20 bp, synthetic construct
  misc_feature 1..20: note = chemically synthesized
  source 1..20: mol_type = other DNA
tctctcactatgctcccaag

SEQ ID NO: 30042 - DNA, 20 bp, synthetic construct
  misc_feature 1..20: note = chemically synthesized
  source 1..20: mol_type = other DNA
ccttcctcaaatctccctca

SEQ ID NO: 30043 - DNA, 20 bp, synthetic construct
  misc_feature 1..20: note = chemically synthesized
  source 1..20: mol_type = other DNA
cctgaaaagcagcatgcaaa

SEQ ID NO: 30044 - DNA, 20 bp, synthetic construct
  misc_feature 1..20: note = chemically synthesized
  source 1..20: mol_type = other DNA
cccatggacagtcataagag

SEQ ID NO: 30045 - DNA, 20 bp, synthetic construct
  misc_feature 1..20: note = chemically synthesized
  source 1..20: mol_type = other DNA
acgattacttcacgataaat

SEQ ID NO: 30046 - DNA, 20 bp, synthetic construct
  misc_feature 1..20: note = chemically synthesized
  source 1..20: mol_type = other DNA
tctctactcctcccccagtg

SEQ ID NO: 30047 - DNA, 20 bp, synthetic construct
  misc_feature 1..20: note = chemically synthesized
  source 1..20: mol_type = other DNA
cccccagtgttgagtggaca

SEQ ID NO: 30048 - DNA, 20 bp, synthetic construct
  misc_feature 1..20: note = chemically synthesized
  source 1..20: mol_type = other DNA
tagagaaacattccattgaa

SEQ ID NO: 30049 - DNA, 20 bp, synthetic construct
  misc_feature 1..20: note = chemically synthesized
  source 1..20: mol_type = other DNA
tttgatcaagtcagattttt

SEQ ID NO: 30050 - DNA, 20 bp, synthetic construct
  misc_feature 1..20: note = chemically synthesized
  source 1..20: mol_type = other DNA
caagtcagatttttcagaat

SEQ ID NO: 30051 - DNA, 20 bp, synthetic construct
  misc_feature 1..20: note = chemically synthesized
  source 1..20: mol_type = other DNA
agccctcaggttagcaggcc

SEQ ID NO: 30052 - DNA, 20 bp, synthetic construct
  misc_feature 1..20: note = chemically synthesized
  source 1..20: mol_type = other DNA
ttagcaggccaaggatatat

SEQ ID NO: 30053 - DNA, 20 bp, synthetic construct
  misc_feature 1..20: note = chemically synthesized
  source 1..20: mol_type = other DNA
ctagacttaaactgccgctc

SEQ ID NO: 30054 - DNA, 20 bp, synthetic construct
  misc_feature 1..20: note = chemically synthesized
  source 1..20: mol_type = other DNA
cttaaactgccgctcctgaa

SEQ ID NO: 30055 - DNA, 20 bp, synthetic construct
  misc_feature 1..20: note = chemically synthesized
  source 1..20: mol_type = other DNA
gattcatggcccctaacatc

SEQ ID NO: 30056 - DNA, 20 bp, synthetic construct
  misc_feature 1..20: note = chemically synthesized
  source 1..20: mol_type = other DNA
aataataataatagcttcca

SEQ ID NO: 30057 - DNA, 20 bp, synthetic construct
  misc_feature 1..20: note = chemically synthesized
  source 1..20: mol_type = other DNA
tccagtagagaaatgatcaa

SEQ ID NO: 30058 - DNA, 20 bp, synthetic construct
  misc_feature 1..20: note = chemically synthesized
  source 1..20: mol_type = other DNA
atgaaaccaagcttcctctg

SEQ ID NO: 30059 - DNA, 20 bp, synthetic construct
  misc_feature 1..20: note = chemically synthesized
  source 1..20: mol_type = other DNA
gacccaccgcttcattggcc

SEQ ID NO: 30060 - DNA, 20 bp, synthetic construct
  misc_feature 1..20: note = chemically synthesized
  source 1..20: mol_type = other DNA
gaggatgaccccataaaggt

SEQ ID NO: 30061 - DNA, 20 bp, synthetic construct
  misc_feature 1..20: note = chemically synthesized
  source 1..20: mol_type = other DNA
cctggcagaccctcaagagc

SEQ ID NO: 30062 - DNA, 20 bp, synthetic construct
  misc_feature 1..20: note = chemically synthesized
  source 1..20: mol_type = other DNA
gacatcactcttagcagggc

SEQ ID NO: 30063 - DNA, 20 bp, synthetic construct
  misc_feature 1..20: note = chemically synthesized
  source 1..20: mol_type = other DNA
tcactcttagcagggctggg

SEQ ID NO: 30064 - DNA, 20 bp, synthetic construct
  misc_feature 1..20: note = chemically synthesized
  source 1..20: mol_type = other DNA
ggggtgagtcaaaagtctgg

SEQ ID NO: 30065 - DNA, 20 bp, synthetic construct
  misc_feature 1..20: note = chemically synthesized
  source 1..20: mol_type = other DNA
tgggagaatggaggtgtgga

SEQ ID NO: 30066 - DNA, 20 bp, synthetic construct
  misc_feature 1..20: note = chemically synthesized
  source 1..20: mol_type = other DNA
tggaggtgtggaggggataa

SEQ ID NO: 30067 - DNA, 20 bp, synthetic construct
  misc_feature 1..20: note = chemically synthesized
  source 1..20: mol_type = other DNA
caggaagggcctctatgtag

SEQ ID NO: 30068 - DNA, 20 bp, synthetic construct
  misc_feature 1..20: note = chemically synthesized
  source 1..20: mol_type = other DNA
acccaggctgggctggacag

SEQ ID NO: 30069 - DNA, 20 bp, synthetic construct
  misc_feature 1..20: note = chemically synthesized
  source 1..20: mol_type = other DNA
agaggggtcccacaagatca

SEQ ID NO: 30070 - DNA, 20 bp, synthetic construct
  misc_feature 1..20: note = chemically synthesized
  source 1..20: mol_type = other DNA
cccatacccacttcccttcc

SEQ ID NO: 30071 - DNA, 20 bp, synthetic construct
  misc_feature 1..20: note = chemically synthesized
  source 1..20: mol_type = other DNA
ggcttaaggaagcctctctg

SEQ ID NO: 30072 - DNA, 20 bp, synthetic construct
  misc_feature 1..20: note = chemically synthesized
  source 1..20: mol_type = other DNA
tatgtaccttatacatacat

SEQ ID NO: 30073 - DNA, 20 bp, synthetic construct
  misc_feature 1..20: note = chemically synthesized
  source 1..20: mol_type = other DNA
acaggaagcaggtggtggtg

SEQ ID NO: 30074 - DNA, 20 bp, synthetic construct
  misc_feature 1..20: note = chemically synthesized
  source 1..20: mol_type = other DNA
ccacacaggcatccaaaggg

SEQ ID NO: 30075 - DNA, 20 bp, synthetic construct
  misc_feature 1..20: note = chemically synthesized
  source 1..20: mol_type = other DNA
gcaagacagccatgtgcaag

SEQ ID NO: 30076 - DNA, 20 bp, synthetic construct
  misc_feature 1..20: note = chemically synthesized
  source 1..20: mol_type = other DNA
gacagccatgtgcaaggcga

SEQ ID NO: 30077 - DNA, 20 bp, synthetic construct
  misc_feature 1..20: note = chemically synthesized
  source 1..20: mol_type = other DNA
cgtcactcccacagagctgc

SEQ ID NO: 30078 - DNA, 20 bp, synthetic construct
  misc_feature 1..20: note = chemically synthesized
  source 1..20: mol_type = other DNA
gactcatgtgtagctgactt

SEQ ID NO: 30079 - DNA, 20 bp, synthetic construct
  misc_feature 1..20: note = chemically synthesized
  source 1..20: mol_type = other DNA
catgaagctccccggaccaa

SEQ ID NO: 30080 - DNA, 20 bp, synthetic construct
  misc_feature 1..20: note = chemically synthesized
  source 1..20: mol_type = other DNA
ctgaaggaaaccgctcaacc

SEQ ID NO: 30081 - DNA, 20 bp, synthetic construct
  misc_feature 1..20: note = chemically synthesized
  source 1..20: mol_type = other DNA
ttgccctgggcactgagggc

SEQ ID NO: 30082 - DNA, 20 bp, synthetic construct
  misc_feature 1..20: note = chemically synthesized
  source 1..20: mol_type = other DNA
cagaggcctgcggctgtgcc

SEQ ID NO: 30083 - DNA, 20 bp, synthetic construct
  misc_feature 1..20: note = chemically synthesized
  source 1..20: mol_type = other DNA
tgtgtgagagcggtggtctt

SEQ ID NO: 30084 - DNA, 20 bp, synthetic construct
  misc_feature 1..20: note = chemically synthesized
  source 1..20: mol_type = other DNA
ggaggggacagggggcaggt

SEQ ID NO: 30085 - DNA, 20 bp, synthetic construct
  misc_feature 1..20: note = chemically synthesized
  source 1..20: mol_type = other DNA
cccctgagaaaaaatggcag

SEQ ID NO: 30086 - DNA, 20 bp, synthetic construct
  misc_feature 1..20: note = chemically synthesized
  source 1..20: mol_type = other DNA
gaagggactacgtgtattga

SEQ ID NO: 30087 - DNA, 20 bp, synthetic construct
  misc_feature 1..20: note = chemically synthesized
  source 1..20: mol_type = other DNA
cacttcccaactcctcagga

SEQ ID NO: 30088 - DNA, 20 bp, synthetic construct
  misc_feature 1..20: note = chemically synthesized
  source 1..20: mol_type = other DNA
gcacctcacttcaagccttg

SEQ ID NO: 30089 - DNA, 20 bp, synthetic construct
  misc_feature 1..20: note = chemically synthesized
  source 1..20: mol_type = other DNA
tcccaagttagacagatgag

SEQ ID NO: 30090 - DNA, 20 bp, synthetic construct
  misc_feature 1..20: note = chemically synthesized
  source 1..20: mol_type = other DNA
atgacattgtatggccaacc

SEQ ID NO: 30091 - DNA, 20 bp, synthetic construct
  misc_feature 1..20: note = chemically synthesized
  source 1..20: mol_type = other DNA
ttgctgatggaactagttaa

SEQ ID NO: 30092 - DNA, 20 bp, synthetic construct
  misc_feature 1..20: note = chemically synthesized
  source 1..20: mol_type = other DNA
tgtctgtgaagcaagcctag

SEQ ID NO: 30093 - DNA, 20 bp, synthetic construct
  misc_feature 1..20: note = chemically synthesized
  source 1..20: mol_type = other DNA
gggtgggcttgcaagcattt

SEQ ID NO: 30094 - DNA, 20 bp, synthetic construct
  misc_feature 1..20: note = chemically synthesized
  source 1..20: mol_type = other DNA
tgctacttgccagaacaaaa

SEQ ID NO: 30095 - DNA, 20 bp, synthetic construct
  misc_feature 1..20: note = chemically synthesized
  source 1..20: mol_type = other DNA
cctggtttgtaagttctctt

SEQ ID NO: 30096 - DNA, 20 bp, synthetic construct
  misc_feature 1..20: note = chemically synthesized
  source 1..20: mol_type = other DNA
gttctctttcgggtgcttcc

SEQ ID NO: 30097 - DNA, 20 bp, synthetic construct
  misc_feature 1..20: note = chemically synthesized
  source 1..20: mol_type = other DNA
ttttttttttttttttgaga

SEQ ID NO: 30098 - DNA, 20 bp, synthetic construct
  misc_feature 1..20: note = chemically synthesized
  source 1..20: mol_type = other DNA
ttcgctcttgttgcccaggc

SEQ ID NO: 30099 - DNA, 20 bp, synthetic construct
  misc_feature 1..20: note = chemically synthesized
  source 1..20: mol_type = other DNA
cggctcaccacctctgcctc

SEQ ID NO: 30100 - DNA, 20 bp, synthetic construct
  misc_feature 1..20: note = chemically synthesized
  source 1..20: mol_type = other DNA
aattctcctccctcagcctc

SEQ ID NO: 30101 - DNA, 20 bp, synthetic construct
  misc_feature 1..20: note = chemically synthesized
  source 1..20: mol_type = other DNA
ccctcagcctcctgagtagc

SEQ ID NO: 30102 - DNA, 20 bp, synthetic construct
  misc_feature 1..20: note = chemically synthesized
  source 1..20: mol_type = other DNA
acctcggcctcccaaagtgc

SEQ ID NO: 30103 - DNA, 20 bp, synthetic construct
  misc_feature 1..20: note = chemically synthesized
  source 1..20: mol_type = other DNA
ttattctaattattttacta

SEQ ID NO: 30104 - DNA, 20 bp, synthetic construct
  misc_feature 1..20: note = chemically synthesized
  source 1..20: mol_type = other DNA
attattttactagtgaatta

SEQ ID NO: 30105 - DNA, 20 bp, synthetic construct
  misc_feature 1..20: note = chemically synthesized
  source 1..20: mol_type = other DNA
acaatgcaactcaagactat

SEQ ID NO: 30106 - DNA, 20 bp, synthetic construct
  misc_feature 1..20: note = chemically synthesized
  source 1..20: mol_type = other DNA
ctcaagactatcagaatgat

SEQ ID NO: 30107 - DNA, 20 bp, synthetic construct
  misc_feature 1..20: note = chemically synthesized
  source 1..20: mol_type = other DNA
aaagctggtgaaacaaaatg

SEQ ID NO: 30108 - DNA, 20 bp, synthetic construct
  misc_feature 1..20: note = chemically synthesized
  source 1..20: mol_type = other DNA
tttgctgagctccaaagtca

SEQ ID NO: 30109 - DNA, 20 bp, synthetic construct
  misc_feature 1..20: note = chemically synthesized
  source 1..20: mol_type = other DNA
gcctaataaaactgcacaga

SEQ ID NO: 30110 - DNA, 20 bp, synthetic construct
  misc_feature 1..20: note = chemically synthesized
  source 1..20: mol_type = other DNA
aacttcttcatcagattcag

SEQ ID NO: 30111 - DNA, 20 bp, synthetic construct
  misc_feature 1..20: note = chemically synthesized
  source 1..20: mol_type = other DNA
tcagattcagaagagtagca

SEQ ID NO: 30112 - DNA, 20 bp, synthetic construct
  misc_feature 1..20: note = chemically synthesized
  source 1..20: mol_type = other DNA
acactttgtacatacaattc

SEQ ID NO: 30113 - DNA, 20 bp, synthetic construct
  misc_feature 1..20: note = chemically synthesized
  source 1..20: mol_type = other DNA
atgctttctaatattaaaat

SEQ ID NO: 30114 - DNA, 20 bp, synthetic construct
  misc_feature 1..20: note = chemically synthesized
  source 1..20: mol_type = other DNA
gggaggtacttaatctctaa

SEQ ID NO: 30115 - DNA, 20 bp, synthetic construct
  misc_feature 1..20: note = chemically synthesized
  source 1..20: mol_type = other DNA
atctctaagagaatcaagtc

SEQ ID NO: 30116 - DNA, 20 bp, synthetic construct
  misc_feature 1..20: note = chemically synthesized
  source 1..20: mol_type = other DNA
ctaagagaatcaagtctcga

SEQ ID NO: 30117 - DNA, 20 bp, synthetic construct
  misc_feature 1..20: note = chemically synthesized
  source 1..20: mol_type = other DNA
tgggtaaaatgagctgggga

SEQ ID NO: 30118 - DNA, 20 bp, synthetic construct
  misc_feature 1..20: note = chemically synthesized
  source 1..20: mol_type = other DNA
ttaaggcctgggctgtctag

SEQ ID NO: 30119 - DNA, 20 bp, synthetic construct
  misc_feature 1..20: note = chemically synthesized
  source 1..20: mol_type = other DNA
gtctgtcatcttaatacaca

SEQ ID NO: 30120 - DNA, 20 bp, synthetic construct
  misc_feature 1..20: note = chemically synthesized
  source 1..20: mol_type = other DNA
tttgtcctggcaatgggagc

SEQ ID NO: 30121 - DNA, 20 bp, synthetic construct
  misc_feature 1..20: note = chemically synthesized
  source 1..20: mol_type = other DNA
tcctggcaatgggagcagga

SEQ ID NO: 30122 - DNA, 20 bp, synthetic construct
  misc_feature 1..20: note = chemically synthesized
  source 1..20: mol_type = other DNA
gctctgaccaggtggaaagc

SEQ ID NO: 30123 - DNA, 20 bp, synthetic construct
  misc_feature 1..20: note = chemically synthesized
  source 1..20: mol_type = other DNA
gaccaggtggaaagccagaa

SEQ ID NO: 30124 - DNA, 20 bp, synthetic construct
  misc_feature 1..20: note = chemically synthesized
  source 1..20: mol_type = other DNA
ataatgtgtggcgctcaggt

SEQ ID NO: 30125 - DNA, 20 bp, synthetic construct
  misc_feature 1..20: note = chemically synthesized
  source 1..20: mol_type = other DNA
ccactgcaagggacaatatt

SEQ ID NO: 30126 - DNA, 20 bp, synthetic construct
  misc_feature 1..20: note = chemically synthesized
  source 1..20: mol_type = other DNA
aaggaacgagggggcagaga

SEQ ID NO: 30127 - DNA, 20 bp, synthetic construct
  misc_feature 1..20: note = chemically synthesized
  source 1..20: mol_type = other DNA
cagagagggaatgaaagaca

SEQ ID NO: 30128 - DNA, 20 bp, synthetic construct
  misc_feature 1..20: note = chemically synthesized
  source 1..20: mol_type = other DNA
ggcacattctgagaactctg

SEQ ID NO: 30129 - DNA, 20 bp, synthetic construct
  misc_feature 1..20: note = chemically synthesized
  source 1..20: mol_type = other DNA
gctgcctaccggcacgcatg

SEQ ID NO: 30130 - DNA, 20 bp, synthetic construct
  misc_feature 1..20: note = chemically synthesized
  source 1..20: mol_type = other DNA
tgatgaagatgcagtacctt

SEQ ID NO: 30131 - DNA, 20 bp, synthetic construct
  misc_feature 1..20: note = chemically synthesized
  source 1..20: mol_type = other DNA
gcagtaccttctgggtctgc

SEQ ID NO: 30132 - DNA, 20 bp, synthetic construct
  misc_feature 1..20: note = chemically synthesized
  source 1..20: mol_type = other DNA
aggcagaggaggccacctat

SEQ ID NO: 30133 - DNA, 20 bp, synthetic construct
  misc_feature 1..20: note = chemically synthesized
  source 1..20: mol_type = other DNA
gaggccacctatctgaatgc

SEQ ID NO: 30134 - DNA, 20 bp, synthetic construct
  misc_feature 1..20: note = chemically synthesized
  source 1..20: mol_type = other DNA
ccagcctgctctcccaaaga

SEQ ID NO: 30135 - DNA, 20 bp, synthetic construct
  misc_feature 1..20: note = chemically synthesized
  source 1..20: mol_type = other DNA
ccaaggcaaaaagcaaatag

SEQ ID NO: 30136 - DNA, 20 bp, synthetic construct
  misc_feature 1..20: note = chemically synthesized
  source 1..20: mol_type = other DNA
ggcaaaaagcaaatagcaga

SEQ ID NO: 30137 - DNA, 20 bp, synthetic construct
  misc_feature 1..20: note = chemically synthesized
  source 1..20: mol_type = other DNA
cttgaaattatatagagagg

SEQ ID NO: 30138 - DNA, 20 bp, synthetic construct
  misc_feature 1..20: note = chemically synthesized
  source 1..20: mol_type = other DNA
gtgtgcaggctgtggaagcg

SEQ ID NO: 30139 - DNA, 20 bp, synthetic construct
  misc_feature 1..20: note = chemically synthesized
  source 1..20: mol_type = other DNA
ggggtggacccagaagtata

SEQ ID NO: 30140 - DNA, 20 bp, synthetic construct
  misc_feature 1..20: note = chemically synthesized
  source 1..20: mol_type = other DNA
acccagaagtataaggagtt

SEQ ID NO: 30141 - DNA, 20 bp, synthetic construct
  misc_feature 1..20: note = chemically synthesized
  source 1..20: mol_type = other DNA
aagtataaggagttctggat

SEQ ID NO: 30142 - DNA, 20 bp, synthetic construct
  misc_feature 1..20: note = chemically synthesized
  source 1..20: mol_type = other DNA
ccctttctcctgcctcttca

SEQ ID NO: 30143 - DNA, 20 bp, synthetic construct
  misc_feature 1..20: note = chemically synthesized
  source 1..20: mol_type = other DNA
ttcacagggttactcatgag

SEQ ID NO: 30144 - DNA, 20 bp, synthetic construct
  misc_feature 1..20: note = chemically synthesized
  source 1..20: mol_type = other DNA
cagcacaatggacattcgaa

SEQ ID NO: 30145 - DNA, 20 bp, synthetic construct
  misc_feature 1..20: note = chemically synthesized
  source 1..20: mol_type = other DNA
ttcataagccaaaaaagcta

SEQ ID NO: 30146 - DNA, 20 bp, synthetic construct
  misc_feature 1..20: note = chemically synthesized
  source 1..20: mol_type = other DNA
gatcggagagaaaagaaggg

SEQ ID NO: 30147 - DNA, 20 bp, synthetic construct
  misc_feature 1..20: note = chemically synthesized
  source 1..20: mol_type = other DNA
ggatactcagaaacggcttc

SEQ ID NO: 30148 - DNA, 20 bp, synthetic construct
  misc_feature 1..20: note = chemically synthesized
  source 1..20: mol_type = other DNA
atcactcatcaggtagtcag

SEQ ID NO: 30149 - DNA, 20 bp, synthetic construct
  misc_feature 1..20: note = chemically synthesized
  source 1..20: mol_type = other DNA
tgcatccacacagggaacaa

SEQ ID NO: 30150 - DNA, 20 bp, synthetic construct
  misc_feature 1..20: note = chemically synthesized
  source 1..20: mol_type = other DNA
tcttcaggctgccagagcaa

SEQ ID NO: 30151 - DNA, 20 bp, synthetic construct
  misc_feature 1..20: note = chemically synthesized
  source 1..20: mol_type = other DNA
cagctggccactctgtgacg

SEQ ID NO: 30152 - DNA, 20 bp, synthetic construct
  misc_feature 1..20: note = chemically synthesized
  source 1..20: mol_type = other DNA
tggccactctgtgacggagg

SEQ ID NO: 30153 - DNA, 20 bp, synthetic construct
  misc_feature 1..20: note = chemically synthesized
  source 1..20: mol_type = other DNA
agggtgggtaacctctctac

SEQ ID NO: 30154 - DNA, 20 bp, synthetic construct
  misc_feature 1..20: note = chemically synthesized
  source 1..20: mol_type = other DNA
tctacctgggtctatcattt

SEQ ID NO: 30155 - DNA, 20 bp, synthetic construct
  misc_feature 1..20: note = chemically synthesized
  source 1..20: mol_type = other DNA
ataacccaaatagggctttg

SEQ ID NO: 30156 - DNA, 20 bp, synthetic construct
  misc_feature 1..20: note = chemically synthesized
  source 1..20: mol_type = other DNA
accacactaggctttgcagc

SEQ ID NO: 30157 - DNA, 20 bp, synthetic construct
  misc_feature 1..20: note = chemically synthesized
  source 1..20: mol_type = other DNA
ccagatggtgcgagaagata

SEQ ID NO: 30158 - DNA, 20 bp, synthetic construct
  misc_feature 1..20: note = chemically synthesized
  source 1..20: mol_type = other DNA
tagtgaatcactcataggca

SEQ ID NO: 30159 - DNA, 20 bp, synthetic construct
  misc_feature 1..20: note = chemically synthesized
  source 1..20: mol_type = other DNA
aattctctctgcatcagagg

SEQ ID NO: 30160 - DNA, 20 bp, synthetic construct
  misc_feature 1..20: note = chemically synthesized
  source 1..20: mol_type = other DNA
gagctggctcaggacgccac

SEQ ID NO: 30161 - DNA, 20 bp, synthetic construct
  misc_feature 1..20: note = chemically synthesized
  source 1..20: mol_type = other DNA
agccggccccagctggcatg

SEQ ID NO: 30162 - DNA, 20 bp, synthetic construct
  misc_feature 1..20: note = chemically synthesized
  source 1..20: mol_type = other DNA
tataatgctgagatttatac

SEQ ID NO: 30163 - DNA, 20 bp, synthetic construct
  misc_feature 1..20: note = chemically synthesized
  source 1..20: mol_type = other DNA
tggcattatctaatttaact

SEQ ID NO: 30164 - DNA, 20 bp, synthetic construct
  misc_feature 1..20: note = chemically synthesized
  source 1..20: mol_type = other DNA
atcccaacagacagagggcc

SEQ ID NO: 30165 - DNA, 20 bp, synthetic construct
  misc_feature 1..20: note = chemically synthesized
  source 1..20: mol_type = other DNA
taaatgctcttctagctctg

SEQ ID NO: 30166 - DNA, 20 bp, synthetic construct
  misc_feature 1..20: note = chemically synthesized
  source 1..20: mol_type = other DNA
ttttacattttcagatgttt

SEQ ID NO: 30167 - DNA, 20 bp, synthetic construct
  misc_feature 1..20: note = chemically synthesized
  source 1..20: mol_type = other DNA
ttcaacagctcactgcataa

SEQ ID NO: 30168 - DNA, 20 bp, synthetic construct
  misc_feature 1..20: note = chemically synthesized
  source 1..20: mol_type = other DNA
caaacagcacaagacagaaa

SEQ ID NO: 30169 - DNA, 20 bp, synthetic construct
  misc_feature 1..20: note = chemically synthesized
  source 1..20: mol_type = other DNA
agcacaagacagaaagcggg

SEQ ID NO: 30170 - DNA, 20 bp, synthetic construct
  misc_feature 1..20: note = chemically synthesized
  source 1..20: mol_type = other DNA
agcgggtggggtggggggcg

SEQ ID NO: 30171 - DNA, 20 bp, synthetic construct
  misc_feature 1..20: note = chemically synthesized
  source 1..20: mol_type = other DNA
taacaaaggacagcatacta

SEQ ID NO: 30172 - DNA, 20 bp, synthetic construct
  misc_feature 1..20: note = chemically synthesized
  source 1..20: mol_type = other DNA
catactatgggataattact

SEQ ID NO: 30173 - DNA, 20 bp, synthetic construct
  misc_feature 1..20: note = chemically synthesized
  source 1..20: mol_type = other DNA
gtcttcggtgttggttccta

SEQ ID NO: 30174 - DNA, 20 bp, synthetic construct
  misc_feature 1..20: note = chemically synthesized
  source 1..20: mol_type = other DNA
gtgttggttcctatggggtt

SEQ ID NO: 30175 - DNA, 20 bp, synthetic construct
  misc_feature 1..20: note = chemically synthesized
  source 1..20: mol_type = other DNA
agaggagacagagaagcttc

SEQ ID NO: 30176 - DNA, 20 bp, synthetic construct
  misc_feature 1..20: note = chemically synthesized
  source 1..20: mol_type = other DNA
agagaagcttcctgggtgtg

SEQ ID NO: 30177 - DNA, 20 bp, synthetic construct
  misc_feature 1..20: note = chemically synthesized
  source 1..20: mol_type = other DNA
cacaggagcaagcactgcag

SEQ ID NO: 30178 - DNA, 20 bp, synthetic construct
  misc_feature 1..20: note = chemically synthesized
  source 1..20: mol_type = other DNA
caagcactgcagccgggtcc

SEQ ID NO: 30179 - DNA, 20 bp, synthetic construct
  misc_feature 1..20: note = chemically synthesized
  source 1..20: mol_type = other DNA
gtctgacttttacccaaaca

SEQ ID NO: 30180 - DNA, 20 bp, synthetic construct
  misc_feature 1..20: note = chemically synthesized
  source 1..20: mol_type = other DNA
gcacattacctagttggcaa

SEQ ID NO: 30181 - DNA, 20 bp, synthetic construct
  misc_feature 1..20: note = chemically synthesized
  source 1..20: mol_type = other DNA
ggaatgcaactgggaggttc

SEQ ID NO: 30182 - DNA, 20 bp, synthetic construct
  misc_feature 1..20: note = chemically synthesized
  source 1..20: mol_type = other DNA
aagaggactttgctttcctc

SEQ ID NO: 30183 - DNA, 20 bp, synthetic construct
  misc_feature 1..20: note = chemically synthesized
  source 1..20: mol_type = other DNA
ccaaagagaagcgttgctag

SEQ ID NO: 30184 - DNA, 20 bp, synthetic construct
  misc_feature 1..20: note = chemically synthesized
  source 1..20: mol_type = other DNA
cgctcagctacaggggccgt

SEQ ID NO: 30185 - DNA, 20 bp, synthetic construct
  misc_feature 1..20: note = chemically synthesized
  source 1..20: mol_type = other DNA
ggaggcctgtgcatttccct

SEQ ID NO: 30186 - DNA, 20 bp, synthetic construct
  misc_feature 1..20: note = chemically synthesized
  source 1..20: mol_type = other DNA
actcttctctgagctccccc

SEQ ID NO: 30187 - DNA, 20 bp, synthetic construct
  misc_feature 1..20: note = chemically synthesized
  source 1..20: mol_type = other DNA
tgggttacctatgattccag

SEQ ID NO: 30188 - DNA, 20 bp, synthetic construct
  misc_feature 1..20: note = chemically synthesized
  source 1..20: mol_type = other DNA
gaaacctaaggcctaccttg

SEQ ID NO: 30189 - DNA, 20 bp, synthetic construct
  misc_feature 1..20: note = chemically synthesized
  source 1..20: mol_type = other DNA
actgctacttaaggtgtctt

SEQ ID NO: 30190 - DNA, 20 bp, synthetic construct
  misc_feature 1..20: note = chemically synthesized
  source 1..20: mol_type = other DNA
tggtctcagctttggctggc

SEQ ID NO: 30191 - DNA, 20 bp, synthetic construct
  misc_feature 1..20: note = chemically synthesized
  source 1..20: mol_type = other DNA
ttggctggcttggatgttat

SEQ ID NO: 30192 - DNA, 20 bp, synthetic construct
  misc_feature 1..20: note = chemically synthesized
  source 1..20: mol_type = other DNA
ttggatgttatgaggattcc

SEQ ID NO: 30193 - DNA, 20 bp, synthetic construct
  misc_feature 1..20: note = chemically synthesized
  source 1..20: mol_type = other DNA
aacctgtggaaaagaggaca

SEQ ID NO: 30194 - DNA, 20 bp, synthetic construct
  misc_feature 1..20: note = chemically synthesized
  source 1..20: mol_type = other DNA
agcacaagacacgtggcagt

SEQ ID NO: 30195 - DNA, 20 bp, synthetic construct
  misc_feature 1..20: note = chemically synthesized
  source 1..20: mol_type = other DNA
aagaaacaaagcgcatcttt

SEQ ID NO: 30196 - DNA, 20 bp, synthetic construct
  misc_feature 1..20: note = chemically synthesized
  source 1..20: mol_type = other DNA
agtcaccgagccacacattt

SEQ ID NO: 30197 - DNA, 20 bp, synthetic construct
  misc_feature 1..20: note = chemically synthesized
  source 1..20: mol_type = other DNA
ttttcccttcgaagtatgtc

SEQ ID NO: 30198 - DNA, 20 bp, synthetic construct
  misc_feature 1..20: note = chemically synthesized
  source 1..20: mol_type = other DNA
tctgcctcactttcccatgc

SEQ ID NO: 30199 - DNA, 20 bp, synthetic construct
  misc_feature 1..20: note = chemically synthesized
  source 1..20: mol_type = other DNA
ccagtggcttccatctccct

SEQ ID NO: 30200 - DNA, 20 bp, synthetic construct
  misc_feature 1..20: note = chemically synthesized
  source 1..20: mol_type = other DNA
tgtctctccccagctagaaa

SEQ ID NO: 30201 - DNA, 20 bp, synthetic construct
  misc_feature 1..20: note = chemically synthesized
  source 1..20: mol_type = other DNA
aagggggtgccacaagagca

SEQ ID NO: 30202 - DNA, 20 bp, synthetic construct
  misc_feature 1..20: note = chemically synthesized
  source 1..20: mol_type = other DNA
ttcaaaatatttgttgaaaa

SEQ ID NO: 30203 - DNA, 20 bp, synthetic construct
  misc_feature 1..20: note = chemically synthesized
  source 1..20: mol_type = other DNA
aaatatttgttgaaaaatga

SEQ ID NO: 30204 - DNA, 20 bp, synthetic construct
  misc_feature 1..20: note = chemically synthesized
  source 1..20: mol_type = other DNA
aacctgggggcactttagct

SEQ ID NO: 30205 - DNA, 20 bp, synthetic construct
  misc_feature 1..20: note = chemically synthesized
  source 1..20: mol_type = other DNA
gggcactttagctttggatc

SEQ ID NO: 30206 - DNA, 20 bp, synthetic construct
  misc_feature 1..20: note = chemically synthesized
  source 1..20: mol_type = other DNA
ttgcattataatgtaaatgg

SEQ ID NO: 30207 - DNA, 20 bp, synthetic construct
  misc_feature 1..20: note = chemically synthesized
  source 1..20: mol_type = other DNA
gccaaccaccagcagttcct

SEQ ID NO: 30208 - DNA, 20 bp, synthetic construct
  misc_feature 1..20: note = chemically synthesized
  source 1..20: mol_type = other DNA
atcccttctacctgagagcc

SEQ ID NO: 30209 - DNA, 20 bp, synthetic construct
  misc_feature 1..20: note = chemically synthesized
  source 1..20: mol_type = other DNA
cctagcatacaatttgacag

SEQ ID NO: 30210 - DNA, 20 bp, synthetic construct
  misc_feature 1..20: note = chemically synthesized
  source 1..20: mol_type = other DNA
aggcaataacaaggagaagt

SEQ ID NO: 30211 - DNA, 20 bp, synthetic construct
  misc_feature 1..20: note = chemically synthesized
  source 1..20: mol_type = other DNA
tgtaagacactaaggggcag

SEQ ID NO: 30212 - DNA, 20 bp, synthetic construct
  misc_feature 1..20: note = chemically synthesized
  source 1..20: mol_type = other DNA
cactctgtttctatgaaggc

SEQ ID NO: 30213 - DNA, 20 bp, synthetic construct
  misc_feature 1..20: note = chemically synthesized
  source 1..20: mol_type = other DNA
agtgtcacagtcactccaaa

SEQ ID NO: 30214 - DNA, 20 bp, synthetic construct
  misc_feature 1..20: note = chemically synthesized
  source 1..20: mol_type = other DNA
cgatgcgctgatgtggaact

SEQ ID NO: 30215 - DNA, 20 bp, synthetic construct
  misc_feature 1..20: note = chemically synthesized
  source 1..20: mol_type = other DNA
ggctgagctgtgctaggtaa

SEQ ID NO: 30216 - DNA, 20 bp, synthetic construct
  misc_feature 1..20: note = chemically synthesized
  source 1..20: mol_type = other DNA
acatcttgctctcaggtata

SEQ ID NO: 30217 - DNA, 20 bp, synthetic construct
  misc_feature 1..20: note = chemically synthesized
  source 1..20: mol_type = other DNA
tgagaaaggcagctttgaga

SEQ ID NO: 30218 - DNA, 20 bp, synthetic construct
  misc_feature 1..20: note = chemically synthesized
  source 1..20: mol_type = other DNA
acctatcacaatgctctgca

SEQ ID NO: 30219 - DNA, 20 bp, synthetic construct
  misc_feature 1..20: note = chemically synthesized
  source 1..20: mol_type = other DNA
tctcttttagtgtctcaagt

SEQ ID NO: 30220 - DNA, 20 bp, synthetic construct
  misc_feature 1..20: note = chemically synthesized
  source 1..20: mol_type = other DNA
agtatgagtcacctctgatg

SEQ ID NO: 30221 - DNA, 20 bp, synthetic construct
  misc_feature 1..20: note = chemically synthesized
  source 1..20: mol_type = other DNA
acaatacacacctaaagtaa

SEQ ID NO: 30222 - DNA, 20 bp, synthetic construct
  misc_feature 1..20: note = chemically synthesized
  source 1..20: mol_type = other DNA
tttggaggagacacagagaa

SEQ ID NO: 30223 - DNA, 20 bp, synthetic construct
  misc_feature 1..20: note = chemically synthesized
  source 1..20: mol_type = other DNA
aacacacagagcaacagctg

SEQ ID NO: 30224 - DNA, 20 bp, synthetic construct
  misc_feature 1..20: note = chemically synthesized
  source 1..20: mol_type = other DNA
caccatttgaggagaggttc

SEQ ID NO: 30225 - DNA, 20 bp, synthetic construct
  misc_feature 1..20: note = chemically synthesized
  source 1..20: mol_type = other DNA
tcaccaccccactgaaatcc

SEQ ID NO: 30226 - DNA, 20 bp, synthetic construct
  misc_feature 1..20: note = chemically synthesized
  source 1..20: mol_type = other DNA
catggatagtctagcctgtg

SEQ ID NO: 30227 - DNA, 20 bp, synthetic construct
  misc_feature 1..20: note = chemically synthesized
  source 1..20: mol_type = other DNA
agtctagcctgtgaggggtt

SEQ ID NO: 30228 - DNA, 20 bp, synthetic construct
  misc_feature 1..20: note = chemically synthesized
  source 1..20: mol_type = other DNA
atctttgagcggctcttccc

SEQ ID NO: 30229 - DNA, 20 bp, synthetic construct
  misc_feature 1..20: note = chemically synthesized
  source 1..20: mol_type = other DNA
gagcggctcttccccagagt

SEQ ID NO: 30230 - DNA, 20 bp, synthetic construct
  misc_feature 1..20: note = chemically synthesized
  source 1..20: mol_type = other DNA
tatgagacaaggaggggaca

SEQ ID NO: 30231 - DNA, 20 bp, synthetic construct
  misc_feature 1..20: note = chemically synthesized
  source 1..20: mol_type = other DNA
gggacaaggaatttagtccc

SEQ ID NO: 30232 - DNA, 20 bp, synthetic construct
  misc_feature 1..20: note = chemically synthesized
  source 1..20: mol_type = other DNA
gtcccaggagtggcactaga

SEQ ID NO: 30233 - DNA, 20 bp, synthetic construct
  misc_feature 1..20: note = chemically synthesized
  source 1..20: mol_type = other DNA
gctccctcaggagccatctg

SEQ ID NO: 30234 - DNA, 20 bp, synthetic construct
  misc_feature 1..20: note = chemically synthesized
  source 1..20: mol_type = other DNA
tgggaacccctttggcaggt

SEQ ID NO: 30235 - DNA, 20 bp, synthetic construct
  misc_feature 1..20: note = chemically synthesized
  source 1..20: mol_type = other DNA
ccctttggcaggtgtgggtg

SEQ ID NO: 30236 - DNA, 20 bp, synthetic construct
  misc_feature 1..20: note = chemically synthesized
  source 1..20: mol_type = other DNA
agcaaatcttcatgtcctgt

SEQ ID NO: 30237 - DNA, 20 bp, synthetic construct
  misc_feature 1..20: note = chemically synthesized
  source 1..20: mol_type = other DNA
ccagtcctgccctctctctt

SEQ ID NO: 30238 - DNA, 20 bp, synthetic construct
  misc_feature 1..20: note = chemically synthesized
  source 1..20: mol_type = other DNA
ccactcacacgctaaagtaa

SEQ ID NO: 30239 - DNA, 20 bp, synthetic construct
  misc_feature 1..20: note = chemically synthesized
  source 1..20: mol_type = other DNA
cactctctgggaaaatagaa

SEQ ID NO: 30240 - DNA, 20 bp, synthetic construct
  misc_feature 1..20: note = chemically synthesized
  source 1..20: mol_type = other DNA
agctctagcactgggcacag

SEQ ID NO: 30241 - DNA, 20 bp, synthetic construct
  misc_feature 1..20: note = chemically synthesized
  source 1..20: mol_type = other DNA
cagctgggtcagcacctacg

SEQ ID NO: 30242 - DNA, 20 bp, synthetic construct
  misc_feature 1..20: note = chemically synthesized
  source 1..20: mol_type = other DNA
cttgtggtgagcaaaactcc

SEQ ID NO: 30243 - DNA, 20 bp, synthetic construct
  misc_feature 1..20: note = chemically synthesized
  source 1..20: mol_type = other DNA
ggtgagcaaaactccctgga

SEQ ID NO: 30244 - DNA, 20 bp, synthetic construct
  misc_feature 1..20: note = chemically synthesized
  source 1..20: mol_type = other DNA
tccctggattgagtcgagac

SEQ ID NO: 30245 - DNA, 20 bp, synthetic construct
  misc_feature 1..20: note = chemically synthesized
  source 1..20: mol_type = other DNA
tggattctagttccactact

SEQ ID NO: 30246 - DNA, 20 bp, synthetic construct
  misc_feature 1..20: note = chemically synthesized
  source 1..20: mol_type = other DNA
aggaacaccccggccactgg

SEQ ID NO: 30247 - DNA, 20 bp, synthetic construct
  misc_feature 1..20: note = chemically synthesized
  source 1..20: mol_type = other DNA
gagaacaagccatctgaaaa

SEQ ID NO: 30248 - DNA, 20 bp, synthetic construct
  misc_feature 1..20: note = chemically synthesized
  source 1..20: mol_type = other DNA
attttgggaggccgaggcgt

SEQ ID NO: 30249 - DNA, 20 bp, synthetic construct
  misc_feature 1..20: note = chemically synthesized
  source 1..20: mol_type = other DNA
cgtgtgggtcacctgaggtc

SEQ ID NO: 30250 - DNA, 20 bp, synthetic construct
  misc_feature 1..20: note = chemically synthesized
  source 1..20: mol_type = other DNA
tacttgggaggctgaggcag

SEQ ID NO: 30251 - DNA, 20 bp, synthetic construct
  misc_feature 1..20: note = chemically synthesized
  source 1..20: mol_type = other DNA
aaaaaaaaaaaaaaattaaa

SEQ ID NO: 30252 - DNA, 20 bp, synthetic construct
  misc_feature 1..20: note = chemically synthesized
  source 1..20: mol_type = other DNA
aaaaaaattaaattgggtgg

SEQ ID NO: 30253 - DNA, 20 bp, synthetic construct
  misc_feature 1..20: note = chemically synthesized
  source 1..20: mol_type = other DNA
gagtttcttaggaaaaaaat

SEQ ID NO: 30254 - DNA, 20 bp, synthetic construct
  misc_feature 1..20: note = chemically synthesized
  source 1..20: mol_type = other DNA
ctgtctttacaacacaatga

SEQ ID NO: 30255 - DNA, 20 bp, synthetic construct
  misc_feature 1..20: note = chemically synthesized
  source 1..20: mol_type = other DNA
gtaaggcaccataagaggct

SEQ ID NO: 30256 - DNA, 20 bp, synthetic construct
  misc_feature 1..20: note = chemically synthesized
  source 1..20: mol_type = other DNA
tgtgaattccattgataaga

SEQ ID NO: 30257 - DNA, 20 bp, synthetic construct
  misc_feature 1..20: note = chemically synthesized
  source 1..20: mol_type = other DNA
aagagagacagagagagaga

SEQ ID NO: 30258 - DNA, 20 bp, synthetic construct
  misc_feature 1..20: note = chemically synthesized
  source 1..20: mol_type = other DNA
gacaggctctagcttgtttc

SEQ ID NO: 30259 - DNA, 20 bp, synthetic construct
  misc_feature 1..20: note = chemically synthesized
  source 1..20: mol_type = other DNA
ccaaagtgttgcccagacct

SEQ ID NO: 30260 - DNA, 20 bp, synthetic construct
  misc_feature 1..20: note = chemically synthesized
  source 1..20: mol_type = other DNA
tggcttccaggtgagcgaga

SEQ ID NO: 30261 - DNA, 20 bp, synthetic construct
  misc_feature 1..20: note = chemically synthesized
  source 1..20: mol_type = other DNA
agcgagacagaatctgcaag

SEQ ID NO: 30262 - DNA, 20 bp, synthetic construct
  misc_feature 1..20: note = chemically synthesized
  source 1..20: mol_type = other DNA
cagagttcactgcttgacca

SEQ ID NO: 30263 - DNA, 20 bp, synthetic construct
  misc_feature 1..20: note = chemically synthesized
  source 1..20: mol_type = other DNA
ccttccctggacagggagct

SEQ ID NO: 30264 - DNA, 20 bp, synthetic construct
  misc_feature 1..20: note = chemically synthesized
  source 1..20: mol_type = other DNA
aaatacacccacgagccaat

SEQ ID NO: 30265 - DNA, 20 bp, synthetic construct
  misc_feature 1..20: note = chemically synthesized
  source 1..20: mol_type = other DNA
gatccccttttaactaatcc

SEQ ID NO: 30266 - DNA, 20 bp, synthetic construct
  misc_feature 1..20: note = chemically synthesized
  source 1..20: mol_type = other DNA
aaagaaagccaagttgctga

SEQ ID NO: 30267 - DNA, 20 bp, synthetic construct
  misc_feature 1..20: note = chemically synthesized
  source 1..20: mol_type = other DNA
caggcagggagaaagtggtg

SEQ ID NO: 30268 - DNA, 20 bp, synthetic construct
  misc_feature 1..20: note = chemically synthesized
  source 1..20: mol_type = other DNA
ggtgggtggcggacagagat

SEQ ID NO: 30269 - DNA, 20 bp, synthetic construct
  misc_feature 1..20: note = chemically synthesized
  source 1..20: mol_type = other DNA
ccactgtgaggtcttactgt

SEQ ID NO: 30270 - DNA, 20 bp, synthetic construct
  misc_feature 1..20: note = chemically synthesized
  source 1..20: mol_type = other DNA
aggtcttactgtggggatta

SEQ ID NO: 30271 - DNA, 20 bp, synthetic construct
  misc_feature 1..20: note = chemically synthesized
  source 1..20: mol_type = other DNA
attcgagaaagatccaataa

SEQ ID NO: 30272 - DNA, 20 bp, synthetic construct
  misc_feature 1..20: note = chemically synthesized
  source 1..20: mol_type = other DNA
cgctgggccaacacccacgg

SEQ ID NO: 30273 - DNA, 20 bp, synthetic construct
  misc_feature 1..20: note = chemically synthesized
  source 1..20: mol_type = other DNA
caacacccacggaggggtcc

SEQ ID NO: 30274 - DNA, 20 bp, synthetic construct
  misc_feature 1..20: note = chemically synthesized
  source 1..20: mol_type = other DNA
gtcctggaatacaaataccc

SEQ ID NO: 30275 - DNA, 20 bp, synthetic construct
  misc_feature 1..20: note = chemically synthesized
  source 1..20: mol_type = other DNA
tcaattatgtcttcattgaa

SEQ ID NO: 30276 - DNA, 20 bp, synthetic construct
  misc_feature 1..20: note = chemically synthesized
  source 1..20: mol_type = other DNA
gggttatgaaaaagggaagc

SEQ ID NO: 30277 - DNA, 20 bp, synthetic construct
  misc_feature 1..20: note = chemically synthesized
  source 1..20: mol_type = other DNA
tgtgatgactcatgccagct

SEQ ID NO: 30278 - DNA, 20 bp, synthetic construct
  misc_feature 1..20: note = chemically synthesized
  source 1..20: mol_type = other DNA
cttggctctgctggctcaca

SEQ ID NO: 30279 - DNA, 20 bp, synthetic construct
  misc_feature 1..20: note = chemically synthesized
  source 1..20: mol_type = other DNA
gaagtcagggaactcgtgtc

SEQ ID NO: 30280 - DNA, 20 bp, synthetic construct
  misc_feature 1..20: note = chemically synthesized
  source 1..20: mol_type = other DNA
caaggacagagaggggcacc

SEQ ID NO: 30281 - DNA, 20 bp, synthetic construct
  misc_feature 1..20: note = chemically synthesized
  source 1..20: mol_type = other DNA
aatgtggcatcaggacaact

SEQ ID NO: 30282 - DNA, 20 bp, synthetic construct
  misc_feature 1..20: note = chemically synthesized
  source 1..20: mol_type = other DNA
tagtggacaccaagctgagc

SEQ ID NO: 30283 - DNA, 20 bp, synthetic construct
  misc_feature 1..20: note = chemically synthesized
  source 1..20: mol_type = other DNA
taaaaaagcaagcaggacat

SEQ ID NO: 30284 - DNA, 20 bp, synthetic construct
  misc_feature 1..20: note = chemically synthesized
  source 1..20: mol_type = other DNA
agagtgcagacataagacta

SEQ ID NO: 30285 - DNA, 20 bp, synthetic construct
  misc_feature 1..20: note = chemically synthesized
  source 1..20: mol_type = other DNA
tgtagttatcagactaatgt

SEQ ID NO: 30286 - DNA, 20 bp, synthetic construct
  misc_feature 1..20: note = chemically synthesized
  source 1..20: mol_type = other DNA
gagaggcatagaaacaataa

SEQ ID NO: 30287 - DNA, 20 bp, synthetic construct
  misc_feature 1..20: note = chemically synthesized
  source 1..20: mol_type = other DNA
ggttacaagataatagatcc

SEQ ID NO: 30288 - DNA, 20 bp, synthetic construct
  misc_feature 1..20: note = chemically synthesized
  source 1..20: mol_type = other DNA
tttaggaagaagaagtggcg

SEQ ID NO: 30289 - DNA, 20 bp, synthetic construct
  misc_feature 1..20: note = chemically synthesized
  source 1..20: mol_type = other DNA
gaagaagaagtggcggagaa

SEQ ID NO: 30290 - DNA, 20 bp, synthetic construct
  misc_feature 1..20: note = chemically synthesized
  source 1..20: mol_type = other DNA
aagtggcggagaatggaatg

SEQ ID NO: 30291 - DNA, 20 bp, synthetic construct
  misc_feature 1..20: note = chemically synthesized
  source 1..20: mol_type = other DNA
atgagatactttgtcgtctc

SEQ ID NO: 30292 - DNA, 20 bp, synthetic construct
  misc_feature 1..20: note = chemically synthesized
  source 1..20: mol_type = other DNA
gtctctggaatgaagaggaa

SEQ ID NO: 30293 - DNA, 20 bp, synthetic construct
  misc_feature 1..20: note = chemically synthesized
  source 1..20: mol_type = other DNA
tgggtttaaaatgaagcata

SEQ ID NO: 30294 - DNA, 20 bp, synthetic construct
  misc_feature 1..20: note = chemically synthesized
  source 1..20: mol_type = other DNA
gatcgaaggtagacaaaagg

SEQ ID NO: 30295 - DNA, 20 bp, synthetic construct
  misc_feature 1..20: note = chemically synthesized
  source 1..20: mol_type = other DNA
ggtgtctttaaaaatagaac

SEQ ID NO: 30296 - DNA, 20 bp, synthetic construct
  misc_feature 1..20: note = chemically synthesized
  source 1..20: mol_type = other DNA
ggagggccatctgcccctga

SEQ ID NO: 30297 - DNA, 20 bp, synthetic construct
  misc_feature 1..20: note = chemically synthesized
  source 1..20: mol_type = other DNA
actccattatctccagttat

SEQ ID NO: 30298 - DNA, 20 bp, synthetic construct
  misc_feature 1..20: note = chemically synthesized
  source 1..20: mol_type = other DNA
ctctgcaacagcacaggtga

SEQ ID NO: 30299 - DNA, 20 bp, synthetic construct
  misc_feature 1..20: note = chemically synthesized
  source 1..20: mol_type = other DNA
ttgggtggtggttttgttgc

SEQ ID NO: 30300 - DNA, 20 bp, synthetic construct
  misc_feature 1..20: note = chemically synthesized
  source 1..20: mol_type = other DNA
cagccatcaccgataaaagc

SEQ ID NO: 30301 - DNA, 20 bp, synthetic construct
  misc_feature 1..20: note = chemically synthesized
  source 1..20: mol_type = other DNA
tgcgattggtacagtcagcc

SEQ ID NO: 30302 - DNA, 20 bp, synthetic construct
  misc_feature 1..20: note = chemically synthesized
  source 1..20: mol_type = other DNA
ctttctcatctgtaaaatga

SEQ ID NO: 30303 - DNA, 20 bp, synthetic construct
  misc_feature 1..20: note = chemically synthesized
  source 1..20: mol_type = other DNA
agggaagattgcttgaagct

SEQ ID NO: 30304 - DNA, 20 bp, synthetic construct
  misc_feature 1..20: note = chemically synthesized
  source 1..20: mol_type = other DNA
acataaaacatcatagataa

SEQ ID NO: 30305 - DNA, 20 bp, synthetic construct
  misc_feature 1..20: note = chemically synthesized
  source 1..20: mol_type = other DNA
catcatagataaaggagtca

SEQ ID NO: 30306 - DNA, 20 bp, synthetic construct
  misc_feature 1..20: note = chemically synthesized
  source 1..20: mol_type = other DNA
cctgtcatgaagcagactca

SEQ ID NO: 30307 - DNA, 20 bp, synthetic construct
  misc_feature 1..20: note = chemically synthesized
  source 1..20: mol_type = other DNA
tgtctgcgatagagcagatt

SEQ ID NO: 30308 - DNA, 20 bp, synthetic construct
  misc_feature 1..20: note = chemically synthesized
  source 1..20: mol_type = other DNA
caactcacctgcatttaaat

SEQ ID NO: 30309 - DNA, 20 bp, synthetic construct
  misc_feature 1..20: note = chemically synthesized
  source 1..20: mol_type = other DNA
cctgcatttaaatatgaata

SEQ ID NO: 30310 - DNA, 20 bp, synthetic construct
  misc_feature 1..20: note = chemically synthesized
  source 1..20: mol_type = other DNA
catgggagggcatcgcacat

SEQ ID NO: 30311 - DNA, 20 bp, synthetic construct
  misc_feature 1..20: note = chemically synthesized
  source 1..20: mol_type = other DNA
ggaagcattgctctagatct

SEQ ID NO: 30312 - DNA, 20 bp, synthetic construct
  misc_feature 1..20: note = chemically synthesized
  source 1..20: mol_type = other DNA
cccagcagagaacgttgaga

SEQ ID NO: 30313 - DNA, 20 bp, synthetic construct
  misc_feature 1..20: note = chemically synthesized
  source 1..20: mol_type = other DNA
tttaagagcctactcatcat

SEQ ID NO: 30314 - DNA, 20 bp, synthetic construct
  misc_feature 1..20: note = chemically synthesized
  source 1..20: mol_type = other DNA
agttcacttaaaagtccatc

SEQ ID NO: 30315 - DNA, 20 bp, synthetic construct
  misc_feature 1..20: note = chemically synthesized
  source 1..20: mol_type = other DNA
gtccatccagaatcagaacg

SEQ ID NO: 30316 - DNA, 20 bp, synthetic construct
  misc_feature 1..20: note = chemically synthesized
  source 1..20: mol_type = other DNA
tccagaatcagaacgtggga

SEQ ID NO: 30317 - DNA, 20 bp, synthetic construct
  misc_feature 1..20: note = chemically synthesized
  source 1..20: mol_type = other DNA
ggcattcctgggggccgggc

SEQ ID NO: 30318 - DNA, 20 bp, synthetic construct
  misc_feature 1..20: note = chemically synthesized
  source 1..20: mol_type = other DNA
ctgttcaagttcaggtcaag

SEQ ID NO: 30319 - DNA, 20 bp, synthetic construct
  misc_feature 1..20: note = chemically synthesized
  source 1..20: mol_type = other DNA
ctgacattctgtcattcaag

SEQ ID NO: 30320 - DNA, 20 bp, synthetic construct
  misc_feature 1..20: note = chemically synthesized
  source 1..20: mol_type = other DNA
cctacaatccacagcaaaag

SEQ ID NO: 30321 - DNA, 20 bp, synthetic construct
  misc_feature 1..20: note = chemically synthesized
  source 1..20: mol_type = other DNA
tgagagaaaatggacagaag

SEQ ID NO: 30322 - DNA, 20 bp, synthetic construct
  misc_feature 1..20: note = chemically synthesized
  source 1..20: mol_type = other DNA
cctgataccagcaggaaaca

SEQ ID NO: 30323 - DNA, 20 bp, synthetic construct
  misc_feature 1..20: note = chemically synthesized
  source 1..20: mol_type = other DNA
ggactatgcatgctctgtct

SEQ ID NO: 30324 - DNA, 20 bp, synthetic construct
  misc_feature 1..20: note = chemically synthesized
  source 1..20: mol_type = other DNA
tctataacctgtaaggagag

SEQ ID NO: 30325 - DNA, 20 bp, synthetic construct
  misc_feature 1..20: note = chemically synthesized
  source 1..20: mol_type = other DNA
gaaagtgaggctggaaccac

SEQ ID NO: 30326 - DNA, 20 bp, synthetic construct
  misc_feature 1..20: note = chemically synthesized
  source 1..20: mol_type = other DNA
cagctgggagccactggttt

SEQ ID NO: 30327 - DNA, 20 bp, synthetic construct
  misc_feature 1..20: note = chemically synthesized
  source 1..20: mol_type = other DNA
catttgccaatccataactc

SEQ ID NO: 30328 - DNA, 20 bp, synthetic construct
  misc_feature 1..20: note = chemically synthesized
  source 1..20: mol_type = other DNA
tcaggaattcatggctatgc

SEQ ID NO: 30329 - DNA, 20 bp, synthetic construct
  misc_feature 1..20: note = chemically synthesized
  source 1..20: mol_type = other DNA
tggataattctctctagact

SEQ ID NO: 30330 - DNA, 20 bp, synthetic construct
  misc_feature 1..20: note = chemically synthesized
  source 1..20: mol_type = other DNA
ttctcccctctctctggcag

SEQ ID NO: 30331 - DNA, 20 bp, synthetic construct
  misc_feature 1..20: note = chemically synthesized
  source 1..20: mol_type = other DNA
attcagaaagccaaagataa

SEQ ID NO: 30332 - DNA, 20 bp, synthetic construct
  misc_feature 1..20: note = chemically synthesized
  source 1..20: mol_type = other DNA
gcaaggtatattgattaggt

SEQ ID NO: 30333 - DNA, 20 bp, synthetic construct
  misc_feature 1..20: note = chemically synthesized
  source 1..20: mol_type = other DNA
aattgcaaaattatttatgc

SEQ ID NO: 30334 - DNA, 20 bp, synthetic construct
  misc_feature 1..20: note = chemically synthesized
  source 1..20: mol_type = other DNA
cctcaaaagttcccaggcaa

SEQ ID NO: 30335 - DNA, 20 bp, synthetic construct
  misc_feature 1..20: note = chemically synthesized
  source 1..20: mol_type = other DNA
tttttttcaagacatgaggt

SEQ ID NO: 30336 - DNA, 20 bp, synthetic construct
  misc_feature 1..20: note = chemically synthesized
  source 1..20: mol_type = other DNA
tgaatgatgcaaaacagtat

SEQ ID NO: 30337 - DNA, 20 bp, synthetic construct
  misc_feature 1..20: note = chemically synthesized
  source 1..20: mol_type = other DNA
acagtatttggatatgtaaa

SEQ ID NO: 30338 - DNA, 20 bp, synthetic construct
  misc_feature 1..20: note = chemically synthesized
  source 1..20: mol_type = other DNA
gcataatgcattactaatca

SEQ ID NO: 30339 - DNA, 20 bp, synthetic construct
  misc_feature 1..20: note = chemically synthesized
  source 1..20: mol_type = other DNA
taatcagtgagtataaattc

SEQ ID NO: 30340 - DNA, 20 bp, synthetic construct
  misc_feature 1..20: note = chemically synthesized
  source 1..20: mol_type = other DNA
taaagagcatcacccttcgg

SEQ ID NO: 30341 - DNA, 20 bp, synthetic construct
  misc_feature 1..20: note = chemically synthesized
  source 1..20: mol_type = other DNA
agaaggagaaattatcctca

SEQ ID NO: 30342 - DNA, 20 bp, synthetic construct
  misc_feature 1..20: note = chemically synthesized
  source 1..20: mol_type = other DNA
acaaccacagaagcaccaag

SEQ ID NO: 30343 - DNA, 20 bp, synthetic construct
  misc_feature 1..20: note = chemically synthesized
  source 1..20: mol_type = other DNA
caccccatgttggtcgccta

SEQ ID NO: 30344 - DNA, 20 bp, synthetic construct
  misc_feature 1..20: note = chemically synthesized
  source 1..20: mol_type = other DNA
tggtcgcctacggaatctac

SEQ ID NO: 30345 - DNA, 20 bp, synthetic construct
  misc_feature 1..20: note = chemically synthesized
  source 1..20: mol_type = other DNA
accacccatgcccttctcca

SEQ ID NO: 30346 - DNA, 20 bp, synthetic construct
  misc_feature 1..20: note = chemically synthesized
  source 1..20: mol_type = other DNA
tgtctaaacactttttggaa

SEQ ID NO: 30347 - DNA, 20 bp, synthetic construct
  misc_feature 1..20: note = chemically synthesized
  source 1..20: mol_type = other DNA
acacactcacacaaatcctt

SEQ ID NO: 30348 - DNA, 20 bp, synthetic construct
  misc_feature 1..20: note = chemically synthesized
  source 1..20: mol_type = other DNA
aaagcgccactctcagataa

SEQ ID NO: 30349 - DNA, 20 bp, synthetic construct
  misc_feature 1..20: note = chemically synthesized
  source 1..20: mol_type = other DNA
acccgggcctgggcctgggc

SEQ ID NO: 30350 - DNA, 20 bp, synthetic construct
  misc_feature 1..20: note = chemically synthesized
  source 1..20: mol_type = other DNA
ctgggcctgggcctgggtct

SEQ ID NO: 30351 - DNA, 20 bp, synthetic construct
  misc_feature 1..20: note = chemically synthesized
  source 1..20: mol_type = other DNA
ttctttgtccccttctttct

SEQ ID NO: 30352 - DNA, 20 bp, synthetic construct
  misc_feature 1..20: note = chemically synthesized
  source 1..20: mol_type = other DNA
ctcatgcactgaaaaagaca

SEQ ID NO: 30353 - DNA, 20 bp, synthetic construct
  misc_feature 1..20: note = chemically synthesized
  source 1..20: mol_type = other DNA
agggatctctgttcttccag

SEQ ID NO: 30354 - DNA, 20 bp, synthetic construct
  misc_feature 1..20: note = chemically synthesized
  source 1..20: mol_type = other DNA
tcaaatactacaaaagtaga

SEQ ID NO: 30355 - DNA, 20 bp, synthetic construct
  misc_feature 1..20: note = chemically synthesized
  source 1..20: mol_type = other DNA
agtcccgtattaccaaatag

SEQ ID NO: 30356 - DNA, 20 bp, synthetic construct
  misc_feature 1..20: note = chemically synthesized
  source 1..20: mol_type = other DNA
tcagaaatacttctttccat

SEQ ID NO: 30357 - DNA, 20 bp, synthetic construct
  misc_feature 1..20: note = chemically synthesized
  source 1..20: mol_type = other DNA
tccatctgggtcatgttttg

SEQ ID NO: 30358 - DNA, 20 bp, synthetic construct
  misc_feature 1..20: note = chemically synthesized
  source 1..20: mol_type = other DNA
agctgccaagaaaagcttca

SEQ ID NO: 30359 - DNA, 20 bp, synthetic construct
  misc_feature 1..20: note = chemically synthesized
  source 1..20: mol_type = other DNA
gtcctttgccctgttcaggg

SEQ ID NO: 30360 - DNA, 20 bp, synthetic construct
  misc_feature 1..20: note = chemically synthesized
  source 1..20: mol_type = other DNA
cagggctgaatgcaccctct

SEQ ID NO: 30361 - DNA, 20 bp, synthetic construct
  misc_feature 1..20: note = chemically synthesized
  source 1..20: mol_type = other DNA
catcgactgccccacaggcc

SEQ ID NO: 30362 - DNA, 20 bp, synthetic construct
  misc_feature 1..20: note = chemically synthesized
  source 1..20: mol_type = other DNA
gcactcccagtgttcagaac

SEQ ID NO: 30363 - DNA, 20 bp, synthetic construct
  misc_feature 1..20: note = chemically synthesized
  source 1..20: mol_type = other DNA
ttctcctggacggttctgca

SEQ ID NO: 30364 - DNA, 20 bp, synthetic construct
  misc_feature 1..20: note = chemically synthesized
  source 1..20: mol_type = other DNA
attcattcacagagcatgtc

SEQ ID NO: 30365 - DNA, 20 bp, synthetic construct
  misc_feature 1..20: note = chemically synthesized
  source 1..20: mol_type = other DNA
atatgtcagttatgttccaa

SEQ ID NO: 30366 - DNA, 20 bp, synthetic construct
  misc_feature 1..20: note = chemically synthesized
  source 1..20: mol_type = other DNA
gagcaaatactatttttaga

SEQ ID NO: 30367 - DNA, 20 bp, synthetic construct
  misc_feature 1..20: note = chemically synthesized
  source 1..20: mol_type = other DNA
ccgttttctctgtagactct

SEQ ID NO: 30368 - DNA, 20 bp, synthetic construct
  misc_feature 1..20: note = chemically synthesized
  source 1..20: mol_type = other DNA
ttgttggacttaatatcttt

SEQ ID NO: 30369 - DNA, 20 bp, synthetic construct
  misc_feature 1..20: note = chemically synthesized
  source 1..20: mol_type = other DNA
cacgtgttgcaacctagaga

SEQ ID NO: 30370 - DNA, 20 bp, synthetic construct
  misc_feature 1..20: note = chemically synthesized
  source 1..20: mol_type = other DNA
acaaaggacagcctgccatc

SEQ ID NO: 30371 - DNA, 20 bp, synthetic construct
  misc_feature 1..20: note = chemically synthesized
  source 1..20: mol_type = other DNA
tgatgaaaagtggtttctac

SEQ ID NO: 30372 - DNA, 20 bp, synthetic construct
  misc_feature 1..20: note = chemically synthesized
  source 1..20: mol_type = other DNA
aaacttctatattgatttga

SEQ ID NO: 30373 - DNA, 20 bp, synthetic construct
  misc_feature 1..20: note = chemically synthesized
  source 1..20: mol_type = other DNA
attgatttgatggaatcatg

SEQ ID NO: 30374 - DNA, 20 bp, synthetic construct
  misc_feature 1..20: note = chemically synthesized
  source 1..20: mol_type = other DNA
atgacagtgttgatgtgttt

SEQ ID NO: 30375 - DNA, 20 bp, synthetic construct
  misc_feature 1..20: note = chemically synthesized
  source 1..20: mol_type = other DNA
ggatttttttttttttcaaa

SEQ ID NO: 30376 - DNA, 20 bp, synthetic construct
  misc_feature 1..20: note = chemically synthesized
  source 1..20: mol_type = other DNA
acaggagctcaatcaagtaa

SEQ ID NO: 30377 - DNA, 20 bp, synthetic construct
  misc_feature 1..20: note = chemically synthesized
  source 1..20: mol_type = other DNA
cttaactagcccaaacgttc

SEQ ID NO: 30378 - DNA, 20 bp, synthetic construct
  misc_feature 1..20: note = chemically synthesized
  source 1..20: mol_type = other DNA
ataaatacctctccattatc

SEQ ID NO: 30379 - DNA, 20 bp, synthetic construct
  misc_feature 1..20: note = chemically synthesized
  source 1..20: mol_type = other DNA
aggaactagtgtgaaaactg

SEQ ID NO: 30380 - DNA, 20 bp, synthetic construct
  misc_feature 1..20: note = chemically synthesized
  source 1..20: mol_type = other DNA
tgaaatcctaaacttcatgt

SEQ ID NO: 30381 - DNA, 20 bp, synthetic construct
  misc_feature 1..20: note = chemically synthesized
  source 1..20: mol_type = other DNA
ttttgtcacctatctctggc

SEQ ID NO: 30382 - DNA, 20 bp, synthetic construct
  misc_feature 1..20: note = chemically synthesized
  source 1..20: mol_type = other DNA
attcggcctgttatttgctt

SEQ ID NO: 30383 - DNA, 20 bp, synthetic construct
  misc_feature 1..20: note = chemically synthesized
  source 1..20: mol_type = other DNA
gcctgttatttgcttttggg

SEQ ID NO: 30384 - DNA, 20 bp, synthetic construct
  misc_feature 1..20: note = chemically synthesized
  source 1..20: mol_type = other DNA
ttattgaagctatagatctc

SEQ ID NO: 30385 - DNA, 20 bp, synthetic construct
  misc_feature 1..20: note = chemically synthesized
  source 1..20: mol_type = other DNA
tgccccttactctgagcaca

SEQ ID NO: 30386 - DNA, 20 bp, synthetic construct
  misc_feature 1..20: note = chemically synthesized
  source 1..20: mol_type = other DNA
ttttagatcatcattatcca

SEQ ID NO: 30387 - DNA, 20 bp, synthetic construct
  misc_feature 1..20: note = chemically synthesized
  source 1..20: mol_type = other DNA
tcattatccaaaggataact

SEQ ID NO: 30388 - DNA, 20 bp, synthetic construct
  misc_feature 1..20: note = chemically synthesized
  source 1..20: mol_type = other DNA
gtaaacaccaagtttaaaaa

SEQ ID NO: 30389 - DNA, 20 bp, synthetic construct
  misc_feature 1..20: note = chemically synthesized
  source 1..20: mol_type = other DNA
catatgcttttacctacatg

SEQ ID NO: 30390 - DNA, 20 bp, synthetic construct
  misc_feature 1..20: note = chemically synthesized
  source 1..20: mol_type = other DNA
gtcttcaacactaacagagg

SEQ ID NO: 30391 - DNA, 20 bp, synthetic construct
  misc_feature 1..20: note = chemically synthesized
  source 1..20: mol_type = other DNA
gttcttctaaacatgttgca

SEQ ID NO: 30392 - DNA, 20 bp, synthetic construct
  misc_feature 1..20: note = chemically synthesized
  source 1..20: mol_type = other DNA
gaggaaggaggaaaatatca

SEQ ID NO: 30393 - DNA, 20 bp, synthetic construct
  misc_feature 1..20: note = chemically synthesized
  source 1..20: mol_type = other DNA
cactgaattcagtcagttaa

SEQ ID NO: 30394 - DNA, 20 bp, synthetic construct
  misc_feature 1..20: note = chemically synthesized
  source 1..20: mol_type = other DNA
aatttaaaatacctggttgt

SEQ ID NO: 30395 - DNA, 20 bp, synthetic construct
  misc_feature 1..20: note = chemically synthesized
  source 1..20: mol_type = other DNA
aaaatacacattacattctt

SEQ ID NO: 30396 - DNA, 20 bp, synthetic construct
  misc_feature 1..20: note = chemically synthesized
  source 1..20: mol_type = other DNA
ttataaggctggaaacttct

SEQ ID NO: 30397 - DNA, 20 bp, synthetic construct
  misc_feature 1..20: note = chemically synthesized
  source 1..20: mol_type = other DNA
tgcctttaagctttctgttg

SEQ ID NO: 30398 - DNA, 20 bp, synthetic construct
  misc_feature 1..20: note = chemically synthesized
  source 1..20: mol_type = other DNA
aagctttctgttggggaatc

SEQ ID NO: 30399 - DNA, 20 bp, synthetic construct
  misc_feature 1..20: note = chemically synthesized
  source 1..20: mol_type = other DNA
atctcacagcatgatacaat

SEQ ID NO: 30400 - DNA, 20 bp, synthetic construct
  misc_feature 1..20: note = chemically synthesized
  source 1..20: mol_type = other DNA
tttctccatggctttcacag

SEQ ID NO: 30401 - DNA, 20 bp, synthetic construct
  misc_feature 1..20: note = chemically synthesized
  source 1..20: mol_type = other DNA
gatactgttattttctggta

SEQ ID NO: 30402 - DNA, 20 bp, synthetic construct
  misc_feature 1..20: note = chemically synthesized
  source 1..20: mol_type = other DNA
tggcagcagggctgggaaaa

SEQ ID NO: 30403 - DNA, 20 bp, synthetic construct
  misc_feature 1..20: note = chemically synthesized
  source 1..20: mol_type = other DNA
actggtgatttgatcaaatt

SEQ ID NO: 30404 - DNA, 20 bp, synthetic construct
  misc_feature 1..20: note = chemically synthesized
  source 1..20: mol_type = other DNA
aaattcagaatcccatattt

SEQ ID NO: 30405 - DNA, 20 bp, synthetic construct
  misc_feature 1..20: note = chemically synthesized
  source 1..20: mol_type = other DNA
taaatagttttcatctttaa

SEQ ID NO: 30406 - DNA, 20 bp, synthetic construct
  misc_feature 1..20: note = chemically synthesized
  source 1..20: mol_type = other DNA
tcgcagacagcagtgctcaa

SEQ ID NO: 30407 - DNA, 20 bp, synthetic construct
  misc_feature 1..20: note = chemically synthesized
  source 1..20: mol_type = other DNA
gtccgcaaaataaaaatgtg

SEQ ID NO: 30408 - DNA, 20 bp, synthetic construct
  misc_feature 1..20: note = chemically synthesized
  source 1..20: mol_type = other DNA
aaaatgtgtcgggtaattaa

SEQ ID NO: 30409 - DNA, 20 bp, synthetic construct
  misc_feature 1..20: note = chemically synthesized
  source 1..20: mol_type = other DNA
gatggtttataggcctcctc

SEQ ID NO: 30410 - DNA, 20 bp, synthetic construct
  misc_feature 1..20: note = chemically synthesized
  source 1..20: mol_type = other DNA
gtgcagtgtgtctatgtcag

SEQ ID NO: 30411 - DNA, 20 bp, synthetic construct
  misc_feature 1..20: note = chemically synthesized
  source 1..20: mol_type = other DNA
acatccaggcacttggcctg

SEQ ID NO: 30412 - DNA, 20 bp, synthetic construct
  misc_feature 1..20: note = chemically synthesized
  source 1..20: mol_type = other DNA
agggaagagaaggaaaacta

SEQ ID NO: 30413 - DNA, 20 bp, synthetic construct
  misc_feature 1..20: note = chemically synthesized
  source 1..20: mol_type = other DNA
gtgcgagcgagggaaataag

SEQ ID NO: 30414 - DNA, 20 bp, synthetic construct
  misc_feature 1..20: note = chemically synthesized
  source 1..20: mol_type = other DNA
aaaactaagagcttctcttc

SEQ ID NO: 30415 - DNA, 20 bp, synthetic construct
  misc_feature 1..20: note = chemically synthesized
  source 1..20: mol_type = other DNA
aaccactacactcttgaccc

SEQ ID NO: 30416 - DNA, 20 bp, synthetic construct
  misc_feature 1..20: note = chemically synthesized
  source 1..20: mol_type = other DNA
caatgaagagggccaagaga

SEQ ID NO: 30417 - DNA, 20 bp, synthetic construct
  misc_feature 1..20: note = chemically synthesized
  source 1..20: mol_type = other DNA
aggacgtccatgccccggga

SEQ ID NO: 30418 - DNA, 20 bp, synthetic construct
  misc_feature 1..20: note = chemically synthesized
  source 1..20: mol_type = other DNA
ctttggagctcttgacccac

SEQ ID NO: 30419 - DNA, 20 bp, synthetic construct
  misc_feature 1..20: note = chemically synthesized
  source 1..20: mol_type = other DNA
cctcaaactcagaagacaac

SEQ ID NO: 30420 - DNA, 20 bp, synthetic construct
  misc_feature 1..20: note = chemically synthesized
  source 1..20: mol_type = other DNA
tgaccgacaacttctttgtg

SEQ ID NO: 30421 - DNA, 20 bp, synthetic construct
  misc_feature 1..20: note = chemically synthesized
  source 1..20: mol_type = other DNA
tgttagcctggccaatttga

SEQ ID NO: 30422 - DNA, 20 bp, synthetic construct
  misc_feature 1..20: note = chemically synthesized
  source 1..20: mol_type = other DNA
ctggccaatttgaaaggatg

SEQ ID NO: 30423 - DNA, 20 bp, synthetic construct
  misc_feature 1..20: note = chemically synthesized
  source 1..20: mol_type = other DNA
aaaacagtaacatttggttt

SEQ ID NO: 30424 - DNA, 20 bp, synthetic construct
  misc_feature 1..20: note = chemically synthesized
  source 1..20: mol_type = other DNA
aatagcgtcagggcagcctg

SEQ ID NO: 30425 - DNA, 20 bp, synthetic construct
  misc_feature 1..20: note = chemically synthesized
  source 1..20: mol_type = other DNA
tgcctctggggaagccacat

SEQ ID NO: 30426 - DNA, 20 bp, synthetic construct
  misc_feature 1..20: note = chemically synthesized
  source 1..20: mol_type = other DNA
ggaaatgactacttgcaaag

SEQ ID NO: 30427 - DNA, 20 bp, synthetic construct
  misc_feature 1..20: note = chemically synthesized
  source 1..20: mol_type = other DNA
aacgtactgaagaggtagca

SEQ ID NO: 30428 - DNA, 20 bp, synthetic construct
  misc_feature 1..20: note = chemically synthesized
  source 1..20: mol_type = other DNA
agggtggcggccgcaggcca

SEQ ID NO: 30429 - DNA, 20 bp, synthetic construct
  misc_feature 1..20: note = chemically synthesized
  source 1..20: mol_type = other DNA
ctctaccaaatgaggctaat

SEQ ID NO: 30430 - DNA, 20 bp, synthetic construct
  misc_feature 1..20: note = chemically synthesized
  source 1..20: mol_type = other DNA
tttcctttccgaggttgttg

SEQ ID NO: 30431 - DNA, 20 bp, synthetic construct
  misc_feature 1..20: note = chemically synthesized
  source 1..20: mol_type = other DNA
tttccgaggttgttgtggga

SEQ ID NO: 30432 - DNA, 20 bp, synthetic construct
  misc_feature 1..20: note = chemically synthesized
  source 1..20: mol_type = other DNA
ctggaggtgcagcccccgga

SEQ ID NO: 30433 - DNA, 20 bp, synthetic construct
  misc_feature 1..20: note = chemically synthesized
  source 1..20: mol_type = other DNA
actctatgaggtaagggacc

SEQ ID NO: 30434 - DNA, 20 bp, synthetic construct
  misc_feature 1..20: note = chemically synthesized
  source 1..20: mol_type = other DNA
gtaacatagaaatctgaacc

SEQ ID NO: 30435 - DNA, 20 bp, synthetic construct
  misc_feature 1..20: note = chemically synthesized
  source 1..20: mol_type = other DNA
ggagcacacagttccaagcc

SEQ ID NO: 30436 - DNA, 20 bp, synthetic construct
  misc_feature 1..20: note = chemically synthesized
  source 1..20: mol_type = other DNA
agcgcccccacatgctctca

SEQ ID NO: 30437 - DNA, 20 bp, synthetic construct
  misc_feature 1..20: note = chemically synthesized
  source 1..20: mol_type = other DNA
attgaggaagcggaggctta

SEQ ID NO: 30438 - DNA, 20 bp, synthetic construct
  misc_feature 1..20: note = chemically synthesized
  source 1..20: mol_type = other DNA
gactgcctctaagggcttgg

SEQ ID NO: 30439 - DNA, 20 bp, synthetic construct
  misc_feature 1..20: note = chemically synthesized
  source 1..20: mol_type = other DNA
ggagcgggggcaggtatcca

SEQ ID NO: 30440 - DNA, 20 bp, synthetic construct
  misc_feature 1..20: note = chemically synthesized
  source 1..20: mol_type = other DNA
ggaaaaatattttttattgt

SEQ ID NO: 30441 - DNA, 20 bp, synthetic construct
  misc_feature 1..20: note = chemically synthesized
  source 1..20: mol_type = other DNA
aagccctggtgtcccctagg

SEQ ID NO: 30442 - DNA, 20 bp, synthetic construct
  misc_feature 1..20: note = chemically synthesized
  source 1..20: mol_type = other DNA
taaaaatgtcaggaagttat

SEQ ID NO: 30443 - DNA, 20 bp, synthetic construct
  misc_feature 1..20: note = chemically synthesized
  source 1..20: mol_type = other DNA
ctgcttgccaacattcatat

SEQ ID NO: 30444 - DNA, 20 bp, synthetic construct
  misc_feature 1..20: note = chemically synthesized
  source 1..20: mol_type = other DNA
aacaaaacaagcccaaacac

SEQ ID NO: 30445 - DNA, 20 bp, synthetic construct
  misc_feature 1..20: note = chemically synthesized
  source 1..20: mol_type = other DNA
acatgggtttgccatcggtc

SEQ ID NO: 30446 - DNA, 20 bp, synthetic construct
  misc_feature 1..20: note = chemically synthesized
  source 1..20: mol_type = other DNA
atttaaaaaaaaaaaaaaaa

SEQ ID NO: 30447 - DNA, 20 bp, synthetic construct
  misc_feature 1..20: note = chemically synthesized
  source 1..20: mol_type = other DNA
aaacccttcccatctggccc

SEQ ID NO: 30448 - DNA, 20 bp, synthetic construct
  misc_feature 1..20: note = chemically synthesized
  source 1..20: mol_type = other DNA
cccacctcccactacccctc

SEQ ID NO: 30449 - DNA, 20 bp, synthetic construct
  misc_feature 1..20: note = chemically synthesized
  source 1..20: mol_type = other DNA
ctggctacaccatggccagg

SEQ ID NO: 30450 - DNA, 20 bp, synthetic construct
  misc_feature 1..20: note = chemically synthesized
  source 1..20: mol_type = other DNA
cacaaatcccgttggaccca

SEQ ID NO: 30451 - DNA, 20 bp, synthetic construct
  misc_feature 1..20: note = chemically synthesized
  source 1..20: mol_type = other DNA
ccccctcctttgcgttctgc

SEQ ID NO: 30452 - DNA, 20 bp, synthetic construct
  misc_feature 1..20: note = chemically synthesized
  source 1..20: mol_type = other DNA
gttctgcaagaatattttaa

SEQ ID NO: 30453 - DNA, 20 bp, synthetic construct
  misc_feature 1..20: note = chemically synthesized
  source 1..20: mol_type = other DNA
cacactttttacaaccagta

SEQ ID NO: 30454 - DNA, 20 bp, synthetic construct
  misc_feature 1..20: note = chemically synthesized
  source 1..20: mol_type = other DNA
gctgaccccagtacccaagg

SEQ ID NO: 30455 - DNA, 20 bp, synthetic construct
  misc_feature 1..20: note = chemically synthesized
  source 1..20: mol_type = other DNA
gactagggcaccatgagcat

SEQ ID NO: 30456 - DNA, 20 bp, synthetic construct
  misc_feature 1..20: note = chemically synthesized
  source 1..20: mol_type = other DNA
tgagcatctgggttaaggct

SEQ ID NO: 30457 - DNA, 20 bp, synthetic construct
  misc_feature 1..20: note = chemically synthesized
  source 1..20: mol_type = other DNA
ccaacacacccaccgcacaa

SEQ ID NO: 30458 - DNA, 20 bp, synthetic construct
  misc_feature 1..20: note = chemically synthesized
  source 1..20: mol_type = other DNA
acagaagttcttcaaatttt

SEQ ID NO: 30459 - DNA, 20 bp, synthetic construct
  misc_feature 1..20: note = chemically synthesized
  source 1..20: mol_type = other DNA
tggttgttgctttttggttt

SEQ ID NO: 30460 - DNA, 20 bp, synthetic construct
  misc_feature 1..20: note = chemically synthesized
  source 1..20: mol_type = other DNA
aagacagcttctgggccact

SEQ ID NO: 30461 - DNA, 20 bp, synthetic construct
  misc_feature 1..20: note = chemically synthesized
  source 1..20: mol_type = other DNA
gatttacagaaccttggtat

SEQ ID NO: 30462 - DNA, 20 bp, synthetic construct
  misc_feature 1..20: note = chemically synthesized
  source 1..20: mol_type = other DNA
aaaagaaaattccttggcat

SEQ ID NO: 30463 - DNA, 20 bp, synthetic construct
  misc_feature 1..20: note = chemically synthesized
  source 1..20: mol_type = other DNA
aaacagtttgccacagtgag

SEQ ID NO: 30464 - DNA, 20 bp, synthetic construct
  misc_feature 1..20: note = chemically synthesized
  source 1..20: mol_type = other DNA
gatttaaagcattaactggt

SEQ ID NO: 30465 - DNA, 20 bp, synthetic construct
  misc_feature 1..20: note = chemically synthesized
  source 1..20: mol_type = other DNA
tactttttatttacttcctg

SEQ ID NO: 30466 - DNA, 20 bp, synthetic construct
  misc_feature 1..20: note = chemically synthesized
  source 1..20: mol_type = other DNA
ccattatataacaatctacc

SEQ ID NO: 30467 - DNA, 20 bp, synthetic construct
  misc_feature 1..20: note = chemically synthesized
  source 1..20: mol_type = other DNA
actagattatgccaatctat

SEQ ID NO: 30468 - DNA, 20 bp, synthetic construct
  misc_feature 1..20: note = chemically synthesized
  source 1..20: mol_type = other DNA
aatgtaaagtgttattatag

SEQ ID NO: 30469 - DNA, 20 bp, synthetic construct
  misc_feature 1..20: note = chemically synthesized
  source 1..20: mol_type = other DNA
aaaccgacatggcaaaactc

SEQ ID NO: 30470 - DNA, 20 bp, synthetic construct
  misc_feature 1..20: note = chemically synthesized
  source 1..20: mol_type = other DNA
tggcaaaactcctggataga

SEQ ID NO: 30471 - DNA, 20 bp, synthetic construct
  misc_feature 1..20: note = chemically synthesized
  source 1..20: mol_type = other DNA
ttgtttactttttaccttgt

SEQ ID NO: 30472 - DNA, 20 bp, synthetic construct
  misc_feature 1..20: note = chemically synthesized
  source 1..20: mol_type = other DNA
agagaggagagaaagagaga

SEQ ID NO: 30473 - DNA, 20 bp, synthetic construct
  misc_feature 1..20: note = chemically synthesized
  source 1..20: mol_type = other DNA
agaaagagagaaggaatgaa

SEQ ID NO: 30474 - DNA, 20 bp, synthetic construct
  misc_feature 1..20: note = chemically synthesized
  source 1..20: mol_type = other DNA
ttgttttgttttcttaaata

SEQ ID NO: 30475 - DNA, 20 bp, synthetic construct
  misc_feature 1..20: note = chemically synthesized
  source 1..20: mol_type = other DNA
tttcttaaataccgggtcag

SEQ ID NO: 30476 - DNA, 20 bp, synthetic construct
  misc_feature 1..20: note = chemically synthesized
  source 1..20: mol_type = other DNA
caagaaaatgatagtgcgtg

SEQ ID NO: 30477 - DNA, 20 bp, synthetic construct
  misc_feature 1..20: note = chemically synthesized
  source 1..20: mol_type = other DNA
ggctgtgaagtcggagaggg

SEQ ID NO: 30478 - DNA, 20 bp, synthetic construct
  misc_feature 1..20: note = chemically synthesized
  source 1..20: mol_type = other DNA
cacacacaaataaaaagccc

SEQ ID NO: 30479 - DNA, 20 bp, synthetic construct
  misc_feature 1..20: note = chemically synthesized
  source 1..20: mol_type = other DNA
cttaataatttatttgtgtt

SEQ ID NO: 30480 - DNA, 20 bp, synthetic construct
  misc_feature 1..20: note = chemically synthesized
  source 1..20: mol_type = other DNA
ttctggatactgtttcccag

SEQ ID NO: 30481 - DNA, 20 bp, synthetic construct
  misc_feature 1..20: note = chemically synthesized
  source 1..20: mol_type = other DNA
aagcatgcttttagcatggt

SEQ ID NO: 30482 - DNA, 20 bp, synthetic construct
  misc_feature 1..20: note = chemically synthesized
  source 1..20: mol_type = other DNA
cattaaacattcgttttaat

SEQ ID NO: 30483 - DNA, 20 bp, synthetic construct
  misc_feature 1..20: note = chemically synthesized
  source 1..20: mol_type = other DNA
agcccagggagcctggagac

SEQ ID NO: 30484 - DNA, 20 bp, synthetic construct
  misc_feature 1..20: note = chemically synthesized
  source 1..20: mol_type = other DNA
attgtagctcagagcagcag

SEQ ID NO: 30485 - DNA, 20 bp, synthetic construct
  misc_feature 1..20: note = chemically synthesized
  source 1..20: mol_type = other DNA
ttacttgatctaaaagataa

SEQ ID NO: 30486 - DNA, 20 bp, synthetic construct
  misc_feature 1..20: note = chemically synthesized
  source 1..20: mol_type = other DNA
gtacttaacgttaaaagaaa

SEQ ID NO: 30487 - DNA, 20 bp, synthetic construct
  misc_feature 1..20: note = chemically synthesized
  source 1..20: mol_type = other DNA
tatgcaaattacattaatga

SEQ ID NO: 30488 - DNA, 20 bp, synthetic construct
  misc_feature 1..20: note = chemically synthesized
  source 1..20: mol_type = other DNA
ttttgcaagattgaaaatct

SEQ ID NO: 30489 - DNA, 20 bp, synthetic construct
  misc_feature 1..20: note = chemically synthesized
  source 1..20: mol_type = other DNA
acaggccagcctgatgtgca

SEQ ID NO: 30490 - DNA, 20 bp, synthetic construct
  misc_feature 1..20: note = chemically synthesized
  source 1..20: mol_type = other DNA
tggaaggacctaatggtcat

SEQ ID NO: 30491 - DNA, 20 bp, synthetic construct
  misc_feature 1..20: note = chemically synthesized
  source 1..20: mol_type = other DNA
taagattcatccaaaaagca

SEQ ID NO: 30492 - DNA, 20 bp, synthetic construct
  misc_feature 1..20: note = chemically synthesized
  source 1..20: mol_type = other DNA
gtaatttatcaaaaacagcc

SEQ ID NO: 30493 - DNA, 20 bp, synthetic construct
  misc_feature 1..20: note = chemically synthesized
  source 1..20: mol_type = other DNA
ctccaacagaacagattaac

SEQ ID NO: 30494 - DNA, 20 bp, synthetic construct
  misc_feature 1..20: note = chemically synthesized
  source 1..20: mol_type = other DNA
aaacagctttttcattggct

SEQ ID NO: 30495 - DNA, 20 bp, synthetic construct
  misc_feature 1..20: note = chemically synthesized
  source 1..20: mol_type = other DNA
caaggtctggtttacttctg

SEQ ID NO: 30496 - DNA, 20 bp, synthetic construct
  misc_feature 1..20: note = chemically synthesized
  source 1..20: mol_type = other DNA
ccgcatttaatccatggtga

SEQ ID NO: 30497 - DNA, 20 bp, synthetic construct
  misc_feature 1..20: note = chemically synthesized
  source 1..20: mol_type = other DNA
ccatcccaccccagttatta

SEQ ID NO: 30498 - DNA, 20 bp, synthetic construct
  misc_feature 1..20: note = chemically synthesized
  source 1..20: mol_type = other DNA
ttagagagtatcgtgggaac

SEQ ID NO: 30499 - DNA, 20 bp, synthetic construct
  misc_feature 1..20: note = chemically synthesized
  source 1..20: mol_type = other DNA
ttccaattactagtctggag

SEQ ID NO: 30500 - DNA, 20 bp, synthetic construct
  misc_feature 1..20: note = chemically synthesized
  source 1..20: mol_type = other DNA
tctggagaagaatcctttgc

SEQ ID NO: 30501 - DNA, 20 bp, synthetic construct
  misc_feature 1..20: note = chemically synthesized
  source 1..20: mol_type = other DNA
catttaaaaaattctagtga

SEQ ID NO: 30502 - DNA, 20 bp, synthetic construct
  misc_feature 1..20: note = chemically synthesized
  source 1..20: mol_type = other DNA
gctggtgtgcaagtcagact

SEQ ID NO: 30503 - DNA, 20 bp, synthetic construct
  misc_feature 1..20: note = chemically synthesized
  source 1..20: mol_type = other DNA
acccaaaagctctctgctgt

SEQ ID NO: 30504 - DNA, 20 bp, synthetic construct
  misc_feature 1..20: note = chemically synthesized
  source 1..20: mol_type = other DNA
tttcatttgaactgctatcg

SEQ ID NO: 30505 - DNA, 20 bp, synthetic construct
  misc_feature 1..20: note = chemically synthesized
  source 1..20: mol_type = other DNA
cccagcctcagactttctcc

SEQ ID NO: 30506 - DNA, 20 bp, synthetic construct
  misc_feature 1..20: note = chemically synthesized
  source 1..20: mol_type = other DNA
gagttgatcttaccggaaat

SEQ ID NO: 30507 - DNA, 20 bp, synthetic construct
  misc_feature 1..20: note = chemically synthesized
  source 1..20: mol_type = other DNA
acattttaacatttattaga

SEQ ID NO: 30508 - DNA, 20 bp, synthetic construct
  misc_feature 1..20: note = chemically synthesized
  source 1..20: mol_type = other DNA
ttaacatttattagaaagga

SEQ ID NO: 30509 - DNA, 20 bp, synthetic construct
  misc_feature 1..20: note = chemically synthesized
  source 1..20: mol_type = other DNA
tgacactaatgttactctac

SEQ ID NO: 30510 - DNA, 20 bp, synthetic construct
  misc_feature 1..20: note = chemically synthesized
  source 1..20: mol_type = other DNA
ctaatgttactctacatgag

SEQ ID NO: 30511 - DNA, 20 bp, synthetic construct
  misc_feature 1..20: note = chemically synthesized
  source 1..20: mol_type = other DNA
ctacatgagtagagttcaat

SEQ ID NO: 30512 - DNA, 20 bp, synthetic construct
  misc_feature 1..20: note = chemically synthesized
  source 1..20: mol_type = other DNA
gagttcaatgagggttgata

SEQ ID NO: 30513 - DNA, 20 bp, synthetic construct
  misc_feature 1..20: note = chemically synthesized
  source 1..20: mol_type = other DNA
tgggatgtgacagggcaaat

SEQ ID NO: 30514 - DNA, 20 bp, synthetic construct
  misc_feature 1..20: note = chemically synthesized
  source 1..20: mol_type = other DNA
aatcacatcagaaagtaaag

SEQ ID NO: 30515 - DNA, 20 bp, synthetic construct
  misc_feature 1..20: note = chemically synthesized
  source 1..20: mol_type = other DNA
acaatgcctgctgtcagcag

SEQ ID NO: 30516 - DNA, 20 bp, synthetic construct
  misc_feature 1..20: note = chemically synthesized
  source 1..20: mol_type = other DNA
cagctgaattatttttatac

SEQ ID NO: 30517 - DNA, 20 bp, synthetic construct
  misc_feature 1..20: note = chemically synthesized
  source 1..20: mol_type = other DNA
ttaagcaatccacttgtatg

SEQ ID NO: 30518 - DNA, 20 bp, synthetic construct
  misc_feature 1..20: note = chemically synthesized
  source 1..20: mol_type = other DNA
gcagttgttttcaaagatcc

SEQ ID NO: 30519 - DNA, 20 bp, synthetic construct
  misc_feature 1..20: note = chemically synthesized
  source 1..20: mol_type = other DNA
agatccaagagtatctttat

SEQ ID NO: 30520 - DNA, 20 bp, synthetic construct
  misc_feature 1..20: note = chemically synthesized
  source 1..20: mol_type = other DNA
atgttcagttttaaatgtaa

SEQ ID NO: 30521 - DNA, 20 bp, synthetic construct
  misc_feature 1..20: note = chemically synthesized
  source 1..20: mol_type = other DNA
gaataatttttttaaaatat

SEQ ID NO: 30522 - DNA, 20 bp, synthetic construct
  misc_feature 1..20: note = chemically synthesized
  source 1..20: mol_type = other DNA
ttgttttaactggaaactga

SEQ ID NO: 30523 - DNA, 20 bp, synthetic construct
  misc_feature 1..20: note = chemically synthesized
  source 1..20: mol_type = other DNA
aactgaaaggatcggggcag

SEQ ID NO: 30524 - DNA, 20 bp, synthetic construct
  misc_feature 1..20: note = chemically synthesized
  source 1..20: mol_type = other DNA
ggggcaggggagttaaaatg

SEQ ID NO: 30525 - DNA, 20 bp, synthetic construct
  misc_feature 1..20: note = chemically synthesized
  source 1..20: mol_type = other DNA
ggggagtaaatggttcactg

SEQ ID NO: 30526 - DNA, 20 bp, synthetic construct
  misc_feature 1..20: note = chemically synthesized
  source 1..20: mol_type = other DNA
tcataaaatcatggtatacc

SEQ ID NO: 30527 - DNA, 20 bp, synthetic construct
  misc_feature 1..20: note = chemically synthesized
  source 1..20: mol_type = other DNA
tataccttgagttggtgaag

SEQ ID NO: 30528 - DNA, 20 bp, synthetic construct
  misc_feature 1..20: note = chemically synthesized
  source 1..20: mol_type = other DNA
gtttttgtttgaggaggtgc

SEQ ID NO: 30529 - DNA, 20 bp, synthetic construct
  misc_feature 1..20: note = chemically synthesized
  source 1..20: mol_type = other DNA
agtgctttgtgctccaacat

SEQ ID NO: 30530 - DNA, 20 bp, synthetic construct
  misc_feature 1..20: note = chemically synthesized
  source 1..20: mol_type = other DNA
attaagaaaatgaacaactg

SEQ ID NO: 30531 - DNA, 20 bp, synthetic construct
  misc_feature 1..20: note = chemically synthesized
  source 1..20: mol_type = other DNA
attccattctttattttaat

SEQ ID NO: 30532 - DNA, 20 bp, synthetic construct
  misc_feature 1..20: note = chemically synthesized
  source 1..20: mol_type = other DNA
ttaatgggagtttttaatca

SEQ ID NO: 30533 - DNA, 20 bp, synthetic construct
  misc_feature 1..20: note = chemically synthesized
  source 1..20: mol_type = other DNA
ttggcaatgctaacaacagt

SEQ ID NO: 30534 - DNA, 20 bp, synthetic construct
  misc_feature 1..20: note = chemically synthesized
  source 1..20: mol_type = other DNA
aatacaaacaaaaactcatt

SEQ ID NO: 30535 - DNA, 20 bp, synthetic construct
  misc_feature 1..20: note = chemically synthesized
  source 1..20: mol_type = other DNA
acctgctccaggttcccact

SEQ ID NO: 30536 - DNA, 20 bp, synthetic construct
  misc_feature 1..20: note = chemically synthesized
  source 1..20: mol_type = other DNA
tggcagagactgattcagtt

SEQ ID NO: 30537 - DNA, 20 bp, synthetic construct
  misc_feature 1..20: note = chemically synthesized
  source 1..20: mol_type = other DNA
gctgccagccctatctggaa

SEQ ID NO: 30538 - DNA, 20 bp, synthetic construct
  misc_feature 1..20: note = chemically synthesized
  source 1..20: mol_type = other DNA
gatccactcacatcagtctc

SEQ ID NO: 30539 - DNA, 20 bp, synthetic construct
  misc_feature 1..20: note = chemically synthesized
  source 1..20: mol_type = other DNA
tatttttctttatacgtttt

SEQ ID NO: 30540 - DNA, 20 bp, synthetic construct
  misc_feature 1..20: note = chemically synthesized
  source 1..20: mol_type = other DNA
ataatggtgaaatattttaa

SEQ ID NO: 30541 - DNA, 20 bp, synthetic construct
  misc_feature 1..20: note = chemically synthesized
  source 1..20: mol_type = other DNA
agatcagtactagatttaaa

SEQ ID NO: 30542 - DNA, 20 bp, synthetic construct
  misc_feature 1..20: note = chemically synthesized
  source 1..20: mol_type = other DNA
tgtgtgtgtaatggggaaag

SEQ ID NO: 30543 - DNA, 20 bp, synthetic construct
  misc_feature 1..20: note = chemically synthesized
  source 1..20: mol_type = other DNA
catgcaaaaaaattctggtg

SEQ ID NO: 30544 - DNA, 20 bp, synthetic construct
  misc_feature 1..20: note = chemically synthesized
  source 1..20: mol_type = other DNA
ggtggtgaattgggaggtgg

SEQ ID NO: 30545 - DNA, 20 bp, synthetic construct
  misc_feature 1..20: note = chemically synthesized
  source 1..20: mol_type = other DNA
agacaactccaagagaagaa

SEQ ID NO: 30546 - DNA, 20 bp, synthetic construct
  misc_feature 1..20: note = chemically synthesized
  source 1..20: mol_type = other DNA
gctatagatcaaaggagaac

SEQ ID NO: 30547 - DNA, 20 bp, synthetic construct
  misc_feature 1..20: note = chemically synthesized
  source 1..20: mol_type = other DNA
gaagctcacctattccctgc

SEQ ID NO: 30548 - DNA, 20 bp, synthetic construct
  misc_feature 1..20: note = chemically synthesized
  source 1..20: mol_type = other DNA
aacctaactcaatgccattg

SEQ ID NO: 30549 - DNA, 20 bp, synthetic construct
  misc_feature 1..20: note = chemically synthesized
  source 1..20: mol_type = other DNA
ctcaatgccattgcagaatg

SEQ ID NO: 30550 - DNA, 20 bp, synthetic construct
  misc_feature 1..20: note = chemically synthesized
  source 1..20: mol_type = other DNA
aaatgttttaaaaatgcata

SEQ ID NO: 30551 - DNA, 20 bp, synthetic construct
  misc_feature 1..20: note = chemically synthesized
  source 1..20: mol_type = other DNA
aaattccaatgaacccaata

SEQ ID NO: 30552 - DNA, 20 bp, synthetic construct
  misc_feature 1..20: note = chemically synthesized
  source 1..20: mol_type = other DNA
tgatgtttactggcttcaaa

SEQ ID NO: 30553 - DNA, 20 bp, synthetic construct
  misc_feature 1..20: note = chemically synthesized
  source 1..20: mol_type = other DNA
ggagcacatgtagagagcta

SEQ ID NO: 30554 - DNA, 20 bp, synthetic construct
  misc_feature 1..20: note = chemically synthesized
  source 1..20: mol_type = other DNA
gtaaaggggagaagctgttt

SEQ ID NO: 30555 - DNA, 20 bp, synthetic construct
  misc_feature 1..20: note = chemically synthesized
  source 1..20: mol_type = other DNA
gttaaaagtgggctctaagt

SEQ ID NO: 30556 - DNA, 20 bp, synthetic construct
  misc_feature 1..20: note = chemically synthesized
  source 1..20: mol_type = other DNA
aaaagtggcaaggtgccagg

SEQ ID NO: 30557 - DNA, 20 bp, synthetic construct
  misc_feature 1..20: note = chemically synthesized
  source 1..20: mol_type = other DNA
tgtaaaaacagacttgggct

SEQ ID NO: 30558 - DNA, 20 bp, synthetic construct
  misc_feature 1..20: note = chemically synthesized
  source 1..20: mol_type = other DNA
aatgacttctttgtgcaata

SEQ ID NO: 30559 - DNA, 20 bp, synthetic construct
  misc_feature 1..20: note = chemically synthesized
  source 1..20: mol_type = other DNA
aaatctaaaaaatgtttccc

SEQ ID NO: 30560 - DNA, 20 bp, synthetic construct
  misc_feature 1..20: note = chemically synthesized
  source 1..20: mol_type = other DNA
gcacaacttgcaacacaaca

SEQ ID NO: 30561 - DNA, 20 bp, synthetic construct
  misc_feature 1..20: note = chemically synthesized
  source 1..20: mol_type = other DNA
acttgcaacacaacaaggaa

SEQ ID NO: 30562 - DNA, 20 bp, synthetic construct
  misc_feature 1..20: note = chemically synthesized
  source 1..20: mol_type = other DNA
tttgtttttttaagctttca

SEQ ID NO: 30563 - DNA, 20 bp, synthetic construct
  misc_feature 1..20: note = chemically synthesized
  source 1..20: mol_type = other DNA
cctctgctcctgttcttgaa

SEQ ID NO: 30564 - DNA, 20 bp, synthetic construct
  misc_feature 1..20: note = chemically synthesized
  source 1..20: mol_type = other DNA
cacaatctccacatcacaca

SEQ ID NO: 30565 - DNA, 20 bp, synthetic construct
  misc_feature 1..20: note = chemically synthesized
  source 1..20: mol_type = other DNA
catcttttctgtgtcaccac

SEQ ID NO: 30566 - DNA, 20 bp, synthetic construct
  misc_feature 1..20: note = chemically synthesized
  source 1..20: mol_type = other DNA
gggtaatgtctgaagaagtt

SEQ ID NO: 30567 - DNA, 20 bp, synthetic construct
  misc_feature 1..20: note = chemically synthesized
  source 1..20: mol_type = other DNA
ctgaagaagtttgggatctt

SEQ ID NO: 30568 - DNA, 20 bp, synthetic construct
  misc_feature 1..20: note = chemically synthesized
  source 1..20: mol_type = other DNA
tatttacaatttgtcttaga

SEQ ID NO: 30569 - DNA, 20 bp, synthetic construct
  misc_feature 1..20: note = chemically synthesized
  source 1..20: mol_type = other DNA
agtttcatgaacattagtct

SEQ ID NO: 30570 - DNA, 20 bp, synthetic construct
  misc_feature 1..20: note = chemically synthesized
  source 1..20: mol_type = other DNA
aaaacaatattctctactct

SEQ ID NO: 30571 - DNA, 20 bp, synthetic construct
  misc_feature 1..20: note = chemically synthesized
  source 1..20: mol_type = other DNA
agaagtcagtcgtttttatt

SEQ ID NO: 30572 - DNA, 20 bp, synthetic construct
  misc_feature 1..20: note = chemically synthesized
  source 1..20: mol_type = other DNA
cagttcagtctgagctagga

SEQ ID NO: 30573 - DNA, 20 bp, synthetic construct
  misc_feature 1..20: note = chemically synthesized
  source 1..20: mol_type = other DNA
agtctgagctaggagagaat

SEQ ID NO: 30574 - DNA, 20 bp, synthetic construct
  misc_feature 1..20: note = chemically synthesized
  source 1..20: mol_type = other DNA
tgagctaggagagaatcaga

SEQ ID NO: 30575 - DNA, 20 bp, synthetic construct
  misc_feature 1..20: note = chemically synthesized
  source 1..20: mol_type = other DNA
catgctaatgtatttccatt

SEQ ID NO: 30576 - DNA, 20 bp, synthetic construct
  misc_feature 1..20: note = chemically synthesized
  source 1..20: mol_type = other DNA
attactatatctcccttctt

SEQ ID NO: 30577 - DNA, 20 bp, synthetic construct
  misc_feature 1..20: note = chemically synthesized
  source 1..20: mol_type = other DNA
aaacctcaaatctgacatga

SEQ ID NO: 30578 - DNA, 20 bp, synthetic construct
  misc_feature 1..20: note = chemically synthesized
  source 1..20: mol_type = other DNA
ctgacatgatgggataatgt

SEQ ID NO: 30579 - DNA, 20 bp, synthetic construct
  misc_feature 1..20: note = chemically synthesized
  source 1..20: mol_type = other DNA
ttcacattcagtaatcttcc

SEQ ID NO: 30580 - DNA, 20 bp, synthetic construct
  misc_feature 1..20: note = chemically synthesized
  source 1..20: mol_type = other DNA
gtcaaaggctgctgatatct

SEQ ID NO: 30581 - DNA, 20 bp, synthetic construct
  misc_feature 1..20: note = chemically synthesized
  source 1..20: mol_type = other DNA
aaggctgctgatatctgagg

SEQ ID NO: 30582 - DNA, 20 bp, synthetic construct
  misc_feature 1..20: note = chemically synthesized
  source 1..20: mol_type = other DNA
atactacttcaatgatctca

SEQ ID NO: 30583 - DNA, 20 bp, synthetic construct
  misc_feature 1..20: note = chemically synthesized
  source 1..20: mol_type = other DNA
gatcacaatcacacaatatt

SEQ ID NO: 30584 - DNA, 20 bp, synthetic construct
  misc_feature 1..20: note = chemically synthesized
  source 1..20: mol_type = other DNA
tgtacagctcatatgtgtac

SEQ ID NO: 30585 - DNA, 20 bp, synthetic construct
  misc_feature 1..20: note = chemically synthesized
  source 1..20: mol_type = other DNA
ccatctattcaccaggtaaa

SEQ ID NO: 30586 - DNA, 20 bp, synthetic construct
  misc_feature 1..20: note = chemically synthesized
  source 1..20: mol_type = other DNA
actttgggaggccaagccag

SEQ ID NO: 30587 - DNA, 20 bp, synthetic construct
  misc_feature 1..20: note = chemically synthesized
  source 1..20: mol_type = other DNA
caggtggatcacctgaggtc

SEQ ID NO: 30588 - DNA, 20 bp, synthetic construct
  misc_feature 1..20: note = chemically synthesized
  source 1..20: mol_type = other DNA
tacttgggaggctgaggcag

SEQ ID NO: 30589 - DNA, 20 bp, synthetic construct
  misc_feature 1..20: note = chemically synthesized
  source 1..20: mol_type = other DNA
aaaactcagcttggagaggc

SEQ ID NO: 30590 - DNA, 20 bp, synthetic construct
  misc_feature 1..20: note = chemically synthesized
  source 1..20: mol_type = other DNA
tattctcctatctgaaagtc

SEQ ID NO: 30591 - DNA, 20 bp, synthetic construct
  misc_feature 1..20: note = chemically synthesized
  source 1..20: mol_type = other DNA
tgacacaattcaaatatcta

SEQ ID NO: 30592 - DNA, 20 bp, synthetic construct
  misc_feature 1..20: note = chemically synthesized
  source 1..20: mol_type = other DNA
cataaaaagaaaagcagact

SEQ ID NO: 30593 - DNA, 20 bp, synthetic construct
  misc_feature 1..20: note = chemically synthesized
  source 1..20: mol_type = other DNA
gtgctttagagaaatgggct

SEQ ID NO: 30594 - DNA, 20 bp, synthetic construct
  misc_feature 1..20: note = chemically synthesized
  source 1..20: mol_type = other DNA
gcacctgagggccagagcgt

SEQ ID NO: 30595 - DNA, 20 bp, synthetic construct
  misc_feature 1..20: note = chemically synthesized
  source 1..20: mol_type = other DNA
tcggaatttatgtgcaatgg

SEQ ID NO: 30596 - DNA, 20 bp, synthetic construct
  misc_feature 1..20: note = chemically synthesized
  source 1..20: mol_type = other DNA
gaaactcttaattcattact

SEQ ID NO: 30597 - DNA, 20 bp, synthetic construct
  misc_feature 1..20: note = chemically synthesized
  source 1..20: mol_type = other DNA
tatttatgttcagccagttc

SEQ ID NO: 30598 - DNA, 20 bp, synthetic construct
  misc_feature 1..20: note = chemically synthesized
  source 1..20: mol_type = other DNA
gcacgaaaggtttacctcac

SEQ ID NO: 30599 - DNA, 20 bp, synthetic construct
  misc_feature 1..20: note = chemically synthesized
  source 1..20: mol_type = other DNA
cagcacttgttgtgcgccca

SEQ ID NO: 30600 - DNA, 20 bp, synthetic construct
  misc_feature 1..20: note = chemically synthesized
  source 1..20: mol_type = other DNA
acagaacctttagacaacca

SEQ ID NO: 30601 - DNA, 20 bp, synthetic construct
  misc_feature 1..20: note = chemically synthesized
  source 1..20: mol_type = other DNA
ctcctctaaatacagaggca

SEQ ID NO: 30602 - DNA, 20 bp, synthetic construct
  misc_feature 1..20: note = chemically synthesized
  source 1..20: mol_type = other DNA
ttgagctggttaatctaaga

SEQ ID NO: 30603 - DNA, 20 bp, synthetic construct
  misc_feature 1..20: note = chemically synthesized
  source 1..20: mol_type = other DNA
tttggtgatttagcaaggct

SEQ ID NO: 30604 - DNA, 20 bp, synthetic construct
  misc_feature 1..20: note = chemically synthesized
  source 1..20: mol_type = other DNA
gtcattcccacatcctgctg

SEQ ID NO: 30605 - DNA, 20 bp, synthetic construct
  misc_feature 1..20: note = chemically synthesized
  source 1..20: mol_type = other DNA
tgtcacataaggtaaatgtg

SEQ ID NO: 30606 - DNA, 20 bp, synthetic construct
  misc_feature 1..20: note = chemically synthesized
  source 1..20: mol_type = other DNA
tttcactaaagggaaagtat

SEQ ID NO: 30607 - DNA, 20 bp, synthetic construct
  misc_feature 1..20: note = chemically synthesized
  source 1..20: mol_type = other DNA
ggtcggagagacaagttcca

SEQ ID NO: 30608 - DNA, 20 bp, synthetic construct
  misc_feature 1..20: note = chemically synthesized
  source 1..20: mol_type = other DNA
aacctcttgcctttcgggag

SEQ ID NO: 30609 - DNA, 20 bp, synthetic construct
  misc_feature 1..20: note = chemically synthesized
  source 1..20: mol_type = other DNA
gcatggcatgtctgtcatca

SEQ ID NO: 30610 - DNA, 20 bp, synthetic construct
  misc_feature 1..20: note = chemically synthesized
  source 1..20: mol_type = other DNA
gctcaagcaaaaaatgtttt

SEQ ID NO: 30611 - DNA, 20 bp, synthetic construct
  misc_feature 1..20: note = chemically synthesized
  source 1..20: mol_type = other DNA
actgtttatcacttagagaa

SEQ ID NO: 30612 - DNA, 20 bp, synthetic construct
  misc_feature 1..20: note = chemically synthesized
  source 1..20: mol_type = other DNA
aaccaaaggagggagggctg

SEQ ID NO: 30613 - DNA, 20 bp, synthetic construct
  misc_feature 1..20: note = chemically synthesized
  source 1..20: mol_type = other DNA
ttgtgttatagcagaaacag

SEQ ID NO: 30614 - DNA, 20 bp, synthetic construct
  misc_feature 1..20: note = chemically synthesized
  source 1..20: mol_type = other DNA
agtctggactggacatttgt

SEQ ID NO: 30615 - DNA, 20 bp, synthetic construct
  misc_feature 1..20: note = chemically synthesized
  source 1..20: mol_type = other DNA
ccaacatgcccttaaacttt

SEQ ID NO: 30616 - DNA, 20 bp, synthetic construct
  misc_feature 1..20: note = chemically synthesized
  source 1..20: mol_type = other DNA
catccgggctgacagccaat

SEQ ID NO: 30617 - DNA, 20 bp, synthetic construct
  misc_feature 1..20: note = chemically synthesized
  source 1..20: mol_type = other DNA
aggaggcctggccagatgtt

SEQ ID NO: 30618 - DNA, 20 bp, synthetic construct
  misc_feature 1..20: note = chemically synthesized
  source 1..20: mol_type = other DNA
atacttcaaaatgagaaggt

SEQ ID NO: 30619 - DNA, 20 bp, synthetic construct
  misc_feature 1..20: note = chemically synthesized
  source 1..20: mol_type = other DNA
ggctgtcatggacagtcaca

SEQ ID NO: 30620 - DNA, 20 bp, synthetic construct
  misc_feature 1..20: note = chemically synthesized
  source 1..20: mol_type = other DNA
tcgtcatcctctggcgtgac

SEQ ID NO: 30621 - DNA, 20 bp, synthetic construct
  misc_feature 1..20: note = chemically synthesized
  source 1..20: mol_type = other DNA
gacctggatgccaacctcca

SEQ ID NO: 30622 - DNA, 20 bp, synthetic construct
  misc_feature 1..20: note = chemically synthesized
  source 1..20: mol_type = other DNA
ggatgccaacctccacggga

SEQ ID NO: 30623 - DNA, 20 bp, synthetic construct
  misc_feature 1..20: note = chemically synthesized
  source 1..20: mol_type = other DNA
cgtttgtgctcgataaaaat

SEQ ID NO: 30624 - DNA, 20 bp, synthetic construct
  misc_feature 1..20: note = chemically synthesized
  source 1..20: mol_type = other DNA
tggtctggttcatcatctgt

SEQ ID NO: 30625 - DNA, 20 bp, synthetic construct
  misc_feature 1..20: note = chemically synthesized
  source 1..20: mol_type = other DNA
agaaacaaaagcacaattat

SEQ ID NO: 30626 - DNA, 20 bp, synthetic construct
  misc_feature 1..20: note = chemically synthesized
  source 1..20: mol_type = other DNA
tgtgagcatacaaaaagtac

SEQ ID NO: 30627 - DNA, 20 bp, synthetic construct
  misc_feature 1..20: note = chemically synthesized
  source 1..20: mol_type = other DNA
gtctggtttgtaagtttaga

SEQ ID NO: 30628 - DNA, 20 bp, synthetic construct
  misc_feature 1..20: note = chemically synthesized
  source 1..20: mol_type = other DNA
aaaactggttaaaaaaaaaa

SEQ ID NO: 30629 - DNA, 20 bp, synthetic construct
  misc_feature 1..20: note = chemically synthesized
  source 1..20: mol_type = other DNA
ccaagttgtccattgtgcca

SEQ ID NO: 30630 - DNA, 20 bp, synthetic construct
  misc_feature 1..20: note = chemically synthesized
  source 1..20: mol_type = other DNA
gccaaagaatgaaaggagag

SEQ ID NO: 30631 - DNA, 20 bp, synthetic construct
  misc_feature 1..20: note = chemically synthesized
  source 1..20: mol_type = other DNA
aacacacacaccctttgtgt

SEQ ID NO: 30632 - DNA, 20 bp, synthetic construct
  misc_feature 1..20: note = chemically synthesized
  source 1..20: mol_type = other DNA
cgactgcatgcacctatgaa

SEQ ID NO: 30633 - DNA, 20 bp, synthetic construct
  misc_feature 1..20: note = chemically synthesized
  source 1..20: mol_type = other DNA
tctcagacacattagctaaa

SEQ ID NO: 30634 - DNA, 20 bp, synthetic construct
  misc_feature 1..20: note = chemically synthesized
  source 1..20: mol_type = other DNA
attagctaaatgggatactt

SEQ ID NO: 30635 - DNA, 20 bp, synthetic construct
  misc_feature 1..20: note = chemically synthesized
  source 1..20: mol_type = other DNA
tttttttttattctgagaaa

SEQ ID NO: 30636 - DNA, 20 bp, synthetic construct
  misc_feature 1..20: note = chemically synthesized
  source 1..20: mol_type = other DNA
ggcatctatgatataaaaat

SEQ ID NO: 30637 - DNA, 20 bp, synthetic construct
  misc_feature 1..20: note = chemically synthesized
  source 1..20: mol_type = other DNA
tgtcaaagtggactaatttt

SEQ ID NO: 30638 - DNA, 20 bp, synthetic construct
  misc_feature 1..20: note = chemically synthesized
  source 1..20: mol_type = other DNA
ttctgcacacataatcacca

SEQ ID NO: 30639 - DNA, 20 bp, synthetic construct
  misc_feature 1..20: note = chemically synthesized
  source 1..20: mol_type = other DNA
taagcttccaaaggggaaaa

SEQ ID NO: 30640 - DNA, 20 bp, synthetic construct
  misc_feature 1..20: note = chemically synthesized
  source 1..20: mol_type = other DNA
atcacaaaatacaaaacatc

SEQ ID NO: 30641 - DNA, 20 bp, synthetic construct
  misc_feature 1..20: note = chemically synthesized
  source 1..20: mol_type = other DNA
ttaatgaacttaaagccaca

SEQ ID NO: 30642 - DNA, 20 bp, synthetic construct
  misc_feature 1..20: note = chemically synthesized
  source 1..20: mol_type = other DNA
atcaaaaaatagattttaat

SEQ ID NO: 30643 - DNA, 20 bp, synthetic construct
  misc_feature 1..20: note = chemically synthesized
  source 1..20: mol_type = other DNA
aatagattttaatttgagtg

SEQ ID NO: 30644 - DNA, 20 bp, synthetic construct
  misc_feature 1..20: note = chemically synthesized
  source 1..20: mol_type = other DNA
ttatttcaaccctacccagg

SEQ ID NO: 30645 - DNA, 20 bp, synthetic construct
  misc_feature 1..20: note = chemically synthesized
  source 1..20: mol_type = other DNA
gaatattgagggggaagatc

SEQ ID NO: 30646 - DNA, 20 bp, synthetic construct
  misc_feature 1..20: note = chemically synthesized
  source 1..20: mol_type = other DNA
atttaacataaggtcaccac

SEQ ID NO: 30647 - DNA, 20 bp, synthetic construct
  misc_feature 1..20: note = chemically synthesized
  source 1..20: mol_type = other DNA
tactggccaaaagataaata

SEQ ID NO: 30648 - DNA, 20 bp, synthetic construct
  misc_feature 1..20: note = chemically synthesized
  source 1..20: mol_type = other DNA
gcttccattttgaccaagtg

SEQ ID NO: 30649 - DNA, 20 bp, synthetic construct
  misc_feature 1..20: note = chemically synthesized
  source 1..20: mol_type = other DNA
tctcaaaatattcctgttgt

SEQ ID NO: 30650 - DNA, 20 bp, synthetic construct
  misc_feature 1..20: note = chemically synthesized
  source 1..20: mol_type = other DNA
atattcctgttgtctgaatt

SEQ ID NO: 30651 - DNA, 20 bp, synthetic construct
  misc_feature 1..20: note = chemically synthesized
  source 1..20: mol_type = other DNA
tctgacacatttctaaaagt

SEQ ID NO: 30652 - DNA, 20 bp, synthetic construct
  misc_feature 1..20: note = chemically synthesized
  source 1..20: mol_type = other DNA
gtaaattattgctaattaac

SEQ ID NO: 30653 - DNA, 20 bp, synthetic construct
  misc_feature 1..20: note = chemically synthesized
  source 1..20: mol_type = other DNA
taaactccggctacaaagca

SEQ ID NO: 30654 - DNA, 20 bp, synthetic construct
  misc_feature 1..20: note = chemically synthesized
  source 1..20: mol_type = other DNA
agtcctcgattgaagtggaa

SEQ ID NO: 30655 - DNA, 20 bp, synthetic construct
  misc_feature 1..20: note = chemically synthesized
  source 1..20: mol_type = other DNA
aataatcataataattagcc

SEQ ID NO: 30656 - DNA, 20 bp, synthetic construct
  misc_feature 1..20: note = chemically synthesized
  source 1..20: mol_type = other DNA
tcctctctgtgtagttgcaa

SEQ ID NO: 30657 - DNA, 20 bp, synthetic construct
  misc_feature 1..20: note = chemically synthesized
  source 1..20: mol_type = other DNA
cttctccttgattgtcttaa

SEQ ID NO: 30658 - DNA, 20 bp, synthetic construct
  misc_feature 1..20: note = chemically synthesized
  source 1..20: mol_type = other DNA
cccggggcaggggccccggc

SEQ ID NO: 30659 - DNA, 20 bp, synthetic construct
  misc_feature 1..20: note = chemically synthesized
  source 1..20: mol_type = other DNA
cagctcggccagctcggccg

SEQ ID NO: 30660 - DNA, 20 bp, synthetic construct
  misc_feature 1..20: note = chemically synthesized
  source 1..20: mol_type = other DNA
tctccgcacacacctcaagc

SEQ ID NO: 30661 - DNA, 20 bp, synthetic construct
  misc_feature 1..20: note = chemically synthesized
  source 1..20: mol_type = other DNA
agcttacactttttactttg

SEQ ID NO: 30662 - DNA, 20 bp, synthetic construct
  misc_feature 1..20: note = chemically synthesized
  source 1..20: mol_type = other DNA
ttcccccgcaattctgggca

SEQ ID NO: 30663 - DNA, 20 bp, synthetic construct
  misc_feature 1..20: note = chemically synthesized
  source 1..20: mol_type = other DNA
ccgagctccgaggcgagagg

SEQ ID NO: 30664 - DNA, 20 bp, synthetic construct
  misc_feature 1..20: note = chemically synthesized
  source 1..20: mol_type = other DNA
ccgaggtctgtgctttgcat

SEQ ID NO: 30665 - DNA, 20 bp, synthetic construct
  misc_feature 1..20: note = chemically synthesized
  source 1..20: mol_type = other DNA
tgtgctttgcatgggggtga

SEQ ID NO: 30666 - DNA, 20 bp, synthetic construct
  misc_feature 1..20: note = chemically synthesized
  source 1..20: mol_type = other DNA
gctggtctcagctcgcgcac

SEQ ID NO: 30667 - DNA, 20 bp, synthetic construct
  misc_feature 1..20: note = chemically synthesized
  source 1..20: mol_type = other DNA
aaatgaagaacaaagacata

SEQ ID NO: 30668 - DNA, 20 bp, synthetic construct
  misc_feature 1..20: note = chemically synthesized
  source 1..20: mol_type = other DNA
ggggtgatgggggagagaaa

SEQ ID NO: 30669 - DNA, 20 bp, synthetic construct
  misc_feature 1..20: note = chemically synthesized
  source 1..20: mol_type = other DNA
aagctcgttcctccccggac

SEQ ID NO: 30670 - DNA, 20 bp, synthetic construct
  misc_feature 1..20: note = chemically synthesized
  source 1..20: mol_type = other DNA
cttgttctgcctcctagcga

SEQ ID NO: 30671 - DNA, 20 bp, synthetic construct
  misc_feature 1..20: note = chemically synthesized
  source 1..20: mol_type = other DNA
atagcagaggcggggggcgg

SEQ ID NO: 30672 - DNA, 20 bp, synthetic construct
  misc_feature 1..20: note = chemically synthesized
  source 1..20: mol_type = other DNA
gggggggtggtactgaggac

SEQ ID NO: 30673 - DNA, 20 bp, synthetic construct
  misc_feature 1..20: note = chemically synthesized
  source 1..20: mol_type = other DNA
ttaaccccgggacaggagga

SEQ ID NO: 30674 - DNA, 20 bp, synthetic construct
  misc_feature 1..20: note = chemically synthesized
  source 1..20: mol_type = other DNA
gggtactaaccctcccagcc

SEQ ID NO: 30675 - DNA, 20 bp, synthetic construct
  misc_feature 1..20: note = chemically synthesized
  source 1..20: mol_type = other DNA
aagatggacccaggagggag

SEQ ID NO: 30676 - DNA, 20 bp, synthetic construct
  misc_feature 1..20: note = chemically synthesized
  source 1..20: mol_type = other DNA
cgaagaagggcctgactttc

SEQ ID NO: 30677 - DNA, 20 bp, synthetic construct
  misc_feature 1..20: note = chemically synthesized
  source 1..20: mol_type = other DNA
tccgcatccggcgcggccgg

SEQ ID NO: 30678 - DNA, 20 bp, synthetic construct
  misc_feature 1..20: note = chemically synthesized
  source 1..20: mol_type = other DNA
gcgggggagagcggcgaggg

SEQ ID NO: 30679 - DNA, 20 bp, synthetic construct
  misc_feature 1..20: note = chemically synthesized
  source 1..20: mol_type = other DNA
gcggcgagggagggatgcga

SEQ ID NO: 30680 - DNA, 20 bp, synthetic construct
  misc_feature 1..20: note = chemically synthesized
  source 1..20: mol_type = other DNA
gggagggccgcgcaacgtgc

SEQ ID NO: 30681 - DNA, 20 bp, synthetic construct
  misc_feature 1..20: note = chemically synthesized
  source 1..20: mol_type = other DNA
ctgcatcaaaaatttaaagt

SEQ ID NO: 30682 - DNA, 20 bp, synthetic construct
  misc_feature 1..20: note = chemically synthesized
  source 1..20: mol_type = other DNA
tttaaagtaagaatcataaa

SEQ ID NO: 30683 - DNA, 20 bp, synthetic construct
  misc_feature 1..20: note = chemically synthesized
  source 1..20: mol_type = other DNA
aatcataaattgagtagggg

SEQ ID NO: 30684 - DNA, 20 bp, synthetic construct
  misc_feature 1..20: note = chemically synthesized
  source 1..20: mol_type = other DNA
ggggaagagggcaagaccca

SEQ ID NO: 30685 - DNA, 20 bp, synthetic construct
  misc_feature 1..20: note = chemically synthesized
  source 1..20: mol_type = other DNA
gacccaaagggtgaagtgct

SEQ ID NO: 30686 - DNA, 20 bp, synthetic construct
  misc_feature 1..20: note = chemically synthesized
  source 1..20: mol_type = other DNA
gggtgaagtgctcggggtcc

SEQ ID NO: 30687 - DNA, 20 bp, synthetic construct
  misc_feature 1..20: note = chemically synthesized
  source 1..20: mol_type = other DNA
ggactggtgaccagaccggg

SEQ ID NO: 30688 - DNA, 20 bp, synthetic construct
  misc_feature 1..20: note = chemically synthesized
  source 1..20: mol_type = other DNA
tgaccagaccgggcggggtg

SEQ ID NO: 30689 - DNA, 20 bp, synthetic construct
  misc_feature 1..20: note = chemically synthesized
  source 1..20: mol_type = other DNA
aataaaaatgctttgcaaag

SEQ ID NO: 30690 - DNA, 20 bp, synthetic construct
  misc_feature 1..20: note = chemically synthesized
  source 1..20: mol_type = other DNA
gtggcctgccgccgtgcctg

SEQ ID NO: 30691 - DNA, 20 bp, synthetic construct
  misc_feature 1..20: note = chemically synthesized
  source 1..20: mol_type = other DNA
tggcgggtgggcgccgggcg

SEQ ID NO: 30692 - DNA, 20 bp, synthetic construct
  misc_feature 1..20: note = chemically synthesized
  source 1..20: mol_type = other DNA
tccaaaaaatagtaagagga

SEQ ID NO: 30693 - DNA, 20 bp, synthetic construct
  misc_feature 1..20: note = chemically synthesized
  source 1..20: mol_type = other DNA
cgccctaagtttgcaactga

SEQ ID NO: 30694 - DNA, 20 bp, synthetic construct
  misc_feature 1..20: note = chemically synthesized
  source 1..20: mol_type = other DNA
actgaaggggtttgggggaa

SEQ ID NO: 30695 - DNA, 20 bp, synthetic construct
  misc_feature 1..20: note = chemically synthesized
  source 1..20: mol_type = other DNA
ttttgcaggggggctggtgg

SEQ ID NO: 30696 - DNA, 20 bp, synthetic construct
  misc_feature 1..20: note = chemically synthesized
  source 1..20: mol_type = other DNA
aagagaaggccgtcacagaa

SEQ ID NO: 30697 - DNA, 20 bp, synthetic construct
  misc_feature 1..20: note = chemically synthesized
  source 1..20: mol_type = other DNA
tgccactttctcactattgt

SEQ ID NO: 30698 - DNA, 20 bp, synthetic construct
  misc_feature 1..20: note = chemically synthesized
  source 1..20: mol_type = other DNA
gtctcacctcttttctcccc

SEQ ID NO: 30699 - DNA, 20 bp, synthetic construct
  misc_feature 1..20: note = chemically synthesized
  source 1..20: mol_type = other DNA
tacccccccattttcttacg

SEQ ID NO: 30700 - DNA, 20 bp, synthetic construct
  misc_feature 1..20: note = chemically synthesized
  source 1..20: mol_type = other DNA
tcccacccccaggtttgcat

SEQ ID NO: 30701 - DNA, 20 bp, synthetic construct
  misc_feature 1..20: note = chemically synthesized
  source 1..20: mol_type = other DNA
caaaactggcggggcggggg

SEQ ID NO: 30702 - DNA, 20 bp, synthetic construct
  misc_feature 1..20: note = chemically synthesized
  source 1..20: mol_type = other DNA
ctggcggggcggggggggag

SEQ ID NO: 30703 - DNA, 20 bp, synthetic construct
  misc_feature 1..20: note = chemically synthesized
  source 1..20: mol_type = other DNA
ggcggaaaggaggaaagagg

SEQ ID NO: 30704 - DNA, 20 bp, synthetic construct
  misc_feature 1..20: note = chemically synthesized
  source 1..20: mol_type = other DNA
tacacggcaatggttccaga

SEQ ID NO: 30705 - DNA, 20 bp, synthetic construct
  misc_feature 1..20: note = chemically synthesized
  source 1..20: mol_type = other DNA
gcaatggttccagatgggat

SEQ ID NO: 30706 - DNA, 20 bp, synthetic construct
  misc_feature 1..20: note = chemically synthesized
  source 1..20: mol_type = other DNA
aataattattattactatta

SEQ ID NO: 30707 - DNA, 20 bp, synthetic construct
  misc_feature 1..20: note = chemically synthesized
  source 1..20: mol_type = other DNA
tattattgggttacttacgc

SEQ ID NO: 30708 - DNA, 20 bp, synthetic construct
  misc_feature 1..20: note = chemically synthesized
  source 1..20: mol_type = other DNA
attcccgtttgcttaagtgc

SEQ ID NO: 30709 - DNA, 20 bp, synthetic construct
  misc_feature 1..20: note = chemically synthesized
  source 1..20: mol_type = other DNA
ctcggttcacatcgggagag

SEQ ID NO: 30710 - DNA, 20 bp, synthetic construct
  misc_feature 1..20: note = chemically synthesized
  source 1..20: mol_type = other DNA
acaaagatggcgcagggaag

SEQ ID NO: 30711 - DNA, 20 bp, synthetic construct
  misc_feature 1..20: note = chemically synthesized
  source 1..20: mol_type = other DNA
tccctgcgaacttgaacgtc

SEQ ID NO: 30712 - DNA, 20 bp, synthetic construct
  misc_feature 1..20: note = chemically synthesized
  source 1..20: mol_type = other DNA
cgaacttgaacgtcaggagt

SEQ ID NO: 30713 - DNA, 20 bp, synthetic construct
  misc_feature 1..20: note = chemically synthesized
  source 1..20: mol_type = other DNA
gcgtggccgggagagaagaa

SEQ ID NO: 30714 - DNA, 20 bp, synthetic construct
  misc_feature 1..20: note = chemically synthesized
  source 1..20: mol_type = other DNA
ggagagaagaaaggggtggc

SEQ ID NO: 30715 - DNA, 20 bp, synthetic construct
  misc_feature 1..20: note = chemically synthesized
  source 1..20: mol_type = other DNA
gggtggcaggggtgggagga

SEQ ID NO: 30716 - DNA, 20 bp, synthetic construct
  misc_feature 1..20: note = chemically synthesized
  source 1..20: mol_type = other DNA
aaaaaagaaaaaaatagagc

SEQ ID NO: 30717 - DNA, 20 bp, synthetic construct
  misc_feature 1..20: note = chemically synthesized
  source 1..20: mol_type = other DNA
gcgggcggagggaagccagg

SEQ ID NO: 30718 - DNA, 20 bp, synthetic construct
  misc_feature 1..20: note = chemically synthesized
  source 1..20: mol_type = other DNA
ggagggagcgcacggcaacg

SEQ ID NO: 30719 - DNA, 20 bp, synthetic construct
  misc_feature 1..20: note = chemically synthesized
  source 1..20: mol_type = other DNA
cagcctaagtttggagggct

SEQ ID NO: 30720 - DNA, 20 bp, synthetic construct
  misc_feature 1..20: note = chemically synthesized
  source 1..20: mol_type = other DNA
ccaaggccgagccagggacc

SEQ ID NO: 30721 - DNA, 20 bp, synthetic construct
  misc_feature 1..20: note = chemically synthesized
  source 1..20: mol_type = other DNA
ctgagcgccccgccaagcga

SEQ ID NO: 30722 - DNA, 20 bp, synthetic construct
  misc_feature 1..20: note = chemically synthesized
  source 1..20: mol_type = other DNA
gccccgccaagcgactgggt

SEQ ID NO: 30723 - DNA, 20 bp, synthetic construct
  misc_feature 1..20: note = chemically synthesized
  source 1..20: mol_type = other DNA
tctgaatgcaactgaaagcg

SEQ ID NO: 30724 - DNA, 20 bp, synthetic construct
  misc_feature 1..20: note = chemically synthesized
  source 1..20: mol_type = other DNA
gcgccgagtccccggctcct

SEQ ID NO: 30725 - DNA, 20 bp, synthetic construct
  misc_feature 1..20: note = chemically synthesized
  source 1..20: mol_type = other DNA
ggtcgcagaaagagagcccg

SEQ ID NO: 30726 - DNA, 20 bp, synthetic construct
  misc_feature 1..20: note = chemically synthesized
  source 1..20: mol_type = other DNA
aggaataaagaacgaggagc

SEQ ID NO: 30727 - DNA, 20 bp, synthetic construct
  misc_feature 1..20: note = chemically synthesized
  source 1..20: mol_type = other DNA
gacaaagcgcgggcagtccc

SEQ ID NO: 30728 - DNA, 20 bp, synthetic construct
  misc_feature 1..20: note = chemically synthesized
  source 1..20: mol_type = other DNA
tcccgggagtcccagtccct

SEQ ID NO: 30729 - DNA, 20 bp, synthetic construct
  misc_feature 1..20: note = chemically synthesized
  source 1..20: mol_type = other DNA
cgccgcgggaggtccccgag

SEQ ID NO: 30730 - DNA, 20 bp, synthetic construct
  misc_feature 1..20: note = chemically synthesized
  source 1..20: mol_type = other DNA
gagcaactgcaaaagcacag

SEQ ID NO: 30731 - DNA, 20 bp, synthetic construct
  misc_feature 1..20: note = chemically synthesized
  source 1..20: mol_type = other DNA
tacccagggaaagagaaaat

SEQ ID NO: 30732 - DNA, 20 bp, synthetic construct
  misc_feature 1..20: note = chemically synthesized
  source 1..20: mol_type = other DNA
acggtggtgagatgaccgcc

SEQ ID NO: 30733 - DNA, 20 bp, synthetic construct
  misc_feature 1..20: note = chemically synthesized
  source 1..20: mol_type = other DNA
aagcgggcttcactctggcg

SEQ ID NO: 30734 - DNA, 20 bp, synthetic construct
  misc_feature 1..20: note = chemically synthesized
  source 1..20: mol_type = other DNA
agtccgattccaaatctgga

SEQ ID NO: 30735 - DNA, 20 bp, synthetic construct
  misc_feature 1..20: note = chemically synthesized
  source 1..20: mol_type = other DNA
ggaaggagttggggggagag

SEQ ID NO: 30736 - DNA, 20 bp, synthetic construct
  misc_feature 1..20: note = chemically synthesized
  source 1..20: mol_type = other DNA
tcaggtccaagggaggtgcg

SEQ ID NO: 30737 - DNA, 20 bp, synthetic construct
  misc_feature 1..20: note = chemically synthesized
  source 1..20: mol_type = other DNA
caagggaggtgcggagggtg

SEQ ID NO: 30738 - DNA, 20 bp, synthetic construct
  misc_feature 1..20: note = chemically synthesized
  source 1..20: mol_type = other DNA
gcggagggtgcagggtggag

SEQ ID NO: 30739 - DNA, 20 bp, synthetic construct
  misc_feature 1..20: note = chemically synthesized
  source 1..20: mol_type = other DNA
cgcgagaccctgagctgcag

SEQ ID NO: 30740 - DNA, 20 bp, synthetic construct
  misc_feature 1..20: note = chemically synthesized
  source 1..20: mol_type = other DNA
tgagctgcaggtggatatgt

SEQ ID NO: 30741 - DNA, 20 bp, synthetic construct
  misc_feature 1..20: note = chemically synthesized
  source 1..20: mol_type = other DNA
tcatccccctcttcagtcta

SEQ ID NO: 30742 - DNA, 20 bp, synthetic construct
  misc_feature 1..20: note = chemically synthesized
  source 1..20: mol_type = other DNA
gagagagatgtgggctgtac

SEQ ID NO: 30743 - DNA, 20 bp, synthetic construct
  misc_feature 1..20: note = chemically synthesized
  source 1..20: mol_type = other DNA
aaattctgtttaagaagcgg

SEQ ID NO: 30744 - DNA, 20 bp, synthetic construct
  misc_feature 1..20: note = chemically synthesized
  source 1..20: mol_type = other DNA
gacaccatttccccttttca

SEQ ID NO: 30745 - DNA, 20 bp, synthetic construct
  misc_feature 1..20: note = chemically synthesized
  source 1..20: mol_type = other DNA
ttgtcttgttaaaccagcct

SEQ ID NO: 30746 - DNA, 20 bp, synthetic construct
  misc_feature 1..20: note = chemically synthesized
  source 1..20: mol_type = other DNA
accagccttggagtcaccaa

SEQ ID NO: 30747 - DNA, 20 bp, synthetic construct
  misc_feature 1..20: note = chemically synthesized
  source 1..20: mol_type = other DNA
accaaaagaatgtcttcttg

SEQ ID NO: 30748 - DNA, 20 bp, synthetic construct
  misc_feature 1..20: note = chemically synthesized
  source 1..20: mol_type = other DNA
cagaaccaagcttttcagat

SEQ ID NO: 30749 - DNA, 20 bp, synthetic construct
  misc_feature 1..20: note = chemically synthesized
  source 1..20: mol_type = other DNA
tagagaagatatataaatga

SEQ ID NO: 30750 - DNA, 20 bp, synthetic construct
  misc_feature 1..20: note = chemically synthesized
  source 1..20: mol_type = other DNA
gaagatatataaatgagcga

SEQ ID NO: 30751 - DNA, 20 bp, synthetic construct
  misc_feature 1..20: note = chemically synthesized
  source 1..20: mol_type = other DNA
atggtgtgtataaagctttt

SEQ ID NO: 30752 - DNA, 20 bp, synthetic construct
  misc_feature 1..20: note = chemically synthesized
  source 1..20: mol_type = other DNA
ggttcacatttaacagtctt

SEQ ID NO: 30753 - DNA, 20 bp, synthetic construct
  misc_feature 1..20: note = chemically synthesized
  source 1..20: mol_type = other DNA
gccacagatagcagccctga

SEQ ID NO: 30754 - DNA, 20 bp, synthetic construct
  misc_feature 1..20: note = chemically synthesized
  source 1..20: mol_type = other DNA
agagcgcacacaattgtgta

SEQ ID NO: 30755 - DNA, 20 bp, synthetic construct
  misc_feature 1..20: note = chemically synthesized
  source 1..20: mol_type = other DNA
ctatagatggacttttatgg

SEQ ID NO: 30756 - DNA, 20 bp, synthetic construct
  misc_feature 1..20: note = chemically synthesized
  source 1..20: mol_type = other DNA
tctgaaaagcttggttctga

SEQ ID NO: 30757 - DNA, 20 bp, synthetic construct
  misc_feature 1..20: note = chemically synthesized
  source 1..20: mol_type = other DNA
agacaaaaagcagactgtgg

SEQ ID NO: 30758 - DNA, 20 bp, synthetic construct
  misc_feature 1..20: note = chemically synthesized
  source 1..20: mol_type = other DNA
gctacagagcttaacttcta

SEQ ID NO: 30759 - DNA, 20 bp, synthetic construct
  misc_feature 1..20: note = chemically synthesized
  source 1..20: mol_type = other DNA
gaatcctcccgcttcttaaa

SEQ ID NO: 30760 - DNA, 20 bp, synthetic construct
  misc_feature 1..20: note = chemically synthesized
  source 1..20: mol_type = other DNA
aacctccttttcttccttag

SEQ ID NO: 30761 - DNA, 20 bp, synthetic construct
  misc_feature 1..20: note = chemically synthesized
  source 1..20: mol_type = other DNA
aaactttactaagacgaaac

SEQ ID NO: 30762 - DNA, 20 bp, synthetic construct
  misc_feature 1..20: note = chemically synthesized
  source 1..20: mol_type = other DNA
gccgcttgccggcagggctg

SEQ ID NO: 30763 - DNA, 20 bp, synthetic construct
  misc_feature 1..20: note = chemically synthesized
  source 1..20: mol_type = other DNA
cttgccggcagggctgcggg

SEQ ID NO: 30764 - DNA, 20 bp, synthetic construct
  misc_feature 1..20: note = chemically synthesized
  source 1..20: mol_type = other DNA
aaaacaataaagccccccca

SEQ ID NO: 30765 - DNA, 20 bp, synthetic construct
  misc_feature 1..20: note = chemically synthesized
  source 1..20: mol_type = other DNA
caataaagcccccccaccgg

SEQ ID NO: 30766 - DNA, 20 bp, synthetic construct
  misc_feature 1..20: note = chemically synthesized
  source 1..20: mol_type = other DNA
aaagcccccccaccgggtgg

SEQ ID NO: 30767 - DNA, 20 bp, synthetic construct
  misc_feature 1..20: note = chemically synthesized
  source 1..20: mol_type = other DNA
acaccctttagactgaagag

SEQ ID NO: 30768 - DNA, 20 bp, synthetic construct
  misc_feature 1..20: note = chemically synthesized
  source 1..20: mol_type = other DNA
gaagagggggatgagaagac

SEQ ID NO: 30769 - DNA, 20 bp, synthetic construct
  misc_feature 1..20: note = chemically synthesized
  source 1..20: mol_type = other DNA
acacatatccacctgcagct

SEQ ID NO: 30770 - DNA, 20 bp, synthetic construct
  misc_feature 1..20: note = chemically synthesized
  source 1..20: mol_type = other DNA
cctccgcacctcccttggac

SEQ ID NO: 30771 - DNA, 20 bp, synthetic construct
  misc_feature 1..20: note = chemically synthesized
  source 1..20: mol_type = other DNA
cccccaactccttccagatt

SEQ ID NO: 30772 - DNA, 20 bp, synthetic construct
  misc_feature 1..20: note = chemically synthesized
  source 1..20: mol_type = other DNA
ggcggcggcggcggcggctg

SEQ ID NO: 30773 - DNA, 20 bp, synthetic construct
  misc_feature 1..20: note = chemically synthesized
  source 1..20: mol_type = other DNA
gggactttacaggcacgttt

SEQ ID NO: 30774 - DNA, 20 bp, synthetic construct
  misc_feature 1..20: note = chemically synthesized
  source 1..20: mol_type = other DNA
gaataaactttccaatcgca

SEQ ID NO: 30775 - DNA, 20 bp, synthetic construct
  misc_feature 1..20: note = chemically synthesized
  source 1..20: mol_type = other DNA
aaactgaaagtatcccacgc

SEQ ID NO: 30776 - DNA, 20 bp, synthetic construct
  misc_feature 1..20: note = chemically synthesized
  source 1..20: mol_type = other DNA
gcgtgtgtgcattaaagaga

SEQ ID NO: 30777 - DNA, 20 bp, synthetic construct
  misc_feature 1..20: note = chemically synthesized
  source 1..20: mol_type = other DNA
cgagagggggctgctggctc

SEQ ID NO: 30778 - DNA, 20 bp, synthetic construct
  misc_feature 1..20: note = chemically synthesized
  source 1..20: mol_type = other DNA
cattcccattttctctttcc

SEQ ID NO: 30779 - DNA, 20 bp, synthetic construct
  misc_feature 1..20: note = chemically synthesized
  source 1..20: mol_type = other DNA
ctgtgcttttgcagttgctc

SEQ ID NO: 30780 - DNA, 20 bp, synthetic construct
  misc_feature 1..20: note = chemically synthesized
  source 1..20: mol_type = other DNA
gcagttgctctggagtggga

SEQ ID NO: 30781 - DNA, 20 bp, synthetic construct
  misc_feature 1..20: note = chemically synthesized
  source 1..20: mol_type = other DNA
cgcagccctccaaacttagg

SEQ ID NO: 30782 - DNA, 20 bp, synthetic construct
  misc_feature 1..20: note = chemically synthesized
  source 1..20: mol_type = other DNA
tggaggctcagctctcaact

SEQ ID NO: 30783 - DNA, 20 bp, synthetic construct
  misc_feature 1..20: note = chemically synthesized
  source 1..20: mol_type = other DNA
ggcggcggcggggaggggaa

SEQ ID NO: 30784 - DNA, 20 bp, synthetic construct
  misc_feature 1..20: note = chemically synthesized
  source 1..20: mol_type = other DNA
aagtgggtgtgcgtacggag

SEQ ID NO: 30785 - DNA, 20 bp, synthetic construct
  misc_feature 1..20: note = chemically synthesized
  source 1..20: mol_type = other DNA
tcgctctatttttttctttt

SEQ ID NO: 30786 - DNA, 20 bp, synthetic construct
  misc_feature 1..20: note = chemically synthesized
  source 1..20: mol_type = other DNA
ttttgaataatctttcattt

SEQ ID NO: 30787 - DNA, 20 bp, synthetic construct
  misc_feature 1..20: note = chemically synthesized
  source 1..20: mol_type = other DNA
tgtattatttctaatttatt

SEQ ID NO: 30788 - DNA, 20 bp, synthetic construct
  misc_feature 1..20: note = chemically synthesized
  source 1..20: mol_type = other DNA
actgatgaagatattttctc

SEQ ID NO: 30789 - DNA, 20 bp, synthetic construct
  misc_feature 1..20: note = chemically synthesized
  source 1..20: mol_type = other DNA
accccagcacttaagcaaac

SEQ ID NO: 30790 - DNA, 20 bp, synthetic construct
  misc_feature 1..20: note = chemically synthesized
  source 1..20: mol_type = other DNA
agcaaaagcgagggggagag

SEQ ID NO: 30791 - DNA, 20 bp, synthetic construct
  misc_feature 1..20: note = chemically synthesized
  source 1..20: mol_type = other DNA
ttttcacgagaaaaacctcc

SEQ ID NO: 30792 - DNA, 20 bp, synthetic construct
  misc_feature 1..20: note = chemically synthesized
  source 1..20: mol_type = other DNA
ctttatttctcttttcgaaa

SEQ ID NO: 30793 - DNA, 20 bp, synthetic construct
  misc_feature 1..20: note = chemically synthesized
  source 1..20: mol_type = other DNA
aacaactcacatgcaaacct

SEQ ID NO: 30794 - DNA, 20 bp, synthetic construct
  misc_feature 1..20: note = chemically synthesized
  source 1..20: mol_type = other DNA
cactcaccgtaagaaaatgg

SEQ ID NO: 30795 - DNA, 20 bp, synthetic construct
  misc_feature 1..20: note = chemically synthesized
  source 1..20: mol_type = other DNA
agaaaatgggggggtaggga

SEQ ID NO: 30796 - DNA, 20 bp, synthetic construct
  misc_feature 1..20: note = chemically synthesized
  source 1..20: mol_type = other DNA
aatgggggggtagggaggga

SEQ ID NO: 30797 - DNA, 20 bp, synthetic construct
  misc_feature 1..20: note = chemically synthesized
  source 1..20: mol_type = other DNA
gaaaggggcccccggcgctc

SEQ ID NO: 30798 - DNA, 20 bp, synthetic construct
  misc_feature 1..20: note = chemically synthesized
  source 1..20: mol_type = other DNA
ccccggcgctcctgagtccg

SEQ ID NO: 30799 - DNA, 20 bp, synthetic construct
  misc_feature 1..20: note = chemically synthesized
  source 1..20: mol_type = other DNA
gccttttgttccggccagag

SEQ ID NO: 30800 - DNA, 20 bp, synthetic construct
  misc_feature 1..20: note = chemically synthesized
  source 1..20: mol_type = other DNA
ggagcccggactgctgcctc

SEQ ID NO: 30801 - DNA, 20 bp, synthetic construct
  misc_feature 1..20: note = chemically synthesized
  source 1..20: mol_type = other DNA
aaataaataaaacaaggcaa

SEQ ID NO: 30802 - DNA, 20 bp, synthetic construct
  misc_feature 1..20: note = chemically synthesized
  source 1..20: mol_type = other DNA
gattttcaaaaaaagtggaa

SEQ ID NO: 30803 - DNA, 20 bp, synthetic construct
  misc_feature 1..20: note = chemically synthesized
  source 1..20: mol_type = other DNA
gattgggaaaaatctcgtgt

SEQ ID NO: 30804 - DNA, 20 bp, synthetic construct
  misc_feature 1..20: note = chemically synthesized
  source 1..20: mol_type = other DNA
cgccgcgccccagcccagcc

SEQ ID NO: 30805 - DNA, 20 bp, synthetic construct
  misc_feature 1..20: note = chemically synthesized
  source 1..20: mol_type = other DNA
ctcccagactgcgaaatcgg

SEQ ID NO: 30806 - DNA, 20 bp, synthetic construct
  misc_feature 1..20: note = chemically synthesized
  source 1..20: mol_type = other DNA
cgcctcccctcccctccgcc

SEQ ID NO: 30807 - DNA, 20 bp, synthetic construct
  misc_feature 1..20: note = chemically synthesized
  source 1..20: mol_type = other DNA
agcacgactaggccaggtgg

SEQ ID NO: 30808 - DNA, 20 bp, synthetic construct
  misc_feature 1..20: note = chemically synthesized
  source 1..20: mol_type = other DNA
agggcaggggagaagtgtgt

SEQ ID NO: 30809 - DNA, 20 bp, synthetic construct
  misc_feature 1..20: note = chemically synthesized
  source 1..20: mol_type = other DNA
gagtgtgcattttaagggcg

SEQ ID NO: 30810 - DNA, 20 bp, synthetic construct
  misc_feature 1..20: note = chemically synthesized
  source 1..20: mol_type = other DNA
gaccccgagcacttcaccct

SEQ ID NO: 30811 - DNA, 20 bp, synthetic construct
  misc_feature 1..20: note = chemically synthesized
  source 1..20: mol_type = other DNA
tggcttggtctgaggttctt

SEQ ID NO: 30812 - DNA, 20 bp, synthetic construct
  misc_feature 1..20: note = chemically synthesized
  source 1..20: mol_type = other DNA
ttggttctgtgtttttttaa

SEQ ID NO: 30813 - DNA, 20 bp, synthetic construct
  misc_feature 1..20: note = chemically synthesized
  source 1..20: mol_type = other DNA
tttttaaaggggtggtggtg

SEQ ID NO: 30814 - DNA, 20 bp, synthetic construct
  misc_feature 1..20: note = chemically synthesized
  source 1..20: mol_type = other DNA
ggtggtggggggtgcgcaca

SEQ ID NO: 30815 - DNA, 20 bp, synthetic construct
  misc_feature 1..20: note = chemically synthesized
  source 1..20: mol_type = other DNA
ccccaactcccccggccgcg

SEQ ID NO: 30816 - DNA, 20 bp, synthetic construct
  misc_feature 1..20: note = chemically synthesized
  source 1..20: mol_type = other DNA
ctcccccggccgcgccggat

SEQ ID NO: 30817 - DNA, 20 bp, synthetic construct
  misc_feature 1..20: note = chemically synthesized
  source 1..20: mol_type = other DNA
aaagtcaggcccttcttcgg

SEQ ID NO: 30818 - DNA, 20 bp, synthetic construct
  misc_feature 1..20: note = chemically synthesized
  source 1..20: mol_type = other DNA
ccctcgtacccctctccctc

SEQ ID NO: 30819 - DNA, 20 bp, synthetic construct
  misc_feature 1..20: note = chemically synthesized
  source 1..20: mol_type = other DNA
cttgggacactctaggctgg

SEQ ID NO: 30820 - DNA, 20 bp, synthetic construct
  misc_feature 1..20: note = chemically synthesized
  source 1..20: mol_type = other DNA
agtaccccctcctcctgtcc

SEQ ID NO: 30821 - DNA, 20 bp, synthetic construct
  misc_feature 1..20: note = chemically synthesized
  source 1..20: mol_type = other DNA
gttaaagggccagtttggga

SEQ ID NO: 30822 - DNA, 20 bp, synthetic construct
  misc_feature 1..20: note = chemically synthesized
  source 1..20: mol_type = other DNA
cttctttctgtcctcatttt

SEQ ID NO: 30823 - DNA, 20 bp, synthetic construct
  misc_feature 1..20: note = chemically synthesized
  source 1..20: mol_type = other DNA
ccccgcctctgctatgtggg

SEQ ID NO: 30824 - DNA, 20 bp, synthetic construct
  misc_feature 1..20: note = chemically synthesized
  source 1..20: mol_type = other DNA
cggggaggaacgagctttgc

SEQ ID NO: 30825 - DNA, 20 bp, synthetic construct
  misc_feature 1..20: note = chemically synthesized
  source 1..20: mol_type = other DNA
ggaacgagctttgcgagggt

SEQ ID NO: 30826 - DNA, 20 bp, synthetic construct
  misc_feature 1..20: note = chemically synthesized
  source 1..20: mol_type = other DNA
ggggggaaagaacggttagg

SEQ ID NO: 30827 - DNA, 20 bp, synthetic construct
  misc_feature 1..20: note = chemically synthesized
  source 1..20: mol_type = other DNA
atttttggtagggaggaacc

SEQ ID NO: 30828 - DNA, 20 bp, synthetic construct
  misc_feature 1..20: note = chemically synthesized
  source 1..20: mol_type = other DNA
ttcggggcatggccgaagag

SEQ ID NO: 30829 - DNA, 20 bp, synthetic construct
  misc_feature 1..20: note = chemically synthesized
  source 1..20: mol_type = other DNA
ccccctctcgcctcggagct

SEQ ID NO: 30830 - DNA, 20 bp, synthetic construct
  misc_feature 1..20: note = chemically synthesized
  source 1..20: mol_type = other DNA
ggcaggcagcgtcattaata

SEQ ID NO: 30831 - DNA, 20 bp, synthetic construct
  misc_feature 1..20: note = chemically synthesized
  source 1..20: mol_type = other DNA
cgccgcgcacacccagtgcc

SEQ ID NO: 30832 - DNA, 20 bp, synthetic construct
  misc_feature 1..20: note = chemically synthesized
  source 1..20: mol_type = other DNA
aaagtgtaagcttgtggaca

SEQ ID NO: 30833 - DNA, 20 bp, synthetic construct
  misc_feature 1..20: note = chemically synthesized
  source 1..20: mol_type = other DNA
tgtaagcttgtggacacaga

SEQ ID NO: 30834 - DNA, 20 bp, synthetic construct
  misc_feature 1..20: note = chemically synthesized
  source 1..20: mol_type = other DNA
gactgcaccaggttaaccag

SEQ ID NO: 30835 - DNA, 20 bp, synthetic construct
  misc_feature 1..20: note = chemically synthesized
  source 1..20: mol_type = other DNA
acgctgctcgctttgtgcct

SEQ ID NO: 30836 - DNA, 20 bp, synthetic construct
  misc_feature 1..20: note = chemically synthesized
  source 1..20: mol_type = other DNA
tgtttctttgcttttcctct

SEQ ID NO: 30837 - DNA, 20 bp, synthetic construct
  misc_feature 1..20: note = chemically synthesized
  source 1..20: mol_type = other DNA
tccttaccaacatttcctat

SEQ ID NO: 30838 - DNA, 20 bp, synthetic construct
  misc_feature 1..20: note = chemically synthesized
  source 1..20: mol_type = other DNA
tttcttcctcccctcgtaga

SEQ ID NO: 30839 - DNA, 20 bp, synthetic construct
  misc_feature 1..20: note = chemically synthesized
  source 1..20: mol_type = other DNA
aggactccctgctttgtagc

SEQ ID NO: 30840 - DNA, 20 bp, synthetic construct
  misc_feature 1..20: note = chemically synthesized
  source 1..20: mol_type = other DNA
ttggtattgttggggcgaag

SEQ ID NO: 30841 - DNA, 20 bp, synthetic construct
  misc_feature 1..20: note = chemically synthesized
  source 1..20: mol_type = other DNA
attgttggggcgaaggagga

SEQ ID NO: 30842 - DNA, 20 bp, synthetic construct
  misc_feature 1..20: note = chemically synthesized
  source 1..20: mol_type = other DNA
tggggcgaaggaggatggag

SEQ ID NO: 30843 - DNA, 20 bp, synthetic construct
  misc_feature 1..20: note = chemically synthesized
  source 1..20: mol_type = other DNA
gatggagttgaattgaggga

SEQ ID NO: 30844 - DNA, 20 bp, synthetic construct
  misc_feature 1..20: note = chemically synthesized
  source 1..20: mol_type = other DNA
gagggagggggtaaatggct

SEQ ID NO: 30845 - DNA, 20 bp, synthetic construct
  misc_feature 1..20: note = chemically synthesized
  source 1..20: mol_type = other DNA
aggaaggtttttagggaaag

SEQ ID NO: 30846 - DNA, 20 bp, synthetic construct
  misc_feature 1..20: note = chemically synthesized
  source 1..20: mol_type = other DNA
aaatcagtagactacaccat

SEQ ID NO: 30847 - DNA, 20 bp, synthetic construct
  misc_feature 1..20: note = chemically synthesized
  source 1..20: mol_type = other DNA
gttaaacgtatttcatacat

SEQ ID NO: 30848 - DNA, 20 bp, synthetic construct
  misc_feature 1..20: note = chemically synthesized
  source 1..20: mol_type = other DNA
ggaggtgtaatcagcaacct

SEQ ID NO: 30849 - DNA, 20 bp, synthetic construct
  misc_feature 1..20: note = chemically synthesized
  source 1..20: mol_type = other DNA
tttaactatttgatacctag

SEQ ID NO: 30850 - DNA, 20 bp, synthetic construct
  misc_feature 1..20: note = chemically synthesized
  source 1..20: mol_type = other DNA
gggaacaaaaaaaaaaaaaa

SEQ ID NO: 30851 - DNA, 20 bp, synthetic construct
  misc_feature 1..20: note = chemically synthesized
  source 1..20: mol_type = other DNA
aaatccttaattcagacaac

SEQ ID NO: 30852 - DNA, 20 bp, synthetic construct
  misc_feature 1..20: note = chemically synthesized
  source 1..20: mol_type = other DNA
tcagacaacaggaatatttt

SEQ ID NO: 30853 - DNA, 20 bp, synthetic construct
  misc_feature 1..20: note = chemically synthesized
  source 1..20: mol_type = other DNA
acaacaggaatattttgaga

SEQ ID NO: 30854 - DNA, 20 bp, synthetic construct
  misc_feature 1..20: note = chemically synthesized
  source 1..20: mol_type = other DNA
aatggaagcaaatgtaagag

SEQ ID NO: 30855 - DNA, 20 bp, synthetic construct
  misc_feature 1..20: note = chemically synthesized
  source 1..20: mol_type = other DNA
actttactgtctttattagt

SEQ ID NO: 30856 - DNA, 20 bp, synthetic construct
  misc_feature 1..20: note = chemically synthesized
  source 1..20: mol_type = other DNA
tgaccttatgttaaattagg

SEQ ID NO: 30857 - DNA, 20 bp, synthetic construct
  misc_feature 1..20: note = chemically synthesized
  source 1..20: mol_type = other DNA
ttatttcacctagcacatct

SEQ ID NO: 30858 - DNA, 20 bp, synthetic construct
  misc_feature 1..20: note = chemically synthesized
  source 1..20: mol_type = other DNA
cttccccctcaatattcagc

SEQ ID NO: 30859 - DNA, 20 bp, synthetic construct
  misc_feature 1..20: note = chemically synthesized
  source 1..20: mol_type = other DNA
ccctcaatattcagcctggg

SEQ ID NO: 30860 - DNA, 20 bp, synthetic construct
  misc_feature 1..20: note = chemically synthesized
  source 1..20: mol_type = other DNA
agggttgaaataaatttaac

SEQ ID NO: 30861 - DNA, 20 bp, synthetic construct
  misc_feature 1..20: note = chemically synthesized
  source 1..20: mol_type = other DNA
ataaatttaacctgagttca

SEQ ID NO: 30862 - DNA, 20 bp, synthetic construct
  misc_feature 1..20: note = chemically synthesized
  source 1..20: mol_type = other DNA
ttttattaactggcagcatc

SEQ ID NO: 30863 - DNA, 20 bp, synthetic construct
  misc_feature 1..20: note = chemically synthesized
  source 1..20: mol_type = other DNA
gaagctggtaaagtagatgc

SEQ ID NO: 30864 - DNA, 20 bp, synthetic construct
  misc_feature 1..20: note = chemically synthesized
  source 1..20: mol_type = other DNA
ccaccaagtgcaaacatgtt

SEQ ID NO: 30865 - DNA, 20 bp, synthetic construct
  misc_feature 1..20: note = chemically synthesized
  source 1..20: mol_type = other DNA
attataggcattccatttct

SEQ ID NO: 30866 - DNA, 20 bp, synthetic construct
  misc_feature 1..20: note = chemically synthesized
  source 1..20: mol_type = other DNA
tttgattttgtggcactgct

SEQ ID NO: 30867 - DNA, 20 bp, synthetic construct
  misc_feature 1..20: note = chemically synthesized
  source 1..20: mol_type = other DNA
gcagaaaggtttttggcagt

SEQ ID NO: 30868 - DNA, 20 bp, synthetic construct
  misc_feature 1..20: note = chemically synthesized
  source 1..20: mol_type = other DNA
gaagccatgtctgtttactt

SEQ ID NO: 30869 - DNA, 20 bp, synthetic construct
  misc_feature 1..20: note = chemically synthesized
  source 1..20: mol_type = other DNA
agtatatacattcacacaca

SEQ ID NO: 30870 - DNA, 20 bp, synthetic construct
  misc_feature 1..20: note = chemically synthesized
  source 1..20: mol_type = other DNA
aaccagacacatttgttgct

SEQ ID NO: 30871 - DNA, 20 bp, synthetic construct
  misc_feature 1..20: note = chemically synthesized
  source 1..20: mol_type = other DNA
ttgttgctgtgggtgtgtgc

SEQ ID NO: 30872 - DNA, 20 bp, synthetic construct
  misc_feature 1..20: note = chemically synthesized
  source 1..20: mol_type = other DNA
atgtgtgtgtgtgtgttctc

SEQ ID NO: 30873 - DNA, 20 bp, synthetic construct
  misc_feature 1..20: note = chemically synthesized
  source 1..20: mol_type = other DNA
tttttgtatgctcacatttt

SEQ ID NO: 30874 - DNA, 20 bp, synthetic construct
  misc_feature 1..20: note = chemically synthesized
  source 1..20: mol_type = other DNA
aaacactttacatgatgtgg

SEQ ID NO: 30875 - DNA, 20 bp, synthetic construct
  misc_feature 1..20: note = chemically synthesized
  source 1..20: mol_type = other DNA
catgatgtggtgggatggca

SEQ ID NO: 30876 - DNA, 20 bp, synthetic construct
  misc_feature 1..20: note = chemically synthesized
  source 1..20: mol_type = other DNA
gcccgttgggagctccagaa

SEQ ID NO: 30877 - DNA, 20 bp, synthetic construct
  misc_feature 1..20: note = chemically synthesized
  source 1..20: mol_type = other DNA
gcctctgcttagaaaaagct

SEQ ID NO: 30878 - DNA, 20 bp, synthetic construct
  misc_feature 1..20: note = chemically synthesized
  source 1..20: mol_type = other DNA
ttggcatccaggtcacgcca

SEQ ID NO: 30879 - DNA, 20 bp, synthetic construct
  misc_feature 1..20: note = chemically synthesized
  source 1..20: mol_type = other DNA
tgtttatcaacgtcatctag

SEQ ID NO: 30880 - DNA, 20 bp, synthetic construct
  misc_feature 1..20: note = chemically synthesized
  source 1..20: mol_type = other DNA
ggtgctgtagccaagcagta

SEQ ID NO: 30881 - DNA, 20 bp, synthetic construct
  misc_feature 1..20: note = chemically synthesized
  source 1..20: mol_type = other DNA
aataaatattttccacctca

SEQ ID NO: 30882 - DNA, 20 bp, synthetic construct
  misc_feature 1..20: note = chemically synthesized
  source 1..20: mol_type = other DNA
ctcactgaatcagatgtagg

SEQ ID NO: 30883 - DNA, 20 bp, synthetic construct
  misc_feature 1..20: note = chemically synthesized
  source 1..20: mol_type = other DNA
acacatcagacaccttctct

SEQ ID NO: 30884 - DNA, 20 bp, synthetic construct
  misc_feature 1..20: note = chemically synthesized
  source 1..20: mol_type = other DNA
tctctctggatctgtcgatt

SEQ ID NO: 30885 - DNA, 20 bp, synthetic construct
  misc_feature 1..20: note = chemically synthesized
  source 1..20: mol_type = other DNA
acatctggccaggcctcctt

SEQ ID NO: 30886 - DNA, 20 bp, synthetic construct
  misc_feature 1..20: note = chemically synthesized
  source 1..20: mol_type = other DNA
ttctcaaggcttccctgaag

SEQ ID NO: 30887 - DNA, 20 bp, synthetic construct
  misc_feature 1..20: note = chemically synthesized
  source 1..20: mol_type = other DNA
cctgaagtagagtgggctgg

SEQ ID NO: 30888 - DNA, 20 bp, synthetic construct
  misc_feature 1..20: note = chemically synthesized
  source 1..20: mol_type = other DNA
gggtagttggaggtggtgga

SEQ ID NO: 30889 - DNA, 20 bp, synthetic construct
  misc_feature 1..20: note = chemically synthesized
  source 1..20: mol_type = other DNA
actgagcttcagggctagcc

SEQ ID NO: 30890 - DNA, 20 bp, synthetic construct
  misc_feature 1..20: note = chemically synthesized
  source 1..20: mol_type = other DNA
gatccatattggctgtcagc

SEQ ID NO: 30891 - DNA, 20 bp, synthetic construct
  misc_feature 1..20: note = chemically synthesized
  source 1..20: mol_type = other DNA
aattaaacacagccccgtgg

SEQ ID NO: 30892 - DNA, 20 bp, synthetic construct
  misc_feature 1..20: note = chemically synthesized
  source 1..20: mol_type = other DNA
ccattttcgactggccaggc

SEQ ID NO: 30893 - DNA, 20 bp, synthetic construct
  misc_feature 1..20: note = chemically synthesized
  source 1..20: mol_type = other DNA
gcagggaggcagctaggtgt

SEQ ID NO: 30894 - DNA, 20 bp, synthetic construct
  misc_feature 1..20: note = chemically synthesized
  source 1..20: mol_type = other DNA
tctcggcagctcaagggaaa

SEQ ID NO: 30895 - DNA, 20 bp, synthetic construct
  misc_feature 1..20: note = chemically synthesized
  source 1..20: mol_type = other DNA
cagacatgccatgcctgttg

SEQ ID NO: 30896 - DNA, 20 bp, synthetic construct
  misc_feature 1..20: note = chemically synthesized
  source 1..20: mol_type = other DNA
taggaaaggtagtgcatatc

SEQ ID NO: 30897 - DNA, 20 bp, synthetic construct
  misc_feature 1..20: note = chemically synthesized
  source 1..20: mol_type = other DNA
taataggtcagtggtctaga

SEQ ID NO: 30898 - DNA, 20 bp, synthetic construct
  misc_feature 1..20: note = chemically synthesized
  source 1..20: mol_type = other DNA
ttatttctcctctccccctc

SEQ ID NO: 30899 - DNA, 20 bp, synthetic construct
  misc_feature 1..20: note = chemically synthesized
  source 1..20: mol_type = other DNA
tgctagggaagctgcatttg

SEQ ID NO: 30900 - DNA, 20 bp, synthetic construct
  misc_feature 1..20: note = chemically synthesized
  source 1..20: mol_type = other DNA
gcatttgtggagtgtatttc

SEQ ID NO: 30901 - DNA, 20 bp, synthetic construct
  misc_feature 1..20: note = chemically synthesized
  source 1..20: mol_type = other DNA
ttatctcccctaccccccag

SEQ ID NO: 30902 - DNA, 20 bp, synthetic construct
  misc_feature 1..20: note = chemically synthesized
  source 1..20: mol_type = other DNA
cctaccccccagcaggatgt

SEQ ID NO: 30903 - DNA, 20 bp, synthetic construct
  misc_feature 1..20: note = chemically synthesized
  source 1..20: mol_type = other DNA
tgaagcaagagcaggcggaa

SEQ ID NO: 30904 - DNA, 20 bp, synthetic construct
  misc_feature 1..20: note = chemically synthesized
  source 1..20: mol_type = other DNA
ccttgctaaatcaccaaata

SEQ ID NO: 30905 - DNA, 20 bp, synthetic construct
  misc_feature 1..20: note = chemically synthesized
  source 1..20: mol_type = other DNA
aaacacagtgtctgtcaagc

SEQ ID NO: 30906 - DNA, 20 bp, synthetic construct
  misc_feature 1..20: note = chemically synthesized
  source 1..20: mol_type = other DNA
tgtgcctctgtatttagagg

SEQ ID NO: 30907 - DNA, 20 bp, synthetic construct
  misc_feature 1..20: note = chemically synthesized
  source 1..20: mol_type = other DNA
agacttttactgctatagtt

SEQ ID NO: 30908 - DNA, 20 bp, synthetic construct
  misc_feature 1..20: note = chemically synthesized
  source 1..20: mol_type = other DNA
gtgaggtaaacctttcgtgc

SEQ ID NO: 30909 - DNA, 20 bp, synthetic construct
  misc_feature 1..20: note = chemically synthesized
  source 1..20: mol_type = other DNA
caaagtgagatgtcagtaac

SEQ ID NO: 30910 - DNA, 20 bp, synthetic construct
  misc_feature 1..20: note = chemically synthesized
  source 1..20: mol_type = other DNA
acttctcataattcacagta

SEQ ID NO: 30911 - DNA, 20 bp, synthetic construct
  misc_feature 1..20: note = chemically synthesized
  source 1..20: mol_type = other DNA
ataattcacagtaatgaatt

SEQ ID NO: 30912 - DNA, 20 bp, synthetic construct
  misc_feature 1..20: note = chemically synthesized
  source 1..20: mol_type = other DNA
agtaatcattcagtagatat

SEQ ID NO: 30913 - DNA, 20 bp, synthetic construct
  misc_feature 1..20: note = chemically synthesized
  source 1..20: mol_type = other DNA
ttaaggaaagagatatattg

SEQ ID NO: 30914 - DNA, 20 bp, synthetic construct
  misc_feature 1..20: note = chemically synthesized
  source 1..20: mol_type = other DNA
atatattgatgaatctctag

SEQ ID NO: 30915 - DNA, 20 bp, synthetic construct
  misc_feature 1..20: note = chemically synthesized
  source 1..20: mol_type = other DNA
aaggtagtcatttaagcgtg

SEQ ID NO: 30916 - DNA, 20 bp, synthetic construct
  misc_feature 1..20: note = chemically synthesized
  source 1..20: mol_type = other DNA
ctttattaaagtgatgtaag

SEQ ID NO: 30917 - DNA, 20 bp, synthetic construct
  misc_feature 1..20: note = chemically synthesized
  source 1..20: mol_type = other DNA
taaagtgatgtaagttggat

SEQ ID NO: 30918 - DNA, 20 bp, synthetic construct
  misc_feature 1..20: note = chemically synthesized
  source 1..20: mol_type = other DNA
ctattttataggcaggaagc

SEQ ID NO: 30919 - DNA, 20 bp, synthetic construct
  misc_feature 1..20: note = chemically synthesized
  source 1..20: mol_type = other DNA
ttcctaagataaataaagct

SEQ ID NO: 30920 - DNA, 20 bp, synthetic construct
  misc_feature 1..20: note = chemically synthesized
  source 1..20: mol_type = other DNA
aattcgggactttcagatag

SEQ ID NO: 30921 - DNA, 20 bp, synthetic construct
  misc_feature 1..20: note = chemically synthesized
  source 1..20: mol_type = other DNA
tttcagataggagaataagg

SEQ ID NO: 30922 - DNA, 20 bp, synthetic construct
  misc_feature 1..20: note = chemically synthesized
  source 1..20: mol_type = other DNA
aaggcagagttctttaaatc

SEQ ID NO: 30923 - DNA, 20 bp, synthetic construct
  misc_feature 1..20: note = chemically synthesized
  source 1..20: mol_type = other DNA
tgtactcaggcctctccaag

SEQ ID NO: 30924 - DNA, 20 bp, synthetic construct
  misc_feature 1..20: note = chemically synthesized
  source 1..20: mol_type = other DNA
tttttttttttttttttaga

SEQ ID NO: 30925 - DNA, 20 bp, synthetic construct
  misc_feature 1..20: note = chemically synthesized
  source 1..20: mol_type = other DNA
tttgctcttgttgcccaggc

SEQ ID NO: 30926 - DNA, 20 bp, synthetic construct
  misc_feature 1..20: note = chemically synthesized
  source 1..20: mol_type = other DNA
gcctcagcctcccaagtagc

SEQ ID NO: 30927 - DNA, 20 bp, synthetic construct
  misc_feature 1..20: note = chemically synthesized
  source 1..20: mol_type = other DNA
ttttgtattttcagtagagg

SEQ ID NO: 30928 - DNA, 20 bp, synthetic construct
  misc_feature 1..20: note = chemically synthesized
  source 1..20: mol_type = other DNA
ggcttggcctcccaaagtgc

SEQ ID NO: 30929 - DNA, 20 bp, synthetic construct
  misc_feature 1..20: note = chemically synthesized
  source 1..20: mol_type = other DNA
gcgaccgcacctggcccaaa

SEQ ID NO: 30930 - DNA, 20 bp, synthetic construct
  misc_feature 1..20: note = chemically synthesized
  source 1..20: mol_type = other DNA
cccaaactgagtatttttta

SEQ ID NO: 30931 - DNA, 20 bp, synthetic construct
  misc_feature 1..20: note = chemically synthesized
  source 1..20: mol_type = other DNA
tagaggattctttttacctg

SEQ ID NO: 30932 - DNA, 20 bp, synthetic construct
  misc_feature 1..20: note = chemically synthesized
  source 1..20: mol_type = other DNA
tctttttacctggtgaatag

SEQ ID NO: 30933 - DNA, 20 bp, synthetic construct
  misc_feature 1..20: note = chemically synthesized
  source 1..20: mol_type = other DNA
gaagtagtattaatttagct

SEQ ID NO: 30934 - DNA, 20 bp, synthetic construct
  misc_feature 1..20: note = chemically synthesized
  source 1..20: mol_type = other DNA
ttgcagtcagagctttcaat

SEQ ID NO: 30935 - DNA, 20 bp, synthetic construct
  misc_feature 1..20: note = chemically synthesized
  source 1..20: mol_type = other DNA
gaaatattcatggaagatta

SEQ ID NO: 30936 - DNA, 20 bp, synthetic construct
  misc_feature 1..20: note = chemically synthesized
  source 1..20: mol_type = other DNA
ggttttggcttattgcacat

SEQ ID NO: 30937 - DNA, 20 bp, synthetic construct
  misc_feature 1..20: note = chemically synthesized
  source 1..20: mol_type = other DNA
atgaacatagacatttatat

SEQ ID NO: 30938 - DNA, 20 bp, synthetic construct
  misc_feature 1..20: note = chemically synthesized
  source 1..20: mol_type = other DNA
atcaaatacaatatgctttt

SEQ ID NO: 30939 - DNA, 20 bp, synthetic construct
  misc_feature 1..20: note = chemically synthesized
  source 1..20: mol_type = other DNA
tcctagctcagactgaactg

SEQ ID NO: 30940 - DNA, 20 bp, synthetic construct
  misc_feature 1..20: note = chemically synthesized
  source 1..20: mol_type = other DNA
ttctctttatttatgtgatt

SEQ ID NO: 30941 - DNA, 20 bp, synthetic construct
  misc_feature 1..20: note = chemically synthesized
  source 1..20: mol_type = other DNA
aaaaacgactgacttctgaa

SEQ ID NO: 30942 - DNA, 20 bp, synthetic construct
  misc_feature 1..20: note = chemically synthesized
  source 1..20: mol_type = other DNA
ttacttaccttcaaaatcca

SEQ ID NO: 30943 - DNA, 20 bp, synthetic construct
  misc_feature 1..20: note = chemically synthesized
  source 1..20: mol_type = other DNA
ccttcaaaatccagagagta

SEQ ID NO: 30944 - DNA, 20 bp, synthetic construct
  misc_feature 1..20: note = chemically synthesized
  source 1..20: mol_type = other DNA
attgttttctaataagtacc

SEQ ID NO: 30945 - DNA, 20 bp, synthetic construct
  misc_feature 1..20: note = chemically synthesized
  source 1..20: mol_type = other DNA
agactaatgttcatgaaact

SEQ ID NO: 30946 - DNA, 20 bp, synthetic construct
  misc_feature 1..20: note = chemically synthesized
  source 1..20: mol_type = other DNA
aaaggttgtgaactggcagc

SEQ ID NO: 30947 - DNA, 20 bp, synthetic construct
  misc_feature 1..20: note = chemically synthesized
  source 1..20: mol_type = other DNA
tcttttataaataatgtttt

SEQ ID NO: 30948 - DNA, 20 bp, synthetic construct
  misc_feature 1..20: note = chemically synthesized
  source 1..20: mol_type = other DNA
caagttgtgcctttactata

SEQ ID NO: 30949 - DNA, 20 bp, synthetic construct
  misc_feature 1..20: note = chemically synthesized
  source 1..20: mol_type = other DNA
ttttgcacacctttctctta

SEQ ID NO: 30950 - DNA, 20 bp, synthetic construct
  misc_feature 1..20: note = chemically synthesized
  source 1..20: mol_type = other DNA
acatgggctggaaaatgcaa

SEQ ID NO: 30951 - DNA, 20 bp, synthetic construct
  misc_feature 1..20: note = chemically synthesized
  source 1..20: mol_type = other DNA
tgggtgtagaaacgtgcagg

SEQ ID NO: 30952 - DNA, 20 bp, synthetic construct
  misc_feature 1..20: note = chemically synthesized
  source 1..20: mol_type = other DNA
accttcagctcagggaggag

SEQ ID NO: 30953 - DNA, 20 bp, synthetic construct
  misc_feature 1..20: note = chemically synthesized
  source 1..20: mol_type = other DNA
cagctcagggaggaggcgag

SEQ ID NO: 30954 - DNA, 20 bp, synthetic construct
  misc_feature 1..20: note = chemically synthesized
  source 1..20: mol_type = other DNA
tgcttattaatggcatcttt

SEQ ID NO: 30955 - DNA, 20 bp, synthetic construct
  misc_feature 1..20: note = chemically synthesized
  source 1..20: mol_type = other DNA
ccatgtagtttggctaatgt

SEQ ID NO: 30956 - DNA, 20 bp, synthetic construct
  misc_feature 1..20: note = chemically synthesized
  source 1..20: mol_type = other DNA
ctaatgtgggagtactaaat

SEQ ID NO: 30957 - DNA, 20 bp, synthetic construct
  misc_feature 1..20: note = chemically synthesized
  source 1..20: mol_type = other DNA
aatgaaaatgtttaataaag

SEQ ID NO: 30958 - DNA, 20 bp, synthetic construct
  misc_feature 1..20: note = chemically synthesized
  source 1..20: mol_type = other DNA
tgtttaataaaggagaatag

SEQ ID NO: 30959 - DNA, 20 bp, synthetic construct
  misc_feature 1..20: note = chemically synthesized
  source 1..20: mol_type = other DNA
gatgcaccaagattgcgtca

SEQ ID NO: 30960 - DNA, 20 bp, synthetic construct
  misc_feature 1..20: note = chemically synthesized
  source 1..20: mol_type = other DNA
tctgcttgttcagatttcat

SEQ ID NO: 30961 - DNA, 20 bp, synthetic construct
  misc_feature 1..20: note = chemically synthesized
  source 1..20: mol_type = other DNA
gtcagcagtgttgttatttc

SEQ ID NO: 30962 - DNA, 20 bp, synthetic construct
  misc_feature 1..20: note = chemically synthesized
  source 1..20: mol_type = other DNA
tttttatgttatgtatcaat

SEQ ID NO: 30963 - DNA, 20 bp, synthetic construct
  misc_feature 1..20: note = chemically synthesized
  source 1..20: mol_type = other DNA
tgttcagactatataattta

SEQ ID NO: 30964 - DNA, 20 bp, synthetic construct
  misc_feature 1..20: note = chemically synthesized
  source 1..20: mol_type = other DNA
cagcttctcccctttacgac

SEQ ID NO: 30965 - DNA, 20 bp, synthetic construct
  misc_feature 1..20: note = chemically synthesized
  source 1..20: mol_type = other DNA
acgaaccatattattgctac

SEQ ID NO: 30966 - DNA, 20 bp, synthetic construct
  misc_feature 1..20: note = chemically synthesized
  source 1..20: mol_type = other DNA
ggaaatgtaacctgacaaat

SEQ ID NO: 30967 - DNA, 20 bp, synthetic construct
  misc_feature 1..20: note = chemically synthesized
  source 1..20: mol_type = other DNA
aaaatgtaacttattccata

SEQ ID NO: 30968 - DNA, 20 bp, synthetic construct
  misc_feature 1..20: note = chemically synthesized
  source 1..20: mol_type = other DNA
ttattccatattgggttcat

SEQ ID NO: 30969 - DNA, 20 bp, synthetic construct
  misc_feature 1..20: note = chemically synthesized
  source 1..20: mol_type = other DNA
aaggcttttgctgttcttag

SEQ ID NO: 30970 - DNA, 20 bp, synthetic construct
  misc_feature 1..20: note = chemically synthesized
  source 1..20: mol_type = other DNA
tcttagcagggttagtaact

SEQ ID NO: 30971 - DNA, 20 bp, synthetic construct
  misc_feature 1..20: note = chemically synthesized
  source 1..20: mol_type = other DNA
ttcgtcattctgcaatggca

SEQ ID NO: 30972 - DNA, 20 bp, synthetic construct
  misc_feature 1..20: note = chemically synthesized
  source 1..20: mol_type = other DNA
ttgagttaggttggcaaggg

SEQ ID NO: 30973 - DNA, 20 bp, synthetic construct
  misc_feature 1..20: note = chemically synthesized
  source 1..20: mol_type = other DNA
agggaaggatttgaggcatg

SEQ ID NO: 30974 - DNA, 20 bp, synthetic construct
  misc_feature 1..20: note = chemically synthesized
  source 1..20: mol_type = other DNA
ggtcacttctgatcccagca

SEQ ID NO: 30975 - DNA, 20 bp, synthetic construct
  misc_feature 1..20: note = chemically synthesized
  source 1..20: mol_type = other DNA
tgccctgtcagatgcggagc

SEQ ID NO: 30976 - DNA, 20 bp, synthetic construct
  misc_feature 1..20: note = chemically synthesized
  source 1..20: mol_type = other DNA
cttaatatgcagctagtctg

SEQ ID NO: 30977 - DNA, 20 bp, synthetic construct
  misc_feature 1..20: note = chemically synthesized
  source 1..20: mol_type = other DNA
acatcatccttttcttctct

SEQ ID NO: 30978 - DNA, 20 bp, synthetic construct
  misc_feature 1..20: note = chemically synthesized
  source 1..20: mol_type = other DNA
gccacctcccaattcaccac

SEQ ID NO: 30979 - DNA, 20 bp, synthetic construct
  misc_feature 1..20: note = chemically synthesized
  source 1..20: mol_type = other DNA
atatggttaattacaggcgt

SEQ ID NO: 30980 - DNA, 20 bp, synthetic construct
  misc_feature 1..20: note = chemically synthesized
  source 1..20: mol_type = other DNA
aagtatgtgatttgaacaaa

SEQ ID NO: 30981 - DNA, 20 bp, synthetic construct
  misc_feature 1..20: note = chemically synthesized
  source 1..20: mol_type = other DNA
tttaaaaaacaactttcaac

SEQ ID NO: 30982 - DNA, 20 bp, synthetic construct
  misc_feature 1..20: note = chemically synthesized
  source 1..20: mol_type = other DNA
aatatttcaccattatattt

SEQ ID NO: 30983 - DNA, 20 bp, synthetic construct
  misc_feature 1..20: note = chemically synthesized
  source 1..20: mol_type = other DNA
tttataatgtgttcctttaa

SEQ ID NO: 30984 - DNA, 20 bp, synthetic construct
  misc_feature 1..20: note = chemically synthesized
  source 1..20: mol_type = other DNA
aaataagctgctaagaactg

SEQ ID NO: 30985 - DNA, 20 bp, synthetic construct
  misc_feature 1..20: note = chemically synthesized
  source 1..20: mol_type = other DNA
ggttcaccctggagactgat

SEQ ID NO: 30986 - DNA, 20 bp, synthetic construct
  misc_feature 1..20: note = chemically synthesized
  source 1..20: mol_type = other DNA
caccctggagactgatgtga

SEQ ID NO: 30987 - DNA, 20 bp, synthetic construct
  misc_feature 1..20: note = chemically synthesized
  source 1..20: mol_type = other DNA
tagataaaataccaagttct

SEQ ID NO: 30988 - DNA, 20 bp, synthetic construct
  misc_feature 1..20: note = chemically synthesized
  source 1..20: mol_type = other DNA
tggcagcatgttattcagaa

SEQ ID NO: 30989 - DNA, 20 bp, synthetic construct
  misc_feature 1..20: note = chemically synthesized
  source 1..20: mol_type = other DNA
aactgaatcagtctctgcca

SEQ ID NO: 30990 - DNA, 20 bp, synthetic construct
  misc_feature 1..20: note = chemically synthesized
  source 1..20: mol_type = other DNA
ggagcaggtatgttgatgaa

SEQ ID NO: 30991 - DNA, 20 bp, synthetic construct
  misc_feature 1..20: note = chemically synthesized
  source 1..20: mol_type = other DNA
gggacctttggtcactcaca

SEQ ID NO: 30992 - DNA, 20 bp, synthetic construct
  misc_feature 1..20: note = chemically synthesized
  source 1..20: mol_type = other DNA
gattttagttttagatagag

SEQ ID NO: 30993 - DNA, 20 bp, synthetic construct
  misc_feature 1..20: note = chemically synthesized
  source 1..20: mol_type = other DNA
taaaaactcccattaaaata

SEQ ID NO: 30994 - DNA, 20 bp, synthetic construct
  misc_feature 1..20: note = chemically synthesized
  source 1..20: mol_type = other DNA
actcccattaaaataaagaa

SEQ ID NO: 30995 - DNA, 20 bp, synthetic construct
  misc_feature 1..20: note = chemically synthesized
  source 1..20: mol_type = other DNA
ggaattattgtgaaacctgc

SEQ ID NO: 30996 - DNA, 20 bp, synthetic construct
  misc_feature 1..20: note = chemically synthesized
  source 1..20: mol_type = other DNA
ttagggaaataaagtgtagc

SEQ ID NO: 30997 - DNA, 20 bp, synthetic construct
  misc_feature 1..20: note = chemically synthesized
  source 1..20: mol_type = other DNA
gttcctgtacattttaaata

SEQ ID NO: 30998 - DNA, 20 bp, synthetic construct
  misc_feature 1..20: note = chemically synthesized
  source 1..20: mol_type = other DNA
aatgttaaatcttaaatctc

SEQ ID NO: 30999 - DNA, 20 bp, synthetic construct
  misc_feature 1..20: note = chemically synthesized
  source 1..20: mol_type = other DNA
aaactgaacattggctactg

SEQ ID NO: 31000 - DNA, 20 bp, synthetic construct
  misc_feature 1..20: note = chemically synthesized
  source 1..20: mol_type = other DNA
taattctgataaagatactc

SEQ ID NO: 31001 - DNA, 20 bp, synthetic construct
  misc_feature 1..20: note = chemically synthesized
  source 1..20: mol_type = other DNA
aaatcttattctacatacaa

SEQ ID NO: 31002 - DNA, 20 bp, synthetic construct
  misc_feature 1..20: note = chemically synthesized
  source 1..20: mol_type = other DNA
cttttgtgcttgtcccagct

SEQ ID NO: 31003 - DNA, 20 bp, synthetic construct
  misc_feature 1..20: note = chemically synthesized
  source 1..20: mol_type = other DNA
tataggtattgtatttaaag

SEQ ID NO: 31004 - DNA, 20 bp, synthetic construct
  misc_feature 1..20: note = chemically synthesized
  source 1..20: mol_type = other DNA
gattgcggtgttgccagcag

SEQ ID NO: 31005 - DNA, 20 bp, synthetic construct
  misc_feature 1..20: note = chemically synthesized
  source 1..20: mol_type = other DNA
ctcattgaactctactcatg

SEQ ID NO: 31006 - DNA, 20 bp, synthetic construct
  misc_feature 1..20: note = chemically synthesized
  source 1..20: mol_type = other DNA
agagtaacattagtgtcaaa

SEQ ID NO: 31007 - DNA, 20 bp, synthetic construct
  misc_feature 1..20: note = chemically synthesized
  source 1..20: mol_type = other DNA
tgtggctcatacagatggtt

SEQ ID NO: 31008 - DNA, 20 bp, synthetic construct
  misc_feature 1..20: note = chemically synthesized
  source 1..20: mol_type = other DNA
tcatacagatggttgtggat

SEQ ID NO: 31009 - DNA, 20 bp, synthetic construct
  misc_feature 1..20: note = chemically synthesized
  source 1..20: mol_type = other DNA
cacatttctgagcagggccc

SEQ ID NO: 31010 - DNA, 20 bp, synthetic construct
  misc_feature 1..20: note = chemically synthesized
  source 1..20: mol_type = other DNA
tgagcagggcccaaggataa

SEQ ID NO: 31011 - DNA, 20 bp, synthetic construct
  misc_feature 1..20: note = chemically synthesized
  source 1..20: mol_type = other DNA
ataagagagttaagaaatca

SEQ ID NO: 31012 - DNA, 20 bp, synthetic construct
  misc_feature 1..20: note = chemically synthesized
  source 1..20: mol_type = other DNA
gctgggggagagagggggag

SEQ ID NO: 31013 - DNA, 20 bp, synthetic construct
  misc_feature 1..20: note = chemically synthesized
  source 1..20: mol_type = other DNA
agggtgcggagagaggttct

SEQ ID NO: 31014 - DNA, 20 bp, synthetic construct
  misc_feature 1..20: note = chemically synthesized
  source 1..20: mol_type = other DNA
atccccacagcagagagctt

SEQ ID NO: 31015 - DNA, 20 bp, synthetic construct
  misc_feature 1..20: note = chemically synthesized
  source 1..20: mol_type = other DNA
atatactttcttgctttcac

SEQ ID NO: 31016 - DNA, 20 bp, synthetic construct
  misc_feature 1..20: note = chemically synthesized
  source 1..20: mol_type = other DNA
ttcacctgggttggagaggt

SEQ ID NO: 31017 - DNA, 20 bp, synthetic construct
  misc_feature 1..20: note = chemically synthesized
  source 1..20: mol_type = other DNA
ttggggttgggaggaagagg

SEQ ID NO: 31018 - DNA, 20 bp, synthetic construct
  misc_feature 1..20: note = chemically synthesized
  source 1..20: mol_type = other DNA
aggaagaggaggagttcatt

SEQ ID NO: 31019 - DNA, 20 bp, synthetic construct
  misc_feature 1..20: note = chemically synthesized
  source 1..20: mol_type = other DNA
ttcattgggaattctgtcac

SEQ ID NO: 31020 - DNA, 20 bp, synthetic construct
  misc_feature 1..20: note = chemically synthesized
  source 1..20: mol_type = other DNA
tgtcaggaggttagcaaggt

SEQ ID NO: 31021 - DNA, 20 bp, synthetic construct
  misc_feature 1..20: note = chemically synthesized
  source 1..20: mol_type = other DNA
tgtgagttagcattcaagca

SEQ ID NO: 31022 - DNA, 20 bp, synthetic construct
  misc_feature 1..20: note = chemically synthesized
  source 1..20: mol_type = other DNA
ccacgatactctctaataac

SEQ ID NO: 31023 - DNA, 20 bp, synthetic construct
  misc_feature 1..20: note = chemically synthesized
  source 1..20: mol_type = other DNA
atactctctaataactgggg

SEQ ID NO: 31024 - DNA, 20 bp, synthetic construct
  misc_feature 1..20: note = chemically synthesized
  source 1..20: mol_type = other DNA
actggggtgggatggtggtg

SEQ ID NO: 31025 - DNA, 20 bp, synthetic construct
  misc_feature 1..20: note = chemically synthesized
  source 1..20: mol_type = other DNA
tgggtggacaccacaacttt

SEQ ID NO: 31026 - DNA, 20 bp, synthetic construct
  misc_feature 1..20: note = chemically synthesized
  source 1..20: mol_type = other DNA
gtctgcatgacccgttcacc

SEQ ID NO: 31027 - DNA, 20 bp, synthetic construct
  misc_feature 1..20: note = chemically synthesized
  source 1..20: mol_type = other DNA
tggattaaatgcggctggtg

SEQ ID NO: 31028 - DNA, 20 bp, synthetic construct
  misc_feature 1..20: note = chemically synthesized
  source 1..20: mol_type = other DNA
gaaaggcaaatctcaagcaa

SEQ ID NO: 31029 - DNA, 20 bp, synthetic construct
  misc_feature 1..20: note = chemically synthesized
  source 1..20: mol_type = other DNA
aaagctgtttttataccaca

SEQ ID NO: 31030 - DNA, 20 bp, synthetic construct
  misc_feature 1..20: note = chemically synthesized
  source 1..20: mol_type = other DNA
agggggaaaaggctttttgg

SEQ ID NO: 31031 - DNA, 20 bp, synthetic construct
  misc_feature 1..20: note = chemically synthesized
  source 1..20: mol_type = other DNA
gaagaaaaaccctttgcttt

SEQ ID NO: 31032 - DNA, 20 bp, synthetic construct
  misc_feature 1..20: note = chemically synthesized
  source 1..20: mol_type = other DNA
aaaaaccctttgctttttgg

SEQ ID NO: 31033 - DNA, 20 bp, synthetic construct
  misc_feature 1..20: note = chemically synthesized
  source 1..20: mol_type = other DNA
gataatttgctaaagctcat

SEQ ID NO: 31034 - DNA, 20 bp, synthetic construct
  misc_feature 1..20: note = chemically synthesized
  source 1..20: mol_type = other DNA
ttcaaaggctaaattgcttt

SEQ ID NO: 31035 - DNA, 20 bp, synthetic construct
  misc_feature 1..20: note = chemically synthesized
  source 1..20: mol_type = other DNA
attaggtccttccagtaatt

SEQ ID NO: 31036 - DNA, 20 bp, synthetic construct
  misc_feature 1..20: note = chemically synthesized
  source 1..20: mol_type = other DNA
ttcttgccaagtttccttta

SEQ ID NO: 31037 - DNA, 20 bp, synthetic construct
  misc_feature 1..20: note = chemically synthesized
  source 1..20: mol_type = other DNA
aagtttcctttagtgaattg

SEQ ID NO: 31038 - DNA, 20 bp, synthetic construct
  misc_feature 1..20: note = chemically synthesized
  source 1..20: mol_type = other DNA
gaggaattagaagtctaacc

SEQ ID NO: 31039 - DNA, 20 bp, synthetic construct
  misc_feature 1..20: note = chemically synthesized
  source 1..20: mol_type = other DNA
ggcacctaaaggacttgggc

SEQ ID NO: 31040 - DNA, 20 bp, synthetic construct
  misc_feature 1..20: note = chemically synthesized
  source 1..20: mol_type = other DNA
cagtgtctccctcaaggtac

SEQ ID NO: 31041 - DNA, 20 bp, synthetic construct
  misc_feature 1..20: note = chemically synthesized
  source 1..20: mol_type = other DNA
tttggtgtttgcctttgctg

SEQ ID NO: 31042 - DNA, 20 bp, synthetic construct
  misc_feature 1..20: note = chemically synthesized
  source 1..20: mol_type = other DNA
ttgatgttcatctttggttt

SEQ ID NO: 31043 - DNA, 20 bp, synthetic construct
  misc_feature 1..20: note = chemically synthesized
  source 1..20: mol_type = other DNA
gtttatcactggttaacaag

SEQ ID NO: 31044 - DNA, 20 bp, synthetic construct
  misc_feature 1..20: note = chemically synthesized
  source 1..20: mol_type = other DNA
taactgatattctgattaaa

SEQ ID NO: 31045 - DNA, 20 bp, synthetic construct
  misc_feature 1..20: note = chemically synthesized
  source 1..20: mol_type = other DNA
taggcagtaagatgaactga

SEQ ID NO: 31046 - DNA, 20 bp, synthetic construct
  misc_feature 1..20: note = chemically synthesized
  source 1..20: mol_type = other DNA
ctaagatatgatgaaatcta

SEQ ID NO: 31047 - DNA, 20 bp, synthetic construct
  misc_feature 1..20: note = chemically synthesized
  source 1..20: mol_type = other DNA
tcttcatactttatgtgggg

SEQ ID NO: 31048 - DNA, 20 bp, synthetic construct
  misc_feature 1..20: note = chemically synthesized
  source 1..20: mol_type = other DNA
gctgagtgggcagtggagaa

SEQ ID NO: 31049 - DNA, 20 bp, synthetic construct
  misc_feature 1..20: note = chemically synthesized
  source 1..20: mol_type = other DNA
ctgcttcagtcgcgttggct

SEQ ID NO: 31050 - DNA, 20 bp, synthetic construct
  misc_feature 1..20: note = chemically synthesized
  source 1..20: mol_type = other DNA
tcccccaaactttacaagaa

SEQ ID NO: 31051 - DNA, 20 bp, synthetic construct
  misc_feature 1..20: note = chemically synthesized
  source 1..20: mol_type = other DNA
ccttattattcagtctatcc

SEQ ID NO: 31052 - DNA, 20 bp, synthetic construct
  misc_feature 1..20: note = chemically synthesized
  source 1..20: mol_type = other DNA
tgtcggtttatttaacttcc

SEQ ID NO: 31053 - DNA, 20 bp, synthetic construct
  misc_feature 1..20: note = chemically synthesized
  source 1..20: mol_type = other DNA
agcaagaaagattacagtat

SEQ ID NO: 31054 - DNA, 20 bp, synthetic construct
  misc_feature 1..20: note = chemically synthesized
  source 1..20: mol_type = other DNA
actggaaacttctgcttata

SEQ ID NO: 31055 - DNA, 20 bp, synthetic construct
  misc_feature 1..20: note = chemically synthesized
  source 1..20: mol_type = other DNA
ttggcataatctagtgtacc

SEQ ID NO: 31056 - DNA, 20 bp, synthetic construct
  misc_feature 1..20: note = chemically synthesized
  source 1..20: mol_type = other DNA
aggaagtaaataaaaagtat

SEQ ID NO: 31057 - DNA, 20 bp, synthetic construct
  misc_feature 1..20: note = chemically synthesized
  source 1..20: mol_type = other DNA
cttttgaaaatgtattttca

SEQ ID NO: 31058 - DNA, 20 bp, synthetic construct
  misc_feature 1..20: note = chemically synthesized
  source 1..20: mol_type = other DNA
tgtttttcgaagtacttaaa

SEQ ID NO: 31059 - DNA, 20 bp, synthetic construct
  misc_feature 1..20: note = chemically synthesized
  source 1..20: mol_type = other DNA
gaagtacttaaagggagtgg

SEQ ID NO: 31060 - DNA, 20 bp, synthetic construct
  misc_feature 1..20: note = chemically synthesized
  source 1..20: mol_type = other DNA
gaggggtagaaagcatataa

SEQ ID NO: 31061 - DNA, 20 bp, synthetic construct
  misc_feature 1..20: note = chemically synthesized
  source 1..20: mol_type = other DNA
gcaaacatatccttatgcca

SEQ ID NO: 31062 - DNA, 20 bp, synthetic construct
  misc_feature 1..20: note = chemically synthesized
  source 1..20: mol_type = other DNA
gtaaatcagtaaaccaggca

SEQ ID NO: 31063 - DNA, 20 bp, synthetic construct
  misc_feature 1..20: note = chemically synthesized
  source 1..20: mol_type = other DNA
ggaaaccaaatcataatacc

SEQ ID NO: 31064 - DNA, 20 bp, synthetic construct
  misc_feature 1..20: note = chemically synthesized
  source 1..20: mol_type = other DNA
ttttaaaaaactggaaatga

SEQ ID NO: 31065 - DNA, 20 bp, synthetic construct
  misc_feature 1..20: note = chemically synthesized
  source 1..20: mol_type = other DNA
gaagaacttctgtgattact

SEQ ID NO: 31066 - DNA, 20 bp, synthetic construct
  misc_feature 1..20: note = chemically synthesized
  source 1..20: mol_type = other DNA
taattagattcgattgtgcg

SEQ ID NO: 31067 - DNA, 20 bp, synthetic construct
  misc_feature 1..20: note = chemically synthesized
  source 1..20: mol_type = other DNA
tcgattgtgcggtgggtgtg

SEQ ID NO: 31068 - DNA, 20 bp, synthetic construct
  misc_feature 1..20: note = chemically synthesized
  source 1..20: mol_type = other DNA
tggggggaggggcagaggca

SEQ ID NO: 31069 - DNA, 20 bp, synthetic construct
  misc_feature 1..20: note = chemically synthesized
  source 1..20: mol_type = other DNA
ggggcagaggcagggagtgc

SEQ ID NO: 31070 - DNA, 20 bp, synthetic construct
  misc_feature 1..20: note = chemically synthesized
  source 1..20: mol_type = other DNA
tgctggggtgaggcgtgagg

SEQ ID NO: 31071 - DNA, 20 bp, synthetic construct
  misc_feature 1..20: note = chemically synthesized
  source 1..20: mol_type = other DNA
ggcagcttccaacgctggtg

SEQ ID NO: 31072 - DNA, 20 bp, synthetic construct
  misc_feature 1..20: note = chemically synthesized
  source 1..20: mol_type = other DNA
atgctcatggtgccctagtc

SEQ ID NO: 31073 - DNA, 20 bp, synthetic construct
  misc_feature 1..20: note = chemically synthesized
  source 1..20: mol_type = other DNA
ttaggtgggcttatttccca

SEQ ID NO: 31074 - DNA, 20 bp, synthetic construct
  misc_feature 1..20: note = chemically synthesized
  source 1..20: mol_type = other DNA
cttatttcccactgggtctg

SEQ ID NO: 31075 - DNA, 20 bp, synthetic construct
  misc_feature 1..20: note = chemically synthesized
  source 1..20: mol_type = other DNA
ttcatttgtcctttgagggg

SEQ ID NO: 31076 - DNA, 20 bp, synthetic construct
  misc_feature 1..20: note = chemically synthesized
  source 1..20: mol_type = other DNA
gaacagctgcggccggcaga

SEQ ID NO: 31077 - DNA, 20 bp, synthetic construct
  misc_feature 1..20: note = chemically synthesized
  source 1..20: mol_type = other DNA
taggaagagggaagcagcct

SEQ ID NO: 31078 - DNA, 20 bp, synthetic construct
  misc_feature 1..20: note = chemically synthesized
  source 1..20: mol_type = other DNA
ttcccgaccacatggaaagg

SEQ ID NO: 31079 - DNA, 20 bp, synthetic construct
  misc_feature 1..20: note = chemically synthesized
  source 1..20: mol_type = other DNA
aagacgttatggaccctgcc

SEQ ID NO: 31080 - DNA, 20 bp, synthetic construct
  misc_feature 1..20: note = chemically synthesized
  source 1..20: mol_type = other DNA
atggaccctgccttgggtac

SEQ ID NO: 31081 - DNA, 20 bp, synthetic construct
  misc_feature 1..20: note = chemically synthesized
  source 1..20: mol_type = other DNA
ggcactgccaaaacacgctc

SEQ ID NO: 31082 - DNA, 20 bp, synthetic construct
  misc_feature 1..20: note = chemically synthesized
  source 1..20: mol_type = other DNA
gtttaatggtagtggttggt

SEQ ID NO: 31083 - DNA, 20 bp, synthetic construct
  misc_feature 1..20: note = chemically synthesized
  source 1..20: mol_type = other DNA
aaaagccctggccaaggctt

SEQ ID NO: 31084 - DNA, 20 bp, synthetic construct
  misc_feature 1..20: note = chemically synthesized
  source 1..20: mol_type = other DNA
gcttgcatttaattgcaagt

SEQ ID NO: 31085 - DNA, 20 bp, synthetic construct
  misc_feature 1..20: note = chemically synthesized
  source 1..20: mol_type = other DNA
ttgcaagtcagggtaaatta

SEQ ID NO: 31086 - DNA, 20 bp, synthetic construct
  misc_feature 1..20: note = chemically synthesized
  source 1..20: mol_type = other DNA
ctggtttagtgttagtgtga

SEQ ID NO: 31087 - DNA, 20 bp, synthetic construct
  misc_feature 1..20: note = chemically synthesized
  source 1..20: mol_type = other DNA
gagagggtcgaaaagattct

SEQ ID NO: 31088 - DNA, 20 bp, synthetic construct
  misc_feature 1..20: note = chemically synthesized
  source 1..20: mol_type = other DNA
aaaagattctgtgggtccaa

SEQ ID NO: 31089 - DNA, 20 bp, synthetic construct
  misc_feature 1..20: note = chemically synthesized
  source 1..20: mol_type = other DNA
gggaggagaaaaacctggac

SEQ ID NO: 31090 - DNA, 20 bp, synthetic construct
  misc_feature 1..20: note = chemically synthesized
  source 1..20: mol_type = other DNA
gagaaaaacctggaccggag

SEQ ID NO: 31091 - DNA, 20 bp, synthetic construct
  misc_feature 1..20: note = chemically synthesized
  source 1..20: mol_type = other DNA
agccagactggtttagcaga

SEQ ID NO: 31092 - DNA, 20 bp, synthetic construct
  misc_feature 1..20: note = chemically synthesized
  source 1..20: mol_type = other DNA
gaatgatagattgttttgtc

SEQ ID NO: 31093 - DNA, 20 bp, synthetic construct
  misc_feature 1..20: note = chemically synthesized
  source 1..20: mol_type = other DNA
gattgttttgtcaggggtcc

SEQ ID NO: 31094 - DNA, 20 bp, synthetic construct
  misc_feature 1..20: note = chemically synthesized
  source 1..20: mol_type = other DNA
cttgaagcactttgtttatc

SEQ ID NO: 31095 - DNA, 20 bp, synthetic construct
  misc_feature 1..20: note = chemically synthesized
  source 1..20: mol_type = other DNA
gagaacagagaagactcagg

SEQ ID NO: 31096 - DNA, 20 bp, synthetic construct
  misc_feature 1..20: note = chemically synthesized
  source 1..20: mol_type = other DNA
ccagtcttttggctacatat

SEQ ID NO: 31097 - DNA, 20 bp, synthetic construct
  misc_feature 1..20: note = chemically synthesized
  source 1..20: mol_type = other DNA
taacccgagggccagatggg

SEQ ID NO: 31098 - DNA, 20 bp, synthetic construct
  misc_feature 1..20: note = chemically synthesized
  source 1..20: mol_type = other DNA
tgtgagagctcgtggtgcag

SEQ ID NO: 31099 - DNA, 20 bp, synthetic construct
  misc_feature 1..20: note = chemically synthesized
  source 1..20: mol_type = other DNA
ttaacttgttggaagggcct

SEQ ID NO: 31100 - DNA, 20 bp, synthetic construct
  misc_feature 1..20: note = chemically synthesized
  source 1..20: mol_type = other DNA
aggaaggctcaagaaaggcc

SEQ ID NO: 31101 - DNA, 20 bp, synthetic construct
  misc_feature 1..20: note = chemically synthesized
  source 1..20: mol_type = other DNA
gtgacattatgcattcatat

SEQ ID NO: 31102 - DNA, 20 bp, synthetic construct
  misc_feature 1..20: note = chemically synthesized
  source 1..20: mol_type = other DNA
atatatgaatgttggcaagc

SEQ ID NO: 31103 - DNA, 20 bp, synthetic construct
  misc_feature 1..20: note = chemically synthesized
  source 1..20: mol_type = other DNA
tgccacaagtggcgaagtaa

SEQ ID NO: 31104 - DNA, 20 bp, synthetic construct
  misc_feature 1..20: note = chemically synthesized
  source 1..20: mol_type = other DNA
aggagctgctggggctaaag

SEQ ID NO: 31105 - DNA, 20 bp, synthetic construct
  misc_feature 1..20: note = chemically synthesized
  source 1..20: mol_type = other DNA
tggggctaaagctgggttca

SEQ ID NO: 31106 - DNA, 20 bp, synthetic construct
  misc_feature 1..20: note = chemically synthesized
  source 1..20: mol_type = other DNA
gctaggcctcataagggagg

SEQ ID NO: 31107 - DNA, 20 bp, synthetic construct
  misc_feature 1..20: note = chemically synthesized
  source 1..20: mol_type = other DNA
ctgggaaaatttgggggcct

SEQ ID NO: 31108 - DNA, 20 bp, synthetic construct
  misc_feature 1..20: note = chemically synthesized
  source 1..20: mol_type = other DNA
ggggcctctgggtttatccc

SEQ ID NO: 31109 - DNA, 20 bp, synthetic construct
  misc_feature 1..20: note = chemically synthesized
  source 1..20: mol_type = other DNA
gaaataaaatggtttaggct

SEQ ID NO: 31110 - DNA, 20 bp, synthetic construct
  misc_feature 1..20: note = chemically synthesized
  source 1..20: mol_type = other DNA
tcctcaatctgtaaagtggg

SEQ ID NO: 31111 - DNA, 20 bp, synthetic construct
  misc_feature 1..20: note = chemically synthesized
  source 1..20: mol_type = other DNA
ggcttggaactgtgtgctcc

SEQ ID NO: 31112 - DNA, 20 bp, synthetic construct
  misc_feature 1..20: note = chemically synthesized
  source 1..20: mol_type = other DNA
tcaaagtagttcccccatta

SEQ ID NO: 31113 - DNA, 20 bp, synthetic construct
  misc_feature 1..20: note = chemically synthesized
  source 1..20: mol_type = other DNA
ccattatggggtgagcaggt

SEQ ID NO: 31114 - DNA, 20 bp, synthetic construct
  misc_feature 1..20: note = chemically synthesized
  source 1..20: mol_type = other DNA
gagagaagagcagggcaggt

SEQ ID NO: 31115 - DNA, 20 bp, synthetic construct
  misc_feature 1..20: note = chemically synthesized
  source 1..20: mol_type = other DNA
aggtgggggtctaaagagct

SEQ ID NO: 31116 - DNA, 20 bp, synthetic construct
  misc_feature 1..20: note = chemically synthesized
  source 1..20: mol_type = other DNA
tttctggtggcagctccctc

SEQ ID NO: 31117 - DNA, 20 bp, synthetic construct
  misc_feature 1..20: note = chemically synthesized
  source 1..20: mol_type = other DNA
gtggcagctccctcgtgggt

SEQ ID NO: 31118 - DNA, 20 bp, synthetic construct
  misc_feature 1..20: note = chemically synthesized
  source 1..20: mol_type = other DNA
tacgagaggcttgtgcctgc

SEQ ID NO: 31119 - DNA, 20 bp, synthetic construct
  misc_feature 1..20: note = chemically synthesized
  source 1..20: mol_type = other DNA
gggtgtgtgacacagttact

SEQ ID NO: 31120 - DNA, 20 bp, synthetic construct
  misc_feature 1..20: note = chemically synthesized
  source 1..20: mol_type = other DNA
tgttactgctagctggttgg

SEQ ID NO: 31121 - DNA, 20 bp, synthetic construct
  misc_feature 1..20: note = chemically synthesized
  source 1..20: mol_type = other DNA
agctggttgggagagtctga

SEQ ID NO: 31122 - DNA, 20 bp, synthetic construct
  misc_feature 1..20: note = chemically synthesized
  source 1..20: mol_type = other DNA
actcaaggtcccttacctca

SEQ ID NO: 31123 - DNA, 20 bp, synthetic construct
  misc_feature 1..20: note = chemically synthesized
  source 1..20: mol_type = other DNA
cgctccgggggctgcacctc

SEQ ID NO: 31124 - DNA, 20 bp, synthetic construct
  misc_feature 1..20: note = chemically synthesized
  source 1..20: mol_type = other DNA
catttggtagaggaggaaat

SEQ ID NO: 31125 - DNA, 20 bp, synthetic construct
  misc_feature 1..20: note = chemically synthesized
  source 1..20: mol_type = other DNA
ggaggaaattggggttcatc

SEQ ID NO: 31126 - DNA, 20 bp, synthetic construct
  misc_feature 1..20: note = chemically synthesized
  source 1..20: mol_type = other DNA
aagggttaaatgacttccct

SEQ ID NO: 31127 - DNA, 20 bp, synthetic construct
  misc_feature 1..20: note = chemically synthesized
  source 1..20: mol_type = other DNA
gctggacagttgtccctccc

SEQ ID NO: 31128 - DNA, 20 bp, synthetic construct
  misc_feature 1..20: note = chemically synthesized
  source 1..20: mol_type = other DNA
ttcaatcttctgggaaagag

SEQ ID NO: 31129 - DNA, 20 bp, synthetic construct
  misc_feature 1..20: note = chemically synthesized
  source 1..20: mol_type = other DNA
ttgggaaaagttgcaatgta

SEQ ID NO: 31130 - DNA, 20 bp, synthetic construct
  misc_feature 1..20: note = chemically synthesized
  source 1..20: mol_type = other DNA
tagtcatttccccatctgtc

SEQ ID NO: 31131 - DNA, 20 bp, synthetic construct
  misc_feature 1..20: note = chemically synthesized
  source 1..20: mol_type = other DNA
gaatgagcctgaaatcaagt

SEQ ID NO: 31132 - DNA, 20 bp, synthetic construct
  misc_feature 1..20: note = chemically synthesized
  source 1..20: mol_type = other DNA
ggtcaggagactgcagtggg

SEQ ID NO: 31133 - DNA, 20 bp, synthetic construct
  misc_feature 1..20: note = chemically synthesized
  source 1..20: mol_type = other DNA
gtctctgtggcatttacttc

SEQ ID NO: 31134 - DNA, 20 bp, synthetic construct
  misc_feature 1..20: note = chemically synthesized
  source 1..20: mol_type = other DNA
tcgtaccttcaaaggctggg

SEQ ID NO: 31135 - DNA, 20 bp, synthetic construct
  misc_feature 1..20: note = chemically synthesized
  source 1..20: mol_type = other DNA
cttcaaaggctggggagaat

SEQ ID NO: 31136 - DNA, 20 bp, synthetic construct
  misc_feature 1..20: note = chemically synthesized
  source 1..20: mol_type = other DNA
attatacagggagggagaga

SEQ ID NO: 31137 - DNA, 20 bp, synthetic construct
  misc_feature 1..20: note = chemically synthesized
  source 1..20: mol_type = other DNA
cagggagggagagactgagt

SEQ ID NO: 31138 - DNA, 20 bp, synthetic construct
  misc_feature 1..20: note = chemically synthesized
  source 1..20: mol_type = other DNA
gagggagagactgagtgtga

SEQ ID NO: 31139 - DNA, 20 bp, synthetic construct
  misc_feature 1..20: note = chemically synthesized
  source 1..20: mol_type = other DNA
cagtggtgtttcttaggacg

SEQ ID NO: 31140 - DNA, 20 bp, synthetic construct
  misc_feature 1..20: note = chemically synthesized
  source 1..20: mol_type = other DNA
tcttaggacgatgggttctg

SEQ ID NO: 31141 - DNA, 20 bp, synthetic construct
  misc_feature 1..20: note = chemically synthesized
  source 1..20: mol_type = other DNA
ctggaaacttgagggaagtt

SEQ ID NO: 31142 - DNA, 20 bp, synthetic construct
  misc_feature 1..20: note = chemically synthesized
  source 1..20: mol_type = other DNA
agacctgaggttcgttgcag

SEQ ID NO: 31143 - DNA, 20 bp, synthetic construct
  misc_feature 1..20: note = chemically synthesized
  source 1..20: mol_type = other DNA
ctaacatagacctccactga

SEQ ID NO: 31144 - DNA, 20 bp, synthetic construct
  misc_feature 1..20: note = chemically synthesized
  source 1..20: mol_type = other DNA
gacctccactgagagaattt

SEQ ID NO: 31145 - DNA, 20 bp, synthetic construct
  misc_feature 1..20: note = chemically synthesized
  source 1..20: mol_type = other DNA
tcatgcggaggccccgtggg

SEQ ID NO: 31146 - DNA, 20 bp, synthetic construct
  misc_feature 1..20: note = chemically synthesized
  source 1..20: mol_type = other DNA
aggccccgtgggaggagtgg

SEQ ID NO: 31147 - DNA, 20 bp, synthetic construct
  misc_feature 1..20: note = chemically synthesized
  source 1..20: mol_type = other DNA
aagagttggcctcagcactg

SEQ ID NO: 31148 - DNA, 20 bp, synthetic construct
  misc_feature 1..20: note = chemically synthesized
  source 1..20: mol_type = other DNA
ggcctcagcactggcgagta

SEQ ID NO: 31149 - DNA, 20 bp, synthetic construct
  misc_feature 1..20: note = chemically synthesized
  source 1..20: mol_type = other DNA
ggtcacatccaggttgtctt

SEQ ID NO: 31150 - DNA, 20 bp, synthetic construct
  misc_feature 1..20: note = chemically synthesized
  source 1..20: mol_type = other DNA
gttgtcttctgagtttgagg

SEQ ID NO: 31151 - DNA, 20 bp, synthetic construct
  misc_feature 1..20: note = chemically synthesized
  source 1..20: mol_type = other DNA
gtgggatggaggtggctgct

SEQ ID NO: 31152 - DNA, 20 bp, synthetic construct
  misc_feature 1..20: note = chemically synthesized
  source 1..20: mol_type = other DNA
ggtggctgctgagaatccat

SEQ ID NO: 31153 - DNA, 20 bp, synthetic construct
  misc_feature 1..20: note = chemically synthesized
  source 1..20: mol_type = other DNA
ttcattgtctctacataccc

SEQ ID NO: 31154 - DNA, 20 bp, synthetic construct
  misc_feature 1..20: note = chemically synthesized
  source 1..20: mol_type = other DNA
tctctacatacccttgggtc

SEQ ID NO: 31155 - DNA, 20 bp, synthetic construct
  misc_feature 1..20: note = chemically synthesized
  source 1..20: mol_type = other DNA
gaagctcttagttttatttg

SEQ ID NO: 31156 - DNA, 20 bp, synthetic construct
  misc_feature 1..20: note = chemically synthesized
  source 1..20: mol_type = other DNA
tgacccttcaggccaagtgc

SEQ ID NO: 31157 - DNA, 20 bp, synthetic construct
  misc_feature 1..20: note = chemically synthesized
  source 1..20: mol_type = other DNA
tggcaaagctacaataaata

SEQ ID NO: 31158 - DNA, 20 bp, synthetic construct
  misc_feature 1..20: note = chemically synthesized
  source 1..20: mol_type = other DNA
gtggactggttaagaggctg

SEQ ID NO: 31159 - DNA, 20 bp, synthetic construct
  misc_feature 1..20: note = chemically synthesized
  source 1..20: mol_type = other DNA
ttaagaggctgttggatgag

SEQ ID NO: 31160 - DNA, 20 bp, synthetic construct
  misc_feature 1..20: note = chemically synthesized
  source 1..20: mol_type = other DNA
tgctaagtagttccccgctt

SEQ ID NO: 31161 - DNA, 20 bp, synthetic construct
  misc_feature 1..20: note = chemically synthesized
  source 1..20: mol_type = other DNA
gctgggcagagattagcgca

SEQ ID NO: 31162 - DNA, 20 bp, synthetic construct
  misc_feature 1..20: note = chemically synthesized
  source 1..20: mol_type = other DNA
agggagttgtgtgtgtcaca

SEQ ID NO: 31163 - DNA, 20 bp, synthetic construct
  misc_feature 1..20: note = chemically synthesized
  source 1..20: mol_type = other DNA
actgctgtctgcgatgcaga

SEQ ID NO: 31164 - DNA, 20 bp, synthetic construct
  misc_feature 1..20: note = chemically synthesized
  source 1..20: mol_type = other DNA
tgtacacttcccaaatggta

SEQ ID NO: 31165 - DNA, 20 bp, synthetic construct
  misc_feature 1..20: note = chemically synthesized
  source 1..20: mol_type = other DNA
gaacacatcatcccaaaata

SEQ ID NO: 31166 - DNA, 20 bp, synthetic construct
  misc_feature 1..20: note = chemically synthesized
  source 1..20: mol_type = other DNA
tcatcccaaaatatgggatt

SEQ ID NO: 31167 - DNA, 20 bp, synthetic construct
  misc_feature 1..20: note = chemically synthesized
  source 1..20: mol_type = other DNA
tttgatcaaatcaccagttt

SEQ ID NO: 31168 - DNA, 20 bp, synthetic construct
  misc_feature 1..20: note = chemically synthesized
  source 1..20: mol_type = other DNA
atctagattttgcagaagtt

SEQ ID NO: 31169 - DNA, 20 bp, synthetic construct
  misc_feature 1..20: note = chemically synthesized
  source 1..20: mol_type = other DNA
actatttttgattaccaaac

SEQ ID NO: 31170 - DNA, 20 bp, synthetic construct
  misc_feature 1..20: note = chemically synthesized
  source 1..20: mol_type = other DNA
tgatctgaaaaccaggacac

SEQ ID NO: 31171 - DNA, 20 bp, synthetic construct
  misc_feature 1..20: note = chemically synthesized
  source 1..20: mol_type = other DNA
ggtaaaatagatagtttgga

SEQ ID NO: 31172 - DNA, 20 bp, synthetic construct
  misc_feature 1..20: note = chemically synthesized
  source 1..20: mol_type = other DNA
aaatagatagtttggactgg

SEQ ID NO: 31173 - DNA, 20 bp, synthetic construct
  misc_feature 1..20: note = chemically synthesized
  source 1..20: mol_type = other DNA
gttttctccctgctattttt

SEQ ID NO: 31174 - DNA, 20 bp, synthetic construct
  misc_feature 1..20: note = chemically synthesized
  source 1..20: mol_type = other DNA
tattttttggaatctagttg

SEQ ID NO: 31175 - DNA, 20 bp, synthetic construct
  misc_feature 1..20: note = chemically synthesized
  source 1..20: mol_type = other DNA
gggctcacctgcaaagacag

SEQ ID NO: 31176 - DNA, 20 bp, synthetic construct
  misc_feature 1..20: note = chemically synthesized
  source 1..20: mol_type = other DNA
gctatggtggagattaaggc

SEQ ID NO: 31177 - DNA, 20 bp, synthetic construct
  misc_feature 1..20: note = chemically synthesized
  source 1..20: mol_type = other DNA
aaaattgaagtgcagtataa

SEQ ID NO: 31178 - DNA, 20 bp, synthetic construct
  misc_feature 1..20: note = chemically synthesized
  source 1..20: mol_type = other DNA
gttttttttgaaaaactcca

SEQ ID NO: 31179 - DNA, 20 bp, synthetic construct
  misc_feature 1..20: note = chemically synthesized
  source 1..20: mol_type = other DNA
cgtttttgaaaaagaaatag

SEQ ID NO: 31180 - DNA, 20 bp, synthetic construct
  misc_feature 1..20: note = chemically synthesized
  source 1..20: mol_type = other DNA
ttttaaattcaattaactga

SEQ ID NO: 31181 - DNA, 20 bp, synthetic construct
  misc_feature 1..20: note = chemically synthesized
  source 1..20: mol_type = other DNA
atggacatagcctacatatg

SEQ ID NO: 31182 - DNA, 20 bp, synthetic construct
  misc_feature 1..20: note = chemically synthesized
  source 1..20: mol_type = other DNA
gcctacatatgctgagtccc

SEQ ID NO: 31183 - DNA, 20 bp, synthetic construct
  misc_feature 1..20: note = chemically synthesized
  source 1..20: mol_type = other DNA
tatgctgagtccctggagtt

SEQ ID NO: 31184 - DNA, 20 bp, synthetic construct
  misc_feature 1..20: note = chemically synthesized
  source 1..20: mol_type = other DNA
gtttaccattggcttttagc

SEQ ID NO: 31185 - DNA, 20 bp, synthetic construct
  misc_feature 1..20: note = chemically synthesized
  source 1..20: mol_type = other DNA
aataccatttatatgtggca

SEQ ID NO: 31186 - DNA, 20 bp, synthetic construct
  misc_feature 1..20: note = chemically synthesized
  source 1..20: mol_type = other DNA
agggcattcaaagttatcct

SEQ ID NO: 31187 - DNA, 20 bp, synthetic construct
  misc_feature 1..20: note = chemically synthesized
  source 1..20: mol_type = other DNA
cttttattatcccatgtgct

SEQ ID NO: 31188 - DNA, 20 bp, synthetic construct
  misc_feature 1..20: note = chemically synthesized
  source 1..20: mol_type = other DNA
gtgctcagagtaaggggcaa

SEQ ID NO: 31189 - DNA, 20 bp, synthetic construct
  misc_feature 1..20: note = chemically synthesized
  source 1..20: mol_type = other DNA
tctttaatttataatgtttt

SEQ ID NO: 31190 - DNA, 20 bp, synthetic construct
  misc_feature 1..20: note = chemically synthesized
  source 1..20: mol_type = other DNA
acccaaaagcaaataacagg

SEQ ID NO: 31191 - DNA, 20 bp, synthetic construct
  misc_feature 1..20: note = chemically synthesized
  source 1..20: mol_type = other DNA
aaaagcaaataacaggccga

SEQ ID NO: 31192 - DNA, 20 bp, synthetic construct
  misc_feature 1..20: note = chemically synthesized
  source 1..20: mol_type = other DNA
atgtattcagacatgaagtt

SEQ ID NO: 31193 - DNA, 20 bp, synthetic construct
  misc_feature 1..20: note = chemically synthesized
  source 1..20: mol_type = other DNA
attttgtttgcgaaatggga

SEQ ID NO: 31194 - DNA, 20 bp, synthetic construct
  misc_feature 1..20: note = chemically synthesized
  source 1..20: mol_type = other DNA
tcacactagttcctgtggtc

SEQ ID NO: 31195 - DNA, 20 bp, synthetic construct
  misc_feature 1..20: note = chemically synthesized
  source 1..20: mol_type = other DNA
tctctggctgaagtttaaga

SEQ ID NO: 31196 - DNA, 20 bp, synthetic construct
  misc_feature 1..20: note = chemically synthesized
  source 1..20: mol_type = other DNA
tttggcttaaataaattatt

SEQ ID NO: 31197 - DNA, 20 bp, synthetic construct
  misc_feature 1..20: note = chemically synthesized
  source 1..20: mol_type = other DNA
ttctcaagttttgcctggca

SEQ ID NO: 31198 - DNA, 20 bp, synthetic construct
  misc_feature 1..20: note = chemically synthesized
  source 1..20: mol_type = other DNA
caatgaatgattttgcttac

SEQ ID NO: 31199 - DNA, 20 bp, synthetic construct
  misc_feature 1..20: note = chemically synthesized
  source 1..20: mol_type = other DNA
atacatacgtatatgcatgt

SEQ ID NO: 31200 - DNA, 20 bp, synthetic construct
  misc_feature 1..20: note = chemically synthesized
  source 1..20: mol_type = other DNA
tgtgtagaaagggagagaga

SEQ ID NO: 31201 - DNA, 20 bp, synthetic construct
  misc_feature 1..20: note = chemically synthesized
  source 1..20: mol_type = other DNA
agagagaataggaaagtctt

SEQ ID NO: 31202 - DNA, 20 bp, synthetic construct
  misc_feature 1..20: note = chemically synthesized
  source 1..20: mol_type = other DNA
agtctgttgttcacatagcg

SEQ ID NO: 31203 - DNA, 20 bp, synthetic construct
  misc_feature 1..20: note = chemically synthesized
  source 1..20: mol_type = other DNA
tgttcacatagcgctggatt

SEQ ID NO: 31204 - DNA, 20 bp, synthetic construct
  misc_feature 1..20: note = chemically synthesized
  source 1..20: mol_type = other DNA
taggagcaacagtcccaagc

SEQ ID NO: 31205 - DNA, 20 bp, synthetic construct
  misc_feature 1..20: note = chemically synthesized
  source 1..20: mol_type = other DNA
aacagtcccaagcaggaatc

SEQ ID NO: 31206 - DNA, 20 bp, synthetic construct
  misc_feature 1..20: note = chemically synthesized
  source 1..20: mol_type = other DNA
ggctgtcctttgtgcctccc

SEQ ID NO: 31207 - DNA, 20 bp, synthetic construct
  misc_feature 1..20: note = chemically synthesized
  source 1..20: mol_type = other DNA
cccttctttacggttctgcc

SEQ ID NO: 31208 - DNA, 20 bp, synthetic construct
  misc_feature 1..20: note = chemically synthesized
  source 1..20: mol_type = other DNA
gtccaacaagcttttaccca

SEQ ID NO: 31209 - DNA, 20 bp, synthetic construct
  misc_feature 1..20: note = chemically synthesized
  source 1..20: mol_type = other DNA
gtatatccaagacatgctct

SEQ ID NO: 31210 - DNA, 20 bp, synthetic construct
  misc_feature 1..20: note = chemically synthesized
  source 1..20: mol_type = other DNA
atccaagacatgctctgtga

SEQ ID NO: 31211 - DNA, 20 bp, synthetic construct
  misc_feature 1..20: note = chemically synthesized
  source 1..20: mol_type = other DNA
aacactttcttccaagacaa

SEQ ID NO: 31212 - DNA, 20 bp, synthetic construct
  misc_feature 1..20: note = chemically synthesized
  source 1..20: mol_type = other DNA
gaattccagttctgaacact

SEQ ID NO: 31213 - DNA, 20 bp, synthetic construct
  misc_feature 1..20: note = chemically synthesized
  source 1..20: mol_type = other DNA
actgggagtgcacctgcttg

SEQ ID NO: 31214 - DNA, 20 bp, synthetic construct
  misc_feature 1..20: note = chemically synthesized
  source 1..20: mol_type = other DNA
tggtgatgggccacatggtg

SEQ ID NO: 31215 - DNA, 20 bp, synthetic construct
  misc_feature 1..20: note = chemically synthesized
  source 1..20: mol_type = other DNA
gactgtcacagagactctca

SEQ ID NO: 31216 - DNA, 20 bp, synthetic construct
  misc_feature 1..20: note = chemically synthesized
  source 1..20: mol_type = other DNA
tttacacaaggcccttttta

SEQ ID NO: 31217 - DNA, 20 bp, synthetic construct
  misc_feature 1..20: note = chemically synthesized
  source 1..20: mol_type = other DNA
cagtcttgaacctcactgga

SEQ ID NO: 31218 - DNA, 20 bp, synthetic construct
  misc_feature 1..20: note = chemically synthesized
  source 1..20: mol_type = other DNA
ccagatggaaagaagtattt

SEQ ID NO: 31219 - DNA, 20 bp, synthetic construct
  misc_feature 1..20: note = chemically synthesized
  source 1..20: mol_type = other DNA
ttgtatttaaaagaaaaaaa

SEQ ID NO: 31220 - DNA, 20 bp, synthetic construct
  misc_feature 1..20: note = chemically synthesized
  source 1..20: mol_type = other DNA
tgatgaaatgatatgacgtc

SEQ ID NO: 31221 - DNA, 20 bp, synthetic construct
  misc_feature 1..20: note = chemically synthesized
  source 1..20: mol_type = other DNA
aaaatgggctagggaggcga

SEQ ID NO: 31222 - DNA, 20 bp, synthetic construct
  misc_feature 1..20: note = chemically synthesized
  source 1..20: mol_type = other DNA
gcgatagggttacagaagac

SEQ ID NO: 31223 - DNA, 20 bp, synthetic construct
  misc_feature 1..20: note = chemically synthesized
  source 1..20: mol_type = other DNA
gtcggtgttgtttcttcacc

SEQ ID NO: 31224 - DNA, 20 bp, synthetic construct
  misc_feature 1..20: note = chemically synthesized
  source 1..20: mol_type = other DNA
atctgggaagttcattgtga

SEQ ID NO: 31225 - DNA, 20 bp, synthetic construct
  misc_feature 1..20: note = chemically synthesized
  source 1..20: mol_type = other DNA
tcattgtgaaggggtcattt

SEQ ID NO: 31226 - DNA, 20 bp, synthetic construct
  misc_feature 1..20: note = chemically synthesized
  source 1..20: mol_type = other DNA
gtctttttcagtgcatgagg

SEQ ID NO: 31227 - DNA, 20 bp, synthetic construct
  misc_feature 1..20: note = chemically synthesized
  source 1..20: mol_type = other DNA
gagtcagatgtggcgtttgc

SEQ ID NO: 31228 - DNA, 20 bp, synthetic construct
  misc_feature 1..20: note = chemically synthesized
  source 1..20: mol_type = other DNA
gtgcctctgtgcctcgtggt

SEQ ID NO: 31229 - DNA, 20 bp, synthetic construct
  misc_feature 1..20: note = chemically synthesized
  source 1..20: mol_type = other DNA
aaggggacaaagaacacgtc

SEQ ID NO: 31230 - DNA, 20 bp, synthetic construct
  misc_feature 1..20: note = chemically synthesized
  source 1..20: mol_type = other DNA
agatggaagatgaaagggag

SEQ ID NO: 31231 - DNA, 20 bp, synthetic construct
  misc_feature 1..20: note = chemically synthesized
  source 1..20: mol_type = other DNA
gcaattgcagagctggaaag

SEQ ID NO: 31232 - DNA, 20 bp, synthetic construct
  misc_feature 1..20: note = chemically synthesized
  source 1..20: mol_type = other DNA
acccaggcccaggcccaggc

SEQ ID NO: 31233 - DNA, 20 bp, synthetic construct
  misc_feature 1..20: note = chemically synthesized
  source 1..20: mol_type = other DNA
caagtgtcactcagttatct

SEQ ID NO: 31234 - DNA, 20 bp, synthetic construct
  misc_feature 1..20: note = chemically synthesized
  source 1..20: mol_type = other DNA
gccatctaagtgcctgatac

SEQ ID NO: 31235 - DNA, 20 bp, synthetic construct
  misc_feature 1..20: note = chemically synthesized
  source 1..20: mol_type = other DNA
aaatgtaacctggcaccctc

SEQ ID NO: 31236 - DNA, 20 bp, synthetic construct
  misc_feature 1..20: note = chemically synthesized
  source 1..20: mol_type = other DNA
tggcaccctcaaggatttgt

SEQ ID NO: 31237 - DNA, 20 bp, synthetic construct
  misc_feature 1..20: note = chemically synthesized
  source 1..20: mol_type = other DNA
gtgtgtgtgtgtgtgtgtgt

SEQ ID NO: 31238 - DNA, 20 bp, synthetic construct
  misc_feature 1..20: note = chemically synthesized
  source 1..20: mol_type = other DNA
ccagacttggttttatcatg

SEQ ID NO: 31239 - DNA, 20 bp, synthetic construct
  misc_feature 1..20: note = chemically synthesized
  source 1..20: mol_type = other DNA
acaaaggttgtgtacagagc

SEQ ID NO: 31240 - DNA, 20 bp, synthetic construct
  misc_feature 1..20: note = chemically synthesized
  source 1..20: mol_type = other DNA
ggaacccactggagaagggc

SEQ ID NO: 31241 - DNA, 20 bp, synthetic construct
  misc_feature 1..20: note = chemically synthesized
  source 1..20: mol_type = other DNA
ttcggttggtggctgatctg

SEQ ID NO: 31242 - DNA, 20 bp, synthetic construct
  misc_feature 1..20: note = chemically synthesized
  source 1..20: mol_type = other DNA
gatctgatgggtggtatagg

SEQ ID NO: 31243 - DNA, 20 bp, synthetic construct
  misc_feature 1..20: note = chemically synthesized
  source 1..20: mol_type = other DNA
gattccgtaggcgaccaaca

SEQ ID NO: 31244 - DNA, 20 bp, synthetic construct
  misc_feature 1..20: note = chemically synthesized
  source 1..20: mol_type = other DNA
gtaggcgaccaacatggggt

SEQ ID NO: 31245 - DNA, 20 bp, synthetic construct
  misc_feature 1..20: note = chemically synthesized
  source 1..20: mol_type = other DNA
gtgcttctgtggttgtgcct

SEQ ID NO: 31246 - DNA, 20 bp, synthetic construct
  misc_feature 1..20: note = chemically synthesized
  source 1..20: mol_type = other DNA
ggaccttatgcctcatagtg

SEQ ID NO: 31247 - DNA, 20 bp, synthetic construct
  misc_feature 1..20: note = chemically synthesized
  source 1..20: mol_type = other DNA
ttttcctcagaaaactctgt

SEQ ID NO: 31248 - DNA, 20 bp, synthetic construct
  misc_feature 1..20: note = chemically synthesized
  source 1..20: mol_type = other DNA
taatttctccttcttataaa

SEQ ID NO: 31249 - DNA, 20 bp, synthetic construct
  misc_feature 1..20: note = chemically synthesized
  source 1..20: mol_type = other DNA
ctccttcttataaacggaat

SEQ ID NO: 31250 - DNA, 20 bp, synthetic construct
  misc_feature 1..20: note = chemically synthesized
  source 1..20: mol_type = other DNA
atgtgtacattatcccaccg

SEQ ID NO: 31251 - DNA, 20 bp, synthetic construct
  misc_feature 1..20: note = chemically synthesized
  source 1..20: mol_type = other DNA
gatttcaggtcctcagactc

SEQ ID NO: 31252 - DNA, 20 bp, synthetic construct
  misc_feature 1..20: note = chemically synthesized
  source 1..20: mol_type = other DNA
aaaataaacaaaacctgcag

SEQ ID NO: 31253 - DNA, 20 bp, synthetic construct
  misc_feature 1..20: note = chemically synthesized
  source 1..20: mol_type = other DNA
cctgcagaagagtttattgt

SEQ ID NO: 31254 - DNA, 20 bp, synthetic construct
  misc_feature 1..20: note = chemically synthesized
  source 1..20: mol_type = other DNA
attctattatctttggcttt

SEQ ID NO: 31255 - DNA, 20 bp, synthetic construct
  misc_feature 1..20: note = chemically synthesized
  source 1..20: mol_type = other DNA
ggcataaatgaaaatttagg

SEQ ID NO: 31256 - DNA, 20 bp, synthetic construct
  misc_feature 1..20: note = chemically synthesized
  source 1..20: mol_type = other DNA
tttaggccgaattatttgaa

SEQ ID NO: 31257 - DNA, 20 bp, synthetic construct
  misc_feature 1..20: note = chemically synthesized
  source 1..20: mol_type = other DNA
ttctcctgccagagagaggg

SEQ ID NO: 31258 - DNA, 20 bp, synthetic construct
  misc_feature 1..20: note = chemically synthesized
  source 1..20: mol_type = other DNA
tttaacactccaagtctaga

SEQ ID NO: 31259 - DNA, 20 bp, synthetic construct
  misc_feature 1..20: note = chemically synthesized
  source 1..20: mol_type = other DNA
agaattatccaagcatagcc

SEQ ID NO: 31260 - DNA, 20 bp, synthetic construct
  misc_feature 1..20: note = chemically synthesized
  source 1..20: mol_type = other DNA
ccaagcatagccatgaattc

SEQ ID NO: 31261 - DNA, 20 bp, synthetic construct
  misc_feature 1..20: note = chemically synthesized
  source 1..20: mol_type = other DNA
tagccatgaattcctgagtt

SEQ ID NO: 31262 - DNA, 20 bp, synthetic construct
  misc_feature 1..20: note = chemically synthesized
  source 1..20: mol_type = other DNA
aaacgatctctttgtcttca

SEQ ID NO: 31263 - DNA, 20 bp, synthetic construct
  misc_feature 1..20: note = chemically synthesized
  source 1..20: mol_type = other DNA
cactgagttttctttgtcat

SEQ ID NO: 31264 - DNA, 20 bp, synthetic construct
  misc_feature 1..20: note = chemically synthesized
  source 1..20: mol_type = other DNA
ttgtcattggagtaatttag

SEQ ID NO: 31265 - DNA, 20 bp, synthetic construct
  misc_feature 1..20: note = chemically synthesized
  source 1..20: mol_type = other DNA
tggagtaatttaggagaata

SEQ ID NO: 31266 - DNA, 20 bp, synthetic construct
  misc_feature 1..20: note = chemically synthesized
  source 1..20: mol_type = other DNA
gatgtgactgggagcccttt

SEQ ID NO: 31267 - DNA, 20 bp, synthetic construct
  misc_feature 1..20: note = chemically synthesized
  source 1..20: mol_type = other DNA
aagcacagtcccatgcccac

SEQ ID NO: 31268 - DNA, 20 bp, synthetic construct
  misc_feature 1..20: note = chemically synthesized
  source 1..20: mol_type = other DNA
ccttattttttctctgcagc

SEQ ID NO: 31269 - DNA, 20 bp, synthetic construct
  misc_feature 1..20: note = chemically synthesized
  source 1..20: mol_type = other DNA
gtctctcaatatggaggtta

SEQ ID NO: 31270 - DNA, 20 bp, synthetic construct
  misc_feature 1..20: note = chemically synthesized
  source 1..20: mol_type = other DNA
ttgtagcgcctgtatttgaa

SEQ ID NO: 31271 - DNA, 20 bp, synthetic construct
  misc_feature 1..20: note = chemically synthesized
  source 1..20: mol_type = other DNA
tccctgtttcctgctggtat

SEQ ID NO: 31272 - DNA, 20 bp, synthetic construct
  misc_feature 1..20: note = chemically synthesized
  source 1..20: mol_type = other DNA
acttctgtccattttctctc

SEQ ID NO: 31273 - DNA, 20 bp, synthetic construct
  misc_feature 1..20: note = chemically synthesized
  source 1..20: mol_type = other DNA
gaaggaactctccttttgct

SEQ ID NO: 31274 - DNA, 20 bp, synthetic construct
  misc_feature 1..20: note = chemically synthesized
  source 1..20: mol_type = other DNA
ctgtggcttcaggacccacc

SEQ ID NO: 31275 - DNA, 20 bp, synthetic construct
  misc_feature 1..20: note = chemically synthesized
  source 1..20: mol_type = other DNA
tcaggacccaccttgaatga

SEQ ID NO: 31276 - DNA, 20 bp, synthetic construct
  misc_feature 1..20: note = chemically synthesized
  source 1..20: mol_type = other DNA
tgcccatcgagcaacaccat

SEQ ID NO: 31277 - DNA, 20 bp, synthetic construct
  misc_feature 1..20: note = chemically synthesized
  source 1..20: mol_type = other DNA
ctgaacttgaacagtaattg

SEQ ID NO: 31278 - DNA, 20 bp, synthetic construct
  misc_feature 1..20: note = chemically synthesized
  source 1..20: mol_type = other DNA
aaaatccacgcccggccccc

SEQ ID NO: 31279 - DNA, 20 bp, synthetic construct
  misc_feature 1..20: note = chemically synthesized
  source 1..20: mol_type = other DNA
ccccatcccacgttctgatt

SEQ ID NO: 31280 - DNA, 20 bp, synthetic construct
  misc_feature 1..20: note = chemically synthesized
  source 1..20: mol_type = other DNA
cttttaagtgaactctgatg

SEQ ID NO: 31281 - DNA, 20 bp, synthetic construct
  misc_feature 1..20: note = chemically synthesized
  source 1..20: mol_type = other DNA
ctctttctcaacgttctctg

SEQ ID NO: 31282 - DNA, 20 bp, synthetic construct
  misc_feature 1..20: note = chemically synthesized
  source 1..20: mol_type = other DNA
ttattcatatttaaatgcag

SEQ ID NO: 31283 - DNA, 20 bp, synthetic construct
  misc_feature 1..20: note = chemically synthesized
  source 1..20: mol_type = other DNA
atatttaaatgcaggtgagt

SEQ ID NO: 31284 - DNA, 20 bp, synthetic construct
  misc_feature 1..20: note = chemically synthesized
  source 1..20: mol_type = other DNA
gtcatcttacaggcataatc

SEQ ID NO: 31285 - DNA, 20 bp, synthetic construct
  misc_feature 1..20: note = chemically synthesized
  source 1..20: mol_type = other DNA
ctaagtagtagccaaattct

SEQ ID NO: 31286 - DNA, 20 bp, synthetic construct
  misc_feature 1..20: note = chemically synthesized
  source 1..20: mol_type = other DNA
gctcagcagatgttgacaga

SEQ ID NO: 31287 - DNA, 20 bp, synthetic construct
  misc_feature 1..20: note = chemically synthesized
  source 1..20: mol_type = other DNA
tattaagctttttgtagaga

SEQ ID NO: 31288 - DNA, 20 bp, synthetic construct
  misc_feature 1..20: note = chemically synthesized
  source 1..20: mol_type = other DNA
ttttctctcctcccctaaaa

SEQ ID NO: 31289 - DNA, 20 bp, synthetic construct
  misc_feature 1..20: note = chemically synthesized
  source 1..20: mol_type = other DNA
cctcccctaaaattgggttt

SEQ ID NO: 31290 - DNA, 20 bp, synthetic construct
  misc_feature 1..20: note = chemically synthesized
  source 1..20: mol_type = other DNA
ttcttgttcctctagtcgac

SEQ ID NO: 31291 - DNA, 20 bp, synthetic construct
  misc_feature 1..20: note = chemically synthesized
  source 1..20: mol_type = other DNA
ctagtcgacaagagtttctg

SEQ ID NO: 31292 - DNA, 20 bp, synthetic construct
  misc_feature 1..20: note = chemically synthesized
  source 1..20: mol_type = other DNA
ttccttcgtggaaagccaaa

SEQ ID NO: 31293 - DNA, 20 bp, synthetic construct
  misc_feature 1..20: note = chemically synthesized
  source 1..20: mol_type = other DNA
agaaaggttgaggctaagag

SEQ ID NO: 31294 - DNA, 20 bp, synthetic construct
  misc_feature 1..20: note = chemically synthesized
  source 1..20: mol_type = other DNA
aggttgaggctaagagggga

SEQ ID NO: 31295 - DNA, 20 bp, synthetic construct
  misc_feature 1..20: note = chemically synthesized
  source 1..20: mol_type = other DNA
gctaagaggggagtgagtgc

SEQ ID NO: 31296 - DNA, 20 bp, synthetic construct
  misc_feature 1..20: note = chemically synthesized
  source 1..20: mol_type = other DNA
acgcttttatcggtgatggc

SEQ ID NO: 31297 - DNA, 20 bp, synthetic construct
  misc_feature 1..20: note = chemically synthesized
  source 1..20: mol_type = other DNA
caatcacctgtgctgttgca

SEQ ID NO: 31298 - DNA, 20 bp, synthetic construct
  misc_feature 1..20: note = chemically synthesized
  source 1..20: mol_type = other DNA
ctcccaaagtgtggcccttc

SEQ ID NO: 31299 - DNA, 20 bp, synthetic construct
  misc_feature 1..20: note = chemically synthesized
  source 1..20: mol_type = other DNA
gggtttacatggtgtgccca

SEQ ID NO: 31300 - DNA, 20 bp, synthetic construct
  misc_feature 1..20: note = chemically synthesized
  source 1..20: mol_type = other DNA
attcagataactggagataa

SEQ ID NO: 31301 - DNA, 20 bp, synthetic construct
  misc_feature 1..20: note = chemically synthesized
  source 1..20: mol_type = other DNA
actggagataatggagtaga

SEQ ID NO: 31302 - DNA, 20 bp, synthetic construct
  misc_feature 1..20: note = chemically synthesized
  source 1..20: mol_type = other DNA
gataatggagtagatggagt

SEQ ID NO: 31303 - DNA, 20 bp, synthetic construct
  misc_feature 1..20: note = chemically synthesized
  source 1..20: mol_type = other DNA
ctcaggggcagatggccctc

SEQ ID NO: 31304 - DNA, 20 bp, synthetic construct
  misc_feature 1..20: note = chemically synthesized
  source 1..20: mol_type = other DNA
tctttcctgaacctgaactc

SEQ ID NO: 31305 - DNA, 20 bp, synthetic construct
  misc_feature 1..20: note = chemically synthesized
  source 1..20: mol_type = other DNA
attgtttctatgcctctctt

SEQ ID NO: 31306 - DNA, 20 bp, synthetic construct
  misc_feature 1..20: note = chemically synthesized
  source 1..20: mol_type = other DNA
aaacattagtctgataacta

SEQ ID NO: 31307 - DNA, 20 bp, synthetic construct
  misc_feature 1..20: note = chemically synthesized
  source 1..20: mol_type = other DNA
tgctcagcttggtgtccact

SEQ ID NO: 31308 - DNA, 20 bp, synthetic construct
  misc_feature 1..20: note = chemically synthesized
  source 1..20: mol_type = other DNA
cttagctctccactcctgac

SEQ ID NO: 31309 - DNA, 20 bp, synthetic construct
  misc_feature 1..20: note = chemically synthesized
  source 1..20: mol_type = other DNA
ctgacttcctctccacttcc

SEQ ID NO: 31310 - DNA, 20 bp, synthetic construct
  misc_feature 1..20: note = chemically synthesized
  source 1..20: mol_type = other DNA
ctccacttccccggatgacg

SEQ ID NO: 31311 - DNA, 20 bp, synthetic construct
  misc_feature 1..20: note = chemically synthesized
  source 1..20: mol_type = other DNA
catggaggctgagaaatata

SEQ ID NO: 31312 - DNA, 20 bp, synthetic construct
  misc_feature 1..20: note = chemically synthesized
  source 1..20: mol_type = other DNA
ccagcagagccaagtctttt

SEQ ID NO: 31313 - DNA, 20 bp, synthetic construct
  misc_feature 1..20: note = chemically synthesized
  source 1..20: mol_type = other DNA
aaaacctgtgttttaataat

SEQ ID NO: 31314 - DNA, 20 bp, synthetic construct
  misc_feature 1..20: note = chemically synthesized
  source 1..20: mol_type = other DNA
cctgtgttttaataatagga

SEQ ID NO: 31315 - DNA, 20 bp, synthetic construct
  misc_feature 1..20: note = chemically synthesized
  source 1..20: mol_type = other DNA
agcacatcttttctgtgtgc

SEQ ID NO: 31316 - DNA, 20 bp, synthetic construct
  misc_feature 1..20: note = chemically synthesized
  source 1..20: mol_type = other DNA
tggggtgaggagaggtgaca

SEQ ID NO: 31317 - DNA, 20 bp, synthetic construct
  misc_feature 1..20: note = chemically synthesized
  source 1..20: mol_type = other DNA
gagaggtgacagtgagtgtg

SEQ ID NO: 31318 - DNA, 20 bp, synthetic construct
  misc_feature 1..20: note = chemically synthesized
  source 1..20: mol_type = other DNA
ttagagcacccaaagctggc

SEQ ID NO: 31319 - DNA, 20 bp, synthetic construct
  misc_feature 1..20: note = chemically synthesized
  source 1..20: mol_type = other DNA
ggccaccgcccttcagactc

SEQ ID NO: 31320 - DNA, 20 bp, synthetic construct
  misc_feature 1..20: note = chemically synthesized
  source 1..20: mol_type = other DNA
ttgtattccaggacccctcc

SEQ ID NO: 31321 - DNA, 20 bp, synthetic construct
  misc_feature 1..20: note = chemically synthesized
  source 1..20: mol_type = other DNA
tgttggcccagcggtgccca

SEQ ID NO: 31322 - DNA, 20 bp, synthetic construct
  misc_feature 1..20: note = chemically synthesized
  source 1..20: mol_type = other DNA
gcccagagaatattccctta

SEQ ID NO: 31323 - DNA, 20 bp, synthetic construct
  misc_feature 1..20: note = chemically synthesized
  source 1..20: mol_type = other DNA
attcccttattggatctttc

SEQ ID NO: 31324 - DNA, 20 bp, synthetic construct
  misc_feature 1..20: note = chemically synthesized
  source 1..20: mol_type = other DNA
ccccacagtaagacctcaca

SEQ ID NO: 31325 - DNA, 20 bp, synthetic construct
  misc_feature 1..20: note = chemically synthesized
  source 1..20: mol_type = other DNA
cagtaagacctcacagtggg

SEQ ID NO: 31326 - DNA, 20 bp, synthetic construct
  misc_feature 1..20: note = chemically synthesized
  source 1..20: mol_type = other DNA
gaaatggggaagctggaaag

SEQ ID NO: 31327 - DNA, 20 bp, synthetic construct
  misc_feature 1..20: note = chemically synthesized
  source 1..20: mol_type = other DNA
agctggaaagttgggtgatc

SEQ ID NO: 31328 - DNA, 20 bp, synthetic construct
  misc_feature 1..20: note = chemically synthesized
  source 1..20: mol_type = other DNA
gctgtgtttcagagaggtag

SEQ ID NO: 31329 - DNA, 20 bp, synthetic construct
  misc_feature 1..20: note = chemically synthesized
  source 1..20: mol_type = other DNA
ctttggaggaggtgtcactc

SEQ ID NO: 31330 - DNA, 20 bp, synthetic construct
  misc_feature 1..20: note = chemically synthesized
  source 1..20: mol_type = other DNA
cactctgggattagttaaaa

SEQ ID NO: 31331 - DNA, 20 bp, synthetic construct
  misc_feature 1..20: note = chemically synthesized
  source 1..20: mol_type = other DNA
agtggtattcacattggctc

SEQ ID NO: 31332 - DNA, 20 bp, synthetic construct
  misc_feature 1..20: note = chemically synthesized
  source 1..20: mol_type = other DNA
attataaccttttggagggc

SEQ ID NO: 31333 - DNA, 20 bp, synthetic construct
  misc_feature 1..20: note = chemically synthesized
  source 1..20: mol_type = other DNA
gaacagagaaagaccgggct

SEQ ID NO: 31334 - DNA, 20 bp, synthetic construct
  misc_feature 1..20: note = chemically synthesized
  source 1..20: mol_type = other DNA
agagaaagaccgggctttga

SEQ ID NO: 31335 - DNA, 20 bp, synthetic construct
  misc_feature 1..20: note = chemically synthesized
  source 1..20: mol_type = other DNA
aagtgaaaaagtgaaagtgc

SEQ ID NO: 31336 - DNA, 20 bp, synthetic construct
  misc_feature 1..20: note = chemically synthesized
  source 1..20: mol_type = other DNA
aaaagtgaaagtgctggggt

SEQ ID NO: 31337 - DNA, 20 bp, synthetic construct
  misc_feature 1..20: note = chemically synthesized
  source 1..20: mol_type = other DNA
tggggaaggagcacgtgggg

SEQ ID NO: 31338 - DNA, 20 bp, synthetic construct
  misc_feature 1..20: note = chemically synthesized
  source 1..20: mol_type = other DNA
cttaggtctgggcaacactt

SEQ ID NO: 31339 - DNA, 20 bp, synthetic construct
  misc_feature 1..20: note = chemically synthesized
  source 1..20: mol_type = other DNA
tgggcaacactttggagtta

SEQ ID NO: 31340 - DNA, 20 bp, synthetic construct
  misc_feature 1..20: note = chemically synthesized
  source 1..20: mol_type = other DNA
tctcaccagagggagaacgg

SEQ ID NO: 31341 - DNA, 20 bp, synthetic construct
  misc_feature 1..20: note = chemically synthesized
  source 1..20: mol_type = other DNA
ggactggggcctgctttcct

SEQ ID NO: 31342 - DNA, 20 bp, synthetic construct
  misc_feature 1..20: note = chemically synthesized
  source 1..20: mol_type = other DNA
tgggtggctttgactggctc

SEQ ID NO: 31343 - DNA, 20 bp, synthetic construct
  misc_feature 1..20: note = chemically synthesized
  source 1..20: mol_type = other DNA
tggctttgactggctcttgg

SEQ ID NO: 31344 - DNA, 20 bp, synthetic construct
  misc_feature 1..20: note = chemically synthesized
  source 1..20: mol_type = other DNA
gtatgcaagacctttgatat

SEQ ID NO: 31345 - DNA, 20 bp, synthetic construct
  misc_feature 1..20: note = chemically synthesized
  source 1..20: mol_type = other DNA
gggaaatcctctcttatcaa

SEQ ID NO: 31346 - DNA, 20 bp, synthetic construct
  misc_feature 1..20: note = chemically synthesized
  source 1..20: mol_type = other DNA
atttttttttttttttgaga

SEQ ID NO: 31347 - DNA, 20 bp, synthetic construct
  misc_feature 1..20: note = chemically synthesized
  source 1..20: mol_type = other DNA
tctcgctctgtcgcccaggc

SEQ ID NO: 31348 - DNA, 20 bp, synthetic construct
  misc_feature 1..20: note = chemically synthesized
  source 1..20: mol_type = other DNA
gcctcagcctcccaagtagc

SEQ ID NO: 31349 - DNA, 20 bp, synthetic construct
  misc_feature 1..20: note = chemically synthesized
  source 1..20: mol_type = other DNA
tttttttttttaagtagaga

SEQ ID NO: 31350 - DNA, 20 bp, synthetic construct
  misc_feature 1..20: note = chemically synthesized
  source 1..20: mol_type = other DNA
agtcttgggactgcccagaa

SEQ ID NO: 31351 - DNA, 20 bp, synthetic construct
  misc_feature 1..20: note = chemically synthesized
  source 1..20: mol_type = other DNA
actgcgatcccaccagtggc

SEQ ID NO: 31352 - DNA, 20 bp, synthetic construct
  misc_feature 1..20: note = chemically synthesized
  source 1..20: mol_type = other DNA
tccagcctggaagcctctca

SEQ ID NO: 31353 - DNA, 20 bp, synthetic construct
  misc_feature 1..20: note = chemically synthesized
  source 1..20: mol_type = other DNA
aggagatggctggtgtggct

SEQ ID NO: 31354 - DNA, 20 bp, synthetic construct
  misc_feature 1..20: note = chemically synthesized
  source 1..20: mol_type = other DNA
cctcaagtctgtccttctct

SEQ ID NO: 31355 - DNA, 20 bp, synthetic construct
  misc_feature 1..20: note = chemically synthesized
  source 1..20: mol_type = other DNA
gatttaggactgtgaaccta

SEQ ID NO: 31356 - DNA, 20 bp, synthetic construct
  misc_feature 1..20: note = chemically synthesized
  source 1..20: mol_type = other DNA
agaattcaaagtagtggaac

SEQ ID NO: 31357 - DNA, 20 bp, synthetic construct
  misc_feature 1..20: note = chemically synthesized
  source 1..20: mol_type = other DNA
ccaggtctcgactcaatcca

SEQ ID NO: 31358 - DNA, 20 bp, synthetic construct
  misc_feature 1..20: note = chemically synthesized
  source 1..20: mol_type = other DNA
aggtgcctgtctggaaggca

SEQ ID NO: 31359 - DNA, 20 bp, synthetic construct
  misc_feature 1..20: note = chemically synthesized
  source 1..20: mol_type = other DNA
tctctggcttgttgagaaga

SEQ ID NO: 31360 - DNA, 20 bp, synthetic construct
  misc_feature 1..20: note = chemically synthesized
  source 1..20: mol_type = other DNA
gactcagttctattttccca

SEQ ID NO: 31361 - DNA, 20 bp, synthetic construct
  misc_feature 1..20: note = chemically synthesized
  source 1..20: mol_type = other DNA
ttcttttttcagtcctgatc

SEQ ID NO: 31362 - DNA, 20 bp, synthetic construct
  misc_feature 1..20: note = chemically synthesized
  source 1..20: mol_type = other DNA
tttttcagtcctgatcaggg

SEQ ID NO: 31363 - DNA, 20 bp, synthetic construct
  misc_feature 1..20: note = chemically synthesized
  source 1..20: mol_type = other DNA
tcagggatgagtccgtgctg

SEQ ID NO: 31364 - DNA, 20 bp, synthetic construct
  misc_feature 1..20: note = chemically synthesized
  source 1..20: mol_type = other DNA
ttattcatttactttagcgt

SEQ ID NO: 31365 - DNA, 20 bp, synthetic construct
  misc_feature 1..20: note = chemically synthesized
  source 1..20: mol_type = other DNA
tttagcgtgtgagtggggag

SEQ ID NO: 31366 - DNA, 20 bp, synthetic construct
  misc_feature 1..20: note = chemically synthesized
  source 1..20: mol_type = other DNA
attaggcagcaggcccttgg

SEQ ID NO: 31367 - DNA, 20 bp, synthetic construct
  misc_feature 1..20: note = chemically synthesized
  source 1..20: mol_type = other DNA
tccacaaagagagaagcagc

SEQ ID NO: 31368 - DNA, 20 bp, synthetic construct
  misc_feature 1..20: note = chemically synthesized
  source 1..20: mol_type = other DNA
ccaacacccacacctgccaa

SEQ ID NO: 31369 - DNA, 20 bp, synthetic construct
  misc_feature 1..20: note = chemically synthesized
  source 1..20: mol_type = other DNA
acctgccaaaggggttccca

SEQ ID NO: 31370 - DNA, 20 bp, synthetic construct
  misc_feature 1..20: note = chemically synthesized
  source 1..20: mol_type = other DNA
ccatggggtggctggcttga

SEQ ID NO: 31371 - DNA, 20 bp, synthetic construct
  misc_feature 1..20: note = chemically synthesized
  source 1..20: mol_type = other DNA
gccgtgtcagctgcagagac

SEQ ID NO: 31372 - DNA, 20 bp, synthetic construct
  misc_feature 1..20: note = chemically synthesized
  source 1..20: mol_type = other DNA
actggagtccggggcatgat

SEQ ID NO: 31373 - DNA, 20 bp, synthetic construct
  misc_feature 1..20: note = chemically synthesized
  source 1..20: mol_type = other DNA
ggatgtacctgaaacctagt

SEQ ID NO: 31374 - DNA, 20 bp, synthetic construct
  misc_feature 1..20: note = chemically synthesized
  source 1..20: mol_type = other DNA
cctcacaggctagactatcc

SEQ ID NO: 31375 - DNA, 20 bp, synthetic construct
  misc_feature 1..20: note = chemically synthesized
  source 1..20: mol_type = other DNA
agactatccatggatttcag

SEQ ID NO: 31376 - DNA, 20 bp, synthetic construct
  misc_feature 1..20: note = chemically synthesized
  source 1..20: mol_type = other DNA
ccatggatttcagtggggtg

SEQ ID NO: 31377 - DNA, 20 bp, synthetic construct
  misc_feature 1..20: note = chemically synthesized
  source 1..20: mol_type = other DNA
cctcaaatggtgactgttct

SEQ ID NO: 31378 - DNA, 20 bp, synthetic construct
  misc_feature 1..20: note = chemically synthesized
  source 1..20: mol_type = other DNA
tcctttctctgcctttctca

SEQ ID NO: 31379 - DNA, 20 bp, synthetic construct
  misc_feature 1..20: note = chemically synthesized
  source 1..20: mol_type = other DNA
tttctctgtgtctcctccaa

SEQ ID NO: 31380 - DNA, 20 bp, synthetic construct
  misc_feature 1..20: note = chemically synthesized
  source 1..20: mol_type = other DNA
ctcctccaaatggatgccat

SEQ ID NO: 31381 - DNA, 20 bp, synthetic construct
  misc_feature 1..20: note = chemically synthesized
  source 1..20: mol_type = other DNA
catgtgggtgggcaaagtgg

SEQ ID NO: 31382 - DNA, 20 bp, synthetic construct
  misc_feature 1..20: note = chemically synthesized
  source 1..20: mol_type = other DNA
tcatacttgagacactaaaa

SEQ ID NO: 31383 - DNA, 20 bp, synthetic construct
  misc_feature 1..20: note = chemically synthesized
  source 1..20: mol_type = other DNA
gaaccaacttcaagtaacgt

SEQ ID NO: 31384 - DNA, 20 bp, synthetic construct
  misc_feature 1..20: note = chemically synthesized
  source 1..20: mol_type = other DNA
ctccaattagatatgcaaaa

SEQ ID NO: 31385 - DNA, 20 bp, synthetic construct
  misc_feature 1..20: note = chemically synthesized
  source 1..20: mol_type = other DNA
tcactttttacaatttagca

SEQ ID NO: 31386 - DNA, 20 bp, synthetic construct
  misc_feature 1..20: note = chemically synthesized
  source 1..20: mol_type = other DNA
gcagagcattgtgataggtt

SEQ ID NO: 31387 - DNA, 20 bp, synthetic construct
  misc_feature 1..20: note = chemically synthesized
  source 1..20: mol_type = other DNA
ctgcctttctcatttgagag

SEQ ID NO: 31388 - DNA, 20 bp, synthetic construct
  misc_feature 1..20: note = chemically synthesized
  source 1..20: mol_type = other DNA
cagctcagccacaagcccaa

SEQ ID NO: 31389 - DNA, 20 bp, synthetic construct
  misc_feature 1..20: note = chemically synthesized
  source 1..20: mol_type = other DNA
acaagcccaaatgaatgatt

SEQ ID NO: 31390 - DNA, 20 bp, synthetic construct
  misc_feature 1..20: note = chemically synthesized
  source 1..20: mol_type = other DNA
ttcctctctgactgctctcc

SEQ ID NO: 31391 - DNA, 20 bp, synthetic construct
  misc_feature 1..20: note = chemically synthesized
  source 1..20: mol_type = other DNA
tctccaggggtggtgagcac

SEQ ID NO: 31392 - DNA, 20 bp, synthetic construct
  misc_feature 1..20: note = chemically synthesized
  source 1..20: mol_type = other DNA
tccttagccttccaagttgt

SEQ ID NO: 31393 - DNA, 20 bp, synthetic construct
  misc_feature 1..20: note = chemically synthesized
  source 1..20: mol_type = other DNA
ggctgcacacatattcattt

SEQ ID NO: 31394 - DNA, 20 bp, synthetic construct
  misc_feature 1..20: note = chemically synthesized
  source 1..20: mol_type = other DNA
ttgaacacctacattgctgg

SEQ ID NO: 31395 - DNA, 20 bp, synthetic construct
  misc_feature 1..20: note = chemically synthesized
  source 1..20: mol_type = other DNA
tgctgggaggataccttagt

SEQ ID NO: 31396 - DNA, 20 bp, synthetic construct
  misc_feature 1..20: note = chemically synthesized
  source 1..20: mol_type = other DNA
aacccttgccttcatagaaa

SEQ ID NO: 31397 - DNA, 20 bp, synthetic construct
  misc_feature 1..20: note = chemically synthesized
  source 1..20: mol_type = other DNA
agagtgttgaaagcttggag

SEQ ID NO: 31398 - DNA, 20 bp, synthetic construct
  misc_feature 1..20: note = chemically synthesized
  source 1..20: mol_type = other DNA
tggcttggaaaatacgttga

SEQ ID NO: 31399 - DNA, 20 bp, synthetic construct
  misc_feature 1..20: note = chemically synthesized
  source 1..20: mol_type = other DNA
tcattaatagtgcagttatg

SEQ ID NO: 31400 - DNA, 20 bp, synthetic construct
  misc_feature 1..20: note = chemically synthesized
  source 1..20: mol_type = other DNA
gttatgtagagtgtagctct

SEQ ID NO: 31401 - DNA, 20 bp, synthetic construct
  misc_feature 1..20: note = chemically synthesized
  source 1..20: mol_type = other DNA
agctctttgagtcttcagtt

SEQ ID NO: 31402 - DNA, 20 bp, synthetic construct
  misc_feature 1..20: note = chemically synthesized
  source 1..20: mol_type = other DNA
cattagcactttatgtctgc

SEQ ID NO: 31403 - DNA, 20 bp, synthetic construct
  misc_feature 1..20: note = chemically synthesized
  source 1..20: mol_type = other DNA
gtgttttattggtaacggaa

SEQ ID NO: 31404 - DNA, 20 bp, synthetic construct
  misc_feature 1..20: note = chemically synthesized
  source 1..20: mol_type = other DNA
ttattggtaacggaaaagag

SEQ ID NO: 31405 - DNA, 20 bp, synthetic construct
  misc_feature 1..20: note = chemically synthesized
  source 1..20: mol_type = other DNA
cggaaaagagtggagtcaca

SEQ ID NO: 31406 - DNA, 20 bp, synthetic construct
  misc_feature 1..20: note = chemically synthesized
  source 1..20: mol_type = other DNA
tgacattacttcccaaattg

SEQ ID NO: 31407 - DNA, 20 bp, synthetic construct
  misc_feature 1..20: note = chemically synthesized
  source 1..20: mol_type = other DNA
tcacctgtcaaattgtatgc

SEQ ID NO: 31408 - DNA, 20 bp, synthetic construct
  misc_feature 1..20: note = chemically synthesized
  source 1..20: mol_type = other DNA
aattgtatgctagggtggga

SEQ ID NO: 31409 - DNA, 20 bp, synthetic construct
  misc_feature 1..20: note = chemically synthesized
  source 1..20: mol_type = other DNA
atcccgggctctcaggtaga

SEQ ID NO: 31410 - DNA, 20 bp, synthetic construct
  misc_feature 1..20: note = chemically synthesized
  source 1..20: mol_type = other DNA
gtgcccctgccaggaggagg

SEQ ID NO: 31411 - DNA, 20 bp, synthetic construct
  misc_feature 1..20: note = chemically synthesized
  source 1..20: mol_type = other DNA
aggagggagaatctgaaagc

SEQ ID NO: 31412 - DNA, 20 bp, synthetic construct
  misc_feature 1..20: note = chemically synthesized
  source 1..20: mol_type = other DNA
tctgaaagcaagaatggagg

SEQ ID NO: 31413 - DNA, 20 bp, synthetic construct
  misc_feature 1..20: note = chemically synthesized
  source 1..20: mol_type = other DNA
agtaatgccgtggaggcagc

SEQ ID NO: 31414 - DNA, 20 bp, synthetic construct
  misc_feature 1..20: note = chemically synthesized
  source 1..20: mol_type = other DNA
gccagtgcccctgcacagta

SEQ ID NO: 31415 - DNA, 20 bp, synthetic construct
  misc_feature 1..20: note = chemically synthesized
  source 1..20: mol_type = other DNA
gcccctgcacagtattggat

SEQ ID NO: 31416 - DNA, 20 bp, synthetic construct
  misc_feature 1..20: note = chemically synthesized
  source 1..20: mol_type = other DNA
ggttttaactggctcctgtc

SEQ ID NO: 31417 - DNA, 20 bp, synthetic construct
  misc_feature 1..20: note = chemically synthesized
  source 1..20: mol_type = other DNA
taatgcaaaagctcttccct

SEQ ID NO: 31418 - DNA, 20 bp, synthetic construct
  misc_feature 1..20: note = chemically synthesized
  source 1..20: mol_type = other DNA
ctcagggcctgtggggaaaa

SEQ ID NO: 31419 - DNA, 20 bp, synthetic construct
  misc_feature 1..20: note = chemically synthesized
  source 1..20: mol_type = other DNA
acagttttatagatatggca

SEQ ID NO: 31420 - DNA, 20 bp, synthetic construct
  misc_feature 1..20: note = chemically synthesized
  source 1..20: mol_type = other DNA
tgagtggcctcctggcagtt

SEQ ID NO: 31421 - DNA, 20 bp, synthetic construct
  misc_feature 1..20: note = chemically synthesized
  source 1..20: mol_type = other DNA
gaagatgcaccaataaatat

SEQ ID NO: 31422 - DNA, 20 bp, synthetic construct
  misc_feature 1..20: note = chemically synthesized
  source 1..20: mol_type = other DNA
acgaaaataaggtggggaag

SEQ ID NO: 31423 - DNA, 20 bp, synthetic construct
  misc_feature 1..20: note = chemically synthesized
  source 1..20: mol_type = other DNA
taaggtggggaagaggggta

SEQ ID NO: 31424 - DNA, 20 bp, synthetic construct
  misc_feature 1..20: note = chemically synthesized
  source 1..20: mol_type = other DNA
atggtgaccaggcttttaaa

SEQ ID NO: 31425 - DNA, 20 bp, synthetic construct
  misc_feature 1..20: note = chemically synthesized
  source 1..20: mol_type = other DNA
gaggtgaggaagttggccat

SEQ ID NO: 31426 - DNA, 20 bp, synthetic construct
  misc_feature 1..20: note = chemically synthesized
  source 1..20: mol_type = other DNA
tttgagaagatggttccagg

SEQ ID NO: 31427 - DNA, 20 bp, synthetic construct
  misc_feature 1..20: note = chemically synthesized
  source 1..20: mol_type = other DNA
ggagcaaggggccctgaggt

SEQ ID NO: 31428 - DNA, 20 bp, synthetic construct
  misc_feature 1..20: note = chemically synthesized
  source 1..20: mol_type = other DNA
ggccctgaggtcagagtgga

SEQ ID NO: 31429 - DNA, 20 bp, synthetic construct
  misc_feature 1..20: note = chemically synthesized
  source 1..20: mol_type = other DNA
ctccttgaaggacgtagagc

SEQ ID NO: 31430 - DNA, 20 bp, synthetic construct
  misc_feature 1..20: note = chemically synthesized
  source 1..20: mol_type = other DNA
agggagatggaagccactgg

SEQ ID NO: 31431 - DNA, 20 bp, synthetic construct
  misc_feature 1..20: note = chemically synthesized
  source 1..20: mol_type = other DNA
tcatatgacttgcgcttcca

SEQ ID NO: 31432 - DNA, 20 bp, synthetic construct
  misc_feature 1..20: note = chemically synthesized
  source 1..20: mol_type = other DNA
caagtgatggtggcgtggac

SEQ ID NO: 31433 - DNA, 20 bp, synthetic construct
  misc_feature 1..20: note = chemically synthesized
  source 1..20: mol_type = other DNA
ggtggggacgtgagaagggg

SEQ ID NO: 31434 - DNA, 20 bp, synthetic construct
  misc_feature 1..20: note = chemically synthesized
  source 1..20: mol_type = other DNA
tacttcgaagggaaaaccgg

SEQ ID NO: 31435 - DNA, 20 bp, synthetic construct
  misc_feature 1..20: note = chemically synthesized
  source 1..20: mol_type = other DNA
cggcaggatttgctgactgg

SEQ ID NO: 31436 - DNA, 20 bp, synthetic construct
  misc_feature 1..20: note = chemically synthesized
  source 1..20: mol_type = other DNA
aggatttgctgactggtggg

SEQ ID NO: 31437 - DNA, 20 bp, synthetic construct
  misc_feature 1..20: note = chemically synthesized
  source 1..20: mol_type = other DNA
gggttgtatgaaaggaaggg

SEQ ID NO: 31438 - DNA, 20 bp, synthetic construct
  misc_feature 1..20: note = chemically synthesized
  source 1..20: mol_type = other DNA
atgtgtggctcggtgactgg

SEQ ID NO: 31439 - DNA, 20 bp, synthetic construct
  misc_feature 1..20: note = chemically synthesized
  source 1..20: mol_type = other DNA
tggctcggtgactgggagaa

SEQ ID NO: 31440 - DNA, 20 bp, synthetic construct
  misc_feature 1..20: note = chemically synthesized
  source 1..20: mol_type = other DNA
agaatagaattgctgtttat

SEQ ID NO: 31441 - DNA, 20 bp, synthetic construct
  misc_feature 1..20: note = chemically synthesized
  source 1..20: mol_type = other DNA
aaaggctgtggaggtgctca

SEQ ID NO: 31442 - DNA, 20 bp, synthetic construct
  misc_feature 1..20: note = chemically synthesized
  source 1..20: mol_type = other DNA
gctgtggaggtgctcagagg

SEQ ID NO: 31443 - DNA, 20 bp, synthetic construct
  misc_feature 1..20: note = chemically synthesized
  source 1..20: mol_type = other DNA
ttcaccacttcaggacttca

SEQ ID NO: 31444 - DNA, 20 bp, synthetic construct
  misc_feature 1..20: note = chemically synthesized
  source 1..20: mol_type = other DNA
aggaagatcgtgaggggaaa

SEQ ID NO: 31445 - DNA, 20 bp, synthetic construct
  misc_feature 1..20: note = chemically synthesized
  source 1..20: mol_type = other DNA
tatagctgagatgatttaag

SEQ ID NO: 31446 - DNA, 20 bp, synthetic construct
  misc_feature 1..20: note = chemically synthesized
  source 1..20: mol_type = other DNA
gctgttaattggtgatattt

SEQ ID NO: 31447 - DNA, 20 bp, synthetic construct
  misc_feature 1..20: note = chemically synthesized
  source 1..20: mol_type = other DNA
ttaattggtgatatttagga

SEQ ID NO: 31448 - DNA, 20 bp, synthetic construct
  misc_feature 1..20: note = chemically synthesized
  source 1..20: mol_type = other DNA
tccacggttagcccctggct

SEQ ID NO: 31449 - DNA, 20 bp, synthetic construct
  misc_feature 1..20: note = chemically synthesized
  source 1..20: mol_type = other DNA
agagcctttttccttgaaag

SEQ ID NO: 31450 - DNA, 20 bp, synthetic construct
  misc_feature 1..20: note = chemically synthesized
  source 1..20: mol_type = other DNA
tggaaaagtaaaaaaattct

SEQ ID NO: 31451 - DNA, 20 bp, synthetic construct
  misc_feature 1..20: note = chemically synthesized
  source 1..20: mol_type = other DNA
tgagaccaagtaaattattg

SEQ ID NO: 31452 - DNA, 20 bp, synthetic construct
  misc_feature 1..20: note = chemically synthesized
  source 1..20: mol_type = other DNA
ggggggtaatttgcaagggc

SEQ ID NO: 31453 - DNA, 20 bp, synthetic construct
  misc_feature 1..20: note = chemically synthesized
  source 1..20: mol_type = other DNA
ttgctttcttgtttctcagc

SEQ ID NO: 31454 - DNA, 20 bp, synthetic construct
  misc_feature 1..20: note = chemically synthesized
  source 1..20: mol_type = other DNA
agaccagaagcctgtgattt

SEQ ID NO: 31455 - DNA, 20 bp, synthetic construct
  misc_feature 1..20: note = chemically synthesized
  source 1..20: mol_type = other DNA
ttcggagtctgatgagaaat

SEQ ID NO: 31456 - DNA, 20 bp, synthetic construct
  misc_feature 1..20: note = chemically synthesized
  source 1..20: mol_type = other DNA
taggagagctccttggtcct

SEQ ID NO: 31457 - DNA, 20 bp, synthetic construct
  misc_feature 1..20: note = chemically synthesized
  source 1..20: mol_type = other DNA
aaaagacaccttaagtagca

SEQ ID NO: 31458 - DNA, 20 bp, synthetic construct
  misc_feature 1..20: note = chemically synthesized
  source 1..20: mol_type = other DNA
acatgtagaacaaactcttc

SEQ ID NO: 31459 - DNA, 20 bp, synthetic construct
  misc_feature 1..20: note = chemically synthesized
  source 1..20: mol_type = other DNA
acccaagggggagctcagag

SEQ ID NO: 31460 - DNA, 20 bp, synthetic construct
  misc_feature 1..20: note = chemically synthesized
  source 1..20: mol_type = other DNA
tgccaactaggtaatgtgct

SEQ ID NO: 31461 - DNA, 20 bp, synthetic construct
  misc_feature 1..20: note = chemically synthesized
  source 1..20: mol_type = other DNA
agcaactggcaaccccctgt

SEQ ID NO: 31462 - DNA, 20 bp, synthetic construct
  misc_feature 1..20: note = chemically synthesized
  source 1..20: mol_type = other DNA
ttgctcctgtggcccctgca

SEQ ID NO: 31463 - DNA, 20 bp, synthetic construct
  misc_feature 1..20: note = chemically synthesized
  source 1..20: mol_type = other DNA
cccctgcagggagtgtggcc

SEQ ID NO: 31464 - DNA, 20 bp, synthetic construct
  misc_feature 1..20: note = chemically synthesized
  source 1..20: mol_type = other DNA
ccctgtgtcctgaaccaagt

SEQ ID NO: 31465 - DNA, 20 bp, synthetic construct
  misc_feature 1..20: note = chemically synthesized
  source 1..20: mol_type = other DNA
gtgtcctgaaccaagtgtgg

SEQ ID NO: 31466 - DNA, 20 bp, synthetic construct
  misc_feature 1..20: note = chemically synthesized
  source 1..20: mol_type = other DNA
tgttgttgttgttgttgttt

SEQ ID NO: 31467 - DNA, 20 bp, synthetic construct
  misc_feature 1..20: note = chemically synthesized
  source 1..20: mol_type = other DNA
tgttgttgttgtttgggggt

SEQ ID NO: 31468 - DNA, 20 bp, synthetic construct
  misc_feature 1..20: note = chemically synthesized
  source 1..20: mol_type = other DNA
gtagacagtgctgggcctgt

SEQ ID NO: 31469 - DNA, 20 bp, synthetic construct
  misc_feature 1..20: note = chemically synthesized
  source 1..20: mol_type = other DNA
ttttaggttggttctttgag

SEQ ID NO: 31470 - DNA, 20 bp, synthetic construct
  misc_feature 1..20: note = chemically synthesized
  source 1..20: mol_type = other DNA
cagtaagcaccatgacatga

SEQ ID NO: 31471 - DNA, 20 bp, synthetic construct
  misc_feature 1..20: note = chemically synthesized
  source 1..20: mol_type = other DNA
gcgtgtgtaatatgtctttt

SEQ ID NO: 31472 - DNA, 20 bp, synthetic construct
  misc_feature 1..20: note = chemically synthesized
  source 1..20: mol_type = other DNA
tgtcctttgttacaggagca

SEQ ID NO: 31473 - DNA, 20 bp, synthetic construct
  misc_feature 1..20: note = chemically synthesized
  source 1..20: mol_type = other DNA
atccttggccctctgtctgt

SEQ ID NO: 31474 - DNA, 20 bp, synthetic construct
  misc_feature 1..20: note = chemically synthesized
  source 1..20: mol_type = other DNA
cagtatttcagaacaaaaat

SEQ ID NO: 31475 - DNA, 20 bp, synthetic construct
  misc_feature 1..20: note = chemically synthesized
  source 1..20: mol_type = other DNA
aaattagagttagttcataa

SEQ ID NO: 31476 - DNA, 20 bp, synthetic construct
  misc_feature 1..20: note = chemically synthesized
  source 1..20: mol_type = other DNA
tcatcacatgccttaccagt

SEQ ID NO: 31477 - DNA, 20 bp, synthetic construct
  misc_feature 1..20: note = chemically synthesized
  source 1..20: mol_type = other DNA
ggcacatgcttttcaatagt

SEQ ID NO: 31478 - DNA, 20 bp, synthetic construct
  misc_feature 1..20: note = chemically synthesized
  source 1..20: mol_type = other DNA
tagcaatttaattacattaa

SEQ ID NO: 31479 - DNA, 20 bp, synthetic construct
  misc_feature 1..20: note = chemically synthesized
  source 1..20: mol_type = other DNA
ttgaggttgctgacagaaaa

SEQ ID NO: 31480 - DNA, 20 bp, synthetic construct
  misc_feature 1..20: note = chemically synthesized
  source 1..20: mol_type = other DNA
gcagccatgcacaaaggcac

SEQ ID NO: 31481 - DNA, 20 bp, synthetic construct
  misc_feature 1..20: note = chemically synthesized
  source 1..20: mol_type = other DNA
gtgaggtctttgtcaccttg

SEQ ID NO: 31482 - DNA, 20 bp, synthetic construct
  misc_feature 1..20: note = chemically synthesized
  source 1..20: mol_type = other DNA
gggtctgaggactggtgcgc

SEQ ID NO: 31483 - DNA, 20 bp, synthetic construct
  misc_feature 1..20: note = chemically synthesized
  source 1..20: mol_type = other DNA
cgtcctgagccagctctgtc

SEQ ID NO: 31484 - DNA, 20 bp, synthetic construct
  misc_feature 1..20: note = chemically synthesized
  source 1..20: mol_type = other DNA
aacactgtctgaagttttcc

SEQ ID NO: 31485 - DNA, 20 bp, synthetic construct
  misc_feature 1..20: note = chemically synthesized
  source 1..20: mol_type = other DNA
tttccaggggtttgacagac

SEQ ID NO: 31486 - DNA, 20 bp, synthetic construct
  misc_feature 1..20: note = chemically synthesized
  source 1..20: mol_type = other DNA
gactcttcctctgatgcaga

SEQ ID NO: 31487 - DNA, 20 bp, synthetic construct
  misc_feature 1..20: note = chemically synthesized
  source 1..20: mol_type = other DNA
tccatgccctcagagaaagt

SEQ ID NO: 31488 - DNA, 20 bp, synthetic construct
  misc_feature 1..20: note = chemically synthesized
  source 1..20: mol_type = other DNA
acctctctgtgatttctatg

SEQ ID NO: 31489 - DNA, 20 bp, synthetic construct
  misc_feature 1..20: note = chemically synthesized
  source 1..20: mol_type = other DNA
gatttctatggtgggtgtca

SEQ ID NO: 31490 - DNA, 20 bp, synthetic construct
  misc_feature 1..20: note = chemically synthesized
  source 1..20: mol_type = other DNA
gtcaaaggatggctgggaaa

SEQ ID NO: 31491 - DNA, 20 bp, synthetic construct
  misc_feature 1..20: note = chemically synthesized
  source 1..20: mol_type = other DNA
tgtgctaacatcccttgcct

SEQ ID NO: 31492 - DNA, 20 bp, synthetic construct
  misc_feature 1..20: note = chemically synthesized
  source 1..20: mol_type = other DNA
cataccctgcaaagccctat

SEQ ID NO: 31493 - DNA, 20 bp, synthetic construct
  misc_feature 1..20: note = chemically synthesized
  source 1..20: mol_type = other DNA
aggtggggctgctattgctt

SEQ ID NO: 31494 - DNA, 20 bp, synthetic construct
  misc_feature 1..20: note = chemically synthesized
  source 1..20: mol_type = other DNA
ctattgcttctgggtattta

SEQ ID NO: 31495 - DNA, 20 bp, synthetic construct
  misc_feature 1..20: note = chemically synthesized
  source 1..20: mol_type = other DNA
ctgcccaccgttgttttggg

SEQ ID NO: 31496 - DNA, 20 bp, synthetic construct
  misc_feature 1..20: note = chemically synthesized
  source 1..20: mol_type = other DNA
ggatttccccctccctcagg

SEQ ID NO: 31497 - DNA, 20 bp, synthetic construct
  misc_feature 1..20: note = chemically synthesized
  source 1..20: mol_type = other DNA
gtaattggcccttcccattt

SEQ ID NO: 31498 - DNA, 20 bp, synthetic construct
  misc_feature 1..20: note = chemically synthesized
  source 1..20: mol_type = other DNA
ttcccatttaagagtcagcc

SEQ ID NO: 31499 - DNA, 20 bp, synthetic construct
  misc_feature 1..20: note = chemically synthesized
  source 1..20: mol_type = other DNA
aggttacccaccctccgtca

SEQ ID NO: 31500 - DNA, 20 bp, synthetic construct
  misc_feature 1..20: note = chemically synthesized
  source 1..20: mol_type = other DNA
gtcccctgcttccgggaggt

SEQ ID NO: 31501 - DNA, 20 bp, synthetic construct
  misc_feature 1..20: note = chemically synthesized
  source 1..20: mol_type = other DNA
ggaggtgggaatgcatgtgg

SEQ ID NO: 31502 - DNA, 20 bp, synthetic construct
  misc_feature 1..20: note = chemically synthesized
  source 1..20: mol_type = other DNA
atttgagggagagaggccca

SEQ ID NO: 31503 - DNA, 20 bp, synthetic construct
  misc_feature 1..20: note = chemically synthesized
  source 1..20: mol_type = other DNA
agcacccgcttgttccctgt

SEQ ID NO: 31504 - DNA, 20 bp, synthetic construct
  misc_feature 1..20: note = chemically synthesized
  source 1..20: mol_type = other DNA
ctcactcggctgactacctg

SEQ ID NO: 31505 - DNA, 20 bp, synthetic construct
  misc_feature 1..20: note = chemically synthesized
  source 1..20: mol_type = other DNA
aggcatttggaacaatctgg

SEQ ID NO: 31506 - DNA, 20 bp, synthetic construct
  misc_feature 1..20: note = chemically synthesized
  source 1..20: mol_type = other DNA
tttggaacaatctggaagaa

SEQ ID NO: 31507 - DNA, 20 bp, synthetic construct
  misc_feature 1..20: note = chemically synthesized
  source 1..20: mol_type = other DNA
ggacacccttgaagccgttt

SEQ ID NO: 31508 - DNA, 20 bp, synthetic construct
  misc_feature 1..20: note = chemically synthesized
  source 1..20: mol_type = other DNA
aaaaattgggcccatccctt

SEQ ID NO: 31509 - DNA, 20 bp, synthetic construct
  misc_feature 1..20: note = chemically synthesized
  source 1..20: mol_type = other DNA
tccattgtgctgttagtaat

SEQ ID NO: 31510 - DNA, 20 bp, synthetic construct
  misc_feature 1..20: note = chemically synthesized
  source 1..20: mol_type = other DNA
gtgctgttagtaatgaggat

SEQ ID NO: 31511 - DNA, 20 bp, synthetic construct
  misc_feature 1..20: note = chemically synthesized
  source 1..20: mol_type = other DNA
gataaaatcacatttttttt

SEQ ID NO: 31512 - DNA, 20 bp, synthetic construct
  misc_feature 1..20: note = chemically synthesized
  source 1..20: mol_type = other DNA
ttttttgagtaagccctttg

SEQ ID NO: 31513 - DNA, 20 bp, synthetic construct
  misc_feature 1..20: note = chemically synthesized
  source 1..20: mol_type = other DNA
gtcaaattgagactcacctc

SEQ ID NO: 31514 - DNA, 20 bp, synthetic construct
  misc_feature 1..20: note = chemically synthesized
  source 1..20: mol_type = other DNA
ccctgtgaagaggcaggaga

SEQ ID NO: 31515 - DNA, 20 bp, synthetic construct
  misc_feature 1..20: note = chemically synthesized
  source 1..20: mol_type = other DNA
gtctggtctcatgcagccgc

SEQ ID NO: 31516 - DNA, 20 bp, synthetic construct
  misc_feature 1..20: note = chemically synthesized
  source 1..20: mol_type = other DNA
tgcagccgcaggggtagact

SEQ ID NO: 31517 - DNA, 20 bp, synthetic construct
  misc_feature 1..20: note = chemically synthesized
  source 1..20: mol_type = other DNA
atccagaactccttatactt

SEQ ID NO: 31518 - DNA, 20 bp, synthetic construct
  misc_feature 1..20: note = chemically synthesized
  source 1..20: mol_type = other DNA
acgcttccacagcctgcaca

SEQ ID NO: 31519 - DNA, 20 bp, synthetic construct
  misc_feature 1..20: note = chemically synthesized
  source 1..20: mol_type = other DNA
tggtaggggaggcatgtgat

SEQ ID NO: 31520 - DNA, 20 bp, synthetic construct
  misc_feature 1..20: note = chemically synthesized
  source 1..20: mol_type = other DNA
gggcttgggggagacagaga

SEQ ID NO: 31521 - DNA, 20 bp, synthetic construct
  misc_feature 1..20: note = chemically synthesized
  source 1..20: mol_type = other DNA
tgccttggagattatttttt

SEQ ID NO: 31522 - DNA, 20 bp, synthetic construct
  misc_feature 1..20: note = chemically synthesized
  source 1..20: mol_type = other DNA
tggcctcctctgccttttca

SEQ ID NO: 31523 - DNA, 20 bp, synthetic construct
  misc_feature 1..20: note = chemically synthesized
  source 1..20: mol_type = other DNA
cttttcagtgggtggctggg

SEQ ID NO: 31524 - DNA, 20 bp, synthetic construct
  misc_feature 1..20: note = chemically synthesized
  source 1..20: mol_type = other DNA
cttgcagtgactaagaaagg

SEQ ID NO: 31525 - DNA, 20 bp, synthetic construct
  misc_feature 1..20: note = chemically synthesized
  source 1..20: mol_type = other DNA
gtgccggtaggcagcagttc

SEQ ID NO: 31526 - DNA, 20 bp, synthetic construct
  misc_feature 1..20: note = chemically synthesized
  source 1..20: mol_type = other DNA
gagcatctctgttctgtttg

SEQ ID NO: 31527 - DNA, 20 bp, synthetic construct
  misc_feature 1..20: note = chemically synthesized
  source 1..20: mol_type = other DNA
gggagtcctgccaggcaagt

SEQ ID NO: 31528 - DNA, 20 bp, synthetic construct
  misc_feature 1..20: note = chemically synthesized
  source 1..20: mol_type = other DNA
tgtcatgggggcagtgtcgg

SEQ ID NO: 31529 - DNA, 20 bp, synthetic construct
  misc_feature 1..20: note = chemically synthesized
  source 1..20: mol_type = other DNA
gtcggctgagtggtactctt

SEQ ID NO: 31530 - DNA, 20 bp, synthetic construct
  misc_feature 1..20: note = chemically synthesized
  source 1..20: mol_type = other DNA
gtggtactcttcagagttct

SEQ ID NO: 31531 - DNA, 20 bp, synthetic construct
  misc_feature 1..20: note = chemically synthesized
  source 1..20: mol_type = other DNA
tccagcaggcttctagcaga

SEQ ID NO: 31532 - DNA, 20 bp, synthetic construct
  misc_feature 1..20: note = chemically synthesized
  source 1..20: mol_type = other DNA
tctagcagatggggttttgg

SEQ ID NO: 31533 - DNA, 20 bp, synthetic construct
  misc_feature 1..20: note = chemically synthesized
  source 1..20: mol_type = other DNA
ttcttgctttcttttttttc

SEQ ID NO: 31534 - DNA, 20 bp, synthetic construct
  misc_feature 1..20: note = chemically synthesized
  source 1..20: mol_type = other DNA
ccaattttcaggaggtttag

SEQ ID NO: 31535 - DNA, 20 bp, synthetic construct
  misc_feature 1..20: note = chemically synthesized
  source 1..20: mol_type = other DNA
ttcaggaggtttagatgaat

SEQ ID NO: 31536 - DNA, 20 bp, synthetic construct
  misc_feature 1..20: note = chemically synthesized
  source 1..20: mol_type = other DNA
taaagctctgacaaaagatc

SEQ ID NO: 31537 - DNA, 20 bp, synthetic construct
  misc_feature 1..20: note = chemically synthesized
  source 1..20: mol_type = other DNA
ttgtcccttgcagtgggctt

SEQ ID NO: 31538 - DNA, 20 bp, synthetic construct
  misc_feature 1..20: note = chemically synthesized
  source 1..20: mol_type = other DNA
ttggctcctaaatcttctag

SEQ ID NO: 31539 - DNA, 20 bp, synthetic construct
  misc_feature 1..20: note = chemically synthesized
  source 1..20: mol_type = other DNA
tggcagctataggtttccag

SEQ ID NO: 31540 - DNA, 20 bp, synthetic construct
  misc_feature 1..20: note = chemically synthesized
  source 1..20: mol_type = other DNA
ggagggtgaacaagggccat

SEQ ID NO: 31541 - DNA, 20 bp, synthetic construct
  misc_feature 1..20: note = chemically synthesized
  source 1..20: mol_type = other DNA
ttgctgagggcttctcagtc

SEQ ID NO: 31542 - DNA, 20 bp, synthetic construct
  misc_feature 1..20: note = chemically synthesized
  source 1..20: mol_type = other DNA
tcagtcctgggtaggaactg

SEQ ID NO: 31543 - DNA, 20 bp, synthetic construct
  misc_feature 1..20: note = chemically synthesized
  source 1..20: mol_type = other DNA
tcccagatttgggcaatcta

SEQ ID NO: 31544 - DNA, 20 bp, synthetic construct
  misc_feature 1..20: note = chemically synthesized
  source 1..20: mol_type = other DNA
gcaatctaatggataggagg

SEQ ID NO: 31545 - DNA, 20 bp, synthetic construct
  misc_feature 1..20: note = chemically synthesized
  source 1..20: mol_type = other DNA
gggagggttatgccccatct

SEQ ID NO: 31546 - DNA, 20 bp, synthetic construct
  misc_feature 1..20: note = chemically synthesized
  source 1..20: mol_type = other DNA
atctgtgaataggtggagga

SEQ ID NO: 31547 - DNA, 20 bp, synthetic construct
  misc_feature 1..20: note = chemically synthesized
  source 1..20: mol_type = other DNA
ccagggacatgtctggctcc

SEQ ID NO: 31548 - DNA, 20 bp, synthetic construct
  misc_feature 1..20: note = chemically synthesized
  source 1..20: mol_type = other DNA
gaatgcctgtccaggctgcg

SEQ ID NO: 31549 - DNA, 20 bp, synthetic construct
  misc_feature 1..20: note = chemically synthesized
  source 1..20: mol_type = other DNA
tccaggctgcggtgggtggc

SEQ ID NO: 31550 - DNA, 20 bp, synthetic construct
  misc_feature 1..20: note = chemically synthesized
  source 1..20: mol_type = other DNA
ctgcggtgggtggcatgggt

SEQ ID NO: 31551 - DNA, 20 bp, synthetic construct
  misc_feature 1..20: note = chemically synthesized
  source 1..20: mol_type = other DNA
agccacctgccttttctgtc

SEQ ID NO: 31552 - DNA, 20 bp, synthetic construct
  misc_feature 1..20: note = chemically synthesized
  source 1..20: mol_type = other DNA
gtcagagcctcctgaggctg

SEQ ID NO: 31553 - DNA, 20 bp, synthetic construct
  misc_feature 1..20: note = chemically synthesized
  source 1..20: mol_type = other DNA
agaatggggctaacatgatc

SEQ ID NO: 31554 - DNA, 20 bp, synthetic construct
  misc_feature 1..20: note = chemically synthesized
  source 1..20: mol_type = other DNA
ggcttctccatcttgggact

SEQ ID NO: 31555 - DNA, 20 bp, synthetic construct
  misc_feature 1..20: note = chemically synthesized
  source 1..20: mol_type = other DNA
tcccattgccaggacaaatg

SEQ ID NO: 31556 - DNA, 20 bp, synthetic construct
  misc_feature 1..20: note = chemically synthesized
  source 1..20: mol_type = other DNA
attgccaggacaaatgcaga

SEQ ID NO: 31557 - DNA, 20 bp, synthetic construct
  misc_feature 1..20: note = chemically synthesized
  source 1..20: mol_type = other DNA
aggacaaatgcagagtggat

SEQ ID NO: 31558 - DNA, 20 bp, synthetic construct
  misc_feature 1..20: note = chemically synthesized
  source 1..20: mol_type = other DNA
ctcccctggtcacatagttt

SEQ ID NO: 31559 - DNA, 20 bp, synthetic construct
  misc_feature 1..20: note = chemically synthesized
  source 1..20: mol_type = other DNA
tagtttctgggtgacaggac

SEQ ID NO: 31560 - DNA, 20 bp, synthetic construct
  misc_feature 1..20: note = chemically synthesized
  source 1..20: mol_type = other DNA
ttatttcttttgatcaccaa

SEQ ID NO: 31561 - DNA, 20 bp, synthetic construct
  misc_feature 1..20: note = chemically synthesized
  source 1..20: mol_type = other DNA
atcaagaacattacaacaca

SEQ ID NO: 31562 - DNA, 20 bp, synthetic construct
  misc_feature 1..20: note = chemically synthesized
  source 1..20: mol_type = other DNA
tattttaatattagaaagca

SEQ ID NO: 31563 - DNA, 20 bp, synthetic construct
  misc_feature 1..20: note = chemically synthesized
  source 1..20: mol_type = other DNA
taatattagaaagcatggga

SEQ ID NO: 31564 - DNA, 20 bp, synthetic construct
  misc_feature 1..20: note = chemically synthesized
  source 1..20: mol_type = other DNA
attgggtgtgaacactgctt

SEQ ID NO: 31565 - DNA, 20 bp, synthetic construct
  misc_feature 1..20: note = chemically synthesized
  source 1..20: mol_type = other DNA
aggagcaatacctgagatcc

SEQ ID NO: 31566 - DNA, 20 bp, synthetic construct
  misc_feature 1..20: note = chemically synthesized
  source 1..20: mol_type = other DNA
agaaaccccctgctactctt

SEQ ID NO: 31567 - DNA, 20 bp, synthetic construct
  misc_feature 1..20: note = chemically synthesized
  source 1..20: mol_type = other DNA
tttatttttccgtttgctca

SEQ ID NO: 31568 - DNA, 20 bp, synthetic construct
  misc_feature 1..20: note = chemically synthesized
  source 1..20: mol_type = other DNA
tttcaccagcttttacaaag

SEQ ID NO: 31569 - DNA, 20 bp, synthetic construct
  misc_feature 1..20: note = chemically synthesized
  source 1..20: mol_type = other DNA
ttcatatcattctgatagtc

SEQ ID NO: 31570 - DNA, 20 bp, synthetic construct
  misc_feature 1..20: note = chemically synthesized
  source 1..20: mol_type = other DNA
ctggtggtacagcttctctg

SEQ ID NO: 31571 - DNA, 20 bp, synthetic construct
  misc_feature 1..20: note = chemically synthesized
  source 1..20: mol_type = other DNA
taattcactagtaaaataat

SEQ ID NO: 31572 - DNA, 20 bp, synthetic construct
  misc_feature 1..20: note = chemically synthesized
  source 1..20: mol_type = other DNA
attagaataaaaggctgttt

SEQ ID NO: 31573 - DNA, 20 bp, synthetic construct
  misc_feature 1..20: note = chemically synthesized
  source 1..20: mol_type = other DNA
gaggggctgatataacttct

SEQ ID NO: 31574 - DNA, 20 bp, synthetic construct
  misc_feature 1..20: note = chemically synthesized
  source 1..20: mol_type = other DNA
cagcactttgggaggccgag

SEQ ID NO: 31575 - DNA, 20 bp, synthetic construct
  misc_feature 1..20: note = chemically synthesized
  source 1..20: mol_type = other DNA
tgggtagatcacctgaggtc

SEQ ID NO: 31576 - DNA, 20 bp, synthetic construct
  misc_feature 1..20: note = chemically synthesized
  source 1..20: mol_type = other DNA
tactcaggaggctgagggag

SEQ ID NO: 31577 - DNA, 20 bp, synthetic construct
  misc_feature 1..20: note = chemically synthesized
  source 1..20: mol_type = other DNA
gaagtgattaatcatattac

SEQ ID NO: 31578 - DNA, 20 bp, synthetic construct
  misc_feature 1..20: note = chemically synthesized
  source 1..20: mol_type = other DNA
ctgtgagctccttgagggca

SEQ ID NO: 31579 - DNA, 20 bp, synthetic construct
  misc_feature 1..20: note = chemically synthesized
  source 1..20: mol_type = other DNA
gcactacaggtttggaccaa

SEQ ID NO: 31580 - DNA, 20 bp, synthetic construct
  misc_feature 1..20: note = chemically synthesized
  source 1..20: mol_type = other DNA
atgaattaaattggctgcca

SEQ ID NO: 31581 - DNA, 20 bp, synthetic construct
  misc_feature 1..20: note = chemically synthesized
  source 1..20: mol_type = other DNA
tggctgccattgaatcaaag

SEQ ID NO: 31582 - DNA, 20 bp, synthetic construct
  misc_feature 1..20: note = chemically synthesized
  source 1..20: mol_type = other DNA
taatataaataagtgcaaaa

SEQ ID NO: 31583 - DNA, 20 bp, synthetic construct
  misc_feature 1..20: note = chemically synthesized
  source 1..20: mol_type = other DNA
tcctgtggagacctctgttg

SEQ ID NO: 31584 - DNA, 20 bp, synthetic construct
  misc_feature 1..20: note = chemically synthesized
  source 1..20: mol_type = other DNA
gtggagacctctgttgctga

SEQ ID NO: 31585 - DNA, 20 bp, synthetic construct
  misc_feature 1..20: note = chemically synthesized
  source 1..20: mol_type = other DNA
atgaggtcggctgagcagtt

SEQ ID NO: 31586 - DNA, 20 bp, synthetic construct
  misc_feature 1..20: note = chemically synthesized
  source 1..20: mol_type = other DNA
ggttctcccattttacagag

SEQ ID NO: 31587 - DNA, 20 bp, synthetic construct
  misc_feature 1..20: note = chemically synthesized
  source 1..20: mol_type = other DNA
caggaaattggtggtagatg

SEQ ID NO: 31588 - DNA, 20 bp, synthetic construct
  misc_feature 1..20: note = chemically synthesized
  source 1..20: mol_type = other DNA
catctgtctaacttgggagc

SEQ ID NO: 31589 - DNA, 20 bp, synthetic construct
  misc_feature 1..20: note = chemically synthesized
  source 1..20: mol_type = other DNA
tgaagtgaggtgccccgact

SEQ ID NO: 31590 - DNA, 20 bp, synthetic construct
  misc_feature 1..20: note = chemically synthesized
  source 1..20: mol_type = other DNA
gtcttataccttaactggtg

SEQ ID NO: 31591 - DNA, 20 bp, synthetic construct
  misc_feature 1..20: note = chemically synthesized
  source 1..20: mol_type = other DNA
tagctctgaaccctgtcctg

SEQ ID NO: 31592 - DNA, 20 bp, synthetic construct
  misc_feature 1..20: note = chemically synthesized
  source 1..20: mol_type = other DNA
tcctgaggagttgggaagtg

SEQ ID NO: 31593 - DNA, 20 bp, synthetic construct
  misc_feature 1..20: note = chemically synthesized
  source 1..20: mol_type = other DNA
tctccttccttccctggctc

SEQ ID NO: 31594 - DNA, 20 bp, synthetic construct
  misc_feature 1..20: note = chemically synthesized
  source 1..20: mol_type = other DNA
gctctgatgtaagttcctgc

SEQ ID NO: 31595 - DNA, 20 bp, synthetic construct
  misc_feature 1..20: note = chemically synthesized
  source 1..20: mol_type = other DNA
acaggagacaaacaccagct

SEQ ID NO: 31596 - DNA, 20 bp, synthetic construct
  misc_feature 1..20: note = chemically synthesized
  source 1..20: mol_type = other DNA
aagagtaaacagcctggcag

SEQ ID NO: 31597 - DNA, 20 bp, synthetic construct
  misc_feature 1..20: note = chemically synthesized
  source 1..20: mol_type = other DNA
gtaaacagcctggcagtggg

SEQ ID NO: 31598 - DNA, 20 bp, synthetic construct
  misc_feature 1..20: note = chemically synthesized
  source 1..20: mol_type = other DNA
caggtcggtggctgctctct

SEQ ID NO: 31599 - DNA, 20 bp, synthetic construct
  misc_feature 1..20: note = chemically synthesized
  source 1..20: mol_type = other DNA
gggcttgaggtctggtgctt

SEQ ID NO: 31600 - DNA, 20 bp, synthetic construct
  misc_feature 1..20: note = chemically synthesized
  source 1..20: mol_type = other DNA
gaggaagagaagacagatgg

SEQ ID NO: 31601 - DNA, 20 bp, synthetic construct
  misc_feature 1..20: note = chemically synthesized
  source 1..20: mol_type = other DNA
gggcctcactgacacctgca

SEQ ID NO: 31602 - DNA, 20 bp, synthetic construct
  misc_feature 1..20: note = chemically synthesized
  source 1..20: mol_type = other DNA
ggggttggtggggaggtatg

SEQ ID NO: 31603 - DNA, 20 bp, synthetic construct
  misc_feature 1..20: note = chemically synthesized
  source 1..20: mol_type = other DNA
ggggaggtatgaggggttgg

SEQ ID NO: 31604 - DNA, 20 bp, synthetic construct
  misc_feature 1..20: note = chemically synthesized
  source 1..20: mol_type = other DNA
gactctaaagtcagctacac

SEQ ID NO: 31605 - DNA, 20 bp, synthetic construct
  misc_feature 1..20: note = chemically synthesized
  source 1..20: mol_type = other DNA
tgggaagaaatatcacttag

SEQ ID NO: 31606 - DNA, 20 bp, synthetic construct
  misc_feature 1..20: note = chemically synthesized
  source 1..20: mol_type = other DNA
aatatcacttagaggagtta

SEQ ID NO: 31607 - DNA, 20 bp, synthetic construct
  misc_feature 1..20: note = chemically synthesized
  source 1..20: mol_type = other DNA
cagaatgtgcaacctttccc

SEQ ID NO: 31608 - DNA, 20 bp, synthetic construct
  misc_feature 1..20: note = chemically synthesized
  source 1..20: mol_type = other DNA
cccaggagtattgctcctga

SEQ ID NO: 31609 - DNA, 20 bp, synthetic construct
  misc_feature 1..20: note = chemically synthesized
  source 1..20: mol_type = other DNA
cctccagcactgtggcccag

SEQ ID NO: 31610 - DNA, 20 bp, synthetic construct
  misc_feature 1..20: note = chemically synthesized
  source 1..20: mol_type = other DNA
tcacacccctgcagctctgt

SEQ ID NO: 31611 - DNA, 20 bp, synthetic construct
  misc_feature 1..20: note = chemically synthesized
  source 1..20: mol_type = other DNA
gataatggcagcccagaaac

SEQ ID NO: 31612 - DNA, 20 bp, synthetic construct
  misc_feature 1..20: note = chemically synthesized
  source 1..20: mol_type = other DNA
gaatactggggaacacattg

SEQ ID NO: 31613 - DNA, 20 bp, synthetic construct
  misc_feature 1..20: note = chemically synthesized
  source 1..20: mol_type = other DNA
tagctgtagcattcttccct

SEQ ID NO: 31614 - DNA, 20 bp, synthetic construct
  misc_feature 1..20: note = chemically synthesized
  source 1..20: mol_type = other DNA
tttggatgcctgtgtgggga

SEQ ID NO: 31615 - DNA, 20 bp, synthetic construct
  misc_feature 1..20: note = chemically synthesized
  source 1..20: mol_type = other DNA
ctgtgtggggacagaatcag

SEQ ID NO: 31616 - DNA, 20 bp, synthetic construct
  misc_feature 1..20: note = chemically synthesized
  source 1..20: mol_type = other DNA
ctattagacaaacgtagttt

SEQ ID NO: 31617 - DNA, 20 bp, synthetic construct
  misc_feature 1..20: note = chemically synthesized
  source 1..20: mol_type = other DNA
tagacaaacgtagtttctgg

SEQ ID NO: 31618 - DNA, 20 bp, synthetic construct
  misc_feature 1..20: note = chemically synthesized
  source 1..20: mol_type = other DNA
tggatgagttggacagtcat

SEQ ID NO: 31619 - DNA, 20 bp, synthetic construct
  misc_feature 1..20: note = chemically synthesized
  source 1..20: mol_type = other DNA
tcagagaactggcagtctgg

SEQ ID NO: 31620 - DNA, 20 bp, synthetic construct
  misc_feature 1..20: note = chemically synthesized
  source 1..20: mol_type = other DNA
cttctctttactgatcttat

SEQ ID NO: 31621 - DNA, 20 bp, synthetic construct
  misc_feature 1..20: note = chemically synthesized
  source 1..20: mol_type = other DNA
gatcttatgtgagtaggtag

SEQ ID NO: 31622 - DNA, 20 bp, synthetic construct
  misc_feature 1..20: note = chemically synthesized
  source 1..20: mol_type = other DNA
gtgccagaggtggctaaata

SEQ ID NO: 31623 - DNA, 20 bp, synthetic construct
  misc_feature 1..20: note = chemically synthesized
  source 1..20: mol_type = other DNA
ggccaattctaggaagggaa

SEQ ID NO: 31624 - DNA, 20 bp, synthetic construct
  misc_feature 1..20: note = chemically synthesized
  source 1..20: mol_type = other DNA
gcccattgccttcctggtac

SEQ ID NO: 31625 - DNA, 20 bp, synthetic construct
  misc_feature 1..20: note = chemically synthesized
  source 1..20: mol_type = other DNA
acccctctgtccagcccagc

SEQ ID NO: 31626 - DNA, 20 bp, synthetic construct
  misc_feature 1..20: note = chemically synthesized
  source 1..20: mol_type = other DNA
tgtgcttggtcggcactgat

SEQ ID NO: 31627 - DNA, 20 bp, synthetic construct
  misc_feature 1..20: note = chemically synthesized
  source 1..20: mol_type = other DNA
cactgataggggtcgcggta

SEQ ID NO: 31628 - DNA, 20 bp, synthetic construct
  misc_feature 1..20: note = chemically synthesized
  source 1..20: mol_type = other DNA
cacttctgtgcccagggctg

SEQ ID NO: 31629 - DNA, 20 bp, synthetic construct
  misc_feature 1..20: note = chemically synthesized
  source 1..20: mol_type = other DNA
acatagaggcccttcctgct

SEQ ID NO: 31630 - DNA, 20 bp, synthetic construct
  misc_feature 1..20: note = chemically synthesized
  source 1..20: mol_type = other DNA
tgactcaccccagccctgct

SEQ ID NO: 31631 - DNA, 20 bp, synthetic construct
  misc_feature 1..20: note = chemically synthesized
  source 1..20: mol_type = other DNA
aagagaagacccctgctctt

SEQ ID NO: 31632 - DNA, 20 bp, synthetic construct
  misc_feature 1..20: note = chemically synthesized
  source 1..20: mol_type = other DNA
tgctcttgagggtctgccag

SEQ ID NO: 31633 - DNA, 20 bp, synthetic construct
  misc_feature 1..20: note = chemically synthesized
  source 1..20: mol_type = other DNA
tccccacctccatgggcctc

SEQ ID NO: 31634 - DNA, 20 bp, synthetic construct
  misc_feature 1..20: note = chemically synthesized
  source 1..20: mol_type = other DNA
ctgcaacaccctgaccttta

SEQ ID NO: 31635 - DNA, 20 bp, synthetic construct
  misc_feature 1..20: note = chemically synthesized
  source 1..20: mol_type = other DNA
catcctcggccaatgaagcg

SEQ ID NO: 31636 - DNA, 20 bp, synthetic construct
  misc_feature 1..20: note = chemically synthesized
  source 1..20: mol_type = other DNA
gtttcatttaggacaatgtg

SEQ ID NO: 31637 - DNA, 20 bp, synthetic construct
  misc_feature 1..20: note = chemically synthesized
  source 1..20: mol_type = other DNA
tccttttgatcatttctcta

SEQ ID NO: 31638 - DNA, 20 bp, synthetic construct
  misc_feature 1..20: note = chemically synthesized
  source 1..20: mol_type = other DNA
aaatgagacaaaagaggcca

SEQ ID NO: 31639 - DNA, 20 bp, synthetic construct
  misc_feature 1..20: note = chemically synthesized
  source 1..20: mol_type = other DNA
gtgatagttcagagaaagag

SEQ ID NO: 31640 - DNA, 20 bp, synthetic construct
  misc_feature 1..20: note = chemically synthesized
  source 1..20: mol_type = other DNA
aaggccttccaaaaaaagta

SEQ ID NO: 31641 - DNA, 20 bp, synthetic construct
  misc_feature 1..20: note = chemically synthesized
  source 1..20: mol_type = other DNA
ggtcattatcatcaccatta

SEQ ID NO: 31642 - DNA, 20 bp, synthetic construct
  misc_feature 1..20: note = chemically synthesized
  source 1..20: mol_type = other DNA
tagtgactggtaagagccga

SEQ ID NO: 31643 - DNA, 20 bp, synthetic construct
  misc_feature 1..20: note = chemically synthesized
  source 1..20: mol_type = other DNA
gattcctgatgttaggggcc

SEQ ID NO: 31644 - DNA, 20 bp, synthetic construct
  misc_feature 1..20: note = chemically synthesized
  source 1..20: mol_type = other DNA
gggccatgaatctgtctacc

SEQ ID NO: 31645 - DNA, 20 bp, synthetic construct
  misc_feature 1..20: note = chemically synthesized
  source 1..20: mol_type = other DNA
taacctgagggctagtttct

SEQ ID NO: 31646 - DNA, 20 bp, synthetic construct
  misc_feature 1..20: note = chemically synthesized
  source 1..20: mol_type = other DNA
taaagacagttcatatatgc

SEQ ID NO: 31647 - DNA, 20 bp, synthetic construct
  misc_feature 1..20: note = chemically synthesized
  source 1..20: mol_type = other DNA
attttcccccctctttacaa

SEQ ID NO: 31648 - DNA, 20 bp, synthetic construct
  misc_feature 1..20: note = chemically synthesized
  source 1..20: mol_type = other DNA
cacagtggtattcctttcaa

SEQ ID NO: 31649 - DNA, 20 bp, synthetic construct
  misc_feature 1..20: note = chemically synthesized
  source 1..20: mol_type = other DNA
ctagctctagctctagctta

SEQ ID NO: 31650 - DNA, 20 bp, synthetic construct
  misc_feature 1..20: note = chemically synthesized
  source 1..20: mol_type = other DNA
cttaggggatgctagctaaa

SEQ ID NO: 31651 - DNA, 20 bp, synthetic construct
  misc_feature 1..20: note = chemically synthesized
  source 1..20: mol_type = other DNA
ggatgctagctaaagggaat

SEQ ID NO: 31652 - DNA, 20 bp, synthetic construct
  misc_feature 1..20: note = chemically synthesized
  source 1..20: mol_type = other DNA
tgtccactcaacactggggg

SEQ ID NO: 31653 - DNA, 20 bp, synthetic construct
  misc_feature 1..20: note = chemically synthesized
  source 1..20: mol_type = other DNA
gtgagagcttatagtccctt

SEQ ID NO: 31654 - DNA, 20 bp, synthetic construct
  misc_feature 1..20: note = chemically synthesized
  source 1..20: mol_type = other DNA
ttatgactgtccatggggaa

SEQ ID NO: 31655 - DNA, 20 bp, synthetic construct
  misc_feature 1..20: note = chemically synthesized
  source 1..20: mol_type = other DNA
cagtgagggagatttgagga

SEQ ID NO: 31656 - DNA, 20 bp, synthetic construct
  misc_feature 1..20: note = chemically synthesized
  source 1..20: mol_type = other DNA
agagcactcacagtggaacc

SEQ ID NO: 31657 - DNA, 20 bp, synthetic construct
  misc_feature 1..20: note = chemically synthesized
  source 1..20: mol_type = other DNA
agagaaagtcggtgaggaga

SEQ ID NO: 31658 - DNA, 20 bp, synthetic construct
  misc_feature 1..20: note = chemically synthesized
  source 1..20: mol_type = other DNA
actcaccaggctcttccaga

SEQ ID NO: 31659 - DNA, 20 bp, synthetic construct
  misc_feature 1..20: note = chemically synthesized
  source 1..20: mol_type = other DNA
ttgcccctcagtaacaccac

SEQ ID NO: 31660 - DNA, 20 bp, synthetic construct
  misc_feature 1..20: note = chemically synthesized
  source 1..20: mol_type = other DNA
ctttcccggttctggttttc

SEQ ID NO: 31661 - DNA, 20 bp, synthetic construct
  misc_feature 1..20: note = chemically synthesized
  source 1..20: mol_type = other DNA
tcaattgacttttcacatat

SEQ ID NO: 31662 - DNA, 20 bp, synthetic construct
  misc_feature 1..20: note = chemically synthesized
  source 1..20: mol_type = other DNA
ttcacatatgagggtgacct

SEQ ID NO: 31663 - DNA, 20 bp, synthetic construct
  misc_feature 1..20: note = chemically synthesized
  source 1..20: mol_type = other DNA
aggtgttttaaaaaatagct

SEQ ID NO: 31664 - DNA, 20 bp, synthetic construct
  misc_feature 1..20: note = chemically synthesized
  source 1..20: mol_type = other DNA
tgacagcaccatttagagcc

SEQ ID NO: 31665 - DNA, 20 bp, synthetic construct
  misc_feature 1..20: note = chemically synthesized
  source 1..20: mol_type = other DNA
ccccaggctcccatggtggc

SEQ ID NO: 31666 - DNA, 20 bp, synthetic construct
  misc_feature 1..20: note = chemically synthesized
  source 1..20: mol_type = other DNA
aagggtttttggttggggga

SEQ ID NO: 31667 - DNA, 20 bp, synthetic construct
  misc_feature 1..20: note = chemically synthesized
  source 1..20: mol_type = other DNA
tttggttgggggaaggggta

SEQ ID NO: 31668 - DNA, 20 bp, synthetic construct
  misc_feature 1..20: note = chemically synthesized
  source 1..20: mol_type = other DNA
tgcctgtctttgagcaggaa

SEQ ID NO: 31669 - DNA, 20 bp, synthetic construct
  misc_feature 1..20: note = chemically synthesized
  source 1..20: mol_type = other DNA
gtgctgattgagggcccatt

SEQ ID NO: 31670 - DNA, 20 bp, synthetic construct
  misc_feature 1..20: note = chemically synthesized
  source 1..20: mol_type = other DNA
gctccaaactctcaaaccac

SEQ ID NO: 31671 - DNA, 20 bp, synthetic construct
  misc_feature 1..20: note = chemically synthesized
  source 1..20: mol_type = other DNA
tgtaagcatcacaacaggca

SEQ ID NO: 31672 - DNA, 20 bp, synthetic construct
  misc_feature 1..20: note = chemically synthesized
  source 1..20: mol_type = other DNA
gcaaaccagactagtttata

SEQ ID NO: 31673 - DNA, 20 bp, synthetic construct
  misc_feature 1..20: note = chemically synthesized
  source 1..20: mol_type = other DNA
ctctgaggtactgatggacc

SEQ ID NO: 31674 - DNA, 20 bp, synthetic construct
  misc_feature 1..20: note = chemically synthesized
  source 1..20: mol_type = other DNA
aaggcagctagacaggactt

SEQ ID NO: 31675 - DNA, 20 bp, synthetic construct
  misc_feature 1..20: note = chemically synthesized
  source 1..20: mol_type = other DNA
tactcttagacataacacac

SEQ ID NO: 31676 - DNA, 20 bp, synthetic construct
  misc_feature 1..20: note = chemically synthesized
  source 1..20: mol_type = other DNA
cttttatcacaggctccagg

SEQ ID NO: 31677 - DNA, 20 bp, synthetic construct
  misc_feature 1..20: note = chemically synthesized
  source 1..20: mol_type = other DNA
ggaagggtttggcctctgat

SEQ ID NO: 31678 - DNA, 20 bp, synthetic construct
  misc_feature 1..20: note = chemically synthesized
  source 1..20: mol_type = other DNA
cctctgattagggtgggggc

SEQ ID NO: 31679 - DNA, 20 bp, synthetic construct
  misc_feature 1..20: note = chemically synthesized
  source 1..20: mol_type = other DNA
gattagggtgggggcgtggg

SEQ ID NO: 31680 - DNA, 20 bp, synthetic construct
  misc_feature 1..20: note = chemically synthesized
  source 1..20: mol_type = other DNA
ggaaggctctcttggtgatg

SEQ ID NO: 31681 - DNA, 20 bp, synthetic construct
  misc_feature 1..20: note = chemically synthesized
  source 1..20: mol_type = other DNA
gctctcttggtgatggagaa

SEQ ID NO: 31682 - DNA, 20 bp, synthetic construct
  misc_feature 1..20: note = chemically synthesized
  source 1..20: mol_type = other DNA
attggattttatttctcaat

SEQ ID NO: 31683 - DNA, 20 bp, synthetic construct
  misc_feature 1..20: note = chemically synthesized
  source 1..20: mol_type = other DNA
tcaggtaccagctactgtgt

SEQ ID NO: 31684 - DNA, 20 bp, synthetic construct
  misc_feature 1..20: note = chemically synthesized
  source 1..20: mol_type = other DNA
cttttcttctgacccaaact

SEQ ID NO: 31685 - DNA, 20 bp, synthetic construct
  misc_feature 1..20: note = chemically synthesized
  source 1..20: mol_type = other DNA
actattattattcctatttt

SEQ ID NO: 31686 - DNA, 20 bp, synthetic construct
  misc_feature 1..20: note = chemically synthesized
  source 1..20: mol_type = other DNA
ttattattcctattttacgg

SEQ ID NO: 31687 - DNA, 20 bp, synthetic construct
  misc_feature 1..20: note = chemically synthesized
  source 1..20: mol_type = other DNA
acatttggtgataaatcatt

SEQ ID NO: 31688 - DNA, 20 bp, synthetic construct
  misc_feature 1..20: note = chemically synthesized
  source 1..20: mol_type = other DNA
taaatcattaggaatgagct

SEQ ID NO: 31689 - DNA, 20 bp, synthetic construct
  misc_feature 1..20: note = chemically synthesized
  source 1..20: mol_type = other DNA
ccaattggagattagggaga

SEQ ID NO: 31690 - DNA, 20 bp, synthetic construct
  misc_feature 1..20: note = chemically synthesized
  source 1..20: mol_type = other DNA
gcataagatttataagacat

SEQ ID NO: 31691 - DNA, 20 bp, synthetic construct
  misc_feature 1..20: note = chemically synthesized
  source 1..20: mol_type = other DNA
acagaggggcaacccaggtc

SEQ ID NO: 31692 - DNA, 20 bp, synthetic construct
  misc_feature 1..20: note = chemically synthesized
  source 1..20: mol_type = other DNA
ttgcttagcctgtgtagctc

SEQ ID NO: 31693 - DNA, 20 bp, synthetic construct
  misc_feature 1..20: note = chemically synthesized
  source 1..20: mol_type = other DNA
gtatttattgccctaggcgt

SEQ ID NO: 31694 - DNA, 20 bp, synthetic construct
  misc_feature 1..20: note = chemically synthesized
  source 1..20: mol_type = other DNA
ctggaggccctgtctccccc

SEQ ID NO: 31695 - DNA, 20 bp, synthetic construct
  misc_feature 1..20: note = chemically synthesized
  source 1..20: mol_type = other DNA
cctgccatggccaagctgat

SEQ ID NO: 31696 - DNA, 20 bp, synthetic construct
  misc_feature 1..20: note = chemically synthesized
  source 1..20: mol_type = other DNA
atgggggagggggaggcagg

SEQ ID NO: 31697 - DNA, 20 bp, synthetic construct
  misc_feature 1..20: note = chemically synthesized
  source 1..20: mol_type = other DNA
ctgggcagcagctgcctccc

SEQ ID NO: 31698 - DNA, 20 bp, synthetic construct
  misc_feature 1..20: note = chemically synthesized
  source 1..20: mol_type = other DNA
cacttaagttatctctgacc

SEQ ID NO: 31699 - DNA, 20 bp, synthetic construct
  misc_feature 1..20: note = chemically synthesized
  source 1..20: mol_type = other DNA
atttatttggcctgattcaa

SEQ ID NO: 31700 - DNA, 20 bp, synthetic construct
  misc_feature 1..20: note = chemically synthesized
  source 1..20: mol_type = other DNA
ttcaaatgaatgcccatttt

SEQ ID NO: 31701 - DNA, 20 bp, synthetic construct
  misc_feature 1..20: note = chemically synthesized
  source 1..20: mol_type = other DNA
tgcccattttaagaatgttt

SEQ ID NO: 31702 - DNA, 20 bp, synthetic construct
  misc_feature 1..20: note = chemically synthesized
  source 1..20: mol_type = other DNA
gtagtggagaggtttctatt

SEQ ID NO: 31703 - DNA, 20 bp, synthetic construct
  misc_feature 1..20: note = chemically synthesized
  source 1..20: mol_type = other DNA
ggagaggtttctattcggaa

SEQ ID NO: 31704 - DNA, 20 bp, synthetic construct
  misc_feature 1..20: note = chemically synthesized
  source 1..20: mol_type = other DNA
agctgagccaaacagatagc

SEQ ID NO: 31705 - DNA, 20 bp, synthetic construct
  misc_feature 1..20: note = chemically synthesized
  source 1..20: mol_type = other DNA
ccaaacagatagctgggata

SEQ ID NO: 31706 - DNA, 20 bp, synthetic construct
  misc_feature 1..20: note = chemically synthesized
  source 1..20: mol_type = other DNA
gatagctgggatatagggtt

SEQ ID NO: 31707 - DNA, 20 bp, synthetic construct
  misc_feature 1..20: note = chemically synthesized
  source 1..20: mol_type = other DNA
gtttggagttgaactctcca

SEQ ID NO: 31708 - DNA, 20 bp, synthetic construct
  misc_feature 1..20: note = chemically synthesized
  source 1..20: mol_type = other DNA
gagttgaactctccagggaa

SEQ ID NO: 31709 - DNA, 20 bp, synthetic construct
  misc_feature 1..20: note = chemically synthesized
  source 1..20: mol_type = other DNA
ggtgggaggggggcagcctg

SEQ ID NO: 31710 - DNA, 20 bp, synthetic construct
  misc_feature 1..20: note = chemically synthesized
  source 1..20: mol_type = other DNA
cccacatggcaaccaatagg

SEQ ID NO: 31711 - DNA, 20 bp, synthetic construct
  misc_feature 1..20: note = chemically synthesized
  source 1..20: mol_type = other DNA
catggcaaccaataggttga

SEQ ID NO: 31712 - DNA, 20 bp, synthetic construct
  misc_feature 1..20: note = chemically synthesized
  source 1..20: mol_type = other DNA
aatggataaacgccctatgg

SEQ ID NO: 31713 - DNA, 20 bp, synthetic construct
  misc_feature 1..20: note = chemically synthesized
  source 1..20: mol_type = other DNA
ggaatacaactcaacagtag

SEQ ID NO: 31714 - DNA, 20 bp, synthetic construct
  misc_feature 1..20: note = chemically synthesized
  source 1..20: mol_type = other DNA
actcaacagtagaagaatga

SEQ ID NO: 31715 - DNA, 20 bp, synthetic construct
  misc_feature 1..20: note = chemically synthesized
  source 1..20: mol_type = other DNA
agagtaacacactccacacc

SEQ ID NO: 31716 - DNA, 20 bp, synthetic construct
  misc_feature 1..20: note = chemically synthesized
  source 1..20: mol_type = other DNA
taacacactccacaccatgg

SEQ ID NO: 31717 - DNA, 20 bp, synthetic construct
  misc_feature 1..20: note = chemically synthesized
  source 1..20: mol_type = other DNA
tccacaccatggatgaatcc

SEQ ID NO: 31718 - DNA, 20 bp, synthetic construct
  misc_feature 1..20: note = chemically synthesized
  source 1..20: mol_type = other DNA
cacaaaagacgatatcctgt

SEQ ID NO: 31719 - DNA, 20 bp, synthetic construct
  misc_feature 1..20: note = chemically synthesized
  source 1..20: mol_type = other DNA
agtccatttgtaacaaattc

SEQ ID NO: 31720 - DNA, 20 bp, synthetic construct
  misc_feature 1..20: note = chemically synthesized
  source 1..20: mol_type = other DNA
tcaacactgtggtggtaggt

SEQ ID NO: 31721 - DNA, 20 bp, synthetic construct
  misc_feature 1..20: note = chemically synthesized
  source 1..20: mol_type = other DNA
gggttcagtggttagaagga

SEQ ID NO: 31722 - DNA, 20 bp, synthetic construct
  misc_feature 1..20: note = chemically synthesized
  source 1..20: mol_type = other DNA
tggttagaaggaaggggtca

SEQ ID NO: 31723 - DNA, 20 bp, synthetic construct
  misc_feature 1..20: note = chemically synthesized
  source 1..20: mol_type = other DNA
ggggtcagagggttagggaa

SEQ ID NO: 31724 - DNA, 20 bp, synthetic construct
  misc_feature 1..20: note = chemically synthesized
  source 1..20: mol_type = other DNA
agctgtatacaactggcaaa

SEQ ID NO: 31725 - DNA, 20 bp, synthetic construct
  misc_feature 1..20: note = chemically synthesized
  source 1..20: mol_type = other DNA
aatccaactgtacacttaaa

SEQ ID NO: 31726 - DNA, 20 bp, synthetic construct
  misc_feature 1..20: note = chemically synthesized
  source 1..20: mol_type = other DNA
caaaacaaaacacccaccac

SEQ ID NO: 31727 - DNA, 20 bp, synthetic construct
  misc_feature 1..20: note = chemically synthesized
  source 1..20: mol_type = other DNA
tgtctgtaacctttaactgt

SEQ ID NO: 31728 - DNA, 20 bp, synthetic construct
  misc_feature 1..20: note = chemically synthesized
  source 1..20: mol_type = other DNA
tcaagactctagccgtcttt

SEQ ID NO: 31729 - DNA, 20 bp, synthetic construct
  misc_feature 1..20: note = chemically synthesized
  source 1..20: mol_type = other DNA
aaagtacatttcagggaaat

SEQ ID NO: 31730 - DNA, 20 bp, synthetic construct
  misc_feature 1..20: note = chemically synthesized
  source 1..20: mol_type = other DNA
gagagggaggcccactgaga

SEQ ID NO: 31731 - DNA, 20 bp, synthetic construct
  misc_feature 1..20: note = chemically synthesized
  source 1..20: mol_type = other DNA
atccaccataagcagagcat

SEQ ID NO: 31732 - DNA, 20 bp, synthetic construct
  misc_feature 1..20: note = chemically synthesized
  source 1..20: mol_type = other DNA
catttgggtctgagaagcgc

SEQ ID NO: 31733 - DNA, 20 bp, synthetic construct
  misc_feature 1..20: note = chemically synthesized
  source 1..20: mol_type = other DNA
tgagaagcgcatgagtactg

SEQ ID NO: 31734 - DNA, 20 bp, synthetic construct
  misc_feature 1..20: note = chemically synthesized
  source 1..20: mol_type = other DNA
ggggaggaaatctgttttcc

SEQ ID NO: 31735 - DNA, 20 bp, synthetic construct
  misc_feature 1..20: note = chemically synthesized
  source 1..20: mol_type = other DNA
ttcaaaaagtaaaaagggga

SEQ ID NO: 31736 - DNA, 20 bp, synthetic construct
  misc_feature 1..20: note = chemically synthesized
  source 1..20: mol_type = other DNA
ttgtttgtttgtttttgaga

SEQ ID NO: 31737 - DNA, 20 bp, synthetic construct
  misc_feature 1..20: note = chemically synthesized
  source 1..20: mol_type = other DNA
tctcgctgtgttgcctaggc

SEQ ID NO: 31738 - DNA, 20 bp, synthetic construct
  misc_feature 1..20: note = chemically synthesized
  source 1..20: mol_type = other DNA
catcctgtcacctcagcctc

SEQ ID NO: 31739 - DNA, 20 bp, synthetic construct
  misc_feature 1..20: note = chemically synthesized
  source 1..20: mol_type = other DNA
cctggctaattttgtagaga

SEQ ID NO: 31740 - DNA, 20 bp, synthetic construct
  misc_feature 1..20: note = chemically synthesized
  source 1..20: mol_type = other DNA
gccttgacctcccaaagtgc

SEQ ID NO: 31741 - DNA, 20 bp, synthetic construct
  misc_feature 1..20: note = chemically synthesized
  source 1..20: mol_type = other DNA
acaatgtagcatctcctgtg

SEQ ID NO: 31742 - DNA, 20 bp, synthetic construct
  misc_feature 1..20: note = chemically synthesized
  source 1..20: mol_type = other DNA
gtgctgaattcctgtaaagt

SEQ ID NO: 31743 - DNA, 20 bp, synthetic construct
  misc_feature 1..20: note = chemically synthesized
  source 1..20: mol_type = other DNA
actgccttttctgaacctat

SEQ ID NO: 31744 - DNA, 20 bp, synthetic construct
  misc_feature 1..20: note = chemically synthesized
  source 1..20: mol_type = other DNA
atttgggtgctaaggactgt

SEQ ID NO: 31745 - DNA, 20 bp, synthetic construct
  misc_feature 1..20: note = chemically synthesized
  source 1..20: mol_type = other DNA
gtgctaaggactgtatggat

SEQ ID NO: 31746 - DNA, 20 bp, synthetic construct
  misc_feature 1..20: note = chemically synthesized
  source 1..20: mol_type = other DNA
acgtctgtgcctgcgtagtg

SEQ ID NO: 31747 - DNA, 20 bp, synthetic construct
  misc_feature 1..20: note = chemically synthesized
  source 1..20: mol_type = other DNA
tggccacttggctctcaaca

SEQ ID NO: 31748 - DNA, 20 bp, synthetic construct
  misc_feature 1..20: note = chemically synthesized
  source 1..20: mol_type = other DNA
caacacggagtgatgatgcc

SEQ ID NO: 31749 - DNA, 20 bp, synthetic construct
  misc_feature 1..20: note = chemically synthesized
  source 1..20: mol_type = other DNA
tttactcttgttgcccgggc

SEQ ID NO: 31750 - DNA, 20 bp, synthetic construct
  misc_feature 1..20: note = chemically synthesized
  source 1..20: mol_type = other DNA
cgatctcctgcctcagcctc

SEQ ID NO: 31751 - DNA, 20 bp, synthetic construct
  misc_feature 1..20: note = chemically synthesized
  source 1..20: mol_type = other DNA
ttttgtatttttagtagaga

SEQ ID NO: 31752 - DNA, 20 bp, synthetic construct
  misc_feature 1..20: note = chemically synthesized
  source 1..20: mol_type = other DNA
gccccggcctcccaaagtgc

SEQ ID NO: 31753 - DNA, 20 bp, synthetic construct
  misc_feature 1..20: note = chemically synthesized
  source 1..20: mol_type = other DNA
gctgcatttaaaacagcatt

SEQ ID NO: 31754 - DNA, 20 bp, synthetic construct
  misc_feature 1..20: note = chemically synthesized
  source 1..20: mol_type = other DNA
agaacttagctttttgcatt

SEQ ID NO: 31755 - DNA, 20 bp, synthetic construct
  misc_feature 1..20: note = chemically synthesized
  source 1..20: mol_type = other DNA
ccatggttgaaagtcagcta

SEQ ID NO: 31756 - DNA, 20 bp, synthetic construct
  misc_feature 1..20: note = chemically synthesized
  source 1..20: mol_type = other DNA
acttcacatttgctcttctc

SEQ ID NO: 31757 - DNA, 20 bp, synthetic construct
  misc_feature 1..20: note = chemically synthesized
  source 1..20: mol_type = other DNA
atttgctcttctccagggtg

SEQ ID NO: 31758 - DNA, 20 bp, synthetic construct
  misc_feature 1..20: note = chemically synthesized
  source 1..20: mol_type = other DNA
gtgtggggtggctgtttaaa

SEQ ID NO: 31759 - DNA, 20 bp, synthetic construct
  misc_feature 1..20: note = chemically synthesized
  source 1..20: mol_type = other DNA
ggggtggctgtttaaagagg

SEQ ID NO: 31760 - DNA, 20 bp, synthetic construct
  misc_feature 1..20: note = chemically synthesized
  source 1..20: mol_type = other DNA
atatcagaagggaaatgttt

SEQ ID NO: 31761 - DNA, 20 bp, synthetic construct
  misc_feature 1..20: note = chemically synthesized
  source 1..20: mol_type = other DNA
agtcatttatatgctatttg

SEQ ID NO: 31762 - DNA, 20 bp, synthetic construct
  misc_feature 1..20: note = chemically synthesized
  source 1..20: mol_type = other DNA
tatgctatttgttgaattcc

SEQ ID NO: 31763 - DNA, 20 bp, synthetic construct
  misc_feature 1..20: note = chemically synthesized
  source 1..20: mol_type = other DNA
ttgttgaattcctagaatat

SEQ ID NO: 31764 - DNA, 20 bp, synthetic construct
  misc_feature 1..20: note = chemically synthesized
  source 1..20: mol_type = other DNA
taatagaagcaagtaggaga

SEQ ID NO: 31765 - DNA, 20 bp, synthetic construct
  misc_feature 1..20: note = chemically synthesized
  source 1..20: mol_type = other DNA
tgaaattaattagaggcata

SEQ ID NO: 31766 - DNA, 20 bp, synthetic construct
  misc_feature 1..20: note = chemically synthesized
  source 1..20: mol_type = other DNA
cagcaatgtaaggcctagat

SEQ ID NO: 31767 - DNA, 20 bp, synthetic construct
  misc_feature 1..20: note = chemically synthesized
  source 1..20: mol_type = other DNA
taaggcctagatatgagtca

SEQ ID NO: 31768 - DNA, 20 bp, synthetic construct
  misc_feature 1..20: note = chemically synthesized
  source 1..20: mol_type = other DNA
atgagtcagggagtggtgca

SEQ ID NO: 31769 - DNA, 20 bp, synthetic construct
  misc_feature 1..20: note = chemically synthesized
  source 1..20: mol_type = other DNA
gtcagggagtggtgcatggg

SEQ ID NO: 31770 - DNA, 20 bp, synthetic construct
  misc_feature 1..20: note = chemically synthesized
  source 1..20: mol_type = other DNA
agtgttctatgaggttggag

SEQ ID NO: 31771 - DNA, 20 bp, synthetic construct
  misc_feature 1..20: note = chemically synthesized
  source 1..20: mol_type = other DNA
ttgaggccttgaagtatgag

SEQ ID NO: 31772 - DNA, 20 bp, synthetic construct
  misc_feature 1..20: note = chemically synthesized
  source 1..20: mol_type = other DNA
aggaaggaaatgagaacgga

SEQ ID NO: 31773 - DNA, 20 bp, synthetic construct
  misc_feature 1..20: note = chemically synthesized
  source 1..20: mol_type = other DNA
ggaagggatttttacttggg

SEQ ID NO: 31774 - DNA, 20 bp, synthetic construct
  misc_feature 1..20: note = chemically synthesized
  source 1..20: mol_type = other DNA
tgggcagaatattttccttg

SEQ ID NO: 31775 - DNA, 20 bp, synthetic construct
  misc_feature 1..20: note = chemically synthesized
  source 1..20: mol_type = other DNA
tgggtacggggaactaagac

SEQ ID NO: 31776 - DNA, 20 bp, synthetic construct
  misc_feature 1..20: note = chemically synthesized
  source 1..20: mol_type = other DNA
ctaagactggaatagaaaat

SEQ ID NO: 31777 - DNA, 20 bp, synthetic construct
  misc_feature 1..20: note = chemically synthesized
  source 1..20: mol_type = other DNA
actggaatagaaaattggag

SEQ ID NO: 31778 - DNA, 20 bp, synthetic construct
  misc_feature 1..20: note = chemically synthesized
  source 1..20: mol_type = other DNA
ggagttggattgtggagctc

SEQ ID NO: 31779 - DNA, 20 bp, synthetic construct
  misc_feature 1..20: note = chemically synthesized
  source 1..20: mol_type = other DNA
agctctggaatgatggctta

SEQ ID NO: 31780 - DNA, 20 bp, synthetic construct
  misc_feature 1..20: note = chemically synthesized
  source 1..20: mol_type = other DNA
aagacaaaggcagcatgcta

SEQ ID NO: 31781 - DNA, 20 bp, synthetic construct
  misc_feature 1..20: note = chemically synthesized
  source 1..20: mol_type = other DNA
ttaagtgaggactctgcaaa

SEQ ID NO: 31782 - DNA, 20 bp, synthetic construct
  misc_feature 1..20: note = chemically synthesized
  source 1..20: mol_type = other DNA
gtgaggactctgcaaagggg

SEQ ID NO: 31783 - DNA, 20 bp, synthetic construct
  misc_feature 1..20: note = chemically synthesized
  source 1..20: mol_type = other DNA
ggactctgcaaagggggtgg

SEQ ID NO: 31784 - DNA, 20 bp, synthetic construct
  misc_feature 1..20: note = chemically synthesized
  source 1..20: mol_type = other DNA
tctctgttatacccttcatg

SEQ ID NO: 31785 - DNA, 20 bp, synthetic construct
  misc_feature 1..20: note = chemically synthesized
  source 1..20: mol_type = other DNA
ctgttgacttatatgttcta

SEQ ID NO: 31786 - DNA, 20 bp, synthetic construct
  misc_feature 1..20: note = chemically synthesized
  source 1..20: mol_type = other DNA
gacttatatgttctagagga

SEQ ID NO: 31787 - DNA, 20 bp, synthetic construct
  misc_feature 1..20: note = chemically synthesized
  source 1..20: mol_type = other DNA
aggatggagttggttgaccg

SEQ ID NO: 31788 - DNA, 20 bp, synthetic construct
  misc_feature 1..20: note = chemically synthesized
  source 1..20: mol_type = other DNA
gtagggtttcctttcactag

SEQ ID NO: 31789 - DNA, 20 bp, synthetic construct
  misc_feature 1..20: note = chemically synthesized
  source 1..20: mol_type = other DNA
atattgtaggagcctagcac

SEQ ID NO: 31790 - DNA, 20 bp, synthetic construct
  misc_feature 1..20: note = chemically synthesized
  source 1..20: mol_type = other DNA
ctttgcccccattgcagatg

SEQ ID NO: 31791 - DNA, 20 bp, synthetic construct
  misc_feature 1..20: note = chemically synthesized
  source 1..20: mol_type = other DNA
attgcagatggggagtgggc

SEQ ID NO: 31792 - DNA, 20 bp, synthetic construct
  misc_feature 1..20: note = chemically synthesized
  source 1..20: mol_type = other DNA
gagtgggcaggaatgacgtt

SEQ ID NO: 31793 - DNA, 20 bp, synthetic construct
  misc_feature 1..20: note = chemically synthesized
  source 1..20: mol_type = other DNA
gttcagaatcaagggcccat

SEQ ID NO: 31794 - DNA, 20 bp, synthetic construct
  misc_feature 1..20: note = chemically synthesized
  source 1..20: mol_type = other DNA
ctcctccagtccatccatgt

SEQ ID NO: 31795 - DNA, 20 bp, synthetic construct
  misc_feature 1..20: note = chemically synthesized
  source 1..20: mol_type = other DNA
catgttgggatactcagggc

SEQ ID NO: 31796 - DNA, 20 bp, synthetic construct
  misc_feature 1..20: note = chemically synthesized
  source 1..20: mol_type = other DNA
taatagtgtcctcctgcttt

SEQ ID NO: 31797 - DNA, 20 bp, synthetic construct
  misc_feature 1..20: note = chemically synthesized
  source 1..20: mol_type = other DNA
gttattaagctagcctgaac

SEQ ID NO: 31798 - DNA, 20 bp, synthetic construct
  misc_feature 1..20: note = chemically synthesized
  source 1..20: mol_type = other DNA
ctgaacttgagtaaacattt

SEQ ID NO: 31799 - DNA, 20 bp, synthetic construct
  misc_feature 1..20: note = chemically synthesized
  source 1..20: mol_type = other DNA
cttgagtaaacatttttgga

SEQ ID NO: 31800 - DNA, 20 bp, synthetic construct
  misc_feature 1..20: note = chemically synthesized
  source 1..20: mol_type = other DNA
aagcagagatgctagtgacc

SEQ ID NO: 31801 - DNA, 20 bp, synthetic construct
  misc_feature 1..20: note = chemically synthesized
  source 1..20: mol_type = other DNA
agaggggaaagaacctctgt

SEQ ID NO: 31802 - DNA, 20 bp, synthetic construct
  misc_feature 1..20: note = chemically synthesized
  source 1..20: mol_type = other DNA
caggtgcttcctcttctact

SEQ ID NO: 31803 - DNA, 20 bp, synthetic construct
  misc_feature 1..20: note = chemically synthesized
  source 1..20: mol_type = other DNA
cagtgtggctgtttgtcatc

SEQ ID NO: 31804 - DNA, 20 bp, synthetic construct
  misc_feature 1..20: note = chemically synthesized
  source 1..20: mol_type = other DNA
ggcagaaattagttaggaag

SEQ ID NO: 31805 - DNA, 20 bp, synthetic construct
  misc_feature 1..20: note = chemically synthesized
  source 1..20: mol_type = other DNA
agttaggaagcagagtagca

SEQ ID NO: 31806 - DNA, 20 bp, synthetic construct
  misc_feature 1..20: note = chemically synthesized
  source 1..20: mol_type = other DNA
gttccaaatgcctctattgt

SEQ ID NO: 31807 - DNA, 20 bp, synthetic construct
  misc_feature 1..20: note = chemically synthesized
  source 1..20: mol_type = other DNA
aatgcctctattgtatgaat

SEQ ID NO: 31808 - DNA, 20 bp, synthetic construct
  misc_feature 1..20: note = chemically synthesized
  source 1..20: mol_type = other DNA
gcaaaatgacataaaagaaa

SEQ ID NO: 31809 - DNA, 20 bp, synthetic construct
  misc_feature 1..20: note = chemically synthesized
  source 1..20: mol_type = other DNA
tgttgactggctctcacagt

SEQ ID NO: 31810 - DNA, 20 bp, synthetic construct
  misc_feature 1..20: note = chemically synthesized
  source 1..20: mol_type = other DNA
ctctaaagcaacagtttaat

SEQ ID NO: 31811 - DNA, 20 bp, synthetic construct
  misc_feature 1..20: note = chemically synthesized
  source 1..20: mol_type = other DNA
tctttgaagataaatttgtt

SEQ ID NO: 31812 - DNA, 20 bp, synthetic construct
  misc_feature 1..20: note = chemically synthesized
  source 1..20: mol_type = other DNA
taaatttgttttgggtatgg

SEQ ID NO: 31813 - DNA, 20 bp, synthetic construct
  misc_feature 1..20: note = chemically synthesized
  source 1..20: mol_type = other DNA
cagcactttgggaggctgag

SEQ ID NO: 31814 - DNA, 20 bp, synthetic construct
  misc_feature 1..20: note = chemically synthesized
  source 1..20: mol_type = other DNA
actttgggaggctgaggtgg

SEQ ID NO: 31815 - DNA, 20 bp, synthetic construct
  misc_feature 1..20: note = chemically synthesized
  source 1..20: mol_type = other DNA
tgggtggatcacctaaggtc

SEQ ID NO: 31816 - DNA, 20 bp, synthetic construct
  misc_feature 1..20: note = chemically synthesized
  source 1..20: mol_type = other DNA
tacttgggaggctgaggcag

SEQ ID NO: 31817 - DNA, 20 bp, synthetic construct
  misc_feature 1..20: note = chemically synthesized
  source 1..20: mol_type = other DNA
aacaaacaaacaaaatcgtt

SEQ ID NO: 31818 - DNA, 20 bp, synthetic construct
  misc_feature 1..20: note = chemically synthesized
  source 1..20: mol_type = other DNA
gcagtggctttaggctgttt

SEQ ID NO: 31819 - DNA, 20 bp, synthetic construct
  misc_feature 1..20: note = chemically synthesized
  source 1..20: mol_type = other DNA
agcaaaactagaaagtttta

SEQ ID NO: 31820 - DNA, 20 bp, synthetic construct
  misc_feature 1..20: note = chemically synthesized
  source 1..20: mol_type = other DNA
caaactatttacagccataa

SEQ ID NO: 31821 - DNA, 20 bp, synthetic construct
  misc_feature 1..20: note = chemically synthesized
  source 1..20: mol_type = other DNA
cagccataacagggtttcca

SEQ ID NO: 31822 - DNA, 20 bp, synthetic construct
  misc_feature 1..20: note = chemically synthesized
  source 1..20: mol_type = other DNA
agtgaattgtataagtagca

SEQ ID NO: 31823 - DNA, 20 bp, synthetic construct
  misc_feature 1..20: note = chemically synthesized
  source 1..20: mol_type = other DNA
taaatgctgtcaaattgtaa

SEQ ID NO: 31824 - DNA, 20 bp, synthetic construct
  misc_feature 1..20: note = chemically synthesized
  source 1..20: mol_type = other DNA
cttcttccccctctcacagt

SEQ ID NO: 31825 - DNA, 20 bp, synthetic construct
  misc_feature 1..20: note = chemically synthesized
  source 1..20: mol_type = other DNA
gcccgtgagacaaactcttc

SEQ ID NO: 31826 - DNA, 20 bp, synthetic construct
  misc_feature 1..20: note = chemically synthesized
  source 1..20: mol_type = other DNA
tttaaatgtttctacataat

SEQ ID NO: 31827 - DNA, 20 bp, synthetic construct
  misc_feature 1..20: note = chemically synthesized
  source 1..20: mol_type = other DNA
tcaaaagtaatagcacagag

SEQ ID NO: 31828 - DNA, 20 bp, synthetic construct
  misc_feature 1..20: note = chemically synthesized
  source 1..20: mol_type = other DNA
tttagatgagggctccattc

SEQ ID NO: 31829 - DNA, 20 bp, synthetic construct
  misc_feature 1..20: note = chemically synthesized
  source 1..20: mol_type = other DNA
ggcagatgttatcagggagc

SEQ ID NO: 31830 - DNA, 20 bp, synthetic construct
  misc_feature 1..20: note = chemically synthesized
  source 1..20: mol_type = other DNA
tgttatcagggagctggagt

SEQ ID NO: 31831 - DNA, 20 bp, synthetic construct
  misc_feature 1..20: note = chemically synthesized
  source 1..20: mol_type = other DNA
ctttctgcagcttccttaga

SEQ ID NO: 31832 - DNA, 20 bp, synthetic construct
  misc_feature 1..20: note = chemically synthesized
  source 1..20: mol_type = other DNA
attctgctgctcataaataa

SEQ ID NO: 31833 - DNA, 20 bp, synthetic construct
  misc_feature 1..20: note = chemically synthesized
  source 1..20: mol_type = other DNA
aaaggctggtgtggttgcca

SEQ ID NO: 31834 - DNA, 20 bp, synthetic construct
  misc_feature 1..20: note = chemically synthesized
  source 1..20: mol_type = other DNA
gagaatagggctaacttaag

SEQ ID NO: 31835 - DNA, 20 bp, synthetic construct
  misc_feature 1..20: note = chemically synthesized
  source 1..20: mol_type = other DNA
tttttttgttttgttttgtt

SEQ ID NO: 31836 - DNA, 20 bp, synthetic construct
  misc_feature 1..20: note = chemically synthesized
  source 1..20: mol_type = other DNA
tcatttagttttcccttaat

SEQ ID NO: 31837 - DNA, 20 bp, synthetic construct
  misc_feature 1..20: note = chemically synthesized
  source 1..20: mol_type = other DNA
tattatttatagccctccag

SEQ ID NO: 31838 - DNA, 20 bp, synthetic construct
  misc_feature 1..20: note = chemically synthesized
  source 1..20: mol_type = other DNA
ccactacactgctccccctg

SEQ ID NO: 31839 - DNA, 20 bp, synthetic construct
  misc_feature 1..20: note = chemically synthesized
  source 1..20: mol_type = other DNA
actctcggtgtgtggcattg

SEQ ID NO: 31840 - DNA, 20 bp, synthetic construct
  misc_feature 1..20: note = chemically synthesized
  source 1..20: mol_type = other DNA
gacttgcaaaatataggtta

SEQ ID NO: 31841 - DNA, 20 bp, synthetic construct
  misc_feature 1..20: note = chemically synthesized
  source 1..20: mol_type = other DNA
atataggttagggagtttta

SEQ ID NO: 31842 - DNA, 20 bp, synthetic construct
  misc_feature 1..20: note = chemically synthesized
  source 1..20: mol_type = other DNA
tacattaactagatcattac

SEQ ID NO: 31843 - DNA, 20 bp, synthetic construct
  misc_feature 1..20: note = chemically synthesized
  source 1..20: mol_type = other DNA
ggttagaacttcacacactt

SEQ ID NO: 31844 - DNA, 20 bp, synthetic construct
  misc_feature 1..20: note = chemically synthesized
  source 1..20: mol_type = other DNA
tgtctagcgctcctaaatgc

SEQ ID NO: 31845 - DNA, 20 bp, synthetic construct
  misc_feature 1..20: note = chemically synthesized
  source 1..20: mol_type = other DNA
gaggggcatttgccttcgct

SEQ ID NO: 31846 - DNA, 20 bp, synthetic construct
  misc_feature 1..20: note = chemically synthesized
  source 1..20: mol_type = other DNA
ttgccttcgctttgaatctc

SEQ ID NO: 31847 - DNA, 20 bp, synthetic construct
  misc_feature 1..20: note = chemically synthesized
  source 1..20: mol_type = other DNA
ccgagtcttttttattctga

SEQ ID NO: 31848 - DNA, 20 bp, synthetic construct
  misc_feature 1..20: note = chemically synthesized
  source 1..20: mol_type = other DNA
ccatggccaggtttgagaga

SEQ ID NO: 31849 - DNA, 20 bp, synthetic construct
  misc_feature 1..20: note = chemically synthesized
  source 1..20: mol_type = other DNA
gtgattcgcagtagtcttcc

SEQ ID NO: 31850 - DNA, 20 bp, synthetic construct
  misc_feature 1..20: note = chemically synthesized
  source 1..20: mol_type = other DNA
gcagtagtcttcccagggtg

SEQ ID NO: 31851 - DNA, 20 bp, synthetic construct
  misc_feature 1..20: note = chemically synthesized
  source 1..20: mol_type = other DNA
gtgggaacgtctccctggga

SEQ ID NO: 31852 - DNA, 20 bp, synthetic construct
  misc_feature 1..20: note = chemically synthesized
  source 1..20: mol_type = other DNA
tttcaggcccaatcctgatg

SEQ ID NO: 31853 - DNA, 20 bp, synthetic construct
  misc_feature 1..20: note = chemically synthesized
  source 1..20: mol_type = other DNA
cattattcatctcaaagcca

SEQ ID NO: 31854 - DNA, 20 bp, synthetic construct
  misc_feature 1..20: note = chemically synthesized
  source 1..20: mol_type = other DNA
ccatcacagggctgtggtct

SEQ ID NO: 31855 - DNA, 20 bp, synthetic construct
  misc_feature 1..20: note = chemically synthesized
  source 1..20: mol_type = other DNA
tgtgcctaagtatagttttc

SEQ ID NO: 31856 - DNA, 20 bp, synthetic construct
  misc_feature 1..20: note = chemically synthesized
  source 1..20: mol_type = other DNA
atgtgcagaaagtgaactct

SEQ ID NO: 31857 - DNA, 20 bp, synthetic construct
  misc_feature 1..20: note = chemically synthesized
  source 1..20: mol_type = other DNA
atccccagtaccagtctccc

SEQ ID NO: 31858 - DNA, 20 bp, synthetic construct
  misc_feature 1..20: note = chemically synthesized
  source 1..20: mol_type = other DNA
ctgttcagtcaaatccattt

SEQ ID NO: 31859 - DNA, 20 bp, synthetic construct
  misc_feature 1..20: note = chemically synthesized
  source 1..20: mol_type = other DNA
gaacaaggggcttggagatt

SEQ ID NO: 31860 - DNA, 20 bp, synthetic construct
  misc_feature 1..20: note = chemically synthesized
  source 1..20: mol_type = other DNA
tcagccttcttgttgaaaat

SEQ ID NO: 31861 - DNA, 20 bp, synthetic construct
  misc_feature 1..20: note = chemically synthesized
  source 1..20: mol_type = other DNA
ttccaagagctatctggtga

SEQ ID NO: 31862 - DNA, 20 bp, synthetic construct
  misc_feature 1..20: note = chemically synthesized
  source 1..20: mol_type = other DNA
agggctacttctgggggacc

SEQ ID NO: 31863 - DNA, 20 bp, synthetic construct
  misc_feature 1..20: note = chemically synthesized
  source 1..20: mol_type = other DNA
ttgggaaacacttgccttct

SEQ ID NO: 31864 - DNA, 20 bp, synthetic construct
  misc_feature 1..20: note = chemically synthesized
  source 1..20: mol_type = other DNA
atagactgtgtttgacagtc

SEQ ID NO: 31865 - DNA, 20 bp, synthetic construct
  misc_feature 1..20: note = chemically synthesized
  source 1..20: mol_type = other DNA
ggcaacttcacttctcaccc

SEQ ID NO: 31866 - DNA, 20 bp, synthetic construct
  misc_feature 1..20: note = chemically synthesized
  source 1..20: mol_type = other DNA
tattcagcagcttcgtgacg

SEQ ID NO: 31867 - DNA, 20 bp, synthetic construct
  misc_feature 1..20: note = chemically synthesized
  source 1..20: mol_type = other DNA
cagcttcgtgacgttggatg

SEQ ID NO: 31868 - DNA, 20 bp, synthetic construct
  misc_feature 1..20: note = chemically synthesized
  source 1..20: mol_type = other DNA
tggagggtttttctttttaa

SEQ ID NO: 31869 - DNA, 20 bp, synthetic construct
  misc_feature 1..20: note = chemically synthesized
  source 1..20: mol_type = other DNA
gtttatttttcccttatagg

SEQ ID NO: 31870 - DNA, 20 bp, synthetic construct
  misc_feature 1..20: note = chemically synthesized
  source 1..20: mol_type = other DNA
cccttataggtagaatataa

SEQ ID NO: 31871 - DNA, 20 bp, synthetic construct
  misc_feature 1..20: note = chemically synthesized
  source 1..20: mol_type = other DNA
aggtagaatataaaagagta

SEQ ID NO: 31872 - DNA, 20 bp, synthetic construct
  misc_feature 1..20: note = chemically synthesized
  source 1..20: mol_type = other DNA
gctatccttggcattcttgc

SEQ ID NO: 31873 - DNA, 20 bp, synthetic construct
  misc_feature 1..20: note = chemically synthesized
  source 1..20: mol_type = other DNA
ggccagacttccattacact

SEQ ID NO: 31874 - DNA, 20 bp, synthetic construct
  misc_feature 1..20: note = chemically synthesized
  source 1..20: mol_type = other DNA
cttgcgaaattgtggctgca

SEQ ID NO: 31875 - DNA, 20 bp, synthetic construct
  misc_feature 1..20: note = chemically synthesized
  source 1..20: mol_type = other DNA
tatgccttggtggtggtggt

SEQ ID NO: 31876 - DNA, 20 bp, synthetic construct
  misc_feature 1..20: note = chemically synthesized
  source 1..20: mol_type = other DNA
agtcctaaacaagtgccaca

SEQ ID NO: 31877 - DNA, 20 bp, synthetic construct
  misc_feature 1..20: note = chemically synthesized
  source 1..20: mol_type = other DNA
ataatgaggtgttcctaagt

SEQ ID NO: 31878 - DNA, 20 bp, synthetic construct
  misc_feature 1..20: note = chemically synthesized
  source 1..20: mol_type = other DNA
cataatttgaggttttatac

SEQ ID NO: 31879 - DNA, 20 bp, synthetic construct
  misc_feature 1..20: note = chemically synthesized
  source 1..20: mol_type = other DNA
cagcccatgtgcattttttc

SEQ ID NO: 31880 - DNA, 20 bp, synthetic construct
  misc_feature 1..20: note = chemically synthesized
  source 1..20: mol_type = other DNA
tatttaaaaggcagggaggg

SEQ ID NO: 31881 - DNA, 20 bp, synthetic construct
  misc_feature 1..20: note = chemically synthesized
  source 1..20: mol_type = other DNA
aaaacctacttccctttctg

SEQ ID NO: 31882 - DNA, 20 bp, synthetic construct
  misc_feature 1..20: note = chemically synthesized
  source 1..20: mol_type = other DNA
agagaggaggcagggggaga

SEQ ID NO: 31883 - DNA, 20 bp, synthetic construct
  misc_feature 1..20: note = chemically synthesized
  source 1..20: mol_type = other DNA
gaggcagggggagagagggt

SEQ ID NO: 31884 - DNA, 20 bp, synthetic construct
  misc_feature 1..20: note = chemically synthesized
  source 1..20: mol_type = other DNA
ggaattcgagctattttcag

SEQ ID NO: 31885 - DNA, 20 bp, synthetic construct
  misc_feature 1..20: note = chemically synthesized
  source 1..20: mol_type = other DNA
cgagctattttcagctgaat

SEQ ID NO: 31886 - DNA, 20 bp, synthetic construct
  misc_feature 1..20: note = chemically synthesized
  source 1..20: mol_type = other DNA
actgcattttctgacactgt

SEQ ID NO: 31887 - DNA, 20 bp, synthetic construct
  misc_feature 1..20: note = chemically synthesized
  source 1..20: mol_type = other DNA
ttaacagaggagctctaaat

SEQ ID NO: 31888 - DNA, 20 bp, synthetic construct
  misc_feature 1..20: note = chemically synthesized
  source 1..20: mol_type = other DNA
tcctccttctagtgctttgg

SEQ ID NO: 31889 - DNA, 20 bp, synthetic construct
  misc_feature 1..20: note = chemically synthesized
  source 1..20: mol_type = other DNA
ctggggacgagcatcctctc

SEQ ID NO: 31890 - DNA, 20 bp, synthetic construct
  misc_feature 1..20: note = chemically synthesized
  source 1..20: mol_type = other DNA
ctgacaactgcagcattcca

SEQ ID NO: 31891 - DNA, 20 bp, synthetic construct
  misc_feature 1..20: note = chemically synthesized
  source 1..20: mol_type = other DNA
actgcagcattccacagggt

SEQ ID NO: 31892 - DNA, 20 bp, synthetic construct
  misc_feature 1..20: note = chemically synthesized
  source 1..20: mol_type = other DNA
tgacatagacagcagttgat

SEQ ID NO: 31893 - DNA, 20 bp, synthetic construct
  misc_feature 1..20: note = chemically synthesized
  source 1..20: mol_type = other DNA
caagtcttctgaccttggcc

SEQ ID NO: 31894 - DNA, 20 bp, synthetic construct
  misc_feature 1..20: note = chemically synthesized
  source 1..20: mol_type = other DNA
gggatctttgcactgggcag

SEQ ID NO: 31895 - DNA, 20 bp, synthetic construct
  misc_feature 1..20: note = chemically synthesized
  source 1..20: mol_type = other DNA
tttgcactgggcaggggaat

SEQ ID NO: 31896 - DNA, 20 bp, synthetic construct
  misc_feature 1..20: note = chemically synthesized
  source 1..20: mol_type = other DNA
ttaaaccacttttcaaaggc

SEQ ID NO: 31897 - DNA, 20 bp, synthetic construct
  misc_feature 1..20: note = chemically synthesized
  source 1..20: mol_type = other DNA
tcaagaccatttctctacca

SEQ ID NO: 31898 - DNA, 20 bp, synthetic construct
  misc_feature 1..20: note = chemically synthesized
  source 1..20: mol_type = other DNA
tgctgcaattatttgtctag

SEQ ID NO: 31899 - DNA, 20 bp, synthetic construct
  misc_feature 1..20: note = chemically synthesized
  source 1..20: mol_type = other DNA
gcactgtataatcacatgaa

SEQ ID NO: 31900 - DNA, 20 bp, synthetic construct
  misc_feature 1..20: note = chemically synthesized
  source 1..20: mol_type = other DNA
tactaacctgtccttcaaaa

SEQ ID NO: 31901 - DNA, 20 bp, synthetic construct
  misc_feature 1..20: note = chemically synthesized
  source 1..20: mol_type = other DNA
caggaagctgatcttaacct

SEQ ID NO: 31902 - DNA, 20 bp, synthetic construct
  misc_feature 1..20: note = chemically synthesized
  source 1..20: mol_type = other DNA
cttgggatgcagtgtgcttt

SEQ ID NO: 31903 - DNA, 20 bp, synthetic construct
  misc_feature 1..20: note = chemically synthesized
  source 1..20: mol_type = other DNA
gatgcagtgtgctttcaggg

SEQ ID NO: 31904 - DNA, 20 bp, synthetic construct
  misc_feature 1..20: note = chemically synthesized
  source 1..20: mol_type = other DNA
gaactttccaagtctgaaaa

SEQ ID NO: 31905 - DNA, 20 bp, synthetic construct
  misc_feature 1..20: note = chemically synthesized
  source 1..20: mol_type = other DNA
ctctattcttcttgcttcct

SEQ ID NO: 31906 - DNA, 20 bp, synthetic construct
  misc_feature 1..20: note = chemically synthesized
  source 1..20: mol_type = other DNA
tttctcacttttctccagtt

SEQ ID NO: 31907 - DNA, 20 bp, synthetic construct
  misc_feature 1..20: note = chemically synthesized
  source 1..20: mol_type = other DNA
accaaactaaactctcaaga

SEQ ID NO: 31908 - DNA, 20 bp, synthetic construct
  misc_feature 1..20: note = chemically synthesized
  source 1..20: mol_type = other DNA
acaggtctgcctctcttcct

SEQ ID NO: 31909 - DNA, 20 bp, synthetic construct
  misc_feature 1..20: note = chemically synthesized
  source 1..20: mol_type = other DNA
tcagaagtgaccttgatgaa

SEQ ID NO: 31910 - DNA, 20 bp, synthetic construct
  misc_feature 1..20: note = chemically synthesized
  source 1..20: mol_type = other DNA
gagaaggtctctatacctag

SEQ ID NO: 31911 - DNA, 20 bp, synthetic construct
  misc_feature 1..20: note = chemically synthesized
  source 1..20: mol_type = other DNA
taggtgggtttcctgagctg

SEQ ID NO: 31912 - DNA, 20 bp, synthetic construct
  misc_feature 1..20: note = chemically synthesized
  source 1..20: mol_type = other DNA
aaggctctcccaccatcaca

SEQ ID NO: 31913 - DNA, 20 bp, synthetic construct
  misc_feature 1..20: note = chemically synthesized
  source 1..20: mol_type = other DNA
caccatcacacagaatgtac

SEQ ID NO: 31914 - DNA, 20 bp, synthetic construct
  misc_feature 1..20: note = chemically synthesized
  source 1..20: mol_type = other DNA
gcccttaaaacactggagcc

SEQ ID NO: 31915 - DNA, 20 bp, synthetic construct
  misc_feature 1..20: note = chemically synthesized
  source 1..20: mol_type = other DNA
gtggggaaaagaaagatgta

SEQ ID NO: 31916 - DNA, 20 bp, synthetic construct
  misc_feature 1..20: note = chemically synthesized
  source 1..20: mol_type = other DNA
ttcacctgccagcttgtggg

SEQ ID NO: 31917 - DNA, 20 bp, synthetic construct
  misc_feature 1..20: note = chemically synthesized
  source 1..20: mol_type = other DNA
gggtggcttaagttctagcc

SEQ ID NO: 31918 - DNA, 20 bp, synthetic construct
  misc_feature 1..20: note = chemically synthesized
  source 1..20: mol_type = other DNA
agcatgtgtatgtgcttgtg

SEQ ID NO: 31919 - DNA, 20 bp, synthetic construct
  misc_feature 1..20: note = chemically synthesized
  source 1..20: mol_type = other DNA
gtgtatgtgcttgtggtggg

SEQ ID NO: 31920 - DNA, 20 bp, synthetic construct
  misc_feature 1..20: note = chemically synthesized
  source 1..20: mol_type = other DNA
tgggagacagagagaaggcc

SEQ ID NO: 31921 - DNA, 20 bp, synthetic construct
  misc_feature 1..20: note = chemically synthesized
  source 1..20: mol_type = other DNA
cagagagaaggccctgggtt

SEQ ID NO: 31922 - DNA, 20 bp, synthetic construct
  misc_feature 1..20: note = chemically synthesized
  source 1..20: mol_type = other DNA
ctgaatgtttttacttttcc

SEQ ID NO: 31923 - DNA, 20 bp, synthetic construct
  misc_feature 1..20: note = chemically synthesized
  source 1..20: mol_type = other DNA
ctgcttcatttttgttttca

SEQ ID NO: 31924 - DNA, 20 bp, synthetic construct
  misc_feature 1..20: note = chemically synthesized
  source 1..20: mol_type = other DNA
ccagcatgtcccaagcagag

SEQ ID NO: 31925 - DNA, 20 bp, synthetic construct
  misc_feature 1..20: note = chemically synthesized
  source 1..20: mol_type = other DNA
agagatgggtggctaggttt

SEQ ID NO: 31926 - DNA, 20 bp, synthetic construct
  misc_feature 1..20: note = chemically synthesized
  source 1..20: mol_type = other DNA
tgggtggctaggtttgggaa

SEQ ID NO: 31927 - DNA, 20 bp, synthetic construct
  misc_feature 1..20: note = chemically synthesized
  source 1..20: mol_type = other DNA
aatggggtgctgggagggga

SEQ ID NO: 31928 - DNA, 20 bp, synthetic construct
  misc_feature 1..20: note = chemically synthesized
  source 1..20: mol_type = other DNA
cggccaccactgggctgtac

SEQ ID NO: 31929 - DNA, 20 bp, synthetic construct
  misc_feature 1..20: note = chemically synthesized
  source 1..20: mol_type = other DNA
gtaccaggatctagtgcaac

SEQ ID NO: 31930 - DNA, 20 bp, synthetic construct
  misc_feature 1..20: note = chemically synthesized
  source 1..20: mol_type = other DNA
tgcaacttgggtgacaaggt

SEQ ID NO: 31931 - DNA, 20 bp, synthetic construct
  misc_feature 1..20: note = chemically synthesized
  source 1..20: mol_type = other DNA
agcaaaaactatttagaact

SEQ ID NO: 31932 - DNA, 20 bp, synthetic construct
  misc_feature 1..20: note = chemically synthesized
  source 1..20: mol_type = other DNA
tagaactatgagttcaaaaa

SEQ ID NO: 31933 - DNA, 20 bp, synthetic construct
  misc_feature 1..20: note = chemically synthesized
  source 1..20: mol_type = other DNA
ctttctcttgggacagagat

SEQ ID NO: 31934 - DNA, 20 bp, synthetic construct
  misc_feature 1..20: note = chemically synthesized
  source 1..20: mol_type = other DNA
cagagatgggggtgcaggta

SEQ ID NO: 31935 - DNA, 20 bp, synthetic construct
  misc_feature 1..20: note = chemically synthesized
  source 1..20: mol_type = other DNA
tgggggtgcaggtaggggat

SEQ ID NO: 31936 - DNA, 20 bp, synthetic construct
  misc_feature 1..20: note = chemically synthesized
  source 1..20: mol_type = other DNA
tgagaatagaggaaaatgtg

SEQ ID NO: 31937 - DNA, 20 bp, synthetic construct
  misc_feature 1..20: note = chemically synthesized
  source 1..20: mol_type = other DNA
aattacacagcatttggaaa

SEQ ID NO: 31938 - DNA, 20 bp, synthetic construct
  misc_feature 1..20: note = chemically synthesized
  source 1..20: mol_type = other DNA
ctgattgtccataacaacca

SEQ ID NO: 31939 - DNA, 20 bp, synthetic construct
  misc_feature 1..20: note = chemically synthesized
  source 1..20: mol_type = other DNA
caaggggctgtaatcctctc

SEQ ID NO: 31940 - DNA, 20 bp, synthetic construct
  misc_feature 1..20: note = chemically synthesized
  source 1..20: mol_type = other DNA
acccagaggctccttggtta

SEQ ID NO: 31941 - DNA, 20 bp, synthetic construct
  misc_feature 1..20: note = chemically synthesized
  source 1..20: mol_type = other DNA
gtccttccagccaggtcatt

SEQ ID NO: 31942 - DNA, 20 bp, synthetic construct
  misc_feature 1..20: note = chemically synthesized
  source 1..20: mol_type = other DNA
aaaagttcactgcacagcgc

SEQ ID NO: 31943 - DNA, 20 bp, synthetic construct
  misc_feature 1..20: note = chemically synthesized
  source 1..20: mol_type = other DNA
ggacagtcagaggtagacca

SEQ ID NO: 31944 - DNA, 20 bp, synthetic construct
  misc_feature 1..20: note = chemically synthesized
  source 1..20: mol_type = other DNA
catgctgattacagggagac

SEQ ID NO: 31945 - DNA, 20 bp, synthetic construct
  misc_feature 1..20: note = chemically synthesized
  source 1..20: mol_type = other DNA
agacttggatccaggagaaa

SEQ ID NO: 31946 - DNA, 20 bp, synthetic construct
  misc_feature 1..20: note = chemically synthesized
  source 1..20: mol_type = other DNA
cctcctcgctgtccttggtg

SEQ ID NO: 31947 - DNA, 20 bp, synthetic construct
  misc_feature 1..20: note = chemically synthesized
  source 1..20: mol_type = other DNA
tgatttaacaaaagcagctt

SEQ ID NO: 31948 - DNA, 20 bp, synthetic construct
  misc_feature 1..20: note = chemically synthesized
  source 1..20: mol_type = other DNA
gcagcttttgagtgagaaag

SEQ ID NO: 31949 - DNA, 20 bp, synthetic construct
  misc_feature 1..20: note = chemically synthesized
  source 1..20: mol_type = other DNA
ttttgagtgagaaagctgag

SEQ ID NO: 31950 - DNA, 20 bp, synthetic construct
  misc_feature 1..20: note = chemically synthesized
  source 1..20: mol_type = other DNA
cagacccttgactctttgcc

SEQ ID NO: 31951 - DNA, 20 bp, synthetic construct
  misc_feature 1..20: note = chemically synthesized
  source 1..20: mol_type = other DNA
tattgcattagagctggggc

SEQ ID NO: 31952 - DNA, 20 bp, synthetic construct
  misc_feature 1..20: note = chemically synthesized
  source 1..20: mol_type = other DNA
ccacactctccaccgcctga

SEQ ID NO: 31953 - DNA, 20 bp, synthetic construct
  misc_feature 1..20: note = chemically synthesized
  source 1..20: mol_type = other DNA
tctccaccgcctgacagggt

SEQ ID NO: 31954 - DNA, 20 bp, synthetic construct
  misc_feature 1..20: note = chemically synthesized
  source 1..20: mol_type = other DNA
ggttgaggccctggaagcaa

SEQ ID NO: 31955 - DNA, 20 bp, synthetic construct
  misc_feature 1..20: note = chemically synthesized
  source 1..20: mol_type = other DNA
gcctgaggggcttgttaagg

SEQ ID NO: 31956 - DNA, 20 bp, synthetic construct
  misc_feature 1..20: note = chemically synthesized
  source 1..20: mol_type = other DNA
ctcaaaacaaaaaatggtct

SEQ ID NO: 31957 - DNA, 20 bp, synthetic construct
  misc_feature 1..20: note = chemically synthesized
  source 1..20: mol_type = other DNA
agaggccaggtgtccatagg

SEQ ID NO: 31958 - DNA, 20 bp, synthetic construct
  misc_feature 1..20: note = chemically synthesized
  source 1..20: mol_type = other DNA
tccccacgtggacctgctag

SEQ ID NO: 31959 - DNA, 20 bp, synthetic construct
  misc_feature 1..20: note = chemically synthesized
  source 1..20: mol_type = other DNA
gacctgctaggtgggtagaa

SEQ ID NO: 31960 - DNA, 20 bp, synthetic construct
  misc_feature 1..20: note = chemically synthesized
  source 1..20: mol_type = other DNA
cttggaggtgtctgggaaca

SEQ ID NO: 31961 - DNA, 20 bp, synthetic construct
  misc_feature 1..20: note = chemically synthesized
  source 1..20: mol_type = other DNA
aacattggatgttactcata

SEQ ID NO: 31962 - DNA, 20 bp, synthetic construct
  misc_feature 1..20: note = chemically synthesized
  source 1..20: mol_type = other DNA
tgttactcatatggaatcag

SEQ ID NO: 31963 - DNA, 20 bp, synthetic construct
  misc_feature 1..20: note = chemically synthesized
  source 1..20: mol_type = other DNA
attggtcagtggtataaatg

SEQ ID NO: 31964 - DNA, 20 bp, synthetic construct
  misc_feature 1..20: note = chemically synthesized
  source 1..20: mol_type = other DNA
ataaatgaaggattaggaaa

SEQ ID NO: 31965 - DNA, 20 bp, synthetic construct
  misc_feature 1..20: note = chemically synthesized
  source 1..20: mol_type = other DNA
cataataggttttaattctg

SEQ ID NO: 31966 - DNA, 20 bp, synthetic construct
  misc_feature 1..20: note = chemically synthesized
  source 1..20: mol_type = other DNA
gaatggccagttctggttct

SEQ ID NO: 31967 - DNA, 20 bp, synthetic construct
  misc_feature 1..20: note = chemically synthesized
  source 1..20: mol_type = other DNA
tctcttggccaagactgtca

SEQ ID NO: 31968 - DNA, 20 bp, synthetic construct
  misc_feature 1..20: note = chemically synthesized
  source 1..20: mol_type = other DNA
ggccctgaggtggcagtggg

SEQ ID NO: 31969 - DNA, 20 bp, synthetic construct
  misc_feature 1..20: note = chemically synthesized
  source 1..20: mol_type = other DNA
ggggtttgtcagaaggtggg

SEQ ID NO: 31970 - DNA, 20 bp, synthetic construct
  misc_feature 1..20: note = chemically synthesized
  source 1..20: mol_type = other DNA
gcaggacacttctgagatct

SEQ ID NO: 31971 - DNA, 20 bp, synthetic construct
  misc_feature 1..20: note = chemically synthesized
  source 1..20: mol_type = other DNA
ccacagggcgactgttgggg

SEQ ID NO: 31972 - DNA, 20 bp, synthetic construct
  misc_feature 1..20: note = chemically synthesized
  source 1..20: mol_type = other DNA
ctgttggggcaggatgtgag

SEQ ID NO: 31973 - DNA, 20 bp, synthetic construct
  misc_feature 1..20: note = chemically synthesized
  source 1..20: mol_type = other DNA
ctgcactccagcctgggcaa

SEQ ID NO: 31974 - DNA, 20 bp, synthetic construct
  misc_feature 1..20: note = chemically synthesized
  source 1..20: mol_type = other DNA
tgtgcttccttaagaagggc

SEQ ID NO: 31975 - DNA, 20 bp, synthetic construct
  misc_feature 1..20: note = chemically synthesized
  source 1..20: mol_type = other DNA
tctccgtgcacagaccagtc

SEQ ID NO: 31976 - DNA, 20 bp, synthetic construct
  misc_feature 1..20: note = chemically synthesized
  source 1..20: mol_type = other DNA
gtgcccacgaacaaaacatc

SEQ ID NO: 31977 - DNA, 20 bp, synthetic construct
  misc_feature 1..20: note = chemically synthesized
  source 1..20: mol_type = other DNA
atttattttactctaagttc

SEQ ID NO: 31978 - DNA, 20 bp, synthetic construct
  misc_feature 1..20: note = chemically synthesized
  source 1..20: mol_type = other DNA
taagttctgggatacatgtg

SEQ ID NO: 31979 - DNA, 20 bp, synthetic construct
  misc_feature 1..20: note = chemically synthesized
  source 1..20: mol_type = other DNA
aggcataaagcacatttgtt

SEQ ID NO: 31980 - DNA, 20 bp, synthetic construct
  misc_feature 1..20: note = chemically synthesized
  source 1..20: mol_type = other DNA
ttgatgcagataaaaaggct

SEQ ID NO: 31981 - DNA, 20 bp, synthetic construct
  misc_feature 1..20: note = chemically synthesized
  source 1..20: mol_type = other DNA
aaaaggcttggggtggtctt

SEQ ID NO: 31982 - DNA, 20 bp, synthetic construct
  misc_feature 1..20: note = chemically synthesized
  source 1..20: mol_type = other DNA
ggtggtcttcagagtaattt

SEQ ID NO: 31983 - DNA, 20 bp, synthetic construct
  misc_feature 1..20: note = chemically synthesized
  source 1..20: mol_type = other DNA
tctgctctggcaggtgttat

SEQ ID NO: 31984 - DNA, 20 bp, synthetic construct
  misc_feature 1..20: note = chemically synthesized
  source 1..20: mol_type = other DNA
tcacagccccatgcctcttc

SEQ ID NO: 31985 - DNA, 20 bp, synthetic construct
  misc_feature 1..20: note = chemically synthesized
  source 1..20: mol_type = other DNA
cccatccttttcttcatttc

SEQ ID NO: 31986 - DNA, 20 bp, synthetic construct
  misc_feature 1..20: note = chemically synthesized
  source 1..20: mol_type = other DNA
cgagtggggcagggaggcat

SEQ ID NO: 31987 - DNA, 20 bp, synthetic construct
  misc_feature 1..20: note = chemically synthesized
  source 1..20: mol_type = other DNA
tttgtgtgaagctggacaat

SEQ ID NO: 31988 - DNA, 20 bp, synthetic construct
  misc_feature 1..20: note = chemically synthesized
  source 1..20: mol_type = other DNA
tcccttctaactacaaaggc

SEQ ID NO: 31989 - DNA, 20 bp, synthetic construct
  misc_feature 1..20: note = chemically synthesized
  source 1..20: mol_type = other DNA
taatggaaactgataaatta

SEQ ID NO: 31990 - DNA, 20 bp, synthetic construct
  misc_feature 1..20: note = chemically synthesized
  source 1..20: mol_type = other DNA
cttttcaaaaggtttcacca

SEQ ID NO: 31991 - DNA, 20 bp, synthetic construct
  misc_feature 1..20: note = chemically synthesized
  source 1..20: mol_type = other DNA
ttaaatagtgagctccccca

SEQ ID NO: 31992 - DNA, 20 bp, synthetic construct
  misc_feature 1..20: note = chemically synthesized
  source 1..20: mol_type = other DNA
atcattaactacttgacaga

SEQ ID NO: 31993 - DNA, 20 bp, synthetic construct
  misc_feature 1..20: note = chemically synthesized
  source 1..20: mol_type = other DNA
tacttgacagagaggatatt

SEQ ID NO: 31994 - DNA, 20 bp, synthetic construct
  misc_feature 1..20: note = chemically synthesized
  source 1..20: mol_type = other DNA
ccaattttcaatgagcctgg

SEQ ID NO: 31995 - DNA, 20 bp, synthetic construct
  misc_feature 1..20: note = chemically synthesized
  source 1..20: mol_type = other DNA
ccaagaaccctccatgctga

SEQ ID NO: 31996 - DNA, 20 bp, synthetic construct
  misc_feature 1..20: note = chemically synthesized
  source 1..20: mol_type = other DNA
tggtgggaggtcaaggacca

SEQ ID NO: 31997 - DNA, 20 bp, synthetic construct
  misc_feature 1..20: note = chemically synthesized
  source 1..20: mol_type = other DNA
gggagaggactcccttttct

SEQ ID NO: 31998 - DNA, 20 bp, synthetic construct
  misc_feature 1..20: note = chemically synthesized
  source 1..20: mol_type = other DNA
tgtgtgtgcctttgtgagca

SEQ ID NO: 31999 - DNA, 20 bp, synthetic construct
  misc_feature 1..20: note = chemically synthesized
  source 1..20: mol_type = other DNA
cttttcccttgacatttagc

SEQ ID NO: 32000 - DNA, 20 bp, synthetic construct
  misc_feature 1..20: note = chemically synthesized
  source 1..20: mol_type = other DNA
caggctcactctctaagcct

SEQ ID NO: 32001 - DNA, 20 bp, synthetic construct
  misc_feature 1..20: note = chemically synthesized
  source 1..20: mol_type = other DNA
aacacttagggccagaaaga

SEQ ID NO: 32002 - DNA, 20 bp, synthetic construct
  misc_feature 1..20: note = chemically synthesized
  source 1..20: mol_type = other DNA
tcaaagtcacgaaacagctg

SEQ ID NO: 32003 - DNA, 20 bp, synthetic construct
  misc_feature 1..20: note = chemically synthesized
  source 1..20: mol_type = other DNA
acgaaacagctggtgagtgg

SEQ ID NO: 32004 - DNA, 20 bp, synthetic construct
  misc_feature 1..20: note = chemically synthesized
  source 1..20: mol_type = other DNA
cagctggtgagtggcagagt

SEQ ID NO: 32005 - DNA, 20 bp, synthetic construct
  misc_feature 1..20: note = chemically synthesized
  source 1..20: mol_type = other DNA
cctgcttcctaaaggaagaa

SEQ ID NO: 32006 - DNA, 20 bp, synthetic construct
  misc_feature 1..20: note = chemically synthesized
  source 1..20: mol_type = other DNA
taaaggaagaaaagaatccg

SEQ ID NO: 32007 - DNA, 20 bp, synthetic construct
  misc_feature 1..20: note = chemically synthesized
  source 1..20: mol_type = other DNA
atccggggagtggtggcagt

SEQ ID NO: 32008 - DNA, 20 bp, synthetic construct
  misc_feature 1..20: note = chemically synthesized
  source 1..20: mol_type = other DNA
caaataacctgataaatacc

SEQ ID NO: 32009 - DNA, 20 bp, synthetic construct
  misc_feature 1..20: note = chemically synthesized
  source 1..20: mol_type = other DNA
ctcagctgaggactcagagc

SEQ ID NO: 32010 - DNA, 20 bp, synthetic construct
  misc_feature 1..20: note = chemically synthesized
  source 1..20: mol_type = other DNA
aagaaagaggggaaatttgg

SEQ ID NO: 32011 - DNA, 20 bp, synthetic construct
  misc_feature 1..20: note = chemically synthesized
  source 1..20: mol_type = other DNA
cacttgtttgtctgactcag

SEQ ID NO: 32012 - DNA, 20 bp, synthetic construct
  misc_feature 1..20: note = chemically synthesized
  source 1..20: mol_type = other DNA
acagaacagatgaaccttca

SEQ ID NO: 32013 - DNA, 20 bp, synthetic construct
  misc_feature 1..20: note = chemically synthesized
  source 1..20: mol_type = other DNA
gaaccttcatggagtttcac

SEQ ID NO: 32014 - DNA, 20 bp, synthetic construct
  misc_feature 1..20: note = chemically synthesized
  source 1..20: mol_type = other DNA
agatgtcacagaaatcttca

SEQ ID NO: 32015 - DNA, 20 bp, synthetic construct
  misc_feature 1..20: note = chemically synthesized
  source 1..20: mol_type = other DNA
gtcgtatcctccgctgtcaa

SEQ ID NO: 32016 - DNA, 20 bp, synthetic construct
  misc_feature 1..20: note = chemically synthesized
  source 1..20: mol_type = other DNA
tatcctccgctgtcaactgg

SEQ ID NO: 32017 - DNA, 20 bp, synthetic construct
  misc_feature 1..20: note = chemically synthesized
  source 1..20: mol_type = other DNA
tcagtgtgcaatattttgat

SEQ ID NO: 32018 - DNA, 20 bp, synthetic construct
  misc_feature 1..20: note = chemically synthesized
  source 1..20: mol_type = other DNA
acctgctttttctttttatc

SEQ ID NO: 32019 - DNA, 20 bp, synthetic construct
  misc_feature 1..20: note = chemically synthesized
  source 1..20: mol_type = other DNA
tggaaataatttctcttcct

SEQ ID NO: 32020 - DNA, 20 bp, synthetic construct
  misc_feature 1..20: note = chemically synthesized
  source 1..20: mol_type = other DNA
tcatgacacactttctacat

SEQ ID NO: 32021 - DNA, 20 bp, synthetic construct
  misc_feature 1..20: note = chemically synthesized
  source 1..20: mol_type = other DNA
aggcactcggtaaatatttg

SEQ ID NO: 32022 - DNA, 20 bp, synthetic construct
  misc_feature 1..20: note = chemically synthesized
  source 1..20: mol_type = other DNA
actcggtaaatatttgttga

SEQ ID NO: 32023 - DNA, 20 bp, synthetic construct
  misc_feature 1..20: note = chemically synthesized
  source 1..20: mol_type = other DNA
ttgaatgaatgcatgagagg

SEQ ID NO: 32024 - DNA, 20 bp, synthetic construct
  misc_feature 1..20: note = chemically synthesized
  source 1..20: mol_type = other DNA
atgaatgcatgagaggttga

SEQ ID NO: 32025 - DNA, 20 bp, synthetic construct
  misc_feature 1..20: note = chemically synthesized
  source 1..20: mol_type = other DNA
gaggttgaatgaatgcatga

SEQ ID NO: 32026 - DNA, 20 bp, synthetic construct
  misc_feature 1..20: note = chemically synthesized
  source 1..20: mol_type = other DNA
ttgaatgaatgcatgagaga

SEQ ID NO: 32027 - DNA, 20 bp, synthetic construct
  misc_feature 1..20: note = chemically synthesized
  source 1..20: mol_type = other DNA
atgaatgcatgagagaatga

SEQ ID NO: 32028 - DNA, 20 bp, synthetic construct
  misc_feature 1..20: note = chemically synthesized
  source 1..20: mol_type = other DNA
tgcatgagagaatgaatgaa

SEQ ID NO: 32029 - DNA, 20 bp, synthetic construct
  misc_feature 1..20: note = chemically synthesized
  source 1..20: mol_type = other DNA
atactttgggcccagagcca

SEQ ID NO: 32030 - DNA, 20 bp, synthetic construct
  misc_feature 1..20: note = chemically synthesized
  source 1..20: mol_type = other DNA
ccagagccaaagaatattat

SEQ ID NO: 32031 - DNA, 20 bp, synthetic construct
  misc_feature 1..20: note = chemically synthesized
  source 1..20: mol_type = other DNA
acaccctaaatttaaccagc

SEQ ID NO: 32032 - DNA, 20 bp, synthetic construct
  misc_feature 1..20: note = chemically synthesized
  source 1..20: mol_type = other DNA
ctattcaaccttttgaaatg

SEQ ID NO: 32033 - DNA, 20 bp, synthetic construct
  misc_feature 1..20: note = chemically synthesized
  source 1..20: mol_type = other DNA
aaagcaagattttttttttt

SEQ ID NO: 32034 - DNA, 20 bp, synthetic construct
  misc_feature 1..20: note = chemically synthesized
  source 1..20: mol_type = other DNA
tgaagttagtaacctgttgt

SEQ ID NO: 32035 - DNA, 20 bp, synthetic construct
  misc_feature 1..20: note = chemically synthesized
  source 1..20: mol_type = other DNA
ttgagtaatcaaggctctaa

SEQ ID NO: 32036 - DNA, 20 bp, synthetic construct
  misc_feature 1..20: note = chemically synthesized
  source 1..20: mol_type = other DNA
gaggatagcattgatcaaaa

SEQ ID NO: 32037 - DNA, 20 bp, synthetic construct
  misc_feature 1..20: note = chemically synthesized
  source 1..20: mol_type = other DNA
gatcaaaaaagagttttaaa

SEQ ID NO: 32038 - DNA, 20 bp, synthetic construct
  misc_feature 1..20: note = chemically synthesized
  source 1..20: mol_type = other DNA
aagtcactggtgaagtatca

SEQ ID NO: 32039 - DNA, 20 bp, synthetic construct
  misc_feature 1..20: note = chemically synthesized
  source 1..20: mol_type = other DNA
aaggaatctaaggaccatga

SEQ ID NO: 32040 - DNA, 20 bp, synthetic construct
  misc_feature 1..20: note = chemically synthesized
  source 1..20: mol_type = other DNA
attgctttcttttgtttttg

SEQ ID NO: 32041 - DNA, 20 bp, synthetic construct
  misc_feature 1..20: note = chemically synthesized
  source 1..20: mol_type = other DNA
atacactttttaaagaacat

SEQ ID NO: 32042 - DNA, 20 bp, synthetic construct
  misc_feature 1..20: note = chemically synthesized
  source 1..20: mol_type = other DNA
tgctcatttctagaacaaaa

SEQ ID NO: 32043 - DNA, 20 bp, synthetic construct
  misc_feature 1..20: note = chemically synthesized
  source 1..20: mol_type = other DNA
gaaggttaattaagaagtct

SEQ ID NO: 32044 - DNA, 20 bp, synthetic construct
  misc_feature 1..20: note = chemically synthesized
  source 1..20: mol_type = other DNA
tataatactctgataagtca

SEQ ID NO: 32045 - DNA, 20 bp, synthetic construct
  misc_feature 1..20: note = chemically synthesized
  source 1..20: mol_type = other DNA
actggtatctatggtaaaca

SEQ ID NO: 32046 - DNA, 20 bp, synthetic construct
  misc_feature 1..20: note = chemically synthesized
  source 1..20: mol_type = other DNA
gggtcaagagctagatgcgg

SEQ ID NO: 32047 - DNA, 20 bp, synthetic construct
  misc_feature 1..20: note = chemically synthesized
  source 1..20: mol_type = other DNA
gtgtggcttgaacctagtaa

SEQ ID NO: 32048 - DNA, 20 bp, synthetic construct
  misc_feature 1..20: note = chemically synthesized
  source 1..20: mol_type = other DNA
ctagtaatcggattcagaac

SEQ ID NO: 32049 - DNA, 20 bp, synthetic construct
  misc_feature 1..20: note = chemically synthesized
  source 1..20: mol_type = other DNA
taatcggattcagaactgga

SEQ ID NO: 32050 - DNA, 20 bp, synthetic construct
  misc_feature 1..20: note = chemically synthesized
  source 1..20: mol_type = other DNA
agaactggaatgggttcctt

SEQ ID NO: 32051 - DNA, 20 bp, synthetic construct
  misc_feature 1..20: note = chemically synthesized
  source 1..20: mol_type = other DNA
cagggtactttacaaacgtt

SEQ ID NO: 32052 - DNA, 20 bp, synthetic construct
  misc_feature 1..20: note = chemically synthesized
  source 1..20: mol_type = other DNA
atggaagagctgagggactt

SEQ ID NO: 32053 - DNA, 20 bp, synthetic construct
  misc_feature 1..20: note = chemically synthesized
  source 1..20: mol_type = other DNA
ccattctctttttgaagacc

SEQ ID NO: 32054 - DNA, 20 bp, synthetic construct
  misc_feature 1..20: note = chemically synthesized
  source 1..20: mol_type = other DNA
aagacccagggtgaaagaaa

SEQ ID NO: 32055 - DNA, 20 bp, synthetic construct
  misc_feature 1..20: note = chemically synthesized
  source 1..20: mol_type = other DNA
acacacacacgtacatttta

SEQ ID NO: 32056 - DNA, 20 bp, synthetic construct
  misc_feature 1..20: note = chemically synthesized
  source 1..20: mol_type = other DNA
cacatctatgtactcctgtg

SEQ ID NO: 32057 - DNA, 20 bp, synthetic construct
  misc_feature 1..20: note = chemically synthesized
  source 1..20: mol_type = other DNA
aaagcagtcattaaacgtgt

SEQ ID NO: 32058 - DNA, 20 bp, synthetic construct
  misc_feature 1..20: note = chemically synthesized
  source 1..20: mol_type = other DNA
aaatagcatgttaatagtca

SEQ ID NO: 32059 - DNA, 20 bp, synthetic construct
  misc_feature 1..20: note = chemically synthesized
  source 1..20: mol_type = other DNA
tttaatgaaacctgaaaaat

SEQ ID NO: 32060 - DNA, 20 bp, synthetic construct
  misc_feature 1..20: note = chemically synthesized
  source 1..20: mol_type = other DNA
tgaggccccaagtggaaata

SEQ ID NO: 32061 - DNA, 20 bp, synthetic construct
  misc_feature 1..20: note = chemically synthesized
  source 1..20: mol_type = other DNA
gtaagacatttgaaaaaaga

SEQ ID NO: 32062 - DNA, 20 bp, synthetic construct
  misc_feature 1..20: note = chemically synthesized
  source 1..20: mol_type = other DNA
gagagaccagaaagggaaac

SEQ ID NO: 32063 - DNA, 20 bp, synthetic construct
  misc_feature 1..20: note = chemically synthesized
  source 1..20: mol_type = other DNA
tctgtctggcacaagctggt

SEQ ID NO: 32064 - DNA, 20 bp, synthetic construct
  misc_feature 1..20: note = chemically synthesized
  source 1..20: mol_type = other DNA
gtccttatcaatgacagacg

SEQ ID NO: 32065 - DNA, 20 bp, synthetic construct
  misc_feature 1..20: note = chemically synthesized
  source 1..20: mol_type = other DNA
tgacagacggagggtggaac

SEQ ID NO: 32066 - DNA, 20 bp, synthetic construct
  misc_feature 1..20: note = chemically synthesized
  source 1..20: mol_type = other DNA
gaacctgaatttcctaatgg

SEQ ID NO: 32067 - DNA, 20 bp, synthetic construct
  misc_feature 1..20: note = chemically synthesized
  source 1..20: mol_type = other DNA
ttcctaatggagggatcctt

SEQ ID NO: 32068 - DNA, 20 bp, synthetic construct
  misc_feature 1..20: note = chemically synthesized
  source 1..20: mol_type = other DNA
ctgttccagtcctaaaggag

SEQ ID NO: 32069 - DNA, 20 bp, synthetic construct
  misc_feature 1..20: note = chemically synthesized
  source 1..20: mol_type = other DNA
ggaaaacagcctcatggccc

SEQ ID NO: 32070 - DNA, 20 bp, synthetic construct
  misc_feature 1..20: note = chemically synthesized
  source 1..20: mol_type = other DNA
ggcccatgggtctctgccca

SEQ ID NO: 32071 - DNA, 20 bp, synthetic construct
  misc_feature 1..20: note = chemically synthesized
  source 1..20: mol_type = other DNA
gacagcagtgctgattcagc

SEQ ID NO: 32072 - DNA, 20 bp, synthetic construct
  misc_feature 1..20: note = chemically synthesized
  source 1..20: mol_type = other DNA
gattcagcttgagtgtgcat

SEQ ID NO: 32073 - DNA, 20 bp, synthetic construct
  misc_feature 1..20: note = chemically synthesized
  source 1..20: mol_type = other DNA
gtgtgcatgagaatcacctg

SEQ ID NO: 32074 - DNA, 20 bp, synthetic construct
  misc_feature 1..20: note = chemically synthesized
  source 1..20: mol_type = other DNA
gtaagtctgaggtggtgccc

SEQ ID NO: 32075 - DNA, 20 bp, synthetic construct
  misc_feature 1..20: note = chemically synthesized
  source 1..20: mol_type = other DNA
actcccaggtgatgctgatc

SEQ ID NO: 32076 - DNA, 20 bp, synthetic construct
  misc_feature 1..20: note = chemically synthesized
  source 1..20: mol_type = other DNA
gatgctgatcgggggtgggc

SEQ ID NO: 32077 - DNA, 20 bp, synthetic construct
  misc_feature 1..20: note = chemically synthesized
  source 1..20: mol_type = other DNA
tgggcctgggtctgcgctgt

SEQ ID NO: 32078 - DNA, 20 bp, synthetic construct
  misc_feature 1..20: note = chemically synthesized
  source 1..20: mol_type = other DNA
agagcccatctctggctggg

SEQ ID NO: 32079 - DNA, 20 bp, synthetic construct
  misc_feature 1..20: note = chemically synthesized
  source 1..20: mol_type = other DNA
tgggaaggcagagctgctcc

SEQ ID NO: 32080 - DNA, 20 bp, synthetic construct
  misc_feature 1..20: note = chemically synthesized
  source 1..20: mol_type = other DNA
ttagcatttccagttcatgt

SEQ ID NO: 32081 - DNA, 20 bp, synthetic construct
  misc_feature 1..20: note = chemically synthesized
  source 1..20: mol_type = other DNA
tgtcgattttacttaccaaa

SEQ ID NO: 32082 - DNA, 20 bp, synthetic construct
  misc_feature 1..20: note = chemically synthesized
  source 1..20: mol_type = other DNA
tacttaccaaagagaatatt

SEQ ID NO: 32083 - DNA, 20 bp, synthetic construct
  misc_feature 1..20: note = chemically synthesized
  source 1..20: mol_type = other DNA
gtgtttagtggaagaagcag

SEQ ID NO: 32084 - DNA, 20 bp, synthetic construct
  misc_feature 1..20: note = chemically synthesized
  source 1..20: mol_type = other DNA
gaagaagcagcagaatcagc

SEQ ID NO: 32085 - DNA, 20 bp, synthetic construct
  misc_feature 1..20: note = chemically synthesized
  source 1..20: mol_type = other DNA
tcctgaaggaagataaatgc

SEQ ID NO: 32086 - DNA, 20 bp, synthetic construct
  misc_feature 1..20: note = chemically synthesized
  source 1..20: mol_type = other DNA
gaaggaagataaatgcaagg

SEQ ID NO: 32087 - DNA, 20 bp, synthetic construct
  misc_feature 1..20: note = chemically synthesized
  source 1..20: mol_type = other DNA
ctgcaggggaagcagaggta

SEQ ID NO: 32088 - DNA, 20 bp, synthetic construct
  misc_feature 1..20: note = chemically synthesized
  source 1..20: mol_type = other DNA
agacggttaagtactgctta

SEQ ID NO: 32089 - DNA, 20 bp, synthetic construct
  misc_feature 1..20: note = chemically synthesized
  source 1..20: mol_type = other DNA
caaattcccaggaaagacca

SEQ ID NO: 32090 - DNA, 20 bp, synthetic construct
  misc_feature 1..20: note = chemically synthesized
  source 1..20: mol_type = other DNA
ccaggaaagaccactggatc

SEQ ID NO: 32091 - DNA, 20 bp, synthetic construct
  misc_feature 1..20: note = chemically synthesized
  source 1..20: mol_type = other DNA
gggacagacttgatgatagc

SEQ ID NO: 32092 - DNA, 20 bp, synthetic construct
  misc_feature 1..20: note = chemically synthesized
  source 1..20: mol_type = other DNA
cgtcagcttgtttagggcta

SEQ ID NO: 32093 - DNA, 20 bp, synthetic construct
  misc_feature 1..20: note = chemically synthesized
  source 1..20: mol_type = other DNA
attcatgcgaggggctaggc

SEQ ID NO: 32094 - DNA, 20 bp, synthetic construct
  misc_feature 1..20: note = chemically synthesized
  source 1..20: mol_type = other DNA
ggaggcctgctgaagcactt

SEQ ID NO: 32095 - DNA, 20 bp, synthetic construct
  misc_feature 1..20: note = chemically synthesized
  source 1..20: mol_type = other DNA
agcacttcagggtctcttcc

SEQ ID NO: 32096 - DNA, 20 bp, synthetic construct
  misc_feature 1..20: note = chemically synthesized
  source 1..20: mol_type = other DNA
tcttcccagagtaagtggca

SEQ ID NO: 32097 - DNA, 20 bp, synthetic construct
  misc_feature 1..20: note = chemically synthesized
  source 1..20: mol_type = other DNA
aaatttgatactccccatac

SEQ ID NO: 32098 - DNA, 20 bp, synthetic construct
  misc_feature 1..20: note = chemically synthesized
  source 1..20: mol_type = other DNA
agtacctgttgcgtttatgc

SEQ ID NO: 32099 - DNA, 20 bp, synthetic construct
  misc_feature 1..20: note = chemically synthesized
  source 1..20: mol_type = other DNA
tgctgggatcacagagatac

SEQ ID NO: 32100 - DNA, 20 bp, synthetic construct
  misc_feature 1..20: note = chemically synthesized
  source 1..20: mol_type = other DNA
ttgcctgtgtttcctaagaa

SEQ ID NO: 32101 - DNA, 20 bp, synthetic construct
  misc_feature 1..20: note = chemically synthesized
  source 1..20: mol_type = other DNA
aggcaaaaacaagtgcaaag

SEQ ID NO: 32102 - DNA, 20 bp, synthetic construct
  misc_feature 1..20: note = chemically synthesized
  source 1..20: mol_type = other DNA
tttgtggtgtttattttgtt

SEQ ID NO: 32103 - DNA, 20 bp, synthetic construct
  misc_feature 1..20: note = chemically synthesized
  source 1..20: mol_type = other DNA
ttattttgttttgggtcaga

SEQ ID NO: 32104 - DNA, 20 bp, synthetic construct
  misc_feature 1..20: note = chemically synthesized
  source 1..20: mol_type = other DNA
tgtgctctatataaggagaa

SEQ ID NO: 32105 - DNA, 20 bp, synthetic construct
  misc_feature 1..20: note = chemically synthesized
  source 1..20: mol_type = other DNA
acacttgagacctgctatcc

SEQ ID NO: 32106 - DNA, 20 bp, synthetic construct
  misc_feature 1..20: note = chemically synthesized
  source 1..20: mol_type = other DNA
gagaagtcacttgtcttcac

SEQ ID NO: 32107 - DNA, 20 bp, synthetic construct
  misc_feature 1..20: note = chemically synthesized
  source 1..20: mol_type = other DNA
agtgcagtaaaatggtgaag

SEQ ID NO: 32108 - DNA, 20 bp, synthetic construct
  misc_feature 1..20: note = chemically synthesized
  source 1..20: mol_type = other DNA
gtaaaatggtgaagatgggt

SEQ ID NO: 32109 - DNA, 20 bp, synthetic construct
  misc_feature 1..20: note = chemically synthesized
  source 1..20: mol_type = other DNA
gtgaagatgggtcagggttt

SEQ ID NO: 32110 - DNA, 20 bp, synthetic construct
  misc_feature 1..20: note = chemically synthesized
  source 1..20: mol_type = other DNA
tttctgggtgctggcattat

SEQ ID NO: 32111 - DNA, 20 bp, synthetic construct
  misc_feature 1..20: note = chemically synthesized
  source 1..20: mol_type = other DNA
tgtgtaaggtttccagttga

SEQ ID NO: 32112 - DNA, 20 bp, synthetic construct
  misc_feature 1..20: note = chemically synthesized
  source 1..20: mol_type = other DNA
gtttccagttgacaggattc

SEQ ID NO: 32113 - DNA, 20 bp, synthetic construct
  misc_feature 1..20: note = chemically synthesized
  source 1..20: mol_type = other DNA
atcagcattttgctttttgc

SEQ ID NO: 32114 - DNA, 20 bp, synthetic construct
  misc_feature 1..20: note = chemically synthesized
  source 1..20: mol_type = other DNA
gatgttgtaatctattttaa

SEQ ID NO: 32115 - DNA, 20 bp, synthetic construct
  misc_feature 1..20: note = chemically synthesized
  source 1..20: mol_type = other DNA
tgtagctgtagtgcttgatt

SEQ ID NO: 32116 - DNA, 20 bp, synthetic construct
  misc_feature 1..20: note = chemically synthesized
  source 1..20: mol_type = other DNA
ggagctctaatccccacgcc

SEQ ID NO: 32117 - DNA, 20 bp, synthetic construct
  misc_feature 1..20: note = chemically synthesized
  source 1..20: mol_type = other DNA
ctctaatccccacgcctggg

SEQ ID NO: 32118 - DNA, 20 bp, synthetic construct
  misc_feature 1..20: note = chemically synthesized
  source 1..20: mol_type = other DNA
ccccacgcctgggatgagtg

SEQ ID NO: 32119 - DNA, 20 bp, synthetic construct
  misc_feature 1..20: note = chemically synthesized
  source 1..20: mol_type = other DNA
tgagtgcagaatatgccccg

SEQ ID NO: 32120 - DNA, 20 bp, synthetic construct
  misc_feature 1..20: note = chemically synthesized
  source 1..20: mol_type = other DNA
atgtccatgtgtatagagat

SEQ ID NO: 32121 - DNA, 20 bp, synthetic construct
  misc_feature 1..20: note = chemically synthesized
  source 1..20: mol_type = other DNA
ccttactttttaagtactga

SEQ ID NO: 32122 - DNA, 20 bp, synthetic construct
  misc_feature 1..20: note = chemically synthesized
  source 1..20: mol_type = other DNA
gctgatagtagctcatccct

SEQ ID NO: 32123 - DNA, 20 bp, synthetic construct
  misc_feature 1..20: note = chemically synthesized
  source 1..20: mol_type = other DNA
atccctgtgggtcttctccc

SEQ ID NO: 32124 - DNA, 20 bp, synthetic construct
  misc_feature 1..20: note = chemically synthesized
  source 1..20: mol_type = other DNA
ctgtggcctcatttaggact

SEQ ID NO: 32125 - DNA, 20 bp, synthetic construct
  misc_feature 1..20: note = chemically synthesized
  source 1..20: mol_type = other DNA
cacacatctttagccaaggc

SEQ ID NO: 32126 - DNA, 20 bp, synthetic construct
  misc_feature 1..20: note = chemically synthesized
  source 1..20: mol_type = other DNA
tagccaaggccagaatcaaa

SEQ ID NO: 32127 - DNA, 20 bp, synthetic construct
  misc_feature 1..20: note = chemically synthesized
  source 1..20: mol_type = other DNA
agaatcaaaaggagtcagtt

SEQ ID NO: 32128 - DNA, 20 bp, synthetic construct
  misc_feature 1..20: note = chemically synthesized
  source 1..20: mol_type = other DNA
gagtcagtttagggttattc

SEQ ID NO: 32129 - DNA, 20 bp, synthetic construct
  misc_feature 1..20: note = chemically synthesized
  source 1..20: mol_type = other DNA
tctgtgtaggaacacatggt

SEQ ID NO: 32130 - DNA, 20 bp, synthetic construct
  misc_feature 1..20: note = chemically synthesized
  source 1..20: mol_type = other DNA
catgcatggctaaaaggtta

SEQ ID NO: 32131 - DNA, 20 bp, synthetic construct
  misc_feature 1..20: note = chemically synthesized
  source 1..20: mol_type = other DNA
aaggaaaaaggtcatggaga

SEQ ID NO: 32132 - DNA, 20 bp, synthetic construct
  misc_feature 1..20: note = chemically synthesized
  source 1..20: mol_type = other DNA
aataacaaagagcaagatgc

SEQ ID NO: 32133 - DNA, 20 bp, synthetic construct
  misc_feature 1..20: note = chemically synthesized
  source 1..20: mol_type = other DNA
ctaggtaatcctaggtaaca

SEQ ID NO: 32134 - DNA, 20 bp, synthetic construct
  misc_feature 1..20: note = chemically synthesized
  source 1..20: mol_type = other DNA
aggtaacaaagagttattgt

SEQ ID NO: 32135 - DNA, 20 bp, synthetic construct
  misc_feature 1..20: note = chemically synthesized
  source 1..20: mol_type = other DNA
aagccctcaggtcctgaggg

SEQ ID NO: 32136 - DNA, 20 bp, synthetic construct
  misc_feature 1..20: note = chemically synthesized
  source 1..20: mol_type = other DNA
tcctgagggctgggtggttc

SEQ ID NO: 32137 - DNA, 20 bp, synthetic construct
  misc_feature 1..20: note = chemically synthesized
  source 1..20: mol_type = other DNA
cccccaagctgggcctaagc

SEQ ID NO: 32138 - DNA, 20 bp, synthetic construct
  misc_feature 1..20: note = chemically synthesized
  source 1..20: mol_type = other DNA
ttctagtccctgcatgctgg

SEQ ID NO: 32139 - DNA, 20 bp, synthetic construct
  misc_feature 1..20: note = chemically synthesized
  source 1..20: mol_type = other DNA
cggagccacttttggaggga

SEQ ID NO: 32140 - DNA, 20 bp, synthetic construct
  misc_feature 1..20: note = chemically synthesized
  source 1..20: mol_type = other DNA
tttggagggaagggatagaa

SEQ ID NO: 32141 - DNA, 20 bp, synthetic construct
  misc_feature 1..20: note = chemically synthesized
  source 1..20: mol_type = other DNA
gggagttgagcagttcagag

SEQ ID NO: 32142 - DNA, 20 bp, synthetic construct
  misc_feature 1..20: note = chemically synthesized
  source 1..20: mol_type = other DNA
ttgagcagttcagaggaggg

SEQ ID NO: 32143 - DNA, 20 bp, synthetic construct
  misc_feature 1..20: note = chemically synthesized
  source 1..20: mol_type = other DNA
gcctggtcttcctgagggct

SEQ ID NO: 32144 - DNA, 20 bp, synthetic construct
  misc_feature 1..20: note = chemically synthesized
  source 1..20: mol_type = other DNA
ctcccaccttcccacaaagg

SEQ ID NO: 32145 - DNA, 20 bp, synthetic construct
  misc_feature 1..20: note = chemically synthesized
  source 1..20: mol_type = other DNA
cctgctggcaggaccaattt

SEQ ID NO: 32146 - DNA, 20 bp, synthetic construct
  misc_feature 1..20: note = chemically synthesized
  source 1..20: mol_type = other DNA
ccagaacaaggtatgtggaa

SEQ ID NO: 32147 - DNA, 20 bp, synthetic construct
  misc_feature 1..20: note = chemically synthesized
  source 1..20: mol_type = other DNA
ggtatgtggaagtgggttgt

SEQ ID NO: 32148 - DNA, 20 bp, synthetic construct
  misc_feature 1..20: note = chemically synthesized
  source 1..20: mol_type = other DNA
aactagagcctccttttggc

SEQ ID NO: 32149 - DNA, 20 bp, synthetic construct
  misc_feature 1..20: note = chemically synthesized
  source 1..20: mol_type = other DNA
accttcctctggaagccgtt

SEQ ID NO: 32150 - DNA, 20 bp, synthetic construct
  misc_feature 1..20: note = chemically synthesized
  source 1..20: mol_type = other DNA
tttatgctcattttacagat

SEQ ID NO: 32151 - DNA, 20 bp, synthetic construct
  misc_feature 1..20: note = chemically synthesized
  source 1..20: mol_type = other DNA
gagaaatcaaatgactatcc

SEQ ID NO: 32152 - DNA, 20 bp, synthetic construct
  misc_feature 1..20: note = chemically synthesized
  source 1..20: mol_type = other DNA
tatcccagagttacaatcta

SEQ ID NO: 32153 - DNA, 20 bp, synthetic construct
  misc_feature 1..20: note = chemically synthesized
  source 1..20: mol_type = other DNA
tctcagacctccttgttctt

SEQ ID NO: 32154 - DNA, 20 bp, synthetic construct
  misc_feature 1..20: note = chemically synthesized
  source 1..20: mol_type = other DNA
attggtgacatactagaaat

SEQ ID NO: 32155 - DNA, 20 bp, synthetic construct
  misc_feature 1..20: note = chemically synthesized
  source 1..20: mol_type = other DNA
attgagaagttgattttcat

SEQ ID NO: 32156 - DNA, 20 bp, synthetic construct
  misc_feature 1..20: note = chemically synthesized
  source 1..20: mol_type = other DNA
gattttcatcagagtaaatg

SEQ ID NO: 32157 - DNA, 20 bp, synthetic construct
  misc_feature 1..20: note = chemically synthesized
  source 1..20: mol_type = other DNA
tttattgatgactgcagttt

SEQ ID NO: 32158 - DNA, 20 bp, synthetic construct
  misc_feature 1..20: note = chemically synthesized
  source 1..20: mol_type = other DNA
atgactgcagtttaggaatt

SEQ ID NO: 32159 - DNA, 20 bp, synthetic construct
  misc_feature 1..20: note = chemically synthesized
  source 1..20: mol_type = other DNA
atatggtacaccggcatgag

SEQ ID NO: 32160 - DNA, 20 bp, synthetic construct
  misc_feature 1..20: note = chemically synthesized
  source 1..20: mol_type = other DNA
cactagctgccctcatgatc

SEQ ID NO: 32161 - DNA, 20 bp, synthetic construct
  misc_feature 1..20: note = chemically synthesized
  source 1..20: mol_type = other DNA
atctagaatatctagttgat

SEQ ID NO: 32162 - DNA, 20 bp, synthetic construct
  misc_feature 1..20: note = chemically synthesized
  source 1..20: mol_type = other DNA
ctgatgtatgagagagaggg

SEQ ID NO: 32163 - DNA, 20 bp, synthetic construct
  misc_feature 1..20: note = chemically synthesized
  source 1..20: mol_type = other DNA
actggctctgaaaaaaagtt

SEQ ID NO: 32164 - DNA, 20 bp, synthetic construct
  misc_feature 1..20: note = chemically synthesized
  source 1..20: mol_type = other DNA
tctcatttaagcctttttga

SEQ ID NO: 32165 - DNA, 20 bp, synthetic construct
  misc_feature 1..20: note = chemically synthesized
  source 1..20: mol_type = other DNA
tgaaaccagcaccactaatt

SEQ ID NO: 32166 - DNA, 20 bp, synthetic construct
  misc_feature 1..20: note = chemically synthesized
  source 1..20: mol_type = other DNA
cactaattatgagtctagtc

SEQ ID NO: 32167 - DNA, 20 bp, synthetic construct
  misc_feature 1..20: note = chemically synthesized
  source 1..20: mol_type = other DNA
aaatataattttaaggcatt

SEQ ID NO: 32168 - DNA, 20 bp, synthetic construct
  misc_feature 1..20: note = chemically synthesized
  source 1..20: mol_type = other DNA
gtgatgaacgtgttaaggac

SEQ ID NO: 32169 - DNA, 20 bp, synthetic construct
  misc_feature 1..20: note = chemically synthesized
  source 1..20: mol_type = other DNA
ctcagatcgtcaggctaaat

SEQ ID NO: 32170 - DNA, 20 bp, synthetic construct
  misc_feature 1..20: note = chemically synthesized
  source 1..20: mol_type = other DNA
aggacaaggaggaagccaca

SEQ ID NO: 32171 - DNA, 20 bp, synthetic construct
  misc_feature 1..20: note = chemically synthesized
  source 1..20: mol_type = other DNA
cttgtttaagagatttaccc

SEQ ID NO: 32172 - DNA, 20 bp, synthetic construct
  misc_feature 1..20: note = chemically synthesized
  source 1..20: mol_type = other DNA
ttacccaggagtgagatata

SEQ ID NO: 32173 - DNA, 20 bp, synthetic construct
  misc_feature 1..20: note = chemically synthesized
  source 1..20: mol_type = other DNA
caggagtgagatatattgag

SEQ ID NO: 32174 - DNA, 20 bp, synthetic construct
  misc_feature 1..20: note = chemically synthesized
  source 1..20: mol_type = other DNA
gtaaattacaaggtcagggc

SEQ ID NO: 32175 - DNA, 20 bp, synthetic construct
  misc_feature 1..20: note = chemically synthesized
  source 1..20: mol_type = other DNA
tgagcgaggctggcttattt

SEQ ID NO: 32176 - DNA, 20 bp, synthetic construct
  misc_feature 1..20: note = chemically synthesized
  source 1..20: mol_type = other DNA
tattttaaggcttttttttt

SEQ ID NO: 32177 - DNA, 20 bp, synthetic construct
  misc_feature 1..20: note = chemically synthesized
  source 1..20: mol_type = other DNA
caaagtggcatttaccactc

SEQ ID NO: 32178 - DNA, 20 bp, synthetic construct
  misc_feature 1..20: note = chemically synthesized
  source 1..20: mol_type = other DNA
cagacggcttggctactggc

SEQ ID NO: 32179 - DNA, 20 bp, synthetic construct
  misc_feature 1..20: note = chemically synthesized
  source 1..20: mol_type = other DNA
tgtttctttctcaactggag

SEQ ID NO: 32180 - DNA, 20 bp, synthetic construct
  misc_feature 1..20: note = chemically synthesized
  source 1..20: mol_type = other DNA
ctgagtcccagccgagggcg

SEQ ID NO: 32181 - DNA, 20 bp, synthetic construct
  misc_feature 1..20: note = chemically synthesized
  source 1..20: mol_type = other DNA
cctctcaaaacaatgaggag

SEQ ID NO: 32182 - DNA, 20 bp, synthetic construct
  misc_feature 1..20: note = chemically synthesized
  source 1..20: mol_type = other DNA
gttttaactgttccttaaac

SEQ ID NO: 32183 - DNA, 20 bp, synthetic construct
  misc_feature 1..20: note = chemically synthesized
  source 1..20: mol_type = other DNA
cgggggacaactcctaaaga

SEQ ID NO: 32184 - DNA, 20 bp, synthetic construct
  misc_feature 1..20: note = chemically synthesized
  source 1..20: mol_type = other DNA
atacagcctatccgttaaat

SEQ ID NO: 32185 - DNA, 20 bp, synthetic construct
  misc_feature 1..20: note = chemically synthesized
  source 1..20: mol_type = other DNA
gataaaaatggacgtcccca

SEQ ID NO: 32186 - DNA, 20 bp, synthetic construct
  misc_feature 1..20: note = chemically synthesized
  source 1..20: mol_type = other DNA
tcactgatcctcccacagtc

SEQ ID NO: 32187 - DNA, 20 bp, synthetic construct
  misc_feature 1..20: note = chemically synthesized
  source 1..20: mol_type = other DNA
cctcccacagtctggggtgt

SEQ ID NO: 32188 - DNA, 20 bp, synthetic construct
  misc_feature 1..20: note = chemically synthesized
  source 1..20: mol_type = other DNA
tttttccacggaagtatttt

SEQ ID NO: 32189 - DNA, 20 bp, synthetic construct
  misc_feature 1..20: note = chemically synthesized
  source 1..20: mol_type = other DNA
tagggccatagaacattgta

SEQ ID NO: 32190 - DNA, 20 bp, synthetic construct
  misc_feature 1..20: note = chemically synthesized
  source 1..20: mol_type = other DNA
agttcacctgtcacccaggg

SEQ ID NO: 32191 - DNA, 20 bp, synthetic construct
  misc_feature 1..20: note = chemically synthesized
  source 1..20: mol_type = other DNA
cccaggggggaatagaaagc

SEQ ID NO: 32192 - DNA, 20 bp, synthetic construct
  misc_feature 1..20: note = chemically synthesized
  source 1..20: mol_type = other DNA
taggaagccaaaaagtttcc

SEQ ID NO: 32193 - DNA, 20 bp, synthetic construct
  misc_feature 1..20: note = chemically synthesized
  source 1..20: mol_type = other DNA
aagacatttgttgaggtgcc

SEQ ID NO: 32194 - DNA, 20 bp, synthetic construct
  misc_feature 1..20: note = chemically synthesized
  source 1..20: mol_type = other DNA
atcctcaagccagaactggt

SEQ ID NO: 32195 - DNA, 20 bp, synthetic construct
  misc_feature 1..20: note = chemically synthesized
  source 1..20: mol_type = other DNA
ggtcaggatttttctgcttt

SEQ ID NO: 32196 - DNA, 20 bp, synthetic construct
  misc_feature 1..20: note = chemically synthesized
  source 1..20: mol_type = other DNA
ggatttttctgctttgggga

SEQ ID NO: 32197 - DNA, 20 bp, synthetic construct
  misc_feature 1..20: note = chemically synthesized
  source 1..20: mol_type = other DNA
tggatataaaatttctagaa

SEQ ID NO: 32198 - DNA, 20 bp, synthetic construct
  misc_feature 1..20: note = chemically synthesized
  source 1..20: mol_type = other DNA
atcaattggaccaatattta

SEQ ID NO: 32199 - DNA, 20 bp, synthetic construct
  misc_feature 1..20: note = chemically synthesized
  source 1..20: mol_type = other DNA
gctcagacgtgccaggcaca

SEQ ID NO: 32200 - DNA, 20 bp, synthetic construct
  misc_feature 1..20: note = chemically synthesized
  source 1..20: mol_type = other DNA
gtcagtgagggcttaggcct

SEQ ID NO: 32201 - DNA, 20 bp, synthetic construct
  misc_feature 1..20: note = chemically synthesized
  source 1..20: mol_type = other DNA
gggcttaggccttggggttg

SEQ ID NO: 32202 - DNA, 20 bp, synthetic construct
  misc_feature 1..20: note = chemically synthesized
  source 1..20: mol_type = other DNA
gcaacacgcacagaacactc

SEQ ID NO: 32203 - DNA, 20 bp, synthetic construct
  misc_feature 1..20: note = chemically synthesized
  source 1..20: mol_type = other DNA
gcacagaacactcatggatt

SEQ ID NO: 32204 - DNA, 20 bp, synthetic construct
  misc_feature 1..20: note = chemically synthesized
  source 1..20: mol_type = other DNA
cacggaagtcccctgacccc

SEQ ID NO: 32205 - DNA, 20 bp, synthetic construct
  misc_feature 1..20: note = chemically synthesized
  source 1..20: mol_type = other DNA
tatcccttcaggactaggtg

SEQ ID NO: 32206 - DNA, 20 bp, synthetic construct
  misc_feature 1..20: note = chemically synthesized
  source 1..20: mol_type = other DNA
ccttcccagccacctctcca

SEQ ID NO: 32207 - DNA, 20 bp, synthetic construct
  misc_feature 1..20: note = chemically synthesized
  source 1..20: mol_type = other DNA
aataacccctttaacctgct

SEQ ID NO: 32208 - DNA, 20 bp, synthetic construct
  misc_feature 1..20: note = chemically synthesized
  source 1..20: mol_type = other DNA
ctttaacctgctaagaatac

SEQ ID NO: 32209 - DNA, 20 bp, synthetic construct
  misc_feature 1..20: note = chemically synthesized
  source 1..20: mol_type = other DNA
tggccctggccacccatcac

SEQ ID NO: 32210 - DNA, 20 bp, synthetic construct
  misc_feature 1..20: note = chemically synthesized
  source 1..20: mol_type = other DNA
catcacccgagtgcctttga

SEQ ID NO: 32211 - DNA, 20 bp, synthetic construct
  misc_feature 1..20: note = chemically synthesized
  source 1..20: mol_type = other DNA
cctttgacagggtgctgcgg

SEQ ID NO: 32212 - DNA, 20 bp, synthetic construct
  misc_feature 1..20: note = chemically synthesized
  source 1..20: mol_type = other DNA
tggctatggagcctcccgcc

SEQ ID NO: 32213 - DNA, 20 bp, synthetic construct
  misc_feature 1..20: note = chemically synthesized
  source 1..20: mol_type = other DNA
cccggtcaagtccaagtcat

SEQ ID NO: 32214 - DNA, 20 bp, synthetic construct
  misc_feature 1..20: note = chemically synthesized
  source 1..20: mol_type = other DNA
gaggagctgacggagagcga

SEQ ID NO: 32215 - DNA, 20 bp, synthetic construct
  misc_feature 1..20: note = chemically synthesized
  source 1..20: mol_type = other DNA
cgacgaagactcggtggccg

SEQ ID NO: 32216 - DNA, 20 bp, synthetic construct
  misc_feature 1..20: note = chemically synthesized
  source 1..20: mol_type = other DNA
tggccgcggctgctccccgg

SEQ ID NO: 32217 - DNA, 20 bp, synthetic construct
  misc_feature 1..20: note = chemically synthesized
  source 1..20: mol_type = other DNA
taagcgcatcaagctcgaga

SEQ ID NO: 32218 - DNA, 20 bp, synthetic construct
  misc_feature 1..20: note = chemically synthesized
  source 1..20: mol_type = other DNA
cggagcactcctcggagaac

SEQ ID NO: 32219 - DNA, 20 bp, synthetic construct
  misc_feature 1..20: note = chemically synthesized
  source 1..20: mol_type = other DNA
ccgcccggggagctggacgg

SEQ ID NO: 32220 - DNA, 20 bp, synthetic construct
  misc_feature 1..20: note = chemically synthesized
  source 1..20: mol_type = other DNA
gggcagacgcagcgacactt

SEQ ID NO: 32221 - DNA, 20 bp, synthetic construct
  misc_feature 1..20: note = chemically synthesized
  source 1..20: mol_type = other DNA
tgtgcaactatgcctgtgcc

SEQ ID NO: 32222 - DNA, 20 bp, synthetic construct
  misc_feature 1..20: note = chemically synthesized
  source 1..20: mol_type = other DNA
atgaaaaaatggcacagtga

SEQ ID NO: 32223 - DNA, 20 bp, synthetic construct
  misc_feature 1..20: note = chemically synthesized
  source 1..20: mol_type = other DNA
aatggcacagtgatcgagtg

SEQ ID NO: 32224 - DNA, 20 bp, synthetic construct
  misc_feature 1..20: note = chemically synthesized
  source 1..20: mol_type = other DNA
gttgaataatgatataaaaa

SEQ ID NO: 32225 - DNA, 20 bp, synthetic construct
  misc_feature 1..20: note = chemically synthesized
  source 1..20: mol_type = other DNA
ccctccagccccactccctg

SEQ ID NO: 32226 - DNA, 20 bp, synthetic construct
  misc_feature 1..20: note = chemically synthesized
  source 1..20: mol_type = other DNA
caaacagaagtaacgaagct

SEQ ID NO: 32227 - DNA, 20 bp, synthetic construct
  misc_feature 1..20: note = chemically synthesized
  source 1..20: mol_type = other DNA
agtaacgaagctaagaatat

SEQ ID NO: 32228 - DNA, 20 bp, synthetic construct
  misc_feature 1..20: note = chemically synthesized
  source 1..20: mol_type = other DNA
ttcctttatgttctcaccgt

SEQ ID NO: 32229 - DNA, 20 bp, synthetic construct
  misc_feature 1..20: note = chemically synthesized
  source 1..20: mol_type = other DNA
gtgaggaggaaaaacagtct

SEQ ID NO: 32230 - DNA, 20 bp, synthetic construct
  misc_feature 1..20: note = chemically synthesized
  source 1..20: mol_type = other DNA
ttggattaaccctctataga

SEQ ID NO: 32231 - DNA, 20 bp, synthetic construct
  misc_feature 1..20: note = chemically synthesized
  source 1..20: mol_type = other DNA
gagctaaatgtctgtctcta

SEQ ID NO: 32232 - DNA, 20 bp, synthetic construct
  misc_feature 1..20: note = chemically synthesized
  source 1..20: mol_type = other DNA
ggaaaggaagaaaaaaggcc

SEQ ID NO: 32233 - DNA, 20 bp, synthetic construct
  misc_feature 1..20: note = chemically synthesized
  source 1..20: mol_type = other DNA
ctatcatttggttttaaaat

SEQ ID NO: 32234 - DNA, 20 bp, synthetic construct
  misc_feature 1..20: note = chemically synthesized
  source 1..20: mol_type = other DNA
ggttttaaaatatgagtgcc

SEQ ID NO: 32235 - DNA, 20 bp, synthetic construct
  misc_feature 1..20: note = chemically synthesized
  source 1..20: mol_type = other DNA
acttgtagcttaattcagca

SEQ ID NO: 32236 - DNA, 20 bp, synthetic construct
  misc_feature 1..20: note = chemically synthesized
  source 1..20: mol_type = other DNA
ttttttaaacaatgattaaa

SEQ ID NO: 32237 - DNA, 20 bp, synthetic construct
  misc_feature 1..20: note = chemically synthesized
  source 1..20: mol_type = other DNA
cgcaattaaatacactagta

SEQ ID NO: 32238 - DNA, 20 bp, synthetic construct
  misc_feature 1..20: note = chemically synthesized
  source 1..20: mol_type = other DNA
tgatacaatgatgattaact

SEQ ID NO: 32239 - DNA, 20 bp, synthetic construct
  misc_feature 1..20: note = chemically synthesized
  source 1..20: mol_type = other DNA
attcttaaaaaaagaagaga

SEQ ID NO: 32240 - DNA, 20 bp, synthetic construct
  misc_feature 1..20: note = chemically synthesized
  source 1..20: mol_type = other DNA
aaaagaagagaaagaatttt

SEQ ID NO: 32241 - DNA, 20 bp, synthetic construct
  misc_feature 1..20: note = chemically synthesized
  source 1..20: mol_type = other DNA
ctatttgtgttaacatggaa

SEQ ID NO: 32242 - DNA, 20 bp, synthetic construct
  misc_feature 1..20: note = chemically synthesized
  source 1..20: mol_type = other DNA
tctaatcagagatacagagg

SEQ ID NO: 32243 - DNA, 20 bp, synthetic construct
  misc_feature 1..20: note = chemically synthesized
  source 1..20: mol_type = other DNA
atacttaagggaaaagttgc

SEQ ID NO: 32244 - DNA, 20 bp, synthetic construct
  misc_feature 1..20: note = chemically synthesized
  source 1..20: mol_type = other DNA
gacgcaacattgcaagcgct

SEQ ID NO: 32245 - DNA, 20 bp, synthetic construct
  misc_feature 1..20: note = chemically synthesized
  source 1..20: mol_type = other DNA
gcaagcgctgtgaatggaaa

SEQ ID NO: 32246 - DNA, 20 bp, synthetic construct
  misc_feature 1..20: note = chemically synthesized
  source 1..20: mol_type = other DNA
agaatacacttaacatagaa

SEQ ID NO: 32247 - DNA, 20 bp, synthetic construct
  misc_feature 1..20: note = chemically synthesized
  source 1..20: mol_type = other DNA
tgctttcgcttctacagtgc

SEQ ID NO: 32248 - DNA, 20 bp, synthetic construct
  misc_feature 1..20: note = chemically synthesized
  source 1..20: mol_type = other DNA
tttaggggggaactgcattt

SEQ ID NO: 32249 - DNA, 20 bp, synthetic construct
  misc_feature 1..20: note = chemically synthesized
  source 1..20: mol_type = other DNA
ggtagtggaaattctatgcc

SEQ ID NO: 32250 - DNA, 20 bp, synthetic construct
  misc_feature 1..20: note = chemically synthesized
  source 1..20: mol_type = other DNA
tggtcttttttctgtatttc

SEQ ID NO: 32251 - DNA, 20 bp, synthetic construct
  misc_feature 1..20: note = chemically synthesized
  source 1..20: mol_type = other DNA
ctgtatttctagaatggtat

SEQ ID NO: 32252 - DNA, 20 bp, synthetic construct
  misc_feature 1..20: note = chemically synthesized
  source 1..20: mol_type = other DNA
agtatatttttttaatttgg

SEQ ID NO: 32253 - DNA, 20 bp, synthetic construct
  misc_feature 1..20: note = chemically synthesized
  source 1..20: mol_type = other DNA
ggcggtttgggggagcctgc

SEQ ID NO: 32254 - DNA, 20 bp, synthetic construct
  misc_feature 1..20: note = chemically synthesized
  source 1..20: mol_type = other DNA
ggagcctgctagaatgtcac

SEQ ID NO: 32255 - DNA, 20 bp, synthetic construct
  misc_feature 1..20: note = chemically synthesized
  source 1..20: mol_type = other DNA
gtcacatggatggctgtcat

SEQ ID NO: 32256 - DNA, 20 bp, synthetic construct
  misc_feature 1..20: note = chemically synthesized
  source 1..20: mol_type = other DNA
tgctttatatttagattgga

SEQ ID NO: 32257 - DNA, 20 bp, synthetic construct
  misc_feature 1..20: note = chemically synthesized
  source 1..20: mol_type = other DNA
cttttttgtaaatggcaatg

SEQ ID NO: 32258 - DNA, 20 bp, synthetic construct
  misc_feature 1..20: note = chemically synthesized
  source 1..20: mol_type = other DNA
gaaattttatcttttactat

SEQ ID NO: 32259 - DNA, 20 bp, synthetic construct
  misc_feature 1..20: note = chemically synthesized
  source 1..20: mol_type = other DNA
gaaggccagtcagtcttttt

SEQ ID NO: 32260 - DNA, 20 bp, synthetic construct
  misc_feature 1..20: note = chemically synthesized
  source 1..20: mol_type = other DNA
agttttaaggctttccagtt

SEQ ID NO: 32261 - DNA, 20 bp, synthetic construct
  misc_feature 1..20: note = chemically synthesized
  source 1..20: mol_type = other DNA
cagctctttggtttccatgt

SEQ ID NO: 32262 - DNA, 20 bp, synthetic construct
  misc_feature 1..20: note = chemically synthesized
  source 1..20: mol_type = other DNA
aagaaaagaaagcagccact

SEQ ID NO: 32263 - DNA, 20 bp, synthetic construct
  misc_feature 1..20: note = chemically synthesized
  source 1..20: mol_type = other DNA
gccagacatagtgaaatctt

SEQ ID NO: 32264 - DNA, 20 bp, synthetic construct
  misc_feature 1..20: note = chemically synthesized
  source 1..20: mol_type = other DNA
gattactttaggtgttttga

SEQ ID NO: 32265 - DNA, 20 bp, synthetic construct
  misc_feature 1..20: note = chemically synthesized
  source 1..20: mol_type = other DNA
ggtgttttgatagggtcttc

SEQ ID NO: 32266 - DNA, 20 bp, synthetic construct
  misc_feature 1..20: note = chemically synthesized
  source 1..20: mol_type = other DNA
ggatgacagcaaataagggc

SEQ ID NO: 32267 - DNA, 20 bp, synthetic construct
  misc_feature 1..20: note = chemically synthesized
  source 1..20: mol_type = other DNA
tgtccctgttcccagtgtag

SEQ ID NO: 32268 - DNA, 20 bp, synthetic construct
  misc_feature 1..20: note = chemically synthesized
  source 1..20: mol_type = other DNA
cctgttcccagtgtagatga

SEQ ID NO: 32269 - DNA, 20 bp, synthetic construct
  misc_feature 1..20: note = chemically synthesized
  source 1..20: mol_type = other DNA
tcatgccttttatctgaggc

SEQ ID NO: 32270 - DNA, 20 bp, synthetic construct
  misc_feature 1..20: note = chemically synthesized
  source 1..20: mol_type = other DNA
atgttttctgaaaagccagt

SEQ ID NO: 32271 - DNA, 20 bp, synthetic construct
  misc_feature 1..20: note = chemically synthesized
  source 1..20: mol_type = other DNA
gccagtttgggtgggaagga

SEQ ID NO: 32272 - DNA, 20 bp, synthetic construct
  misc_feature 1..20: note = chemically synthesized
  source 1..20: mol_type = other DNA
gaaggagagagtggggctag

SEQ ID NO: 32273 - DNA, 20 bp, synthetic construct
  misc_feature 1..20: note = chemically synthesized
  source 1..20: mol_type = other DNA
gctagaggaatccactgaga

SEQ ID NO: 32274 - DNA, 20 bp, synthetic construct
  misc_feature 1..20: note = chemically synthesized
  source 1..20: mol_type = other DNA
tccactgagaaaggatgttg

SEQ ID NO: 32275 - DNA, 20 bp, synthetic construct
  misc_feature 1..20: note = chemically synthesized
  source 1..20: mol_type = other DNA
ggagaatattacataggagg

SEQ ID NO: 32276 - DNA, 20 bp, synthetic construct
  misc_feature 1..20: note = chemically synthesized
  source 1..20: mol_type = other DNA
atattacataggaggtgggg

SEQ ID NO: 32277 - DNA, 20 bp, synthetic construct
  misc_feature 1..20: note = chemically synthesized
  source 1..20: mol_type = other DNA
aaagatatactgtatgtgtt

SEQ ID NO: 32278 - DNA, 20 bp, synthetic construct
  misc_feature 1..20: note = chemically synthesized
  source 1..20: mol_type = other DNA
tggattaggtttctccaaaa

SEQ ID NO: 32279 - DNA, 20 bp, synthetic construct
  misc_feature 1..20: note = chemically synthesized
  source 1..20: mol_type = other DNA
ttactcttttattaggagct

SEQ ID NO: 32280 - DNA, 20 bp, synthetic construct
  misc_feature 1..20: note = chemically synthesized
  source 1..20: mol_type = other DNA
aggttttgcatcctgacaga

SEQ ID NO: 32281 - DNA, 20 bp, synthetic construct
  misc_feature 1..20: note = chemically synthesized
  source 1..20: mol_type = other DNA
cctgacagacagaattaatg

SEQ ID NO: 32282 - DNA, 20 bp, synthetic construct
  misc_feature 1..20: note = chemically synthesized
  source 1..20: mol_type = other DNA
caaatttcttaaatcaaatg

SEQ ID NO: 32283 - DNA, 20 bp, synthetic construct
  misc_feature 1..20: note = chemically synthesized
  source 1..20: mol_type = other DNA
aaatcaaatggggaatgggg

SEQ ID NO: 32284 - DNA, 20 bp, synthetic construct
  misc_feature 1..20: note = chemically synthesized
  source 1..20: mol_type = other DNA
ttaaataaatttactgggag

SEQ ID NO: 32285 - DNA, 20 bp, synthetic construct
  misc_feature 1..20: note = chemically synthesized
  source 1..20: mol_type = other DNA
tgcacatttccaatagtaag

SEQ ID NO: 32286 - DNA, 20 bp, synthetic construct
  misc_feature 1..20: note = chemically synthesized
  source 1..20: mol_type = other DNA
taacaggcttgacgtgctga

SEQ ID NO: 32287 - DNA, 20 bp, synthetic construct
  misc_feature 1..20: note = chemically synthesized
  source 1..20: mol_type = other DNA
ttgagaacaacttaataaac

SEQ ID NO: 32288 - DNA, 20 bp, synthetic construct
  misc_feature 1..20: note = chemically synthesized
  source 1..20: mol_type = other DNA
tggcagaaagtgtgaagtag

SEQ ID NO: 32289 - DNA, 20 bp, synthetic construct
  misc_feature 1..20: note = chemically synthesized
  source 1..20: mol_type = other DNA
cacagtttgctgaaaggtac

SEQ ID NO: 32290 - DNA, 20 bp, synthetic construct
  misc_feature 1..20: note = chemically synthesized
  source 1..20: mol_type = other DNA
tatttcgggccttcctgaaa

SEQ ID NO: 32291 - DNA, 20 bp, synthetic construct
  misc_feature 1..20: note = chemically synthesized
  source 1..20: mol_type = other DNA
tccctgggcctggtgtgttc

SEQ ID NO: 32292 - DNA, 20 bp, synthetic construct
  misc_feature 1..20: note = chemically synthesized
  source 1..20: mol_type = other DNA
tgtgggaactttgccgatat

SEQ ID NO: 32293 - DNA, 20 bp, synthetic construct
  misc_feature 1..20: note = chemically synthesized
  source 1..20: mol_type = other DNA
gaactttgccgatatgagga

SEQ ID NO: 32294 - DNA, 20 bp, synthetic construct
  misc_feature 1..20: note = chemically synthesized
  source 1..20: mol_type = other DNA
cgatatgaggatgggattgg

SEQ ID NO: 32295 - DNA, 20 bp, synthetic construct
  misc_feature 1..20: note = chemically synthesized
  source 1..20: mol_type = other DNA
tggacatcagaacacataga

SEQ ID NO: 32296 - DNA, 20 bp, synthetic construct
  misc_feature 1..20: note = chemically synthesized
  source 1..20: mol_type = other DNA
tatagctatgaactgtggac

SEQ ID NO: 32297 - DNA, 20 bp, synthetic construct
  misc_feature 1..20: note = chemically synthesized
  source 1..20: mol_type = other DNA
gccagtgactcagcctttag

SEQ ID NO: 32298 - DNA, 20 bp, synthetic construct
  misc_feature 1..20: note = chemically synthesized
  source 1..20: mol_type = other DNA
cccagcgtcatctacggtca

SEQ ID NO: 32299 - DNA, 20 bp, synthetic construct
  misc_feature 1..20: note = chemically synthesized
  source 1..20: mol_type = other DNA
aagagaccaatccagttcac

SEQ ID NO: 32300 - DNA, 20 bp, synthetic construct
  misc_feature 1..20: note = chemically synthesized
  source 1..20: mol_type = other DNA
acgtgtatcagatctttcat

SEQ ID NO: 32301 - DNA, 20 bp, synthetic construct
  misc_feature 1..20: note = chemically synthesized
  source 1..20: mol_type = other DNA
ccatgatatactttgtctat

SEQ ID NO: 32302 - DNA, 20 bp, synthetic construct
  misc_feature 1..20: note = chemically synthesized
  source 1..20: mol_type = other DNA
tatactttgtctattagaat

SEQ ID NO: 32303 - DNA, 20 bp, synthetic construct
  misc_feature 1..20: note = chemically synthesized
  source 1..20: mol_type = other DNA
attggtagcaggttggacga

SEQ ID NO: 32304 - DNA, 20 bp, synthetic construct
  misc_feature 1..20: note = chemically synthesized
  source 1..20: mol_type = other DNA
gttggacgaaagggtttgat

SEQ ID NO: 32305 - DNA, 20 bp, synthetic construct
  misc_feature 1..20: note = chemically synthesized
  source 1..20: mol_type = other DNA
cagtgacttagcgctggact

SEQ ID NO: 32306 - DNA, 20 bp, synthetic construct
  misc_feature 1..20: note = chemically synthesized
  source 1..20: mol_type = other DNA
acttagcgctggactgggaa

SEQ ID NO: 32307 - DNA, 20 bp, synthetic construct
  misc_feature 1..20: note = chemically synthesized
  source 1..20: mol_type = other DNA
aggtctccgctgctctgctc

SEQ ID NO: 32308 - DNA, 20 bp, synthetic construct
  misc_feature 1..20: note = chemically synthesized
  source 1..20: mol_type = other DNA
tccgctgctctgctcagggg

SEQ ID NO: 32309 - DNA, 20 bp, synthetic construct
  misc_feature 1..20: note = chemically synthesized
  source 1..20: mol_type = other DNA
ggaggccccaggcccctgct

SEQ ID NO: 32310 - DNA, 20 bp, synthetic construct
  misc_feature 1..20: note = chemically synthesized
  source 1..20: mol_type = other DNA
gtcgccatggcaacgaggcc

SEQ ID NO: 32311 - DNA, 20 bp, synthetic construct
  misc_feature 1..20: note = chemically synthesized
  source 1..20: mol_type = other DNA
gcaatttgagagcaactctt

SEQ ID NO: 32312 - DNA, 20 bp, synthetic construct
  misc_feature 1..20: note = chemically synthesized
  source 1..20: mol_type = other DNA
tgtttccttccaggtgtgtc

SEQ ID NO: 32313 - DNA, 20 bp, synthetic construct
  misc_feature 1..20: note = chemically synthesized
  source 1..20: mol_type = other DNA
ggactatcatacaattgggc

SEQ ID NO: 32314 - DNA, 20 bp, synthetic construct
  misc_feature 1..20: note = chemically synthesized
  source 1..20: mol_type = other DNA
ttgggcaggggtggggggac

SEQ ID NO: 32315 - DNA, 20 bp, synthetic construct
  misc_feature 1..20: note = chemically synthesized
  source 1..20: mol_type = other DNA
agatacttggggaggggagg

SEQ ID NO: 32316 - DNA, 20 bp, synthetic construct
  misc_feature 1..20: note = chemically synthesized
  source 1..20: mol_type = other DNA
ctcaagatgtgtggcagttt

SEQ ID NO: 32317 - DNA, 20 bp, synthetic construct
  misc_feature 1..20: note = chemically synthesized
  source 1..20: mol_type = other DNA
tgagaaaatttgaagccccc

SEQ ID NO: 32318 - DNA, 20 bp, synthetic construct
  misc_feature 1..20: note = chemically synthesized
  source 1..20: mol_type = other DNA
aaatttgaagcccccagggg

SEQ ID NO: 32319 - DNA, 20 bp, synthetic construct
  misc_feature 1..20: note = chemically synthesized
  source 1..20: mol_type = other DNA
aagaagccgttgtgcgaaga

SEQ ID NO: 32320 - DNA, 20 bp, synthetic construct
  misc_feature 1..20: note = chemically synthesized
  source 1..20: mol_type = other DNA
tgtgcgaagacagagtcctg

SEQ ID NO: 32321 - DNA, 20 bp, synthetic construct
  misc_feature 1..20: note = chemically synthesized
  source 1..20: mol_type = other DNA
aacagacccacattggaaca

SEQ ID NO: 32322 - DNA, 20 bp, synthetic construct
  misc_feature 1..20: note = chemically synthesized
  source 1..20: mol_type = other DNA
gcccgtggaccatcgctgtc

SEQ ID NO: 32323 - DNA, 20 bp, synthetic construct
  misc_feature 1..20: note = chemically synthesized
  source 1..20: mol_type = other DNA
cctgtattgtggaaatgcgc

SEQ ID NO: 32324 - DNA, 20 bp, synthetic construct
  misc_feature 1..20: note = chemically synthesized
  source 1..20: mol_type = other DNA
ctgtttcctacagacaccca

SEQ ID NO: 32325 - DNA, 20 bp, synthetic construct
  misc_feature 1..20: note = chemically synthesized
  source 1..20: mol_type = other DNA
ttcctacagacacccatcgg

SEQ ID NO: 32326 - DNA, 20 bp, synthetic construct
  misc_feature 1..20: note = chemically synthesized
  source 1..20: mol_type = other DNA
agatggcataaattttcaag

SEQ ID NO: 32327 - DNA, 20 bp, synthetic construct
  misc_feature 1..20: note = chemically synthesized
  source 1..20: mol_type = other DNA
agaatcaaaatgcaaaactt

SEQ ID NO: 32328 - DNA, 20 bp, synthetic construct
  misc_feature 1..20: note = chemically synthesized
  source 1..20: mol_type = other DNA
ataatgcataatatggcacg

SEQ ID NO: 32329 - DNA, 20 bp, synthetic construct
  misc_feature 1..20: note = chemically synthesized
  source 1..20: mol_type = other DNA
tgcttttggtggctaccatg

SEQ ID NO: 32330 - DNA, 20 bp, synthetic construct
  misc_feature 1..20: note = chemically synthesized
  source 1..20: mol_type = other DNA
tggtggctaccatgcaggat

SEQ ID NO: 32331 - DNA, 20 bp, synthetic construct
  misc_feature 1..20: note = chemically synthesized
  source 1..20: mol_type = other DNA
tactgcttggagatccagaa

SEQ ID NO: 32332 - DNA, 20 bp, synthetic construct
  misc_feature 1..20: note = chemically synthesized
  source 1..20: mol_type = other DNA
gatagccaaataattggcat

SEQ ID NO: 32333 - DNA, 20 bp, synthetic construct
  misc_feature 1..20: note = chemically synthesized
  source 1..20: mol_type = other DNA
actctgtttaactgatcaaa

SEQ ID NO: 32334 - DNA, 20 bp, synthetic construct
  misc_feature 1..20: note = chemically synthesized
  source 1..20: mol_type = other DNA
gtggcttacacatacagacc

SEQ ID NO: 32335 - DNA, 20 bp, synthetic construct
  misc_feature 1..20: note = chemically synthesized
  source 1..20: mol_type = other DNA
tggcctttggtaaaggcatg

SEQ ID NO: 32336 - DNA, 20 bp, synthetic construct
  misc_feature 1..20: note = chemically synthesized
  source 1..20: mol_type = other DNA
tgacaaataaccctgattgc

SEQ ID NO: 32337 - DNA, 20 bp, synthetic construct
  misc_feature 1..20: note = chemically synthesized
  source 1..20: mol_type = other DNA
ttgctgaaacataagaccat

SEQ ID NO: 32338 - DNA, 20 bp, synthetic construct
  misc_feature 1..20: note = chemically synthesized
  source 1..20: mol_type = other DNA
actccttgctgatgcctaga

SEQ ID NO: 32339 - DNA, 20 bp, synthetic construct
  misc_feature 1..20: note = chemically synthesized
  source 1..20: mol_type = other DNA
ccagaactgaaacaacaatc

SEQ ID NO: 32340 - DNA, 20 bp, synthetic construct
  misc_feature 1..20: note = chemically synthesized
  source 1..20: mol_type = other DNA
actttttatatatttcttct

SEQ ID NO: 32341 - DNA, 20 bp, synthetic construct
  misc_feature 1..20: note = chemically synthesized
  source 1..20: mol_type = other DNA
cagagtcagtttgtaaataa

SEQ ID NO: 32342 - DNA, 20 bp, synthetic construct
  misc_feature 1..20: note = chemically synthesized
  source 1..20: mol_type = other DNA
taagtggatatctctaaaag

SEQ ID NO: 32343 - DNA, 20 bp, synthetic construct
  misc_feature 1..20: note = chemically synthesized
  source 1..20: mol_type = other DNA
gtgggatttttaaggggcaa

SEQ ID NO: 32344 - DNA, 20 bp, synthetic construct
  misc_feature 1..20: note = chemically synthesized
  source 1..20: mol_type = other DNA
ggggcaagaggataacagaa

SEQ ID NO: 32345 - DNA, 20 bp, synthetic construct
  misc_feature 1..20: note = chemically synthesized
  source 1..20: mol_type = other DNA
gaggataacagaagtggata

SEQ ID NO: 32346 - DNA, 20 bp, synthetic construct
  misc_feature 1..20: note = chemically synthesized
  source 1..20: mol_type = other DNA
agacaacaaaaatttattta

SEQ ID NO: 32347 - DNA, 20 bp, synthetic construct
  misc_feature 1..20: note = chemically synthesized
  source 1..20: mol_type = other DNA
ttttttttttttttttaaga

SEQ ID NO: 32348 - DNA, 20 bp, synthetic construct
  misc_feature 1..20: note = chemically synthesized
  source 1..20: mol_type = other DNA
tctcgctctgtcacccaggc

SEQ ID NO: 32349 - DNA, 20 bp, synthetic construct
  misc_feature 1..20: note = chemically synthesized
  source 1..20: mol_type = other DNA
ctcaccacaacctccgccta

SEQ ID NO: 32350 - DNA, 20 bp, synthetic construct
  misc_feature 1..20: note = chemically synthesized
  source 1..20: mol_type = other DNA
acctccgcctactgggttca

SEQ ID NO: 32351 - DNA, 20 bp, synthetic construct
  misc_feature 1..20: note = chemically synthesized
  source 1..20: mol_type = other DNA
cggcgtttcaccgtgttagc

SEQ ID NO: 32352 - DNA, 20 bp, synthetic construct
  misc_feature 1..20: note = chemically synthesized
  source 1..20: mol_type = other DNA
tcctaggcctcccatagtgc

SEQ ID NO: 32353 - DNA, 20 bp, synthetic construct
  misc_feature 1..20: note = chemically synthesized
  source 1..20: mol_type = other DNA
ggaagacatctctctgtgtg

SEQ ID NO: 32354 - DNA, 20 bp, synthetic construct
  misc_feature 1..20: note = chemically synthesized
  source 1..20: mol_type = other DNA
agtcaagatcatggttatcc

SEQ ID NO: 32355 - DNA, 20 bp, synthetic construct
  misc_feature 1..20: note = chemically synthesized
  source 1..20: mol_type = other DNA
aagaggctcacaaatctgcc

SEQ ID NO: 32356 - DNA, 20 bp, synthetic construct
  misc_feature 1..20: note = chemically synthesized
  source 1..20: mol_type = other DNA
ttctcactgtgtcctctctg

SEQ ID NO: 32357 - DNA, 20 bp, synthetic construct
  misc_feature 1..20: note = chemically synthesized
  source 1..20: mol_type = other DNA
catgagcacagactagagga

SEQ ID NO: 32358 - DNA, 20 bp, synthetic construct
  misc_feature 1..20: note = chemically synthesized
  source 1..20: mol_type = other DNA
gaggacagagtcccagccac

SEQ ID NO: 32359 - DNA, 20 bp, synthetic construct
  misc_feature 1..20: note = chemically synthesized
  source 1..20: mol_type = other DNA
tattattattattgttgaga

SEQ ID NO: 32360 - DNA, 20 bp, synthetic construct
  misc_feature 1..20: note = chemically synthesized
  source 1..20: mol_type = other DNA
tctcactctattgcccaggc

SEQ ID NO: 32361 - DNA, 20 bp, synthetic construct
  misc_feature 1..20: note = chemically synthesized
  source 1..20: mol_type = other DNA
ctcactgcaacctctacctc

SEQ ID NO: 32362 - DNA, 20 bp, synthetic construct
  misc_feature 1..20: note = chemically synthesized
  source 1..20: mol_type = other DNA
ggttctcctgcctcagcctc

SEQ ID NO: 32363 - DNA, 20 bp, synthetic construct
  misc_feature 1..20: note = chemically synthesized
  source 1..20: mol_type = other DNA
gcctcagcctcctgagtggc

SEQ ID NO: 32364 - DNA, 20 bp, synthetic construct
  misc_feature 1..20: note = chemically synthesized
  source 1..20: mol_type = other DNA
ttttgtatttttagtagaga

SEQ ID NO: 32365 - DNA, 20 bp, synthetic construct
  misc_feature 1..20: note = chemically synthesized
  source 1..20: mol_type = other DNA
gcctcggcctcccaaagtgc

SEQ ID NO: 32366 - DNA, 20 bp, synthetic construct
  misc_feature 1..20: note = chemically synthesized
  source 1..20: mol_type = other DNA
actgtataaaaaaggtctgt

SEQ ID NO: 32367 - DNA, 20 bp, synthetic construct
  misc_feature 1..20: note = chemically synthesized
  source 1..20: mol_type = other DNA
taaaaaaggtctgttagaat

SEQ ID NO: 32368 - DNA, 20 bp, synthetic construct
  misc_feature 1..20: note = chemically synthesized
  source 1..20: mol_type = other DNA
agcacccagcatccagcatg

SEQ ID NO: 32369 - DNA, 20 bp, synthetic construct
  misc_feature 1..20: note = chemically synthesized
  source 1..20: mol_type = other DNA
ttaaagaaaactcttaggca

SEQ ID NO: 32370 - DNA, 20 bp, synthetic construct
  misc_feature 1..20: note = chemically synthesized
  source 1..20: mol_type = other DNA
ttaggcaaggagtgcaatct

SEQ ID NO: 32371 - DNA, 20 bp, synthetic construct
  misc_feature 1..20: note = chemically synthesized
  source 1..20: mol_type = other DNA
tggaatctgctgaggtctaa

SEQ ID NO: 32372 - DNA, 20 bp, synthetic construct
  misc_feature 1..20: note = chemically synthesized
  source 1..20: mol_type = other DNA
attttctgggcacttttgct

SEQ ID NO: 32373 - DNA, 20 bp, synthetic construct
  misc_feature 1..20: note = chemically synthesized
  source 1..20: mol_type = other DNA
accaagcccttcaagtggtc

SEQ ID NO: 32374 - DNA, 20 bp, synthetic construct
  misc_feature 1..20: note = chemically synthesized
  source 1..20: mol_type = other DNA
agtgtccccggaagtaatag

SEQ ID NO: 32375 - DNA, 20 bp, synthetic construct
  misc_feature 1..20: note = chemically synthesized
  source 1..20: mol_type = other DNA
cccggaagtaatagtaggat

SEQ ID NO: 32376 - DNA, 20 bp, synthetic construct
  misc_feature 1..20: note = chemically synthesized
  source 1..20: mol_type = other DNA
cacatagctttgactccttt

SEQ ID NO: 32377 - DNA, 20 bp, synthetic construct
  misc_feature 1..20: note = chemically synthesized
  source 1..20: mol_type = other DNA
gtgtgaaggaagcagatttg

SEQ ID NO: 32378 - DNA, 20 bp, synthetic construct
  misc_feature 1..20: note = chemically synthesized
  source 1..20: mol_type = other DNA
ggaagcagatttgaggaatt

SEQ ID NO: 32379 - DNA, 20 bp, synthetic construct
  misc_feature 1..20: note = chemically synthesized
  source 1..20: mol_type = other DNA
caagcacaccttccttcttc

SEQ ID NO: 32380 - DNA, 20 bp, synthetic construct
  misc_feature 1..20: note = chemically synthesized
  source 1..20: mol_type = other DNA
tccttcttcaagagttcatc

SEQ ID NO: 32381 - DNA, 20 bp, synthetic construct
  misc_feature 1..20: note = chemically synthesized
  source 1..20: mol_type = other DNA
ctcttcagtttgcattcccc

SEQ ID NO: 32382 - DNA, 20 bp, synthetic construct
  misc_feature 1..20: note = chemically synthesized
  source 1..20: mol_type = other DNA
ttttctatcttagtttaaat

SEQ ID NO: 32383 - DNA, 20 bp, synthetic construct
  misc_feature 1..20: note = chemically synthesized
  source 1..20: mol_type = other DNA
caggaagtacttaagcttta

SEQ ID NO: 32384 - DNA, 20 bp, synthetic construct
  misc_feature 1..20: note = chemically synthesized
  source 1..20: mol_type = other DNA
gaatacttttatatacatga

SEQ ID NO: 32385 - DNA, 20 bp, synthetic construct
  misc_feature 1..20: note = chemically synthesized
  source 1..20: mol_type = other DNA
ttctataaattagataagaa

SEQ ID NO: 32386 - DNA, 20 bp, synthetic construct
  misc_feature 1..20: note = chemically synthesized
  source 1..20: mol_type = other DNA
aagaatagactgaagttgaa

SEQ ID NO: 32387 - DNA, 20 bp, synthetic construct
  misc_feature 1..20: note = chemically synthesized
  source 1..20: mol_type = other DNA
taatcactcattttagagat

SEQ ID NO: 32388 - DNA, 20 bp, synthetic construct
  misc_feature 1..20: note = chemically synthesized
  source 1..20: mol_type = other DNA
attcttttcttatctaattt

SEQ ID NO: 32389 - DNA, 20 bp, synthetic construct
  misc_feature 1..20: note = chemically synthesized
  source 1..20: mol_type = other DNA
ttttttaaaatacaaagcaa

SEQ ID NO: 32390 - DNA, 20 bp, synthetic construct
  misc_feature 1..20: note = chemically synthesized
  source 1..20: mol_type = other DNA
atatcctaatttaaactaag

SEQ ID NO: 32391 - DNA, 20 bp, synthetic construct
  misc_feature 1..20: note = chemically synthesized
  source 1..20: mol_type = other DNA
ctctcctaggcagtcagagg

SEQ ID NO: 32392 - DNA, 20 bp, synthetic construct
  misc_feature 1..20: note = chemically synthesized
  source 1..20: mol_type = other DNA
ggggacactgatttataaaa

SEQ ID NO: 32393 - DNA, 20 bp, synthetic construct
  misc_feature 1..20: note = chemically synthesized
  source 1..20: mol_type = other DNA
ataaaataagaattataaaa

SEQ ID NO: 32394 - DNA, 20 bp, synthetic construct
  misc_feature 1..20: note = chemically synthesized
  source 1..20: mol_type = other DNA
gaaactccaagcaaaagtgc

SEQ ID NO: 32395 - DNA, 20 bp, synthetic construct
  misc_feature 1..20: note = chemically synthesized
  source 1..20: mol_type = other DNA
tatttacaaactgactctga

SEQ ID NO: 32396 - DNA, 20 bp, synthetic construct
  misc_feature 1..20: note = chemically synthesized
  source 1..20: mol_type = other DNA
gaaatatataaaaagtgggg

SEQ ID NO: 32397 - DNA, 20 bp, synthetic construct
  misc_feature 1..20: note = chemically synthesized
  source 1..20: mol_type = other DNA
agtgggggtagaaacacaga

SEQ ID NO: 32398 - DNA, 20 bp, synthetic construct
  misc_feature 1..20: note = chemically synthesized
  source 1..20: mol_type = other DNA
catttagggaggaagccatc

SEQ ID NO: 32399 - DNA, 20 bp, synthetic construct
  misc_feature 1..20: note = chemically synthesized
  source 1..20: mol_type = other DNA
ttggtgaaattagctctgga

SEQ ID NO: 32400 - DNA, 20 bp, synthetic construct
  misc_feature 1..20: note = chemically synthesized
  source 1..20: mol_type = other DNA
aattagctctggacaagaaa

SEQ ID NO: 32401 - DNA, 20 bp, synthetic construct
  misc_feature 1..20: note = chemically synthesized
  source 1..20: mol_type = other DNA
agcagtaaaaaataccaaac

SEQ ID NO: 32402 - DNA, 20 bp, synthetic construct
  misc_feature 1..20: note = chemically synthesized
  source 1..20: mol_type = other DNA
ttctgtgcaaattaactggg

SEQ ID NO: 32403 - DNA, 20 bp, synthetic construct
  misc_feature 1..20: note = chemically synthesized
  source 1..20: mol_type = other DNA
gtgcaaattaactgggccag

SEQ ID NO: 32404 - DNA, 20 bp, synthetic construct
  misc_feature 1..20: note = chemically synthesized
  source 1..20: mol_type = other DNA
gaaggtttgggaacctaaaa

SEQ ID NO: 32405 - DNA, 20 bp, synthetic construct
  misc_feature 1..20: note = chemically synthesized
  source 1..20: mol_type = other DNA
cctaaaattagaatatttaa

SEQ ID NO: 32406 - DNA, 20 bp, synthetic construct
  misc_feature 1..20: note = chemically synthesized
  source 1..20: mol_type = other DNA
cacactttttaaaagacaac

SEQ ID NO: 32407 - DNA, 20 bp, synthetic construct
  misc_feature 1..20: note = chemically synthesized
  source 1..20: mol_type = other DNA
taaaagacaacatagaatgt

SEQ ID NO: 32408 - DNA, 20 bp, synthetic construct
  misc_feature 1..20: note = chemically synthesized
  source 1..20: mol_type = other DNA
cggcttcttggaggctactg

SEQ ID NO: 32409 - DNA, 20 bp, synthetic construct
  misc_feature 1..20: note = chemically synthesized
  source 1..20: mol_type = other DNA
aatgggggtgtgtgaagaac

SEQ ID NO: 32410 - DNA, 20 bp, synthetic construct
  misc_feature 1..20: note = chemically synthesized
  source 1..20: mol_type = other DNA
gaaacacttgcccttatgac

SEQ ID NO: 32411 - DNA, 20 bp, synthetic construct
  misc_feature 1..20: note = chemically synthesized
  source 1..20: mol_type = other DNA
ttatgactgagaaaacttag

SEQ ID NO: 32412 - DNA, 20 bp, synthetic construct
  misc_feature 1..20: note = chemically synthesized
  source 1..20: mol_type = other DNA
caaaataataataaaattat

SEQ ID NO: 32413 - DNA, 20 bp, synthetic construct
  misc_feature 1..20: note = chemically synthesized
  source 1..20: mol_type = other DNA
agaggcgaacaaatctctga

SEQ ID NO: 32414 - DNA, 20 bp, synthetic construct
  misc_feature 1..20: note = chemically synthesized
  source 1..20: mol_type = other DNA
gaaatagtttttgccacttt

SEQ ID NO: 32415 - DNA, 20 bp, synthetic construct
  misc_feature 1..20: note = chemically synthesized
  source 1..20: mol_type = other DNA
tgacgctgggaaatagagag

SEQ ID NO: 32416 - DNA, 20 bp, synthetic construct
  misc_feature 1..20: note = chemically synthesized
  source 1..20: mol_type = other DNA
agagaaagagagagagagag

SEQ ID NO: 32417 - DNA, 20 bp, synthetic construct
  misc_feature 1..20: note = chemically synthesized
  source 1..20: mol_type = other DNA
tttaaaagttagcagtcttt

SEQ ID NO: 32418 - DNA, 20 bp, synthetic construct
  misc_feature 1..20: note = chemically synthesized
  source 1..20: mol_type = other DNA
tgggaagttgtctgaaaaaa

SEQ ID NO: 32419 - DNA, 20 bp, synthetic construct
  misc_feature 1..20: note = chemically synthesized
  source 1..20: mol_type = other DNA
ggcccagggacaatggagta

SEQ ID NO: 32420 - DNA, 20 bp, synthetic construct
  misc_feature 1..20: note = chemically synthesized
  source 1..20: mol_type = other DNA
gggggaaaagaggcttaaaa

SEQ ID NO: 32421 - DNA, 20 bp, synthetic construct
  misc_feature 1..20: note = chemically synthesized
  source 1..20: mol_type = other DNA
aaataaacagttctatatct

SEQ ID NO: 32422 - DNA, 20 bp, synthetic construct
  misc_feature 1..20: note = chemically synthesized
  source 1..20: mol_type = other DNA
agtttctggtttaaaatctg

SEQ ID NO: 32423 - DNA, 20 bp, synthetic construct
  misc_feature 1..20: note = chemically synthesized
  source 1..20: mol_type = other DNA
tggtttaaaatctgtgagaa

SEQ ID NO: 32424 - DNA, 20 bp, synthetic construct
  misc_feature 1..20: note = chemically synthesized
  source 1..20: mol_type = other DNA
gtttctattgttcatcagct

SEQ ID NO: 32425 - DNA, 20 bp, synthetic construct
  misc_feature 1..20: note = chemically synthesized
  source 1..20: mol_type = other DNA
tccccattccccatttgatt

SEQ ID NO: 32426 - DNA, 20 bp, synthetic construct
  misc_feature 1..20: note = chemically synthesized
  source 1..20: mol_type = other DNA
acgctaagagcagcatatac

SEQ ID NO: 32427 - DNA, 20 bp, synthetic construct
  misc_feature 1..20: note = chemically synthesized
  source 1..20: mol_type = other DNA
agcattttggattcagtttt

SEQ ID NO: 32428 - DNA, 20 bp, synthetic construct
  misc_feature 1..20: note = chemically synthesized
  source 1..20: mol_type = other DNA
ttcccacccaaactggcttt

SEQ ID NO: 32429 - DNA, 20 bp, synthetic construct
  misc_feature 1..20: note = chemically synthesized
  source 1..20: mol_type = other DNA
acattgactttctttatact

SEQ ID NO: 32430 - DNA, 20 bp, synthetic construct
  misc_feature 1..20: note = chemically synthesized
  source 1..20: mol_type = other DNA
aaagtggggttattttgtta

SEQ ID NO: 32431 - DNA, 20 bp, synthetic construct
  misc_feature 1..20: note = chemically synthesized
  source 1..20: mol_type = other DNA
tctaagataaagcaaggatg

SEQ ID NO: 32432 - DNA, 20 bp, synthetic construct
  misc_feature 1..20: note = chemically synthesized
  source 1..20: mol_type = other DNA
gataaagcaaggatgggaga

SEQ ID NO: 32433 - DNA, 20 bp, synthetic construct
  misc_feature 1..20: note = chemically synthesized
  source 1..20: mol_type = other DNA
tttagggtataatacacgca

SEQ ID NO: 32434 - DNA, 20 bp, synthetic construct
  misc_feature 1..20: note = chemically synthesized
  source 1..20: mol_type = other DNA
atacacgcatcagaatgccc

SEQ ID NO: 32435 - DNA, 20 bp, synthetic construct
  misc_feature 1..20: note = chemically synthesized
  source 1..20: mol_type = other DNA
ccaatagaacttaacaaaga

SEQ ID NO: 32436 - DNA, 20 bp, synthetic construct
  misc_feature 1..20: note = chemically synthesized
  source 1..20: mol_type = other DNA
ataaaaaaaaaaataaaaac

SEQ ID NO: 32437 - DNA, 20 bp, synthetic construct
  misc_feature 1..20: note = chemically synthesized
  source 1..20: mol_type = other DNA
aaacagctttcattacagga

SEQ ID NO: 32438 - DNA, 20 bp, synthetic construct
  misc_feature 1..20: note = chemically synthesized
  source 1..20: mol_type = other DNA
catttaattcaaataccatt

SEQ ID NO: 32439 - DNA, 20 bp, synthetic construct
  misc_feature 1..20: note = chemically synthesized
  source 1..20: mol_type = other DNA
tcaaataccattctagaaat

SEQ ID NO: 32440 - DNA, 20 bp, synthetic construct
  misc_feature 1..20: note = chemically synthesized
  source 1..20: mol_type = other DNA
gagcggtgtgtatccaaggc

SEQ ID NO: 32441 - DNA, 20 bp, synthetic construct
  misc_feature 1..20: note = chemically synthesized
  source 1..20: mol_type = other DNA
caacctctgtatctctgatt

SEQ ID NO: 32442 - DNA, 20 bp, synthetic construct
  misc_feature 1..20: note = chemically synthesized
  source 1..20: mol_type = other DNA
gcagatgctagcttaataaa

SEQ ID NO: 32443 - DNA, 20 bp, synthetic construct
  misc_feature 1..20: note = chemically synthesized
  source 1..20: mol_type = other DNA
aatagcacacagtgtatgga

SEQ ID NO: 32444 - DNA, 20 bp, synthetic construct
  misc_feature 1..20: note = chemically synthesized
  source 1..20: mol_type = other DNA
aattctttctcttctttttt

SEQ ID NO: 32445 - DNA, 20 bp, synthetic construct
  misc_feature 1..20: note = chemically synthesized
  source 1..20: mol_type = other DNA
tcacatttaaatgcaagtct

SEQ ID NO: 32446 - DNA, 20 bp, synthetic construct
  misc_feature 1..20: note = chemically synthesized
  source 1..20: mol_type = other DNA
tttttaggtagccattgttg

SEQ ID NO: 32447 - DNA, 20 bp, synthetic construct
  misc_feature 1..20: note = chemically synthesized
  source 1..20: mol_type = other DNA
attgttgtgagaaatacaat

SEQ ID NO: 32448 - DNA, 20 bp, synthetic construct
  misc_feature 1..20: note = chemically synthesized
  source 1..20: mol_type = other DNA
aagctacaagtttataacaa

SEQ ID NO: 32449 - DNA, 20 bp, synthetic construct
  misc_feature 1..20: note = chemically synthesized
  source 1..20: mol_type = other DNA
tcatattttaaaaccaaatg

SEQ ID NO: 32450 - DNA, 20 bp, synthetic construct
  misc_feature 1..20: note = chemically synthesized
  source 1..20: mol_type = other DNA
aactgtacatgatatgtatt

SEQ ID NO: 32451 - DNA, 20 bp, synthetic construct
  misc_feature 1..20: note = chemically synthesized
  source 1..20: mol_type = other DNA
aacatgtaaattattgcaca

SEQ ID NO: 32452 - DNA, 20 bp, synthetic construct
  misc_feature 1..20: note = chemically synthesized
  source 1..20: mol_type = other DNA
ggaaaaaaaaaaaaaaggaa

SEQ ID NO: 32453 - DNA, 20 bp, synthetic construct
  misc_feature 1..20: note = chemically synthesized
  source 1..20: mol_type = other DNA
aaaaaaaaaggaaaaagaaa

SEQ ID NO: 32454 - DNA, 20 bp, synthetic construct
  misc_feature 1..20: note = chemically synthesized
  source 1..20: mol_type = other DNA
aaaggaaaaagaaaaaagaa

SEQ ID NO: 32455 - DNA, 20 bp, synthetic construct
  misc_feature 1..20: note = chemically synthesized
  source 1..20: mol_type = other DNA
aaaagaaaaaagaaaaagaa

SEQ ID NO: 32456 - DNA, 20 bp, synthetic construct
  misc_feature 1..20: note = chemically synthesized
  source 1..20: mol_type = other DNA
tttgtttaaatcacatggga

SEQ ID NO: 32457 - DNA, 20 bp, synthetic construct
  misc_feature 1..20: note = chemically synthesized
  source 1..20: mol_type = other DNA
gccagctctctaagtctcct

SEQ ID NO: 32458 - DNA, 20 bp, synthetic construct
  misc_feature 1..20: note = chemically synthesized
  source 1..20: mol_type = other DNA
agtgttctgtgcgtgttgca

SEQ ID NO: 32459 - DNA, 20 bp, synthetic construct
  misc_feature 1..20: note = chemically synthesized
  source 1..20: mol_type = other DNA
tcctgccattaaactcagtt

SEQ ID NO: 32460 - DNA, 20 bp, synthetic construct
  misc_feature 1..20: note = chemically synthesized
  source 1..20: mol_type = other DNA
ttttatatccaatccccaaa

SEQ ID NO: 32461 - DNA, 20 bp, synthetic construct
  misc_feature 1..20: note = chemically synthesized
  source 1..20: mol_type = other DNA
tctgtttcctccttgttaag

SEQ ID NO: 32462 - DNA, 20 bp, synthetic construct
  misc_feature 1..20: note = chemically synthesized
  source 1..20: mol_type = other DNA
gggacgtccatttttatctc

SEQ ID NO: 32463 - DNA, 20 bp, synthetic construct
  misc_feature 1..20: note = chemically synthesized
  source 1..20: mol_type = other DNA
aagaatgtttaaaaaatctg

SEQ ID NO: 32464 - DNA, 20 bp, synthetic construct
  misc_feature 1..20: note = chemically synthesized
  source 1..20: mol_type = other DNA
cgccatgacaggcagcaggc

SEQ ID NO: 32465 - DNA, 20 bp, synthetic construct
  misc_feature 1..20: note = chemically synthesized
  source 1..20: mol_type = other DNA
ggctgggactcagctccagt

SEQ ID NO: 32466 - DNA, 20 bp, synthetic construct
  misc_feature 1..20: note = chemically synthesized
  source 1..20: mol_type = other DNA
gggactcagctccagttgag

SEQ ID NO: 32467 - DNA, 20 bp, synthetic construct
  misc_feature 1..20: note = chemically synthesized
  source 1..20: mol_type = other DNA
cagctccagttgagaaagaa

SEQ ID NO: 32468 - DNA, 20 bp, synthetic construct
  misc_feature 1..20: note = chemically synthesized
  source 1..20: mol_type = other DNA
tggtagccaaaggacgagga

SEQ ID NO: 32469 - DNA, 20 bp, synthetic construct
  misc_feature 1..20: note = chemically synthesized
  source 1..20: mol_type = other DNA
aaaaagccttaaaatataac

SEQ ID NO: 32470 - DNA, 20 bp, synthetic construct
  misc_feature 1..20: note = chemically synthesized
  source 1..20: mol_type = other DNA
tctaccagggaggttaagag

SEQ ID NO: 32471 - DNA, 20 bp, synthetic construct
  misc_feature 1..20: note = chemically synthesized
  source 1..20: mol_type = other DNA
tgatgcctccatttagcaag

SEQ ID NO: 32472 - DNA, 20 bp, synthetic construct
  misc_feature 1..20: note = chemically synthesized
  source 1..20: mol_type = other DNA
gcctccatttagcaagtcag

SEQ ID NO: 32473 - DNA, 20 bp, synthetic construct
  misc_feature 1..20: note = chemically synthesized
  source 1..20: mol_type = other DNA
atgtggaagggggaaaaaag

SEQ ID NO: 32474 - DNA, 20 bp, synthetic construct
  misc_feature 1..20: note = chemically synthesized
  source 1..20: mol_type = other DNA
aaaaaggcagaaagattttg

SEQ ID NO: 32475 - DNA, 20 bp, synthetic construct
  misc_feature 1..20: note = chemically synthesized
  source 1..20: mol_type = other DNA
tcctttcaaaaaggcttaaa

SEQ ID NO: 32476 - DNA, 20 bp, synthetic construct
  misc_feature 1..20: note = chemically synthesized
  source 1..20: mol_type = other DNA
tctctctcatacatcaggtc

SEQ ID NO: 32477 - DNA, 20 bp, synthetic construct
  misc_feature 1..20: note = chemically synthesized
  source 1..20: mol_type = other DNA
ttcataacatctttgatgat

SEQ ID NO: 32478 - DNA, 20 bp, synthetic construct
  misc_feature 1..20: note = chemically synthesized
  source 1..20: mol_type = other DNA
gagcataaaaacagtacctg

SEQ ID NO: 32479 - DNA, 20 bp, synthetic construct
  misc_feature 1..20: note = chemically synthesized
  source 1..20: mol_type = other DNA
acccagccagcatgcaggga

SEQ ID NO: 32480 - DNA, 20 bp, synthetic construct
  misc_feature 1..20: note = chemically synthesized
  source 1..20: mol_type = other DNA
attttctaaaacagtatctt

SEQ ID NO: 32481 - DNA, 20 bp, synthetic construct
  misc_feature 1..20: note = chemically synthesized
  source 1..20: mol_type = other DNA
tgcatttttctctaaaacca

SEQ ID NO: 32482 - DNA, 20 bp, synthetic construct
  misc_feature 1..20: note = chemically synthesized
  source 1..20: mol_type = other DNA
gctcccagcctccagtgagg

SEQ ID NO: 32483 - DNA, 20 bp, synthetic construct
  misc_feature 1..20: note = chemically synthesized
  source 1..20: mol_type = other DNA
ttaaaaagtaagggcaattt

SEQ ID NO: 32484 - DNA, 20 bp, synthetic construct
  misc_feature 1..20: note = chemically synthesized
  source 1..20: mol_type = other DNA
tatacacatggacatttgta

SEQ ID NO: 32485 - DNA, 20 bp, synthetic construct
  misc_feature 1..20: note = chemically synthesized
  source 1..20: mol_type = other DNA
agtgcagaagtttatctgtg

SEQ ID NO: 32486 - DNA, 20 bp, synthetic construct
  misc_feature 1..20: note = chemically synthesized
  source 1..20: mol_type = other DNA
ggactgagctgggccatact

SEQ ID NO: 32487 - DNA, 20 bp, synthetic construct
  misc_feature 1..20: note = chemically synthesized
  source 1..20: mol_type = other DNA
cattccaataatgccagcac

SEQ ID NO: 32488 - DNA, 20 bp, synthetic construct
  misc_feature 1..20: note = chemically synthesized
  source 1..20: mol_type = other DNA
tgattggggagggcgggaga

SEQ ID NO: 32489 - DNA, 20 bp, synthetic construct
  misc_feature 1..20: note = chemically synthesized
  source 1..20: mol_type = other DNA
tttgtcatggtatttttcaa

SEQ ID NO: 32490 - DNA, 20 bp, synthetic construct
  misc_feature 1..20: note = chemically synthesized
  source 1..20: mol_type = other DNA
gtatttttcaatgagaaatc

SEQ ID NO: 32491 - DNA, 20 bp, synthetic construct
  misc_feature 1..20: note = chemically synthesized
  source 1..20: mol_type = other DNA
gtgcttcagcaggcctccag

SEQ ID NO: 32492 - DNA, 20 bp, synthetic construct
  misc_feature 1..20: note = chemically synthesized
  source 1..20: mol_type = other DNA
agatggggaaactgaggcca

SEQ ID NO: 32493 - DNA, 20 bp, synthetic construct
  misc_feature 1..20: note = chemically synthesized
  source 1..20: mol_type = other DNA
gattaaccacaatgtgaaga

SEQ ID NO: 32494 - DNA, 20 bp, synthetic construct
  misc_feature 1..20: note = chemically synthesized
  source 1..20: mol_type = other DNA
cctctacctctgcttcccct

SEQ ID NO: 32495 - DNA, 20 bp, synthetic construct
  misc_feature 1..20: note = chemically synthesized
  source 1..20: mol_type = other DNA
agcctaagaagctatttact

SEQ ID NO: 32496 - DNA, 20 bp, synthetic construct
  misc_feature 1..20: note = chemically synthesized
  source 1..20: mol_type = other DNA
accacctcagacttactgaa

SEQ ID NO: 32497 - DNA, 20 bp, synthetic construct
  misc_feature 1..20: note = chemically synthesized
  source 1..20: mol_type = other DNA
cagtatttccacttggggcc

SEQ ID NO: 32498 - DNA, 20 bp, synthetic construct
  misc_feature 1..20: note = chemically synthesized
  source 1..20: mol_type = other DNA
ttcaccctgggtcttcaaaa

SEQ ID NO: 32499 - DNA, 20 bp, synthetic construct
  misc_feature 1..20: note = chemically synthesized
  source 1..20: mol_type = other DNA
aaatcgcactctcttttgtt

SEQ ID NO: 32500 - DNA, 20 bp, synthetic construct
  misc_feature 1..20: note = chemically synthesized
  source 1..20: mol_type = other DNA
aagtgtattctgcaaaaaca

SEQ ID NO: 32501 - DNA, 20 bp, synthetic construct
  misc_feature 1..20: note = chemically synthesized
  source 1..20: mol_type = other DNA
ataattatagacactacaat

SEQ ID NO: 32502 - DNA, 20 bp, synthetic construct
  misc_feature 1..20: note = chemically synthesized
  source 1..20: mol_type = other DNA
gaataggatggtacttaaaa

SEQ ID NO: 32503 - DNA, 20 bp, synthetic construct
  misc_feature 1..20: note = chemically synthesized
  source 1..20: mol_type = other DNA
ttacactttaagcttttgcc

SEQ ID NO: 32504 - DNA, 20 bp, synthetic construct
  misc_feature 1..20: note = chemically synthesized
  source 1..20: mol_type = other DNA
ctagccgctgtgggcagtac

SEQ ID NO: 32505 - DNA, 20 bp, synthetic construct
  misc_feature 1..20: note = chemically synthesized
  source 1..20: mol_type = other DNA
cccacagcaggcttcattta

SEQ ID NO: 32506 - DNA, 20 bp, synthetic construct
  misc_feature 1..20: note = chemically synthesized
  source 1..20: mol_type = other DNA
gtagaaaaggtaaggcctgc

SEQ ID NO: 32507 - DNA, 20 bp, synthetic construct
  misc_feature 1..20: note = chemically synthesized
  source 1..20: mol_type = other DNA
agaaattgctctacccccat

SEQ ID NO: 32508 - DNA, 20 bp, synthetic construct
  misc_feature 1..20: note = chemically synthesized
  source 1..20: mol_type = other DNA
tgctatggaaattcaaagga

SEQ ID NO: 32509 - DNA, 20 bp, synthetic construct
  misc_feature 1..20: note = chemically synthesized
  source 1..20: mol_type = other DNA
gagttaaacctggagagcca

SEQ ID NO: 32510 - DNA, 20 bp, synthetic construct
  misc_feature 1..20: note = chemically synthesized
  source 1..20: mol_type = other DNA
agaaaggatatcctagataa

SEQ ID NO: 32511 - DNA, 20 bp, synthetic construct
  misc_feature 1..20: note = chemically synthesized
  source 1..20: mol_type = other DNA
attttcaacaaatgactgtg

SEQ ID NO: 32512 - DNA, 20 bp, synthetic construct
  misc_feature 1..20: note = chemically synthesized
  source 1..20: mol_type = other DNA
actgaaggtcagagaaccag

SEQ ID NO: 32513 - DNA, 20 bp, synthetic construct
  misc_feature 1..20: note = chemically synthesized
  source 1..20: mol_type = other DNA
caaaggcacacacaggactc

SEQ ID NO: 32514 - DNA, 20 bp, synthetic construct
  misc_feature 1..20: note = chemically synthesized
  source 1..20: mol_type = other DNA
agtgggggagctcactattt

SEQ ID NO: 32515 - DNA, 20 bp, synthetic construct
  misc_feature 1..20: note = chemically synthesized
  source 1..20: mol_type = other DNA
cgatgcctccctgccccact

SEQ ID NO: 32516 - DNA, 20 bp, synthetic construct
  misc_feature 1..20: note = chemically synthesized
  source 1..20: mol_type = other DNA
ccctgccccactcgagaaat

SEQ ID NO: 32517 - DNA, 20 bp, synthetic construct
  misc_feature 1..20: note = chemically synthesized
  source 1..20: mol_type = other DNA
ggctgtgaagatggatgcga

SEQ ID NO: 32518 - DNA, 20 bp, synthetic construct
  misc_feature 1..20: note = chemically synthesized
  source 1..20: mol_type = other DNA
attatcatttcgatcggtct

SEQ ID NO: 32519 - DNA, 20 bp, synthetic construct
  misc_feature 1..20: note = chemically synthesized
  source 1..20: mol_type = other DNA
cgatcggtcttgagaaaata

SEQ ID NO: 32520 - DNA, 20 bp, synthetic construct
  misc_feature 1..20: note = chemically synthesized
  source 1..20: mol_type = other DNA
agaaaatactagaataagct

SEQ ID NO: 32521 - DNA, 20 bp, synthetic construct
  misc_feature 1..20: note = chemically synthesized
  source 1..20: mol_type = other DNA
caaggggagggatagcatta

SEQ ID NO: 32522 - DNA, 20 bp, synthetic construct
  misc_feature 1..20: note = chemically synthesized
  source 1..20: mol_type = other DNA
gaacttagagtaaaataaat

SEQ ID NO: 32523 - DNA, 20 bp, synthetic construct
  misc_feature 1..20: note = chemically synthesized
  source 1..20: mol_type = other DNA
ttagagtaaaataaataaag

SEQ ID NO: 32524 - DNA, 20 bp, synthetic construct
  misc_feature 1..20: note = chemically synthesized
  source 1..20: mol_type = other DNA
agtaaaataaataaagaaag

SEQ ID NO: 32525 - DNA, 20 bp, synthetic construct
  misc_feature 1..20: note = chemically synthesized
  source 1..20: mol_type = other DNA
aaataaataaagaaagaaag

SEQ ID NO: 32526 - DNA, 20 bp, synthetic construct
  misc_feature 1..20: note = chemically synthesized
  source 1..20: mol_type = other DNA
aaataaagaaagaaagaaag

SEQ ID NO: 32527 - DNA, 20 bp, synthetic construct
  misc_feature 1..20: note = chemically synthesized
  source 1..20: mol_type = other DNA
actgccacctcagggccgcg

SEQ ID NO: 32528 - DNA, 20 bp, synthetic construct
  misc_feature 1..20: note = chemically synthesized
  source 1..20: mol_type = other DNA
gaaccagaactggccattct

SEQ ID NO: 32529 - DNA, 20 bp, synthetic construct
  misc_feature 1..20: note = chemically synthesized
  source 1..20: mol_type = other DNA
tatggttaacacagagctgc

SEQ ID NO: 32530 - DNA, 20 bp, synthetic construct
  misc_feature 1..20: note = chemically synthesized
  source 1..20: mol_type = other DNA
catgacggcaagtccttctt

SEQ ID NO: 32531 - DNA, 20 bp, synthetic construct
  misc_feature 1..20: note = chemically synthesized
  source 1..20: mol_type = other DNA
tcaggtctactaggaacagg

SEQ ID NO: 32532 - DNA, 20 bp, synthetic construct
  misc_feature 1..20: note = chemically synthesized
  source 1..20: mol_type = other DNA
cctcaaccttctactgctgg

SEQ ID NO: 32533 - DNA, 20 bp, synthetic construct
  misc_feature 1..20: note = chemically synthesized
  source 1..20: mol_type = other DNA
tttgatttatggggaggagg

SEQ ID NO: 32534 - DNA, 20 bp, synthetic construct
  misc_feature 1..20: note = chemically synthesized
  source 1..20: mol_type = other DNA
gcacccccatctctgtccca

SEQ ID NO: 32535 - DNA, 20 bp, synthetic construct
  misc_feature 1..20: note = chemically synthesized
  source 1..20: mol_type = other DNA
agtggtggccgcagctcagg

SEQ ID NO: 32536 - DNA, 20 bp, synthetic construct
  misc_feature 1..20: note = chemically synthesized
  source 1..20: mol_type = other DNA
acatgctggaaggcaagaag

SEQ ID NO: 32537 - DNA, 20 bp, synthetic construct
  misc_feature 1..20: note = chemically synthesized
  source 1..20: mol_type = other DNA
cctggctaagagcaactgca

SEQ ID NO: 32538 - DNA, 20 bp, synthetic construct
  misc_feature 1..20: note = chemically synthesized
  source 1..20: mol_type = other DNA
ctgttctagtcctgctgtca

SEQ ID NO: 32539 - DNA, 20 bp, synthetic construct
  misc_feature 1..20: note = chemically synthesized
  source 1..20: mol_type = other DNA
gctgatacatggagcagagc

SEQ ID NO: 32540 - DNA, 20 bp, synthetic construct
  misc_feature 1..20: note = chemically synthesized
  source 1..20: mol_type = other DNA
agccgagaatatccggaact

SEQ ID NO: 32541 - DNA, 20 bp, synthetic construct
  misc_feature 1..20: note = chemically synthesized
  source 1..20: mol_type = other DNA
tatccggaactggagaaaag

SEQ ID NO: 32542 - DNA, 20 bp, synthetic construct
  misc_feature 1..20: note = chemically synthesized
  source 1..20: mol_type = other DNA
tttaaatccacaggaagcaa

SEQ ID NO: 32543 - DNA, 20 bp, synthetic construct
  misc_feature 1..20: note = chemically synthesized
  source 1..20: mol_type = other DNA
attatacagtgccttgcttt

SEQ ID NO: 32544 - DNA, 20 bp, synthetic construct
  misc_feature 1..20: note = chemically synthesized
  source 1..20: mol_type = other DNA
aaatctttctttcaaacatt

SEQ ID NO: 32545 - DNA, 20 bp, synthetic construct
  misc_feature 1..20: note = chemically synthesized
  source 1..20: mol_type = other DNA
atttactgataaaggcactg

SEQ ID NO: 32546 - DNA, 20 bp, synthetic construct
  misc_feature 1..20: note = chemically synthesized
  source 1..20: mol_type = other DNA
ttactttgcgagatgtttga

SEQ ID NO: 32547 - DNA, 20 bp, synthetic construct
  misc_feature 1..20: note = chemically synthesized
  source 1..20: mol_type = other DNA
ggatagtgtgggtagttgga

SEQ ID NO: 32548 - DNA, 20 bp, synthetic construct
  misc_feature 1..20: note = chemically synthesized
  source 1..20: mol_type = other DNA
tctaatatatatcccgtggt

SEQ ID NO: 32549 - DNA, 20 bp, synthetic construct
  misc_feature 1..20: note = chemically synthesized
  source 1..20: mol_type = other DNA
cctgtggaatgctgcagttg

SEQ ID NO: 32550 - DNA, 20 bp, synthetic construct
  misc_feature 1..20: note = chemically synthesized
  source 1..20: mol_type = other DNA
tgcttcagcagacaacaaag

SEQ ID NO: 32551 - DNA, 20 bp, synthetic construct
  misc_feature 1..20: note = chemically synthesized
  source 1..20: mol_type = other DNA
atttagagctcctctgttaa

SEQ ID NO: 32552 - DNA, 20 bp, synthetic construct
  misc_feature 1..20: note = chemically synthesized
  source 1..20: mol_type = other DNA
ttgtccagactctgacagtg

SEQ ID NO: 32553 - DNA, 20 bp, synthetic construct
  misc_feature 1..20: note = chemically synthesized
  source 1..20: mol_type = other DNA
gtcaaaaacagccacattca

SEQ ID NO: 32554 - DNA, 20 bp, synthetic construct
  misc_feature 1..20: note = chemically synthesized
  source 1..20: mol_type = other DNA
gaaacagcagtgattgtgga

SEQ ID NO: 32555 - DNA, 20 bp, synthetic construct
  misc_feature 1..20: note = chemically synthesized
  source 1..20: mol_type = other DNA
ggaggggggcaaaaaaagaa

SEQ ID NO: 32556 - DNA, 20 bp, synthetic construct
  misc_feature 1..20: note = chemically synthesized
  source 1..20: mol_type = other DNA
gagaggaaaggttaaccact

SEQ ID NO: 32557 - DNA, 20 bp, synthetic construct
  misc_feature 1..20: note = chemically synthesized
  source 1..20: mol_type = other DNA
ttttatcaagttcaagccaa

SEQ ID NO: 32558 - DNA, 20 bp, synthetic construct
  misc_feature 1..20: note = chemically synthesized
  source 1..20: mol_type = other DNA
accaccaaggcatagccttg

SEQ ID NO: 32559 - DNA, 20 bp, synthetic construct
  misc_feature 1..20: note = chemically synthesized
  source 1..20: mol_type = other DNA
gtggagcaaggccactccag

SEQ ID NO: 32560 - DNA, 20 bp, synthetic construct
  misc_feature 1..20: note = chemically synthesized
  source 1..20: mol_type = other DNA
aagccaatcaactcatttaa

SEQ ID NO: 32561 - DNA, 20 bp, synthetic construct
  misc_feature 1..20: note = chemically synthesized
  source 1..20: mol_type = other DNA
ctgtcccagcaacctagata

SEQ ID NO: 32562 - DNA, 20 bp, synthetic construct
  misc_feature 1..20: note = chemically synthesized
  source 1..20: mol_type = other DNA
gtggaccatggctcctttcc

SEQ ID NO: 32563 - DNA, 20 bp, synthetic construct
  misc_feature 1..20: note = chemically synthesized
  source 1..20: mol_type = other DNA
tttgcctccttctcacacaa

SEQ ID NO: 32564 - DNA, 20 bp, synthetic construct
  misc_feature 1..20: note = chemically synthesized
  source 1..20: mol_type = other DNA
tgtgtagttaagtactgaag

SEQ ID NO: 32565 - DNA, 20 bp, synthetic construct
  misc_feature 1..20: note = chemically synthesized
  source 1..20: mol_type = other DNA
aagtactgaagtgagaaatt

SEQ ID NO: 32566 - DNA, 20 bp, synthetic construct
  misc_feature 1..20: note = chemically synthesized
  source 1..20: mol_type = other DNA
cctaccaatctaagatactg

SEQ ID NO: 32567 - DNA, 20 bp, synthetic construct
  misc_feature 1..20: note = chemically synthesized
  source 1..20: mol_type = other DNA
agaaaatggctacatcaggc

SEQ ID NO: 32568 - DNA, 20 bp, synthetic construct
  misc_feature 1..20: note = chemically synthesized
  source 1..20: mol_type = other DNA
ggctttgagatgaataatgc

SEQ ID NO: 32569 - DNA, 20 bp, synthetic construct
  misc_feature 1..20: note = chemically synthesized
  source 1..20: mol_type = other DNA
cagagtctgagcccacagtc

SEQ ID NO: 32570 - DNA, 20 bp, synthetic construct
  misc_feature 1..20: note = chemically synthesized
  source 1..20: mol_type = other DNA
atttgcccttttccctgcta

SEQ ID NO: 32571 - DNA, 20 bp, synthetic construct
  misc_feature 1..20: note = chemically synthesized
  source 1..20: mol_type = other DNA
attttaagattactattcta

SEQ ID NO: 32572 - DNA, 20 bp, synthetic construct
  misc_feature 1..20: note = chemically synthesized
  source 1..20: mol_type = other DNA
gccacacaccgagagtggaa

SEQ ID NO: 32573 - DNA, 20 bp, synthetic construct
  misc_feature 1..20: note = chemically synthesized
  source 1..20: mol_type = other DNA
cactcccttatttatgagca

SEQ ID NO: 32574 - DNA, 20 bp, synthetic construct
  misc_feature 1..20: note = chemically synthesized
  source 1..20: mol_type = other DNA
ccattctatctaaggaagct

SEQ ID NO: 32575 - DNA, 20 bp, synthetic construct
  misc_feature 1..20: note = chemically synthesized
  source 1..20: mol_type = other DNA
cctttaatgggaaatctgga

SEQ ID NO: 32576 - DNA, 20 bp, synthetic construct
  misc_feature 1..20: note = chemically synthesized
  source 1..20: mol_type = other DNA
ctgacttggttttcccaact

SEQ ID NO: 32577 - DNA, 20 bp, synthetic construct
  misc_feature 1..20: note = chemically synthesized
  source 1..20: mol_type = other DNA
ttacaatttattctcattat

SEQ ID NO: 32578 - DNA, 20 bp, synthetic construct
  misc_feature 1..20: note = chemically synthesized
  source 1..20: mol_type = other DNA
ttttaactgaacaatgtctc

SEQ ID NO: 32579 - DNA, 20 bp, synthetic construct
  misc_feature 1..20: note = chemically synthesized
  source 1..20: mol_type = other DNA
acaggattacagcaaatgtg

SEQ ID NO: 32580 - DNA, 20 bp, synthetic construct
  misc_feature 1..20: note = chemically synthesized
  source 1..20: mol_type = other DNA
atagtttgcttcccccaatg

SEQ ID NO: 32581 - DNA, 20 bp, synthetic construct
  misc_feature 1..20: note = chemically synthesized
  source 1..20: mol_type = other DNA
cccaaaacaaatttatcttc

SEQ ID NO: 32582 - DNA, 20 bp, synthetic construct
  misc_feature 1..20: note = chemically synthesized
  source 1..20: mol_type = other DNA
tttgaccagcacctatctca

SEQ ID NO: 32583 - DNA, 20 bp, synthetic construct
  misc_feature 1..20: note = chemically synthesized
  source 1..20: mol_type = other DNA
aagcacctgaaggaagctga

SEQ ID NO: 32584 - DNA, 20 bp, synthetic construct
  misc_feature 1..20: note = chemically synthesized
  source 1..20: mol_type = other DNA
ctcggcatgaagggtataac

SEQ ID NO: 32585 - DNA, 20 bp, synthetic construct
  misc_feature 1..20: note = chemically synthesized
  source 1..20: mol_type = other DNA
ctacctagtcaccttagcaa

SEQ ID NO: 32586 - DNA, 20 bp, synthetic construct
  misc_feature 1..20: note = chemically synthesized
  source 1..20: mol_type = other DNA
aaatctccgtctcaccaaaa

SEQ ID NO: 32587 - DNA, 20 bp, synthetic construct
  misc_feature 1..20: note = chemically synthesized
  source 1..20: mol_type = other DNA
cgtctcaccaaaaaaagaaa

SEQ ID NO: 32588 - DNA, 20 bp, synthetic construct
  misc_feature 1..20: note = chemically synthesized
  source 1..20: mol_type = other DNA
agaaaaaagaaaaaaaaaaa

SEQ ID NO: 32589 - DNA, 20 bp, synthetic construct
  misc_feature 1..20: note = chemically synthesized
  source 1..20: mol_type = other DNA
aaaagaaaaaaaaaaaaaag

SEQ ID NO: 32590 - DNA, 20 bp, synthetic construct
  misc_feature 1..20: note = chemically synthesized
  source 1..20: mol_type = other DNA
tccttagcacccaaataggt

SEQ ID NO: 32591 - DNA, 20 bp, synthetic construct
  misc_feature 1..20: note = chemically synthesized
  source 1..20: mol_type = other DNA
aagaccagcctgggcaacag

SEQ ID NO: 32592 - DNA, 20 bp, synthetic construct
  misc_feature 1..20: note = chemically synthesized
  source 1..20: mol_type = other DNA
acaactaattgggctaatgt

SEQ ID NO: 32593 - DNA, 20 bp, synthetic construct
  misc_feature 1..20: note = chemically synthesized
  source 1..20: mol_type = other DNA
agaataaatgtatttctagg

SEQ ID NO: 32594 - DNA, 20 bp, synthetic construct
  misc_feature 1..20: note = chemically synthesized
  source 1..20: mol_type = other DNA
ttaccaacttctataaaatc

SEQ ID NO: 32595 - DNA, 20 bp, synthetic construct
  misc_feature 1..20: note = chemically synthesized
  source 1..20: mol_type = other DNA
tacagaacacgtccaccagt

SEQ ID NO: 32596 - DNA, 20 bp, synthetic construct
  misc_feature 1..20: note = chemically synthesized
  source 1..20: mol_type = other DNA
cccacctaccaccacagtgt

SEQ ID NO: 32597 - DNA, 20 bp, synthetic construct
  misc_feature 1..20: note = chemically synthesized
  source 1..20: mol_type = other DNA
ccaccacagtgttgagaatt

SEQ ID NO: 32598 - DNA, 20 bp, synthetic construct
  misc_feature 1..20: note = chemically synthesized
  source 1..20: mol_type = other DNA
tgtttaatttcttccacaga

SEQ ID NO: 32599 - DNA, 20 bp, synthetic construct
  misc_feature 1..20: note = chemically synthesized
  source 1..20: mol_type = other DNA
atctaaggcatttcgagaac

SEQ ID NO: 32600 - DNA, 20 bp, synthetic construct
  misc_feature 1..20: note = chemically synthesized
  source 1..20: mol_type = other DNA
caaatgtcatcctattccga

SEQ ID NO: 32601 - DNA, 20 bp, synthetic construct
  misc_feature 1..20: note = chemically synthesized
  source 1..20: mol_type = other DNA
tcctaagagcccccactagc

SEQ ID NO: 32602 - DNA, 20 bp, synthetic construct
  misc_feature 1..20: note = chemically synthesized
  source 1..20: mol_type = other DNA
taccttgccaaaggccttgg

SEQ ID NO: 32603 - DNA, 20 bp, synthetic construct
  misc_feature 1..20: note = chemically synthesized
  source 1..20: mol_type = other DNA
cttagacaacaatgcaaggg

SEQ ID NO: 32604 - DNA, 20 bp, synthetic construct
  misc_feature 1..20: note = chemically synthesized
  source 1..20: mol_type = other DNA
caatgcaagggggagaaact

SEQ ID NO: 32605 - DNA, 20 bp, synthetic construct
  misc_feature 1..20: note = chemically synthesized
  source 1..20: mol_type = other DNA
ccactactggcaataaacag

SEQ ID NO: 32606 - DNA, 20 bp, synthetic construct
  misc_feature 1..20: note = chemically synthesized
  source 1..20: mol_type = other DNA
tgaggcacacctacattact

SEQ ID NO: 32607 - DNA, 20 bp, synthetic construct
  misc_feature 1..20: note = chemically synthesized
  source 1..20: mol_type = other DNA
tatttattagttacacctca

SEQ ID NO: 32608 - DNA, 20 bp, synthetic construct
  misc_feature 1..20: note = chemically synthesized
  source 1..20: mol_type = other DNA
ccaattcctagtttgggtca

SEQ ID NO: 32609 - DNA, 20 bp, synthetic construct
  misc_feature 1..20: note = chemically synthesized
  source 1..20: mol_type = other DNA
aaaagggagaggaaaaagga

SEQ ID NO: 32610 - DNA, 20 bp, synthetic construct
  misc_feature 1..20: note = chemically synthesized
  source 1..20: mol_type = other DNA
acaaattatttcattcccat

SEQ ID NO: 32611 - DNA, 20 bp, synthetic construct
  misc_feature 1..20: note = chemically synthesized
  source 1..20: mol_type = other DNA
tagctattttttaaaacacc

SEQ ID NO: 32612 - DNA, 20 bp, synthetic construct
  misc_feature 1..20: note = chemically synthesized
  source 1..20: mol_type = other DNA
agggaattgttcatgaaatc

SEQ ID NO: 32613 - DNA, 20 bp, synthetic construct
  misc_feature 1..20: note = chemically synthesized
  source 1..20: mol_type = other DNA
tggaagtccaatacacgttt

SEQ ID NO: 32614 - DNA, 20 bp, synthetic construct
  misc_feature 1..20: note = chemically synthesized
  source 1..20: mol_type = other DNA
ctgtaaacacttaatgagct

SEQ ID NO: 32615 - DNA, 20 bp, synthetic construct
  misc_feature 1..20: note = chemically synthesized
  source 1..20: mol_type = other DNA
gtttgatcaagtcagatttt

SEQ ID NO: 32616 - DNA, 20 bp, synthetic construct
  misc_feature 1..20: note = chemically synthesized
  source 1..20: mol_type = other DNA
gtctttaagttaatcaatcc

SEQ ID NO: 32617 - DNA, 20 bp, synthetic construct
  misc_feature 1..20: note = chemically synthesized
  source 1..20: mol_type = other DNA
cccctaacatcaggaatcag

SEQ ID NO: 32618 - DNA, 20 bp, synthetic construct
  misc_feature 1..20: note = chemically synthesized
  source 1..20: mol_type = other DNA
ccctttgctgatgatccagt

SEQ ID NO: 32619 - DNA, 20 bp, synthetic construct
  misc_feature 1..20: note = chemically synthesized
  source 1..20: mol_type = other DNA
tggggtgagtcaaaagtctg

SEQ ID NO: 32620 - DNA, 20 bp, synthetic construct
  misc_feature 1..20: note = chemically synthesized
  source 1..20: mol_type = other DNA
ccccatacccacttcccttc

SEQ ID NO: 32621 - DNA, 20 bp, synthetic construct
  misc_feature 1..20: note = chemically synthesized
  source 1..20: mol_type = other DNA
aggcagatgaggtgacaagg

SEQ ID NO: 32622 - DNA, 20 bp, synthetic construct
  misc_feature 1..20: note = chemically synthesized
  source 1..20: mol_type = other DNA
cagatgactgtccaactcat

SEQ ID NO: 32623 - DNA, 20 bp, synthetic construct
  misc_feature 1..20: note = chemically synthesized
  source 1..20: mol_type = other DNA
cccacacaggcatccaaagg

SEQ ID NO: 32624 - DNA, 20 bp, synthetic construct
  misc_feature 1..20: note = chemically synthesized
  source 1..20: mol_type = other DNA
agggaaggaaggagagcccc

SEQ ID NO: 32625 - DNA, 20 bp, synthetic construct
  misc_feature 1..20: note = chemically synthesized
  source 1..20: mol_type = other DNA
gcccctgagaaaaaatggca

SEQ ID NO: 32626 - DNA, 20 bp, synthetic construct
  misc_feature 1..20: note = chemically synthesized
  source 1..20: mol_type = other DNA
cacttatttatattattgtt

SEQ ID NO: 32627 - DNA, 20 bp, synthetic construct
  misc_feature 1..20: note = chemically synthesized
  source 1..20: mol_type = other DNA
aacaatgcaactcaagacta

SEQ ID NO: 32628 - DNA, 20 bp, synthetic construct
  misc_feature 1..20: note = chemically synthesized
  source 1..20: mol_type = other DNA
agcctaataaaactgcacag

SEQ ID NO: 32629 - DNA, 20 bp, synthetic construct
  misc_feature 1..20: note = chemically synthesized
  source 1..20: mol_type = other DNA
ggatctcaggtattgctcct

SEQ ID NO: 32630 - DNA, 20 bp, synthetic construct
  misc_feature 1..20: note = chemically synthesized
  source 1..20: mol_type = other DNA
ctaatattaaaatatgaatt

SEQ ID NO: 32631 - DNA, 20 bp, synthetic construct
  misc_feature 1..20: note = chemically synthesized
  source 1..20: mol_type = other DNA
gtgaaaagagattttttaaa

SEQ ID NO: 32632 - DNA, 20 bp, synthetic construct
  misc_feature 1..20: note = chemically synthesized
  source 1..20: mol_type = other DNA
aactgttttcaatcatcatc

SEQ ID NO: 32633 - DNA, 20 bp, synthetic construct
  misc_feature 1..20: note = chemically synthesized
  source 1..20: mol_type = other DNA
gatcatggtagcacagtaga

SEQ ID NO: 32634 - DNA, 20 bp, synthetic construct
  misc_feature 1..20: note = chemically synthesized
  source 1..20: mol_type = other DNA
gagcactcaattggtgatca

SEQ ID NO: 32635 - DNA, 20 bp, synthetic construct
  misc_feature 1..20: note = chemically synthesized
  source 1..20: mol_type = other DNA
ataaattctagtcctgtcac

SEQ ID NO: 32636 - DNA, 20 bp, synthetic construct
  misc_feature 1..20: note = chemically synthesized
  source 1..20: mol_type = other DNA
ggggaggtacttaatctcta

SEQ ID NO: 32637 - DNA, 20 bp, synthetic construct
  misc_feature 1..20: note = chemically synthesized
  source 1..20: mol_type = other DNA
ctggggaaggagtgaaccag

SEQ ID NO: 32638 - DNA, 20 bp, synthetic construct
  misc_feature 1..20: note = chemically synthesized
  source 1..20: mol_type = other DNA
ggctctgaccaggtggaaag

SEQ ID NO: 32639 - DNA, 20 bp, synthetic construct
  misc_feature 1..20: note = chemically synthesized
  source 1..20: mol_type = other DNA
gtccaaccaggagacccaag

SEQ ID NO: 32640 - DNA, 20 bp, synthetic construct
  misc_feature 1..20: note = chemically synthesized
  source 1..20: mol_type = other DNA
tattggctgcttcgttgatt

SEQ ID NO: 32641 - DNA, 20 bp, synthetic construct
  misc_feature 1..20: note = chemically synthesized
  source 1..20: mol_type = other DNA
cttcgttgattctagaaaaa

SEQ ID NO: 32642 - DNA, 20 bp, synthetic construct
  misc_feature 1..20: note = chemically synthesized
  source 1..20: mol_type = other DNA
attctagaaaaaaaagaaag

SEQ ID NO: 32643 - DNA, 20 bp, synthetic construct
  misc_feature 1..20: note = chemically synthesized
  source 1..20: mol_type = other DNA
ggagctcagcatcgggacac

SEQ ID NO: 32644 - DNA, 20 bp, synthetic construct
  misc_feature 1..20: note = chemically synthesized
  source 1..20: mol_type = other DNA
tccaaggcaaaaagcaaata

SEQ ID NO: 32645 - DNA, 20 bp, synthetic construct
  misc_feature 1..20: note = chemically synthesized
  source 1..20: mol_type = other DNA
gaagtataaggagttctgga

SEQ ID NO: 32646 - DNA, 20 bp, synthetic construct
  misc_feature 1..20: note = chemically synthesized
  source 1..20: mol_type = other DNA
caaaaaagctagaggatcgg

SEQ ID NO: 32647 - DNA, 20 bp, synthetic construct
  misc_feature 1..20: note = chemically synthesized
  source 1..20: mol_type = other DNA
agaaaagaagggacggatac

SEQ ID NO: 32648 - DNA, 20 bp, synthetic construct
  misc_feature 1..20: note = chemically synthesized
  source 1..20: mol_type = other DNA
ctctacctgggtctatcatt

SEQ ID NO: 32649 - DNA, 20 bp, synthetic construct
  misc_feature 1..20: note = chemically synthesized
  source 1..20: mol_type = other DNA
ccctcccaaaacaacggtgg

SEQ ID NO: 32650 - DNA, 20 bp, synthetic construct
  misc_feature 1..20: note = chemically synthesized
  source 1..20: mol_type = other DNA
gccatcctttgacacccacc

SEQ ID NO: 32651 - DNA, 20 bp, synthetic construct
  misc_feature 1..20: note = chemically synthesized
  source 1..20: mol_type = other DNA
ccatagaaatcacagagagg

SEQ ID NO: 32652 - DNA, 20 bp, synthetic construct
  misc_feature 1..20: note = chemically synthesized
  source 1..20: mol_type = other DNA
taatgataaaggcagctcac

SEQ ID NO: 32653 - DNA, 20 bp, synthetic construct
  misc_feature 1..20: note = chemically synthesized
  source 1..20: mol_type = other DNA
ttaaatgctcttctagctct

SEQ ID NO: 32654 - DNA, 20 bp, synthetic construct
  misc_feature 1..20: note = chemically synthesized
  source 1..20: mol_type = other DNA
agaatgcaaagcaagacaag

SEQ ID NO: 32655 - DNA, 20 bp, synthetic construct
  misc_feature 1..20: note = chemically synthesized
  source 1..20: mol_type = other DNA
cccttgcctttcttgaaaag

SEQ ID NO: 32656 - DNA, 20 bp, synthetic construct
  misc_feature 1..20: note = chemically synthesized
  source 1..20: mol_type = other DNA
tgaagctgcttccgttcaag

SEQ ID NO: 32657 - DNA, 20 bp, synthetic construct
  misc_feature 1..20: note = chemically synthesized
  source 1..20: mol_type = other DNA
tcagatgttttggagtctct

SEQ ID NO: 32658 - DNA, 20 bp, synthetic construct
  misc_feature 1..20: note = chemically synthesized
  source 1..20: mol_type = other DNA
cagcttttctaagacatatg

SEQ ID NO: 32659 - DNA, 20 bp, synthetic construct
  misc_feature 1..20: note = chemically synthesized
  source 1..20: mol_type = other DNA
tgtcttccaaacagcacaag

SEQ ID NO: 32660 - DNA, 20 bp, synthetic construct
  misc_feature 1..20: note = chemically synthesized
  source 1..20: mol_type = other DNA
acgacagatgcaaacacaaa

SEQ ID NO: 32661 - DNA, 20 bp, synthetic construct
  misc_feature 1..20: note = chemically synthesized
  source 1..20: mol_type = other DNA
cagagaagcttcctgggtgt

SEQ ID NO: 32662 - DNA, 20 bp, synthetic construct
  misc_feature 1..20: note = chemically synthesized
  source 1..20: mol_type = other DNA
gccaaagagaagcgttgcta

SEQ ID NO: 32663 - DNA, 20 bp, synthetic construct
  misc_feature 1..20: note = chemically synthesized
  source 1..20: mol_type = other DNA
aagcctagaggacctcctcc

SEQ ID NO: 32664 - DNA, 20 bp, synthetic construct
  misc_feature 1..20: note = chemically synthesized
  source 1..20: mol_type = other DNA
tccaaagaaaagtggctcag

SEQ ID NO: 32665 - DNA, 20 bp, synthetic construct
  misc_feature 1..20: note = chemically synthesized
  source 1..20: mol_type = other DNA
tctggtctaaagattcaagc

SEQ ID NO: 32666 - DNA, 20 bp, synthetic construct
  misc_feature 1..20: note = chemically synthesized
  source 1..20: mol_type = other DNA
taaagattcaagctgagaaa

SEQ ID NO: 32667 - DNA, 20 bp, synthetic construct
  misc_feature 1..20: note = chemically synthesized
  source 1..20: mol_type = other DNA
cttggatgttatgaggattc

SEQ ID NO: 32668 - DNA, 20 bp, synthetic construct
  misc_feature 1..20: note = chemically synthesized
  source 1..20: mol_type = other DNA
atgtgccagcccacttcttt

SEQ ID NO: 32669 - DNA, 20 bp, synthetic construct
  misc_feature 1..20: note = chemically synthesized
  source 1..20: mol_type = other DNA
aagaggacaacggatttccg

SEQ ID NO: 32670 - DNA, 20 bp, synthetic construct
  misc_feature 1..20: note = chemically synthesized
  source 1..20: mol_type = other DNA
agcagagccacacggacgtc

SEQ ID NO: 32671 - DNA, 20 bp, synthetic construct
  misc_feature 1..20: note = chemically synthesized
  source 1..20: mol_type = other DNA
tcgatggtctacctgagacc

SEQ ID NO: 32672 - DNA, 20 bp, synthetic construct
  misc_feature 1..20: note = chemically synthesized
  source 1..20: mol_type = other DNA
ctgagaaaacaaacgaaggg

SEQ ID NO: 32673 - DNA, 20 bp, synthetic construct
  misc_feature 1..20: note = chemically synthesized
  source 1..20: mol_type = other DNA
caaacgaagggaaagaaatg

SEQ ID NO: 32674 - DNA, 20 bp, synthetic construct
  misc_feature 1..20: note = chemically synthesized
  source 1..20: mol_type = other DNA
gaacaaaaagattaggagga

SEQ ID NO: 32675 - DNA, 20 bp, synthetic construct
  misc_feature 1..20: note = chemically synthesized
  source 1..20: mol_type = other DNA
gttttcccttcgaagtatgt

SEQ ID NO: 32676 - DNA, 20 bp, synthetic construct
  misc_feature 1..20: note = chemically synthesized
  source 1..20: mol_type = other DNA
catcttctgtctctccccag

SEQ ID NO: 32677 - DNA, 20 bp, synthetic construct
  misc_feature 1..20: note = chemically synthesized
  source 1..20: mol_type = other DNA
ctaaggcttaggtggagcct

SEQ ID NO: 32678 - DNA, 20 bp, synthetic construct
  misc_feature 1..20: note = chemically synthesized
  source 1..20: mol_type = other DNA
cctgagagcccgggatgcag

SEQ ID NO: 32679 - DNA, 20 bp, synthetic construct
  misc_feature 1..20: note = chemically synthesized
  source 1..20: mol_type = other DNA
gtcaacgtattttccaagcc

SEQ ID NO: 32680 - DNA, 20 bp, synthetic construct
  misc_feature 1..20: note = chemically synthesized
  source 1..20: mol_type = other DNA
aatgtaggtgttcaaaggca

SEQ ID NO: 32681 - DNA, 20 bp, synthetic construct
  misc_feature 1..20: note = chemically synthesized
  source 1..20: mol_type = other DNA
ccgatgcgctgatgtggaac

SEQ ID NO: 32682 - DNA, 20 bp, synthetic construct
  misc_feature 1..20: note = chemically synthesized
  source 1..20: mol_type = other DNA
acacacactcgcctctcaaa

SEQ ID NO: 32683 - DNA, 20 bp, synthetic construct
  misc_feature 1..20: note = chemically synthesized
  source 1..20: mol_type = other DNA
agctctaaattatttggtct

SEQ ID NO: 32684 - DNA, 20 bp, synthetic construct
  misc_feature 1..20: note = chemically synthesized
  source 1..20: mol_type = other DNA
catccatttggaggagacac

SEQ ID NO: 32685 - DNA, 20 bp, synthetic construct
  misc_feature 1..20: note = chemically synthesized
  source 1..20: mol_type = other DNA
caccacctctggttaccccc

SEQ ID NO: 32686 - DNA, 20 bp, synthetic construct
  misc_feature 1..20: note = chemically synthesized
  source 1..20: mol_type = other DNA
ggttaccccctgagaaaggc

SEQ ID NO: 32687 - DNA, 20 bp, synthetic construct
  misc_feature 1..20: note = chemically synthesized
  source 1..20: mol_type = other DNA
cccacttgaggctgtccaca

SEQ ID NO: 32688 - DNA, 20 bp, synthetic construct
  misc_feature 1..20: note = chemically synthesized
  source 1..20: mol_type = other DNA
atccctgatcaggactgaaa

SEQ ID NO: 32689 - DNA, 20 bp, synthetic construct
  misc_feature 1..20: note = chemically synthesized
  source 1..20: mol_type = other DNA
gatcaggactgaaaaaagaa

SEQ ID NO: 32690 - DNA, 20 bp, synthetic construct
  misc_feature 1..20: note = chemically synthesized
  source 1..20: mol_type = other DNA
ggagaacaagccatctgaaa

SEQ ID NO: 32691 - DNA, 20 bp, synthetic construct
  misc_feature 1..20: note = chemically synthesized
  source 1..20: mol_type = other DNA
ctacttgggaggctgaggca

SEQ ID NO: 32692 - DNA, 20 bp, synthetic construct
  misc_feature 1..20: note = chemically synthesized
  source 1..20: mol_type = other DNA
ttgcatacacatacactaaa

SEQ ID NO: 32693 - DNA, 20 bp, synthetic construct
  misc_feature 1..20: note = chemically synthesized
  source 1..20: mol_type = other DNA
cacatacactaaaacagaaa

SEQ ID NO: 32694 - DNA, 20 bp, synthetic construct
  misc_feature 1..20: note = chemically synthesized
  source 1..20: mol_type = other DNA
cagaaaaaagaaaaaaaaaa

SEQ ID NO: 32695 - DNA, 20 bp, synthetic construct
  misc_feature 1..20: note = chemically synthesized
  source 1..20: mol_type = other DNA
aaagagagacagagagagag

SEQ ID NO: 32696 - DNA, 20 bp, synthetic construct
  misc_feature 1..20: note = chemically synthesized
  source 1..20: mol_type = other DNA
agacaggctctagcttgttt

SEQ ID NO: 32697 - DNA, 20 bp, synthetic construct
  misc_feature 1..20: note = chemically synthesized
  source 1..20: mol_type = other DNA
ctggcttccaggtgagcgag

SEQ ID NO: 32698 - DNA, 20 bp, synthetic construct
  misc_feature 1..20: note = chemically synthesized
  source 1..20: mol_type = other DNA
aaaaggttataatttgagga

SEQ ID NO: 32699 - DNA, 20 bp, synthetic construct
  misc_feature 1..20: note = chemically synthesized
  source 1..20: mol_type = other DNA
cccagagtgacacctcctcc

SEQ ID NO: 32700 - DNA, 20 bp, synthetic construct
  misc_feature 1..20: note = chemically synthesized
  source 1..20: mol_type = other DNA
agtcaggccttcctagttac

SEQ ID NO: 32701 - DNA, 20 bp, synthetic construct
  misc_feature 1..20: note = chemically synthesized
  source 1..20: mol_type = other DNA
ccagcccactagaaggagat

SEQ ID NO: 32702 - DNA, 20 bp, synthetic construct
  misc_feature 1..20: note = chemically synthesized
  source 1..20: mol_type = other DNA
agcccagtgctttcaggcag

SEQ ID NO: 32703 - DNA, 20 bp, synthetic construct
  misc_feature 1..20: note = chemically synthesized
  source 1..20: mol_type = other DNA
aggaagtgaacaagtcaatt

SEQ ID NO: 32704 - DNA, 20 bp, synthetic construct
  misc_feature 1..20: note = chemically synthesized
  source 1..20: mol_type = other DNA
acctctcctcaccccagcac

SEQ ID NO: 32705 - DNA, 20 bp, synthetic construct
  misc_feature 1..20: note = chemically synthesized
  source 1..20: mol_type = other DNA
ttaccgagcagtaagtgagg

SEQ ID NO: 32706 - DNA, 20 bp, synthetic construct
  misc_feature 1..20: note = chemically synthesized
  source 1..20: mol_type = other DNA
agagaggggcacctgggatg

SEQ ID NO: 32707 - DNA, 20 bp, synthetic construct
  misc_feature 1..20: note = chemically synthesized
  source 1..20: mol_type = other DNA
aagagtgcagacataagact

SEQ ID NO: 32708 - DNA, 20 bp, synthetic construct
  misc_feature 1..20: note = chemically synthesized
  source 1..20: mol_type = other DNA
agcagattctaaagagaggc

SEQ ID NO: 32709 - DNA, 20 bp, synthetic construct
  misc_feature 1..20: note = chemically synthesized
  source 1..20: mol_type = other DNA
atttaggaagaagaagtggc

SEQ ID NO: 32710 - DNA, 20 bp, synthetic construct
  misc_feature 1..20: note = chemically synthesized
  source 1..20: mol_type = other DNA
gaagtggcggagaatggaat

SEQ ID NO: 32711 - DNA, 20 bp, synthetic construct
  misc_feature 1..20: note = chemically synthesized
  source 1..20: mol_type = other DNA
gaccagccccgaaaaagggc

SEQ ID NO: 32712 - DNA, 20 bp, synthetic construct
  misc_feature 1..20: note = chemically synthesized
  source 1..20: mol_type = other DNA
cagggaaaggaacaaggcaa

SEQ ID NO: 32713 - DNA, 20 bp, synthetic construct
  misc_feature 1..20: note = chemically synthesized
  source 1..20: mol_type = other DNA
ctcttcaacaaagctccagt

SEQ ID NO: 32714 - DNA, 20 bp, synthetic construct
  misc_feature 1..20: note = chemically synthesized
  source 1..20: mol_type = other DNA
gtgctttcttctatgattcc

SEQ ID NO: 32715 - DNA, 20 bp, synthetic construct
  misc_feature 1..20: note = chemically synthesized
  source 1..20: mol_type = other DNA
aaacccaattttaggggagg

SEQ ID NO: 32716 - DNA, 20 bp, synthetic construct
  misc_feature 1..20: note = chemically synthesized
  source 1..20: mol_type = other DNA
atttgcttatgcctataatc

SEQ ID NO: 32717 - DNA, 20 bp, synthetic construct
  misc_feature 1..20: note = chemically synthesized
  source 1..20: mol_type = other DNA
tgagatttagctatcttttc

SEQ ID NO: 32718 - DNA, 20 bp, synthetic construct
  misc_feature 1..20: note = chemically synthesized
  source 1..20: mol_type = other DNA
gcctgtcatgaagcagactc

SEQ ID NO: 32719 - DNA, 20 bp, synthetic construct
  misc_feature 1..20: note = chemically synthesized
  source 1..20: mol_type = other DNA
aggaagcattgctctagatc

SEQ ID NO: 32720 - DNA, 20 bp, synthetic construct
  misc_feature 1..20: note = chemically synthesized
  source 1..20: mol_type = other DNA
acaaacccagcagagaacgt

SEQ ID NO: 32721 - DNA, 20 bp, synthetic construct
  misc_feature 1..20: note = chemically synthesized
  source 1..20: mol_type = other DNA
gagttcacttaaaagtccat

SEQ ID NO: 32722 - DNA, 20 bp, synthetic construct
  misc_feature 1..20: note = chemically synthesized
  source 1..20: mol_type = other DNA
cacacatctctcaactcttg

SEQ ID NO: 32723 - DNA, 20 bp, synthetic construct
  misc_feature 1..20: note = chemically synthesized
  source 1..20: mol_type = other DNA
caaatacaggcgctacaaaa

SEQ ID NO: 32724 - DNA, 20 bp, synthetic construct
  misc_feature 1..20: note = chemically synthesized
  source 1..20: mol_type = other DNA
aaataggtgtgaaagcgggg

SEQ ID NO: 32725 - DNA, 20 bp, synthetic construct
  misc_feature 1..20: note = chemically synthesized
  source 1..20: mol_type = other DNA
ggtgactgcactcatgctgc

SEQ ID NO: 32726 - DNA, 20 bp, synthetic construct
  misc_feature 1..20: note = chemically synthesized
  source 1..20: mol_type = other DNA
gcctgccttctttccttaca

SEQ ID NO: 32727 - DNA, 20 bp, synthetic construct
  misc_feature 1..20: note = chemically synthesized
  source 1..20: mol_type = other DNA
acagcagtaagttgaccact

SEQ ID NO: 32728 - DNA, 20 bp, synthetic construct
  misc_feature 1..20: note = chemically synthesized
  source 1..20: mol_type = other DNA
gggcatgggactgtgcttat

SEQ ID NO: 32729 - DNA, 20 bp, synthetic construct
  misc_feature 1..20: note = chemically synthesized
  source 1..20: mol_type = other DNA
tcctaaattactccaatgac

SEQ ID NO: 32730 - DNA, 20 bp, synthetic construct
  misc_feature 1..20: note = chemically synthesized
  source 1..20: mol_type = other DNA
attctcccctctctctggca

SEQ ID NO: 32731 - DNA, 20 bp, synthetic construct
  misc_feature 1..20: note = chemically synthesized
  source 1..20: mol_type = other DNA
ttttctgaaaattgaaaaat

SEQ ID NO: 32732 - DNA, 20 bp, synthetic construct
  misc_feature 1..20: note = chemically synthesized
  source 1..20: mol_type = other DNA
aattcagaaagccaaagata

SEQ ID NO: 32733 - DNA, 20 bp, synthetic construct
  misc_feature 1..20: note = chemically synthesized
  source 1..20: mol_type = other DNA
tcgcattccgtttataagaa

SEQ ID NO: 32734 - DNA, 20 bp, synthetic construct
  misc_feature 1..20: note = chemically synthesized
  source 1..20: mol_type = other DNA
gcaagcttagccccttcttt

SEQ ID NO: 32735 - DNA, 20 bp, synthetic construct
  misc_feature 1..20: note = chemically synthesized
  source 1..20: mol_type = other DNA
aagatattgatgtgccaaca

SEQ ID NO: 32736 - DNA, 20 bp, synthetic construct
  misc_feature 1..20: note = chemically synthesized
  source 1..20: mol_type = other DNA
tgatgtgccaacagtagaaa

SEQ ID NO: 32737 - DNA, 20 bp, synthetic construct
  misc_feature 1..20: note = chemically synthesized
  source 1..20: mol_type = other DNA
tagccagggctcaaatggcc

SEQ ID NO: 32738 - DNA, 20 bp, synthetic construct
  misc_feature 1..20: note = chemically synthesized
  source 1..20: mol_type = other DNA
aagggatctctgttcttcca

SEQ ID NO: 32739 - DNA, 20 bp, synthetic construct
  misc_feature 1..20: note = chemically synthesized
  source 1..20: mol_type = other DNA
ctctgagccaaacccttggt

SEQ ID NO: 32740 - DNA, 20 bp, synthetic construct
  misc_feature 1..20: note = chemically synthesized
  source 1..20: mol_type = other DNA
ctcaaatactacaaaagtag

SEQ ID NO: 32741 - DNA, 20 bp, synthetic construct
  misc_feature 1..20: note = chemically synthesized
  source 1..20: mol_type = other DNA
ataggggagttattttaaac

SEQ ID NO: 32742 - DNA, 20 bp, synthetic construct
  misc_feature 1..20: note = chemically synthesized
  source 1..20: mol_type = other DNA
aggttcaagactgaagctgc

SEQ ID NO: 32743 - DNA, 20 bp, synthetic construct
  misc_feature 1..20: note = chemically synthesized
  source 1..20: mol_type = other DNA
aagctgccaagaaaagcttc

SEQ ID NO: 32744 - DNA, 20 bp, synthetic construct
  misc_feature 1..20: note = chemically synthesized
  source 1..20: mol_type = other DNA
actggaattcatttgtcttg

SEQ ID NO: 32745 - DNA, 20 bp, synthetic construct
  misc_feature 1..20: note = chemically synthesized
  source 1..20: mol_type = other DNA
gttctcctggacggttctgc

SEQ ID NO: 32746 - DNA, 20 bp, synthetic construct
  misc_feature 1..20: note = chemically synthesized
  source 1..20: mol_type = other DNA
accagatgcagaggcaggtc

SEQ ID NO: 32747 - DNA, 20 bp, synthetic construct
  misc_feature 1..20: note = chemically synthesized
  source 1..20: mol_type = other DNA
ggcaacacgtgttgcaacct

SEQ ID NO: 32748 - DNA, 20 bp, synthetic construct
  misc_feature 1..20: note = chemically synthesized
  source 1..20: mol_type = other DNA
acacgtgttgcaacctagag

SEQ ID NO: 32749 - DNA, 20 bp, synthetic construct
  misc_feature 1..20: note = chemically synthesized
  source 1..20: mol_type = other DNA
attcattgccaggcaaaact

SEQ ID NO: 32750 - DNA, 20 bp, synthetic construct
  misc_feature 1..20: note = chemically synthesized
  source 1..20: mol_type = other DNA
gcaaaacttgagaaatacat

SEQ ID NO: 32751 - DNA, 20 bp, synthetic construct
  misc_feature 1..20: note = chemically synthesized
  source 1..20: mol_type = other DNA
agtaaatgaatcaccaaggc

SEQ ID NO: 32752 - DNA, 20 bp, synthetic construct
  misc_feature 1..20: note = chemically synthesized
  source 1..20: mol_type = other DNA
acttaactagcccaaacgtt

SEQ ID NO: 32753 - DNA, 20 bp, synthetic construct
  misc_feature 1..20: note = chemically synthesized
  source 1..20: mol_type = other DNA
agatagaagagcatgcaaaa

SEQ ID NO: 32754 - DNA, 20 bp, synthetic construct
  misc_feature 1..20: note = chemically synthesized
  source 1..20: mol_type = other DNA
tctgagcacatgggataata

SEQ ID NO: 32755 - DNA, 20 bp, synthetic construct
  misc_feature 1..20: note = chemically synthesized
  source 1..20: mol_type = other DNA
tttgctggacagtgtggaaa

SEQ ID NO: 32756 - DNA, 20 bp, synthetic construct
  misc_feature 1..20: note = chemically synthesized
  source 1..20: mol_type = other DNA
tatgtaggctatgtccatac

SEQ ID NO: 32757 - DNA, 20 bp, synthetic construct
  misc_feature 1..20: note = chemically synthesized
  source 1..20: mol_type = other DNA
ttgcccaaaaaagcaaactt

SEQ ID NO: 32758 - DNA, 20 bp, synthetic construct
  misc_feature 1..20: note = chemically synthesized
  source 1..20: mol_type = other DNA
gcttgcaacaattaaaagat

SEQ ID NO: 32759 - DNA, 20 bp, synthetic construct
  misc_feature 1..20: note = chemically synthesized
  source 1..20: mol_type = other DNA
cttccatctttgaggcaaat

SEQ ID NO: 32760 - DNA, 20 bp, synthetic construct
  misc_feature 1..20: note = chemically synthesized
  source 1..20: mol_type = other DNA
tagattccaaaaaatagcag

SEQ ID NO: 32761 - DNA, 20 bp, synthetic construct
  misc_feature 1..20: note = chemically synthesized
  source 1..20: mol_type = other DNA
atggcagcagggctgggaaa

SEQ ID NO: 32762 - DNA, 20 bp, synthetic construct
  misc_feature 1..20: note = chemically synthesized
  source 1..20: mol_type = other DNA
aaatctagatttgatcaaat

SEQ ID NO: 32763 - DNA, 20 bp, synthetic construct
  misc_feature 1..20: note = chemically synthesized
  source 1..20: mol_type = other DNA
aactggtgatttgatcaaat

SEQ ID NO: 32764 - DNA, 20 bp, synthetic construct
  misc_feature 1..20: note = chemically synthesized
  source 1..20: mol_type = other DNA
ttttgggatgatgtgttcta

SEQ ID NO: 32765 - DNA, 20 bp, synthetic construct
  misc_feature 1..20: note = chemically synthesized
  source 1..20: mol_type = other DNA
gacatttcaatcaggttgaa

SEQ ID NO: 32766 - DNA, 20 bp, synthetic construct
  misc_feature 1..20: note = chemically synthesized
  source 1..20: mol_type = other DNA
tttgtgcttacctaacgaag

SEQ ID NO: 32767 - DNA, 20 bp, synthetic construct
  misc_feature 1..20: note = chemically synthesized
  source 1..20: mol_type = other DNA
cttacctaacgaaggcagaa

SEQ ID NO: 32768 - DNA, 20 bp, synthetic construct
  misc_feature 1..20: note = chemically synthesized
  source 1..20: mol_type = other DNA
taacgaaggcagaaacagaa

SEQ ID NO: 32769 - DNA, 20 bp, synthetic construct
  misc_feature 1..20: note = chemically synthesized
  source 1..20: mol_type = other DNA
aggcagaaacagaaaaagaa

SEQ ID NO: 32770 - DNA, 20 bp, synthetic construct
  misc_feature 1..20: note = chemically synthesized
  source 1..20: mol_type = other DNA
cctggccaatttgaaaggat

SEQ ID NO: 32771 - DNA, 20 bp, synthetic construct
  misc_feature 1..20: note = chemically synthesized
  source 1..20: mol_type = other DNA
cttaccacagccttgttcag

SEQ ID NO: 32772 - DNA, 20 bp, synthetic construct
  misc_feature 1..20: note = chemically synthesized
  source 1..20: mol_type = other DNA
ccccccagaacccatcgtcc

SEQ ID NO: 32773 - DNA, 20 bp, synthetic construct
  misc_feature 1..20: note = chemically synthesized
  source 1..20: mol_type = other DNA
agttgttgcctggcaccgct

SEQ ID NO: 32774 - DNA, 20 bp, synthetic construct
  misc_feature 1..20: note = chemically synthesized
  source 1..20: mol_type = other DNA
cccaaccagctagcagtaac

SEQ ID NO: 32775 - DNA, 20 bp, synthetic construct
  misc_feature 1..20: note = chemically synthesized
  source 1..20: mol_type = other DNA
cacccacgagggagctgcca

SEQ ID NO: 32776 - DNA, 20 bp, synthetic construct
  misc_feature 1..20: note = chemically synthesized
  source 1..20: mol_type = other DNA
atctgcccaaggttgcacaa

SEQ ID NO: 32777 - DNA, 20 bp, synthetic construct
  misc_feature 1..20: note = chemically synthesized
  source 1..20: mol_type = other DNA
tttcgtgtaatcaaagagaa

SEQ ID NO: 32778 - DNA, 20 bp, synthetic construct
  misc_feature 1..20: note = chemically synthesized
  source 1..20: mol_type = other DNA
tgtaatcaaagagaagaaga

SEQ ID NO: 32779 - DNA, 20 bp, synthetic construct
  misc_feature 1..20: note = chemically synthesized
  source 1..20: mol_type = other DNA
ttcccagtttttatttgcta

SEQ ID NO: 32780 - DNA, 20 bp, synthetic construct
  misc_feature 1..20: note = chemically synthesized
  source 1..20: mol_type = other DNA
acaggaagaggccaagaaga

SEQ ID NO: 32781 - DNA, 20 bp, synthetic construct
  misc_feature 1..20: note = chemically synthesized
  source 1..20: mol_type = other DNA
acagtcagcaggtatttaaa

SEQ ID NO: 32782 - DNA, 20 bp, synthetic construct
  misc_feature 1..20: note = chemically synthesized
  source 1..20: mol_type = other DNA
tcagcaggtatttaaaaaag

SEQ ID NO: 32783 - DNA, 20 bp, synthetic construct
  misc_feature 1..20: note = chemically synthesized
  source 1..20: mol_type = other DNA
caggtatttaaaaaagaaag

SEQ ID NO: 32784 - DNA, 20 bp, synthetic construct
  misc_feature 1..20: note = chemically synthesized
  source 1..20: mol_type = other DNA
ttaagcccctcctggcaacc

SEQ ID NO: 32785 - DNA, 20 bp, synthetic construct
  misc_feature 1..20: note = chemically synthesized
  source 1..20: mol_type = other DNA
tcctggcaacctcagaaatt

SEQ ID NO: 32786 - DNA, 20 bp, synthetic construct
  misc_feature 1..20: note = chemically synthesized
  source 1..20: mol_type = other DNA
acacaaatcccgttggaccc

SEQ ID NO: 32787 - DNA, 20 bp, synthetic construct
  misc_feature 1..20: note = chemically synthesized
  source 1..20: mol_type = other DNA
cctctcacactaacactaaa

SEQ ID NO: 32788 - DNA, 20 bp, synthetic construct
  misc_feature 1..20: note = chemically synthesized
  source 1..20: mol_type = other DNA
gccccctcctttgcgttctg

SEQ ID NO: 32789 - DNA, 20 bp, synthetic construct
  misc_feature 1..20: note = chemically synthesized
  source 1..20: mol_type = other DNA
tcgaatctaattaagatcag

SEQ ID NO: 32790 - DNA, 20 bp, synthetic construct
  misc_feature 1..20: note = chemically synthesized
  source 1..20: mol_type = other DNA
cacagaagttcttcaaattt

SEQ ID NO: 32791 - DNA, 20 bp, synthetic construct
  misc_feature 1..20: note = chemically synthesized
  source 1..20: mol_type = other DNA
gtggtggcgttaatgtttct

SEQ ID NO: 32792 - DNA, 20 bp, synthetic construct
  misc_feature 1..20: note = chemically synthesized
  source 1..20: mol_type = other DNA
cttggtatgtgaatggcgaa

SEQ ID NO: 32793 - DNA, 20 bp, synthetic construct
  misc_feature 1..20: note = chemically synthesized
  source 1..20: mol_type = other DNA
ggcgaaaaagaaaaaaaagg

SEQ ID NO: 32794 - DNA, 20 bp, synthetic construct
  misc_feature 1..20: note = chemically synthesized
  source 1..20: mol_type = other DNA
agaaaaaaaaggaaagaaaa

SEQ ID NO: 32795 - DNA, 20 bp, synthetic construct
  misc_feature 1..20: note = chemically synthesized
  source 1..20: mol_type = other DNA
accaaaatttaatggtgact

SEQ ID NO: 32796 - DNA, 20 bp, synthetic construct
  misc_feature 1..20: note = chemically synthesized
  source 1..20: mol_type = other DNA
atactttttatttacttcct

SEQ ID NO: 32797 - DNA, 20 bp, synthetic construct
  misc_feature 1..20: note = chemically synthesized
  source 1..20: mol_type = other DNA
cactagattatgccaatcta

SEQ ID NO: 32798 - DNA, 20 bp, synthetic construct
  misc_feature 1..20: note = chemically synthesized
  source 1..20: mol_type = other DNA
gtttgggggagagagagagg

SEQ ID NO: 32799 - DNA, 20 bp, synthetic construct
  misc_feature 1..20: note = chemically synthesized
  source 1..20: mol_type = other DNA
tcttagtaaagcaattacat

SEQ ID NO: 32800 - DNA, 20 bp, synthetic construct
  misc_feature 1..20: note = chemically synthesized
  source 1..20: mol_type = other DNA
aggctgtgaagtcggagagg

SEQ ID NO: 32801 - DNA, 20 bp, synthetic construct
  misc_feature 1..20: note = chemically synthesized
  source 1..20: mol_type = other DNA
tcattaaacattcgttttaa

SEQ ID NO: 32802 - DNA, 20 bp, synthetic construct
  misc_feature 1..20: note = chemically synthesized
  source 1..20: mol_type = other DNA
agctcagagcagcagctgaa

SEQ ID NO: 32803 - DNA, 20 bp, synthetic construct
  misc_feature 1..20: note = chemically synthesized
  source 1..20: mol_type = other DNA
gtgccagccatctatctaaa

SEQ ID NO: 32804 - DNA, 20 bp, synthetic construct
  misc_feature 1..20: note = chemically synthesized
  source 1..20: mol_type = other DNA
agaagaaacctaaagcattg

SEQ ID NO: 32805 - DNA, 20 bp, synthetic construct
  misc_feature 1..20: note = chemically synthesized
  source 1..20: mol_type = other DNA
ccctgcaatgttcgtgggga

SEQ ID NO: 32806 - DNA, 20 bp, synthetic construct
  misc_feature 1..20: note = chemically synthesized
  source 1..20: mol_type = other DNA
acaaactgtacttaacgtta

SEQ ID NO: 32807 - DNA, 20 bp, synthetic construct
  misc_feature 1..20: note = chemically synthesized
  source 1..20: mol_type = other DNA
tggtgaacttttaatcttga

SEQ ID NO: 32808 - DNA, 20 bp, synthetic construct
  misc_feature 1..20: note = chemically synthesized
  source 1..20: mol_type = other DNA
attttgcaagattgaaaatc

SEQ ID NO: 32809 - DNA, 20 bp, synthetic construct
  misc_feature 1..20: note = chemically synthesized
  source 1..20: mol_type = other DNA
ctggaaggacctaatggtca

SEQ ID NO: 32810 - DNA, 20 bp, synthetic construct
  misc_feature 1..20: note = chemically synthesized
  source 1..20: mol_type = other DNA
tgcttccaaagggaaaccag

SEQ ID NO: 32811 - DNA, 20 bp, synthetic construct
  misc_feature 1..20: note = chemically synthesized
  source 1..20: mol_type = other DNA
atgcagacatcagctgacat

SEQ ID NO: 32812 - DNA, 20 bp, synthetic construct
  misc_feature 1..20: note = chemically synthesized
  source 1..20: mol_type = other DNA
tttccaattactagtctgga

SEQ ID NO: 32813 - DNA, 20 bp, synthetic construct
  misc_feature 1..20: note = chemically synthesized
  source 1..20: mol_type = other DNA
acatttaaaaaattctagtg

SEQ ID NO: 32814 - DNA, 20 bp, synthetic construct
  misc_feature 1..20: note = chemically synthesized
  source 1..20: mol_type = other DNA
ctctccaacccaggtgaaag

SEQ ID NO: 32815 - DNA, 20 bp, synthetic construct
  misc_feature 1..20: note = chemically synthesized
  source 1..20: mol_type = other DNA
agctggtgtgcaagtcagac

SEQ ID NO: 32816 - DNA, 20 bp, synthetic construct
  misc_feature 1..20: note = chemically synthesized
  source 1..20: mol_type = other DNA
atttcatttgaactgctatc

SEQ ID NO: 32817 - DNA, 20 bp, synthetic construct
  misc_feature 1..20: note = chemically synthesized
  source 1..20: mol_type = other DNA
aaggaaatcggaaagagaag

SEQ ID NO: 32818 - DNA, 20 bp, synthetic construct
  misc_feature 1..20: note = chemically synthesized
  source 1..20: mol_type = other DNA
ctcttatccttgggccctgc

SEQ ID NO: 32819 - DNA, 20 bp, synthetic construct
  misc_feature 1..20: note = chemically synthesized
  source 1..20: mol_type = other DNA
gtgccacattttaacattta

SEQ ID NO: 32820 - DNA, 20 bp, synthetic construct
  misc_feature 1..20: note = chemically synthesized
  source 1..20: mol_type = other DNA
atgggatgtgacagggcaaa

SEQ ID NO: 32821 - DNA, 20 bp, synthetic construct
  misc_feature 1..20: note = chemically synthesized
  source 1..20: mol_type = other DNA
attagattaaaaacaaaagt

SEQ ID NO: 32822 - DNA, 20 bp, synthetic construct
  misc_feature 1..20: note = chemically synthesized
  source 1..20: mol_type = other DNA
ctggcaacaccgcaatcaca

SEQ ID NO: 32823 - DNA, 20 bp, synthetic construct
  misc_feature 1..20: note = chemically synthesized
  source 1..20: mol_type = other DNA
gttaagcaatccacttgtat

SEQ ID NO: 32824 - DNA, 20 bp, synthetic construct
  misc_feature 1..20: note = chemically synthesized
  source 1..20: mol_type = other DNA
gtcacacagctccaagatca

SEQ ID NO: 32825 - DNA, 20 bp, synthetic construct
  misc_feature 1..20: note = chemically synthesized
  source 1..20: mol_type = other DNA
aagatccaagagtatcttta

SEQ ID NO: 32826 - DNA, 20 bp, synthetic construct
  misc_feature 1..20: note = chemically synthesized
  source 1..20: mol_type = other DNA
aaaatattagggtgtgatgg

SEQ ID NO: 32827 - DNA, 20 bp, synthetic construct
  misc_feature 1..20: note = chemically synthesized
  source 1..20: mol_type = other DNA
gtataccttgagttggtgaa

SEQ ID NO: 32828 - DNA, 20 bp, synthetic construct
  misc_feature 1..20: note = chemically synthesized
  source 1..20: mol_type = other DNA
tagtgctttgtgctccaaca

SEQ ID NO: 32829 - DNA, 20 bp, synthetic construct
  misc_feature 1..20: note = chemically synthesized
  source 1..20: mol_type = other DNA
ttttatgcatcattacatat

SEQ ID NO: 32830 - DNA, 20 bp, synthetic construct
  misc_feature 1..20: note = chemically synthesized
  source 1..20: mol_type = other DNA
aaaaagcttccttgtgtttt

SEQ ID NO: 32831 - DNA, 20 bp, synthetic construct
  misc_feature 1..20: note = chemically synthesized
  source 1..20: mol_type = other DNA
ttagaaagttcaaaaagcaa

SEQ ID NO: 32832 - DNA, 20 bp, synthetic construct
  misc_feature 1..20: note = chemically synthesized
  source 1..20: mol_type = other DNA
attggcaatgctaacaacag

SEQ ID NO: 32833 - DNA, 20 bp, synthetic construct
  misc_feature 1..20: note = chemically synthesized
  source 1..20: mol_type = other DNA
ttggggagacaactccaaga

SEQ ID NO: 32834 - DNA, 20 bp, synthetic construct
  misc_feature 1..20: note = chemically synthesized
  source 1..20: mol_type = other DNA
cgctatagatcaaaggagaa

SEQ ID NO: 32835 - DNA, 20 bp, synthetic construct
  misc_feature 1..20: note = chemically synthesized
  source 1..20: mol_type = other DNA
caacctaactcaatgccatt

SEQ ID NO: 32836 - DNA, 20 bp, synthetic construct
  misc_feature 1..20: note = chemically synthesized
  source 1..20: mol_type = other DNA
ttgcagaatgacgaatgagc

SEQ ID NO: 32837 - DNA, 20 bp, synthetic construct
  misc_feature 1..20: note = chemically synthesized
  source 1..20: mol_type = other DNA
aagttacattttaaaactga

SEQ ID NO: 32838 - DNA, 20 bp, synthetic construct
  misc_feature 1..20: note = chemically synthesized
  source 1..20: mol_type = other DNA
aggagcacatgtagagagct

SEQ ID NO: 32839 - DNA, 20 bp, synthetic construct
  misc_feature 1..20: note = chemically synthesized
  source 1..20: mol_type = other DNA
tcctggaaattaagtttgtg

SEQ ID NO: 32840 - DNA, 20 bp, synthetic construct
  misc_feature 1..20: note = chemically synthesized
  source 1..20: mol_type = other DNA
gatgcccatttacctaggta

SEQ ID NO: 32841 - DNA, 20 bp, synthetic construct
  misc_feature 1..20: note = chemically synthesized
  source 1..20: mol_type = other DNA
tgttaaaagtgggctctaag

SEQ ID NO: 32842 - DNA, 20 bp, synthetic construct
  misc_feature 1..20: note = chemically synthesized
  source 1..20: mol_type = other DNA
cccaaatgaaatctgaacaa

SEQ ID NO: 32843 - DNA, 20 bp, synthetic construct
  misc_feature 1..20: note = chemically synthesized
  source 1..20: mol_type = other DNA
cctttattaaacattttcat

SEQ ID NO: 32844 - DNA, 20 bp, synthetic construct
  misc_feature 1..20: note = chemically synthesized
  source 1..20: mol_type = other DNA
attatatgccacattcacta

SEQ ID NO: 32845 - DNA, 20 bp, synthetic construct
  misc_feature 1..20: note = chemically synthesized
  source 1..20: mol_type = other DNA
caacaaggaatggggtgatt

SEQ ID NO: 32846 - DNA, 20 bp, synthetic construct
  misc_feature 1..20: note = chemically synthesized
  source 1..20: mol_type = other DNA
ttttgtttttttaagctttc

SEQ ID NO: 32847 - DNA, 20 bp, synthetic construct
  misc_feature 1..20: note = chemically synthesized
  source 1..20: mol_type = other DNA
actgtctgtaacagcaggag

SEQ ID NO: 32848 - DNA, 20 bp, synthetic construct
  misc_feature 1..20: note = chemically synthesized
  source 1..20: mol_type = other DNA
agttctatttacaatttgtc

SEQ ID NO: 32849 - DNA, 20 bp, synthetic construct
  misc_feature 1..20: note = chemically synthesized
  source 1..20: mol_type = other DNA
atgaaaatcctaggtactta

SEQ ID NO: 32850 - DNA, 20 bp, synthetic construct
  misc_feature 1..20: note = chemically synthesized
  source 1..20: mol_type = other DNA
cagaagtcagtcgtttttat

SEQ ID NO: 32851 - DNA, 20 bp, synthetic construct
  misc_feature 1..20: note = chemically synthesized
  source 1..20: mol_type = other DNA
attcagaatcacataaataa

SEQ ID NO: 32852 - DNA, 20 bp, synthetic construct
  misc_feature 1..20: note = chemically synthesized
  source 1..20: mol_type = other DNA
gaatcacataaataaagaga

SEQ ID NO: 32853 - DNA, 20 bp, synthetic construct
  misc_feature 1..20: note = chemically synthesized
  source 1..20: mol_type = other DNA
ccagttcagtctgagctagg

SEQ ID NO: 32854 - DNA, 20 bp, synthetic construct
  misc_feature 1..20: note = chemically synthesized
  source 1..20: mol_type = other DNA
cagtctgagctaggagagaa

SEQ ID NO: 32855 - DNA, 20 bp, synthetic construct
  misc_feature 1..20: note = chemically synthesized
  source 1..20: mol_type = other DNA
gagaatcagaatggatacaa

SEQ ID NO: 32856 - DNA, 20 bp, synthetic construct
  misc_feature 1..20: note = chemically synthesized
  source 1..20: mol_type = other DNA
gtctatgttcatgattttaa

SEQ ID NO: 32857 - DNA, 20 bp, synthetic construct
  misc_feature 1..20: note = chemically synthesized
  source 1..20: mol_type = other DNA
taaaatatgagactaaaaaa

SEQ ID NO: 32858 - DNA, 20 bp, synthetic construct
  misc_feature 1..20: note = chemically synthesized
  source 1..20: mol_type = other DNA
cccatctattcaccaggtaa

SEQ ID NO: 32859 - DNA, 20 bp, synthetic construct
  misc_feature 1..20: note = chemically synthesized
  source 1..20: mol_type = other DNA
ctacttgggaggctgaggca

SEQ ID NO: 32860 - DNA, 20 bp, synthetic construct
  misc_feature 1..20: note = chemically synthesized
  source 1..20: mol_type = other DNA
tgtttccttcctcatcataa

SEQ ID NO: 32861 - DNA, 20 bp, synthetic construct
  misc_feature 1..20: note = chemically synthesized
  source 1..20: mol_type = other DNA
gaattgtgcagacgtgcttt

SEQ ID NO: 32862 - DNA, 20 bp, synthetic construct
  misc_feature 1..20: note = chemically synthesized
  source 1..20: mol_type = other DNA
gtcggaatttatgtgcaatg

SEQ ID NO: 32863 - DNA, 20 bp, synthetic construct
  misc_feature 1..20: note = chemically synthesized
  source 1..20: mol_type = other DNA
acaggtgattaaacacaatg

SEQ ID NO: 32864 - DNA, 20 bp, synthetic construct
  misc_feature 1..20: note = chemically synthesized
  source 1..20: mol_type = other DNA
cctcctctaaatacagaggc

SEQ ID NO: 32865 - DNA, 20 bp, synthetic construct
  misc_feature 1..20: note = chemically synthesized
  source 1..20: mol_type = other DNA
taaggtaaatgtggtggatt

SEQ ID NO: 32866 - DNA, 20 bp, synthetic construct
  misc_feature 1..20: note = chemically synthesized
  source 1..20: mol_type = other DNA
gaaagtatctgagtgctatc

SEQ ID NO: 32867 - DNA, 20 bp, synthetic construct
  misc_feature 1..20: note = chemically synthesized
  source 1..20: mol_type = other DNA
tatcacagaaagcactaaaa

SEQ ID NO: 32868 - DNA, 20 bp, synthetic construct
  misc_feature 1..20: note = chemically synthesized
  source 1..20: mol_type = other DNA
acagaaagcactaaaaaaag

SEQ ID NO: 32869 - DNA, 20 bp, synthetic construct
  misc_feature 1..20: note = chemically synthesized
  source 1..20: mol_type = other DNA
tcaaattctagagggggaga

SEQ ID NO: 32870 - DNA, 20 bp, synthetic construct
  misc_feature 1..20: note = chemically synthesized
  source 1..20: mol_type = other DNA
agctgggtggtaggtagatg

SEQ ID NO: 32871 - DNA, 20 bp, synthetic construct
  misc_feature 1..20: note = chemically synthesized
  source 1..20: mol_type = other DNA
ggcatggcatgtctgtcatc

SEQ ID NO: 32872 - DNA, 20 bp, synthetic construct
  misc_feature 1..20: note = chemically synthesized
  source 1..20: mol_type = other DNA
ttccttttcccttgagctgc

SEQ ID NO: 32873 - DNA, 20 bp, synthetic construct
  misc_feature 1..20: note = chemically synthesized
  source 1..20: mol_type = other DNA
aatacgtgtgtgtatttttc

SEQ ID NO: 32874 - DNA, 20 bp, synthetic construct
  misc_feature 1..20: note = chemically synthesized
  source 1..20: mol_type = other DNA
aatttttacattgtgttata

SEQ ID NO: 32875 - DNA, 20 bp, synthetic construct
  misc_feature 1..20: note = chemically synthesized
  source 1..20: mol_type = other DNA
aatgagaaggtggggatggg

SEQ ID NO: 32876 - DNA, 20 bp, synthetic construct
  misc_feature 1..20: note = chemically synthesized
  source 1..20: mol_type = other DNA
gaaggtggggatggggaaga

SEQ ID NO: 32877 - DNA, 20 bp, synthetic construct
  misc_feature 1..20: note = chemically synthesized
  source 1..20: mol_type = other DNA
ctgtgttctggacgtaagca

SEQ ID NO: 32878 - DNA, 20 bp, synthetic construct
  misc_feature 1..20: note = chemically synthesized
  source 1..20: mol_type = other DNA
ggacagtcacatagagtaat

SEQ ID NO: 32879 - DNA, 20 bp, synthetic construct
  misc_feature 1..20: note = chemically synthesized
  source 1..20: mol_type = other DNA
tacagcacctctgaaaatga

SEQ ID NO: 32880 - DNA, 20 bp, synthetic construct
  misc_feature 1..20: note = chemically synthesized
  source 1..20: mol_type = other DNA
ccgtttgtgctcgataaaaa

SEQ ID NO: 32881 - DNA, 20 bp, synthetic construct
  misc_feature 1..20: note = chemically synthesized
  source 1..20: mol_type = other DNA
gtggtctggttcatcatctg

SEQ ID NO: 32882 - DNA, 20 bp, synthetic construct
  misc_feature 1..20: note = chemically synthesized
  source 1..20: mol_type = other DNA
caagaggctcggctgtggtt

SEQ ID NO: 32883 - DNA, 20 bp, synthetic construct
  misc_feature 1..20: note = chemically synthesized
  source 1..20: mol_type = other DNA
ttattagagtgccagagagg

SEQ ID NO: 32884 - DNA, 20 bp, synthetic construct
  misc_feature 1..20: note = chemically synthesized
  source 1..20: mol_type = other DNA
taggcttctctatataatac

SEQ ID NO: 32885 - DNA, 20 bp, synthetic construct
  misc_feature 1..20: note = chemically synthesized
  source 1..20: mol_type = other DNA
aggcaaatcatcacatatgt

SEQ ID NO: 32886 - DNA, 20 bp, synthetic construct
  misc_feature 1..20: note = chemically synthesized
  source 1..20: mol_type = other DNA
aatgtgtctggtttgtaagt

SEQ ID NO: 32887 - DNA, 20 bp, synthetic construct
  misc_feature 1..20: note = chemically synthesized
  source 1..20: mol_type = other DNA
tgtctggtttgtaagtttag

SEQ ID NO: 32888 - DNA, 20 bp, synthetic construct
  misc_feature 1..20: note = chemically synthesized
  source 1..20: mol_type = other DNA
atagttaacacagggaacat

SEQ ID NO: 32889 - DNA, 20 bp, synthetic construct
  misc_feature 1..20: note = chemically synthesized
  source 1..20: mol_type = other DNA
gaaagcttaaataataacta

SEQ ID NO: 32890 - DNA, 20 bp, synthetic construct
  misc_feature 1..20: note = chemically synthesized
  source 1..20: mol_type = other DNA
ctggttaaaaaaaaaagtgg

SEQ ID NO: 32891 - DNA, 20 bp, synthetic construct
  misc_feature 1..20: note = chemically synthesized
  source 1..20: mol_type = other DNA
accaagttgtccattgtgcc

SEQ ID NO: 32892 - DNA, 20 bp, synthetic construct
  misc_feature 1..20: note = chemically synthesized
  source 1..20: mol_type = other DNA
aacagacatggcttcataaa

SEQ ID NO: 32893 - DNA, 20 bp, synthetic construct
  misc_feature 1..20: note = chemically synthesized
  source 1..20: mol_type = other DNA
ccacatttacactgctgtaa

SEQ ID NO: 32894 - DNA, 20 bp, synthetic construct
  misc_feature 1..20: note = chemically synthesized
  source 1..20: mol_type = other DNA
ctcagcagtgccacaaaatc

SEQ ID NO: 32895 - DNA, 20 bp, synthetic construct
  misc_feature 1..20: note = chemically synthesized
  source 1..20: mol_type = other DNA
atgggatacttttgagtact

SEQ ID NO: 32896 - DNA, 20 bp, synthetic construct
  misc_feature 1..20: note = chemically synthesized
  source 1..20: mol_type = other DNA
tagtcattttttttttattc

SEQ ID NO: 32897 - DNA, 20 bp, synthetic construct
  misc_feature 1..20: note = chemically synthesized
  source 1..20: mol_type = other DNA
tggcatctatgatataaaaa

SEQ ID NO: 32898 - DNA, 20 bp, synthetic construct
  misc_feature 1..20: note = chemically synthesized
  source 1..20: mol_type = other DNA
tgccagttaataaaactgaa

SEQ ID NO: 32899 - DNA, 20 bp, synthetic construct
  misc_feature 1..20: note = chemically synthesized
  source 1..20: mol_type = other DNA
tttaatgaacttaaagccac

SEQ ID NO: 32900 - DNA, 20 bp, synthetic construct
  misc_feature 1..20: note = chemically synthesized
  source 1..20: mol_type = other DNA
aaatagattttaatttgagt

SEQ ID NO: 32901 - DNA, 20 bp, synthetic construct
  misc_feature 1..20: note = chemically synthesized
  source 1..20: mol_type = other DNA
atactggccaaaagataaat

SEQ ID NO: 32902 - DNA, 20 bp, synthetic construct
  misc_feature 1..20: note = chemically synthesized
  source 1..20: mol_type = other DNA
cgtaaattattgctaattaa

SEQ ID NO: 32903 - DNA, 20 bp, synthetic construct
  misc_feature 1..20: note = chemically synthesized
  source 1..20: mol_type = other DNA
acatttggctagtggtgttc

SEQ ID NO: 32904 - DNA, 20 bp, synthetic construct
  misc_feature 1..20: note = chemically synthesized
  source 1..20: mol_type = other DNA
aatcagacaaagtgggacac

SEQ ID NO: 32905 - DNA, 20 bp, synthetic construct
  misc_feature 1..20: note = chemically synthesized
  source 1..20: mol_type = other DNA
aattctctctacgaggggag

SEQ ID NO: 32906 - DNA, 20 bp, synthetic construct
  misc_feature 1..20: note = chemically synthesized
  source 1..20: mol_type = other DNA
ctctacgaggggaggaagaa

SEQ ID NO: 32907 - DNA, 20 bp, synthetic construct
  misc_feature 1..20: note = chemically synthesized
  source 1..20: mol_type = other DNA
ttcctctctgtgtagttgca

SEQ ID NO: 32908 - DNA, 20 bp, synthetic construct
  misc_feature 1..20: note = chemically synthesized
  source 1..20: mol_type = other DNA
gaaattcagagaggaaaagc

SEQ ID NO: 32909 - DNA, 20 bp, synthetic construct
  misc_feature 1..20: note = chemically synthesized
  source 1..20: mol_type = other DNA
ccccggcaagggtggaccgt

SEQ ID NO: 32910 - DNA, 20 bp, synthetic construct
  misc_feature 1..20: note = chemically synthesized
  source 1..20: mol_type = other DNA
taccaaaaatgccggccccg

SEQ ID NO: 32911 - DNA, 20 bp, synthetic construct
  misc_feature 1..20: note = chemically synthesized
  source 1..20: mol_type = other DNA
gacatacggggtgatggggg

SEQ ID NO: 32912 - DNA, 20 bp, synthetic construct
  misc_feature 1..20: note = chemically synthesized
  source 1..20: mol_type = other DNA
aaagctcgttcctccccgga

SEQ ID NO: 32913 - DNA, 20 bp, synthetic construct
  misc_feature 1..20: note = chemically synthesized
  source 1..20: mol_type = other DNA
ctcctgccccctctgagcac

SEQ ID NO: 32914 - DNA, 20 bp, synthetic construct
  misc_feature 1..20: note = chemically synthesized
  source 1..20: mol_type = other DNA
tgagcacccagaaaatgagg

SEQ ID NO: 32915 - DNA, 20 bp, synthetic construct
  misc_feature 1..20: note = chemically synthesized
  source 1..20: mol_type = other DNA
actgcatcaaaaatttaaag

SEQ ID NO: 32916 - DNA, 20 bp, synthetic construct
  misc_feature 1..20: note = chemically synthesized
  source 1..20: mol_type = other DNA
agctgtggacaagagacgtc

SEQ ID NO: 32917 - DNA, 20 bp, synthetic construct
  misc_feature 1..20: note = chemically synthesized
  source 1..20: mol_type = other DNA
gagtcaaagagaaggccgtc

SEQ ID NO: 32918 - DNA, 20 bp, synthetic construct
  misc_feature 1..20: note = chemically synthesized
  source 1..20: mol_type = other DNA
gtttggcttcggtttggggg

SEQ ID NO: 32919 - DNA, 20 bp, synthetic construct
  misc_feature 1..20: note = chemically synthesized
  source 1..20: mol_type = other DNA
cattgcattccttttcgaaa

SEQ ID NO: 32920 - DNA, 20 bp, synthetic construct
  misc_feature 1..20: note = chemically synthesized
  source 1..20: mol_type = other DNA
ctattattgggttacttacg

SEQ ID NO: 32921 - DNA, 20 bp, synthetic construct
  misc_feature 1..20: note = chemically synthesized
  source 1..20: mol_type = other DNA
ttcacatcgggagagccggg

SEQ ID NO: 32922 - DNA, 20 bp, synthetic construct
  misc_feature 1..20: note = chemically synthesized
  source 1..20: mol_type = other DNA
gttagaaagaaggagactcc

SEQ ID NO: 32923 - DNA, 20 bp, synthetic construct
  misc_feature 1..20: note = chemically synthesized
  source 1..20: mol_type = other DNA
cttttgacatccaaaataaa

SEQ ID NO: 32924 - DNA, 20 bp, synthetic construct
  misc_feature 1..20: note = chemically synthesized
  source 1..20: mol_type = other DNA
gcggtggcgtggccgggaga

SEQ ID NO: 32925 - DNA, 20 bp, synthetic construct
  misc_feature 1..20: note = chemically synthesized
  source 1..20: mol_type = other DNA
aaaatgaaagattattcaaa

SEQ ID NO: 32926 - DNA, 20 bp, synthetic construct
  misc_feature 1..20: note = chemically synthesized
  source 1..20: mol_type = other DNA
ttgcccgaggagaggacagc

SEQ ID NO: 32927 - DNA, 20 bp, synthetic construct
  misc_feature 1..20: note = chemically synthesized
  source 1..20: mol_type = other DNA
gtccccggctcctaagggtc

SEQ ID NO: 32928 - DNA, 20 bp, synthetic construct
  misc_feature 1..20: note = chemically synthesized
  source 1..20: mol_type = other DNA
gcaaaagcacagagggatgg

SEQ ID NO: 32929 - DNA, 20 bp, synthetic construct
  misc_feature 1..20: note = chemically synthesized
  source 1..20: mol_type = other DNA
ctgtgctgttacccagggaa

SEQ ID NO: 32930 - DNA, 20 bp, synthetic construct
  misc_feature 1..20: note = chemically synthesized
  source 1..20: mol_type = other DNA
cctgcgattggaaagtttat

SEQ ID NO: 32931 - DNA, 20 bp, synthetic construct
  misc_feature 1..20: note = chemically synthesized
  source 1..20: mol_type = other DNA
tggaaggagttggggggaga

SEQ ID NO: 32932 - DNA, 20 bp, synthetic construct
  misc_feature 1..20: note = chemically synthesized
  source 1..20: mol_type = other DNA
aaagtttcaagtctactgtg

SEQ ID NO: 32933 - DNA, 20 bp, synthetic construct
  misc_feature 1..20: note = chemically synthesized
  source 1..20: mol_type = other DNA
gagcttcggacccctctaag

SEQ ID NO: 32934 - DNA, 20 bp, synthetic construct
  misc_feature 1..20: note = chemically synthesized
  source 1..20: mol_type = other DNA
aaccagccttggagtcacca

SEQ ID NO: 32935 - DNA, 20 bp, synthetic construct
  misc_feature 1..20: note = chemically synthesized
  source 1..20: mol_type = other DNA
gggaaggtgaagagagggaa

SEQ ID NO: 32936 - DNA, 20 bp, synthetic construct
  misc_feature 1..20: note = chemically synthesized
  source 1..20: mol_type = other DNA
ctttgaaaaataaataaata

SEQ ID NO: 32937 - DNA, 20 bp, synthetic construct
  misc_feature 1..20: note = chemically synthesized
  source 1..20: mol_type = other DNA
atctgaaaagcttggttctg

SEQ ID NO: 32938 - DNA, 20 bp, synthetic construct
  misc_feature 1..20: note = chemically synthesized
  source 1..20: mol_type = other DNA
tgaatcctcccgcttcttaa

SEQ ID NO: 32939 - DNA, 20 bp, synthetic construct
  misc_feature 1..20: note = chemically synthesized
  source 1..20: mol_type = other DNA
ctaatttccagggaacgtct

SEQ ID NO: 32940 - DNA, 20 bp, synthetic construct
  misc_feature 1..20: note = chemically synthesized
  source 1..20: mol_type = other DNA
gaacagttgtgctctgcccg

SEQ ID NO: 32941 - DNA, 20 bp, synthetic construct
  misc_feature 1..20: note = chemically synthesized
  source 1..20: mol_type = other DNA
atgcatttttaaatttttca

SEQ ID NO: 32942 - DNA, 20 bp, synthetic construct
  misc_feature 1..20: note = chemically synthesized
  source 1..20: mol_type = other DNA
aggttgcttcccactcaccg

SEQ ID NO: 32943 - DNA, 20 bp, synthetic construct
  misc_feature 1..20: note = chemically synthesized
  source 1..20: mol_type = other DNA
gtctaaaaaacgattcccgg

SEQ ID NO: 32944 - DNA, 20 bp, synthetic construct
  misc_feature 1..20: note = chemically synthesized
  source 1..20: mol_type = other DNA
agtagtcatccccacaatag

SEQ ID NO: 32945 - DNA, 20 bp, synthetic construct
  misc_feature 1..20: note = chemically synthesized
  source 1..20: mol_type = other DNA
aaaataaataaaacaaggca

SEQ ID NO: 32946 - DNA, 20 bp, synthetic construct
  misc_feature 1..20: note = chemically synthesized
  source 1..20: mol_type = other DNA
aaaatctcacaatctctcat

SEQ ID NO: 32947 - DNA, 20 bp, synthetic construct
  misc_feature 1..20: note = chemically synthesized
  source 1..20: mol_type = other DNA
ggaaagtttggcagcaaggg

SEQ ID NO: 32948 - DNA, 20 bp, synthetic construct
  misc_feature 1..20: note = chemically synthesized
  source 1..20: mol_type = other DNA
gctaggaggcagaacaagat

SEQ ID NO: 32949 - DNA, 20 bp, synthetic construct
  misc_feature 1..20: note = chemically synthesized
  source 1..20: mol_type = other DNA
tggggggaaagaacggttag

SEQ ID NO: 32950 - DNA, 20 bp, synthetic construct
  misc_feature 1..20: note = chemically synthesized
  source 1..20: mol_type = other DNA
ccgccgcgcacacccagtgc

SEQ ID NO: 32951 - DNA, 20 bp, synthetic construct
  misc_feature 1..20: note = chemically synthesized
  source 1..20: mol_type = other DNA
aaaagtgtaagcttgtggac

SEQ ID NO: 32952 - DNA, 20 bp, synthetic construct
  misc_feature 1..20: note = chemically synthesized
  source 1..20: mol_type = other DNA
atttcttcctcccctcgtag

SEQ ID NO: 32953 - DNA, 20 bp, synthetic construct
  misc_feature 1..20: note = chemically synthesized
  source 1..20: mol_type = other DNA
gccggagtttaggccggagc

SEQ ID NO: 32954 - DNA, 20 bp, synthetic construct
  misc_feature 1..20: note = chemically synthesized
  source 1..20: mol_type = other DNA
gggaatttgcattaaaatgc

SEQ ID NO: 32955 - DNA, 20 bp, synthetic construct
  misc_feature 1..20: note = chemically synthesized
  source 1..20: mol_type = other DNA
gcagagaaattatcagatgc

SEQ ID NO: 32956 - DNA, 20 bp, synthetic construct
  misc_feature 1..20: note = chemically synthesized
  source 1..20: mol_type = other DNA
aaggaaatgttgattgccac

SEQ ID NO: 32957 - DNA, 20 bp, synthetic construct
  misc_feature 1..20: note = chemically synthesized
  source 1..20: mol_type = other DNA
caaatcagtagactacacca

SEQ ID NO: 32958 - DNA, 20 bp, synthetic construct
  misc_feature 1..20: note = chemically synthesized
  source 1..20: mol_type = other DNA
tgttaaacgtatttcataca

SEQ ID NO: 32959 - DNA, 20 bp, synthetic construct
  misc_feature 1..20: note = chemically synthesized
  source 1..20: mol_type = other DNA
caataatttacgttaagagc

SEQ ID NO: 32960 - DNA, 20 bp, synthetic construct
  misc_feature 1..20: note = chemically synthesized
  source 1..20: mol_type = other DNA
ctttaactatttgataccta

SEQ ID NO: 32961 - DNA, 20 bp, synthetic construct
  misc_feature 1..20: note = chemically synthesized
  source 1..20: mol_type = other DNA
cctaaataatattcccactt

SEQ ID NO: 32962 - DNA, 20 bp, synthetic construct
  misc_feature 1..20: note = chemically synthesized
  source 1..20: mol_type = other DNA
tgggaacaaaaaaaaaaaaa

SEQ ID NO: 32963 - DNA, 20 bp, synthetic construct
  misc_feature 1..20: note = chemically synthesized
  source 1..20: mol_type = other DNA
ttcagacaacaggaatattt

SEQ ID NO: 32964 - DNA, 20 bp, synthetic construct
  misc_feature 1..20: note = chemically synthesized
  source 1..20: mol_type = other DNA
aaatggaagcaaatgtaaga

SEQ ID NO: 32965 - DNA, 20 bp, synthetic construct
  misc_feature 1..20: note = chemically synthesized
  source 1..20: mol_type = other DNA
ttttggccagtatgttgggc

SEQ ID NO: 32966 - DNA, 20 bp, synthetic construct
  misc_feature 1..20: note = chemically synthesized
  source 1..20: mol_type = other DNA
attaggaggagtaccagagg

SEQ ID NO: 32967 - DNA, 20 bp, synthetic construct
  misc_feature 1..20: note = chemically synthesized
  source 1..20: mol_type = other DNA
taaaaaaaaaagcaaacagg

SEQ ID NO: 32968 - DNA, 20 bp, synthetic construct
  misc_feature 1..20: note = chemically synthesized
  source 1..20: mol_type = other DNA
atccgctggtgattatgtgt

SEQ ID NO: 32969 - DNA, 20 bp, synthetic construct
  misc_feature 1..20: note = chemically synthesized
  source 1..20: mol_type = other DNA
tgaagcattttggagctcat

SEQ ID NO: 32970 - DNA, 20 bp, synthetic construct
  misc_feature 1..20: note = chemically synthesized
  source 1..20: mol_type = other DNA
aggcgaagtatttcaagtct

SEQ ID NO: 32971 - DNA, 20 bp, synthetic construct
  misc_feature 1..20: note = chemically synthesized
  source 1..20: mol_type = other DNA
gccaccaagtgcaaacatgt

SEQ ID NO: 32972 - DNA, 20 bp, synthetic construct
  misc_feature 1..20: note = chemically synthesized
  source 1..20: mol_type = other DNA
tattataggcattccatttc

SEQ ID NO: 32973 - DNA, 20 bp, synthetic construct
  misc_feature 1..20: note = chemically synthesized
  source 1..20: mol_type = other DNA
tcccatttagctaatgtgtc

SEQ ID NO: 32974 - DNA, 20 bp, synthetic construct
  misc_feature 1..20: note = chemically synthesized
  source 1..20: mol_type = other DNA
tggcactgctgagagtgaga

SEQ ID NO: 32975 - DNA, 20 bp, synthetic construct
  misc_feature 1..20: note = chemically synthesized
  source 1..20: mol_type = other DNA
acaacttggtgtataggaaa

SEQ ID NO: 32976 - DNA, 20 bp, synthetic construct
  misc_feature 1..20: note = chemically synthesized
  source 1..20: mol_type = other DNA
tgggtattatatagagaagc

SEQ ID NO: 32977 - DNA, 20 bp, synthetic construct
  misc_feature 1..20: note = chemically synthesized
  source 1..20: mol_type = other DNA
aatgcaatggcagcctctgc

SEQ ID NO: 32978 - DNA, 20 bp, synthetic construct
  misc_feature 1..20: note = chemically synthesized
  source 1..20: mol_type = other DNA
agcaggtaaatgagaagcaa

SEQ ID NO: 32979 - DNA, 20 bp, synthetic construct
  misc_feature 1..20: note = chemically synthesized
  source 1..20: mol_type = other DNA
ctgttgcttacgtccagaac

SEQ ID NO: 32980 - DNA, 20 bp, synthetic construct
  misc_feature 1..20: note = chemically synthesized
  source 1..20: mol_type = other DNA
attatttctcctctccccct

SEQ ID NO: 32981 - DNA, 20 bp, synthetic construct
  misc_feature 1..20: note = chemically synthesized
  source 1..20: mol_type = other DNA
aaaacacagtgtctgtcaag

SEQ ID NO: 32982 - DNA, 20 bp, synthetic construct
  misc_feature 1..20: note = chemically synthesized
  source 1..20: mol_type = other DNA
tcaaagtgagatgtcagtaa

SEQ ID NO: 32983 - DNA, 20 bp, synthetic construct
  misc_feature 1..20: note = chemically synthesized
  source 1..20: mol_type = other DNA
atatttgaattgtgtcacaa

SEQ ID NO: 32984 - DNA, 20 bp, synthetic construct
  misc_feature 1..20: note = chemically synthesized
  source 1..20: mol_type = other DNA
gatatattgatgaatctcta

SEQ ID NO: 32985 - DNA, 20 bp, synthetic construct
  misc_feature 1..20: note = chemically synthesized
  source 1..20: mol_type = other DNA
actattttataggcaggaag

SEQ ID NO: 32986 - DNA, 20 bp, synthetic construct
  misc_feature 1..20: note = chemically synthesized
  source 1..20: mol_type = other DNA
cttcctaagataaataaagc

SEQ ID NO: 32987 - DNA, 20 bp, synthetic construct
  misc_feature 1..20: note = chemically synthesized
  source 1..20: mol_type = other DNA
gaattcgggactttcagata

SEQ ID NO: 32988 - DNA, 20 bp, synthetic construct
  misc_feature 1..20: note = chemically synthesized
  source 1..20: mol_type = other DNA
tgtgaaactgctgttccctt

SEQ ID NO: 32989 - DNA, 20 bp, synthetic construct
  misc_feature 1..20: note = chemically synthesized
  source 1..20: mol_type = other DNA
agttagctttttgagagact

SEQ ID NO: 32990 - DNA, 20 bp, synthetic construct
  misc_feature 1..20: note = chemically synthesized
  source 1..20: mol_type = other DNA
aatcaaatacaatatgcttt

SEQ ID NO: 32991 - DNA, 20 bp, synthetic construct
  misc_feature 1..20: note = chemically synthesized
  source 1..20: mol_type = other DNA
tacaatatgcttttcagaat

SEQ ID NO: 32992 - DNA, 20 bp, synthetic construct
  misc_feature 1..20: note = chemically synthesized
  source 1..20: mol_type = other DNA
accttcaaaatccagagagt

SEQ ID NO: 32993 - DNA, 20 bp, synthetic construct
  misc_feature 1..20: note = chemically synthesized
  source 1..20: mol_type = other DNA
gctgtatttgtaaataagac

SEQ ID NO: 32994 - DNA, 20 bp, synthetic construct
  misc_feature 1..20: note = chemically synthesized
  source 1..20: mol_type = other DNA
ttttgtcaaagtacaatgtc

SEQ ID NO: 32995 - DNA, 20 bp, synthetic construct
  misc_feature 1..20: note = chemically synthesized
  source 1..20: mol_type = other DNA
gacattacccttgtggtgac

SEQ ID NO: 32996 - DNA, 20 bp, synthetic construct
  misc_feature 1..20: note = chemically synthesized
  source 1..20: mol_type = other DNA
atcttttataaataatgttt

SEQ ID NO: 32997 - DNA, 20 bp, synthetic construct
  misc_feature 1..20: note = chemically synthesized
  source 1..20: mol_type = other DNA
gctggaaaatgcaactgggt

SEQ ID NO: 32998 - DNA, 20 bp, synthetic construct
  misc_feature 1..20: note = chemically synthesized
  source 1..20: mol_type = other DNA
caatgaaaatgtttaataaa

SEQ ID NO: 32999 - DNA, 20 bp, synthetic construct
  misc_feature 1..20: note = chemically synthesized
  source 1..20: mol_type = other DNA
tggctttgcgtgctggtcag

SEQ ID NO: 33000 - DNA, 20 bp, synthetic construct
  misc_feature 1..20: note = chemically synthesized
  source 1..20: mol_type = other DNA
aaatattaaatttaaccgaa

SEQ ID NO: 33001 - DNA, 20 bp, synthetic construct
  misc_feature 1..20: note = chemically synthesized
  source 1..20: mol_type = other DNA
aggaaatgtaacctgacaaa

SEQ ID NO: 33002 - DNA, 20 bp, synthetic construct
  misc_feature 1..20: note = chemically synthesized
  source 1..20: mol_type = other DNA
tgccacctcccaattcacca

SEQ ID NO: 33003 - DNA, 20 bp, synthetic construct
  misc_feature 1..20: note = chemically synthesized
  source 1..20: mol_type = other DNA
ttttttgcatgtgctggtat

SEQ ID NO: 33004 - DNA, 20 bp, synthetic construct
  misc_feature 1..20: note = chemically synthesized
  source 1..20: mol_type = other DNA
ttttataatgtgttccttta

SEQ ID NO: 33005 - DNA, 20 bp, synthetic construct
  misc_feature 1..20: note = chemically synthesized
  source 1..20: mol_type = other DNA
ggtagatccacaaaacgtat

SEQ ID NO: 33006 - DNA, 20 bp, synthetic construct
  misc_feature 1..20: note = chemically synthesized
  source 1..20: mol_type = other DNA
gaactgaatcagtctctgcc

SEQ ID NO: 33007 - DNA, 20 bp, synthetic construct
  misc_feature 1..20: note = chemically synthesized
  source 1..20: mol_type = other DNA
ttaaaaactcccattaaaat

SEQ ID NO: 33008 - DNA, 20 bp, synthetic construct
  misc_feature 1..20: note = chemically synthesized
  source 1..20: mol_type = other DNA
acctgcaagggtgccttcaa

SEQ ID NO: 33009 - DNA, 20 bp, synthetic construct
  misc_feature 1..20: note = chemically synthesized
  source 1..20: mol_type = other DNA
aaaactgaacattggctact

SEQ ID NO: 33010 - DNA, 20 bp, synthetic construct
  misc_feature 1..20: note = chemically synthesized
  source 1..20: mol_type = other DNA
ttatgtttttgttatgttaa

SEQ ID NO: 33011 - DNA, 20 bp, synthetic construct
  misc_feature 1..20: note = chemically synthesized
  source 1..20: mol_type = other DNA
tggagctgtgtgactggtag

SEQ ID NO: 33012 - DNA, 20 bp, synthetic construct
  misc_feature 1..20: note = chemically synthesized
  source 1..20: mol_type = other DNA
gctgtgtgactggtagcaag

SEQ ID NO: 33013 - DNA, 20 bp, synthetic construct
  misc_feature 1..20: note = chemically synthesized
  source 1..20: mol_type = other DNA
gggcccaaggataagagagt

SEQ ID NO: 33014 - DNA, 20 bp, synthetic construct
  misc_feature 1..20: note = chemically synthesized
  source 1..20: mol_type = other DNA
ttccggtaagatcaactcta

SEQ ID NO: 33015 - DNA, 20 bp, synthetic construct
  misc_feature 1..20: note = chemically synthesized
  source 1..20: mol_type = other DNA
gttcattgggaattctgtca

SEQ ID NO: 33016 - DNA, 20 bp, synthetic construct
  misc_feature 1..20: note = chemically synthesized
  source 1..20: mol_type = other DNA
ctggtgccgaatggaggaaa

SEQ ID NO: 33017 - DNA, 20 bp, synthetic construct
  misc_feature 1..20: note = chemically synthesized
  source 1..20: mol_type = other DNA
ttgctggtttccctttggaa

SEQ ID NO: 33018 - DNA, 20 bp, synthetic construct
  misc_feature 1..20: note = chemically synthesized
  source 1..20: mol_type = other DNA
aaaaaatgaggaaatcatag

SEQ ID NO: 33019 - DNA, 20 bp, synthetic construct
  misc_feature 1..20: note = chemically synthesized
  source 1..20: mol_type = other DNA
tggcctgtcagcctgctgaa

SEQ ID NO: 33020 - DNA, 20 bp, synthetic construct
  misc_feature 1..20: note = chemically synthesized
  source 1..20: mol_type = other DNA
tctcctcctcagatgcccca

SEQ ID NO: 33021 - DNA, 20 bp, synthetic construct
  misc_feature 1..20: note = chemically synthesized
  source 1..20: mol_type = other DNA
tgaggcacttccagatacat

SEQ ID NO: 33022 - DNA, 20 bp, synthetic construct
  misc_feature 1..20: note = chemically synthesized
  source 1..20: mol_type = other DNA
agtttatcactggttaacaa

SEQ ID NO: 33023 - DNA, 20 bp, synthetic construct
  misc_feature 1..20: note = chemically synthesized
  source 1..20: mol_type = other DNA
attaaaacgaatgtttaatg

SEQ ID NO: 33024 - DNA, 20 bp, synthetic construct
  misc_feature 1..20: note = chemically synthesized
  source 1..20: mol_type = other DNA
gatggaaaatgaacagtgtg

SEQ ID NO: 33025 - DNA, 20 bp, synthetic construct
  misc_feature 1..20: note = chemically synthesized
  source 1..20: mol_type = other DNA
tgtggggctgagtgggcagt

SEQ ID NO: 33026 - DNA, 20 bp, synthetic construct
  misc_feature 1..20: note = chemically synthesized
  source 1..20: mol_type = other DNA
tattcagctgacccggtatt

SEQ ID NO: 33027 - DNA, 20 bp, synthetic construct
  misc_feature 1..20: note = chemically synthesized
  source 1..20: mol_type = other DNA
tctctctcccccaaacttta

SEQ ID NO: 33028 - DNA, 20 bp, synthetic construct
  misc_feature 1..20: note = chemically synthesized
  source 1..20: mol_type = other DNA
tgacacagccctagaagcag

SEQ ID NO: 33029 - DNA, 20 bp, synthetic construct
  misc_feature 1..20: note = chemically synthesized
  source 1..20: mol_type = other DNA
agggtagattgttatataat

SEQ ID NO: 33030 - DNA, 20 bp, synthetic construct
  misc_feature 1..20: note = chemically synthesized
  source 1..20: mol_type = other DNA
caggaagtaaataaaaagta

SEQ ID NO: 33031 - DNA, 20 bp, synthetic construct
  misc_feature 1..20: note = chemically synthesized
  source 1..20: mol_type = other DNA
tacttaaagggagtggaggg

SEQ ID NO: 33032 - DNA, 20 bp, synthetic construct
  misc_feature 1..20: note = chemically synthesized
  source 1..20: mol_type = other DNA
ggcccagaagctgtctttct

SEQ ID NO: 33033 - DNA, 20 bp, synthetic construct
  misc_feature 1..20: note = chemically synthesized
  source 1..20: mol_type = other DNA
taacgccaccaccaccaaaa

SEQ ID NO: 33034 - DNA, 20 bp, synthetic construct
  misc_feature 1..20: note = chemically synthesized
  source 1..20: mol_type = other DNA
tttttaaaaaactggaaatg

SEQ ID NO: 33035 - DNA, 20 bp, synthetic construct
  misc_feature 1..20: note = chemically synthesized
  source 1..20: mol_type = other DNA
gattactgggggtacagtga

SEQ ID NO: 33036 - DNA, 20 bp, synthetic construct
  misc_feature 1..20: note = chemically synthesized
  source 1..20: mol_type = other DNA
cgtcgggcaacacagaggga

SEQ ID NO: 33037 - DNA, 20 bp, synthetic construct
  misc_feature 1..20: note = chemically synthesized
  source 1..20: mol_type = other DNA
tctgctccggagaaggtggt

SEQ ID NO: 33038 - DNA, 20 bp, synthetic construct
  misc_feature 1..20: note = chemically synthesized
  source 1..20: mol_type = other DNA
tagccagactggtttagcag

SEQ ID NO: 33039 - DNA, 20 bp, synthetic construct
  misc_feature 1..20: note = chemically synthesized
  source 1..20: mol_type = other DNA
aagcactttgtttatcttga

SEQ ID NO: 33040 - DNA, 20 bp, synthetic construct
  misc_feature 1..20: note = chemically synthesized
  source 1..20: mol_type = other DNA
ggcgtgcctgcgtgtgcagg

SEQ ID NO: 33041 - DNA, 20 bp, synthetic construct
  misc_feature 1..20: note = chemically synthesized
  source 1..20: mol_type = other DNA
aggaaggctcaaggaaggct

SEQ ID NO: 33042 - DNA, 20 bp, synthetic construct
  misc_feature 1..20: note = chemically synthesized
  source 1..20: mol_type = other DNA
ctggggctaaagctgggttc

SEQ ID NO: 33043 - DNA, 20 bp, synthetic construct
  misc_feature 1..20: note = chemically synthesized
  source 1..20: mol_type = other DNA
gtctttgtaacctgagctgg

SEQ ID NO: 33044 - DNA, 20 bp, synthetic construct
  misc_feature 1..20: note = chemically synthesized
  source 1..20: mol_type = other DNA
tggtaagaaagggaggaggg

SEQ ID NO: 33045 - DNA, 20 bp, synthetic construct
  misc_feature 1..20: note = chemically synthesized
  source 1..20: mol_type = other DNA
ttcctcaatctgtaaagtgg

SEQ ID NO: 33046 - DNA, 20 bp, synthetic construct
  misc_feature 1..20: note = chemically synthesized
  source 1..20: mol_type = other DNA
tcgctccgggggctgcacct

SEQ ID NO: 33047 - DNA, 20 bp, synthetic construct
  misc_feature 1..20: note = chemically synthesized
  source 1..20: mol_type = other DNA
tttcaatcttctgggaaaga

SEQ ID NO: 33048 - DNA, 20 bp, synthetic construct
  misc_feature 1..20: note = chemically synthesized
  source 1..20: mol_type = other DNA
gtagtcatttccccatctgt

SEQ ID NO: 33049 - DNA, 20 bp, synthetic construct
  misc_feature 1..20: note = chemically synthesized
  source 1..20: mol_type = other DNA
ctgaaatcaagtgagggtcc

SEQ ID NO: 33050 - DNA, 20 bp, synthetic construct
  misc_feature 1..20: note = chemically synthesized
  source 1..20: mol_type = other DNA
ggagactgcagtgggctgaa

SEQ ID NO: 33051 - DNA, 20 bp, synthetic construct
  misc_feature 1..20: note = chemically synthesized
  source 1..20: mol_type = other DNA
atcgtaccttcaaaggctgg

SEQ ID NO: 33052 - DNA, 20 bp, synthetic construct
  misc_feature 1..20: note = chemically synthesized
  source 1..20: mol_type = other DNA
ccttcaaaggctggggagaa

SEQ ID NO: 33053 - DNA, 20 bp, synthetic construct
  misc_feature 1..20: note = chemically synthesized
  source 1..20: mol_type = other DNA
gctaacatagacctccactg

SEQ ID NO: 33054 - DNA, 20 bp, synthetic construct
  misc_feature 1..20: note = chemically synthesized
  source 1..20: mol_type = other DNA
agacctccactgagagaatt

SEQ ID NO: 33055 - DNA, 20 bp, synthetic construct
  misc_feature 1..20: note = chemically synthesized
  source 1..20: mol_type = other DNA
ggtgggatggaggtggctgc

SEQ ID NO: 33056 - DNA, 20 bp, synthetic construct
  misc_feature 1..20: note = chemically synthesized
  source 1..20: mol_type = other DNA
gtgctaagtagttccccgct

SEQ ID NO: 33057 - DNA, 20 bp, synthetic construct
  misc_feature 1..20: note = chemically synthesized
  source 1..20: mol_type = other DNA
ctatttaaaaatcttttggg

SEQ ID NO: 33058 - DNA, 20 bp, synthetic construct
  misc_feature 1..20: note = chemically synthesized
  source 1..20: mol_type = other DNA
ttttgcagaagttcagggtg

SEQ ID NO: 33059 - DNA, 20 bp, synthetic construct
  misc_feature 1..20: note = chemically synthesized
  source 1..20: mol_type = other DNA
aaaccatgcctgttttatat

SEQ ID NO: 33060 - DNA, 20 bp, synthetic construct
  misc_feature 1..20: note = chemically synthesized
  source 1..20: mol_type = other DNA
tagaaagtgaaatcattgtt

SEQ ID NO: 33061 - DNA, 20 bp, synthetic construct
  misc_feature 1..20: note = chemically synthesized
  source 1..20: mol_type = other DNA
atagaaaaaacctactgtgg

SEQ ID NO: 33062 - DNA, 20 bp, synthetic construct
  misc_feature 1..20: note = chemically synthesized
  source 1..20: mol_type = other DNA
agccctgctgccatcctcta

SEQ ID NO: 33063 - DNA, 20 bp, synthetic construct
  misc_feature 1..20: note = chemically synthesized
  source 1..20: mol_type = other DNA
tacccttctgtgaaagccat

SEQ ID NO: 33064 - DNA, 20 bp, synthetic construct
  misc_feature 1..20: note = chemically synthesized
  source 1..20: mol_type = other DNA
ggggctcacctgcaaagaca

SEQ ID NO: 33065 - DNA, 20 bp, synthetic construct
  misc_feature 1..20: note = chemically synthesized
  source 1..20: mol_type = other DNA
cttggattcgtgattcccca

SEQ ID NO: 33066 - DNA, 20 bp, synthetic construct
  misc_feature 1..20: note = chemically synthesized
  source 1..20: mol_type = other DNA
tgttttttttgaaaaactcc

SEQ ID NO: 33067 - DNA, 20 bp, synthetic construct
  misc_feature 1..20: note = chemically synthesized
  source 1..20: mol_type = other DNA
aatagaagtacgtttttgaa

SEQ ID NO: 33068 - DNA, 20 bp, synthetic construct
  misc_feature 1..20: note = chemically synthesized
  source 1..20: mol_type = other DNA
caaaataaaatcttaaaaaa

SEQ ID NO: 33069 - DNA, 20 bp, synthetic construct
  misc_feature 1..20: note = chemically synthesized
  source 1..20: mol_type = other DNA
aaatcttaaaaaacaagaaa

SEQ ID NO: 33070 - DNA, 20 bp, synthetic construct
  misc_feature 1..20: note = chemically synthesized
  source 1..20: mol_type = other DNA
agttgtgtgcctgtgtgtgt

SEQ ID NO: 33071 - DNA, 20 bp, synthetic construct
  misc_feature 1..20: note = chemically synthesized
  source 1..20: mol_type = other DNA
gtgtgtagaaagggagagag

SEQ ID NO: 33072 - DNA, 20 bp, synthetic construct
  misc_feature 1..20: note = chemically synthesized
  source 1..20: mol_type = other DNA
gagagagaataggaaagtct

SEQ ID NO: 33073 - DNA, 20 bp, synthetic construct
  misc_feature 1..20: note = chemically synthesized
  source 1..20: mol_type = other DNA
agtttttgaaagctatccat

SEQ ID NO: 33074 - DNA, 20 bp, synthetic construct
  misc_feature 1..20: note = chemically synthesized
  source 1..20: mol_type = other DNA
cttttacccacagagtctac

SEQ ID NO: 33075 - DNA, 20 bp, synthetic construct
  misc_feature 1..20: note = chemically synthesized
  source 1..20: mol_type = other DNA
tggttttgcagttgtattta

SEQ ID NO: 33076 - DNA, 20 bp, synthetic construct
  misc_feature 1..20: note = chemically synthesized
  source 1..20: mol_type = other DNA
ggcgatagggttacagaaga

SEQ ID NO: 33077 - DNA, 20 bp, synthetic construct
  misc_feature 1..20: note = chemically synthesized
  source 1..20: mol_type = other DNA
ttgtagtatttgagattttt

SEQ ID NO: 33078 - DNA, 20 bp, synthetic construct
  misc_feature 1..20: note = chemically synthesized
  source 1..20: mol_type = other DNA
ggggacaagtgtcctatggg

SEQ ID NO: 33079 - DNA, 20 bp, synthetic construct
  misc_feature 1..20: note = chemically synthesized
  source 1..20: mol_type = other DNA
ccatttgagccctggctatt

SEQ ID NO: 33080 - DNA, 20 bp, synthetic construct
  misc_feature 1..20: note = chemically synthesized
  source 1..20: mol_type = other DNA
agaggagattgaccacactc

SEQ ID NO: 33081 - DNA, 20 bp, synthetic construct
  misc_feature 1..20: note = chemically synthesized
  source 1..20: mol_type = other DNA
gacaatggaaggcagctgtt

SEQ ID NO: 33082 - DNA, 20 bp, synthetic construct
  misc_feature 1..20: note = chemically synthesized
  source 1..20: mol_type = other DNA
tgatctgatgggtggtatag

SEQ ID NO: 33083 - DNA, 20 bp, synthetic construct
  misc_feature 1..20: note = chemically synthesized
  source 1..20: mol_type = other DNA
ggccacttatttaattttcc

SEQ ID NO: 33084 - DNA, 20 bp, synthetic construct
  misc_feature 1..20: note = chemically synthesized
  source 1..20: mol_type = other DNA
tgatttcaggtcctcagact

SEQ ID NO: 33085 - DNA, 20 bp, synthetic construct
  misc_feature 1..20: note = chemically synthesized
  source 1..20: mol_type = other DNA
ctttctgaatttttcaattt

SEQ ID NO: 33086 - DNA, 20 bp, synthetic construct
  misc_feature 1..20: note = chemically synthesized
  source 1..20: mol_type = other DNA
attctcctgccagagagagg

SEQ ID NO: 33087 - DNA, 20 bp, synthetic construct
  misc_feature 1..20: note = chemically synthesized
  source 1..20: mol_type = other DNA
ttttaacactccaagtctag

SEQ ID NO: 33088 - DNA, 20 bp, synthetic construct
  misc_feature 1..20: note = chemically synthesized
  source 1..20: mol_type = other DNA
tttgtcattggagtaattta

SEQ ID NO: 33089 - DNA, 20 bp, synthetic construct
  misc_feature 1..20: note = chemically synthesized
  source 1..20: mol_type = other DNA
gtgtcagaacagaactggcc

SEQ ID NO: 33090 - DNA, 20 bp, synthetic construct
  misc_feature 1..20: note = chemically synthesized
  source 1..20: mol_type = other DNA
tgtctctcaatatggaggtt

SEQ ID NO: 33091 - DNA, 20 bp, synthetic construct
  misc_feature 1..20: note = chemically synthesized
  source 1..20: mol_type = other DNA
aggggttcctggtgtacttg

SEQ ID NO: 33092 - DNA, 20 bp, synthetic construct
  misc_feature 1..20: note = chemically synthesized
  source 1..20: mol_type = other DNA
ttcaggacccaccttgaatg

SEQ ID NO: 33093 - DNA, 20 bp, synthetic construct
  misc_feature 1..20: note = chemically synthesized
  source 1..20: mol_type = other DNA
agagtttctgaggaatcata

SEQ ID NO: 33094 - DNA, 20 bp, synthetic construct
  misc_feature 1..20: note = chemically synthesized
  source 1..20: mol_type = other DNA
taaccctgtcattttacaga

SEQ ID NO: 33095 - DNA, 20 bp, synthetic construct
  misc_feature 1..20: note = chemically synthesized
  source 1..20: mol_type = other DNA
ccaatcacctgtgctgttgc

SEQ ID NO: 33096 - DNA, 20 bp, synthetic construct
  misc_feature 1..20: note = chemically synthesized
  source 1..20: mol_type = other DNA
tctcaggggcagatggccct

SEQ ID NO: 33097 - DNA, 20 bp, synthetic construct
  misc_feature 1..20: note = chemically synthesized
  source 1..20: mol_type = other DNA
tattgtttctatgcctctct

SEQ ID NO: 33098 - DNA, 20 bp, synthetic construct
  misc_feature 1..20: note = chemically synthesized
  source 1..20: mol_type = other DNA
agtgacgacttcatggaggc

SEQ ID NO: 33099 - DNA, 20 bp, synthetic construct
  misc_feature 1..20: note = chemically synthesized
  source 1..20: mol_type = other DNA
gtgttggcccagcggtgccc

SEQ ID NO: 33100 - DNA, 20 bp, synthetic construct
  misc_feature 1..20: note = chemically synthesized
  source 1..20: mol_type = other DNA
cctgggagctcaagtcaggg

SEQ ID NO: 33101 - DNA, 20 bp, synthetic construct
  misc_feature 1..20: note = chemically synthesized
  source 1..20: mol_type = other DNA
ctcacgctgcttgattgaac

SEQ ID NO: 33102 - DNA, 20 bp, synthetic construct
  misc_feature 1..20: note = chemically synthesized
  source 1..20: mol_type = other DNA
atttcccccttcctccctgg

SEQ ID NO: 33103 - DNA, 20 bp, synthetic construct
  misc_feature 1..20: note = chemically synthesized
  source 1..20: mol_type = other DNA
cacaactctgatttttttcc

SEQ ID NO: 33104 - DNA, 20 bp, synthetic construct
  misc_feature 1..20: note = chemically synthesized
  source 1..20: mol_type = other DNA
tctccaagtcttgggactgc

SEQ ID NO: 33105 - DNA, 20 bp, synthetic construct
  misc_feature 1..20: note = chemically synthesized
  source 1..20: mol_type = other DNA
ggatttaggactgtgaacct

SEQ ID NO: 33106 - DNA, 20 bp, synthetic construct
  misc_feature 1..20: note = chemically synthesized
  source 1..20: mol_type = other DNA
gagaattcaaagtagtggaa

SEQ ID NO: 33107 - DNA, 20 bp, synthetic construct
  misc_feature 1..20: note = chemically synthesized
  source 1..20: mol_type = other DNA
gaggtgcctgtctggaaggc

SEQ ID NO: 33108 - DNA, 20 bp, synthetic construct
  misc_feature 1..20: note = chemically synthesized
  source 1..20: mol_type = other DNA
ggggaagagccgctcaaaga

SEQ ID NO: 33109 - DNA, 20 bp, synthetic construct
  misc_feature 1..20: note = chemically synthesized
  source 1..20: mol_type = other DNA
ttgctctgtgtgttcatttt

SEQ ID NO: 33110 - DNA, 20 bp, synthetic construct
  misc_feature 1..20: note = chemically synthesized
  source 1..20: mol_type = other DNA
ctcatacttgagacactaaa

SEQ ID NO: 33111 - DNA, 20 bp, synthetic construct
  misc_feature 1..20: note = chemically synthesized
  source 1..20: mol_type = other DNA
tcattttactgatttatttg

SEQ ID NO: 33112 - DNA, 20 bp, synthetic construct
  misc_feature 1..20: note = chemically synthesized
  source 1..20: mol_type = other DNA
tccctccaacccttgccttc

SEQ ID NO: 33113 - DNA, 20 bp, synthetic construct
  misc_feature 1..20: note = chemically synthesized
  source 1..20: mol_type = other DNA
cagagtgttgaaagcttgga

SEQ ID NO: 33114 - DNA, 20 bp, synthetic construct
  misc_feature 1..20: note = chemically synthesized
  source 1..20: mol_type = other DNA
gaaggaaaaaaaaagaactg

SEQ ID NO: 33115 - DNA, 20 bp, synthetic construct
  misc_feature 1..20: note = chemically synthesized
  source 1..20: mol_type = other DNA
acggaaaagagtggagtcac

SEQ ID NO: 33116 - DNA, 20 bp, synthetic construct
  misc_feature 1..20: note = chemically synthesized
  source 1..20: mol_type = other DNA
agtgcccctgccaggaggag

SEQ ID NO: 33117 - DNA, 20 bp, synthetic construct
  misc_feature 1..20: note = chemically synthesized
  source 1..20: mol_type = other DNA
gaggagggagaatctgaaag

SEQ ID NO: 33118 - DNA, 20 bp, synthetic construct
  misc_feature 1..20: note = chemically synthesized
  source 1..20: mol_type = other DNA
aacggttcttggtgttgggc

SEQ ID NO: 33119 - DNA, 20 bp, synthetic construct
  misc_feature 1..20: note = chemically synthesized
  source 1..20: mol_type = other DNA
agaggtgaggaagttggcca

SEQ ID NO: 33120 - DNA, 20 bp, synthetic construct
  misc_feature 1..20: note = chemically synthesized
  source 1..20: mol_type = other DNA
aatgtgtggctcggtgactg

SEQ ID NO: 33121 - DNA, 20 bp, synthetic construct
  misc_feature 1..20: note = chemically synthesized
  source 1..20: mol_type = other DNA
gtggctcggtgactgggaga

SEQ ID NO: 33122 - DNA, 20 bp, synthetic construct
  misc_feature 1..20: note = chemically synthesized
  source 1..20: mol_type = other DNA
ttgctgtttattgggatggg

SEQ ID NO: 33123 - DNA, 20 bp, synthetic construct
  misc_feature 1..20: note = chemically synthesized
  source 1..20: mol_type = other DNA
agacaacttgatcttttgat

SEQ ID NO: 33124 - DNA, 20 bp, synthetic construct
  misc_feature 1..20: note = chemically synthesized
  source 1..20: mol_type = other DNA
cctgtgatttcggagtctga

SEQ ID NO: 33125 - DNA, 20 bp, synthetic construct
  misc_feature 1..20: note = chemically synthesized
  source 1..20: mol_type = other DNA
ggtagacagtgctgggcctg

SEQ ID NO: 33126 - DNA, 20 bp, synthetic construct
  misc_feature 1..20: note = chemically synthesized
  source 1..20: mol_type = other DNA
ctcaactacttttgtttgtg

SEQ ID NO: 33127 - DNA, 20 bp, synthetic construct
  misc_feature 1..20: note = chemically synthesized
  source 1..20: mol_type = other DNA
gcagtaagcaccatgacatg

SEQ ID NO: 33128 - DNA, 20 bp, synthetic construct
  misc_feature 1..20: note = chemically synthesized
  source 1..20: mol_type = other DNA
gaccatatgattttaaagct

SEQ ID NO: 33129 - DNA, 20 bp, synthetic construct
  misc_feature 1..20: note = chemically synthesized
  source 1..20: mol_type = other DNA
tttttttttgttcttttgct

SEQ ID NO: 33130 - DNA, 20 bp, synthetic construct
  misc_feature 1..20: note = chemically synthesized
  source 1..20: mol_type = other DNA
ccacatttctgccatatgtc

SEQ ID NO: 33131 - DNA, 20 bp, synthetic construct
  misc_feature 1..20: note = chemically synthesized
  source 1..20: mol_type = other DNA
gacacagttttctagctttt

SEQ ID NO: 33132 - DNA, 20 bp, synthetic construct
  misc_feature 1..20: note = chemically synthesized
  source 1..20: mol_type = other DNA
gacattatttgaggttgctg

SEQ ID NO: 33133 - DNA, 20 bp, synthetic construct
  misc_feature 1..20: note = chemically synthesized
  source 1..20: mol_type = other DNA
ttttccaggggtttgacaga

SEQ ID NO: 33134 - DNA, 20 bp, synthetic construct
  misc_feature 1..20: note = chemically synthesized
  source 1..20: mol_type = other DNA
tgactcttcctctgatgcag

SEQ ID NO: 33135 - DNA, 20 bp, synthetic construct
  misc_feature 1..20: note = chemically synthesized
  source 1..20: mol_type = other DNA
tgcctcccctccatgccctc

SEQ ID NO: 33136 - DNA, 20 bp, synthetic construct
  misc_feature 1..20: note = chemically synthesized
  source 1..20: mol_type = other DNA
caggcatttggaacaatctg

SEQ ID NO: 33137 - DNA, 20 bp, synthetic construct
  misc_feature 1..20: note = chemically synthesized
  source 1..20: mol_type = other DNA
agtaaccctgtgaagaggca

SEQ ID NO: 33138 - DNA, 20 bp, synthetic construct
  misc_feature 1..20: note = chemically synthesized
  source 1..20: mol_type = other DNA
ggcattgtccctaagcacca

SEQ ID NO: 33139 - DNA, 20 bp, synthetic construct
  misc_feature 1..20: note = chemically synthesized
  source 1..20: mol_type = other DNA
gggtgaaatcttgcagtgac

SEQ ID NO: 33140 - DNA, 20 bp, synthetic construct
  misc_feature 1..20: note = chemically synthesized
  source 1..20: mol_type = other DNA
agtggtactcttcagagttc

SEQ ID NO: 33141 - DNA, 20 bp, synthetic construct
  misc_feature 1..20: note = chemically synthesized
  source 1..20: mol_type = other DNA
tttcttgctttctttttttt

SEQ ID NO: 33142 - DNA, 20 bp, synthetic construct
  misc_feature 1..20: note = chemically synthesized
  source 1..20: mol_type = other DNA
ataaagctctgacaaaagat

SEQ ID NO: 33143 - DNA, 20 bp, synthetic construct
  misc_feature 1..20: note = chemically synthesized
  source 1..20: mol_type = other DNA
ataggtggaggagagggtcc

SEQ ID NO: 33144 - DNA, 20 bp, synthetic construct
  misc_feature 1..20: note = chemically synthesized
  source 1..20: mol_type = other DNA
ggtcagagcctcctgaggct

SEQ ID NO: 33145 - DNA, 20 bp, synthetic construct
  misc_feature 1..20: note = chemically synthesized
  source 1..20: mol_type = other DNA
aggaggtgtttggacaagag

SEQ ID NO: 33146 - DNA, 20 bp, synthetic construct
  misc_feature 1..20: note = chemically synthesized
  source 1..20: mol_type = other DNA
atagtttctgggtgacagga

SEQ ID NO: 33147 - DNA, 20 bp, synthetic construct
  misc_feature 1..20: note = chemically synthesized
  source 1..20: mol_type = other DNA
cttaaattcatattttaata

SEQ ID NO: 33148 - DNA, 20 bp, synthetic construct
  misc_feature 1..20: note = chemically synthesized
  source 1..20: mol_type = other DNA
taggagcaatacctgagatc

SEQ ID NO: 33149 - DNA, 20 bp, synthetic construct
  misc_feature 1..20: note = chemically synthesized
  source 1..20: mol_type = other DNA
agagctcaaatctgtgctag

SEQ ID NO: 33150 - DNA, 20 bp, synthetic construct
  misc_feature 1..20: note = chemically synthesized
  source 1..20: mol_type = other DNA
gtttatttttccgtttgctc

SEQ ID NO: 33151 - DNA, 20 bp, synthetic construct
  misc_feature 1..20: note = chemically synthesized
  source 1..20: mol_type = other DNA
cctagtgcaacacaagttgt

SEQ ID NO: 33152 - DNA, 20 bp, synthetic construct
  misc_feature 1..20: note = chemically synthesized
  source 1..20: mol_type = other DNA
gtgcaacacaagttgtgtag

SEQ ID NO: 33153 - DNA, 20 bp, synthetic construct
  misc_feature 1..20: note = chemically synthesized
  source 1..20: mol_type = other DNA
ataattcactagtaaaataa

SEQ ID NO: 33154 - DNA, 20 bp, synthetic construct
  misc_feature 1..20: note = chemically synthesized
  source 1..20: mol_type = other DNA
agaggggctgatataacttc

SEQ ID NO: 33155 - DNA, 20 bp, synthetic construct
  misc_feature 1..20: note = chemically synthesized
  source 1..20: mol_type = other DNA
gatgagcacactgctgtaat

SEQ ID NO: 33156 - DNA, 20 bp, synthetic construct
  misc_feature 1..20: note = chemically synthesized
  source 1..20: mol_type = other DNA
gagaccagcctgaccaacat

SEQ ID NO: 33157 - DNA, 20 bp, synthetic construct
  misc_feature 1..20: note = chemically synthesized
  source 1..20: mol_type = other DNA
ctactcaggaggctgaggga

SEQ ID NO: 33158 - DNA, 20 bp, synthetic construct
  misc_feature 1..20: note = chemically synthesized
  source 1..20: mol_type = other DNA
tcaaaaaaaaaaaaaaaaaa

SEQ ID NO: 33159 - DNA, 20 bp, synthetic construct
  misc_feature 1..20: note = chemically synthesized
  source 1..20: mol_type = other DNA
ttggctgccattgaatcaaa

SEQ ID NO: 33160 - DNA, 20 bp, synthetic construct
  misc_feature 1..20: note = chemically synthesized
  source 1..20: mol_type = other DNA
ggatgtttaccaacaacttt

SEQ ID NO: 33161 - DNA, 20 bp, synthetic construct
  misc_feature 1..20: note = chemically synthesized
  source 1..20: mol_type = other DNA
acagaggaggatgcagcgac

SEQ ID NO: 33162 - DNA, 20 bp, synthetic construct
  misc_feature 1..20: note = chemically synthesized
  source 1..20: mol_type = other DNA
atcatacacattttaccagt

SEQ ID NO: 33163 - DNA, 20 bp, synthetic construct
  misc_feature 1..20: note = chemically synthesized
  source 1..20: mol_type = other DNA
gcccgtggcaaacactgtct

SEQ ID NO: 33164 - DNA, 20 bp, synthetic construct
  misc_feature 1..20: note = chemically synthesized
  source 1..20: mol_type = other DNA
atttccttttttgcccctgg

SEQ ID NO: 33165 - DNA, 20 bp, synthetic construct
  misc_feature 1..20: note = chemically synthesized
  source 1..20: mol_type = other DNA
aaatatcacttagaggagtt

SEQ ID NO: 33166 - DNA, 20 bp, synthetic construct
  misc_feature 1..20: note = chemically synthesized
  source 1..20: mol_type = other DNA
ccagagaagataatggcagc

SEQ ID NO: 33167 - DNA, 20 bp, synthetic construct
  misc_feature 1..20: note = chemically synthesized
  source 1..20: mol_type = other DNA
acacattgtagggtgatctc

SEQ ID NO: 33168 - DNA, 20 bp, synthetic construct
  misc_feature 1..20: note = chemically synthesized
  source 1..20: mol_type = other DNA
tgatctcccagaaaagccag

SEQ ID NO: 33169 - DNA, 20 bp, synthetic construct
  misc_feature 1..20: note = chemically synthesized
  source 1..20: mol_type = other DNA
ctttggatgcctgtgtgggg

SEQ ID NO: 33170 - DNA, 20 bp, synthetic construct
  misc_feature 1..20: note = chemically synthesized
  source 1..20: mol_type = other DNA
tcagtggaatggaaaatgaa

SEQ ID NO: 33171 - DNA, 20 bp, synthetic construct
  misc_feature 1..20: note = chemically synthesized
  source 1..20: mol_type = other DNA
ctactggatcatcagcaaag

SEQ ID NO: 33172 - DNA, 20 bp, synthetic construct
  misc_feature 1..20: note = chemically synthesized
  source 1..20: mol_type = other DNA
ctatagtaaggtgatagttc

SEQ ID NO: 33173 - DNA, 20 bp, synthetic construct
  misc_feature 1..20: note = chemically synthesized
  source 1..20: mol_type = other DNA
ctgcatggaaggactttgct

SEQ ID NO: 33174 - DNA, 20 bp, synthetic construct
  misc_feature 1..20: note = chemically synthesized
  source 1..20: mol_type = other DNA
gggatgctagctaaagggaa

SEQ ID NO: 33175 - DNA, 20 bp, synthetic construct
  misc_feature 1..20: note = chemically synthesized
  source 1..20: mol_type = other DNA
atcgtgaagtaatcgtgaag

SEQ ID NO: 33176 - DNA, 20 bp, synthetic construct
  misc_feature 1..20: note = chemically synthesized
  source 1..20: mol_type = other DNA
ggcccctgctggctgctggg

SEQ ID NO: 33177 - DNA, 20 bp, synthetic construct
  misc_feature 1..20: note = chemically synthesized
  source 1..20: mol_type = other DNA
taggtgttttaaaaaatagc

SEQ ID NO: 33178 - DNA, 20 bp, synthetic construct
  misc_feature 1..20: note = chemically synthesized
  source 1..20: mol_type = other DNA
cccttgtaatttagagactc

SEQ ID NO: 33179 - DNA, 20 bp, synthetic construct
  misc_feature 1..20: note = chemically synthesized
  source 1..20: mol_type = other DNA
ttgcctgtctttgagcagga

SEQ ID NO: 33180 - DNA, 20 bp, synthetic construct
  misc_feature 1..20: note = chemically synthesized
  source 1..20: mol_type = other DNA
tgtgctgattgagggcccat

SEQ ID NO: 33181 - DNA, 20 bp, synthetic construct
  misc_feature 1..20: note = chemically synthesized
  source 1..20: mol_type = other DNA
atgtaagcatcacaacaggc

SEQ ID NO: 33182 - DNA, 20 bp, synthetic construct
  misc_feature 1..20: note = chemically synthesized
  source 1..20: mol_type = other DNA
catacaggtaataacatagg

SEQ ID NO: 33183 - DNA, 20 bp, synthetic construct
  misc_feature 1..20: note = chemically synthesized
  source 1..20: mol_type = other DNA
cggaaggctctcttggtgat

SEQ ID NO: 33184 - DNA, 20 bp, synthetic construct
  misc_feature 1..20: note = chemically synthesized
  source 1..20: mol_type = other DNA
ccatattttaaattccagct

SEQ ID NO: 33185 - DNA, 20 bp, synthetic construct
  misc_feature 1..20: note = chemically synthesized
  source 1..20: mol_type = other DNA
tgtatttattgccctaggcg

SEQ ID NO: 33186 - DNA, 20 bp, synthetic construct
  misc_feature 1..20: note = chemically synthesized
  source 1..20: mol_type = other DNA
attcaaatgaatgcccattt

SEQ ID NO: 33187 - DNA, 20 bp, synthetic construct
  misc_feature 1..20: note = chemically synthesized
  source 1..20: mol_type = other DNA
atgccttagatgtttaccta

SEQ ID NO: 33188 - DNA, 20 bp, synthetic construct
  misc_feature 1..20: note = chemically synthesized
  source 1..20: mol_type = other DNA
tggaatacaactcaacagta

SEQ ID NO: 33189 - DNA, 20 bp, synthetic construct
  misc_feature 1..20: note = chemically synthesized
  source 1..20: mol_type = other DNA
ctccacaccatggatgaatc

SEQ ID NO: 33190 - DNA, 20 bp, synthetic construct
  misc_feature 1..20: note = chemically synthesized
  source 1..20: mol_type = other DNA
cagaatcattctgctctgtg

SEQ ID NO: 33191 - DNA, 20 bp, synthetic construct
  misc_feature 1..20: note = chemically synthesized
  source 1..20: mol_type = other DNA
gagtccatttgtaacaaatt

SEQ ID NO: 33192 - DNA, 20 bp, synthetic construct
  misc_feature 1..20: note = chemically synthesized
  source 1..20: mol_type = other DNA
caaagtacatttcagggaaa

SEQ ID NO: 33193 - DNA, 20 bp, synthetic construct
  misc_feature 1..20: note = chemically synthesized
  source 1..20: mol_type = other DNA
aggggaggaaatctgttttc

SEQ ID NO: 33194 - DNA, 20 bp, synthetic construct
  misc_feature 1..20: note = chemically synthesized
  source 1..20: mol_type = other DNA
caactaagtttttttcttcc

SEQ ID NO: 33195 - DNA, 20 bp, synthetic construct
  misc_feature 1..20: note = chemically synthesized
  source 1..20: mol_type = other DNA
tgctgcatttaaaacagcat

SEQ ID NO: 33196 - DNA, 20 bp, synthetic construct
  misc_feature 1..20: note = chemically synthesized
  source 1..20: mol_type = other DNA
ggttaaaattaccattttga

SEQ ID NO: 33197 - DNA, 20 bp, synthetic construct
  misc_feature 1..20: note = chemically synthesized
  source 1..20: mol_type = other DNA
atatgctatttgttgaattc

SEQ ID NO: 33198 - DNA, 20 bp, synthetic construct
  misc_feature 1..20: note = chemically synthesized
  source 1..20: mol_type = other DNA
aaatataatagaagcaagta

SEQ ID NO: 33199 - DNA, 20 bp, synthetic construct
  misc_feature 1..20: note = chemically synthesized
  source 1..20: mol_type = other DNA
ggagaaagagtccctgtatt

SEQ ID NO: 33200 - DNA, 20 bp, synthetic construct
  misc_feature 1..20: note = chemically synthesized
  source 1..20: mol_type = other DNA
tccaggaggtaagagaagaa

SEQ ID NO: 33201 - DNA, 20 bp, synthetic construct
  misc_feature 1..20: note = chemically synthesized
  source 1..20: mol_type = other DNA
cggaagggatttttacttgg

SEQ ID NO: 33202 - DNA, 20 bp, synthetic construct
  misc_feature 1..20: note = chemically synthesized
  source 1..20: mol_type = other DNA
tacggggaactaagactgga

SEQ ID NO: 33203 - DNA, 20 bp, synthetic construct
  misc_feature 1..20: note = chemically synthesized
  source 1..20: mol_type = other DNA
cgtagggtttcctttcacta

SEQ ID NO: 33204 - DNA, 20 bp, synthetic construct
  misc_feature 1..20: note = chemically synthesized
  source 1..20: mol_type = other DNA
ggagtgggcaggaatgacgt

SEQ ID NO: 33205 - DNA, 20 bp, synthetic construct
  misc_feature 1..20: note = chemically synthesized
  source 1..20: mol_type = other DNA
tagaggggaaagaacctctg

SEQ ID NO: 33206 - DNA, 20 bp, synthetic construct
  misc_feature 1..20: note = chemically synthesized
  source 1..20: mol_type = other DNA
tcaggtgcttcctcttctac

SEQ ID NO: 33207 - DNA, 20 bp, synthetic construct
  misc_feature 1..20: note = chemically synthesized
  source 1..20: mol_type = other DNA
ggccgccgtgtgtttactgc

SEQ ID NO: 33208 - DNA, 20 bp, synthetic construct
  misc_feature 1..20: note = chemically synthesized
  source 1..20: mol_type = other DNA
ttaggaacaaacttccagcg

SEQ ID NO: 33209 - DNA, 20 bp, synthetic construct
  misc_feature 1..20: note = chemically synthesized
  source 1..20: mol_type = other DNA
gttgtgggcaaaatgacata

SEQ ID NO: 33210 - DNA, 20 bp, synthetic construct
  misc_feature 1..20: note = chemically synthesized
  source 1..20: mol_type = other DNA
atgacataaaagaaatggaa

SEQ ID NO: 33211 - DNA, 20 bp, synthetic construct
  misc_feature 1..20: note = chemically synthesized
  source 1..20: mol_type = other DNA
attggggtctaaggtaccct

SEQ ID NO: 33212 - DNA, 20 bp, synthetic construct
  misc_feature 1..20: note = chemically synthesized
  source 1..20: mol_type = other DNA
gagaccagcctgaccaacat

SEQ ID NO: 33213 - DNA, 20 bp, synthetic construct
  misc_feature 1..20: note = chemically synthesized
  source 1..20: mol_type = other DNA
accccgtctctaccaaaaat

SEQ ID NO: 33214 - DNA, 20 bp, synthetic construct
  misc_feature 1..20: note = chemically synthesized
  source 1..20: mol_type = other DNA
ctacttgggaggctgaggca

SEQ ID NO: 33215 - DNA, 20 bp, synthetic construct
  misc_feature 1..20: note = chemically synthesized
  source 1..20: mol_type = other DNA
aacaagagcgaaactccacc

SEQ ID NO: 33216 - DNA, 20 bp, synthetic construct
  misc_feature 1..20: note = chemically synthesized
  source 1..20: mol_type = other DNA
tattttcatgttaagcaaaa

SEQ ID NO: 33217 - DNA, 20 bp, synthetic construct
  misc_feature 1..20: note = chemically synthesized
  source 1..20: mol_type = other DNA
tcatgttcctagaaggaaag

SEQ ID NO: 33218 - DNA, 20 bp, synthetic construct
  misc_feature 1..20: note = chemically synthesized
  source 1..20: mol_type = other DNA
atttaaatgtttctacataa

SEQ ID NO: 33219 - DNA, 20 bp, synthetic construct
  misc_feature 1..20: note = chemically synthesized
  source 1..20: mol_type = other DNA
cctttctgcagcttccttag

SEQ ID NO: 33220 - DNA, 20 bp, synthetic construct
  misc_feature 1..20: note = chemically synthesized
  source 1..20: mol_type = other DNA
tccttagatagaatggttga

SEQ ID NO: 33221 - DNA, 20 bp, synthetic construct
  misc_feature 1..20: note = chemically synthesized
  source 1..20: mol_type = other DNA
taaaggctggtgtggttgcc

SEQ ID NO: 33222 - DNA, 20 bp, synthetic construct
  misc_feature 1..20: note = chemically synthesized
  source 1..20: mol_type = other DNA
cccgagtcttttttattctg

SEQ ID NO: 33223 - DNA, 20 bp, synthetic construct
  misc_feature 1..20: note = chemically synthesized
  source 1..20: mol_type = other DNA
tatcttagattggtaggtct

SEQ ID NO: 33224 - DNA, 20 bp, synthetic construct
  misc_feature 1..20: note = chemically synthesized
  source 1..20: mol_type = other DNA
gtacttaactacacatatgt

SEQ ID NO: 33225 - DNA, 20 bp, synthetic construct
  misc_feature 1..20: note = chemically synthesized
  source 1..20: mol_type = other DNA
tatgtgcagaaagtgaactc

SEQ ID NO: 33226 - DNA, 20 bp, synthetic construct
  misc_feature 1..20: note = chemically synthesized
  source 1..20: mol_type = other DNA
gctgttcagtcaaatccatt

SEQ ID NO: 33227 - DNA, 20 bp, synthetic construct
  misc_feature 1..20: note = chemically synthesized
  source 1..20: mol_type = other DNA
gagaaccagagcagaaggtt

SEQ ID NO: 33228 - DNA, 20 bp, synthetic construct
  misc_feature 1..20: note = chemically synthesized
  source 1..20: mol_type = other DNA
accagagcagaaggttggag

SEQ ID NO: 33229 - DNA, 20 bp, synthetic construct
  misc_feature 1..20: note = chemically synthesized
  source 1..20: mol_type = other DNA
ctcagccttcttgttgaaaa

SEQ ID NO: 33230 - DNA, 20 bp, synthetic construct
  misc_feature 1..20: note = chemically synthesized
  source 1..20: mol_type = other DNA
aggcaacttcacttctcacc

SEQ ID NO: 33231 - DNA, 20 bp, synthetic construct
  misc_feature 1..20: note = chemically synthesized
  source 1..20: mol_type = other DNA
ggtttatttttcccttatag

SEQ ID NO: 33232 - DNA, 20 bp, synthetic construct
  misc_feature 1..20: note = chemically synthesized
  source 1..20: mol_type = other DNA
cataatgaggtgttcctaag

SEQ ID NO: 33233 - DNA, 20 bp, synthetic construct
  misc_feature 1..20: note = chemically synthesized
  source 1..20: mol_type = other DNA
ctccaaattcccccttctct

SEQ ID NO: 33234 - DNA, 20 bp, synthetic construct
  misc_feature 1..20: note = chemically synthesized
  source 1..20: mol_type = other DNA
aggactaaagagagagaaga

SEQ ID NO: 33235 - DNA, 20 bp, synthetic construct
  misc_feature 1..20: note = chemically synthesized
  source 1..20: mol_type = other DNA
agatgctggaaacagaggtt

SEQ ID NO: 33236 - DNA, 20 bp, synthetic construct
  misc_feature 1..20: note = chemically synthesized
  source 1..20: mol_type = other DNA
ggagaaagagaggcaaggaa

SEQ ID NO: 33237 - DNA, 20 bp, synthetic construct
  misc_feature 1..20: note = chemically synthesized
  source 1..20: mol_type = other DNA
gtcgatagtgacctgcattt

SEQ ID NO: 33238 - DNA, 20 bp, synthetic construct
  misc_feature 1..20: note = chemically synthesized
  source 1..20: mol_type = other DNA
aagggggaaaaaaaagcaac

SEQ ID NO: 33239 - DNA, 20 bp, synthetic construct
  misc_feature 1..20: note = chemically synthesized
  source 1..20: mol_type = other DNA
gggaaaaaaaagcaaccaag

SEQ ID NO: 33240 - DNA, 20 bp, synthetic construct
  misc_feature 1..20: note = chemically synthesized
  source 1..20: mol_type = other DNA
accaagaaagaaaaagaagg

SEQ ID NO: 33241 - DNA, 20 bp, synthetic construct
  misc_feature 1..20: note = chemically synthesized
  source 1..20: mol_type = other DNA
aaagaaggaaagaaaaaaag

SEQ ID NO: 33242 - DNA, 20 bp, synthetic construct
  misc_feature 1..20: note = chemically synthesized
  source 1..20: mol_type = other DNA
aagaaaaaaagggagaaaag

SEQ ID NO: 33243 - DNA, 20 bp, synthetic construct
  misc_feature 1..20: note = chemically synthesized
  source 1..20: mol_type = other DNA
aaaaaagggagaaaaggaag

SEQ ID NO: 33244 - DNA, 20 bp, synthetic construct
  misc_feature 1..20: note = chemically synthesized
  source 1..20: mol_type = other DNA
accagaagaacaaaaatagg

SEQ ID NO: 33245 - DNA, 20 bp, synthetic construct
  misc_feature 1..20: note = chemically synthesized
  source 1..20: mol_type = other DNA
aaaataggaaagaaaaataa

SEQ ID NO: 33246 - DNA, 20 bp, synthetic construct
  misc_feature 1..20: note = chemically synthesized
  source 1..20: mol_type = other DNA
atttgggttctgccttggac

SEQ ID NO: 33247 - DNA, 20 bp, synthetic construct
  misc_feature 1..20: note = chemically synthesized
  source 1..20: mol_type = other DNA
catcatttctgtaatgtttg

SEQ ID NO: 33248 - DNA, 20 bp, synthetic construct
  misc_feature 1..20: note = chemically synthesized
  source 1..20: mol_type = other DNA
gttggatatttaaaatgtca

SEQ ID NO: 33249 - DNA, 20 bp, synthetic construct
  misc_feature 1..20: note = chemically synthesized
  source 1..20: mol_type = other DNA
gaaagagatgattacacatt

SEQ ID NO: 33250 - DNA, 20 bp, synthetic construct
  misc_feature 1..20: note = chemically synthesized
  source 1..20: mol_type = other DNA
gtactaacctgtccttcaaa

SEQ ID NO: 33251 - DNA, 20 bp, synthetic construct
  misc_feature 1..20: note = chemically synthesized
  source 1..20: mol_type = other DNA
aattacaactgtttggaagc

SEQ ID NO: 33252 - DNA, 20 bp, synthetic construct
  misc_feature 1..20: note = chemically synthesized
  source 1..20: mol_type = other DNA
gtccgctccgtgaacaggaa

SEQ ID NO: 33253 - DNA, 20 bp, synthetic construct
  misc_feature 1..20: note = chemically synthesized
  source 1..20: mol_type = other DNA
tttttttttttaatggagga

SEQ ID NO: 33254 - DNA, 20 bp, synthetic construct
  misc_feature 1..20: note = chemically synthesized
  source 1..20: mol_type = other DNA
aaccaaactaaactctcaag

SEQ ID NO: 33255 - DNA, 20 bp, synthetic construct
  misc_feature 1..20: note = chemically synthesized
  source 1..20: mol_type = other DNA
ctaggtgggtttcctgagct

SEQ ID NO: 33256 - DNA, 20 bp, synthetic construct
  misc_feature 1..20: note = chemically synthesized
  source 1..20: mol_type = other DNA
aaaggctctcccaccatcac

SEQ ID NO: 33257 - DNA, 20 bp, synthetic construct
  misc_feature 1..20: note = chemically synthesized
  source 1..20: mol_type = other DNA
cagaatgtactagggttctg

SEQ ID NO: 33258 - DNA, 20 bp, synthetic construct
  misc_feature 1..20: note = chemically synthesized
  source 1..20: mol_type = other DNA
tgtgctggagcatgtgggga

SEQ ID NO: 33259 - DNA, 20 bp, synthetic construct
  misc_feature 1..20: note = chemically synthesized
  source 1..20: mol_type = other DNA
agatgtagggggtggagcgt

SEQ ID NO: 33260 - DNA, 20 bp, synthetic construct
  misc_feature 1..20: note = chemically synthesized
  source 1..20: mol_type = other DNA
tcacgagccatggaaatgga

SEQ ID NO: 33261 - DNA, 20 bp, synthetic construct
  misc_feature 1..20: note = chemically synthesized
  source 1..20: mol_type = other DNA
atgggggtgcaggtagggga

SEQ ID NO: 33262 - DNA, 20 bp, synthetic construct
  misc_feature 1..20: note = chemically synthesized
  source 1..20: mol_type = other DNA
aaacaaattgagagaggaag

SEQ ID NO: 33263 - DNA, 20 bp, synthetic construct
  misc_feature 1..20: note = chemically synthesized
  source 1..20: mol_type = other DNA
ggtccttccagccaggtcat

SEQ ID NO: 33264 - DNA, 20 bp, synthetic construct
  misc_feature 1..20: note = chemically synthesized
  source 1..20: mol_type = other DNA
ttagaatggctctccaacag

SEQ ID NO: 33265 - DNA, 20 bp, synthetic construct
  misc_feature 1..20: note = chemically synthesized
  source 1..20: mol_type = other DNA
tacagggagacttggatcca

SEQ ID NO: 33266 - DNA, 20 bp, synthetic construct
  misc_feature 1..20: note = chemically synthesized
  source 1..20: mol_type = other DNA
taacaaaagcagcttttgag

SEQ ID NO: 33267 - DNA, 20 bp, synthetic construct
  misc_feature 1..20: note = chemically synthesized
  source 1..20: mol_type = other DNA
cgtttcattttcagattttg

SEQ ID NO: 33268 - DNA, 20 bp, synthetic construct
  misc_feature 1..20: note = chemically synthesized
  source 1..20: mol_type = other DNA
cacgtggacctgctaggtgg

SEQ ID NO: 33269 - DNA, 20 bp, synthetic construct
  misc_feature 1..20: note = chemically synthesized
  source 1..20: mol_type = other DNA
atgttactcatatggaatca

SEQ ID NO: 33270 - DNA, 20 bp, synthetic construct
  misc_feature 1..20: note = chemically synthesized
  source 1..20: mol_type = other DNA
ggcagcctagttttattcct

SEQ ID NO: 33271 - DNA, 20 bp, synthetic construct
  misc_feature 1..20: note = chemically synthesized
  source 1..20: mol_type = other DNA
acataataggttttaattct

SEQ ID NO: 33272 - DNA, 20 bp, synthetic construct
  misc_feature 1..20: note = chemically synthesized
  source 1..20: mol_type = other DNA
agaatggccagttctggttc

SEQ ID NO: 33273 - DNA, 20 bp, synthetic construct
  misc_feature 1..20: note = chemically synthesized
  source 1..20: mol_type = other DNA
acaccagtcactcaatagtg

SEQ ID NO: 33274 - DNA, 20 bp, synthetic construct
  misc_feature 1..20: note = chemically synthesized
  source 1..20: mol_type = other DNA
ctaagttctgggatacatgt

SEQ ID NO: 33275 - DNA, 20 bp, synthetic construct
  misc_feature 1..20: note = chemically synthesized
  source 1..20: mol_type = other DNA
ctctgctctggcaggtgtta

SEQ ID NO: 33276 - DNA, 20 bp, synthetic construct
  misc_feature 1..20: note = chemically synthesized
  source 1..20: mol_type = other DNA
ggtatctaatacttaacctg

SEQ ID NO: 33277 - DNA, 20 bp, synthetic construct
  misc_feature 1..20: note = chemically synthesized
  source 1..20: mol_type = other DNA
gaagctggacaattcgggtg

SEQ ID NO: 33278 - DNA, 20 bp, synthetic construct
  misc_feature 1..20: note = chemically synthesized
  source 1..20: mol_type = other DNA
agagagtgatttttcacatt

SEQ ID NO: 33279 - DNA, 20 bp, synthetic construct
  misc_feature 1..20: note = chemically synthesized
  source 1..20: mol_type = other DNA
tagcaaatatgatttatttt

SEQ ID NO: 33280 - DNA, 20 bp, synthetic construct
  misc_feature 1..20: note = chemically synthesized
  source 1..20: mol_type = other DNA
aaagatggaaacacttaggg

SEQ ID NO: 33281 - DNA, 20 bp, synthetic construct
  misc_feature 1..20: note = chemically synthesized
  source 1..20: mol_type = other DNA
atggaaacacttagggccag

SEQ ID NO: 33282 - DNA, 20 bp, synthetic construct
  misc_feature 1..20: note = chemically synthesized
  source 1..20: mol_type = other DNA
caagtccctgcttcctaaag

SEQ ID NO: 33283 - DNA, 20 bp, synthetic construct
  misc_feature 1..20: note = chemically synthesized
  source 1..20: mol_type = other DNA
ccctgcttcctaaaggaaga

SEQ ID NO: 33284 - DNA, 20 bp, synthetic construct
  misc_feature 1..20: note = chemically synthesized
  source 1..20: mol_type = other DNA
cctccccatggctttgaaaa

SEQ ID NO: 33285 - DNA, 20 bp, synthetic construct
  misc_feature 1..20: note = chemically synthesized
  source 1..20: mol_type = other DNA
gccacccacattcattgggg

SEQ ID NO: 33286 - DNA, 20 bp, synthetic construct
  misc_feature 1..20: note = chemically synthesized
  source 1..20: mol_type = other DNA
catggttgtgtcccttattt

SEQ ID NO: 33287 - DNA, 20 bp, synthetic construct
  misc_feature 1..20: note = chemically synthesized
  source 1..20: mol_type = other DNA
ttgtgaaagctgaagatgtc

SEQ ID NO: 33288 - DNA, 20 bp, synthetic construct
  misc_feature 1..20: note = chemically synthesized
  source 1..20: mol_type = other DNA
actaaatgaagcctgctgtg

SEQ ID NO: 33289 - DNA, 20 bp, synthetic construct
  misc_feature 1..20: note = chemically synthesized
  source 1..20: mol_type = other DNA
agaggttgaatgaatgcatg

SEQ ID NO: 33290 - DNA, 20 bp, synthetic construct
  misc_feature 1..20: note = chemically synthesized
  source 1..20: mol_type = other DNA
aatactttgggcccagagcc

SEQ ID NO: 33291 - DNA, 20 bp, synthetic construct
  misc_feature 1..20: note = chemically synthesized
  source 1..20: mol_type = other DNA
gtctttggcttagttgcttt

SEQ ID NO: 33292 - DNA, 20 bp, synthetic construct
  misc_feature 1..20: note = chemically synthesized
  source 1..20: mol_type = other DNA
ttatgttaaagacacagctt

SEQ ID NO: 33293 - DNA, 20 bp, synthetic construct
  misc_feature 1..20: note = chemically synthesized
  source 1..20: mol_type = other DNA
tctctacttcctccctttat

SEQ ID NO: 33294 - DNA, 20 bp, synthetic construct
  misc_feature 1..20: note = chemically synthesized
  source 1..20: mol_type = other DNA
gaccatgagagagtttcagg

SEQ ID NO: 33295 - DNA, 20 bp, synthetic construct
  misc_feature 1..20: note = chemically synthesized
  source 1..20: mol_type = other DNA
tattgctttcttttgttttt

SEQ ID NO: 33296 - DNA, 20 bp, synthetic construct
  misc_feature 1..20: note = chemically synthesized
  source 1..20: mol_type = other DNA
ctataatactctgataagtc

SEQ ID NO: 33297 - DNA, 20 bp, synthetic construct
  misc_feature 1..20: note = chemically synthesized
  source 1..20: mol_type = other DNA
caagagctagatgcggctga

SEQ ID NO: 33298 - DNA, 20 bp, synthetic construct
  misc_feature 1..20: note = chemically synthesized
  source 1..20: mol_type = other DNA
ctttttgaagacccagggtg

SEQ ID NO: 33299 - DNA, 20 bp, synthetic construct
  misc_feature 1..20: note = chemically synthesized
  source 1..20: mol_type = other DNA
tacacacccagtgattagtt

SEQ ID NO: 33300 - DNA, 20 bp, synthetic construct
  misc_feature 1..20: note = chemically synthesized
  source 1..20: mol_type = other DNA
aaagttggtacccaatatat

SEQ ID NO: 33301 - DNA, 20 bp, synthetic construct
  misc_feature 1..20: note = chemically synthesized
  source 1..20: mol_type = other DNA
acaggttgaaacaccttcca

SEQ ID NO: 33302 - DNA, 20 bp, synthetic construct
  misc_feature 1..20: note = chemically synthesized
  source 1..20: mol_type = other DNA
acatttgaaaaaagattgag

SEQ ID NO: 33303 - DNA, 20 bp, synthetic construct
  misc_feature 1..20: note = chemically synthesized
  source 1..20: mol_type = other DNA
aatgtgtcccatttgagaga

SEQ ID NO: 33304 - DNA, 20 bp, synthetic construct
  misc_feature 1..20: note = chemically synthesized
  source 1..20: mol_type = other DNA
tgattcagcttgagtgtgca

SEQ ID NO: 33305 - DNA, 20 bp, synthetic construct
  misc_feature 1..20: note = chemically synthesized
  source 1..20: mol_type = other DNA
agtgtgcatgagaatcacct

SEQ ID NO: 33306 - DNA, 20 bp, synthetic construct
  misc_feature 1..20: note = chemically synthesized
  source 1..20: mol_type = other DNA
agtaagtctgaggtggtgcc

SEQ ID NO: 33307 - DNA, 20 bp, synthetic construct
  misc_feature 1..20: note = chemically synthesized
  source 1..20: mol_type = other DNA
gtgggcctgggtctgcgctg

SEQ ID NO: 33308 - DNA, 20 bp, synthetic construct
  misc_feature 1..20: note = chemically synthesized
  source 1..20: mol_type = other DNA
acttgcctaagagcactaac

SEQ ID NO: 33309 - DNA, 20 bp, synthetic construct
  misc_feature 1..20: note = chemically synthesized
  source 1..20: mol_type = other DNA
cagagcccatctctggctgg

SEQ ID NO: 33310 - DNA, 20 bp, synthetic construct
  misc_feature 1..20: note = chemically synthesized
  source 1..20: mol_type = other DNA
atgtcgattttacttaccaa

SEQ ID NO: 33311 - DNA, 20 bp, synthetic construct
  misc_feature 1..20: note = chemically synthesized
  source 1..20: mol_type = other DNA
tgtgtttagtggaagaagca

SEQ ID NO: 33312 - DNA, 20 bp, synthetic construct
  misc_feature 1..20: note = chemically synthesized
  source 1..20: mol_type = other DNA
gtaaatagcttcttaggctg

SEQ ID NO: 33313 - DNA, 20 bp, synthetic construct
  misc_feature 1..20: note = chemically synthesized
  source 1..20: mol_type = other DNA
aagtactgcttaatggatca

SEQ ID NO: 33314 - DNA, 20 bp, synthetic construct
  misc_feature 1..20: note = chemically synthesized
  source 1..20: mol_type = other DNA
tagctagggttttttacaac

SEQ ID NO: 33315 - DNA, 20 bp, synthetic construct
  misc_feature 1..20: note = chemically synthesized
  source 1..20: mol_type = other DNA
ctcttcccagagtaagtggc

SEQ ID NO: 33316 - DNA, 20 bp, synthetic construct
  misc_feature 1..20: note = chemically synthesized
  source 1..20: mol_type = other DNA
cctgggttgcctgtgtttcc

SEQ ID NO: 33317 - DNA, 20 bp, synthetic construct
  misc_feature 1..20: note = chemically synthesized
  source 1..20: mol_type = other DNA
agagtatggcccagctcagt

SEQ ID NO: 33318 - DNA, 20 bp, synthetic construct
  misc_feature 1..20: note = chemically synthesized
  source 1..20: mol_type = other DNA
gaagaggggggcagagggac

SEQ ID NO: 33319 - DNA, 20 bp, synthetic construct
  misc_feature 1..20: note = chemically synthesized
  source 1..20: mol_type = other DNA
agaccgaaattgaaaacaaa

SEQ ID NO: 33320 - DNA, 20 bp, synthetic construct
  misc_feature 1..20: note = chemically synthesized
  source 1..20: mol_type = other DNA
tccccacgcctgggatgagt

SEQ ID NO: 33321 - DNA, 20 bp, synthetic construct
  misc_feature 1..20: note = chemically synthesized
  source 1..20: mol_type = other DNA
aatgtccatgtgtatagaga

SEQ ID NO: 33322 - DNA, 20 bp, synthetic construct
  misc_feature 1..20: note = chemically synthesized
  source 1..20: mol_type = other DNA
gcacacatctttagccaagg

SEQ ID NO: 33323 - DNA, 20 bp, synthetic construct
  misc_feature 1..20: note = chemically synthesized
  source 1..20: mol_type = other DNA
ctaatttttctcctggtttt

SEQ ID NO: 33324 - DNA, 20 bp, synthetic construct
  misc_feature 1..20: note = chemically synthesized
  source 1..20: mol_type = other DNA
gttttctgaaagatactgtt

SEQ ID NO: 33325 - DNA, 20 bp, synthetic construct
  misc_feature 1..20: note = chemically synthesized
  source 1..20: mol_type = other DNA
acacaaaaaagcaggttcaa

SEQ ID NO: 33326 - DNA, 20 bp, synthetic construct
  misc_feature 1..20: note = chemically synthesized
  source 1..20: mol_type = other DNA
tgaaaaataacctgctgtgg

SEQ ID NO: 33327 - DNA, 20 bp, synthetic construct
  misc_feature 1..20: note = chemically synthesized
  source 1..20: mol_type = other DNA
cctgctgtggaaagaaaaaa

SEQ ID NO: 33328 - DNA, 20 bp, synthetic construct
  misc_feature 1..20: note = chemically synthesized
  source 1..20: mol_type = other DNA
aaaggaaaaaggtcatggag

SEQ ID NO: 33329 - DNA, 20 bp, synthetic construct
  misc_feature 1..20: note = chemically synthesized
  source 1..20: mol_type = other DNA
tggaagtgggttgtgggggt

SEQ ID NO: 33330 - DNA, 20 bp, synthetic construct
  misc_feature 1..20: note = chemically synthesized
  source 1..20: mol_type = other DNA
agataggaattccaagactc

SEQ ID NO: 33331 - DNA, 20 bp, synthetic construct
  misc_feature 1..20: note = chemically synthesized
  source 1..20: mol_type = other DNA
tttttcacattggtgacata

SEQ ID NO: 33332 - DNA, 20 bp, synthetic construct
  misc_feature 1..20: note = chemically synthesized
  source 1..20: mol_type = other DNA
tgattttcatcagagtaaat

SEQ ID NO: 33333 - DNA, 20 bp, synthetic construct
  misc_feature 1..20: note = chemically synthesized
  source 1..20: mol_type = other DNA
gatgactgcagtttaggaat

SEQ ID NO: 33334 - DNA, 20 bp, synthetic construct
  misc_feature 1..20: note = chemically synthesized
  source 1..20: mol_type = other DNA
acactagctgccctcatgat

SEQ ID NO: 33335 - DNA, 20 bp, synthetic construct
  misc_feature 1..20: note = chemically synthesized
  source 1..20: mol_type = other DNA
attttttttttttttccttc

SEQ ID NO: 33336 - DNA, 20 bp, synthetic construct
  misc_feature 1..20: note = chemically synthesized
  source 1..20: mol_type = other DNA
cagcccttcttttaaaagaa

SEQ ID NO: 33337 - DNA, 20 bp, synthetic construct
  misc_feature 1..20: note = chemically synthesized
  source 1..20: mol_type = other DNA
atattttaaggctttttttt

SEQ ID NO: 33338 - DNA, 20 bp, synthetic construct
  misc_feature 1..20: note = chemically synthesized
  source 1..20: mol_type = other DNA
tcctcccacagtctggggtg

SEQ ID NO: 33339 - DNA, 20 bp, synthetic construct
  misc_feature 1..20: note = chemically synthesized
  source 1..20: mol_type = other DNA
tctatgaaatgtttgcctat

SEQ ID NO: 33340 - DNA, 20 bp, synthetic construct
  misc_feature 1..20: note = chemically synthesized
  source 1..20: mol_type = other DNA
cacctgtcacccagggggga

SEQ ID NO: 33341 - DNA, 20 bp, synthetic construct
  misc_feature 1..20: note = chemically synthesized
  source 1..20: mol_type = other DNA
gaagacatttgttgaggtgc

SEQ ID NO: 33342 - DNA, 20 bp, synthetic construct
  misc_feature 1..20: note = chemically synthesized
  source 1..20: mol_type = other DNA
cgcacagaacactcatggat

SEQ ID NO: 33343 - DNA, 20 bp, synthetic construct
  misc_feature 1..20: note = chemically synthesized
  source 1..20: mol_type = other DNA
ctcatggattaagaatctac

SEQ ID NO: 33344 - DNA, 20 bp, synthetic construct
  misc_feature 1..20: note = chemically synthesized
  source 1..20: mol_type = other DNA
gtatcccttcaggactaggt

SEQ ID NO: 33345 - DNA, 20 bp, synthetic construct
  misc_feature 1..20: note = chemically synthesized
  source 1..20: mol_type = other DNA
caataacccctttaacctgc

SEQ ID NO: 33346 - DNA, 20 bp, synthetic construct
  misc_feature 1..20: note = chemically synthesized
  source 1..20: mol_type = other DNA
tttagcgtgtacagtaccct

SEQ ID NO: 33347 - DNA, 20 bp, synthetic construct
  misc_feature 1..20: note = chemically synthesized
  source 1..20: mol_type = other DNA
acaaacagaagtaacgaagc

SEQ ID NO: 33348 - DNA, 20 bp, synthetic construct
  misc_feature 1..20: note = chemically synthesized
  source 1..20: mol_type = other DNA
ctgtttccagttccgttctg

SEQ ID NO: 33349 - DNA, 20 bp, synthetic construct
  misc_feature 1..20: note = chemically synthesized
  source 1..20: mol_type = other DNA
tgagagaaaaagagagagag

SEQ ID NO: 33350 - DNA, 20 bp, synthetic construct
  misc_feature 1..20: note = chemically synthesized
  source 1..20: mol_type = other DNA
tttggattaaccctctatag

SEQ ID NO: 33351 - DNA, 20 bp, synthetic construct
  misc_feature 1..20: note = chemically synthesized
  source 1..20: mol_type = other DNA
taaatgtatcaattggaaag

SEQ ID NO: 33352 - DNA, 20 bp, synthetic construct
  misc_feature 1..20: note = chemically synthesized
  source 1..20: mol_type = other DNA
ggccttgaattgacaaatta

SEQ ID NO: 33353 - DNA, 20 bp, synthetic construct
  misc_feature 1..20: note = chemically synthesized
  source 1..20: mol_type = other DNA
ttgctcctggtgagagctta

SEQ ID NO: 33354 - DNA, 20 bp, synthetic construct
  misc_feature 1..20: note = chemically synthesized
  source 1..20: mol_type = other DNA
ttttaaaaatactggcacca

SEQ ID NO: 33355 - DNA, 20 bp, synthetic construct
  misc_feature 1..20: note = chemically synthesized
  source 1..20: mol_type = other DNA
aggtttgacagaggggaaca

SEQ ID NO: 33356 - DNA, 20 bp, synthetic construct
  misc_feature 1..20: note = chemically synthesized
  source 1..20: mol_type = other DNA
gtgacattcttaaaaaaaga

SEQ ID NO: 33357 - DNA, 20 bp, synthetic construct
  misc_feature 1..20: note = chemically synthesized
  source 1..20: mol_type = other DNA
cattcttaaaaaaagaagag

SEQ ID NO: 33358 - DNA, 20 bp, synthetic construct
  misc_feature 1..20: note = chemically synthesized
  source 1..20: mol_type = other DNA
tatacttaagggaaaagttg

SEQ ID NO: 33359 - DNA, 20 bp, synthetic construct
  misc_feature 1..20: note = chemically synthesized
  source 1..20: mol_type = other DNA
tgcaagcgctgtgaatggaa

SEQ ID NO: 33360 - DNA, 20 bp, synthetic construct
  misc_feature 1..20: note = chemically synthesized
  source 1..20: mol_type = other DNA
ggaaacagaatacacttaac

SEQ ID NO: 33361 - DNA, 20 bp, synthetic construct
  misc_feature 1..20: note = chemically synthesized
  source 1..20: mol_type = other DNA
acttttttaaatataaatgt

SEQ ID NO: 33362 - DNA, 20 bp, synthetic construct
  misc_feature 1..20: note = chemically synthesized
  source 1..20: mol_type = other DNA
atggtcttttttctgtattt

SEQ ID NO: 33363 - DNA, 20 bp, synthetic construct
  misc_feature 1..20: note = chemically synthesized
  source 1..20: mol_type = other DNA
gcttcaaaaaaaaaaaaaag

SEQ ID NO: 33364 - DNA, 20 bp, synthetic construct
  misc_feature 1..20: note = chemically synthesized
  source 1..20: mol_type = other DNA
tggcggtttgggggagcctg

SEQ ID NO: 33365 - DNA, 20 bp, synthetic construct
  misc_feature 1..20: note = chemically synthesized
  source 1..20: mol_type = other DNA
tcttaccttcatatgcagta

SEQ ID NO: 33366 - DNA, 20 bp, synthetic construct
  misc_feature 1..20: note = chemically synthesized
  source 1..20: mol_type = other DNA
accttcatatgcagtaaaag

SEQ ID NO: 33367 - DNA, 20 bp, synthetic construct
  misc_feature 1..20: note = chemically synthesized
  source 1..20: mol_type = other DNA
tcatatgcagtaaaagaaag

SEQ ID NO: 33368 - DNA, 20 bp, synthetic construct
  misc_feature 1..20: note = chemically synthesized
  source 1..20: mol_type = other DNA
gtgctttatatttagattgg

SEQ ID NO: 33369 - DNA, 20 bp, synthetic construct
  misc_feature 1..20: note = chemically synthesized
  source 1..20: mol_type = other DNA
tcatatgcaaagcatattaa

SEQ ID NO: 33370 - DNA, 20 bp, synthetic construct
  misc_feature 1..20: note = chemically synthesized
  source 1..20: mol_type = other DNA
acttttttgtaaatggcaat

SEQ ID NO: 33371 - DNA, 20 bp, synthetic construct
  misc_feature 1..20: note = chemically synthesized
  source 1..20: mol_type = other DNA
cacactctgtaaattacttg

SEQ ID NO: 33372 - DNA, 20 bp, synthetic construct
  misc_feature 1..20: note = chemically synthesized
  source 1..20: mol_type = other DNA
tagttttaaggctttccagt

SEQ ID NO: 33373 - DNA, 20 bp, synthetic construct
  misc_feature 1..20: note = chemically synthesized
  source 1..20: mol_type = other DNA
ttccagtttagaatagtttt

SEQ ID NO: 33374 - DNA, 20 bp, synthetic construct
  misc_feature 1..20: note = chemically synthesized
  source 1..20: mol_type = other DNA
aaaacttactccatctctta

SEQ ID NO: 33375 - DNA, 20 bp, synthetic construct
  misc_feature 1..20: note = chemically synthesized
  source 1..20: mol_type = other DNA
ttgttttgtttaaaaaagag

SEQ ID NO: 33376 - DNA, 20 bp, synthetic construct
  misc_feature 1..20: note = chemically synthesized
  source 1..20: mol_type = other DNA
gagaaaaaaagagagagacg

SEQ ID NO: 33377 - DNA, 20 bp, synthetic construct
  misc_feature 1..20: note = chemically synthesized
  source 1..20: mol_type = other DNA
aaaaagagagagacgaaaga

SEQ ID NO: 33378 - DNA, 20 bp, synthetic construct
  misc_feature 1..20: note = chemically synthesized
  source 1..20: mol_type = other DNA
taggtctattttaaaaatcc

SEQ ID NO: 33379 - DNA, 20 bp, synthetic construct
  misc_feature 1..20: note = chemically synthesized
  source 1..20: mol_type = other DNA
gtcatgccttttatctgagg

SEQ ID NO: 33380 - DNA, 20 bp, synthetic construct
  misc_feature 1..20: note = chemically synthesized
  source 1..20: mol_type = other DNA
gttttatctttctaaagtat

SEQ ID NO: 33381 - DNA, 20 bp, synthetic construct
  misc_feature 1..20: note = chemically synthesized
  source 1..20: mol_type = other DNA
gtggggctagaggaatccac

SEQ ID NO: 33382 - DNA, 20 bp, synthetic construct
  misc_feature 1..20: note = chemically synthesized
  source 1..20: mol_type = other DNA
atccactgagaaaggatgtt

SEQ ID NO: 33383 - DNA, 20 bp, synthetic construct
  misc_feature 1..20: note = chemically synthesized
  source 1..20: mol_type = other DNA
cttgatgtttgtcactgaac

SEQ ID NO: 33384 - DNA, 20 bp, synthetic construct
  misc_feature 1..20: note = chemically synthesized
  source 1..20: mol_type = other DNA
caaaatgctgctcaagacag

SEQ ID NO: 33385 - DNA, 20 bp, synthetic construct
  misc_feature 1..20: note = chemically synthesized
  source 1..20: mol_type = other DNA
taggttttgcatcctgacag

SEQ ID NO: 33386 - DNA, 20 bp, synthetic construct
  misc_feature 1..20: note = chemically synthesized
  source 1..20: mol_type = other DNA
atttctgaagctgatgaaca

SEQ ID NO: 33387 - DNA, 20 bp, synthetic construct
  misc_feature 1..20: note = chemically synthesized
  source 1..20: mol_type = other DNA
tatttctcacagattttaaa

SEQ ID NO: 33388 - DNA, 20 bp, synthetic construct
  misc_feature 1..20: note = chemically synthesized
  source 1..20: mol_type = other DNA
cttcatttgcactggccatg

SEQ ID NO: 33389 - DNA, 20 bp, synthetic construct
  misc_feature 1..20: note = chemically synthesized
  source 1..20: mol_type = other DNA
gcttaggtataattccaatt

SEQ ID NO: 33390 - DNA, 20 bp, synthetic construct
  misc_feature 1..20: note = chemically synthesized
  source 1..20: mol_type = other DNA
aaagccctgcatatttccca

SEQ ID NO: 33391 - DNA, 20 bp, synthetic construct
  misc_feature 1..20: note = chemically synthesized
  source 1..20: mol_type = other DNA
aaataaacgaacccattgtt

SEQ ID NO: 33392 - DNA, 20 bp, synthetic construct
  misc_feature 1..20: note = chemically synthesized
  source 1..20: mol_type = other DNA
tcagatctttcatagggatg

SEQ ID NO: 33393 - DNA, 20 bp, synthetic construct
  misc_feature 1..20: note = chemically synthesized
  source 1..20: mol_type = other DNA
cccatgatatactttgtcta

SEQ ID NO: 33394 - DNA, 20 bp, synthetic construct
  misc_feature 1..20: note = chemically synthesized
  source 1..20: mol_type = other DNA
attgccttcccccttccaaa

SEQ ID NO: 33395 - DNA, 20 bp, synthetic construct
  misc_feature 1..20: note = chemically synthesized
  source 1..20: mol_type = other DNA
cttcccccttccaaaaaaga

SEQ ID NO: 33396 - DNA, 20 bp, synthetic construct
  misc_feature 1..20: note = chemically synthesized
  source 1..20: mol_type = other DNA
aaaagaaaactgcatgtttg

SEQ ID NO: 33397 - DNA, 20 bp, synthetic construct
  misc_feature 1..20: note = chemically synthesized
  source 1..20: mol_type = other DNA
tttaaaaagctagttagaga

SEQ ID NO: 33398 - DNA, 20 bp, synthetic construct
  misc_feature 1..20: note = chemically synthesized
  source 1..20: mol_type = other DNA
gctcgagagcccttaagttc

SEQ ID NO: 33399 - DNA, 20 bp, synthetic construct
  misc_feature 1..20: note = chemically synthesized
  source 1..20: mol_type = other DNA
gtgggtaggaggaacagatt

SEQ ID NO: 33400 - DNA, 20 bp, synthetic construct
  misc_feature 1..20: note = chemically synthesized
  source 1..20: mol_type = other DNA
cagatggcataaattttcaa

SEQ ID NO: 33401 - DNA, 20 bp, synthetic construct
  misc_feature 1..20: note = chemically synthesized
  source 1..20: mol_type = other DNA
tcacagcaatgctctattcc

SEQ ID NO: 33402 - DNA, 20 bp, synthetic construct
  misc_feature 1..20: note = chemically synthesized
  source 1..20: mol_type = other DNA
ttactgcttggagatccaga

SEQ ID NO: 33403 - DNA, 20 bp, synthetic construct
  misc_feature 1..20: note = chemically synthesized
  source 1..20: mol_type = other DNA
cttggagatccagaagagaa

SEQ ID NO: 33404 - DNA, 20 bp, synthetic construct
  misc_feature 1..20: note = chemically synthesized
  source 1..20: mol_type = other DNA
ccagaggccacatcagtaag

SEQ ID NO: 33405 - DNA, 20 bp, synthetic construct
  misc_feature 1..20: note = chemically synthesized
  source 1..20: mol_type = other DNA
ctaccaacagatgtgtgcac

SEQ ID NO: 33406 - DNA, 20 bp, synthetic construct
  misc_feature 1..20: note = chemically synthesized
  source 1..20: mol_type = other DNA
cagacaagaagttatttcat

SEQ ID NO: 33407 - DNA, 20 bp, synthetic construct
  misc_feature 1..20: note = chemically synthesized
  source 1..20: mol_type = other DNA
gctgaactccttgctgatgc

SEQ ID NO: 33408 - DNA, 20 bp, synthetic construct
  misc_feature 1..20: note = chemically synthesized
  source 1..20: mol_type = other DNA
aagacaacaaaaatttattt

SEQ ID NO: 33409 - DNA, 20 bp, synthetic construct
  misc_feature 1..20: note = chemically synthesized
  source 1..20: mol_type = other DNA
tttttttttttttttttaag

SEQ ID NO: 33410 - DNA, 20 bp, synthetic construct
  misc_feature 1..20: note = chemically synthesized
  source 1..20: mol_type = other DNA
cactgtataaaaaaggtctg

SEQ ID NO: 33411 - DNA, 20 bp, synthetic construct
  misc_feature 1..20: note = chemically synthesized
  source 1..20: mol_type = other DNA
gaattggggtccatgatggg

SEQ ID NO: 33412 - DNA, 20 bp, synthetic construct
  misc_feature 1..20: note = chemically synthesized
  source 1..20: mol_type = other DNA
atgttgaatatcagcctgtt

SEQ ID NO: 33413 - DNA, 20 bp, synthetic construct
  misc_feature 1..20: note = chemically synthesized
  source 1..20: mol_type = other DNA
tcaaaaaccagtgatcattt

SEQ ID NO: 33414 - DNA, 20 bp, synthetic construct
  misc_feature 1..20: note = chemically synthesized
  source 1..20: mol_type = other DNA
ccccggaagtaatagtagga

SEQ ID NO: 33415 - DNA, 20 bp, synthetic construct
  misc_feature 1..20: note = chemically synthesized
  source 1..20: mol_type = other DNA
atcttgagttcctaaccagc

SEQ ID NO: 33416 - DNA, 20 bp, synthetic construct
  misc_feature 1..20: note = chemically synthesized
  source 1..20: mol_type = other DNA
ccaggaagtacttaagcttt

SEQ ID NO: 33417 - DNA, 20 bp, synthetic construct
  misc_feature 1..20: note = chemically synthesized
  source 1..20: mol_type = other DNA
agaatacttttatatacatg

SEQ ID NO: 33418 - DNA, 20 bp, synthetic construct
  misc_feature 1..20: note = chemically synthesized
  source 1..20: mol_type = other DNA
ttgtgattctataaattaga

SEQ ID NO: 33419 - DNA, 20 bp, synthetic construct
  misc_feature 1..20: note = chemically synthesized
  source 1..20: mol_type = other DNA
attctataaattagataaga

SEQ ID NO: 33420 - DNA, 20 bp, synthetic construct
  misc_feature 1..20: note = chemically synthesized
  source 1..20: mol_type = other DNA
gtaatcactcattttagaga

SEQ ID NO: 33421 - DNA, 20 bp, synthetic construct
  misc_feature 1..20: note = chemically synthesized
  source 1..20: mol_type = other DNA
cctaatttaaactaagatag

SEQ ID NO: 33422 - DNA, 20 bp, synthetic construct
  misc_feature 1..20: note = chemically synthesized
  source 1..20: mol_type = other DNA
aaaaatcatgtcaacgcata

SEQ ID NO: 33423 - DNA, 20 bp, synthetic construct
  misc_feature 1..20: note = chemically synthesized
  source 1..20: mol_type = other DNA
cacaaaaggcttgggaaagt

SEQ ID NO: 33424 - DNA, 20 bp, synthetic construct
  misc_feature 1..20: note = chemically synthesized
  source 1..20: mol_type = other DNA
cttctccacagtgaagagga

SEQ ID NO: 33425 - DNA, 20 bp, synthetic construct
  misc_feature 1..20: note = chemically synthesized
  source 1..20: mol_type = other DNA
tagctctggacaagaaacca

SEQ ID NO: 33426 - DNA, 20 bp, synthetic construct
  misc_feature 1..20: note = chemically synthesized
  source 1..20: mol_type = other DNA
ccaccaaaagcatatatttg

SEQ ID NO: 33427 - DNA, 20 bp, synthetic construct
  misc_feature 1..20: note = chemically synthesized
  source 1..20: mol_type = other DNA
attataagtcagacagttag

SEQ ID NO: 33428 - DNA, 20 bp, synthetic construct
  misc_feature 1..20: note = chemically synthesized
  source 1..20: mol_type = other DNA
cttcttggaggctactgtca

SEQ ID NO: 33429 - DNA, 20 bp, synthetic construct
  misc_feature 1..20: note = chemically synthesized
  source 1..20: mol_type = other DNA
gggctctcgagcttccatcc

SEQ ID NO: 33430 - DNA, 20 bp, synthetic construct
  misc_feature 1..20: note = chemically synthesized
  source 1..20: mol_type = other DNA
acacttgcccttatgactga

SEQ ID NO: 33431 - DNA, 20 bp, synthetic construct
  misc_feature 1..20: note = chemically synthesized
  source 1..20: mol_type = other DNA
attataaagaaacaaaaaat

SEQ ID NO: 33432 - DNA, 20 bp, synthetic construct
  misc_feature 1..20: note = chemically synthesized
  source 1..20: mol_type = other DNA
tgatgtaaaagcagcacaac

SEQ ID NO: 33433 - DNA, 20 bp, synthetic construct
  misc_feature 1..20: note = chemically synthesized
  source 1..20: mol_type = other DNA
ggcgaacaaatctctgaaga

SEQ ID NO: 33434 - DNA, 20 bp, synthetic construct
  misc_feature 1..20: note = chemically synthesized
  source 1..20: mol_type = other DNA
agttgctctcaaattgcacc

SEQ ID NO: 33435 - DNA, 20 bp, synthetic construct
  misc_feature 1..20: note = chemically synthesized
  source 1..20: mol_type = other DNA
tttgccactttacagaaagg

SEQ ID NO: 33436 - DNA, 20 bp, synthetic construct
  misc_feature 1..20: note = chemically synthesized
  source 1..20: mol_type = other DNA
acggagggggaaaagaggct

SEQ ID NO: 33437 - DNA, 20 bp, synthetic construct
  misc_feature 1..20: note = chemically synthesized
  source 1..20: mol_type = other DNA
ggaaaagaggcttaaaacaa

SEQ ID NO: 33438 - DNA, 20 bp, synthetic construct
  misc_feature 1..20: note = chemically synthesized
  source 1..20: mol_type = other DNA
tatctacagaatgccctggg

SEQ ID NO: 33439 - DNA, 20 bp, synthetic construct
  misc_feature 1..20: note = chemically synthesized
  source 1..20: mol_type = other DNA
cagcacgtcaagcctgttac

SEQ ID NO: 33440 - DNA, 20 bp, synthetic construct
  misc_feature 1..20: note = chemically synthesized
  source 1..20: mol_type = other DNA
taattctgtctgtcaggatg

SEQ ID NO: 33441 - DNA, 20 bp, synthetic construct
  misc_feature 1..20: note = chemically synthesized
  source 1..20: mol_type = other DNA
attaaaatgaatactgtata

SEQ ID NO: 33442 - DNA, 20 bp, synthetic construct
  misc_feature 1..20: note = chemically synthesized
  source 1..20: mol_type = other DNA
agttttggagaaacctaatc

SEQ ID NO: 33443 - DNA, 20 bp, synthetic construct
  misc_feature 1..20: note = chemically synthesized
  source 1..20: mol_type = other DNA
ccacccaaactggcttttca

SEQ ID NO: 33444 - DNA, 20 bp, synthetic construct
  misc_feature 1..20: note = chemically synthesized
  source 1..20: mol_type = other DNA
ttctttatactttagaaaga

SEQ ID NO: 33445 - DNA, 20 bp, synthetic construct
  misc_feature 1..20: note = chemically synthesized
  source 1..20: mol_type = other DNA
gtcatccaggaagaccctat

SEQ ID NO: 33446 - DNA, 20 bp, synthetic construct
  misc_feature 1..20: note = chemically synthesized
  source 1..20: mol_type = other DNA
ttttctccctcttttttaaa

SEQ ID NO: 33447 - DNA, 20 bp, synthetic construct
  misc_feature 1..20: note = chemically synthesized
  source 1..20: mol_type = other DNA
tccctcttttttaaacaaaa

SEQ ID NO: 33448 - DNA, 20 bp, synthetic construct
  misc_feature 1..20: note = chemically synthesized
  source 1..20: mol_type = other DNA
cttttttaaacaaaacaaaa

SEQ ID NO: 33449 - DNA, 20 bp, synthetic construct
  misc_feature 1..20: note = chemically synthesized
  source 1..20: mol_type = other DNA
ttaaacaaaacaaaacaaaa

SEQ ID NO: 33450 - DNA, 20 bp, synthetic construct
  misc_feature 1..20: note = chemically synthesized
  source 1..20: mol_type = other DNA
caaaacaaaacaaaacaaaa

SEQ ID NO: 33451 - DNA, 20 bp, synthetic construct
  misc_feature 1..20: note = chemically synthesized
  source 1..20: mol_type = other DNA
taagtttttaacatcagact

SEQ ID NO: 33452 - DNA, 20 bp, synthetic construct
  misc_feature 1..20: note = chemically synthesized
  source 1..20: mol_type = other DNA
gaaaacaccttccatttctt

SEQ ID NO: 33453 - DNA, 20 bp, synthetic construct
  misc_feature 1..20: note = chemically synthesized
  source 1..20: mol_type = other DNA
tattctaaactggaaagcct

SEQ ID NO: 33454 - DNA, 20 bp, synthetic construct
  misc_feature 1..20: note = chemically synthesized
  source 1..20: mol_type = other DNA
aagactgactggccttctct

SEQ ID NO: 33455 - DNA, 20 bp, synthetic construct
  misc_feature 1..20: note = chemically synthesized
  source 1..20: mol_type = other DNA
ttaatgcagacaactgccaa

SEQ ID NO: 33456 - DNA, 20 bp, synthetic construct
  misc_feature 1..20: note = chemically synthesized
  source 1..20: mol_type = other DNA
atctaaataaaaaaaaaaat

SEQ ID NO: 33457 - DNA, 20 bp, synthetic construct
  misc_feature 1..20: note = chemically synthesized
  source 1..20: mol_type = other DNA
atttagtttttggcaatgaa

SEQ ID NO: 33458 - DNA, 20 bp, synthetic construct
  misc_feature 1..20: note = chemically synthesized
  source 1..20: mol_type = other DNA
tttggcaatgaaaaaaactg

SEQ ID NO: 33459 - DNA, 20 bp, synthetic construct
  misc_feature 1..20: note = chemically synthesized
  source 1..20: mol_type = other DNA
aaaattaaaaaaataaaaat

SEQ ID NO: 33460 - DNA, 20 bp, synthetic construct
  misc_feature 1..20: note = chemically synthesized
  source 1..20: mol_type = other DNA
taatcattgtttaaaaaaaa

SEQ ID NO: 33461 - DNA, 20 bp, synthetic construct
  misc_feature 1..20: note = chemically synthesized
  source 1..20: mol_type = other DNA
aaaaaaaataaaactttggg

SEQ ID NO: 33462 - DNA, 20 bp, synthetic construct
  misc_feature 1..20: note = chemically synthesized
  source 1..20: mol_type = other DNA
gatccaaggcactcatattt

SEQ ID NO: 33463 - DNA, 20 bp, synthetic construct
  misc_feature 1..20: note = chemically synthesized
  source 1..20: mol_type = other DNA
ttcctcctcacgttataaaa

SEQ ID NO: 33464 - DNA, 20 bp, synthetic construct
  misc_feature 1..20: note = chemically synthesized
  source 1..20: mol_type = other DNA
catgctgtctaagtttaaaa

SEQ ID NO: 33465 - DNA, 20 bp, synthetic construct
  misc_feature 1..20: note = chemically synthesized
  source 1..20: mol_type = other DNA
aaaagaaaaagaaaaagaaa

SEQ ID NO: 33466 - DNA, 20 bp, synthetic construct
  misc_feature 1..20: note = chemically synthesized
  source 1..20: mol_type = other DNA
atgtttaaaaaatctgaaag

SEQ ID NO: 33467 - DNA, 20 bp, synthetic construct
  misc_feature 1..20: note = chemically synthesized
  source 1..20: mol_type = other DNA
atcctagtttaaggaacagt

SEQ ID NO: 33468 - DNA, 20 bp, synthetic construct
  misc_feature 1..20: note = chemically synthesized
  source 1..20: mol_type = other DNA
agccaaaggacgaggatgag

SEQ ID NO: 33469 - DNA, 20 bp, synthetic construct
  misc_feature 1..20: note = chemically synthesized
  source 1..20: mol_type = other DNA
aaggacgaggatgagaaaaa

SEQ ID NO: 33470 - DNA, 20 bp, synthetic construct
  misc_feature 1..20: note = chemically synthesized
  source 1..20: mol_type = other DNA
aaggcagaaagattttgaaa

SEQ ID NO: 33471 - DNA, 20 bp, synthetic construct
  misc_feature 1..20: note = chemically synthesized
  source 1..20: mol_type = other DNA
ggtcccaaataggctggaaa

SEQ ID NO: 33472 - DNA, 20 bp, synthetic construct
  misc_feature 1..20: note = chemically synthesized
  source 1..20: mol_type = other DNA
taaaattatattttacctta

SEQ ID NO: 33473 - DNA, 20 bp, synthetic construct
  misc_feature 1..20: note = chemically synthesized
  source 1..20: mol_type = other DNA
cctatctgtaaaatgagcat

SEQ ID NO: 33474 - DNA, 20 bp, synthetic construct
  misc_feature 1..20: note = chemically synthesized
  source 1..20: mol_type = other DNA
gtgtcatctccctcccatct

SEQ ID NO: 33475 - DNA, 20 bp, synthetic construct
  misc_feature 1..20: note = chemically synthesized
  source 1..20: mol_type = other DNA
aagcaaactgtattattttc

SEQ ID NO: 33476 - DNA, 20 bp, synthetic construct
  misc_feature 1..20: note = chemically synthesized
  source 1..20: mol_type = other DNA
ttctaaaacagtatctttca

SEQ ID NO: 33477 - DNA, 20 bp, synthetic construct
  misc_feature 1..20: note = chemically synthesized
  source 1..20: mol_type = other DNA
caatgatgtgcatttttctc

SEQ ID NO: 33478 - DNA, 20 bp, synthetic construct
  misc_feature 1..20: note = chemically synthesized
  source 1..20: mol_type = other DNA
agatgtgtaagcagcaaggg

SEQ ID NO: 33479 - DNA, 20 bp, synthetic construct
  misc_feature 1..20: note = chemically synthesized
  source 1..20: mol_type = other DNA
tggggagggcgggagacaag

SEQ ID NO: 33480 - DNA, 20 bp, synthetic construct
  misc_feature 1..20: note = chemically synthesized
  source 1..20: mol_type = other DNA
acatttcatcctctctgacc

SEQ ID NO: 33481 - DNA, 20 bp, synthetic construct
  misc_feature 1..20: note = chemically synthesized
  source 1..20: mol_type = other DNA
ccgttcactaagtttgctgc

SEQ ID NO: 33482 - DNA, 20 bp, synthetic construct
  misc_feature 1..20: note = chemically synthesized
  source 1..20: mol_type = other DNA
tttttgttttctaagttgta

SEQ ID NO: 33483 - DNA, 20 bp, synthetic construct
  misc_feature 1..20: note = chemically synthesized
  source 1..20: mol_type = other DNA
ctgacttggtctcacaattg

SEQ ID NO: 33484 - DNA, 20 bp, synthetic construct
  misc_feature 1..20: note = chemically synthesized
  source 1..20: mol_type = other DNA
ccctgcagaattagacagct

SEQ ID NO: 33485 - DNA, 20 bp, synthetic construct
  misc_feature 1..20: note = chemically synthesized
  source 1..20: mol_type = other DNA
cctttaggactggaacagtc

SEQ ID NO: 33486 - DNA, 20 bp, synthetic construct
  misc_feature 1..20: note = chemically synthesized
  source 1..20: mol_type = other DNA
ctgcagatttccaaatgtgc

SEQ ID NO: 33487 - DNA, 20 bp, synthetic construct
  misc_feature 1..20: note = chemically synthesized
  source 1..20: mol_type = other DNA
agcccaactttaacaggtat

SEQ ID NO: 33488 - DNA, 20 bp, synthetic construct
  misc_feature 1..20: note = chemically synthesized
  source 1..20: mol_type = other DNA
ctttaaaaagtgtattctgc

SEQ ID NO: 33489 - DNA, 20 bp, synthetic construct
  misc_feature 1..20: note = chemically synthesized
  source 1..20: mol_type = other DNA
ataacatcaatcactcattt

SEQ ID NO: 33490 - DNA, 20 bp, synthetic construct
  misc_feature 1..20: note = chemically synthesized
  source 1..20: mol_type = other DNA
gccgctgtgggcagtacaaa

SEQ ID NO: 33491 - DNA, 20 bp, synthetic construct
  misc_feature 1..20: note = chemically synthesized
  source 1..20: mol_type = other DNA
agagaggctttgggaaagag

SEQ ID NO: 33492 - DNA, 20 bp, synthetic construct
  misc_feature 1..20: note = chemically synthesized
  source 1..20: mol_type = other DNA
aaatactagaataagctaaa

SEQ ID NO: 33493 - DNA, 20 bp, synthetic construct
  misc_feature 1..20: note = chemically synthesized
  source 1..20: mol_type = other DNA
aactggccattctccagaat

SEQ ID NO: 33494 - DNA, 20 bp, synthetic construct
  misc_feature 1..20: note = chemically synthesized
  source 1..20: mol_type = other DNA
ctctaacatttcttcaggaa

SEQ ID NO: 33495 - DNA, 20 bp, synthetic construct
  misc_feature 1..20: note = chemically synthesized
  source 1..20: mol_type = other DNA
gacggcaagtccttctttca

SEQ ID NO: 33496 - DNA, 20 bp, synthetic construct
  misc_feature 1..20: note = chemically synthesized
  source 1..20: mol_type = other DNA
tctggcaaagtcccacagaa

SEQ ID NO: 33497 - DNA, 20 bp, synthetic construct
  misc_feature 1..20: note = chemically synthesized
  source 1..20: mol_type = other DNA
agattgaggcttcccagccc

SEQ ID NO: 33498 - DNA, 20 bp, synthetic construct
  misc_feature 1..20: note = chemically synthesized
  source 1..20: mol_type = other DNA
agagaaacaagtaactcctt

SEQ ID NO: 33499 - DNA, 20 bp, synthetic construct
  misc_feature 1..20: note = chemically synthesized
  source 1..20: mol_type = other DNA
gcagggatcctaggaaaagt

SEQ ID NO: 33500 - DNA, 20 bp, synthetic construct
  misc_feature 1..20: note = chemically synthesized
  source 1..20: mol_type = other DNA
aaggttaagatcagcttcct

SEQ ID NO: 33501 - DNA, 20 bp, synthetic construct
  misc_feature 1..20: note = chemically synthesized
  source 1..20: mol_type = other DNA
tactgataaaggcactgcaa

SEQ ID NO: 33502 - DNA, 20 bp, synthetic construct
  misc_feature 1..20: note = chemically synthesized
  source 1..20: mol_type = other DNA
ggattacagtaaggaaaatc

SEQ ID NO: 33503 - DNA, 20 bp, synthetic construct
  misc_feature 1..20: note = chemically synthesized
  source 1..20: mol_type = other DNA
aactggggtcctctgctgtc

SEQ ID NO: 33504 - DNA, 20 bp, synthetic construct
  misc_feature 1..20: note = chemically synthesized
  source 1..20: mol_type = other DNA
cccttatcaccattccagta

SEQ ID NO: 33505 - DNA, 20 bp, synthetic construct
  misc_feature 1..20: note = chemically synthesized
  source 1..20: mol_type = other DNA
aggacttaaaaaaaaaaaaa

SEQ ID NO: 33506 - DNA, 20 bp, synthetic construct
  misc_feature 1..20: note = chemically synthesized
  source 1..20: mol_type = other DNA
aaaaaccaaccaaccaaaca

SEQ ID NO: 33507 - DNA, 20 bp, synthetic construct
  misc_feature 1..20: note = chemically synthesized
  source 1..20: mol_type = other DNA
aaatcaaaataggaaataca

SEQ ID NO: 33508 - DNA, 20 bp, synthetic construct
  misc_feature 1..20: note = chemically synthesized
  source 1..20: mol_type = other DNA
catgcctttaagctaactgc

SEQ ID NO: 33509 - DNA, 20 bp, synthetic construct
  misc_feature 1..20: note = chemically synthesized
  source 1..20: mol_type = other DNA
gaaaaataaacctagacctg

SEQ ID NO: 33510 - DNA, 20 bp, synthetic construct
  misc_feature 1..20: note = chemically synthesized
  source 1..20: mol_type = other DNA
caatcaactcatttaaaaag

SEQ ID NO: 33511 - DNA, 20 bp, synthetic construct
  misc_feature 1..20: note = chemically synthesized
  source 1..20: mol_type = other DNA
tactgaagtgagaaattcaa

SEQ ID NO: 33512 - DNA, 20 bp, synthetic construct
  misc_feature 1..20: note = chemically synthesized
  source 1..20: mol_type = other DNA
taagataatttgatatccta

SEQ ID NO: 33513 - DNA, 20 bp, synthetic construct
  misc_feature 1..20: note = chemically synthesized
  source 1..20: mol_type = other DNA
aatacagattcagattaagg

SEQ ID NO: 33514 - DNA, 20 bp, synthetic construct
  misc_feature 1..20: note = chemically synthesized
  source 1..20: mol_type = other DNA
tgcctttataaaatccagaa

SEQ ID NO: 33515 - DNA, 20 bp, synthetic construct
  misc_feature 1..20: note = chemically synthesized
  source 1..20: mol_type = other DNA
ttataaaatccagaacaaaa

SEQ ID NO: 33516 - DNA, 20 bp, synthetic construct
  misc_feature 1..20: note = chemically synthesized
  source 1..20: mol_type = other DNA
taaggaagctgcagaaaggt

SEQ ID NO: 33517 - DNA, 20 bp, synthetic construct
  misc_feature 1..20: note = chemically synthesized
  source 1..20: mol_type = other DNA
ttacttttgacctgggtttt

SEQ ID NO: 33518 - DNA, 20 bp, synthetic construct
  misc_feature 1..20: note = chemically synthesized
  source 1..20: mol_type = other DNA
tgtactgcaggggaattcgg

SEQ ID NO: 33519 - DNA, 20 bp, synthetic construct
  misc_feature 1..20: note = chemically synthesized
  source 1..20: mol_type = other DNA
gtatcaatagccaaagatcc

SEQ ID NO: 33520 - DNA, 20 bp, synthetic construct
  misc_feature 1..20: note = chemically synthesized
  source 1..20: mol_type = other DNA
agcctaaagccactgctacc

SEQ ID NO: 33521 - DNA, 20 bp, synthetic construct
  misc_feature 1..20: note = chemically synthesized
  source 1..20: mol_type = other DNA
ctaccacacccagccatacc

SEQ ID NO: 33522 - DNA, 20 bp, synthetic construct
  misc_feature 1..20: note = chemically synthesized
  source 1..20: mol_type = other DNA
aatgcaaaaagctaagttct

SEQ ID NO: 33523 - DNA, 20 bp, synthetic construct
  misc_feature 1..20: note = chemically synthesized
  source 1..20: mol_type = other DNA
gctgggctgactgcccacgt

SEQ ID NO: 33524 - DNA, 20 bp, synthetic construct
  misc_feature 1..20: note = chemically synthesized
  source 1..20: mol_type = other DNA
gagaggaagatggatgtagg

SEQ ID NO: 33525 - DNA, 20 bp, synthetic construct
  misc_feature 1..20: note = chemically synthesized
  source 1..20: mol_type = other DNA
aagatggatgtaggaaaaac

SEQ ID NO: 33526 - DNA, 20 bp, synthetic construct
  misc_feature 1..20: note = chemically synthesized
  source 1..20: mol_type = other DNA
acacagcgagaccctgtctc

SEQ ID NO: 33527 - DNA, 20 bp, synthetic construct
  misc_feature 1..20: note = chemically synthesized
  source 1..20: mol_type = other DNA
aatgtatttctagggaagaa

SEQ ID NO: 33528 - DNA, 20 bp, synthetic construct
  misc_feature 1..20: note = chemically synthesized
  source 1..20: mol_type = other DNA
gaagcctgctggaattctag

SEQ ID NO: 33529 - DNA, 20 bp, synthetic construct
  misc_feature 1..20: note = chemically synthesized
  source 1..20: mol_type = other DNA
gaaatgatgggaagagaccc

SEQ ID NO: 33530 - DNA, 20 bp, synthetic construct
  misc_feature 1..20: note = chemically synthesized
  source 1..20: mol_type = other DNA
tgcaagggggagaaactgaa

SEQ ID NO: 33531 - DNA, 20 bp, synthetic construct
  misc_feature 1..20: note = chemically synthesized
  source 1..20: mol_type = other DNA
atacacacaaaaggtacctg

SEQ ID NO: 33532 - DNA, 20 bp, synthetic construct
  misc_feature 1..20: note = chemically synthesized
  source 1..20: mol_type = other DNA
caataccccttcccccaacc

SEQ ID NO: 33533 - DNA, 20 bp, synthetic construct
  misc_feature 1..20: note = chemically synthesized
  source 1..20: mol_type = other DNA
cactattcttagctattttt

SEQ ID NO: 33534 - DNA, 20 bp, synthetic construct
  misc_feature 1..20: note = chemically synthesized
  source 1..20: mol_type = other DNA
gaattgttcatgaaatccca

SEQ ID NO: 33535 - DNA, 20 bp, synthetic construct
  misc_feature 1..20: note = chemically synthesized
  source 1..20: mol_type = other DNA
gggaaagttctggaagtcgg

SEQ ID NO: 33536 - DNA, 20 bp, synthetic construct
  misc_feature 1..20: note = chemically synthesized
  source 1..20: mol_type = other DNA
agaggggggaaaatcttttg

SEQ ID NO: 33537 - DNA, 20 bp, synthetic construct
  misc_feature 1..20: note = chemically synthesized
  source 1..20: mol_type = other DNA
ctgcggctgtgccctggatg

SEQ ID NO: 33538 - DNA, 20 bp, synthetic construct
  misc_feature 1..20: note = chemically synthesized
  source 1..20: mol_type = other DNA
cacataaaaatttaagacgg

SEQ ID NO: 33539 - DNA, 20 bp, synthetic construct
  misc_feature 1..20: note = chemically synthesized
  source 1..20: mol_type = other DNA
ccctctgcctctctacattc

SEQ ID NO: 33540 - DNA, 20 bp, synthetic construct
  misc_feature 1..20: note = chemically synthesized
  source 1..20: mol_type = other DNA
ctgtaccaccagaagtcctg

SEQ ID NO: 33541 - DNA, 20 bp, synthetic construct
  misc_feature 1..20: note = chemically synthesized
  source 1..20: mol_type = other DNA
cggaaaaagtctcagcctaa

SEQ ID NO: 33542 - DNA, 20 bp, synthetic construct
  misc_feature 1..20: note = chemically synthesized
  source 1..20: mol_type = other DNA
taatgttcttgatatgttaa

SEQ ID NO: 33543 - DNA, 20 bp, synthetic construct
  misc_feature 1..20: note = chemically synthesized
  source 1..20: mol_type = other DNA
gttttcaatcatcatcagag

SEQ ID NO: 33544 - DNA, 20 bp, synthetic construct
  misc_feature 1..20: note = chemically synthesized
  source 1..20: mol_type = other DNA
ggatggctactggcttggag

SEQ ID NO: 33545 - DNA, 20 bp, synthetic construct
  misc_feature 1..20: note = chemically synthesized
  source 1..20: mol_type = other DNA
aggcattgtgactttttatt

SEQ ID NO: 33546 - DNA, 20 bp, synthetic construct
  misc_feature 1..20: note = chemically synthesized
  source 1..20: mol_type = other DNA
gtattaaggcccaacccagc

SEQ ID NO: 33547 - DNA, 20 bp, synthetic construct
  misc_feature 1..20: note = chemically synthesized
  source 1..20: mol_type = other DNA
gcttccttgctccaaactat

SEQ ID NO: 33548 - DNA, 20 bp, synthetic construct
  misc_feature 1..20: note = chemically synthesized
  source 1..20: mol_type = other DNA
aaaacagagcgtccccccaa

SEQ ID NO: 33549 - DNA, 20 bp, synthetic construct
  misc_feature 1..20: note = chemically synthesized
  source 1..20: mol_type = other DNA
agggagggggaaatccctcc

SEQ ID NO: 33550 - DNA, 20 bp, synthetic construct
  misc_feature 1..20: note = chemically synthesized
  source 1..20: mol_type = other DNA
tctggtctgtcaaacccctg

SEQ ID NO: 33551 - DNA, 20 bp, synthetic construct
  misc_feature 1..20: note = chemically synthesized
  source 1..20: mol_type = other DNA
ccaggaaagccctggctata

SEQ ID NO: 33552 - DNA, 20 bp, synthetic construct
  misc_feature 1..20: note = chemically synthesized
  source 1..20: mol_type = other DNA
tgataaaggcagctcactaa

SEQ ID NO: 33553 - DNA, 20 bp, synthetic construct
  misc_feature 1..20: note = chemically synthesized
  source 1..20: mol_type = other DNA
tgatttcattatagcctctg

SEQ ID NO: 33554 - DNA, 20 bp, synthetic construct
  misc_feature 1..20: note = chemically synthesized
  source 1..20: mol_type = other DNA
tcataaacaagcactattaa

SEQ ID NO: 33555 - DNA, 20 bp, synthetic construct
  misc_feature 1..20: note = chemically synthesized
  source 1..20: mol_type = other DNA
ttgcctttcttgaaaagcta

SEQ ID NO: 33556 - DNA, 20 bp, synthetic construct
  misc_feature 1..20: note = chemically synthesized
  source 1..20: mol_type = other DNA
aaaagctagaaaactgtgtc

SEQ ID NO: 33557 - DNA, 20 bp, synthetic construct
  misc_feature 1..20: note = chemically synthesized
  source 1..20: mol_type = other DNA
tccgttcaagccagaaaagt

SEQ ID NO: 33558 - DNA, 20 bp, synthetic construct
  misc_feature 1..20: note = chemically synthesized
  source 1..20: mol_type = other DNA
gcggggagaagggaagaagt

SEQ ID NO: 33559 - DNA, 20 bp, synthetic construct
  misc_feature 1..20: note = chemically synthesized
  source 1..20: mol_type = other DNA
caacaacaaattacacaaat

SEQ ID NO: 33560 - DNA, 20 bp, synthetic construct
  misc_feature 1..20: note = chemically synthesized
  source 1..20: mol_type = other DNA
agcatttggcaggcaaagga

SEQ ID NO: 33561 - DNA, 20 bp, synthetic construct
  misc_feature 1..20: note = chemically synthesized
  source 1..20: mol_type = other DNA
agagccacacggacgtctca

SEQ ID NO: 33562 - DNA, 20 bp, synthetic construct
  misc_feature 1..20: note = chemically synthesized
  source 1..20: mol_type = other DNA
atggtctacctgagacctga

SEQ ID NO: 33563 - DNA, 20 bp, synthetic construct
  misc_feature 1..20: note = chemically synthesized
  source 1..20: mol_type = other DNA
aaaaagattaggaggaggag

SEQ ID NO: 33564 - DNA, 20 bp, synthetic construct
  misc_feature 1..20: note = chemically synthesized
  source 1..20: mol_type = other DNA
gccactcaatgccatatcta

SEQ ID NO: 33565 - DNA, 20 bp, synthetic construct
  misc_feature 1..20: note = chemically synthesized
  source 1..20: mol_type = other DNA
aacccttgacaggagccagt

SEQ ID NO: 33566 - DNA, 20 bp, synthetic construct
  misc_feature 1..20: note = chemically synthesized
  source 1..20: mol_type = other DNA
ccactcttttccgttaccaa

SEQ ID NO: 33567 - DNA, 20 bp, synthetic construct
  misc_feature 1..20: note = chemically synthesized
  source 1..20: mol_type = other DNA
aacagagcgctaatctgatt

SEQ ID NO: 33568 - DNA, 20 bp, synthetic construct
  misc_feature 1..20: note = chemically synthesized
  source 1..20: mol_type = other DNA
tacatgttgcaccatttcat

SEQ ID NO: 33569 - DNA, 20 bp, synthetic construct
  misc_feature 1..20: note = chemically synthesized
  source 1..20: mol_type = other DNA
tctaaattatttggtctaaa

SEQ ID NO: 33570 - DNA, 20 bp, synthetic construct
  misc_feature 1..20: note = chemically synthesized
  source 1..20: mol_type = other DNA
tgttcctggcttgtggtgag

SEQ ID NO: 33571 - DNA, 20 bp, synthetic construct
  misc_feature 1..20: note = chemically synthesized
  source 1..20: mol_type = other DNA
ggtcttgcatacacatacac

SEQ ID NO: 33572 - DNA, 20 bp, synthetic construct
  misc_feature 1..20: note = chemically synthesized
  source 1..20: mol_type = other DNA
caccaagaaggcacaaaaaa

SEQ ID NO: 33573 - DNA, 20 bp, synthetic construct
  misc_feature 1..20: note = chemically synthesized
  source 1..20: mol_type = other DNA
caatgacccactcctattat

SEQ ID NO: 33574 - DNA, 20 bp, synthetic construct
  misc_feature 1..20: note = chemically synthesized
  source 1..20: mol_type = other DNA
gaatctgggctccgctcttc

SEQ ID NO: 33575 - DNA, 20 bp, synthetic construct
  misc_feature 1..20: note = chemically synthesized
  source 1..20: mol_type = other DNA
acataagactaaagaatgtg

SEQ ID NO: 33576 - DNA, 20 bp, synthetic construct
  misc_feature 1..20: note = chemically synthesized
  source 1..20: mol_type = other DNA
atgtttgagtaaaagagctg

SEQ ID NO: 33577 - DNA, 20 bp, synthetic construct
  misc_feature 1..20: note = chemically synthesized
  source 1..20: mol_type = other DNA
cagccccgaaaaagggcaga

SEQ ID NO: 33578 - DNA, 20 bp, synthetic construct
  misc_feature 1..20: note = chemically synthesized
  source 1..20: mol_type = other DNA
gaggaacaagaaccttactc

SEQ ID NO: 33579 - DNA, 20 bp, synthetic construct
  misc_feature 1..20: note = chemically synthesized
  source 1..20: mol_type = other DNA
gaccagcctgggcaacatag

SEQ ID NO: 33580 - DNA, 20 bp, synthetic construct
  misc_feature 1..20: note = chemically synthesized
  source 1..20: mol_type = other DNA
tgctgagctctcataataca

SEQ ID NO: 33581 - DNA, 20 bp, synthetic construct
  misc_feature 1..20: note = chemically synthesized
  source 1..20: mol_type = other DNA
aacctccatattgagagaca

SEQ ID NO: 33582 - DNA, 20 bp, synthetic construct
  misc_feature 1..20: note = chemically synthesized
  source 1..20: mol_type = other DNA
tgatgtgaaagttaaagatt

SEQ ID NO: 33583 - DNA, 20 bp, synthetic construct
  misc_feature 1..20: note = chemically synthesized
  source 1..20: mol_type = other DNA
taaattactccaatgacaaa

SEQ ID NO: 33584 - DNA, 20 bp, synthetic construct
  misc_feature 1..20: note = chemically synthesized
  source 1..20: mol_type = other DNA
gacatgaggtgtgaatgatg

SEQ ID NO: 33585 - DNA, 20 bp, synthetic construct
  misc_feature 1..20: note = chemically synthesized
  source 1..20: mol_type = other DNA
gatcagccaccaaccgaacc

SEQ ID NO: 33586 - DNA, 20 bp, synthetic construct
  misc_feature 1..20: note = chemically synthesized
  source 1..20: mol_type = other DNA
cctttgtcaacccagcatga

SEQ ID NO: 33587 - DNA, 20 bp, synthetic construct
  misc_feature 1..20: note = chemically synthesized
  source 1..20: mol_type = other DNA
gagagagagcggacattttg

SEQ ID NO: 33588 - DNA, 20 bp, synthetic construct
  misc_feature 1..20: note = chemically synthesized
  source 1..20: mol_type = other DNA
ttttcttttaaatacaactg

SEQ ID NO: 33589 - DNA, 20 bp, synthetic construct
  misc_feature 1..20: note = chemically synthesized
  source 1..20: mol_type = other DNA
agagacagtgaggtctacaa

SEQ ID NO: 33590 - DNA, 20 bp, synthetic construct
  misc_feature 1..20: note = chemically synthesized
  source 1..20: mol_type = other DNA
tttctacatggatagctttc

SEQ ID NO: 33591 - DNA, 20 bp, synthetic construct
  misc_feature 1..20: note = chemically synthesized
  source 1..20: mol_type = other DNA
caaaatcattcattgccagg

SEQ ID NO: 33592 - DNA, 20 bp, synthetic construct
  misc_feature 1..20: note = chemically synthesized
  source 1..20: mol_type = other DNA
ttaaacttcagccagagatc

SEQ ID NO: 33593 - DNA, 20 bp, synthetic construct
  misc_feature 1..20: note = chemically synthesized
  source 1..20: mol_type = other DNA
cggaccacaggaactagtgt

SEQ ID NO: 33594 - DNA, 20 bp, synthetic construct
  misc_feature 1..20: note = chemically synthesized
  source 1..20: mol_type = other DNA
gcatgcctattaaaaatccc

SEQ ID NO: 33595 - DNA, 20 bp, synthetic construct
  misc_feature 1..20: note = chemically synthesized
  source 1..20: mol_type = other DNA
ccctttttcagcatgcttct

SEQ ID NO: 33596 - DNA, 20 bp, synthetic construct
  misc_feature 1..20: note = chemically synthesized
  source 1..20: mol_type = other DNA
ggtatttgctggacagtgtg

SEQ ID NO: 33597 - DNA, 20 bp, synthetic construct
  misc_feature 1..20: note = chemically synthesized
  source 1..20: mol_type = other DNA
aattcaactatttctttttc

SEQ ID NO: 33598 - DNA, 20 bp, synthetic construct
  misc_feature 1..20: note = chemically synthesized
  source 1..20: mol_type = other DNA
attctttggagtttttcaaa

SEQ ID NO: 33599 - DNA, 20 bp, synthetic construct
  misc_feature 1..20: note = chemically synthesized
  source 1..20: mol_type = other DNA
attccaaaaaatagcaggga

SEQ ID NO: 33600 - DNA, 20 bp, synthetic construct
  misc_feature 1..20: note = chemically synthesized
  source 1..20: mol_type = other DNA
atgatttcactttctagata

SEQ ID NO: 33601 - DNA, 20 bp, synthetic construct
  misc_feature 1..20: note = chemically synthesized
  source 1..20: mol_type = other DNA
gattttcaagggaagagaag

SEQ ID NO: 33602 - DNA, 20 bp, synthetic construct
  misc_feature 1..20: note = chemically synthesized
  source 1..20: mol_type = other DNA
agtctaggagacccagcaaa

SEQ ID NO: 33603 - DNA, 20 bp, synthetic construct
  misc_feature 1..20: note = chemically synthesized
  source 1..20: mol_type = other DNA
tgaaaggatggagaatacag

SEQ ID NO: 33604 - DNA, 20 bp, synthetic construct
  misc_feature 1..20: note = chemically synthesized
  source 1..20: mol_type = other DNA
ggagaggccaccacgcagct

SEQ ID NO: 33605 - DNA, 20 bp, synthetic construct
  misc_feature 1..20: note = chemically synthesized
  source 1..20: mol_type = other DNA
tgttgactgcagtttccatt

SEQ ID NO: 33606 - DNA, 20 bp, synthetic construct
  misc_feature 1..20: note = chemically synthesized
  source 1..20: mol_type = other DNA
agccttgttcagccagaaat

SEQ ID NO: 33607 - DNA, 20 bp, synthetic construct
  misc_feature 1..20: note = chemically synthesized
  source 1..20: mol_type = other DNA
accaagccacacacaaacag

SEQ ID NO: 33608 - DNA, 20 bp, synthetic construct
  misc_feature 1..20: note = chemically synthesized
  source 1..20: mol_type = other DNA
ttctctttcccagaagattg

SEQ ID NO: 33609 - DNA, 20 bp, synthetic construct
  misc_feature 1..20: note = chemically synthesized
  source 1..20: mol_type = other DNA
cataatgtcacaataaacta

SEQ ID NO: 33610 - DNA, 20 bp, synthetic construct
  misc_feature 1..20: note = chemically synthesized
  source 1..20: mol_type = other DNA
gaagataagaaaatcgagaa

SEQ ID NO: 33611 - DNA, 20 bp, synthetic construct
  misc_feature 1..20: note = chemically synthesized
  source 1..20: mol_type = other DNA
aaagaaagaaaaaggaaaaa

SEQ ID NO: 33612 - DNA, 20 bp, synthetic construct
  misc_feature 1..20: note = chemically synthesized
  source 1..20: mol_type = other DNA
cctacctctttcgagctcct

SEQ ID NO: 33613 - DNA, 20 bp, synthetic construct
  misc_feature 1..20: note = chemically synthesized
  source 1..20: mol_type = other DNA
gcgcaccctgggacccctga

SEQ ID NO: 33614 - DNA, 20 bp, synthetic construct
  misc_feature 1..20: note = chemically synthesized
  source 1..20: mol_type = other DNA
ggtttttttttttttccttt

SEQ ID NO: 33615 - DNA, 20 bp, synthetic construct
  misc_feature 1..20: note = chemically synthesized
  source 1..20: mol_type = other DNA
cattattatgactttacttg

SEQ ID NO: 33616 - DNA, 20 bp, synthetic construct
  misc_feature 1..20: note = chemically synthesized
  source 1..20: mol_type = other DNA
cactccctttaagtacttcg

SEQ ID NO: 33617 - DNA, 20 bp, synthetic construct
  misc_feature 1..20: note = chemically synthesized
  source 1..20: mol_type = other DNA
aagcattaactggtttggat

SEQ ID NO: 33618 - DNA, 20 bp, synthetic construct
  misc_feature 1..20: note = chemically synthesized
  source 1..20: mol_type = other DNA
agttaaataaaccgacatgg

SEQ ID NO: 33619 - DNA, 20 bp, synthetic construct
  misc_feature 1..20: note = chemically synthesized
  source 1..20: mol_type = other DNA
tcagagcagcagctgaatga

SEQ ID NO: 33620 - DNA, 20 bp, synthetic construct
  misc_feature 1..20: note = chemically synthesized
  source 1..20: mol_type = other DNA
tgccatcaaactgctaacaa

SEQ ID NO: 33621 - DNA, 20 bp, synthetic construct
  misc_feature 1..20: note = chemically synthesized
  source 1..20: mol_type = other DNA
aactgtacttaacgttaaaa

SEQ ID NO: 33622 - DNA, 20 bp, synthetic construct
  misc_feature 1..20: note = chemically synthesized
  source 1..20: mol_type = other DNA
taacgttaaaagaaaacgga

SEQ ID NO: 33623 - DNA, 20 bp, synthetic construct
  misc_feature 1..20: note = chemically synthesized
  source 1..20: mol_type = other DNA
ccactgaggcagctaataca

SEQ ID NO: 33624 - DNA, 20 bp, synthetic construct
  misc_feature 1..20: note = chemically synthesized
  source 1..20: mol_type = other DNA
aacttttaatcttgagaaga

SEQ ID NO: 33625 - DNA, 20 bp, synthetic construct
  misc_feature 1..20: note = chemically synthesized
  source 1..20: mol_type = other DNA
taataggccaatcaaaaatg

SEQ ID NO: 33626 - DNA, 20 bp, synthetic construct
  misc_feature 1..20: note = chemically synthesized
  source 1..20: mol_type = other DNA
atcgtcacggactttgttca

SEQ ID NO: 33627 - DNA, 20 bp, synthetic construct
  misc_feature 1..20: note = chemically synthesized
  source 1..20: mol_type = other DNA
tctaaacatggtaatttatc

SEQ ID NO: 33628 - DNA, 20 bp, synthetic construct
  misc_feature 1..20: note = chemically synthesized
  source 1..20: mol_type = other DNA
gtaaacatccactgtggtat

SEQ ID NO: 33629 - DNA, 20 bp, synthetic construct
  misc_feature 1..20: note = chemically synthesized
  source 1..20: mol_type = other DNA
gggcaaatcagaattagatt

SEQ ID NO: 33630 - DNA, 20 bp, synthetic construct
  misc_feature 1..20: note = chemically synthesized
  source 1..20: mol_type = other DNA
ttttttctccttaacataac

SEQ ID NO: 33631 - DNA, 20 bp, synthetic construct
  misc_feature 1..20: note = chemically synthesized
  source 1..20: mol_type = other DNA
tgcagggattggccaaatat

SEQ ID NO: 33632 - DNA, 20 bp, synthetic construct
  misc_feature 1..20: note = chemically synthesized
  source 1..20: mol_type = other DNA
tcagtggattcgcctctatc

SEQ ID NO: 33633 - DNA, 20 bp, synthetic construct
  misc_feature 1..20: note = chemically synthesized
  source 1..20: mol_type = other DNA
acaacagtgagaatacaaac

SEQ ID NO: 33634 - DNA, 20 bp, synthetic construct
  misc_feature 1..20: note = chemically synthesized
  source 1..20: mol_type = other DNA
cacattataaaaatcttctt

SEQ ID NO: 33635 - DNA, 20 bp, synthetic construct
  misc_feature 1..20: note = chemically synthesized
  source 1..20: mol_type = other DNA
atatggaataagttacattt

SEQ ID NO: 33636 - DNA, 20 bp, synthetic construct
  misc_feature 1..20: note = chemically synthesized
  source 1..20: mol_type = other DNA
aattaattaggtcatgttgt

SEQ ID NO: 33637 - DNA, 20 bp, synthetic construct
  misc_feature 1..20: note = chemically synthesized
  source 1..20: mol_type = other DNA
tccaaattgatacataacat

SEQ ID NO: 33638 - DNA, 20 bp, synthetic construct
  misc_feature 1..20: note = chemically synthesized
  source 1..20: mol_type = other DNA
aagctggtactactgtatgt

SEQ ID NO: 33639 - DNA, 20 bp, synthetic construct
  misc_feature 1..20: note = chemically synthesized
  source 1..20: mol_type = other DNA
ttcactaagagaaaggtgtg

SEQ ID NO: 33640 - DNA, 20 bp, synthetic construct
  misc_feature 1..20: note = chemically synthesized
  source 1..20: mol_type = other DNA
tctgtaacagcaggagacag

SEQ ID NO: 33641 - DNA, 20 bp, synthetic construct
  misc_feature 1..20: note = chemically synthesized
  source 1..20: mol_type = other DNA
atatcacgtggacctattct

SEQ ID NO: 33642 - DNA, 20 bp, synthetic construct
  misc_feature 1..20: note = chemically synthesized
  source 1..20: mol_type = other DNA
tctctgacattgtactttga

SEQ ID NO: 33643 - DNA, 20 bp, synthetic construct
  misc_feature 1..20: note = chemically synthesized
  source 1..20: mol_type = other DNA
aaaatcctaggtacttatta

SEQ ID NO: 33644 - DNA, 20 bp, synthetic construct
  misc_feature 1..20: note = chemically synthesized
  source 1..20: mol_type = other DNA
gattcctatgtgcaataagc

SEQ ID NO: 33645 - DNA, 20 bp, synthetic construct
  misc_feature 1..20: note = chemically synthesized
  source 1..20: mol_type = other DNA
aatatgagactaaaaaaaaa

SEQ ID NO: 33646 - DNA, 20 bp, synthetic construct
  misc_feature 1..20: note = chemically synthesized
  source 1..20: mol_type = other DNA
gagactaaaaaaaaagaaaa

SEQ ID NO: 33647 - DNA, 20 bp, synthetic construct
  misc_feature 1..20: note = chemically synthesized
  source 1..20: mol_type = other DNA
taaaaaaaaagaaaacaaaa

SEQ ID NO: 33648 - DNA, 20 bp, synthetic construct
  misc_feature 1..20: note = chemically synthesized
  source 1..20: mol_type = other DNA
aaaaagaaaacaaaacaaaa

SEQ ID NO: 33649 - DNA, 20 bp, synthetic construct
  misc_feature 1..20: note = chemically synthesized
  source 1..20: mol_type = other DNA
ctgcctctactgaaaataca

SEQ ID NO: 33650 - DNA, 20 bp, synthetic construct
  misc_feature 1..20: note = chemically synthesized
  source 1..20: mol_type = other DNA
tccagcctgggcaacaagag

SEQ ID NO: 33651 - DNA, 20 bp, synthetic construct
  misc_feature 1..20: note = chemically synthesized
  source 1..20: mol_type = other DNA
taaaaaaaaaaaaaaaaaaa

SEQ ID NO: 33652 - DNA, 20 bp, synthetic construct
  misc_feature 1..20: note = chemically synthesized
  source 1..20: mol_type = other DNA
atgatatgcactacctttcc

SEQ ID NO: 33653 - DNA, 20 bp, synthetic construct
  misc_feature 1..20: note = chemically synthesized
  source 1..20: mol_type = other DNA
caaaatcaagatacatctgt

SEQ ID NO: 33654 - DNA, 20 bp, synthetic construct
  misc_feature 1..20: note = chemically synthesized
  source 1..20: mol_type = other DNA
agcacctctgaaaatgaaaa

SEQ ID NO: 33655 - DNA, 20 bp, synthetic construct
  misc_feature 1..20: note = chemically synthesized
  source 1..20: mol_type = other DNA
caaatcatcacatatgtaaa

SEQ ID NO: 33656 - DNA, 20 bp, synthetic construct
  misc_feature 1..20: note = chemically synthesized
  source 1..20: mol_type = other DNA
gcttaaataataactacaag

SEQ ID NO: 33657 - DNA, 20 bp, synthetic construct
  misc_feature 1..20: note = chemically synthesized
  source 1..20: mol_type = other DNA
catttacactgctgtaataa

SEQ ID NO: 33658 - DNA, 20 bp, synthetic construct
  misc_feature 1..20: note = chemically synthesized
  source 1..20: mol_type = other DNA
gcagcataattcacactgcc

SEQ ID NO: 33659 - DNA, 20 bp, synthetic construct
  misc_feature 1..20: note = chemically synthesized
  source 1..20: mol_type = other DNA
aaaaaaaaaatcacaaaata

SEQ ID NO: 33660 - DNA, 20 bp, synthetic construct
  misc_feature 1..20: note = chemically synthesized
  source 1..20: mol_type = other DNA
tccaggatgctgccagttaa

SEQ ID NO: 33661 - DNA, 20 bp, synthetic construct
  misc_feature 1..20: note = chemically synthesized
  source 1..20: mol_type = other DNA
tagttaaaggtaatgtggtt

SEQ ID NO: 33662 - DNA, 20 bp, synthetic construct
  misc_feature 1..20: note = chemically synthesized
  source 1..20: mol_type = other DNA
tgactgaactgatttacaat

SEQ ID NO: 33663 - DNA, 20 bp, synthetic construct
  misc_feature 1..20: note = chemically synthesized
  source 1..20: mol_type = other DNA
gatgatcaaatgtacagata

SEQ ID NO: 33664 - DNA, 20 bp, synthetic construct
  misc_feature 1..20: note = chemically synthesized
  source 1..20: mol_type = other DNA
gtttaacatcggtctccttg

SEQ ID NO: 33665 - DNA, 20 bp, synthetic construct
  misc_feature 1..20: note = chemically synthesized
  source 1..20: mol_type = other DNA
agtggtgttcagagaaatac

SEQ ID NO: 33666 - DNA, 20 bp, synthetic construct
  misc_feature 1..20: note = chemically synthesized
  source 1..20: mol_type = other DNA
atgcaaattcccctttccct

SEQ ID NO: 33667 - DNA, 20 bp, synthetic construct
  misc_feature 1..20: note = chemically synthesized
  source 1..20: mol_type = other DNA
aaatgttggtaaggagcgag

SEQ ID NO: 33668 - DNA, 20 bp, synthetic construct
  misc_feature 1..20: note = chemically synthesized
  source 1..20: mol_type = other DNA
gaaaaaggaagtgaggtttg

SEQ ID NO: 33669 - DNA, 20 bp, synthetic construct
  misc_feature 1..20: note = chemically synthesized
  source 1..20: mol_type = other DNA
tgccggccccgaaagaaagc

SEQ ID NO: 33670 - DNA, 20 bp, synthetic construct
  misc_feature 1..20: note = chemically synthesized
  source 1..20: mol_type = other DNA
ccccaccaccacccctttaa

SEQ ID NO: 33671 - DNA, 20 bp, synthetic construct
  misc_feature 1..20: note = chemically synthesized
  source 1..20: mol_type = other DNA
accaagtataggtggtcctt

SEQ ID NO: 33672 - DNA, 20 bp, synthetic construct
  misc_feature 1..20: note = chemically synthesized
  source 1..20: mol_type = other DNA
tagcattgttcattattttg

SEQ ID NO: 33673 - DNA, 20 bp, synthetic construct
  misc_feature 1..20: note = chemically synthesized
  source 1..20: mol_type = other DNA
tctggatggacagagacaca

SEQ ID NO: 33674 - DNA, 20 bp, synthetic construct
  misc_feature 1..20: note = chemically synthesized
  source 1..20: mol_type = other DNA
tagggaagacctgttggaaa

SEQ ID NO: 33675 - DNA, 20 bp, synthetic construct
  misc_feature 1..20: note = chemically synthesized
  source 1..20: mol_type = other DNA
attgattttcctttttaaaa

SEQ ID NO: 33676 - DNA, 20 bp, synthetic construct
  misc_feature 1..20: note = chemically synthesized
  source 1..20: mol_type = other DNA
tctctctcaatgttgagcat

SEQ ID NO: 33677 - DNA, 20 bp, synthetic construct
  misc_feature 1..20: note = chemically synthesized
  source 1..20: mol_type = other DNA
gcaagcccggggccctcgct

SEQ ID NO: 33678 - DNA, 20 bp, synthetic construct
  misc_feature 1..20: note = chemically synthesized
  source 1..20: mol_type = other DNA
ctgttgctgtacattttacg

SEQ ID NO: 33679 - DNA, 20 bp, synthetic construct
  misc_feature 1..20: note = chemically synthesized
  source 1..20: mol_type = other DNA
atttttaaatttttcacgag

SEQ ID NO: 33680 - DNA, 20 bp, synthetic construct
  misc_feature 1..20: note = chemically synthesized
  source 1..20: mol_type = other DNA
gtaaaagagataaaggggga

SEQ ID NO: 33681 - DNA, 20 bp, synthetic construct
  misc_feature 1..20: note = chemically synthesized
  source 1..20: mol_type = other DNA
agggagtgagtacaagtcta

SEQ ID NO: 33682 - DNA, 20 bp, synthetic construct
  misc_feature 1..20: note = chemically synthesized
  source 1..20: mol_type = other DNA
atacataaaaataaaataaa

SEQ ID NO: 33683 - DNA, 20 bp, synthetic construct
  misc_feature 1..20: note = chemically synthesized
  source 1..20: mol_type = other DNA
aataatataccagcaatgat

SEQ ID NO: 33684 - DNA, 20 bp, synthetic construct
  misc_feature 1..20: note = chemically synthesized
  source 1..20: mol_type = other DNA
taacactatatagtgaccct

SEQ ID NO: 33685 - DNA, 20 bp, synthetic construct
  misc_feature 1..20: note = chemically synthesized
  source 1..20: mol_type = other DNA
cccctctagaatttgatcat

SEQ ID NO: 33686 - DNA, 20 bp, synthetic construct
  misc_feature 1..20: note = chemically synthesized
  source 1..20: mol_type = other DNA
cgagctgctcgtttaaaaga

SEQ ID NO: 33687 - DNA, 20 bp, synthetic construct
  misc_feature 1..20: note = chemically synthesized
  source 1..20: mol_type = other DNA
agtgtctgtcaagcaagaat

SEQ ID NO: 33688 - DNA, 20 bp, synthetic construct
  misc_feature 1..20: note = chemically synthesized
  source 1..20: mol_type = other DNA
atagcagagcctagagaagc

SEQ ID NO: 33689 - DNA, 20 bp, synthetic construct
  misc_feature 1..20: note = chemically synthesized
  source 1..20: mol_type = other DNA
ttataggcaggaagcaagaa

SEQ ID NO: 33690 - DNA, 20 bp, synthetic construct
  misc_feature 1..20: note = chemically synthesized
  source 1..20: mol_type = other DNA
ttatttatgtgattctgaat

SEQ ID NO: 33691 - DNA, 20 bp, synthetic construct
  misc_feature 1..20: note = chemically synthesized
  source 1..20: mol_type = other DNA
tgaattttcagcatggcagt

SEQ ID NO: 33692 - DNA, 20 bp, synthetic construct
  misc_feature 1..20: note = chemically synthesized
  source 1..20: mol_type = other DNA
cagcatggcagttaaaacaa

SEQ ID NO: 33693 - DNA, 20 bp, synthetic construct
  misc_feature 1..20: note = chemically synthesized
  source 1..20: mol_type = other DNA
aaaaaaacaccactaccaca

SEQ ID NO: 33694 - DNA, 20 bp, synthetic construct
  misc_feature 1..20: note = chemically synthesized
  source 1..20: mol_type = other DNA
tttattctgtgaaagcttaa

SEQ ID NO: 33695 - DNA, 20 bp, synthetic construct
  misc_feature 1..20: note = chemically synthesized
  source 1..20: mol_type = other DNA
gtgaaagcttaaaaaaacaa

SEQ ID NO: 33696 - DNA, 20 bp, synthetic construct
  misc_feature 1..20: note = chemically synthesized
  source 1..20: mol_type = other DNA
cacacacacacacacacaca

SEQ ID NO: 33697 - DNA, 20 bp, synthetic construct
  misc_feature 1..20: note = chemically synthesized
  source 1..20: mol_type = other DNA
gtactaaattggggtacata

SEQ ID NO: 33698 - DNA, 20 bp, synthetic construct
  misc_feature 1..20: note = chemically synthesized
  source 1..20: mol_type = other DNA
ctgcactccctatgcatttt

SEQ ID NO: 33699 - DNA, 20 bp, synthetic construct
  misc_feature 1..20: note = chemically synthesized
  source 1..20: mol_type = other DNA
cctttgatctatagcgaaat

SEQ ID NO: 33700 - DNA, 20 bp, synthetic construct
  misc_feature 1..20: note = chemically synthesized
  source 1..20: mol_type = other DNA
cttcatttgtacttttttta

SEQ ID NO: 33701 - DNA, 20 bp, synthetic construct
  misc_feature 1..20: note = chemically synthesized
  source 1..20: mol_type = other DNA
aagcagttgtggtagatcca

SEQ ID NO: 33702 - DNA, 20 bp, synthetic construct
  misc_feature 1..20: note = chemically synthesized
  source 1..20: mol_type = other DNA
aaaatacacgtttcctgaaa

SEQ ID NO: 33703 - DNA, 20 bp, synthetic construct
  misc_feature 1..20: note = chemically synthesized
  source 1..20: mol_type = other DNA
tagaggcgaatccactgatt

SEQ ID NO: 33704 - DNA, 20 bp, synthetic construct
  misc_feature 1..20: note = chemically synthesized
  source 1..20: mol_type = other DNA
tgcaagggtgccttcaaaaa

SEQ ID NO: 33705 - DNA, 20 bp, synthetic construct
  misc_feature 1..20: note = chemically synthesized
  source 1..20: mol_type = other DNA
tttgctttttgaactttcta

SEQ ID NO: 33706 - DNA, 20 bp, synthetic construct
  misc_feature 1..20: note = chemically synthesized
  source 1..20: mol_type = other DNA
atccctgcacctcctcaaac

SEQ ID NO: 33707 - DNA, 20 bp, synthetic construct
  misc_feature 1..20: note = chemically synthesized
  source 1..20: mol_type = other DNA
tcaaacaaaaacaaacctca

SEQ ID NO: 33708 - DNA, 20 bp, synthetic construct
  misc_feature 1..20: note = chemically synthesized
  source 1..20: mol_type = other DNA
cgatcctttcagtttccagt

SEQ ID NO: 33709 - DNA, 20 bp, synthetic construct
  misc_feature 1..20: note = chemically synthesized
  source 1..20: mol_type = other DNA
aaaaattattcctttacatt

SEQ ID NO: 33710 - DNA, 20 bp, synthetic construct
  misc_feature 1..20: note = chemically synthesized
  source 1..20: mol_type = other DNA
aaagatactcttggatcttt

SEQ ID NO: 33711 - DNA, 20 bp, synthetic construct
  misc_feature 1..20: note = chemically synthesized
  source 1..20: mol_type = other DNA
acaactgctgtccttttaac

SEQ ID NO: 33712 - DNA, 20 bp, synthetic construct
  misc_feature 1..20: note = chemically synthesized
  source 1..20: mol_type = other DNA
aatgaggaaatcataggaag

SEQ ID NO: 33713 - DNA, 20 bp, synthetic construct
  misc_feature 1..20: note = chemically synthesized
  source 1..20: mol_type = other DNA
tacacgagtgccctggtggt

SEQ ID NO: 33714 - DNA, 20 bp, synthetic construct
  misc_feature 1..20: note = chemically synthesized
  source 1..20: mol_type = other DNA
agtgtaactgatattctgat

SEQ ID NO: 33715 - DNA, 20 bp, synthetic construct
  misc_feature 1..20: note = chemically synthesized
  source 1..20: mol_type = other DNA
tcagctgacccggtatttaa

SEQ ID NO: 33716 - DNA, 20 bp, synthetic construct
  misc_feature 1..20: note = chemically synthesized
  source 1..20: mol_type = other DNA
tgacccggtatttaagaaaa

SEQ ID NO: 33717 - DNA, 20 bp, synthetic construct
  misc_feature 1..20: note = chemically synthesized
  source 1..20: mol_type = other DNA
aagattacagtattagagtt

SEQ ID NO: 33718 - DNA, 20 bp, synthetic construct
  misc_feature 1..20: note = chemically synthesized
  source 1..20: mol_type = other DNA
gccaccaccaccaaaaaaag

SEQ ID NO: 33719 - DNA, 20 bp, synthetic construct
  misc_feature 1..20: note = chemically synthesized
  source 1..20: mol_type = other DNA
caccaaaaaaagaaaaacaa

SEQ ID NO: 33720 - DNA, 20 bp, synthetic construct
  misc_feature 1..20: note = chemically synthesized
  source 1..20: mol_type = other DNA
aaaagaaaaacaaaaaaaca

SEQ ID NO: 33721 - DNA, 20 bp, synthetic construct
  misc_feature 1..20: note = chemically synthesized
  source 1..20: mol_type = other DNA
caaaaaaacaaaaaacaaag

SEQ ID NO: 33722 - DNA, 20 bp, synthetic construct
  misc_feature 1..20: note = chemically synthesized
  source 1..20: mol_type = other DNA
aaacaaaaaacaaagcaaaa

SEQ ID NO: 33723 - DNA, 20 bp, synthetic construct
  misc_feature 1..20: note = chemically synthesized
  source 1..20: mol_type = other DNA
aaaaacaaagcaaaacaaaa

SEQ ID NO: 33724 - DNA, 20 bp, synthetic construct
  misc_feature 1..20: note = chemically synthesized
  source 1..20: mol_type = other DNA
aacaaaacaaaaccttttta

SEQ ID NO: 33725 - DNA, 20 bp, synthetic construct
  misc_feature 1..20: note = chemically synthesized
  source 1..20: mol_type = other DNA
agttttaaaaggaaaaaaaa

SEQ ID NO: 33726 - DNA, 20 bp, synthetic construct
  misc_feature 1..20: note = chemically synthesized
  source 1..20: mol_type = other DNA
aaggaaaaaaaaaaaaaccc

SEQ ID NO: 33727 - DNA, 20 bp, synthetic construct
  misc_feature 1..20: note = chemically synthesized
  source 1..20: mol_type = other DNA
aacaaccaccttctgacgct

SEQ ID NO: 33728 - DNA, 20 bp, synthetic construct
  misc_feature 1..20: note = chemically synthesized
  source 1..20: mol_type = other DNA
ccccaatgccagggcactgc

SEQ ID NO: 33729 - DNA, 20 bp, synthetic construct
  misc_feature 1..20: note = chemically synthesized
  source 1..20: mol_type = other DNA
gtaaattaatggatatgatt

SEQ ID NO: 33730 - DNA, 20 bp, synthetic construct
  misc_feature 1..20: note = chemically synthesized
  source 1..20: mol_type = other DNA
ttaatggatatgatttaaaa

SEQ ID NO: 33731 - DNA, 20 bp, synthetic construct
  misc_feature 1..20: note = chemically synthesized
  source 1..20: mol_type = other DNA
gggcaacacagagggaggag

SEQ ID NO: 33732 - DNA, 20 bp, synthetic construct
  misc_feature 1..20: note = chemically synthesized
  source 1..20: mol_type = other DNA
ctccttttctagtagcaaat

SEQ ID NO: 33733 - DNA, 20 bp, synthetic construct
  misc_feature 1..20: note = chemically synthesized
  source 1..20: mol_type = other DNA
gctcagtgctgggcacatgg

SEQ ID NO: 33734 - DNA, 20 bp, synthetic construct
  misc_feature 1..20: note = chemically synthesized
  source 1..20: mol_type = other DNA
atggattacacaatgtattc

SEQ ID NO: 33735 - DNA, 20 bp, synthetic construct
  misc_feature 1..20: note = chemically synthesized
  source 1..20: mol_type = other DNA
gttgaaatccttttaaagat

SEQ ID NO: 33736 - DNA, 20 bp, synthetic construct
  misc_feature 1..20: note = chemically synthesized
  source 1..20: mol_type = other DNA
agtgaaatcattgttataga

SEQ ID NO: 33737 - DNA, 20 bp, synthetic construct
  misc_feature 1..20: note = chemically synthesized
  source 1..20: mol_type = other DNA
aaaacctactgtggttagaa

SEQ ID NO: 33738 - DNA, 20 bp, synthetic construct
  misc_feature 1..20: note = chemically synthesized
  source 1..20: mol_type = other DNA
taacagagagacactgatct

SEQ ID NO: 33739 - DNA, 20 bp, synthetic construct
  misc_feature 1..20: note = chemically synthesized
  source 1..20: mol_type = other DNA
gttgcaagctgttttttttg

SEQ ID NO: 33740 - DNA, 20 bp, synthetic construct
  misc_feature 1..20: note = chemically synthesized
  source 1..20: mol_type = other DNA
tcctttggataatgatgatc

SEQ ID NO: 33741 - DNA, 20 bp, synthetic construct
  misc_feature 1..20: note = chemically synthesized
  source 1..20: mol_type = other DNA
ggtaacaaaataaaatctta

SEQ ID NO: 33742 - DNA, 20 bp, synthetic construct
  misc_feature 1..20: note = chemically synthesized
  source 1..20: mol_type = other DNA
aaaaacaagaaaaaagaaaa

SEQ ID NO: 33743 - DNA, 20 bp, synthetic construct
  misc_feature 1..20: note = chemically synthesized
  source 1..20: mol_type = other DNA
aagaaaaaagaaaaaaaaac

SEQ ID NO: 33744 - DNA, 20 bp, synthetic construct
  misc_feature 1..20: note = chemically synthesized
  source 1..20: mol_type = other DNA
aaagaaaaaaaaacaaaaac

SEQ ID NO: 33745 - DNA, 20 bp, synthetic construct
  misc_feature 1..20: note = chemically synthesized
  source 1..20: mol_type = other DNA
ttacccacagagtctacaga

SEQ ID NO: 33746 - DNA, 20 bp, synthetic construct
  misc_feature 1..20: note = chemically synthesized
  source 1..20: mol_type = other DNA
cctgcagaaccttgacctgt

SEQ ID NO: 33747 - DNA, 20 bp, synthetic construct
  misc_feature 1..20: note = chemically synthesized
  source 1..20: mol_type = other DNA
cctcactggaagggatcctc

SEQ ID NO: 33748 - DNA, 20 bp, synthetic construct
  misc_feature 1..20: note = chemically synthesized
  source 1..20: mol_type = other DNA
gcagttgtatttaaaagaaa

SEQ ID NO: 33749 - DNA, 20 bp, synthetic construct
  misc_feature 1..20: note = chemically synthesized
  source 1..20: mol_type = other DNA
agaaggggctaagcttgcac

SEQ ID NO: 33750 - DNA, 20 bp, synthetic construct
  misc_feature 1..20: note = chemically synthesized
  source 1..20: mol_type = other DNA
ctcatagtgttgagtcagag

SEQ ID NO: 33751 - DNA, 20 bp, synthetic construct
  misc_feature 1..20: note = chemically synthesized
  source 1..20: mol_type = other DNA
cacttatttaattttcctca

SEQ ID NO: 33752 - DNA, 20 bp, synthetic construct
  misc_feature 1..20: note = chemically synthesized
  source 1..20: mol_type = other DNA
aaatgtttcctcaaaataaa

SEQ ID NO: 33753 - DNA, 20 bp, synthetic construct
  misc_feature 1..20: note = chemically synthesized
  source 1..20: mol_type = other DNA
tggcaaatgacaatgcctat

SEQ ID NO: 33754 - DNA, 20 bp, synthetic construct
  misc_feature 1..20: note = chemically synthesized
  source 1..20: mol_type = other DNA
tctgatgatgagtaggctct

SEQ ID NO: 33755 - DNA, 20 bp, synthetic construct
  misc_feature 1..20: note = chemically synthesized
  source 1..20: mol_type = other DNA
ctgctctatcgcagacattt

SEQ ID NO: 33756 - DNA, 20 bp, synthetic construct
  misc_feature 1..20: note = chemically synthesized
  source 1..20: mol_type = other DNA
aggtctaggtttgatagata

SEQ ID NO: 33757 - DNA, 20 bp, synthetic construct
  misc_feature 1..20: note = chemically synthesized
  source 1..20: mol_type = other DNA
ctaacctggggagcccatgg

SEQ ID NO: 33758 - DNA, 20 bp, synthetic construct
  misc_feature 1..20: note = chemically synthesized
  source 1..20: mol_type = other DNA
ccatggtaaaacccaagcaa

SEQ ID NO: 33759 - DNA, 20 bp, synthetic construct
  misc_feature 1..20: note = chemically synthesized
  source 1..20: mol_type = other DNA
tatgtcctgcttgctttttt

SEQ ID NO: 33760 - DNA, 20 bp, synthetic construct
  misc_feature 1..20: note = chemically synthesized
  source 1..20: mol_type = other DNA
agtcttttttgagtttccag

SEQ ID NO: 33761 - DNA, 20 bp, synthetic construct
  misc_feature 1..20: note = chemically synthesized
  source 1..20: mol_type = other DNA
cattgtgtttaatagtacaa

SEQ ID NO: 33762 - DNA, 20 bp, synthetic construct
  misc_feature 1..20: note = chemically synthesized
  source 1..20: mol_type = other DNA
actttaggtgtgtattgtag

SEQ ID NO: 33763 - DNA, 20 bp, synthetic construct
  misc_feature 1..20: note = chemically synthesized
  source 1..20: mol_type = other DNA
gggctctaggtggcttcctt

SEQ ID NO: 33764 - DNA, 20 bp, synthetic construct
  misc_feature 1..20: note = chemically synthesized
  source 1..20: mol_type = other DNA
tgttgggcatagaaagcctt

SEQ ID NO: 33765 - DNA, 20 bp, synthetic construct
  misc_feature 1..20: note = chemically synthesized
  source 1..20: mol_type = other DNA
ttctggacatacttcgaagg

SEQ ID NO: 33766 - DNA, 20 bp, synthetic construct
  misc_feature 1..20: note = chemically synthesized
  source 1..20: mol_type = other DNA
cctcatttcttgagagactc

SEQ ID NO: 33767 - DNA, 20 bp, synthetic construct
  misc_feature 1..20: note = chemically synthesized
  source 1..20: mol_type = other DNA
gtttttctctgatgatgatt

SEQ ID NO: 33768 - DNA, 20 bp, synthetic construct
  misc_feature 1..20: note = chemically synthesized
  source 1..20: mol_type = other DNA
ctatttgctattaaaatttg

SEQ ID NO: 33769 - DNA, 20 bp, synthetic construct
  misc_feature 1..20: note = chemically synthesized
  source 1..20: mol_type = other DNA
aaaaaatagctaagaatagt

SEQ ID NO: 33770 - DNA, 20 bp, synthetic construct
  misc_feature 1..20: note = chemically synthesized
  source 1..20: mol_type = other DNA
aatgtctgcaccccaccctg

SEQ ID NO: 33771 - DNA, 20 bp, synthetic construct
  misc_feature 1..20: note = chemically synthesized
  source 1..20: mol_type = other DNA
gggctccctggactcaaact

SEQ ID NO: 33772 - DNA, 20 bp, synthetic construct
  misc_feature 1..20: note = chemically synthesized
  source 1..20: mol_type = other DNA
ttaataaagctaaagcgaaa

SEQ ID NO: 33773 - DNA, 20 bp, synthetic construct
  misc_feature 1..20: note = chemically synthesized
  source 1..20: mol_type = other DNA
aaagctaaagcgaaacaaaa

SEQ ID NO: 33774 - DNA, 20 bp, synthetic construct
  misc_feature 1..20: note = chemically synthesized
  source 1..20: mol_type = other DNA
ggatttgggttcttaacatg

SEQ ID NO: 33775 - DNA, 20 bp, synthetic construct
  misc_feature 1..20: note = chemically synthesized
  source 1..20: mol_type = other DNA
ctttttagtagtgctgcatt

SEQ ID NO: 33776 - DNA, 20 bp, synthetic construct
  misc_feature 1..20: note = chemically synthesized
  source 1..20: mol_type = other DNA
gaaactccacctcagaaaca

SEQ ID NO: 33777 - DNA, 20 bp, synthetic construct
  misc_feature 1..20: note = chemically synthesized
  source 1..20: mol_type = other DNA
gttattattttcatgttaag

SEQ ID NO: 33778 - DNA, 20 bp, synthetic construct
  misc_feature 1..20: note = chemically synthesized
  source 1..20: mol_type = other DNA
gtgtcagcaaaaaatgaaac

SEQ ID NO: 33779 - DNA, 20 bp, synthetic construct
  misc_feature 1..20: note = chemically synthesized
  source 1..20: mol_type = other DNA
tgtaagtgttactgtgtttt

SEQ ID NO: 33780 - DNA, 20 bp, synthetic construct
  misc_feature 1..20: note = chemically synthesized
  source 1..20: mol_type = other DNA
gggctccattctagagttgg

SEQ ID NO: 33781 - DNA, 20 bp, synthetic construct
  misc_feature 1..20: note = chemically synthesized
  source 1..20: mol_type = other DNA
ccaatttccatacagatgac

SEQ ID NO: 33782 - DNA, 20 bp, synthetic construct
  misc_feature 1..20: note = chemically synthesized
  source 1..20: mol_type = other DNA
aattcccccttctcttaaga

SEQ ID NO: 33783 - DNA, 20 bp, synthetic construct
  misc_feature 1..20: note = chemically synthesized
  source 1..20: mol_type = other DNA
aaagcaacccggtttatctg

SEQ ID NO: 33784 - DNA, 20 bp, synthetic construct
  misc_feature 1..20: note = chemically synthesized
  source 1..20: mol_type = other DNA
cctaacttaaatattacaat

SEQ ID NO: 33785 - DNA, 20 bp, synthetic construct
  misc_feature 1..20: note = chemically synthesized
  source 1..20: mol_type = other DNA
acgggatatatattagaggg

SEQ ID NO: 33786 - DNA, 20 bp, synthetic construct
  misc_feature 1..20: note = chemically synthesized
  source 1..20: mol_type = other DNA
gagaaaccacaacccgaaca

SEQ ID NO: 33787 - DNA, 20 bp, synthetic construct
  misc_feature 1..20: note = chemically synthesized
  source 1..20: mol_type = other DNA
acaacccgaacaaaaaactc

SEQ ID NO: 33788 - DNA, 20 bp, synthetic construct
  misc_feature 1..20: note = chemically synthesized
  source 1..20: mol_type = other DNA
ttgtggaaaaaaaatgccct

SEQ ID NO: 33789 - DNA, 20 bp, synthetic construct
  misc_feature 1..20: note = chemically synthesized
  source 1..20: mol_type = other DNA
gtagggggtggagcgtcaag

SEQ ID NO: 33790 - DNA, 20 bp, synthetic construct
  misc_feature 1..20: note = chemically synthesized
  source 1..20: mol_type = other DNA
ttaagcccttttagtggagc

SEQ ID NO: 33791 - DNA, 20 bp, synthetic construct
  misc_feature 1..20: note = chemically synthesized
  source 1..20: mol_type = other DNA
aggaaaatgtggaggattgc

SEQ ID NO: 33792 - DNA, 20 bp, synthetic construct
  misc_feature 1..20: note = chemically synthesized
  source 1..20: mol_type = other DNA
ttcctcctccccataaatca

SEQ ID NO: 33793 - DNA, 20 bp, synthetic construct
  misc_feature 1..20: note = chemically synthesized
  source 1..20: mol_type = other DNA
caagcagtcttagagagact

SEQ ID NO: 33794 - DNA, 20 bp, synthetic construct
  misc_feature 1..20: note = chemically synthesized
  source 1..20: mol_type = other DNA
ccagggaggagggaaaaaaa

SEQ ID NO: 33795 - DNA, 20 bp, synthetic construct
  misc_feature 1..20: note = chemically synthesized
  source 1..20: mol_type = other DNA
ggagggaaaaaaaaaaaaca

SEQ ID NO: 33796 - DNA, 20 bp, synthetic construct
  misc_feature 1..20: note = chemically synthesized
  source 1..20: mol_type = other DNA
gtttccacagtgcccacgaa

SEQ ID NO: 33797 - DNA, 20 bp, synthetic construct
  misc_feature 1..20: note = chemically synthesized
  source 1..20: mol_type = other DNA
gtttgtctgactcagaggaa

SEQ ID NO: 33798 - DNA, 20 bp, synthetic construct
  misc_feature 1..20: note = chemically synthesized
  source 1..20: mol_type = other DNA
agaaacaattgaggtggggg

SEQ ID NO: 33799 - DNA, 20 bp, synthetic construct
  misc_feature 1..20: note = chemically synthesized
  source 1..20: mol_type = other DNA
taaagaacatcaggatttgg

SEQ ID NO: 33800 - DNA, 20 bp, synthetic construct
  misc_feature 1..20: note = chemically synthesized
  source 1..20: mol_type = other DNA
tgtctcactgaaaaaaaaaa

SEQ ID NO: 33801 - DNA, 20 bp, synthetic construct
  misc_feature 1..20: note = chemically synthesized
  source 1..20: mol_type = other DNA
aaaaaacagggaaattatct

SEQ ID NO: 33802 - DNA, 20 bp, synthetic construct
  misc_feature 1..20: note = chemically synthesized
  source 1..20: mol_type = other DNA
agatgttcttgaggaaacca

SEQ ID NO: 33803 - DNA, 20 bp, synthetic construct
  misc_feature 1..20: note = chemically synthesized
  source 1..20: mol_type = other DNA
ggtgggtcctggacaggagg

SEQ ID NO: 33804 - DNA, 20 bp, synthetic construct
  misc_feature 1..20: note = chemically synthesized
  source 1..20: mol_type = other DNA
ctagggttttttacaactta

SEQ ID NO: 33805 - DNA, 20 bp, synthetic construct
  misc_feature 1..20: note = chemically synthesized
  source 1..20: mol_type = other DNA
ttttttacaacttagaaaac

SEQ ID NO: 33806 - DNA, 20 bp, synthetic construct
  misc_feature 1..20: note = chemically synthesized
  source 1..20: mol_type = other DNA
acaacttagaaaacaaaaac

SEQ ID NO: 33807 - DNA, 20 bp, synthetic construct
  misc_feature 1..20: note = chemically synthesized
  source 1..20: mol_type = other DNA
tagaaaacaaaaacaaaaac

SEQ ID NO: 33808 - DNA, 20 bp, synthetic construct
  misc_feature 1..20: note = chemically synthesized
  source 1..20: mol_type = other DNA
acaaaaacaaaaacaaaaac

SEQ ID NO: 33809 - DNA, 20 bp, synthetic construct
  misc_feature 1..20: note = chemically synthesized
  source 1..20: mol_type = other DNA
acttagtgaacggctgaggc

SEQ ID NO: 33810 - DNA, 20 bp, synthetic construct
  misc_feature 1..20: note = chemically synthesized
  source 1..20: mol_type = other DNA
ctcttaatattaagctaatg

SEQ ID NO: 33811 - DNA, 20 bp, synthetic construct
  misc_feature 1..20: note = chemically synthesized
  source 1..20: mol_type = other DNA
aagtgggactctgtcccata

SEQ ID NO: 33812 - DNA, 20 bp, synthetic construct
  misc_feature 1..20: note = chemically synthesized
  source 1..20: mol_type = other DNA
agaccacctctcccctttcc

SEQ ID NO: 33813 - DNA, 20 bp, synthetic construct
  misc_feature 1..20: note = chemically synthesized
  source 1..20: mol_type = other DNA
ttgtcaaaaagaccgaaatt

SEQ ID NO: 33814 - DNA, 20 bp, synthetic construct
  misc_feature 1..20: note = chemically synthesized
  source 1..20: mol_type = other DNA
aaaaagaccgaaattgaaaa

SEQ ID NO: 33815 - DNA, 20 bp, synthetic construct
  misc_feature 1..20: note = chemically synthesized
  source 1..20: mol_type = other DNA
taatcacccctggtagtaat

SEQ ID NO: 33816 - DNA, 20 bp, synthetic construct
  misc_feature 1..20: note = chemically synthesized
  source 1..20: mol_type = other DNA
gtcagtttattgctctaaat

SEQ ID NO: 33817 - DNA, 20 bp, synthetic construct
  misc_feature 1..20: note = chemically synthesized
  source 1..20: mol_type = other DNA
gaatactaaaatgcgatagt

SEQ ID NO: 33818 - DNA, 20 bp, synthetic construct
  misc_feature 1..20: note = chemically synthesized
  source 1..20: mol_type = other DNA
ggttcacgttgttagcctct

SEQ ID NO: 33819 - DNA, 20 bp, synthetic construct
  misc_feature 1..20: note = chemically synthesized
  source 1..20: mol_type = other DNA
agcaagctcaccaggcacat

SEQ ID NO: 33820 - DNA, 20 bp, synthetic construct
  misc_feature 1..20: note = chemically synthesized
  source 1..20: mol_type = other DNA
cgagtgttgaataatgatat

SEQ ID NO: 33821 - DNA, 20 bp, synthetic construct
  misc_feature 1..20: note = chemically synthesized
  source 1..20: mol_type = other DNA
tattttataacgtgaggagg

SEQ ID NO: 33822 - DNA, 20 bp, synthetic construct
  misc_feature 1..20: note = chemically synthesized
  source 1..20: mol_type = other DNA
ttgaattgacaaattaacag

SEQ ID NO: 33823 - DNA, 20 bp, synthetic construct
  misc_feature 1..20: note = chemically synthesized
  source 1..20: mol_type = other DNA
tatgagtgccttggatctat

SEQ ID NO: 33824 - DNA, 20 bp, synthetic construct
  misc_feature 1..20: note = chemically synthesized
  source 1..20: mol_type = other DNA
ctttagtttaattttataaa

SEQ ID NO: 33825 - DNA, 20 bp, synthetic construct
  misc_feature 1..20: note = chemically synthesized
  source 1..20: mol_type = other DNA
acgtggtactatttgccatt

SEQ ID NO: 33826 - DNA, 20 bp, synthetic construct
  misc_feature 1..20: note = chemically synthesized
  source 1..20: mol_type = other DNA
ctcattgaggagcatttttt

SEQ ID NO: 33827 - DNA, 20 bp, synthetic construct
  misc_feature 1..20: note = chemically synthesized
  source 1..20: mol_type = other DNA
tttttaaaaactaaaaaaaa

SEQ ID NO: 33828 - DNA, 20 bp, synthetic construct
  misc_feature 1..20: note = chemically synthesized
  source 1..20: mol_type = other DNA
agtgcaaggatttttttgta

SEQ ID NO: 33829 - DNA, 20 bp, synthetic construct
  misc_feature 1..20: note = chemically synthesized
  source 1..20: mol_type = other DNA
gttaagaaaaatttttttta

SEQ ID NO: 33830 - DNA, 20 bp, synthetic construct
  misc_feature 1..20: note = chemically synthesized
  source 1..20: mol_type = other DNA
ctcttcaggttgtaaaaaaa

SEQ ID NO: 33831 - DNA, 20 bp, synthetic construct
  misc_feature 1..20: note = chemically synthesized
  source 1..20: mol_type = other DNA
aaaaaaaaggaaaaaaaaaa

SEQ ID NO: 33832 - DNA, 20 bp, synthetic construct
  misc_feature 1..20: note = chemically synthesized
  source 1..20: mol_type = other DNA
ttgcagtttttttcattgcc

SEQ ID NO: 33833 - DNA, 20 bp, synthetic construct
  misc_feature 1..20: note = chemically synthesized
  source 1..20: mol_type = other DNA
tattgcttatgtgccctgtt

SEQ ID NO: 33834 - DNA, 20 bp, synthetic construct
  misc_feature 1..20: note = chemically synthesized
  source 1..20: mol_type = other DNA
tctttgttaagttctattgg

SEQ ID NO: 33835 - DNA, 20 bp, synthetic construct
  misc_feature 1..20: note = chemically synthesized
  source 1..20: mol_type = other DNA
ggtgttttcagtctgatgtt

SEQ ID NO: 33836 - DNA, 20 bp, synthetic construct
  misc_feature 1..20: note = chemically synthesized
  source 1..20: mol_type = other DNA
atccattcaaacataagtga

SEQ ID NO: 33837 - DNA, 20 bp, synthetic construct
  misc_feature 1..20: note = chemically synthesized
  source 1..20: mol_type = other DNA
acattgttcttatttttgta

SEQ ID NO: 33838 - DNA, 20 bp, synthetic construct
  misc_feature 1..20: note = chemically synthesized
  source 1..20: mol_type = other DNA
ttcttatttttgtaaaaaac

SEQ ID NO: 33839 - DNA, 20 bp, synthetic construct
  misc_feature 1..20: note = chemically synthesized
  source 1..20: mol_type = other DNA
tgttttggattaggtttctc

SEQ ID NO: 33840 - DNA, 20 bp, synthetic construct
  misc_feature 1..20: note = chemically synthesized
  source 1..20: mol_type = other DNA
tccaccctattaaatgtcca

SEQ ID NO: 33841 - DNA, 20 bp, synthetic construct
  misc_feature 1..20: note = chemically synthesized
  source 1..20: mol_type = other DNA
tttcctttctgtaaagtggc

SEQ ID NO: 33842 - DNA, 20 bp, synthetic construct
  misc_feature 1..20: note = chemically synthesized
  source 1..20: mol_type = other DNA
cccccttccaaaaaagaaaa

SEQ ID NO: 33843 - DNA, 20 bp, synthetic construct
  misc_feature 1..20: note = chemically synthesized
  source 1..20: mol_type = other DNA
tatattttttaataaaaagt

SEQ ID NO: 33844 - DNA, 20 bp, synthetic construct
  misc_feature 1..20: note = chemically synthesized
  source 1..20: mol_type = other DNA
ttaataaaaagtaaaaacaa

SEQ ID NO: 33845 - DNA, 20 bp, synthetic construct
  misc_feature 1..20: note = chemically synthesized
  source 1..20: mol_type = other DNA
tttcaaggagaatcaaaatg

SEQ ID NO: 33846 - DNA, 20 bp, synthetic construct
  misc_feature 1..20: note = chemically synthesized
  source 1..20: mol_type = other DNA
ttaatgcagacaaacaaaca

SEQ ID NO: 33847 - DNA, 20 bp, synthetic construct
  misc_feature 1..20: note = chemically synthesized
  source 1..20: mol_type = other DNA
actgtggagaagaaccccct

SEQ ID NO: 33848 - DNA, 20 bp, synthetic construct
  misc_feature 1..20: note = chemically synthesized
  source 1..20: mol_type = other DNA
gtttgagaaataattgtttc

SEQ ID NO: 33849 - DNA, 20 bp, synthetic construct
  misc_feature 1..20: note = chemically synthesized
  source 1..20: mol_type = other DNA
aaaaccagtgatcatttaaa

SEQ ID NO: 33850 - DNA, 20 bp, synthetic construct
  misc_feature 1..20: note = chemically synthesized
  source 1..20: mol_type = other DNA
gtttccaagagcattcagat

SEQ ID NO: 33851 - DNA, 20 bp, synthetic construct
  misc_feature 1..20: note = chemically synthesized
  source 1..20: mol_type = other DNA
acctaagatcacagtgtgaa

SEQ ID NO: 33852 - DNA, 20 bp, synthetic construct
  misc_feature 1..20: note = chemically synthesized
  source 1..20: mol_type = other DNA
attattctgatctctaaaat

SEQ ID NO: 33853 - DNA, 20 bp, synthetic construct
  misc_feature 1..20: note = chemically synthesized
  source 1..20: mol_type = other DNA
atctctaaaatgagtgatta

SEQ ID NO: 33854 - DNA, 20 bp, synthetic construct
  misc_feature 1..20: note = chemically synthesized
  source 1..20: mol_type = other DNA
atttatagaatcacaaggaa

SEQ ID NO: 33855 - DNA, 20 bp, synthetic construct
  misc_feature 1..20: note = chemically synthesized
  source 1..20: mol_type = other DNA
atgtatataaaagtattcta

SEQ ID NO: 33856 - DNA, 20 bp, synthetic construct
  misc_feature 1..20: note = chemically synthesized
  source 1..20: mol_type = other DNA
aagatagaaaaacagacaat

SEQ ID NO: 33857 - DNA, 20 bp, synthetic construct
  misc_feature 1..20: note = chemically synthesized
  source 1..20: mol_type = other DNA
aaaaacagacaatgactgct

SEQ ID NO: 33858 - DNA, 20 bp, synthetic construct
  misc_feature 1..20: note = chemically synthesized
  source 1..20: mol_type = other DNA
gtcagaggaaagaaatataa

SEQ ID NO: 33859 - DNA, 20 bp, synthetic construct
  misc_feature 1..20: note = chemically synthesized
  source 1..20: mol_type = other DNA
tgaactcttgaagaaggaag

SEQ ID NO: 33860 - DNA, 20 bp, synthetic construct
  misc_feature 1..20: note = chemically synthesized
  source 1..20: mol_type = other DNA
ccagactcaaaattcctcaa

SEQ ID NO: 33861 - DNA, 20 bp, synthetic construct
  misc_feature 1..20: note = chemically synthesized
  source 1..20: mol_type = other DNA
cctactattacttccgggga

SEQ ID NO: 33862 - DNA, 20 bp, synthetic construct
  misc_feature 1..20: note = chemically synthesized
  source 1..20: mol_type = other DNA
aagatattcctgaccacttg

SEQ ID NO: 33863 - DNA, 20 bp, synthetic construct
  misc_feature 1..20: note = chemically synthesized
  source 1..20: mol_type = other DNA
attcctgaccacttgaaggg

SEQ ID NO: 33864 - DNA, 20 bp, synthetic construct
  misc_feature 1..20: note = chemically synthesized
  source 1..20: mol_type = other DNA
gtgcccagaaaatatgctgc

SEQ ID NO: 33865 - DNA, 20 bp, synthetic construct
  misc_feature 1..20: note = chemically synthesized
  source 1..20: mol_type = other DNA
ggggcactcagttagacctc

SEQ ID NO: 33866 - DNA, 20 bp, synthetic construct
  misc_feature 1..20: note = chemically synthesized
  source 1..20: mol_type = other DNA
cagttagacctcagcagatt

SEQ ID NO: 33867 - DNA, 20 bp, synthetic construct
  misc_feature 1..20: note = chemically synthesized
  source 1..20: mol_type = other DNA
caagattgcactccttgcct

SEQ ID NO: 33868 - DNA, 20 bp, synthetic construct
  misc_feature 1..20: note = chemically synthesized
  source 1..20: mol_type = other DNA
agagttttctttaaatgatc

SEQ ID NO: 33869 - DNA, 20 bp, synthetic construct
  misc_feature 1..20: note = chemically synthesized
  source 1..20: mol_type = other DNA
tgctggatgctgggtgctgc

SEQ ID NO: 33870 - DNA, 20 bp, synthetic construct
  misc_feature 1..20: note = chemically synthesized
  source 1..20: mol_type = other DNA
gtaataatctgtccgggcgc

SEQ ID NO: 33871 - DNA, 20 bp, synthetic construct
  misc_feature 1..20: note = chemically synthesized
  source 1..20: mol_type = other DNA
aataatctgaacagcccaca

SEQ ID NO: 33872 - DNA, 20 bp, synthetic construct
  misc_feature 1..20: note = chemically synthesized
  source 1..20: mol_type = other DNA
aggacacagtgagaacccct

SEQ ID NO: 33873 - DNA, 20 bp, synthetic construct
  misc_feature 1..20: note = chemically synthesized
  source 1..20: mol_type = other DNA
ggcagatttgtgagcctctt

SEQ ID NO: 33874 - DNA, 20 bp, synthetic construct
  misc_feature 1..20: note = chemically synthesized
  source 1..20: mol_type = other DNA
cccaaattgtcaatcttgta

SEQ ID NO: 33875 - DNA, 20 bp, synthetic construct
  misc_feature 1..20: note = chemically synthesized
  source 1..20: mol_type = other DNA
actccagcctgggtgacaga

SEQ ID NO: 33876 - DNA, 20 bp, synthetic construct
  misc_feature 1..20: note = chemically synthesized
  source 1..20: mol_type = other DNA
aatggctagccctaacacaa

SEQ ID NO: 33877 - DNA, 20 bp, synthetic construct
  misc_feature 1..20: note = chemically synthesized
  source 1..20: mol_type = other DNA
gggaaaagacagtctttttg

SEQ ID NO: 33878 - DNA, 20 bp, synthetic construct
  misc_feature 1..20: note = chemically synthesized
  source 1..20: mol_type = other DNA
aaagacagtctttttgttct

SEQ ID NO: 33879 - DNA, 20 bp, synthetic construct
  misc_feature 1..20: note = chemically synthesized
  source 1..20: mol_type = other DNA
ggctgaacttgtctcaagac

SEQ ID NO: 33880 - DNA, 20 bp, synthetic construct
  misc_feature 1..20: note = chemically synthesized
  source 1..20: mol_type = other DNA
cttgtctcaagacccaggat

SEQ ID NO: 33881 - DNA, 20 bp, synthetic construct
  misc_feature 1..20: note = chemically synthesized
  source 1..20: mol_type = other DNA
tcacagaaaccctaatggtc

SEQ ID NO: 33882 - DNA, 20 bp, synthetic construct
  misc_feature 1..20: note = chemically synthesized
  source 1..20: mol_type = other DNA
ggcagagcatggggcaggga

SEQ ID NO: 33883 - DNA, 20 bp, synthetic construct
  misc_feature 1..20: note = chemically synthesized
  source 1..20: mol_type = other DNA
actccctttgatcagttaaa

SEQ ID NO: 33884 - DNA, 20 bp, synthetic construct
  misc_feature 1..20: note = chemically synthesized
  source 1..20: mol_type = other DNA
ctggacaagaaaccagaaaa

SEQ ID NO: 33885 - DNA, 20 bp, synthetic construct
  misc_feature 1..20: note = chemically synthesized
  source 1..20: mol_type = other DNA
gaaaccagaaaacctggctt

SEQ ID NO: 33886 - DNA, 20 bp, synthetic construct
  misc_feature 1..20: note = chemically synthesized
  source 1..20: mol_type = other DNA
tctagccagaaggtggatag

SEQ ID NO: 33887 - DNA, 20 bp, synthetic construct
  misc_feature 1..20: note = chemically synthesized
  source 1..20: mol_type = other DNA
aaacctattttaatttgcta

SEQ ID NO: 33888 - DNA, 20 bp, synthetic construct
  misc_feature 1..20: note = chemically synthesized
  source 1..20: mol_type = other DNA
ggccagaaagaatttttacc

SEQ ID NO: 33889 - DNA, 20 bp, synthetic construct
  misc_feature 1..20: note = chemically synthesized
  source 1..20: mol_type = other DNA
ttctaaggaatagagcattg

SEQ ID NO: 33890 - DNA, 20 bp, synthetic construct
  misc_feature 1..20: note = chemically synthesized
  source 1..20: mol_type = other DNA
tttcctgatgtaagtactaa

SEQ ID NO: 33891 - DNA, 20 bp, synthetic construct
  misc_feature 1..20: note = chemically synthesized
  source 1..20: mol_type = other DNA
atgtaagtactaaagaagtt

SEQ ID NO: 33892 - DNA, 20 bp, synthetic construct
  misc_feature 1..20: note = chemically synthesized
  source 1..20: mol_type = other DNA
aagtactaaagaagttttat

SEQ ID NO: 33893 - DNA, 20 bp, synthetic construct
  misc_feature 1..20: note = chemically synthesized
  source 1..20: mol_type = other DNA
tgcattaagatatatttcct

SEQ ID NO: 33894 - DNA, 20 bp, synthetic construct
  misc_feature 1..20: note = chemically synthesized
  source 1..20: mol_type = other DNA
actgacatttatcaccttct

SEQ ID NO: 33895 - DNA, 20 bp, synthetic construct
  misc_feature 1..20: note = chemically synthesized
  source 1..20: mol_type = other DNA
caaaagcatatatttgaaaa

SEQ ID NO: 33896 - DNA, 20 bp, synthetic construct
  misc_feature 1..20: note = chemically synthesized
  source 1..20: mol_type = other DNA
ctacattaattatgatattg

SEQ ID NO: 33897 - DNA, 20 bp, synthetic construct
  misc_feature 1..20: note = chemically synthesized
  source 1..20: mol_type = other DNA
gatattgctatgatttattc

SEQ ID NO: 33898 - DNA, 20 bp, synthetic construct
  misc_feature 1..20: note = chemically synthesized
  source 1..20: mol_type = other DNA
atttattcccaagttttgca

SEQ ID NO: 33899 - DNA, 20 bp, synthetic construct
  misc_feature 1..20: note = chemically synthesized
  source 1..20: mol_type = other DNA
caatacaggtaattaggttg

SEQ ID NO: 33900 - DNA, 20 bp, synthetic construct
  misc_feature 1..20: note = chemically synthesized
  source 1..20: mol_type = other DNA
tccacgggccctctctatgg

SEQ ID NO: 33901 - DNA, 20 bp, synthetic construct
  misc_feature 1..20: note = chemically synthesized
  source 1..20: mol_type = other DNA
gattcactgttccaatgtgg

SEQ ID NO: 33902 - DNA, 20 bp, synthetic construct
  misc_feature 1..20: note = chemically synthesized
  source 1..20: mol_type = other DNA
gttccaatgtgggtctgttt

SEQ ID NO: 33903 - DNA, 20 bp, synthetic construct
  misc_feature 1..20: note = chemically synthesized
  source 1..20: mol_type = other DNA
gcaggactctgtcttcgcac

SEQ ID NO: 33904 - DNA, 20 bp, synthetic construct
  misc_feature 1..20: note = chemically synthesized
  source 1..20: mol_type = other DNA
cacgcgtccaccccacccct

SEQ ID NO: 33905 - DNA, 20 bp, synthetic construct
  misc_feature 1..20: note = chemically synthesized
  source 1..20: mol_type = other DNA
ttctcagaacttaagggctc

SEQ ID NO: 33906 - DNA, 20 bp, synthetic construct
  misc_feature 1..20: note = chemically synthesized
  source 1..20: mol_type = other DNA
agtacaggtgtgacttggcc

SEQ ID NO: 33907 - DNA, 20 bp, synthetic construct
  misc_feature 1..20: note = chemically synthesized
  source 1..20: mol_type = other DNA
caatgattttctgttctcta

SEQ ID NO: 33908 - DNA, 20 bp, synthetic construct
  misc_feature 1..20: note = chemically synthesized
  source 1..20: mol_type = other DNA
tcgagccactggcatcttaa

SEQ ID NO: 33909 - DNA, 20 bp, synthetic construct
  misc_feature 1..20: note = chemically synthesized
  source 1..20: mol_type = other DNA
aagttcaacgtcaaagcagc

SEQ ID NO: 33910 - DNA, 20 bp, synthetic construct
  misc_feature 1..20: note = chemically synthesized
  source 1..20: mol_type = other DNA
aaattgcaccaaaaactgcc

SEQ ID NO: 33911 - DNA, 20 bp, synthetic construct
  misc_feature 1..20: note = chemically synthesized
  source 1..20: mol_type = other DNA
cctgtagtttctttcaaaca

SEQ ID NO: 33912 - DNA, 20 bp, synthetic construct
  misc_feature 1..20: note = chemically synthesized
  source 1..20: mol_type = other DNA
tttaaaagcacagcccccct

SEQ ID NO: 33913 - DNA, 20 bp, synthetic construct
  misc_feature 1..20: note = chemically synthesized
  source 1..20: mol_type = other DNA
ccccctatgggtttaggggc

SEQ ID NO: 33914 - DNA, 20 bp, synthetic construct
  misc_feature 1..20: note = chemically synthesized
  source 1..20: mol_type = other DNA
ctttagaggatacttgggga

SEQ ID NO: 33915 - DNA, 20 bp, synthetic construct
  misc_feature 1..20: note = chemically synthesized
  source 1..20: mol_type = other DNA
tgatacacgtgctcccttga

SEQ ID NO: 33916 - DNA, 20 bp, synthetic construct
  misc_feature 1..20: note = chemically synthesized
  source 1..20: mol_type = other DNA
aaccatcgagctgtgttcag

SEQ ID NO: 33917 - DNA, 20 bp, synthetic construct
  misc_feature 1..20: note = chemically synthesized
  source 1..20: mol_type = other DNA
aagtacaatgacccgtgtga

SEQ ID NO: 33918 - DNA, 20 bp, synthetic construct
  misc_feature 1..20: note = chemically synthesized
  source 1..20: mol_type = other DNA
gtccatttctctaacaatgg

SEQ ID NO: 33919 - DNA, 20 bp, synthetic construct
  misc_feature 1..20: note = chemically synthesized
  source 1..20: mol_type = other DNA
attttctattgggaaatatg

SEQ ID NO: 33920 - DNA, 20 bp, synthetic construct
  misc_feature 1..20: note = chemically synthesized
  source 1..20: mol_type = other DNA
tgtgtgtacggagggggaaa

SEQ ID NO: 33921 - DNA, 20 bp, synthetic construct
  misc_feature 1..20: note = chemically synthesized
  source 1..20: mol_type = other DNA
aagcaggagaggatggggcc

SEQ ID NO: 33922 - DNA, 20 bp, synthetic construct
  misc_feature 1..20: note = chemically synthesized
  source 1..20: mol_type = other DNA
tcaagttctcacttctagca

SEQ ID NO: 33923 - DNA, 20 bp, synthetic construct
  misc_feature 1..20: note = chemically synthesized
  source 1..20: mol_type = other DNA
ggaggtaatataggcactgg

SEQ ID NO: 33924 - DNA, 20 bp, synthetic construct
  misc_feature 1..20: note = chemically synthesized
  source 1..20: mol_type = other DNA
atataggcactggaagagtt

SEQ ID NO: 33925 - DNA, 20 bp, synthetic construct
  misc_feature 1..20: note = chemically synthesized
  source 1..20: mol_type = other DNA
agaaatagaatttgcggtat

SEQ ID NO: 33926 - DNA, 20 bp, synthetic construct
  misc_feature 1..20: note = chemically synthesized
  source 1..20: mol_type = other DNA
tttattaagttgttctcaaa

SEQ ID NO: 33927 - DNA, 20 bp, synthetic construct
  misc_feature 1..20: note = chemically synthesized
  source 1..20: mol_type = other DNA
gcctgttacaaaaacttact

SEQ ID NO: 33928 - DNA, 20 bp, synthetic construct
  misc_feature 1..20: note = chemically synthesized
  source 1..20: mol_type = other DNA
aatgtgcatgttattttata

SEQ ID NO: 33929 - DNA, 20 bp, synthetic construct
  misc_feature 1..20: note = chemically synthesized
  source 1..20: mol_type = other DNA
atatcatgttggctaggttc

SEQ ID NO: 33930 - DNA, 20 bp, synthetic construct
  misc_feature 1..20: note = chemically synthesized
  source 1..20: mol_type = other DNA
ttctcatgtttctattgttc

SEQ ID NO: 33931 - DNA, 20 bp, synthetic construct
  misc_feature 1..20: note = chemically synthesized
  source 1..20: mol_type = other DNA
ccatgtaaatcaaacataat

SEQ ID NO: 33932 - DNA, 20 bp, synthetic construct
  misc_feature 1..20: note = chemically synthesized
  source 1..20: mol_type = other DNA
ataatctgtgatttatcacc

SEQ ID NO: 33933 - DNA, 20 bp, synthetic construct
  misc_feature 1..20: note = chemically synthesized
  source 1..20: mol_type = other DNA
tgcactcctccccattcccc

SEQ ID NO: 33934 - DNA, 20 bp, synthetic construct
  misc_feature 1..20: note = chemically synthesized
  source 1..20: mol_type = other DNA
aaagagtaatagggacacac

SEQ ID NO: 33935 - DNA, 20 bp, synthetic construct
  misc_feature 1..20: note = chemically synthesized
  source 1..20: mol_type = other DNA
ctatctgtcttgagcagcat

SEQ ID NO: 33936 - DNA, 20 bp, synthetic construct
  misc_feature 1..20: note = chemically synthesized
  source 1..20: mol_type = other DNA
gtcttgagcagcattttgga

SEQ ID NO: 33937 - DNA, 20 bp, synthetic construct
  misc_feature 1..20: note = chemically synthesized
  source 1..20: mol_type = other DNA
attctccaacatcctttctc

SEQ ID NO: 33938 - DNA, 20 bp, synthetic construct
  misc_feature 1..20: note = chemically synthesized
  source 1..20: mol_type = other DNA
actctctccttcccacccaa

SEQ ID NO: 33939 - DNA, 20 bp, synthetic construct
  misc_feature 1..20: note = chemically synthesized
  source 1..20: mol_type = other DNA
ctaccacaagaagacaacag

SEQ ID NO: 33940 - DNA, 20 bp, synthetic construct
  misc_feature 1..20: note = chemically synthesized
  source 1..20: mol_type = other DNA
caagaagacaacagaacggc

SEQ ID NO: 33941 - DNA, 20 bp, synthetic construct
  misc_feature 1..20: note = chemically synthesized
  source 1..20: mol_type = other DNA
gacaacagaacggcttttgt

SEQ ID NO: 33942 - DNA, 20 bp, synthetic construct
  misc_feature 1..20: note = chemically synthesized
  source 1..20: mol_type = other DNA
ggacacgatatcacagaggt

SEQ ID NO: 33943 - DNA, 20 bp, synthetic construct
  misc_feature 1..20: note = chemically synthesized
  source 1..20: mol_type = other DNA
agtatttgtaaaagtgacaa

SEQ ID NO: 33944 - DNA, 20 bp, synthetic construct
  misc_feature 1..20: note = chemically synthesized
  source 1..20: mol_type = other DNA
aaagtgacaacacagatttc

SEQ ID NO: 33945 - DNA, 20 bp, synthetic construct
  misc_feature 1..20: note = chemically synthesized
  source 1..20: mol_type = other DNA
atgcatctcaggaaatcagt

SEQ ID NO: 33946 - DNA, 20 bp, synthetic construct
  misc_feature 1..20: note = chemically synthesized
  source 1..20: mol_type = other DNA
aggaaatcagtggctgattc

SEQ ID NO: 33947 - DNA, 20 bp, synthetic construct
  misc_feature 1..20: note = chemically synthesized
  source 1..20: mol_type = other DNA
tgtctggctacacccctagt

SEQ ID NO: 33948 - DNA, 20 bp, synthetic construct
  misc_feature 1..20: note = chemically synthesized
  source 1..20: mol_type = other DNA
aacaaaacaaaacctgatgc

SEQ ID NO: 33949 - DNA, 20 bp, synthetic construct
  misc_feature 1..20: note = chemically synthesized
  source 1..20: mol_type = other DNA
caaaacctgatgcctttgtt

SEQ ID NO: 33950 - DNA, 20 bp, synthetic construct
  misc_feature 1..20: note = chemically synthesized
  source 1..20: mol_type = other DNA
gatgcctttgtttccagatt

SEQ ID NO: 33951 - DNA, 20 bp, synthetic construct
  misc_feature 1..20: note = chemically synthesized
  source 1..20: mol_type = other DNA
ctcttacatggaaaccaaag

SEQ ID NO: 33952 - DNA, 20 bp, synthetic construct
  misc_feature 1..20: note = chemically synthesized
  source 1..20: mol_type = other DNA
gcaaaaaatttaaaggaaat

SEQ ID NO: 33953 - DNA, 20 bp, synthetic construct
  misc_feature 1..20: note = chemically synthesized
  source 1..20: mol_type = other DNA
agtttaagatgctattacca

SEQ ID NO: 33954 - DNA, 20 bp, synthetic construct
  misc_feature 1..20: note = chemically synthesized
  source 1..20: mol_type = other DNA
ttaccagcaagttttttcac

SEQ ID NO: 33955 - DNA, 20 bp, synthetic construct
  misc_feature 1..20: note = chemically synthesized
  source 1..20: mol_type = other DNA
agttttttcacttatgtttg

SEQ ID NO: 33956 - DNA, 20 bp, synthetic construct
  misc_feature 1..20: note = chemically synthesized
  source 1..20: mol_type = other DNA
gatttctgctaagagatgga

SEQ ID NO: 33957 - DNA, 20 bp, synthetic construct
  misc_feature 1..20: note = chemically synthesized
  source 1..20: mol_type = other DNA
gaaagccttaaaactatgtc

SEQ ID NO: 33958 - DNA, 20 bp, synthetic construct
  misc_feature 1..20: note = chemically synthesized
  source 1..20: mol_type = other DNA
gtgtgtcaaatgaggacaca

SEQ ID NO: 33959 - DNA, 20 bp, synthetic construct
  misc_feature 1..20: note = chemically synthesized
  source 1..20: mol_type = other DNA
actgccaaaaaaacacagac

SEQ ID NO: 33960 - DNA, 20 bp, synthetic construct
  misc_feature 1..20: note = chemically synthesized
  source 1..20: mol_type = other DNA
taaaagatcaaattaagtgc

SEQ ID NO: 33961 - DNA, 20 bp, synthetic construct
  misc_feature 1..20: note = chemically synthesized
  source 1..20: mol_type = other DNA
taaaatttcaagttacgaca

SEQ ID NO: 33962 - DNA, 20 bp, synthetic construct
  misc_feature 1..20: note = chemically synthesized
  source 1..20: mol_type = other DNA
acaaaaaagtattgactaaa

SEQ ID NO: 33963 - DNA, 20 bp, synthetic construct
  misc_feature 1..20: note = chemically synthesized
  source 1..20: mol_type = other DNA
taaagcgggctttctcttta

SEQ ID NO: 33964 - DNA, 20 bp, synthetic construct
  misc_feature 1..20: note = chemically synthesized
  source 1..20: mol_type = other DNA
aatctaaatataaagcacca

SEQ ID NO: 33965 - DNA, 20 bp, synthetic construct
  misc_feature 1..20: note = chemically synthesized
  source 1..20: mol_type = other DNA
aatgaaaaaaactgcaaaac

SEQ ID NO: 33966 - DNA, 20 bp, synthetic construct
  misc_feature 1..20: note = chemically synthesized
  source 1..20: mol_type = other DNA
ctacataacaaaccaacgtt

SEQ ID NO: 33967 - DNA, 20 bp, synthetic construct
  misc_feature 1..20: note = chemically synthesized
  source 1..20: mol_type = other DNA
gctcccccaaaccgccatta

SEQ ID NO: 33968 - DNA, 20 bp, synthetic construct
  misc_feature 1..20: note = chemically synthesized
  source 1..20: mol_type = other DNA
tcatctgtaatgtcacactt

SEQ ID NO: 33969 - DNA, 20 bp, synthetic construct
  misc_feature 1..20: note = chemically synthesized
  source 1..20: mol_type = other DNA
aacaagcaacagttaaaaat

SEQ ID NO: 33970 - DNA, 20 bp, synthetic construct
  misc_feature 1..20: note = chemically synthesized
  source 1..20: mol_type = other DNA
atcttaaacctttccccaat

SEQ ID NO: 33971 - DNA, 20 bp, synthetic construct
  misc_feature 1..20: note = chemically synthesized
  source 1..20: mol_type = other DNA
gttcccccctaaacataatg

SEQ ID NO: 33972 - DNA, 20 bp, synthetic construct
  misc_feature 1..20: note = chemically synthesized
  source 1..20: mol_type = other DNA
ttcttaacatttatatttaa

SEQ ID NO: 33973 - DNA, 20 bp, synthetic construct
  misc_feature 1..20: note = chemically synthesized
  source 1..20: mol_type = other DNA
tcatttctatgttaagtgta

SEQ ID NO: 33974 - DNA, 20 bp, synthetic construct
  misc_feature 1..20: note = chemically synthesized
  source 1..20: mol_type = other DNA
gtgtattctgtttccattca

SEQ ID NO: 33975 - DNA, 20 bp, synthetic construct
  misc_feature 1..20: note = chemically synthesized
  source 1..20: mol_type = other DNA
atagtcaagtaaatggctgg

SEQ ID NO: 33976 - DNA, 20 bp, synthetic construct
  misc_feature 1..20: note = chemically synthesized
  source 1..20: mol_type = other DNA
gctggcaaagtttttttttt

SEQ ID NO: 33977 - DNA, 20 bp, synthetic construct
  misc_feature 1..20: note = chemically synthesized
  source 1..20: mol_type = other DNA
tttttaaaaaatgctcctca

SEQ ID NO: 33978 - DNA, 20 bp, synthetic construct
  misc_feature 1..20: note = chemically synthesized
  source 1..20: mol_type = other DNA
cacttaattgtcctatctga

SEQ ID NO: 33979 - DNA, 20 bp, synthetic construct
  misc_feature 1..20: note = chemically synthesized
  source 1..20: mol_type = other DNA
tttatactcaacctctgtat

SEQ ID NO: 33980 - DNA, 20 bp, synthetic construct
  misc_feature 1..20: note = chemically synthesized
  source 1..20: mol_type = other DNA
gaacaccaactggggcagat

SEQ ID NO: 33981 - DNA, 20 bp, synthetic construct
  misc_feature 1..20: note = chemically synthesized
  source 1..20: mol_type = other DNA
ttaatcatcattgtatcaat

SEQ ID NO: 33982 - DNA, 20 bp, synthetic construct
  misc_feature 1..20: note = chemically synthesized
  source 1..20: mol_type = other DNA
atattagcttatatacctgt

SEQ ID NO: 33983 - DNA, 20 bp, synthetic construct
  misc_feature 1..20: note = chemically synthesized
  source 1..20: mol_type = other DNA
caatatggtatacaaggtct

SEQ ID NO: 33984 - DNA, 20 bp, synthetic construct
  misc_feature 1..20: note = chemically synthesized
  source 1..20: mol_type = other DNA
acaaggtcttaaagtttatc

SEQ ID NO: 33985 - DNA, 20 bp, synthetic construct
  misc_feature 1..20: note = chemically synthesized
  source 1..20: mol_type = other DNA
tagtgtatttaattgcgttc

SEQ ID NO: 33986 - DNA, 20 bp, synthetic construct
  misc_feature 1..20: note = chemically synthesized
  source 1..20: mol_type = other DNA
cattacacattcaatttaat

SEQ ID NO: 33987 - DNA, 20 bp, synthetic construct
  misc_feature 1..20: note = chemically synthesized
  source 1..20: mol_type = other DNA
taagctctcaccaggagcaa

SEQ ID NO: 33988 - DNA, 20 bp, synthetic construct
  misc_feature 1..20: note = chemically synthesized
  source 1..20: mol_type = other DNA
gtagcttttatactggtata

SEQ ID NO: 33989 - DNA, 20 bp, synthetic construct
  misc_feature 1..20: note = chemically synthesized
  source 1..20: mol_type = other DNA
ttttatactggtataatcag

SEQ ID NO: 33990 - DNA, 20 bp, synthetic construct
  misc_feature 1..20: note = chemically synthesized
  source 1..20: mol_type = other DNA
aaattaaactaaaggaaaaa

SEQ ID NO: 33991 - DNA, 20 bp, synthetic construct
  misc_feature 1..20: note = chemically synthesized
  source 1..20: mol_type = other DNA
tagaattatatgctagttcc

SEQ ID NO: 33992 - DNA, 20 bp, synthetic construct
  misc_feature 1..20: note = chemically synthesized
  source 1..20: mol_type = other DNA
acccaatgctgaattaagct

SEQ ID NO: 33993 - DNA, 20 bp, synthetic construct
  misc_feature 1..20: note = chemically synthesized
  source 1..20: mol_type = other DNA
caagtagaaagaaccatcga

SEQ ID NO: 33994 - DNA, 20 bp, synthetic construct
  misc_feature 1..20: note = chemically synthesized
  source 1..20: mol_type = other DNA
caaatgatagaataaacttg

SEQ ID NO: 33995 - DNA, 20 bp, synthetic construct
  misc_feature 1..20: note = chemically synthesized
  source 1..20: mol_type = other DNA
agagacagacatttagctca

SEQ ID NO: 33996 - DNA, 20 bp, synthetic construct
  misc_feature 1..20: note = chemically synthesized
  source 1..20: mol_type = other DNA
ctatagagggttaatccaaa

SEQ ID NO: 33997 - DNA, 20 bp, synthetic construct
  misc_feature 1..20: note = chemically synthesized
  source 1..20: mol_type = other DNA
gaacggaactggaaacagca

SEQ ID NO: 33998 - DNA, 20 bp, synthetic construct
  misc_feature 1..20: note = chemically synthesized
  source 1..20: mol_type = other DNA
taacataccatacatgctgt

SEQ ID NO: 33999 - DNA, 20 bp, synthetic construct
  misc_feature 1..20: note = chemically synthesized
  source 1..20: mol_type = other DNA
tattgcacaagagaaaggct

SEQ ID NO: 34000 - DNA, 20 bp, synthetic construct
  misc_feature 1..20: note = chemically synthesized
  source 1..20: mol_type = other DNA
gtgacaagcactctcatatt

SEQ ID NO: 34001 - DNA, 20 bp, synthetic construct
  misc_feature 1..20: note = chemically synthesized
  source 1..20: mol_type = other DNA
catattcttagcttcgttac

SEQ ID NO: 34002 - DNA, 20 bp, synthetic construct
  misc_feature 1..20: note = chemically synthesized
  source 1..20: mol_type = other DNA
ttcttagcttcgttacttct

SEQ ID NO: 34003 - DNA, 20 bp, synthetic construct
  misc_feature 1..20: note = chemically synthesized
  source 1..20: mol_type = other DNA
tagcttcgttacttctgttt

SEQ ID NO: 34004 - DNA, 20 bp, synthetic construct
  misc_feature 1..20: note = chemically synthesized
  source 1..20: mol_type = other DNA
ttcgttacttctgtttgttt

SEQ ID NO: 34005 - DNA, 20 bp, synthetic construct
  misc_feature 1..20: note = chemically synthesized
  source 1..20: mol_type = other DNA
ttacttctgtttgtttgttt

SEQ ID NO: 34006 - DNA, 20 bp, synthetic construct
  misc_feature 1..20: note = chemically synthesized
  source 1..20: mol_type = other DNA
ggggtattaatatacctcta

SEQ ID NO: 34007 - DNA, 20 bp, synthetic construct
  misc_feature 1..20: note = chemically synthesized
  source 1..20: mol_type = other DNA
gatcactgtgccattttttc

SEQ ID NO: 34008 - DNA, 20 bp, synthetic construct
  misc_feature 1..20: note = chemically synthesized
  source 1..20: mol_type = other DNA
acgtccttccccacctggcc

SEQ ID NO: 34009 - DNA, 20 bp, synthetic construct
  misc_feature 1..20: note = chemically synthesized
  source 1..20: mol_type = other DNA
catgcgttttcatgtgcctg

SEQ ID NO: 34010 - DNA, 20 bp, synthetic construct
  misc_feature 1..20: note = chemically synthesized
  source 1..20: mol_type = other DNA
tttataaggcctttcgcccg

SEQ ID NO: 34011 - DNA, 20 bp, synthetic construct
  misc_feature 1..20: note = chemically synthesized
  source 1..20: mol_type = other DNA
tgtggcttctcctgtggaca

SEQ ID NO: 34012 - DNA, 20 bp, synthetic construct
  misc_feature 1..20: note = chemically synthesized
  source 1..20: mol_type = other DNA
tgctccgacgaggaggcaaa

SEQ ID NO: 34013 - DNA, 20 bp, synthetic construct
  misc_feature 1..20: note = chemically synthesized
  source 1..20: mol_type = other DNA
ggggcaggtcgaactccttc

SEQ ID NO: 34014 - DNA, 20 bp, synthetic construct
  misc_feature 1..20: note = chemically synthesized
  source 1..20: mol_type = other DNA
cgaactccttctcgagcttg

SEQ ID NO: 34015 - DNA, 20 bp, synthetic construct
  misc_feature 1..20: note = chemically synthesized
  source 1..20: mol_type = other DNA
gcgagctggggctgcccagc

SEQ ID NO: 34016 - DNA, 20 bp, synthetic construct
  misc_feature 1..20: note = chemically synthesized
  source 1..20: mol_type = other DNA
cctcggcctcggccaggtgg

SEQ ID NO: 34017 - DNA, 20 bp, synthetic construct
  misc_feature 1..20: note = chemically synthesized
  source 1..20: mol_type = other DNA
cctcggccaggtggccgcgc

SEQ ID NO: 34018 - DNA, 20 bp, synthetic construct
  misc_feature 1..20: note = chemically synthesized
  source 1..20: mol_type = other DNA
tcggacttgaccgtcatggg

SEQ ID NO: 34019 - DNA, 20 bp, synthetic construct
  misc_feature 1..20: note = chemically synthesized
  source 1..20: mol_type = other DNA
tgtgcatgtgcgtcttcatg

SEQ ID NO: 34020 - DNA, 20 bp, synthetic construct
  misc_feature 1..20: note = chemically synthesized
  source 1..20: mol_type = other DNA
tgtgcgtcttcatgtggcgc

SEQ ID NO: 34021 - DNA, 20 bp, synthetic construct
  misc_feature 1..20: note = chemically synthesized
  source 1..20: mol_type = other DNA
ggtcgcacaggttgcacttg

SEQ ID NO: 34022 - DNA, 20 bp, synthetic construct
  misc_feature 1..20: note = chemically synthesized
  source 1..20: mol_type = other DNA
gggggctgggagggaggagg

SEQ ID NO: 34023 - DNA, 20 bp, synthetic construct
  misc_feature 1..20: note = chemically synthesized
  source 1..20: mol_type = other DNA
gggggggcgtcgccaggaag

SEQ ID NO: 34024 - DNA, 20 bp, synthetic construct
  misc_feature 1..20: note = chemically synthesized
  source 1..20: mol_type = other DNA
tggcgggaggctccatagcc

SEQ ID NO: 34025 - DNA, 20 bp, synthetic construct
  misc_feature 1..20: note = chemically synthesized
  source 1..20: mol_type = other DNA
cggggtcaggggacttccgt

SEQ ID NO: 34026 - DNA, 20 bp, synthetic construct
  misc_feature 1..20: note = chemically synthesized
  source 1..20: mol_type = other DNA
acttccgtgttcgctttcta

SEQ ID NO: 34027 - DNA, 20 bp, synthetic construct
  misc_feature 1..20: note = chemically synthesized
  source 1..20: mol_type = other DNA
gaaaccatgcactggtgaat

SEQ ID NO: 34028 - DNA, 20 bp, synthetic construct
  misc_feature 1..20: note = chemically synthesized
  source 1..20: mol_type = other DNA
aaataatacaacaccaacat

SEQ ID NO: 34029 - DNA, 20 bp, synthetic construct
  misc_feature 1..20: note = chemically synthesized
  source 1..20: mol_type = other DNA
tcactgaggcgggcatcagc

SEQ ID NO: 34030 - DNA, 20 bp, synthetic construct
  misc_feature 1..20: note = chemically synthesized
  source 1..20: mol_type = other DNA
gcagaaaaatcctgaccagt

SEQ ID NO: 34031 - DNA, 20 bp, synthetic construct
  misc_feature 1..20: note = chemically synthesized
  source 1..20: mol_type = other DNA
aactttccagttccatcagc

SEQ ID NO: 34032 - DNA, 20 bp, synthetic construct
  misc_feature 1..20: note = chemically synthesized
  source 1..20: mol_type = other DNA
gccatctcatctccatgtgc

SEQ ID NO: 34033 - DNA, 20 bp, synthetic construct
  misc_feature 1..20: note = chemically synthesized
  source 1..20: mol_type = other DNA
aaggtgacccaaggaaactt

SEQ ID NO: 34034 - DNA, 20 bp, synthetic construct
  misc_feature 1..20: note = chemically synthesized
  source 1..20: mol_type = other DNA
aactttttggcttcctaaat

SEQ ID NO: 34035 - DNA, 20 bp, synthetic construct
  misc_feature 1..20: note = chemically synthesized
  source 1..20: mol_type = other DNA
acaatgttctatggccctaa

SEQ ID NO: 34036 - DNA, 20 bp, synthetic construct
  misc_feature 1..20: note = chemically synthesized
  source 1..20: mol_type = other DNA
acgtccatttttatctcaaa

SEQ ID NO: 34037 - DNA, 20 bp, synthetic construct
  misc_feature 1..20: note = chemically synthesized
  source 1..20: mol_type = other DNA
aatctgaaagaaaaacttca

SEQ ID NO: 34038 - DNA, 20 bp, synthetic construct
  misc_feature 1..20: note = chemically synthesized
  source 1..20: mol_type = other DNA
gacttaagcagacacagcat

SEQ ID NO: 34039 - DNA, 20 bp, synthetic construct
  misc_feature 1..20: note = chemically synthesized
  source 1..20: mol_type = other DNA
tgctacactatcctcctcct

SEQ ID NO: 34040 - DNA, 20 bp, synthetic construct
  misc_feature 1..20: note = chemically synthesized
  source 1..20: mol_type = other DNA
ccaagccgtctggagagggg

SEQ ID NO: 34041 - DNA, 20 bp, synthetic construct
  misc_feature 1..20: note = chemically synthesized
  source 1..20: mol_type = other DNA
tgccactttggcaaagaagg

SEQ ID NO: 34042 - DNA, 20 bp, synthetic construct
  misc_feature 1..20: note = chemically synthesized
  source 1..20: mol_type = other DNA
tatatatggaataactgacc

SEQ ID NO: 34043 - DNA, 20 bp, synthetic construct
  misc_feature 1..20: note = chemically synthesized
  source 1..20: mol_type = other DNA
atgagaaaaacaaaacttcc

SEQ ID NO: 34044 - DNA, 20 bp, synthetic construct
  misc_feature 1..20: note = chemically synthesized
  source 1..20: mol_type = other DNA
ctcctgggtaaatctcttaa

SEQ ID NO: 34045 - DNA, 20 bp, synthetic construct
  misc_feature 1..20: note = chemically synthesized
  source 1..20: mol_type = other DNA
tagatggtaagataccaaaa

SEQ ID NO: 34046 - DNA, 20 bp, synthetic construct
  misc_feature 1..20: note = chemically synthesized
  source 1..20: mol_type = other DNA
tggaagggggaaaaaaggca

SEQ ID NO: 34047 - DNA, 20 bp, synthetic construct
  misc_feature 1..20: note = chemically synthesized
  source 1..20: mol_type = other DNA
gtatcacattatctgcctat

SEQ ID NO: 34048 - DNA, 20 bp, synthetic construct
  misc_feature 1..20: note = chemically synthesized
  source 1..20: mol_type = other DNA
cctctcttcaaagggaaata

SEQ ID NO: 34049 - DNA, 20 bp, synthetic construct
  misc_feature 1..20: note = chemically synthesized
  source 1..20: mol_type = other DNA
gttccaactacatgatcctc

SEQ ID NO: 34050 - DNA, 20 bp, synthetic construct
  misc_feature 1..20: note = chemically synthesized
  source 1..20: mol_type = other DNA
cgatctgagttgggcaagta

SEQ ID NO: 34051 - DNA, 20 bp, synthetic construct
  misc_feature 1..20: note = chemically synthesized
  source 1..20: mol_type = other DNA
ttatattttaccttataaaa

SEQ ID NO: 34052 - DNA, 20 bp, synthetic construct
  misc_feature 1..20: note = chemically synthesized
  source 1..20: mol_type = other DNA
ctagactcataattagtggt

SEQ ID NO: 34053 - DNA, 20 bp, synthetic construct
  misc_feature 1..20: note = chemically synthesized
  source 1..20: mol_type = other DNA
tctcatttgtatcctttcaa

SEQ ID NO: 34054 - DNA, 20 bp, synthetic construct
  misc_feature 1..20: note = chemically synthesized
  source 1..20: mol_type = other DNA
cttataatgagcatacaaca

SEQ ID NO: 34055 - DNA, 20 bp, synthetic construct
  misc_feature 1..20: note = chemically synthesized
  source 1..20: mol_type = other DNA
aatgtcaatgagaagggctg

SEQ ID NO: 34056 - DNA, 20 bp, synthetic construct
  misc_feature 1..20: note = chemically synthesized
  source 1..20: mol_type = other DNA
agggctgttacgattgagac

SEQ ID NO: 34057 - DNA, 20 bp, synthetic construct
  misc_feature 1..20: note = chemically synthesized
  source 1..20: mol_type = other DNA
actaaagattacatggagag

SEQ ID NO: 34058 - DNA, 20 bp, synthetic construct
  misc_feature 1..20: note = chemically synthesized
  source 1..20: mol_type = other DNA
ccatattatattacagtgct

SEQ ID NO: 34059 - DNA, 20 bp, synthetic construct
  misc_feature 1..20: note = chemically synthesized
  source 1..20: mol_type = other DNA
tactttgttcataacatctt

SEQ ID NO: 34060 - DNA, 20 bp, synthetic construct
  misc_feature 1..20: note = chemically synthesized
  source 1..20: mol_type = other DNA
tgatgatttagaaagactgg

SEQ ID NO: 34061 - DNA, 20 bp, synthetic construct
  misc_feature 1..20: note = chemically synthesized
  source 1..20: mol_type = other DNA
gtgtggcaaaattagggcta

SEQ ID NO: 34062 - DNA, 20 bp, synthetic construct
  misc_feature 1..20: note = chemically synthesized
  source 1..20: mol_type = other DNA
agagcctcattgggcattta

SEQ ID NO: 34063 - DNA, 20 bp, synthetic construct
  misc_feature 1..20: note = chemically synthesized
  source 1..20: mol_type = other DNA
cctcattgggcatttacggg

SEQ ID NO: 34064 - DNA, 20 bp, synthetic construct
  misc_feature 1..20: note = chemically synthesized
  source 1..20: mol_type = other DNA
ttgggcatttacggggattg

SEQ ID NO: 34065 - DNA, 20 bp, synthetic construct
  misc_feature 1..20: note = chemically synthesized
  source 1..20: mol_type = other DNA
aatcagctattagcccacct

SEQ ID NO: 34066 - DNA, 20 bp, synthetic construct
  misc_feature 1..20: note = chemically synthesized
  source 1..20: mol_type = other DNA
aaagtcatgtgatctaagcc

SEQ ID NO: 34067 - DNA, 20 bp, synthetic construct
  misc_feature 1..20: note = chemically synthesized
  source 1..20: mol_type = other DNA
gaggcctagctctattatcc

SEQ ID NO: 34068 - DNA, 20 bp, synthetic construct
  misc_feature 1..20: note = chemically synthesized
  source 1..20: mol_type = other DNA
attgtaactctgggatagtc

SEQ ID NO: 34069 - DNA, 20 bp, synthetic construct
  misc_feature 1..20: note = chemically synthesized
  source 1..20: mol_type = other DNA
ctatcaggtcgaatgtgaat

SEQ ID NO: 34070 - DNA, 20 bp, synthetic construct
  misc_feature 1..20: note = chemically synthesized
  source 1..20: mol_type = other DNA
tgagttttcattactaccag

SEQ ID NO: 34071 - DNA, 20 bp, synthetic construct
  misc_feature 1..20: note = chemically synthesized
  source 1..20: mol_type = other DNA
taaccacattacacaccccg

SEQ ID NO: 34072 - DNA, 20 bp, synthetic construct
  misc_feature 1..20: note = chemically synthesized
  source 1..20: mol_type = other DNA
gccgccaagtggaatgggca

SEQ ID NO: 34073 - DNA, 20 bp, synthetic construct
  misc_feature 1..20: note = chemically synthesized
  source 1..20: mol_type = other DNA
aatgggcatcaggtttgttc

SEQ ID NO: 34074 - DNA, 20 bp, synthetic construct
  misc_feature 1..20: note = chemically synthesized
  source 1..20: mol_type = other DNA
accaggctgaagaccgagaa

SEQ ID NO: 34075 - DNA, 20 bp, synthetic construct
  misc_feature 1..20: note = chemically synthesized
  source 1..20: mol_type = other DNA
tcccttccctccaaaagtgg

SEQ ID NO: 34076 - DNA, 20 bp, synthetic construct
  misc_feature 1..20: note = chemically synthesized
  source 1..20: mol_type = other DNA
tctgcaatctgtgacctaac

SEQ ID NO: 34077 - DNA, 20 bp, synthetic construct
  misc_feature 1..20: note = chemically synthesized
  source 1..20: mol_type = other DNA
tgacctaacccaggcttagg

SEQ ID NO: 34078 - DNA, 20 bp, synthetic construct
  misc_feature 1..20: note = chemically synthesized
  source 1..20: mol_type = other DNA
ttgggggaagggagcagatg

SEQ ID NO: 34079 - DNA, 20 bp, synthetic construct
  misc_feature 1..20: note = chemically synthesized
  source 1..20: mol_type = other DNA
ccacccagccctcaggacct

SEQ ID NO: 34080 - DNA, 20 bp, synthetic construct
  misc_feature 1..20: note = chemically synthesized
  source 1..20: mol_type = other DNA
acacaataactctttgttac

SEQ ID NO: 34081 - DNA, 20 bp, synthetic construct
  misc_feature 1..20: note = chemically synthesized
  source 1..20: mol_type = other DNA
ggagttaacaaaaataaaca

SEQ ID NO: 34082 - DNA, 20 bp, synthetic construct
  misc_feature 1..20: note = chemically synthesized
  source 1..20: mol_type = other DNA
cacacttcttttcttcttga

SEQ ID NO: 34083 - DNA, 20 bp, synthetic construct
  misc_feature 1..20: note = chemically synthesized
  source 1..20: mol_type = other DNA
ttcttcttgaacctgctttt

SEQ ID NO: 34084 - DNA, 20 bp, synthetic construct
  misc_feature 1..20: note = chemically synthesized
  source 1..20: mol_type = other DNA
ccccctaaccttttagccat

SEQ ID NO: 34085 - DNA, 20 bp, synthetic construct
  misc_feature 1..20: note = chemically synthesized
  source 1..20: mol_type = other DNA
atttgtataaatggacaaat

SEQ ID NO: 34086 - DNA, 20 bp, synthetic construct
  misc_feature 1..20: note = chemically synthesized
  source 1..20: mol_type = other DNA
aataaccctaaactgactcc

SEQ ID NO: 34087 - DNA, 20 bp, synthetic construct
  misc_feature 1..20: note = chemically synthesized
  source 1..20: mol_type = other DNA
ttctgcactcatcccaggcg

SEQ ID NO: 34088 - DNA, 20 bp, synthetic construct
  misc_feature 1..20: note = chemically synthesized
  source 1..20: mol_type = other DNA
aggagaggcccctccagtgc

SEQ ID NO: 34089 - DNA, 20 bp, synthetic construct
  misc_feature 1..20: note = chemically synthesized
  source 1..20: mol_type = other DNA
tcacatttcaattccattaa

SEQ ID NO: 34090 - DNA, 20 bp, synthetic construct
  misc_feature 1..20: note = chemically synthesized
  source 1..20: mol_type = other DNA
aagagtggtgagttatttcc

SEQ ID NO: 34091 - DNA, 20 bp, synthetic construct
  misc_feature 1..20: note = chemically synthesized
  source 1..20: mol_type = other DNA
ggtgagttatttcccagagt

SEQ ID NO: 34092 - DNA, 20 bp, synthetic construct
  misc_feature 1..20: note = chemically synthesized
  source 1..20: mol_type = other DNA
gttatttcccagagtttctg

SEQ ID NO: 34093 - DNA, 20 bp, synthetic construct
  misc_feature 1..20: note = chemically synthesized
  source 1..20: mol_type = other DNA
ggtctttttgacaaaagtga

SEQ ID NO: 34094 - DNA, 20 bp, synthetic construct
  misc_feature 1..20: note = chemically synthesized
  source 1..20: mol_type = other DNA
tttttgacaaaagtgaaagg

SEQ ID NO: 34095 - DNA, 20 bp, synthetic construct
  misc_feature 1..20: note = chemically synthesized
  source 1..20: mol_type = other DNA
ggagaggtggtctttggttc

SEQ ID NO: 34096 - DNA, 20 bp, synthetic construct
  misc_feature 1..20: note = chemically synthesized
  source 1..20: mol_type = other DNA
tcatttgcttatttatttgt

SEQ ID NO: 34097 - DNA, 20 bp, synthetic construct
  misc_feature 1..20: note = chemically synthesized
  source 1..20: mol_type = other DNA
ttgcttatttatttgttgtt

SEQ ID NO: 34098 - DNA, 20 bp, synthetic construct
  misc_feature 1..20: note = chemically synthesized
  source 1..20: mol_type = other DNA
gtgggtagcctggaaacatg

SEQ ID NO: 34099 - DNA, 20 bp, synthetic construct
  misc_feature 1..20: note = chemically synthesized
  source 1..20: mol_type = other DNA
ggggggattttatctgcaag

SEQ ID NO: 34100 - DNA, 20 bp, synthetic construct
  misc_feature 1..20: note = chemically synthesized
  source 1..20: mol_type = other DNA
caaaatgctgataggaaatg

SEQ ID NO: 34101 - DNA, 20 bp, synthetic construct
  misc_feature 1..20: note = chemically synthesized
  source 1..20: mol_type = other DNA
aggaaatgagtagatttgtg

SEQ ID NO: 34102 - DNA, 20 bp, synthetic construct
  misc_feature 1..20: note = chemically synthesized
  source 1..20: mol_type = other DNA
ttttatgggacagagtccca

SEQ ID NO: 34103 - DNA, 20 bp, synthetic construct
  misc_feature 1..20: note = chemically synthesized
  source 1..20: mol_type = other DNA
aactggaaaccttacacaga

SEQ ID NO: 34104 - DNA, 20 bp, synthetic construct
  misc_feature 1..20: note = chemically synthesized
  source 1..20: mol_type = other DNA
caatacaaagcaatggaaga

SEQ ID NO: 34105 - DNA, 20 bp, synthetic construct
  misc_feature 1..20: note = chemically synthesized
  source 1..20: mol_type = other DNA
tcaatgaaacatttgtagca

SEQ ID NO: 34106 - DNA, 20 bp, synthetic construct
  misc_feature 1..20: note = chemically synthesized
  source 1..20: mol_type = other DNA
tttttttgagaagaggaaaa

SEQ ID NO: 34107 - DNA, 20 bp, synthetic construct
  misc_feature 1..20: note = chemically synthesized
  source 1..20: mol_type = other DNA
aaaatttggtttgtgcaatc

SEQ ID NO: 34108 - DNA, 20 bp, synthetic construct
  misc_feature 1..20: note = chemically synthesized
  source 1..20: mol_type = other DNA
tttgtgcaatctggggattt

SEQ ID NO: 34109 - DNA, 20 bp, synthetic construct
  misc_feature 1..20: note = chemically synthesized
  source 1..20: mol_type = other DNA
tacggtttatgtggtaagtg

SEQ ID NO: 34110 - DNA, 20 bp, synthetic construct
  misc_feature 1..20: note = chemically synthesized
  source 1..20: mol_type = other DNA
ggagacgctctgtgtgttct

SEQ ID NO: 34111 - DNA, 20 bp, synthetic construct
  misc_feature 1..20: note = chemically synthesized
  source 1..20: mol_type = other DNA
ttctagaggtttggagttca

SEQ ID NO: 34112 - DNA, 20 bp, synthetic construct
  misc_feature 1..20: note = chemically synthesized
  source 1..20: mol_type = other DNA
actttgatggtgaacaaaca

SEQ ID NO: 34113 - DNA, 20 bp, synthetic construct
  misc_feature 1..20: note = chemically synthesized
  source 1..20: mol_type = other DNA
gaacaaacagtatgttttcc

SEQ ID NO: 34114 - DNA, 20 bp, synthetic construct
  misc_feature 1..20: note = chemically synthesized
  source 1..20: mol_type = other DNA
gcacagccaaggcagttggg

SEQ ID NO: 34115 - DNA, 20 bp, synthetic construct
  misc_feature 1..20: note = chemically synthesized
  source 1..20: mol_type = other DNA
aaacaagtatgtctacattt

SEQ ID NO: 34116 - DNA, 20 bp, synthetic construct
  misc_feature 1..20: note = chemically synthesized
  source 1..20: mol_type = other DNA
agagtgtggcgtaaaattac

SEQ ID NO: 34117 - DNA, 20 bp, synthetic construct
  misc_feature 1..20: note = chemically synthesized
  source 1..20: mol_type = other DNA
atctgagaatccatctttgc

SEQ ID NO: 34118 - DNA, 20 bp, synthetic construct
  misc_feature 1..20: note = chemically synthesized
  source 1..20: mol_type = other DNA
gtttttgcctcagccgttca

SEQ ID NO: 34119 - DNA, 20 bp, synthetic construct
  misc_feature 1..20: note = chemically synthesized
  source 1..20: mol_type = other DNA
tactctgggaagagaccctg

SEQ ID NO: 34120 - DNA, 20 bp, synthetic construct
  misc_feature 1..20: note = chemically synthesized
  source 1..20: mol_type = other DNA
ctcatctgactatctggcag

SEQ ID NO: 34121 - DNA, 20 bp, synthetic construct
  misc_feature 1..20: note = chemically synthesized
  source 1..20: mol_type = other DNA
tctgactatctggcagcata

SEQ ID NO: 34122 - DNA, 20 bp, synthetic construct
  misc_feature 1..20: note = chemically synthesized
  source 1..20: mol_type = other DNA
tatctggcagcatagtttgt

SEQ ID NO: 34123 - DNA, 20 bp, synthetic construct
  misc_feature 1..20: note = chemically synthesized
  source 1..20: mol_type = other DNA
gcagcatagtttgtttttgt

SEQ ID NO: 34124 - DNA, 20 bp, synthetic construct
  misc_feature 1..20: note = chemically synthesized
  source 1..20: mol_type = other DNA
tagtttgtttttgtttttgt

SEQ ID NO: 34125 - DNA, 20 bp, synthetic construct
  misc_feature 1..20: note = chemically synthesized
  source 1..20: mol_type = other DNA
gtttttgtttttgtttttgt

SEQ ID NO: 34126 - DNA, 20 bp, synthetic construct
  misc_feature 1..20: note = chemically synthesized
  source 1..20: mol_type = other DNA
tgacttgcccatggctacac

SEQ ID NO: 34127 - DNA, 20 bp, synthetic construct
  misc_feature 1..20: note = chemically synthesized
  source 1..20: mol_type = other DNA
actgatgattaaccacaatg

SEQ ID NO: 34128 - DNA, 20 bp, synthetic construct
  misc_feature 1..20: note = chemically synthesized
  source 1..20: mol_type = other DNA
ttcactgcccaacaagaagg

SEQ ID NO: 34129 - DNA, 20 bp, synthetic construct
  misc_feature 1..20: note = chemically synthesized
  source 1..20: mol_type = other DNA
tccagcccagcagcgctaca

SEQ ID NO: 34130 - DNA, 20 bp, synthetic construct
  misc_feature 1..20: note = chemically synthesized
  source 1..20: mol_type = other DNA
ttgctgtgttcaccctctac

SEQ ID NO: 34131 - DNA, 20 bp, synthetic construct
  misc_feature 1..20: note = chemically synthesized
  source 1..20: mol_type = other DNA
caaagccaactggggacccc

SEQ ID NO: 34132 - DNA, 20 bp, synthetic construct
  misc_feature 1..20: note = chemically synthesized
  source 1..20: mol_type = other DNA
ctggggaccccagctgattc

SEQ ID NO: 34133 - DNA, 20 bp, synthetic construct
  misc_feature 1..20: note = chemically synthesized
  source 1..20: mol_type = other DNA
taaattgttaatagcctccc

SEQ ID NO: 34134 - DNA, 20 bp, synthetic construct
  misc_feature 1..20: note = chemically synthesized
  source 1..20: mol_type = other DNA
gatgccttcaattatttcat

SEQ ID NO: 34135 - DNA, 20 bp, synthetic construct
  misc_feature 1..20: note = chemically synthesized
  source 1..20: mol_type = other DNA
gcaaagtaaagtatcacaat

SEQ ID NO: 34136 - DNA, 20 bp, synthetic construct
  misc_feature 1..20: note = chemically synthesized
  source 1..20: mol_type = other DNA
agggcctcttcttttcccac

SEQ ID NO: 34137 - DNA, 20 bp, synthetic construct
  misc_feature 1..20: note = chemically synthesized
  source 1..20: mol_type = other DNA
ctttgttagtgctcttaggc

SEQ ID NO: 34138 - DNA, 20 bp, synthetic construct
  misc_feature 1..20: note = chemically synthesized
  source 1..20: mol_type = other DNA
acccccgatcagcatcacct

SEQ ID NO: 34139 - DNA, 20 bp, synthetic construct
  misc_feature 1..20: note = chemically synthesized
  source 1..20: mol_type = other DNA
ctatgttgaataaattctcc

SEQ ID NO: 34140 - DNA, 20 bp, synthetic construct
  misc_feature 1..20: note = chemically synthesized
  source 1..20: mol_type = other DNA
gtaagggaagtatgaacgct

SEQ ID NO: 34141 - DNA, 20 bp, synthetic construct
  misc_feature 1..20: note = chemically synthesized
  source 1..20: mol_type = other DNA
cagagacccatgggccatga

SEQ ID NO: 34142 - DNA, 20 bp, synthetic construct
  misc_feature 1..20: note = chemically synthesized
  source 1..20: mol_type = other DNA
ctggaacagtcaaaaacaaa

SEQ ID NO: 34143 - DNA, 20 bp, synthetic construct
  misc_feature 1..20: note = chemically synthesized
  source 1..20: mol_type = other DNA
tagcatgagacaacacccaa

SEQ ID NO: 34144 - DNA, 20 bp, synthetic construct
  misc_feature 1..20: note = chemically synthesized
  source 1..20: mol_type = other DNA
acccaaaccagcttgtgcca

SEQ ID NO: 34145 - DNA, 20 bp, synthetic construct
  misc_feature 1..20: note = chemically synthesized
  source 1..20: mol_type = other DNA
tgccagacagattgtgtcct

SEQ ID NO: 34146 - DNA, 20 bp, synthetic construct
  misc_feature 1..20: note = chemically synthesized
  source 1..20: mol_type = other DNA
ggacacagcaggaactggac

SEQ ID NO: 34147 - DNA, 20 bp, synthetic construct
  misc_feature 1..20: note = chemically synthesized
  source 1..20: mol_type = other DNA
tcttacacttttctggtgga

SEQ ID NO: 34148 - DNA, 20 bp, synthetic construct
  misc_feature 1..20: note = chemically synthesized
  source 1..20: mol_type = other DNA
ccttacacattattaggttg

SEQ ID NO: 34149 - DNA, 20 bp, synthetic construct
  misc_feature 1..20: note = chemically synthesized
  source 1..20: mol_type = other DNA
aaaatagtgactcttatttt

SEQ ID NO: 34150 - DNA, 20 bp, synthetic construct
  misc_feature 1..20: note = chemically synthesized
  source 1..20: mol_type = other DNA
aaaatatgcagcaaactggg

SEQ ID NO: 34151 - DNA, 20 bp, synthetic construct
  misc_feature 1..20: note = chemically synthesized
  source 1..20: mol_type = other DNA
atgcagcaaactgggaatgg

SEQ ID NO: 34152 - DNA, 20 bp, synthetic construct
  misc_feature 1..20: note = chemically synthesized
  source 1..20: mol_type = other DNA
ctggaatttaagtcattaaa

SEQ ID NO: 34153 - DNA, 20 bp, synthetic construct
  misc_feature 1..20: note = chemically synthesized
  source 1..20: mol_type = other DNA
taagtcattaaatcaagttt

SEQ ID NO: 34154 - DNA, 20 bp, synthetic construct
  misc_feature 1..20: note = chemically synthesized
  source 1..20: mol_type = other DNA
tggtttcctcaagaacatct

SEQ ID NO: 34155 - DNA, 20 bp, synthetic construct
  misc_feature 1..20: note = chemically synthesized
  source 1..20: mol_type = other DNA
tccttgactattaacatgct

SEQ ID NO: 34156 - DNA, 20 bp, synthetic construct
  misc_feature 1..20: note = chemically synthesized
  source 1..20: mol_type = other DNA
tactaatcaacaggtaatac

SEQ ID NO: 34157 - DNA, 20 bp, synthetic construct
  misc_feature 1..20: note = chemically synthesized
  source 1..20: mol_type = other DNA
aagcaaaaagcatcattcca

SEQ ID NO: 34158 - DNA, 20 bp, synthetic construct
  misc_feature 1..20: note = chemically synthesized
  source 1..20: mol_type = other DNA
atcattccaacacgtttaat

SEQ ID NO: 34159 - DNA, 20 bp, synthetic construct
  misc_feature 1..20: note = chemically synthesized
  source 1..20: mol_type = other DNA
tcactaaaatgtacgtgtgt

SEQ ID NO: 34160 - DNA, 20 bp, synthetic construct
  misc_feature 1..20: note = chemically synthesized
  source 1..20: mol_type = other DNA
gtgttagcgtgtgcatgcat

SEQ ID NO: 34161 - DNA, 20 bp, synthetic construct
  misc_feature 1..20: note = chemically synthesized
  source 1..20: mol_type = other DNA
gtgactgtgtgcatgtgtgt

SEQ ID NO: 34162 - DNA, 20 bp, synthetic construct
  misc_feature 1..20: note = chemically synthesized
  source 1..20: mol_type = other DNA
tgtgtgtatatttcctaaac

SEQ ID NO: 34163 - DNA, 20 bp, synthetic construct
  misc_feature 1..20: note = chemically synthesized
  source 1..20: mol_type = other DNA
catatgtttttagataattt

SEQ ID NO: 34164 - DNA, 20 bp, synthetic construct
  misc_feature 1..20: note = chemically synthesized
  source 1..20: mol_type = other DNA
ctacacttaaaatgcatcct

SEQ ID NO: 34165 - DNA, 20 bp, synthetic construct
  misc_feature 1..20: note = chemically synthesized
  source 1..20: mol_type = other DNA
ggaacccattccagttctga

SEQ ID NO: 34166 - DNA, 20 bp, synthetic construct
  misc_feature 1..20: note = chemically synthesized
  source 1..20: mol_type = other DNA
cagtgcagctagtctgagct

SEQ ID NO: 34167 - DNA, 20 bp, synthetic construct
  misc_feature 1..20: note = chemically synthesized
  source 1..20: mol_type = other DNA
gccgcatctagctcttgacc

SEQ ID NO: 34168 - DNA, 20 bp, synthetic construct
  misc_feature 1..20: note = chemically synthesized
  source 1..20: mol_type = other DNA
atagataccagttcttctca

SEQ ID NO: 34169 - DNA, 20 bp, synthetic construct
  misc_feature 1..20: note = chemically synthesized
  source 1..20: mol_type = other DNA
tcaatctgtaatgaaaatgt

SEQ ID NO: 34170 - DNA, 20 bp, synthetic construct
  misc_feature 1..20: note = chemically synthesized
  source 1..20: mol_type = other DNA
catgtgcattttttttcctt

SEQ ID NO: 34171 - DNA, 20 bp, synthetic construct
  misc_feature 1..20: note = chemically synthesized
  source 1..20: mol_type = other DNA
tccttcattgcttttttact

SEQ ID NO: 34172 - DNA, 20 bp, synthetic construct
  misc_feature 1..20: note = chemically synthesized
  source 1..20: mol_type = other DNA
cctgaaactctctcatggtc

SEQ ID NO: 34173 - DNA, 20 bp, synthetic construct
  misc_feature 1..20: note = chemically synthesized
  source 1..20: mol_type = other DNA
tcaatgctatcctcttagag

SEQ ID NO: 34174 - DNA, 20 bp, synthetic construct
  misc_feature 1..20: note = chemically synthesized
  source 1..20: mol_type = other DNA
accttttaagagttctcctc

SEQ ID NO: 34175 - DNA, 20 bp, synthetic construct
  misc_feature 1..20: note = chemically synthesized
  source 1..20: mol_type = other DNA
ataattccaaaaaaaaaaaa

SEQ ID NO: 34176 - DNA, 20 bp, synthetic construct
  misc_feature 1..20: note = chemically synthesized
  source 1..20: mol_type = other DNA
gttccatctttgtgttgaaa

SEQ ID NO: 34177 - DNA, 20 bp, synthetic construct
  misc_feature 1..20: note = chemically synthesized
  source 1..20: mol_type = other DNA
agataaatttttattacact

SEQ ID NO: 34178 - DNA, 20 bp, synthetic construct
  misc_feature 1..20: note = chemically synthesized
  source 1..20: mol_type = other DNA
attgtcttaggacaattttt

SEQ ID NO: 34179 - DNA, 20 bp, synthetic construct
  misc_feature 1..20: note = chemically synthesized
  source 1..20: mol_type = other DNA
tcttaggacaattttttttt

SEQ ID NO: 34180 - DNA, 20 bp, synthetic construct
  misc_feature 1..20: note = chemically synthesized
  source 1..20: mol_type = other DNA
cagtacaaagaaaacacgga

SEQ ID NO: 34181 - DNA, 20 bp, synthetic construct
  misc_feature 1..20: note = chemically synthesized
  source 1..20: mol_type = other DNA
ggacacagatttctcccaca

SEQ ID NO: 34182 - DNA, 20 bp, synthetic construct
  misc_feature 1..20: note = chemically synthesized
  source 1..20: mol_type = other DNA
tccatttggaagggagggag

SEQ ID NO: 34183 - DNA, 20 bp, synthetic construct
  misc_feature 1..20: note = chemically synthesized
  source 1..20: mol_type = other DNA
taaaaagaaaaagcaggtaa

SEQ ID NO: 34184 - DNA, 20 bp, synthetic construct
  misc_feature 1..20: note = chemically synthesized
  source 1..20: mol_type = other DNA
attcacatcaaaatattgca

SEQ ID NO: 34185 - DNA, 20 bp, synthetic construct
  misc_feature 1..20: note = chemically synthesized
  source 1..20: mol_type = other DNA
gaccatctaaataaatcctc

SEQ ID NO: 34186 - DNA, 20 bp, synthetic construct
  misc_feature 1..20: note = chemically synthesized
  source 1..20: mol_type = other DNA
ctgaagatttctgtgacatc

SEQ ID NO: 34187 - DNA, 20 bp, synthetic construct
  misc_feature 1..20: note = chemically synthesized
  source 1..20: mol_type = other DNA
actccatgaaggttcatctg

SEQ ID NO: 34188 - DNA, 20 bp, synthetic construct
  misc_feature 1..20: note = chemically synthesized
  source 1..20: mol_type = other DNA
ttctgttttccccccacctc

SEQ ID NO: 34189 - DNA, 20 bp, synthetic construct
  misc_feature 1..20: note = chemically synthesized
  source 1..20: mol_type = other DNA
gcccgctaaggcaaaattta

SEQ ID NO: 34190 - DNA, 20 bp, synthetic construct
  misc_feature 1..20: note = chemically synthesized
  source 1..20: mol_type = other DNA
cttccttgcaatactgcctc

SEQ ID NO: 34191 - DNA, 20 bp, synthetic construct
  misc_feature 1..20: note = chemically synthesized
  source 1..20: mol_type = other DNA
tctatttcagatgtctcatt

SEQ ID NO: 34192 - DNA, 20 bp, synthetic construct
  misc_feature 1..20: note = chemically synthesized
  source 1..20: mol_type = other DNA
tgtctcattgccagtttaag

SEQ ID NO: 34193 - DNA, 20 bp, synthetic construct
  misc_feature 1..20: note = chemically synthesized
  source 1..20: mol_type = other DNA
aaatgactgtgcaagaaaca

SEQ ID NO: 34194 - DNA, 20 bp, synthetic construct
  misc_feature 1..20: note = chemically synthesized
  source 1..20: mol_type = other DNA
tctgagtcctcagctgagga

SEQ ID NO: 34195 - DNA, 20 bp, synthetic construct
  misc_feature 1..20: note = chemically synthesized
  source 1..20: mol_type = other DNA
tattcccactgccaccactc

SEQ ID NO: 34196 - DNA, 20 bp, synthetic construct
  misc_feature 1..20: note = chemically synthesized
  source 1..20: mol_type = other DNA
ccccaactctgccactcacc

SEQ ID NO: 34197 - DNA, 20 bp, synthetic construct
  misc_feature 1..20: note = chemically synthesized
  source 1..20: mol_type = other DNA
aatcctttctttctggccct

SEQ ID NO: 34198 - DNA, 20 bp, synthetic construct
  misc_feature 1..20: note = chemically synthesized
  source 1..20: mol_type = other DNA
tccatctttaaaaggagaag

SEQ ID NO: 34199 - DNA, 20 bp, synthetic construct
  misc_feature 1..20: note = chemically synthesized
  source 1..20: mol_type = other DNA
gagaagactggattagatgg

SEQ ID NO: 34200 - DNA, 20 bp, synthetic construct
  misc_feature 1..20: note = chemically synthesized
  source 1..20: mol_type = other DNA
ccttataggagagttcaggg

SEQ ID NO: 34201 - DNA, 20 bp, synthetic construct
  misc_feature 1..20: note = chemically synthesized
  source 1..20: mol_type = other DNA
cttggtccccaggctaatcc

SEQ ID NO: 34202 - DNA, 20 bp, synthetic construct
  misc_feature 1..20: note = chemically synthesized
  source 1..20: mol_type = other DNA
gcttagagagtgagcctgat

SEQ ID NO: 34203 - DNA, 20 bp, synthetic construct
  misc_feature 1..20: note = chemically synthesized
  source 1..20: mol_type = other DNA
cctcctgggacacagtcttg

SEQ ID NO: 34204 - DNA, 20 bp, synthetic construct
  misc_feature 1..20: note = chemically synthesized
  source 1..20: mol_type = other DNA
gtcttgcaaagtttacatgt

SEQ ID NO: 34205 - DNA, 20 bp, synthetic construct
  misc_feature 1..20: note = chemically synthesized
  source 1..20: mol_type = other DNA
gctaaccaacataatttcag

SEQ ID NO: 34206 - DNA, 20 bp, synthetic construct
  misc_feature 1..20: note = chemically synthesized
  source 1..20: mol_type = other DNA
ccaggctcattgaaaattgg

SEQ ID NO: 34207 - DNA, 20 bp, synthetic construct
  misc_feature 1..20: note = chemically synthesized
  source 1..20: mol_type = other DNA
gaaaaatcactctctaattt

SEQ ID NO: 34208 - DNA, 20 bp, synthetic construct
  misc_feature 1..20: note = chemically synthesized
  source 1..20: mol_type = other DNA
taatttatcagtttccatta

SEQ ID NO: 34209 - DNA, 20 bp, synthetic construct
  misc_feature 1..20: note = chemically synthesized
  source 1..20: mol_type = other DNA
tatttctgtcacccgaattg

SEQ ID NO: 34210 - DNA, 20 bp, synthetic construct
  misc_feature 1..20: note = chemically synthesized
  source 1..20: mol_type = other DNA
gaaagccttgcaaaccacac

SEQ ID NO: 34211 - DNA, 20 bp, synthetic construct
  misc_feature 1..20: note = chemically synthesized
  source 1..20: mol_type = other DNA
cgatgagaatgatcatttgc

SEQ ID NO: 34212 - DNA, 20 bp, synthetic construct
  misc_feature 1..20: note = chemically synthesized
  source 1..20: mol_type = other DNA
gagaatgatcatttgcaaac

SEQ ID NO: 34213 - DNA, 20 bp, synthetic construct
  misc_feature 1..20: note = chemically synthesized
  source 1..20: mol_type = other DNA
taacacctgccagagcagag

SEQ ID NO: 34214 - DNA, 20 bp, synthetic construct
  misc_feature 1..20: note = chemically synthesized
  source 1..20: mol_type = other DNA
tctgcatcaactcacaacaa

SEQ ID NO: 34215 - DNA, 20 bp, synthetic construct
  misc_feature 1..20: note = chemically synthesized
  source 1..20: mol_type = other DNA
aagaaagaaataatcaaaca

SEQ ID NO: 34216 - DNA, 20 bp, synthetic construct
  misc_feature 1..20: note = chemically synthesized
  source 1..20: mol_type = other DNA
tggtgtttccaagagactcc

SEQ ID NO: 34217 - DNA, 20 bp, synthetic construct
  misc_feature 1..20: note = chemically synthesized
  source 1..20: mol_type = other DNA
cactgcagcccggccaggtg

SEQ ID NO: 34218 - DNA, 20 bp, synthetic construct
  misc_feature 1..20: note = chemically synthesized
  source 1..20: mol_type = other DNA
catctgtcctggcctttatg

SEQ ID NO: 34219 - DNA, 20 bp, synthetic construct
  misc_feature 1..20: note = chemically synthesized
  source 1..20: mol_type = other DNA
tgtggacagggaggacaggg

SEQ ID NO: 34220 - DNA, 20 bp, synthetic construct
  misc_feature 1..20: note = chemically synthesized
  source 1..20: mol_type = other DNA
actctgtgacagtcttggcc

SEQ ID NO: 34221 - DNA, 20 bp, synthetic construct
  misc_feature 1..20: note = chemically synthesized
  source 1..20: mol_type = other DNA
agaaattatgagaactaatt

SEQ ID NO: 34222 - DNA, 20 bp, synthetic construct
  misc_feature 1..20: note = chemically synthesized
  source 1..20: mol_type = other DNA
ctctgcccggggcatgctgc

SEQ ID NO: 34223 - DNA, 20 bp, synthetic construct
  misc_feature 1..20: note = chemically synthesized
  source 1..20: mol_type = other DNA
ccacagaacaaaacacaggc

SEQ ID NO: 34224 - DNA, 20 bp, synthetic construct
  misc_feature 1..20: note = chemically synthesized
  source 1..20: mol_type = other DNA
aaacacaggccttggctttg

SEQ ID NO: 34225 - DNA, 20 bp, synthetic construct
  misc_feature 1..20: note = chemically synthesized
  source 1..20: mol_type = other DNA
caggccttggctttgacgtg

SEQ ID NO: 34226 - DNA, 20 bp, synthetic construct
  misc_feature 1..20: note = chemically synthesized
  source 1..20: mol_type = other DNA
tggctttgacgtgctttgtt

SEQ ID NO: 34227 - DNA, 20 bp, synthetic construct
  misc_feature 1..20: note = chemically synthesized
  source 1..20: mol_type = other DNA
ttttttttttttccctcctc

SEQ ID NO: 34228 - DNA, 20 bp, synthetic construct
  misc_feature 1..20: note = chemically synthesized
  source 1..20: mol_type = other DNA
gttcttggctctactaattc

SEQ ID NO: 34229 - DNA, 20 bp, synthetic construct
  misc_feature 1..20: note = chemically synthesized
  source 1..20: mol_type = other DNA
ggtgggacccggagaccatt

SEQ ID NO: 34230 - DNA, 20 bp, synthetic construct
  misc_feature 1..20: note = chemically synthesized
  source 1..20: mol_type = other DNA
tttgttttgagtctctctaa

SEQ ID NO: 34231 - DNA, 20 bp, synthetic construct
  misc_feature 1..20: note = chemically synthesized
  source 1..20: mol_type = other DNA
agcccctcaggctgaaatcc

SEQ ID NO: 34232 - DNA, 20 bp, synthetic construct
  misc_feature 1..20: note = chemically synthesized
  source 1..20: mol_type = other DNA
gagtgtggacggcaggctga

SEQ ID NO: 34233 - DNA, 20 bp, synthetic construct
  misc_feature 1..20: note = chemically synthesized
  source 1..20: mol_type = other DNA
agggtctgtcaccattttaa

SEQ ID NO: 34234 - DNA, 20 bp, synthetic construct
  misc_feature 1..20: note = chemically synthesized
  source 1..20: mol_type = other DNA
tatcagcgtgggacaggttc

SEQ ID NO: 34235 - DNA, 20 bp, synthetic construct
  misc_feature 1..20: note = chemically synthesized
  source 1..20: mol_type = other DNA
tcttacaaaatctgaaaatg

SEQ ID NO: 34236 - DNA, 20 bp, synthetic construct
  misc_feature 1..20: note = chemically synthesized
  source 1..20: mol_type = other DNA
ttctgtccctcccttccacc

SEQ ID NO: 34237 - DNA, 20 bp, synthetic construct
  misc_feature 1..20: note = chemically synthesized
  source 1..20: mol_type = other DNA
cctcccttccaccaaccgtt

SEQ ID NO: 34238 - DNA, 20 bp, synthetic construct
  misc_feature 1..20: note = chemically synthesized
  source 1..20: mol_type = other DNA
gacaggttgggacaactcca

SEQ ID NO: 34239 - DNA, 20 bp, synthetic construct
  misc_feature 1..20: note = chemically synthesized
  source 1..20: mol_type = other DNA
actcagctttctcactcaaa

SEQ ID NO: 34240 - DNA, 20 bp, synthetic construct
  misc_feature 1..20: note = chemically synthesized
  source 1..20: mol_type = other DNA
tggttctccaactaaaagtt

SEQ ID NO: 34241 - DNA, 20 bp, synthetic construct
  misc_feature 1..20: note = chemically synthesized
  source 1..20: mol_type = other DNA
aagagcccctcaataaataa

SEQ ID NO: 34242 - DNA, 20 bp, synthetic construct
  misc_feature 1..20: note = chemically synthesized
  source 1..20: mol_type = other DNA
caggggaaaccttccctagt

SEQ ID NO: 34243 - DNA, 20 bp, synthetic construct
  misc_feature 1..20: note = chemically synthesized
  source 1..20: mol_type = other DNA
tgggtcagccttgacccagg

SEQ ID NO: 34244 - DNA, 20 bp, synthetic construct
  misc_feature 1..20: note = chemically synthesized
  source 1..20: mol_type = other DNA
cttgaaagtggctgctggtc

SEQ ID NO: 34245 - DNA, 20 bp, synthetic construct
  misc_feature 1..20: note = chemically synthesized
  source 1..20: mol_type = other DNA
ctttcttccttcctctctca

SEQ ID NO: 34246 - DNA, 20 bp, synthetic construct
  misc_feature 1..20: note = chemically synthesized
  source 1..20: mol_type = other DNA
gaaagaacagtgtgaagtac

SEQ ID NO: 34247 - DNA, 20 bp, synthetic construct
  misc_feature 1..20: note = chemically synthesized
  source 1..20: mol_type = other DNA
tttttgaactcatagttcta

SEQ ID NO: 34248 - DNA, 20 bp, synthetic construct
  misc_feature 1..20: note = chemically synthesized
  source 1..20: mol_type = other DNA
aatagtttttgctccactaa

SEQ ID NO: 34249 - DNA, 20 bp, synthetic construct
  misc_feature 1..20: note = chemically synthesized
  source 1..20: mol_type = other DNA
gcaaagccctgctgtgctca

SEQ ID NO: 34250 - DNA, 20 bp, synthetic construct
  misc_feature 1..20: note = chemically synthesized
  source 1..20: mol_type = other DNA
cctgctgtgctcaaggagat

SEQ ID NO: 34251 - DNA, 20 bp, synthetic construct
  misc_feature 1..20: note = chemically synthesized
  source 1..20: mol_type = other DNA
tcccaaacctagccacccat

SEQ ID NO: 34252 - DNA, 20 bp, synthetic construct
  misc_feature 1..20: note = chemically synthesized
  source 1..20: mol_type = other DNA
ctacaccaggcccttcgcac

SEQ ID NO: 34253 - DNA, 20 bp, synthetic construct
  misc_feature 1..20: note = chemically synthesized
  source 1..20: mol_type = other DNA
ggcccttcgcacctctgctt

SEQ ID NO: 34254 - DNA, 20 bp, synthetic construct
  misc_feature 1..20: note = chemically synthesized
  source 1..20: mol_type = other DNA
aagagcaactgcagcagaaa

SEQ ID NO: 34255 - DNA, 20 bp, synthetic construct
  misc_feature 1..20: note = chemically synthesized
  source 1..20: mol_type = other DNA
atggctcgtgaatttttttg

SEQ ID NO: 34256 - DNA, 20 bp, synthetic construct
  misc_feature 1..20: note = chemically synthesized
  source 1..20: mol_type = other DNA
gcacatacaactcagggctc

SEQ ID NO: 34257 - DNA, 20 bp, synthetic construct
  misc_feature 1..20: note = chemically synthesized
  source 1..20: mol_type = other DNA
agggcattttttttccacaa

SEQ ID NO: 34258 - DNA, 20 bp, synthetic construct
  misc_feature 1..20: note = chemically synthesized
  source 1..20: mol_type = other DNA
tcaaaagaaaggggttggac

SEQ ID NO: 34259 - DNA, 20 bp, synthetic construct
  misc_feature 1..20: note = chemically synthesized
  source 1..20: mol_type = other DNA
tggactgatgtttcccagtg

SEQ ID NO: 34260 - DNA, 20 bp, synthetic construct
  misc_feature 1..20: note = chemically synthesized
  source 1..20: mol_type = other DNA
ctgatgtttcccagtggagg

SEQ ID NO: 34261 - DNA, 20 bp, synthetic construct
  misc_feature 1..20: note = chemically synthesized
  source 1..20: mol_type = other DNA
ggcagacctgttaaggggcg

SEQ ID NO: 34262 - DNA, 20 bp, synthetic construct
  misc_feature 1..20: note = chemically synthesized
  source 1..20: mol_type = other DNA
ttttggacattttgcatctc

SEQ ID NO: 34263 - DNA, 20 bp, synthetic construct
  misc_feature 1..20: note = chemically synthesized
  source 1..20: mol_type = other DNA
atctctcatgattctatctt

SEQ ID NO: 34264 - DNA, 20 bp, synthetic construct
  misc_feature 1..20: note = chemically synthesized
  source 1..20: mol_type = other DNA
tcatgattctatcttgagag

SEQ ID NO: 34265 - DNA, 20 bp, synthetic construct
  misc_feature 1..20: note = chemically synthesized
  source 1..20: mol_type = other DNA
tcttgagagtttagtttggt

SEQ ID NO: 34266 - DNA, 20 bp, synthetic construct
  misc_feature 1..20: note = chemically synthesized
  source 1..20: mol_type = other DNA
agagtttagtttggttggag

SEQ ID NO: 34267 - DNA, 20 bp, synthetic construct
  misc_feature 1..20: note = chemically synthesized
  source 1..20: mol_type = other DNA
gtttggttggagtttagttt

SEQ ID NO: 34268 - DNA, 20 bp, synthetic construct
  misc_feature 1..20: note = chemically synthesized
  source 1..20: mol_type = other DNA
tttgagttttttgttcgggt

SEQ ID NO: 34269 - DNA, 20 bp, synthetic construct
  misc_feature 1..20: note = chemically synthesized
  source 1..20: mol_type = other DNA
aaaaaaaattggagctgtat

SEQ ID NO: 34270 - DNA, 20 bp, synthetic construct
  misc_feature 1..20: note = chemically synthesized
  source 1..20: mol_type = other DNA
aactggagaaaagtgagaaa

SEQ ID NO: 34271 - DNA, 20 bp, synthetic construct
  misc_feature 1..20: note = chemically synthesized
  source 1..20: mol_type = other DNA
gtgagaaatggagctttttt

SEQ ID NO: 34272 - DNA, 20 bp, synthetic construct
  misc_feature 1..20: note = chemically synthesized
  source 1..20: mol_type = other DNA
acagttgtaatttccactgc

SEQ ID NO: 34273 - DNA, 20 bp, synthetic construct
  misc_feature 1..20: note = chemically synthesized
  source 1..20: mol_type = other DNA
tgtgacaactttgccacaaa

SEQ ID NO: 34274 - DNA, 20 bp, synthetic construct
  misc_feature 1..20: note = chemically synthesized
  source 1..20: mol_type = other DNA
ggaagcaagaagaatagagg

SEQ ID NO: 34275 - DNA, 20 bp, synthetic construct
  misc_feature 1..20: note = chemically synthesized
  source 1..20: mol_type = other DNA
gaatagagggactgcttatt

SEQ ID NO: 34276 - DNA, 20 bp, synthetic construct
  misc_feature 1..20: note = chemically synthesized
  source 1..20: mol_type = other DNA
cactgcatcccaaggttaag

SEQ ID NO: 34277 - DNA, 20 bp, synthetic construct
  misc_feature 1..20: note = chemically synthesized
  source 1..20: mol_type = other DNA
ctgaaaacagggcagaagac

SEQ ID NO: 34278 - DNA, 20 bp, synthetic construct
  misc_feature 1..20: note = chemically synthesized
  source 1..20: mol_type = other DNA
ttagtaccacactacattta

SEQ ID NO: 34279 - DNA, 20 bp, synthetic construct
  misc_feature 1..20: note = chemically synthesized
  source 1..20: mol_type = other DNA
catttaactggattcagttc

SEQ ID NO: 34280 - DNA, 20 bp, synthetic construct
  misc_feature 1..20: note = chemically synthesized
  source 1..20: mol_type = other DNA
gttcatgtgattatacagtg

SEQ ID NO: 34281 - DNA, 20 bp, synthetic construct
  misc_feature 1..20: note = chemically synthesized
  source 1..20: mol_type = other DNA
gcagagtcaagctggaagat

SEQ ID NO: 34282 - DNA, 20 bp, synthetic construct
  misc_feature 1..20: note = chemically synthesized
  source 1..20: mol_type = other DNA
ttcaaacattacagaaatga

SEQ ID NO: 34283 - DNA, 20 bp, synthetic construct
  misc_feature 1..20: note = chemically synthesized
  source 1..20: mol_type = other DNA
tttgctgataaatgctcaaa

SEQ ID NO: 34284 - DNA, 20 bp, synthetic construct
  misc_feature 1..20: note = chemically synthesized
  source 1..20: mol_type = other DNA
aagaaaacctgcacttcagc

SEQ ID NO: 34285 - DNA, 20 bp, synthetic construct
  misc_feature 1..20: note = chemically synthesized
  source 1..20: mol_type = other DNA
cagcccatgattactttgcg

SEQ ID NO: 34286 - DNA, 20 bp, synthetic construct
  misc_feature 1..20: note = chemically synthesized
  source 1..20: mol_type = other DNA
tgtttgagaagaatcaggca

SEQ ID NO: 34287 - DNA, 20 bp, synthetic construct
  misc_feature 1..20: note = chemically synthesized
  source 1..20: mol_type = other DNA
gaacaatgctagccaacaat

SEQ ID NO: 34288 - DNA, 20 bp, synthetic construct
  misc_feature 1..20: note = chemically synthesized
  source 1..20: mol_type = other DNA
agccaacaatcagggtttac

SEQ ID NO: 34289 - DNA, 20 bp, synthetic construct
  misc_feature 1..20: note = chemically synthesized
  source 1..20: mol_type = other DNA
ctccattcaggcctttgaaa

SEQ ID NO: 34290 - DNA, 20 bp, synthetic construct
  misc_feature 1..20: note = chemically synthesized
  source 1..20: mol_type = other DNA
ctgcagtccctttagcccca

SEQ ID NO: 34291 - DNA, 20 bp, synthetic construct
  misc_feature 1..20: note = chemically synthesized
  source 1..20: mol_type = other DNA
aatcaactgctgtctatgtc

SEQ ID NO: 34292 - DNA, 20 bp, synthetic construct
  misc_feature 1..20: note = chemically synthesized
  source 1..20: mol_type = other DNA
actgctgtctatgtcatgtg

SEQ ID NO: 34293 - DNA, 20 bp, synthetic construct
  misc_feature 1..20: note = chemically synthesized
  source 1..20: mol_type = other DNA
tgagctggcatattagcaga

SEQ ID NO: 34294 - DNA, 20 bp, synthetic construct
  misc_feature 1..20: note = chemically synthesized
  source 1..20: mol_type = other DNA
ctaaaacagaagatgtatct

SEQ ID NO: 34295 - DNA, 20 bp, synthetic construct
  misc_feature 1..20: note = chemically synthesized
  source 1..20: mol_type = other DNA
actcgcccaaagcactagaa

SEQ ID NO: 34296 - DNA, 20 bp, synthetic construct
  misc_feature 1..20: note = chemically synthesized
  source 1..20: mol_type = other DNA
tttccttctttttctttctt

SEQ ID NO: 34297 - DNA, 20 bp, synthetic construct
  misc_feature 1..20: note = chemically synthesized
  source 1..20: mol_type = other DNA
cattataaatgagttggtct

SEQ ID NO: 34298 - DNA, 20 bp, synthetic construct
  misc_feature 1..20: note = chemically synthesized
  source 1..20: mol_type = other DNA
catagcttctgttaaaaatc

SEQ ID NO: 34299 - DNA, 20 bp, synthetic construct
  misc_feature 1..20: note = chemically synthesized
  source 1..20: mol_type = other DNA
aatcagaagcttgttagatg

SEQ ID NO: 34300 - DNA, 20 bp, synthetic construct
  misc_feature 1..20: note = chemically synthesized
  source 1..20: mol_type = other DNA
gcgtatgaggggtcttgtcg

SEQ ID NO: 34301 - DNA, 20 bp, synthetic construct
  misc_feature 1..20: note = chemically synthesized
  source 1..20: mol_type = other DNA
cctctgttaattagaaagcc

SEQ ID NO: 34302 - DNA, 20 bp, synthetic construct
  misc_feature 1..20: note = chemically synthesized
  source 1..20: mol_type = other DNA
tgcaggtcactatcgacagc

SEQ ID NO: 34303 - DNA, 20 bp, synthetic construct
  misc_feature 1..20: note = chemically synthesized
  source 1..20: mol_type = other DNA
ctatcgacagctcatgcttt

SEQ ID NO: 34304 - DNA, 20 bp, synthetic construct
  misc_feature 1..20: note = chemically synthesized
  source 1..20: mol_type = other DNA
tcagaaaatgcagtcaccac

SEQ ID NO: 34305 - DNA, 20 bp, synthetic construct
  misc_feature 1..20: note = chemically synthesized
  source 1..20: mol_type = other DNA
acacgcaaggtccgcacaca

SEQ ID NO: 34306 - DNA, 20 bp, synthetic construct
  misc_feature 1..20: note = chemically synthesized
  source 1..20: mol_type = other DNA
cttgcctctctttctccaac

SEQ ID NO: 34307 - DNA, 20 bp, synthetic construct
  misc_feature 1..20: note = chemically synthesized
  source 1..20: mol_type = other DNA
cacattcaccagaaagggaa

SEQ ID NO: 34308 - DNA, 20 bp, synthetic construct
  misc_feature 1..20: note = chemically synthesized
  source 1..20: mol_type = other DNA
taggttttacagataaaccg

SEQ ID NO: 34309 - DNA, 20 bp, synthetic construct
  misc_feature 1..20: note = chemically synthesized
  source 1..20: mol_type = other DNA
gttgcttttcactgaaacag

SEQ ID NO: 34310 - DNA, 20 bp, synthetic construct
  misc_feature 1..20: note = chemically synthesized
  source 1..20: mol_type = other DNA
ctgtacttccaacatggctc

SEQ ID NO: 34311 - DNA, 20 bp, synthetic construct
  misc_feature 1..20: note = chemically synthesized
  source 1..20: mol_type = other DNA
gagaaaaaatgcacatgggc

SEQ ID NO: 34312 - DNA, 20 bp, synthetic construct
  misc_feature 1..20: note = chemically synthesized
  source 1..20: mol_type = other DNA
aaaaagaaatcctctgtggc

SEQ ID NO: 34313 - DNA, 20 bp, synthetic construct
  misc_feature 1..20: note = chemically synthesized
  source 1..20: mol_type = other DNA
ggaagtctggccttggagtt

SEQ ID NO: 34314 - DNA, 20 bp, synthetic construct
  misc_feature 1..20: note = chemically synthesized
  source 1..20: mol_type = other DNA
agcaacctagatatgagaaa

SEQ ID NO: 34315 - DNA, 20 bp, synthetic construct
  misc_feature 1..20: note = chemically synthesized
  source 1..20: mol_type = other DNA
gagctcaacccagagaaggc

SEQ ID NO: 34316 - DNA, 20 bp, synthetic construct
  misc_feature 1..20: note = chemically synthesized
  source 1..20: mol_type = other DNA
tggaaataatacattgctgc

SEQ ID NO: 34317 - DNA, 20 bp, synthetic construct
  misc_feature 1..20: note = chemically synthesized
  source 1..20: mol_type = other DNA
ttcaacaagaaggctgagga

SEQ ID NO: 34318 - DNA, 20 bp, synthetic construct
  misc_feature 1..20: note = chemically synthesized
  source 1..20: mol_type = other DNA
tgaggaatgagattgcacat

SEQ ID NO: 34319 - DNA, 20 bp, synthetic construct
  misc_feature 1..20: note = chemically synthesized
  source 1..20: mol_type = other DNA
gtacaaaaaaaatcttttta

SEQ ID NO: 34320 - DNA, 20 bp, synthetic construct
  misc_feature 1..20: note = chemically synthesized
  source 1..20: mol_type = other DNA
caagctgttctccattctga

SEQ ID NO: 34321 - DNA, 20 bp, synthetic construct
  misc_feature 1..20: note = chemically synthesized
  source 1..20: mol_type = other DNA
catcctagggagactggtac

SEQ ID NO: 34322 - DNA, 20 bp, synthetic construct
  misc_feature 1..20: note = chemically synthesized
  source 1..20: mol_type = other DNA
gctcctttccagagaatgac

SEQ ID NO: 34323 - DNA, 20 bp, synthetic construct
  misc_feature 1..20: note = chemically synthesized
  source 1..20: mol_type = other DNA
ctgtgatggacatgagatcc

SEQ ID NO: 34324 - DNA, 20 bp, synthetic construct
  misc_feature 1..20: note = chemically synthesized
  source 1..20: mol_type = other DNA
tgcacagaaatgagcagcat

SEQ ID NO: 34325 - DNA, 20 bp, synthetic construct
  misc_feature 1..20: note = chemically synthesized
  source 1..20: mol_type = other DNA
agcagcatgatggattagct

SEQ ID NO: 34326 - DNA, 20 bp, synthetic construct
  misc_feature 1..20: note = chemically synthesized
  source 1..20: mol_type = other DNA
gtgaacatgccaactcaaca

SEQ ID NO: 34327 - DNA, 20 bp, synthetic construct
  misc_feature 1..20: note = chemically synthesized
  source 1..20: mol_type = other DNA
gaacaaattaatatttaatt

SEQ ID NO: 34328 - DNA, 20 bp, synthetic construct
  misc_feature 1..20: note = chemically synthesized
  source 1..20: mol_type = other DNA
tatcagaataaaaaagactc

SEQ ID NO: 34329 - DNA, 20 bp, synthetic construct
  misc_feature 1..20: note = chemically synthesized
  source 1..20: mol_type = other DNA
atttaggagcgctagacaca

SEQ ID NO: 34330 - DNA, 20 bp, synthetic construct
  misc_feature 1..20: note = chemically synthesized
  source 1..20: mol_type = other DNA
tgagtttccctgcctccaac

SEQ ID NO: 34331 - DNA, 20 bp, synthetic construct
  misc_feature 1..20: note = chemically synthesized
  source 1..20: mol_type = other DNA
tccctaacctatattttgca

SEQ ID NO: 34332 - DNA, 20 bp, synthetic construct
  misc_feature 1..20: note = chemically synthesized
  source 1..20: mol_type = other DNA
agcccatgttacatctccag

SEQ ID NO: 34333 - DNA, 20 bp, synthetic construct
  misc_feature 1..20: note = chemically synthesized
  source 1..20: mol_type = other DNA
gggagcagtgtagtgggcag

SEQ ID NO: 34334 - DNA, 20 bp, synthetic construct
  misc_feature 1..20: note = chemically synthesized
  source 1..20: mol_type = other DNA
tgggaaatcgtcttctcaaa

SEQ ID NO: 34335 - DNA, 20 bp, synthetic construct
  misc_feature 1..20: note = chemically synthesized
  source 1..20: mol_type = other DNA
attagatatttaaaaatgaa

SEQ ID NO: 34336 - DNA, 20 bp, synthetic construct
  misc_feature 1..20: note = chemically synthesized
  source 1..20: mol_type = other DNA
tatttaaaaatgaatacaga

SEQ ID NO: 34337 - DNA, 20 bp, synthetic construct
  misc_feature 1..20: note = chemically synthesized
  source 1..20: mol_type = other DNA
acaaaaaaaggcatgaaaaa

SEQ ID NO: 34338 - DNA, 20 bp, synthetic construct
  misc_feature 1..20: note = chemically synthesized
  source 1..20: mol_type = other DNA
gcagcagaatgtaaaaagca

SEQ ID NO: 34339 - DNA, 20 bp, synthetic construct
  misc_feature 1..20: note = chemically synthesized
  source 1..20: mol_type = other DNA
ccctgataacatctgccact

SEQ ID NO: 34340 - DNA, 20 bp, synthetic construct
  misc_feature 1..20: note = chemically synthesized
  source 1..20: mol_type = other DNA
tgccactaaaggtttactga

SEQ ID NO: 34341 - DNA, 20 bp, synthetic construct
  misc_feature 1..20: note = chemically synthesized
  source 1..20: mol_type = other DNA
tatatgaacaattagatatt

SEQ ID NO: 34342 - DNA, 20 bp, synthetic construct
  misc_feature 1..20: note = chemically synthesized
  source 1..20: mol_type = other DNA
tctgtgctattacttttgac

SEQ ID NO: 34343 - DNA, 20 bp, synthetic construct
  misc_feature 1..20: note = chemically synthesized
  source 1..20: mol_type = other DNA
aaacatttaaattatcctgg

SEQ ID NO: 34344 - DNA, 20 bp, synthetic construct
  misc_feature 1..20: note = chemically synthesized
  source 1..20: mol_type = other DNA
tgtctcacgggctgttcaaa

SEQ ID NO: 34345 - DNA, 20 bp, synthetic construct
  misc_feature 1..20: note = chemically synthesized
  source 1..20: mol_type = other DNA
gcctgtaaaagatacctgag

SEQ ID NO: 34346 - DNA, 20 bp, synthetic construct
  misc_feature 1..20: note = chemically synthesized
  source 1..20: mol_type = other DNA
gataataggacaatgccata

SEQ ID NO: 34347 - DNA, 20 bp, synthetic construct
  misc_feature 1..20: note = chemically synthesized
  source 1..20: mol_type = other DNA
tttaggtaatgtcatctatg

SEQ ID NO: 34348 - DNA, 20 bp, synthetic construct
  misc_feature 1..20: note = chemically synthesized
  source 1..20: mol_type = other DNA
taatgtcatctatgatcagt

SEQ ID NO: 34349 - DNA, 20 bp, synthetic construct
  misc_feature 1..20: note = chemically synthesized
  source 1..20: mol_type = other DNA
gaaaccctgttatggctgta

SEQ ID NO: 34350 - DNA, 20 bp, synthetic construct
  misc_feature 1..20: note = chemically synthesized
  source 1..20: mol_type = other DNA
ccctgttatggctgtaaata

SEQ ID NO: 34351 - DNA, 20 bp, synthetic construct
  misc_feature 1..20: note = chemically synthesized
  source 1..20: mol_type = other DNA
aggggaattcggtaaaactt

SEQ ID NO: 34352 - DNA, 20 bp, synthetic construct
  misc_feature 1..20: note = chemically synthesized
  source 1..20: mol_type = other DNA
aattcggtaaaactttctag

SEQ ID NO: 34353 - DNA, 20 bp, synthetic construct
  misc_feature 1..20: note = chemically synthesized
  source 1..20: mol_type = other DNA
cctaaagccactgctaccca

SEQ ID NO: 34354 - DNA, 20 bp, synthetic construct
  misc_feature 1..20: note = chemically synthesized
  source 1..20: mol_type = other DNA
gccactgctacccaaaacga

SEQ ID NO: 34355 - DNA, 20 bp, synthetic construct
  misc_feature 1..20: note = chemically synthesized
  source 1..20: mol_type = other DNA
ctgctacccaaaacgatttt

SEQ ID NO: 34356 - DNA, 20 bp, synthetic construct
  misc_feature 1..20: note = chemically synthesized
  source 1..20: mol_type = other DNA
tacccaaaacgattttgttt

SEQ ID NO: 34357 - DNA, 20 bp, synthetic construct
  misc_feature 1..20: note = chemically synthesized
  source 1..20: mol_type = other DNA
caaaacgattttgtttgttt

SEQ ID NO: 34358 - DNA, 20 bp, synthetic construct
  misc_feature 1..20: note = chemically synthesized
  source 1..20: mol_type = other DNA
acgattttgtttgtttgttt

SEQ ID NO: 34359 - DNA, 20 bp, synthetic construct
  misc_feature 1..20: note = chemically synthesized
  source 1..20: mol_type = other DNA
ttttgtttgtttgtttgttt

SEQ ID NO: 34360 - DNA, 20 bp, synthetic construct
  misc_feature 1..20: note = chemically synthesized
  source 1..20: mol_type = other DNA
gtttgtttgtttgtttgttt

SEQ ID NO: 34361 - DNA, 20 bp, synthetic construct
  misc_feature 1..20: note = chemically synthesized
  source 1..20: mol_type = other DNA
tgtttgtttgtttgtttgtt

SEQ ID NO: 34362 - DNA, 20 bp, synthetic construct
  misc_feature 1..20: note = chemically synthesized
  source 1..20: mol_type = other DNA
tttgttttttgtttctgagg

SEQ ID NO: 34363 - DNA, 20 bp, synthetic construct
  misc_feature 1..20: note = chemically synthesized
  source 1..20: mol_type = other DNA
aatctccgcctcccgggttc

SEQ ID NO: 34364 - DNA, 20 bp, synthetic construct
  misc_feature 1..20: note = chemically synthesized
  source 1..20: mol_type = other DNA
tgcctcagcctcccaagtag

SEQ ID NO: 34365 - DNA, 20 bp, synthetic construct
  misc_feature 1..20: note = chemically synthesized
  source 1..20: mol_type = other DNA
ttctgtatttttggtagaga

SEQ ID NO: 34366 - DNA, 20 bp, synthetic construct
  misc_feature 1..20: note = chemically synthesized
  source 1..20: mol_type = other DNA
cacctcagcctcccaaagtg

SEQ ID NO: 34367 - DNA, 20 bp, synthetic construct
  misc_feature 1..20: note = chemically synthesized
  source 1..20: mol_type = other DNA
tcctaaataataggtggtca

SEQ ID NO: 34368 - DNA, 20 bp, synthetic construct
  misc_feature 1..20: note = chemically synthesized
  source 1..20: mol_type = other DNA
accttagaccccaattaaac

SEQ ID NO: 34369 - DNA, 20 bp, synthetic construct
  misc_feature 1..20: note = chemically synthesized
  source 1..20: mol_type = other DNA
ccccaattaaactgttgctt

SEQ ID NO: 34370 - DNA, 20 bp, synthetic construct
  misc_feature 1..20: note = chemically synthesized
  source 1..20: mol_type = other DNA
gcatttggaacccagtgcta

SEQ ID NO: 34371 - DNA, 20 bp, synthetic construct
  misc_feature 1..20: note = chemically synthesized
  source 1..20: mol_type = other DNA
cctaactaatttctgccgct

SEQ ID NO: 34372 - DNA, 20 bp, synthetic construct
  misc_feature 1..20: note = chemically synthesized
  source 1..20: mol_type = other DNA
ccaagtgaccagccacaaac

SEQ ID NO: 34373 - DNA, 20 bp, synthetic construct
  misc_feature 1..20: note = chemically synthesized
  source 1..20: mol_type = other DNA
gtgaccagccacaaacaaaa

SEQ ID NO: 34374 - DNA, 20 bp, synthetic construct
  misc_feature 1..20: note = chemically synthesized
  source 1..20: mol_type = other DNA
acactctgggtcactagcat

SEQ ID NO: 34375 - DNA, 20 bp, synthetic construct
  misc_feature 1..20: note = chemically synthesized
  source 1..20: mol_type = other DNA
ccccctctcaccccatccaa

SEQ ID NO: 34376 - DNA, 20 bp, synthetic construct
  misc_feature 1..20: note = chemically synthesized
  source 1..20: mol_type = other DNA
aaatgtttactcaagttcag

SEQ ID NO: 34377 - DNA, 20 bp, synthetic construct
  misc_feature 1..20: note = chemically synthesized
  source 1..20: mol_type = other DNA
caatacagaccctgatgggc

SEQ ID NO: 34378 - DNA, 20 bp, synthetic construct
  misc_feature 1..20: note = chemically synthesized
  source 1..20: mol_type = other DNA
aatgggggcaaaggcaaaag

SEQ ID NO: 34379 - DNA, 20 bp, synthetic construct
  misc_feature 1..20: note = chemically synthesized
  source 1..20: mol_type = other DNA
aaaggcaaaaggaaagcttt

SEQ ID NO: 34380 - DNA, 20 bp, synthetic construct
  misc_feature 1..20: note = chemically synthesized
  source 1..20: mol_type = other DNA
ccttccgttctcatttcctt

SEQ ID NO: 34381 - DNA, 20 bp, synthetic construct
  misc_feature 1..20: note = chemically synthesized
  source 1..20: mol_type = other DNA
attaatttcatgtgttccca

SEQ ID NO: 34382 - DNA, 20 bp, synthetic construct
  misc_feature 1..20: note = chemically synthesized
  source 1..20: mol_type = other DNA
atacagggactctttctcct

SEQ ID NO: 34383 - DNA, 20 bp, synthetic construct
  misc_feature 1..20: note = chemically synthesized
  source 1..20: mol_type = other DNA
tcaacaaatagcatataaat

SEQ ID NO: 34384 - DNA, 20 bp, synthetic construct
  misc_feature 1..20: note = chemically synthesized
  source 1..20: mol_type = other DNA
cagtaacatgttatgctaca

SEQ ID NO: 34385 - DNA, 20 bp, synthetic construct
  misc_feature 1..20: note = chemically synthesized
  source 1..20: mol_type = other DNA
accctggagaagagcaaatg

SEQ ID NO: 34386 - DNA, 20 bp, synthetic construct
  misc_feature 1..20: note = chemically synthesized
  source 1..20: mol_type = other DNA
ttctaaaaacgtattcttaa

SEQ ID NO: 34387 - DNA, 20 bp, synthetic construct
  misc_feature 1..20: note = chemically synthesized
  source 1..20: mol_type = other DNA
cctgaggtcaggagttcaag

SEQ ID NO: 34388 - DNA, 20 bp, synthetic construct
  misc_feature 1..20: note = chemically synthesized
  source 1..20: mol_type = other DNA
ctcgggaggctgaggcagga

SEQ ID NO: 34389 - DNA, 20 bp, synthetic construct
  misc_feature 1..20: note = chemically synthesized
  source 1..20: mol_type = other DNA
acccaacactacgcaggcac

SEQ ID NO: 34390 - DNA, 20 bp, synthetic construct
  misc_feature 1..20: note = chemically synthesized
  source 1..20: mol_type = other DNA
agatgctacattgttagcat

SEQ ID NO: 34391 - DNA, 20 bp, synthetic construct
  misc_feature 1..20: note = chemically synthesized
  source 1..20: mol_type = other DNA
tcaggaggctgaggtgacag

SEQ ID NO: 34392 - DNA, 20 bp, synthetic construct
  misc_feature 1..20: note = chemically synthesized
  source 1..20: mol_type = other DNA
caaaagacaactaattgggc

SEQ ID NO: 34393 - DNA, 20 bp, synthetic construct
  misc_feature 1..20: note = chemically synthesized
  source 1..20: mol_type = other DNA
gcctgctggaattctaggaa

SEQ ID NO: 34394 - DNA, 20 bp, synthetic construct
  misc_feature 1..20: note = chemically synthesized
  source 1..20: mol_type = other DNA
tcacatactcaccagtactc

SEQ ID NO: 34395 - DNA, 20 bp, synthetic construct
  misc_feature 1..20: note = chemically synthesized
  source 1..20: mol_type = other DNA
gcgcttctcagacccaaatg

SEQ ID NO: 34396 - DNA, 20 bp, synthetic construct
  misc_feature 1..20: note = chemically synthesized
  source 1..20: mol_type = other DNA
cttggttccactccagtggt

SEQ ID NO: 34397 - DNA, 20 bp, synthetic construct
  misc_feature 1..20: note = chemically synthesized
  source 1..20: mol_type = other DNA
ttccactccagtggtgggtg

SEQ ID NO: 34398 - DNA, 20 bp, synthetic construct
  misc_feature 1..20: note = chemically synthesized
  source 1..20: mol_type = other DNA
ctccagtggtgggtgttttg

SEQ ID NO: 34399 - DNA, 20 bp, synthetic construct
  misc_feature 1..20: note = chemically synthesized
  source 1..20: mol_type = other DNA
gtggtgggtgttttgttttg

SEQ ID NO: 34400 - DNA, 20 bp, synthetic construct
  misc_feature 1..20: note = chemically synthesized
  source 1..20: mol_type = other DNA
ggtgttttgttttgtttcgc

SEQ ID NO: 34401 - DNA, 20 bp, synthetic construct
  misc_feature 1..20: note = chemically synthesized
  source 1..20: mol_type = other DNA
tcattcattttaagtgtaca

SEQ ID NO: 34402 - DNA, 20 bp, synthetic construct
  misc_feature 1..20: note = chemically synthesized
  source 1..20: mol_type = other DNA
ctcatacaggatatcgtctt

SEQ ID NO: 34403 - DNA, 20 bp, synthetic construct
  misc_feature 1..20: note = chemically synthesized
  source 1..20: mol_type = other DNA
ttaatttcttccacagagca

SEQ ID NO: 34404 - DNA, 20 bp, synthetic construct
  misc_feature 1..20: note = chemically synthesized
  source 1..20: mol_type = other DNA
ttccacagagcagaatgatt

SEQ ID NO: 34405 - DNA, 20 bp, synthetic construct
  misc_feature 1..20: note = chemically synthesized
  source 1..20: mol_type = other DNA
ttgagttgtattccaccata

SEQ ID NO: 34406 - DNA, 20 bp, synthetic construct
  misc_feature 1..20: note = chemically synthesized
  source 1..20: mol_type = other DNA
ctacaatggacactgtgtag

SEQ ID NO: 34407 - DNA, 20 bp, synthetic construct
  misc_feature 1..20: note = chemically synthesized
  source 1..20: mol_type = other DNA
aggcatttcgagaacacaga

SEQ ID NO: 34408 - DNA, 20 bp, synthetic construct
  misc_feature 1..20: note = chemically synthesized
  source 1..20: mol_type = other DNA
tcgagaacacagaaaaggtt

SEQ ID NO: 34409 - DNA, 20 bp, synthetic construct
  misc_feature 1..20: note = chemically synthesized
  source 1..20: mol_type = other DNA
ccaaaccctatatcccagct

SEQ ID NO: 34410 - DNA, 20 bp, synthetic construct
  misc_feature 1..20: note = chemically synthesized
  source 1..20: mol_type = other DNA
ctgcccagtgctgtggacag

SEQ ID NO: 34411 - DNA, 20 bp, synthetic construct
  misc_feature 1..20: note = chemically synthesized
  source 1..20: mol_type = other DNA
caaagcttcagtgcaggaaa

SEQ ID NO: 34412 - DNA, 20 bp, synthetic construct
  misc_feature 1..20: note = chemically synthesized
  source 1..20: mol_type = other DNA
cctccccctcccccatcctc

SEQ ID NO: 34413 - DNA, 20 bp, synthetic construct
  misc_feature 1..20: note = chemically synthesized
  source 1..20: mol_type = other DNA
tggcctcaggcagtggcgga

SEQ ID NO: 34414 - DNA, 20 bp, synthetic construct
  misc_feature 1..20: note = chemically synthesized
  source 1..20: mol_type = other DNA
gaagacgtgggctgggagct

SEQ ID NO: 34415 - DNA, 20 bp, synthetic construct
  misc_feature 1..20: note = chemically synthesized
  source 1..20: mol_type = other DNA
cgtgggctgggagctgggag

SEQ ID NO: 34416 - DNA, 20 bp, synthetic construct
  misc_feature 1..20: note = chemically synthesized
  source 1..20: mol_type = other DNA
aataactcctagctcattcc

SEQ ID NO: 34417 - DNA, 20 bp, synthetic construct
  misc_feature 1..20: note = chemically synthesized
  source 1..20: mol_type = other DNA
aaaataggaataataatagt

SEQ ID NO: 34418 - DNA, 20 bp, synthetic construct
  misc_feature 1..20: note = chemically synthesized
  source 1..20: mol_type = other DNA
taataatagtatatgcttca

SEQ ID NO: 34419 - DNA, 20 bp, synthetic construct
  misc_feature 1..20: note = chemically synthesized
  source 1..20: mol_type = other DNA
cctagagcagagtaagtgct

SEQ ID NO: 34420 - DNA, 20 bp, synthetic construct
  misc_feature 1..20: note = chemically synthesized
  source 1..20: mol_type = other DNA
atcaggccctttccccaatt

SEQ ID NO: 34421 - DNA, 20 bp, synthetic construct
  misc_feature 1..20: note = chemically synthesized
  source 1..20: mol_type = other DNA
gaggggagagtgcagacagg

SEQ ID NO: 34422 - DNA, 20 bp, synthetic construct
  misc_feature 1..20: note = chemically synthesized
  source 1..20: mol_type = other DNA
agcctgtgataaaagcaact

SEQ ID NO: 34423 - DNA, 20 bp, synthetic construct
  misc_feature 1..20: note = chemically synthesized
  source 1..20: mol_type = other DNA
caactgttagcttgcactag

SEQ ID NO: 34424 - DNA, 20 bp, synthetic construct
  misc_feature 1..20: note = chemically synthesized
  source 1..20: mol_type = other DNA
ggggcatagagccagccctg

SEQ ID NO: 34425 - DNA, 20 bp, synthetic construct
  misc_feature 1..20: note = chemically synthesized
  source 1..20: mol_type = other DNA
tagaaccccctataaactag

SEQ ID NO: 34426 - DNA, 20 bp, synthetic construct
  misc_feature 1..20: note = chemically synthesized
  source 1..20: mol_type = other DNA
ttgcccatggggcacagtca

SEQ ID NO: 34427 - DNA, 20 bp, synthetic construct
  misc_feature 1..20: note = chemically synthesized
  source 1..20: mol_type = other DNA
cagacattctctgcctgttg

SEQ ID NO: 34428 - DNA, 20 bp, synthetic construct
  misc_feature 1..20: note = chemically synthesized
  source 1..20: mol_type = other DNA
cacgtatgtgttgtgatccc

SEQ ID NO: 34429 - DNA, 20 bp, synthetic construct
  misc_feature 1..20: note = chemically synthesized
  source 1..20: mol_type = other DNA
tgttgtgatccctgtggttt

SEQ ID NO: 34430 - DNA, 20 bp, synthetic construct
  misc_feature 1..20: note = chemically synthesized
  source 1..20: mol_type = other DNA
atccctgtggtttgagagtt

SEQ ID NO: 34431 - DNA, 20 bp, synthetic construct
  misc_feature 1..20: note = chemically synthesized
  source 1..20: mol_type = other DNA
tgagagtctctaaattacaa

SEQ ID NO: 34432 - DNA, 20 bp, synthetic construct
  misc_feature 1..20: note = chemically synthesized
  source 1..20: mol_type = other DNA
gtgaaaagtcaattgataat

SEQ ID NO: 34433 - DNA, 20 bp, synthetic construct
  misc_feature 1..20: note = chemically synthesized
  source 1..20: mol_type = other DNA
ctttaggataaccggagggg

SEQ ID NO: 34434 - DNA, 20 bp, synthetic construct
  misc_feature 1..20: note = chemically synthesized
  source 1..20: mol_type = other DNA
agcaatgcacctgtgcagga

SEQ ID NO: 34435 - DNA, 20 bp, synthetic construct
  misc_feature 1..20: note = chemically synthesized
  source 1..20: mol_type = other DNA
ttaagcaatggaagtccaat

SEQ ID NO: 34436 - DNA, 20 bp, synthetic construct
  misc_feature 1..20: note = chemically synthesized
  source 1..20: mol_type = other DNA
gcaagtgtccagggcagaac

SEQ ID NO: 34437 - DNA, 20 bp, synthetic construct
  misc_feature 1..20: note = chemically synthesized
  source 1..20: mol_type = other DNA
actttgctgcaggttcaagg

SEQ ID NO: 34438 - DNA, 20 bp, synthetic construct
  misc_feature 1..20: note = chemically synthesized
  source 1..20: mol_type = other DNA
gtagcacttaatttctgtct

SEQ ID NO: 34439 - DNA, 20 bp, synthetic construct
  misc_feature 1..20: note = chemically synthesized
  source 1..20: mol_type = other DNA
cacgattacttcacgataaa

SEQ ID NO: 34440 - DNA, 20 bp, synthetic construct
  misc_feature 1..20: note = chemically synthesized
  source 1..20: mol_type = other DNA
cgaagcatcgcctttaactg

SEQ ID NO: 34441 - DNA, 20 bp, synthetic construct
  misc_feature 1..20: note = chemically synthesized
  source 1..20: mol_type = other DNA
taactgctctgtttgatcaa

SEQ ID NO: 34442 - DNA, 20 bp, synthetic construct
  misc_feature 1..20: note = chemically synthesized
  source 1..20: mol_type = other DNA
agcaggccaaggatatatga

SEQ ID NO: 34443 - DNA, 20 bp, synthetic construct
  misc_feature 1..20: note = chemically synthesized
  source 1..20: mol_type = other DNA
gaattagaacattccaggta

SEQ ID NO: 34444 - DNA, 20 bp, synthetic construct
  misc_feature 1..20: note = chemically synthesized
  source 1..20: mol_type = other DNA
atgatgatgataataataat

SEQ ID NO: 34445 - DNA, 20 bp, synthetic construct
  misc_feature 1..20: note = chemically synthesized
  source 1..20: mol_type = other DNA
gcacattgtcctaaatgaaa

SEQ ID NO: 34446 - DNA, 20 bp, synthetic construct
  misc_feature 1..20: note = chemically synthesized
  source 1..20: mol_type = other DNA
tagaagggggagcctggacc

SEQ ID NO: 34447 - DNA, 20 bp, synthetic construct
  misc_feature 1..20: note = chemically synthesized
  source 1..20: mol_type = other DNA
ccataaaggtcagggtgttg

SEQ ID NO: 34448 - DNA, 20 bp, synthetic construct
  misc_feature 1..20: note = chemically synthesized
  source 1..20: mol_type = other DNA
tagccacctctggcacctgc

SEQ ID NO: 34449 - DNA, 20 bp, synthetic construct
  misc_feature 1..20: note = chemically synthesized
  source 1..20: mol_type = other DNA
ttttcaaattttaatagcaa

SEQ ID NO: 34450 - DNA, 20 bp, synthetic construct
  misc_feature 1..20: note = chemically synthesized
  source 1..20: mol_type = other DNA
tctctgaggagctagagact

SEQ ID NO: 34451 - DNA, 20 bp, synthetic construct
  misc_feature 1..20: note = chemically synthesized
  source 1..20: mol_type = other DNA
ctgtccaactcatccagaaa

SEQ ID NO: 34452 - DNA, 20 bp, synthetic construct
  misc_feature 1..20: note = chemically synthesized
  source 1..20: mol_type = other DNA
gcattgatgagaggcagggc

SEQ ID NO: 34453 - DNA, 20 bp, synthetic construct
  misc_feature 1..20: note = chemically synthesized
  source 1..20: mol_type = other DNA
ttcttcttcattttccattc

SEQ ID NO: 34454 - DNA, 20 bp, synthetic construct
  misc_feature 1..20: note = chemically synthesized
  source 1..20: mol_type = other DNA
acagctacagtccatttctc

SEQ ID NO: 34455 - DNA, 20 bp, synthetic construct
  misc_feature 1..20: note = chemically synthesized
  source 1..20: mol_type = other DNA
tacaatgtgttccccagtat

SEQ ID NO: 34456 - DNA, 20 bp, synthetic construct
  misc_feature 1..20: note = chemically synthesized
  source 1..20: mol_type = other DNA
aaagagcctgaggcccaata

SEQ ID NO: 34457 - DNA, 20 bp, synthetic construct
  misc_feature 1..20: note = chemically synthesized
  source 1..20: mol_type = other DNA
aacgtcccactttctcaaga

SEQ ID NO: 34458 - DNA, 20 bp, synthetic construct
  misc_feature 1..20: note = chemically synthesized
  source 1..20: mol_type = other DNA
ctgctagacctcaagcagga

SEQ ID NO: 34459 - DNA, 20 bp, synthetic construct
  misc_feature 1..20: note = chemically synthesized
  source 1..20: mol_type = other DNA
aggcactcaccccactgcca

SEQ ID NO: 34460 - DNA, 20 bp, synthetic construct
  misc_feature 1..20: note = chemically synthesized
  source 1..20: mol_type = other DNA
ccaggctgtttactcttagc

SEQ ID NO: 34461 - DNA, 20 bp, synthetic construct
  misc_feature 1..20: note = chemically synthesized
  source 1..20: mol_type = other DNA
ctgcctgaggctgcctgcca

SEQ ID NO: 34462 - DNA, 20 bp, synthetic construct
  misc_feature 1..20: note = chemically synthesized
  source 1..20: mol_type = other DNA
ctgccagtgagattgcatgt

SEQ ID NO: 34463 - DNA, 20 bp, synthetic construct
  misc_feature 1..20: note = chemically synthesized
  source 1..20: mol_type = other DNA
gttcccccattatgcactgc

SEQ ID NO: 34464 - DNA, 20 bp, synthetic construct
  misc_feature 1..20: note = chemically synthesized
  source 1..20: mol_type = other DNA
gctctttaacctctccaagc

SEQ ID NO: 34465 - DNA, 20 bp, synthetic construct
  misc_feature 1..20: note = chemically synthesized
  source 1..20: mol_type = other DNA
tgtgaagcaagcctagctgg

SEQ ID NO: 34466 - DNA, 20 bp, synthetic construct
  misc_feature 1..20: note = chemically synthesized
  source 1..20: mol_type = other DNA
ggcacatcttctgaaacaag

SEQ ID NO: 34467 - DNA, 20 bp, synthetic construct
  misc_feature 1..20: note = chemically synthesized
  source 1..20: mol_type = other DNA
aattttgcacttatttatat

SEQ ID NO: 34468 - DNA, 20 bp, synthetic construct
  misc_feature 1..20: note = chemically synthesized
  source 1..20: mol_type = other DNA
tttcagaaacactaccttca

SEQ ID NO: 34469 - DNA, 20 bp, synthetic construct
  misc_feature 1..20: note = chemically synthesized
  source 1..20: mol_type = other DNA
gaaacactaccttcattctg

SEQ ID NO: 34470 - DNA, 20 bp, synthetic construct
  misc_feature 1..20: note = chemically synthesized
  source 1..20: mol_type = other DNA
aaatgaagaacactcttgta

SEQ ID NO: 34471 - DNA, 20 bp, synthetic construct
  misc_feature 1..20: note = chemically synthesized
  source 1..20: mol_type = other DNA
aatcacttccaaatacttta

SEQ ID NO: 34472 - DNA, 20 bp, synthetic construct
  misc_feature 1..20: note = chemically synthesized
  source 1..20: mol_type = other DNA
tggtttgtaagttctctttc

SEQ ID NO: 34473 - DNA, 20 bp, synthetic construct
  misc_feature 1..20: note = chemically synthesized
  source 1..20: mol_type = other DNA
aggccttttgcaagtactga

SEQ ID NO: 34474 - DNA, 20 bp, synthetic construct
  misc_feature 1..20: note = chemically synthesized
  source 1..20: mol_type = other DNA
ttttttttttttttttgaga

SEQ ID NO: 34475 - DNA, 20 bp, synthetic construct
  misc_feature 1..20: note = chemically synthesized
  source 1..20: mol_type = other DNA
tccctcagcctcctgagtag

SEQ ID NO: 34476 - DNA, 20 bp, synthetic construct
  misc_feature 1..20: note = chemically synthesized
  source 1..20: mol_type = other DNA
gcatgtgcgaccatgcctgg

SEQ ID NO: 34477 - DNA, 20 bp, synthetic construct
  misc_feature 1..20: note = chemically synthesized
  source 1..20: mol_type = other DNA
gtttatatttttaatagaga

SEQ ID NO: 34478 - DNA, 20 bp, synthetic construct
  misc_feature 1..20: note = chemically synthesized
  source 1..20: mol_type = other DNA
agccactgcgcccagcctta

SEQ ID NO: 34479 - DNA, 20 bp, synthetic construct
  misc_feature 1..20: note = chemically synthesized
  source 1..20: mol_type = other DNA
aattatggaataaagtagta

SEQ ID NO: 34480 - DNA, 20 bp, synthetic construct
  misc_feature 1..20: note = chemically synthesized
  source 1..20: mol_type = other DNA
taggtgaaatctcaggctaa

SEQ ID NO: 34481 - DNA, 20 bp, synthetic construct
  misc_feature 1..20: note = chemically synthesized
  source 1..20: mol_type = other DNA
ccagaagtcctggaaaactg

SEQ ID NO: 34482 - DNA, 20 bp, synthetic construct
  misc_feature 1..20: note = chemically synthesized
  source 1..20: mol_type = other DNA
cagagatcaggtccctccaa

SEQ ID NO: 34483 - DNA, 20 bp, synthetic construct
  misc_feature 1..20: note = chemically synthesized
  source 1..20: mol_type = other DNA
caggtccctccaaatgagct

SEQ ID NO: 34484 - DNA, 20 bp, synthetic construct
  misc_feature 1..20: note = chemically synthesized
  source 1..20: mol_type = other DNA
aatgagcttacagtttatga

SEQ ID NO: 34485 - DNA, 20 bp, synthetic construct
  misc_feature 1..20: note = chemically synthesized
  source 1..20: mol_type = other DNA
ggtgaaacaaaatgatggat

SEQ ID NO: 34486 - DNA, 20 bp, synthetic construct
  misc_feature 1..20: note = chemically synthesized
  source 1..20: mol_type = other DNA
acagacagaataacttcttc

SEQ ID NO: 34487 - DNA, 20 bp, synthetic construct
  misc_feature 1..20: note = chemically synthesized
  source 1..20: mol_type = other DNA
tcagattcagaagagtagca

SEQ ID NO: 34488 - DNA, 20 bp, synthetic construct
  misc_feature 1..20: note = chemically synthesized
  source 1..20: mol_type = other DNA
agcagggggtttctcgctag

SEQ ID NO: 34489 - DNA, 20 bp, synthetic construct
  misc_feature 1..20: note = chemically synthesized
  source 1..20: mol_type = other DNA
gtattgctcctaaagaaaga

SEQ ID NO: 34490 - DNA, 20 bp, synthetic construct
  misc_feature 1..20: note = chemically synthesized
  source 1..20: mol_type = other DNA
agcagtgttcacacccaatc

SEQ ID NO: 34491 - DNA, 20 bp, synthetic construct
  misc_feature 1..20: note = chemically synthesized
  source 1..20: mol_type = other DNA
atttaagaaataccagtgaa

SEQ ID NO: 34492 - DNA, 20 bp, synthetic construct
  misc_feature 1..20: note = chemically synthesized
  source 1..20: mol_type = other DNA
tgttcttgatatgttaataa

SEQ ID NO: 34493 - DNA, 20 bp, synthetic construct
  misc_feature 1..20: note = chemically synthesized
  source 1..20: mol_type = other DNA
ggctgtctagggggatggct

SEQ ID NO: 34494 - DNA, 20 bp, synthetic construct
  misc_feature 1..20: note = chemically synthesized
  source 1..20: mol_type = other DNA
gtccctggaagacagtaggc

SEQ ID NO: 34495 - DNA, 20 bp, synthetic construct
  misc_feature 1..20: note = chemically synthesized
  source 1..20: mol_type = other DNA
cataaccctccctcctatcc

SEQ ID NO: 34496 - DNA, 20 bp, synthetic construct
  misc_feature 1..20: note = chemically synthesized
  source 1..20: mol_type = other DNA
tcccaataccagtggctctt

SEQ ID NO: 34497 - DNA, 20 bp, synthetic construct
  misc_feature 1..20: note = chemically synthesized
  source 1..20: mol_type = other DNA
tttcaggcttacaaagcctt

SEQ ID NO: 34498 - DNA, 20 bp, synthetic construct
  misc_feature 1..20: note = chemically synthesized
  source 1..20: mol_type = other DNA
aggactaatttaacccgcct

SEQ ID NO: 34499 - DNA, 20 bp, synthetic construct
  misc_feature 1..20: note = chemically synthesized
  source 1..20: mol_type = other DNA
caatattctggatcttttgt

SEQ ID NO: 34500 - DNA, 20 bp, synthetic construct
  misc_feature 1..20: note = chemically synthesized
  source 1..20: mol_type = other DNA
cctcctgaaaattggttatt

SEQ ID NO: 34501 - DNA, 20 bp, synthetic construct
  misc_feature 1..20: note = chemically synthesized
  source 1..20: mol_type = other DNA
aaattggttattggctgctt

SEQ ID NO: 34502 - DNA, 20 bp, synthetic construct
  misc_feature 1..20: note = chemically synthesized
  source 1..20: mol_type = other DNA
agaagcctgctggaagccta

SEQ ID NO: 34503 - DNA, 20 bp, synthetic construct
  misc_feature 1..20: note = chemically synthesized
  source 1..20: mol_type = other DNA
ccccagggctcatgctgcac

SEQ ID NO: 34504 - DNA, 20 bp, synthetic construct
  misc_feature 1..20: note = chemically synthesized
  source 1..20: mol_type = other DNA
cccttcctttcttagtcact

SEQ ID NO: 34505 - DNA, 20 bp, synthetic construct
  misc_feature 1..20: note = chemically synthesized
  source 1..20: mol_type = other DNA
aaagtcaacctctgactact

SEQ ID NO: 34506 - DNA, 20 bp, synthetic construct
  misc_feature 1..20: note = chemically synthesized
  source 1..20: mol_type = other DNA
tacagctgatgtatttactg

SEQ ID NO: 34507 - DNA, 20 bp, synthetic construct
  misc_feature 1..20: note = chemically synthesized
  source 1..20: mol_type = other DNA
gtatttactgagaagcttct

SEQ ID NO: 34508 - DNA, 20 bp, synthetic construct
  misc_feature 1..20: note = chemically synthesized
  source 1..20: mol_type = other DNA
agcttcttcaagctttctac

SEQ ID NO: 34509 - DNA, 20 bp, synthetic construct
  misc_feature 1..20: note = chemically synthesized
  source 1..20: mol_type = other DNA
aggtacatatctgtccctga

SEQ ID NO: 34510 - DNA, 20 bp, synthetic construct
  misc_feature 1..20: note = chemically synthesized
  source 1..20: mol_type = other DNA
tgaaaatgcttaaaagatca

SEQ ID NO: 34511 - DNA, 20 bp, synthetic construct
  misc_feature 1..20: note = chemically synthesized
  source 1..20: mol_type = other DNA
cctaccagtgagcgcccacc

SEQ ID NO: 34512 - DNA, 20 bp, synthetic construct
  misc_feature 1..20: note = chemically synthesized
  source 1..20: mol_type = other DNA
agacctgccatttaacctct

SEQ ID NO: 34513 - DNA, 20 bp, synthetic construct
  misc_feature 1..20: note = chemically synthesized
  source 1..20: mol_type = other DNA
caatttgacaatactcctca

SEQ ID NO: 34514 - DNA, 20 bp, synthetic construct
  misc_feature 1..20: note = chemically synthesized
  source 1..20: mol_type = other DNA
agggcttactcaaaaaaaaa

SEQ ID NO: 34515 - DNA, 20 bp, synthetic construct
  misc_feature 1..20: note = chemically synthesized
  source 1..20: mol_type = other DNA
agaagggacggatactcaga

SEQ ID NO: 34516 - DNA, 20 bp, synthetic construct
  misc_feature 1..20: note = chemically synthesized
  source 1..20: mol_type = other DNA
gtcctttggcaccccattct

SEQ ID NO: 34517 - DNA, 20 bp, synthetic construct
  misc_feature 1..20: note = chemically synthesized
  source 1..20: mol_type = other DNA
tgaaatgtgttggagcagct

SEQ ID NO: 34518 - DNA, 20 bp, synthetic construct
  misc_feature 1..20: note = chemically synthesized
  source 1..20: mol_type = other DNA
catccacacagggaacaagc

SEQ ID NO: 34519 - DNA, 20 bp, synthetic construct
  misc_feature 1..20: note = chemically synthesized
  source 1..20: mol_type = other DNA
catttggtaaataacccaaa

SEQ ID NO: 34520 - DNA, 20 bp, synthetic construct
  misc_feature 1..20: note = chemically synthesized
  source 1..20: mol_type = other DNA
gcagggtatgggacaccaca

SEQ ID NO: 34521 - DNA, 20 bp, synthetic construct
  misc_feature 1..20: note = chemically synthesized
  source 1..20: mol_type = other DNA
acccacgtgcctttgtgcat

SEQ ID NO: 34522 - DNA, 20 bp, synthetic construct
  misc_feature 1..20: note = chemically synthesized
  source 1..20: mol_type = other DNA
accactgatgacagcccccc

SEQ ID NO: 34523 - DNA, 20 bp, synthetic construct
  misc_feature 1..20: note = chemically synthesized
  source 1..20: mol_type = other DNA
ctcaaataatgtctataatg

SEQ ID NO: 34524 - DNA, 20 bp, synthetic construct
  misc_feature 1..20: note = chemically synthesized
  source 1..20: mol_type = other DNA
ttatacatgggtacttataa

SEQ ID NO: 34525 - DNA, 20 bp, synthetic construct
  misc_feature 1..20: note = chemically synthesized
  source 1..20: mol_type = other DNA
taaacatgttggcgtaactg

SEQ ID NO: 34526 - DNA, 20 bp, synthetic construct
  misc_feature 1..20: note = chemically synthesized
  source 1..20: mol_type = other DNA
tatcccaacagacagagggc

SEQ ID NO: 34527 - DNA, 20 bp, synthetic construct
  misc_feature 1..20: note = chemically synthesized
  source 1..20: mol_type = other DNA
ttgtgctcttgttgacttga

SEQ ID NO: 34528 - DNA, 20 bp, synthetic construct
  misc_feature 1..20: note = chemically synthesized
  source 1..20: mol_type = other DNA
agaaaagttaaaaccttgtg

SEQ ID NO: 34529 - DNA, 20 bp, synthetic construct
  misc_feature 1..20: note = chemically synthesized
  source 1..20: mol_type = other DNA
tgaagtgcttttacattttc

SEQ ID NO: 34530 - DNA, 20 bp, synthetic construct
  misc_feature 1..20: note = chemically synthesized
  source 1..20: mol_type = other DNA
tgaggacaggcaaggggaag

SEQ ID NO: 34531 - DNA, 20 bp, synthetic construct
  misc_feature 1..20: note = chemically synthesized
  source 1..20: mol_type = other DNA
gaagaactgtttccacatgc

SEQ ID NO: 34532 - DNA, 20 bp, synthetic construct
  misc_feature 1..20: note = chemically synthesized
  source 1..20: mol_type = other DNA
gggctgcctccgcacctgag

SEQ ID NO: 34533 - DNA, 20 bp, synthetic construct
  misc_feature 1..20: note = chemically synthesized
  source 1..20: mol_type = other DNA
gcttgctgtcctaagtcggc

SEQ ID NO: 34534 - DNA, 20 bp, synthetic construct
  misc_feature 1..20: note = chemically synthesized
  source 1..20: mol_type = other DNA
tcggctactgcttctaagtc

SEQ ID NO: 34535 - DNA, 20 bp, synthetic construct
  misc_feature 1..20: note = chemically synthesized
  source 1..20: mol_type = other DNA
gcatactatgggataattac

SEQ ID NO: 34536 - DNA, 20 bp, synthetic construct
  misc_feature 1..20: note = chemically synthesized
  source 1..20: mol_type = other DNA
taattactatggattattat

SEQ ID NO: 34537 - DNA, 20 bp, synthetic construct
  misc_feature 1..20: note = chemically synthesized
  source 1..20: mol_type = other DNA
cacaaaagacatattacaca

SEQ ID NO: 34538 - DNA, 20 bp, synthetic construct
  misc_feature 1..20: note = chemically synthesized
  source 1..20: mol_type = other DNA
atattacacacgcagatttc

SEQ ID NO: 34539 - DNA, 20 bp, synthetic construct
  misc_feature 1..20: note = chemically synthesized
  source 1..20: mol_type = other DNA
cctgaaattctctcatgtca

SEQ ID NO: 34540 - DNA, 20 bp, synthetic construct
  misc_feature 1..20: note = chemically synthesized
  source 1..20: mol_type = other DNA
tgatgtgaaagaggagacag

SEQ ID NO: 34541 - DNA, 20 bp, synthetic construct
  misc_feature 1..20: note = chemically synthesized
  source 1..20: mol_type = other DNA
ttttcctgttctgaagagga

SEQ ID NO: 34542 - DNA, 20 bp, synthetic construct
  misc_feature 1..20: note = chemically synthesized
  source 1..20: mol_type = other DNA
tggacacggcaggaaacagc

SEQ ID NO: 34543 - DNA, 20 bp, synthetic construct
  misc_feature 1..20: note = chemically synthesized
  source 1..20: mol_type = other DNA
tgagctcccccttgggttac

SEQ ID NO: 34544 - DNA, 20 bp, synthetic construct
  misc_feature 1..20: note = chemically synthesized
  source 1..20: mol_type = other DNA
tgggttacctatgattccag

SEQ ID NO: 34545 - DNA, 20 bp, synthetic construct
  misc_feature 1..20: note = chemically synthesized
  source 1..20: mol_type = other DNA
ggaacctgtcactggttctt

SEQ ID NO: 34546 - DNA, 20 bp, synthetic construct
  misc_feature 1..20: note = chemically synthesized
  source 1..20: mol_type = other DNA
tctcatcagactccgaaatc

SEQ ID NO: 34547 - DNA, 20 bp, synthetic construct
  misc_feature 1..20: note = chemically synthesized
  source 1..20: mol_type = other DNA
gaaatcacaggcttctggtc

SEQ ID NO: 34548 - DNA, 20 bp, synthetic construct
  misc_feature 1..20: note = chemically synthesized
  source 1..20: mol_type = other DNA
agctgagaaacaagaaagca

SEQ ID NO: 34549 - DNA, 20 bp, synthetic construct
  misc_feature 1..20: note = chemically synthesized
  source 1..20: mol_type = other DNA
gagaaacaagaaagcaattt

SEQ ID NO: 34550 - DNA, 20 bp, synthetic construct
  misc_feature 1..20: note = chemically synthesized
  source 1..20: mol_type = other DNA
cccccaataatttacttggt

SEQ ID NO: 34551 - DNA, 20 bp, synthetic construct
  misc_feature 1..20: note = chemically synthesized
  source 1..20: mol_type = other DNA
tttacttggtctcagctttg

SEQ ID NO: 34552 - DNA, 20 bp, synthetic construct
  misc_feature 1..20: note = chemically synthesized
  source 1..20: mol_type = other DNA
tttggctggcttggatgtta

SEQ ID NO: 34553 - DNA, 20 bp, synthetic construct
  misc_feature 1..20: note = chemically synthesized
  source 1..20: mol_type = other DNA
gaacctgtggaaaagaggac

SEQ ID NO: 34554 - DNA, 20 bp, synthetic construct
  misc_feature 1..20: note = chemically synthesized
  source 1..20: mol_type = other DNA
ctgagaagtccaggaaaaga

SEQ ID NO: 34555 - DNA, 20 bp, synthetic construct
  misc_feature 1..20: note = chemically synthesized
  source 1..20: mol_type = other DNA
acagagaaggaaaaagaaca

SEQ ID NO: 34556 - DNA, 20 bp, synthetic construct
  misc_feature 1..20: note = chemically synthesized
  source 1..20: mol_type = other DNA
cccaccagtcagcaaatcct

SEQ ID NO: 34557 - DNA, 20 bp, synthetic construct
  misc_feature 1..20: note = chemically synthesized
  source 1..20: mol_type = other DNA
ttgcctaaaatttgccttct

SEQ ID NO: 34558 - DNA, 20 bp, synthetic construct
  misc_feature 1..20: note = chemically synthesized
  source 1..20: mol_type = other DNA
actgcttctgcctcactttc

SEQ ID NO: 34559 - DNA, 20 bp, synthetic construct
  misc_feature 1..20: note = chemically synthesized
  source 1..20: mol_type = other DNA
tcatatgacatcactcctcc

SEQ ID NO: 34560 - DNA, 20 bp, synthetic construct
  misc_feature 1..20: note = chemically synthesized
  source 1..20: mol_type = other DNA
cttcctcacctctttggagc

SEQ ID NO: 34561 - DNA, 20 bp, synthetic construct
  misc_feature 1..20: note = chemically synthesized
  source 1..20: mol_type = other DNA
ccccaccttattttcgtgca

SEQ ID NO: 34562 - DNA, 20 bp, synthetic construct
  misc_feature 1..20: note = chemically synthesized
  source 1..20: mol_type = other DNA
aagggggtgccacaagagca

SEQ ID NO: 34563 - DNA, 20 bp, synthetic construct
  misc_feature 1..20: note = chemically synthesized
  source 1..20: mol_type = other DNA
ccacaagagcagggagtttt

SEQ ID NO: 34564 - DNA, 20 bp, synthetic construct
  misc_feature 1..20: note = chemically synthesized
  source 1..20: mol_type = other DNA
gcagcccaacctgggggcac

SEQ ID NO: 34565 - DNA, 20 bp, synthetic construct
  misc_feature 1..20: note = chemically synthesized
  source 1..20: mol_type = other DNA
gggcactttagctttggatc

SEQ ID NO: 34566 - DNA, 20 bp, synthetic construct
  misc_feature 1..20: note = chemically synthesized
  source 1..20: mol_type = other DNA
gctttggatcttgggtttga

SEQ ID NO: 34567 - DNA, 20 bp, synthetic construct
  misc_feature 1..20: note = chemically synthesized
  source 1..20: mol_type = other DNA
aggccctgagacccacaggg

SEQ ID NO: 34568 - DNA, 20 bp, synthetic construct
  misc_feature 1..20: note = chemically synthesized
  source 1..20: mol_type = other DNA
aatgtaaatggaggggttga

SEQ ID NO: 34569 - DNA, 20 bp, synthetic construct
  misc_feature 1..20: note = chemically synthesized
  source 1..20: mol_type = other DNA
aaccaaacgaaagtctttcc

SEQ ID NO: 34570 - DNA, 20 bp, synthetic construct
  misc_feature 1..20: note = chemically synthesized
  source 1..20: mol_type = other DNA
cactggggctgtgcagccaa

SEQ ID NO: 34571 - DNA, 20 bp, synthetic construct
  misc_feature 1..20: note = chemically synthesized
  source 1..20: mol_type = other DNA
cggcattactctccctccat

SEQ ID NO: 34572 - DNA, 20 bp, synthetic construct
  misc_feature 1..20: note = chemically synthesized
  source 1..20: mol_type = other DNA
actctccctccattcttgct

SEQ ID NO: 34573 - DNA, 20 bp, synthetic construct
  misc_feature 1..20: note = chemically synthesized
  source 1..20: mol_type = other DNA
gtgctaatggccacttgtta

SEQ ID NO: 34574 - DNA, 20 bp, synthetic construct
  misc_feature 1..20: note = chemically synthesized
  source 1..20: mol_type = other DNA
ttcataatgctaatatttcc

SEQ ID NO: 34575 - DNA, 20 bp, synthetic construct
  misc_feature 1..20: note = chemically synthesized
  source 1..20: mol_type = other DNA
tttaagttaacagagcgcta

SEQ ID NO: 34576 - DNA, 20 bp, synthetic construct
  misc_feature 1..20: note = chemically synthesized
  source 1..20: mol_type = other DNA
actgcactattaatgacaac

SEQ ID NO: 34577 - DNA, 20 bp, synthetic construct
  misc_feature 1..20: note = chemically synthesized
  source 1..20: mol_type = other DNA
ggggagtcattaattcttct

SEQ ID NO: 34578 - DNA, 20 bp, synthetic construct
  misc_feature 1..20: note = chemically synthesized
  source 1..20: mol_type = other DNA
tcttctccaagctttcaaca

SEQ ID NO: 34579 - DNA, 20 bp, synthetic construct
  misc_feature 1..20: note = chemically synthesized
  source 1..20: mol_type = other DNA
ctatgaaggcaagggttgga

SEQ ID NO: 34580 - DNA, 20 bp, synthetic construct
  misc_feature 1..20: note = chemically synthesized
  source 1..20: mol_type = other DNA
aataaatcagtaaaatgatg

SEQ ID NO: 34581 - DNA, 20 bp, synthetic construct
  misc_feature 1..20: note = chemically synthesized
  source 1..20: mol_type = other DNA
ttgctcggccaaagacatag

SEQ ID NO: 34582 - DNA, 20 bp, synthetic construct
  misc_feature 1..20: note = chemically synthesized
  source 1..20: mol_type = other DNA
atgaatatgtgtgcagccac

SEQ ID NO: 34583 - DNA, 20 bp, synthetic construct
  misc_feature 1..20: note = chemically synthesized
  source 1..20: mol_type = other DNA
ggagagcagtcagagaggaa

SEQ ID NO: 34584 - DNA, 20 bp, synthetic construct
  misc_feature 1..20: note = chemically synthesized
  source 1..20: mol_type = other DNA
agaggaagcctgctttcctc

SEQ ID NO: 34585 - DNA, 20 bp, synthetic construct
  misc_feature 1..20: note = chemically synthesized
  source 1..20: mol_type = other DNA
tggaactcagaatcattcat

SEQ ID NO: 34586 - DNA, 20 bp, synthetic construct
  misc_feature 1..20: note = chemically synthesized
  source 1..20: mol_type = other DNA
acctcccttggcctgtgtcc

SEQ ID NO: 34587 - DNA, 20 bp, synthetic construct
  misc_feature 1..20: note = chemically synthesized
  source 1..20: mol_type = other DNA
ctcgcctctcaaatgagaaa

SEQ ID NO: 34588 - DNA, 20 bp, synthetic construct
  misc_feature 1..20: note = chemically synthesized
  source 1..20: mol_type = other DNA
agaaaggcagctttgagaga

SEQ ID NO: 34589 - DNA, 20 bp, synthetic construct
  misc_feature 1..20: note = chemically synthesized
  source 1..20: mol_type = other DNA
attttgcatatctaattgga

SEQ ID NO: 34590 - DNA, 20 bp, synthetic construct
  misc_feature 1..20: note = chemically synthesized
  source 1..20: mol_type = other DNA
gacgttcacagccttatgaa

SEQ ID NO: 34591 - DNA, 20 bp, synthetic construct
  misc_feature 1..20: note = chemically synthesized
  source 1..20: mol_type = other DNA
gatgacggataggagaacaa

SEQ ID NO: 34592 - DNA, 20 bp, synthetic construct
  misc_feature 1..20: note = chemically synthesized
  source 1..20: mol_type = other DNA
tttggaggagacacagagaa

SEQ ID NO: 34593 - DNA, 20 bp, synthetic construct
  misc_feature 1..20: note = chemically synthesized
  source 1..20: mol_type = other DNA
gtttcacctcttagacgtct

SEQ ID NO: 34594 - DNA, 20 bp, synthetic construct
  misc_feature 1..20: note = chemically synthesized
  source 1..20: mol_type = other DNA
cagagtcaggatgactctca

SEQ ID NO: 34595 - DNA, 20 bp, synthetic construct
  misc_feature 1..20: note = chemically synthesized
  source 1..20: mol_type = other DNA
tccctcaggagccatctgcc

SEQ ID NO: 34596 - DNA, 20 bp, synthetic construct
  misc_feature 1..20: note = chemically synthesized
  source 1..20: mol_type = other DNA
tagcctctagccagaactcc

SEQ ID NO: 34597 - DNA, 20 bp, synthetic construct
  misc_feature 1..20: note = chemically synthesized
  source 1..20: mol_type = other DNA
actctctcttctcaacaagc

SEQ ID NO: 34598 - DNA, 20 bp, synthetic construct
  misc_feature 1..20: note = chemically synthesized
  source 1..20: mol_type = other DNA
ctccatgaagagaagctgtt

SEQ ID NO: 34599 - DNA, 20 bp, synthetic construct
  misc_feature 1..20: note = chemically synthesized
  source 1..20: mol_type = other DNA
gcttgtggtgagcaaaactc

SEQ ID NO: 34600 - DNA, 20 bp, synthetic construct
  misc_feature 1..20: note = chemically synthesized
  source 1..20: mol_type = other DNA
ctccctggattgagtcgaga

SEQ ID NO: 34601 - DNA, 20 bp, synthetic construct
  misc_feature 1..20: note = chemically synthesized
  source 1..20: mol_type = other DNA
agtgctccaagcactctctg

SEQ ID NO: 34602 - DNA, 20 bp, synthetic construct
  misc_feature 1..20: note = chemically synthesized
  source 1..20: mol_type = other DNA
gcttccaggctggagctctg

SEQ ID NO: 34603 - DNA, 20 bp, synthetic construct
  misc_feature 1..20: note = chemically synthesized
  source 1..20: mol_type = other DNA
aaaaaaattaaattgggtgg

SEQ ID NO: 34604 - DNA, 20 bp, synthetic construct
  misc_feature 1..20: note = chemically synthesized
  source 1..20: mol_type = other DNA
ctgtgaattccattgataag

SEQ ID NO: 34605 - DNA, 20 bp, synthetic construct
  misc_feature 1..20: note = chemically synthesized
  source 1..20: mol_type = other DNA
ctccctctggtgagacaggc

SEQ ID NO: 34606 - DNA, 20 bp, synthetic construct
  misc_feature 1..20: note = chemically synthesized
  source 1..20: mol_type = other DNA
ctctggtgagacaggctcta

SEQ ID NO: 34607 - DNA, 20 bp, synthetic construct
  misc_feature 1..20: note = chemically synthesized
  source 1..20: mol_type = other DNA
cttgtttccagaatgccact

SEQ ID NO: 34608 - DNA, 20 bp, synthetic construct
  misc_feature 1..20: note = chemically synthesized
  source 1..20: mol_type = other DNA
ccacgtgctccttccccaac

SEQ ID NO: 34609 - DNA, 20 bp, synthetic construct
  misc_feature 1..20: note = chemically synthesized
  source 1..20: mol_type = other DNA
cagaatctgcaagcagagtt

SEQ ID NO: 34610 - DNA, 20 bp, synthetic construct
  misc_feature 1..20: note = chemically synthesized
  source 1..20: mol_type = other DNA
atcaagcagcgtgagcaaag

SEQ ID NO: 34611 - DNA, 20 bp, synthetic construct
  misc_feature 1..20: note = chemically synthesized
  source 1..20: mol_type = other DNA
tacctctctgaaacacagcc

SEQ ID NO: 34612 - DNA, 20 bp, synthetic construct
  misc_feature 1..20: note = chemically synthesized
  source 1..20: mol_type = other DNA
gagtggactgacacagacat

SEQ ID NO: 34613 - DNA, 20 bp, synthetic construct
  misc_feature 1..20: note = chemically synthesized
  source 1..20: mol_type = other DNA
gactcttgatcacccaactt

SEQ ID NO: 34614 - DNA, 20 bp, synthetic construct
  misc_feature 1..20: note = chemically synthesized
  source 1..20: mol_type = other DNA
cccactgtgaggtcttactg

SEQ ID NO: 34615 - DNA, 20 bp, synthetic construct
  misc_feature 1..20: note = chemically synthesized
  source 1..20: mol_type = other DNA
tgggttatgaaaaagggaag

SEQ ID NO: 34616 - DNA, 20 bp, synthetic construct
  misc_feature 1..20: note = chemically synthesized
  source 1..20: mol_type = other DNA
ataagcctgtgatgactcat

SEQ ID NO: 34617 - DNA, 20 bp, synthetic construct
  misc_feature 1..20: note = chemically synthesized
  source 1..20: mol_type = other DNA
tgccagctttgggtgctcta

SEQ ID NO: 34618 - DNA, 20 bp, synthetic construct
  misc_feature 1..20: note = chemically synthesized
  source 1..20: mol_type = other DNA
aagatgctttcccatgtctg

SEQ ID NO: 34619 - DNA, 20 bp, synthetic construct
  misc_feature 1..20: note = chemically synthesized
  source 1..20: mol_type = other DNA
caccccagcacacagaaaag

SEQ ID NO: 34620 - DNA, 20 bp, synthetic construct
  misc_feature 1..20: note = chemically synthesized
  source 1..20: mol_type = other DNA
gatgtgcttattatgtgcac

SEQ ID NO: 34621 - DNA, 20 bp, synthetic construct
  misc_feature 1..20: note = chemically synthesized
  source 1..20: mol_type = other DNA
cccactcctattattaaaac

SEQ ID NO: 34622 - DNA, 20 bp, synthetic construct
  misc_feature 1..20: note = chemically synthesized
  source 1..20: mol_type = other DNA
gcatcaggacaactgggagt

SEQ ID NO: 34623 - DNA, 20 bp, synthetic construct
  misc_feature 1..20: note = chemically synthesized
  source 1..20: mol_type = other DNA
gcatgagtcatcaatgaagc

SEQ ID NO: 34624 - DNA, 20 bp, synthetic construct
  misc_feature 1..20: note = chemically synthesized
  source 1..20: mol_type = other DNA
ggactctgtagttatcagac

SEQ ID NO: 34625 - DNA, 20 bp, synthetic construct
  misc_feature 1..20: note = chemically synthesized
  source 1..20: mol_type = other DNA
agtaaaagagctggaaaacc

SEQ ID NO: 34626 - DNA, 20 bp, synthetic construct
  misc_feature 1..20: note = chemically synthesized
  source 1..20: mol_type = other DNA
ccatgagttcaggttcagga

SEQ ID NO: 34627 - DNA, 20 bp, synthetic construct
  misc_feature 1..20: note = chemically synthesized
  source 1..20: mol_type = other DNA
gtctctggaatgaagaggaa

SEQ ID NO: 34628 - DNA, 20 bp, synthetic construct
  misc_feature 1..20: note = chemically synthesized
  source 1..20: mol_type = other DNA
ggatcgaaggtagacaaaag

SEQ ID NO: 34629 - DNA, 20 bp, synthetic construct
  misc_feature 1..20: note = chemically synthesized
  source 1..20: mol_type = other DNA
tagacaaaaggaaggatttc

SEQ ID NO: 34630 - DNA, 20 bp, synthetic construct
  misc_feature 1..20: note = chemically synthesized
  source 1..20: mol_type = other DNA
accattctctgcaacagcac

SEQ ID NO: 34631 - DNA, 20 bp, synthetic construct
  misc_feature 1..20: note = chemically synthesized
  source 1..20: mol_type = other DNA
aacagcacaggtgattgggt

SEQ ID NO: 34632 - DNA, 20 bp, synthetic construct
  misc_feature 1..20: note = chemically synthesized
  source 1..20: mol_type = other DNA
aggtgattgggtggtggttt

SEQ ID NO: 34633 - DNA, 20 bp, synthetic construct
  misc_feature 1..20: note = chemically synthesized
  source 1..20: mol_type = other DNA
ttgggtggtggttttgttgc

SEQ ID NO: 34634 - DNA, 20 bp, synthetic construct
  misc_feature 1..20: note = chemically synthesized
  source 1..20: mol_type = other DNA
gctggccatggagaggccat

SEQ ID NO: 34635 - DNA, 20 bp, synthetic construct
  misc_feature 1..20: note = chemically synthesized
  source 1..20: mol_type = other DNA
gatgctcaataagtattcac

SEQ ID NO: 34636 - DNA, 20 bp, synthetic construct
  misc_feature 1..20: note = chemically synthesized
  source 1..20: mol_type = other DNA
aactatctatgctcaaagag

SEQ ID NO: 34637 - DNA, 20 bp, synthetic construct
  misc_feature 1..20: note = chemically synthesized
  source 1..20: mol_type = other DNA
tcaaagagctgtgctttctt

SEQ ID NO: 34638 - DNA, 20 bp, synthetic construct
  misc_feature 1..20: note = chemically synthesized
  source 1..20: mol_type = other DNA
attacttgaaggccagaggc

SEQ ID NO: 34639 - DNA, 20 bp, synthetic construct
  misc_feature 1..20: note = chemically synthesized
  source 1..20: mol_type = other DNA
aaatttggaaggccacagag

SEQ ID NO: 34640 - DNA, 20 bp, synthetic construct
  misc_feature 1..20: note = chemically synthesized
  source 1..20: mol_type = other DNA
ttggaaggccacagagggaa

SEQ ID NO: 34641 - DNA, 20 bp, synthetic construct
  misc_feature 1..20: note = chemically synthesized
  source 1..20: mol_type = other DNA
agcaaaaccctgtctctaca

SEQ ID NO: 34642 - DNA, 20 bp, synthetic construct
  misc_feature 1..20: note = chemically synthesized
  source 1..20: mol_type = other DNA
taaataaaataaaataattg

SEQ ID NO: 34643 - DNA, 20 bp, synthetic construct
  misc_feature 1..20: note = chemically synthesized
  source 1..20: mol_type = other DNA
aaagaaaatataaaatttgg

SEQ ID NO: 34644 - DNA, 20 bp, synthetic construct
  misc_feature 1..20: note = chemically synthesized
  source 1..20: mol_type = other DNA
acatcatagataaaggagtc

SEQ ID NO: 34645 - DNA, 20 bp, synthetic construct
  misc_feature 1..20: note = chemically synthesized
  source 1..20: mol_type = other DNA
tacttagtactaacatttaa

SEQ ID NO: 34646 - DNA, 20 bp, synthetic construct
  misc_feature 1..20: note = chemically synthesized
  source 1..20: mol_type = other DNA
ttttaaaatgtctgcgatag

SEQ ID NO: 34647 - DNA, 20 bp, synthetic construct
  misc_feature 1..20: note = chemically synthesized
  source 1..20: mol_type = other DNA
atgtctgcgatagagcagat

SEQ ID NO: 34648 - DNA, 20 bp, synthetic construct
  misc_feature 1..20: note = chemically synthesized
  source 1..20: mol_type = other DNA
agggcatcgcacatgtgaat

SEQ ID NO: 34649 - DNA, 20 bp, synthetic construct
  misc_feature 1..20: note = chemically synthesized
  source 1..20: mol_type = other DNA
cccagcagagaacgttgaga

SEQ ID NO: 34650 - DNA, 20 bp, synthetic construct
  misc_feature 1..20: note = chemically synthesized
  source 1..20: mol_type = other DNA
aggcattcctgggggccggg

SEQ ID NO: 34651 - DNA, 20 bp, synthetic construct
  misc_feature 1..20: note = chemically synthesized
  source 1..20: mol_type = other DNA
ccaccagccgtatttcctgg

SEQ ID NO: 34652 - DNA, 20 bp, synthetic construct
  misc_feature 1..20: note = chemically synthesized
  source 1..20: mol_type = other DNA
ttgagagaaaatggacagaa

SEQ ID NO: 34653 - DNA, 20 bp, synthetic construct
  misc_feature 1..20: note = chemically synthesized
  source 1..20: mol_type = other DNA
tggtaggtactaccaaacca

SEQ ID NO: 34654 - DNA, 20 bp, synthetic construct
  misc_feature 1..20: note = chemically synthesized
  source 1..20: mol_type = other DNA
tttaaggcattttgcggtct

SEQ ID NO: 34655 - DNA, 20 bp, synthetic construct
  misc_feature 1..20: note = chemically synthesized
  source 1..20: mol_type = other DNA
aggcagctgaaagtcagtac

SEQ ID NO: 34656 - DNA, 20 bp, synthetic construct
  misc_feature 1..20: note = chemically synthesized
  source 1..20: mol_type = other DNA
ctttttaatgatgtgaaagt

SEQ ID NO: 34657 - DNA, 20 bp, synthetic construct
  misc_feature 1..20: note = chemically synthesized
  source 1..20: mol_type = other DNA
taaagattaaaaacatgttg

SEQ ID NO: 34658 - DNA, 20 bp, synthetic construct
  misc_feature 1..20: note = chemically synthesized
  source 1..20: mol_type = other DNA
gaaatcgctcctgaaatctg

SEQ ID NO: 34659 - DNA, 20 bp, synthetic construct
  misc_feature 1..20: note = chemically synthesized
  source 1..20: mol_type = other DNA
ggctggaaccactggaatct

SEQ ID NO: 34660 - DNA, 20 bp, synthetic construct
  misc_feature 1..20: note = chemically synthesized
  source 1..20: mol_type = other DNA
gacacatgcagctgggagcc

SEQ ID NO: 34661 - DNA, 20 bp, synthetic construct
  misc_feature 1..20: note = chemically synthesized
  source 1..20: mol_type = other DNA
gaattcacgtgggcatggga

SEQ ID NO: 34662 - DNA, 20 bp, synthetic construct
  misc_feature 1..20: note = chemically synthesized
  source 1..20: mol_type = other DNA
aaactcagtgaagacaaaga

SEQ ID NO: 34663 - DNA, 20 bp, synthetic construct
  misc_feature 1..20: note = chemically synthesized
  source 1..20: mol_type = other DNA
cataactcaggaattcatgg

SEQ ID NO: 34664 - DNA, 20 bp, synthetic construct
  misc_feature 1..20: note = chemically synthesized
  source 1..20: mol_type = other DNA
ctctctagacttggagtgtt

SEQ ID NO: 34665 - DNA, 20 bp, synthetic construct
  misc_feature 1..20: note = chemically synthesized
  source 1..20: mol_type = other DNA
atgtgtgtatgatatagtat

SEQ ID NO: 34666 - DNA, 20 bp, synthetic construct
  misc_feature 1..20: note = chemically synthesized
  source 1..20: mol_type = other DNA
ataccttgcgtggcaaggta

SEQ ID NO: 34667 - DNA, 20 bp, synthetic construct
  misc_feature 1..20: note = chemically synthesized
  source 1..20: mol_type = other DNA
cccttacaataaactcttct

SEQ ID NO: 34668 - DNA, 20 bp, synthetic construct
  misc_feature 1..20: note = chemically synthesized
  source 1..20: mol_type = other DNA
acaataaactcttctgcagg

SEQ ID NO: 34669 - DNA, 20 bp, synthetic construct
  misc_feature 1..20: note = chemically synthesized
  source 1..20: mol_type = other DNA
tgccaccaaattttttaaaa

SEQ ID NO: 34670 - DNA, 20 bp, synthetic construct
  misc_feature 1..20: note = chemically synthesized
  source 1..20: mol_type = other DNA
catttgtgtacacattcgca

SEQ ID NO: 34671 - DNA, 20 bp, synthetic construct
  misc_feature 1..20: note = chemically synthesized
  source 1..20: mol_type = other DNA
agaaggagaaattatcctca

SEQ ID NO: 34672 - DNA, 20 bp, synthetic construct
  misc_feature 1..20: note = chemically synthesized
  source 1..20: mol_type = other DNA
aataagtggcctttgatgta

SEQ ID NO: 34673 - DNA, 20 bp, synthetic construct
  misc_feature 1..20: note = chemically synthesized
  source 1..20: mol_type = other DNA
cttctccagtgggttcccac

SEQ ID NO: 34674 - DNA, 20 bp, synthetic construct
  misc_feature 1..20: note = chemically synthesized
  source 1..20: mol_type = other DNA
gttcccaccggtgttttcgt

SEQ ID NO: 34675 - DNA, 20 bp, synthetic construct
  misc_feature 1..20: note = chemically synthesized
  source 1..20: mol_type = other DNA
tgtgatgtggttaggccagt

SEQ ID NO: 34676 - DNA, 20 bp, synthetic construct
  misc_feature 1..20: note = chemically synthesized
  source 1..20: mol_type = other DNA
tgcacgaagcccaccagtga

SEQ ID NO: 34677 - DNA, 20 bp, synthetic construct
  misc_feature 1..20: note = chemically synthesized
  source 1..20: mol_type = other DNA
tcaagtcacacagcgacagt

SEQ ID NO: 34678 - DNA, 20 bp, synthetic construct
  misc_feature 1..20: note = chemically synthesized
  source 1..20: mol_type = other DNA
cagtcctcccttaaagggaa

SEQ ID NO: 34679 - DNA, 20 bp, synthetic construct
  misc_feature 1..20: note = chemically synthesized
  source 1..20: mol_type = other DNA
cagccacgtgagcacgtccc

SEQ ID NO: 34680 - DNA, 20 bp, synthetic construct
  misc_feature 1..20: note = chemically synthesized
  source 1..20: mol_type = other DNA
tgtattttttaaacatagga

SEQ ID NO: 34681 - DNA, 20 bp, synthetic construct
  misc_feature 1..20: note = chemically synthesized
  source 1..20: mol_type = other DNA
aatacttctttccatctggg

SEQ ID NO: 34682 - DNA, 20 bp, synthetic construct
  misc_feature 1..20: note = chemically synthesized
  source 1..20: mol_type = other DNA
tcaagactgaagctgccaag

SEQ ID NO: 34683 - DNA, 20 bp, synthetic construct
  misc_feature 1..20: note = chemically synthesized
  source 1..20: mol_type = other DNA
atatgtcagttatgttccaa

SEQ ID NO: 34684 - DNA, 20 bp, synthetic construct
  misc_feature 1..20: note = chemically synthesized
  source 1..20: mol_type = other DNA
ttttagacaggataaggtca

SEQ ID NO: 34685 - DNA, 20 bp, synthetic construct
  misc_feature 1..20: note = chemically synthesized
  source 1..20: mol_type = other DNA
actagtgctccagagagaca

SEQ ID NO: 34686 - DNA, 20 bp, synthetic construct
  misc_feature 1..20: note = chemically synthesized
  source 1..20: mol_type = other DNA
gattgaaacaaaaattgcct

SEQ ID NO: 34687 - DNA, 20 bp, synthetic construct
  misc_feature 1..20: note = chemically synthesized
  source 1..20: mol_type = other DNA
tctctgtagactctgtgggt

SEQ ID NO: 34688 - DNA, 20 bp, synthetic construct
  misc_feature 1..20: note = chemically synthesized
  source 1..20: mol_type = other DNA
ataagtaagaagtaactgtg

SEQ ID NO: 34689 - DNA, 20 bp, synthetic construct
  misc_feature 1..20: note = chemically synthesized
  source 1..20: mol_type = other DNA
catggcagaaccgtaaagaa

SEQ ID NO: 34690 - DNA, 20 bp, synthetic construct
  misc_feature 1..20: note = chemically synthesized
  source 1..20: mol_type = other DNA
cacaaaggacagcctgccat

SEQ ID NO: 34691 - DNA, 20 bp, synthetic construct
  misc_feature 1..20: note = chemically synthesized
  source 1..20: mol_type = other DNA
gacagcctgccatccaggat

SEQ ID NO: 34692 - DNA, 20 bp, synthetic construct
  misc_feature 1..20: note = chemically synthesized
  source 1..20: mol_type = other DNA
agataaatagtatggagata

SEQ ID NO: 34693 - DNA, 20 bp, synthetic construct
  misc_feature 1..20: note = chemically synthesized
  source 1..20: mol_type = other DNA
tatggagataatttgcttaa

SEQ ID NO: 34694 - DNA, 20 bp, synthetic construct
  misc_feature 1..20: note = chemically synthesized
  source 1..20: mol_type = other DNA
taagtcagattttgatgaaa

SEQ ID NO: 34695 - DNA, 20 bp, synthetic construct
  misc_feature 1..20: note = chemically synthesized
  source 1..20: mol_type = other DNA
tgaaaagtggtttctacatg

SEQ ID NO: 34696 - DNA, 20 bp, synthetic construct
  misc_feature 1..20: note = chemically synthesized
  source 1..20: mol_type = other DNA
atagctttcaaaaacttcta

SEQ ID NO: 34697 - DNA, 20 bp, synthetic construct
  misc_feature 1..20: note = chemically synthesized
  source 1..20: mol_type = other DNA
gtatatagatgcatatgtat

SEQ ID NO: 34698 - DNA, 20 bp, synthetic construct
  misc_feature 1..20: note = chemically synthesized
  source 1..20: mol_type = other DNA
atcttatgatgacagtgttg

SEQ ID NO: 34699 - DNA, 20 bp, synthetic construct
  misc_feature 1..20: note = chemically synthesized
  source 1..20: mol_type = other DNA
gatgacagtgttgatgtgtt

SEQ ID NO: 34700 - DNA, 20 bp, synthetic construct
  misc_feature 1..20: note = chemically synthesized
  source 1..20: mol_type = other DNA
ccaaacgttcaagaattgac

SEQ ID NO: 34701 - DNA, 20 bp, synthetic construct
  misc_feature 1..20: note = chemically synthesized
  source 1..20: mol_type = other DNA
ataatttatttaagccaaat

SEQ ID NO: 34702 - DNA, 20 bp, synthetic construct
  misc_feature 1..20: note = chemically synthesized
  source 1..20: mol_type = other DNA
aaatacctctccattatcag

SEQ ID NO: 34703 - DNA, 20 bp, synthetic construct
  misc_feature 1..20: note = chemically synthesized
  source 1..20: mol_type = other DNA
ctccattatcaggggtgctt

SEQ ID NO: 34704 - DNA, 20 bp, synthetic construct
  misc_feature 1..20: note = chemically synthesized
  source 1..20: mol_type = other DNA
tgagccaagactgtcctagc

SEQ ID NO: 34705 - DNA, 20 bp, synthetic construct
  misc_feature 1..20: note = chemically synthesized
  source 1..20: mol_type = other DNA
tatctctggcatgaatgtta

SEQ ID NO: 34706 - DNA, 20 bp, synthetic construct
  misc_feature 1..20: note = chemically synthesized
  source 1..20: mol_type = other DNA
tgccattcattcggcctgtt

SEQ ID NO: 34707 - DNA, 20 bp, synthetic construct
  misc_feature 1..20: note = chemically synthesized
  source 1..20: mol_type = other DNA
ttagggctaaactttatgtt

SEQ ID NO: 34708 - DNA, 20 bp, synthetic construct
  misc_feature 1..20: note = chemically synthesized
  source 1..20: mol_type = other DNA
ctaaactttatgttccttgt

SEQ ID NO: 34709 - DNA, 20 bp, synthetic construct
  misc_feature 1..20: note = chemically synthesized
  source 1..20: mol_type = other DNA
tttatgttccttgtttttgt

SEQ ID NO: 34710 - DNA, 20 bp, synthetic construct
  misc_feature 1..20: note = chemically synthesized
  source 1..20: mol_type = other DNA
ttttgtttttttttcttttt

SEQ ID NO: 34711 - DNA, 20 bp, synthetic construct
  misc_feature 1..20: note = chemically synthesized
  source 1..20: mol_type = other DNA
tttttcttttttcttgtttt

SEQ ID NO: 34712 - DNA, 20 bp, synthetic construct
  misc_feature 1..20: note = chemically synthesized
  source 1..20: mol_type = other DNA
gagcatgcaaaatcagaaac

SEQ ID NO: 34713 - DNA, 20 bp, synthetic construct
  misc_feature 1..20: note = chemically synthesized
  source 1..20: mol_type = other DNA
acaaggaacacatatttcac

SEQ ID NO: 34714 - DNA, 20 bp, synthetic construct
  misc_feature 1..20: note = chemically synthesized
  source 1..20: mol_type = other DNA
gagcacatgggataataaaa

SEQ ID NO: 34715 - DNA, 20 bp, synthetic construct
  misc_feature 1..20: note = chemically synthesized
  source 1..20: mol_type = other DNA
actttgaatgccctttttca

SEQ ID NO: 34716 - DNA, 20 bp, synthetic construct
  misc_feature 1..20: note = chemically synthesized
  source 1..20: mol_type = other DNA
ctaaaagccaatggtaaaca

SEQ ID NO: 34717 - DNA, 20 bp, synthetic construct
  misc_feature 1..20: note = chemically synthesized
  source 1..20: mol_type = other DNA
ggtaaacaccaagtttaaaa

SEQ ID NO: 34718 - DNA, 20 bp, synthetic construct
  misc_feature 1..20: note = chemically synthesized
  source 1..20: mol_type = other DNA
cgcatgtcccagaacaggcc

SEQ ID NO: 34719 - DNA, 20 bp, synthetic construct
  misc_feature 1..20: note = chemically synthesized
  source 1..20: mol_type = other DNA
ggctatgtccatacagagaa

SEQ ID NO: 34720 - DNA, 20 bp, synthetic construct
  misc_feature 1..20: note = chemically synthesized
  source 1..20: mol_type = other DNA
taattgaatttaaaatacct

SEQ ID NO: 34721 - DNA, 20 bp, synthetic construct
  misc_feature 1..20: note = chemically synthesized
  source 1..20: mol_type = other DNA
aaaatacacattacattctt

SEQ ID NO: 34722 - DNA, 20 bp, synthetic construct
  misc_feature 1..20: note = chemically synthesized
  source 1..20: mol_type = other DNA
ctttggagtttttcaaaaaa

SEQ ID NO: 34723 - DNA, 20 bp, synthetic construct
  misc_feature 1..20: note = chemically synthesized
  source 1..20: mol_type = other DNA
tccattatactgcacttcaa

SEQ ID NO: 34724 - DNA, 20 bp, synthetic construct
  misc_feature 1..20: note = chemically synthesized
  source 1..20: mol_type = other DNA
cagcaatttgaaagatgcct

SEQ ID NO: 34725 - DNA, 20 bp, synthetic construct
  misc_feature 1..20: note = chemically synthesized
  source 1..20: mol_type = other DNA
atccaagccttaatctccac

SEQ ID NO: 34726 - DNA, 20 bp, synthetic construct
  misc_feature 1..20: note = chemically synthesized
  source 1..20: mol_type = other DNA
caggtgagccccattcagca

SEQ ID NO: 34727 - DNA, 20 bp, synthetic construct
  misc_feature 1..20: note = chemically synthesized
  source 1..20: mol_type = other DNA
aagggtcagaacccaggtgt

SEQ ID NO: 34728 - DNA, 20 bp, synthetic construct
  misc_feature 1..20: note = chemically synthesized
  source 1..20: mol_type = other DNA
tctctgttaacactaaaagt

SEQ ID NO: 34729 - DNA, 20 bp, synthetic construct
  misc_feature 1..20: note = chemically synthesized
  source 1..20: mol_type = other DNA
accagtcttggtaatttctc

SEQ ID NO: 34730 - DNA, 20 bp, synthetic construct
  misc_feature 1..20: note = chemically synthesized
  source 1..20: mol_type = other DNA
atgttatcttcttccttcat

SEQ ID NO: 34731 - DNA, 20 bp, synthetic construct
  misc_feature 1..20: note = chemically synthesized
  source 1..20: mol_type = other DNA
attcgtgtttggtaatcaaa

SEQ ID NO: 34732 - DNA, 20 bp, synthetic construct
  misc_feature 1..20: note = chemically synthesized
  source 1..20: mol_type = other DNA
gcagggctgggaaaaaagaa

SEQ ID NO: 34733 - DNA, 20 bp, synthetic construct
  misc_feature 1..20: note = chemically synthesized
  source 1..20: mol_type = other DNA
gtggtttttttctaaccaca

SEQ ID NO: 34734 - DNA, 20 bp, synthetic construct
  misc_feature 1..20: note = chemically synthesized
  source 1..20: mol_type = other DNA
acagtaggttttttctataa

SEQ ID NO: 34735 - DNA, 20 bp, synthetic construct
  misc_feature 1..20: note = chemically synthesized
  source 1..20: mol_type = other DNA
ctttctagatataaaacagg

SEQ ID NO: 34736 - DNA, 20 bp, synthetic construct
  misc_feature 1..20: note = chemically synthesized
  source 1..20: mol_type = other DNA
caccctgaacttctgcaaaa

SEQ ID NO: 34737 - DNA, 20 bp, synthetic construct
  misc_feature 1..20: note = chemically synthesized
  source 1..20: mol_type = other DNA
atttgatcaaattcagaaac

SEQ ID NO: 34738 - DNA, 20 bp, synthetic construct
  misc_feature 1..20: note = chemically synthesized
  source 1..20: mol_type = other DNA
tattttgctctttcttcccc

SEQ ID NO: 34739 - DNA, 20 bp, synthetic construct
  misc_feature 1..20: note = chemically synthesized
  source 1..20: mol_type = other DNA
tcttccccaaaagattttta

SEQ ID NO: 34740 - DNA, 20 bp, synthetic construct
  misc_feature 1..20: note = chemically synthesized
  source 1..20: mol_type = other DNA
ttaaatagttttcatcttta

SEQ ID NO: 34741 - DNA, 20 bp, synthetic construct
  misc_feature 1..20: note = chemically synthesized
  source 1..20: mol_type = other DNA
atctttaaaaggatttcaac

SEQ ID NO: 34742 - DNA, 20 bp, synthetic construct
  misc_feature 1..20: note = chemically synthesized
  source 1..20: mol_type = other DNA
aataagacaaacaaagcagc

SEQ ID NO: 34743 - DNA, 20 bp, synthetic construct
  misc_feature 1..20: note = chemically synthesized
  source 1..20: mol_type = other DNA
gggaagtgtacattaattac

SEQ ID NO: 34744 - DNA, 20 bp, synthetic construct
  misc_feature 1..20: note = chemically synthesized
  source 1..20: mol_type = other DNA
ttgcatcagggacaaatgag

SEQ ID NO: 34745 - DNA, 20 bp, synthetic construct
  misc_feature 1..20: note = chemically synthesized
  source 1..20: mol_type = other DNA
tgattttaatctgcagcgca

SEQ ID NO: 34746 - DNA, 20 bp, synthetic construct
  misc_feature 1..20: note = chemically synthesized
  source 1..20: mol_type = other DNA
gcccaaagatagtgtaattt

SEQ ID NO: 34747 - DNA, 20 bp, synthetic construct
  misc_feature 1..20: note = chemically synthesized
  source 1..20: mol_type = other DNA
tgatggtttataggcctcct

SEQ ID NO: 34748 - DNA, 20 bp, synthetic construct
  misc_feature 1..20: note = chemically synthesized
  source 1..20: mol_type = other DNA
taaagaagaagatgcaatga

SEQ ID NO: 34749 - DNA, 20 bp, synthetic construct
  misc_feature 1..20: note = chemically synthesized
  source 1..20: mol_type = other DNA
aaagggctgacctataatgc

SEQ ID NO: 34750 - DNA, 20 bp, synthetic construct
  misc_feature 1..20: note = chemically synthesized
  source 1..20: mol_type = other DNA
aaattatcactagtcaacag

SEQ ID NO: 34751 - DNA, 20 bp, synthetic construct
  misc_feature 1..20: note = chemically synthesized
  source 1..20: mol_type = other DNA
ccctctgaggtctccccggt

SEQ ID NO: 34752 - DNA, 20 bp, synthetic construct
  misc_feature 1..20: note = chemically synthesized
  source 1..20: mol_type = other DNA
tctcaccattcgatatttat

SEQ ID NO: 34753 - DNA, 20 bp, synthetic construct
  misc_feature 1..20: note = chemically synthesized
  source 1..20: mol_type = other DNA
tgcctcttgggacatcaaat

SEQ ID NO: 34754 - DNA, 20 bp, synthetic construct
  misc_feature 1..20: note = chemically synthesized
  source 1..20: mol_type = other DNA
aggccatcatcagagatgtg

SEQ ID NO: 34755 - DNA, 20 bp, synthetic construct
  misc_feature 1..20: note = chemically synthesized
  source 1..20: mol_type = other DNA
cagagatgtggcctgatttt

SEQ ID NO: 34756 - DNA, 20 bp, synthetic construct
  misc_feature 1..20: note = chemically synthesized
  source 1..20: mol_type = other DNA
catgatacgccttttatcat

SEQ ID NO: 34757 - DNA, 20 bp, synthetic construct
  misc_feature 1..20: note = chemically synthesized
  source 1..20: mol_type = other DNA
gagacccagcaaataaaact

SEQ ID NO: 34758 - DNA, 20 bp, synthetic construct
  misc_feature 1..20: note = chemically synthesized
  source 1..20: mol_type = other DNA
caagagaaggggtgaggggg

SEQ ID NO: 34759 - DNA, 20 bp, synthetic construct
  misc_feature 1..20: note = chemically synthesized
  source 1..20: mol_type = other DNA
gacagagtgcgaagtaaaag

SEQ ID NO: 34760 - DNA, 20 bp, synthetic construct
  misc_feature 1..20: note = chemically synthesized
  source 1..20: mol_type = other DNA
gctttggagctcttgaccca

SEQ ID NO: 34761 - DNA, 20 bp, synthetic construct
  misc_feature 1..20: note = chemically synthesized
  source 1..20: mol_type = other DNA
acggggcctccgcatgaagt

SEQ ID NO: 34762 - DNA, 20 bp, synthetic construct
  misc_feature 1..20: note = chemically synthesized
  source 1..20: mol_type = other DNA
gtaggcgcttctcaactacc

SEQ ID NO: 34763 - DNA, 20 bp, synthetic construct
  misc_feature 1..20: note = chemically synthesized
  source 1..20: mol_type = other DNA
aatacaggaaaacagtaaca

SEQ ID NO: 34764 - DNA, 20 bp, synthetic construct
  misc_feature 1..20: note = chemically synthesized
  source 1..20: mol_type = other DNA
catctgcaacgaacctcagg

SEQ ID NO: 34765 - DNA, 20 bp, synthetic construct
  misc_feature 1..20: note = chemically synthesized
  source 1..20: mol_type = other DNA
gatcatatggagctgttgac

SEQ ID NO: 34766 - DNA, 20 bp, synthetic construct
  misc_feature 1..20: note = chemically synthesized
  source 1..20: mol_type = other DNA
gtttccattcaaaacttccc

SEQ ID NO: 34767 - DNA, 20 bp, synthetic construct
  misc_feature 1..20: note = chemically synthesized
  source 1..20: mol_type = other DNA
agaaatgaaaacctcctcga

SEQ ID NO: 34768 - DNA, 20 bp, synthetic construct
  misc_feature 1..20: note = chemically synthesized
  source 1..20: mol_type = other DNA
gtctctccctccctgtataa

SEQ ID NO: 34769 - DNA, 20 bp, synthetic construct
  misc_feature 1..20: note = chemically synthesized
  source 1..20: mol_type = other DNA
cctcaccacttcttaaaagt

SEQ ID NO: 34770 - DNA, 20 bp, synthetic construct
  misc_feature 1..20: note = chemically synthesized
  source 1..20: mol_type = other DNA
ccacttcttaaaagtccgag

SEQ ID NO: 34771 - DNA, 20 bp, synthetic construct
  misc_feature 1..20: note = chemically synthesized
  source 1..20: mol_type = other DNA
caaacagtaaaacctcctcc

SEQ ID NO: 34772 - DNA, 20 bp, synthetic construct
  misc_feature 1..20: note = chemically synthesized
  source 1..20: mol_type = other DNA
ctctgtttctcaggaccctc

SEQ ID NO: 34773 - DNA, 20 bp, synthetic construct
  misc_feature 1..20: note = chemically synthesized
  source 1..20: mol_type = other DNA
gggaaatgactacttgcaaa

SEQ ID NO: 34774 - DNA, 20 bp, synthetic construct
  misc_feature 1..20: note = chemically synthesized
  source 1..20: mol_type = other DNA
ggaacattcttctctttccc

SEQ ID NO: 34775 - DNA, 20 bp, synthetic construct
  misc_feature 1..20: note = chemically synthesized
  source 1..20: mol_type = other DNA
gagggacaactgtccagcac

SEQ ID NO: 34776 - DNA, 20 bp, synthetic construct
  misc_feature 1..20: note = chemically synthesized
  source 1..20: mol_type = other DNA
gagggtggcggccgcaggcc

SEQ ID NO: 34777 - DNA, 20 bp, synthetic construct
  misc_feature 1..20: note = chemically synthesized
  source 1..20: mol_type = other DNA
ctaccaaatgaggctaatgg

SEQ ID NO: 34778 - DNA, 20 bp, synthetic construct
  misc_feature 1..20: note = chemically synthesized
  source 1..20: mol_type = other DNA
gcccccggagcgagtaatgt

SEQ ID NO: 34779 - DNA, 20 bp, synthetic construct
  misc_feature 1..20: note = chemically synthesized
  source 1..20: mol_type = other DNA
ctccatttcacagagaggtg

SEQ ID NO: 34780 - DNA, 20 bp, synthetic construct
  misc_feature 1..20: note = chemically synthesized
  source 1..20: mol_type = other DNA
gagtcataaccgtaatagta

SEQ ID NO: 34781 - DNA, 20 bp, synthetic construct
  misc_feature 1..20: note = chemically synthesized
  source 1..20: mol_type = other DNA
aatagtaatgagcttttgtg

SEQ ID NO: 34782 - DNA, 20 bp, synthetic construct
  misc_feature 1..20: note = chemically synthesized
  source 1..20: mol_type = other DNA
aaggccctatgaggcaagcc

SEQ ID NO: 34783 - DNA, 20 bp, synthetic construct
  misc_feature 1..20: note = chemically synthesized
  source 1..20: mol_type = other DNA
ccccgtgattctccccactt

SEQ ID NO: 34784 - DNA, 20 bp, synthetic construct
  misc_feature 1..20: note = chemically synthesized
  source 1..20: mol_type = other DNA
actttacagattgaggaagc

SEQ ID NO: 34785 - DNA, 20 bp, synthetic construct
  misc_feature 1..20: note = chemically synthesized
  source 1..20: mol_type = other DNA
tgggagagaagactgcctct

SEQ ID NO: 34786 - DNA, 20 bp, synthetic construct
  misc_feature 1..20: note = chemically synthesized
  source 1..20: mol_type = other DNA
cccagaggcccccaaatttt

SEQ ID NO: 34787 - DNA, 20 bp, synthetic construct
  misc_feature 1..20: note = chemically synthesized
  source 1..20: mol_type = other DNA
ggcctagccaggggaagtaa

SEQ ID NO: 34788 - DNA, 20 bp, synthetic construct
  misc_feature 1..20: note = chemically synthesized
  source 1..20: mol_type = other DNA
aaagccctggtgtcccctag

SEQ ID NO: 34789 - DNA, 20 bp, synthetic construct
  misc_feature 1..20: note = chemically synthesized
  source 1..20: mol_type = other DNA
cctaggtgggattctatgaa

SEQ ID NO: 34790 - DNA, 20 bp, synthetic construct
  misc_feature 1..20: note = chemically synthesized
  source 1..20: mol_type = other DNA
gaagttattgggatgatgac

SEQ ID NO: 34791 - DNA, 20 bp, synthetic construct
  misc_feature 1..20: note = chemically synthesized
  source 1..20: mol_type = other DNA
aacaaaacaagcccaaacac

SEQ ID NO: 34792 - DNA, 20 bp, synthetic construct
  misc_feature 1..20: note = chemically synthesized
  source 1..20: mol_type = other DNA
tattatcgttctcagccacc

SEQ ID NO: 34793 - DNA, 20 bp, synthetic construct
  misc_feature 1..20: note = chemically synthesized
  source 1..20: mol_type = other DNA
atttaaaaaaaaaaaaaaaa

SEQ ID NO: 34794 - DNA, 20 bp, synthetic construct
  misc_feature 1..20: note = chemically synthesized
  source 1..20: mol_type = other DNA
aaaaaaaaaaaaagagtttc

SEQ ID NO: 34795 - DNA, 20 bp, synthetic construct
  misc_feature 1..20: note = chemically synthesized
  source 1..20: mol_type = other DNA
aaggaaaaaaaaaacactga

SEQ ID NO: 34796 - DNA, 20 bp, synthetic construct
  misc_feature 1..20: note = chemically synthesized
  source 1..20: mol_type = other DNA
tcgagctcctaaaaactaga

SEQ ID NO: 34797 - DNA, 20 bp, synthetic construct
  misc_feature 1..20: note = chemically synthesized
  source 1..20: mol_type = other DNA
aaactagacatcgattatgt

SEQ ID NO: 34798 - DNA, 20 bp, synthetic construct
  misc_feature 1..20: note = chemically synthesized
  source 1..20: mol_type = other DNA
ctttctattcaagataaaca

SEQ ID NO: 34799 - DNA, 20 bp, synthetic construct
  misc_feature 1..20: note = chemically synthesized
  source 1..20: mol_type = other DNA
ggagcagatggacttgacca

SEQ ID NO: 34800 - DNA, 20 bp, synthetic construct
  misc_feature 1..20: note = chemically synthesized
  source 1..20: mol_type = other DNA
cctggctaccctactccggt

SEQ ID NO: 34801 - DNA, 20 bp, synthetic construct
  misc_feature 1..20: note = chemically synthesized
  source 1..20: mol_type = other DNA
gttctgcaagaatattttaa

SEQ ID NO: 34802 - DNA, 20 bp, synthetic construct
  misc_feature 1..20: note = chemically synthesized
  source 1..20: mol_type = other DNA
gcaagaatattttaagtgag

SEQ ID NO: 34803 - DNA, 20 bp, synthetic construct
  misc_feature 1..20: note = chemically synthesized
  source 1..20: mol_type = other DNA
aataatattaatgaaacaaa

SEQ ID NO: 34804 - DNA, 20 bp, synthetic construct
  misc_feature 1..20: note = chemically synthesized
  source 1..20: mol_type = other DNA
atagattcataagccttggc

SEQ ID NO: 34805 - DNA, 20 bp, synthetic construct
  misc_feature 1..20: note = chemically synthesized
  source 1..20: mol_type = other DNA
cactaccattaaactcaaga

SEQ ID NO: 34806 - DNA, 20 bp, synthetic construct
  misc_feature 1..20: note = chemically synthesized
  source 1..20: mol_type = other DNA
tggtcgggaagttacccaca

SEQ ID NO: 34807 - DNA, 20 bp, synthetic construct
  misc_feature 1..20: note = chemically synthesized
  source 1..20: mol_type = other DNA
tatctcactggtggtctatt

SEQ ID NO: 34808 - DNA, 20 bp, synthetic construct
  misc_feature 1..20: note = chemically synthesized
  source 1..20: mol_type = other DNA
ctggtggtctattaatagtt

SEQ ID NO: 34809 - DNA, 20 bp, synthetic construct
  misc_feature 1..20: note = chemically synthesized
  source 1..20: mol_type = other DNA
tttgagcgtcagaaggtggt

SEQ ID NO: 34810 - DNA, 20 bp, synthetic construct
  misc_feature 1..20: note = chemically synthesized
  source 1..20: mol_type = other DNA
tcagaaggtggttgttgctt

SEQ ID NO: 34811 - DNA, 20 bp, synthetic construct
  misc_feature 1..20: note = chemically synthesized
  source 1..20: mol_type = other DNA
tggttgttgctttttggttt

SEQ ID NO: 34812 - DNA, 20 bp, synthetic construct
  misc_feature 1..20: note = chemically synthesized
  source 1..20: mol_type = other DNA
tttaaaactattctgtcatt

SEQ ID NO: 34813 - DNA, 20 bp, synthetic construct
  misc_feature 1..20: note = chemically synthesized
  source 1..20: mol_type = other DNA
tgtcatttccagttttttaa

SEQ ID NO: 34814 - DNA, 20 bp, synthetic construct
  misc_feature 1..20: note = chemically synthesized
  source 1..20: mol_type = other DNA
tttccagttttttaaaaagg

SEQ ID NO: 34815 - DNA, 20 bp, synthetic construct
  misc_feature 1..20: note = chemically synthesized
  source 1..20: mol_type = other DNA
agttttttaaaaaggttttg

SEQ ID NO: 34816 - DNA, 20 bp, synthetic construct
  misc_feature 1..20: note = chemically synthesized
  source 1..20: mol_type = other DNA
tttaaaaaggttttgttttg

SEQ ID NO: 34817 - DNA, 20 bp, synthetic construct
  misc_feature 1..20: note = chemically synthesized
  source 1..20: mol_type = other DNA
aaaggttttgttttgttttg

SEQ ID NO: 34818 - DNA, 20 bp, synthetic construct
  misc_feature 1..20: note = chemically synthesized
  source 1..20: mol_type = other DNA
ttgttttgttttgctttgtt

SEQ ID NO: 34819 - DNA, 20 bp, synthetic construct
  misc_feature 1..20: note = chemically synthesized
  source 1..20: mol_type = other DNA
ttttgctttgttttttgttt

SEQ ID NO: 34820 - DNA, 20 bp, synthetic construct
  misc_feature 1..20: note = chemically synthesized
  source 1..20: mol_type = other DNA
ttttttggtggtggtggcgt

SEQ ID NO: 34821 - DNA, 20 bp, synthetic construct
  misc_feature 1..20: note = chemically synthesized
  source 1..20: mol_type = other DNA
cgttaatgtttcttcagaaa

SEQ ID NO: 34822 - DNA, 20 bp, synthetic construct
  misc_feature 1..20: note = chemically synthesized
  source 1..20: mol_type = other DNA
cttctgggccactctgggta

SEQ ID NO: 34823 - DNA, 20 bp, synthetic construct
  misc_feature 1..20: note = chemically synthesized
  source 1..20: mol_type = other DNA
ggccactctgggtattatga

SEQ ID NO: 34824 - DNA, 20 bp, synthetic construct
  misc_feature 1..20: note = chemically synthesized
  source 1..20: mol_type = other DNA
cttacaatagttactctctg

SEQ ID NO: 34825 - DNA, 20 bp, synthetic construct
  misc_feature 1..20: note = chemically synthesized
  source 1..20: mol_type = other DNA
tagttactctctgcctggtt

SEQ ID NO: 34826 - DNA, 20 bp, synthetic construct
  misc_feature 1..20: note = chemically synthesized
  source 1..20: mol_type = other DNA
gaaaattccttggcataagg

SEQ ID NO: 34827 - DNA, 20 bp, synthetic construct
  misc_feature 1..20: note = chemically synthesized
  source 1..20: mol_type = other DNA
tattatgactttacttgaaa

SEQ ID NO: 34828 - DNA, 20 bp, synthetic construct
  misc_feature 1..20: note = chemically synthesized
  source 1..20: mol_type = other DNA
aaaacagtttgccacagtga

SEQ ID NO: 34829 - DNA, 20 bp, synthetic construct
  misc_feature 1..20: note = chemically synthesized
  source 1..20: mol_type = other DNA
acagtgagatggattcactt

SEQ ID NO: 34830 - DNA, 20 bp, synthetic construct
  misc_feature 1..20: note = chemically synthesized
  source 1..20: mol_type = other DNA
aacagtacaatttttttaaa

SEQ ID NO: 34831 - DNA, 20 bp, synthetic construct
  misc_feature 1..20: note = chemically synthesized
  source 1..20: mol_type = other DNA
aaggtagatttaaagcatta

SEQ ID NO: 34832 - DNA, 20 bp, synthetic construct
  misc_feature 1..20: note = chemically synthesized
  source 1..20: mol_type = other DNA
agatttaaagcattaactgg

SEQ ID NO: 34833 - DNA, 20 bp, synthetic construct
  misc_feature 1..20: note = chemically synthesized
  source 1..20: mol_type = other DNA
ttaactggtttggattaaaa

SEQ ID NO: 34834 - DNA, 20 bp, synthetic construct
  misc_feature 1..20: note = chemically synthesized
  source 1..20: mol_type = other DNA
caaaagacttatgcaaagcc

SEQ ID NO: 34835 - DNA, 20 bp, synthetic construct
  misc_feature 1..20: note = chemically synthesized
  source 1..20: mol_type = other DNA
acatgattttgaaggagcta

SEQ ID NO: 34836 - DNA, 20 bp, synthetic construct
  misc_feature 1..20: note = chemically synthesized
  source 1..20: mol_type = other DNA
atttgtgtacttgacattta

SEQ ID NO: 34837 - DNA, 20 bp, synthetic construct
  misc_feature 1..20: note = chemically synthesized
  source 1..20: mol_type = other DNA
taacaatctaccctgggtac

SEQ ID NO: 34838 - DNA, 20 bp, synthetic construct
  misc_feature 1..20: note = chemically synthesized
  source 1..20: mol_type = other DNA
aatttgtactccatataagc

SEQ ID NO: 34839 - DNA, 20 bp, synthetic construct
  misc_feature 1..20: note = chemically synthesized
  source 1..20: mol_type = other DNA
cagtcacttttgacttacca

SEQ ID NO: 34840 - DNA, 20 bp, synthetic construct
  misc_feature 1..20: note = chemically synthesized
  source 1..20: mol_type = other DNA
aaagcacagctcctccatgc

SEQ ID NO: 34841 - DNA, 20 bp, synthetic construct
  misc_feature 1..20: note = chemically synthesized
  source 1..20: mol_type = other DNA
tctaatactgtaatctttct

SEQ ID NO: 34842 - DNA, 20 bp, synthetic construct
  misc_feature 1..20: note = chemically synthesized
  source 1..20: mol_type = other DNA
tgctgcttctagggctgtgt

SEQ ID NO: 34843 - DNA, 20 bp, synthetic construct
  misc_feature 1..20: note = chemically synthesized
  source 1..20: mol_type = other DNA
ctcctggatagactgaataa

SEQ ID NO: 34844 - DNA, 20 bp, synthetic construct
  misc_feature 1..20: note = chemically synthesized
  source 1..20: mol_type = other DNA
aataaggcttgtgatgacta

SEQ ID NO: 34845 - DNA, 20 bp, synthetic construct
  misc_feature 1..20: note = chemically synthesized
  source 1..20: mol_type = other DNA
ttgttaggatccctttcttg

SEQ ID NO: 34846 - DNA, 20 bp, synthetic construct
  misc_feature 1..20: note = chemically synthesized
  source 1..20: mol_type = other DNA
ggtgatgcaagatagaagga

SEQ ID NO: 34847 - DNA, 20 bp, synthetic construct
  misc_feature 1..20: note = chemically synthesized
  source 1..20: mol_type = other DNA
agaaggagagagatttatac

SEQ ID NO: 34848 - DNA, 20 bp, synthetic construct
  misc_feature 1..20: note = chemically synthesized
  source 1..20: mol_type = other DNA
aagcagcatgcataagttag

SEQ ID NO: 34849 - DNA, 20 bp, synthetic construct
  misc_feature 1..20: note = chemically synthesized
  source 1..20: mol_type = other DNA
agcatgcataagttagtgtt

SEQ ID NO: 34850 - DNA, 20 bp, synthetic construct
  misc_feature 1..20: note = chemically synthesized
  source 1..20: mol_type = other DNA
gcataagttagtgttgcttg

SEQ ID NO: 34851 - DNA, 20 bp, synthetic construct
  misc_feature 1..20: note = chemically synthesized
  source 1..20: mol_type = other DNA
actcagccccacataaagta

SEQ ID NO: 34852 - DNA, 20 bp, synthetic construct
  misc_feature 1..20: note = chemically synthesized
  source 1..20: mol_type = other DNA
tttcaaatagcaaattatcc

SEQ ID NO: 34853 - DNA, 20 bp, synthetic construct
  misc_feature 1..20: note = chemically synthesized
  source 1..20: mol_type = other DNA
taatttatttgtgttctgga

SEQ ID NO: 34854 - DNA, 20 bp, synthetic construct
  misc_feature 1..20: note = chemically synthesized
  source 1..20: mol_type = other DNA
attaacaactttaaactgaa

SEQ ID NO: 34855 - DNA, 20 bp, synthetic construct
  misc_feature 1..20: note = chemically synthesized
  source 1..20: mol_type = other DNA
ctcggaggttaaaattatag

SEQ ID NO: 34856 - DNA, 20 bp, synthetic construct
  misc_feature 1..20: note = chemically synthesized
  source 1..20: mol_type = other DNA
tttattttctttcattaaac

SEQ ID NO: 34857 - DNA, 20 bp, synthetic construct
  misc_feature 1..20: note = chemically synthesized
  source 1..20: mol_type = other DNA
tcagaatatcagttacactg

SEQ ID NO: 34858 - DNA, 20 bp, synthetic construct
  misc_feature 1..20: note = chemically synthesized
  source 1..20: mol_type = other DNA
tatcagttacactgttctga

SEQ ID NO: 34859 - DNA, 20 bp, synthetic construct
  misc_feature 1..20: note = chemically synthesized
  source 1..20: mol_type = other DNA
tcggaaaccgttagttagca

SEQ ID NO: 34860 - DNA, 20 bp, synthetic construct
  misc_feature 1..20: note = chemically synthesized
  source 1..20: mol_type = other DNA
gaaacctaaagcattgttag

SEQ ID NO: 34861 - DNA, 20 bp, synthetic construct
  misc_feature 1..20: note = chemically synthesized
  source 1..20: mol_type = other DNA
tcttaatacactataatagc

SEQ ID NO: 34862 - DNA, 20 bp, synthetic construct
  misc_feature 1..20: note = chemically synthesized
  source 1..20: mol_type = other DNA
acagtcttctccccaaatga

SEQ ID NO: 34863 - DNA, 20 bp, synthetic construct
  misc_feature 1..20: note = chemically synthesized
  source 1..20: mol_type = other DNA
aatacacaaaacatgatcaa

SEQ ID NO: 34864 - DNA, 20 bp, synthetic construct
  misc_feature 1..20: note = chemically synthesized
  source 1..20: mol_type = other DNA
catgatcaaaagtgattaac

SEQ ID NO: 34865 - DNA, 20 bp, synthetic construct
  misc_feature 1..20: note = chemically synthesized
  source 1..20: mol_type = other DNA
ttaatcttgagaagaaaaaa

SEQ ID NO: 34866 - DNA, 20 bp, synthetic construct
  misc_feature 1..20: note = chemically synthesized
  source 1..20: mol_type = other DNA
ttttttacatcatcaatttt

SEQ ID NO: 34867 - DNA, 20 bp, synthetic construct
  misc_feature 1..20: note = chemically synthesized
  source 1..20: mol_type = other DNA
tcataaagcaatttagcctt

SEQ ID NO: 34868 - DNA, 20 bp, synthetic construct
  misc_feature 1..20: note = chemically synthesized
  source 1..20: mol_type = other DNA
ttagcctttgaagattaaag

SEQ ID NO: 34869 - DNA, 20 bp, synthetic construct
  misc_feature 1..20: note = chemically synthesized
  source 1..20: mol_type = other DNA
aagaagtgcttaaaattcaa

SEQ ID NO: 34870 - DNA, 20 bp, synthetic construct
  misc_feature 1..20: note = chemically synthesized
  source 1..20: mol_type = other DNA
tgagctttagcaaattatca

SEQ ID NO: 34871 - DNA, 20 bp, synthetic construct
  misc_feature 1..20: note = chemically synthesized
  source 1..20: mol_type = other DNA
taagattcatccaaaaagca

SEQ ID NO: 34872 - DNA, 20 bp, synthetic construct
  misc_feature 1..20: note = chemically synthesized
  source 1..20: mol_type = other DNA
aaagcaaagggtttttcttc

SEQ ID NO: 34873 - DNA, 20 bp, synthetic construct
  misc_feature 1..20: note = chemically synthesized
  source 1..20: mol_type = other DNA
aaattgtaatatcttccaga

SEQ ID NO: 34874 - DNA, 20 bp, synthetic construct
  misc_feature 1..20: note = chemically synthesized
  source 1..20: mol_type = other DNA
gactgagcttaaactaaaca

SEQ ID NO: 34875 - DNA, 20 bp, synthetic construct
  misc_feature 1..20: note = chemically synthesized
  source 1..20: mol_type = other DNA
actgcatagtcctccaacag

SEQ ID NO: 34876 - DNA, 20 bp, synthetic construct
  misc_feature 1..20: note = chemically synthesized
  source 1..20: mol_type = other DNA
aacatccactgtggtataaa

SEQ ID NO: 34877 - DNA, 20 bp, synthetic construct
  misc_feature 1..20: note = chemically synthesized
  source 1..20: mol_type = other DNA
ggtataaaaacagctttttc

SEQ ID NO: 34878 - DNA, 20 bp, synthetic construct
  misc_feature 1..20: note = chemically synthesized
  source 1..20: mol_type = other DNA
cttggagtggcattaatttt

SEQ ID NO: 34879 - DNA, 20 bp, synthetic construct
  misc_feature 1..20: note = chemically synthesized
  source 1..20: mol_type = other DNA
gtggcattaattttagaagt

SEQ ID NO: 34880 - DNA, 20 bp, synthetic construct
  misc_feature 1..20: note = chemically synthesized
  source 1..20: mol_type = other DNA
caggagggagaggagcaagg

SEQ ID NO: 34881 - DNA, 20 bp, synthetic construct
  misc_feature 1..20: note = chemically synthesized
  source 1..20: mol_type = other DNA
cttctgaggagtgcaaatcc

SEQ ID NO: 34882 - DNA, 20 bp, synthetic construct
  misc_feature 1..20: note = chemically synthesized
  source 1..20: mol_type = other DNA
aggagtgcaaatcctgttgc

SEQ ID NO: 34883 - DNA, 20 bp, synthetic construct
  misc_feature 1..20: note = chemically synthesized
  source 1..20: mol_type = other DNA
ctgttgcttgagatttgcct

SEQ ID NO: 34884 - DNA, 20 bp, synthetic construct
  misc_feature 1..20: note = chemically synthesized
  source 1..20: mol_type = other DNA
attagagagtatcgtgggaa

SEQ ID NO: 34885 - DNA, 20 bp, synthetic construct
  misc_feature 1..20: note = chemically synthesized
  source 1..20: mol_type = other DNA
tatcgtgggaacctggattt

SEQ ID NO: 34886 - DNA, 20 bp, synthetic construct
  misc_feature 1..20: note = chemically synthesized
  source 1..20: mol_type = other DNA
tactagtctggagaagaatc

SEQ ID NO: 34887 - DNA, 20 bp, synthetic construct
  misc_feature 1..20: note = chemically synthesized
  source 1..20: mol_type = other DNA
gtgcaagtcagactgagaat

SEQ ID NO: 34888 - DNA, 20 bp, synthetic construct
  misc_feature 1..20: note = chemically synthesized
  source 1..20: mol_type = other DNA
agcttcgaaaggccacgtgt

SEQ ID NO: 34889 - DNA, 20 bp, synthetic construct
  misc_feature 1..20: note = chemically synthesized
  source 1..20: mol_type = other DNA
gacccaaaagctctctgctg

SEQ ID NO: 34890 - DNA, 20 bp, synthetic construct
  misc_feature 1..20: note = chemically synthesized
  source 1..20: mol_type = other DNA
gaaaaatctcaggtactacc

SEQ ID NO: 34891 - DNA, 20 bp, synthetic construct
  misc_feature 1..20: note = chemically synthesized
  source 1..20: mol_type = other DNA
aggtccacagtcctgaccaa

SEQ ID NO: 34892 - DNA, 20 bp, synthetic construct
  misc_feature 1..20: note = chemically synthesized
  source 1..20: mol_type = other DNA
atgtgacagggcaaatcaga

SEQ ID NO: 34893 - DNA, 20 bp, synthetic construct
  misc_feature 1..20: note = chemically synthesized
  source 1..20: mol_type = other DNA
atcagaattagattaaaaac

SEQ ID NO: 34894 - DNA, 20 bp, synthetic construct
  misc_feature 1..20: note = chemically synthesized
  source 1..20: mol_type = other DNA
aatttcccctaactgccttc

SEQ ID NO: 34895 - DNA, 20 bp, synthetic construct
  misc_feature 1..20: note = chemically synthesized
  source 1..20: mol_type = other DNA
tcaagtgattttccctatta

SEQ ID NO: 34896 - DNA, 20 bp, synthetic construct
  misc_feature 1..20: note = chemically synthesized
  source 1..20: mol_type = other DNA
gcaatccacttgtatgtaga

SEQ ID NO: 34897 - DNA, 20 bp, synthetic construct
  misc_feature 1..20: note = chemically synthesized
  source 1..20: mol_type = other DNA
catagtctttgaagctgctc

SEQ ID NO: 34898 - DNA, 20 bp, synthetic construct
  misc_feature 1..20: note = chemically synthesized
  source 1..20: mol_type = other DNA
gttttagttaaaaggacagc

SEQ ID NO: 34899 - DNA, 20 bp, synthetic construct
  misc_feature 1..20: note = chemically synthesized
  source 1..20: mol_type = other DNA
atcagaattaaatttttcct

SEQ ID NO: 34900 - DNA, 20 bp, synthetic construct
  misc_feature 1..20: note = chemically synthesized
  source 1..20: mol_type = other DNA
aaaaacataacatgagaagg

SEQ ID NO: 34901 - DNA, 20 bp, synthetic construct
  misc_feature 1..20: note = chemically synthesized
  source 1..20: mol_type = other DNA
tcattcttcagtagccaatg

SEQ ID NO: 34902 - DNA, 20 bp, synthetic construct
  misc_feature 1..20: note = chemically synthesized
  source 1..20: mol_type = other DNA
ggtgtgatggagagaaactc

SEQ ID NO: 34903 - DNA, 20 bp, synthetic construct
  misc_feature 1..20: note = chemically synthesized
  source 1..20: mol_type = other DNA
tggagagaaactcacgagat

SEQ ID NO: 34904 - DNA, 20 bp, synthetic construct
  misc_feature 1..20: note = chemically synthesized
  source 1..20: mol_type = other DNA
agatttaacattggttaatg

SEQ ID NO: 34905 - DNA, 20 bp, synthetic construct
  misc_feature 1..20: note = chemically synthesized
  source 1..20: mol_type = other DNA
agttggtgaaggagaatact

SEQ ID NO: 34906 - DNA, 20 bp, synthetic construct
  misc_feature 1..20: note = chemically synthesized
  source 1..20: mol_type = other DNA
aatacttcaggtttggttct

SEQ ID NO: 34907 - DNA, 20 bp, synthetic construct
  misc_feature 1..20: note = chemically synthesized
  source 1..20: mol_type = other DNA
gtttggttctcttagttttt

SEQ ID NO: 34908 - DNA, 20 bp, synthetic construct
  misc_feature 1..20: note = chemically synthesized
  source 1..20: mol_type = other DNA
ggttctcttagttttttgag

SEQ ID NO: 34909 - DNA, 20 bp, synthetic construct
  misc_feature 1..20: note = chemically synthesized
  source 1..20: mol_type = other DNA
cttagttttttgaggtttgt

SEQ ID NO: 34910 - DNA, 20 bp, synthetic construct
  misc_feature 1..20: note = chemically synthesized
  source 1..20: mol_type = other DNA
tgtttttgtttgaggaggtg

SEQ ID NO: 34911 - DNA, 20 bp, synthetic construct
  misc_feature 1..20: note = chemically synthesized
  source 1..20: mol_type = other DNA
acaggaacagacttggcaca

SEQ ID NO: 34912 - DNA, 20 bp, synthetic construct
  misc_feature 1..20: note = chemically synthesized
  source 1..20: mol_type = other DNA
atttccctaaaaattaacag

SEQ ID NO: 34913 - DNA, 20 bp, synthetic construct
  misc_feature 1..20: note = chemically synthesized
  source 1..20: mol_type = other DNA
gaatataaatttaaatgccc

SEQ ID NO: 34914 - DNA, 20 bp, synthetic construct
  misc_feature 1..20: note = chemically synthesized
  source 1..20: mol_type = other DNA
aaatgccctgatgcttagca

SEQ ID NO: 34915 - DNA, 20 bp, synthetic construct
  misc_feature 1..20: note = chemically synthesized
  source 1..20: mol_type = other DNA
atgcttagcaaaaagcttcc

SEQ ID NO: 34916 - DNA, 20 bp, synthetic construct
  misc_feature 1..20: note = chemically synthesized
  source 1..20: mol_type = other DNA
cgaggtaggtatacaacagc

SEQ ID NO: 34917 - DNA, 20 bp, synthetic construct
  misc_feature 1..20: note = chemically synthesized
  source 1..20: mol_type = other DNA
ttctttttgaaggcaccctt

SEQ ID NO: 34918 - DNA, 20 bp, synthetic construct
  misc_feature 1..20: note = chemically synthesized
  source 1..20: mol_type = other DNA
attccattctttattttaat

SEQ ID NO: 34919 - DNA, 20 bp, synthetic construct
  misc_feature 1..20: note = chemically synthesized
  source 1..20: mol_type = other DNA
tttaatgggagtttttaatc

SEQ ID NO: 34920 - DNA, 20 bp, synthetic construct
  misc_feature 1..20: note = chemically synthesized
  source 1..20: mol_type = other DNA
actgggaattctctggcaga

SEQ ID NO: 34921 - DNA, 20 bp, synthetic construct
  misc_feature 1..20: note = chemically synthesized
  source 1..20: mol_type = other DNA
gccttctcgcctcttttaca

SEQ ID NO: 34922 - DNA, 20 bp, synthetic construct
  misc_feature 1..20: note = chemically synthesized
  source 1..20: mol_type = other DNA
acctttaggtatatataatt

SEQ ID NO: 34923 - DNA, 20 bp, synthetic construct
  misc_feature 1..20: note = chemically synthesized
  source 1..20: mol_type = other DNA
cttctaattcgccagttctt

SEQ ID NO: 34924 - DNA, 20 bp, synthetic construct
  misc_feature 1..20: note = chemically synthesized
  source 1..20: mol_type = other DNA
tcttagcagcttatttttcc

SEQ ID NO: 34925 - DNA, 20 bp, synthetic construct
  misc_feature 1..20: note = chemically synthesized
  source 1..20: mol_type = other DNA
gcagcttatttttccaagtg

SEQ ID NO: 34926 - DNA, 20 bp, synthetic construct
  misc_feature 1..20: note = chemically synthesized
  source 1..20: mol_type = other DNA
ggaaacgtgtatttttcttt

SEQ ID NO: 34927 - DNA, 20 bp, synthetic construct
  misc_feature 1..20: note = chemically synthesized
  source 1..20: mol_type = other DNA
acgttttgtggatctaccac

SEQ ID NO: 34928 - DNA, 20 bp, synthetic construct
  misc_feature 1..20: note = chemically synthesized
  source 1..20: mol_type = other DNA
ccacaactgcttctgacagc

SEQ ID NO: 34929 - DNA, 20 bp, synthetic construct
  misc_feature 1..20: note = chemically synthesized
  source 1..20: mol_type = other DNA
ttaatggaattccagttgaa

SEQ ID NO: 34930 - DNA, 20 bp, synthetic construct
  misc_feature 1..20: note = chemically synthesized
  source 1..20: mol_type = other DNA
cagaagtcctttagatcagt

SEQ ID NO: 34931 - DNA, 20 bp, synthetic construct
  misc_feature 1..20: note = chemically synthesized
  source 1..20: mol_type = other DNA
actccaagagaagaaaagga

SEQ ID NO: 34932 - DNA, 20 bp, synthetic construct
  misc_feature 1..20: note = chemically synthesized
  source 1..20: mol_type = other DNA
tgtctttcacactgggctat

SEQ ID NO: 34933 - DNA, 20 bp, synthetic construct
  misc_feature 1..20: note = chemically synthesized
  source 1..20: mol_type = other DNA
ttccccagactagctgcata

SEQ ID NO: 34934 - DNA, 20 bp, synthetic construct
  misc_feature 1..20: note = chemically synthesized
  source 1..20: mol_type = other DNA
tgcatattaagcttgctgtg

SEQ ID NO: 34935 - DNA, 20 bp, synthetic construct
  misc_feature 1..20: note = chemically synthesized
  source 1..20: mol_type = other DNA
aacagcaaaagcctttgctg

SEQ ID NO: 34936 - DNA, 20 bp, synthetic construct
  misc_feature 1..20: note = chemically synthesized
  source 1..20: mol_type = other DNA
tggaataagttacattttaa

SEQ ID NO: 34937 - DNA, 20 bp, synthetic construct
  misc_feature 1..20: note = chemically synthesized
  source 1..20: mol_type = other DNA
aactgattagaaatacagtc

SEQ ID NO: 34938 - DNA, 20 bp, synthetic construct
  misc_feature 1..20: note = chemically synthesized
  source 1..20: mol_type = other DNA
agaaatacagtctgatgttt

SEQ ID NO: 34939 - DNA, 20 bp, synthetic construct
  misc_feature 1..20: note = chemically synthesized
  source 1..20: mol_type = other DNA
tgatgtttactggcttcaaa

SEQ ID NO: 34940 - DNA, 20 bp, synthetic construct
  misc_feature 1..20: note = chemically synthesized
  source 1..20: mol_type = other DNA
ttgagtttggcatcaagtat

SEQ ID NO: 34941 - DNA, 20 bp, synthetic construct
  misc_feature 1..20: note = chemically synthesized
  source 1..20: mol_type = other DNA
caggttacatttcctggaaa

SEQ ID NO: 34942 - DNA, 20 bp, synthetic construct
  misc_feature 1..20: note = chemically synthesized
  source 1..20: mol_type = other DNA
ccctggtcgtaaaggggaga

SEQ ID NO: 34943 - DNA, 20 bp, synthetic construct
  misc_feature 1..20: note = chemically synthesized
  source 1..20: mol_type = other DNA
aattgatacataacataaaa

SEQ ID NO: 34944 - DNA, 20 bp, synthetic construct
  misc_feature 1..20: note = chemically synthesized
  source 1..20: mol_type = other DNA
gatacataacataaaaacct

SEQ ID NO: 34945 - DNA, 20 bp, synthetic construct
  misc_feature 1..20: note = chemically synthesized
  source 1..20: mol_type = other DNA
aacaagcagaaaggtactaa

SEQ ID NO: 34946 - DNA, 20 bp, synthetic construct
  misc_feature 1..20: note = chemically synthesized
  source 1..20: mol_type = other DNA
agaaaggtactaaagatgct

SEQ ID NO: 34947 - DNA, 20 bp, synthetic construct
  misc_feature 1..20: note = chemically synthesized
  source 1..20: mol_type = other DNA
tggcaaggtgccaggctggg

SEQ ID NO: 34948 - DNA, 20 bp, synthetic construct
  misc_feature 1..20: note = chemically synthesized
  source 1..20: mol_type = other DNA
gctgggtccagcttgatgct

SEQ ID NO: 34949 - DNA, 20 bp, synthetic construct
  misc_feature 1..20: note = chemically synthesized
  source 1..20: mol_type = other DNA
tactgtatgtaaaaacagac

SEQ ID NO: 34950 - DNA, 20 bp, synthetic construct
  misc_feature 1..20: note = chemically synthesized
  source 1..20: mol_type = other DNA
ggtgtgaacagaccaaccaa

SEQ ID NO: 34951 - DNA, 20 bp, synthetic construct
  misc_feature 1..20: note = chemically synthesized
  source 1..20: mol_type = other DNA
atcttggtgcatctccctag

SEQ ID NO: 34952 - DNA, 20 bp, synthetic construct
  misc_feature 1..20: note = chemically synthesized
  source 1..20: mol_type = other DNA
ccccccaaaggaaagccaaa

SEQ ID NO: 34953 - DNA, 20 bp, synthetic construct
  misc_feature 1..20: note = chemically synthesized
  source 1..20: mol_type = other DNA
agaaatcacaaaaatctaaa

SEQ ID NO: 34954 - DNA, 20 bp, synthetic construct
  misc_feature 1..20: note = chemically synthesized
  source 1..20: mol_type = other DNA
aaaatctaaaaaatgtttcc

SEQ ID NO: 34955 - DNA, 20 bp, synthetic construct
  misc_feature 1..20: note = chemically synthesized
  source 1..20: mol_type = other DNA
aaaatgtttccctaggattt

SEQ ID NO: 34956 - DNA, 20 bp, synthetic construct
  misc_feature 1..20: note = chemically synthesized
  source 1..20: mol_type = other DNA
tggaagctgcagtgtgaaat

SEQ ID NO: 34957 - DNA, 20 bp, synthetic construct
  misc_feature 1..20: note = chemically synthesized
  source 1..20: mol_type = other DNA
tgcctgtcctgaccctgcct

SEQ ID NO: 34958 - DNA, 20 bp, synthetic construct
  misc_feature 1..20: note = chemically synthesized
  source 1..20: mol_type = other DNA
ttgcaacacaacaaggaatg

SEQ ID NO: 34959 - DNA, 20 bp, synthetic construct
  misc_feature 1..20: note = chemically synthesized
  source 1..20: mol_type = other DNA
gtgatttaagaaattacagc

SEQ ID NO: 34960 - DNA, 20 bp, synthetic construct
  misc_feature 1..20: note = chemically synthesized
  source 1..20: mol_type = other DNA
tgtgtgtgtgtgtgtggtta

SEQ ID NO: 34961 - DNA, 20 bp, synthetic construct
  misc_feature 1..20: note = chemically synthesized
  source 1..20: mol_type = other DNA
tgtgtgtggttattttgttt

SEQ ID NO: 34962 - DNA, 20 bp, synthetic construct
  misc_feature 1..20: note = chemically synthesized
  source 1..20: mol_type = other DNA
tattttgtttttttgttttt

SEQ ID NO: 34963 - DNA, 20 bp, synthetic construct
  misc_feature 1..20: note = chemically synthesized
  source 1..20: mol_type = other DNA
ttcttgaagtgaatacatat

SEQ ID NO: 34964 - DNA, 20 bp, synthetic construct
  misc_feature 1..20: note = chemically synthesized
  source 1..20: mol_type = other DNA
accacaagggtaatgtctga

SEQ ID NO: 34965 - DNA, 20 bp, synthetic construct
  misc_feature 1..20: note = chemically synthesized
  source 1..20: mol_type = other DNA
agatatattttttttttcct

SEQ ID NO: 34966 - DNA, 20 bp, synthetic construct
  misc_feature 1..20: note = chemically synthesized
  source 1..20: mol_type = other DNA
tttccttttggctttcctta

SEQ ID NO: 34967 - DNA, 20 bp, synthetic construct
  misc_feature 1..20: note = chemically synthesized
  source 1..20: mol_type = other DNA
tttagcagccatgcgggcca

SEQ ID NO: 34968 - DNA, 20 bp, synthetic construct
  misc_feature 1..20: note = chemically synthesized
  source 1..20: mol_type = other DNA
atgcgggccactgtgtttaa

SEQ ID NO: 34969 - DNA, 20 bp, synthetic construct
  misc_feature 1..20: note = chemically synthesized
  source 1..20: mol_type = other DNA
tatttacaatttgtcttaga

SEQ ID NO: 34970 - DNA, 20 bp, synthetic construct
  misc_feature 1..20: note = chemically synthesized
  source 1..20: mol_type = other DNA
ttctctgtcttatttacaaa

SEQ ID NO: 34971 - DNA, 20 bp, synthetic construct
  misc_feature 1..20: note = chemically synthesized
  source 1..20: mol_type = other DNA
tacagcttgtatataggact

SEQ ID NO: 34972 - DNA, 20 bp, synthetic construct
  misc_feature 1..20: note = chemically synthesized
  source 1..20: mol_type = other DNA
gaaaacaatattctctactc

SEQ ID NO: 34973 - DNA, 20 bp, synthetic construct
  misc_feature 1..20: note = chemically synthesized
  source 1..20: mol_type = other DNA
aagtaaaatgttcaccagta

SEQ ID NO: 34974 - DNA, 20 bp, synthetic construct
  misc_feature 1..20: note = chemically synthesized
  source 1..20: mol_type = other DNA
tatattgttttttgtggtag

SEQ ID NO: 34975 - DNA, 20 bp, synthetic construct
  misc_feature 1..20: note = chemically synthesized
  source 1..20: mol_type = other DNA
tttttgtggtagtggtgttt

SEQ ID NO: 34976 - DNA, 20 bp, synthetic construct
  misc_feature 1..20: note = chemically synthesized
  source 1..20: mol_type = other DNA
gaaaattcacttcagaagtc

SEQ ID NO: 34977 - DNA, 20 bp, synthetic construct
  misc_feature 1..20: note = chemically synthesized
  source 1..20: mol_type = other DNA
aattctgaaaagcatattgt

SEQ ID NO: 34978 - DNA, 20 bp, synthetic construct
  misc_feature 1..20: note = chemically synthesized
  source 1..20: mol_type = other DNA
cctgatataaatgtctatgt

SEQ ID NO: 34979 - DNA, 20 bp, synthetic construct
  misc_feature 1..20: note = chemically synthesized
  source 1..20: mol_type = other DNA
atgacagcccaaacctaatt

SEQ ID NO: 34980 - DNA, 20 bp, synthetic construct
  misc_feature 1..20: note = chemically synthesized
  source 1..20: mol_type = other DNA
tcaaatctgacatgatggga

SEQ ID NO: 34981 - DNA, 20 bp, synthetic construct
  misc_feature 1..20: note = chemically synthesized
  source 1..20: mol_type = other DNA
ggtcttttctataagggaac

SEQ ID NO: 34982 - DNA, 20 bp, synthetic construct
  misc_feature 1..20: note = chemically synthesized
  source 1..20: mol_type = other DNA
taaataaaatgaaaaaagca

SEQ ID NO: 34983 - DNA, 20 bp, synthetic construct
  misc_feature 1..20: note = chemically synthesized
  source 1..20: mol_type = other DNA
aaagaatcctctaaaaaata

SEQ ID NO: 34984 - DNA, 20 bp, synthetic construct
  misc_feature 1..20: note = chemically synthesized
  source 1..20: mol_type = other DNA
ttgggaggctgaggcaggag

SEQ ID NO: 34985 - DNA, 20 bp, synthetic construct
  misc_feature 1..20: note = chemically synthesized
  source 1..20: mol_type = other DNA
aaaaaaaaaaaaaaaaaaaa

SEQ ID NO: 34986 - DNA, 20 bp, synthetic construct
  misc_feature 1..20: note = chemically synthesized
  source 1..20: mol_type = other DNA
gaaaatgcataccattttac

SEQ ID NO: 34987 - DNA, 20 bp, synthetic construct
  misc_feature 1..20: note = chemically synthesized
  source 1..20: mol_type = other DNA
ctatctgaaagtcccgaatt

SEQ ID NO: 34988 - DNA, 20 bp, synthetic construct
  misc_feature 1..20: note = chemically synthesized
  source 1..20: mol_type = other DNA
atcttaggaagaagatctgt

SEQ ID NO: 34989 - DNA, 20 bp, synthetic construct
  misc_feature 1..20: note = chemically synthesized
  source 1..20: mol_type = other DNA
aagatctgtcactgttttat

SEQ ID NO: 34990 - DNA, 20 bp, synthetic construct
  misc_feature 1..20: note = chemically synthesized
  source 1..20: mol_type = other DNA
aataaagcctttcctaccca

SEQ ID NO: 34991 - DNA, 20 bp, synthetic construct
  misc_feature 1..20: note = chemically synthesized
  source 1..20: mol_type = other DNA
ggttgccaaacacattcttc

SEQ ID NO: 34992 - DNA, 20 bp, synthetic construct
  misc_feature 1..20: note = chemically synthesized
  source 1..20: mol_type = other DNA
tctctttccttaatacaagg

SEQ ID NO: 34993 - DNA, 20 bp, synthetic construct
  misc_feature 1..20: note = chemically synthesized
  source 1..20: mol_type = other DNA
acacaattcaaatatctact

SEQ ID NO: 34994 - DNA, 20 bp, synthetic construct
  misc_feature 1..20: note = chemically synthesized
  source 1..20: mol_type = other DNA
atctactgaatgattactgt

SEQ ID NO: 34995 - DNA, 20 bp, synthetic construct
  misc_feature 1..20: note = chemically synthesized
  source 1..20: mol_type = other DNA
gcagacttggaattgtgcag

SEQ ID NO: 34996 - DNA, 20 bp, synthetic construct
  misc_feature 1..20: note = chemically synthesized
  source 1..20: mol_type = other DNA
cacacagccgtcttccagaa

SEQ ID NO: 34997 - DNA, 20 bp, synthetic construct
  misc_feature 1..20: note = chemically synthesized
  source 1..20: mol_type = other DNA
ttactgtgaattatgagaag

SEQ ID NO: 34998 - DNA, 20 bp, synthetic construct
  misc_feature 1..20: note = chemically synthesized
  source 1..20: mol_type = other DNA
gccagttccagggtgggaac

SEQ ID NO: 34999 - DNA, 20 bp, synthetic construct
  misc_feature 1..20: note = chemically synthesized
  source 1..20: mol_type = other DNA
tttgtaattattcatgcacg

SEQ ID NO: 35000 - DNA, 20 bp, synthetic construct
  misc_feature 1..20: note = chemically synthesized
  source 1..20: mol_type = other DNA
tgaatatcttagacatctta

SEQ ID NO: 35001 - DNA, 20 bp, synthetic construct
  misc_feature 1..20: note = chemically synthesized
  source 1..20: mol_type = other DNA
gagagcttttcgtctcagtt

SEQ ID NO: 35002 - DNA, 20 bp, synthetic construct
  misc_feature 1..20: note = chemically synthesized
  source 1..20: mol_type = other DNA
gcttttcgtctcagttaaat

SEQ ID NO: 35003 - DNA, 20 bp, synthetic construct
  misc_feature 1..20: note = chemically synthesized
  source 1..20: mol_type = other DNA
cgctataaaatatattttaa

SEQ ID NO: 35004 - DNA, 20 bp, synthetic construct
  misc_feature 1..20: note = chemically synthesized
  source 1..20: mol_type = other DNA
aaatatattttaaatttgct

SEQ ID NO: 35005 - DNA, 20 bp, synthetic construct
  misc_feature 1..20: note = chemically synthesized
  source 1..20: mol_type = other DNA
attttaaatttgcttttggt

SEQ ID NO: 35006 - DNA, 20 bp, synthetic construct
  misc_feature 1..20: note = chemically synthesized
  source 1..20: mol_type = other DNA
aaatatctcttatttcccta

SEQ ID NO: 35007 - DNA, 20 bp, synthetic construct
  misc_feature 1..20: note = chemically synthesized
  source 1..20: mol_type = other DNA
gtaaggccttccccccagca

SEQ ID NO: 35008 - DNA, 20 bp, synthetic construct
  misc_feature 1..20: note = chemically synthesized
  source 1..20: mol_type = other DNA
tttgggacctcagtaagaag

SEQ ID NO: 35009 - DNA, 20 bp, synthetic construct
  misc_feature 1..20: note = chemically synthesized
  source 1..20: mol_type = other DNA
gtaagaagtgtggttttaat

SEQ ID NO: 35010 - DNA, 20 bp, synthetic construct
  misc_feature 1..20: note = chemically synthesized
  source 1..20: mol_type = other DNA
taattcttgcttgacagaca

SEQ ID NO: 35011 - DNA, 20 bp, synthetic construct
  misc_feature 1..20: note = chemically synthesized
  source 1..20: mol_type = other DNA
cgcaagtgttactccatatt

SEQ ID NO: 35012 - DNA, 20 bp, synthetic construct
  misc_feature 1..20: note = chemically synthesized
  source 1..20: mol_type = other DNA
ctccatatttggtgatttag

SEQ ID NO: 35013 - DNA, 20 bp, synthetic construct
  misc_feature 1..20: note = chemically synthesized
  source 1..20: mol_type = other DNA
acaaatccccttccgcctgc

SEQ ID NO: 35014 - DNA, 20 bp, synthetic construct
  misc_feature 1..20: note = chemically synthesized
  source 1..20: mol_type = other DNA
atgtcacataaggtaaatgt

SEQ ID NO: 35015 - DNA, 20 bp, synthetic construct
  misc_feature 1..20: note = chemically synthesized
  source 1..20: mol_type = other DNA
caagaaatacactccacaaa

SEQ ID NO: 35016 - DNA, 20 bp, synthetic construct
  misc_feature 1..20: note = chemically synthesized
  source 1..20: mol_type = other DNA
acaaatgcagcttccctagc

SEQ ID NO: 35017 - DNA, 20 bp, synthetic construct
  misc_feature 1..20: note = chemically synthesized
  source 1..20: mol_type = other DNA
ctaaaaaaagaaagaaaatg

SEQ ID NO: 35018 - DNA, 20 bp, synthetic construct
  misc_feature 1..20: note = chemically synthesized
  source 1..20: mol_type = other DNA
aaaagaaagaaaatgccatg

SEQ ID NO: 35019 - DNA, 20 bp, synthetic construct
  misc_feature 1..20: note = chemically synthesized
  source 1..20: mol_type = other DNA
gtctaacatgctcaagcaaa

SEQ ID NO: 35020 - DNA, 20 bp, synthetic construct
  misc_feature 1..20: note = chemically synthesized
  source 1..20: mol_type = other DNA
tgagggtcactatatagtgt

SEQ ID NO: 35021 - DNA, 20 bp, synthetic construct
  misc_feature 1..20: note = chemically synthesized
  source 1..20: mol_type = other DNA
cttttcgagtaagcatgtct

SEQ ID NO: 35022 - DNA, 20 bp, synthetic construct
  misc_feature 1..20: note = chemically synthesized
  source 1..20: mol_type = other DNA
ggtgtcatcccaccacgggg

SEQ ID NO: 35023 - DNA, 20 bp, synthetic construct
  misc_feature 1..20: note = chemically synthesized
  source 1..20: mol_type = other DNA
tgtgtacctatcctgcctac

SEQ ID NO: 35024 - DNA, 20 bp, synthetic construct
  misc_feature 1..20: note = chemically synthesized
  source 1..20: mol_type = other DNA
gttctggacgtaagcaacag

SEQ ID NO: 35025 - DNA, 20 bp, synthetic construct
  misc_feature 1..20: note = chemically synthesized
  source 1..20: mol_type = other DNA
gaaagcacttcacaactcct

SEQ ID NO: 35026 - DNA, 20 bp, synthetic construct
  misc_feature 1..20: note = chemically synthesized
  source 1..20: mol_type = other DNA
aaatgaaaagaaaacatgca

SEQ ID NO: 35027 - DNA, 20 bp, synthetic construct
  misc_feature 1..20: note = chemically synthesized
  source 1..20: mol_type = other DNA
aacatgcaaacagcttttct

SEQ ID NO: 35028 - DNA, 20 bp, synthetic construct
  misc_feature 1..20: note = chemically synthesized
  source 1..20: mol_type = other DNA
ctcatttacctgctatgtgt

SEQ ID NO: 35029 - DNA, 20 bp, synthetic construct
  misc_feature 1..20: note = chemically synthesized
  source 1..20: mol_type = other DNA
tgacctggatgccaacctcc

SEQ ID NO: 35030 - DNA, 20 bp, synthetic construct
  misc_feature 1..20: note = chemically synthesized
  source 1..20: mol_type = other DNA
atgccaacctccacgggatt

SEQ ID NO: 35031 - DNA, 20 bp, synthetic construct
  misc_feature 1..20: note = chemically synthesized
  source 1..20: mol_type = other DNA
gggattggatgcttttttca

SEQ ID NO: 35032 - DNA, 20 bp, synthetic construct
  misc_feature 1..20: note = chemically synthesized
  source 1..20: mol_type = other DNA
tctcgattggtgaaggggaa

SEQ ID NO: 35033 - DNA, 20 bp, synthetic construct
  misc_feature 1..20: note = chemically synthesized
  source 1..20: mol_type = other DNA
gaaggggaaggtggcttatc

SEQ ID NO: 35034 - DNA, 20 bp, synthetic construct
  misc_feature 1..20: note = chemically synthesized
  source 1..20: mol_type = other DNA
ctaagcagaggctgccattg

SEQ ID NO: 35035 - DNA, 20 bp, synthetic construct
  misc_feature 1..20: note = chemically synthesized
  source 1..20: mol_type = other DNA
agaggctgccattgcattgt

SEQ ID NO: 35036 - DNA, 20 bp, synthetic construct
  misc_feature 1..20: note = chemically synthesized
  source 1..20: mol_type = other DNA
tctggttcatcatctgtaag

SEQ ID NO: 35037 - DNA, 20 bp, synthetic construct
  misc_feature 1..20: note = chemically synthesized
  source 1..20: mol_type = other DNA
ccatcccaccacatcatgta

SEQ ID NO: 35038 - DNA, 20 bp, synthetic construct
  misc_feature 1..20: note = chemically synthesized
  source 1..20: mol_type = other DNA
ccacatcatgtaaagtgttt

SEQ ID NO: 35039 - DNA, 20 bp, synthetic construct
  misc_feature 1..20: note = chemically synthesized
  source 1..20: mol_type = other DNA
cacccacagcaacaaatgtg

SEQ ID NO: 35040 - DNA, 20 bp, synthetic construct
  misc_feature 1..20: note = chemically synthesized
  source 1..20: mol_type = other DNA
gcaacaaatgtgtctggttt

SEQ ID NO: 35041 - DNA, 20 bp, synthetic construct
  misc_feature 1..20: note = chemically synthesized
  source 1..20: mol_type = other DNA
gttaacacagggaacataaa

SEQ ID NO: 35042 - DNA, 20 bp, synthetic construct
  misc_feature 1..20: note = chemically synthesized
  source 1..20: mol_type = other DNA
aaaaagtggatagaaaccaa

SEQ ID NO: 35043 - DNA, 20 bp, synthetic construct
  misc_feature 1..20: note = chemically synthesized
  source 1..20: mol_type = other DNA
tatactcctaagtaaacaga

SEQ ID NO: 35044 - DNA, 20 bp, synthetic construct
  misc_feature 1..20: note = chemically synthesized
  source 1..20: mol_type = other DNA
gaatgcctataatattctaa

SEQ ID NO: 35045 - DNA, 20 bp, synthetic construct
  misc_feature 1..20: note = chemically synthesized
  source 1..20: mol_type = other DNA
aattttctgaatgagctcca

SEQ ID NO: 35046 - DNA, 20 bp, synthetic construct
  misc_feature 1..20: note = chemically synthesized
  source 1..20: mol_type = other DNA
aaggtagacatgtctttctt

SEQ ID NO: 35047 - DNA, 20 bp, synthetic construct
  misc_feature 1..20: note = chemically synthesized
  source 1..20: mol_type = other DNA
tagacatgtctttctttcct

SEQ ID NO: 35048 - DNA, 20 bp, synthetic construct
  misc_feature 1..20: note = chemically synthesized
  source 1..20: mol_type = other DNA
aatactccagcatctacttt

SEQ ID NO: 35049 - DNA, 20 bp, synthetic construct
  misc_feature 1..20: note = chemically synthesized
  source 1..20: mol_type = other DNA
ttaccagcttctatcatttt

SEQ ID NO: 35050 - DNA, 20 bp, synthetic construct
  misc_feature 1..20: note = chemically synthesized
  source 1..20: mol_type = other DNA
ggaaaagagagttggtaagt

SEQ ID NO: 35051 - DNA, 20 bp, synthetic construct
  misc_feature 1..20: note = chemically synthesized
  source 1..20: mol_type = other DNA
aagtctctgcttgtgaaatc

SEQ ID NO: 35052 - DNA, 20 bp, synthetic construct
  misc_feature 1..20: note = chemically synthesized
  source 1..20: mol_type = other DNA
aaagccacagagaatcaaaa

SEQ ID NO: 35053 - DNA, 20 bp, synthetic construct
  misc_feature 1..20: note = chemically synthesized
  source 1..20: mol_type = other DNA
atttgagtgtagaatattgg

SEQ ID NO: 35054 - DNA, 20 bp, synthetic construct
  misc_feature 1..20: note = chemically synthesized
  source 1..20: mol_type = other DNA
aaagacagtaaagtaagcac

SEQ ID NO: 35055 - DNA, 20 bp, synthetic construct
  misc_feature 1..20: note = chemically synthesized
  source 1..20: mol_type = other DNA
taatgtcattcttctcttac

SEQ ID NO: 35056 - DNA, 20 bp, synthetic construct
  misc_feature 1..20: note = chemically synthesized
  source 1..20: mol_type = other DNA
aatattcctgttgtctgaat

SEQ ID NO: 35057 - DNA, 20 bp, synthetic construct
  misc_feature 1..20: note = chemically synthesized
  source 1..20: mol_type = other DNA
tttaagtacacattgataaa

SEQ ID NO: 35058 - DNA, 20 bp, synthetic construct
  misc_feature 1..20: note = chemically synthesized
  source 1..20: mol_type = other DNA
cacattgataaatgtggctt

SEQ ID NO: 35059 - DNA, 20 bp, synthetic construct
  misc_feature 1..20: note = chemically synthesized
  source 1..20: mol_type = other DNA
ttagcattagctacaagttc

SEQ ID NO: 35060 - DNA, 20 bp, synthetic construct
  misc_feature 1..20: note = chemically synthesized
  source 1..20: mol_type = other DNA
aaaattttttatttccaccg

SEQ ID NO: 35061 - DNA, 20 bp, synthetic construct
  misc_feature 1..20: note = chemically synthesized
  source 1..20: mol_type = other DNA
tcttctaaatgtagtgactg

SEQ ID NO: 35062 - DNA, 20 bp, synthetic construct
  misc_feature 1..20: note = chemically synthesized
  source 1..20: mol_type = other DNA
tgaagtggtaattcagaggt

SEQ ID NO: 35063 - DNA, 20 bp, synthetic construct
  misc_feature 1..20: note = chemically synthesized
  source 1..20: mol_type = other DNA
attatattctaatgtatgaa

SEQ ID NO: 35064 - DNA, 20 bp, synthetic construct
  misc_feature 1..20: note = chemically synthesized
  source 1..20: mol_type = other DNA
gtgttcagagaaataccaaa

SEQ ID NO: 35065 - DNA, 20 bp, synthetic construct
  misc_feature 1..20: note = chemically synthesized
  source 1..20: mol_type = other DNA
acaattctcatggtgtagtc

SEQ ID NO: 35066 - DNA, 20 bp, synthetic construct
  misc_feature 1..20: note = chemically synthesized
  source 1..20: mol_type = other DNA
ccggctacaaagcagggagt

SEQ ID NO: 35067 - DNA, 20 bp, synthetic construct
  misc_feature 1..20: note = chemically synthesized
  source 1..20: mol_type = other DNA
ggaggaagaaatagaaaata

SEQ ID NO: 35068 - DNA, 20 bp, synthetic construct
  misc_feature 1..20: note = chemically synthesized
  source 1..20: mol_type = other DNA
ggggaaagggagatgtgtct

SEQ ID NO: 35069 - DNA, 20 bp, synthetic construct
  misc_feature 1..20: note = chemically synthesized
  source 1..20: mol_type = other DNA
aaagggagatgtgtcttcaa

SEQ ID NO: 35070 - DNA, 20 bp, synthetic construct
  misc_feature 1..20: note = chemically synthesized
  source 1..20: mol_type = other DNA
tttgctttccaagtccttct

SEQ ID NO: 35071 - DNA, 20 bp, synthetic construct
  misc_feature 1..20: note = chemically synthesized
  source 1..20: mol_type = other DNA
gtgctggctgcaggctcccg

SEQ ID NO: 35072 - DNA, 20 bp, synthetic construct
  misc_feature 1..20: note = chemically synthesized
  source 1..20: mol_type = other DNA
ccagttggtgaaaaaggaag

SEQ ID NO: 35073 - DNA, 20 bp, synthetic construct
  misc_feature 1..20: note = chemically synthesized
  source 1..20: mol_type = other DNA
acacacctcaagcgcgggtc

SEQ ID NO: 35074 - DNA, 20 bp, synthetic construct
  misc_feature 1..20: note = chemically synthesized
  source 1..20: mol_type = other DNA
ctgagattcattctgtgtcc

SEQ ID NO: 35075 - DNA, 20 bp, synthetic construct
  misc_feature 1..20: note = chemically synthesized
  source 1..20: mol_type = other DNA
gatgataactattactattg

SEQ ID NO: 35076 - DNA, 20 bp, synthetic construct
  misc_feature 1..20: note = chemically synthesized
  source 1..20: mol_type = other DNA
ccagccgaggccaccgaggt

SEQ ID NO: 35077 - DNA, 20 bp, synthetic construct
  misc_feature 1..20: note = chemically synthesized
  source 1..20: mol_type = other DNA
ggggtgtcggccgcgcgccc

SEQ ID NO: 35078 - DNA, 20 bp, synthetic construct
  misc_feature 1..20: note = chemically synthesized
  source 1..20: mol_type = other DNA
ctggtacaggttcaagttcg

SEQ ID NO: 35079 - DNA, 20 bp, synthetic construct
  misc_feature 1..20: note = chemically synthesized
  source 1..20: mol_type = other DNA
cgcgcaacgtgccggggtgg

SEQ ID NO: 35080 - DNA, 20 bp, synthetic construct
  misc_feature 1..20: note = chemically synthesized
  source 1..20: mol_type = other DNA
gaggggaggggaggcgcaga

SEQ ID NO: 35081 - DNA, 20 bp, synthetic construct
  misc_feature 1..20: note = chemically synthesized
  source 1..20: mol_type = other DNA
acagttgccctgcaaaataa

SEQ ID NO: 35082 - DNA, 20 bp, synthetic construct
  misc_feature 1..20: note = chemically synthesized
  source 1..20: mol_type = other DNA
aataaaaatgctttgcaaag

SEQ ID NO: 35083 - DNA, 20 bp, synthetic construct
  misc_feature 1..20: note = chemically synthesized
  source 1..20: mol_type = other DNA
tgcaaagccgagtttcaccc

SEQ ID NO: 35084 - DNA, 20 bp, synthetic construct
  misc_feature 1..20: note = chemically synthesized
  source 1..20: mol_type = other DNA
cgcgccgcgctcggtcctct

SEQ ID NO: 35085 - DNA, 20 bp, synthetic construct
  misc_feature 1..20: note = chemically synthesized
  source 1..20: mol_type = other DNA
gcaggaggctcccgcacacg

SEQ ID NO: 35086 - DNA, 20 bp, synthetic construct
  misc_feature 1..20: note = chemically synthesized
  source 1..20: mol_type = other DNA
gtgcttgtaaacattcagac

SEQ ID NO: 35087 - DNA, 20 bp, synthetic construct
  misc_feature 1..20: note = chemically synthesized
  source 1..20: mol_type = other DNA
ctctccgtgccgtcggcgcc

SEQ ID NO: 35088 - DNA, 20 bp, synthetic construct
  misc_feature 1..20: note = chemically synthesized
  source 1..20: mol_type = other DNA
cgccctaagtttgcaactga

SEQ ID NO: 35089 - DNA, 20 bp, synthetic construct
  misc_feature 1..20: note = chemically synthesized
  source 1..20: mol_type = other DNA
tgaaggggtttgggggaaga

SEQ ID NO: 35090 - DNA, 20 bp, synthetic construct
  misc_feature 1..20: note = chemically synthesized
  source 1..20: mol_type = other DNA
ttgtaaatttttttctagat

SEQ ID NO: 35091 - DNA, 20 bp, synthetic construct
  misc_feature 1..20: note = chemically synthesized
  source 1..20: mol_type = other DNA
ttttttctagatgagagatt

SEQ ID NO: 35092 - DNA, 20 bp, synthetic construct
  misc_feature 1..20: note = chemically synthesized
  source 1..20: mol_type = other DNA
gtcacagaaaagggttggca

SEQ ID NO: 35093 - DNA, 20 bp, synthetic construct
  misc_feature 1..20: note = chemically synthesized
  source 1..20: mol_type = other DNA
agaaaagggttggcagagcg

SEQ ID NO: 35094 - DNA, 20 bp, synthetic construct
  misc_feature 1..20: note = chemically synthesized
  source 1..20: mol_type = other DNA
gggttggcagagcgtttggc

SEQ ID NO: 35095 - DNA, 20 bp, synthetic construct
  misc_feature 1..20: note = chemically synthesized
  source 1..20: mol_type = other DNA
agaaattgtacattctcttg

SEQ ID NO: 35096 - DNA, 20 bp, synthetic construct
  misc_feature 1..20: note = chemically synthesized
  source 1..20: mol_type = other DNA
tcacctcttttctccccggg

SEQ ID NO: 35097 - DNA, 20 bp, synthetic construct
  misc_feature 1..20: note = chemically synthesized
  source 1..20: mol_type = other DNA
ttccccaccagctcccaccc

SEQ ID NO: 35098 - DNA, 20 bp, synthetic construct
  misc_feature 1..20: note = chemically synthesized
  source 1..20: mol_type = other DNA
gcaatggttccagatgggat

SEQ ID NO: 35099 - DNA, 20 bp, synthetic construct
  misc_feature 1..20: note = chemically synthesized
  source 1..20: mol_type = other DNA
tctcttttacctcgactctc

SEQ ID NO: 35100 - DNA, 20 bp, synthetic construct
  misc_feature 1..20: note = chemically synthesized
  source 1..20: mol_type = other DNA
tgcacacacccctctctccc

SEQ ID NO: 35101 - DNA, 20 bp, synthetic construct
  misc_feature 1..20: note = chemically synthesized
  source 1..20: mol_type = other DNA
cacccctctctccccctcgc

SEQ ID NO: 35102 - DNA, 20 bp, synthetic construct
  misc_feature 1..20: note = chemically synthesized
  source 1..20: mol_type = other DNA
gcttctagtcctgcgcgctc

SEQ ID NO: 35103 - DNA, 20 bp, synthetic construct
  misc_feature 1..20: note = chemically synthesized
  source 1..20: mol_type = other DNA
tgggttacttacgcgagaat

SEQ ID NO: 35104 - DNA, 20 bp, synthetic construct
  misc_feature 1..20: note = chemically synthesized
  source 1..20: mol_type = other DNA
ttacttacgcgagaattccc

SEQ ID NO: 35105 - DNA, 20 bp, synthetic construct
  misc_feature 1..20: note = chemically synthesized
  source 1..20: mol_type = other DNA
attcccgtttgcttaagtgc

SEQ ID NO: 35106 - DNA, 20 bp, synthetic construct
  misc_feature 1..20: note = chemically synthesized
  source 1..20: mol_type = other DNA
tgcttaagtgctggggtttg

SEQ ID NO: 35107 - DNA, 20 bp, synthetic construct
  misc_feature 1..20: note = chemically synthesized
  source 1..20: mol_type = other DNA
atgaattgtgggagagccgt

SEQ ID NO: 35108 - DNA, 20 bp, synthetic construct
  misc_feature 1..20: note = chemically synthesized
  source 1..20: mol_type = other DNA
acacacgcggactctaaaat

SEQ ID NO: 35109 - DNA, 20 bp, synthetic construct
  misc_feature 1..20: note = chemically synthesized
  source 1..20: mol_type = other DNA
acggcaacgcggaatccagc

SEQ ID NO: 35110 - DNA, 20 bp, synthetic construct
  misc_feature 1..20: note = chemically synthesized
  source 1..20: mol_type = other DNA
agcacagagggatgggaaga

SEQ ID NO: 35111 - DNA, 20 bp, synthetic construct
  misc_feature 1..20: note = chemically synthesized
  source 1..20: mol_type = other DNA
cgtgctgccgctgtcaaaaa

SEQ ID NO: 35112 - DNA, 20 bp, synthetic construct
  misc_feature 1..20: note = chemically synthesized
  source 1..20: mol_type = other DNA
tcactctggcgtgggatact

SEQ ID NO: 35113 - DNA, 20 bp, synthetic construct
  misc_feature 1..20: note = chemically synthesized
  source 1..20: mol_type = other DNA
atgtacagcaacagcacccc

SEQ ID NO: 35114 - DNA, 20 bp, synthetic construct
  misc_feature 1..20: note = chemically synthesized
  source 1..20: mol_type = other DNA
aacagcaccccctgcgattg

SEQ ID NO: 35115 - DNA, 20 bp, synthetic construct
  misc_feature 1..20: note = chemically synthesized
  source 1..20: mol_type = other DNA
ccgccgccggggagatcgca

SEQ ID NO: 35116 - DNA, 20 bp, synthetic construct
  misc_feature 1..20: note = chemically synthesized
  source 1..20: mol_type = other DNA
cccctcttcagtctaaaggg

SEQ ID NO: 35117 - DNA, 20 bp, synthetic construct
  misc_feature 1..20: note = chemically synthesized
  source 1..20: mol_type = other DNA
taaactcacccacccggtgg

SEQ ID NO: 35118 - DNA, 20 bp, synthetic construct
  misc_feature 1..20: note = chemically synthesized
  source 1..20: mol_type = other DNA
cccacccggtgggggggctt

SEQ ID NO: 35119 - DNA, 20 bp, synthetic construct
  misc_feature 1..20: note = chemically synthesized
  source 1..20: mol_type = other DNA
tattgttttaagcgagggcc

SEQ ID NO: 35120 - DNA, 20 bp, synthetic construct
  misc_feature 1..20: note = chemically synthesized
  source 1..20: mol_type = other DNA
ccgcagccctgccggcaagc

SEQ ID NO: 35121 - DNA, 20 bp, synthetic construct
  misc_feature 1..20: note = chemically synthesized
  source 1..20: mol_type = other DNA
gccggcaagcggctgtttat

SEQ ID NO: 35122 - DNA, 20 bp, synthetic construct
  misc_feature 1..20: note = chemically synthesized
  source 1..20: mol_type = other DNA
ttattcctgtttcgtcttag

SEQ ID NO: 35123 - DNA, 20 bp, synthetic construct
  misc_feature 1..20: note = chemically synthesized
  source 1..20: mol_type = other DNA
gtctactgtgttagaaaatg

SEQ ID NO: 35124 - DNA, 20 bp, synthetic construct
  misc_feature 1..20: note = chemically synthesized
  source 1..20: mol_type = other DNA
gactggcttgcctagctcgg

SEQ ID NO: 35125 - DNA, 20 bp, synthetic construct
  misc_feature 1..20: note = chemically synthesized
  source 1..20: mol_type = other DNA
gacccctctaaggaagaaaa

SEQ ID NO: 35126 - DNA, 20 bp, synthetic construct
  misc_feature 1..20: note = chemically synthesized
  source 1..20: mol_type = other DNA
tgagagagatgtgggctgta

SEQ ID NO: 35127 - DNA, 20 bp, synthetic construct
  misc_feature 1..20: note = chemically synthesized
  source 1..20: mol_type = other DNA
ctgtactgggattgtgtcaa

SEQ ID NO: 35128 - DNA, 20 bp, synthetic construct
  misc_feature 1..20: note = chemically synthesized
  source 1..20: mol_type = other DNA
gggattgtgtcaatgtggtt

SEQ ID NO: 35129 - DNA, 20 bp, synthetic construct
  misc_feature 1..20: note = chemically synthesized
  source 1..20: mol_type = other DNA
caatgtggtttgttgtttgt

SEQ ID NO: 35130 - DNA, 20 bp, synthetic construct
  misc_feature 1..20: note = chemically synthesized
  source 1..20: mol_type = other DNA
gttgtttgttgttgtttccc

SEQ ID NO: 35131 - DNA, 20 bp, synthetic construct
  misc_feature 1..20: note = chemically synthesized
  source 1..20: mol_type = other DNA
tgtgggagggagacctcaaa

SEQ ID NO: 35132 - DNA, 20 bp, synthetic construct
  misc_feature 1..20: note = chemically synthesized
  source 1..20: mol_type = other DNA
caaattctgtttaagaagcg

SEQ ID NO: 35133 - DNA, 20 bp, synthetic construct
  misc_feature 1..20: note = chemically synthesized
  source 1..20: mol_type = other DNA
attcactagaagttaagctc

SEQ ID NO: 35134 - DNA, 20 bp, synthetic construct
  misc_feature 1..20: note = chemically synthesized
  source 1..20: mol_type = other DNA
agcatctctattccaccaca

SEQ ID NO: 35135 - DNA, 20 bp, synthetic construct
  misc_feature 1..20: note = chemically synthesized
  source 1..20: mol_type = other DNA
ccttcaggtaacaatagtga

SEQ ID NO: 35136 - DNA, 20 bp, synthetic construct
  misc_feature 1..20: note = chemically synthesized
  source 1..20: mol_type = other DNA
tgagccagattctttcagaa

SEQ ID NO: 35137 - DNA, 20 bp, synthetic construct
  misc_feature 1..20: note = chemically synthesized
  source 1..20: mol_type = other DNA
attctttcagaaccaagctt

SEQ ID NO: 35138 - DNA, 20 bp, synthetic construct
  misc_feature 1..20: note = chemically synthesized
  source 1..20: mol_type = other DNA
ttgtggaaatatatatatat

SEQ ID NO: 35139 - DNA, 20 bp, synthetic construct
  misc_feature 1..20: note = chemically synthesized
  source 1..20: mol_type = other DNA
tttatatataatggtgtgta

SEQ ID NO: 35140 - DNA, 20 bp, synthetic construct
  misc_feature 1..20: note = chemically synthesized
  source 1..20: mol_type = other DNA
ataaataactggcaacattt

SEQ ID NO: 35141 - DNA, 20 bp, synthetic construct
  misc_feature 1..20: note = chemically synthesized
  source 1..20: mol_type = other DNA
tagcagacctacttgtaact

SEQ ID NO: 35142 - DNA, 20 bp, synthetic construct
  misc_feature 1..20: note = chemically synthesized
  source 1..20: mol_type = other DNA
gtaactaagtgcttaatttc

SEQ ID NO: 35143 - DNA, 20 bp, synthetic construct
  misc_feature 1..20: note = chemically synthesized
  source 1..20: mol_type = other DNA
ttacactacagccaaccccg

SEQ ID NO: 35144 - DNA, 20 bp, synthetic construct
  misc_feature 1..20: note = chemically synthesized
  source 1..20: mol_type = other DNA
gggaacaatattcaaatctg

SEQ ID NO: 35145 - DNA, 20 bp, synthetic construct
  misc_feature 1..20: note = chemically synthesized
  source 1..20: mol_type = other DNA
ggctcactattgttacctga

SEQ ID NO: 35146 - DNA, 20 bp, synthetic construct
  misc_feature 1..20: note = chemically synthesized
  source 1..20: mol_type = other DNA
attcttttggtgactccaag

SEQ ID NO: 35147 - DNA, 20 bp, synthetic construct
  misc_feature 1..20: note = chemically synthesized
  source 1..20: mol_type = other DNA
atggtgtcacacacaagcta

SEQ ID NO: 35148 - DNA, 20 bp, synthetic construct
  misc_feature 1..20: note = chemically synthesized
  source 1..20: mol_type = other DNA
gcttaacttctagtgaatcc

SEQ ID NO: 35149 - DNA, 20 bp, synthetic construct
  misc_feature 1..20: note = chemically synthesized
  source 1..20: mol_type = other DNA
aagacgaaacaggaataaac

SEQ ID NO: 35150 - DNA, 20 bp, synthetic construct
  misc_feature 1..20: note = chemically synthesized
  source 1..20: mol_type = other DNA
agcgcgtgcaagcccggggc

SEQ ID NO: 35151 - DNA, 20 bp, synthetic construct
  misc_feature 1..20: note = chemically synthesized
  source 1..20: mol_type = other DNA
aaagcccccccaccgggtgg

SEQ ID NO: 35152 - DNA, 20 bp, synthetic construct
  misc_feature 1..20: note = chemically synthesized
  source 1..20: mol_type = other DNA
ctcctctccccccaactcct

SEQ ID NO: 35153 - DNA, 20 bp, synthetic construct
  misc_feature 1..20: note = chemically synthesized
  source 1..20: mol_type = other DNA
ggcgccaggggactttacag

SEQ ID NO: 35154 - DNA, 20 bp, synthetic construct
  misc_feature 1..20: note = chemically synthesized
  source 1..20: mol_type = other DNA
gtatcccacgccagagtgaa

SEQ ID NO: 35155 - DNA, 20 bp, synthetic construct
  misc_feature 1..20: note = chemically synthesized
  source 1..20: mol_type = other DNA
gcgtgtgtgcattaaagaga

SEQ ID NO: 35156 - DNA, 20 bp, synthetic construct
  misc_feature 1..20: note = chemically synthesized
  source 1..20: mol_type = other DNA
aacattttcttcccatccct

SEQ ID NO: 35157 - DNA, 20 bp, synthetic construct
  misc_feature 1..20: note = chemically synthesized
  source 1..20: mol_type = other DNA
actgggactcccgggactgc

SEQ ID NO: 35158 - DNA, 20 bp, synthetic construct
  misc_feature 1..20: note = chemically synthesized
  source 1..20: mol_type = other DNA
acccttaggagccggggact

SEQ ID NO: 35159 - DNA, 20 bp, synthetic construct
  misc_feature 1..20: note = chemically synthesized
  source 1..20: mol_type = other DNA
tttcagttgcattcagaccc

SEQ ID NO: 35160 - DNA, 20 bp, synthetic construct
  misc_feature 1..20: note = chemically synthesized
  source 1..20: mol_type = other DNA
cccagtcgcttggcggggcg

SEQ ID NO: 35161 - DNA, 20 bp, synthetic construct
  misc_feature 1..20: note = chemically synthesized
  source 1..20: mol_type = other DNA
ccgcagccctccaaacttag

SEQ ID NO: 35162 - DNA, 20 bp, synthetic construct
  misc_feature 1..20: note = chemically synthesized
  source 1..20: mol_type = other DNA
gaggctcagctctcaacttc

SEQ ID NO: 35163 - DNA, 20 bp, synthetic construct
  misc_feature 1..20: note = chemically synthesized
  source 1..20: mol_type = other DNA
tttgctgtcctctcctcggg

SEQ ID NO: 35164 - DNA, 20 bp, synthetic construct
  misc_feature 1..20: note = chemically synthesized
  source 1..20: mol_type = other DNA
cccgagcgcagccgcgggct

SEQ ID NO: 35165 - DNA, 20 bp, synthetic construct
  misc_feature 1..20: note = chemically synthesized
  source 1..20: mol_type = other DNA
ggtgtccgggagcaactcta

SEQ ID NO: 35166 - DNA, 20 bp, synthetic construct
  misc_feature 1..20: note = chemically synthesized
  source 1..20: mol_type = other DNA
tctacctggcttccctccgc

SEQ ID NO: 35167 - DNA, 20 bp, synthetic construct
  misc_feature 1..20: note = chemically synthesized
  source 1..20: mol_type = other DNA
tccccctccccgcactggcc

SEQ ID NO: 35168 - DNA, 20 bp, synthetic construct
  misc_feature 1..20: note = chemically synthesized
  source 1..20: mol_type = other DNA
cctgatgtgtgtccattggt

SEQ ID NO: 35169 - DNA, 20 bp, synthetic construct
  misc_feature 1..20: note = chemically synthesized
  source 1..20: mol_type = other DNA
ttctctcctgctcgccctgc

SEQ ID NO: 35170 - DNA, 20 bp, synthetic construct
  misc_feature 1..20: note = chemically synthesized
  source 1..20: mol_type = other DNA
cacttgaacttgcagctcag

SEQ ID NO: 35171 - DNA, 20 bp, synthetic construct
  misc_feature 1..20: note = chemically synthesized
  source 1..20: mol_type = other DNA
tttttttttttttttttttt

SEQ ID NO: 35172 - DNA, 20 bp, synthetic construct
  misc_feature 1..20: note = chemically synthesized
  source 1..20: mol_type = other DNA
tcctcctctttcctcctttc

SEQ ID NO: 35173 - DNA, 20 bp, synthetic construct
  misc_feature 1..20: note = chemically synthesized
  source 1..20: mol_type = other DNA
tctcttttcgaaaaggaatg

SEQ ID NO: 35174 - DNA, 20 bp, synthetic construct
  misc_feature 1..20: note = chemically synthesized
  source 1..20: mol_type = other DNA
ttccactccccccccgcccc

SEQ ID NO: 35175 - DNA, 20 bp, synthetic construct
  misc_feature 1..20: note = chemically synthesized
  source 1..20: mol_type = other DNA
ggagctggtggggaaaggga

SEQ ID NO: 35176 - DNA, 20 bp, synthetic construct
  misc_feature 1..20: note = chemically synthesized
  source 1..20: mol_type = other DNA
ggagtgagtacaagtctaaa

SEQ ID NO: 35177 - DNA, 20 bp, synthetic construct
  misc_feature 1..20: note = chemically synthesized
  source 1..20: mol_type = other DNA
ccggggagaaaagaggtgag

SEQ ID NO: 35178 - DNA, 20 bp, synthetic construct
  misc_feature 1..20: note = chemically synthesized
  source 1..20: mol_type = other DNA
cttttgttccggccagaggt

SEQ ID NO: 35179 - DNA, 20 bp, synthetic construct
  misc_feature 1..20: note = chemically synthesized
  source 1..20: mol_type = other DNA
ctgccttttgtgccggctcc

SEQ ID NO: 35180 - DNA, 20 bp, synthetic construct
  misc_feature 1..20: note = chemically synthesized
  source 1..20: mol_type = other DNA
ccctcctcttactatttttt

SEQ ID NO: 35181 - DNA, 20 bp, synthetic construct
  misc_feature 1..20: note = chemically synthesized
  source 1..20: mol_type = other DNA
agattttcaaaaaaagtgga

SEQ ID NO: 35182 - DNA, 20 bp, synthetic construct
  misc_feature 1..20: note = chemically synthesized
  source 1..20: mol_type = other DNA
tcaaaaaaagtggaagtgga

SEQ ID NO: 35183 - DNA, 20 bp, synthetic construct
  misc_feature 1..20: note = chemically synthesized
  source 1..20: mol_type = other DNA
ttgggaaaaatctcgtgtct

SEQ ID NO: 35184 - DNA, 20 bp, synthetic construct
  misc_feature 1..20: note = chemically synthesized
  source 1..20: mol_type = other DNA
gcgaaatcggctgggtgaaa

SEQ ID NO: 35185 - DNA, 20 bp, synthetic construct
  misc_feature 1..20: note = chemically synthesized
  source 1..20: mol_type = other DNA
gggaccgcgaggaggtcacc

SEQ ID NO: 35186 - DNA, 20 bp, synthetic construct
  misc_feature 1..20: note = chemically synthesized
  source 1..20: mol_type = other DNA
cggggaagggcaggggagaa

SEQ ID NO: 35187 - DNA, 20 bp, synthetic construct
  misc_feature 1..20: note = chemically synthesized
  source 1..20: mol_type = other DNA
gtcttgccctcttccccagg

SEQ ID NO: 35188 - DNA, 20 bp, synthetic construct
  misc_feature 1..20: note = chemically synthesized
  source 1..20: mol_type = other DNA
ggcgggcggtgggcacttag

SEQ ID NO: 35189 - DNA, 20 bp, synthetic construct
  misc_feature 1..20: note = chemically synthesized
  source 1..20: mol_type = other DNA
acattccccccctactcaat

SEQ ID NO: 35190 - DNA, 20 bp, synthetic construct
  misc_feature 1..20: note = chemically synthesized
  source 1..20: mol_type = other DNA
ttcttactttaaatttttga

SEQ ID NO: 35191 - DNA, 20 bp, synthetic construct
  misc_feature 1..20: note = chemically synthesized
  source 1..20: mol_type = other DNA
aggaccacctatacttggtt

SEQ ID NO: 35192 - DNA, 20 bp, synthetic construct
  misc_feature 1..20: note = chemically synthesized
  source 1..20: mol_type = other DNA
tcctgtcccggggttaaagg

SEQ ID NO: 35193 - DNA, 20 bp, synthetic construct
  misc_feature 1..20: note = chemically synthesized
  source 1..20: mol_type = other DNA
agcctcccccacctcctgcc

SEQ ID NO: 35194 - DNA, 20 bp, synthetic construct
  misc_feature 1..20: note = chemically synthesized
  source 1..20: mol_type = other DNA
cgattctcgtccggggagga

SEQ ID NO: 35195 - DNA, 20 bp, synthetic construct
  misc_feature 1..20: note = chemically synthesized
  source 1..20: mol_type = other DNA
gttcttcattttgactttaa

SEQ ID NO: 35196 - DNA, 20 bp, synthetic construct
  misc_feature 1..20: note = chemically synthesized
  source 1..20: mol_type = other DNA
gcgccgggctcggagcacgg

SEQ ID NO: 35197 - DNA, 20 bp, synthetic construct
  misc_feature 1..20: note = chemically synthesized
  source 1..20: mol_type = other DNA
ggctcggagcacggtgcagt

SEQ ID NO: 35198 - DNA, 20 bp, synthetic construct
  misc_feature 1..20: note = chemically synthesized
  source 1..20: mol_type = other DNA
ggaaccgggagtgcgcgctc

SEQ ID NO: 35199 - DNA, 20 bp, synthetic construct
  misc_feature 1..20: note = chemically synthesized
  source 1..20: mol_type = other DNA
tggccgaagagggggatatg

SEQ ID NO: 35200 - DNA, 20 bp, synthetic construct
  misc_feature 1..20: note = chemically synthesized
  source 1..20: mol_type = other DNA
cacagacctcggtggcctcg

SEQ ID NO: 35201 - DNA, 20 bp, synthetic construct
  misc_feature 1..20: note = chemically synthesized
  source 1..20: mol_type = other DNA
gatcccccaaagtaaaaagt

SEQ ID NO: 35202 - DNA, 20 bp, synthetic construct
  misc_feature 1..20: note = chemically synthesized
  source 1..20: mol_type = other DNA
cacagaatgaatctcaggac

SEQ ID NO: 35203 - DNA, 20 bp, synthetic construct
  misc_feature 1..20: note = chemically synthesized
  source 1..20: mol_type = other DNA
gactgcaccaggttaaccag

SEQ ID NO: 35204 - DNA, 20 bp, synthetic construct
  misc_feature 1..20: note = chemically synthesized
  source 1..20: mol_type = other DNA
gagcctgcagccagcacgct

SEQ ID NO: 35205 - DNA, 20 bp, synthetic construct
  misc_feature 1..20: note = chemically synthesized
  source 1..20: mol_type = other DNA
cctgccccgggcctgtagcc

SEQ ID NO: 35206 - DNA, 20 bp, synthetic construct
  misc_feature 1..20: note = chemically synthesized
  source 1..20: mol_type = other DNA
cccgggcctgtagcccccgg

SEQ ID NO: 35207 - DNA, 20 bp, synthetic construct
  misc_feature 1..20: note = chemically synthesized
  source 1..20: mol_type = other DNA
cctgtagcccccggctttgc

SEQ ID NO: 35208 - DNA, 20 bp, synthetic construct
  misc_feature 1..20: note = chemically synthesized
  source 1..20: mol_type = other DNA
ccccggctttgcttttgttt

SEQ ID NO: 35209 - DNA, 20 bp, synthetic construct
  misc_feature 1..20: note = chemically synthesized
  source 1..20: mol_type = other DNA
tttcctctctgaatttcagc

SEQ ID NO: 35210 - DNA, 20 bp, synthetic construct
  misc_feature 1..20: note = chemically synthesized
  source 1..20: mol_type = other DNA
ctctctgaatttcagcctcc

SEQ ID NO: 35211 - DNA, 20 bp, synthetic construct
  misc_feature 1..20: note = chemically synthesized
  source 1..20: mol_type = other DNA
cccctccgctccccggcagc

SEQ ID NO: 35212 - DNA, 20 bp, synthetic construct
  misc_feature 1..20: note = chemically synthesized
  source 1..20: mol_type = other DNA
ctccttaccaacatttccta

SEQ ID NO: 35213 - DNA, 20 bp, synthetic construct
  misc_feature 1..20: note = chemically synthesized
  source 1..20: mol_type = other DNA
tgagacgttccaggctgtct

SEQ ID NO: 35214 - DNA, 20 bp, synthetic construct
  misc_feature 1..20: note = chemically synthesized
  source 1..20: mol_type = other DNA
agagaattcgcggctaatta

SEQ ID NO: 35215 - DNA, 20 bp, synthetic construct
  misc_feature 1..20: note = chemically synthesized
  source 1..20: mol_type = other DNA
ttccacttcaatcgaggact

SEQ ID NO: 35216 - DNA, 20 bp, synthetic construct
  misc_feature 1..20: note = chemically synthesized
  source 1..20: mol_type = other DNA
aggactccctgctttgtagc

SEQ ID NO: 35217 - DNA, 20 bp, synthetic construct
  misc_feature 1..20: note = chemically synthesized
  source 1..20: mol_type = other DNA
tttgtagccggagtttaggc

SEQ ID NO: 35218 - DNA, 20 bp, synthetic construct
  misc_feature 1..20: note = chemically synthesized
  source 1..20: mol_type = other DNA
ggtaaatggctgagggttag

SEQ ID NO: 35219 - DNA, 20 bp, synthetic construct
  misc_feature 1..20: note = chemically synthesized
  source 1..20: mol_type = other DNA
tcagatgcccagaaaggaaa

SEQ ID NO: 35220 - DNA, 20 bp, synthetic construct
  misc_feature 1..20: note = chemically synthesized
  source 1..20: mol_type = other DNA
ttttctttgtgtcccacttt

SEQ ID NO: 35221 - DNA, 20 bp, synthetic construct
  misc_feature 1..20: note = chemically synthesized
  source 1..20: mol_type = other DNA
atataccagcaatgataaaa

SEQ ID NO: 35222 - DNA, 20 bp, synthetic construct
  misc_feature 1..20: note = chemically synthesized
  source 1..20: mol_type = other DNA
ttctctgaacaccactagcc

SEQ ID NO: 35223 - DNA, 20 bp, synthetic construct
  misc_feature 1..20: note = chemically synthesized
  source 1..20: mol_type = other DNA
gcatagaaaatgttgaggtt

SEQ ID NO: 35224 - DNA, 20 bp, synthetic construct
  misc_feature 1..20: note = chemically synthesized
  source 1..20: mol_type = other DNA
tctgaattaccacttcattt

SEQ ID NO: 35225 - DNA, 20 bp, synthetic construct
  misc_feature 1..20: note = chemically synthesized
  source 1..20: mol_type = other DNA
attaccacttcatttcccgg

SEQ ID NO: 35226 - DNA, 20 bp, synthetic construct
  misc_feature 1..20: note = chemically synthesized
  source 1..20: mol_type = other DNA
atttagaagactttaaccaa

SEQ ID NO: 35227 - DNA, 20 bp, synthetic construct
  misc_feature 1..20: note = chemically synthesized
  source 1..20: mol_type = other DNA
tgcaaaggttctatgtacta

SEQ ID NO: 35228 - DNA, 20 bp, synthetic construct
  misc_feature 1..20: note = chemically synthesized
  source 1..20: mol_type = other DNA
aaggcacaatgcagaggcac

SEQ ID NO: 35229 - DNA, 20 bp, synthetic construct
  misc_feature 1..20: note = chemically synthesized
  source 1..20: mol_type = other DNA
tatgttgggcaaagaaacat

SEQ ID NO: 35230 - DNA, 20 bp, synthetic construct
  misc_feature 1..20: note = chemically synthesized
  source 1..20: mol_type = other DNA
aataaatttaacctgagttc

SEQ ID NO: 35231 - DNA, 20 bp, synthetic construct
  misc_feature 1..20: note = chemically synthesized
  source 1..20: mol_type = other DNA
cactcaaattaaaatctatt

SEQ ID NO: 35232 - DNA, 20 bp, synthetic construct
  misc_feature 1..20: note = chemically synthesized
  source 1..20: mol_type = other DNA
aaatctattttttgattctc

SEQ ID NO: 35233 - DNA, 20 bp, synthetic construct
  misc_feature 1..20: note = chemically synthesized
  source 1..20: mol_type = other DNA
agttcattaaatgtaaaatt

SEQ ID NO: 35234 - DNA, 20 bp, synthetic construct
  misc_feature 1..20: note = chemically synthesized
  source 1..20: mol_type = other DNA
cagcttgctaaagaaggtca

SEQ ID NO: 35235 - DNA, 20 bp, synthetic construct
  misc_feature 1..20: note = chemically synthesized
  source 1..20: mol_type = other DNA
taaagaaggtcagactgatt

SEQ ID NO: 35236 - DNA, 20 bp, synthetic construct
  misc_feature 1..20: note = chemically synthesized
  source 1..20: mol_type = other DNA
ctgtttaagacttgtacatt

SEQ ID NO: 35237 - DNA, 20 bp, synthetic construct
  misc_feature 1..20: note = chemically synthesized
  source 1..20: mol_type = other DNA
aagacttgtacattttctgc

SEQ ID NO: 35238 - DNA, 20 bp, synthetic construct
  misc_feature 1..20: note = chemically synthesized
  source 1..20: mol_type = other DNA
ttattaactggcagcatcct

SEQ ID NO: 35239 - DNA, 20 bp, synthetic construct
  misc_feature 1..20: note = chemically synthesized
  source 1..20: mol_type = other DNA
catcctggatgttttgtatt

SEQ ID NO: 35240 - DNA, 20 bp, synthetic construct
  misc_feature 1..20: note = chemically synthesized
  source 1..20: mol_type = other DNA
ttttttttgatagagcaagc

SEQ ID NO: 35241 - DNA, 20 bp, synthetic construct
  misc_feature 1..20: note = chemically synthesized
  source 1..20: mol_type = other DNA
ccaactctcttttccccttt

SEQ ID NO: 35242 - DNA, 20 bp, synthetic construct
  misc_feature 1..20: note = chemically synthesized
  source 1..20: mol_type = other DNA
taccttgttataccatccgc

SEQ ID NO: 35243 - DNA, 20 bp, synthetic construct
  misc_feature 1..20: note = chemically synthesized
  source 1..20: mol_type = other DNA
ctcagccttgctctgaaatg

SEQ ID NO: 35244 - DNA, 20 bp, synthetic construct
  misc_feature 1..20: note = chemically synthesized
  source 1..20: mol_type = other DNA
gccttgctctgaaatgtggt

SEQ ID NO: 35245 - DNA, 20 bp, synthetic construct
  misc_feature 1..20: note = chemically synthesized
  source 1..20: mol_type = other DNA
atgtggtgtttgcttgacca

SEQ ID NO: 35246 - DNA, 20 bp, synthetic construct
  misc_feature 1..20: note = chemically synthesized
  source 1..20: mol_type = other DNA
atagatgccaccaagtgcaa

SEQ ID NO: 35247 - DNA, 20 bp, synthetic construct
  misc_feature 1..20: note = chemically synthesized
  source 1..20: mol_type = other DNA
gaataaaaaaaaaatgacta

SEQ ID NO: 35248 - DNA, 20 bp, synthetic construct
  misc_feature 1..20: note = chemically synthesized
  source 1..20: mol_type = other DNA
tgcccgtgcatttggtattt

SEQ ID NO: 35249 - DNA, 20 bp, synthetic construct
  misc_feature 1..20: note = chemically synthesized
  source 1..20: mol_type = other DNA
actgctgagagtgagagcag

SEQ ID NO: 35250 - DNA, 20 bp, synthetic construct
  misc_feature 1..20: note = chemically synthesized
  source 1..20: mol_type = other DNA
gcagtgtgaattatgctgcg

SEQ ID NO: 35251 - DNA, 20 bp, synthetic construct
  misc_feature 1..20: note = chemically synthesized
  source 1..20: mol_type = other DNA
gcgacatgattattatttag

SEQ ID NO: 35252 - DNA, 20 bp, synthetic construct
  misc_feature 1..20: note = chemically synthesized
  source 1..20: mol_type = other DNA
tccgtttcataggtgcatgc

SEQ ID NO: 35253 - DNA, 20 bp, synthetic construct
  misc_feature 1..20: note = chemically synthesized
  source 1..20: mol_type = other DNA
gcacatttttcatgtgacat

SEQ ID NO: 35254 - DNA, 20 bp, synthetic construct
  misc_feature 1..20: note = chemically synthesized
  source 1..20: mol_type = other DNA
tttctaatttatgaagccat

SEQ ID NO: 35255 - DNA, 20 bp, synthetic construct
  misc_feature 1..20: note = chemically synthesized
  source 1..20: mol_type = other DNA
cattcacacacaaagggtgt

SEQ ID NO: 35256 - DNA, 20 bp, synthetic construct
  misc_feature 1..20: note = chemically synthesized
  source 1..20: mol_type = other DNA
tataggaaaaaagaaacaaa

SEQ ID NO: 35257 - DNA, 20 bp, synthetic construct
  misc_feature 1..20: note = chemically synthesized
  source 1..20: mol_type = other DNA
tctatccactttttttttta

SEQ ID NO: 35258 - DNA, 20 bp, synthetic construct
  misc_feature 1..20: note = chemically synthesized
  source 1..20: mol_type = other DNA
gtttttcttgtagttattat

SEQ ID NO: 35259 - DNA, 20 bp, synthetic construct
  misc_feature 1..20: note = chemically synthesized
  source 1..20: mol_type = other DNA
ctctggagttatgcaaggaa

SEQ ID NO: 35260 - DNA, 20 bp, synthetic construct
  misc_feature 1..20: note = chemically synthesized
  source 1..20: mol_type = other DNA
gactgttttctttacatatg

SEQ ID NO: 35261 - DNA, 20 bp, synthetic construct
  misc_feature 1..20: note = chemically synthesized
  source 1..20: mol_type = other DNA
tgggatggcatggggttgag

SEQ ID NO: 35262 - DNA, 20 bp, synthetic construct
  misc_feature 1..20: note = chemically synthesized
  source 1..20: mol_type = other DNA
cctctctggcactctaataa

SEQ ID NO: 35263 - DNA, 20 bp, synthetic construct
  misc_feature 1..20: note = chemically synthesized
  source 1..20: mol_type = other DNA
tggcactctaataattgtgc

SEQ ID NO: 35264 - DNA, 20 bp, synthetic construct
  misc_feature 1..20: note = chemically synthesized
  source 1..20: mol_type = other DNA
ggaaacaatgcaatggcagc

SEQ ID NO: 35265 - DNA, 20 bp, synthetic construct
  misc_feature 1..20: note = chemically synthesized
  source 1..20: mol_type = other DNA
atccaggtcacgccagagga

SEQ ID NO: 35266 - DNA, 20 bp, synthetic construct
  misc_feature 1..20: note = chemically synthesized
  source 1..20: mol_type = other DNA
aggtcacgccagaggatgac

SEQ ID NO: 35267 - DNA, 20 bp, synthetic construct
  misc_feature 1..20: note = chemically synthesized
  source 1..20: mol_type = other DNA
aaatgagaagcaaggagaaa

SEQ ID NO: 35268 - DNA, 20 bp, synthetic construct
  misc_feature 1..20: note = chemically synthesized
  source 1..20: mol_type = other DNA
agcaaggagaaaagctgttt

SEQ ID NO: 35269 - DNA, 20 bp, synthetic construct
  misc_feature 1..20: note = chemically synthesized
  source 1..20: mol_type = other DNA
ccaagcagtaaggagttgtg

SEQ ID NO: 35270 - DNA, 20 bp, synthetic construct
  misc_feature 1..20: note = chemically synthesized
  source 1..20: mol_type = other DNA
aatgttaaaataatcatttc

SEQ ID NO: 35271 - DNA, 20 bp, synthetic construct
  misc_feature 1..20: note = chemically synthesized
  source 1..20: mol_type = other DNA
agacaccttctctctggatc

SEQ ID NO: 35272 - DNA, 20 bp, synthetic construct
  misc_feature 1..20: note = chemically synthesized
  source 1..20: mol_type = other DNA
ttctctctggatctgtcgat

SEQ ID NO: 35273 - DNA, 20 bp, synthetic construct
  misc_feature 1..20: note = chemically synthesized
  source 1..20: mol_type = other DNA
caccttctcattttgaagta

SEQ ID NO: 35274 - DNA, 20 bp, synthetic construct
  misc_feature 1..20: note = chemically synthesized
  source 1..20: mol_type = other DNA
ttgagctttactacacctag

SEQ ID NO: 35275 - DNA, 20 bp, synthetic construct
  misc_feature 1..20: note = chemically synthesized
  source 1..20: mol_type = other DNA
catttgcagttcagccaatg

SEQ ID NO: 35276 - DNA, 20 bp, synthetic construct
  misc_feature 1..20: note = chemically synthesized
  source 1..20: mol_type = other DNA
ttaggggttcagctcgttct

SEQ ID NO: 35277 - DNA, 20 bp, synthetic construct
  misc_feature 1..20: note = chemically synthesized
  source 1..20: mol_type = other DNA
gaggtggtggaaagagttaa

SEQ ID NO: 35278 - DNA, 20 bp, synthetic construct
  misc_feature 1..20: note = chemically synthesized
  source 1..20: mol_type = other DNA
gcagttgctgaagcgcacag

SEQ ID NO: 35279 - DNA, 20 bp, synthetic construct
  misc_feature 1..20: note = chemically synthesized
  source 1..20: mol_type = other DNA
cgcacagacatgcttactcg

SEQ ID NO: 35280 - DNA, 20 bp, synthetic construct
  misc_feature 1..20: note = chemically synthesized
  source 1..20: mol_type = other DNA
catgttggaaatttcaaaag

SEQ ID NO: 35281 - DNA, 20 bp, synthetic construct
  misc_feature 1..20: note = chemically synthesized
  source 1..20: mol_type = other DNA
tgcctcctcagctaaatgat

SEQ ID NO: 35282 - DNA, 20 bp, synthetic construct
  misc_feature 1..20: note = chemically synthesized
  source 1..20: mol_type = other DNA
gtgctctctcttgtctctga

SEQ ID NO: 35283 - DNA, 20 bp, synthetic construct
  misc_feature 1..20: note = chemically synthesized
  source 1..20: mol_type = other DNA
atgtggttttgacagatgta

SEQ ID NO: 35284 - DNA, 20 bp, synthetic construct
  misc_feature 1..20: note = chemically synthesized
  source 1..20: mol_type = other DNA
ttttgacagatgtatcttga

SEQ ID NO: 35285 - DNA, 20 bp, synthetic construct
  misc_feature 1..20: note = chemically synthesized
  source 1..20: mol_type = other DNA
agatgtatcttgattttgtt

SEQ ID NO: 35286 - DNA, 20 bp, synthetic construct
  misc_feature 1..20: note = chemically synthesized
  source 1..20: mol_type = other DNA
caaatgtccagtccagactc

SEQ ID NO: 35287 - DNA, 20 bp, synthetic construct
  misc_feature 1..20: note = chemically synthesized
  source 1..20: mol_type = other DNA
gcagggaggcagctaggtgt

SEQ ID NO: 35288 - DNA, 20 bp, synthetic construct
  misc_feature 1..20: note = chemically synthesized
  source 1..20: mol_type = other DNA
atagtgaccctcaaaacatt

SEQ ID NO: 35289 - DNA, 20 bp, synthetic construct
  misc_feature 1..20: note = chemically synthesized
  source 1..20: mol_type = other DNA
gcatgttagacaaaagtcaa

SEQ ID NO: 35290 - DNA, 20 bp, synthetic construct
  misc_feature 1..20: note = chemically synthesized
  source 1..20: mol_type = other DNA
acatgccatgcctgttggtg

SEQ ID NO: 35291 - DNA, 20 bp, synthetic construct
  misc_feature 1..20: note = chemically synthesized
  source 1..20: mol_type = other DNA
cacccagctcccgaaaggca

SEQ ID NO: 35292 - DNA, 20 bp, synthetic construct
  misc_feature 1..20: note = chemically synthesized
  source 1..20: mol_type = other DNA
cccgaaaggcaagaggtttg

SEQ ID NO: 35293 - DNA, 20 bp, synthetic construct
  misc_feature 1..20: note = chemically synthesized
  source 1..20: mol_type = other DNA
gaaaggtagtgcatatcatg

SEQ ID NO: 35294 - DNA, 20 bp, synthetic construct
  misc_feature 1..20: note = chemically synthesized
  source 1..20: mol_type = other DNA
actggaacttgtctctccga

SEQ ID NO: 35295 - DNA, 20 bp, synthetic construct
  misc_feature 1..20: note = chemically synthesized
  source 1..20: mol_type = other DNA
ataataggtcagtggtctag

SEQ ID NO: 35296 - DNA, 20 bp, synthetic construct
  misc_feature 1..20: note = chemically synthesized
  source 1..20: mol_type = other DNA
tggcattttctttctttttt

SEQ ID NO: 35297 - DNA, 20 bp, synthetic construct
  misc_feature 1..20: note = chemically synthesized
  source 1..20: mol_type = other DNA
taccttatgtgacatgtagg

SEQ ID NO: 35298 - DNA, 20 bp, synthetic construct
  misc_feature 1..20: note = chemically synthesized
  source 1..20: mol_type = other DNA
aaaatgaacagaagtgtaag

SEQ ID NO: 35299 - DNA, 20 bp, synthetic construct
  misc_feature 1..20: note = chemically synthesized
  source 1..20: mol_type = other DNA
atgaagcaagagcaggcgga

SEQ ID NO: 35300 - DNA, 20 bp, synthetic construct
  misc_feature 1..20: note = chemically synthesized
  source 1..20: mol_type = other DNA
tcgtatttacatatcgagct

SEQ ID NO: 35301 - DNA, 20 bp, synthetic construct
  misc_feature 1..20: note = chemically synthesized
  source 1..20: mol_type = other DNA
tcccaaataggttattcagt

SEQ ID NO: 35302 - DNA, 20 bp, synthetic construct
  misc_feature 1..20: note = chemically synthesized
  source 1..20: mol_type = other DNA
tatgtagggaaataagagat

SEQ ID NO: 35303 - DNA, 20 bp, synthetic construct
  misc_feature 1..20: note = chemically synthesized
  source 1..20: mol_type = other DNA
gtgcatgaataattacaaag

SEQ ID NO: 35304 - DNA, 20 bp, synthetic construct
  misc_feature 1..20: note = chemically synthesized
  source 1..20: mol_type = other DNA
caaagtcttgatttctttca

SEQ ID NO: 35305 - DNA, 20 bp, synthetic construct
  misc_feature 1..20: note = chemically synthesized
  source 1..20: mol_type = other DNA
ataattcacagtaatgaatt

SEQ ID NO: 35306 - DNA, 20 bp, synthetic construct
  misc_feature 1..20: note = chemically synthesized
  source 1..20: mol_type = other DNA
gcacgtctgcacaattccaa

SEQ ID NO: 35307 - DNA, 20 bp, synthetic construct
  misc_feature 1..20: note = chemically synthesized
  source 1..20: mol_type = other DNA
attgatgaatctctagaaga

SEQ ID NO: 35308 - DNA, 20 bp, synthetic construct
  misc_feature 1..20: note = chemically synthesized
  source 1..20: mol_type = other DNA
atttaagcgtgctgggtagg

SEQ ID NO: 35309 - DNA, 20 bp, synthetic construct
  misc_feature 1..20: note = chemically synthesized
  source 1..20: mol_type = other DNA
gctttattaaagtgatgtaa

SEQ ID NO: 35310 - DNA, 20 bp, synthetic construct
  misc_feature 1..20: note = chemically synthesized
  source 1..20: mol_type = other DNA
gatcttcttcctaagataaa

SEQ ID NO: 35311 - DNA, 20 bp, synthetic construct
  misc_feature 1..20: note = chemically synthesized
  source 1..20: mol_type = other DNA
tgtactcaggcctctccaag

SEQ ID NO: 35312 - DNA, 20 bp, synthetic construct
  misc_feature 1..20: note = chemically synthesized
  source 1..20: mol_type = other DNA
tttttttttttttttttaga

SEQ ID NO: 35313 - DNA, 20 bp, synthetic construct
  misc_feature 1..20: note = chemically synthesized
  source 1..20: mol_type = other DNA
gcccaggctggagtgcagtg

SEQ ID NO: 35314 - DNA, 20 bp, synthetic construct
  misc_feature 1..20: note = chemically synthesized
  source 1..20: mol_type = other DNA
aacctctgcctcctaggttc

SEQ ID NO: 35315 - DNA, 20 bp, synthetic construct
  misc_feature 1..20: note = chemically synthesized
  source 1..20: mol_type = other DNA
tgcctcagcctcccaagtag

SEQ ID NO: 35316 - DNA, 20 bp, synthetic construct
  misc_feature 1..20: note = chemically synthesized
  source 1..20: mol_type = other DNA
ggcgtgtgccactacgccca

SEQ ID NO: 35317 - DNA, 20 bp, synthetic construct
  misc_feature 1..20: note = chemically synthesized
  source 1..20: mol_type = other DNA
ttttgtattttcagtagagg

SEQ ID NO: 35318 - DNA, 20 bp, synthetic construct
  misc_feature 1..20: note = chemically synthesized
  source 1..20: mol_type = other DNA
tcctgacctcaggtgatcca

SEQ ID NO: 35319 - DNA, 20 bp, synthetic construct
  misc_feature 1..20: note = chemically synthesized
  source 1..20: mol_type = other DNA
tggcttggcctcccaaagtg

SEQ ID NO: 35320 - DNA, 20 bp, synthetic construct
  misc_feature 1..20: note = chemically synthesized
  source 1..20: mol_type = other DNA
cctcccaaagtgctgggatt

SEQ ID NO: 35321 - DNA, 20 bp, synthetic construct
  misc_feature 1..20: note = chemically synthesized
  source 1..20: mol_type = other DNA
gcccaaactgagtatttttt

SEQ ID NO: 35322 - DNA, 20 bp, synthetic construct
  misc_feature 1..20: note = chemically synthesized
  source 1..20: mol_type = other DNA
gtacacatagatgttaatca

SEQ ID NO: 35323 - DNA, 20 bp, synthetic construct
  misc_feature 1..20: note = chemically synthesized
  source 1..20: mol_type = other DNA
atttaaatattcaaaatatt

SEQ ID NO: 35324 - DNA, 20 bp, synthetic construct
  misc_feature 1..20: note = chemically synthesized
  source 1..20: mol_type = other DNA
tattaatttagctgggaatt

SEQ ID NO: 35325 - DNA, 20 bp, synthetic construct
  misc_feature 1..20: note = chemically synthesized
  source 1..20: mol_type = other DNA
agcagcctttgacttgcagt

SEQ ID NO: 35326 - DNA, 20 bp, synthetic construct
  misc_feature 1..20: note = chemically synthesized
  source 1..20: mol_type = other DNA
ttgcagtcagagctttcaat

SEQ ID NO: 35327 - DNA, 20 bp, synthetic construct
  misc_feature 1..20: note = chemically synthesized
  source 1..20: mol_type = other DNA
gtcagagctttcaatagggg

SEQ ID NO: 35328 - DNA, 20 bp, synthetic construct
  misc_feature 1..20: note = chemically synthesized
  source 1..20: mol_type = other DNA
agctttcaataggggttttg

SEQ ID NO: 35329 - DNA, 20 bp, synthetic construct
  misc_feature 1..20: note = chemically synthesized
  source 1..20: mol_type = other DNA
tcaataggggttttgttttg

SEQ ID NO: 35330 - DNA, 20 bp, synthetic construct
  misc_feature 1..20: note = chemically synthesized
  source 1..20: mol_type = other DNA
tgatggggggaaatattcat

SEQ ID NO: 35331 - DNA, 20 bp, synthetic construct
  misc_feature 1..20: note = chemically synthesized
  source 1..20: mol_type = other DNA
cccaaacattatcccatcat

SEQ ID NO: 35332 - DNA, 20 bp, synthetic construct
  misc_feature 1..20: note = chemically synthesized
  source 1..20: mol_type = other DNA
ttatcccatcatgtcagatt

SEQ ID NO: 35333 - DNA, 20 bp, synthetic construct
  misc_feature 1..20: note = chemically synthesized
  source 1..20: mol_type = other DNA
catcatgtcagatttgaggt

SEQ ID NO: 35334 - DNA, 20 bp, synthetic construct
  misc_feature 1..20: note = chemically synthesized
  source 1..20: mol_type = other DNA
tgcacataggaatctttaaa

SEQ ID NO: 35335 - DNA, 20 bp, synthetic construct
  misc_feature 1..20: note = chemically synthesized
  source 1..20: mol_type = other DNA
taggtttgggctgtcataaa

SEQ ID NO: 35336 - DNA, 20 bp, synthetic construct
  misc_feature 1..20: note = chemically synthesized
  source 1..20: mol_type = other DNA
ttaaaagtaaatcaaataca

SEQ ID NO: 35337 - DNA, 20 bp, synthetic construct
  misc_feature 1..20: note = chemically synthesized
  source 1..20: mol_type = other DNA
accttttctttttgtatcca

SEQ ID NO: 35338 - DNA, 20 bp, synthetic construct
  misc_feature 1..20: note = chemically synthesized
  source 1..20: mol_type = other DNA
tttttcttttctctttattt

SEQ ID NO: 35339 - DNA, 20 bp, synthetic construct
  misc_feature 1..20: note = chemically synthesized
  source 1..20: mol_type = other DNA
aaaatccagagagtagagaa

SEQ ID NO: 35340 - DNA, 20 bp, synthetic construct
  misc_feature 1..20: note = chemically synthesized
  source 1..20: mol_type = other DNA
tattgttttctaataagtac

SEQ ID NO: 35341 - DNA, 20 bp, synthetic construct
  misc_feature 1..20: note = chemically synthesized
  source 1..20: mol_type = other DNA
ctaggattttcatagggagc

SEQ ID NO: 35342 - DNA, 20 bp, synthetic construct
  misc_feature 1..20: note = chemically synthesized
  source 1..20: mol_type = other DNA
acagagaaaggttgtgaact

SEQ ID NO: 35343 - DNA, 20 bp, synthetic construct
  misc_feature 1..20: note = chemically synthesized
  source 1..20: mol_type = other DNA
aggttgtgaactggcagctt

SEQ ID NO: 35344 - DNA, 20 bp, synthetic construct
  misc_feature 1..20: note = chemically synthesized
  source 1..20: mol_type = other DNA
aattgtaaatagaactgtca

SEQ ID NO: 35345 - DNA, 20 bp, synthetic construct
  misc_feature 1..20: note = chemically synthesized
  source 1..20: mol_type = other DNA
atagaactgtcacagtgatt

SEQ ID NO: 35346 - DNA, 20 bp, synthetic construct
  misc_feature 1..20: note = chemically synthesized
  source 1..20: mol_type = other DNA
ttggcattgtcaggactttt

SEQ ID NO: 35347 - DNA, 20 bp, synthetic construct
  misc_feature 1..20: note = chemically synthesized
  source 1..20: mol_type = other DNA
tcctagtcatcttttataaa

SEQ ID NO: 35348 - DNA, 20 bp, synthetic construct
  misc_feature 1..20: note = chemically synthesized
  source 1..20: mol_type = other DNA
agatcatcctgtgtgtgatg

SEQ ID NO: 35349 - DNA, 20 bp, synthetic construct
  misc_feature 1..20: note = chemically synthesized
  source 1..20: mol_type = other DNA
gtgtgtgatgtggagattgt

SEQ ID NO: 35350 - DNA, 20 bp, synthetic construct
  misc_feature 1..20: note = chemically synthesized
  source 1..20: mol_type = other DNA
agaacaggagcagaggggga

SEQ ID NO: 35351 - DNA, 20 bp, synthetic construct
  misc_feature 1..20: note = chemically synthesized
  source 1..20: mol_type = other DNA
caaagtttccctcccgttct

SEQ ID NO: 35352 - DNA, 20 bp, synthetic construct
  misc_feature 1..20: note = chemically synthesized
  source 1..20: mol_type = other DNA
gttctctgtgtttattctgt

SEQ ID NO: 35353 - DNA, 20 bp, synthetic construct
  misc_feature 1..20: note = chemically synthesized
  source 1..20: mol_type = other DNA
tttactataaaggatctgaa

SEQ ID NO: 35354 - DNA, 20 bp, synthetic construct
  misc_feature 1..20: note = chemically synthesized
  source 1..20: mol_type = other DNA
gctcagggaggaggcgagtt

SEQ ID NO: 35355 - DNA, 20 bp, synthetic construct
  misc_feature 1..20: note = chemically synthesized
  source 1..20: mol_type = other DNA
gaaaatcattaatttcacac

SEQ ID NO: 35356 - DNA, 20 bp, synthetic construct
  misc_feature 1..20: note = chemically synthesized
  source 1..20: mol_type = other DNA
atttcacactgcagcttcca

SEQ ID NO: 35357 - DNA, 20 bp, synthetic construct
  misc_feature 1..20: note = chemically synthesized
  source 1..20: mol_type = other DNA
caaatcctagggaaacattt

SEQ ID NO: 35358 - DNA, 20 bp, synthetic construct
  misc_feature 1..20: note = chemically synthesized
  source 1..20: mol_type = other DNA
gggaaacattttttagattt

SEQ ID NO: 35359 - DNA, 20 bp, synthetic construct
  misc_feature 1..20: note = chemically synthesized
  source 1..20: mol_type = other DNA
tttttgtgatttctcaatga

SEQ ID NO: 35360 - DNA, 20 bp, synthetic construct
  misc_feature 1..20: note = chemically synthesized
  source 1..20: mol_type = other DNA
ataaaggagaataggtgaat

SEQ ID NO: 35361 - DNA, 20 bp, synthetic construct
  misc_feature 1..20: note = chemically synthesized
  source 1..20: mol_type = other DNA
cagtaagaaaggaaacaaat

SEQ ID NO: 35362 - DNA, 20 bp, synthetic construct
  misc_feature 1..20: note = chemically synthesized
  source 1..20: mol_type = other DNA
agcacagctagggagatgca

SEQ ID NO: 35363 - DNA, 20 bp, synthetic construct
  misc_feature 1..20: note = chemically synthesized
  source 1..20: mol_type = other DNA
aaaatttaccccaagcccaa

SEQ ID NO: 35364 - DNA, 20 bp, synthetic construct
  misc_feature 1..20: note = chemically synthesized
  source 1..20: mol_type = other DNA
ctgtttttacatacagtagt

SEQ ID NO: 35365 - DNA, 20 bp, synthetic construct
  misc_feature 1..20: note = chemically synthesized
  source 1..20: mol_type = other DNA
caccttgccacttttttagc

SEQ ID NO: 35366 - DNA, 20 bp, synthetic construct
  misc_feature 1..20: note = chemically synthesized
  source 1..20: mol_type = other DNA
accaagcatctttagtacct

SEQ ID NO: 35367 - DNA, 20 bp, synthetic construct
  misc_feature 1..20: note = chemically synthesized
  source 1..20: mol_type = other DNA
ctttagtacctttctgcttg

SEQ ID NO: 35368 - DNA, 20 bp, synthetic construct
  misc_feature 1..20: note = chemically synthesized
  source 1..20: mol_type = other DNA
tgtcagcagtgttgttattt

SEQ ID NO: 35369 - DNA, 20 bp, synthetic construct
  misc_feature 1..20: note = chemically synthesized
  source 1..20: mol_type = other DNA
gttatttcaaggattaaaaa

SEQ ID NO: 35370 - DNA, 20 bp, synthetic construct
  misc_feature 1..20: note = chemically synthesized
  source 1..20: mol_type = other DNA
ttaacattatttcaaatcaa

SEQ ID NO: 35371 - DNA, 20 bp, synthetic construct
  misc_feature 1..20: note = chemically synthesized
  source 1..20: mol_type = other DNA
taggtaaatgggcatcctta

SEQ ID NO: 35372 - DNA, 20 bp, synthetic construct
  misc_feature 1..20: note = chemically synthesized
  source 1..20: mol_type = other DNA
tttacctttgtaatttgcca

SEQ ID NO: 35373 - DNA, 20 bp, synthetic construct
  misc_feature 1..20: note = chemically synthesized
  source 1..20: mol_type = other DNA
atgtgctcctagagaccaaa

SEQ ID NO: 35374 - DNA, 20 bp, synthetic construct
  misc_feature 1..20: note = chemically synthesized
  source 1..20: mol_type = other DNA
aacatcagactgtatttcta

SEQ ID NO: 35375 - DNA, 20 bp, synthetic construct
  misc_feature 1..20: note = chemically synthesized
  source 1..20: mol_type = other DNA
gggttcattggaatttgtct

SEQ ID NO: 35376 - DNA, 20 bp, synthetic construct
  misc_feature 1..20: note = chemically synthesized
  source 1..20: mol_type = other DNA
catttttaaaacatttcagc

SEQ ID NO: 35377 - DNA, 20 bp, synthetic construct
  misc_feature 1..20: note = chemically synthesized
  source 1..20: mol_type = other DNA
attgagttaggttggcaagg

SEQ ID NO: 35378 - DNA, 20 bp, synthetic construct
  misc_feature 1..20: note = chemically synthesized
  source 1..20: mol_type = other DNA
ctgatcccagcagggaatag

SEQ ID NO: 35379 - DNA, 20 bp, synthetic construct
  misc_feature 1..20: note = chemically synthesized
  source 1..20: mol_type = other DNA
cagatgcggagctggaatat

SEQ ID NO: 35380 - DNA, 20 bp, synthetic construct
  misc_feature 1..20: note = chemically synthesized
  source 1..20: mol_type = other DNA
ccataataaagctgtacaca

SEQ ID NO: 35381 - DNA, 20 bp, synthetic construct
  misc_feature 1..20: note = chemically synthesized
  source 1..20: mol_type = other DNA
tggaaaaatgctcgatatgc

SEQ ID NO: 35382 - DNA, 20 bp, synthetic construct
  misc_feature 1..20: note = chemically synthesized
  source 1..20: mol_type = other DNA
gtatggagaaatgcaacata

SEQ ID NO: 35383 - DNA, 20 bp, synthetic construct
  misc_feature 1..20: note = chemically synthesized
  source 1..20: mol_type = other DNA
tgtttcatatggttaattac

SEQ ID NO: 35384 - DNA, 20 bp, synthetic construct
  misc_feature 1..20: note = chemically synthesized
  source 1..20: mol_type = other DNA
aaattttaaatagccacagt

SEQ ID NO: 35385 - DNA, 20 bp, synthetic construct
  misc_feature 1..20: note = chemically synthesized
  source 1..20: mol_type = other DNA
cagcttttcccgttaaaagt

SEQ ID NO: 35386 - DNA, 20 bp, synthetic construct
  misc_feature 1..20: note = chemically synthesized
  source 1..20: mol_type = other DNA
gagtacagtgtaaatatttg

SEQ ID NO: 35387 - DNA, 20 bp, synthetic construct
  misc_feature 1..20: note = chemically synthesized
  source 1..20: mol_type = other DNA
gagagagagagagagagaca

SEQ ID NO: 35388 - DNA, 20 bp, synthetic construct
  misc_feature 1..20: note = chemically synthesized
  source 1..20: mol_type = other DNA
ccattatatttttgagtcca

SEQ ID NO: 35389 - DNA, 20 bp, synthetic construct
  misc_feature 1..20: note = chemically synthesized
  source 1..20: mol_type = other DNA
atttttgagtccacattgct

SEQ ID NO: 35390 - DNA, 20 bp, synthetic construct
  misc_feature 1..20: note = chemically synthesized
  source 1..20: mol_type = other DNA
cacattgcttgaggttttaa

SEQ ID NO: 35391 - DNA, 20 bp, synthetic construct
  misc_feature 1..20: note = chemically synthesized
  source 1..20: mol_type = other DNA
caaaacgtataaagaaaaat

SEQ ID NO: 35392 - DNA, 20 bp, synthetic construct
  misc_feature 1..20: note = chemically synthesized
  source 1..20: mol_type = other DNA
ctgctaagaactggcgaatt

SEQ ID NO: 35393 - DNA, 20 bp, synthetic construct
  misc_feature 1..20: note = chemically synthesized
  source 1..20: mol_type = other DNA
ggatctgatgcaatgctgct

SEQ ID NO: 35394 - DNA, 20 bp, synthetic construct
  misc_feature 1..20: note = chemically synthesized
  source 1..20: mol_type = other DNA
cctctaaggcaacgcgcagt

SEQ ID NO: 35395 - DNA, 20 bp, synthetic construct
  misc_feature 1..20: note = chemically synthesized
  source 1..20: mol_type = other DNA
tatacctaaaggtgagatga

SEQ ID NO: 35396 - DNA, 20 bp, synthetic construct
  misc_feature 1..20: note = chemically synthesized
  source 1..20: mol_type = other DNA
gggacctttggtcactcaca

SEQ ID NO: 35397 - DNA, 20 bp, synthetic construct
  misc_feature 1..20: note = chemically synthesized
  source 1..20: mol_type = other DNA
tttggtcactcacaatgagt

SEQ ID NO: 35398 - DNA, 20 bp, synthetic construct
  misc_feature 1..20: note = chemically synthesized
  source 1..20: mol_type = other DNA
aatgaacaattgcacctaca

SEQ ID NO: 35399 - DNA, 20 bp, synthetic construct
  misc_feature 1..20: note = chemically synthesized
  source 1..20: mol_type = other DNA
aattgcacctacaatttgat

SEQ ID NO: 35400 - DNA, 20 bp, synthetic construct
  misc_feature 1..20: note = chemically synthesized
  source 1..20: mol_type = other DNA
gttttagatagaggcgaatc

SEQ ID NO: 35401 - DNA, 20 bp, synthetic construct
  misc_feature 1..20: note = chemically synthesized
  source 1..20: mol_type = other DNA
tatacctacctcgcctttct

SEQ ID NO: 35402 - DNA, 20 bp, synthetic construct
  misc_feature 1..20: note = chemically synthesized
  source 1..20: mol_type = other DNA
gaactttctaaaaaacacaa

SEQ ID NO: 35403 - DNA, 20 bp, synthetic construct
  misc_feature 1..20: note = chemically synthesized
  source 1..20: mol_type = other DNA
taatttttagggaaataaag

SEQ ID NO: 35404 - DNA, 20 bp, synthetic construct
  misc_feature 1..20: note = chemically synthesized
  source 1..20: mol_type = other DNA
tttagggaaataaagtgtag

SEQ ID NO: 35405 - DNA, 20 bp, synthetic construct
  misc_feature 1..20: note = chemically synthesized
  source 1..20: mol_type = other DNA
gttcctgtacattttaaata

SEQ ID NO: 35406 - DNA, 20 bp, synthetic construct
  misc_feature 1..20: note = chemically synthesized
  source 1..20: mol_type = other DNA
cttcaccaactcaaggtata

SEQ ID NO: 35407 - DNA, 20 bp, synthetic construct
  misc_feature 1..20: note = chemically synthesized
  source 1..20: mol_type = other DNA
actcaaggtataccatgatt

SEQ ID NO: 35408 - DNA, 20 bp, synthetic construct
  misc_feature 1..20: note = chemically synthesized
  source 1..20: mol_type = other DNA
aactcccctgccccgatcct

SEQ ID NO: 35409 - DNA, 20 bp, synthetic construct
  misc_feature 1..20: note = chemically synthesized
  source 1..20: mol_type = other DNA
aatgttaaatcttaaatctc

SEQ ID NO: 35410 - DNA, 20 bp, synthetic construct
  misc_feature 1..20: note = chemically synthesized
  source 1..20: mol_type = other DNA
actgaacattggctactgaa

SEQ ID NO: 35411 - DNA, 20 bp, synthetic construct
  misc_feature 1..20: note = chemically synthesized
  source 1..20: mol_type = other DNA
taaatcgtaaccttctcatg

SEQ ID NO: 35412 - DNA, 20 bp, synthetic construct
  misc_feature 1..20: note = chemically synthesized
  source 1..20: mol_type = other DNA
ccttttaactaaaacatttg

SEQ ID NO: 35413 - DNA, 20 bp, synthetic construct
  misc_feature 1..20: note = chemically synthesized
  source 1..20: mol_type = other DNA
aaaatcttattctacataca

SEQ ID NO: 35414 - DNA, 20 bp, synthetic construct
  misc_feature 1..20: note = chemically synthesized
  source 1..20: mol_type = other DNA
tcttattctacatacaagtg

SEQ ID NO: 35415 - DNA, 20 bp, synthetic construct
  misc_feature 1..20: note = chemically synthesized
  source 1..20: mol_type = other DNA
acaagtcagcacagacacgt

SEQ ID NO: 35416 - DNA, 20 bp, synthetic construct
  misc_feature 1..20: note = chemically synthesized
  source 1..20: mol_type = other DNA
attgttgttggacctgtctt

SEQ ID NO: 35417 - DNA, 20 bp, synthetic construct
  misc_feature 1..20: note = chemically synthesized
  source 1..20: mol_type = other DNA
ctgggtccccctcccctcct

SEQ ID NO: 35418 - DNA, 20 bp, synthetic construct
  misc_feature 1..20: note = chemically synthesized
  source 1..20: mol_type = other DNA
gtatttaaagaggaatatct

SEQ ID NO: 35419 - DNA, 20 bp, synthetic construct
  misc_feature 1..20: note = chemically synthesized
  source 1..20: mol_type = other DNA
gcattccactttactttctg

SEQ ID NO: 35420 - DNA, 20 bp, synthetic construct
  misc_feature 1..20: note = chemically synthesized
  source 1..20: mol_type = other DNA
catttgctctgtagtgtagc

SEQ ID NO: 35421 - DNA, 20 bp, synthetic construct
  misc_feature 1..20: note = chemically synthesized
  source 1..20: mol_type = other DNA
tgtagcattggtttctaaac

SEQ ID NO: 35422 - DNA, 20 bp, synthetic construct
  misc_feature 1..20: note = chemically synthesized
  source 1..20: mol_type = other DNA
aacttttgtttttaatctaa

SEQ ID NO: 35423 - DNA, 20 bp, synthetic construct
  misc_feature 1..20: note = chemically synthesized
  source 1..20: mol_type = other DNA
aagaaatcagggggtagtac

SEQ ID NO: 35424 - DNA, 20 bp, synthetic construct
  misc_feature 1..20: note = chemically synthesized
  source 1..20: mol_type = other DNA
gagatttttctcccttctct

SEQ ID NO: 35425 - DNA, 20 bp, synthetic construct
  misc_feature 1..20: note = chemically synthesized
  source 1..20: mol_type = other DNA
caaatgaaatccccacagca

SEQ ID NO: 35426 - DNA, 20 bp, synthetic construct
  misc_feature 1..20: note = chemically synthesized
  source 1..20: mol_type = other DNA
ataggacttaacatatactt

SEQ ID NO: 35427 - DNA, 20 bp, synthetic construct
  misc_feature 1..20: note = chemically synthesized
  source 1..20: mol_type = other DNA
gtgtgagttagcattcaagc

SEQ ID NO: 35428 - DNA, 20 bp, synthetic construct
  misc_feature 1..20: note = chemically synthesized
  source 1..20: mol_type = other DNA
tgtctgcatgacccgttcac

SEQ ID NO: 35429 - DNA, 20 bp, synthetic construct
  misc_feature 1..20: note = chemically synthesized
  source 1..20: mol_type = other DNA
agaaaggcaaatctcaagca

SEQ ID NO: 35430 - DNA, 20 bp, synthetic construct
  misc_feature 1..20: note = chemically synthesized
  source 1..20: mol_type = other DNA
agaccttgctcctctccctc

SEQ ID NO: 35431 - DNA, 20 bp, synthetic construct
  misc_feature 1..20: note = chemically synthesized
  source 1..20: mol_type = other DNA
tcctgtgcttctcctttctt

SEQ ID NO: 35432 - DNA, 20 bp, synthetic construct
  misc_feature 1..20: note = chemically synthesized
  source 1..20: mol_type = other DNA
ccactccaagccaatgaaaa

SEQ ID NO: 35433 - DNA, 20 bp, synthetic construct
  misc_feature 1..20: note = chemically synthesized
  source 1..20: mol_type = other DNA
agctgtttttataccacagt

SEQ ID NO: 35434 - DNA, 20 bp, synthetic construct
  misc_feature 1..20: note = chemically synthesized
  source 1..20: mol_type = other DNA
gagagacaacttgaggggga

SEQ ID NO: 35435 - DNA, 20 bp, synthetic construct
  misc_feature 1..20: note = chemically synthesized
  source 1..20: mol_type = other DNA
attgcctatgagcgactctg

SEQ ID NO: 35436 - DNA, 20 bp, synthetic construct
  misc_feature 1..20: note = chemically synthesized
  source 1..20: mol_type = other DNA
gggctgtttttgataaatta

SEQ ID NO: 35437 - DNA, 20 bp, synthetic construct
  misc_feature 1..20: note = chemically synthesized
  source 1..20: mol_type = other DNA
ataaattaccatgtttagag

SEQ ID NO: 35438 - DNA, 20 bp, synthetic construct
  misc_feature 1..20: note = chemically synthesized
  source 1..20: mol_type = other DNA
tagagataggtttggctctt

SEQ ID NO: 35439 - DNA, 20 bp, synthetic construct
  misc_feature 1..20: note = chemically synthesized
  source 1..20: mol_type = other DNA
ataggtttggctcttaaggg

SEQ ID NO: 35440 - DNA, 20 bp, synthetic construct
  misc_feature 1..20: note = chemically synthesized
  source 1..20: mol_type = other DNA
tttatgaacaaagtccgtga

SEQ ID NO: 35441 - DNA, 20 bp, synthetic construct
  misc_feature 1..20: note = chemically synthesized
  source 1..20: mol_type = other DNA
tccgtgacgatgtttgcagc

SEQ ID NO: 35442 - DNA, 20 bp, synthetic construct
  misc_feature 1..20: note = chemically synthesized
  source 1..20: mol_type = other DNA
tctgtttgtatcttagcccc

SEQ ID NO: 35443 - DNA, 20 bp, synthetic construct
  misc_feature 1..20: note = chemically synthesized
  source 1..20: mol_type = other DNA
ctttggcttgactagaagct

SEQ ID NO: 35444 - DNA, 20 bp, synthetic construct
  misc_feature 1..20: note = chemically synthesized
  source 1..20: mol_type = other DNA
gcttgactagaagctctatg

SEQ ID NO: 35445 - DNA, 20 bp, synthetic construct
  misc_feature 1..20: note = chemically synthesized
  source 1..20: mol_type = other DNA
aaatcataggaagaaaaacc

SEQ ID NO: 35446 - DNA, 20 bp, synthetic construct
  misc_feature 1..20: note = chemically synthesized
  source 1..20: mol_type = other DNA
tctttaatcttcaaaggcta

SEQ ID NO: 35447 - DNA, 20 bp, synthetic construct
  misc_feature 1..20: note = chemically synthesized
  source 1..20: mol_type = other DNA
aggtccttccagtaattgcg

SEQ ID NO: 35448 - DNA, 20 bp, synthetic construct
  misc_feature 1..20: note = chemically synthesized
  source 1..20: mol_type = other DNA
aattgcgaattgttttgcat

SEQ ID NO: 35449 - DNA, 20 bp, synthetic construct
  misc_feature 1..20: note = chemically synthesized
  source 1..20: mol_type = other DNA
aaggagaaaaaaaaggtgaa

SEQ ID NO: 35450 - DNA, 20 bp, synthetic construct
  misc_feature 1..20: note = chemically synthesized
  source 1..20: mol_type = other DNA
ggtgaaaattgtttatagca

SEQ ID NO: 35451 - DNA, 20 bp, synthetic construct
  misc_feature 1..20: note = chemically synthesized
  source 1..20: mol_type = other DNA
ttgtttatagcaccaagatt

SEQ ID NO: 35452 - DNA, 20 bp, synthetic construct
  misc_feature 1..20: note = chemically synthesized
  source 1..20: mol_type = other DNA
atgatgtaaaaaaattaaag

SEQ ID NO: 35453 - DNA, 20 bp, synthetic construct
  misc_feature 1..20: note = chemically synthesized
  source 1..20: mol_type = other DNA
taaagcagtgttttttcttc

SEQ ID NO: 35454 - DNA, 20 bp, synthetic construct
  misc_feature 1..20: note = chemically synthesized
  source 1..20: mol_type = other DNA
ctcaagattaaaagttcacc

SEQ ID NO: 35455 - DNA, 20 bp, synthetic construct
  misc_feature 1..20: note = chemically synthesized
  source 1..20: mol_type = other DNA
ctgttgttaatcacttttga

SEQ ID NO: 35456 - DNA, 20 bp, synthetic construct
  misc_feature 1..20: note = chemically synthesized
  source 1..20: mol_type = other DNA
caaaatgatgcatcttcttg

SEQ ID NO: 35457 - DNA, 20 bp, synthetic construct
  misc_feature 1..20: note = chemically synthesized
  source 1..20: mol_type = other DNA
gtctaaccttgagtaattac

SEQ ID NO: 35458 - DNA, 20 bp, synthetic construct
  misc_feature 1..20: note = chemically synthesized
  source 1..20: mol_type = other DNA
tgagtaattacatatgtttt

SEQ ID NO: 35459 - DNA, 20 bp, synthetic construct
  misc_feature 1..20: note = chemically synthesized
  source 1..20: mol_type = other DNA
cgttttcttttaacgttaag

SEQ ID NO: 35460 - DNA, 20 bp, synthetic construct
  misc_feature 1..20: note = chemically synthesized
  source 1..20: mol_type = other DNA
gaagactgtaaaatttaagt

SEQ ID NO: 35461 - DNA, 20 bp, synthetic construct
  misc_feature 1..20: note = chemically synthesized
  source 1..20: mol_type = other DNA
tacatagagaaatatgtatt

SEQ ID NO: 35462 - DNA, 20 bp, synthetic construct
  misc_feature 1..20: note = chemically synthesized
  source 1..20: mol_type = other DNA
gttccccacgaacattgcag

SEQ ID NO: 35463 - DNA, 20 bp, synthetic construct
  misc_feature 1..20: note = chemically synthesized
  source 1..20: mol_type = other DNA
tgcagggcagttttattgtt

SEQ ID NO: 35464 - DNA, 20 bp, synthetic construct
  misc_feature 1..20: note = chemically synthesized
  source 1..20: mol_type = other DNA
agaactacaaacctttctaa

SEQ ID NO: 35465 - DNA, 20 bp, synthetic construct
  misc_feature 1..20: note = chemically synthesized
  source 1..20: mol_type = other DNA
caaacctttctaacaatgct

SEQ ID NO: 35466 - DNA, 20 bp, synthetic construct
  misc_feature 1..20: note = chemically synthesized
  source 1..20: mol_type = other DNA
ggcacctaaaggacttgggc

SEQ ID NO: 35467 - DNA, 20 bp, synthetic construct
  misc_feature 1..20: note = chemically synthesized
  source 1..20: mol_type = other DNA
tcttttatcttttagatcaa

SEQ ID NO: 35468 - DNA, 20 bp, synthetic construct
  misc_feature 1..20: note = chemically synthesized
  source 1..20: mol_type = other DNA
gtgaaaacaaggtgctaact

SEQ ID NO: 35469 - DNA, 20 bp, synthetic construct
  misc_feature 1..20: note = chemically synthesized
  source 1..20: mol_type = other DNA
acaaggtgctaactaacggt

SEQ ID NO: 35470 - DNA, 20 bp, synthetic construct
  misc_feature 1..20: note = chemically synthesized
  source 1..20: mol_type = other DNA
ggtttccgatttttgagagc

SEQ ID NO: 35471 - DNA, 20 bp, synthetic construct
  misc_feature 1..20: note = chemically synthesized
  source 1..20: mol_type = other DNA
tttttgagagcctgtgattt

SEQ ID NO: 35472 - DNA, 20 bp, synthetic construct
  misc_feature 1..20: note = chemically synthesized
  source 1..20: mol_type = other DNA
ctgtattattgatgttcatc

SEQ ID NO: 35473 - DNA, 20 bp, synthetic construct
  misc_feature 1..20: note = chemically synthesized
  source 1..20: mol_type = other DNA
ttgatgttcatctttggttt

SEQ ID NO: 35474 - DNA, 20 bp, synthetic construct
  misc_feature 1..20: note = chemically synthesized
  source 1..20: mol_type = other DNA
tcagaacagtgtaactgata

SEQ ID NO: 35475 - DNA, 20 bp, synthetic construct
  misc_feature 1..20: note = chemically synthesized
  source 1..20: mol_type = other DNA
actgatattctgattaaaac

SEQ ID NO: 35476 - DNA, 20 bp, synthetic construct
  misc_feature 1..20: note = chemically synthesized
  source 1..20: mol_type = other DNA
ccatccataccatgctaaaa

SEQ ID NO: 35477 - DNA, 20 bp, synthetic construct
  misc_feature 1..20: note = chemically synthesized
  source 1..20: mol_type = other DNA
ataccatgctaaaagcatgc

SEQ ID NO: 35478 - DNA, 20 bp, synthetic construct
  misc_feature 1..20: note = chemically synthesized
  source 1..20: mol_type = other DNA
ggggtccatctgtgagatcc

SEQ ID NO: 35479 - DNA, 20 bp, synthetic construct
  misc_feature 1..20: note = chemically synthesized
  source 1..20: mol_type = other DNA
gctttttatttgtgtgtgtc

SEQ ID NO: 35480 - DNA, 20 bp, synthetic construct
  misc_feature 1..20: note = chemically synthesized
  source 1..20: mol_type = other DNA
ctccggccaactgcatgcat

SEQ ID NO: 35481 - DNA, 20 bp, synthetic construct
  misc_feature 1..20: note = chemically synthesized
  source 1..20: mol_type = other DNA
cactatcattttcttgatgt

SEQ ID NO: 35482 - DNA, 20 bp, synthetic construct
  misc_feature 1..20: note = chemically synthesized
  source 1..20: mol_type = other DNA
aagcaacactaacttatgca

SEQ ID NO: 35483 - DNA, 20 bp, synthetic construct
  misc_feature 1..20: note = chemically synthesized
  source 1..20: mol_type = other DNA
ccttattattcagtctatcc

SEQ ID NO: 35484 - DNA, 20 bp, synthetic construct
  misc_feature 1..20: note = chemically synthesized
  source 1..20: mol_type = other DNA
ctatccaggagttttgccat

SEQ ID NO: 35485 - DNA, 20 bp, synthetic construct
  misc_feature 1..20: note = chemically synthesized
  source 1..20: mol_type = other DNA
cacagccctagaagcagcaa

SEQ ID NO: 35486 - DNA, 20 bp, synthetic construct
  misc_feature 1..20: note = chemically synthesized
  source 1..20: mol_type = other DNA
aaaacgtgagcatggaggag

SEQ ID NO: 35487 - DNA, 20 bp, synthetic construct
  misc_feature 1..20: note = chemically synthesized
  source 1..20: mol_type = other DNA
agtcaaaagtgactggaaac

SEQ ID NO: 35488 - DNA, 20 bp, synthetic construct
  misc_feature 1..20: note = chemically synthesized
  source 1..20: mol_type = other DNA
tggagtacaaatttcattct

SEQ ID NO: 35489 - DNA, 20 bp, synthetic construct
  misc_feature 1..20: note = chemically synthesized
  source 1..20: mol_type = other DNA
gcataatctagtgtacccag

SEQ ID NO: 35490 - DNA, 20 bp, synthetic construct
  misc_feature 1..20: note = chemically synthesized
  source 1..20: mol_type = other DNA
cattagctccttcaaaatca

SEQ ID NO: 35491 - DNA, 20 bp, synthetic construct
  misc_feature 1..20: note = chemically synthesized
  source 1..20: mol_type = other DNA
ggaatttacagatggtgaaa

SEQ ID NO: 35492 - DNA, 20 bp, synthetic construct
  misc_feature 1..20: note = chemically synthesized
  source 1..20: mol_type = other DNA
ttgttttaatccaaaccagt

SEQ ID NO: 35493 - DNA, 20 bp, synthetic construct
  misc_feature 1..20: note = chemically synthesized
  source 1..20: mol_type = other DNA
atctacctttaaaaaaattg

SEQ ID NO: 35494 - DNA, 20 bp, synthetic construct
  misc_feature 1..20: note = chemically synthesized
  source 1..20: mol_type = other DNA
gaatccatctcactgtggca

SEQ ID NO: 35495 - DNA, 20 bp, synthetic construct
  misc_feature 1..20: note = chemically synthesized
  source 1..20: mol_type = other DNA
taaaaaactggaaatgacag

SEQ ID NO: 35496 - DNA, 20 bp, synthetic construct
  misc_feature 1..20: note = chemically synthesized
  source 1..20: mol_type = other DNA
tctcaaaatttgaagaactt

SEQ ID NO: 35497 - DNA, 20 bp, synthetic construct
  misc_feature 1..20: note = chemically synthesized
  source 1..20: mol_type = other DNA
caaatttcttcctgatctta

SEQ ID NO: 35498 - DNA, 20 bp, synthetic construct
  misc_feature 1..20: note = chemically synthesized
  source 1..20: mol_type = other DNA
ttcttcctgatcttaattag

SEQ ID NO: 35499 - DNA, 20 bp, synthetic construct
  misc_feature 1..20: note = chemically synthesized
  source 1..20: mol_type = other DNA
ttcgattgtgcggtgggtgt

SEQ ID NO: 35500 - DNA, 20 bp, synthetic construct
  misc_feature 1..20: note = chemically synthesized
  source 1..20: mol_type = other DNA
ggcggtgtggcaggaacaaa

SEQ ID NO: 35501 - DNA, 20 bp, synthetic construct
  misc_feature 1..20: note = chemically synthesized
  source 1..20: mol_type = other DNA
aggcagcttccaacgctggt

SEQ ID NO: 35502 - DNA, 20 bp, synthetic construct
  misc_feature 1..20: note = chemically synthesized
  source 1..20: mol_type = other DNA
gtcttgagttcttcatttag

SEQ ID NO: 35503 - DNA, 20 bp, synthetic construct
  misc_feature 1..20: note = chemically synthesized
  source 1..20: mol_type = other DNA
gcttatttcccactgggtct

SEQ ID NO: 35504 - DNA, 20 bp, synthetic construct
  misc_feature 1..20: note = chemically synthesized
  source 1..20: mol_type = other DNA
ggcactgccaaaacacgctc

SEQ ID NO: 35505 - DNA, 20 bp, synthetic construct
  misc_feature 1..20: note = chemically synthesized
  source 1..20: mol_type = other DNA
gtcctgccaaagtgtatgga

SEQ ID NO: 35506 - DNA, 20 bp, synthetic construct
  misc_feature 1..20: note = chemically synthesized
  source 1..20: mol_type = other DNA
gaaataataaaagccctggc

SEQ ID NO: 35507 - DNA, 20 bp, synthetic construct
  misc_feature 1..20: note = chemically synthesized
  source 1..20: mol_type = other DNA
gccaaggcttatgaatctat

SEQ ID NO: 35508 - DNA, 20 bp, synthetic construct
  misc_feature 1..20: note = chemically synthesized
  source 1..20: mol_type = other DNA
ttccgtactggttgtaaaaa

SEQ ID NO: 35509 - DNA, 20 bp, synthetic construct
  misc_feature 1..20: note = chemically synthesized
  source 1..20: mol_type = other DNA
aagtcagggtaaattaatgg

SEQ ID NO: 35510 - DNA, 20 bp, synthetic construct
  misc_feature 1..20: note = chemically synthesized
  source 1..20: mol_type = other DNA
tcccagtatttaatttattt

SEQ ID NO: 35511 - DNA, 20 bp, synthetic construct
  misc_feature 1..20: note = chemically synthesized
  source 1..20: mol_type = other DNA
gtgttagtgtgagagggtcg

SEQ ID NO: 35512 - DNA, 20 bp, synthetic construct
  misc_feature 1..20: note = chemically synthesized
  source 1..20: mol_type = other DNA
gaaaagattctgtgggtcca

SEQ ID NO: 35513 - DNA, 20 bp, synthetic construct
  misc_feature 1..20: note = chemically synthesized
  source 1..20: mol_type = other DNA
taatttctgaggttgccagg

SEQ ID NO: 35514 - DNA, 20 bp, synthetic construct
  misc_feature 1..20: note = chemically synthesized
  source 1..20: mol_type = other DNA
cctggccatggtgtagccag

SEQ ID NO: 35515 - DNA, 20 bp, synthetic construct
  misc_feature 1..20: note = chemically synthesized
  source 1..20: mol_type = other DNA
actggtttagcagacagaat

SEQ ID NO: 35516 - DNA, 20 bp, synthetic construct
  misc_feature 1..20: note = chemically synthesized
  source 1..20: mol_type = other DNA
gtttagcagacagaatgata

SEQ ID NO: 35517 - DNA, 20 bp, synthetic construct
  misc_feature 1..20: note = chemically synthesized
  source 1..20: mol_type = other DNA
tgcgccctgaacttgaagca

SEQ ID NO: 35518 - DNA, 20 bp, synthetic construct
  misc_feature 1..20: note = chemically synthesized
  source 1..20: mol_type = other DNA
aagcgcagacataatcgatg

SEQ ID NO: 35519 - DNA, 20 bp, synthetic construct
  misc_feature 1..20: note = chemically synthesized
  source 1..20: mol_type = other DNA
cagatgaacttggccgaggg

SEQ ID NO: 35520 - DNA, 20 bp, synthetic construct
  misc_feature 1..20: note = chemically synthesized
  source 1..20: mol_type = other DNA
ccagtgcagccaagcctttt

SEQ ID NO: 35521 - DNA, 20 bp, synthetic construct
  misc_feature 1..20: note = chemically synthesized
  source 1..20: mol_type = other DNA
atgcgggttctatcatcttt

SEQ ID NO: 35522 - DNA, 20 bp, synthetic construct
  misc_feature 1..20: note = chemically synthesized
  source 1..20: mol_type = other DNA
taacccgagggccagatggg

SEQ ID NO: 35523 - DNA, 20 bp, synthetic construct
  misc_feature 1..20: note = chemically synthesized
  source 1..20: mol_type = other DNA
tttttttttttttaaatggc

SEQ ID NO: 35524 - DNA, 20 bp, synthetic construct
  misc_feature 1..20: note = chemically synthesized
  source 1..20: mol_type = other DNA
ccaggaccgatggcaaaccc

SEQ ID NO: 35525 - DNA, 20 bp, synthetic construct
  misc_feature 1..20: note = chemically synthesized
  source 1..20: mol_type = other DNA
ccgatggcaaacccatgtgt

SEQ ID NO: 35526 - DNA, 20 bp, synthetic construct
  misc_feature 1..20: note = chemically synthesized
  source 1..20: mol_type = other DNA
tggcaaacccatgtgtttgg

SEQ ID NO: 35527 - DNA, 20 bp, synthetic construct
  misc_feature 1..20: note = chemically synthesized
  source 1..20: mol_type = other DNA
tgtgtttgggcttgttttgt

SEQ ID NO: 35528 - DNA, 20 bp, synthetic construct
  misc_feature 1..20: note = chemically synthesized
  source 1..20: mol_type = other DNA
cttatcttcttggcctcttc

SEQ ID NO: 35529 - DNA, 20 bp, synthetic construct
  misc_feature 1..20: note = chemically synthesized
  source 1..20: mol_type = other DNA
cttggcctcttcctgtgttt

SEQ ID NO: 35530 - DNA, 20 bp, synthetic construct
  misc_feature 1..20: note = chemically synthesized
  source 1..20: mol_type = other DNA
gaatcccacctaggggacac

SEQ ID NO: 35531 - DNA, 20 bp, synthetic construct
  misc_feature 1..20: note = chemically synthesized
  source 1..20: mol_type = other DNA
aggggacaccagggctttca

SEQ ID NO: 35532 - DNA, 20 bp, synthetic construct
  misc_feature 1..20: note = chemically synthesized
  source 1..20: mol_type = other DNA
ggctaggcctcataagggag

SEQ ID NO: 35533 - DNA, 20 bp, synthetic construct
  misc_feature 1..20: note = chemically synthesized
  source 1..20: mol_type = other DNA
ctgggaaaatttgggggcct

SEQ ID NO: 35534 - DNA, 20 bp, synthetic construct
  misc_feature 1..20: note = chemically synthesized
  source 1..20: mol_type = other DNA
cttctttcttttcttcttct

SEQ ID NO: 35535 - DNA, 20 bp, synthetic construct
  misc_feature 1..20: note = chemically synthesized
  source 1..20: mol_type = other DNA
tctttgattacacgaaataa

SEQ ID NO: 35536 - DNA, 20 bp, synthetic construct
  misc_feature 1..20: note = chemically synthesized
  source 1..20: mol_type = other DNA
tttctagttgtgcaaccttg

SEQ ID NO: 35537 - DNA, 20 bp, synthetic construct
  misc_feature 1..20: note = chemically synthesized
  source 1..20: mol_type = other DNA
gcagatttcattccctaagc

SEQ ID NO: 35538 - DNA, 20 bp, synthetic construct
  misc_feature 1..20: note = chemically synthesized
  source 1..20: mol_type = other DNA
ctgtaaagtggggagaatca

SEQ ID NO: 35539 - DNA, 20 bp, synthetic construct
  misc_feature 1..20: note = chemically synthesized
  source 1..20: mol_type = other DNA
ttactattacggttatgact

SEQ ID NO: 35540 - DNA, 20 bp, synthetic construct
  misc_feature 1..20: note = chemically synthesized
  source 1..20: mol_type = other DNA
ctaaagagctcagggtctca

SEQ ID NO: 35541 - DNA, 20 bp, synthetic construct
  misc_feature 1..20: note = chemically synthesized
  source 1..20: mol_type = other DNA
tagacgtgtgttgccttacg

SEQ ID NO: 35542 - DNA, 20 bp, synthetic construct
  misc_feature 1..20: note = chemically synthesized
  source 1..20: mol_type = other DNA
tgtgacacagttactctggg

SEQ ID NO: 35543 - DNA, 20 bp, synthetic construct
  misc_feature 1..20: note = chemically synthesized
  source 1..20: mol_type = other DNA
caccctctgctacctcttca

SEQ ID NO: 35544 - DNA, 20 bp, synthetic construct
  misc_feature 1..20: note = chemically synthesized
  source 1..20: mol_type = other DNA
tgctacctcttcagtacgtt

SEQ ID NO: 35545 - DNA, 20 bp, synthetic construct
  misc_feature 1..20: note = chemically synthesized
  source 1..20: mol_type = other DNA
ccctcccatgggttctgtgg

SEQ ID NO: 35546 - DNA, 20 bp, synthetic construct
  misc_feature 1..20: note = chemically synthesized
  source 1..20: mol_type = other DNA
aaaagttgcaatgtaaggaa

SEQ ID NO: 35547 - DNA, 20 bp, synthetic construct
  misc_feature 1..20: note = chemically synthesized
  source 1..20: mol_type = other DNA
ggtcctgagaaacagaggga

SEQ ID NO: 35548 - DNA, 20 bp, synthetic construct
  misc_feature 1..20: note = chemically synthesized
  source 1..20: mol_type = other DNA
gaaacagagggaggaggttt

SEQ ID NO: 35549 - DNA, 20 bp, synthetic construct
  misc_feature 1..20: note = chemically synthesized
  source 1..20: mol_type = other DNA
aggaggttttactgtttgtg

SEQ ID NO: 35550 - DNA, 20 bp, synthetic construct
  misc_feature 1..20: note = chemically synthesized
  source 1..20: mol_type = other DNA
ctcggacttttaagaagtgg

SEQ ID NO: 35551 - DNA, 20 bp, synthetic construct
  misc_feature 1..20: note = chemically synthesized
  source 1..20: mol_type = other DNA
tgagtgagtgtgcgtggcag

SEQ ID NO: 35552 - DNA, 20 bp, synthetic construct
  misc_feature 1..20: note = chemically synthesized
  source 1..20: mol_type = other DNA
atgggttctggggggtcata

SEQ ID NO: 35553 - DNA, 20 bp, synthetic construct
  misc_feature 1..20: note = chemically synthesized
  source 1..20: mol_type = other DNA
ggggtcataatctgcttcga

SEQ ID NO: 35554 - DNA, 20 bp, synthetic construct
  misc_feature 1..20: note = chemically synthesized
  source 1..20: mol_type = other DNA
aggcatgctggaaacttgag

SEQ ID NO: 35555 - DNA, 20 bp, synthetic construct
  misc_feature 1..20: note = chemically synthesized
  source 1..20: mol_type = other DNA
acagctccatatgatccgca

SEQ ID NO: 35556 - DNA, 20 bp, synthetic construct
  misc_feature 1..20: note = chemically synthesized
  source 1..20: mol_type = other DNA
cgcatgtggcttccccagag

SEQ ID NO: 35557 - DNA, 20 bp, synthetic construct
  misc_feature 1..20: note = chemically synthesized
  source 1..20: mol_type = other DNA
aagacctgaggttcgttgca

SEQ ID NO: 35558 - DNA, 20 bp, synthetic construct
  misc_feature 1..20: note = chemically synthesized
  source 1..20: mol_type = other DNA
tgtattccaaaaccaaatgt

SEQ ID NO: 35559 - DNA, 20 bp, synthetic construct
  misc_feature 1..20: note = chemically synthesized
  source 1..20: mol_type = other DNA
ggtcacatccaggttgtctt

SEQ ID NO: 35560 - DNA, 20 bp, synthetic construct
  misc_feature 1..20: note = chemically synthesized
  source 1..20: mol_type = other DNA
tccatgtgggtcaagagctc

SEQ ID NO: 35561 - DNA, 20 bp, synthetic construct
  misc_feature 1..20: note = chemically synthesized
  source 1..20: mol_type = other DNA
gtcaccctggaagagaagct

SEQ ID NO: 35562 - DNA, 20 bp, synthetic construct
  misc_feature 1..20: note = chemically synthesized
  source 1..20: mol_type = other DNA
tgaaatgataaaaggcgtat

SEQ ID NO: 35563 - DNA, 20 bp, synthetic construct
  misc_feature 1..20: note = chemically synthesized
  source 1..20: mol_type = other DNA
tatttccctcgctcgcaccc

SEQ ID NO: 35564 - DNA, 20 bp, synthetic construct
  misc_feature 1..20: note = chemically synthesized
  source 1..20: mol_type = other DNA
ccacatctctgatgatggcc

SEQ ID NO: 35565 - DNA, 20 bp, synthetic construct
  misc_feature 1..20: note = chemically synthesized
  source 1..20: mol_type = other DNA
ccttttgtttctttttcttt

SEQ ID NO: 35566 - DNA, 20 bp, synthetic construct
  misc_feature 1..20: note = chemically synthesized
  source 1..20: mol_type = other DNA
cgggtagtatttctacttca

SEQ ID NO: 35567 - DNA, 20 bp, synthetic construct
  misc_feature 1..20: note = chemically synthesized
  source 1..20: mol_type = other DNA
gttcctggtgctaagtagtt

SEQ ID NO: 35568 - DNA, 20 bp, synthetic construct
  misc_feature 1..20: note = chemically synthesized
  source 1..20: mol_type = other DNA
ttaagaatgcgttggctggg

SEQ ID NO: 35569 - DNA, 20 bp, synthetic construct
  misc_feature 1..20: note = chemically synthesized
  source 1..20: mol_type = other DNA
gcattataggtcagcccttt

SEQ ID NO: 35570 - DNA, 20 bp, synthetic construct
  misc_feature 1..20: note = chemically synthesized
  source 1..20: mol_type = other DNA
acagttgtcatgtaatttat

SEQ ID NO: 35571 - DNA, 20 bp, synthetic construct
  misc_feature 1..20: note = chemically synthesized
  source 1..20: mol_type = other DNA
gacatagacacactgcactt

SEQ ID NO: 35572 - DNA, 20 bp, synthetic construct
  misc_feature 1..20: note = chemically synthesized
  source 1..20: mol_type = other DNA
cactgcacttgaaggcttgg

SEQ ID NO: 35573 - DNA, 20 bp, synthetic construct
  misc_feature 1..20: note = chemically synthesized
  source 1..20: mol_type = other DNA
ttgggctaatctaaatgcgc

SEQ ID NO: 35574 - DNA, 20 bp, synthetic construct
  misc_feature 1..20: note = chemically synthesized
  source 1..20: mol_type = other DNA
aatggtaaaggataaacata

SEQ ID NO: 35575 - DNA, 20 bp, synthetic construct
  misc_feature 1..20: note = chemically synthesized
  source 1..20: mol_type = other DNA
taaaggataaacatatgctg

SEQ ID NO: 35576 - DNA, 20 bp, synthetic construct
  misc_feature 1..20: note = chemically synthesized
  source 1..20: mol_type = other DNA
ctttgtttgtcttatttatt

SEQ ID NO: 35577 - DNA, 20 bp, synthetic construct
  misc_feature 1..20: note = chemically synthesized
  source 1..20: mol_type = other DNA
agagcaaaatatagccaacc

SEQ ID NO: 35578 - DNA, 20 bp, synthetic construct
  misc_feature 1..20: note = chemically synthesized
  source 1..20: mol_type = other DNA
agaacacatcatcccaaaat

SEQ ID NO: 35579 - DNA, 20 bp, synthetic construct
  misc_feature 1..20: note = chemically synthesized
  source 1..20: mol_type = other DNA
attctgaatttgatcaaatc

SEQ ID NO: 35580 - DNA, 20 bp, synthetic construct
  misc_feature 1..20: note = chemically synthesized
  source 1..20: mol_type = other DNA
agtttctgaatttgatcaaa

SEQ ID NO: 35581 - DNA, 20 bp, synthetic construct
  misc_feature 1..20: note = chemically synthesized
  source 1..20: mol_type = other DNA
ttcagggtgagagaaaccat

SEQ ID NO: 35582 - DNA, 20 bp, synthetic construct
  misc_feature 1..20: note = chemically synthesized
  source 1..20: mol_type = other DNA
agagcattatgataaactat

SEQ ID NO: 35583 - DNA, 20 bp, synthetic construct
  misc_feature 1..20: note = chemically synthesized
  source 1..20: mol_type = other DNA
gccatggagaaattaccaag

SEQ ID NO: 35584 - DNA, 20 bp, synthetic construct
  misc_feature 1..20: note = chemically synthesized
  source 1..20: mol_type = other DNA
atttaaggtcttttgggcat

SEQ ID NO: 35585 - DNA, 20 bp, synthetic construct
  misc_feature 1..20: note = chemically synthesized
  source 1..20: mol_type = other DNA
gacccttattgtatcatgct

SEQ ID NO: 35586 - DNA, 20 bp, synthetic construct
  misc_feature 1..20: note = chemically synthesized
  source 1..20: mol_type = other DNA
ggctcccttcacctgttagc

SEQ ID NO: 35587 - DNA, 20 bp, synthetic construct
  misc_feature 1..20: note = chemically synthesized
  source 1..20: mol_type = other DNA
cttgtaaagtaggtaaaata

SEQ ID NO: 35588 - DNA, 20 bp, synthetic construct
  misc_feature 1..20: note = chemically synthesized
  source 1..20: mol_type = other DNA
gcatagtatgaacaccactg

SEQ ID NO: 35589 - DNA, 20 bp, synthetic construct
  misc_feature 1..20: note = chemically synthesized
  source 1..20: mol_type = other DNA
aagacagcagaatattattt

SEQ ID NO: 35590 - DNA, 20 bp, synthetic construct
  misc_feature 1..20: note = chemically synthesized
  source 1..20: mol_type = other DNA
ctcaaagatggaagctatgg

SEQ ID NO: 35591 - DNA, 20 bp, synthetic construct
  misc_feature 1..20: note = chemically synthesized
  source 1..20: mol_type = other DNA
atggaagctatggtggagat

SEQ ID NO: 35592 - DNA, 20 bp, synthetic construct
  misc_feature 1..20: note = chemically synthesized
  source 1..20: mol_type = other DNA
agctatggtggagattaagg

SEQ ID NO: 35593 - DNA, 20 bp, synthetic construct
  misc_feature 1..20: note = chemically synthesized
  source 1..20: mol_type = other DNA
gtggagattaaggcttggat

SEQ ID NO: 35594 - DNA, 20 bp, synthetic construct
  misc_feature 1..20: note = chemically synthesized
  source 1..20: mol_type = other DNA
ggattcgtgattccccaaca

SEQ ID NO: 35595 - DNA, 20 bp, synthetic construct
  misc_feature 1..20: note = chemically synthesized
  source 1..20: mol_type = other DNA
atggaatggtgataattcac

SEQ ID NO: 35596 - DNA, 20 bp, synthetic construct
  misc_feature 1..20: note = chemically synthesized
  source 1..20: mol_type = other DNA
tcacagaagtttccagcctt

SEQ ID NO: 35597 - DNA, 20 bp, synthetic construct
  misc_feature 1..20: note = chemically synthesized
  source 1..20: mol_type = other DNA
tccatcttttaattgttgca

SEQ ID NO: 35598 - DNA, 20 bp, synthetic construct
  misc_feature 1..20: note = chemically synthesized
  source 1..20: mol_type = other DNA
gaatgtaatgtgtattttct

SEQ ID NO: 35599 - DNA, 20 bp, synthetic construct
  misc_feature 1..20: note = chemically synthesized
  source 1..20: mol_type = other DNA
gtaatgtgtattttctccaa

SEQ ID NO: 35600 - DNA, 20 bp, synthetic construct
  misc_feature 1..20: note = chemically synthesized
  source 1..20: mol_type = other DNA
gtaactacatcaaaatagaa

SEQ ID NO: 35601 - DNA, 20 bp, synthetic construct
  misc_feature 1..20: note = chemically synthesized
  source 1..20: mol_type = other DNA
cctccttcctcctcccaaaa

SEQ ID NO: 35602 - DNA, 20 bp, synthetic construct
  misc_feature 1..20: note = chemically synthesized
  source 1..20: mol_type = other DNA
gagtccctggagttaggaat

SEQ ID NO: 35603 - DNA, 20 bp, synthetic construct
  misc_feature 1..20: note = chemically synthesized
  source 1..20: mol_type = other DNA
tgttaaaggcatccgatgca

SEQ ID NO: 35604 - DNA, 20 bp, synthetic construct
  misc_feature 1..20: note = chemically synthesized
  source 1..20: mol_type = other DNA
tgcaatccattttttaaact

SEQ ID NO: 35605 - DNA, 20 bp, synthetic construct
  misc_feature 1..20: note = chemically synthesized
  source 1..20: mol_type = other DNA
ttttaaacttggtgtttacc

SEQ ID NO: 35606 - DNA, 20 bp, synthetic construct
  misc_feature 1..20: note = chemically synthesized
  source 1..20: mol_type = other DNA
ttaccattggcttttagcac

SEQ ID NO: 35607 - DNA, 20 bp, synthetic construct
  misc_feature 1..20: note = chemically synthesized
  source 1..20: mol_type = other DNA
ttggcttttagcacggatgt

SEQ ID NO: 35608 - DNA, 20 bp, synthetic construct
  misc_feature 1..20: note = chemically synthesized
  source 1..20: mol_type = other DNA
gtggcattgaatgagatatg

SEQ ID NO: 35609 - DNA, 20 bp, synthetic construct
  misc_feature 1..20: note = chemically synthesized
  source 1..20: mol_type = other DNA
acacaggcactcttgagatc

SEQ ID NO: 35610 - DNA, 20 bp, synthetic construct
  misc_feature 1..20: note = chemically synthesized
  source 1..20: mol_type = other DNA
attactgcctctttaattta

SEQ ID NO: 35611 - DNA, 20 bp, synthetic construct
  misc_feature 1..20: note = chemically synthesized
  source 1..20: mol_type = other DNA
ctctttaatttataatgttt

SEQ ID NO: 35612 - DNA, 20 bp, synthetic construct
  misc_feature 1..20: note = chemically synthesized
  source 1..20: mol_type = other DNA
ctgtaagggcactggtaatc

SEQ ID NO: 35613 - DNA, 20 bp, synthetic construct
  misc_feature 1..20: note = chemically synthesized
  source 1..20: mol_type = other DNA
gggcactggtaatcagctgt

SEQ ID NO: 35614 - DNA, 20 bp, synthetic construct
  misc_feature 1..20: note = chemically synthesized
  source 1..20: mol_type = other DNA
aaaaacaaaaacaaggaaca

SEQ ID NO: 35615 - DNA, 20 bp, synthetic construct
  misc_feature 1..20: note = chemically synthesized
  source 1..20: mol_type = other DNA
caaaattatgtattcagaca

SEQ ID NO: 35616 - DNA, 20 bp, synthetic construct
  misc_feature 1..20: note = chemically synthesized
  source 1..20: mol_type = other DNA
tatgtattcagacatgaagt

SEQ ID NO: 35617 - DNA, 20 bp, synthetic construct
  misc_feature 1..20: note = chemically synthesized
  source 1..20: mol_type = other DNA
agctgtgtcacaatgtgata

SEQ ID NO: 35618 - DNA, 20 bp, synthetic construct
  misc_feature 1..20: note = chemically synthesized
  source 1..20: mol_type = other DNA
attatatttaccatggcata

SEQ ID NO: 35619 - DNA, 20 bp, synthetic construct
  misc_feature 1..20: note = chemically synthesized
  source 1..20: mol_type = other DNA
gatgataaatgaagataccc

SEQ ID NO: 35620 - DNA, 20 bp, synthetic construct
  misc_feature 1..20: note = chemically synthesized
  source 1..20: mol_type = other DNA
tatgggaacataattgactt

SEQ ID NO: 35621 - DNA, 20 bp, synthetic construct
  misc_feature 1..20: note = chemically synthesized
  source 1..20: mol_type = other DNA
caaagttttagatctctggc

SEQ ID NO: 35622 - DNA, 20 bp, synthetic construct
  misc_feature 1..20: note = chemically synthesized
  source 1..20: mol_type = other DNA
atagtccattacattaatgt

SEQ ID NO: 35623 - DNA, 20 bp, synthetic construct
  misc_feature 1..20: note = chemically synthesized
  source 1..20: mol_type = other DNA
gtctgtgcttaaagctccta

SEQ ID NO: 35624 - DNA, 20 bp, synthetic construct
  misc_feature 1..20: note = chemically synthesized
  source 1..20: mol_type = other DNA
tttggcttaaataaattatt

SEQ ID NO: 35625 - DNA, 20 bp, synthetic construct
  misc_feature 1..20: note = chemically synthesized
  source 1..20: mol_type = other DNA
taaataaattatttagggtt

SEQ ID NO: 35626 - DNA, 20 bp, synthetic construct
  misc_feature 1..20: note = chemically synthesized
  source 1..20: mol_type = other DNA
ttaaaccttggtcaattctt

SEQ ID NO: 35627 - DNA, 20 bp, synthetic construct
  misc_feature 1..20: note = chemically synthesized
  source 1..20: mol_type = other DNA
tccagtgactttctgtgcct

SEQ ID NO: 35628 - DNA, 20 bp, synthetic construct
  misc_feature 1..20: note = chemically synthesized
  source 1..20: mol_type = other DNA
tgtgccttggtgattcattt

SEQ ID NO: 35629 - DNA, 20 bp, synthetic construct
  misc_feature 1..20: note = chemically synthesized
  source 1..20: mol_type = other DNA
gattgagctcctgtgtgctc

SEQ ID NO: 35630 - DNA, 20 bp, synthetic construct
  misc_feature 1..20: note = chemically synthesized
  source 1..20: mol_type = other DNA
atgatttctaaatgtatttc

SEQ ID NO: 35631 - DNA, 20 bp, synthetic construct
  misc_feature 1..20: note = chemically synthesized
  source 1..20: mol_type = other DNA
ctcaagttttgcctggcaat

SEQ ID NO: 35632 - DNA, 20 bp, synthetic construct
  misc_feature 1..20: note = chemically synthesized
  source 1..20: mol_type = other DNA
ttttgcctggcaatgaatga

SEQ ID NO: 35633 - DNA, 20 bp, synthetic construct
  misc_feature 1..20: note = chemically synthesized
  source 1..20: mol_type = other DNA
tcttgtgtggtacacctata

SEQ ID NO: 35634 - DNA, 20 bp, synthetic construct
  misc_feature 1..20: note = chemically synthesized
  source 1..20: mol_type = other DNA
aggaaagtctttagaattca

SEQ ID NO: 35635 - DNA, 20 bp, synthetic construct
  misc_feature 1..20: note = chemically synthesized
  source 1..20: mol_type = other DNA
tgattccatcaaatcaatat

SEQ ID NO: 35636 - DNA, 20 bp, synthetic construct
  misc_feature 1..20: note = chemically synthesized
  source 1..20: mol_type = other DNA
aagtctgttgttcacatagc

SEQ ID NO: 35637 - DNA, 20 bp, synthetic construct
  misc_feature 1..20: note = chemically synthesized
  source 1..20: mol_type = other DNA
ctcccctgagttgagaagac

SEQ ID NO: 35638 - DNA, 20 bp, synthetic construct
  misc_feature 1..20: note = chemically synthesized
  source 1..20: mol_type = other DNA
cctgaaagatattaagtcca

SEQ ID NO: 35639 - DNA, 20 bp, synthetic construct
  misc_feature 1..20: note = chemically synthesized
  source 1..20: mol_type = other DNA
agagaaaacggccaggcaat

SEQ ID NO: 35640 - DNA, 20 bp, synthetic construct
  misc_feature 1..20: note = chemically synthesized
  source 1..20: mol_type = other DNA
ctagttccagaggctgatca

SEQ ID NO: 35641 - DNA, 20 bp, synthetic construct
  misc_feature 1..20: note = chemically synthesized
  source 1..20: mol_type = other DNA
gttctgaacactgggagtgc

SEQ ID NO: 35642 - DNA, 20 bp, synthetic construct
  misc_feature 1..20: note = chemically synthesized
  source 1..20: mol_type = other DNA
ggcaaaggactgcaaggggc

SEQ ID NO: 35643 - DNA, 20 bp, synthetic construct
  misc_feature 1..20: note = chemically synthesized
  source 1..20: mol_type = other DNA
gagcttgggctgacatgcaa

SEQ ID NO: 35644 - DNA, 20 bp, synthetic construct
  misc_feature 1..20: note = chemically synthesized
  source 1..20: mol_type = other DNA
cacaaggccctttttagaga

SEQ ID NO: 35645 - DNA, 20 bp, synthetic construct
  misc_feature 1..20: note = chemically synthesized
  source 1..20: mol_type = other DNA
ttttagagagtgtgattctc

SEQ ID NO: 35646 - DNA, 20 bp, synthetic construct
  misc_feature 1..20: note = chemically synthesized
  source 1..20: mol_type = other DNA
gattctctgaagcttttctt

SEQ ID NO: 35647 - DNA, 20 bp, synthetic construct
  misc_feature 1..20: note = chemically synthesized
  source 1..20: mol_type = other DNA
ccagatggaaagaagtattt

SEQ ID NO: 35648 - DNA, 20 bp, synthetic construct
  misc_feature 1..20: note = chemically synthesized
  source 1..20: mol_type = other DNA
ttattatttttaggtgtgat

SEQ ID NO: 35649 - DNA, 20 bp, synthetic construct
  misc_feature 1..20: note = chemically synthesized
  source 1..20: mol_type = other DNA
aaaagaaaaaaaacgagttc

SEQ ID NO: 35650 - DNA, 20 bp, synthetic construct
  misc_feature 1..20: note = chemically synthesized
  source 1..20: mol_type = other DNA
tgtttaaaaaatacatacag

SEQ ID NO: 35651 - DNA, 20 bp, synthetic construct
  misc_feature 1..20: note = chemically synthesized
  source 1..20: mol_type = other DNA
ctggaagatgtggacttggg

SEQ ID NO: 35652 - DNA, 20 bp, synthetic construct
  misc_feature 1..20: note = chemically synthesized
  source 1..20: mol_type = other DNA
tctctctacttttgtagtat

SEQ ID NO: 35653 - DNA, 20 bp, synthetic construct
  misc_feature 1..20: note = chemically synthesized
  source 1..20: mol_type = other DNA
actggtggagagcagtatgg

SEQ ID NO: 35654 - DNA, 20 bp, synthetic construct
  misc_feature 1..20: note = chemically synthesized
  source 1..20: mol_type = other DNA
gtatggccttgtttagtcgg

SEQ ID NO: 35655 - DNA, 20 bp, synthetic construct
  misc_feature 1..20: note = chemically synthesized
  source 1..20: mol_type = other DNA
gtcggtgttgtttcttcacc

SEQ ID NO: 35656 - DNA, 20 bp, synthetic construct
  misc_feature 1..20: note = chemically synthesized
  source 1..20: mol_type = other DNA
gcatgaggcagagtcagatg

SEQ ID NO: 35657 - DNA, 20 bp, synthetic construct
  misc_feature 1..20: note = chemically synthesized
  source 1..20: mol_type = other DNA
gaggcagagtcagatgtggc

SEQ ID NO: 35658 - DNA, 20 bp, synthetic construct
  misc_feature 1..20: note = chemically synthesized
  source 1..20: mol_type = other DNA
gagtcagatgtggcgtttgc

SEQ ID NO: 35659 - DNA, 20 bp, synthetic construct
  misc_feature 1..20: note = chemically synthesized
  source 1..20: mol_type = other DNA
ggctggtagtgttatgaaga

SEQ ID NO: 35660 - DNA, 20 bp, synthetic construct
  misc_feature 1..20: note = chemically synthesized
  source 1..20: mol_type = other DNA
gagccctggctattagagaa

SEQ ID NO: 35661 - DNA, 20 bp, synthetic construct
  misc_feature 1..20: note = chemically synthesized
  source 1..20: mol_type = other DNA
agaaagatgatttgcctgag

SEQ ID NO: 35662 - DNA, 20 bp, synthetic construct
  misc_feature 1..20: note = chemically synthesized
  source 1..20: mol_type = other DNA
acttgaaagctaggtcactg

SEQ ID NO: 35663 - DNA, 20 bp, synthetic construct
  misc_feature 1..20: note = chemically synthesized
  source 1..20: mol_type = other DNA
caggcccaggcccgggtccc

SEQ ID NO: 35664 - DNA, 20 bp, synthetic construct
  misc_feature 1..20: note = chemically synthesized
  source 1..20: mol_type = other DNA
tttacaaaatgtccgctctc

SEQ ID NO: 35665 - DNA, 20 bp, synthetic construct
  misc_feature 1..20: note = chemically synthesized
  source 1..20: mol_type = other DNA
gtcactcagttatctgagag

SEQ ID NO: 35666 - DNA, 20 bp, synthetic construct
  misc_feature 1..20: note = chemically synthesized
  source 1..20: mol_type = other DNA
gccatctaagtgcctgatac

SEQ ID NO: 35667 - DNA, 20 bp, synthetic construct
  misc_feature 1..20: note = chemically synthesized
  source 1..20: mol_type = other DNA
tgcctgatacttgggtttac

SEQ ID NO: 35668 - DNA, 20 bp, synthetic construct
  misc_feature 1..20: note = chemically synthesized
  source 1..20: mol_type = other DNA
cagattaaattaaattttag

SEQ ID NO: 35669 - DNA, 20 bp, synthetic construct
  misc_feature 1..20: note = chemically synthesized
  source 1..20: mol_type = other DNA
taaattaaattttaggctgg

SEQ ID NO: 35670 - DNA, 20 bp, synthetic construct
  misc_feature 1..20: note = chemically synthesized
  source 1..20: mol_type = other DNA
gaaatgtaacctggcaccct

SEQ ID NO: 35671 - DNA, 20 bp, synthetic construct
  misc_feature 1..20: note = chemically synthesized
  source 1..20: mol_type = other DNA
ccatttcatccctttccaaa

SEQ ID NO: 35672 - DNA, 20 bp, synthetic construct
  misc_feature 1..20: note = chemically synthesized
  source 1..20: mol_type = other DNA
ttccaaaaagtgtttagaca

SEQ ID NO: 35673 - DNA, 20 bp, synthetic construct
  misc_feature 1..20: note = chemically synthesized
  source 1..20: mol_type = other DNA
tagacaaatagtttcccaga

SEQ ID NO: 35674 - DNA, 20 bp, synthetic construct
  misc_feature 1..20: note = chemically synthesized
  source 1..20: mol_type = other DNA
ttttttctgcaaagaagggg

SEQ ID NO: 35675 - DNA, 20 bp, synthetic construct
  misc_feature 1..20: note = chemically synthesized
  source 1..20: mol_type = other DNA
acccactggagaagggcatg

SEQ ID NO: 35676 - DNA, 20 bp, synthetic construct
  misc_feature 1..20: note = chemically synthesized
  source 1..20: mol_type = other DNA
gcagaatgtctggctgcccc

SEQ ID NO: 35677 - DNA, 20 bp, synthetic construct
  misc_feature 1..20: note = chemically synthesized
  source 1..20: mol_type = other DNA
tggctgccccttcagattcc

SEQ ID NO: 35678 - DNA, 20 bp, synthetic construct
  misc_feature 1..20: note = chemically synthesized
  source 1..20: mol_type = other DNA
gcaaatatcttcactctcct

SEQ ID NO: 35679 - DNA, 20 bp, synthetic construct
  misc_feature 1..20: note = chemically synthesized
  source 1..20: mol_type = other DNA
atagtgttgagtcagagcaa

SEQ ID NO: 35680 - DNA, 20 bp, synthetic construct
  misc_feature 1..20: note = chemically synthesized
  source 1..20: mol_type = other DNA
gatgctctttacttttataa

SEQ ID NO: 35681 - DNA, 20 bp, synthetic construct
  misc_feature 1..20: note = chemically synthesized
  source 1..20: mol_type = other DNA
attttaaaaaatttggtggc

SEQ ID NO: 35682 - DNA, 20 bp, synthetic construct
  misc_feature 1..20: note = chemically synthesized
  source 1..20: mol_type = other DNA
cagactccagaatttatact

SEQ ID NO: 35683 - DNA, 20 bp, synthetic construct
  misc_feature 1..20: note = chemically synthesized
  source 1..20: mol_type = other DNA
gtaatgcattatgcaaataa

SEQ ID NO: 35684 - DNA, 20 bp, synthetic construct
  misc_feature 1..20: note = chemically synthesized
  source 1..20: mol_type = other DNA
attcagtttacatatccaaa

SEQ ID NO: 35685 - DNA, 20 bp, synthetic construct
  misc_feature 1..20: note = chemically synthesized
  source 1..20: mol_type = other DNA
atgtcttgaaaaaaaaagtg

SEQ ID NO: 35686 - DNA, 20 bp, synthetic construct
  misc_feature 1..20: note = chemically synthesized
  source 1..20: mol_type = other DNA
aaaataaacaaaacctgcag

SEQ ID NO: 35687 - DNA, 20 bp, synthetic construct
  misc_feature 1..20: note = chemically synthesized
  source 1..20: mol_type = other DNA
ataaataattttgcaattat

SEQ ID NO: 35688 - DNA, 20 bp, synthetic construct
  misc_feature 1..20: note = chemically synthesized
  source 1..20: mol_type = other DNA
gcaaggtatattctattatc

SEQ ID NO: 35689 - DNA, 20 bp, synthetic construct
  misc_feature 1..20: note = chemically synthesized
  source 1..20: mol_type = other DNA
ttatttgaagaggatacaat

SEQ ID NO: 35690 - DNA, 20 bp, synthetic construct
  misc_feature 1..20: note = chemically synthesized
  source 1..20: mol_type = other DNA
acaataattgcttgccagtg

SEQ ID NO: 35691 - DNA, 20 bp, synthetic construct
  misc_feature 1..20: note = chemically synthesized
  source 1..20: mol_type = other DNA
atagccatgaattcctgagt

SEQ ID NO: 35692 - DNA, 20 bp, synthetic construct
  misc_feature 1..20: note = chemically synthesized
  source 1..20: mol_type = other DNA
aaacgatctctttgtcttca

SEQ ID NO: 35693 - DNA, 20 bp, synthetic construct
  misc_feature 1..20: note = chemically synthesized
  source 1..20: mol_type = other DNA
agaactggcctcagaaatct

SEQ ID NO: 35694 - DNA, 20 bp, synthetic construct
  misc_feature 1..20: note = chemically synthesized
  source 1..20: mol_type = other DNA
ttactgctgttgcaaagcac

SEQ ID NO: 35695 - DNA, 20 bp, synthetic construct
  misc_feature 1..20: note = chemically synthesized
  source 1..20: mol_type = other DNA
caaagcacgtcagatttcag

SEQ ID NO: 35696 - DNA, 20 bp, synthetic construct
  misc_feature 1..20: note = chemically synthesized
  source 1..20: mol_type = other DNA
tgcataaagtaagcgttcca

SEQ ID NO: 35697 - DNA, 20 bp, synthetic construct
  misc_feature 1..20: note = chemically synthesized
  source 1..20: mol_type = other DNA
cacctgacaggtgtaatgtt

SEQ ID NO: 35698 - DNA, 20 bp, synthetic construct
  misc_feature 1..20: note = chemically synthesized
  source 1..20: mol_type = other DNA
tcctcaggttccctttcttg

SEQ ID NO: 35699 - DNA, 20 bp, synthetic construct
  misc_feature 1..20: note = chemically synthesized
  source 1..20: mol_type = other DNA
cctggtgtacttgggagaaa

SEQ ID NO: 35700 - DNA, 20 bp, synthetic construct
  misc_feature 1..20: note = chemically synthesized
  source 1..20: mol_type = other DNA
acttgggagaaaagaagctt

SEQ ID NO: 35701 - DNA, 20 bp, synthetic construct
  misc_feature 1..20: note = chemically synthesized
  source 1..20: mol_type = other DNA
ggtagtacctaccagagact

SEQ ID NO: 35702 - DNA, 20 bp, synthetic construct
  misc_feature 1..20: note = chemically synthesized
  source 1..20: mol_type = other DNA
ctccctgtttcctgctggta

SEQ ID NO: 35703 - DNA, 20 bp, synthetic construct
  misc_feature 1..20: note = chemically synthesized
  source 1..20: mol_type = other DNA
agaaggaactctccttttgc

SEQ ID NO: 35704 - DNA, 20 bp, synthetic construct
  misc_feature 1..20: note = chemically synthesized
  source 1..20: mol_type = other DNA
ttttgctgtggattgtaggg

SEQ ID NO: 35705 - DNA, 20 bp, synthetic construct
  misc_feature 1..20: note = chemically synthesized
  source 1..20: mol_type = other DNA
tggattgtagggagcagatt

SEQ ID NO: 35706 - DNA, 20 bp, synthetic construct
  misc_feature 1..20: note = chemically synthesized
  source 1..20: mol_type = other DNA
ggagcagatttggtgcttac

SEQ ID NO: 35707 - DNA, 20 bp, synthetic construct
  misc_feature 1..20: note = chemically synthesized
  source 1..20: mol_type = other DNA
caccatgtggatggtgtcca

SEQ ID NO: 35708 - DNA, 20 bp, synthetic construct
  misc_feature 1..20: note = chemically synthesized
  source 1..20: mol_type = other DNA
ttggggcaccccatcccacg

SEQ ID NO: 35709 - DNA, 20 bp, synthetic construct
  misc_feature 1..20: note = chemically synthesized
  source 1..20: mol_type = other DNA
ctctttctcaacgttctctg

SEQ ID NO: 35710 - DNA, 20 bp, synthetic construct
  misc_feature 1..20: note = chemically synthesized
  source 1..20: mol_type = other DNA
cccatgccctctctggtgtg

SEQ ID NO: 35711 - DNA, 20 bp, synthetic construct
  misc_feature 1..20: note = chemically synthesized
  source 1..20: mol_type = other DNA
ggtgattctcagatctagag

SEQ ID NO: 35712 - DNA, 20 bp, synthetic construct
  misc_feature 1..20: note = chemically synthesized
  source 1..20: mol_type = other DNA
gtagtagccaaattctctga

SEQ ID NO: 35713 - DNA, 20 bp, synthetic construct
  misc_feature 1..20: note = chemically synthesized
  source 1..20: mol_type = other DNA
tcctgtgactcctttatcta

SEQ ID NO: 35714 - DNA, 20 bp, synthetic construct
  misc_feature 1..20: note = chemically synthesized
  source 1..20: mol_type = other DNA
ttgacagagggaatgagaca

SEQ ID NO: 35715 - DNA, 20 bp, synthetic construct
  misc_feature 1..20: note = chemically synthesized
  source 1..20: mol_type = other DNA
gagacaagatgattttaggt

SEQ ID NO: 35716 - DNA, 20 bp, synthetic construct
  misc_feature 1..20: note = chemically synthesized
  source 1..20: mol_type = other DNA
caattattttattttattta

SEQ ID NO: 35717 - DNA, 20 bp, synthetic construct
  misc_feature 1..20: note = chemically synthesized
  source 1..20: mol_type = other DNA
tattaagctttttgtagaga

SEQ ID NO: 35718 - DNA, 20 bp, synthetic construct
  misc_feature 1..20: note = chemically synthesized
  source 1..20: mol_type = other DNA
gcccaggctggtcttgaact

SEQ ID NO: 35719 - DNA, 20 bp, synthetic construct
  misc_feature 1..20: note = chemically synthesized
  source 1..20: mol_type = other DNA
ctctgtggccttccaaattt

SEQ ID NO: 35720 - DNA, 20 bp, synthetic construct
  misc_feature 1..20: note = chemically synthesized
  source 1..20: mol_type = other DNA
ttttctctcctcccctaaaa

SEQ ID NO: 35721 - DNA, 20 bp, synthetic construct
  misc_feature 1..20: note = chemically synthesized
  source 1..20: mol_type = other DNA
ttcttgttcctctagtcgac

SEQ ID NO: 35722 - DNA, 20 bp, synthetic construct
  misc_feature 1..20: note = chemically synthesized
  source 1..20: mol_type = other DNA
agcacagctctttgagcata

SEQ ID NO: 35723 - DNA, 20 bp, synthetic construct
  misc_feature 1..20: note = chemically synthesized
  source 1..20: mol_type = other DNA
ggtagacttggcccagagcc

SEQ ID NO: 35724 - DNA, 20 bp, synthetic construct
  misc_feature 1..20: note = chemically synthesized
  source 1..20: mol_type = other DNA
aggagccagaggtggcccgc

SEQ ID NO: 35725 - DNA, 20 bp, synthetic construct
  misc_feature 1..20: note = chemically synthesized
  source 1..20: mol_type = other DNA
ctttgcagaggaacttgcac

SEQ ID NO: 35726 - DNA, 20 bp, synthetic construct
  misc_feature 1..20: note = chemically synthesized
  source 1..20: mol_type = other DNA
gcttttatcggtgatggctg

SEQ ID NO: 35727 - DNA, 20 bp, synthetic construct
  misc_feature 1..20: note = chemically synthesized
  source 1..20: mol_type = other DNA
gctggaatgcttttcttaac

SEQ ID NO: 35728 - DNA, 20 bp, synthetic construct
  misc_feature 1..20: note = chemically synthesized
  source 1..20: mol_type = other DNA
tggagctttgttgaagagcc

SEQ ID NO: 35729 - DNA, 20 bp, synthetic construct
  misc_feature 1..20: note = chemically synthesized
  source 1..20: mol_type = other DNA
tcttcttgccttgttccttt

SEQ ID NO: 35730 - DNA, 20 bp, synthetic construct
  misc_feature 1..20: note = chemically synthesized
  source 1..20: mol_type = other DNA
ctcccaaagtgtggcccttc

SEQ ID NO: 35731 - DNA, 20 bp, synthetic construct
  misc_feature 1..20: note = chemically synthesized
  source 1..20: mol_type = other DNA
tttacatggtgtgcccaggg

SEQ ID NO: 35732 - DNA, 20 bp, synthetic construct
  misc_feature 1..20: note = chemically synthesized
  source 1..20: mol_type = other DNA
atggtgtgcccagggaatag

SEQ ID NO: 35733 - DNA, 20 bp, synthetic construct
  misc_feature 1..20: note = chemically synthesized
  source 1..20: mol_type = other DNA
ttttgtctaccttcgatccc

SEQ ID NO: 35734 - DNA, 20 bp, synthetic construct
  misc_feature 1..20: note = chemically synthesized
  source 1..20: mol_type = other DNA
agacgacaaagtatctcatc

SEQ ID NO: 35735 - DNA, 20 bp, synthetic construct
  misc_feature 1..20: note = chemically synthesized
  source 1..20: mol_type = other DNA
tcatcaccagctttgggctg

SEQ ID NO: 35736 - DNA, 20 bp, synthetic construct
  misc_feature 1..20: note = chemically synthesized
  source 1..20: mol_type = other DNA
ctattatcttgtaacccatt

SEQ ID NO: 35737 - DNA, 20 bp, synthetic construct
  misc_feature 1..20: note = chemically synthesized
  source 1..20: mol_type = other DNA
tatgcctctctttagaatct

SEQ ID NO: 35738 - DNA, 20 bp, synthetic construct
  misc_feature 1..20: note = chemically synthesized
  source 1..20: mol_type = other DNA
agtccaatggcaagatatct

SEQ ID NO: 35739 - DNA, 20 bp, synthetic construct
  misc_feature 1..20: note = chemically synthesized
  source 1..20: mol_type = other DNA
cttatgtctgcactcttatg

SEQ ID NO: 35740 - DNA, 20 bp, synthetic construct
  misc_feature 1..20: note = chemically synthesized
  source 1..20: mol_type = other DNA
tgtctgcactcttatgtcct

SEQ ID NO: 35741 - DNA, 20 bp, synthetic construct
  misc_feature 1..20: note = chemically synthesized
  source 1..20: mol_type = other DNA
ctgcttgcttttttaaaaac

SEQ ID NO: 35742 - DNA, 20 bp, synthetic construct
  misc_feature 1..20: note = chemically synthesized
  source 1..20: mol_type = other DNA
tgcttcattgatgactcatg

SEQ ID NO: 35743 - DNA, 20 bp, synthetic construct
  misc_feature 1..20: note = chemically synthesized
  source 1..20: mol_type = other DNA
cctctctgtccttgtccata

SEQ ID NO: 35744 - DNA, 20 bp, synthetic construct
  misc_feature 1..20: note = chemically synthesized
  source 1..20: mol_type = other DNA
tgcactgacatctggagaac

SEQ ID NO: 35745 - DNA, 20 bp, synthetic construct
  misc_feature 1..20: note = chemically synthesized
  source 1..20: mol_type = other DNA
aaggttttggaagagcggag

SEQ ID NO: 35746 - DNA, 20 bp, synthetic construct
  misc_feature 1..20: note = chemically synthesized
  source 1..20: mol_type = other DNA
ccagcagagccaagtctttt

SEQ ID NO: 35747 - DNA, 20 bp, synthetic construct
  misc_feature 1..20: note = chemically synthesized
  source 1..20: mol_type = other DNA
ttttgagtttccagcaaaac

SEQ ID NO: 35748 - DNA, 20 bp, synthetic construct
  misc_feature 1..20: note = chemically synthesized
  source 1..20: mol_type = other DNA
ttaataataggagtgggtca

SEQ ID NO: 35749 - DNA, 20 bp, synthetic construct
  misc_feature 1..20: note = chemically synthesized
  source 1..20: mol_type = other DNA
caaagctggcatgagtcatc

SEQ ID NO: 35750 - DNA, 20 bp, synthetic construct
  misc_feature 1..20: note = chemically synthesized
  source 1..20: mol_type = other DNA
cacaggcttatggccacaag

SEQ ID NO: 35751 - DNA, 20 bp, synthetic construct
  misc_feature 1..20: note = chemically synthesized
  source 1..20: mol_type = other DNA
cacaaggctagattttcaat

SEQ ID NO: 35752 - DNA, 20 bp, synthetic construct
  misc_feature 1..20: note = chemically synthesized
  source 1..20: mol_type = other DNA
ccctgcctgaaagcactggg

SEQ ID NO: 35753 - DNA, 20 bp, synthetic construct
  misc_feature 1..20: note = chemically synthesized
  source 1..20: mol_type = other DNA
gggtcccacagatatttatg

SEQ ID NO: 35754 - DNA, 20 bp, synthetic construct
  misc_feature 1..20: note = chemically synthesized
  source 1..20: mol_type = other DNA
cccacagatatttatggagg

SEQ ID NO: 35755 - DNA, 20 bp, synthetic construct
  misc_feature 1..20: note = chemically synthesized
  source 1..20: mol_type = other DNA
aggcctgactctgtcagcaa

SEQ ID NO: 35756 - DNA, 20 bp, synthetic construct
  misc_feature 1..20: note = chemically synthesized
  source 1..20: mol_type = other DNA
tctttggaggaggtgtcact

SEQ ID NO: 35757 - DNA, 20 bp, synthetic construct
  misc_feature 1..20: note = chemically synthesized
  source 1..20: mol_type = other DNA
aaccttttggagggcaggag

SEQ ID NO: 35758 - DNA, 20 bp, synthetic construct
  misc_feature 1..20: note = chemically synthesized
  source 1..20: mol_type = other DNA
tttaatctgtactttgctca

SEQ ID NO: 35759 - DNA, 20 bp, synthetic construct
  misc_feature 1..20: note = chemically synthesized
  source 1..20: mol_type = other DNA
atctgtactttgctcacgct

SEQ ID NO: 35760 - DNA, 20 bp, synthetic construct
  misc_feature 1..20: note = chemically synthesized
  source 1..20: mol_type = other DNA
cttgattgaacagagaaaga

SEQ ID NO: 35761 - DNA, 20 bp, synthetic construct
  misc_feature 1..20: note = chemically synthesized
  source 1..20: mol_type = other DNA
cagggaaggtgtgaggctgg

SEQ ID NO: 35762 - DNA, 20 bp, synthetic construct
  misc_feature 1..20: note = chemically synthesized
  source 1..20: mol_type = other DNA
gggatagctggtggtgtctt

SEQ ID NO: 35763 - DNA, 20 bp, synthetic construct
  misc_feature 1..20: note = chemically synthesized
  source 1..20: mol_type = other DNA
ccccatggtcaagcagtgaa

SEQ ID NO: 35764 - DNA, 20 bp, synthetic construct
  misc_feature 1..20: note = chemically synthesized
  source 1..20: mol_type = other DNA
gtcaagcagtgaactctgct

SEQ ID NO: 35765 - DNA, 20 bp, synthetic construct
  misc_feature 1..20: note = chemically synthesized
  source 1..20: mol_type = other DNA
tgagttcggaagggactggg

SEQ ID NO: 35766 - DNA, 20 bp, synthetic construct
  misc_feature 1..20: note = chemically synthesized
  source 1..20: mol_type = other DNA
ctggggcctgctttcctttg

SEQ ID NO: 35767 - DNA, 20 bp, synthetic construct
  misc_feature 1..20: note = chemically synthesized
  source 1..20: mol_type = other DNA
tggctttgactggctcttgg

SEQ ID NO: 35768 - DNA, 20 bp, synthetic construct
  misc_feature 1..20: note = chemically synthesized
  source 1..20: mol_type = other DNA
ggctcttggatgagtttaaa

SEQ ID NO: 35769 - DNA, 20 bp, synthetic construct
  misc_feature 1..20: note = chemically synthesized
  source 1..20: mol_type = other DNA
tctttttttttttttctttt

SEQ ID NO: 35770 - DNA, 20 bp, synthetic construct
  misc_feature 1..20: note = chemically synthesized
  source 1..20: mol_type = other DNA
ttgtaaagacagtcagacca

SEQ ID NO: 35771 - DNA, 20 bp, synthetic construct
  misc_feature 1..20: note = chemically synthesized
  source 1..20: mol_type = other DNA
aactagatttatttgcacaa

SEQ ID NO: 35772 - DNA, 20 bp, synthetic construct
  misc_feature 1..20: note = chemically synthesized
  source 1..20: mol_type = other DNA
agcctccgcctcccaggttc

SEQ ID NO: 35773 - DNA, 20 bp, synthetic construct
  misc_feature 1..20: note = chemically synthesized
  source 1..20: mol_type = other DNA
tgcctcagcctcccaagtag

SEQ ID NO: 35774 - DNA, 20 bp, synthetic construct
  misc_feature 1..20: note = chemically synthesized
  source 1..20: mol_type = other DNA
aggtgcatgccatcacacct

SEQ ID NO: 35775 - DNA, 20 bp, synthetic construct
  misc_feature 1..20: note = chemically synthesized
  source 1..20: mol_type = other DNA
tttttttttttaagtagaga

SEQ ID NO: 35776 - DNA, 20 bp, synthetic construct
  misc_feature 1..20: note = chemically synthesized
  source 1..20: mol_type = other DNA
cgcctcggcctcccaaaatg

SEQ ID NO: 35777 - DNA, 20 bp, synthetic construct
  misc_feature 1..20: note = chemically synthesized
  source 1..20: mol_type = other DNA
gctatttaattctattttca

SEQ ID NO: 35778 - DNA, 20 bp, synthetic construct
  misc_feature 1..20: note = chemically synthesized
  source 1..20: mol_type = other DNA
ctagttcagttgtggccctt

SEQ ID NO: 35779 - DNA, 20 bp, synthetic construct
  misc_feature 1..20: note = chemically synthesized
  source 1..20: mol_type = other DNA
ccttctgggcttcctttgct

SEQ ID NO: 35780 - DNA, 20 bp, synthetic construct
  misc_feature 1..20: note = chemically synthesized
  source 1..20: mol_type = other DNA
cagcctggaagcctctcaga

SEQ ID NO: 35781 - DNA, 20 bp, synthetic construct
  misc_feature 1..20: note = chemically synthesized
  source 1..20: mol_type = other DNA
ccctcaagtctgtccttctc

SEQ ID NO: 35782 - DNA, 20 bp, synthetic construct
  misc_feature 1..20: note = chemically synthesized
  source 1..20: mol_type = other DNA
ccaggtctcgactcaatcca

SEQ ID NO: 35783 - DNA, 20 bp, synthetic construct
  misc_feature 1..20: note = chemically synthesized
  source 1..20: mol_type = other DNA
tttgctcaccacaagccagg

SEQ ID NO: 35784 - DNA, 20 bp, synthetic construct
  misc_feature 1..20: note = chemically synthesized
  source 1..20: mol_type = other DNA
tgtctggaaggcagagaatc

SEQ ID NO: 35785 - DNA, 20 bp, synthetic construct
  misc_feature 1..20: note = chemically synthesized
  source 1..20: mol_type = other DNA
tcagggatgagtccgtgctg

SEQ ID NO: 35786 - DNA, 20 bp, synthetic construct
  misc_feature 1..20: note = chemically synthesized
  source 1..20: mol_type = other DNA
ctttagcgtgtgagtgggga

SEQ ID NO: 35787 - DNA, 20 bp, synthetic construct
  misc_feature 1..20: note = chemically synthesized
  source 1..20: mol_type = other DNA
agcaggcccttggaagggtg

SEQ ID NO: 35788 - DNA, 20 bp, synthetic construct
  misc_feature 1..20: note = chemically synthesized
  source 1..20: mol_type = other DNA
gggaagatccagacaggaca

SEQ ID NO: 35789 - DNA, 20 bp, synthetic construct
  misc_feature 1..20: note = chemically synthesized
  source 1..20: mol_type = other DNA
aaaggggttcccatggggtg

SEQ ID NO: 35790 - DNA, 20 bp, synthetic construct
  misc_feature 1..20: note = chemically synthesized
  source 1..20: mol_type = other DNA
tggcttgaggggatctgggc

SEQ ID NO: 35791 - DNA, 20 bp, synthetic construct
  misc_feature 1..20: note = chemically synthesized
  source 1..20: mol_type = other DNA
ccctcacaggctagactatc

SEQ ID NO: 35792 - DNA, 20 bp, synthetic construct
  misc_feature 1..20: note = chemically synthesized
  source 1..20: mol_type = other DNA
catgtgggtgggcaaagtgg

SEQ ID NO: 35793 - DNA, 20 bp, synthetic construct
  misc_feature 1..20: note = chemically synthesized
  source 1..20: mol_type = other DNA
taggtgtgtattgtagtaaa

SEQ ID NO: 35794 - DNA, 20 bp, synthetic construct
  misc_feature 1..20: note = chemically synthesized
  source 1..20: mol_type = other DNA
ttcataaggctgtgaacgtc

SEQ ID NO: 35795 - DNA, 20 bp, synthetic construct
  misc_feature 1..20: note = chemically synthesized
  source 1..20: mol_type = other DNA
atatgcaaaatggagttgct

SEQ ID NO: 35796 - DNA, 20 bp, synthetic construct
  misc_feature 1..20: note = chemically synthesized
  source 1..20: mol_type = other DNA
aaaatggagttgctgggggc

SEQ ID NO: 35797 - DNA, 20 bp, synthetic construct
  misc_feature 1..20: note = chemically synthesized
  source 1..20: mol_type = other DNA
ctcactttttacaatttagc

SEQ ID NO: 35798 - DNA, 20 bp, synthetic construct
  misc_feature 1..20: note = chemically synthesized
  source 1..20: mol_type = other DNA
gctcagccacaagcccaaat

SEQ ID NO: 35799 - DNA, 20 bp, synthetic construct
  misc_feature 1..20: note = chemically synthesized
  source 1..20: mol_type = other DNA
cagtgacaggtggggctcta

SEQ ID NO: 35800 - DNA, 20 bp, synthetic construct
  misc_feature 1..20: note = chemically synthesized
  source 1..20: mol_type = other DNA
ctttaaaacatctgaggaaa

SEQ ID NO: 35801 - DNA, 20 bp, synthetic construct
  misc_feature 1..20: note = chemically synthesized
  source 1..20: mol_type = other DNA
cagtgctccttagccttcca

SEQ ID NO: 35802 - DNA, 20 bp, synthetic construct
  misc_feature 1..20: note = chemically synthesized
  source 1..20: mol_type = other DNA
gaggaagcacctcatcattt

SEQ ID NO: 35803 - DNA, 20 bp, synthetic construct
  misc_feature 1..20: note = chemically synthesized
  source 1..20: mol_type = other DNA
cttcatagaaacagagtgtt

SEQ ID NO: 35804 - DNA, 20 bp, synthetic construct
  misc_feature 1..20: note = chemically synthesized
  source 1..20: mol_type = other DNA
ccttagtgtcttacatgact

SEQ ID NO: 35805 - DNA, 20 bp, synthetic construct
  misc_feature 1..20: note = chemically synthesized
  source 1..20: mol_type = other DNA
acttatttcaacttattttc

SEQ ID NO: 35806 - DNA, 20 bp, synthetic construct
  misc_feature 1..20: note = chemically synthesized
  source 1..20: mol_type = other DNA
tggaaaatacgttgactgag

SEQ ID NO: 35807 - DNA, 20 bp, synthetic construct
  misc_feature 1..20: note = chemically synthesized
  source 1..20: mol_type = other DNA
aaatacgttgactgagtgat

SEQ ID NO: 35808 - DNA, 20 bp, synthetic construct
  misc_feature 1..20: note = chemically synthesized
  source 1..20: mol_type = other DNA
agagtgtagctctttgagtc

SEQ ID NO: 35809 - DNA, 20 bp, synthetic construct
  misc_feature 1..20: note = chemically synthesized
  source 1..20: mol_type = other DNA
ctttgagtcttcagttttga

SEQ ID NO: 35810 - DNA, 20 bp, synthetic construct
  misc_feature 1..20: note = chemically synthesized
  source 1..20: mol_type = other DNA
tctgcatgaatagcatcttt

SEQ ID NO: 35811 - DNA, 20 bp, synthetic construct
  misc_feature 1..20: note = chemically synthesized
  source 1..20: mol_type = other DNA
gctagggtgggaaagggtat

SEQ ID NO: 35812 - DNA, 20 bp, synthetic construct
  misc_feature 1..20: note = chemically synthesized
  source 1..20: mol_type = other DNA
catcccgggctctcaggtag

SEQ ID NO: 35813 - DNA, 20 bp, synthetic construct
  misc_feature 1..20: note = chemically synthesized
  source 1..20: mol_type = other DNA
gagtaatgccgtggaggcag

SEQ ID NO: 35814 - DNA, 20 bp, synthetic construct
  misc_feature 1..20: note = chemically synthesized
  source 1..20: mol_type = other DNA
acctaagccttaggaaagac

SEQ ID NO: 35815 - DNA, 20 bp, synthetic construct
  misc_feature 1..20: note = chemically synthesized
  source 1..20: mol_type = other DNA
agccttaggaaagactttcg

SEQ ID NO: 35816 - DNA, 20 bp, synthetic construct
  misc_feature 1..20: note = chemically synthesized
  source 1..20: mol_type = other DNA
gcccccaggttgggctgcct

SEQ ID NO: 35817 - DNA, 20 bp, synthetic construct
  misc_feature 1..20: note = chemically synthesized
  source 1..20: mol_type = other DNA
atggcattgagtggcctcct

SEQ ID NO: 35818 - DNA, 20 bp, synthetic construct
  misc_feature 1..20: note = chemically synthesized
  source 1..20: mol_type = other DNA
gggtaaggggtgcatggtga

SEQ ID NO: 35819 - DNA, 20 bp, synthetic construct
  misc_feature 1..20: note = chemically synthesized
  source 1..20: mol_type = other DNA
gctccttgaaggacgtagag

SEQ ID NO: 35820 - DNA, 20 bp, synthetic construct
  misc_feature 1..20: note = chemically synthesized
  source 1..20: mol_type = other DNA
gaggagtgatgtcatatgac

SEQ ID NO: 35821 - DNA, 20 bp, synthetic construct
  misc_feature 1..20: note = chemically synthesized
  source 1..20: mol_type = other DNA
tggtggggacgtgagaaggg

SEQ ID NO: 35822 - DNA, 20 bp, synthetic construct
  misc_feature 1..20: note = chemically synthesized
  source 1..20: mol_type = other DNA
atacttcgaagggaaaaccg

SEQ ID NO: 35823 - DNA, 20 bp, synthetic construct
  misc_feature 1..20: note = chemically synthesized
  source 1..20: mol_type = other DNA
ggtgactgggagaatagaat

SEQ ID NO: 35824 - DNA, 20 bp, synthetic construct
  misc_feature 1..20: note = chemically synthesized
  source 1..20: mol_type = other DNA
tgaggggaaagagagtagcc

SEQ ID NO: 35825 - DNA, 20 bp, synthetic construct
  misc_feature 1..20: note = chemically synthesized
  source 1..20: mol_type = other DNA
cagttgactgcctatagctg

SEQ ID NO: 35826 - DNA, 20 bp, synthetic construct
  misc_feature 1..20: note = chemically synthesized
  source 1..20: mol_type = other DNA
cgagttctttggggagggcc

SEQ ID NO: 35827 - DNA, 20 bp, synthetic construct
  misc_feature 1..20: note = chemically synthesized
  source 1..20: mol_type = other DNA
tgatcttttgatccagaaag

SEQ ID NO: 35828 - DNA, 20 bp, synthetic construct
  misc_feature 1..20: note = chemically synthesized
  source 1..20: mol_type = other DNA
ttttgatccagaaagatgcg

SEQ ID NO: 35829 - DNA, 20 bp, synthetic construct
  misc_feature 1..20: note = chemically synthesized
  source 1..20: mol_type = other DNA
tgtttcttgcatttctttcc

SEQ ID NO: 35830 - DNA, 20 bp, synthetic construct
  misc_feature 1..20: note = chemically synthesized
  source 1..20: mol_type = other DNA
tcttgcatttctttcccttc

SEQ ID NO: 35831 - DNA, 20 bp, synthetic construct
  misc_feature 1..20: note = chemically synthesized
  source 1..20: mol_type = other DNA
gactctcactgccacgtgtc

SEQ ID NO: 35832 - DNA, 20 bp, synthetic construct
  misc_feature 1..20: note = chemically synthesized
  source 1..20: mol_type = other DNA
cgtgtcttgtgcttccacag

SEQ ID NO: 35833 - DNA, 20 bp, synthetic construct
  misc_feature 1..20: note = chemically synthesized
  source 1..20: mol_type = other DNA
gctcaggtccacggttagcc

SEQ ID NO: 35834 - DNA, 20 bp, synthetic construct
  misc_feature 1..20: note = chemically synthesized
  source 1..20: mol_type = other DNA
gcaagggcctgaatcaaaca

SEQ ID NO: 35835 - DNA, 20 bp, synthetic construct
  misc_feature 1..20: note = chemically synthesized
  source 1..20: mol_type = other DNA
ctgaatcaaacaaattgctt

SEQ ID NO: 35836 - DNA, 20 bp, synthetic construct
  misc_feature 1..20: note = chemically synthesized
  source 1..20: mol_type = other DNA
aacaaattgctttcttgttt

SEQ ID NO: 35837 - DNA, 20 bp, synthetic construct
  misc_feature 1..20: note = chemically synthesized
  source 1..20: mol_type = other DNA
tgaatctttagaccagaagc

SEQ ID NO: 35838 - DNA, 20 bp, synthetic construct
  misc_feature 1..20: note = chemically synthesized
  source 1..20: mol_type = other DNA
gtctgatgagaaataagagt

SEQ ID NO: 35839 - DNA, 20 bp, synthetic construct
  misc_feature 1..20: note = chemically synthesized
  source 1..20: mol_type = other DNA
ttttctttggaggaggtcct

SEQ ID NO: 35840 - DNA, 20 bp, synthetic construct
  misc_feature 1..20: note = chemically synthesized
  source 1..20: mol_type = other DNA
ataggagagctccttggtcc

SEQ ID NO: 35841 - DNA, 20 bp, synthetic construct
  misc_feature 1..20: note = chemically synthesized
  source 1..20: mol_type = other DNA
taagtagcagtgggtagggc

SEQ ID NO: 35842 - DNA, 20 bp, synthetic construct
  misc_feature 1..20: note = chemically synthesized
  source 1..20: mol_type = other DNA
aacatccctcaaggtaggcc

SEQ ID NO: 35843 - DNA, 20 bp, synthetic construct
  misc_feature 1..20: note = chemically synthesized
  source 1..20: mol_type = other DNA
ccctctgtcccctctatggt

SEQ ID NO: 35844 - DNA, 20 bp, synthetic construct
  misc_feature 1..20: note = chemically synthesized
  source 1..20: mol_type = other DNA
cacggcccctgtagctgagc

SEQ ID NO: 35845 - DNA, 20 bp, synthetic construct
  misc_feature 1..20: note = chemically synthesized
  source 1..20: mol_type = other DNA
ttcttcctgggccaagctga

SEQ ID NO: 35846 - DNA, 20 bp, synthetic construct
  misc_feature 1..20: note = chemically synthesized
  source 1..20: mol_type = other DNA
tgccgtgtccattctcctag

SEQ ID NO: 35847 - DNA, 20 bp, synthetic construct
  misc_feature 1..20: note = chemically synthesized
  source 1..20: mol_type = other DNA
cctagcaacgcttctctttg

SEQ ID NO: 35848 - DNA, 20 bp, synthetic construct
  misc_feature 1..20: note = chemically synthesized
  source 1..20: mol_type = other DNA
agtttgccatagtacctgag

SEQ ID NO: 35849 - DNA, 20 bp, synthetic construct
  misc_feature 1..20: note = chemically synthesized
  source 1..20: mol_type = other DNA
agttttgtcctttgcctgcc

SEQ ID NO: 35850 - DNA, 20 bp, synthetic construct
  misc_feature 1..20: note = chemically synthesized
  source 1..20: mol_type = other DNA
tctcgcagcaactggcaacc

SEQ ID NO: 35851 - DNA, 20 bp, synthetic construct
  misc_feature 1..20: note = chemically synthesized
  source 1..20: mol_type = other DNA
cagactcagggacccggctg

SEQ ID NO: 35852 - DNA, 20 bp, synthetic construct
  misc_feature 1..20: note = chemically synthesized
  source 1..20: mol_type = other DNA
ggtgtaattctgcacaccca

SEQ ID NO: 35853 - DNA, 20 bp, synthetic construct
  misc_feature 1..20: note = chemically synthesized
  source 1..20: mol_type = other DNA
gtgtcctgaaccaagtgtgg

SEQ ID NO: 35854 - DNA, 20 bp, synthetic construct
  misc_feature 1..20: note = chemically synthesized
  source 1..20: mol_type = other DNA
tgaaccaagtgtggatgagt

SEQ ID NO: 35855 - DNA, 20 bp, synthetic construct
  misc_feature 1..20: note = chemically synthesized
  source 1..20: mol_type = other DNA
tggatgagtttgagcttcct

SEQ ID NO: 35856 - DNA, 20 bp, synthetic construct
  misc_feature 1..20: note = chemically synthesized
  source 1..20: mol_type = other DNA
gtgtaatttgttgttgttgt

SEQ ID NO: 35857 - DNA, 20 bp, synthetic construct
  misc_feature 1..20: note = chemically synthesized
  source 1..20: mol_type = other DNA
cttagctgttgctcaactac

SEQ ID NO: 35858 - DNA, 20 bp, synthetic construct
  misc_feature 1..20: note = chemically synthesized
  source 1..20: mol_type = other DNA
caccatgacatgagagaatt

SEQ ID NO: 35859 - DNA, 20 bp, synthetic construct
  misc_feature 1..20: note = chemically synthesized
  source 1..20: mol_type = other DNA
atgagagaatttcaggttta

SEQ ID NO: 35860 - DNA, 20 bp, synthetic construct
  misc_feature 1..20: note = chemically synthesized
  source 1..20: mol_type = other DNA
ggtttattgtgatttctttt

SEQ ID NO: 35861 - DNA, 20 bp, synthetic construct
  misc_feature 1..20: note = chemically synthesized
  source 1..20: mol_type = other DNA
aggaaccaacaccgaagacc

SEQ ID NO: 35862 - DNA, 20 bp, synthetic construct
  misc_feature 1..20: note = chemically synthesized
  source 1..20: mol_type = other DNA
caccgaagaccatatgattt

SEQ ID NO: 35863 - DNA, 20 bp, synthetic construct
  misc_feature 1..20: note = chemically synthesized
  source 1..20: mol_type = other DNA
ttgtgaatttttttttgttc

SEQ ID NO: 35864 - DNA, 20 bp, synthetic construct
  misc_feature 1..20: note = chemically synthesized
  source 1..20: mol_type = other DNA
ctgtcctttgttacaggagc

SEQ ID NO: 35865 - DNA, 20 bp, synthetic construct
  misc_feature 1..20: note = chemically synthesized
  source 1..20: mol_type = other DNA
ctgtgaagacgtgtcctgta

SEQ ID NO: 35866 - DNA, 20 bp, synthetic construct
  misc_feature 1..20: note = chemically synthesized
  source 1..20: mol_type = other DNA
cgtgtcctgtatacagtttc

SEQ ID NO: 35867 - DNA, 20 bp, synthetic construct
  misc_feature 1..20: note = chemically synthesized
  source 1..20: mol_type = other DNA
tcctgtatacagtttcaaca

SEQ ID NO: 35868 - DNA, 20 bp, synthetic construct
  misc_feature 1..20: note = chemically synthesized
  source 1..20: mol_type = other DNA
cacccgtcgccccccacccc

SEQ ID NO: 35869 - DNA, 20 bp, synthetic construct
  misc_feature 1..20: note = chemically synthesized
  source 1..20: mol_type = other DNA
cccacccgctttctgtcttg

SEQ ID NO: 35870 - DNA, 20 bp, synthetic construct
  misc_feature 1..20: note = chemically synthesized
  source 1..20: mol_type = other DNA
gaaaatgtaaaagcacttca

SEQ ID NO: 35871 - DNA, 20 bp, synthetic construct
  misc_feature 1..20: note = chemically synthesized
  source 1..20: mol_type = other DNA
cttcacaaggttttaacttt

SEQ ID NO: 35872 - DNA, 20 bp, synthetic construct
  misc_feature 1..20: note = chemically synthesized
  source 1..20: mol_type = other DNA
acttttctggcttgaacgga

SEQ ID NO: 35873 - DNA, 20 bp, synthetic construct
  misc_feature 1..20: note = chemically synthesized
  source 1..20: mol_type = other DNA
acaagagcacaatagtcttt

SEQ ID NO: 35874 - DNA, 20 bp, synthetic construct
  misc_feature 1..20: note = chemically synthesized
  source 1..20: mol_type = other DNA
tagtctttgtaggttttgga

SEQ ID NO: 35875 - DNA, 20 bp, synthetic construct
  misc_feature 1..20: note = chemically synthesized
  source 1..20: mol_type = other DNA
gtaggttttggacacagttt

SEQ ID NO: 35876 - DNA, 20 bp, synthetic construct
  misc_feature 1..20: note = chemically synthesized
  source 1..20: mol_type = other DNA
cttccttcctttcttccttg

SEQ ID NO: 35877 - DNA, 20 bp, synthetic construct
  misc_feature 1..20: note = chemically synthesized
  source 1..20: mol_type = other DNA
gccctctgtctgttgggata

SEQ ID NO: 35878 - DNA, 20 bp, synthetic construct
  misc_feature 1..20: note = chemically synthesized
  source 1..20: mol_type = other DNA
gggatattatgtttttttaa

SEQ ID NO: 35879 - DNA, 20 bp, synthetic construct
  misc_feature 1..20: note = chemically synthesized
  source 1..20: mol_type = other DNA
tattatgtttttttaatagt

SEQ ID NO: 35880 - DNA, 20 bp, synthetic construct
  misc_feature 1..20: note = chemically synthesized
  source 1..20: mol_type = other DNA
aattgagtacatatgtacgt

SEQ ID NO: 35881 - DNA, 20 bp, synthetic construct
  misc_feature 1..20: note = chemically synthesized
  source 1..20: mol_type = other DNA
tgtacgttactgtttatttt

SEQ ID NO: 35882 - DNA, 20 bp, synthetic construct
  misc_feature 1..20: note = chemically synthesized
  source 1..20: mol_type = other DNA
taaacagctcagttacgcca

SEQ ID NO: 35883 - DNA, 20 bp, synthetic construct
  misc_feature 1..20: note = chemically synthesized
  source 1..20: mol_type = other DNA
cagtcagggtgttaaaaggc

SEQ ID NO: 35884 - DNA, 20 bp, synthetic construct
  misc_feature 1..20: note = chemically synthesized
  source 1..20: mol_type = other DNA
ttaaaaggcacatgcttttc

SEQ ID NO: 35885 - DNA, 20 bp, synthetic construct
  misc_feature 1..20: note = chemically synthesized
  source 1..20: mol_type = other DNA
gcaatttaattacattaatt

SEQ ID NO: 35886 - DNA, 20 bp, synthetic construct
  misc_feature 1..20: note = chemically synthesized
  source 1..20: mol_type = other DNA
attgaatgtttaggcggaaa

SEQ ID NO: 35887 - DNA, 20 bp, synthetic construct
  misc_feature 1..20: note = chemically synthesized
  source 1..20: mol_type = other DNA
cagaaaaatggatatatatc

SEQ ID NO: 35888 - DNA, 20 bp, synthetic construct
  misc_feature 1..20: note = chemically synthesized
  source 1..20: mol_type = other DNA
tttaggagactgctgggcac

SEQ ID NO: 35889 - DNA, 20 bp, synthetic construct
  misc_feature 1..20: note = chemically synthesized
  source 1..20: mol_type = other DNA
tgcacaaaggcacgtgggtg

SEQ ID NO: 35890 - DNA, 20 bp, synthetic construct
  misc_feature 1..20: note = chemically synthesized
  source 1..20: mol_type = other DNA
ggtgctgtgttttgtatagc

SEQ ID NO: 35891 - DNA, 20 bp, synthetic construct
  misc_feature 1..20: note = chemically synthesized
  source 1..20: mol_type = other DNA
tggatctgaggaacactgtc

SEQ ID NO: 35892 - DNA, 20 bp, synthetic construct
  misc_feature 1..20: note = chemically synthesized
  source 1..20: mol_type = other DNA
aacactgtctgaagttttcc

SEQ ID NO: 35893 - DNA, 20 bp, synthetic construct
  misc_feature 1..20: note = chemically synthesized
  source 1..20: mol_type = other DNA
aggtgttctttctgacctct

SEQ ID NO: 35894 - DNA, 20 bp, synthetic construct
  misc_feature 1..20: note = chemically synthesized
  source 1..20: mol_type = other DNA
tgtcaaaggatggctgggaa

SEQ ID NO: 35895 - DNA, 20 bp, synthetic construct
  misc_feature 1..20: note = chemically synthesized
  source 1..20: mol_type = other DNA
tgctaacatcccttgcctat

SEQ ID NO: 35896 - DNA, 20 bp, synthetic construct
  misc_feature 1..20: note = chemically synthesized
  source 1..20: mol_type = other DNA
ttcactatcttctcgcacca

SEQ ID NO: 35897 - DNA, 20 bp, synthetic construct
  misc_feature 1..20: note = chemically synthesized
  source 1..20: mol_type = other DNA
gacgaaccaggtggggctgc

SEQ ID NO: 35898 - DNA, 20 bp, synthetic construct
  misc_feature 1..20: note = chemically synthesized
  source 1..20: mol_type = other DNA
gcttctgggtatttacggga

SEQ ID NO: 35899 - DNA, 20 bp, synthetic construct
  misc_feature 1..20: note = chemically synthesized
  source 1..20: mol_type = other DNA
atgcagatttttctgcccac

SEQ ID NO: 35900 - DNA, 20 bp, synthetic construct
  misc_feature 1..20: note = chemically synthesized
  source 1..20: mol_type = other DNA
tctgcccaccgttgttttgg

SEQ ID NO: 35901 - DNA, 20 bp, synthetic construct
  misc_feature 1..20: note = chemically synthesized
  source 1..20: mol_type = other DNA
cccatttaagagtcagccac

SEQ ID NO: 35902 - DNA, 20 bp, synthetic construct
  misc_feature 1..20: note = chemically synthesized
  source 1..20: mol_type = other DNA
acagagtggccagctgtgtc

SEQ ID NO: 35903 - DNA, 20 bp, synthetic construct
  misc_feature 1..20: note = chemically synthesized
  source 1..20: mol_type = other DNA
gagctgtctgtgccctgaac

SEQ ID NO: 35904 - DNA, 20 bp, synthetic construct
  misc_feature 1..20: note = chemically synthesized
  source 1..20: mol_type = other DNA
ggacaagaaggtaaaagagg

SEQ ID NO: 35905 - DNA, 20 bp, synthetic construct
  misc_feature 1..20: note = chemically synthesized
  source 1..20: mol_type = other DNA
taagggaaggacaggaaagc

SEQ ID NO: 35906 - DNA, 20 bp, synthetic construct
  misc_feature 1..20: note = chemically synthesized
  source 1..20: mol_type = other DNA
gcttgttccctgtgtggatg

SEQ ID NO: 35907 - DNA, 20 bp, synthetic construct
  misc_feature 1..20: note = chemically synthesized
  source 1..20: mol_type = other DNA
cactcggctgactacctgat

SEQ ID NO: 35908 - DNA, 20 bp, synthetic construct
  misc_feature 1..20: note = chemically synthesized
  source 1..20: mol_type = other DNA
gtgccaaaggacacccttga

SEQ ID NO: 35909 - DNA, 20 bp, synthetic construct
  misc_feature 1..20: note = chemically synthesized
  source 1..20: mol_type = other DNA
ccttcttttctctccgatcc

SEQ ID NO: 35910 - DNA, 20 bp, synthetic construct
  misc_feature 1..20: note = chemically synthesized
  source 1..20: mol_type = other DNA
ctctccgatcctctagcttt

SEQ ID NO: 35911 - DNA, 20 bp, synthetic construct
  misc_feature 1..20: note = chemically synthesized
  source 1..20: mol_type = other DNA
gaggcaggagaaagggtagt

SEQ ID NO: 35912 - DNA, 20 bp, synthetic construct
  misc_feature 1..20: note = chemically synthesized
  source 1..20: mol_type = other DNA
atgcagccgcaggggtagac

SEQ ID NO: 35913 - DNA, 20 bp, synthetic construct
  misc_feature 1..20: note = chemically synthesized
  source 1..20: mol_type = other DNA
cttatacttctgggtccacc

SEQ ID NO: 35914 - DNA, 20 bp, synthetic construct
  misc_feature 1..20: note = chemically synthesized
  source 1..20: mol_type = other DNA
tgcacacagggtagggaagt

SEQ ID NO: 35915 - DNA, 20 bp, synthetic construct
  misc_feature 1..20: note = chemically synthesized
  source 1..20: mol_type = other DNA
ggaagttgtggcttgcagaa

SEQ ID NO: 35916 - DNA, 20 bp, synthetic construct
  misc_feature 1..20: note = chemically synthesized
  source 1..20: mol_type = other DNA
gctgtttttttggggggacg

SEQ ID NO: 35917 - DNA, 20 bp, synthetic construct
  misc_feature 1..20: note = chemically synthesized
  source 1..20: mol_type = other DNA
ttggggggacgctctgtttt

SEQ ID NO: 35918 - DNA, 20 bp, synthetic construct
  misc_feature 1..20: note = chemically synthesized
  source 1..20: mol_type = other DNA
aggggaggcatgtgatagga

SEQ ID NO: 35919 - DNA, 20 bp, synthetic construct
  misc_feature 1..20: note = chemically synthesized
  source 1..20: mol_type = other DNA
cctctctatataatttcaag

SEQ ID NO: 35920 - DNA, 20 bp, synthetic construct
  misc_feature 1..20: note = chemically synthesized
  source 1..20: mol_type = other DNA
attgtccctaagcaccagta

SEQ ID NO: 35921 - DNA, 20 bp, synthetic construct
  misc_feature 1..20: note = chemically synthesized
  source 1..20: mol_type = other DNA
agcaccagtagaaagcttga

SEQ ID NO: 35922 - DNA, 20 bp, synthetic construct
  misc_feature 1..20: note = chemically synthesized
  source 1..20: mol_type = other DNA
tgagagaacgttctgactag

SEQ ID NO: 35923 - DNA, 20 bp, synthetic construct
  misc_feature 1..20: note = chemically synthesized
  source 1..20: mol_type = other DNA
ggggagacagagacagagtt

SEQ ID NO: 35924 - DNA, 20 bp, synthetic construct
  misc_feature 1..20: note = chemically synthesized
  source 1..20: mol_type = other DNA
ttcagcagactcattctgct

SEQ ID NO: 35925 - DNA, 20 bp, synthetic construct
  misc_feature 1..20: note = chemically synthesized
  source 1..20: mol_type = other DNA
ctgctatttgctttttgcct

SEQ ID NO: 35926 - DNA, 20 bp, synthetic construct
  misc_feature 1..20: note = chemically synthesized
  source 1..20: mol_type = other DNA
tgcccggctgagcatctctg

SEQ ID NO: 35927 - DNA, 20 bp, synthetic construct
  misc_feature 1..20: note = chemically synthesized
  source 1..20: mol_type = other DNA
aatgtgccgctcgaagccat

SEQ ID NO: 35928 - DNA, 20 bp, synthetic construct
  misc_feature 1..20: note = chemically synthesized
  source 1..20: mol_type = other DNA
cgaagccatgtaggcttcca

SEQ ID NO: 35929 - DNA, 20 bp, synthetic construct
  misc_feature 1..20: note = chemically synthesized
  source 1..20: mol_type = other DNA
tccagcaggcttctagcaga

SEQ ID NO: 35930 - DNA, 20 bp, synthetic construct
  misc_feature 1..20: note = chemically synthesized
  source 1..20: mol_type = other DNA
cctcgttcctttcctgcatt

SEQ ID NO: 35931 - DNA, 20 bp, synthetic construct
  misc_feature 1..20: note = chemically synthesized
  source 1..20: mol_type = other DNA
cagccaataaccaattttca

SEQ ID NO: 35932 - DNA, 20 bp, synthetic construct
  misc_feature 1..20: note = chemically synthesized
  source 1..20: mol_type = other DNA
aggtttagatgaatgtgaat

SEQ ID NO: 35933 - DNA, 20 bp, synthetic construct
  misc_feature 1..20: note = chemically synthesized
  source 1..20: mol_type = other DNA
ccagaatattgtcccttgca

SEQ ID NO: 35934 - DNA, 20 bp, synthetic construct
  misc_feature 1..20: note = chemically synthesized
  source 1..20: mol_type = other DNA
gtcacatttccctggcagct

SEQ ID NO: 35935 - DNA, 20 bp, synthetic construct
  misc_feature 1..20: note = chemically synthesized
  source 1..20: mol_type = other DNA
agggtgaacaagggccatct

SEQ ID NO: 35936 - DNA, 20 bp, synthetic construct
  misc_feature 1..20: note = chemically synthesized
  source 1..20: mol_type = other DNA
gggccatctgggtgtttgct

SEQ ID NO: 35937 - DNA, 20 bp, synthetic construct
  misc_feature 1..20: note = chemically synthesized
  source 1..20: mol_type = other DNA
ctgctgggtgtggaaaccac

SEQ ID NO: 35938 - DNA, 20 bp, synthetic construct
  misc_feature 1..20: note = chemically synthesized
  source 1..20: mol_type = other DNA
ctgaaagagccactggtatt

SEQ ID NO: 35939 - DNA, 20 bp, synthetic construct
  misc_feature 1..20: note = chemically synthesized
  source 1..20: mol_type = other DNA
tgagcgccacacattatttt

SEQ ID NO: 35940 - DNA, 20 bp, synthetic construct
  misc_feature 1..20: note = chemically synthesized
  source 1..20: mol_type = other DNA
ctgcggtgggtggcatgggt

SEQ ID NO: 35941 - DNA, 20 bp, synthetic construct
  misc_feature 1..20: note = chemically synthesized
  source 1..20: mol_type = other DNA
gtctcctggttggaccccat

SEQ ID NO: 35942 - DNA, 20 bp, synthetic construct
  misc_feature 1..20: note = chemically synthesized
  source 1..20: mol_type = other DNA
gctaacatgatcaagggtga

SEQ ID NO: 35943 - DNA, 20 bp, synthetic construct
  misc_feature 1..20: note = chemically synthesized
  source 1..20: mol_type = other DNA
catcttgggactaggagtga

SEQ ID NO: 35944 - DNA, 20 bp, synthetic construct
  misc_feature 1..20: note = chemically synthesized
  source 1..20: mol_type = other DNA
tgtattaagatgacagacac

SEQ ID NO: 35945 - DNA, 20 bp, synthetic construct
  misc_feature 1..20: note = chemically synthesized
  source 1..20: mol_type = other DNA
ccaggccttaaaagacaagg

SEQ ID NO: 35946 - DNA, 20 bp, synthetic construct
  misc_feature 1..20: note = chemically synthesized
  source 1..20: mol_type = other DNA
gctcattttacccactcgag

SEQ ID NO: 35947 - DNA, 20 bp, synthetic construct
  misc_feature 1..20: note = chemically synthesized
  source 1..20: mol_type = other DNA
cactcgagacttgattctct

SEQ ID NO: 35948 - DNA, 20 bp, synthetic construct
  misc_feature 1..20: note = chemically synthesized
  source 1..20: mol_type = other DNA
ttaagtacctcccctggtca

SEQ ID NO: 35949 - DNA, 20 bp, synthetic construct
  misc_feature 1..20: note = chemically synthesized
  source 1..20: mol_type = other DNA
gctaccatgatcagaggtaa

SEQ ID NO: 35950 - DNA, 20 bp, synthetic construct
  misc_feature 1..20: note = chemically synthesized
  source 1..20: mol_type = other DNA
gtaaatttgtttttctctga

SEQ ID NO: 35951 - DNA, 20 bp, synthetic construct
  misc_feature 1..20: note = chemically synthesized
  source 1..20: mol_type = other DNA
tttctctgatgatgattgaa

SEQ ID NO: 35952 - DNA, 20 bp, synthetic construct
  misc_feature 1..20: note = chemically synthesized
  source 1..20: mol_type = other DNA
atcaagaacattacaacaca

SEQ ID NO: 35953 - DNA, 20 bp, synthetic construct
  misc_feature 1..20: note = chemically synthesized
  source 1..20: mol_type = other DNA
acattacaacacaaagagtt

SEQ ID NO: 35954 - DNA, 20 bp, synthetic construct
  misc_feature 1..20: note = chemically synthesized
  source 1..20: mol_type = other DNA
atattttaatattagaaagc

SEQ ID NO: 35955 - DNA, 20 bp, synthetic construct
  misc_feature 1..20: note = chemically synthesized
  source 1..20: mol_type = other DNA
agcatgggattgggtgtgaa

SEQ ID NO: 35956 - DNA, 20 bp, synthetic construct
  misc_feature 1..20: note = chemically synthesized
  source 1..20: mol_type = other DNA
tgaagaagttattctgtctg

SEQ ID NO: 35957 - DNA, 20 bp, synthetic construct
  misc_feature 1..20: note = chemically synthesized
  source 1..20: mol_type = other DNA
attaggctgagactttttcc

SEQ ID NO: 35958 - DNA, 20 bp, synthetic construct
  misc_feature 1..20: note = chemically synthesized
  source 1..20: mol_type = other DNA
ctttttccgatggtttattt

SEQ ID NO: 35959 - DNA, 20 bp, synthetic construct
  misc_feature 1..20: note = chemically synthesized
  source 1..20: mol_type = other DNA
ggagggagctgacacgttca

SEQ ID NO: 35960 - DNA, 20 bp, synthetic construct
  misc_feature 1..20: note = chemically synthesized
  source 1..20: mol_type = other DNA
agcaaatctgctatccatca

SEQ ID NO: 35961 - DNA, 20 bp, synthetic construct
  misc_feature 1..20: note = chemically synthesized
  source 1..20: mol_type = other DNA
gctatccatcattttgtttc

SEQ ID NO: 35962 - DNA, 20 bp, synthetic construct
  misc_feature 1..20: note = chemically synthesized
  source 1..20: mol_type = other DNA
ctcatttggagggacctgat

SEQ ID NO: 35963 - DNA, 20 bp, synthetic construct
  misc_feature 1..20: note = chemically synthesized
  source 1..20: mol_type = other DNA
ggagggacctgatctctgat

SEQ ID NO: 35964 - DNA, 20 bp, synthetic construct
  misc_feature 1..20: note = chemically synthesized
  source 1..20: mol_type = other DNA
ttgttacaacatgcaaacct

SEQ ID NO: 35965 - DNA, 20 bp, synthetic construct
  misc_feature 1..20: note = chemically synthesized
  source 1..20: mol_type = other DNA
ttttccaggacttctggtgg

SEQ ID NO: 35966 - DNA, 20 bp, synthetic construct
  misc_feature 1..20: note = chemically synthesized
  source 1..20: mol_type = other DNA
ctccctgaagctctgttagc

SEQ ID NO: 35967 - DNA, 20 bp, synthetic construct
  misc_feature 1..20: note = chemically synthesized
  source 1..20: mol_type = other DNA
gtaaaataattagaataaaa

SEQ ID NO: 35968 - DNA, 20 bp, synthetic construct
  misc_feature 1..20: note = chemically synthesized
  source 1..20: mol_type = other DNA
taacttctcagaatgcatct

SEQ ID NO: 35969 - DNA, 20 bp, synthetic construct
  misc_feature 1..20: note = chemically synthesized
  source 1..20: mol_type = other DNA
tgggtagatcacctgaggtc

SEQ ID NO: 35970 - DNA, 20 bp, synthetic construct
  misc_feature 1..20: note = chemically synthesized
  source 1..20: mol_type = other DNA
tcaggaggctgagggaggag

SEQ ID NO: 35971 - DNA, 20 bp, synthetic construct
  misc_feature 1..20: note = chemically synthesized
  source 1..20: mol_type = other DNA
aaaccaggtaaagtatttgg

SEQ ID NO: 35972 - DNA, 20 bp, synthetic construct
  misc_feature 1..20: note = chemically synthesized
  source 1..20: mol_type = other DNA
cttcatttcccccaaaggac

SEQ ID NO: 35973 - DNA, 20 bp, synthetic construct
  misc_feature 1..20: note = chemically synthesized
  source 1..20: mol_type = other DNA
ttgttctggcaagtagcact

SEQ ID NO: 35974 - DNA, 20 bp, synthetic construct
  misc_feature 1..20: note = chemically synthesized
  source 1..20: mol_type = other DNA
gaatcaaagcagaatgaagg

SEQ ID NO: 35975 - DNA, 20 bp, synthetic construct
  misc_feature 1..20: note = chemically synthesized
  source 1..20: mol_type = other DNA
atataaataagtgcaaaatt

SEQ ID NO: 35976 - DNA, 20 bp, synthetic construct
  misc_feature 1..20: note = chemically synthesized
  source 1..20: mol_type = other DNA
aacaactttccagaaacagg

SEQ ID NO: 35977 - DNA, 20 bp, synthetic construct
  misc_feature 1..20: note = chemically synthesized
  source 1..20: mol_type = other DNA
aggaggatgcagcgacccag

SEQ ID NO: 35978 - DNA, 20 bp, synthetic construct
  misc_feature 1..20: note = chemically synthesized
  source 1..20: mol_type = other DNA
atgcttgcaagcccacccag

SEQ ID NO: 35979 - DNA, 20 bp, synthetic construct
  misc_feature 1..20: note = chemically synthesized
  source 1..20: mol_type = other DNA
ttgcaagcccacccagctag

SEQ ID NO: 35980 - DNA, 20 bp, synthetic construct
  misc_feature 1..20: note = chemically synthesized
  source 1..20: mol_type = other DNA
cattttaccagtgaagaaac

SEQ ID NO: 35981 - DNA, 20 bp, synthetic construct
  misc_feature 1..20: note = chemically synthesized
  source 1..20: mol_type = other DNA
tgttcatcttacctatccac

SEQ ID NO: 35982 - DNA, 20 bp, synthetic construct
  misc_feature 1..20: note = chemically synthesized
  source 1..20: mol_type = other DNA
aggtgccccgactgtgagtt

SEQ ID NO: 35983 - DNA, 20 bp, synthetic construct
  misc_feature 1..20: note = chemically synthesized
  source 1..20: mol_type = other DNA
gagttgggaagtgtggggtg

SEQ ID NO: 35984 - DNA, 20 bp, synthetic construct
  misc_feature 1..20: note = chemically synthesized
  source 1..20: mol_type = other DNA
tctgatgtaagttcctgctg

SEQ ID NO: 35985 - DNA, 20 bp, synthetic construct
  misc_feature 1..20: note = chemically synthesized
  source 1..20: mol_type = other DNA
gccccctgtcccctccccgc

SEQ ID NO: 35986 - DNA, 20 bp, synthetic construct
  misc_feature 1..20: note = chemically synthesized
  source 1..20: mol_type = other DNA
cacaggtcctgtgctgcccc

SEQ ID NO: 35987 - DNA, 20 bp, synthetic construct
  misc_feature 1..20: note = chemically synthesized
  source 1..20: mol_type = other DNA
cccccacagctttgcaggct

SEQ ID NO: 35988 - DNA, 20 bp, synthetic construct
  misc_feature 1..20: note = chemically synthesized
  source 1..20: mol_type = other DNA
ctgctctctccgaatcttag

SEQ ID NO: 35989 - DNA, 20 bp, synthetic construct
  misc_feature 1..20: note = chemically synthesized
  source 1..20: mol_type = other DNA
cttagtcctgcttgaggtct

SEQ ID NO: 35990 - DNA, 20 bp, synthetic construct
  misc_feature 1..20: note = chemically synthesized
  source 1..20: mol_type = other DNA
gcagcttccggagctgcaca

SEQ ID NO: 35991 - DNA, 20 bp, synthetic construct
  misc_feature 1..20: note = chemically synthesized
  source 1..20: mol_type = other DNA
tgcacatggggcttgaggtc

SEQ ID NO: 35992 - DNA, 20 bp, synthetic construct
  misc_feature 1..20: note = chemically synthesized
  source 1..20: mol_type = other DNA
ggggcttgaggtctggtgct

SEQ ID NO: 35993 - DNA, 20 bp, synthetic construct
  misc_feature 1..20: note = chemically synthesized
  source 1..20: mol_type = other DNA
agacagatggcagagtacca

SEQ ID NO: 35994 - DNA, 20 bp, synthetic construct
  misc_feature 1..20: note = chemically synthesized
  source 1..20: mol_type = other DNA
gtggcccaggtgctgcccag

SEQ ID NO: 35995 - DNA, 20 bp, synthetic construct
  misc_feature 1..20: note = chemically synthesized
  source 1..20: mol_type = other DNA
agcctctccactcaaggttg

SEQ ID NO: 35996 - DNA, 20 bp, synthetic construct
  misc_feature 1..20: note = chemically synthesized
  source 1..20: mol_type = other DNA
ctgtccacccctttggtccg

SEQ ID NO: 35997 - DNA, 20 bp, synthetic construct
  misc_feature 1..20: note = chemically synthesized
  source 1..20: mol_type = other DNA
ttgagaaagtgggacgttga

SEQ ID NO: 35998 - DNA, 20 bp, synthetic construct
  misc_feature 1..20: note = chemically synthesized
  source 1..20: mol_type = other DNA
tcctgaaggaataaggcacg

SEQ ID NO: 35999 - DNA, 20 bp, synthetic construct
  misc_feature 1..20: note = chemically synthesized
  source 1..20: mol_type = other DNA
cagatactgttctccagctc

SEQ ID NO: 36000 - DNA, 20 bp, synthetic construct
  misc_feature 1..20: note = chemically synthesized
  source 1..20: mol_type = other DNA
ccccaccacccaccaccacc

SEQ ID NO: 36001 - DNA, 20 bp, synthetic construct
  misc_feature 1..20: note = chemically synthesized
  source 1..20: mol_type = other DNA
ttcctgttctattagacaaa

SEQ ID NO: 36002 - DNA, 20 bp, synthetic construct
  misc_feature 1..20: note = chemically synthesized
  source 1..20: mol_type = other DNA
tggatgagttggacagtcat

SEQ ID NO: 36003 - DNA, 20 bp, synthetic construct
  misc_feature 1..20: note = chemically synthesized
  source 1..20: mol_type = other DNA
ggacagtcatctgagtttga

SEQ ID NO: 36004 - DNA, 20 bp, synthetic construct
  misc_feature 1..20: note = chemically synthesized
  source 1..20: mol_type = other DNA
catattagtacatccatcag

SEQ ID NO: 36005 - DNA, 20 bp, synthetic construct
  misc_feature 1..20: note = chemically synthesized
  source 1..20: mol_type = other DNA
ttggacctatagatgacctc

SEQ ID NO: 36006 - DNA, 20 bp, synthetic construct
  misc_feature 1..20: note = chemically synthesized
  source 1..20: mol_type = other DNA
ctccccttgtcacctcatct

SEQ ID NO: 36007 - DNA, 20 bp, synthetic construct
  misc_feature 1..20: note = chemically synthesized
  source 1..20: mol_type = other DNA
ttcctggtaccaggatgatg

SEQ ID NO: 36008 - DNA, 20 bp, synthetic construct
  misc_feature 1..20: note = chemically synthesized
  source 1..20: mol_type = other DNA
ccagcctgggtgtgcatctt

SEQ ID NO: 36009 - DNA, 20 bp, synthetic construct
  misc_feature 1..20: note = chemically synthesized
  source 1..20: mol_type = other DNA
cccgtctacatagaggccct

SEQ ID NO: 36010 - DNA, 20 bp, synthetic construct
  misc_feature 1..20: note = chemically synthesized
  source 1..20: mol_type = other DNA
ctccccacctccatgggcct

SEQ ID NO: 36011 - DNA, 20 bp, synthetic construct
  misc_feature 1..20: note = chemically synthesized
  source 1..20: mol_type = other DNA
gctcacttccatcctgcaga

SEQ ID NO: 36012 - DNA, 20 bp, synthetic construct
  misc_feature 1..20: note = chemically synthesized
  source 1..20: mol_type = other DNA
cttccatcctgcagaggaag

SEQ ID NO: 36013 - DNA, 20 bp, synthetic construct
  misc_feature 1..20: note = chemically synthesized
  source 1..20: mol_type = other DNA
cgtaggtagtgactggtaag

SEQ ID NO: 36014 - DNA, 20 bp, synthetic construct
  misc_feature 1..20: note = chemically synthesized
  source 1..20: mol_type = other DNA
tagtgactggtaagagccga

SEQ ID NO: 36015 - DNA, 20 bp, synthetic construct
  misc_feature 1..20: note = chemically synthesized
  source 1..20: mol_type = other DNA
taagagccgattgagtttct

SEQ ID NO: 36016 - DNA, 20 bp, synthetic construct
  misc_feature 1..20: note = chemically synthesized
  source 1..20: mol_type = other DNA
ttctaattcaattcaggagc

SEQ ID NO: 36017 - DNA, 20 bp, synthetic construct
  misc_feature 1..20: note = chemically synthesized
  source 1..20: mol_type = other DNA
cttggcctgctaacctgagg

SEQ ID NO: 36018 - DNA, 20 bp, synthetic construct
  misc_feature 1..20: note = chemically synthesized
  source 1..20: mol_type = other DNA
ctaacctgagggctagtttc

SEQ ID NO: 36019 - DNA, 20 bp, synthetic construct
  misc_feature 1..20: note = chemically synthesized
  source 1..20: mol_type = other DNA
cctgagggctagtttctagg

SEQ ID NO: 36020 - DNA, 20 bp, synthetic construct
  misc_feature 1..20: note = chemically synthesized
  source 1..20: mol_type = other DNA
ttaacttaaagacagttcat

SEQ ID NO: 36021 - DNA, 20 bp, synthetic construct
  misc_feature 1..20: note = chemically synthesized
  source 1..20: mol_type = other DNA
tcaaacagagcagttaaagg

SEQ ID NO: 36022 - DNA, 20 bp, synthetic construct
  misc_feature 1..20: note = chemically synthesized
  source 1..20: mol_type = other DNA
cagagcagttaaaggcgatg

SEQ ID NO: 36023 - DNA, 20 bp, synthetic construct
  misc_feature 1..20: note = chemically synthesized
  source 1..20: mol_type = other DNA
aaggcgatgcttcgttttac

SEQ ID NO: 36024 - DNA, 20 bp, synthetic construct
  misc_feature 1..20: note = chemically synthesized
  source 1..20: mol_type = other DNA
cagtggtattcctttcaatg

SEQ ID NO: 36025 - DNA, 20 bp, synthetic construct
  misc_feature 1..20: note = chemically synthesized
  source 1..20: mol_type = other DNA
gaatgtttctctagctcatt

SEQ ID NO: 36026 - DNA, 20 bp, synthetic construct
  misc_feature 1..20: note = chemically synthesized
  source 1..20: mol_type = other DNA
gaaatagctctagctctagc

SEQ ID NO: 36027 - DNA, 20 bp, synthetic construct
  misc_feature 1..20: note = chemically synthesized
  source 1..20: mol_type = other DNA
cactgggggaggagtagaga

SEQ ID NO: 36028 - DNA, 20 bp, synthetic construct
  misc_feature 1..20: note = chemically synthesized
  source 1..20: mol_type = other DNA
gatcttgcttccttccatgt

SEQ ID NO: 36029 - DNA, 20 bp, synthetic construct
  misc_feature 1..20: note = chemically synthesized
  source 1..20: mol_type = other DNA
agcttatagtccctttggaa

SEQ ID NO: 36030 - DNA, 20 bp, synthetic construct
  misc_feature 1..20: note = chemically synthesized
  source 1..20: mol_type = other DNA
actgtccatggggaaatggg

SEQ ID NO: 36031 - DNA, 20 bp, synthetic construct
  misc_feature 1..20: note = chemically synthesized
  source 1..20: mol_type = other DNA
tgggtcctgctttacaaaaa

SEQ ID NO: 36032 - DNA, 20 bp, synthetic construct
  misc_feature 1..20: note = chemically synthesized
  source 1..20: mol_type = other DNA
ttacaaaaattcagtttgca

SEQ ID NO: 36033 - DNA, 20 bp, synthetic construct
  misc_feature 1..20: note = chemically synthesized
  source 1..20: mol_type = other DNA
atgactgtgacatccagtga

SEQ ID NO: 36034 - DNA, 20 bp, synthetic construct
  misc_feature 1..20: note = chemically synthesized
  source 1..20: mol_type = other DNA
tgtaagtaagtctgtgtggt

SEQ ID NO: 36035 - DNA, 20 bp, synthetic construct
  misc_feature 1..20: note = chemically synthesized
  source 1..20: mol_type = other DNA
atcctcctctcttccctctt

SEQ ID NO: 36036 - DNA, 20 bp, synthetic construct
  misc_feature 1..20: note = chemically synthesized
  source 1..20: mol_type = other DNA
tgctctgtctctgcctggga

SEQ ID NO: 36037 - DNA, 20 bp, synthetic construct
  misc_feature 1..20: note = chemically synthesized
  source 1..20: mol_type = other DNA
gtaaacgtgtattggacttc

SEQ ID NO: 36038 - DNA, 20 bp, synthetic construct
  misc_feature 1..20: note = chemically synthesized
  source 1..20: mol_type = other DNA
ttggacttccattgcttaag

SEQ ID NO: 36039 - DNA, 20 bp, synthetic construct
  misc_feature 1..20: note = chemically synthesized
  source 1..20: mol_type = other DNA
cttccattgcttaagtcatg

SEQ ID NO: 36040 - DNA, 20 bp, synthetic construct
  misc_feature 1..20: note = chemically synthesized
  source 1..20: mol_type = other DNA
acttccagaactttcccggt

SEQ ID NO: 36041 - DNA, 20 bp, synthetic construct
  misc_feature 1..20: note = chemically synthesized
  source 1..20: mol_type = other DNA
actttcccggttctggtttt

SEQ ID NO: 36042 - DNA, 20 bp, synthetic construct
  misc_feature 1..20: note = chemically synthesized
  source 1..20: mol_type = other DNA
ctgggatttcatgaacaatt

SEQ ID NO: 36043 - DNA, 20 bp, synthetic construct
  misc_feature 1..20: note = chemically synthesized
  source 1..20: mol_type = other DNA
atccatttcctgcacaggtg

SEQ ID NO: 36044 - DNA, 20 bp, synthetic construct
  misc_feature 1..20: note = chemically synthesized
  source 1..20: mol_type = other DNA
tgacctctggatcccttctc

SEQ ID NO: 36045 - DNA, 20 bp, synthetic construct
  misc_feature 1..20: note = chemically synthesized
  source 1..20: mol_type = other DNA
ctctggatcccttctctttg

SEQ ID NO: 36046 - DNA, 20 bp, synthetic construct
  misc_feature 1..20: note = chemically synthesized
  source 1..20: mol_type = other DNA
ttctcttttccagagctgca

SEQ ID NO: 36047 - DNA, 20 bp, synthetic construct
  misc_feature 1..20: note = chemically synthesized
  source 1..20: mol_type = other DNA
agagctgcagtatgtttctt

SEQ ID NO: 36048 - DNA, 20 bp, synthetic construct
  misc_feature 1..20: note = chemically synthesized
  source 1..20: mol_type = other DNA
caccatttagagcctggaat

SEQ ID NO: 36049 - DNA, 20 bp, synthetic construct
  misc_feature 1..20: note = chemically synthesized
  source 1..20: mol_type = other DNA
ccccaggctcccatggtggc

SEQ ID NO: 36050 - DNA, 20 bp, synthetic construct
  misc_feature 1..20: note = chemically synthesized
  source 1..20: mol_type = other DNA
tctttgagcaggaaaagaat

SEQ ID NO: 36051 - DNA, 20 bp, synthetic construct
  misc_feature 1..20: note = chemically synthesized
  source 1..20: mol_type = other DNA
aggtaccttttgtgtgtatg

SEQ ID NO: 36052 - DNA, 20 bp, synthetic construct
  misc_feature 1..20: note = chemically synthesized
  source 1..20: mol_type = other DNA
gtgccccatgggcaaaccag

SEQ ID NO: 36053 - DNA, 20 bp, synthetic construct
  misc_feature 1..20: note = chemically synthesized
  source 1..20: mol_type = other DNA
gtgcataagtaagagcagat

SEQ ID NO: 36054 - DNA, 20 bp, synthetic construct
  misc_feature 1..20: note = chemically synthesized
  source 1..20: mol_type = other DNA
ctagtctagtgcaagctaac

SEQ ID NO: 36055 - DNA, 20 bp, synthetic construct
  misc_feature 1..20: note = chemically synthesized
  source 1..20: mol_type = other DNA
cttttatcacaggctccagg

SEQ ID NO: 36056 - DNA, 20 bp, synthetic construct
  misc_feature 1..20: note = chemically synthesized
  source 1..20: mol_type = other DNA
ggctccaggaagggtttggc

SEQ ID NO: 36057 - DNA, 20 bp, synthetic construct
  misc_feature 1..20: note = chemically synthesized
  source 1..20: mol_type = other DNA
tggcagacctctccatcggt

SEQ ID NO: 36058 - DNA, 20 bp, synthetic construct
  misc_feature 1..20: note = chemically synthesized
  source 1..20: mol_type = other DNA
ggctctcttggtgatggaga

SEQ ID NO: 36059 - DNA, 20 bp, synthetic construct
  misc_feature 1..20: note = chemically synthesized
  source 1..20: mol_type = other DNA
tcccaaaattgtaaaggagg

SEQ ID NO: 36060 - DNA, 20 bp, synthetic construct
  misc_feature 1..20: note = chemically synthesized
  source 1..20: mol_type = other DNA
ttggggaaagggcctgataa

SEQ ID NO: 36061 - DNA, 20 bp, synthetic construct
  misc_feature 1..20: note = chemically synthesized
  source 1..20: mol_type = other DNA
ccagtctgtattgccccaag

SEQ ID NO: 36062 - DNA, 20 bp, synthetic construct
  misc_feature 1..20: note = chemically synthesized
  source 1..20: mol_type = other DNA
ccaagtctggctttgccaat

SEQ ID NO: 36063 - DNA, 20 bp, synthetic construct
  misc_feature 1..20: note = chemically synthesized
  source 1..20: mol_type = other DNA
tctcatctcactgagctctg

SEQ ID NO: 36064 - DNA, 20 bp, synthetic construct
  misc_feature 1..20: note = chemically synthesized
  source 1..20: mol_type = other DNA
cccatcttggcaaaaattgc

SEQ ID NO: 36065 - DNA, 20 bp, synthetic construct
  misc_feature 1..20: note = chemically synthesized
  source 1..20: mol_type = other DNA
gagataatttattacaacct

SEQ ID NO: 36066 - DNA, 20 bp, synthetic construct
  misc_feature 1..20: note = chemically synthesized
  source 1..20: mol_type = other DNA
tgaccaggccatggtcactg

SEQ ID NO: 36067 - DNA, 20 bp, synthetic construct
  misc_feature 1..20: note = chemically synthesized
  source 1..20: mol_type = other DNA
tcagcatcaccctctctcac

SEQ ID NO: 36068 - DNA, 20 bp, synthetic construct
  misc_feature 1..20: note = chemically synthesized
  source 1..20: mol_type = other DNA
ccctaggcgtaagaatgtgc

SEQ ID NO: 36069 - DNA, 20 bp, synthetic construct
  misc_feature 1..20: note = chemically synthesized
  source 1..20: mol_type = other DNA
atgtaggtgtgcctcaccca

SEQ ID NO: 36070 - DNA, 20 bp, synthetic construct
  misc_feature 1..20: note = chemically synthesized
  source 1..20: mol_type = other DNA
cccatggggcttcactttct

SEQ ID NO: 36071 - DNA, 20 bp, synthetic construct
  misc_feature 1..20: note = chemically synthesized
  source 1..20: mol_type = other DNA
attgccagtagtggtctctg

SEQ ID NO: 36072 - DNA, 20 bp, synthetic construct
  misc_feature 1..20: note = chemically synthesized
  source 1..20: mol_type = other DNA
gtggtctctgttctgttttc

SEQ ID NO: 36073 - DNA, 20 bp, synthetic construct
  misc_feature 1..20: note = chemically synthesized
  source 1..20: mol_type = other DNA
actccccgtaccttccttta

SEQ ID NO: 36074 - DNA, 20 bp, synthetic construct
  misc_feature 1..20: note = chemically synthesized
  source 1..20: mol_type = other DNA
cctgtctcccccaggggtcc

SEQ ID NO: 36075 - DNA, 20 bp, synthetic construct
  misc_feature 1..20: note = chemically synthesized
  source 1..20: mol_type = other DNA
ggaatcttaatttcctgcac

SEQ ID NO: 36076 - DNA, 20 bp, synthetic construct
  misc_feature 1..20: note = chemically synthesized
  source 1..20: mol_type = other DNA
cccagagtccaatttatttg

SEQ ID NO: 36077 - DNA, 20 bp, synthetic construct
  misc_feature 1..20: note = chemically synthesized
  source 1..20: mol_type = other DNA
caaatgaatgcccattttaa

SEQ ID NO: 36078 - DNA, 20 bp, synthetic construct
  misc_feature 1..20: note = chemically synthesized
  source 1..20: mol_type = other DNA
tcatttccttagtgtagtgg

SEQ ID NO: 36079 - DNA, 20 bp, synthetic construct
  misc_feature 1..20: note = chemically synthesized
  source 1..20: mol_type = other DNA
ccaaacagatagctgggata

SEQ ID NO: 36080 - DNA, 20 bp, synthetic construct
  misc_feature 1..20: note = chemically synthesized
  source 1..20: mol_type = other DNA
ctgtgttctcgaaatgcctt

SEQ ID NO: 36081 - DNA, 20 bp, synthetic construct
  misc_feature 1..20: note = chemically synthesized
  source 1..20: mol_type = other DNA
aggggtcagagggttaggga

SEQ ID NO: 36082 - DNA, 20 bp, synthetic construct
  misc_feature 1..20: note = chemically synthesized
  source 1..20: mol_type = other DNA
ttgacagcaaaggggcatga

SEQ ID NO: 36083 - DNA, 20 bp, synthetic construct
  misc_feature 1..20: note = chemically synthesized
  source 1..20: mol_type = other DNA
actggtggacgtgttctgta

SEQ ID NO: 36084 - DNA, 20 bp, synthetic construct
  misc_feature 1..20: note = chemically synthesized
  source 1..20: mol_type = other DNA
caagtctgtctgtaaccttt

SEQ ID NO: 36085 - DNA, 20 bp, synthetic construct
  misc_feature 1..20: note = chemically synthesized
  source 1..20: mol_type = other DNA
atgagaatgccctttgtatt

SEQ ID NO: 36086 - DNA, 20 bp, synthetic construct
  misc_feature 1..20: note = chemically synthesized
  source 1..20: mol_type = other DNA
ggagagagcaaggggaggaa

SEQ ID NO: 36087 - DNA, 20 bp, synthetic construct
  misc_feature 1..20: note = chemically synthesized
  source 1..20: mol_type = other DNA
tctgttttcctagaattcca

SEQ ID NO: 36088 - DNA, 20 bp, synthetic construct
  misc_feature 1..20: note = chemically synthesized
  source 1..20: mol_type = other DNA
aaaggggagggagtacccaa

SEQ ID NO: 36089 - DNA, 20 bp, synthetic construct
  misc_feature 1..20: note = chemically synthesized
  source 1..20: mol_type = other DNA
cattagcccaattagttgtc

SEQ ID NO: 36090 - DNA, 20 bp, synthetic construct
  misc_feature 1..20: note = chemically synthesized
  source 1..20: mol_type = other DNA
agcccaattagttgtctttt

SEQ ID NO: 36091 - DNA, 20 bp, synthetic construct
  misc_feature 1..20: note = chemically synthesized
  source 1..20: mol_type = other DNA
caattagttgtcttttgttt

SEQ ID NO: 36092 - DNA, 20 bp, synthetic construct
  misc_feature 1..20: note = chemically synthesized
  source 1..20: mol_type = other DNA
tagttgtcttttgtttgttt

SEQ ID NO: 36093 - DNA, 20 bp, synthetic construct
  misc_feature 1..20: note = chemically synthesized
  source 1..20: mol_type = other DNA
tgtcttttgtttgtttgttt

SEQ ID NO: 36094 - DNA, 20 bp, synthetic construct
  misc_feature 1..20: note = chemically synthesized
  source 1..20: mol_type = other DNA
cctggctaattttgtagaga

SEQ ID NO: 36095 - DNA, 20 bp, synthetic construct
  misc_feature 1..20: note = chemically synthesized
  source 1..20: mol_type = other DNA
tgccttgacctcccaaagtg

SEQ ID NO: 36096 - DNA, 20 bp, synthetic construct
  misc_feature 1..20: note = chemically synthesized
  source 1..20: mol_type = other DNA
gtgctgaattcctgtaaagt

SEQ ID NO: 36097 - DNA, 20 bp, synthetic construct
  misc_feature 1..20: note = chemically synthesized
  source 1..20: mol_type = other DNA
aattcctgtaaagtgagggt

SEQ ID NO: 36098 - DNA, 20 bp, synthetic construct
  misc_feature 1..20: note = chemically synthesized
  source 1..20: mol_type = other DNA
ttcctacatccatcttcctc

SEQ ID NO: 36099 - DNA, 20 bp, synthetic construct
  misc_feature 1..20: note = chemically synthesized
  source 1..20: mol_type = other DNA
tatctgaacttcatttattt

SEQ ID NO: 36100 - DNA, 20 bp, synthetic construct
  misc_feature 1..20: note = chemically synthesized
  source 1..20: mol_type = other DNA
tatttgggtgctaaggactg

SEQ ID NO: 36101 - DNA, 20 bp, synthetic construct
  misc_feature 1..20: note = chemically synthesized
  source 1..20: mol_type = other DNA
acacggagtgatgatgccta

SEQ ID NO: 36102 - DNA, 20 bp, synthetic construct
  misc_feature 1..20: note = chemically synthesized
  source 1..20: mol_type = other DNA
tttttctttttttggtgaga

SEQ ID NO: 36103 - DNA, 20 bp, synthetic construct
  misc_feature 1..20: note = chemically synthesized
  source 1..20: mol_type = other DNA
tgcctcagcctcccgagtag

SEQ ID NO: 36104 - DNA, 20 bp, synthetic construct
  misc_feature 1..20: note = chemically synthesized
  source 1..20: mol_type = other DNA
ttttgtatttttagtagaga

SEQ ID NO: 36105 - DNA, 20 bp, synthetic construct
  misc_feature 1..20: note = chemically synthesized
  source 1..20: mol_type = other DNA
tgccccggcctcccaaagtg

SEQ ID NO: 36106 - DNA, 20 bp, synthetic construct
  misc_feature 1..20: note = chemically synthesized
  source 1..20: mol_type = other DNA
ctgaagggggccaaaagtgt

SEQ ID NO: 36107 - DNA, 20 bp, synthetic construct
  misc_feature 1..20: note = chemically synthesized
  source 1..20: mol_type = other DNA
catttaaaacagcattaaga

SEQ ID NO: 36108 - DNA, 20 bp, synthetic construct
  misc_feature 1..20: note = chemically synthesized
  source 1..20: mol_type = other DNA
ttaagaatacgtttttagaa

SEQ ID NO: 36109 - DNA, 20 bp, synthetic construct
  misc_feature 1..20: note = chemically synthesized
  source 1..20: mol_type = other DNA
agagttgcacaaccacgtag

SEQ ID NO: 36110 - DNA, 20 bp, synthetic construct
  misc_feature 1..20: note = chemically synthesized
  source 1..20: mol_type = other DNA
tcttctccagggtgtggggt

SEQ ID NO: 36111 - DNA, 20 bp, synthetic construct
  misc_feature 1..20: note = chemically synthesized
  source 1..20: mol_type = other DNA
tagcataacatgttactgca

SEQ ID NO: 36112 - DNA, 20 bp, synthetic construct
  misc_feature 1..20: note = chemically synthesized
  source 1..20: mol_type = other DNA
tcaagtagatatcagaaggg

SEQ ID NO: 36113 - DNA, 20 bp, synthetic construct
  misc_feature 1..20: note = chemically synthesized
  source 1..20: mol_type = other DNA
ttctatgaggttggagaagg

SEQ ID NO: 36114 - DNA, 20 bp, synthetic construct
  misc_feature 1..20: note = chemically synthesized
  source 1..20: mol_type = other DNA
atgaggttggagaaggatga

SEQ ID NO: 36115 - DNA, 20 bp, synthetic construct
  misc_feature 1..20: note = chemically synthesized
  source 1..20: mol_type = other DNA
attgaggccttgaagtatga

SEQ ID NO: 36116 - DNA, 20 bp, synthetic construct
  misc_feature 1..20: note = chemically synthesized
  source 1..20: mol_type = other DNA
caggaaggaaatgagaacgg

SEQ ID NO: 36117 - DNA, 20 bp, synthetic construct
  misc_feature 1..20: note = chemically synthesized
  source 1..20: mol_type = other DNA
gactggaatagaaaattgga

SEQ ID NO: 36118 - DNA, 20 bp, synthetic construct
  misc_feature 1..20: note = chemically synthesized
  source 1..20: mol_type = other DNA
ggattgtggagctctggaat

SEQ ID NO: 36119 - DNA, 20 bp, synthetic construct
  misc_feature 1..20: note = chemically synthesized
  source 1..20: mol_type = other DNA
aggatggagttggttgaccg

SEQ ID NO: 36120 - DNA, 20 bp, synthetic construct
  misc_feature 1..20: note = chemically synthesized
  source 1..20: mol_type = other DNA
ggtctgttactaatatagag

SEQ ID NO: 36121 - DNA, 20 bp, synthetic construct
  misc_feature 1..20: note = chemically synthesized
  source 1..20: mol_type = other DNA
agaggactgtttaaatcttg

SEQ ID NO: 36122 - DNA, 20 bp, synthetic construct
  misc_feature 1..20: note = chemically synthesized
  source 1..20: mol_type = other DNA
tgggatactcagggcatgga

SEQ ID NO: 36123 - DNA, 20 bp, synthetic construct
  misc_feature 1..20: note = chemically synthesized
  source 1..20: mol_type = other DNA
atctctctttaatagtgtcc

SEQ ID NO: 36124 - DNA, 20 bp, synthetic construct
  misc_feature 1..20: note = chemically synthesized
  source 1..20: mol_type = other DNA
ttcaaatgtcagactttctt

SEQ ID NO: 36125 - DNA, 20 bp, synthetic construct
  misc_feature 1..20: note = chemically synthesized
  source 1..20: mol_type = other DNA
ctttcttttcagcttccttc

SEQ ID NO: 36126 - DNA, 20 bp, synthetic construct
  misc_feature 1..20: note = chemically synthesized
  source 1..20: mol_type = other DNA
ttgagataggtgctggtcaa

SEQ ID NO: 36127 - DNA, 20 bp, synthetic construct
  misc_feature 1..20: note = chemically synthesized
  source 1..20: mol_type = other DNA
taggtgctggtcaaacaagc

SEQ ID NO: 36128 - DNA, 20 bp, synthetic construct
  misc_feature 1..20: note = chemically synthesized
  source 1..20: mol_type = other DNA
ggtcacttggcacacagtgt

SEQ ID NO: 36129 - DNA, 20 bp, synthetic construct
  misc_feature 1..20: note = chemically synthesized
  source 1..20: mol_type = other DNA
taatggcacgcagggccgcc

SEQ ID NO: 36130 - DNA, 20 bp, synthetic construct
  misc_feature 1..20: note = chemically synthesized
  source 1..20: mol_type = other DNA
tgtgtttactgccaagaaat

SEQ ID NO: 36131 - DNA, 20 bp, synthetic construct
  misc_feature 1..20: note = chemically synthesized
  source 1..20: mol_type = other DNA
taagggcttctaggagactt

SEQ ID NO: 36132 - DNA, 20 bp, synthetic construct
  misc_feature 1..20: note = chemically synthesized
  source 1..20: mol_type = other DNA
ctcacagtgtgaatttagtt

SEQ ID NO: 36133 - DNA, 20 bp, synthetic construct
  misc_feature 1..20: note = chemically synthesized
  source 1..20: mol_type = other DNA
ttttccccaaactctaaagc

SEQ ID NO: 36134 - DNA, 20 bp, synthetic construct
  misc_feature 1..20: note = chemically synthesized
  source 1..20: mol_type = other DNA
ttttttttctttgaagataa

SEQ ID NO: 36135 - DNA, 20 bp, synthetic construct
  misc_feature 1..20: note = chemically synthesized
  source 1..20: mol_type = other DNA
ttttgggtatggctgggtgt

SEQ ID NO: 36136 - DNA, 20 bp, synthetic construct
  misc_feature 1..20: note = chemically synthesized
  source 1..20: mol_type = other DNA
tgggtggatcacctaaggtc

SEQ ID NO: 36137 - DNA, 20 bp, synthetic construct
  misc_feature 1..20: note = chemically synthesized
  source 1..20: mol_type = other DNA
ttgggaggctgaggcaggag

SEQ ID NO: 36138 - DNA, 20 bp, synthetic construct
  misc_feature 1..20: note = chemically synthesized
  source 1..20: mol_type = other DNA
aatcgcttgaacccgggagg

SEQ ID NO: 36139 - DNA, 20 bp, synthetic construct
  misc_feature 1..20: note = chemically synthesized
  source 1..20: mol_type = other DNA
gaggcggagattgcggtgag

SEQ ID NO: 36140 - DNA, 20 bp, synthetic construct
  misc_feature 1..20: note = chemically synthesized
  source 1..20: mol_type = other DNA
acaaacaaacaaacaaacaa

SEQ ID NO: 36141 - DNA, 20 bp, synthetic construct
  misc_feature 1..20: note = chemically synthesized
  source 1..20: mol_type = other DNA
acaaaatcgttttgggtagc

SEQ ID NO: 36142 - DNA, 20 bp, synthetic construct
  misc_feature 1..20: note = chemically synthesized
  source 1..20: mol_type = other DNA
tttgggtagcagtggcttta

SEQ ID NO: 36143 - DNA, 20 bp, synthetic construct
  misc_feature 1..20: note = chemically synthesized
  source 1..20: mol_type = other DNA
tttggatctttggctattga

SEQ ID NO: 36144 - DNA, 20 bp, synthetic construct
  misc_feature 1..20: note = chemically synthesized
  source 1..20: mol_type = other DNA
tttcatgttaagcaaaacta

SEQ ID NO: 36145 - DNA, 20 bp, synthetic construct
  misc_feature 1..20: note = chemically synthesized
  source 1..20: mol_type = other DNA
caaactatttacagccataa

SEQ ID NO: 36146 - DNA, 20 bp, synthetic construct
  misc_feature 1..20: note = chemically synthesized
  source 1..20: mol_type = other DNA
ttaaatgctgtcaaattgta

SEQ ID NO: 36147 - DNA, 20 bp, synthetic construct
  misc_feature 1..20: note = chemically synthesized
  source 1..20: mol_type = other DNA
tcatgactcaggtatctttt

SEQ ID NO: 36148 - DNA, 20 bp, synthetic construct
  misc_feature 1..20: note = chemically synthesized
  source 1..20: mol_type = other DNA
ttacaggctttgatgaaata

SEQ ID NO: 36149 - DNA, 20 bp, synthetic construct
  misc_feature 1..20: note = chemically synthesized
  source 1..20: mol_type = other DNA
aaactcttccaggataattt

SEQ ID NO: 36150 - DNA, 20 bp, synthetic construct
  misc_feature 1..20: note = chemically synthesized
  source 1..20: mol_type = other DNA
agaataaattgtaagtgtta

SEQ ID NO: 36151 - DNA, 20 bp, synthetic construct
  misc_feature 1..20: note = chemically synthesized
  source 1..20: mol_type = other DNA
ttaatatctaattgttcata

SEQ ID NO: 36152 - DNA, 20 bp, synthetic construct
  misc_feature 1..20: note = chemically synthesized
  source 1..20: mol_type = other DNA
attgttcatatattgcttcc

SEQ ID NO: 36153 - DNA, 20 bp, synthetic construct
  misc_feature 1..20: note = chemically synthesized
  source 1..20: mol_type = other DNA
ggagttggagtacttgcatt

SEQ ID NO: 36154 - DNA, 20 bp, synthetic construct
  misc_feature 1..20: note = chemically synthesized
  source 1..20: mol_type = other DNA
atatttagaccaaattctta

SEQ ID NO: 36155 - DNA, 20 bp, synthetic construct
  misc_feature 1..20: note = chemically synthesized
  source 1..20: mol_type = other DNA
ccattaaaggttcataaatt

SEQ ID NO: 36156 - DNA, 20 bp, synthetic construct
  misc_feature 1..20: note = chemically synthesized
  source 1..20: mol_type = other DNA
atttccagttttcacctttc

SEQ ID NO: 36157 - DNA, 20 bp, synthetic construct
  misc_feature 1..20: note = chemically synthesized
  source 1..20: mol_type = other DNA
taccgcattaaaattaagcc

SEQ ID NO: 36158 - DNA, 20 bp, synthetic construct
  misc_feature 1..20: note = chemically synthesized
  source 1..20: mol_type = other DNA
gccttctttttcatgccttt

SEQ ID NO: 36159 - DNA, 20 bp, synthetic construct
  misc_feature 1..20: note = chemically synthesized
  source 1..20: mol_type = other DNA
ctttttcatgcctttttttg

SEQ ID NO: 36160 - DNA, 20 bp, synthetic construct
  misc_feature 1..20: note = chemically synthesized
  source 1..20: mol_type = other DNA
ctttttttgttttgttttgt

SEQ ID NO: 36161 - DNA, 20 bp, synthetic construct
  misc_feature 1..20: note = chemically synthesized
  source 1..20: mol_type = other DNA
tggattttataaaggcatca

SEQ ID NO: 36162 - DNA, 20 bp, synthetic construct
  misc_feature 1..20: note = chemically synthesized
  source 1..20: mol_type = other DNA
attcatttttaaatatctaa

SEQ ID NO: 36163 - DNA, 20 bp, synthetic construct
  misc_feature 1..20: note = chemically synthesized
  source 1..20: mol_type = other DNA
aagataatctacatttgaga

SEQ ID NO: 36164 - DNA, 20 bp, synthetic construct
  misc_feature 1..20: note = chemically synthesized
  source 1..20: mol_type = other DNA
gctctgctgacattagcatg

SEQ ID NO: 36165 - DNA, 20 bp, synthetic construct
  misc_feature 1..20: note = chemically synthesized
  source 1..20: mol_type = other DNA
gacttgcaaaatataggtta

SEQ ID NO: 36166 - DNA, 20 bp, synthetic construct
  misc_feature 1..20: note = chemically synthesized
  source 1..20: mol_type = other DNA
atcaaattatcttactcttt

SEQ ID NO: 36167 - DNA, 20 bp, synthetic construct
  misc_feature 1..20: note = chemically synthesized
  source 1..20: mol_type = other DNA
cttaaaggaggggcatttgc

SEQ ID NO: 36168 - DNA, 20 bp, synthetic construct
  misc_feature 1..20: note = chemically synthesized
  source 1..20: mol_type = other DNA
taaaattaaatattaatttg

SEQ ID NO: 36169 - DNA, 20 bp, synthetic construct
  misc_feature 1..20: note = chemically synthesized
  source 1..20: mol_type = other DNA
gggcgtgggctgagccatgg

SEQ ID NO: 36170 - DNA, 20 bp, synthetic construct
  misc_feature 1..20: note = chemically synthesized
  source 1..20: mol_type = other DNA
atggccaggtttgagagaca

SEQ ID NO: 36171 - DNA, 20 bp, synthetic construct
  misc_feature 1..20: note = chemically synthesized
  source 1..20: mol_type = other DNA
gctatcaaggccttcctgag

SEQ ID NO: 36172 - DNA, 20 bp, synthetic construct
  misc_feature 1..20: note = chemically synthesized
  source 1..20: mol_type = other DNA
tctgtggatagggaaaattt

SEQ ID NO: 36173 - DNA, 20 bp, synthetic construct
  misc_feature 1..20: note = chemically synthesized
  source 1..20: mol_type = other DNA
tagccattttctttcagtat

SEQ ID NO: 36174 - DNA, 20 bp, synthetic construct
  misc_feature 1..20: note = chemically synthesized
  source 1..20: mol_type = other DNA
tgtgtgtgtgtgtgcctaag

SEQ ID NO: 36175 - DNA, 20 bp, synthetic construct
  misc_feature 1..20: note = chemically synthesized
  source 1..20: mol_type = other DNA
ggcaaggtgggccagtagag

SEQ ID NO: 36176 - DNA, 20 bp, synthetic construct
  misc_feature 1..20: note = chemically synthesized
  source 1..20: mol_type = other DNA
aaatccatttcagaatggag

SEQ ID NO: 36177 - DNA, 20 bp, synthetic construct
  misc_feature 1..20: note = chemically synthesized
  source 1..20: mol_type = other DNA
cttgacctgctgatagaaca

SEQ ID NO: 36178 - DNA, 20 bp, synthetic construct
  misc_feature 1..20: note = chemically synthesized
  source 1..20: mol_type = other DNA
tgctgatagaacaaggggct

SEQ ID NO: 36179 - DNA, 20 bp, synthetic construct
  misc_feature 1..20: note = chemically synthesized
  source 1..20: mol_type = other DNA
atagatccctaaacatacta

SEQ ID NO: 36180 - DNA, 20 bp, synthetic construct
  misc_feature 1..20: note = chemically synthesized
  source 1..20: mol_type = other DNA
gcattgctggtatttataga

SEQ ID NO: 36181 - DNA, 20 bp, synthetic construct
  misc_feature 1..20: note = chemically synthesized
  source 1..20: mol_type = other DNA
tctcaccccagaatagcaag

SEQ ID NO: 36182 - DNA, 20 bp, synthetic construct
  misc_feature 1..20: note = chemically synthesized
  source 1..20: mol_type = other DNA
tctcatatctaggttgctgg

SEQ ID NO: 36183 - DNA, 20 bp, synthetic construct
  misc_feature 1..20: note = chemically synthesized
  source 1..20: mol_type = other DNA
ttcccaggaacctaatattc

SEQ ID NO: 36184 - DNA, 20 bp, synthetic construct
  misc_feature 1..20: note = chemically synthesized
  source 1..20: mol_type = other DNA
cagcttcgtgacgttggatg

SEQ ID NO: 36185 - DNA, 20 bp, synthetic construct
  misc_feature 1..20: note = chemically synthesized
  source 1..20: mol_type = other DNA
agggtttttctttttaaatg

SEQ ID NO: 36186 - DNA, 20 bp, synthetic construct
  misc_feature 1..20: note = chemically synthesized
  source 1..20: mol_type = other DNA
ttttctttttaaatgagttg

SEQ ID NO: 36187 - DNA, 20 bp, synthetic construct
  misc_feature 1..20: note = chemically synthesized
  source 1..20: mol_type = other DNA
ttggcttttgccactttaca

SEQ ID NO: 36188 - DNA, 20 bp, synthetic construct
  misc_feature 1..20: note = chemically synthesized
  source 1..20: mol_type = other DNA
ttacacattgttttccaggt

SEQ ID NO: 36189 - DNA, 20 bp, synthetic construct
  misc_feature 1..20: note = chemically synthesized
  source 1..20: mol_type = other DNA
gtctgccctggctcacaccg

SEQ ID NO: 36190 - DNA, 20 bp, synthetic construct
  misc_feature 1..20: note = chemically synthesized
  source 1..20: mol_type = other DNA
cacaccgttctgtttttgca

SEQ ID NO: 36191 - DNA, 20 bp, synthetic construct
  misc_feature 1..20: note = chemically synthesized
  source 1..20: mol_type = other DNA
gtgacttcaaggaagaaggg

SEQ ID NO: 36192 - DNA, 20 bp, synthetic construct
  misc_feature 1..20: note = chemically synthesized
  source 1..20: mol_type = other DNA
ggtggtggtgagggtgtaca

SEQ ID NO: 36193 - DNA, 20 bp, synthetic construct
  misc_feature 1..20: note = chemically synthesized
  source 1..20: mol_type = other DNA
attgttttttgtatttccta

SEQ ID NO: 36194 - DNA, 20 bp, synthetic construct
  misc_feature 1..20: note = chemically synthesized
  source 1..20: mol_type = other DNA
atttcctattttgatttaaa

SEQ ID NO: 36195 - DNA, 20 bp, synthetic construct
  misc_feature 1..20: note = chemically synthesized
  source 1..20: mol_type = other DNA
attttgatttaaatactgtt

SEQ ID NO: 36196 - DNA, 20 bp, synthetic construct
  misc_feature 1..20: note = chemically synthesized
  source 1..20: mol_type = other DNA
tactgttttttgtttggttg

SEQ ID NO: 36197 - DNA, 20 bp, synthetic construct
  misc_feature 1..20: note = chemically synthesized
  source 1..20: mol_type = other DNA
aagtcctaaacaagtgccac

SEQ ID NO: 36198 - DNA, 20 bp, synthetic construct
  misc_feature 1..20: note = chemically synthesized
  source 1..20: mol_type = other DNA
agtgccacagaggatttctt

SEQ ID NO: 36199 - DNA, 20 bp, synthetic construct
  misc_feature 1..20: note = chemically synthesized
  source 1..20: mol_type = other DNA
cttgataaaatttggagcac

SEQ ID NO: 36200 - DNA, 20 bp, synthetic construct
  misc_feature 1..20: note = chemically synthesized
  source 1..20: mol_type = other DNA
aagtgagaattcccataatt

SEQ ID NO: 36201 - DNA, 20 bp, synthetic construct
  misc_feature 1..20: note = chemically synthesized
  source 1..20: mol_type = other DNA
tatttaaaaggcagggaggg

SEQ ID NO: 36202 - DNA, 20 bp, synthetic construct
  misc_feature 1..20: note = chemically synthesized
  source 1..20: mol_type = other DNA
agtttctgttccacaatcac

SEQ ID NO: 36203 - DNA, 20 bp, synthetic construct
  misc_feature 1..20: note = chemically synthesized
  source 1..20: mol_type = other DNA
gctgtttcagtgaaaagcaa

SEQ ID NO: 36204 - DNA, 20 bp, synthetic construct
  misc_feature 1..20: note = chemically synthesized
  source 1..20: mol_type = other DNA
cttccctttctggtgaatgt

SEQ ID NO: 36205 - DNA, 20 bp, synthetic construct
  misc_feature 1..20: note = chemically synthesized
  source 1..20: mol_type = other DNA
tattttcagctgaatgtgag

SEQ ID NO: 36206 - DNA, 20 bp, synthetic construct
  misc_feature 1..20: note = chemically synthesized
  source 1..20: mol_type = other DNA
gaatgtgagtgcagatttca

SEQ ID NO: 36207 - DNA, 20 bp, synthetic construct
  misc_feature 1..20: note = chemically synthesized
  source 1..20: mol_type = other DNA
cctgcatttgcagaaaatct

SEQ ID NO: 36208 - DNA, 20 bp, synthetic construct
  misc_feature 1..20: note = chemically synthesized
  source 1..20: mol_type = other DNA
gcagataatcattacatcta

SEQ ID NO: 36209 - DNA, 20 bp, synthetic construct
  misc_feature 1..20: note = chemically synthesized
  source 1..20: mol_type = other DNA
aatcattacatctaacaagc

SEQ ID NO: 36210 - DNA, 20 bp, synthetic construct
  misc_feature 1..20: note = chemically synthesized
  source 1..20: mol_type = other DNA
gaccaactcatttataatgg

SEQ ID NO: 36211 - DNA, 20 bp, synthetic construct
  misc_feature 1..20: note = chemically synthesized
  source 1..20: mol_type = other DNA
ataaaaagaaatcctccttc

SEQ ID NO: 36212 - DNA, 20 bp, synthetic construct
  misc_feature 1..20: note = chemically synthesized
  source 1..20: mol_type = other DNA
ctccttctagtgctttgggc

SEQ ID NO: 36213 - DNA, 20 bp, synthetic construct
  misc_feature 1..20: note = chemically synthesized
  source 1..20: mol_type = other DNA
ctgaagcatccagatacatc

SEQ ID NO: 36214 - DNA, 20 bp, synthetic construct
  misc_feature 1..20: note = chemically synthesized
  source 1..20: mol_type = other DNA
catccagatacatcttctgt

SEQ ID NO: 36215 - DNA, 20 bp, synthetic construct
  misc_feature 1..20: note = chemically synthesized
  source 1..20: mol_type = other DNA
aatatgccagctcattcatt

SEQ ID NO: 36216 - DNA, 20 bp, synthetic construct
  misc_feature 1..20: note = chemically synthesized
  source 1..20: mol_type = other DNA
aaacacatgacatagacagc

SEQ ID NO: 36217 - DNA, 20 bp, synthetic construct
  misc_feature 1..20: note = chemically synthesized
  source 1..20: mol_type = other DNA
atttgagtcccaatttgagg

SEQ ID NO: 36218 - DNA, 20 bp, synthetic construct
  misc_feature 1..20: note = chemically synthesized
  source 1..20: mol_type = other DNA
cttttcaaaggcctgaatgg

SEQ ID NO: 36219 - DNA, 20 bp, synthetic construct
  misc_feature 1..20: note = chemically synthesized
  source 1..20: mol_type = other DNA
gaggggaaaacggctgtaaa

SEQ ID NO: 36220 - DNA, 20 bp, synthetic construct
  misc_feature 1..20: note = chemically synthesized
  source 1..20: mol_type = other DNA
agcaacacttctctcgcctg

SEQ ID NO: 36221 - DNA, 20 bp, synthetic construct
  misc_feature 1..20: note = chemically synthesized
  source 1..20: mol_type = other DNA
gaaataatataaatcacact

SEQ ID NO: 36222 - DNA, 20 bp, synthetic construct
  misc_feature 1..20: note = chemically synthesized
  source 1..20: mol_type = other DNA
aagtaatcatgggctgaagt

SEQ ID NO: 36223 - DNA, 20 bp, synthetic construct
  misc_feature 1..20: note = chemically synthesized
  source 1..20: mol_type = other DNA
tgcagtgcctttatcagtaa

SEQ ID NO: 36224 - DNA, 20 bp, synthetic construct
  misc_feature 1..20: note = chemically synthesized
  source 1..20: mol_type = other DNA
cttaaacatcatcatttctg

SEQ ID NO: 36225 - DNA, 20 bp, synthetic construct
  misc_feature 1..20: note = chemically synthesized
  source 1..20: mol_type = other DNA
catttctgtaatgtttgaaa

SEQ ID NO: 36226 - DNA, 20 bp, synthetic construct
  misc_feature 1..20: note = chemically synthesized
  source 1..20: mol_type = other DNA
ctgtaatgtttgaaagaaag

SEQ ID NO: 36227 - DNA, 20 bp, synthetic construct
  misc_feature 1..20: note = chemically synthesized
  source 1..20: mol_type = other DNA
actctgccaatcaatgatct

SEQ ID NO: 36228 - DNA, 20 bp, synthetic construct
  misc_feature 1..20: note = chemically synthesized
  source 1..20: mol_type = other DNA
tttaaaatgtcatcagaaag

SEQ ID NO: 36229 - DNA, 20 bp, synthetic construct
  misc_feature 1..20: note = chemically synthesized
  source 1..20: mol_type = other DNA
actgaagcagcagtcttctg

SEQ ID NO: 36230 - DNA, 20 bp, synthetic construct
  misc_feature 1..20: note = chemically synthesized
  source 1..20: mol_type = other DNA
gatcttaaccttgggatgca

SEQ ID NO: 36231 - DNA, 20 bp, synthetic construct
  misc_feature 1..20: note = chemically synthesized
  source 1..20: mol_type = other DNA
ataagcagtccctctattct

SEQ ID NO: 36232 - DNA, 20 bp, synthetic construct
  misc_feature 1..20: note = chemically synthesized
  source 1..20: mol_type = other DNA
cctctattcttcttgcttcc

SEQ ID NO: 36233 - DNA, 20 bp, synthetic construct
  misc_feature 1..20: note = chemically synthesized
  source 1..20: mol_type = other DNA
ctgtggatttaaatgccaaa

SEQ ID NO: 36234 - DNA, 20 bp, synthetic construct
  misc_feature 1..20: note = chemically synthesized
  source 1..20: mol_type = other DNA
gcagtggcagtggaaattac

SEQ ID NO: 36235 - DNA, 20 bp, synthetic construct
  misc_feature 1..20: note = chemically synthesized
  source 1..20: mol_type = other DNA
gagaaggtctctatacctag

SEQ ID NO: 36236 - DNA, 20 bp, synthetic construct
  misc_feature 1..20: note = chemically synthesized
  source 1..20: mol_type = other DNA
ccatggggctgtctgtgtgt

SEQ ID NO: 36237 - DNA, 20 bp, synthetic construct
  misc_feature 1..20: note = chemically synthesized
  source 1..20: mol_type = other DNA
ccatggaaatggagaagaaa

SEQ ID NO: 36238 - DNA, 20 bp, synthetic construct
  misc_feature 1..20: note = chemically synthesized
  source 1..20: mol_type = other DNA
atccctgtcctccttcacct

SEQ ID NO: 36239 - DNA, 20 bp, synthetic construct
  misc_feature 1..20: note = chemically synthesized
  source 1..20: mol_type = other DNA
acctgccagcttgtgggctg

SEQ ID NO: 36240 - DNA, 20 bp, synthetic construct
  misc_feature 1..20: note = chemically synthesized
  source 1..20: mol_type = other DNA
tgactcctgagagcatgtgt

SEQ ID NO: 36241 - DNA, 20 bp, synthetic construct
  misc_feature 1..20: note = chemically synthesized
  source 1..20: mol_type = other DNA
gagagaaggccctgggttct

SEQ ID NO: 36242 - DNA, 20 bp, synthetic construct
  misc_feature 1..20: note = chemically synthesized
  source 1..20: mol_type = other DNA
gtttttacttttcctaggat

SEQ ID NO: 36243 - DNA, 20 bp, synthetic construct
  misc_feature 1..20: note = chemically synthesized
  source 1..20: mol_type = other DNA
tcctaggatccctgcttcat

SEQ ID NO: 36244 - DNA, 20 bp, synthetic construct
  misc_feature 1..20: note = chemically synthesized
  source 1..20: mol_type = other DNA
atttttgttttcaaggagtt

SEQ ID NO: 36245 - DNA, 20 bp, synthetic construct
  misc_feature 1..20: note = chemically synthesized
  source 1..20: mol_type = other DNA
tcccaagcagagatgggtgg

SEQ ID NO: 36246 - DNA, 20 bp, synthetic construct
  misc_feature 1..20: note = chemically synthesized
  source 1..20: mol_type = other DNA
tatcccattccagggccctt

SEQ ID NO: 36247 - DNA, 20 bp, synthetic construct
  misc_feature 1..20: note = chemically synthesized
  source 1..20: mol_type = other DNA
ctcaatctccttgagcacag

SEQ ID NO: 36248 - DNA, 20 bp, synthetic construct
  misc_feature 1..20: note = chemically synthesized
  source 1..20: mol_type = other DNA
tctgaggcagggaggcagct

SEQ ID NO: 36249 - DNA, 20 bp, synthetic construct
  misc_feature 1..20: note = chemically synthesized
  source 1..20: mol_type = other DNA
cctgtaatgcccctcccagg

SEQ ID NO: 36250 - DNA, 20 bp, synthetic construct
  misc_feature 1..20: note = chemically synthesized
  source 1..20: mol_type = other DNA
ttagaactatgagttcaaaa

SEQ ID NO: 36251 - DNA, 20 bp, synthetic construct
  misc_feature 1..20: note = chemically synthesized
  source 1..20: mol_type = other DNA
atgagaatagaggaaaatgt

SEQ ID NO: 36252 - DNA, 20 bp, synthetic construct
  misc_feature 1..20: note = chemically synthesized
  source 1..20: mol_type = other DNA
ttacacagcatttggaaagt

SEQ ID NO: 36253 - DNA, 20 bp, synthetic construct
  misc_feature 1..20: note = chemically synthesized
  source 1..20: mol_type = other DNA
atttggaaagtgaatgatta

SEQ ID NO: 36254 - DNA, 20 bp, synthetic construct
  misc_feature 1..20: note = chemically synthesized
  source 1..20: mol_type = other DNA
ccattgagtaaatacactat

SEQ ID NO: 36255 - DNA, 20 bp, synthetic construct
  misc_feature 1..20: note = chemically synthesized
  source 1..20: mol_type = other DNA
ttagtgaatcatttactagg

SEQ ID NO: 36256 - DNA, 20 bp, synthetic construct
  misc_feature 1..20: note = chemically synthesized
  source 1..20: mol_type = other DNA
aggaagaaaagttcactgca

SEQ ID NO: 36257 - DNA, 20 bp, synthetic construct
  misc_feature 1..20: note = chemically synthesized
  source 1..20: mol_type = other DNA
gagaaccagtggtagataca

SEQ ID NO: 36258 - DNA, 20 bp, synthetic construct
  misc_feature 1..20: note = chemically synthesized
  source 1..20: mol_type = other DNA
ggcctcctcccggggaagtc

SEQ ID NO: 36259 - DNA, 20 bp, synthetic construct
  misc_feature 1..20: note = chemically synthesized
  source 1..20: mol_type = other DNA
ccgcaggccataaatgcaaa

SEQ ID NO: 36260 - DNA, 20 bp, synthetic construct
  misc_feature 1..20: note = chemically synthesized
  source 1..20: mol_type = other DNA
gcaaagtatgatttaacaaa

SEQ ID NO: 36261 - DNA, 20 bp, synthetic construct
  misc_feature 1..20: note = chemically synthesized
  source 1..20: mol_type = other DNA
agttgtcccaacctgtcaac

SEQ ID NO: 36262 - DNA, 20 bp, synthetic construct
  misc_feature 1..20: note = chemically synthesized
  source 1..20: mol_type = other DNA
ttggtggaagggagggacag

SEQ ID NO: 36263 - DNA, 20 bp, synthetic construct
  misc_feature 1..20: note = chemically synthesized
  source 1..20: mol_type = other DNA
agggacagaagcgtttcatt

SEQ ID NO: 36264 - DNA, 20 bp, synthetic construct
  misc_feature 1..20: note = chemically synthesized
  source 1..20: mol_type = other DNA
ccacgctgataccttacatg

SEQ ID NO: 36265 - DNA, 20 bp, synthetic construct
  misc_feature 1..20: note = chemically synthesized
  source 1..20: mol_type = other DNA
ccacactctccaccgcctga

SEQ ID NO: 36266 - DNA, 20 bp, synthetic construct
  misc_feature 1..20: note = chemically synthesized
  source 1..20: mol_type = other DNA
atctgtgggccggtgacaga

SEQ ID NO: 36267 - DNA, 20 bp, synthetic construct
  misc_feature 1..20: note = chemically synthesized
  source 1..20: mol_type = other DNA
aggttgaggccctggaagca

SEQ ID NO: 36268 - DNA, 20 bp, synthetic construct
  misc_feature 1..20: note = chemically synthesized
  source 1..20: mol_type = other DNA
agcaaaaggatttcagcctg

SEQ ID NO: 36269 - DNA, 20 bp, synthetic construct
  misc_feature 1..20: note = chemically synthesized
  source 1..20: mol_type = other DNA
cctgttcctagtagacctga

SEQ ID NO: 36270 - DNA, 20 bp, synthetic construct
  misc_feature 1..20: note = chemically synthesized
  source 1..20: mol_type = other DNA
gatgttgtgctgttggttgg

SEQ ID NO: 36271 - DNA, 20 bp, synthetic construct
  misc_feature 1..20: note = chemically synthesized
  source 1..20: mol_type = other DNA
aatttgctcagggaactctt

SEQ ID NO: 36272 - DNA, 20 bp, synthetic construct
  misc_feature 1..20: note = chemically synthesized
  source 1..20: mol_type = other DNA
gattggtcagtggtataaat

SEQ ID NO: 36273 - DNA, 20 bp, synthetic construct
  misc_feature 1..20: note = chemically synthesized
  source 1..20: mol_type = other DNA
aagcacgtcaaagccaaggc

SEQ ID NO: 36274 - DNA, 20 bp, synthetic construct
  misc_feature 1..20: note = chemically synthesized
  source 1..20: mol_type = other DNA
gcagcatgccccgggcagag

SEQ ID NO: 36275 - DNA, 20 bp, synthetic construct
  misc_feature 1..20: note = chemically synthesized
  source 1..20: mol_type = other DNA
cacctcaggcgagagggcag

SEQ ID NO: 36276 - DNA, 20 bp, synthetic construct
  misc_feature 1..20: note = chemically synthesized
  source 1..20: mol_type = other DNA
tgctagaccattttttttgg

SEQ ID NO: 36277 - DNA, 20 bp, synthetic construct
  misc_feature 1..20: note = chemically synthesized
  source 1..20: mol_type = other DNA
tgtgttaaccataggacata

SEQ ID NO: 36278 - DNA, 20 bp, synthetic construct
  misc_feature 1..20: note = chemically synthesized
  source 1..20: mol_type = other DNA
ttaggcctgtgaagtgcctt

SEQ ID NO: 36279 - DNA, 20 bp, synthetic construct
  misc_feature 1..20: note = chemically synthesized
  source 1..20: mol_type = other DNA
tagtgccagaaaggcaagtg

SEQ ID NO: 36280 - DNA, 20 bp, synthetic construct
  misc_feature 1..20: note = chemically synthesized
  source 1..20: mol_type = other DNA
gtatgaccagtgtccagacg

SEQ ID NO: 36281 - DNA, 20 bp, synthetic construct
  misc_feature 1..20: note = chemically synthesized
  source 1..20: mol_type = other DNA
ggccctgaggtggcagtggg

SEQ ID NO: 36282 - DNA, 20 bp, synthetic construct
  misc_feature 1..20: note = chemically synthesized
  source 1..20: mol_type = other DNA
cttgagagctgaggcaggag

SEQ ID NO: 36283 - DNA, 20 bp, synthetic construct
  misc_feature 1..20: note = chemically synthesized
  source 1..20: mol_type = other DNA
gaggcggaggttgcagtgag

SEQ ID NO: 36284 - DNA, 20 bp, synthetic construct
  misc_feature 1..20: note = chemically synthesized
  source 1..20: mol_type = other DNA
tcaattaaaaaaaaaaaaaa

SEQ ID NO: 36285 - DNA, 20 bp, synthetic construct
  misc_feature 1..20: note = chemically synthesized
  source 1..20: mol_type = other DNA
ttccataaaggccaggacag

SEQ ID NO: 36286 - DNA, 20 bp, synthetic construct
  misc_feature 1..20: note = chemically synthesized
  source 1..20: mol_type = other DNA
gttggaggccttgccctcct

SEQ ID NO: 36287 - DNA, 20 bp, synthetic construct
  misc_feature 1..20: note = chemically synthesized
  source 1..20: mol_type = other DNA
gtctctcacagcaccactgc

SEQ ID NO: 36288 - DNA, 20 bp, synthetic construct
  misc_feature 1..20: note = chemically synthesized
  source 1..20: mol_type = other DNA
tcaggagtctcttggaaaca

SEQ ID NO: 36289 - DNA, 20 bp, synthetic construct
  misc_feature 1..20: note = chemically synthesized
  source 1..20: mol_type = other DNA
gagtctcttggaaacaccat

SEQ ID NO: 36290 - DNA, 20 bp, synthetic construct
  misc_feature 1..20: note = chemically synthesized
  source 1..20: mol_type = other DNA
gggatacatgtgcagaatgt

SEQ ID NO: 36291 - DNA, 20 bp, synthetic construct
  misc_feature 1..20: note = chemically synthesized
  source 1..20: mol_type = other DNA
cataagtatacatgtaccat

SEQ ID NO: 36292 - DNA, 20 bp, synthetic construct
  misc_feature 1..20: note = chemically synthesized
  source 1..20: mol_type = other DNA
ccctccccttgcccctccac

SEQ ID NO: 36293 - DNA, 20 bp, synthetic construct
  misc_feature 1..20: note = chemically synthesized
  source 1..20: mol_type = other DNA
cccttgcccctccacccatg

SEQ ID NO: 36294 - DNA, 20 bp, synthetic construct
  misc_feature 1..20: note = chemically synthesized
  source 1..20: mol_type = other DNA
tccacccatgtttggttttc

SEQ ID NO: 36295 - DNA, 20 bp, synthetic construct
  misc_feature 1..20: note = chemically synthesized
  source 1..20: mol_type = other DNA
ttgtgagttgatgcagataa

SEQ ID NO: 36296 - DNA, 20 bp, synthetic construct
  misc_feature 1..20: note = chemically synthesized
  source 1..20: mol_type = other DNA
atttgggagttgtgtgttct

SEQ ID NO: 36297 - DNA, 20 bp, synthetic construct
  misc_feature 1..20: note = chemically synthesized
  source 1..20: mol_type = other DNA
tggcaggtgttatcagaatc

SEQ ID NO: 36298 - DNA, 20 bp, synthetic construct
  misc_feature 1..20: note = chemically synthesized
  source 1..20: mol_type = other DNA
taacctgggagaaacgcaag

SEQ ID NO: 36299 - DNA, 20 bp, synthetic construct
  misc_feature 1..20: note = chemically synthesized
  source 1..20: mol_type = other DNA
agaaacgcaagtgtggtttg

SEQ ID NO: 36300 - DNA, 20 bp, synthetic construct
  misc_feature 1..20: note = chemically synthesized
  source 1..20: mol_type = other DNA
aggctttccaggtgtccaaa

SEQ ID NO: 36301 - DNA, 20 bp, synthetic construct
  misc_feature 1..20: note = chemically synthesized
  source 1..20: mol_type = other DNA
agtggggcagggaggcatcg

SEQ ID NO: 36302 - DNA, 20 bp, synthetic construct
  misc_feature 1..20: note = chemically synthesized
  source 1..20: mol_type = other DNA
gaggcatcggggtgtttgtg

SEQ ID NO: 36303 - DNA, 20 bp, synthetic construct
  misc_feature 1..20: note = chemically synthesized
  source 1..20: mol_type = other DNA
gtcccttctaactacaaagg

SEQ ID NO: 36304 - DNA, 20 bp, synthetic construct
  misc_feature 1..20: note = chemically synthesized
  source 1..20: mol_type = other DNA
atggaaactgataaattaga

SEQ ID NO: 36305 - DNA, 20 bp, synthetic construct
  misc_feature 1..20: note = chemically synthesized
  source 1..20: mol_type = other DNA
gagtgatttttcacattaca

SEQ ID NO: 36306 - DNA, 20 bp, synthetic construct
  misc_feature 1..20: note = chemically synthesized
  source 1..20: mol_type = other DNA
gaaagattgttaacttttca

SEQ ID NO: 36307 - DNA, 20 bp, synthetic construct
  misc_feature 1..20: note = chemically synthesized
  source 1..20: mol_type = other DNA
cttttcaaaaggtttcacca

SEQ ID NO: 36308 - DNA, 20 bp, synthetic construct
  misc_feature 1..20: note = chemically synthesized
  source 1..20: mol_type = other DNA
gagctcccccactgaattta

SEQ ID NO: 36309 - DNA, 20 bp, synthetic construct
  misc_feature 1..20: note = chemically synthesized
  source 1..20: mol_type = other DNA
tcccccactgaatttaaagt

SEQ ID NO: 36310 - DNA, 20 bp, synthetic construct
  misc_feature 1..20: note = chemically synthesized
  source 1..20: mol_type = other DNA
gaaattatgttggttagcaa

SEQ ID NO: 36311 - DNA, 20 bp, synthetic construct
  misc_feature 1..20: note = chemically synthesized
  source 1..20: mol_type = other DNA
ttacagaaattcattttaca

SEQ ID NO: 36312 - DNA, 20 bp, synthetic construct
  misc_feature 1..20: note = chemically synthesized
  source 1..20: mol_type = other DNA
aggtcaaggaccacagggtg

SEQ ID NO: 36313 - DNA, 20 bp, synthetic construct
  misc_feature 1..20: note = chemically synthesized
  source 1..20: mol_type = other DNA
agggtgctgggctttgctgt

SEQ ID NO: 36314 - DNA, 20 bp, synthetic construct
  misc_feature 1..20: note = chemically synthesized
  source 1..20: mol_type = other DNA
tgccaggctctggcatgagg

SEQ ID NO: 36315 - DNA, 20 bp, synthetic construct
  misc_feature 1..20: note = chemically synthesized
  source 1..20: mol_type = other DNA
cttttcccttgacatttagc

SEQ ID NO: 36316 - DNA, 20 bp, synthetic construct
  misc_feature 1..20: note = chemically synthesized
  source 1..20: mol_type = other DNA
gacatttagcctgggtttgg

SEQ ID NO: 36317 - DNA, 20 bp, synthetic construct
  misc_feature 1..20: note = chemically synthesized
  source 1..20: mol_type = other DNA
ctcattggctcaggacacac

SEQ ID NO: 36318 - DNA, 20 bp, synthetic construct
  misc_feature 1..20: note = chemically synthesized
  source 1..20: mol_type = other DNA
tcaggctcactctctaagcc

SEQ ID NO: 36319 - DNA, 20 bp, synthetic construct
  misc_feature 1..20: note = chemically synthesized
  source 1..20: mol_type = other DNA
aggggaacaggtgtatcctg

SEQ ID NO: 36320 - DNA, 20 bp, synthetic construct
  misc_feature 1..20: note = chemically synthesized
  source 1..20: mol_type = other DNA
aaacacttagggccagaaag

SEQ ID NO: 36321 - DNA, 20 bp, synthetic construct
  misc_feature 1..20: note = chemically synthesized
  source 1..20: mol_type = other DNA
gtctctccagaggaacaagt

SEQ ID NO: 36322 - DNA, 20 bp, synthetic construct
  misc_feature 1..20: note = chemically synthesized
  source 1..20: mol_type = other DNA
aagggcacccctatcctccc

SEQ ID NO: 36323 - DNA, 20 bp, synthetic construct
  misc_feature 1..20: note = chemically synthesized
  source 1..20: mol_type = other DNA
atttggagggatggtcaagt

SEQ ID NO: 36324 - DNA, 20 bp, synthetic construct
  misc_feature 1..20: note = chemically synthesized
  source 1..20: mol_type = other DNA
aaagtagtgtaggaaaatct

SEQ ID NO: 36325 - DNA, 20 bp, synthetic construct
  misc_feature 1..20: note = chemically synthesized
  source 1..20: mol_type = other DNA
actggcaatgagacatctga

SEQ ID NO: 36326 - DNA, 20 bp, synthetic construct
  misc_feature 1..20: note = chemically synthesized
  source 1..20: mol_type = other DNA
ggaagaacatggctatcaac

SEQ ID NO: 36327 - DNA, 20 bp, synthetic construct
  misc_feature 1..20: note = chemically synthesized
  source 1..20: mol_type = other DNA
acagaacagatgaaccttca

SEQ ID NO: 36328 - DNA, 20 bp, synthetic construct
  misc_feature 1..20: note = chemically synthesized
  source 1..20: mol_type = other DNA
aagatgtcacagaaatcttc

SEQ ID NO: 36329 - DNA, 20 bp, synthetic construct
  misc_feature 1..20: note = chemically synthesized
  source 1..20: mol_type = other DNA
ccatttactctgtgcccacc

SEQ ID NO: 36330 - DNA, 20 bp, synthetic construct
  misc_feature 1..20: note = chemically synthesized
  source 1..20: mol_type = other DNA
tactctgtgcccaccttggg

SEQ ID NO: 36331 - DNA, 20 bp, synthetic construct
  misc_feature 1..20: note = chemically synthesized
  source 1..20: mol_type = other DNA
gcttctctctaagcatcttt

SEQ ID NO: 36332 - DNA, 20 bp, synthetic construct
  misc_feature 1..20: note = chemically synthesized
  source 1..20: mol_type = other DNA
atatcctttctcttggctct

SEQ ID NO: 36333 - DNA, 20 bp, synthetic construct
  misc_feature 1..20: note = chemically synthesized
  source 1..20: mol_type = other DNA
tggctctccaggtttaactc

SEQ ID NO: 36334 - DNA, 20 bp, synthetic construct
  misc_feature 1..20: note = chemically synthesized
  source 1..20: mol_type = other DNA
gctgtgggagaaatctgtgt

SEQ ID NO: 36335 - DNA, 20 bp, synthetic construct
  misc_feature 1..20: note = chemically synthesized
  source 1..20: mol_type = other DNA
actgcccacagcggctagcc

SEQ ID NO: 36336 - DNA, 20 bp, synthetic construct
  misc_feature 1..20: note = chemically synthesized
  source 1..20: mol_type = other DNA
cacattttgcatagtgaggt

SEQ ID NO: 36337 - DNA, 20 bp, synthetic construct
  misc_feature 1..20: note = chemically synthesized
  source 1..20: mol_type = other DNA
aagttccgccattctaaggc

SEQ ID NO: 36338 - DNA, 20 bp, synthetic construct
  misc_feature 1..20: note = chemically synthesized
  source 1..20: mol_type = other DNA
cctattcaaccttttgaaat

SEQ ID NO: 36339 - DNA, 20 bp, synthetic construct
  misc_feature 1..20: note = chemically synthesized
  source 1..20: mol_type = other DNA
caaagatggaacacaatgtc

SEQ ID NO: 36340 - DNA, 20 bp, synthetic construct
  misc_feature 1..20: note = chemically synthesized
  source 1..20: mol_type = other DNA
gaacacaatgtctttggctt

SEQ ID NO: 36341 - DNA, 20 bp, synthetic construct
  misc_feature 1..20: note = chemically synthesized
  source 1..20: mol_type = other DNA
cttagttgcttttcagaaaa

SEQ ID NO: 36342 - DNA, 20 bp, synthetic construct
  misc_feature 1..20: note = chemically synthesized
  source 1..20: mol_type = other DNA
gattttttttttttggaatt

SEQ ID NO: 36343 - DNA, 20 bp, synthetic construct
  misc_feature 1..20: note = chemically synthesized
  source 1..20: mol_type = other DNA
tttttttttggaattatatg

SEQ ID NO: 36344 - DNA, 20 bp, synthetic construct
  misc_feature 1..20: note = chemically synthesized
  source 1..20: mol_type = other DNA
tgctttgcttatgttaaaga

SEQ ID NO: 36345 - DNA, 20 bp, synthetic construct
  misc_feature 1..20: note = chemically synthesized
  source 1..20: mol_type = other DNA
agacacagcttgcagaaaaa

SEQ ID NO: 36346 - DNA, 20 bp, synthetic construct
  misc_feature 1..20: note = chemically synthesized
  source 1..20: mol_type = other DNA
gaaaaattttgtttaggcct

SEQ ID NO: 36347 - DNA, 20 bp, synthetic construct
  misc_feature 1..20: note = chemically synthesized
  source 1..20: mol_type = other DNA
aaaaggtgaagttagtaacc

SEQ ID NO: 36348 - DNA, 20 bp, synthetic construct
  misc_feature 1..20: note = chemically synthesized
  source 1..20: mol_type = other DNA
gaggatagcattgatcaaaa

SEQ ID NO: 36349 - DNA, 20 bp, synthetic construct
  misc_feature 1..20: note = chemically synthesized
  source 1..20: mol_type = other DNA
tcaaaaaagagttttaaaat

SEQ ID NO: 36350 - DNA, 20 bp, synthetic construct
  misc_feature 1..20: note = chemically synthesized
  source 1..20: mol_type = other DNA
aaggaatctaaggaccatga

SEQ ID NO: 36351 - DNA, 20 bp, synthetic construct
  misc_feature 1..20: note = chemically synthesized
  source 1..20: mol_type = other DNA
tatattgtagtgtctataat

SEQ ID NO: 36352 - DNA, 20 bp, synthetic construct
  misc_feature 1..20: note = chemically synthesized
  source 1..20: mol_type = other DNA
tgtctataattattgctttc

SEQ ID NO: 36353 - DNA, 20 bp, synthetic construct
  misc_feature 1..20: note = chemically synthesized
  source 1..20: mol_type = other DNA
aatacactttttaaagaaca

SEQ ID NO: 36354 - DNA, 20 bp, synthetic construct
  misc_feature 1..20: note = chemically synthesized
  source 1..20: mol_type = other DNA
catttctagaacaaaagaga

SEQ ID NO: 36355 - DNA, 20 bp, synthetic construct
  misc_feature 1..20: note = chemically synthesized
  source 1..20: mol_type = other DNA
taaagctggcacattttcat

SEQ ID NO: 36356 - DNA, 20 bp, synthetic construct
  misc_feature 1..20: note = chemically synthesized
  source 1..20: mol_type = other DNA
actcaagtcacaggcatagc

SEQ ID NO: 36357 - DNA, 20 bp, synthetic construct
  misc_feature 1..20: note = chemically synthesized
  source 1..20: mol_type = other DNA
agctgcactgttgttatttg

SEQ ID NO: 36358 - DNA, 20 bp, synthetic construct
  misc_feature 1..20: note = chemically synthesized
  source 1..20: mol_type = other DNA
tgtgtggcttgaacctagta

SEQ ID NO: 36359 - DNA, 20 bp, synthetic construct
  misc_feature 1..20: note = chemically synthesized
  source 1..20: mol_type = other DNA
catggaagagctgagggact

SEQ ID NO: 36360 - DNA, 20 bp, synthetic construct
  misc_feature 1..20: note = chemically synthesized
  source 1..20: mol_type = other DNA
cattccacgtgggacagctc

SEQ ID NO: 36361 - DNA, 20 bp, synthetic construct
  misc_feature 1..20: note = chemically synthesized
  source 1..20: mol_type = other DNA
cagggaaattatctaaaaac

SEQ ID NO: 36362 - DNA, 20 bp, synthetic construct
  misc_feature 1..20: note = chemically synthesized
  source 1..20: mol_type = other DNA
taacacacatatgtacacat

SEQ ID NO: 36363 - DNA, 20 bp, synthetic construct
  misc_feature 1..20: note = chemically synthesized
  source 1..20: mol_type = other DNA
tgtactcctgtggagagtcc

SEQ ID NO: 36364 - DNA, 20 bp, synthetic construct
  misc_feature 1..20: note = chemically synthesized
  source 1..20: mol_type = other DNA
agtcattaaacgtgttggaa

SEQ ID NO: 36365 - DNA, 20 bp, synthetic construct
  misc_feature 1..20: note = chemically synthesized
  source 1..20: mol_type = other DNA
aaacgtgttggaatgatgct

SEQ ID NO: 36366 - DNA, 20 bp, synthetic construct
  misc_feature 1..20: note = chemically synthesized
  source 1..20: mol_type = other DNA
tggaatgatgctttttgctt

SEQ ID NO: 36367 - DNA, 20 bp, synthetic construct
  misc_feature 1..20: note = chemically synthesized
  source 1..20: mol_type = other DNA
tggaaatctgcagtattacc

SEQ ID NO: 36368 - DNA, 20 bp, synthetic construct
  misc_feature 1..20: note = chemically synthesized
  source 1..20: mol_type = other DNA
atgtggctgtattacacacc

SEQ ID NO: 36369 - DNA, 20 bp, synthetic construct
  misc_feature 1..20: note = chemically synthesized
  source 1..20: mol_type = other DNA
gctgtattacacacccagtg

SEQ ID NO: 36370 - DNA, 20 bp, synthetic construct
  misc_feature 1..20: note = chemically synthesized
  source 1..20: mol_type = other DNA
gttcttgaggaaaccaaaaa

SEQ ID NO: 36371 - DNA, 20 bp, synthetic construct
  misc_feature 1..20: note = chemically synthesized
  source 1..20: mol_type = other DNA
taaattccaggaacatccca

SEQ ID NO: 36372 - DNA, 20 bp, synthetic construct
  misc_feature 1..20: note = chemically synthesized
  source 1..20: mol_type = other DNA
aacattaaatcaaagccatt

SEQ ID NO: 36373 - DNA, 20 bp, synthetic construct
  misc_feature 1..20: note = chemically synthesized
  source 1..20: mol_type = other DNA
aaaagtgtaagacatttgaa

SEQ ID NO: 36374 - DNA, 20 bp, synthetic construct
  misc_feature 1..20: note = chemically synthesized
  source 1..20: mol_type = other DNA
acagctgcgttcgctgacat

SEQ ID NO: 36375 - DNA, 20 bp, synthetic construct
  misc_feature 1..20: note = chemically synthesized
  source 1..20: mol_type = other DNA
acacaatctgtctggcacaa

SEQ ID NO: 36376 - DNA, 20 bp, synthetic construct
  misc_feature 1..20: note = chemically synthesized
  source 1..20: mol_type = other DNA
tttcctaatggagggatcct

SEQ ID NO: 36377 - DNA, 20 bp, synthetic construct
  misc_feature 1..20: note = chemically synthesized
  source 1..20: mol_type = other DNA
gagggatccttagggattcc

SEQ ID NO: 36378 - DNA, 20 bp, synthetic construct
  misc_feature 1..20: note = chemically synthesized
  source 1..20: mol_type = other DNA
ttagggattccctaagctta

SEQ ID NO: 36379 - DNA, 20 bp, synthetic construct
  misc_feature 1..20: note = chemically synthesized
  source 1..20: mol_type = other DNA
ggtctctgcccagggaattt

SEQ ID NO: 36380 - DNA, 20 bp, synthetic construct
  misc_feature 1..20: note = chemically synthesized
  source 1..20: mol_type = other DNA
cccttaccctaagacagcag

SEQ ID NO: 36381 - DNA, 20 bp, synthetic construct
  misc_feature 1..20: note = chemically synthesized
  source 1..20: mol_type = other DNA
ccctaagacagcagtgctga

SEQ ID NO: 36382 - DNA, 20 bp, synthetic construct
  misc_feature 1..20: note = chemically synthesized
  source 1..20: mol_type = other DNA
agaatttattcaacatagaa

SEQ ID NO: 36383 - DNA, 20 bp, synthetic construct
  misc_feature 1..20: note = chemically synthesized
  source 1..20: mol_type = other DNA
gctgcttccccaccctcaat

SEQ ID NO: 36384 - DNA, 20 bp, synthetic construct
  misc_feature 1..20: note = chemically synthesized
  source 1..20: mol_type = other DNA
tgggaaggcagagctgctcc

SEQ ID NO: 36385 - DNA, 20 bp, synthetic construct
  misc_feature 1..20: note = chemically synthesized
  source 1..20: mol_type = other DNA
atttccagttcatgtgggaa

SEQ ID NO: 36386 - DNA, 20 bp, synthetic construct
  misc_feature 1..20: note = chemically synthesized
  source 1..20: mol_type = other DNA
taccaaagagaatattatgg

SEQ ID NO: 36387 - DNA, 20 bp, synthetic construct
  misc_feature 1..20: note = chemically synthesized
  source 1..20: mol_type = other DNA
agaatcagctggggtcccca

SEQ ID NO: 36388 - DNA, 20 bp, synthetic construct
  misc_feature 1..20: note = chemically synthesized
  source 1..20: mol_type = other DNA
cagctggggtccccagttgg

SEQ ID NO: 36389 - DNA, 20 bp, synthetic construct
  misc_feature 1..20: note = chemically synthesized
  source 1..20: mol_type = other DNA
gggtgagtctcacaaagaca

SEQ ID NO: 36390 - DNA, 20 bp, synthetic construct
  misc_feature 1..20: note = chemically synthesized
  source 1..20: mol_type = other DNA
tgtgctttttttctaaagta

SEQ ID NO: 36391 - DNA, 20 bp, synthetic construct
  misc_feature 1..20: note = chemically synthesized
  source 1..20: mol_type = other DNA
atagcttcttaggctgatag

SEQ ID NO: 36392 - DNA, 20 bp, synthetic construct
  misc_feature 1..20: note = chemically synthesized
  source 1..20: mol_type = other DNA
ggcccaggcagcagagcagg

SEQ ID NO: 36393 - DNA, 20 bp, synthetic construct
  misc_feature 1..20: note = chemically synthesized
  source 1..20: mol_type = other DNA
cctcccccaagacggttaag

SEQ ID NO: 36394 - DNA, 20 bp, synthetic construct
  misc_feature 1..20: note = chemically synthesized
  source 1..20: mol_type = other DNA
agaccactggatcaggagtc

SEQ ID NO: 36395 - DNA, 20 bp, synthetic construct
  misc_feature 1..20: note = chemically synthesized
  source 1..20: mol_type = other DNA
gtcacttaatttctcatggc

SEQ ID NO: 36396 - DNA, 20 bp, synthetic construct
  misc_feature 1..20: note = chemically synthesized
  source 1..20: mol_type = other DNA
gggacagacttgatgatagc

SEQ ID NO: 36397 - DNA, 20 bp, synthetic construct
  misc_feature 1..20: note = chemically synthesized
  source 1..20: mol_type = other DNA
tgtagagatctggtcctgcc

SEQ ID NO: 36398 - DNA, 20 bp, synthetic construct
  misc_feature 1..20: note = chemically synthesized
  source 1..20: mol_type = other DNA
gagatctggtcctgccgtca

SEQ ID NO: 36399 - DNA, 20 bp, synthetic construct
  misc_feature 1..20: note = chemically synthesized
  source 1..20: mol_type = other DNA
cgtcagcttgtttagggcta

SEQ ID NO: 36400 - DNA, 20 bp, synthetic construct
  misc_feature 1..20: note = chemically synthesized
  source 1..20: mol_type = other DNA
tagggctaatgggtttgtag

SEQ ID NO: 36401 - DNA, 20 bp, synthetic construct
  misc_feature 1..20: note = chemically synthesized
  source 1..20: mol_type = other DNA
ttgtagacaagtttgccaac

SEQ ID NO: 36402 - DNA, 20 bp, synthetic construct
  misc_feature 1..20: note = chemically synthesized
  source 1..20: mol_type = other DNA
gattcatgcgaggggctagg

SEQ ID NO: 36403 - DNA, 20 bp, synthetic construct
  misc_feature 1..20: note = chemically synthesized
  source 1..20: mol_type = other DNA
tacaaggatccaagtacctg

SEQ ID NO: 36404 - DNA, 20 bp, synthetic construct
  misc_feature 1..20: note = chemically synthesized
  source 1..20: mol_type = other DNA
cacagagatacctgggttgc

SEQ ID NO: 36405 - DNA, 20 bp, synthetic construct
  misc_feature 1..20: note = chemically synthesized
  source 1..20: mol_type = other DNA
gtgtttcctaagaaaaggat

SEQ ID NO: 36406 - DNA, 20 bp, synthetic construct
  misc_feature 1..20: note = chemically synthesized
  source 1..20: mol_type = other DNA
gaggcaaaaacaagtgcaaa

SEQ ID NO: 36407 - DNA, 20 bp, synthetic construct
  misc_feature 1..20: note = chemically synthesized
  source 1..20: mol_type = other DNA
aacaagtgcaaagatggatt

SEQ ID NO: 36408 - DNA, 20 bp, synthetic construct
  misc_feature 1..20: note = chemically synthesized
  source 1..20: mol_type = other DNA
aaacagtcaaatgtagacat

SEQ ID NO: 36409 - DNA, 20 bp, synthetic construct
  misc_feature 1..20: note = chemically synthesized
  source 1..20: mol_type = other DNA
ttgtttgttaagtccggtct

SEQ ID NO: 36410 - DNA, 20 bp, synthetic construct
  misc_feature 1..20: note = chemically synthesized
  source 1..20: mol_type = other DNA
gcttgtgttggttcactttg

SEQ ID NO: 36411 - DNA, 20 bp, synthetic construct
  misc_feature 1..20: note = chemically synthesized
  source 1..20: mol_type = other DNA
ggttcactttgtggtgttta

SEQ ID NO: 36412 - DNA, 20 bp, synthetic construct
  misc_feature 1..20: note = chemically synthesized
  source 1..20: mol_type = other DNA
gtagatgttctcaggctagg

SEQ ID NO: 36413 - DNA, 20 bp, synthetic construct
  misc_feature 1..20: note = chemically synthesized
  source 1..20: mol_type = other DNA
aggctaggtggtgcttccac

SEQ ID NO: 36414 - DNA, 20 bp, synthetic construct
  misc_feature 1..20: note = chemically synthesized
  source 1..20: mol_type = other DNA
tcttgtcccaactgccttgg

SEQ ID NO: 36415 - DNA, 20 bp, synthetic construct
  misc_feature 1..20: note = chemically synthesized
  source 1..20: mol_type = other DNA
tattaagctaatggaaaaca

SEQ ID NO: 36416 - DNA, 20 bp, synthetic construct
  misc_feature 1..20: note = chemically synthesized
  source 1..20: mol_type = other DNA
actgtttgttcaccatcaaa

SEQ ID NO: 36417 - DNA, 20 bp, synthetic construct
  misc_feature 1..20: note = chemically synthesized
  source 1..20: mol_type = other DNA
accacataaaccgtaaaatc

SEQ ID NO: 36418 - DNA, 20 bp, synthetic construct
  misc_feature 1..20: note = chemically synthesized
  source 1..20: mol_type = other DNA
caaaaaaatctcagtgctac

SEQ ID NO: 36419 - DNA, 20 bp, synthetic construct
  misc_feature 1..20: note = chemically synthesized
  source 1..20: mol_type = other DNA
ctacaaatgtttcattgact

SEQ ID NO: 36420 - DNA, 20 bp, synthetic construct
  misc_feature 1..20: note = chemically synthesized
  source 1..20: mol_type = other DNA
gtaaaatggtgaagatgggt

SEQ ID NO: 36421 - DNA, 20 bp, synthetic construct
  misc_feature 1..20: note = chemically synthesized
  source 1..20: mol_type = other DNA
gaagtctaatctttatcttc

SEQ ID NO: 36422 - DNA, 20 bp, synthetic construct
  misc_feature 1..20: note = chemically synthesized
  source 1..20: mol_type = other DNA
tgtgagaagccacatctgtg

SEQ ID NO: 36423 - DNA, 20 bp, synthetic construct
  misc_feature 1..20: note = chemically synthesized
  source 1..20: mol_type = other DNA
ctgtgtaaggtttccagttg

SEQ ID NO: 36424 - DNA, 20 bp, synthetic construct
  misc_feature 1..20: note = chemically synthesized
  source 1..20: mol_type = other DNA
ccagctcagtccagaaatgc

SEQ ID NO: 36425 - DNA, 20 bp, synthetic construct
  misc_feature 1..20: note = chemically synthesized
  source 1..20: mol_type = other DNA
gtgggactctgtcccataaa

SEQ ID NO: 36426 - DNA, 20 bp, synthetic construct
  misc_feature 1..20: note = chemically synthesized
  source 1..20: mol_type = other DNA
ctactcatttcctatcagca

SEQ ID NO: 36427 - DNA, 20 bp, synthetic construct
  misc_feature 1..20: note = chemically synthesized
  source 1..20: mol_type = other DNA
tttcctatcagcattttgct

SEQ ID NO: 36428 - DNA, 20 bp, synthetic construct
  misc_feature 1..20: note = chemically synthesized
  source 1..20: mol_type = other DNA
atcagcattttgctttttgc

SEQ ID NO: 36429 - DNA, 20 bp, synthetic construct
  misc_feature 1..20: note = chemically synthesized
  source 1..20: mol_type = other DNA
gccttgcagataaaatcccc

SEQ ID NO: 36430 - DNA, 20 bp, synthetic construct
  misc_feature 1..20: note = chemically synthesized
  source 1..20: mol_type = other DNA
tccaggctacccacaatatt

SEQ ID NO: 36431 - DNA, 20 bp, synthetic construct
  misc_feature 1..20: note = chemically synthesized
  source 1..20: mol_type = other DNA
aatattaccagttttcccct

SEQ ID NO: 36432 - DNA, 20 bp, synthetic construct
  misc_feature 1..20: note = chemically synthesized
  source 1..20: mol_type = other DNA
gaaataactcaccactcttc

SEQ ID NO: 36433 - DNA, 20 bp, synthetic construct
  misc_feature 1..20: note = chemically synthesized
  source 1..20: mol_type = other DNA
ggaattgaaatgtgatatcc

SEQ ID NO: 36434 - DNA, 20 bp, synthetic construct
  misc_feature 1..20: note = chemically synthesized
  source 1..20: mol_type = other DNA
atcctgtggtttatgatgca

SEQ ID NO: 36435 - DNA, 20 bp, synthetic construct
  misc_feature 1..20: note = chemically synthesized
  source 1..20: mol_type = other DNA
atgcacgttgtttgtagctg

SEQ ID NO: 36436 - DNA, 20 bp, synthetic construct
  misc_feature 1..20: note = chemically synthesized
  source 1..20: mol_type = other DNA
acgttgtttgtagctgtagt

SEQ ID NO: 36437 - DNA, 20 bp, synthetic construct
  misc_feature 1..20: note = chemically synthesized
  source 1..20: mol_type = other DNA
tgtagctgtagtgcttgatt

SEQ ID NO: 36438 - DNA, 20 bp, synthetic construct
  misc_feature 1..20: note = chemically synthesized
  source 1..20: mol_type = other DNA
actgaaggagttacttccaa

SEQ ID NO: 36439 - DNA, 20 bp, synthetic construct
  misc_feature 1..20: note = chemically synthesized
  source 1..20: mol_type = other DNA
gtcttgtcttgctccgtggc

SEQ ID NO: 36440 - DNA, 20 bp, synthetic construct
  misc_feature 1..20: note = chemically synthesized
  source 1..20: mol_type = other DNA
caaggccagaatcaaaagga

SEQ ID NO: 36441 - DNA, 20 bp, synthetic construct
  misc_feature 1..20: note = chemically synthesized
  source 1..20: mol_type = other DNA
taattttgactaatttttct

SEQ ID NO: 36442 - DNA, 20 bp, synthetic construct
  misc_feature 1..20: note = chemically synthesized
  source 1..20: mol_type = other DNA
accaccatttacttgttcaa

SEQ ID NO: 36443 - DNA, 20 bp, synthetic construct
  misc_feature 1..20: note = chemically synthesized
  source 1..20: mol_type = other DNA
ttaaatttgtccatttatac

SEQ ID NO: 36444 - DNA, 20 bp, synthetic construct
  misc_feature 1..20: note = chemically synthesized
  source 1..20: mol_type = other DNA
tacaaatgttttctgaaaga

SEQ ID NO: 36445 - DNA, 20 bp, synthetic construct
  misc_feature 1..20: note = chemically synthesized
  source 1..20: mol_type = other DNA
gatactgttttagaaaataa

SEQ ID NO: 36446 - DNA, 20 bp, synthetic construct
  misc_feature 1..20: note = chemically synthesized
  source 1..20: mol_type = other DNA
ctgttttagaaaataataca

SEQ ID NO: 36447 - DNA, 20 bp, synthetic construct
  misc_feature 1..20: note = chemically synthesized
  source 1..20: mol_type = other DNA
ctaaaaggttagggggtggg

SEQ ID NO: 36448 - DNA, 20 bp, synthetic construct
  misc_feature 1..20: note = chemically synthesized
  source 1..20: mol_type = other DNA
agagttaaggctctaagggg

SEQ ID NO: 36449 - DNA, 20 bp, synthetic construct
  misc_feature 1..20: note = chemically synthesized
  source 1..20: mol_type = other DNA
agcagggcatgcaccctgag

SEQ ID NO: 36450 - DNA, 20 bp, synthetic construct
  misc_feature 1..20: note = chemically synthesized
  source 1..20: mol_type = other DNA
ctgagaccagattcaaagcc

SEQ ID NO: 36451 - DNA, 20 bp, synthetic construct
  misc_feature 1..20: note = chemically synthesized
  source 1..20: mol_type = other DNA
ggcctaagcctgggttaggt

SEQ ID NO: 36452 - DNA, 20 bp, synthetic construct
  misc_feature 1..20: note = chemically synthesized
  source 1..20: mol_type = other DNA
gggttaggtcacagattgca

SEQ ID NO: 36453 - DNA, 20 bp, synthetic construct
  misc_feature 1..20: note = chemically synthesized
  source 1..20: mol_type = other DNA
aaggtttaggaggttgggct

SEQ ID NO: 36454 - DNA, 20 bp, synthetic construct
  misc_feature 1..20: note = chemically synthesized
  source 1..20: mol_type = other DNA
gcctggtcttcctgagggct

SEQ ID NO: 36455 - DNA, 20 bp, synthetic construct
  misc_feature 1..20: note = chemically synthesized
  source 1..20: mol_type = other DNA
ggtcttcctgagggctggga

SEQ ID NO: 36456 - DNA, 20 bp, synthetic construct
  misc_feature 1..20: note = chemically synthesized
  source 1..20: mol_type = other DNA
gatttgactggtaggaaagt

SEQ ID NO: 36457 - DNA, 20 bp, synthetic construct
  misc_feature 1..20: note = chemically synthesized
  source 1..20: mol_type = other DNA
cttcccacaaagggagggta

SEQ ID NO: 36458 - DNA, 20 bp, synthetic construct
  misc_feature 1..20: note = chemically synthesized
  source 1..20: mol_type = other DNA
ggcggcattaacctgctgcc

SEQ ID NO: 36459 - DNA, 20 bp, synthetic construct
  misc_feature 1..20: note = chemically synthesized
  source 1..20: mol_type = other DNA
ctcacattcacattcgacct

SEQ ID NO: 36460 - DNA, 20 bp, synthetic construct
  misc_feature 1..20: note = chemically synthesized
  source 1..20: mol_type = other DNA
attcgacctgatagtttaca

SEQ ID NO: 36461 - DNA, 20 bp, synthetic construct
  misc_feature 1..20: note = chemically synthesized
  source 1..20: mol_type = other DNA
ttcccaacaattcttacagg

SEQ ID NO: 36462 - DNA, 20 bp, synthetic construct
  misc_feature 1..20: note = chemically synthesized
  source 1..20: mol_type = other DNA
ctccttgttcttctgaatct

SEQ ID NO: 36463 - DNA, 20 bp, synthetic construct
  misc_feature 1..20: note = chemically synthesized
  source 1..20: mol_type = other DNA
aagccagtaggtgggctaat

SEQ ID NO: 36464 - DNA, 20 bp, synthetic construct
  misc_feature 1..20: note = chemically synthesized
  source 1..20: mol_type = other DNA
ccttttgatgtctcaagttc

SEQ ID NO: 36465 - DNA, 20 bp, synthetic construct
  misc_feature 1..20: note = chemically synthesized
  source 1..20: mol_type = other DNA
cctatgcttaggggccaggt

SEQ ID NO: 36466 - DNA, 20 bp, synthetic construct
  misc_feature 1..20: note = chemically synthesized
  source 1..20: mol_type = other DNA
atgaggctctcaaattgaga

SEQ ID NO: 36467 - DNA, 20 bp, synthetic construct
  misc_feature 1..20: note = chemically synthesized
  source 1..20: mol_type = other DNA
gtaacacatttattgatgac

SEQ ID NO: 36468 - DNA, 20 bp, synthetic construct
  misc_feature 1..20: note = chemically synthesized
  source 1..20: mol_type = other DNA
ccggcatgagctgagtgaaa

SEQ ID NO: 36469 - DNA, 20 bp, synthetic construct
  misc_feature 1..20: note = chemically synthesized
  source 1..20: mol_type = other DNA
ttagtggactggtaataatt

SEQ ID NO: 36470 - DNA, 20 bp, synthetic construct
  misc_feature 1..20: note = chemically synthesized
  source 1..20: mol_type = other DNA
aacagcccttctcattgaca

SEQ ID NO: 36471 - DNA, 20 bp, synthetic construct
  misc_feature 1..20: note = chemically synthesized
  source 1..20: mol_type = other DNA
tcacataactggctctgaaa

SEQ ID NO: 36472 - DNA, 20 bp, synthetic construct
  misc_feature 1..20: note = chemically synthesized
  source 1..20: mol_type = other DNA
cttgatgtagtgctgtatgc

SEQ ID NO: 36473 - DNA, 20 bp, synthetic construct
  misc_feature 1..20: note = chemically synthesized
  source 1..20: mol_type = other DNA
ccactaattatgagtctagt

SEQ ID NO: 36474 - DNA, 20 bp, synthetic construct
  misc_feature 1..20: note = chemically synthesized
  source 1..20: mol_type = other DNA
gtctagtcctggatttcaat

SEQ ID NO: 36475 - DNA, 20 bp, synthetic construct
  misc_feature 1..20: note = chemically synthesized
  source 1..20: mol_type = other DNA
agtgatgaacgtgttaagga

SEQ ID NO: 36476 - DNA, 20 bp, synthetic construct
  misc_feature 1..20: note = chemically synthesized
  source 1..20: mol_type = other DNA
ggatcatgtagttggaacca

SEQ ID NO: 36477 - DNA, 20 bp, synthetic construct
  misc_feature 1..20: note = chemically synthesized
  source 1..20: mol_type = other DNA
atttataaaaatgttctcaa

SEQ ID NO: 36478 - DNA, 20 bp, synthetic construct
  misc_feature 1..20: note = chemically synthesized
  source 1..20: mol_type = other DNA
agataatgtgatactaatgt

SEQ ID NO: 36479 - DNA, 20 bp, synthetic construct
  misc_feature 1..20: note = chemically synthesized
  source 1..20: mol_type = other DNA
ttcccccttccacattagac

SEQ ID NO: 36480 - DNA, 20 bp, synthetic construct
  misc_feature 1..20: note = chemically synthesized
  source 1..20: mol_type = other DNA
tttggtatcttaccatctaa

SEQ ID NO: 36481 - DNA, 20 bp, synthetic construct
  misc_feature 1..20: note = chemically synthesized
  source 1..20: mol_type = other DNA
cttaccatctaatcttgttt

SEQ ID NO: 36482 - DNA, 20 bp, synthetic construct
  misc_feature 1..20: note = chemically synthesized
  source 1..20: mol_type = other DNA
ccaggagtgagatatattga

SEQ ID NO: 36483 - DNA, 20 bp, synthetic construct
  misc_feature 1..20: note = chemically synthesized
  source 1..20: mol_type = other DNA
caggagtccattatttagac

SEQ ID NO: 36484 - DNA, 20 bp, synthetic construct
  misc_feature 1..20: note = chemically synthesized
  source 1..20: mol_type = other DNA
tagacaagtgcttgagcgag

SEQ ID NO: 36485 - DNA, 20 bp, synthetic construct
  misc_feature 1..20: note = chemically synthesized
  source 1..20: mol_type = other DNA
gctggcttattttggaatac

SEQ ID NO: 36486 - DNA, 20 bp, synthetic construct
  misc_feature 1..20: note = chemically synthesized
  source 1..20: mol_type = other DNA
ggggctcctgagaagaccct

SEQ ID NO: 36487 - DNA, 20 bp, synthetic construct
  misc_feature 1..20: note = chemically synthesized
  source 1..20: mol_type = other DNA
gctaaatggaggcatcatat

SEQ ID NO: 36488 - DNA, 20 bp, synthetic construct
  misc_feature 1..20: note = chemically synthesized
  source 1..20: mol_type = other DNA
ttctcactcttaacctccct

SEQ ID NO: 36489 - DNA, 20 bp, synthetic construct
  misc_feature 1..20: note = chemically synthesized
  source 1..20: mol_type = other DNA
ccttcttttaaaagaaggag

SEQ ID NO: 36490 - DNA, 20 bp, synthetic construct
  misc_feature 1..20: note = chemically synthesized
  source 1..20: mol_type = other DNA
gttatttctcagttatattt

SEQ ID NO: 36491 - DNA, 20 bp, synthetic construct
  misc_feature 1..20: note = chemically synthesized
  source 1..20: mol_type = other DNA
tttttttttcagaatctctg

SEQ ID NO: 36492 - DNA, 20 bp, synthetic construct
  misc_feature 1..20: note = chemically synthesized
  source 1..20: mol_type = other DNA
ttttcagaatctctgggaag

SEQ ID NO: 36493 - DNA, 20 bp, synthetic construct
  misc_feature 1..20: note = chemically synthesized
  source 1..20: mol_type = other DNA
ttaagcagggcccctctcca

SEQ ID NO: 36494 - DNA, 20 bp, synthetic construct
  misc_feature 1..20: note = chemically synthesized
  source 1..20: mol_type = other DNA
tgactagctgaactgtatct

SEQ ID NO: 36495 - DNA, 20 bp, synthetic construct
  misc_feature 1..20: note = chemically synthesized
  source 1..20: mol_type = other DNA
ctgctgcctgtcatggcgct

SEQ ID NO: 36496 - DNA, 20 bp, synthetic construct
  misc_feature 1..20: note = chemically synthesized
  source 1..20: mol_type = other DNA
tccttaaactaggatgctgt

SEQ ID NO: 36497 - DNA, 20 bp, synthetic construct
  misc_feature 1..20: note = chemically synthesized
  source 1..20: mol_type = other DNA
tctgaccgggggacaactcc

SEQ ID NO: 36498 - DNA, 20 bp, synthetic construct
  misc_feature 1..20: note = chemically synthesized
  source 1..20: mol_type = other DNA
gcctatccgttaaatctgaa

SEQ ID NO: 36499 - DNA, 20 bp, synthetic construct
  misc_feature 1..20: note = chemically synthesized
  source 1..20: mol_type = other DNA
aatctgaatgaagtttttct

SEQ ID NO: 36500 - DNA, 20 bp, synthetic construct
  misc_feature 1..20: note = chemically synthesized
  source 1..20: mol_type = other DNA
tttaacaatatcaacaatta

SEQ ID NO: 36501 - DNA, 20 bp, synthetic construct
  misc_feature 1..20: note = chemically synthesized
  source 1..20: mol_type = other DNA
ccttttttgatacctctatg

SEQ ID NO: 36502 - DNA, 20 bp, synthetic construct
  misc_feature 1..20: note = chemically synthesized
  source 1..20: mol_type = other DNA
acccaggggggaatagaaag

SEQ ID NO: 36503 - DNA, 20 bp, synthetic construct
  misc_feature 1..20: note = chemically synthesized
  source 1..20: mol_type = other DNA
agctgggatttaggaagcca

SEQ ID NO: 36504 - DNA, 20 bp, synthetic construct
  misc_feature 1..20: note = chemically synthesized
  source 1..20: mol_type = other DNA
gtttccttgggtcaccttgt

SEQ ID NO: 36505 - DNA, 20 bp, synthetic construct
  misc_feature 1..20: note = chemically synthesized
  source 1..20: mol_type = other DNA
acagaggcacatggagatga

SEQ ID NO: 36506 - DNA, 20 bp, synthetic construct
  misc_feature 1..20: note = chemically synthesized
  source 1..20: mol_type = other DNA
aactacagctgatggaactg

SEQ ID NO: 36507 - DNA, 20 bp, synthetic construct
  misc_feature 1..20: note = chemically synthesized
  source 1..20: mol_type = other DNA
catcctcaagccagaactgg

SEQ ID NO: 36508 - DNA, 20 bp, synthetic construct
  misc_feature 1..20: note = chemically synthesized
  source 1..20: mol_type = other DNA
gccagaactggtcaggattt

SEQ ID NO: 36509 - DNA, 20 bp, synthetic construct
  misc_feature 1..20: note = chemically synthesized
  source 1..20: mol_type = other DNA
tggtcaggatttttctgctt

SEQ ID NO: 36510 - DNA, 20 bp, synthetic construct
  misc_feature 1..20: note = chemically synthesized
  source 1..20: mol_type = other DNA
tggatataaaatttctagaa

SEQ ID NO: 36511 - DNA, 20 bp, synthetic construct
  misc_feature 1..20: note = chemically synthesized
  source 1..20: mol_type = other DNA
ggcacagggggtaggtcagt

SEQ ID NO: 36512 - DNA, 20 bp, synthetic construct
  misc_feature 1..20: note = chemically synthesized
  source 1..20: mol_type = other DNA
gcaattgctgatgcccgcct

SEQ ID NO: 36513 - DNA, 20 bp, synthetic construct
  misc_feature 1..20: note = chemically synthesized
  source 1..20: mol_type = other DNA
caaacagccattcaccagtg

SEQ ID NO: 36514 - DNA, 20 bp, synthetic construct
  misc_feature 1..20: note = chemically synthesized
  source 1..20: mol_type = other DNA
tgcaacacgcacagaacact

SEQ ID NO: 36515 - DNA, 20 bp, synthetic construct
  misc_feature 1..20: note = chemically synthesized
  source 1..20: mol_type = other DNA
tccttcccagccacctctcc

SEQ ID NO: 36516 - DNA, 20 bp, synthetic construct
  misc_feature 1..20: note = chemically synthesized
  source 1..20: mol_type = other DNA
ataccaggatcagtatcgag

SEQ ID NO: 36517 - DNA, 20 bp, synthetic construct
  misc_feature 1..20: note = chemically synthesized
  source 1..20: mol_type = other DNA
aggcttccggcctggcagaa

SEQ ID NO: 36518 - DNA, 20 bp, synthetic construct
  misc_feature 1..20: note = chemically synthesized
  source 1..20: mol_type = other DNA
gcgctttccacccactcccc

SEQ ID NO: 36519 - DNA, 20 bp, synthetic construct
  misc_feature 1..20: note = chemically synthesized
  source 1..20: mol_type = other DNA
atggctatggagcctcccgc

SEQ ID NO: 36520 - DNA, 20 bp, synthetic construct
  misc_feature 1..20: note = chemically synthesized
  source 1..20: mol_type = other DNA
cggagagcgagagggtggac

SEQ ID NO: 36521 - DNA, 20 bp, synthetic construct
  misc_feature 1..20: note = chemically synthesized
  source 1..20: mol_type = other DNA
ggcagctcaaagatcccttc

SEQ ID NO: 36522 - DNA, 20 bp, synthetic construct
  misc_feature 1..20: note = chemically synthesized
  source 1..20: mol_type = other DNA
cggagcactcctcggagaac

SEQ ID NO: 36523 - DNA, 20 bp, synthetic construct
  misc_feature 1..20: note = chemically synthesized
  source 1..20: mol_type = other DNA
actcctcggagaacgggagt

SEQ ID NO: 36524 - DNA, 20 bp, synthetic construct
  misc_feature 1..20: note = chemically synthesized
  source 1..20: mol_type = other DNA
acgcatggccaggtggggaa

SEQ ID NO: 36525 - DNA, 20 bp, synthetic construct
  misc_feature 1..20: note = chemically synthesized
  source 1..20: mol_type = other DNA
gccctccagccccactccct

SEQ ID NO: 36526 - DNA, 20 bp, synthetic construct
  misc_feature 1..20: note = chemically synthesized
  source 1..20: mol_type = other DNA
taggatttttttctagtccc

SEQ ID NO: 36527 - DNA, 20 bp, synthetic construct
  misc_feature 1..20: note = chemically synthesized
  source 1..20: mol_type = other DNA
taacgaagctaagaatatga

SEQ ID NO: 36528 - DNA, 20 bp, synthetic construct
  misc_feature 1..20: note = chemically synthesized
  source 1..20: mol_type = other DNA
agagtgcttgtcaccagcac

SEQ ID NO: 36529 - DNA, 20 bp, synthetic construct
  misc_feature 1..20: note = chemically synthesized
  source 1..20: mol_type = other DNA
ttttttttcctttatgttct

SEQ ID NO: 36530 - DNA, 20 bp, synthetic construct
  misc_feature 1..20: note = chemically synthesized
  source 1..20: mol_type = other DNA
tgcaataatttacatgttgt

SEQ ID NO: 36531 - DNA, 20 bp, synthetic construct
  misc_feature 1..20: note = chemically synthesized
  source 1..20: mol_type = other DNA
tcgttgctgagcaaacatgt

SEQ ID NO: 36532 - DNA, 20 bp, synthetic construct
  misc_feature 1..20: note = chemically synthesized
  source 1..20: mol_type = other DNA
attctgtaatacatatcatg

SEQ ID NO: 36533 - DNA, 20 bp, synthetic construct
  misc_feature 1..20: note = chemically synthesized
  source 1..20: mol_type = other DNA
cgtgaggaggaaaaacagtc

SEQ ID NO: 36534 - DNA, 20 bp, synthetic construct
  misc_feature 1..20: note = chemically synthesized
  source 1..20: mol_type = other DNA
caaattaacagaaaaacaga

SEQ ID NO: 36535 - DNA, 20 bp, synthetic construct
  misc_feature 1..20: note = chemically synthesized
  source 1..20: mol_type = other DNA
agaacaagtttattctatca

SEQ ID NO: 36536 - DNA, 20 bp, synthetic construct
  misc_feature 1..20: note = chemically synthesized
  source 1..20: mol_type = other DNA
ctttctacttgttataaact

SEQ ID NO: 36537 - DNA, 20 bp, synthetic construct
  misc_feature 1..20: note = chemically synthesized
  source 1..20: mol_type = other DNA
tagttaatcatcatttttcc

SEQ ID NO: 36538 - DNA, 20 bp, synthetic construct
  misc_feature 1..20: note = chemically synthesized
  source 1..20: mol_type = other DNA
tagtttaattttataaacaa

SEQ ID NO: 36539 - DNA, 20 bp, synthetic construct
  misc_feature 1..20: note = chemically synthesized
  source 1..20: mol_type = other DNA
aaagctactttgctcctggt

SEQ ID NO: 36540 - DNA, 20 bp, synthetic construct
  misc_feature 1..20: note = chemically synthesized
  source 1..20: mol_type = other DNA
gtgagagcttaaaagaaatg

SEQ ID NO: 36541 - DNA, 20 bp, synthetic construct
  misc_feature 1..20: note = chemically synthesized
  source 1..20: mol_type = other DNA
aagaaatgggctgttttgcc

SEQ ID NO: 36542 - DNA, 20 bp, synthetic construct
  misc_feature 1..20: note = chemically synthesized
  source 1..20: mol_type = other DNA
aaagttttattttttttaaa

SEQ ID NO: 36543 - DNA, 20 bp, synthetic construct
  misc_feature 1..20: note = chemically synthesized
  source 1..20: mol_type = other DNA
ggagttcattttatgaagat

SEQ ID NO: 36544 - DNA, 20 bp, synthetic construct
  misc_feature 1..20: note = chemically synthesized
  source 1..20: mol_type = other DNA
tgaaaggaagaggctgacaa

SEQ ID NO: 36545 - DNA, 20 bp, synthetic construct
  misc_feature 1..20: note = chemically synthesized
  source 1..20: mol_type = other DNA
gaggggaacagaagaaaata

SEQ ID NO: 36546 - DNA, 20 bp, synthetic construct
  misc_feature 1..20: note = chemically synthesized
  source 1..20: mol_type = other DNA
ataagctaatattgatacaa

SEQ ID NO: 36547 - DNA, 20 bp, synthetic construct
  misc_feature 1..20: note = chemically synthesized
  source 1..20: mol_type = other DNA
gctatttgtgttaacatgga

SEQ ID NO: 36548 - DNA, 20 bp, synthetic construct
  misc_feature 1..20: note = chemically synthesized
  source 1..20: mol_type = other DNA
tgttaacatggaagaggatt

SEQ ID NO: 36549 - DNA, 20 bp, synthetic construct
  misc_feature 1..20: note = chemically synthesized
  source 1..20: mol_type = other DNA
taagtgcactgtacaatttt

SEQ ID NO: 36550 - DNA, 20 bp, synthetic construct
  misc_feature 1..20: note = chemically synthesized
  source 1..20: mol_type = other DNA
gccagccatttacttgacta

SEQ ID NO: 36551 - DNA, 20 bp, synthetic construct
  misc_feature 1..20: note = chemically synthesized
  source 1..20: mol_type = other DNA
aatacacttaacatagaaat

SEQ ID NO: 36552 - DNA, 20 bp, synthetic construct
  misc_feature 1..20: note = chemically synthesized
  source 1..20: mol_type = other DNA
cacttaacatagaaatgaat

SEQ ID NO: 36553 - DNA, 20 bp, synthetic construct
  misc_feature 1..20: note = chemically synthesized
  source 1..20: mol_type = other DNA
acatagaaatgaatgattgc

SEQ ID NO: 36554 - DNA, 20 bp, synthetic construct
  misc_feature 1..20: note = chemically synthesized
  source 1..20: mol_type = other DNA
ttgctttcgcttctacagtg

SEQ ID NO: 36555 - DNA, 20 bp, synthetic construct
  misc_feature 1..20: note = chemically synthesized
  source 1..20: mol_type = other DNA
tttttttaaaaaacacttca

SEQ ID NO: 36556 - DNA, 20 bp, synthetic construct
  misc_feature 1..20: note = chemically synthesized
  source 1..20: mol_type = other DNA
aaaaaaaacatacattgggg

SEQ ID NO: 36557 - DNA, 20 bp, synthetic construct
  misc_feature 1..20: note = chemically synthesized
  source 1..20: mol_type = other DNA
aacatacattggggaaaggt

SEQ ID NO: 36558 - DNA, 20 bp, synthetic construct
  misc_feature 1..20: note = chemically synthesized
  source 1..20: mol_type = other DNA
tataggaaaatgcacactca

SEQ ID NO: 36559 - DNA, 20 bp, synthetic construct
  misc_feature 1..20: note = chemically synthesized
  source 1..20: mol_type = other DNA
aggcactatagtatttatat

SEQ ID NO: 36560 - DNA, 20 bp, synthetic construct
  misc_feature 1..20: note = chemically synthesized
  source 1..20: mol_type = other DNA
ttgaagcttgtatttttaac

SEQ ID NO: 36561 - DNA, 20 bp, synthetic construct
  misc_feature 1..20: note = chemically synthesized
  source 1..20: mol_type = other DNA
taatatagtgcaaattattt

SEQ ID NO: 36562 - DNA, 20 bp, synthetic construct
  misc_feature 1..20: note = chemically synthesized
  source 1..20: mol_type = other DNA
cagatgagaagccatataat

SEQ ID NO: 36563 - DNA, 20 bp, synthetic construct
  misc_feature 1..20: note = chemically synthesized
  source 1..20: mol_type = other DNA
cagtactgcaagctaataac

SEQ ID NO: 36564 - DNA, 20 bp, synthetic construct
  misc_feature 1..20: note = chemically synthesized
  source 1..20: mol_type = other DNA
taacgttggtttgttatgta

SEQ ID NO: 36565 - DNA, 20 bp, synthetic construct
  misc_feature 1..20: note = chemically synthesized
  source 1..20: mol_type = other DNA
aaggaaaaaaaaaaaaaaac

SEQ ID NO: 36566 - DNA, 20 bp, synthetic construct
  misc_feature 1..20: note = chemically synthesized
  source 1..20: mol_type = other DNA
aaaaaaaaaaaccaatgttt

SEQ ID NO: 36567 - DNA, 20 bp, synthetic construct
  misc_feature 1..20: note = chemically synthesized
  source 1..20: mol_type = other DNA
tttcattgccaaaaactaaa

SEQ ID NO: 36568 - DNA, 20 bp, synthetic construct
  misc_feature 1..20: note = chemically synthesized
  source 1..20: mol_type = other DNA
aaactaaatggtgctttata

SEQ ID NO: 36569 - DNA, 20 bp, synthetic construct
  misc_feature 1..20: note = chemically synthesized
  source 1..20: mol_type = other DNA
caaagcatattaaagagaaa

SEQ ID NO: 36570 - DNA, 20 bp, synthetic construct
  misc_feature 1..20: note = chemically synthesized
  source 1..20: mol_type = other DNA
ttttctattcctgtaatgaa

SEQ ID NO: 36571 - DNA, 20 bp, synthetic construct
  misc_feature 1..20: note = chemically synthesized
  source 1..20: mol_type = other DNA
ctatgggagtcactatttat

SEQ ID NO: 36572 - DNA, 20 bp, synthetic construct
  misc_feature 1..20: note = chemically synthesized
  source 1..20: mol_type = other DNA
taatttgatcttttattttt

SEQ ID NO: 36573 - DNA, 20 bp, synthetic construct
  misc_feature 1..20: note = chemically synthesized
  source 1..20: mol_type = other DNA
atgaccaaaggtcattacaa

SEQ ID NO: 36574 - DNA, 20 bp, synthetic construct
  misc_feature 1..20: note = chemically synthesized
  source 1..20: mol_type = other DNA
acaacctggctttttattgt

SEQ ID NO: 36575 - DNA, 20 bp, synthetic construct
  misc_feature 1..20: note = chemically synthesized
  source 1..20: mol_type = other DNA
tctattggaaaaaccactgt

SEQ ID NO: 36576 - DNA, 20 bp, synthetic construct
  misc_feature 1..20: note = chemically synthesized
  source 1..20: mol_type = other DNA
aaaaaattaaagtacacatt

SEQ ID NO: 36577 - DNA, 20 bp, synthetic construct
  misc_feature 1..20: note = chemically synthesized
  source 1..20: mol_type = other DNA
aaattacttgcaagaaaata

SEQ ID NO: 36578 - DNA, 20 bp, synthetic construct
  misc_feature 1..20: note = chemically synthesized
  source 1..20: mol_type = other DNA
agaaggccagtcagtctttt

SEQ ID NO: 36579 - DNA, 20 bp, synthetic construct
  misc_feature 1..20: note = chemically synthesized
  source 1..20: mol_type = other DNA
gacatatctcaaaccctgga

SEQ ID NO: 36580 - DNA, 20 bp, synthetic construct
  misc_feature 1..20: note = chemically synthesized
  source 1..20: mol_type = other DNA
tcaaaccctggacatagttt

SEQ ID NO: 36581 - DNA, 20 bp, synthetic construct
  misc_feature 1..20: note = chemically synthesized
  source 1..20: mol_type = other DNA
tggacatagttttaaggctt

SEQ ID NO: 36582 - DNA, 20 bp, synthetic construct
  misc_feature 1..20: note = chemically synthesized
  source 1..20: mol_type = other DNA
tttaaggctttccagtttag

SEQ ID NO: 36583 - DNA, 20 bp, synthetic construct
  misc_feature 1..20: note = chemically synthesized
  source 1..20: mol_type = other DNA
aatagttttcaagaaatgga

SEQ ID NO: 36584 - DNA, 20 bp, synthetic construct
  misc_feature 1..20: note = chemically synthesized
  source 1..20: mol_type = other DNA
gttcttttctattctcccat

SEQ ID NO: 36585 - DNA, 20 bp, synthetic construct
  misc_feature 1..20: note = chemically synthesized
  source 1..20: mol_type = other DNA
tatcttagaacataatgtaa

SEQ ID NO: 36586 - DNA, 20 bp, synthetic construct
  misc_feature 1..20: note = chemically synthesized
  source 1..20: mol_type = other DNA
tttttaaaaaaaatcagctc

SEQ ID NO: 36587 - DNA, 20 bp, synthetic construct
  misc_feature 1..20: note = chemically synthesized
  source 1..20: mol_type = other DNA
aaaatctggaaacaaaggca

SEQ ID NO: 36588 - DNA, 20 bp, synthetic construct
  misc_feature 1..20: note = chemically synthesized
  source 1..20: mol_type = other DNA
ctggaaacaaaggcatcagg

SEQ ID NO: 36589 - DNA, 20 bp, synthetic construct
  misc_feature 1..20: note = chemically synthesized
  source 1..20: mol_type = other DNA
aacaaaggcatcaggttttg

SEQ ID NO: 36590 - DNA, 20 bp, synthetic construct
  misc_feature 1..20: note = chemically synthesized
  source 1..20: mol_type = other DNA
aggcatcaggttttgttttg

SEQ ID NO: 36591 - DNA, 20 bp, synthetic construct
  misc_feature 1..20: note = chemically synthesized
  source 1..20: mol_type = other DNA
tcaggttttgttttgttttg

SEQ ID NO: 36592 - DNA, 20 bp, synthetic construct
  misc_feature 1..20: note = chemically synthesized
  source 1..20: mol_type = other DNA
ttttgttttgttttgttttg

SEQ ID NO: 36593 - DNA, 20 bp, synthetic construct
  misc_feature 1..20: note = chemically synthesized
  source 1..20: mol_type = other DNA
gtgaaatctttggaatcagc

SEQ ID NO: 36594 - DNA, 20 bp, synthetic construct
  misc_feature 1..20: note = chemically synthesized
  source 1..20: mol_type = other DNA
actgatttcctgagatgcat

SEQ ID NO: 36595 - DNA, 20 bp, synthetic construct
  misc_feature 1..20: note = chemically synthesized
  source 1..20: mol_type = other DNA
atcccaggaaccctagatgc

SEQ ID NO: 36596 - DNA, 20 bp, synthetic construct
  misc_feature 1..20: note = chemically synthesized
  source 1..20: mol_type = other DNA
tagatgctacagattacttt

SEQ ID NO: 36597 - DNA, 20 bp, synthetic construct
  misc_feature 1..20: note = chemically synthesized
  source 1..20: mol_type = other DNA
tactgcatgttgcagcatct

SEQ ID NO: 36598 - DNA, 20 bp, synthetic construct
  misc_feature 1..20: note = chemically synthesized
  source 1..20: mol_type = other DNA
tgccttttatctgaggcaag

SEQ ID NO: 36599 - DNA, 20 bp, synthetic construct
  misc_feature 1..20: note = chemically synthesized
  source 1..20: mol_type = other DNA
ttctaaagtataaagaaagt

SEQ ID NO: 36600 - DNA, 20 bp, synthetic construct
  misc_feature 1..20: note = chemically synthesized
  source 1..20: mol_type = other DNA
aagtcaatgttttctgaaaa

SEQ ID NO: 36601 - DNA, 20 bp, synthetic construct
  misc_feature 1..20: note = chemically synthesized
  source 1..20: mol_type = other DNA
cgtgcggtaccttgagaact

SEQ ID NO: 36602 - DNA, 20 bp, synthetic construct
  misc_feature 1..20: note = chemically synthesized
  source 1..20: mol_type = other DNA
acttagaaaagatatactgt

SEQ ID NO: 36603 - DNA, 20 bp, synthetic construct
  misc_feature 1..20: note = chemically synthesized
  source 1..20: mol_type = other DNA
aaaagatatactgtatgtgt

SEQ ID NO: 36604 - DNA, 20 bp, synthetic construct
  misc_feature 1..20: note = chemically synthesized
  source 1..20: mol_type = other DNA
tatactgtatgtgttttgga

SEQ ID NO: 36605 - DNA, 20 bp, synthetic construct
  misc_feature 1..20: note = chemically synthesized
  source 1..20: mol_type = other DNA
aaataattccccagtgccat

SEQ ID NO: 36606 - DNA, 20 bp, synthetic construct
  misc_feature 1..20: note = chemically synthesized
  source 1..20: mol_type = other DNA
ggagctatgagtgcaactgt

SEQ ID NO: 36607 - DNA, 20 bp, synthetic construct
  misc_feature 1..20: note = chemically synthesized
  source 1..20: mol_type = other DNA
atatgctgctcttagcgtaa

SEQ ID NO: 36608 - DNA, 20 bp, synthetic construct
  misc_feature 1..20: note = chemically synthesized
  source 1..20: mol_type = other DNA
gcaaacatctggtgataaat

SEQ ID NO: 36609 - DNA, 20 bp, synthetic construct
  misc_feature 1..20: note = chemically synthesized
  source 1..20: mol_type = other DNA
atctggtgataaatcacaga

SEQ ID NO: 36610 - DNA, 20 bp, synthetic construct
  misc_feature 1..20: note = chemically synthesized
  source 1..20: mol_type = other DNA
ggtgataaatcacagattat

SEQ ID NO: 36611 - DNA, 20 bp, synthetic construct
  misc_feature 1..20: note = chemically synthesized
  source 1..20: mol_type = other DNA
atgtctcttaaaatcctcaa

SEQ ID NO: 36612 - DNA, 20 bp, synthetic construct
  misc_feature 1..20: note = chemically synthesized
  source 1..20: mol_type = other DNA
tcctcaagtaagtttttgta

SEQ ID NO: 36613 - DNA, 20 bp, synthetic construct
  misc_feature 1..20: note = chemically synthesized
  source 1..20: mol_type = other DNA
tgttctctacatacctgaac

SEQ ID NO: 36614 - DNA, 20 bp, synthetic construct
  misc_feature 1..20: note = chemically synthesized
  source 1..20: mol_type = other DNA
ataccgcaaattctatttct

SEQ ID NO: 36615 - DNA, 20 bp, synthetic construct
  misc_feature 1..20: note = chemically synthesized
  source 1..20: mol_type = other DNA
gaacccatttgctatcctct

SEQ ID NO: 36616 - DNA, 20 bp, synthetic construct
  misc_feature 1..20: note = chemically synthesized
  source 1..20: mol_type = other DNA
tggcagaaagtgtgaagtag

SEQ ID NO: 36617 - DNA, 20 bp, synthetic construct
  misc_feature 1..20: note = chemically synthesized
  source 1..20: mol_type = other DNA
agggcattctgtagatatag

SEQ ID NO: 36618 - DNA, 20 bp, synthetic construct
  misc_feature 1..20: note = chemically synthesized
  source 1..20: mol_type = other DNA
cttgaaaggaagtggcggga

SEQ ID NO: 36619 - DNA, 20 bp, synthetic construct
  misc_feature 1..20: note = chemically synthesized
  source 1..20: mol_type = other DNA
ttggagaaataaggaaatga

SEQ ID NO: 36620 - DNA, 20 bp, synthetic construct
  misc_feature 1..20: note = chemically synthesized
  source 1..20: mol_type = other DNA
tgaggtggtttattcacaga

SEQ ID NO: 36621 - DNA, 20 bp, synthetic construct
  misc_feature 1..20: note = chemically synthesized
  source 1..20: mol_type = other DNA
acacagtttgctgaaaggta

SEQ ID NO: 36622 - DNA, 20 bp, synthetic construct
  misc_feature 1..20: note = chemically synthesized
  source 1..20: mol_type = other DNA
aagcctcaggccccatcctc

SEQ ID NO: 36623 - DNA, 20 bp, synthetic construct
  misc_feature 1..20: note = chemically synthesized
  source 1..20: mol_type = other DNA
agagactgagggaggaaata

SEQ ID NO: 36624 - DNA, 20 bp, synthetic construct
  misc_feature 1..20: note = chemically synthesized
  source 1..20: mol_type = other DNA
agggaggaaatacagtgttt

SEQ ID NO: 36625 - DNA, 20 bp, synthetic construct
  misc_feature 1..20: note = chemically synthesized
  source 1..20: mol_type = other DNA
ttgtaactgtgtgttcctca

SEQ ID NO: 36626 - DNA, 20 bp, synthetic construct
  misc_feature 1..20: note = chemically synthesized
  source 1..20: mol_type = other DNA
ggaactttgccgatatgagg

SEQ ID NO: 36627 - DNA, 20 bp, synthetic construct
  misc_feature 1..20: note = chemically synthesized
  source 1..20: mol_type = other DNA
ggattggcagagttctctca

SEQ ID NO: 36628 - DNA, 20 bp, synthetic construct
  misc_feature 1..20: note = chemically synthesized
  source 1..20: mol_type = other DNA
ttctctcaacctgcttggaa

SEQ ID NO: 36629 - DNA, 20 bp, synthetic construct
  misc_feature 1..20: note = chemically synthesized
  source 1..20: mol_type = other DNA
ttaaaaggcatgagccatct

SEQ ID NO: 36630 - DNA, 20 bp, synthetic construct
  misc_feature 1..20: note = chemically synthesized
  source 1..20: mol_type = other DNA
atgggttgtccggtctgcac

SEQ ID NO: 36631 - DNA, 20 bp, synthetic construct
  misc_feature 1..20: note = chemically synthesized
  source 1..20: mol_type = other DNA
atctcgttatcccattagcc

SEQ ID NO: 36632 - DNA, 20 bp, synthetic construct
  misc_feature 1..20: note = chemically synthesized
  source 1..20: mol_type = other DNA
ctcagcctttaggggaatgg

SEQ ID NO: 36633 - DNA, 20 bp, synthetic construct
  misc_feature 1..20: note = chemically synthesized
  source 1..20: mol_type = other DNA
cagctcgatggttgatccaa

SEQ ID NO: 36634 - DNA, 20 bp, synthetic construct
  misc_feature 1..20: note = chemically synthesized
  source 1..20: mol_type = other DNA
cccctaaacccatagggggg

SEQ ID NO: 36635 - DNA, 20 bp, synthetic construct
  misc_feature 1..20: note = chemically synthesized
  source 1..20: mol_type = other DNA
attggtagcaggttggacga

SEQ ID NO: 36636 - DNA, 20 bp, synthetic construct
  misc_feature 1..20: note = chemically synthesized
  source 1..20: mol_type = other DNA
gtagcaggttggacgaaagg

SEQ ID NO: 36637 - DNA, 20 bp, synthetic construct
  misc_feature 1..20: note = chemically synthesized
  source 1..20: mol_type = other DNA
gacttagcgctggactggga

SEQ ID NO: 36638 - DNA, 20 bp, synthetic construct
  misc_feature 1..20: note = chemically synthesized
  source 1..20: mol_type = other DNA
ggggagaggaggccccaggc

SEQ ID NO: 36639 - DNA, 20 bp, synthetic construct
  misc_feature 1..20: note = chemically synthesized
  source 1..20: mol_type = other DNA
cacatccggactcccagttc

SEQ ID NO: 36640 - DNA, 20 bp, synthetic construct
  misc_feature 1..20: note = chemically synthesized
  source 1..20: mol_type = other DNA
ccaaaaaagaaaagaaaact

SEQ ID NO: 36641 - DNA, 20 bp, synthetic construct
  misc_feature 1..20: note = chemically synthesized
  source 1..20: mol_type = other DNA
catgtttgaaagaaactaca

SEQ ID NO: 36642 - DNA, 20 bp, synthetic construct
  misc_feature 1..20: note = chemically synthesized
  source 1..20: mol_type = other DNA
tgagagcaactcttttgggt

SEQ ID NO: 36643 - DNA, 20 bp, synthetic construct
  misc_feature 1..20: note = chemically synthesized
  source 1..20: mol_type = other DNA
ttgggttctggttttctctt

SEQ ID NO: 36644 - DNA, 20 bp, synthetic construct
  misc_feature 1..20: note = chemically synthesized
  source 1..20: mol_type = other DNA
ttcgcctcttgtaaatcatt

SEQ ID NO: 36645 - DNA, 20 bp, synthetic construct
  misc_feature 1..20: note = chemically synthesized
  source 1..20: mol_type = other DNA
acgttgaacttgatgacatt

SEQ ID NO: 36646 - DNA, 20 bp, synthetic construct
  misc_feature 1..20: note = chemically synthesized
  source 1..20: mol_type = other DNA
gacatttcatgttttcgttg

SEQ ID NO: 36647 - DNA, 20 bp, synthetic construct
  misc_feature 1..20: note = chemically synthesized
  source 1..20: mol_type = other DNA
tttcgttgtgctgcttttac

SEQ ID NO: 36648 - DNA, 20 bp, synthetic construct
  misc_feature 1..20: note = chemically synthesized
  source 1..20: mol_type = other DNA
ttgtgctgcttttacatcag

SEQ ID NO: 36649 - DNA, 20 bp, synthetic construct
  misc_feature 1..20: note = chemically synthesized
  source 1..20: mol_type = other DNA
cttttacatcagttttgatt

SEQ ID NO: 36650 - DNA, 20 bp, synthetic construct
  misc_feature 1..20: note = chemically synthesized
  source 1..20: mol_type = other DNA
cccgctctcctcaaccaaag

SEQ ID NO: 36651 - DNA, 20 bp, synthetic construct
  misc_feature 1..20: note = chemically synthesized
  source 1..20: mol_type = other DNA
aaccaaaggactgtttctta

SEQ ID NO: 36652 - DNA, 20 bp, synthetic construct
  misc_feature 1..20: note = chemically synthesized
  source 1..20: mol_type = other DNA
gttttctcagtcataagggc

SEQ ID NO: 36653 - DNA, 20 bp, synthetic construct
  misc_feature 1..20: note = chemically synthesized
  source 1..20: mol_type = other DNA
tgtttccttccaggtgtgtc

SEQ ID NO: 36654 - DNA, 20 bp, synthetic construct
  misc_feature 1..20: note = chemically synthesized
  source 1..20: mol_type = other DNA
agatacttggggaggggagg

SEQ ID NO: 36655 - DNA, 20 bp, synthetic construct
  misc_feature 1..20: note = chemically synthesized
  source 1..20: mol_type = other DNA
aggggaggctgagtttgaaa

SEQ ID NO: 36656 - DNA, 20 bp, synthetic construct
  misc_feature 1..20: note = chemically synthesized
  source 1..20: mol_type = other DNA
tgccagtggctcgacctgtg

SEQ ID NO: 36657 - DNA, 20 bp, synthetic construct
  misc_feature 1..20: note = chemically synthesized
  source 1..20: mol_type = other DNA
ccagagagctcaagatgtgt

SEQ ID NO: 36658 - DNA, 20 bp, synthetic construct
  misc_feature 1..20: note = chemically synthesized
  source 1..20: mol_type = other DNA
tcagcgtggtctgtcatcct

SEQ ID NO: 36659 - DNA, 20 bp, synthetic construct
  misc_feature 1..20: note = chemically synthesized
  source 1..20: mol_type = other DNA
tctgtcatcctgctagtttg

SEQ ID NO: 36660 - DNA, 20 bp, synthetic construct
  misc_feature 1..20: note = chemically synthesized
  source 1..20: mol_type = other DNA
atgcgcatgagtccccaacc

SEQ ID NO: 36661 - DNA, 20 bp, synthetic construct
  misc_feature 1..20: note = chemically synthesized
  source 1..20: mol_type = other DNA
tctatgttgtcttttaaaaa

SEQ ID NO: 36662 - DNA, 20 bp, synthetic construct
  misc_feature 1..20: note = chemically synthesized
  source 1..20: mol_type = other DNA
aacattgacacaataaatgt

SEQ ID NO: 36663 - DNA, 20 bp, synthetic construct
  misc_feature 1..20: note = chemically synthesized
  source 1..20: mol_type = other DNA
ataaatgttggagctttagg

SEQ ID NO: 36664 - DNA, 20 bp, synthetic construct
  misc_feature 1..20: note = chemically synthesized
  source 1..20: mol_type = other DNA
atgttggagctttaggtggt

SEQ ID NO: 36665 - DNA, 20 bp, synthetic construct
  misc_feature 1..20: note = chemically synthesized
  source 1..20: mol_type = other DNA
tttgcttgttctttaatttt

SEQ ID NO: 36666 - DNA, 20 bp, synthetic construct
  misc_feature 1..20: note = chemically synthesized
  source 1..20: mol_type = other DNA
taatgcttataagacaatga

SEQ ID NO: 36667 - DNA, 20 bp, synthetic construct
  misc_feature 1..20: note = chemically synthesized
  source 1..20: mol_type = other DNA
ttataagacaatgaggctgc

SEQ ID NO: 36668 - DNA, 20 bp, synthetic construct
  misc_feature 1..20: note = chemically synthesized
  source 1..20: mol_type = other DNA
ttatgattttgtacttctgt

SEQ ID NO: 36669 - DNA, 20 bp, synthetic construct
  misc_feature 1..20: note = chemically synthesized
  source 1..20: mol_type = other DNA
cccatcgggtgggtaggagg

SEQ ID NO: 36670 - DNA, 20 bp, synthetic construct
  misc_feature 1..20: note = chemically synthesized
  source 1..20: mol_type = other DNA
atgtaggaggggaactaggt

SEQ ID NO: 36671 - DNA, 20 bp, synthetic construct
  misc_feature 1..20: note = chemically synthesized
  source 1..20: mol_type = other DNA
aattaatgtagtagtaatat

SEQ ID NO: 36672 - DNA, 20 bp, synthetic construct
  misc_feature 1..20: note = chemically synthesized
  source 1..20: mol_type = other DNA
gctgtttattaatgctgaag

SEQ ID NO: 36673 - DNA, 20 bp, synthetic construct
  misc_feature 1..20: note = chemically synthesized
  source 1..20: mol_type = other DNA
gcataatatggcacgccgaa

SEQ ID NO: 36674 - DNA, 20 bp, synthetic construct
  misc_feature 1..20: note = chemically synthesized
  source 1..20: mol_type = other DNA
ccgaatcctgtttttcaaat

SEQ ID NO: 36675 - DNA, 20 bp, synthetic construct
  misc_feature 1..20: note = chemically synthesized
  source 1..20: mol_type = other DNA
atgcttttggtggctaccat

SEQ ID NO: 36676 - DNA, 20 bp, synthetic construct
  misc_feature 1..20: note = chemically synthesized
  source 1..20: mol_type = other DNA
gatttgaatttgtcttttaa

SEQ ID NO: 36677 - DNA, 20 bp, synthetic construct
  misc_feature 1..20: note = chemically synthesized
  source 1..20: mol_type = other DNA
taaagaaggtgataaatgtc

SEQ ID NO: 36678 - DNA, 20 bp, synthetic construct
  misc_feature 1..20: note = chemically synthesized
  source 1..20: mol_type = other DNA
acttacatcaggaaatttgg

SEQ ID NO: 36679 - DNA, 20 bp, synthetic construct
  misc_feature 1..20: note = chemically synthesized
  source 1..20: mol_type = other DNA
ttaatttgcacagaactttt

SEQ ID NO: 36680 - DNA, 20 bp, synthetic construct
  misc_feature 1..20: note = chemically synthesized
  source 1..20: mol_type = other DNA
tttctcagtttggtattttt

SEQ ID NO: 36681 - DNA, 20 bp, synthetic construct
  misc_feature 1..20: note = chemically synthesized
  source 1..20: mol_type = other DNA
aaacaacatagcaaattaaa

SEQ ID NO: 36682 - DNA, 20 bp, synthetic construct
  misc_feature 1..20: note = chemically synthesized
  source 1..20: mol_type = other DNA
gagctcagacacctgtgtgc

SEQ ID NO: 36683 - DNA, 20 bp, synthetic construct
  misc_feature 1..20: note = chemically synthesized
  source 1..20: mol_type = other DNA
tcctacctatccaccttctg

SEQ ID NO: 36684 - DNA, 20 bp, synthetic construct
  misc_feature 1..20: note = chemically synthesized
  source 1..20: mol_type = other DNA
tccaccttctggctagatta

SEQ ID NO: 36685 - DNA, 20 bp, synthetic construct
  misc_feature 1..20: note = chemically synthesized
  source 1..20: mol_type = other DNA
taattggcatgtgaattatt

SEQ ID NO: 36686 - DNA, 20 bp, synthetic construct
  misc_feature 1..20: note = chemically synthesized
  source 1..20: mol_type = other DNA
cgacttctactttatggagg

SEQ ID NO: 36687 - DNA, 20 bp, synthetic construct
  misc_feature 1..20: note = chemically synthesized
  source 1..20: mol_type = other DNA
tactttatggaggtggagat

SEQ ID NO: 36688 - DNA, 20 bp, synthetic construct
  misc_feature 1..20: note = chemically synthesized
  source 1..20: mol_type = other DNA
gattgaggcttaccaaggtt

SEQ ID NO: 36689 - DNA, 20 bp, synthetic construct
  misc_feature 1..20: note = chemically synthesized
  source 1..20: mol_type = other DNA
taagagagaaagcagagaag

SEQ ID NO: 36690 - DNA, 20 bp, synthetic construct
  misc_feature 1..20: note = chemically synthesized
  source 1..20: mol_type = other DNA
aaagcagagaagccaggttt

SEQ ID NO: 36691 - DNA, 20 bp, synthetic construct
  misc_feature 1..20: note = chemically synthesized
  source 1..20: mol_type = other DNA
ccagagctaatttcaccaaa

SEQ ID NO: 36692 - DNA, 20 bp, synthetic construct
  misc_feature 1..20: note = chemically synthesized
  source 1..20: mol_type = other DNA
aatgttcacagacacacaca

SEQ ID NO: 36693 - DNA, 20 bp, synthetic construct
  misc_feature 1..20: note = chemically synthesized
  source 1..20: mol_type = other DNA
ccttgccatcacctttcccc

SEQ ID NO: 36694 - DNA, 20 bp, synthetic construct
  misc_feature 1..20: note = chemically synthesized
  source 1..20: mol_type = other DNA
ggcttttccatgacaaataa

SEQ ID NO: 36695 - DNA, 20 bp, synthetic construct
  misc_feature 1..20: note = chemically synthesized
  source 1..20: mol_type = other DNA
taaccctgattgcacgagtg

SEQ ID NO: 36696 - DNA, 20 bp, synthetic construct
  misc_feature 1..20: note = chemically synthesized
  source 1..20: mol_type = other DNA
ttgctgaaacataagaccat

SEQ ID NO: 36697 - DNA, 20 bp, synthetic construct
  misc_feature 1..20: note = chemically synthesized
  source 1..20: mol_type = other DNA
aagaccattagggtttctgt

SEQ ID NO: 36698 - DNA, 20 bp, synthetic construct
  misc_feature 1..20: note = chemically synthesized
  source 1..20: mol_type = other DNA
actacactttcatttctggt

SEQ ID NO: 36699 - DNA, 20 bp, synthetic construct
  misc_feature 1..20: note = chemically synthesized
  source 1..20: mol_type = other DNA
tttatatatttcttctcaga

SEQ ID NO: 36700 - DNA, 20 bp, synthetic construct
  misc_feature 1..20: note = chemically synthesized
  source 1..20: mol_type = other DNA
ataagtggatatctctaaaa

SEQ ID NO: 36701 - DNA, 20 bp, synthetic construct
  misc_feature 1..20: note = chemically synthesized
  source 1..20: mol_type = other DNA
taacagaagtggataaagga

SEQ ID NO: 36702 - DNA, 20 bp, synthetic construct
  misc_feature 1..20: note = chemically synthesized
  source 1..20: mol_type = other DNA
acaaaaagactgtcttttcc

SEQ ID NO: 36703 - DNA, 20 bp, synthetic construct
  misc_feature 1..20: note = chemically synthesized
  source 1..20: mol_type = other DNA
ggttcaagggatcctcctgc

SEQ ID NO: 36704 - DNA, 20 bp, synthetic construct
  misc_feature 1..20: note = chemically synthesized
  source 1..20: mol_type = other DNA
ttttgtatttttagtagata

SEQ ID NO: 36705 - DNA, 20 bp, synthetic construct
  misc_feature 1..20: note = chemically synthesized
  source 1..20: mol_type = other DNA
ctcctaggcctcccatagtg

SEQ ID NO: 36706 - DNA, 20 bp, synthetic construct
  misc_feature 1..20: note = chemically synthesized
  source 1..20: mol_type = other DNA
ctagacttttgaaaccccat

SEQ ID NO: 36707 - DNA, 20 bp, synthetic construct
  misc_feature 1..20: note = chemically synthesized
  source 1..20: mol_type = other DNA
tcctctctgcagagtggaac

SEQ ID NO: 36708 - DNA, 20 bp, synthetic construct
  misc_feature 1..20: note = chemically synthesized
  source 1..20: mol_type = other DNA
ggaggagaccaaatacaggg

SEQ ID NO: 36709 - DNA, 20 bp, synthetic construct
  misc_feature 1..20: note = chemically synthesized
  source 1..20: mol_type = other DNA
cccaagccttttgtgggctg

SEQ ID NO: 36710 - DNA, 20 bp, synthetic construct
  misc_feature 1..20: note = chemically synthesized
  source 1..20: mol_type = other DNA
tgcctcagcctcctgagtgg

SEQ ID NO: 36711 - DNA, 20 bp, synthetic construct
  misc_feature 1..20: note = chemically synthesized
  source 1..20: mol_type = other DNA
ttttgtatttttagtagaga

SEQ ID NO: 36712 - DNA, 20 bp, synthetic construct
  misc_feature 1..20: note = chemically synthesized
  source 1..20: mol_type = other DNA
tgcctcggcctcccaaagtg

SEQ ID NO: 36713 - DNA, 20 bp, synthetic construct
  misc_feature 1..20: note = chemically synthesized
  source 1..20: mol_type = other DNA
ggtgtaagccaccgcgcccg

SEQ ID NO: 36714 - DNA, 20 bp, synthetic construct
  misc_feature 1..20: note = chemically synthesized
  source 1..20: mol_type = other DNA
atccagcatgttgaatatca

SEQ ID NO: 36715 - DNA, 20 bp, synthetic construct
  misc_feature 1..20: note = chemically synthesized
  source 1..20: mol_type = other DNA
tatcagcctgtttgagaaat

SEQ ID NO: 36716 - DNA, 20 bp, synthetic construct
  misc_feature 1..20: note = chemically synthesized
  source 1..20: mol_type = other DNA
gcagcatattttctgggcac

SEQ ID NO: 36717 - DNA, 20 bp, synthetic construct
  misc_feature 1..20: note = chemically synthesized
  source 1..20: mol_type = other DNA
attttctgggcacttttgct

SEQ ID NO: 36718 - DNA, 20 bp, synthetic construct
  misc_feature 1..20: note = chemically synthesized
  source 1..20: mol_type = other DNA
gcttggagtttccaagagca

SEQ ID NO: 36719 - DNA, 20 bp, synthetic construct
  misc_feature 1..20: note = chemically synthesized
  source 1..20: mol_type = other DNA
caagtggtcaggaatatctt

SEQ ID NO: 36720 - DNA, 20 bp, synthetic construct
  misc_feature 1..20: note = chemically synthesized
  source 1..20: mol_type = other DNA
ttcaggttttgtatgcgttg

SEQ ID NO: 36721 - DNA, 20 bp, synthetic construct
  misc_feature 1..20: note = chemically synthesized
  source 1..20: mol_type = other DNA
cagtgtccccggaagtaata

SEQ ID NO: 36722 - DNA, 20 bp, synthetic construct
  misc_feature 1..20: note = chemically synthesized
  source 1..20: mol_type = other DNA
tctgttcttacagtatgcca

SEQ ID NO: 36723 - DNA, 20 bp, synthetic construct
  misc_feature 1..20: note = chemically synthesized
  source 1..20: mol_type = other DNA
ttggagtatagtgtgaagga

SEQ ID NO: 36724 - DNA, 20 bp, synthetic construct
  misc_feature 1..20: note = chemically synthesized
  source 1..20: mol_type = other DNA
gcctaggagagacagtactc

SEQ ID NO: 36725 - DNA, 20 bp, synthetic construct
  misc_feature 1..20: note = chemically synthesized
  source 1..20: mol_type = other DNA
aaaatccagaagcagtcatt

SEQ ID NO: 36726 - DNA, 20 bp, synthetic construct
  misc_feature 1..20: note = chemically synthesized
  source 1..20: mol_type = other DNA
gtcattgtctgtttttctat

SEQ ID NO: 36727 - DNA, 20 bp, synthetic construct
  misc_feature 1..20: note = chemically synthesized
  source 1..20: mol_type = other DNA
acgaaccacatggcctttct

SEQ ID NO: 36728 - DNA, 20 bp, synthetic construct
  misc_feature 1..20: note = chemically synthesized
  source 1..20: mol_type = other DNA
aaaatgctcccaggaagtac

SEQ ID NO: 36729 - DNA, 20 bp, synthetic construct
  misc_feature 1..20: note = chemically synthesized
  source 1..20: mol_type = other DNA
catgatagaatcaattttcc

SEQ ID NO: 36730 - DNA, 20 bp, synthetic construct
  misc_feature 1..20: note = chemically synthesized
  source 1..20: mol_type = other DNA
agatcagaataataagggcc

SEQ ID NO: 36731 - DNA, 20 bp, synthetic construct
  misc_feature 1..20: note = chemically synthesized
  source 1..20: mol_type = other DNA
gtgtgaaaaaaacatcatag

SEQ ID NO: 36732 - DNA, 22 bp, synthetic construct
  misc_feature 1..22: note = chemically synthesized
  source 1..22: mol_type = other DNA
caagcttggctatgatgttttt

SEQ ID NO: 36733 - DNA, 22 bp, synthetic construct
  misc_feature 1..22: note = chemically synthesized
  source 1..22: mol_type = other DNA
aagcttggctatgatgtttttt

SEQ ID NO: 36734 - DNA, 22 bp, synthetic construct
  misc_feature 1..22: note = chemically synthesized
  source 1..22: mol_type = other DNA
ggctatgatgtttttttcacac

SEQ ID NO: 36735 - DNA, 22 bp, synthetic construct
  misc_feature 1..22: note = chemically synthesized
  source 1..22: mol_type = other DNA
gctatgatgtttttttcacact

SEQ ID NO: 36736 - DNA, 22 bp, synthetic construct
  misc_feature 1..22: note = chemically synthesized
  source 1..22: mol_type = other DNA
tgatgtttttttcacactgtga

SEQ ID NO: 36737 - DNA, 22 bp, synthetic construct
  misc_feature 1..22: note = chemically synthesized
  source 1..22: mol_type = other DNA
ttttcacactgtgatcttaggt

SEQ ID NO: 36738 - DNA, 22 bp, synthetic construct
  misc_feature 1..22: note = chemically synthesized
  source 1..22: mol_type = other DNA
tttcacactgtgatcttaggta

SEQ ID NO: 36739 - DNA, 22 bp, synthetic construct
  misc_feature 1..22: note = chemically synthesized
  source 1..22: mol_type = other DNA
ttcacactgtgatcttaggtac

SEQ ID NO: 36740 - DNA, 22 bp, synthetic construct
  misc_feature 1..22: note = chemically synthesized
  source 1..22: mol_type = other DNA
tcacactgtgatcttaggtact

SEQ ID NO: 36741 - DNA, 22 bp, synthetic construct
  misc_feature 1..22: note = chemically synthesized
  source 1..22: mol_type = other DNA
cacactgtgatcttaggtactt

SEQ ID NO: 36742 - DNA, 22 bp, synthetic construct
  misc_feature 1..22: note = chemically synthesized
  source 1..22: mol_type = other DNA
acactgtgatcttaggtacttc

SEQ ID NO: 36743 - DNA, 22 bp, synthetic construct
  misc_feature 1..22: note = chemically synthesized
  source 1..22: mol_type = other DNA
tgatcttaggtacttcacttaa

SEQ ID NO: 36744 - DNA, 22 bp, synthetic construct
  misc_feature 1..22: note = chemically synthesized
  source 1..22: mol_type = other DNA
aggtacttcacttaatctttgg

SEQ ID NO: 36745 - DNA, 22 bp, synthetic construct
  misc_feature 1..22: note = chemically synthesized
  source 1..22: mol_type = other DNA
ggtacttcacttaatctttggg

SEQ ID NO: 36746 - DNA, 22 bp, synthetic construct
  misc_feature 1..22: note = chemically synthesized
  source 1..22: mol_type = other DNA
cacttaatctttgggcccttat

SEQ ID NO: 36747 - DNA, 22 bp, synthetic construct
  misc_feature 1..22: note = chemically synthesized
  source 1..22: mol_type = other DNA
acttaatctttgggcccttatt

SEQ ID NO: 36748 - DNA, 22 bp, synthetic construct
  misc_feature 1..22: note = chemically synthesized
  source 1..22: mol_type = other DNA
aatctttgggcccttattattc

SEQ ID NO: 36749 - DNA, 22 bp, synthetic construct
  misc_feature 1..22: note = chemically synthesized
  source 1..22: mol_type = other DNA
atctttgggcccttattattct

SEQ ID NO: 36750 - DNA, 22 bp, synthetic construct
  misc_feature 1..22: note = chemically synthesized
  source 1..22: mol_type = other DNA
tgggcccttattattctgatct

SEQ ID NO: 36751 - DNA, 22 bp, synthetic construct
  misc_feature 1..22: note = chemically synthesized
  source 1..22: mol_type = other DNA
gggcccttattattctgatctc

SEQ ID NO: 36752 - DNA, 22 bp, synthetic construct
  misc_feature 1..22: note = chemically synthesized
  source 1..22: mol_type = other DNA
ggcccttattattctgatctct

SEQ ID NO: 36753 - DNA, 22 bp, synthetic construct
  misc_feature 1..22: note = chemically synthesized
  source 1..22: mol_type = other DNA
attattctgatctctaaaatga

SEQ ID NO: 36754 - DNA, 22 bp, synthetic construct
  misc_feature 1..22: note = chemically synthesized
  source 1..22: mol_type = other DNA
ttattctgatctctaaaatgag

SEQ ID NO: 36755 - DNA, 22 bp, synthetic construct
  misc_feature 1..22: note = chemically synthesized
  source 1..22: mol_type = other DNA
ttctgatctctaaaatgagtga

SEQ ID NO: 36756 - DNA, 22 bp, synthetic construct
  misc_feature 1..22: note = chemically synthesized
  source 1..22: mol_type = other DNA
tgatctctaaaatgagtgatta

SEQ ID NO: 36757 - DNA, 22 bp, synthetic construct
  misc_feature 1..22: note = chemically synthesized
  source 1..22: mol_type = other DNA
atctctaaaatgagtgattact

SEQ ID NO: 36758 - DNA, 22 bp, synthetic construct
  misc_feature 1..22: note = chemically synthesized
  source 1..22: mol_type = other DNA
taaaatgagtgattactaggat

SEQ ID NO: 36759 - DNA, 22 bp, synthetic construct
  misc_feature 1..22: note = chemically synthesized
  source 1..22: mol_type = other DNA
aaatgagtgattactaggattc

SEQ ID NO: 36760 - DNA, 22 bp, synthetic construct
  misc_feature 1..22: note = chemically synthesized
  source 1..22: mol_type = other DNA
ctaggattcctttcaacttcag

SEQ ID NO: 36761 - DNA, 22 bp, synthetic construct
  misc_feature 1..22: note = chemically synthesized
  source 1..22: mol_type = other DNA
ggattcctttcaacttcagtct

SEQ ID NO: 36762 - DNA, 22 bp, synthetic construct
  misc_feature 1..22: note = chemically synthesized
  source 1..22: mol_type = other DNA
ctttcaacttcagtctattctt

SEQ ID NO: 36763 - DNA, 22 bp, synthetic construct
  misc_feature 1..22: note = chemically synthesized
  source 1..22: mol_type = other DNA
tcaacttcagtctattcttttc

SEQ ID NO: 36764 - DNA, 22 bp, synthetic construct
  misc_feature 1..22: note = chemically synthesized
  source 1..22: mol_type = other DNA
caacttcagtctattcttttct

SEQ ID NO: 36765 - DNA, 22 bp, synthetic construct
  misc_feature 1..22: note = chemically synthesized
  source 1..22: mol_type = other DNA
aacttcagtctattcttttctt

SEQ ID NO: 36766 - DNA, 22 bp, synthetic construct
  misc_feature 1..22: note = chemically synthesized
  source 1..22: mol_type = other DNA
cagtctattcttttcttatcta

SEQ ID NO: 36767 - DNA, 22 bp, synthetic construct
  misc_feature 1..22: note = chemically synthesized
  source 1..22: mol_type = other DNA
agtctattcttttcttatctaa

SEQ ID NO: 36768 - DNA, 22 bp, synthetic construct
  misc_feature 1..22: note = chemically synthesized
  source 1..22: mol_type = other DNA
ttcttttcttatctaatttata

SEQ ID NO: 36769 - DNA, 22 bp, synthetic construct
  misc_feature 1..22: note = chemically synthesized
  source 1..22: mol_type = other DNA
ttttcttatctaatttatagaa

SEQ ID NO: 36770 - DNA, 22 bp, synthetic construct
  misc_feature 1..22: note = chemically synthesized
  source 1..22: mol_type = other DNA
ttcttatctaatttatagaatc

SEQ ID NO: 36771 - DNA, 22 bp, synthetic construct
  misc_feature 1..22: note = chemically synthesized
  source 1..22: mol_type = other DNA
tcttatctaatttatagaatca

SEQ ID NO: 36772 - DNA, 22 bp, synthetic construct
  misc_feature 1..22: note = chemically synthesized
  source 1..22: mol_type = other DNA
cttatctaatttatagaatcac

SEQ ID NO: 36773 - DNA, 22 bp, synthetic construct
  misc_feature 1..22: note = chemically synthesized
  source 1..22: mol_type = other DNA
ttatctaatttatagaatcaca

SEQ ID NO: 36774 - DNA, 22 bp, synthetic construct
  misc_feature 1..22: note = chemically synthesized
  source 1..22: mol_type = other DNA
atctaatttatagaatcacaag

SEQ ID NO: 36775 - DNA, 22 bp, synthetic construct
  misc_feature 1..22: note = chemically synthesized
  source 1..22: mol_type = other DNA
tctaatttatagaatcacaagg

SEQ ID NO: 36776 - DNA, 22 bp, synthetic construct
  misc_feature 1..22: note = chemically synthesized
  source 1..22: mol_type = other DNA
atttatagaatcacaaggaaaa

SEQ ID NO: 36777 - DNA, 22 bp, synthetic construct
  misc_feature 1..22: note = chemically synthesized
  source 1..22: mol_type = other DNA
atagaatcacaaggaaaattga

SEQ ID NO: 36778 - DNA, 22 bp, synthetic construct
  misc_feature 1..22: note = chemically synthesized
  source 1..22: mol_type = other DNA
tagaatcacaaggaaaattgat

SEQ ID NO: 36779 - DNA, 22 bp, synthetic construct
  misc_feature 1..22: note = chemically synthesized
  source 1..22: mol_type = other DNA
attctatcatgtatataaaagt

SEQ ID NO: 36780 - DNA, 22 bp, synthetic construct
  misc_feature 1..22: note = chemically synthesized
  source 1..22: mol_type = other DNA
tatcatgtatataaaagtattc

SEQ ID NO: 36781 - DNA, 22 bp, synthetic construct
  misc_feature 1..22: note = chemically synthesized
  source 1..22: mol_type = other DNA
tcatgtatataaaagtattcta

SEQ ID NO: 36782 - DNA, 22 bp, synthetic construct
  misc_feature 1..22: note = chemically synthesized
  source 1..22: mol_type = other DNA
tataaagcttaagtacttcctg

SEQ ID NO: 36783 - DNA, 22 bp, synthetic construct
  misc_feature 1..22: note = chemically synthesized
  source 1..22: mol_type = other DNA
taaagcttaagtacttcctggg

SEQ ID NO: 36784 - DNA, 22 bp, synthetic construct
  misc_feature 1..22: note = chemically synthesized
  source 1..22: mol_type = other DNA
aagtacttcctgggagcatttt

SEQ ID NO: 36785 - DNA, 22 bp, synthetic construct
  misc_feature 1..22: note = chemically synthesized
  source 1..22: mol_type = other DNA
agtacttcctgggagcattttt

SEQ ID NO: 36786 - DNA, 22 bp, synthetic construct
  misc_feature 1..22: note = chemically synthesized
  source 1..22: mol_type = other DNA
cctgggagcattttttaaaata

SEQ ID NO: 36787 - DNA, 22 bp, synthetic construct
  misc_feature 1..22: note = chemically synthesized
  source 1..22: mol_type = other DNA
ctgggagcattttttaaaatac

SEQ ID NO: 36788 - DNA, 22 bp, synthetic construct
  misc_feature 1..22: note = chemically synthesized
  source 1..22: mol_type = other DNA
ggagcattttttaaaatacaaa

SEQ ID NO: 36789 - DNA, 22 bp, synthetic construct
  misc_feature 1..22: note = chemically synthesized
  source 1..22: mol_type = other DNA
tttaaaatacaaagcaaaaaga

SEQ ID NO: 36790 - DNA, 22 bp, synthetic construct
  misc_feature 1..22: note = chemically synthesized
  source 1..22: mol_type = other DNA
ttaaaatacaaagcaaaaagaa

SEQ ID NO: 36791 - DNA, 22 bp, synthetic construct
  misc_feature 1..22: note = chemically synthesized
  source 1..22: mol_type = other DNA
taaaatacaaagcaaaaagaaa

SEQ ID NO: 36792 - DNA, 22 bp, synthetic construct
  misc_feature 1..22: note = chemically synthesized
  source 1..22: mol_type = other DNA
aaaatacaaagcaaaaagaaag

SEQ ID NO: 36793 - DNA, 22 bp, synthetic construct
  misc_feature 1..22: note = chemically synthesized
  source 1..22: mol_type = other DNA
aaatacaaagcaaaaagaaagg

SEQ ID NO: 36794 - DNA, 22 bp, synthetic construct
  misc_feature 1..22: note = chemically synthesized
  source 1..22: mol_type = other DNA
gtaataagatatcctaatttaa

SEQ ID NO: 36795 - DNA, 22 bp, synthetic construct
  misc_feature 1..22: note = chemically synthesized
  source 1..22: mol_type = other DNA
atttaaactaagatagaaaaac

SEQ ID NO: 36796 - DNA, 22 bp, synthetic construct
  misc_feature 1..22: note = chemically synthesized
  source 1..22: mol_type = other DNA
aaactaagatagaaaaacagac

SEQ ID NO: 36797 - DNA, 22 bp, synthetic construct
  misc_feature 1..22: note = chemically synthesized
  source 1..22: mol_type = other DNA
aactaagatagaaaaacagaca

SEQ ID NO: 36798 - DNA, 22 bp, synthetic construct
  misc_feature 1..22: note = chemically synthesized
  source 1..22: mol_type = other DNA
agatagaaaaacagacaatgac

SEQ ID NO: 36799 - DNA, 22 bp, synthetic construct
  misc_feature 1..22: note = chemically synthesized
  source 1..22: mol_type = other DNA
cttctggattttactggaagtg

SEQ ID NO: 36800 - DNA, 22 bp, synthetic construct
  misc_feature 1..22: note = chemically synthesized
  source 1..22: mol_type = other DNA
ctggattttactggaagtgaga

SEQ ID NO: 36801 - DNA, 22 bp, synthetic construct
  misc_feature 1..22: note = chemically synthesized
  source 1..22: mol_type = other DNA
tggattttactggaagtgagaa

SEQ ID NO: 36802 - DNA, 22 bp, synthetic construct
  misc_feature 1..22: note = chemically synthesized
  source 1..22: mol_type = other DNA
gattttactggaagtgagaagt

SEQ ID NO: 36803 - DNA, 22 bp, synthetic construct
  misc_feature 1..22: note = chemically synthesized
  source 1..22: mol_type = other DNA
tactggaagtgagaagttccat

SEQ ID NO: 36804 - DNA, 22 bp, synthetic construct
  misc_feature 1..22: note = chemically synthesized
  source 1..22: mol_type = other DNA
actggaagtgagaagttccatg

SEQ ID NO: 36805 - DNA, 22 bp, synthetic construct
  misc_feature 1..22: note = chemically synthesized
  source 1..22: mol_type = other DNA
ctggaagtgagaagttccatga

SEQ ID NO: 36806 - DNA, 22 bp, synthetic construct
  misc_feature 1..22: note = chemically synthesized
  source 1..22: mol_type = other DNA
gaagtgagaagttccatgactt

SEQ ID NO: 36807 - DNA, 22 bp, synthetic construct
  misc_feature 1..22: note = chemically synthesized
  source 1..22: mol_type = other DNA
catgacttaatgtaactccagg

SEQ ID NO: 36808 - DNA, 22 bp, synthetic construct
  misc_feature 1..22: note = chemically synthesized
  source 1..22: mol_type = other DNA
aatgtaactccaggggaatgca

SEQ ID NO: 36809 - DNA, 22 bp, synthetic construct
  misc_feature 1..22: note = chemically synthesized
  source 1..22: mol_type = other DNA
atgtaactccaggggaatgcaa

SEQ ID NO: 36810 - DNA, 22 bp, synthetic construct
  misc_feature 1..22: note = chemically synthesized
  source 1..22: mol_type = other DNA
caggggaatgcaaactgaagag

SEQ ID NO: 36811 - DNA, 22 bp, synthetic construct
  misc_feature 1..22: note = chemically synthesized
  source 1..22: mol_type = other DNA
aagagtactgtctctcctaggc

SEQ ID NO: 36812 - DNA, 22 bp, synthetic construct
  misc_feature 1..22: note = chemically synthesized
  source 1..22: mol_type = other DNA
tctctcctaggcagtcagagga

SEQ ID NO: 36813 - DNA, 22 bp, synthetic construct
  misc_feature 1..22: note = chemically synthesized
  source 1..22: mol_type = other DNA
tcctaggcagtcagaggaaaga

SEQ ID NO: 36814 - DNA, 22 bp, synthetic construct
  misc_feature 1..22: note = chemically synthesized
  source 1..22: mol_type = other DNA
ctaggcagtcagaggaaagaaa

SEQ ID NO: 36815 - DNA, 22 bp, synthetic construct
  misc_feature 1..22: note = chemically synthesized
  source 1..22: mol_type = other DNA
ggcagtcagaggaaagaaatat

SEQ ID NO: 36816 - DNA, 22 bp, synthetic construct
  misc_feature 1..22: note = chemically synthesized
  source 1..22: mol_type = other DNA
tttctctgctggttaggaactc

SEQ ID NO: 36817 - DNA, 22 bp, synthetic construct
  misc_feature 1..22: note = chemically synthesized
  source 1..22: mol_type = other DNA
ctctgctggttaggaactcaag

SEQ ID NO: 36818 - DNA, 22 bp, synthetic construct
  misc_feature 1..22: note = chemically synthesized
  source 1..22: mol_type = other DNA
tctgctggttaggaactcaaga

SEQ ID NO: 36819 - DNA, 22 bp, synthetic construct
  misc_feature 1..22: note = chemically synthesized
  source 1..22: mol_type = other DNA
tgctggttaggaactcaagatg

SEQ ID NO: 36820 - DNA, 22 bp, synthetic construct
  misc_feature 1..22: note = chemically synthesized
  source 1..22: mol_type = other DNA
ctggttaggaactcaagatgaa

SEQ ID NO: 36821 - DNA, 22 bp, synthetic construct
  misc_feature 1..22: note = chemically synthesized
  source 1..22: mol_type = other DNA
gttaggaactcaagatgaactc

SEQ ID NO: 36822 - DNA, 22 bp, synthetic construct
  misc_feature 1..22: note = chemically synthesized
  source 1..22: mol_type = other DNA
ggaactcaagatgaactcttga

SEQ ID NO: 36823 - DNA, 22 bp, synthetic construct
  misc_feature 1..22: note = chemically synthesized
  source 1..22: mol_type = other DNA
aagatgaactcttgaagaagga

SEQ ID NO: 36824 - DNA, 22 bp, synthetic construct
  misc_feature 1..22: note = chemically synthesized
  source 1..22: mol_type = other DNA
ttgaagaaggaaggtgtgcttg

SEQ ID NO: 36825 - DNA, 22 bp, synthetic construct
  misc_feature 1..22: note = chemically synthesized
  source 1..22: mol_type = other DNA
gaagaaggaaggtgtgcttgca

SEQ ID NO: 36826 - DNA, 22 bp, synthetic construct
  misc_feature 1..22: note = chemically synthesized
  source 1..22: mol_type = other DNA
aagaaggaaggtgtgcttgcat

SEQ ID NO: 36827 - DNA, 22 bp, synthetic construct
  misc_feature 1..22: note = chemically synthesized
  source 1..22: mol_type = other DNA
gcatcaccagttattttggaac

SEQ ID NO: 36828 - DNA, 22 bp, synthetic construct
  misc_feature 1..22: note = chemically synthesized
  source 1..22: mol_type = other DNA
catcaccagttattttggaact

SEQ ID NO: 36829 - DNA, 22 bp, synthetic construct
  misc_feature 1..22: note = chemically synthesized
  source 1..22: mol_type = other DNA
ttttggaacttccaccagactc

SEQ ID NO: 36830 - DNA, 22 bp, synthetic construct
  misc_feature 1..22: note = chemically synthesized
  source 1..22: mol_type = other DNA
tggaacttccaccagactcaaa

SEQ ID NO: 36831 - DNA, 22 bp, synthetic construct
  misc_feature 1..22: note = chemically synthesized
  source 1..22: mol_type = other DNA
ggaacttccaccagactcaaaa

SEQ ID NO: 36832 - DNA, 22 bp, synthetic construct
  misc_feature 1..22: note = chemically synthesized
  source 1..22: mol_type = other DNA
gaacttccaccagactcaaaat

SEQ ID NO: 36833 - DNA, 22 bp, synthetic construct
  misc_feature 1..22: note = chemically synthesized
  source 1..22: mol_type = other DNA
ccaccagactcaaaattcctca

SEQ ID NO: 36834 - DNA, 22 bp, synthetic construct
  misc_feature 1..22: note = chemically synthesized
  source 1..22: mol_type = other DNA
caccagactcaaaattcctcaa

SEQ ID NO: 36835 - DNA, 22 bp, synthetic construct
  misc_feature 1..22: note = chemically synthesized
  source 1..22: mol_type = other DNA
aaaattcctcaaatctgcttcc

SEQ ID NO: 36836 - DNA, 22 bp, synthetic construct
  misc_feature 1..22: note = chemically synthesized
  source 1..22: mol_type = other DNA
ctcaaatctgcttccttcacac

SEQ ID NO: 36837 - DNA, 22 bp, synthetic construct
  misc_feature 1..22: note = chemically synthesized
  source 1..22: mol_type = other DNA
aaatctgcttccttcacactat

SEQ ID NO: 36838 - DNA, 22 bp, synthetic construct
  misc_feature 1..22: note = chemically synthesized
  source 1..22: mol_type = other DNA
cttccttcacactatactccaa

SEQ ID NO: 36839 - DNA, 22 bp, synthetic construct
  misc_feature 1..22: note = chemically synthesized
  source 1..22: mol_type = other DNA
ccttcacactatactccaaaag

SEQ ID NO: 36840 - DNA, 22 bp, synthetic construct
  misc_feature 1..22: note = chemically synthesized
  source 1..22: mol_type = other DNA
cttcacactatactccaaaagg

SEQ ID NO: 36841 - DNA, 22 bp, synthetic construct
  misc_feature 1..22: note = chemically synthesized
  source 1..22: mol_type = other DNA
cacactatactccaaaaggagt

SEQ ID NO: 36842 - DNA, 22 bp, synthetic construct
  misc_feature 1..22: note = chemically synthesized
  source 1..22: mol_type = other DNA
acactatactccaaaaggagtc

SEQ ID NO: 36843 - DNA, 22 bp, synthetic construct
  misc_feature 1..22: note = chemically synthesized
  source 1..22: mol_type = other DNA
tactccaaaaggagtcaaagct

SEQ ID NO: 36844 - DNA, 22 bp, synthetic construct
  misc_feature 1..22: note = chemically synthesized
  source 1..22: mol_type = other DNA
caaaaggagtcaaagctatgtg

SEQ ID NO: 36845 - DNA, 22 bp, synthetic construct
  misc_feature 1..22: note = chemically synthesized
  source 1..22: mol_type = other DNA
tgtggcatactgtaagaacaga

SEQ ID NO: 36846 - DNA, 22 bp, synthetic construct
  misc_feature 1..22: note = chemically synthesized
  source 1..22: mol_type = other DNA
taagaacagaaccaacagccta

SEQ ID NO: 36847 - DNA, 22 bp, synthetic construct
  misc_feature 1..22: note = chemically synthesized
  source 1..22: mol_type = other DNA
caaaatacttccattctaatcc

SEQ ID NO: 36848 - DNA, 22 bp, synthetic construct
  misc_feature 1..22: note = chemically synthesized
  source 1..22: mol_type = other DNA
ccattctaatcctactattact

SEQ ID NO: 36849 - DNA, 22 bp, synthetic construct
  misc_feature 1..22: note = chemically synthesized
  source 1..22: mol_type = other DNA
cattctaatcctactattactt

SEQ ID NO: 36850 - DNA, 22 bp, synthetic construct
  misc_feature 1..22: note = chemically synthesized
  source 1..22: mol_type = other DNA
taatcctactattacttccggg

SEQ ID NO: 36851 - DNA, 22 bp, synthetic construct
  misc_feature 1..22: note = chemically synthesized
  source 1..22: mol_type = other DNA
atcctactattacttccgggga

SEQ ID NO: 36852 - DNA, 22 bp, synthetic construct
  misc_feature 1..22: note = chemically synthesized
  source 1..22: mol_type = other DNA
ctattacttccggggacactga

SEQ ID NO: 36853 - DNA, 22 bp, synthetic construct
  misc_feature 1..22: note = chemically synthesized
  source 1..22: mol_type = other DNA
ttacttccggggacactgattt

SEQ ID NO: 36854 - DNA, 22 bp, synthetic construct
  misc_feature 1..22: note = chemically synthesized
  source 1..22: mol_type = other DNA
cttccggggacactgatttata

SEQ ID NO: 36855 - DNA, 22 bp, synthetic construct
  misc_feature 1..22: note = chemically synthesized
  source 1..22: mol_type = other DNA
ccggggacactgatttataaaa

SEQ ID NO: 36856 - DNA, 22 bp, synthetic construct
  misc_feature 1..22: note = chemically synthesized
  source 1..22: mol_type = other DNA
cggggacactgatttataaaat

SEQ ID NO: 36857 - DNA, 22 bp, synthetic construct
  misc_feature 1..22: note = chemically synthesized
  source 1..22: mol_type = other DNA
atttataaaataagaattataa

SEQ ID NO: 36858 - DNA, 22 bp, synthetic construct
  misc_feature 1..22: note = chemically synthesized
  source 1..22: mol_type = other DNA
ataaaataagaattataaaata

SEQ ID NO: 36859 - DNA, 22 bp, synthetic construct
  misc_feature 1..22: note = chemically synthesized
  source 1..22: mol_type = other DNA
taaaataagaattataaaataa

SEQ ID NO: 36860 - DNA, 22 bp, synthetic construct
  misc_feature 1..22: note = chemically synthesized
  source 1..22: mol_type = other DNA
taaaataagaatttttaaaaat

SEQ ID NO: 36861 - DNA, 22 bp, synthetic construct
  misc_feature 1..22: note = chemically synthesized
  source 1..22: mol_type = other DNA
ttaaaaataggaataaatatag

SEQ ID NO: 36862 - DNA, 22 bp, synthetic construct
  misc_feature 1..22: note = chemically synthesized
  source 1..22: mol_type = other DNA
taaaaataggaataaatatagc

SEQ ID NO: 36863 - DNA, 22 bp, synthetic construct
  misc_feature 1..22: note = chemically synthesized
  source 1..22: mol_type = other DNA
aaaaataggaataaatatagcc

SEQ ID NO: 36864 - DNA, 22 bp, synthetic construct
  misc_feature 1..22: note = chemically synthesized
  source 1..22: mol_type = other DNA
aaaataggaataaatatagcca

SEQ ID NO: 36865 - DNA, 22 bp, synthetic construct
  misc_feature 1..22: note = chemically synthesized
  source 1..22: mol_type = other DNA
cgtcaatgttaacctcactatc

SEQ ID NO: 36866 - DNA, 22 bp, synthetic construct
  misc_feature 1..22: note = chemically synthesized
  source 1..22: mol_type = other DNA
gtcaatgttaacctcactatca

SEQ ID NO: 36867 - DNA, 22 bp, synthetic construct
  misc_feature 1..22: note = chemically synthesized
  source 1..22: mol_type = other DNA
acctcactatcaaaaaaaaaaa

SEQ ID NO: 36868 - DNA, 22 bp, synthetic construct
  misc_feature 1..22: note = chemically synthesized
  source 1..22: mol_type = other DNA
actatcaaaaaaaaaaaaaaat

SEQ ID NO: 36869 - DNA, 22 bp, synthetic construct
  misc_feature 1..22: note = chemically synthesized
  source 1..22: mol_type = other DNA
tcaaaaaaaaaaaaaaatcatg

SEQ ID NO: 36870 - DNA, 22 bp, synthetic construct
  misc_feature 1..22: note = chemically synthesized
  source 1..22: mol_type = other DNA
aaagatattcctgaccacttga

SEQ ID NO: 36871 - DNA, 22 bp, synthetic construct
  misc_feature 1..22: note = chemically synthesized
  source 1..22: mol_type = other DNA
ctgaccacttgaagggcttggt

SEQ ID NO: 36872 - DNA, 22 bp, synthetic construct
  misc_feature 1..22: note = chemically synthesized
  source 1..22: mol_type = other DNA
accacttgaagggcttggtttt

SEQ ID NO: 36873 - DNA, 22 bp, synthetic construct
  misc_feature 1..22: note = chemically synthesized
  source 1..22: mol_type = other DNA
gaagggcttggttttaatctga

SEQ ID NO: 36874 - DNA, 22 bp, synthetic construct
  misc_feature 1..22: note = chemically synthesized
  source 1..22: mol_type = other DNA
aagggcttggttttaatctgaa

SEQ ID NO: 36875 - DNA, 22 bp, synthetic construct
  misc_feature 1..22: note = chemically synthesized
  source 1..22: mol_type = other DNA
ggttttaatctgaatgctcttg

SEQ ID NO: 36876 - DNA, 22 bp, synthetic construct
  misc_feature 1..22: note = chemically synthesized
  source 1..22: mol_type = other DNA
gttttaatctgaatgctcttgg

SEQ ID NO: 36877 - DNA, 22 bp, synthetic construct
  misc_feature 1..22: note = chemically synthesized
  source 1..22: mol_type = other DNA
taatctgaatgctcttggaaac

SEQ ID NO: 36878 - DNA, 22 bp, synthetic construct
  misc_feature 1..22: note = chemically synthesized
  source 1..22: mol_type = other DNA
aatctgaatgctcttggaaact

SEQ ID NO: 36879 - DNA, 22 bp, synthetic construct
  misc_feature 1..22: note = chemically synthesized
  source 1..22: mol_type = other DNA
atctgaatgctcttggaaactc

SEQ ID NO: 36880 - DNA, 22 bp, synthetic construct
  misc_feature 1..22: note = chemically synthesized
  source 1..22: mol_type = other DNA
aatgctcttggaaactccaagc

SEQ ID NO: 36881 - DNA, 22 bp, synthetic construct
  misc_feature 1..22: note = chemically synthesized
  source 1..22: mol_type = other DNA
ttggaaactccaagcaaaagtg

SEQ ID NO: 36882 - DNA, 22 bp, synthetic construct
  misc_feature 1..22: note = chemically synthesized
  source 1..22: mol_type = other DNA
ggaaactccaagcaaaagtgcc

SEQ ID NO: 36883 - DNA, 22 bp, synthetic construct
  misc_feature 1..22: note = chemically synthesized
  source 1..22: mol_type = other DNA
gaaactccaagcaaaagtgccc

SEQ ID NO: 36884 - DNA, 22 bp, synthetic construct
  misc_feature 1..22: note = chemically synthesized
  source 1..22: mol_type = other DNA
caagcaaaagtgcccagaaaat

SEQ ID NO: 36885 - DNA, 22 bp, synthetic construct
  misc_feature 1..22: note = chemically synthesized
  source 1..22: mol_type = other DNA
ccaaggtttggggcactcagtt

SEQ ID NO: 36886 - DNA, 22 bp, synthetic construct
  misc_feature 1..22: note = chemically synthesized
  source 1..22: mol_type = other DNA
ggggcactcagttagacctcag

SEQ ID NO: 36887 - DNA, 22 bp, synthetic construct
  misc_feature 1..22: note = chemically synthesized
  source 1..22: mol_type = other DNA
gggcactcagttagacctcagc

SEQ ID NO: 36888 - DNA, 22 bp, synthetic construct
  misc_feature 1..22: note = chemically synthesized
  source 1..22: mol_type = other DNA
agttagacctcagcagattcca

SEQ ID NO: 36889 - DNA, 22 bp, synthetic construct
  misc_feature 1..22: note = chemically synthesized
  source 1..22: mol_type = other DNA
gacctcagcagattccaagatt

SEQ ID NO: 36890 - DNA, 22 bp, synthetic construct
  misc_feature 1..22: note = chemically synthesized
  source 1..22: mol_type = other DNA
agcagattccaagattgcactc

SEQ ID NO: 36891 - DNA, 22 bp, synthetic construct
  misc_feature 1..22: note = chemically synthesized
  source 1..22: mol_type = other DNA
caagattgcactccttgcctaa

SEQ ID NO: 36892 - DNA, 22 bp, synthetic construct
  misc_feature 1..22: note = chemically synthesized
  source 1..22: mol_type = other DNA
cactccttgcctaagagttttc

SEQ ID NO: 36893 - DNA, 22 bp, synthetic construct
  misc_feature 1..22: note = chemically synthesized
  source 1..22: mol_type = other DNA
cttgcctaagagttttctttaa

SEQ ID NO: 36894 - DNA, 22 bp, synthetic construct
  misc_feature 1..22: note = chemically synthesized
  source 1..22: mol_type = other DNA
gcctaagagttttctttaaatg

SEQ ID NO: 36895 - DNA, 22 bp, synthetic construct
  misc_feature 1..22: note = chemically synthesized
  source 1..22: mol_type = other DNA
cctaagagttttctttaaatga

SEQ ID NO: 36896 - DNA, 22 bp, synthetic construct
  misc_feature 1..22: note = chemically synthesized
  source 1..22: mol_type = other DNA
agagttttctttaaatgatcac

SEQ ID NO: 36897 - DNA, 22 bp, synthetic construct
  misc_feature 1..22: note = chemically synthesized
  source 1..22: mol_type = other DNA
tctttaaatgatcactggtttt

SEQ ID NO: 36898 - DNA, 22 bp, synthetic construct
  misc_feature 1..22: note = chemically synthesized
  source 1..22: mol_type = other DNA
ctttaaatgatcactggttttt

SEQ ID NO: 36899 - DNA, 22 bp, synthetic construct
  misc_feature 1..22: note = chemically synthesized
  source 1..22: mol_type = other DNA
tttaaatgatcactggtttttg

SEQ ID NO: 36900 - DNA, 22 bp, synthetic construct
  misc_feature 1..22: note = chemically synthesized
  source 1..22: mol_type = other DNA
taaatgatcactggtttttgaa

SEQ ID NO: 36901 - DNA, 22 bp, synthetic construct
  misc_feature 1..22: note = chemically synthesized
  source 1..22: mol_type = other DNA
aaatgatcactggtttttgaaa

SEQ ID NO: 36902 - DNA, 22 bp, synthetic construct
  misc_feature 1..22: note = chemically synthesized
  source 1..22: mol_type = other DNA
aatgatcactggtttttgaaac

SEQ ID NO: 36903 - DNA, 22 bp, synthetic construct
  misc_feature 1..22: note = chemically synthesized
  source 1..22: mol_type = other DNA
gtttttgaaacaattatttctc

SEQ ID NO: 36904 - DNA, 22 bp, synthetic construct
  misc_feature 1..22: note = chemically synthesized
  source 1..22: mol_type = other DNA
ttgaaacaattatttctcaaac

SEQ ID NO: 36905 - DNA, 22 bp, synthetic construct
  misc_feature 1..22: note = chemically synthesized
  source 1..22: mol_type = other DNA
tgaaacaattatttctcaaaca

SEQ ID NO: 36906 - DNA, 22 bp, synthetic construct
  misc_feature 1..22: note = chemically synthesized
  source 1..22: mol_type = other DNA
gaaacaattatttctcaaacag

SEQ ID NO: 36907 - DNA, 22 bp, synthetic construct
  misc_feature 1..22: note = chemically synthesized
  source 1..22: mol_type = other DNA
aaacaattatttctcaaacagg

SEQ ID NO: 36908 - DNA, 22 bp, synthetic construct
  misc_feature 1..22: note = chemically synthesized
  source 1..22: mol_type = other DNA
tttctcaaacaggctgatattc

SEQ ID NO: 36909 - DNA, 22 bp, synthetic construct
  misc_feature 1..22: note = chemically synthesized
  source 1..22: mol_type = other DNA
ctcaaacaggctgatattcaac

SEQ ID NO: 36910 - DNA, 22 bp, synthetic construct
  misc_feature 1..22: note = chemically synthesized
  source 1..22: mol_type = other DNA
tcaaacaggctgatattcaaca

SEQ ID NO: 36911 - DNA, 22 bp, synthetic construct
  misc_feature 1..22: note = chemically synthesized
  source 1..22: mol_type = other DNA
aaacaggctgatattcaacatg

SEQ ID NO: 36912 - DNA, 22 bp, synthetic construct
  misc_feature 1..22: note = chemically synthesized
  source 1..22: mol_type = other DNA
atattcaacatgctggatgctg

SEQ ID NO: 36913 - DNA, 22 bp, synthetic construct
  misc_feature 1..22: note = chemically synthesized
  source 1..22: mol_type = other DNA
aacatgctggatgctgggtgct

SEQ ID NO: 36914 - DNA, 22 bp, synthetic construct
  misc_feature 1..22: note = chemically synthesized
  source 1..22: mol_type = other DNA
gatgctgggtgctgcaggggct

SEQ ID NO: 36915 - DNA, 22 bp, synthetic construct
  misc_feature 1..22: note = chemically synthesized
  source 1..22: mol_type = other DNA
ggtgctgcaggggctttgagtg

SEQ ID NO: 36916 - DNA, 22 bp, synthetic construct
  misc_feature 1..22: note = chemically synthesized
  source 1..22: mol_type = other DNA
caggggctttgagtgtctttct

SEQ ID NO: 36917 - DNA, 22 bp, synthetic construct
  misc_feature 1..22: note = chemically synthesized
  source 1..22: mol_type = other DNA
tgagtgtctttctctcccatca

SEQ ID NO: 36918 - DNA, 22 bp, synthetic construct
  misc_feature 1..22: note = chemically synthesized
  source 1..22: mol_type = other DNA
gagtgtctttctctcccatcat

SEQ ID NO: 36919 - DNA, 22 bp, synthetic construct
  misc_feature 1..22: note = chemically synthesized
  source 1..22: mol_type = other DNA
agtgtctttctctcccatcatg

SEQ ID NO: 36920 - DNA, 22 bp, synthetic construct
  misc_feature 1..22: note = chemically synthesized
  source 1..22: mol_type = other DNA
tctctcccatcatggaccccaa

SEQ ID NO: 36921 - DNA, 22 bp, synthetic construct
  misc_feature 1..22: note = chemically synthesized
  source 1..22: mol_type = other DNA
ctctcccatcatggaccccaat

SEQ ID NO: 36922 - DNA, 22 bp, synthetic construct
  misc_feature 1..22: note = chemically synthesized
  source 1..22: mol_type = other DNA
tctcccatcatggaccccaatt

SEQ ID NO: 36923 - DNA, 22 bp, synthetic construct
  misc_feature 1..22: note = chemically synthesized
  source 1..22: mol_type = other DNA
tcccatcatggaccccaattct

SEQ ID NO: 36924 - DNA, 22 bp, synthetic construct
  misc_feature 1..22: note = chemically synthesized
  source 1..22: mol_type = other DNA
ccatcatggaccccaattctaa

SEQ ID NO: 36925 - DNA, 22 bp, synthetic construct
  misc_feature 1..22: note = chemically synthesized
  source 1..22: mol_type = other DNA
taacagaccttttttatacagt

SEQ ID NO: 36926 - DNA, 22 bp, synthetic construct
  misc_feature 1..22: note = chemically synthesized
  source 1..22: mol_type = other DNA
acagaccttttttatacagtgt

SEQ ID NO: 36927 - DNA, 22 bp, synthetic construct
  misc_feature 1..22: note = chemically synthesized
  source 1..22: mol_type = other DNA
ttttatacagtgtaataatctg

SEQ ID NO: 36928 - DNA, 22 bp, synthetic construct
  misc_feature 1..22: note = chemically synthesized
  source 1..22: mol_type = other DNA
tttatacagtgtaataatctgt

SEQ ID NO: 36929 - DNA, 22 bp, synthetic construct
  misc_feature 1..22: note = chemically synthesized
  source 1..22: mol_type = other DNA
ttatacagtgtaataatctgtc

SEQ ID NO: 36930 - DNA, 22 bp, synthetic construct
  misc_feature 1..22: note = chemically synthesized
  source 1..22: mol_type = other DNA
tatacagtgtaataatctgtcc

SEQ ID NO: 36931 - DNA, 22 bp, synthetic construct
  misc_feature 1..22: note = chemically synthesized
  source 1..22: mol_type = other DNA
atacagtgtaataatctgtccg

SEQ ID NO: 36932 - DNA, 22 bp, synthetic construct
  misc_feature 1..22: note = chemically synthesized
  source 1..22: mol_type = other DNA
tacagtgtaataatctgtccgg

SEQ ID NO: 36933 - DNA, 22 bp, synthetic construct
  misc_feature 1..22: note = chemically synthesized
  source 1..22: mol_type = other DNA
tccgggcgcggtggcttacacc

SEQ ID NO: 36934 - DNA, 22 bp, synthetic construct
  misc_feature 1..22: note = chemically synthesized
  source 1..22: mol_type = other DNA
acacctgtaatcccagcacttt

SEQ ID NO: 36935 - DNA, 22 bp, synthetic construct
  misc_feature 1..22: note = chemically synthesized
  source 1..22: mol_type = other DNA
cacctgtaatcccagcactttg

SEQ ID NO: 36936 - DNA, 22 bp, synthetic construct
  misc_feature 1..22: note = chemically synthesized
  source 1..22: mol_type = other DNA
taatcccagcactttgggaggc

SEQ ID NO: 36937 - DNA, 22 bp, synthetic construct
  misc_feature 1..22: note = chemically synthesized
  source 1..22: mol_type = other DNA
tgggaggccgaggcaggtggct

SEQ ID NO: 36938 - DNA, 22 bp, synthetic construct
  misc_feature 1..22: note = chemically synthesized
  source 1..22: mol_type = other DNA
gggaggccgaggcaggtggctc

SEQ ID NO: 36939 - DNA, 22 bp, synthetic construct
  misc_feature 1..22: note = chemically synthesized
  source 1..22: mol_type = other DNA
ggaggccgaggcaggtggctca

SEQ ID NO: 36940 - DNA, 22 bp, synthetic construct
  misc_feature 1..22: note = chemically synthesized
  source 1..22: mol_type = other DNA
atgaggtcaggagttcgagacc

SEQ ID NO: 36941 - DNA, 22 bp, synthetic construct
  misc_feature 1..22: note = chemically synthesized
  source 1..22: mol_type = other DNA
gagaccagcctgaccaacatgg

SEQ ID NO: 36942 - DNA, 22 bp, synthetic construct
  misc_feature 1..22: note = chemically synthesized
  source 1..22: mol_type = other DNA
accaacatggtgaaaccccgtc

SEQ ID NO: 36943 - DNA, 22 bp, synthetic construct
  misc_feature 1..22: note = chemically synthesized
  source 1..22: mol_type = other DNA
tactaaaaatacaaaaattagc

SEQ ID NO: 36944 - DNA, 22 bp, synthetic construct
  misc_feature 1..22: note = chemically synthesized
  source 1..22: mol_type = other DNA
ctaaaaatacaaaaattagcca

SEQ ID NO: 36945 - DNA, 22 bp, synthetic construct
  misc_feature 1..22: note = chemically synthesized
  source 1..22: mol_type = other DNA
aaaatacaaaaattagccaggt

SEQ ID NO: 36946 - DNA, 22 bp, synthetic construct
  misc_feature 1..22: note = chemically synthesized
  source 1..22: mol_type = other DNA
gccaggtggtacgcacctgtaa

SEQ ID NO: 36947 - DNA, 22 bp, synthetic construct
  misc_feature 1..22: note = chemically synthesized
  source 1..22: mol_type = other DNA
taatcccagccactcaggaggc

SEQ ID NO: 36948 - DNA, 22 bp, synthetic construct
  misc_feature 1..22: note = chemically synthesized
  source 1..22: mol_type = other DNA
aggaggctgaggcaggagaacc

SEQ ID NO: 36949 - DNA, 22 bp, synthetic construct
  misc_feature 1..22: note = chemically synthesized
  source 1..22: mol_type = other DNA
aggcaggagaaccacttgaacc

SEQ ID NO: 36950 - DNA, 22 bp, synthetic construct
  misc_feature 1..22: note = chemically synthesized
  source 1..22: mol_type = other DNA
gaacccgggaggtagaggttgc

SEQ ID NO: 36951 - DNA, 22 bp, synthetic construct
  misc_feature 1..22: note = chemically synthesized
  source 1..22: mol_type = other DNA
aacccgggaggtagaggttgca

SEQ ID NO: 36952 - DNA, 22 bp, synthetic construct
  misc_feature 1..22: note = chemically synthesized
  source 1..22: mol_type = other DNA
cagtgagccaagatcgtgccat

SEQ ID NO: 36953 - DNA, 22 bp, synthetic construct
  misc_feature 1..22: note = chemically synthesized
  source 1..22: mol_type = other DNA
cactccagcctgggcaatagag

SEQ ID NO: 36954 - DNA, 22 bp, synthetic construct
  misc_feature 1..22: note = chemically synthesized
  source 1..22: mol_type = other DNA
cagcctgggcaatagagtgaga

SEQ ID NO: 36955 - DNA, 22 bp, synthetic construct
  misc_feature 1..22: note = chemically synthesized
  source 1..22: mol_type = other DNA
ggcaatagagtgagactccatc

SEQ ID NO: 36956 - DNA, 22 bp, synthetic construct
  misc_feature 1..22: note = chemically synthesized
  source 1..22: mol_type = other DNA
catctcaacaataataataata

SEQ ID NO: 36957 - DNA, 22 bp, synthetic construct
  misc_feature 1..22: note = chemically synthesized
  source 1..22: mol_type = other DNA
aacaataataataataataata

SEQ ID NO: 36958 - DNA, 22 bp, synthetic construct
  misc_feature 1..22: note = chemically synthesized
  source 1..22: mol_type = other DNA
aacagcccacaaaaggcttggg

SEQ ID NO: 36959 - DNA, 22 bp, synthetic construct
  misc_feature 1..22: note = chemically synthesized
  source 1..22: mol_type = other DNA
gggaaagtaaaaacaatgccct

SEQ ID NO: 36960 - DNA, 22 bp, synthetic construct
  misc_feature 1..22: note = chemically synthesized
  source 1..22: mol_type = other DNA
ggaaagtaaaaacaatgccctg

SEQ ID NO: 36961 - DNA, 22 bp, synthetic construct
  misc_feature 1..22: note = chemically synthesized
  source 1..22: mol_type = other DNA
tatttggtctcctccatccaag

SEQ ID NO: 36962 - DNA, 22 bp, synthetic construct
  misc_feature 1..22: note = chemically synthesized
  source 1..22: mol_type = other DNA
ggtctcctccatccaagtggct

SEQ ID NO: 36963 - DNA, 22 bp, synthetic construct
  misc_feature 1..22: note = chemically synthesized
  source 1..22: mol_type = other DNA
gtctcctccatccaagtggctg

SEQ ID NO: 36964 - DNA, 22 bp, synthetic construct
  misc_feature 1..22: note = chemically synthesized
  source 1..22: mol_type = other DNA
ctccatccaagtggctgggact

SEQ ID NO: 36965 - DNA, 22 bp, synthetic construct
  misc_feature 1..22: note = chemically synthesized
  source 1..22: mol_type = other DNA
catccaagtggctgggactctg

SEQ ID NO: 36966 - DNA, 22 bp, synthetic construct
  misc_feature 1..22: note = chemically synthesized
  source 1..22: mol_type = other DNA
ggactctgtcctctagtctgtg

SEQ ID NO: 36967 - DNA, 22 bp, synthetic construct
  misc_feature 1..22: note = chemically synthesized
  source 1..22: mol_type = other DNA
tgtcctctagtctgtgctcatg

SEQ ID NO: 36968 - DNA, 22 bp, synthetic construct
  misc_feature 1..22: note = chemically synthesized
  source 1..22: mol_type = other DNA
tcctctagtctgtgctcatgtc

SEQ ID NO: 36969 - DNA, 22 bp, synthetic construct
  misc_feature 1..22: note = chemically synthesized
  source 1..22: mol_type = other DNA
tagtctgtgctcatgtcaggca

SEQ ID NO: 36970 - DNA, 22 bp, synthetic construct
  misc_feature 1..22: note = chemically synthesized
  source 1..22: mol_type = other DNA
gtctgtgctcatgtcaggcaac

SEQ ID NO: 36971 - DNA, 22 bp, synthetic construct
  misc_feature 1..22: note = chemically synthesized
  source 1..22: mol_type = other DNA
tgctcatgtcaggcaaccaatt

SEQ ID NO: 36972 - DNA, 22 bp, synthetic construct
  misc_feature 1..22: note = chemically synthesized
  source 1..22: mol_type = other DNA
atgtcaggcaaccaatttatct

SEQ ID NO: 36973 - DNA, 22 bp, synthetic construct
  misc_feature 1..22: note = chemically synthesized
  source 1..22: mol_type = other DNA
atctctctgcaatctgaagttc

SEQ ID NO: 36974 - DNA, 22 bp, synthetic construct
  misc_feature 1..22: note = chemically synthesized
  source 1..22: mol_type = other DNA
tctctctgcaatctgaagttcc

SEQ ID NO: 36975 - DNA, 22 bp, synthetic construct
  misc_feature 1..22: note = chemically synthesized
  source 1..22: mol_type = other DNA
tctgcaatctgaagttccactc

SEQ ID NO: 36976 - DNA, 22 bp, synthetic construct
  misc_feature 1..22: note = chemically synthesized
  source 1..22: mol_type = other DNA
tgcaatctgaagttccactctg

SEQ ID NO: 36977 - DNA, 22 bp, synthetic construct
  misc_feature 1..22: note = chemically synthesized
  source 1..22: mol_type = other DNA
caatctgaagttccactctgca

SEQ ID NO: 36978 - DNA, 22 bp, synthetic construct
  misc_feature 1..22: note = chemically synthesized
  source 1..22: mol_type = other DNA
aagttccactctgcagagagga

SEQ ID NO: 36979 - DNA, 22 bp, synthetic construct
  misc_feature 1..22: note = chemically synthesized
  source 1..22: mol_type = other DNA
cactctgcagagaggacacagt

SEQ ID NO: 36980 - DNA, 22 bp, synthetic construct
  misc_feature 1..22: note = chemically synthesized
  source 1..22: mol_type = other DNA
tgcagagaggacacagtgagaa

SEQ ID NO: 36981 - DNA, 22 bp, synthetic construct
  misc_feature 1..22: note = chemically synthesized
  source 1..22: mol_type = other DNA
cagagaggacacagtgagaacc

SEQ ID NO: 36982 - DNA, 22 bp, synthetic construct
  misc_feature 1..22: note = chemically synthesized
  source 1..22: mol_type = other DNA
gcagatttgtgagcctcttccc

SEQ ID NO: 36983 - DNA, 22 bp, synthetic construct
  misc_feature 1..22: note = chemically synthesized
  source 1..22: mol_type = other DNA
gtgagcctcttccctgcttctg

SEQ ID NO: 36984 - DNA, 22 bp, synthetic construct
  misc_feature 1..22: note = chemically synthesized
  source 1..22: mol_type = other DNA
tgagcctcttccctgcttctgc

SEQ ID NO: 36985 - DNA, 22 bp, synthetic construct
  misc_feature 1..22: note = chemically synthesized
  source 1..22: mol_type = other DNA
ttccctgcttctgccattcatg

SEQ ID NO: 36986 - DNA, 22 bp, synthetic construct
  misc_feature 1..22: note = chemically synthesized
  source 1..22: mol_type = other DNA
ccctgcttctgccattcatgga

SEQ ID NO: 36987 - DNA, 22 bp, synthetic construct
  misc_feature 1..22: note = chemically synthesized
  source 1..22: mol_type = other DNA
cctgcttctgccattcatggat

SEQ ID NO: 36988 - DNA, 22 bp, synthetic construct
  misc_feature 1..22: note = chemically synthesized
  source 1..22: mol_type = other DNA
cttctgccattcatggataacc

SEQ ID NO: 36989 - DNA, 22 bp, synthetic construct
  misc_feature 1..22: note = chemically synthesized
  source 1..22: mol_type = other DNA
ctgccattcatggataaccatg

SEQ ID NO: 36990 - DNA, 22 bp, synthetic construct
  misc_feature 1..22: note = chemically synthesized
  source 1..22: mol_type = other DNA
tgccattcatggataaccatga

SEQ ID NO: 36991 - DNA, 22 bp, synthetic construct
  misc_feature 1..22: note = chemically synthesized
  source 1..22: mol_type = other DNA
ccattcatggataaccatgatc

SEQ ID NO: 36992 - DNA, 22 bp, synthetic construct
  misc_feature 1..22: note = chemically synthesized
  source 1..22: mol_type = other DNA
atggataaccatgatcttgact

SEQ ID NO: 36993 - DNA, 22 bp, synthetic construct
  misc_feature 1..22: note = chemically synthesized
  source 1..22: mol_type = other DNA
gactcatcacacagagagatgt

SEQ ID NO: 36994 - DNA, 22 bp, synthetic construct
  misc_feature 1..22: note = chemically synthesized
  source 1..22: mol_type = other DNA
actcatcacacagagagatgtc

SEQ ID NO: 36995 - DNA, 22 bp, synthetic construct
  misc_feature 1..22: note = chemically synthesized
  source 1..22: mol_type = other DNA
atcacacagagagatgtcttcc

SEQ ID NO: 36996 - DNA, 22 bp, synthetic construct
  misc_feature 1..22: note = chemically synthesized
  source 1..22: mol_type = other DNA
cccaaattgtcaatcttgtatg

SEQ ID NO: 36997 - DNA, 22 bp, synthetic construct
  misc_feature 1..22: note = chemically synthesized
  source 1..22: mol_type = other DNA
ccaaattgtcaatcttgtatgg

SEQ ID NO: 36998 - DNA, 22 bp, synthetic construct
  misc_feature 1..22: note = chemically synthesized
  source 1..22: mol_type = other DNA
tcaatcttgtatggggtttcaa

SEQ ID NO: 36999 - DNA, 22 bp, synthetic construct
  misc_feature 1..22: note = chemically synthesized
  source 1..22: mol_type = other DNA
gtatggggtttcaaaagtctag

SEQ ID NO: 37000 - DNA, 22 bp, synthetic construct
  misc_feature 1..22: note = chemically synthesized
  source 1..22: mol_type = other DNA
tatggggtttcaaaagtctagc

SEQ ID NO: 37001 - DNA, 22 bp, synthetic construct
  misc_feature 1..22: note = chemically synthesized
  source 1..22: mol_type = other DNA
caaaagtctagccctaggccag

SEQ ID NO: 37002 - DNA, 22 bp, synthetic construct
  misc_feature 1..22: note = chemically synthesized
  source 1..22: mol_type = other DNA
aaaagtctagccctaggccagg

SEQ ID NO: 37003 - DNA, 22 bp, synthetic construct
  misc_feature 1..22: note = chemically synthesized
  source 1..22: mol_type = other DNA
gccctaggccaggtgaggtagt

SEQ ID NO: 37004 - DNA, 22 bp, synthetic construct
  misc_feature 1..22: note = chemically synthesized
  source 1..22: mol_type = other DNA
ggccaggtgaggtagtgcaatg

SEQ ID NO: 37005 - DNA, 22 bp, synthetic construct
  misc_feature 1..22: note = chemically synthesized
  source 1..22: mol_type = other DNA
taatcccagcactatgggaggc

SEQ ID NO: 37006 - DNA, 22 bp, synthetic construct
  misc_feature 1..22: note = chemically synthesized
  source 1..22: mol_type = other DNA
atcccagcactatgggaggcct

SEQ ID NO: 37007 - DNA, 22 bp, synthetic construct
  misc_feature 1..22: note = chemically synthesized
  source 1..22: mol_type = other DNA
tgggaggcctaggagggtggat

SEQ ID NO: 37008 - DNA, 22 bp, synthetic construct
  misc_feature 1..22: note = chemically synthesized
  source 1..22: mol_type = other DNA
ggagggtggatcacgagatcag

SEQ ID NO: 37009 - DNA, 22 bp, synthetic construct
  misc_feature 1..22: note = chemically synthesized
  source 1..22: mol_type = other DNA
gctaacacggtgaaacgccgta

SEQ ID NO: 37010 - DNA, 22 bp, synthetic construct
  misc_feature 1..22: note = chemically synthesized
  source 1..22: mol_type = other DNA
acacggtgaaacgccgtatcta

SEQ ID NO: 37011 - DNA, 22 bp, synthetic construct
  misc_feature 1..22: note = chemically synthesized
  source 1..22: mol_type = other DNA
ctaaaaatacaaaaaatattag

SEQ ID NO: 37012 - DNA, 22 bp, synthetic construct
  misc_feature 1..22: note = chemically synthesized
  source 1..22: mol_type = other DNA
aaaatacaaaaaatattagctg

SEQ ID NO: 37013 - DNA, 22 bp, synthetic construct
  misc_feature 1..22: note = chemically synthesized
  source 1..22: mol_type = other DNA
gctgggcgtggtggcgcgtgcc

SEQ ID NO: 37014 - DNA, 22 bp, synthetic construct
  misc_feature 1..22: note = chemically synthesized
  source 1..22: mol_type = other DNA
ggcgtggtggcgcgtgcctgta

SEQ ID NO: 37015 - DNA, 22 bp, synthetic construct
  misc_feature 1..22: note = chemically synthesized
  source 1..22: mol_type = other DNA
tagtcccagctacttgggaagc

SEQ ID NO: 37016 - DNA, 22 bp, synthetic construct
  misc_feature 1..22: note = chemically synthesized
  source 1..22: mol_type = other DNA
cttgggaagctgaggcaggagg

SEQ ID NO: 37017 - DNA, 22 bp, synthetic construct
  misc_feature 1..22: note = chemically synthesized
  source 1..22: mol_type = other DNA
gggaagctgaggcaggaggatc

SEQ ID NO: 37018 - DNA, 22 bp, synthetic construct
  misc_feature 1..22: note = chemically synthesized
  source 1..22: mol_type = other DNA
ggaagctgaggcaggaggatcc

SEQ ID NO: 37019 - DNA, 22 bp, synthetic construct
  misc_feature 1..22: note = chemically synthesized
  source 1..22: mol_type = other DNA
aggcaggaggatcccttgaacc

SEQ ID NO: 37020 - DNA, 22 bp, synthetic construct
  misc_feature 1..22: note = chemically synthesized
  source 1..22: mol_type = other DNA
gaacccagtaggcggaggttgt

SEQ ID NO: 37021 - DNA, 22 bp, synthetic construct
  misc_feature 1..22: note = chemically synthesized
  source 1..22: mol_type = other DNA
aacccagtaggcggaggttgtg

SEQ ID NO: 37022 - DNA, 22 bp, synthetic construct
  misc_feature 1..22: note = chemically synthesized
  source 1..22: mol_type = other DNA
tggtgagctgagtccttgccac

SEQ ID NO: 37023 - DNA, 22 bp, synthetic construct
  misc_feature 1..22: note = chemically synthesized
  source 1..22: mol_type = other DNA
agtccttgccactgcactccag

SEQ ID NO: 37024 - DNA, 22 bp, synthetic construct
  misc_feature 1..22: note = chemically synthesized
  source 1..22: mol_type = other DNA
gccactgcactccagcctgggt

SEQ ID NO: 37025 - DNA, 22 bp, synthetic construct
  misc_feature 1..22: note = chemically synthesized
  source 1..22: mol_type = other DNA
ccactgcactccagcctgggtg

SEQ ID NO: 37026 - DNA, 22 bp, synthetic construct
  misc_feature 1..22: note = chemically synthesized
  source 1..22: mol_type = other DNA
cactccagcctgggtgacagag

SEQ ID NO: 37027 - DNA, 22 bp, synthetic construct
  misc_feature 1..22: note = chemically synthesized
  source 1..22: mol_type = other DNA
cagcctgggtgacagagcgaga

SEQ ID NO: 37028 - DNA, 22 bp, synthetic construct
  misc_feature 1..22: note = chemically synthesized
  source 1..22: mol_type = other DNA
ggtgacagagcgagattctgtc

SEQ ID NO: 37029 - DNA, 22 bp, synthetic construct
  misc_feature 1..22: note = chemically synthesized
  source 1..22: mol_type = other DNA
tgtcttaaaaaaaaaaaaaaaa

SEQ ID NO: 37030 - DNA, 22 bp, synthetic construct
  misc_feature 1..22: note = chemically synthesized
  source 1..22: mol_type = other DNA
tcttaaaaaaaaaaaaaaaaaa

SEQ ID NO: 37031 - DNA, 22 bp, synthetic construct
  misc_feature 1..22: note = chemically synthesized
  source 1..22: mol_type = other DNA
aaaaaaaaaaaaaaaaaaaaaa

SEQ ID NO: 37032 - DNA, 22 bp, synthetic construct
  misc_feature 1..22: note = chemically synthesized
  source 1..22: mol_type = other DNA
aaaaaaaaaaaaaaaaaaaaaa

SEQ ID NO: 37033 - DNA, 22 bp, synthetic construct
  misc_feature 1..22: note = chemically synthesized
  source 1..22: mol_type = other DNA
gccctaacacaataccgtttcc

SEQ ID NO: 37034 - DNA, 22 bp, synthetic construct
  misc_feature 1..22: note = chemically synthesized
  source 1..22: mol_type = other DNA
acacaataccgtttcctaataa

SEQ ID NO: 37035 - DNA, 22 bp, synthetic construct
  misc_feature 1..22: note = chemically synthesized
  source 1..22: mol_type = other DNA
cctaataaattctgtaaataaa

SEQ ID NO: 37036 - DNA, 22 bp, synthetic construct
  misc_feature 1..22: note = chemically synthesized
  source 1..22: mol_type = other DNA
ctaataaattctgtaaataaat

SEQ ID NO: 37037 - DNA, 22 bp, synthetic construct
  misc_feature 1..22: note = chemically synthesized
  source 1..22: mol_type = other DNA
ataaattctgtaaataaatttt

SEQ ID NO: 37038 - DNA, 22 bp, synthetic construct
  misc_feature 1..22: note = chemically synthesized
  source 1..22: mol_type = other DNA
tgtaaataaatttttgttgtct

SEQ ID NO: 37039 - DNA, 22 bp, synthetic construct
  misc_feature 1..22: note = chemically synthesized
  source 1..22: mol_type = other DNA
taaataaatttttgttgtcttt

SEQ ID NO: 37040 - DNA, 22 bp, synthetic construct
  misc_feature 1..22: note = chemically synthesized
  source 1..22: mol_type = other DNA
ttgttgtctttcaactttaaaa

SEQ ID NO: 37041 - DNA, 22 bp, synthetic construct
  misc_feature 1..22: note = chemically synthesized
  source 1..22: mol_type = other DNA
tgttgtctttcaactttaaaag

SEQ ID NO: 37042 - DNA, 22 bp, synthetic construct
  misc_feature 1..22: note = chemically synthesized
  source 1..22: mol_type = other DNA
gttgtctttcaactttaaaagc

SEQ ID NO: 37043 - DNA, 22 bp, synthetic construct
  misc_feature 1..22: note = chemically synthesized
  source 1..22: mol_type = other DNA
ttgtctttcaactttaaaagcc

SEQ ID NO: 37044 - DNA, 22 bp, synthetic construct
  misc_feature 1..22: note = chemically synthesized
  source 1..22: mol_type = other DNA
tctttcaactttaaaagccatg

SEQ ID NO: 37045 - DNA, 22 bp, synthetic construct
  misc_feature 1..22: note = chemically synthesized
  source 1..22: mol_type = other DNA
tcaactttaaaagccatgggaa

SEQ ID NO: 37046 - DNA, 22 bp, synthetic construct
  misc_feature 1..22: note = chemically synthesized
  source 1..22: mol_type = other DNA
caactttaaaagccatgggaaa

SEQ ID NO: 37047 - DNA, 22 bp, synthetic construct
  misc_feature 1..22: note = chemically synthesized
  source 1..22: mol_type = other DNA
aactttaaaagccatgggaaaa

SEQ ID NO: 37048 - DNA, 22 bp, synthetic construct
  misc_feature 1..22: note = chemically synthesized
  source 1..22: mol_type = other DNA
taaaagccatgggaaaagacag

SEQ ID NO: 37049 - DNA, 22 bp, synthetic construct
  misc_feature 1..22: note = chemically synthesized
  source 1..22: mol_type = other DNA
aaaagccatgggaaaagacagt

SEQ ID NO: 37050 - DNA, 22 bp, synthetic construct
  misc_feature 1..22: note = chemically synthesized
  source 1..22: mol_type = other DNA
aaagccatgggaaaagacagtc

SEQ ID NO: 37051 - DNA, 22 bp, synthetic construct
  misc_feature 1..22: note = chemically synthesized
  source 1..22: mol_type = other DNA
tttgttctgtttgttttgaggg

SEQ ID NO: 37052 - DNA, 22 bp, synthetic construct
  misc_feature 1..22: note = chemically synthesized
  source 1..22: mol_type = other DNA
ttgttctgtttgttttgagggg

SEQ ID NO: 37053 - DNA, 22 bp, synthetic construct
  misc_feature 1..22: note = chemically synthesized
  source 1..22: mol_type = other DNA
tgttctgtttgttttgaggggg

SEQ ID NO: 37054 - DNA, 22 bp, synthetic construct
  misc_feature 1..22: note = chemically synthesized
  source 1..22: mol_type = other DNA
gttctgtttgttttgagggggt

SEQ ID NO: 37055 - DNA, 22 bp, synthetic construct
  misc_feature 1..22: note = chemically synthesized
  source 1..22: mol_type = other DNA
ttctgtttgttttgagggggtt

SEQ ID NO: 37056 - DNA, 22 bp, synthetic construct
  misc_feature 1..22: note = chemically synthesized
  source 1..22: mol_type = other DNA
tgtttgttttgagggggttctt

SEQ ID NO: 37057 - DNA, 22 bp, synthetic construct
  misc_feature 1..22: note = chemically synthesized
  source 1..22: mol_type = other DNA
tttgttttgagggggttcttct

SEQ ID NO: 37058 - DNA, 22 bp, synthetic construct
  misc_feature 1..22: note = chemically synthesized
  source 1..22: mol_type = other DNA
gttttgagggggttcttctcca

SEQ ID NO: 37059 - DNA, 22 bp, synthetic construct
  misc_feature 1..22: note = chemically synthesized
  source 1..22: mol_type = other DNA
ttttgagggggttcttctccac

SEQ ID NO: 37060 - DNA, 22 bp, synthetic construct
  misc_feature 1..22: note = chemically synthesized
  source 1..22: mol_type = other DNA
tgagggggttcttctccacagt

SEQ ID NO: 37061 - DNA, 22 bp, synthetic construct
  misc_feature 1..22: note = chemically synthesized
  source 1..22: mol_type = other DNA
gagggggttcttctccacagtg

SEQ ID NO: 37062 - DNA, 22 bp, synthetic construct
  misc_feature 1..22: note = chemically synthesized
  source 1..22: mol_type = other DNA
agggggttcttctccacagtga

SEQ ID NO: 37063 - DNA, 22 bp, synthetic construct
  misc_feature 1..22: note = chemically synthesized
  source 1..22: mol_type = other DNA
ttctccacagtgaagaggataa

SEQ ID NO: 37064 - DNA, 22 bp, synthetic construct
  misc_feature 1..22: note = chemically synthesized
  source 1..22: mol_type = other DNA
ctccacagtgaagaggataaaa

SEQ ID NO: 37065 - DNA, 22 bp, synthetic construct
  misc_feature 1..22: note = chemically synthesized
  source 1..22: mol_type = other DNA
tccacagtgaagaggataaaac

SEQ ID NO: 37066 - DNA, 22 bp, synthetic construct
  misc_feature 1..22: note = chemically synthesized
  source 1..22: mol_type = other DNA
cacagtgaagaggataaaacaa

SEQ ID NO: 37067 - DNA, 22 bp, synthetic construct
  misc_feature 1..22: note = chemically synthesized
  source 1..22: mol_type = other DNA
tatccacttctgttatcctctt

SEQ ID NO: 37068 - DNA, 22 bp, synthetic construct
  misc_feature 1..22: note = chemically synthesized
  source 1..22: mol_type = other DNA
atccacttctgttatcctcttg

SEQ ID NO: 37069 - DNA, 22 bp, synthetic construct
  misc_feature 1..22: note = chemically synthesized
  source 1..22: mol_type = other DNA
tccacttctgttatcctcttgc

SEQ ID NO: 37070 - DNA, 22 bp, synthetic construct
  misc_feature 1..22: note = chemically synthesized
  source 1..22: mol_type = other DNA
ctgttatcctcttgccccttaa

SEQ ID NO: 37071 - DNA, 22 bp, synthetic construct
  misc_feature 1..22: note = chemically synthesized
  source 1..22: mol_type = other DNA
tgttatcctcttgccccttaaa

SEQ ID NO: 37072 - DNA, 22 bp, synthetic construct
  misc_feature 1..22: note = chemically synthesized
  source 1..22: mol_type = other DNA
ttatcctcttgccccttaaaaa

SEQ ID NO: 37073 - DNA, 22 bp, synthetic construct
  misc_feature 1..22: note = chemically synthesized
  source 1..22: mol_type = other DNA
tcctcttgccccttaaaaatcc

SEQ ID NO: 37074 - DNA, 22 bp, synthetic construct
  misc_feature 1..22: note = chemically synthesized
  source 1..22: mol_type = other DNA
ttgccccttaaaaatcccactt

SEQ ID NO: 37075 - DNA, 22 bp, synthetic construct
  misc_feature 1..22: note = chemically synthesized
  source 1..22: mol_type = other DNA
gccccttaaaaatcccactttt

SEQ ID NO: 37076 - DNA, 22 bp, synthetic construct
  misc_feature 1..22: note = chemically synthesized
  source 1..22: mol_type = other DNA
ccccttaaaaatcccactttta

SEQ ID NO: 37077 - DNA, 22 bp, synthetic construct
  misc_feature 1..22: note = chemically synthesized
  source 1..22: mol_type = other DNA
aaaaatcccacttttagagata

SEQ ID NO: 37078 - DNA, 22 bp, synthetic construct
  misc_feature 1..22: note = chemically synthesized
  source 1..22: mol_type = other DNA
aaaatcccacttttagagatat

SEQ ID NO: 37079 - DNA, 22 bp, synthetic construct
  misc_feature 1..22: note = chemically synthesized
  source 1..22: mol_type = other DNA
ttagagatatccacttatttac

SEQ ID NO: 37080 - DNA, 22 bp, synthetic construct
  misc_feature 1..22: note = chemically synthesized
  source 1..22: mol_type = other DNA
tagagatatccacttatttaca

SEQ ID NO: 37081 - DNA, 22 bp, synthetic construct
  misc_feature 1..22: note = chemically synthesized
  source 1..22: mol_type = other DNA
agagatatccacttatttacaa

SEQ ID NO: 37082 - DNA, 22 bp, synthetic construct
  misc_feature 1..22: note = chemically synthesized
  source 1..22: mol_type = other DNA
gagatatccacttatttacaaa

SEQ ID NO: 37083 - DNA, 22 bp, synthetic construct
  misc_feature 1..22: note = chemically synthesized
  source 1..22: mol_type = other DNA
atttacaaactgactctgagaa

SEQ ID NO: 37084 - DNA, 22 bp, synthetic construct
  misc_feature 1..22: note = chemically synthesized
  source 1..22: mol_type = other DNA
tttacaaactgactctgagaag

SEQ ID NO: 37085 - DNA, 22 bp, synthetic construct
  misc_feature 1..22: note = chemically synthesized
  source 1..22: mol_type = other DNA
acaaactgactctgagaagaaa

SEQ ID NO: 37086 - DNA, 22 bp, synthetic construct
  misc_feature 1..22: note = chemically synthesized
  source 1..22: mol_type = other DNA
caaactgactctgagaagaaat

SEQ ID NO: 37087 - DNA, 22 bp, synthetic construct
  misc_feature 1..22: note = chemically synthesized
  source 1..22: mol_type = other DNA
actctgagaagaaatatataaa

SEQ ID NO: 37088 - DNA, 22 bp, synthetic construct
  misc_feature 1..22: note = chemically synthesized
  source 1..22: mol_type = other DNA
tgagaagaaatatataaaaagt

SEQ ID NO: 37089 - DNA, 22 bp, synthetic construct
  misc_feature 1..22: note = chemically synthesized
  source 1..22: mol_type = other DNA
agaagaaatatataaaaagtgg

SEQ ID NO: 37090 - DNA, 22 bp, synthetic construct
  misc_feature 1..22: note = chemically synthesized
  source 1..22: mol_type = other DNA
caaaggctgaacttgtctcaag

SEQ ID NO: 37091 - DNA, 22 bp, synthetic construct
  misc_feature 1..22: note = chemically synthesized
  source 1..22: mol_type = other DNA
aacttgtctcaagacccaggat

SEQ ID NO: 37092 - DNA, 22 bp, synthetic construct
  misc_feature 1..22: note = chemically synthesized
  source 1..22: mol_type = other DNA
gtctcaagacccaggattgttg

SEQ ID NO: 37093 - DNA, 22 bp, synthetic construct
  misc_feature 1..22: note = chemically synthesized
  source 1..22: mol_type = other DNA
tctcaagacccaggattgttgt

SEQ ID NO: 37094 - DNA, 22 bp, synthetic construct
  misc_feature 1..22: note = chemically synthesized
  source 1..22: mol_type = other DNA
aagacccaggattgttgtttca

SEQ ID NO: 37095 - DNA, 22 bp, synthetic construct
  misc_feature 1..22: note = chemically synthesized
  source 1..22: mol_type = other DNA
ttgtttcagttctggcctccct

SEQ ID NO: 37096 - DNA, 22 bp, synthetic construct
  misc_feature 1..22: note = chemically synthesized
  source 1..22: mol_type = other DNA
tttcagttctggcctccctttg

SEQ ID NO: 37097 - DNA, 22 bp, synthetic construct
  misc_feature 1..22: note = chemically synthesized
  source 1..22: mol_type = other DNA
cagttctggcctccctttggaa

SEQ ID NO: 37098 - DNA, 22 bp, synthetic construct
  misc_feature 1..22: note = chemically synthesized
  source 1..22: mol_type = other DNA
agttctggcctccctttggaag

SEQ ID NO: 37099 - DNA, 22 bp, synthetic construct
  misc_feature 1..22: note = chemically synthesized
  source 1..22: mol_type = other DNA
tggcctccctttggaagtggtg

SEQ ID NO: 37100 - DNA, 22 bp, synthetic construct
  misc_feature 1..22: note = chemically synthesized
  source 1..22: mol_type = other DNA
gcctccctttggaagtggtgtc

SEQ ID NO: 37101 - DNA, 22 bp, synthetic construct
  misc_feature 1..22: note = chemically synthesized
  source 1..22: mol_type = other DNA
cctttggaagtggtgtcactct

SEQ ID NO: 37102 - DNA, 22 bp, synthetic construct
  misc_feature 1..22: note = chemically synthesized
  source 1..22: mol_type = other DNA
tggaagtggtgtcactctttct

SEQ ID NO: 37103 - DNA, 22 bp, synthetic construct
  misc_feature 1..22: note = chemically synthesized
  source 1..22: mol_type = other DNA
ggaagtggtgtcactctttcta

SEQ ID NO: 37104 - DNA, 22 bp, synthetic construct
  misc_feature 1..22: note = chemically synthesized
  source 1..22: mol_type = other DNA
gaagtggtgtcactctttctag

SEQ ID NO: 37105 - DNA, 22 bp, synthetic construct
  misc_feature 1..22: note = chemically synthesized
  source 1..22: mol_type = other DNA
tttctaggcatcagcaaggagt

SEQ ID NO: 37106 - DNA, 22 bp, synthetic construct
  misc_feature 1..22: note = chemically synthesized
  source 1..22: mol_type = other DNA
tctaggcatcagcaaggagttc

SEQ ID NO: 37107 - DNA, 22 bp, synthetic construct
  misc_feature 1..22: note = chemically synthesized
  source 1..22: mol_type = other DNA
ctaggcatcagcaaggagttca

SEQ ID NO: 37108 - DNA, 22 bp, synthetic construct
  misc_feature 1..22: note = chemically synthesized
  source 1..22: mol_type = other DNA
taggcatcagcaaggagttcag

SEQ ID NO: 37109 - DNA, 22 bp, synthetic construct
  misc_feature 1..22: note = chemically synthesized
  source 1..22: mol_type = other DNA
ggcatcagcaaggagttcagca

SEQ ID NO: 37110 - DNA, 22 bp, synthetic construct
  misc_feature 1..22: note = chemically synthesized
  source 1..22: mol_type = other DNA
agcacatttagggaggaagcca

SEQ ID NO: 37111 - DNA, 22 bp, synthetic construct
  misc_feature 1..22: note = chemically synthesized
  source 1..22: mol_type = other DNA
agggaggaagccatcacagaaa

SEQ ID NO: 37112 - DNA, 22 bp, synthetic construct
  misc_feature 1..22: note = chemically synthesized
  source 1..22: mol_type = other DNA
gggaggaagccatcacagaaac

SEQ ID NO: 37113 - DNA, 22 bp, synthetic construct
  misc_feature 1..22: note = chemically synthesized
  source 1..22: mol_type = other DNA
atggtcttatgtttcagcaaca

SEQ ID NO: 37114 - DNA, 22 bp, synthetic construct
  misc_feature 1..22: note = chemically synthesized
  source 1..22: mol_type = other DNA
atgtttcagcaacacataggca

SEQ ID NO: 37115 - DNA, 22 bp, synthetic construct
  misc_feature 1..22: note = chemically synthesized
  source 1..22: mol_type = other DNA
tgtttcagcaacacataggcag

SEQ ID NO: 37116 - DNA, 22 bp, synthetic construct
  misc_feature 1..22: note = chemically synthesized
  source 1..22: mol_type = other DNA
cagcaacacataggcagagcat

SEQ ID NO: 37117 - DNA, 22 bp, synthetic construct
  misc_feature 1..22: note = chemically synthesized
  source 1..22: mol_type = other DNA
agcaacacataggcagagcatg

SEQ ID NO: 37118 - DNA, 22 bp, synthetic construct
  misc_feature 1..22: note = chemically synthesized
  source 1..22: mol_type = other DNA
ctttatgaaataacttcttgtc

SEQ ID NO: 37119 - DNA, 22 bp, synthetic construct
  misc_feature 1..22: note = chemically synthesized
  source 1..22: mol_type = other DNA
tttatgaaataacttcttgtct

SEQ ID NO: 37120 - DNA, 22 bp, synthetic construct
  misc_feature 1..22: note = chemically synthesized
  source 1..22: mol_type = other DNA
tatgaaataacttcttgtctgg

SEQ ID NO: 37121 - DNA, 22 bp, synthetic construct
  misc_feature 1..22: note = chemically synthesized
  source 1..22: mol_type = other DNA
atgaaataacttcttgtctgga

SEQ ID NO: 37122 - DNA, 22 bp, synthetic construct
  misc_feature 1..22: note = chemically synthesized
  source 1..22: mol_type = other DNA
tgaaataacttcttgtctggaa

SEQ ID NO: 37123 - DNA, 22 bp, synthetic construct
  misc_feature 1..22: note = chemically synthesized
  source 1..22: mol_type = other DNA
cttgtctggaagtcccaactaa

SEQ ID NO: 37124 - DNA, 22 bp, synthetic construct
  misc_feature 1..22: note = chemically synthesized
  source 1..22: mol_type = other DNA
ttgtctggaagtcccaactaat

SEQ ID NO: 37125 - DNA, 22 bp, synthetic construct
  misc_feature 1..22: note = chemically synthesized
  source 1..22: mol_type = other DNA
gtctggaagtcccaactaattg

SEQ ID NO: 37126 - DNA, 22 bp, synthetic construct
  misc_feature 1..22: note = chemically synthesized
  source 1..22: mol_type = other DNA
tctggaagtcccaactaattga

SEQ ID NO: 37127 - DNA, 22 bp, synthetic construct
  misc_feature 1..22: note = chemically synthesized
  source 1..22: mol_type = other DNA
gaagtcccaactaattgatagg

SEQ ID NO: 37128 - DNA, 22 bp, synthetic construct
  misc_feature 1..22: note = chemically synthesized
  source 1..22: mol_type = other DNA
attgataggaagtcacaaacag

SEQ ID NO: 37129 - DNA, 22 bp, synthetic construct
  misc_feature 1..22: note = chemically synthesized
  source 1..22: mol_type = other DNA
ataggaagtcacaaacaggcca

SEQ ID NO: 37130 - DNA, 22 bp, synthetic construct
  misc_feature 1..22: note = chemically synthesized
  source 1..22: mol_type = other DNA
gtgcaatcagggttatttgtca

SEQ ID NO: 37131 - DNA, 22 bp, synthetic construct
  misc_feature 1..22: note = chemically synthesized
  source 1..22: mol_type = other DNA
tttgtcatggaaaagccacagg

SEQ ID NO: 37132 - DNA, 22 bp, synthetic construct
  misc_feature 1..22: note = chemically synthesized
  source 1..22: mol_type = other DNA
gtcatggaaaagccacagggga

SEQ ID NO: 37133 - DNA, 22 bp, synthetic construct
  misc_feature 1..22: note = chemically synthesized
  source 1..22: mol_type = other DNA
tcatggaaaagccacaggggaa

SEQ ID NO: 37134 - DNA, 22 bp, synthetic construct
  misc_feature 1..22: note = chemically synthesized
  source 1..22: mol_type = other DNA
caacctccctttctcagtgcac

SEQ ID NO: 37135 - DNA, 22 bp, synthetic construct
  misc_feature 1..22: note = chemically synthesized
  source 1..22: mol_type = other DNA
cctttctcagtgcacacatctg

SEQ ID NO: 37136 - DNA, 22 bp, synthetic construct
  misc_feature 1..22: note = chemically synthesized
  source 1..22: mol_type = other DNA
tctcagtgcacacatctgttgg

SEQ ID NO: 37137 - DNA, 22 bp, synthetic construct
  misc_feature 1..22: note = chemically synthesized
  source 1..22: mol_type = other DNA
ctcagtgcacacatctgttggt

SEQ ID NO: 37138 - DNA, 22 bp, synthetic construct
  misc_feature 1..22: note = chemically synthesized
  source 1..22: mol_type = other DNA
tcagtgcacacatctgttggta

SEQ ID NO: 37139 - DNA, 22 bp, synthetic construct
  misc_feature 1..22: note = chemically synthesized
  source 1..22: mol_type = other DNA
agtgcacacatctgttggtagg

SEQ ID NO: 37140 - DNA, 22 bp, synthetic construct
  misc_feature 1..22: note = chemically synthesized
  source 1..22: mol_type = other DNA
ttggtaggaagaggcaactctg

SEQ ID NO: 37141 - DNA, 22 bp, synthetic construct
  misc_feature 1..22: note = chemically synthesized
  source 1..22: mol_type = other DNA
gtaggaagaggcaactctgcat

SEQ ID NO: 37142 - DNA, 22 bp, synthetic construct
  misc_feature 1..22: note = chemically synthesized
  source 1..22: mol_type = other DNA
tgcatgcctttaccaaaggcca

SEQ ID NO: 37143 - DNA, 22 bp, synthetic construct
  misc_feature 1..22: note = chemically synthesized
  source 1..22: mol_type = other DNA
catgcctttaccaaaggccatc

SEQ ID NO: 37144 - DNA, 22 bp, synthetic construct
  misc_feature 1..22: note = chemically synthesized
  source 1..22: mol_type = other DNA
taccaaaggccatcctgggtct

SEQ ID NO: 37145 - DNA, 22 bp, synthetic construct
  misc_feature 1..22: note = chemically synthesized
  source 1..22: mol_type = other DNA
accaaaggccatcctgggtctg

SEQ ID NO: 37146 - DNA, 22 bp, synthetic construct
  misc_feature 1..22: note = chemically synthesized
  source 1..22: mol_type = other DNA
ccaaaggccatcctgggtctgt

SEQ ID NO: 37147 - DNA, 22 bp, synthetic construct
  misc_feature 1..22: note = chemically synthesized
  source 1..22: mol_type = other DNA
ggtctgtatgtgtaagccacat

SEQ ID NO: 37148 - DNA, 22 bp, synthetic construct
  misc_feature 1..22: note = chemically synthesized
  source 1..22: mol_type = other DNA
tatgtgtaagccacatgtgtgt

SEQ ID NO: 37149 - DNA, 22 bp, synthetic construct
  misc_feature 1..22: note = chemically synthesized
  source 1..22: mol_type = other DNA
tgaacatttatgacttatgtgc

SEQ ID NO: 37150 - DNA, 22 bp, synthetic construct
  misc_feature 1..22: note = chemically synthesized
  source 1..22: mol_type = other DNA
atgacttatgtgctaacacagg

SEQ ID NO: 37151 - DNA, 22 bp, synthetic construct
  misc_feature 1..22: note = chemically synthesized
  source 1..22: mol_type = other DNA
tgacttatgtgctaacacagga

SEQ ID NO: 37152 - DNA, 22 bp, synthetic construct
  misc_feature 1..22: note = chemically synthesized
  source 1..22: mol_type = other DNA
atgtgctaacacaggaaaagat

SEQ ID NO: 37153 - DNA, 22 bp, synthetic construct
  misc_feature 1..22: note = chemically synthesized
  source 1..22: mol_type = other DNA
tgtgctaacacaggaaaagata

SEQ ID NO: 37154 - DNA, 22 bp, synthetic construct
  misc_feature 1..22: note = chemically synthesized
  source 1..22: mol_type = other DNA
acacaggaaaagatactccctt

SEQ ID NO: 37155 - DNA, 22 bp, synthetic construct
  misc_feature 1..22: note = chemically synthesized
  source 1..22: mol_type = other DNA
cctttgatcagttaaacagagt

SEQ ID NO: 37156 - DNA, 22 bp, synthetic construct
  misc_feature 1..22: note = chemically synthesized
  source 1..22: mol_type = other DNA
tgatcagttaaacagagtttgg

SEQ ID NO: 37157 - DNA, 22 bp, synthetic construct
  misc_feature 1..22: note = chemically synthesized
  source 1..22: mol_type = other DNA
gatcagttaaacagagtttggt

SEQ ID NO: 37158 - DNA, 22 bp, synthetic construct
  misc_feature 1..22: note = chemically synthesized
  source 1..22: mol_type = other DNA
atcagttaaacagagtttggtg

SEQ ID NO: 37159 - DNA, 22 bp, synthetic construct
  misc_feature 1..22: note = chemically synthesized
  source 1..22: mol_type = other DNA
aacagagtttggtgaaattagc

SEQ ID NO: 37160 - DNA, 22 bp, synthetic construct
  misc_feature 1..22: note = chemically synthesized
  source 1..22: mol_type = other DNA
ggtgaaattagctctggacaag

SEQ ID NO: 37161 - DNA, 22 bp, synthetic construct
  misc_feature 1..22: note = chemically synthesized
  source 1..22: mol_type = other DNA
gtgaaattagctctggacaaga

SEQ ID NO: 37162 - DNA, 22 bp, synthetic construct
  misc_feature 1..22: note = chemically synthesized
  source 1..22: mol_type = other DNA
gctctggacaagaaaccagaaa

SEQ ID NO: 37163 - DNA, 22 bp, synthetic construct
  misc_feature 1..22: note = chemically synthesized
  source 1..22: mol_type = other DNA
tggacaagaaaccagaaaacct

SEQ ID NO: 37164 - DNA, 22 bp, synthetic construct
  misc_feature 1..22: note = chemically synthesized
  source 1..22: mol_type = other DNA
gacaagaaaccagaaaacctgg

SEQ ID NO: 37165 - DNA, 22 bp, synthetic construct
  misc_feature 1..22: note = chemically synthesized
  source 1..22: mol_type = other DNA
gcttctctgctttctctcttac

SEQ ID NO: 37166 - DNA, 22 bp, synthetic construct
  misc_feature 1..22: note = chemically synthesized
  source 1..22: mol_type = other DNA
ctctgctttctctcttactgat

SEQ ID NO: 37167 - DNA, 22 bp, synthetic construct
  misc_feature 1..22: note = chemically synthesized
  source 1..22: mol_type = other DNA
tctgctttctctcttactgatg

SEQ ID NO: 37168 - DNA, 22 bp, synthetic construct
  misc_feature 1..22: note = chemically synthesized
  source 1..22: mol_type = other DNA
tgctttctctcttactgatgtg

SEQ ID NO: 37169 - DNA, 22 bp, synthetic construct
  misc_feature 1..22: note = chemically synthesized
  source 1..22: mol_type = other DNA
ctttctctcttactgatgtggc

SEQ ID NO: 37170 - DNA, 22 bp, synthetic construct
  misc_feature 1..22: note = chemically synthesized
  source 1..22: mol_type = other DNA
tctctcttactgatgtggcctc

SEQ ID NO: 37171 - DNA, 22 bp, synthetic construct
  misc_feature 1..22: note = chemically synthesized
  source 1..22: mol_type = other DNA
ctctcttactgatgtggcctct

SEQ ID NO: 37172 - DNA, 22 bp, synthetic construct
  misc_feature 1..22: note = chemically synthesized
  source 1..22: mol_type = other DNA
tctcttactgatgtggcctctg

SEQ ID NO: 37173 - DNA, 22 bp, synthetic construct
  misc_feature 1..22: note = chemically synthesized
  source 1..22: mol_type = other DNA
tcttactgatgtggcctctggc

SEQ ID NO: 37174 - DNA, 22 bp, synthetic construct
  misc_feature 1..22: note = chemically synthesized
  source 1..22: mol_type = other DNA
ttactgatgtggcctctggcaa

SEQ ID NO: 37175 - DNA, 22 bp, synthetic construct
  misc_feature 1..22: note = chemically synthesized
  source 1..22: mol_type = other DNA
actgatgtggcctctggcaagc

SEQ ID NO: 37176 - DNA, 22 bp, synthetic construct
  misc_feature 1..22: note = chemically synthesized
  source 1..22: mol_type = other DNA
ctgatgtggcctctggcaagcc

SEQ ID NO: 37177 - DNA, 22 bp, synthetic construct
  misc_feature 1..22: note = chemically synthesized
  source 1..22: mol_type = other DNA
atgtggcctctggcaagccctt

SEQ ID NO: 37178 - DNA, 22 bp, synthetic construct
  misc_feature 1..22: note = chemically synthesized
  source 1..22: mol_type = other DNA
tggcaagcccttaaccttggta

SEQ ID NO: 37179 - DNA, 22 bp, synthetic construct
  misc_feature 1..22: note = chemically synthesized
  source 1..22: mol_type = other DNA
gcaagcccttaaccttggtaag

SEQ ID NO: 37180 - DNA, 22 bp, synthetic construct
  misc_feature 1..22: note = chemically synthesized
  source 1..22: mol_type = other DNA
aaccttggtaagcctcaatctc

SEQ ID NO: 37181 - DNA, 22 bp, synthetic construct
  misc_feature 1..22: note = chemically synthesized
  source 1..22: mol_type = other DNA
accttggtaagcctcaatctcc

SEQ ID NO: 37182 - DNA, 22 bp, synthetic construct
  misc_feature 1..22: note = chemically synthesized
  source 1..22: mol_type = other DNA
ggtaagcctcaatctccacctc

SEQ ID NO: 37183 - DNA, 22 bp, synthetic construct
  misc_feature 1..22: note = chemically synthesized
  source 1..22: mol_type = other DNA
gtaagcctcaatctccacctcc

SEQ ID NO: 37184 - DNA, 22 bp, synthetic construct
  misc_feature 1..22: note = chemically synthesized
  source 1..22: mol_type = other DNA
aatctccacctccataaagtag

SEQ ID NO: 37185 - DNA, 22 bp, synthetic construct
  misc_feature 1..22: note = chemically synthesized
  source 1..22: mol_type = other DNA
cacctccataaagtagaagtcg

SEQ ID NO: 37186 - DNA, 22 bp, synthetic construct
  misc_feature 1..22: note = chemically synthesized
  source 1..22: mol_type = other DNA
cataaagtagaagtcgtgagat

SEQ ID NO: 37187 - DNA, 22 bp, synthetic construct
  misc_feature 1..22: note = chemically synthesized
  source 1..22: mol_type = other DNA
tcccagagagcaggtgaaataa

SEQ ID NO: 37188 - DNA, 22 bp, synthetic construct
  misc_feature 1..22: note = chemically synthesized
  source 1..22: mol_type = other DNA
tatacagtataaggtagttcac

SEQ ID NO: 37189 - DNA, 22 bp, synthetic construct
  misc_feature 1..22: note = chemically synthesized
  source 1..22: mol_type = other DNA
actactgtagacagtcattatt

SEQ ID NO: 37190 - DNA, 22 bp, synthetic construct
  misc_feature 1..22: note = chemically synthesized
  source 1..22: mol_type = other DNA
ctgtagacagtcattatttatt

SEQ ID NO: 37191 - DNA, 22 bp, synthetic construct
  misc_feature 1..22: note = chemically synthesized
  source 1..22: mol_type = other DNA
tagacagtcattatttattatg

SEQ ID NO: 37192 - DNA, 22 bp, synthetic construct
  misc_feature 1..22: note = chemically synthesized
  source 1..22: mol_type = other DNA
tttattatgaataagcaggaaa

SEQ ID NO: 37193 - DNA, 22 bp, synthetic construct
  misc_feature 1..22: note = chemically synthesized
  source 1..22: mol_type = other DNA
attatgaataagcaggaaataa

SEQ ID NO: 37194 - DNA, 22 bp, synthetic construct
  misc_feature 1..22: note = chemically synthesized
  source 1..22: mol_type = other DNA
ttatgaataagcaggaaataat

SEQ ID NO: 37195 - DNA, 22 bp, synthetic construct
  misc_feature 1..22: note = chemically synthesized
  source 1..22: mol_type = other DNA
tgaataagcaggaaataattca

SEQ ID NO: 37196 - DNA, 22 bp, synthetic construct
  misc_feature 1..22: note = chemically synthesized
  source 1..22: mol_type = other DNA
acatgccaattatttggctatc

SEQ ID NO: 37197 - DNA, 22 bp, synthetic construct
  misc_feature 1..22: note = chemically synthesized
  source 1..22: mol_type = other DNA
tttggctatcttttcactaagc

SEQ ID NO: 37198 - DNA, 22 bp, synthetic construct
  misc_feature 1..22: note = chemically synthesized
  source 1..22: mol_type = other DNA
ggctatcttttcactaagctag

SEQ ID NO: 37199 - DNA, 22 bp, synthetic construct
  misc_feature 1..22: note = chemically synthesized
  source 1..22: mol_type = other DNA
gctatcttttcactaagctagg

SEQ ID NO: 37200 - DNA, 22 bp, synthetic construct
  misc_feature 1..22: note = chemically synthesized
  source 1..22: mol_type = other DNA
tcttttcactaagctaggtaat

SEQ ID NO: 37201 - DNA, 22 bp, synthetic construct
  misc_feature 1..22: note = chemically synthesized
  source 1..22: mol_type = other DNA
ttcactaagctaggtaatctag

SEQ ID NO: 37202 - DNA, 22 bp, synthetic construct
  misc_feature 1..22: note = chemically synthesized
  source 1..22: mol_type = other DNA
tcactaagctaggtaatctagc

SEQ ID NO: 37203 - DNA, 22 bp, synthetic construct
  misc_feature 1..22: note = chemically synthesized
  source 1..22: mol_type = other DNA
cactaagctaggtaatctagcc

SEQ ID NO: 37204 - DNA, 22 bp, synthetic construct
  misc_feature 1..22: note = chemically synthesized
  source 1..22: mol_type = other DNA
actaagctaggtaatctagcca

SEQ ID NO: 37205 - DNA, 22 bp, synthetic construct
  misc_feature 1..22: note = chemically synthesized
  source 1..22: mol_type = other DNA
agctaggtaatctagccagaag

SEQ ID NO: 37206 - DNA, 22 bp, synthetic construct
  misc_feature 1..22: note = chemically synthesized
  source 1..22: mol_type = other DNA
ggtaatctagccagaaggtgga

SEQ ID NO: 37207 - DNA, 22 bp, synthetic construct
  misc_feature 1..22: note = chemically synthesized
  source 1..22: mol_type = other DNA
gccagaaggtggataggtagga

SEQ ID NO: 37208 - DNA, 22 bp, synthetic construct
  misc_feature 1..22: note = chemically synthesized
  source 1..22: mol_type = other DNA
tccccacttaggttcacggcct

SEQ ID NO: 37209 - DNA, 22 bp, synthetic construct
  misc_feature 1..22: note = chemically synthesized
  source 1..22: mol_type = other DNA
ccccacttaggttcacggcctg

SEQ ID NO: 37210 - DNA, 22 bp, synthetic construct
  misc_feature 1..22: note = chemically synthesized
  source 1..22: mol_type = other DNA
cccacttaggttcacggcctgt

SEQ ID NO: 37211 - DNA, 22 bp, synthetic construct
  misc_feature 1..22: note = chemically synthesized
  source 1..22: mol_type = other DNA
aggttcacggcctgtatgtgaa

SEQ ID NO: 37212 - DNA, 22 bp, synthetic construct
  misc_feature 1..22: note = chemically synthesized
  source 1..22: mol_type = other DNA
ggttcacggcctgtatgtgaat

SEQ ID NO: 37213 - DNA, 22 bp, synthetic construct
  misc_feature 1..22: note = chemically synthesized
  source 1..22: mol_type = other DNA
acggcctgtatgtgaatctaca

SEQ ID NO: 37214 - DNA, 22 bp, synthetic construct
  misc_feature 1..22: note = chemically synthesized
  source 1..22: mol_type = other DNA
tatgtgaatctacagcacacag

SEQ ID NO: 37215 - DNA, 22 bp, synthetic construct
  misc_feature 1..22: note = chemically synthesized
  source 1..22: mol_type = other DNA
cagcacacaggtgtctgagctc

SEQ ID NO: 37216 - DNA, 22 bp, synthetic construct
  misc_feature 1..22: note = chemically synthesized
  source 1..22: mol_type = other DNA
agctctattattgacaaaccta

SEQ ID NO: 37217 - DNA, 22 bp, synthetic construct
  misc_feature 1..22: note = chemically synthesized
  source 1..22: mol_type = other DNA
tattattgacaaacctatttta

SEQ ID NO: 37218 - DNA, 22 bp, synthetic construct
  misc_feature 1..22: note = chemically synthesized
  source 1..22: mol_type = other DNA
ttattgacaaacctattttaat

SEQ ID NO: 37219 - DNA, 22 bp, synthetic construct
  misc_feature 1..22: note = chemically synthesized
  source 1..22: mol_type = other DNA
ttgacaaacctattttaatttg

SEQ ID NO: 37220 - DNA, 22 bp, synthetic construct
  misc_feature 1..22: note = chemically synthesized
  source 1..22: mol_type = other DNA
acaaacctattttaatttgcta

SEQ ID NO: 37221 - DNA, 22 bp, synthetic construct
  misc_feature 1..22: note = chemically synthesized
  source 1..22: mol_type = other DNA
ttttaatttgctatgttgtttc

SEQ ID NO: 37222 - DNA, 22 bp, synthetic construct
  misc_feature 1..22: note = chemically synthesized
  source 1..22: mol_type = other DNA
taatttgctatgttgtttctaa

SEQ ID NO: 37223 - DNA, 22 bp, synthetic construct
  misc_feature 1..22: note = chemically synthesized
  source 1..22: mol_type = other DNA
aatttgctatgttgtttctaat

SEQ ID NO: 37224 - DNA, 22 bp, synthetic construct
  misc_feature 1..22: note = chemically synthesized
  source 1..22: mol_type = other DNA
atttgctatgttgtttctaatt

SEQ ID NO: 37225 - DNA, 22 bp, synthetic construct
  misc_feature 1..22: note = chemically synthesized
  source 1..22: mol_type = other DNA
gctatgttgtttctaattctct

SEQ ID NO: 37226 - DNA, 22 bp, synthetic construct
  misc_feature 1..22: note = chemically synthesized
  source 1..22: mol_type = other DNA
ctatgttgtttctaattctctt

SEQ ID NO: 37227 - DNA, 22 bp, synthetic construct
  misc_feature 1..22: note = chemically synthesized
  source 1..22: mol_type = other DNA
tgttgtttctaattctcttctg

SEQ ID NO: 37228 - DNA, 22 bp, synthetic construct
  misc_feature 1..22: note = chemically synthesized
  source 1..22: mol_type = other DNA
tttctaattctcttctggatct

SEQ ID NO: 37229 - DNA, 22 bp, synthetic construct
  misc_feature 1..22: note = chemically synthesized
  source 1..22: mol_type = other DNA
ctaattctcttctggatctcca

SEQ ID NO: 37230 - DNA, 22 bp, synthetic construct
  misc_feature 1..22: note = chemically synthesized
  source 1..22: mol_type = other DNA
taattctcttctggatctccaa

SEQ ID NO: 37231 - DNA, 22 bp, synthetic construct
  misc_feature 1..22: note = chemically synthesized
  source 1..22: mol_type = other DNA
attctcttctggatctccaagc

SEQ ID NO: 37232 - DNA, 22 bp, synthetic construct
  misc_feature 1..22: note = chemically synthesized
  source 1..22: mol_type = other DNA
tcttctggatctccaagcagta

SEQ ID NO: 37233 - DNA, 22 bp, synthetic construct
  misc_feature 1..22: note = chemically synthesized
  source 1..22: mol_type = other DNA
ttctggatctccaagcagtaaa

SEQ ID NO: 37234 - DNA, 22 bp, synthetic construct
  misc_feature 1..22: note = chemically synthesized
  source 1..22: mol_type = other DNA
ctggatctccaagcagtaaaaa

SEQ ID NO: 37235 - DNA, 22 bp, synthetic construct
  misc_feature 1..22: note = chemically synthesized
  source 1..22: mol_type = other DNA
tggatctccaagcagtaaaaaa

SEQ ID NO: 37236 - DNA, 22 bp, synthetic construct
  misc_feature 1..22: note = chemically synthesized
  source 1..22: mol_type = other DNA
gatctccaagcagtaaaaaata

SEQ ID NO: 37237 - DNA, 22 bp, synthetic construct
  misc_feature 1..22: note = chemically synthesized
  source 1..22: mol_type = other DNA
caagcagtaaaaaataccaaac

SEQ ID NO: 37238 - DNA, 22 bp, synthetic construct
  misc_feature 1..22: note = chemically synthesized
  source 1..22: mol_type = other DNA
agaaaagttctgtgcaaattaa

SEQ ID NO: 37239 - DNA, 22 bp, synthetic construct
  misc_feature 1..22: note = chemically synthesized
  source 1..22: mol_type = other DNA
tgtgcaaattaactgggccaga

SEQ ID NO: 37240 - DNA, 22 bp, synthetic construct
  misc_feature 1..22: note = chemically synthesized
  source 1..22: mol_type = other DNA
tgcaaattaactgggccagaaa

SEQ ID NO: 37241 - DNA, 22 bp, synthetic construct
  misc_feature 1..22: note = chemically synthesized
  source 1..22: mol_type = other DNA
actgggccagaaagaattttta

SEQ ID NO: 37242 - DNA, 22 bp, synthetic construct
  misc_feature 1..22: note = chemically synthesized
  source 1..22: mol_type = other DNA
ggccagaaagaatttttaccac

SEQ ID NO: 37243 - DNA, 22 bp, synthetic construct
  misc_feature 1..22: note = chemically synthesized
  source 1..22: mol_type = other DNA
ttaccacctgtttgtagatgta

SEQ ID NO: 37244 - DNA, 22 bp, synthetic construct
  misc_feature 1..22: note = chemically synthesized
  source 1..22: mol_type = other DNA
taccacctgtttgtagatgtaa

SEQ ID NO: 37245 - DNA, 22 bp, synthetic construct
  misc_feature 1..22: note = chemically synthesized
  source 1..22: mol_type = other DNA
accacctgtttgtagatgtaac

SEQ ID NO: 37246 - DNA, 22 bp, synthetic construct
  misc_feature 1..22: note = chemically synthesized
  source 1..22: mol_type = other DNA
ccacctgtttgtagatgtaact

SEQ ID NO: 37247 - DNA, 22 bp, synthetic construct
  misc_feature 1..22: note = chemically synthesized
  source 1..22: mol_type = other DNA
tttgtagatgtaacttatttgt

SEQ ID NO: 37248 - DNA, 22 bp, synthetic construct
  misc_feature 1..22: note = chemically synthesized
  source 1..22: mol_type = other DNA
gtagatgtaacttatttgtggc

SEQ ID NO: 37249 - DNA, 22 bp, synthetic construct
  misc_feature 1..22: note = chemically synthesized
  source 1..22: mol_type = other DNA
tagatgtaacttatttgtggca

SEQ ID NO: 37250 - DNA, 22 bp, synthetic construct
  misc_feature 1..22: note = chemically synthesized
  source 1..22: mol_type = other DNA
atttgtggcactaatttctaag

SEQ ID NO: 37251 - DNA, 22 bp, synthetic construct
  misc_feature 1..22: note = chemically synthesized
  source 1..22: mol_type = other DNA
tttgtggcactaatttctaagg

SEQ ID NO: 37252 - DNA, 22 bp, synthetic construct
  misc_feature 1..22: note = chemically synthesized
  source 1..22: mol_type = other DNA
gtggcactaatttctaaggaat

SEQ ID NO: 37253 - DNA, 22 bp, synthetic construct
  misc_feature 1..22: note = chemically synthesized
  source 1..22: mol_type = other DNA
tggcactaatttctaaggaata

SEQ ID NO: 37254 - DNA, 22 bp, synthetic construct
  misc_feature 1..22: note = chemically synthesized
  source 1..22: mol_type = other DNA
atttctaaggaatagagcattg

SEQ ID NO: 37255 - DNA, 22 bp, synthetic construct
  misc_feature 1..22: note = chemically synthesized
  source 1..22: mol_type = other DNA
ctaaggaatagagcattgctgt

SEQ ID NO: 37256 - DNA, 22 bp, synthetic construct
  misc_feature 1..22: note = chemically synthesized
  source 1..22: mol_type = other DNA
taaggaatagagcattgctgtg

SEQ ID NO: 37257 - DNA, 22 bp, synthetic construct
  misc_feature 1..22: note = chemically synthesized
  source 1..22: mol_type = other DNA
aggaatagagcattgctgtgat

SEQ ID NO: 37258 - DNA, 22 bp, synthetic construct
  misc_feature 1..22: note = chemically synthesized
  source 1..22: mol_type = other DNA
ctgtgattgtctgttctgatgt

SEQ ID NO: 37259 - DNA, 22 bp, synthetic construct
  misc_feature 1..22: note = chemically synthesized
  source 1..22: mol_type = other DNA
tgattgtctgttctgatgtgaa

SEQ ID NO: 37260 - DNA, 22 bp, synthetic construct
  misc_feature 1..22: note = chemically synthesized
  source 1..22: mol_type = other DNA
tctgttctgatgtgaacttctt

SEQ ID NO: 37261 - DNA, 22 bp, synthetic construct
  misc_feature 1..22: note = chemically synthesized
  source 1..22: mol_type = other DNA
ttctgatgtgaacttctttcct

SEQ ID NO: 37262 - DNA, 22 bp, synthetic construct
  misc_feature 1..22: note = chemically synthesized
  source 1..22: mol_type = other DNA
tgatgtgaacttctttcctcct

SEQ ID NO: 37263 - DNA, 22 bp, synthetic construct
  misc_feature 1..22: note = chemically synthesized
  source 1..22: mol_type = other DNA
atgtgaacttctttcctcctat

SEQ ID NO: 37264 - DNA, 22 bp, synthetic construct
  misc_feature 1..22: note = chemically synthesized
  source 1..22: mol_type = other DNA
ctttcctcctataatttccccc

SEQ ID NO: 37265 - DNA, 22 bp, synthetic construct
  misc_feature 1..22: note = chemically synthesized
  source 1..22: mol_type = other DNA
tttcctcctataatttcccccc

SEQ ID NO: 37266 - DNA, 22 bp, synthetic construct
  misc_feature 1..22: note = chemically synthesized
  source 1..22: mol_type = other DNA
tcctcctataatttcccccctc

SEQ ID NO: 37267 - DNA, 22 bp, synthetic construct
  misc_feature 1..22: note = chemically synthesized
  source 1..22: mol_type = other DNA
cctcctataatttcccccctct

SEQ ID NO: 37268 - DNA, 22 bp, synthetic construct
  misc_feature 1..22: note = chemically synthesized
  source 1..22: mol_type = other DNA
ctcctataatttcccccctcta

SEQ ID NO: 37269 - DNA, 22 bp, synthetic construct
  misc_feature 1..22: note = chemically synthesized
  source 1..22: mol_type = other DNA
ctataatttcccccctctaaaa

SEQ ID NO: 37270 - DNA, 22 bp, synthetic construct
  misc_feature 1..22: note = chemically synthesized
  source 1..22: mol_type = other DNA
taatttcccccctctaaaatct

SEQ ID NO: 37271 - DNA, 22 bp, synthetic construct
  misc_feature 1..22: note = chemically synthesized
  source 1..22: mol_type = other DNA
cccccctctaaaatctgcccca

SEQ ID NO: 37272 - DNA, 22 bp, synthetic construct
  misc_feature 1..22: note = chemically synthesized
  source 1..22: mol_type = other DNA
ccccctctaaaatctgccccaa

SEQ ID NO: 37273 - DNA, 22 bp, synthetic construct
  misc_feature 1..22: note = chemically synthesized
  source 1..22: mol_type = other DNA
taaaatctgccccaaatttcct

SEQ ID NO: 37274 - DNA, 22 bp, synthetic construct
  misc_feature 1..22: note = chemically synthesized
  source 1..22: mol_type = other DNA
aaatctgccccaaatttcctga

SEQ ID NO: 37275 - DNA, 22 bp, synthetic construct
  misc_feature 1..22: note = chemically synthesized
  source 1..22: mol_type = other DNA
ccccaaatttcctgatgtaagt

SEQ ID NO: 37276 - DNA, 22 bp, synthetic construct
  misc_feature 1..22: note = chemically synthesized
  source 1..22: mol_type = other DNA
cctgatgtaagtactaaagaag

SEQ ID NO: 37277 - DNA, 22 bp, synthetic construct
  misc_feature 1..22: note = chemically synthesized
  source 1..22: mol_type = other DNA
ctgatgtaagtactaaagaagt

SEQ ID NO: 37278 - DNA, 22 bp, synthetic construct
  misc_feature 1..22: note = chemically synthesized
  source 1..22: mol_type = other DNA
atgtaagtactaaagaagtttt

SEQ ID NO: 37279 - DNA, 22 bp, synthetic construct
  misc_feature 1..22: note = chemically synthesized
  source 1..22: mol_type = other DNA
aagaagttttatgtttgtttgt

SEQ ID NO: 37280 - DNA, 22 bp, synthetic construct
  misc_feature 1..22: note = chemically synthesized
  source 1..22: mol_type = other DNA
tatgtttgtttgtctgcattaa

SEQ ID NO: 37281 - DNA, 22 bp, synthetic construct
  misc_feature 1..22: note = chemically synthesized
  source 1..22: mol_type = other DNA
atgtttgtttgtctgcattaag

SEQ ID NO: 37282 - DNA, 22 bp, synthetic construct
  misc_feature 1..22: note = chemically synthesized
  source 1..22: mol_type = other DNA
tgtttgtttgtctgcattaaga

SEQ ID NO: 37283 - DNA, 22 bp, synthetic construct
  misc_feature 1..22: note = chemically synthesized
  source 1..22: mol_type = other DNA
gtttgtctgcattaagatatat

SEQ ID NO: 37284 - DNA, 22 bp, synthetic construct
  misc_feature 1..22: note = chemically synthesized
  source 1..22: mol_type = other DNA
tttgtctgcattaagatatatt

SEQ ID NO: 37285 - DNA, 22 bp, synthetic construct
  misc_feature 1..22: note = chemically synthesized
  source 1..22: mol_type = other DNA
gtctgcattaagatatatttcc

SEQ ID NO: 37286 - DNA, 22 bp, synthetic construct
  misc_feature 1..22: note = chemically synthesized
  source 1..22: mol_type = other DNA
tctgcattaagatatatttcct

SEQ ID NO: 37287 - DNA, 22 bp, synthetic construct
  misc_feature 1..22: note = chemically synthesized
  source 1..22: mol_type = other DNA
cattaagatatatttcctgaag

SEQ ID NO: 37288 - DNA, 22 bp, synthetic construct
  misc_feature 1..22: note = chemically synthesized
  source 1..22: mol_type = other DNA
agatatatttcctgaaggtttg

SEQ ID NO: 37289 - DNA, 22 bp, synthetic construct
  misc_feature 1..22: note = chemically synthesized
  source 1..22: mol_type = other DNA
cctgaaggtttgggaacctaaa

SEQ ID NO: 37290 - DNA, 22 bp, synthetic construct
  misc_feature 1..22: note = chemically synthesized
  source 1..22: mol_type = other DNA
ctgaaggtttgggaacctaaaa

SEQ ID NO: 37291 - DNA, 22 bp, synthetic construct
  misc_feature 1..22: note = chemically synthesized
  source 1..22: mol_type = other DNA
aaggtttgggaacctaaaatta

SEQ ID NO: 37292 - DNA, 22 bp, synthetic construct
  misc_feature 1..22: note = chemically synthesized
  source 1..22: mol_type = other DNA
gggaacctaaaattagaatatt

SEQ ID NO: 37293 - DNA, 22 bp, synthetic construct
  misc_feature 1..22: note = chemically synthesized
  source 1..22: mol_type = other DNA
ggaacctaaaattagaatattt

SEQ ID NO: 37294 - DNA, 22 bp, synthetic construct
  misc_feature 1..22: note = chemically synthesized
  source 1..22: mol_type = other DNA
aaattagaatatttaataagaa

SEQ ID NO: 37295 - DNA, 22 bp, synthetic construct
  misc_feature 1..22: note = chemically synthesized
  source 1..22: mol_type = other DNA
gaatatttaataagaaactact

SEQ ID NO: 37296 - DNA, 22 bp, synthetic construct
  misc_feature 1..22: note = chemically synthesized
  source 1..22: mol_type = other DNA
aataagaaactactgacattta

SEQ ID NO: 37297 - DNA, 22 bp, synthetic construct
  misc_feature 1..22: note = chemically synthesized
  source 1..22: mol_type = other DNA
ataagaaactactgacatttat

SEQ ID NO: 37298 - DNA, 22 bp, synthetic construct
  misc_feature 1..22: note = chemically synthesized
  source 1..22: mol_type = other DNA
ctgacatttatcaccttcttta

SEQ ID NO: 37299 - DNA, 22 bp, synthetic construct
  misc_feature 1..22: note = chemically synthesized
  source 1..22: mol_type = other DNA
acatttatcaccttctttagga

SEQ ID NO: 37300 - DNA, 22 bp, synthetic construct
  misc_feature 1..22: note = chemically synthesized
  source 1..22: mol_type = other DNA
atcaccttctttaggatttacc

SEQ ID NO: 37301 - DNA, 22 bp, synthetic construct
  misc_feature 1..22: note = chemically synthesized
  source 1..22: mol_type = other DNA
tcaccttctttaggatttaccg

SEQ ID NO: 37302 - DNA, 22 bp, synthetic construct
  misc_feature 1..22: note = chemically synthesized
  source 1..22: mol_type = other DNA
ctttaggatttaccgctcgccc

SEQ ID NO: 37303 - DNA, 22 bp, synthetic construct
  misc_feature 1..22: note = chemically synthesized
  source 1..22: mol_type = other DNA
tttaggatttaccgctcgccca

SEQ ID NO: 37304 - DNA, 22 bp, synthetic construct
  misc_feature 1..22: note = chemically synthesized
  source 1..22: mol_type = other DNA
taggatttaccgctcgcccagt

SEQ ID NO: 37305 - DNA, 22 bp, synthetic construct
  misc_feature 1..22: note = chemically synthesized
  source 1..22: mol_type = other DNA
aggatttaccgctcgcccagtg

SEQ ID NO: 37306 - DNA, 22 bp, synthetic construct
  misc_feature 1..22: note = chemically synthesized
  source 1..22: mol_type = other DNA
ggatttaccgctcgcccagtga

SEQ ID NO: 37307 - DNA, 22 bp, synthetic construct
  misc_feature 1..22: note = chemically synthesized
  source 1..22: mol_type = other DNA
accgctcgcccagtgatgttct

SEQ ID NO: 37308 - DNA, 22 bp, synthetic construct
  misc_feature 1..22: note = chemically synthesized
  source 1..22: mol_type = other DNA
ccgctcgcccagtgatgttctt

SEQ ID NO: 37309 - DNA, 22 bp, synthetic construct
  misc_feature 1..22: note = chemically synthesized
  source 1..22: mol_type = other DNA
gcccagtgatgttctttcctaa

SEQ ID NO: 37310 - DNA, 22 bp, synthetic construct
  misc_feature 1..22: note = chemically synthesized
  source 1..22: mol_type = other DNA
tttcctaagctaaattaaaaga

SEQ ID NO: 37311 - DNA, 22 bp, synthetic construct
  misc_feature 1..22: note = chemically synthesized
  source 1..22: mol_type = other DNA
tcctaagctaaattaaaagaca

SEQ ID NO: 37312 - DNA, 22 bp, synthetic construct
  misc_feature 1..22: note = chemically synthesized
  source 1..22: mol_type = other DNA
cctaagctaaattaaaagacaa

SEQ ID NO: 37313 - DNA, 22 bp, synthetic construct
  misc_feature 1..22: note = chemically synthesized
  source 1..22: mol_type = other DNA
ctaagctaaattaaaagacaaa

SEQ ID NO: 37314 - DNA, 22 bp, synthetic construct
  misc_feature 1..22: note = chemically synthesized
  source 1..22: mol_type = other DNA
agctaaattaaaagacaaattc

SEQ ID NO: 37315 - DNA, 22 bp, synthetic construct
  misc_feature 1..22: note = chemically synthesized
  source 1..22: mol_type = other DNA
aattaaaagacaaattcaaatc

SEQ ID NO: 37316 - DNA, 22 bp, synthetic construct
  misc_feature 1..22: note = chemically synthesized
  source 1..22: mol_type = other DNA
aaagacaaattcaaatcctgca

SEQ ID NO: 37317 - DNA, 22 bp, synthetic construct
  misc_feature 1..22: note = chemically synthesized
  source 1..22: mol_type = other DNA
aaatcctgcatggtagccacca

SEQ ID NO: 37318 - DNA, 22 bp, synthetic construct
  misc_feature 1..22: note = chemically synthesized
  source 1..22: mol_type = other DNA
catggtagccaccaaaagcata

SEQ ID NO: 37319 - DNA, 22 bp, synthetic construct
  misc_feature 1..22: note = chemically synthesized
  source 1..22: mol_type = other DNA
gaaaaacaggattcggcgtgcc

SEQ ID NO: 37320 - DNA, 22 bp, synthetic construct
  misc_feature 1..22: note = chemically synthesized
  source 1..22: mol_type = other DNA
aaaaacaggattcggcgtgcca

SEQ ID NO: 37321 - DNA, 22 bp, synthetic construct
  misc_feature 1..22: note = chemically synthesized
  source 1..22: mol_type = other DNA
ggcgtgccatattatgcattat

SEQ ID NO: 37322 - DNA, 22 bp, synthetic construct
  misc_feature 1..22: note = chemically synthesized
  source 1..22: mol_type = other DNA
tgcattatttaatggtatgcaa

SEQ ID NO: 37323 - DNA, 22 bp, synthetic construct
  misc_feature 1..22: note = chemically synthesized
  source 1..22: mol_type = other DNA
tttaatggtatgcaaattataa

SEQ ID NO: 37324 - DNA, 22 bp, synthetic construct
  misc_feature 1..22: note = chemically synthesized
  source 1..22: mol_type = other DNA
aatggtatgcaaattataagtc

SEQ ID NO: 37325 - DNA, 22 bp, synthetic construct
  misc_feature 1..22: note = chemically synthesized
  source 1..22: mol_type = other DNA
atggtatgcaaattataagtca

SEQ ID NO: 37326 - DNA, 22 bp, synthetic construct
  misc_feature 1..22: note = chemically synthesized
  source 1..22: mol_type = other DNA
taagtcagacagttaggaaaac

SEQ ID NO: 37327 - DNA, 22 bp, synthetic construct
  misc_feature 1..22: note = chemically synthesized
  source 1..22: mol_type = other DNA
ggaaaaccacacttcagcatta

SEQ ID NO: 37328 - DNA, 22 bp, synthetic construct
  misc_feature 1..22: note = chemically synthesized
  source 1..22: mol_type = other DNA
cagcattaataaacagcaatat

SEQ ID NO: 37329 - DNA, 22 bp, synthetic construct
  misc_feature 1..22: note = chemically synthesized
  source 1..22: mol_type = other DNA
agcattaataaacagcaatatt

SEQ ID NO: 37330 - DNA, 22 bp, synthetic construct
  misc_feature 1..22: note = chemically synthesized
  source 1..22: mol_type = other DNA
ataaacagcaatattactacta

SEQ ID NO: 37331 - DNA, 22 bp, synthetic construct
  misc_feature 1..22: note = chemically synthesized
  source 1..22: mol_type = other DNA
ctactacattaattatgatatt

SEQ ID NO: 37332 - DNA, 22 bp, synthetic construct
  misc_feature 1..22: note = chemically synthesized
  source 1..22: mol_type = other DNA
ctacattaattatgatattgct

SEQ ID NO: 37333 - DNA, 22 bp, synthetic construct
  misc_feature 1..22: note = chemically synthesized
  source 1..22: mol_type = other DNA
cattaattatgatattgctatg

SEQ ID NO: 37334 - DNA, 22 bp, synthetic construct
  misc_feature 1..22: note = chemically synthesized
  source 1..22: mol_type = other DNA
attatgatattgctatgattta

SEQ ID NO: 37335 - DNA, 22 bp, synthetic construct
  misc_feature 1..22: note = chemically synthesized
  source 1..22: mol_type = other DNA
tgatattgctatgatttattcc

SEQ ID NO: 37336 - DNA, 22 bp, synthetic construct
  misc_feature 1..22: note = chemically synthesized
  source 1..22: mol_type = other DNA
ctatgatttattcccaagtttt

SEQ ID NO: 37337 - DNA, 22 bp, synthetic construct
  misc_feature 1..22: note = chemically synthesized
  source 1..22: mol_type = other DNA
tgatttattcccaagttttgca

SEQ ID NO: 37338 - DNA, 22 bp, synthetic construct
  misc_feature 1..22: note = chemically synthesized
  source 1..22: mol_type = other DNA
attcccaagttttgcattttga

SEQ ID NO: 37339 - DNA, 22 bp, synthetic construct
  misc_feature 1..22: note = chemically synthesized
  source 1..22: mol_type = other DNA
ttcccaagttttgcattttgat

SEQ ID NO: 37340 - DNA, 22 bp, synthetic construct
  misc_feature 1..22: note = chemically synthesized
  source 1..22: mol_type = other DNA
ccaagttttgcattttgattct

SEQ ID NO: 37341 - DNA, 22 bp, synthetic construct
  misc_feature 1..22: note = chemically synthesized
  source 1..22: mol_type = other DNA
tgcattttgattctccttgaaa

SEQ ID NO: 37342 - DNA, 22 bp, synthetic construct
  misc_feature 1..22: note = chemically synthesized
  source 1..22: mol_type = other DNA
gcattttgattctccttgaaaa

SEQ ID NO: 37343 - DNA, 22 bp, synthetic construct
  misc_feature 1..22: note = chemically synthesized
  source 1..22: mol_type = other DNA
cattttgattctccttgaaaat

SEQ ID NO: 37344 - DNA, 22 bp, synthetic construct
  misc_feature 1..22: note = chemically synthesized
  source 1..22: mol_type = other DNA
tgattctccttgaaaatttatg

SEQ ID NO: 37345 - DNA, 22 bp, synthetic construct
  misc_feature 1..22: note = chemically synthesized
  source 1..22: mol_type = other DNA
gattctccttgaaaatttatgc

SEQ ID NO: 37346 - DNA, 22 bp, synthetic construct
  misc_feature 1..22: note = chemically synthesized
  source 1..22: mol_type = other DNA
attctccttgaaaatttatgcc

SEQ ID NO: 37347 - DNA, 22 bp, synthetic construct
  misc_feature 1..22: note = chemically synthesized
  source 1..22: mol_type = other DNA
tccttgaaaatttatgccatct

SEQ ID NO: 37348 - DNA, 22 bp, synthetic construct
  misc_feature 1..22: note = chemically synthesized
  source 1..22: mol_type = other DNA
cttgaaaatttatgccatctga

SEQ ID NO: 37349 - DNA, 22 bp, synthetic construct
  misc_feature 1..22: note = chemically synthesized
  source 1..22: mol_type = other DNA
gaaaatttatgccatctgataa

SEQ ID NO: 37350 - DNA, 22 bp, synthetic construct
  misc_feature 1..22: note = chemically synthesized
  source 1..22: mol_type = other DNA
aaaatttatgccatctgataag

SEQ ID NO: 37351 - DNA, 22 bp, synthetic construct
  misc_feature 1..22: note = chemically synthesized
  source 1..22: mol_type = other DNA
atgccatctgataagcggtaac

SEQ ID NO: 37352 - DNA, 22 bp, synthetic construct
  misc_feature 1..22: note = chemically synthesized
  source 1..22: mol_type = other DNA
tgccatctgataagcggtaacc

SEQ ID NO: 37353 - DNA, 22 bp, synthetic construct
  misc_feature 1..22: note = chemically synthesized
  source 1..22: mol_type = other DNA
ataagcggtaacctagttcccc

SEQ ID NO: 37354 - DNA, 22 bp, synthetic construct
  misc_feature 1..22: note = chemically synthesized
  source 1..22: mol_type = other DNA
gttcccctcctacatctcctgc

SEQ ID NO: 37355 - DNA, 22 bp, synthetic construct
  misc_feature 1..22: note = chemically synthesized
  source 1..22: mol_type = other DNA
ccctcctacatctcctgcccat

SEQ ID NO: 37356 - DNA, 22 bp, synthetic construct
  misc_feature 1..22: note = chemically synthesized
  source 1..22: mol_type = other DNA
ctacatctcctgcccatttctc

SEQ ID NO: 37357 - DNA, 22 bp, synthetic construct
  misc_feature 1..22: note = chemically synthesized
  source 1..22: mol_type = other DNA
catctcctgcccatttctcaaa

SEQ ID NO: 37358 - DNA, 22 bp, synthetic construct
  misc_feature 1..22: note = chemically synthesized
  source 1..22: mol_type = other DNA
ctgcccatttctcaaatctgtt

SEQ ID NO: 37359 - DNA, 22 bp, synthetic construct
  misc_feature 1..22: note = chemically synthesized
  source 1..22: mol_type = other DNA
cccatttctcaaatctgttcct

SEQ ID NO: 37360 - DNA, 22 bp, synthetic construct
  misc_feature 1..22: note = chemically synthesized
  source 1..22: mol_type = other DNA
ctcaaatctgttcctcctaccc

SEQ ID NO: 37361 - DNA, 22 bp, synthetic construct
  misc_feature 1..22: note = chemically synthesized
  source 1..22: mol_type = other DNA
tcaaatctgttcctcctaccca

SEQ ID NO: 37362 - DNA, 22 bp, synthetic construct
  misc_feature 1..22: note = chemically synthesized
  source 1..22: mol_type = other DNA
aaatctgttcctcctacccacc

SEQ ID NO: 37363 - DNA, 22 bp, synthetic construct
  misc_feature 1..22: note = chemically synthesized
  source 1..22: mol_type = other DNA
ttcctcctacccacccgatggg

SEQ ID NO: 37364 - DNA, 22 bp, synthetic construct
  misc_feature 1..22: note = chemically synthesized
  source 1..22: mol_type = other DNA
ctcctacccacccgatgggtgt

SEQ ID NO: 37365 - DNA, 22 bp, synthetic construct
  misc_feature 1..22: note = chemically synthesized
  source 1..22: mol_type = other DNA
ctacccacccgatgggtgtctg

SEQ ID NO: 37366 - DNA, 22 bp, synthetic construct
  misc_feature 1..22: note = chemically synthesized
  source 1..22: mol_type = other DNA
cccacccgatgggtgtctgtag

SEQ ID NO: 37367 - DNA, 22 bp, synthetic construct
  misc_feature 1..22: note = chemically synthesized
  source 1..22: mol_type = other DNA
taggaaacaggtacagaagtac

SEQ ID NO: 37368 - DNA, 22 bp, synthetic construct
  misc_feature 1..22: note = chemically synthesized
  source 1..22: mol_type = other DNA
attgtcttataagcattaaaaa

SEQ ID NO: 37369 - DNA, 22 bp, synthetic construct
  misc_feature 1..22: note = chemically synthesized
  source 1..22: mol_type = other DNA
tcttataagcattaaaaattaa

SEQ ID NO: 37370 - DNA, 22 bp, synthetic construct
  misc_feature 1..22: note = chemically synthesized
  source 1..22: mol_type = other DNA
ataagcattaaaaattaaagaa

SEQ ID NO: 37371 - DNA, 22 bp, synthetic construct
  misc_feature 1..22: note = chemically synthesized
  source 1..22: mol_type = other DNA
taagcattaaaaattaaagaac

SEQ ID NO: 37372 - DNA, 22 bp, synthetic construct
  misc_feature 1..22: note = chemically synthesized
  source 1..22: mol_type = other DNA
aaaattaaagaacaagcaaaca

SEQ ID NO: 37373 - DNA, 22 bp, synthetic construct
  misc_feature 1..22: note = chemically synthesized
  source 1..22: mol_type = other DNA
aagaacaagcaaacaccaccta

SEQ ID NO: 37374 - DNA, 22 bp, synthetic construct
  misc_feature 1..22: note = chemically synthesized
  source 1..22: mol_type = other DNA
aagctccaacatttattgtgtc

SEQ ID NO: 37375 - DNA, 22 bp, synthetic construct
  misc_feature 1..22: note = chemically synthesized
  source 1..22: mol_type = other DNA
caacatttattgtgtcaatgtt

SEQ ID NO: 37376 - DNA, 22 bp, synthetic construct
  misc_feature 1..22: note = chemically synthesized
  source 1..22: mol_type = other DNA
attgtgtcaatgttaagcacac

SEQ ID NO: 37377 - DNA, 22 bp, synthetic construct
  misc_feature 1..22: note = chemically synthesized
  source 1..22: mol_type = other DNA
ttgtgtcaatgttaagcacact

SEQ ID NO: 37378 - DNA, 22 bp, synthetic construct
  misc_feature 1..22: note = chemically synthesized
  source 1..22: mol_type = other DNA
tgtcaatgttaagcacactttt

SEQ ID NO: 37379 - DNA, 22 bp, synthetic construct
  misc_feature 1..22: note = chemically synthesized
  source 1..22: mol_type = other DNA
agcacactttttaaaagacaac

SEQ ID NO: 37380 - DNA, 22 bp, synthetic construct
  misc_feature 1..22: note = chemically synthesized
  source 1..22: mol_type = other DNA
tttaaaagacaacatagaatgt

SEQ ID NO: 37381 - DNA, 22 bp, synthetic construct
  misc_feature 1..22: note = chemically synthesized
  source 1..22: mol_type = other DNA
ttaaaagacaacatagaatgta

SEQ ID NO: 37382 - DNA, 22 bp, synthetic construct
  misc_feature 1..22: note = chemically synthesized
  source 1..22: mol_type = other DNA
taaaagacaacatagaatgtat

SEQ ID NO: 37383 - DNA, 22 bp, synthetic construct
  misc_feature 1..22: note = chemically synthesized
  source 1..22: mol_type = other DNA
aaaagacaacatagaatgtata

SEQ ID NO: 37384 - DNA, 22 bp, synthetic construct
  misc_feature 1..22: note = chemically synthesized
  source 1..22: mol_type = other DNA
aaagacaacatagaatgtatag

SEQ ID NO: 37385 - DNA, 22 bp, synthetic construct
  misc_feature 1..22: note = chemically synthesized
  source 1..22: mol_type = other DNA
gggactcatgcgcatttccaca

SEQ ID NO: 37386 - DNA, 22 bp, synthetic construct
  misc_feature 1..22: note = chemically synthesized
  source 1..22: mol_type = other DNA
atgcgcatttccacaatacagg

SEQ ID NO: 37387 - DNA, 22 bp, synthetic construct
  misc_feature 1..22: note = chemically synthesized
  source 1..22: mol_type = other DNA
ccacaatacaggtaattaggtt

SEQ ID NO: 37388 - DNA, 22 bp, synthetic construct
  misc_feature 1..22: note = chemically synthesized
  source 1..22: mol_type = other DNA
cacaatacaggtaattaggttg

SEQ ID NO: 37389 - DNA, 22 bp, synthetic construct
  misc_feature 1..22: note = chemically synthesized
  source 1..22: mol_type = other DNA
ggttggctggtttcagaagggc

SEQ ID NO: 37390 - DNA, 22 bp, synthetic construct
  misc_feature 1..22: note = chemically synthesized
  source 1..22: mol_type = other DNA
gctggtttcagaagggccaggg

SEQ ID NO: 37391 - DNA, 22 bp, synthetic construct
  misc_feature 1..22: note = chemically synthesized
  source 1..22: mol_type = other DNA
gtttcagaagggccagggcatc

SEQ ID NO: 37392 - DNA, 22 bp, synthetic construct
  misc_feature 1..22: note = chemically synthesized
  source 1..22: mol_type = other DNA
cagaagggccagggcatcactc

SEQ ID NO: 37393 - DNA, 22 bp, synthetic construct
  misc_feature 1..22: note = chemically synthesized
  source 1..22: mol_type = other DNA
agaagggccagggcatcactca

SEQ ID NO: 37394 - DNA, 22 bp, synthetic construct
  misc_feature 1..22: note = chemically synthesized
  source 1..22: mol_type = other DNA
atgacagcgatggtccacgggc

SEQ ID NO: 37395 - DNA, 22 bp, synthetic construct
  misc_feature 1..22: note = chemically synthesized
  source 1..22: mol_type = other DNA
tctatgggactgattcactgtt

SEQ ID NO: 37396 - DNA, 22 bp, synthetic construct
  misc_feature 1..22: note = chemically synthesized
  source 1..22: mol_type = other DNA
tatgggactgattcactgttcc

SEQ ID NO: 37397 - DNA, 22 bp, synthetic construct
  misc_feature 1..22: note = chemically synthesized
  source 1..22: mol_type = other DNA
tgggactgattcactgttccaa

SEQ ID NO: 37398 - DNA, 22 bp, synthetic construct
  misc_feature 1..22: note = chemically synthesized
  source 1..22: mol_type = other DNA
attcactgttccaatgtgggtc

SEQ ID NO: 37399 - DNA, 22 bp, synthetic construct
  misc_feature 1..22: note = chemically synthesized
  source 1..22: mol_type = other DNA
actgttccaatgtgggtctgtt

SEQ ID NO: 37400 - DNA, 22 bp, synthetic construct
  misc_feature 1..22: note = chemically synthesized
  source 1..22: mol_type = other DNA
ttccaatgtgggtctgtttttt

SEQ ID NO: 37401 - DNA, 22 bp, synthetic construct
  misc_feature 1..22: note = chemically synthesized
  source 1..22: mol_type = other DNA
caatgtgggtctgtttttttgt

SEQ ID NO: 37402 - DNA, 22 bp, synthetic construct
  misc_feature 1..22: note = chemically synthesized
  source 1..22: mol_type = other DNA
tttttttgtttttactttttat

SEQ ID NO: 37403 - DNA, 22 bp, synthetic construct
  misc_feature 1..22: note = chemically synthesized
  source 1..22: mol_type = other DNA
ttttgtttttactttttattaa

SEQ ID NO: 37404 - DNA, 22 bp, synthetic construct
  misc_feature 1..22: note = chemically synthesized
  source 1..22: mol_type = other DNA
tttgtttttactttttattaaa

SEQ ID NO: 37405 - DNA, 22 bp, synthetic construct
  misc_feature 1..22: note = chemically synthesized
  source 1..22: mol_type = other DNA
ttgtttttactttttattaaaa

SEQ ID NO: 37406 - DNA, 22 bp, synthetic construct
  misc_feature 1..22: note = chemically synthesized
  source 1..22: mol_type = other DNA
tgtttttactttttattaaaaa

SEQ ID NO: 37407 - DNA, 22 bp, synthetic construct
  misc_feature 1..22: note = chemically synthesized
  source 1..22: mol_type = other DNA
gtttttactttttattaaaaaa

SEQ ID NO: 37408 - DNA, 22 bp, synthetic construct
  misc_feature 1..22: note = chemically synthesized
  source 1..22: mol_type = other DNA
tttttactttttattaaaaaat

SEQ ID NO: 37409 - DNA, 22 bp, synthetic construct
  misc_feature 1..22: note = chemically synthesized
  source 1..22: mol_type = other DNA
ttactttttattaaaaaatata

SEQ ID NO: 37410 - DNA, 22 bp, synthetic construct
  misc_feature 1..22: note = chemically synthesized
  source 1..22: mol_type = other DNA
tactttttattaaaaaatataa

SEQ ID NO: 37411 - DNA, 22 bp, synthetic construct
  misc_feature 1..22: note = chemically synthesized
  source 1..22: mol_type = other DNA
actttttattaaaaaatataaa

SEQ ID NO: 37412 - DNA, 22 bp, synthetic construct
  misc_feature 1..22: note = chemically synthesized
  source 1..22: mol_type = other DNA
ctttttattaaaaaatataaat

SEQ ID NO: 37413 - DNA, 22 bp, synthetic construct
  misc_feature 1..22: note = chemically synthesized
  source 1..22: mol_type = other DNA
tttattaaaaaatataaataaa

SEQ ID NO: 37414 - DNA, 22 bp, synthetic construct
  misc_feature 1..22: note = chemically synthesized
  source 1..22: mol_type = other DNA
ttattaaaaaatataaataaaa

SEQ ID NO: 37415 - DNA, 22 bp, synthetic construct
  misc_feature 1..22: note = chemically synthesized
  source 1..22: mol_type = other DNA
tattaaaaaatataaataaaat

SEQ ID NO: 37416 - DNA, 22 bp, synthetic construct
  misc_feature 1..22: note = chemically synthesized
  source 1..22: mol_type = other DNA
attaaaaaatataaataaaatg

SEQ ID NO: 37417 - DNA, 22 bp, synthetic construct
  misc_feature 1..22: note = chemically synthesized
  source 1..22: mol_type = other DNA
ttaaaaaatataaataaaatgg

SEQ ID NO: 37418 - DNA, 22 bp, synthetic construct
  misc_feature 1..22: note = chemically synthesized
  source 1..22: mol_type = other DNA
aaaaatataaataaaatggcgc

SEQ ID NO: 37419 - DNA, 22 bp, synthetic construct
  misc_feature 1..22: note = chemically synthesized
  source 1..22: mol_type = other DNA
caggcctaggctggaaggactc

SEQ ID NO: 37420 - DNA, 22 bp, synthetic construct
  misc_feature 1..22: note = chemically synthesized
  source 1..22: mol_type = other DNA
ggctggaaggactctgcaggac

SEQ ID NO: 37421 - DNA, 22 bp, synthetic construct
  misc_feature 1..22: note = chemically synthesized
  source 1..22: mol_type = other DNA
gaaggactctgcaggactctgt

SEQ ID NO: 37422 - DNA, 22 bp, synthetic construct
  misc_feature 1..22: note = chemically synthesized
  source 1..22: mol_type = other DNA
tgcaggactctgtcttcgcaca

SEQ ID NO: 37423 - DNA, 22 bp, synthetic construct
  misc_feature 1..22: note = chemically synthesized
  source 1..22: mol_type = other DNA
caggactctgtcttcgcacaac

SEQ ID NO: 37424 - DNA, 22 bp, synthetic construct
  misc_feature 1..22: note = chemically synthesized
  source 1..22: mol_type = other DNA
tgtcttcgcacaacggcttctt

SEQ ID NO: 37425 - DNA, 22 bp, synthetic construct
  misc_feature 1..22: note = chemically synthesized
  source 1..22: mol_type = other DNA
tcttcgcacaacggcttcttgg

SEQ ID NO: 37426 - DNA, 22 bp, synthetic construct
  misc_feature 1..22: note = chemically synthesized
  source 1..22: mol_type = other DNA
cgcacaacggcttcttggaggc

SEQ ID NO: 37427 - DNA, 22 bp, synthetic construct
  misc_feature 1..22: note = chemically synthesized
  source 1..22: mol_type = other DNA
gcacaacggcttcttggaggct

SEQ ID NO: 37428 - DNA, 22 bp, synthetic construct
  misc_feature 1..22: note = chemically synthesized
  source 1..22: mol_type = other DNA
cttggaggctactgtcagaaaa

SEQ ID NO: 37429 - DNA, 22 bp, synthetic construct
  misc_feature 1..22: note = chemically synthesized
  source 1..22: mol_type = other DNA
ttggaggctactgtcagaaaac

SEQ ID NO: 37430 - DNA, 22 bp, synthetic construct
  misc_feature 1..22: note = chemically synthesized
  source 1..22: mol_type = other DNA
ggaggctactgtcagaaaacat

SEQ ID NO: 37431 - DNA, 22 bp, synthetic construct
  misc_feature 1..22: note = chemically synthesized
  source 1..22: mol_type = other DNA
gaggctactgtcagaaaacatc

SEQ ID NO: 37432 - DNA, 22 bp, synthetic construct
  misc_feature 1..22: note = chemically synthesized
  source 1..22: mol_type = other DNA
ctgtcagaaaacatcacaaact

SEQ ID NO: 37433 - DNA, 22 bp, synthetic construct
  misc_feature 1..22: note = chemically synthesized
  source 1..22: mol_type = other DNA
tcagaaaacatcacaaactagc

SEQ ID NO: 37434 - DNA, 22 bp, synthetic construct
  misc_feature 1..22: note = chemically synthesized
  source 1..22: mol_type = other DNA
gcaggatgacagaccacgctga

SEQ ID NO: 37435 - DNA, 22 bp, synthetic construct
  misc_feature 1..22: note = chemically synthesized
  source 1..22: mol_type = other DNA
acgtcgactgggcggcacgcgt

SEQ ID NO: 37436 - DNA, 22 bp, synthetic construct
  misc_feature 1..22: note = chemically synthesized
  source 1..22: mol_type = other DNA
ggcggcacgcgtccaccccacc

SEQ ID NO: 37437 - DNA, 22 bp, synthetic construct
  misc_feature 1..22: note = chemically synthesized
  source 1..22: mol_type = other DNA
ggggcttcaaattttctcagaa

SEQ ID NO: 37438 - DNA, 22 bp, synthetic construct
  misc_feature 1..22: note = chemically synthesized
  source 1..22: mol_type = other DNA
caaattttctcagaacttaagg

SEQ ID NO: 37439 - DNA, 22 bp, synthetic construct
  misc_feature 1..22: note = chemically synthesized
  source 1..22: mol_type = other DNA
aaattttctcagaacttaaggg

SEQ ID NO: 37440 - DNA, 22 bp, synthetic construct
  misc_feature 1..22: note = chemically synthesized
  source 1..22: mol_type = other DNA
tctcagaacttaagggctctcg

SEQ ID NO: 37441 - DNA, 22 bp, synthetic construct
  misc_feature 1..22: note = chemically synthesized
  source 1..22: mol_type = other DNA
ctcagaacttaagggctctcga

SEQ ID NO: 37442 - DNA, 22 bp, synthetic construct
  misc_feature 1..22: note = chemically synthesized
  source 1..22: mol_type = other DNA
tcagaacttaagggctctcgag

SEQ ID NO: 37443 - DNA, 22 bp, synthetic construct
  misc_feature 1..22: note = chemically synthesized
  source 1..22: mol_type = other DNA
agaacttaagggctctcgagct

SEQ ID NO: 37444 - DNA, 22 bp, synthetic construct
  misc_feature 1..22: note = chemically synthesized
  source 1..22: mol_type = other DNA
aagggctctcgagcttccatcc

SEQ ID NO: 37445 - DNA, 22 bp, synthetic construct
  misc_feature 1..22: note = chemically synthesized
  source 1..22: mol_type = other DNA
agggctctcgagcttccatccg

SEQ ID NO: 37446 - DNA, 22 bp, synthetic construct
  misc_feature 1..22: note = chemically synthesized
  source 1..22: mol_type = other DNA
tcgagcttccatccgaaaactg

SEQ ID NO: 37447 - DNA, 22 bp, synthetic construct
  misc_feature 1..22: note = chemically synthesized
  source 1..22: mol_type = other DNA
gagcttccatccgaaaactgcc

SEQ ID NO: 37448 - DNA, 22 bp, synthetic construct
  misc_feature 1..22: note = chemically synthesized
  source 1..22: mol_type = other DNA
ccatccgaaaactgccacacat

SEQ ID NO: 37449 - DNA, 22 bp, synthetic construct
  misc_feature 1..22: note = chemically synthesized
  source 1..22: mol_type = other DNA
catccgaaaactgccacacatc

SEQ ID NO: 37450 - DNA, 22 bp, synthetic construct
  misc_feature 1..22: note = chemically synthesized
  source 1..22: mol_type = other DNA
ccacacatcttgagctctctgg

SEQ ID NO: 37451 - DNA, 22 bp, synthetic construct
  misc_feature 1..22: note = chemically synthesized
  source 1..22: mol_type = other DNA
gagctctctgggtactacgccg

SEQ ID NO: 37452 - DNA, 22 bp, synthetic construct
  misc_feature 1..22: note = chemically synthesized
  source 1..22: mol_type = other DNA
agctctctgggtactacgccga

SEQ ID NO: 37453 - DNA, 22 bp, synthetic construct
  misc_feature 1..22: note = chemically synthesized
  source 1..22: mol_type = other DNA
tctgggtactacgccgaatggg

SEQ ID NO: 37454 - DNA, 22 bp, synthetic construct
  misc_feature 1..22: note = chemically synthesized
  source 1..22: mol_type = other DNA
tgggtactacgccgaatggggg

SEQ ID NO: 37455 - DNA, 22 bp, synthetic construct
  misc_feature 1..22: note = chemically synthesized
  source 1..22: mol_type = other DNA
ggtactacgccgaatgggggtg

SEQ ID NO: 37456 - DNA, 22 bp, synthetic construct
  misc_feature 1..22: note = chemically synthesized
  source 1..22: mol_type = other DNA
cgccgaatgggggtgtgtgaag

SEQ ID NO: 37457 - DNA, 22 bp, synthetic construct
  misc_feature 1..22: note = chemically synthesized
  source 1..22: mol_type = other DNA
gaaagaggttggagacagagga

SEQ ID NO: 37458 - DNA, 22 bp, synthetic construct
  misc_feature 1..22: note = chemically synthesized
  source 1..22: mol_type = other DNA
gagacagaggagggggaaaaaa

SEQ ID NO: 37459 - DNA, 22 bp, synthetic construct
  misc_feature 1..22: note = chemically synthesized
  source 1..22: mol_type = other DNA
ggcccaatgattttctgttctc

SEQ ID NO: 37460 - DNA, 22 bp, synthetic construct
  misc_feature 1..22: note = chemically synthesized
  source 1..22: mol_type = other DNA
gcccaatgattttctgttctct

SEQ ID NO: 37461 - DNA, 22 bp, synthetic construct
  misc_feature 1..22: note = chemically synthesized
  source 1..22: mol_type = other DNA
tctgttctctaactagcttttt

SEQ ID NO: 37462 - DNA, 22 bp, synthetic construct
  misc_feature 1..22: note = chemically synthesized
  source 1..22: mol_type = other DNA
ctgttctctaactagcttttta

SEQ ID NO: 37463 - DNA, 22 bp, synthetic construct
  misc_feature 1..22: note = chemically synthesized
  source 1..22: mol_type = other DNA
tgttctctaactagctttttaa

SEQ ID NO: 37464 - DNA, 22 bp, synthetic construct
  misc_feature 1..22: note = chemically synthesized
  source 1..22: mol_type = other DNA
ttctctaactagctttttaaaa

SEQ ID NO: 37465 - DNA, 22 bp, synthetic construct
  misc_feature 1..22: note = chemically synthesized
  source 1..22: mol_type = other DNA
tctaactagctttttaaaaatt

SEQ ID NO: 37466 - DNA, 22 bp, synthetic construct
  misc_feature 1..22: note = chemically synthesized
  source 1..22: mol_type = other DNA
taactagctttttaaaaattag

SEQ ID NO: 37467 - DNA, 22 bp, synthetic construct
  misc_feature 1..22: note = chemically synthesized
  source 1..22: mol_type = other DNA
actagctttttaaaaattagaa

SEQ ID NO: 37468 - DNA, 22 bp, synthetic construct
  misc_feature 1..22: note = chemically synthesized
  source 1..22: mol_type = other DNA
gctttttaaaaattagaactta

SEQ ID NO: 37469 - DNA, 22 bp, synthetic construct
  misc_feature 1..22: note = chemically synthesized
  source 1..22: mol_type = other DNA
tttaaaaattagaacttaaacc

SEQ ID NO: 37470 - DNA, 22 bp, synthetic construct
  misc_feature 1..22: note = chemically synthesized
  source 1..22: mol_type = other DNA
ttaaaaattagaacttaaacca

SEQ ID NO: 37471 - DNA, 22 bp, synthetic construct
  misc_feature 1..22: note = chemically synthesized
  source 1..22: mol_type = other DNA
taaaaattagaacttaaaccaa

SEQ ID NO: 37472 - DNA, 22 bp, synthetic construct
  misc_feature 1..22: note = chemically synthesized
  source 1..22: mol_type = other DNA
aaaaattagaacttaaaccaac

SEQ ID NO: 37473 - DNA, 22 bp, synthetic construct
  misc_feature 1..22: note = chemically synthesized
  source 1..22: mol_type = other DNA
aaaattagaacttaaaccaacc

SEQ ID NO: 37474 - DNA, 22 bp, synthetic construct
  misc_feature 1..22: note = chemically synthesized
  source 1..22: mol_type = other DNA
gaacttaaaccaaccacaggtc

SEQ ID NO: 37475 - DNA, 22 bp, synthetic construct
  misc_feature 1..22: note = chemically synthesized
  source 1..22: mol_type = other DNA
aaaccaaccacaggtcgagcca

SEQ ID NO: 37476 - DNA, 22 bp, synthetic construct
  misc_feature 1..22: note = chemically synthesized
  source 1..22: mol_type = other DNA
aaccaaccacaggtcgagccac

SEQ ID NO: 37477 - DNA, 22 bp, synthetic construct
  misc_feature 1..22: note = chemically synthesized
  source 1..22: mol_type = other DNA
gcatcttaagcatgatttcaaa

SEQ ID NO: 37478 - DNA, 22 bp, synthetic construct
  misc_feature 1..22: note = chemically synthesized
  source 1..22: mol_type = other DNA
aagcatgatttcaaactcagcc

SEQ ID NO: 37479 - DNA, 22 bp, synthetic construct
  misc_feature 1..22: note = chemically synthesized
  source 1..22: mol_type = other DNA
agcatgatttcaaactcagcct

SEQ ID NO: 37480 - DNA, 22 bp, synthetic construct
  misc_feature 1..22: note = chemically synthesized
  source 1..22: mol_type = other DNA
caaactcagcctcccctcccca

SEQ ID NO: 37481 - DNA, 22 bp, synthetic construct
  misc_feature 1..22: note = chemically synthesized
  source 1..22: mol_type = other DNA
aaactcagcctcccctccccaa

SEQ ID NO: 37482 - DNA, 22 bp, synthetic construct
  misc_feature 1..22: note = chemically synthesized
  source 1..22: mol_type = other DNA
agcctcccctccccaagtatct

SEQ ID NO: 37483 - DNA, 22 bp, synthetic construct
  misc_feature 1..22: note = chemically synthesized
  source 1..22: mol_type = other DNA
ccctccccaagtatctctgacc

SEQ ID NO: 37484 - DNA, 22 bp, synthetic construct
  misc_feature 1..22: note = chemically synthesized
  source 1..22: mol_type = other DNA
cccaagtatctctgacctctga

SEQ ID NO: 37485 - DNA, 22 bp, synthetic construct
  misc_feature 1..22: note = chemically synthesized
  source 1..22: mol_type = other DNA
tgacctctgagtcgtcttccca

SEQ ID NO: 37486 - DNA, 22 bp, synthetic construct
  misc_feature 1..22: note = chemically synthesized
  source 1..22: mol_type = other DNA
acctctgagtcgtcttcccatg

SEQ ID NO: 37487 - DNA, 22 bp, synthetic construct
  misc_feature 1..22: note = chemically synthesized
  source 1..22: mol_type = other DNA
tgagtcgtcttcccatgcctcc

SEQ ID NO: 37488 - DNA, 22 bp, synthetic construct
  misc_feature 1..22: note = chemically synthesized
  source 1..22: mol_type = other DNA
agtcgtcttcccatgcctccct

SEQ ID NO: 37489 - DNA, 22 bp, synthetic construct
  misc_feature 1..22: note = chemically synthesized
  source 1..22: mol_type = other DNA
cccatgcctccctcccttccgt

SEQ ID NO: 37490 - DNA, 22 bp, synthetic construct
  misc_feature 1..22: note = chemically synthesized
  source 1..22: mol_type = other DNA
ccatgcctccctcccttccgtc

SEQ ID NO: 37491 - DNA, 22 bp, synthetic construct
  misc_feature 1..22: note = chemically synthesized
  source 1..22: mol_type = other DNA
cctcccttccgtccccccaagg

SEQ ID NO: 37492 - DNA, 22 bp, synthetic construct
  misc_feature 1..22: note = chemically synthesized
  source 1..22: mol_type = other DNA
ccttccgtccccccaaggagga

SEQ ID NO: 37493 - DNA, 22 bp, synthetic construct
  misc_feature 1..22: note = chemically synthesized
  source 1..22: mol_type = other DNA
ccgtccccccaaggaggaccca

SEQ ID NO: 37494 - DNA, 22 bp, synthetic construct
  misc_feature 1..22: note = chemically synthesized
  source 1..22: mol_type = other DNA
cgtccccccaaggaggacccag

SEQ ID NO: 37495 - DNA, 22 bp, synthetic construct
  misc_feature 1..22: note = chemically synthesized
  source 1..22: mol_type = other DNA
cccaattgtatgatagtcctaa

SEQ ID NO: 37496 - DNA, 22 bp, synthetic construct
  misc_feature 1..22: note = chemically synthesized
  source 1..22: mol_type = other DNA
tatgatagtcctaataaactcg

SEQ ID NO: 37497 - DNA, 22 bp, synthetic construct
  misc_feature 1..22: note = chemically synthesized
  source 1..22: mol_type = other DNA
ataaactcgggacacacctgga

SEQ ID NO: 37498 - DNA, 22 bp, synthetic construct
  misc_feature 1..22: note = chemically synthesized
  source 1..22: mol_type = other DNA
gggacacacctggaaggaaaca

SEQ ID NO: 37499 - DNA, 22 bp, synthetic construct
  misc_feature 1..22: note = chemically synthesized
  source 1..22: mol_type = other DNA
gaaggaaacacttgcccttatg

SEQ ID NO: 37500 - DNA, 22 bp, synthetic construct
  misc_feature 1..22: note = chemically synthesized
  source 1..22: mol_type = other DNA
gcccttatgactgagaaaactt

SEQ ID NO: 37501 - DNA, 22 bp, synthetic construct
  misc_feature 1..22: note = chemically synthesized
  source 1..22: mol_type = other DNA
cccttatgactgagaaaactta

SEQ ID NO: 37502 - DNA, 22 bp, synthetic construct
  misc_feature 1..22: note = chemically synthesized
  source 1..22: mol_type = other DNA
atgactgagaaaacttagtaag

SEQ ID NO: 37503 - DNA, 22 bp, synthetic construct
  misc_feature 1..22: note = chemically synthesized
  source 1..22: mol_type = other DNA
tgactgagaaaacttagtaaga

SEQ ID NO: 37504 - DNA, 22 bp, synthetic construct
  misc_feature 1..22: note = chemically synthesized
  source 1..22: mol_type = other DNA
agaaaacttagtaagaaacagt

SEQ ID NO: 37505 - DNA, 22 bp, synthetic construct
  misc_feature 1..22: note = chemically synthesized
  source 1..22: mol_type = other DNA
agtaagaaacagtcctttggtt

SEQ ID NO: 37506 - DNA, 22 bp, synthetic construct
  misc_feature 1..22: note = chemically synthesized
  source 1..22: mol_type = other DNA
gtaagaaacagtcctttggttg

SEQ ID NO: 37507 - DNA, 22 bp, synthetic construct
  misc_feature 1..22: note = chemically synthesized
  source 1..22: mol_type = other DNA
tggttgaggagagcgggagagg

SEQ ID NO: 37508 - DNA, 22 bp, synthetic construct
  misc_feature 1..22: note = chemically synthesized
  source 1..22: mol_type = other DNA
ggttgaggagagcgggagaggg

SEQ ID NO: 37509 - DNA, 22 bp, synthetic construct
  misc_feature 1..22: note = chemically synthesized
  source 1..22: mol_type = other DNA
gttgaggagagcgggagaggga

SEQ ID NO: 37510 - DNA, 22 bp, synthetic construct
  misc_feature 1..22: note = chemically synthesized
  source 1..22: mol_type = other DNA
aggagagcgggagagggaggag

SEQ ID NO: 37511 - DNA, 22 bp, synthetic construct
  misc_feature 1..22: note = chemically synthesized
  source 1..22: mol_type = other DNA
ctcaaaataataataaaattat

SEQ ID NO: 37512 - DNA, 22 bp, synthetic construct
  misc_feature 1..22: note = chemically synthesized
  source 1..22: mol_type = other DNA
tcaaaataataataaaattata

SEQ ID NO: 37513 - DNA, 22 bp, synthetic construct
  misc_feature 1..22: note = chemically synthesized
  source 1..22: mol_type = other DNA
aaaataataataaaattataaa

SEQ ID NO: 37514 - DNA, 22 bp, synthetic construct
  misc_feature 1..22: note = chemically synthesized
  source 1..22: mol_type = other DNA
taaagaaacaaaaaatcaaaac

SEQ ID NO: 37515 - DNA, 22 bp, synthetic construct
  misc_feature 1..22: note = chemically synthesized
  source 1..22: mol_type = other DNA
atgtaaaagcagcacaacgaaa

SEQ ID NO: 37516 - DNA, 22 bp, synthetic construct
  misc_feature 1..22: note = chemically synthesized
  source 1..22: mol_type = other DNA
aacgtcaaagcagccaatgatt

SEQ ID NO: 37517 - DNA, 22 bp, synthetic construct
  misc_feature 1..22: note = chemically synthesized
  source 1..22: mol_type = other DNA
acaagaggcgaacaaatctctg

SEQ ID NO: 37518 - DNA, 22 bp, synthetic construct
  misc_feature 1..22: note = chemically synthesized
  source 1..22: mol_type = other DNA
caagaggcgaacaaatctctga

SEQ ID NO: 37519 - DNA, 22 bp, synthetic construct
  misc_feature 1..22: note = chemically synthesized
  source 1..22: mol_type = other DNA
tgaagagaaaaccagaacccaa

SEQ ID NO: 37520 - DNA, 22 bp, synthetic construct
  misc_feature 1..22: note = chemically synthesized
  source 1..22: mol_type = other DNA
aagagaaaaccagaacccaaaa

SEQ ID NO: 37521 - DNA, 22 bp, synthetic construct
  misc_feature 1..22: note = chemically synthesized
  source 1..22: mol_type = other DNA
ctctcaaattgcaccaaaaact

SEQ ID NO: 37522 - DNA, 22 bp, synthetic construct
  misc_feature 1..22: note = chemically synthesized
  source 1..22: mol_type = other DNA
tcaaattgcaccaaaaactgcc

SEQ ID NO: 37523 - DNA, 22 bp, synthetic construct
  misc_feature 1..22: note = chemically synthesized
  source 1..22: mol_type = other DNA
aaattgcaccaaaaactgcctg

SEQ ID NO: 37524 - DNA, 22 bp, synthetic construct
  misc_feature 1..22: note = chemically synthesized
  source 1..22: mol_type = other DNA
caccaaaaactgcctgtagttt

SEQ ID NO: 37525 - DNA, 22 bp, synthetic construct
  misc_feature 1..22: note = chemically synthesized
  source 1..22: mol_type = other DNA
cctgtagtttctttcaaacatg

SEQ ID NO: 37526 - DNA, 22 bp, synthetic construct
  misc_feature 1..22: note = chemically synthesized
  source 1..22: mol_type = other DNA
tagtttctttcaaacatgcagt

SEQ ID NO: 37527 - DNA, 22 bp, synthetic construct
  misc_feature 1..22: note = chemically synthesized
  source 1..22: mol_type = other DNA
ctttcaaacatgcagttttctt

SEQ ID NO: 37528 - DNA, 22 bp, synthetic construct
  misc_feature 1..22: note = chemically synthesized
  source 1..22: mol_type = other DNA
tttcaaacatgcagttttcttt

SEQ ID NO: 37529 - DNA, 22 bp, synthetic construct
  misc_feature 1..22: note = chemically synthesized
  source 1..22: mol_type = other DNA
tcaaacatgcagttttcttttc

SEQ ID NO: 37530 - DNA, 22 bp, synthetic construct
  misc_feature 1..22: note = chemically synthesized
  source 1..22: mol_type = other DNA
caaacatgcagttttcttttct

SEQ ID NO: 37531 - DNA, 22 bp, synthetic construct
  misc_feature 1..22: note = chemically synthesized
  source 1..22: mol_type = other DNA
aaacatgcagttttcttttctt

SEQ ID NO: 37532 - DNA, 22 bp, synthetic construct
  misc_feature 1..22: note = chemically synthesized
  source 1..22: mol_type = other DNA
tcttttcttttttggaaggggg

SEQ ID NO: 37533 - DNA, 22 bp, synthetic construct
  misc_feature 1..22: note = chemically synthesized
  source 1..22: mol_type = other DNA
cttttcttttttggaaggggga

SEQ ID NO: 37534 - DNA, 22 bp, synthetic construct
  misc_feature 1..22: note = chemically synthesized
  source 1..22: mol_type = other DNA
ttttcttttttggaagggggaa

SEQ ID NO: 37535 - DNA, 22 bp, synthetic construct
  misc_feature 1..22: note = chemically synthesized
  source 1..22: mol_type = other DNA
ttcttttttggaagggggaagg

SEQ ID NO: 37536 - DNA, 22 bp, synthetic construct
  misc_feature 1..22: note = chemically synthesized
  source 1..22: mol_type = other DNA
tcttttttggaagggggaaggc

SEQ ID NO: 37537 - DNA, 22 bp, synthetic construct
  misc_feature 1..22: note = chemically synthesized
  source 1..22: mol_type = other DNA
cttttttggaagggggaaggca

SEQ ID NO: 37538 - DNA, 22 bp, synthetic construct
  misc_feature 1..22: note = chemically synthesized
  source 1..22: mol_type = other DNA
ttttttggaagggggaaggcaa

SEQ ID NO: 37539 - DNA, 22 bp, synthetic construct
  misc_feature 1..22: note = chemically synthesized
  source 1..22: mol_type = other DNA
ttttggaagggggaaggcaatg

SEQ ID NO: 37540 - DNA, 22 bp, synthetic construct
  misc_feature 1..22: note = chemically synthesized
  source 1..22: mol_type = other DNA
tttggaagggggaaggcaatgg

SEQ ID NO: 37541 - DNA, 22 bp, synthetic construct
  misc_feature 1..22: note = chemically synthesized
  source 1..22: mol_type = other DNA
ttggaagggggaaggcaatggt

SEQ ID NO: 37542 - DNA, 22 bp, synthetic construct
  misc_feature 1..22: note = chemically synthesized
  source 1..22: mol_type = other DNA
tggaagggggaaggcaatggtg

SEQ ID NO: 37543 - DNA, 22 bp, synthetic construct
  misc_feature 1..22: note = chemically synthesized
  source 1..22: mol_type = other DNA
ggaagggggaaggcaatggtga

SEQ ID NO: 37544 - DNA, 22 bp, synthetic construct
  misc_feature 1..22: note = chemically synthesized
  source 1..22: mol_type = other DNA
gaagggggaaggcaatggtgaa

SEQ ID NO: 37545 - DNA, 22 bp, synthetic construct
  misc_feature 1..22: note = chemically synthesized
  source 1..22: mol_type = other DNA
ttttcctccggggttcctccct

SEQ ID NO: 37546 - DNA, 22 bp, synthetic construct
  misc_feature 1..22: note = chemically synthesized
  source 1..22: mol_type = other DNA
tcctccggggttcctcccttgc

SEQ ID NO: 37547 - DNA, 22 bp, synthetic construct
  misc_feature 1..22: note = chemically synthesized
  source 1..22: mol_type = other DNA
cctccggggttcctcccttgct

SEQ ID NO: 37548 - DNA, 22 bp, synthetic construct
  misc_feature 1..22: note = chemically synthesized
  source 1..22: mol_type = other DNA
ctccggggttcctcccttgctg

SEQ ID NO: 37549 - DNA, 22 bp, synthetic construct
  misc_feature 1..22: note = chemically synthesized
  source 1..22: mol_type = other DNA
cggggttcctcccttgctgtgg

SEQ ID NO: 37550 - DNA, 22 bp, synthetic construct
  misc_feature 1..22: note = chemically synthesized
  source 1..22: mol_type = other DNA
ctcccttgctgtggacattgac

SEQ ID NO: 37551 - DNA, 22 bp, synthetic construct
  misc_feature 1..22: note = chemically synthesized
  source 1..22: mol_type = other DNA
ccttgctgtggacattgacttg

SEQ ID NO: 37552 - DNA, 22 bp, synthetic construct
  misc_feature 1..22: note = chemically synthesized
  source 1..22: mol_type = other DNA
gctgtggacattgacttgaagc

SEQ ID NO: 37553 - DNA, 22 bp, synthetic construct
  misc_feature 1..22: note = chemically synthesized
  source 1..22: mol_type = other DNA
ctgtggacattgacttgaagca

SEQ ID NO: 37554 - DNA, 22 bp, synthetic construct
  misc_feature 1..22: note = chemically synthesized
  source 1..22: mol_type = other DNA
tggacattgacttgaagcagca

SEQ ID NO: 37555 - DNA, 22 bp, synthetic construct
  misc_feature 1..22: note = chemically synthesized
  source 1..22: mol_type = other DNA
acttgaagcagcagaactggga

SEQ ID NO: 37556 - DNA, 22 bp, synthetic construct
  misc_feature 1..22: note = chemically synthesized
  source 1..22: mol_type = other DNA
gaagcagcagaactgggagtcc

SEQ ID NO: 37557 - DNA, 22 bp, synthetic construct
  misc_feature 1..22: note = chemically synthesized
  source 1..22: mol_type = other DNA
aagcagcagaactgggagtccg

SEQ ID NO: 37558 - DNA, 22 bp, synthetic construct
  misc_feature 1..22: note = chemically synthesized
  source 1..22: mol_type = other DNA
ggagtccggatgtgccgaggaa

SEQ ID NO: 37559 - DNA, 22 bp, synthetic construct
  misc_feature 1..22: note = chemically synthesized
  source 1..22: mol_type = other DNA
ccactgtggcattccaggcctc

SEQ ID NO: 37560 - DNA, 22 bp, synthetic construct
  misc_feature 1..22: note = chemically synthesized
  source 1..22: mol_type = other DNA
tggcattccaggcctcgttgcc

SEQ ID NO: 37561 - DNA, 22 bp, synthetic construct
  misc_feature 1..22: note = chemically synthesized
  source 1..22: mol_type = other DNA
caggcctcgttgccatggcgac

SEQ ID NO: 37562 - DNA, 22 bp, synthetic construct
  misc_feature 1..22: note = chemically synthesized
  source 1..22: mol_type = other DNA
gttgccatggcgacccgaagca

SEQ ID NO: 37563 - DNA, 22 bp, synthetic construct
  misc_feature 1..22: note = chemically synthesized
  source 1..22: mol_type = other DNA
ccatggcgacccgaagcagggg

SEQ ID NO: 37564 - DNA, 22 bp, synthetic construct
  misc_feature 1..22: note = chemically synthesized
  source 1..22: mol_type = other DNA
gggcctcctctcccctgacttg

SEQ ID NO: 37565 - DNA, 22 bp, synthetic construct
  misc_feature 1..22: note = chemically synthesized
  source 1..22: mol_type = other DNA
ctctcccctgacttggcgccgc

SEQ ID NO: 37566 - DNA, 22 bp, synthetic construct
  misc_feature 1..22: note = chemically synthesized
  source 1..22: mol_type = other DNA
tcccctgacttggcgccgcagg

SEQ ID NO: 37567 - DNA, 22 bp, synthetic construct
  misc_feature 1..22: note = chemically synthesized
  source 1..22: mol_type = other DNA
ccctgacttggcgccgcaggag

SEQ ID NO: 37568 - DNA, 22 bp, synthetic construct
  misc_feature 1..22: note = chemically synthesized
  source 1..22: mol_type = other DNA
acttggcgccgcaggaggcccg

SEQ ID NO: 37569 - DNA, 22 bp, synthetic construct
  misc_feature 1..22: note = chemically synthesized
  source 1..22: mol_type = other DNA
ggcgccgcaggaggcccggggt

SEQ ID NO: 37570 - DNA, 22 bp, synthetic construct
  misc_feature 1..22: note = chemically synthesized
  source 1..22: mol_type = other DNA
gcgccgcaggaggcccggggtc

SEQ ID NO: 37571 - DNA, 22 bp, synthetic construct
  misc_feature 1..22: note = chemically synthesized
  source 1..22: mol_type = other DNA
gatctcagctgctctcacgcat

SEQ ID NO: 37572 - DNA, 22 bp, synthetic construct
  misc_feature 1..22: note = chemically synthesized
  source 1..22: mol_type = other DNA
agctgctctcacgcatcccacc

SEQ ID NO: 37573 - DNA, 22 bp, synthetic construct
  misc_feature 1..22: note = chemically synthesized
  source 1..22: mol_type = other DNA
ctctcacgcatcccacccctga

SEQ ID NO: 37574 - DNA, 22 bp, synthetic construct
  misc_feature 1..22: note = chemically synthesized
  source 1..22: mol_type = other DNA
tcacgcatcccacccctgagca

SEQ ID NO: 37575 - DNA, 22 bp, synthetic construct
  misc_feature 1..22: note = chemically synthesized
  source 1..22: mol_type = other DNA
acgcatcccacccctgagcaga

SEQ ID NO: 37576 - DNA, 22 bp, synthetic construct
  misc_feature 1..22: note = chemically synthesized
  source 1..22: mol_type = other DNA
agcagagcagcggagacctggg

SEQ ID NO: 37577 - DNA, 22 bp, synthetic construct
  misc_feature 1..22: note = chemically synthesized
  source 1..22: mol_type = other DNA
ggctgaggggcatgctgcgtcc

SEQ ID NO: 37578 - DNA, 22 bp, synthetic construct
  misc_feature 1..22: note = chemically synthesized
  source 1..22: mol_type = other DNA
aggggcatgctgcgtccaggtg

SEQ ID NO: 37579 - DNA, 22 bp, synthetic construct
  misc_feature 1..22: note = chemically synthesized
  source 1..22: mol_type = other DNA
cgtccaggtgggttctggggaa

SEQ ID NO: 37580 - DNA, 22 bp, synthetic construct
  misc_feature 1..22: note = chemically synthesized
  source 1..22: mol_type = other DNA
tggggaatcccattcccagtcc

SEQ ID NO: 37581 - DNA, 22 bp, synthetic construct
  misc_feature 1..22: note = chemically synthesized
  source 1..22: mol_type = other DNA
gggaatcccattcccagtccag

SEQ ID NO: 37582 - DNA, 22 bp, synthetic construct
  misc_feature 1..22: note = chemically synthesized
  source 1..22: mol_type = other DNA
ccagtccagcgctaagtcactg

SEQ ID NO: 37583 - DNA, 22 bp, synthetic construct
  misc_feature 1..22: note = chemically synthesized
  source 1..22: mol_type = other DNA
agtcactgtcgtcgaggcccct

SEQ ID NO: 37584 - DNA, 22 bp, synthetic construct
  misc_feature 1..22: note = chemically synthesized
  source 1..22: mol_type = other DNA
tcgtcgaggcccctttagctga

SEQ ID NO: 37585 - DNA, 22 bp, synthetic construct
  misc_feature 1..22: note = chemically synthesized
  source 1..22: mol_type = other DNA
tagctgataccccaatcaaacc

SEQ ID NO: 37586 - DNA, 22 bp, synthetic construct
  misc_feature 1..22: note = chemically synthesized
  source 1..22: mol_type = other DNA
agctgataccccaatcaaaccc

SEQ ID NO: 37587 - DNA, 22 bp, synthetic construct
  misc_feature 1..22: note = chemically synthesized
  source 1..22: mol_type = other DNA
gctgataccccaatcaaaccct

SEQ ID NO: 37588 - DNA, 22 bp, synthetic construct
  misc_feature 1..22: note = chemically synthesized
  source 1..22: mol_type = other DNA
ataccccaatcaaaccctttcg

SEQ ID NO: 37589 - DNA, 22 bp, synthetic construct
  misc_feature 1..22: note = chemically synthesized
  source 1..22: mol_type = other DNA
tcgtccaacctgctaccaatat

SEQ ID NO: 37590 - DNA, 22 bp, synthetic construct
  misc_feature 1..22: note = chemically synthesized
  source 1..22: mol_type = other DNA
cgtccaacctgctaccaatatt

SEQ ID NO: 37591 - DNA, 22 bp, synthetic construct
  misc_feature 1..22: note = chemically synthesized
  source 1..22: mol_type = other DNA
gtccaacctgctaccaatattc

SEQ ID NO: 37592 - DNA, 22 bp, synthetic construct
  misc_feature 1..22: note = chemically synthesized
  source 1..22: mol_type = other DNA
ctaccaatattcaaattctaat

SEQ ID NO: 37593 - DNA, 22 bp, synthetic construct
  misc_feature 1..22: note = chemically synthesized
  source 1..22: mol_type = other DNA
ccaatattcaaattctaataga

SEQ ID NO: 37594 - DNA, 22 bp, synthetic construct
  misc_feature 1..22: note = chemically synthesized
  source 1..22: mol_type = other DNA
aaattctaatagacaaagtata

SEQ ID NO: 37595 - DNA, 22 bp, synthetic construct
  misc_feature 1..22: note = chemically synthesized
  source 1..22: mol_type = other DNA
taatagacaaagtatatcatgg

SEQ ID NO: 37596 - DNA, 22 bp, synthetic construct
  misc_feature 1..22: note = chemically synthesized
  source 1..22: mol_type = other DNA
atagacaaagtatatcatgggc

SEQ ID NO: 37597 - DNA, 22 bp, synthetic construct
  misc_feature 1..22: note = chemically synthesized
  source 1..22: mol_type = other DNA
acagctatttaaaagcacagcc

SEQ ID NO: 37598 - DNA, 22 bp, synthetic construct
  misc_feature 1..22: note = chemically synthesized
  source 1..22: mol_type = other DNA
tttaaaagcacagcccccctat

SEQ ID NO: 37599 - DNA, 22 bp, synthetic construct
  misc_feature 1..22: note = chemically synthesized
  source 1..22: mol_type = other DNA
aaaagcacagcccccctatggg

SEQ ID NO: 37600 - DNA, 22 bp, synthetic construct
  misc_feature 1..22: note = chemically synthesized
  source 1..22: mol_type = other DNA
aaagcacagcccccctatgggt

SEQ ID NO: 37601 - DNA, 22 bp, synthetic construct
  misc_feature 1..22: note = chemically synthesized
  source 1..22: mol_type = other DNA
tgggtttaggggctcccgcttt

SEQ ID NO: 37602 - DNA, 22 bp, synthetic construct
  misc_feature 1..22: note = chemically synthesized
  source 1..22: mol_type = other DNA
aggggctcccgctttagaggat

SEQ ID NO: 37603 - DNA, 22 bp, synthetic construct
  misc_feature 1..22: note = chemically synthesized
  source 1..22: mol_type = other DNA
ggggctcccgctttagaggata

SEQ ID NO: 37604 - DNA, 22 bp, synthetic construct
  misc_feature 1..22: note = chemically synthesized
  source 1..22: mol_type = other DNA
ccgctttagaggatacttgggg

SEQ ID NO: 37605 - DNA, 22 bp, synthetic construct
  misc_feature 1..22: note = chemically synthesized
  source 1..22: mol_type = other DNA
tagaggatacttggggaaatgg

SEQ ID NO: 37606 - DNA, 22 bp, synthetic construct
  misc_feature 1..22: note = chemically synthesized
  source 1..22: mol_type = other DNA
agaggatacttggggaaatggc

SEQ ID NO: 37607 - DNA, 22 bp, synthetic construct
  misc_feature 1..22: note = chemically synthesized
  source 1..22: mol_type = other DNA
gaggatacttggggaaatggct

SEQ ID NO: 37608 - DNA, 22 bp, synthetic construct
  misc_feature 1..22: note = chemically synthesized
  source 1..22: mol_type = other DNA
ggggaaatggcttaatttgcct

SEQ ID NO: 37609 - DNA, 22 bp, synthetic construct
  misc_feature 1..22: note = chemically synthesized
  source 1..22: mol_type = other DNA
gggaaatggcttaatttgcctt

SEQ ID NO: 37610 - DNA, 22 bp, synthetic construct
  misc_feature 1..22: note = chemically synthesized
  source 1..22: mol_type = other DNA
aatttgccttttctaccatccc

SEQ ID NO: 37611 - DNA, 22 bp, synthetic construct
  misc_feature 1..22: note = chemically synthesized
  source 1..22: mol_type = other DNA
atttgccttttctaccatccct

SEQ ID NO: 37612 - DNA, 22 bp, synthetic construct
  misc_feature 1..22: note = chemically synthesized
  source 1..22: mol_type = other DNA
gccttttctaccatccctatga

SEQ ID NO: 37613 - DNA, 22 bp, synthetic construct
  misc_feature 1..22: note = chemically synthesized
  source 1..22: mol_type = other DNA
ccttttctaccatccctatgaa

SEQ ID NO: 37614 - DNA, 22 bp, synthetic construct
  misc_feature 1..22: note = chemically synthesized
  source 1..22: mol_type = other DNA
ttctaccatccctatgaaagat

SEQ ID NO: 37615 - DNA, 22 bp, synthetic construct
  misc_feature 1..22: note = chemically synthesized
  source 1..22: mol_type = other DNA
tctaccatccctatgaaagatc

SEQ ID NO: 37616 - DNA, 22 bp, synthetic construct
  misc_feature 1..22: note = chemically synthesized
  source 1..22: mol_type = other DNA
ctaccatccctatgaaagatct

SEQ ID NO: 37617 - DNA, 22 bp, synthetic construct
  misc_feature 1..22: note = chemically synthesized
  source 1..22: mol_type = other DNA
taccatccctatgaaagatctg

SEQ ID NO: 37618 - DNA, 22 bp, synthetic construct
  misc_feature 1..22: note = chemically synthesized
  source 1..22: mol_type = other DNA
ccatccctatgaaagatctgat

SEQ ID NO: 37619 - DNA, 22 bp, synthetic construct
  misc_feature 1..22: note = chemically synthesized
  source 1..22: mol_type = other DNA
tgaaagatctgatacacgtgct

SEQ ID NO: 37620 - DNA, 22 bp, synthetic construct
  misc_feature 1..22: note = chemically synthesized
  source 1..22: mol_type = other DNA
atacacgtgctcccttgaaata

SEQ ID NO: 37621 - DNA, 22 bp, synthetic construct
  misc_feature 1..22: note = chemically synthesized
  source 1..22: mol_type = other DNA
ccttgaaatagtttttgccact

SEQ ID NO: 37622 - DNA, 22 bp, synthetic construct
  misc_feature 1..22: note = chemically synthesized
  source 1..22: mol_type = other DNA
gaaatagtttttgccactttac

SEQ ID NO: 37623 - DNA, 22 bp, synthetic construct
  misc_feature 1..22: note = chemically synthesized
  source 1..22: mol_type = other DNA
aaatagtttttgccactttaca

SEQ ID NO: 37624 - DNA, 22 bp, synthetic construct
  misc_feature 1..22: note = chemically synthesized
  source 1..22: mol_type = other DNA
ttgccactttacagaaaggaaa

SEQ ID NO: 37625 - DNA, 22 bp, synthetic construct
  misc_feature 1..22: note = chemically synthesized
  source 1..22: mol_type = other DNA
tgccactttacagaaaggaaaa

SEQ ID NO: 37626 - DNA, 22 bp, synthetic construct
  misc_feature 1..22: note = chemically synthesized
  source 1..22: mol_type = other DNA
gccactttacagaaaggaaaaa

SEQ ID NO: 37627 - DNA, 22 bp, synthetic construct
  misc_feature 1..22: note = chemically synthesized
  source 1..22: mol_type = other DNA
ccactttacagaaaggaaaaac

SEQ ID NO: 37628 - DNA, 22 bp, synthetic construct
  misc_feature 1..22: note = chemically synthesized
  source 1..22: mol_type = other DNA
tacagaaaggaaaaacgtattt

SEQ ID NO: 37629 - DNA, 22 bp, synthetic construct
  misc_feature 1..22: note = chemically synthesized
  source 1..22: mol_type = other DNA
acagaaaggaaaaacgtatttg

SEQ ID NO: 37630 - DNA, 22 bp, synthetic construct
  misc_feature 1..22: note = chemically synthesized
  source 1..22: mol_type = other DNA
cagaaaggaaaaacgtatttgg

SEQ ID NO: 37631 - DNA, 22 bp, synthetic construct
  misc_feature 1..22: note = chemically synthesized
  source 1..22: mol_type = other DNA
ggatcaaccatcgagctgtgtt

SEQ ID NO: 37632 - DNA, 22 bp, synthetic construct
  misc_feature 1..22: note = chemically synthesized
  source 1..22: mol_type = other DNA
gatcaaccatcgagctgtgttc

SEQ ID NO: 37633 - DNA, 22 bp, synthetic construct
  misc_feature 1..22: note = chemically synthesized
  source 1..22: mol_type = other DNA
tgttcagccaagtttaggttct

SEQ ID NO: 37634 - DNA, 22 bp, synthetic construct
  misc_feature 1..22: note = chemically synthesized
  source 1..22: mol_type = other DNA
agccaagtttaggttctcaagt

SEQ ID NO: 37635 - DNA, 22 bp, synthetic construct
  misc_feature 1..22: note = chemically synthesized
  source 1..22: mol_type = other DNA
aggttctcaagtacaatgaccc

SEQ ID NO: 37636 - DNA, 22 bp, synthetic construct
  misc_feature 1..22: note = chemically synthesized
  source 1..22: mol_type = other DNA
ggttctcaagtacaatgacccg

SEQ ID NO: 37637 - DNA, 22 bp, synthetic construct
  misc_feature 1..22: note = chemically synthesized
  source 1..22: mol_type = other DNA
tcaagtacaatgacccgtgtga

SEQ ID NO: 37638 - DNA, 22 bp, synthetic construct
  misc_feature 1..22: note = chemically synthesized
  source 1..22: mol_type = other DNA
aagtacaatgacccgtgtgaac

SEQ ID NO: 37639 - DNA, 22 bp, synthetic construct
  misc_feature 1..22: note = chemically synthesized
  source 1..22: mol_type = other DNA
gattggtctctttcccatttgg

SEQ ID NO: 37640 - DNA, 22 bp, synthetic construct
  misc_feature 1..22: note = chemically synthesized
  source 1..22: mol_type = other DNA
gtctctttcccatttggaaggg

SEQ ID NO: 37641 - DNA, 22 bp, synthetic construct
  misc_feature 1..22: note = chemically synthesized
  source 1..22: mol_type = other DNA
tttcccatttggaagggaggaa

SEQ ID NO: 37642 - DNA, 22 bp, synthetic construct
  misc_feature 1..22: note = chemically synthesized
  source 1..22: mol_type = other DNA
tcccatttggaagggaggaatt

SEQ ID NO: 37643 - DNA, 22 bp, synthetic construct
  misc_feature 1..22: note = chemically synthesized
  source 1..22: mol_type = other DNA
cccatttggaagggaggaatta

SEQ ID NO: 37644 - DNA, 22 bp, synthetic construct
  misc_feature 1..22: note = chemically synthesized
  source 1..22: mol_type = other DNA
ccatttggaagggaggaattaa

SEQ ID NO: 37645 - DNA, 22 bp, synthetic construct
  misc_feature 1..22: note = chemically synthesized
  source 1..22: mol_type = other DNA
ggaagggaggaattaatggtat

SEQ ID NO: 37646 - DNA, 22 bp, synthetic construct
  misc_feature 1..22: note = chemically synthesized
  source 1..22: mol_type = other DNA
gaagggaggaattaatggtatc

SEQ ID NO: 37647 - DNA, 22 bp, synthetic construct
  misc_feature 1..22: note = chemically synthesized
  source 1..22: mol_type = other DNA
atggtatcccatgaccgtagat

SEQ ID NO: 37648 - DNA, 22 bp, synthetic construct
  misc_feature 1..22: note = chemically synthesized
  source 1..22: mol_type = other DNA
ggaaatagagagagagaaagag

SEQ ID NO: 37649 - DNA, 22 bp, synthetic construct
  misc_feature 1..22: note = chemically synthesized
  source 1..22: mol_type = other DNA
ccctaaaggctgagtcactggc

SEQ ID NO: 37650 - DNA, 22 bp, synthetic construct
  misc_feature 1..22: note = chemically synthesized
  source 1..22: mol_type = other DNA
aaggctgagtcactggcctcgt

SEQ ID NO: 37651 - DNA, 22 bp, synthetic construct
  misc_feature 1..22: note = chemically synthesized
  source 1..22: mol_type = other DNA
agtcactggcctcgtgctgtat

SEQ ID NO: 37652 - DNA, 22 bp, synthetic construct
  misc_feature 1..22: note = chemically synthesized
  source 1..22: mol_type = other DNA
gcctcgtgctgtatgtagtaaa

SEQ ID NO: 37653 - DNA, 22 bp, synthetic construct
  misc_feature 1..22: note = chemically synthesized
  source 1..22: mol_type = other DNA
gtgctgtatgtagtaaattaaa

SEQ ID NO: 37654 - DNA, 22 bp, synthetic construct
  misc_feature 1..22: note = chemically synthesized
  source 1..22: mol_type = other DNA
tatgtagtaaattaaacagcgg

SEQ ID NO: 37655 - DNA, 22 bp, synthetic construct
  misc_feature 1..22: note = chemically synthesized
  source 1..22: mol_type = other DNA
aacagcgggctaatgggataac

SEQ ID NO: 37656 - DNA, 22 bp, synthetic construct
  misc_feature 1..22: note = chemically synthesized
  source 1..22: mol_type = other DNA
atgggataacgagatgccagca

SEQ ID NO: 37657 - DNA, 22 bp, synthetic construct
  misc_feature 1..22: note = chemically synthesized
  source 1..22: mol_type = other DNA
atagctatagcagccctagagt

SEQ ID NO: 37658 - DNA, 22 bp, synthetic construct
  misc_feature 1..22: note = chemically synthesized
  source 1..22: mol_type = other DNA
tagcagccctagagtaaataca

SEQ ID NO: 37659 - DNA, 22 bp, synthetic construct
  misc_feature 1..22: note = chemically synthesized
  source 1..22: mol_type = other DNA
gagtaaatacacatcataccaa

SEQ ID NO: 37660 - DNA, 22 bp, synthetic construct
  misc_feature 1..22: note = chemically synthesized
  source 1..22: mol_type = other DNA
cctctatgtgttctgatgtcca

SEQ ID NO: 37661 - DNA, 22 bp, synthetic construct
  misc_feature 1..22: note = chemically synthesized
  source 1..22: mol_type = other DNA
tatgtgttctgatgtccatttc

SEQ ID NO: 37662 - DNA, 22 bp, synthetic construct
  misc_feature 1..22: note = chemically synthesized
  source 1..22: mol_type = other DNA
tgtgttctgatgtccatttctc

SEQ ID NO: 37663 - DNA, 22 bp, synthetic construct
  misc_feature 1..22: note = chemically synthesized
  source 1..22: mol_type = other DNA
tgatgtccatttctctaacaat

SEQ ID NO: 37664 - DNA, 22 bp, synthetic construct
  misc_feature 1..22: note = chemically synthesized
  source 1..22: mol_type = other DNA
atgtccatttctctaacaatgg

SEQ ID NO: 37665 - DNA, 22 bp, synthetic construct
  misc_feature 1..22: note = chemically synthesized
  source 1..22: mol_type = other DNA
ctctaacaatgggttcgtttat

SEQ ID NO: 37666 - DNA, 22 bp, synthetic construct
  misc_feature 1..22: note = chemically synthesized
  source 1..22: mol_type = other DNA
tctaacaatgggttcgtttatt

SEQ ID NO: 37667 - DNA, 22 bp, synthetic construct
  misc_feature 1..22: note = chemically synthesized
  source 1..22: mol_type = other DNA
taacaatgggttcgtttatttt

SEQ ID NO: 37668 - DNA, 22 bp, synthetic construct
  misc_feature 1..22: note = chemically synthesized
  source 1..22: mol_type = other DNA
acaatgggttcgtttattttct

SEQ ID NO: 37669 - DNA, 22 bp, synthetic construct
  misc_feature 1..22: note = chemically synthesized
  source 1..22: mol_type = other DNA
gtttattttctattgggaaata

SEQ ID NO: 37670 - DNA, 22 bp, synthetic construct
  misc_feature 1..22: note = chemically synthesized
  source 1..22: mol_type = other DNA
attttctattgggaaatatgca

SEQ ID NO: 37671 - DNA, 22 bp, synthetic construct
  misc_feature 1..22: note = chemically synthesized
  source 1..22: mol_type = other DNA
ttttctattgggaaatatgcag

SEQ ID NO: 37672 - DNA, 22 bp, synthetic construct
  misc_feature 1..22: note = chemically synthesized
  source 1..22: mol_type = other DNA
tctattgggaaatatgcagggc

SEQ ID NO: 37673 - DNA, 22 bp, synthetic construct
  misc_feature 1..22: note = chemically synthesized
  source 1..22: mol_type = other DNA
ctattgggaaatatgcagggct

SEQ ID NO: 37674 - DNA, 22 bp, synthetic construct
  misc_feature 1..22: note = chemically synthesized
  source 1..22: mol_type = other DNA
tattgggaaatatgcagggctt

SEQ ID NO: 37675 - DNA, 22 bp, synthetic construct
  misc_feature 1..22: note = chemically synthesized
  source 1..22: mol_type = other DNA
ttgggaaatatgcagggcttta

SEQ ID NO: 37676 - DNA, 22 bp, synthetic construct
  misc_feature 1..22: note = chemically synthesized
  source 1..22: mol_type = other DNA
ggaaatatgcagggctttagga

SEQ ID NO: 37677 - DNA, 22 bp, synthetic construct
  misc_feature 1..22: note = chemically synthesized
  source 1..22: mol_type = other DNA
taggagacaactaggaaaatct

SEQ ID NO: 37678 - DNA, 22 bp, synthetic construct
  misc_feature 1..22: note = chemically synthesized
  source 1..22: mol_type = other DNA
aggagacaactaggaaaatctg

SEQ ID NO: 37679 - DNA, 22 bp, synthetic construct
  misc_feature 1..22: note = chemically synthesized
  source 1..22: mol_type = other DNA
ggagacaactaggaaaatctgc

SEQ ID NO: 37680 - DNA, 22 bp, synthetic construct
  misc_feature 1..22: note = chemically synthesized
  source 1..22: mol_type = other DNA
ggaaaatctgctagatggctca

SEQ ID NO: 37681 - DNA, 22 bp, synthetic construct
  misc_feature 1..22: note = chemically synthesized
  source 1..22: mol_type = other DNA
ctagatggctcatgccttttaa

SEQ ID NO: 37682 - DNA, 22 bp, synthetic construct
  misc_feature 1..22: note = chemically synthesized
  source 1..22: mol_type = other DNA
gatggctcatgccttttaaaag

SEQ ID NO: 37683 - DNA, 22 bp, synthetic construct
  misc_feature 1..22: note = chemically synthesized
  source 1..22: mol_type = other DNA
atgccttttaaaagttagcagt

SEQ ID NO: 37684 - DNA, 22 bp, synthetic construct
  misc_feature 1..22: note = chemically synthesized
  source 1..22: mol_type = other DNA
ttaaaagttagcagtcttttaa

SEQ ID NO: 37685 - DNA, 22 bp, synthetic construct
  misc_feature 1..22: note = chemically synthesized
  source 1..22: mol_type = other DNA
taaaagttagcagtcttttaag

SEQ ID NO: 37686 - DNA, 22 bp, synthetic construct
  misc_feature 1..22: note = chemically synthesized
  source 1..22: mol_type = other DNA
aaaagttagcagtcttttaaga

SEQ ID NO: 37687 - DNA, 22 bp, synthetic construct
  misc_feature 1..22: note = chemically synthesized
  source 1..22: mol_type = other DNA
aaagttagcagtcttttaagaa

SEQ ID NO: 37688 - DNA, 22 bp, synthetic construct
  misc_feature 1..22: note = chemically synthesized
  source 1..22: mol_type = other DNA
gcagtcttttaagaaacatttt

SEQ ID NO: 37689 - DNA, 22 bp, synthetic construct
  misc_feature 1..22: note = chemically synthesized
  source 1..22: mol_type = other DNA
ttaagaaacatttttccaagca

SEQ ID NO: 37690 - DNA, 22 bp, synthetic construct
  misc_feature 1..22: note = chemically synthesized
  source 1..22: mol_type = other DNA
taagaaacatttttccaagcag

SEQ ID NO: 37691 - DNA, 22 bp, synthetic construct
  misc_feature 1..22: note = chemically synthesized
  source 1..22: mol_type = other DNA
aagaaacatttttccaagcagg

SEQ ID NO: 37692 - DNA, 22 bp, synthetic construct
  misc_feature 1..22: note = chemically synthesized
  source 1..22: mol_type = other DNA
agaaacatttttccaagcaggt

SEQ ID NO: 37693 - DNA, 22 bp, synthetic construct
  misc_feature 1..22: note = chemically synthesized
  source 1..22: mol_type = other DNA
ttccaagcaggttgagagaact

SEQ ID NO: 37694 - DNA, 22 bp, synthetic construct
  misc_feature 1..22: note = chemically synthesized
  source 1..22: mol_type = other DNA
tccaagcaggttgagagaactc

SEQ ID NO: 37695 - DNA, 22 bp, synthetic construct
  misc_feature 1..22: note = chemically synthesized
  source 1..22: mol_type = other DNA
ccaagcaggttgagagaactct

SEQ ID NO: 37696 - DNA, 22 bp, synthetic construct
  misc_feature 1..22: note = chemically synthesized
  source 1..22: mol_type = other DNA
caagcaggttgagagaactctg

SEQ ID NO: 37697 - DNA, 22 bp, synthetic construct
  misc_feature 1..22: note = chemically synthesized
  source 1..22: mol_type = other DNA
agagaactctgccaatcccatc

SEQ ID NO: 37698 - DNA, 22 bp, synthetic construct
  misc_feature 1..22: note = chemically synthesized
  source 1..22: mol_type = other DNA
tgccaatcccatcctcatatcg

SEQ ID NO: 37699 - DNA, 22 bp, synthetic construct
  misc_feature 1..22: note = chemically synthesized
  source 1..22: mol_type = other DNA
ccaatcccatcctcatatcggc

SEQ ID NO: 37700 - DNA, 22 bp, synthetic construct
  misc_feature 1..22: note = chemically synthesized
  source 1..22: mol_type = other DNA
atatcggcaaagttcccacaat

SEQ ID NO: 37701 - DNA, 22 bp, synthetic construct
  misc_feature 1..22: note = chemically synthesized
  source 1..22: mol_type = other DNA
ccacaattttttttttatggga

SEQ ID NO: 37702 - DNA, 22 bp, synthetic construct
  misc_feature 1..22: note = chemically synthesized
  source 1..22: mol_type = other DNA
tttttttatgggaagttgtctg

SEQ ID NO: 37703 - DNA, 22 bp, synthetic construct
  misc_feature 1..22: note = chemically synthesized
  source 1..22: mol_type = other DNA
ttttttatgggaagttgtctga

SEQ ID NO: 37704 - DNA, 22 bp, synthetic construct
  misc_feature 1..22: note = chemically synthesized
  source 1..22: mol_type = other DNA
tttttatgggaagttgtctgaa

SEQ ID NO: 37705 - DNA, 22 bp, synthetic construct
  misc_feature 1..22: note = chemically synthesized
  source 1..22: mol_type = other DNA
ttttatgggaagttgtctgaaa

SEQ ID NO: 37706 - DNA, 22 bp, synthetic construct
  misc_feature 1..22: note = chemically synthesized
  source 1..22: mol_type = other DNA
tttatgggaagttgtctgaaaa

SEQ ID NO: 37707 - DNA, 22 bp, synthetic construct
  misc_feature 1..22: note = chemically synthesized
  source 1..22: mol_type = other DNA
ttatgggaagttgtctgaaaaa

SEQ ID NO: 37708 - DNA, 22 bp, synthetic construct
  misc_feature 1..22: note = chemically synthesized
  source 1..22: mol_type = other DNA
tatgggaagttgtctgaaaaaa

SEQ ID NO: 37709 - DNA, 22 bp, synthetic construct
  misc_feature 1..22: note = chemically synthesized
  source 1..22: mol_type = other DNA
atgggaagttgtctgaaaaaaa

SEQ ID NO: 37710 - DNA, 22 bp, synthetic construct
  misc_feature 1..22: note = chemically synthesized
  source 1..22: mol_type = other DNA
tgggaagttgtctgaaaaaaag

SEQ ID NO: 37711 - DNA, 22 bp, synthetic construct
  misc_feature 1..22: note = chemically synthesized
  source 1..22: mol_type = other DNA
tctgaaaaaaagagaatgggat

SEQ ID NO: 37712 - DNA, 22 bp, synthetic construct
  misc_feature 1..22: note = chemically synthesized
  source 1..22: mol_type = other DNA
aaaaaaagagaatgggatgggt

SEQ ID NO: 37713 - DNA, 22 bp, synthetic construct
  misc_feature 1..22: note = chemically synthesized
  source 1..22: mol_type = other DNA
ctgaacacaccaggcccaggga

SEQ ID NO: 37714 - DNA, 22 bp, synthetic construct
  misc_feature 1..22: note = chemically synthesized
  source 1..22: mol_type = other DNA
aacacaccaggcccagggacaa

SEQ ID NO: 37715 - DNA, 22 bp, synthetic construct
  misc_feature 1..22: note = chemically synthesized
  source 1..22: mol_type = other DNA
caacacagtcataagaagtcat

SEQ ID NO: 37716 - DNA, 22 bp, synthetic construct
  misc_feature 1..22: note = chemically synthesized
  source 1..22: mol_type = other DNA
atgtgtgtacggagggggaaaa

SEQ ID NO: 37717 - DNA, 22 bp, synthetic construct
  misc_feature 1..22: note = chemically synthesized
  source 1..22: mol_type = other DNA
aaaacaagaaaacactgtattt

SEQ ID NO: 37718 - DNA, 22 bp, synthetic construct
  misc_feature 1..22: note = chemically synthesized
  source 1..22: mol_type = other DNA
aaacaagaaaacactgtatttc

SEQ ID NO: 37719 - DNA, 22 bp, synthetic construct
  misc_feature 1..22: note = chemically synthesized
  source 1..22: mol_type = other DNA
tatttcctccctcagtctctgt

SEQ ID NO: 37720 - DNA, 22 bp, synthetic construct
  misc_feature 1..22: note = chemically synthesized
  source 1..22: mol_type = other DNA
cctccctcagtctctgtgagca

SEQ ID NO: 37721 - DNA, 22 bp, synthetic construct
  misc_feature 1..22: note = chemically synthesized
  source 1..22: mol_type = other DNA
ctccctcagtctctgtgagcaa

SEQ ID NO: 37722 - DNA, 22 bp, synthetic construct
  misc_feature 1..22: note = chemically synthesized
  source 1..22: mol_type = other DNA
cctcagtctctgtgagcaaagt

SEQ ID NO: 37723 - DNA, 22 bp, synthetic construct
  misc_feature 1..22: note = chemically synthesized
  source 1..22: mol_type = other DNA
agtctctgtgagcaaagtacta

SEQ ID NO: 37724 - DNA, 22 bp, synthetic construct
  misc_feature 1..22: note = chemically synthesized
  source 1..22: mol_type = other DNA
tgtgagcaaagtactacaagca

SEQ ID NO: 37725 - DNA, 22 bp, synthetic construct
  misc_feature 1..22: note = chemically synthesized
  source 1..22: mol_type = other DNA
tgagcaaagtactacaagcagg

SEQ ID NO: 37726 - DNA, 22 bp, synthetic construct
  misc_feature 1..22: note = chemically synthesized
  source 1..22: mol_type = other DNA
caagcaggagaggatggggcct

SEQ ID NO: 37727 - DNA, 22 bp, synthetic construct
  misc_feature 1..22: note = chemically synthesized
  source 1..22: mol_type = other DNA
aggcttctcaactccttttcag

SEQ ID NO: 37728 - DNA, 22 bp, synthetic construct
  misc_feature 1..22: note = chemically synthesized
  source 1..22: mol_type = other DNA
ctcaactccttttcaggaaggc

SEQ ID NO: 37729 - DNA, 22 bp, synthetic construct
  misc_feature 1..22: note = chemically synthesized
  source 1..22: mol_type = other DNA
tcaactccttttcaggaaggcc

SEQ ID NO: 37730 - DNA, 22 bp, synthetic construct
  misc_feature 1..22: note = chemically synthesized
  source 1..22: mol_type = other DNA
aactccttttcaggaaggcccg

SEQ ID NO: 37731 - DNA, 22 bp, synthetic construct
  misc_feature 1..22: note = chemically synthesized
  source 1..22: mol_type = other DNA
cttttcaggaaggcccgaaata

SEQ ID NO: 37732 - DNA, 22 bp, synthetic construct
  misc_feature 1..22: note = chemically synthesized
  source 1..22: mol_type = other DNA
ttcaggaaggcccgaaataatc

SEQ ID NO: 37733 - DNA, 22 bp, synthetic construct
  misc_feature 1..22: note = chemically synthesized
  source 1..22: mol_type = other DNA
tcaggaaggcccgaaataatcc

SEQ ID NO: 37734 - DNA, 22 bp, synthetic construct
  misc_feature 1..22: note = chemically synthesized
  source 1..22: mol_type = other DNA
caggaaggcccgaaataatccc

SEQ ID NO: 37735 - DNA, 22 bp, synthetic construct
  misc_feature 1..22: note = chemically synthesized
  source 1..22: mol_type = other DNA
aggaaggcccgaaataatccca

SEQ ID NO: 37736 - DNA, 22 bp, synthetic construct
  misc_feature 1..22: note = chemically synthesized
  source 1..22: mol_type = other DNA
tcagcaaactgtgtctgtgaat

SEQ ID NO: 37737 - DNA, 22 bp, synthetic construct
  misc_feature 1..22: note = chemically synthesized
  source 1..22: mol_type = other DNA
cagcaaactgtgtctgtgaata

SEQ ID NO: 37738 - DNA, 22 bp, synthetic construct
  misc_feature 1..22: note = chemically synthesized
  source 1..22: mol_type = other DNA
agcaaactgtgtctgtgaataa

SEQ ID NO: 37739 - DNA, 22 bp, synthetic construct
  misc_feature 1..22: note = chemically synthesized
  source 1..22: mol_type = other DNA
tgtctgtgaataaaccacctca

SEQ ID NO: 37740 - DNA, 22 bp, synthetic construct
  misc_feature 1..22: note = chemically synthesized
  source 1..22: mol_type = other DNA
tgaataaaccacctcatttcct

SEQ ID NO: 37741 - DNA, 22 bp, synthetic construct
  misc_feature 1..22: note = chemically synthesized
  source 1..22: mol_type = other DNA
atttccttatttctccaattgg

SEQ ID NO: 37742 - DNA, 22 bp, synthetic construct
  misc_feature 1..22: note = chemically synthesized
  source 1..22: mol_type = other DNA
ccttatttctccaattggaatt

SEQ ID NO: 37743 - DNA, 22 bp, synthetic construct
  misc_feature 1..22: note = chemically synthesized
  source 1..22: mol_type = other DNA
cttatttctccaattggaatta

SEQ ID NO: 37744 - DNA, 22 bp, synthetic construct
  misc_feature 1..22: note = chemically synthesized
  source 1..22: mol_type = other DNA
atttctccaattggaattatac

SEQ ID NO: 37745 - DNA, 22 bp, synthetic construct
  misc_feature 1..22: note = chemically synthesized
  source 1..22: mol_type = other DNA
tttctccaattggaattatacc

SEQ ID NO: 37746 - DNA, 22 bp, synthetic construct
  misc_feature 1..22: note = chemically synthesized
  source 1..22: mol_type = other DNA
ctccaattggaattatacctaa

SEQ ID NO: 37747 - DNA, 22 bp, synthetic construct
  misc_feature 1..22: note = chemically synthesized
  source 1..22: mol_type = other DNA
tccaattggaattatacctaag

SEQ ID NO: 37748 - DNA, 22 bp, synthetic construct
  misc_feature 1..22: note = chemically synthesized
  source 1..22: mol_type = other DNA
caattggaattatacctaagcc

SEQ ID NO: 37749 - DNA, 22 bp, synthetic construct
  misc_feature 1..22: note = chemically synthesized
  source 1..22: mol_type = other DNA
gaattatacctaagccatctcc

SEQ ID NO: 37750 - DNA, 22 bp, synthetic construct
  misc_feature 1..22: note = chemically synthesized
  source 1..22: mol_type = other DNA
tacctaagccatctcccgccac

SEQ ID NO: 37751 - DNA, 22 bp, synthetic construct
  misc_feature 1..22: note = chemically synthesized
  source 1..22: mol_type = other DNA
agccatctcccgccacttcctt

SEQ ID NO: 37752 - DNA, 22 bp, synthetic construct
  misc_feature 1..22: note = chemically synthesized
  source 1..22: mol_type = other DNA
ccgccacttcctttcaagttct

SEQ ID NO: 37753 - DNA, 22 bp, synthetic construct
  misc_feature 1..22: note = chemically synthesized
  source 1..22: mol_type = other DNA
cctttcaagttctcacttctag

SEQ ID NO: 37754 - DNA, 22 bp, synthetic construct
  misc_feature 1..22: note = chemically synthesized
  source 1..22: mol_type = other DNA
ctttcaagttctcacttctagc

SEQ ID NO: 37755 - DNA, 22 bp, synthetic construct
  misc_feature 1..22: note = chemically synthesized
  source 1..22: mol_type = other DNA
tcaagttctcacttctagcatt

SEQ ID NO: 37756 - DNA, 22 bp, synthetic construct
  misc_feature 1..22: note = chemically synthesized
  source 1..22: mol_type = other DNA
caagttctcacttctagcatta

SEQ ID NO: 37757 - DNA, 22 bp, synthetic construct
  misc_feature 1..22: note = chemically synthesized
  source 1..22: mol_type = other DNA
aagttctcacttctagcattat

SEQ ID NO: 37758 - DNA, 22 bp, synthetic construct
  misc_feature 1..22: note = chemically synthesized
  source 1..22: mol_type = other DNA
tcacttctagcattatgattat

SEQ ID NO: 37759 - DNA, 22 bp, synthetic construct
  misc_feature 1..22: note = chemically synthesized
  source 1..22: mol_type = other DNA
acttctagcattatgattatat

SEQ ID NO: 37760 - DNA, 22 bp, synthetic construct
  misc_feature 1..22: note = chemically synthesized
  source 1..22: mol_type = other DNA
ctagcattatgattatatacaa

SEQ ID NO: 37761 - DNA, 22 bp, synthetic construct
  misc_feature 1..22: note = chemically synthesized
  source 1..22: mol_type = other DNA
tagcattatgattatatacaat

SEQ ID NO: 37762 - DNA, 22 bp, synthetic construct
  misc_feature 1..22: note = chemically synthesized
  source 1..22: mol_type = other DNA
gcattatgattatatacaatat

SEQ ID NO: 37763 - DNA, 22 bp, synthetic construct
  misc_feature 1..22: note = chemically synthesized
  source 1..22: mol_type = other DNA
tgattatatacaatatgtactt

SEQ ID NO: 37764 - DNA, 22 bp, synthetic construct
  misc_feature 1..22: note = chemically synthesized
  source 1..22: mol_type = other DNA
tatacaatatgtacttattgca

SEQ ID NO: 37765 - DNA, 22 bp, synthetic construct
  misc_feature 1..22: note = chemically synthesized
  source 1..22: mol_type = other DNA
attgcatatacaaaaatggtat

SEQ ID NO: 37766 - DNA, 22 bp, synthetic construct
  misc_feature 1..22: note = chemically synthesized
  source 1..22: mol_type = other DNA
ttgcatatacaaaaatggtatt

SEQ ID NO: 37767 - DNA, 22 bp, synthetic construct
  misc_feature 1..22: note = chemically synthesized
  source 1..22: mol_type = other DNA
catatacaaaaatggtatttaa

SEQ ID NO: 37768 - DNA, 22 bp, synthetic construct
  misc_feature 1..22: note = chemically synthesized
  source 1..22: mol_type = other DNA
aaataaacagttctatatctac

SEQ ID NO: 37769 - DNA, 22 bp, synthetic construct
  misc_feature 1..22: note = chemically synthesized
  source 1..22: mol_type = other DNA
aataaacagttctatatctaca

SEQ ID NO: 37770 - DNA, 22 bp, synthetic construct
  misc_feature 1..22: note = chemically synthesized
  source 1..22: mol_type = other DNA
tatatctacagaatgccctggg

SEQ ID NO: 37771 - DNA, 22 bp, synthetic construct
  misc_feature 1..22: note = chemically synthesized
  source 1..22: mol_type = other DNA
tatctacagaatgccctgggaa

SEQ ID NO: 37772 - DNA, 22 bp, synthetic construct
  misc_feature 1..22: note = chemically synthesized
  source 1..22: mol_type = other DNA
cagaatgccctgggaaaaactc

SEQ ID NO: 37773 - DNA, 22 bp, synthetic construct
  misc_feature 1..22: note = chemically synthesized
  source 1..22: mol_type = other DNA
ggaaaaactcaactacttcaca

SEQ ID NO: 37774 - DNA, 22 bp, synthetic construct
  misc_feature 1..22: note = chemically synthesized
  source 1..22: mol_type = other DNA
aactacttcacactttctgcca

SEQ ID NO: 37775 - DNA, 22 bp, synthetic construct
  misc_feature 1..22: note = chemically synthesized
  source 1..22: mol_type = other DNA
cttcacactttctgccatggcc

SEQ ID NO: 37776 - DNA, 22 bp, synthetic construct
  misc_feature 1..22: note = chemically synthesized
  source 1..22: mol_type = other DNA
cacactttctgccatggccagt

SEQ ID NO: 37777 - DNA, 22 bp, synthetic construct
  misc_feature 1..22: note = chemically synthesized
  source 1..22: mol_type = other DNA
acactttctgccatggccagtg

SEQ ID NO: 37778 - DNA, 22 bp, synthetic construct
  misc_feature 1..22: note = chemically synthesized
  source 1..22: mol_type = other DNA
tctgccatggccagtgcaaatg

SEQ ID NO: 37779 - DNA, 22 bp, synthetic construct
  misc_feature 1..22: note = chemically synthesized
  source 1..22: mol_type = other DNA
ctgccatggccagtgcaaatga

SEQ ID NO: 37780 - DNA, 22 bp, synthetic construct
  misc_feature 1..22: note = chemically synthesized
  source 1..22: mol_type = other DNA
tgccatggccagtgcaaatgaa

SEQ ID NO: 37781 - DNA, 22 bp, synthetic construct
  misc_feature 1..22: note = chemically synthesized
  source 1..22: mol_type = other DNA
ccatggccagtgcaaatgaaga

SEQ ID NO: 37782 - DNA, 22 bp, synthetic construct
  misc_feature 1..22: note = chemically synthesized
  source 1..22: mol_type = other DNA
tgttcacctcacttcttagcaa

SEQ ID NO: 37783 - DNA, 22 bp, synthetic construct
  misc_feature 1..22: note = chemically synthesized
  source 1..22: mol_type = other DNA
acctcacttcttagcaaccttt

SEQ ID NO: 37784 - DNA, 22 bp, synthetic construct
  misc_feature 1..22: note = chemically synthesized
  source 1..22: mol_type = other DNA
acttcttagcaacctttgtaat

SEQ ID NO: 37785 - DNA, 22 bp, synthetic construct
  misc_feature 1..22: note = chemically synthesized
  source 1..22: mol_type = other DNA
cttagcaacctttgtaatgtgt

SEQ ID NO: 37786 - DNA, 22 bp, synthetic construct
  misc_feature 1..22: note = chemically synthesized
  source 1..22: mol_type = other DNA
ttagcaacctttgtaatgtgtt

SEQ ID NO: 37787 - DNA, 22 bp, synthetic construct
  misc_feature 1..22: note = chemically synthesized
  source 1..22: mol_type = other DNA
agcaacctttgtaatgtgttgg

SEQ ID NO: 37788 - DNA, 22 bp, synthetic construct
  misc_feature 1..22: note = chemically synthesized
  source 1..22: mol_type = other DNA
gcaacctttgtaatgtgttggt

SEQ ID NO: 37789 - DNA, 22 bp, synthetic construct
  misc_feature 1..22: note = chemically synthesized
  source 1..22: mol_type = other DNA
tgtaatgtgttggttccagcct

SEQ ID NO: 37790 - DNA, 22 bp, synthetic construct
  misc_feature 1..22: note = chemically synthesized
  source 1..22: mol_type = other DNA
gtaatgtgttggttccagcctt

SEQ ID NO: 37791 - DNA, 22 bp, synthetic construct
  misc_feature 1..22: note = chemically synthesized
  source 1..22: mol_type = other DNA
taatgtgttggttccagccttt

SEQ ID NO: 37792 - DNA, 22 bp, synthetic construct
  misc_feature 1..22: note = chemically synthesized
  source 1..22: mol_type = other DNA
gttccagcctttttgtaggtcc

SEQ ID NO: 37793 - DNA, 22 bp, synthetic construct
  misc_feature 1..22: note = chemically synthesized
  source 1..22: mol_type = other DNA
cagcctttttgtaggtcctaaa

SEQ ID NO: 37794 - DNA, 22 bp, synthetic construct
  misc_feature 1..22: note = chemically synthesized
  source 1..22: mol_type = other DNA
tttgtaggtcctaaacaaagag

SEQ ID NO: 37795 - DNA, 22 bp, synthetic construct
  misc_feature 1..22: note = chemically synthesized
  source 1..22: mol_type = other DNA
ttgtaggtcctaaacaaagaga

SEQ ID NO: 37796 - DNA, 22 bp, synthetic construct
  misc_feature 1..22: note = chemically synthesized
  source 1..22: mol_type = other DNA
tgtaggtcctaaacaaagagag

SEQ ID NO: 37797 - DNA, 22 bp, synthetic construct
  misc_feature 1..22: note = chemically synthesized
  source 1..22: mol_type = other DNA
gtaggtcctaaacaaagagagg

SEQ ID NO: 37798 - DNA, 22 bp, synthetic construct
  misc_feature 1..22: note = chemically synthesized
  source 1..22: mol_type = other DNA
taggtcctaaacaaagagagga

SEQ ID NO: 37799 - DNA, 22 bp, synthetic construct
  misc_feature 1..22: note = chemically synthesized
  source 1..22: mol_type = other DNA
aacaaagagaggatagcaaatg

SEQ ID NO: 37800 - DNA, 22 bp, synthetic construct
  misc_feature 1..22: note = chemically synthesized
  source 1..22: mol_type = other DNA
aggaaggaggtaatataggcac

SEQ ID NO: 37801 - DNA, 22 bp, synthetic construct
  misc_feature 1..22: note = chemically synthesized
  source 1..22: mol_type = other DNA
gaagagtttctggtttaaaatc

SEQ ID NO: 37802 - DNA, 22 bp, synthetic construct
  misc_feature 1..22: note = chemically synthesized
  source 1..22: mol_type = other DNA
ctggtttaaaatctgtgagaaa

SEQ ID NO: 37803 - DNA, 22 bp, synthetic construct
  misc_feature 1..22: note = chemically synthesized
  source 1..22: mol_type = other DNA
tggtttaaaatctgtgagaaat

SEQ ID NO: 37804 - DNA, 22 bp, synthetic construct
  misc_feature 1..22: note = chemically synthesized
  source 1..22: mol_type = other DNA
gtttaaaatctgtgagaaatag

SEQ ID NO: 37805 - DNA, 22 bp, synthetic construct
  misc_feature 1..22: note = chemically synthesized
  source 1..22: mol_type = other DNA
aaaatctgtgagaaatagaatt

SEQ ID NO: 37806 - DNA, 22 bp, synthetic construct
  misc_feature 1..22: note = chemically synthesized
  source 1..22: mol_type = other DNA
aaatctgtgagaaatagaattt

SEQ ID NO: 37807 - DNA, 22 bp, synthetic construct
  misc_feature 1..22: note = chemically synthesized
  source 1..22: mol_type = other DNA
tgagaaatagaatttgcggtat

SEQ ID NO: 37808 - DNA, 22 bp, synthetic construct
  misc_feature 1..22: note = chemically synthesized
  source 1..22: mol_type = other DNA
gcggtattcctgtttattaagt

SEQ ID NO: 37809 - DNA, 22 bp, synthetic construct
  misc_feature 1..22: note = chemically synthesized
  source 1..22: mol_type = other DNA
cggtattcctgtttattaagtt

SEQ ID NO: 37810 - DNA, 22 bp, synthetic construct
  misc_feature 1..22: note = chemically synthesized
  source 1..22: mol_type = other DNA
ctgtttattaagttgttctcaa

SEQ ID NO: 37811 - DNA, 22 bp, synthetic construct
  misc_feature 1..22: note = chemically synthesized
  source 1..22: mol_type = other DNA
tttattaagttgttctcaaatg

SEQ ID NO: 37812 - DNA, 22 bp, synthetic construct
  misc_feature 1..22: note = chemically synthesized
  source 1..22: mol_type = other DNA
attaagttgttctcaaatgaag

SEQ ID NO: 37813 - DNA, 22 bp, synthetic construct
  misc_feature 1..22: note = chemically synthesized
  source 1..22: mol_type = other DNA
ttaagttgttctcaaatgaaga

SEQ ID NO: 37814 - DNA, 22 bp, synthetic construct
  misc_feature 1..22: note = chemically synthesized
  source 1..22: mol_type = other DNA
agttgttctcaaatgaagatta

SEQ ID NO: 37815 - DNA, 22 bp, synthetic construct
  misc_feature 1..22: note = chemically synthesized
  source 1..22: mol_type = other DNA
ttctcaaatgaagattaaaaag

SEQ ID NO: 37816 - DNA, 22 bp, synthetic construct
  misc_feature 1..22: note = chemically synthesized
  source 1..22: mol_type = other DNA
tcaaatgaagattaaaaagaac

SEQ ID NO: 37817 - DNA, 22 bp, synthetic construct
  misc_feature 1..22: note = chemically synthesized
  source 1..22: mol_type = other DNA
aaatgaagattaaaaagaacat

SEQ ID NO: 37818 - DNA, 22 bp, synthetic construct
  misc_feature 1..22: note = chemically synthesized
  source 1..22: mol_type = other DNA
aaaagaacattttaagcatcag

SEQ ID NO: 37819 - DNA, 22 bp, synthetic construct
  misc_feature 1..22: note = chemically synthesized
  source 1..22: mol_type = other DNA
taagcatcagttcaggtatgta

SEQ ID NO: 37820 - DNA, 22 bp, synthetic construct
  misc_feature 1..22: note = chemically synthesized
  source 1..22: mol_type = other DNA
aagcatcagttcaggtatgtag

SEQ ID NO: 37821 - DNA, 22 bp, synthetic construct
  misc_feature 1..22: note = chemically synthesized
  source 1..22: mol_type = other DNA
agcatcagttcaggtatgtaga

SEQ ID NO: 37822 - DNA, 22 bp, synthetic construct
  misc_feature 1..22: note = chemically synthesized
  source 1..22: mol_type = other DNA
aggtatgtagagaacattccat

SEQ ID NO: 37823 - DNA, 22 bp, synthetic construct
  misc_feature 1..22: note = chemically synthesized
  source 1..22: mol_type = other DNA
catcagcacgtcaagcctgtta

SEQ ID NO: 37824 - DNA, 22 bp, synthetic construct
  misc_feature 1..22: note = chemically synthesized
  source 1..22: mol_type = other DNA
ttacaaaaacttacttgaggat

SEQ ID NO: 37825 - DNA, 22 bp, synthetic construct
  misc_feature 1..22: note = chemically synthesized
  source 1..22: mol_type = other DNA
caaaaacttacttgaggatttt

SEQ ID NO: 37826 - DNA, 22 bp, synthetic construct
  misc_feature 1..22: note = chemically synthesized
  source 1..22: mol_type = other DNA
acttgaggattttaagagacat

SEQ ID NO: 37827 - DNA, 22 bp, synthetic construct
  misc_feature 1..22: note = chemically synthesized
  source 1..22: mol_type = other DNA
cttgaggattttaagagacatt

SEQ ID NO: 37828 - DNA, 22 bp, synthetic construct
  misc_feature 1..22: note = chemically synthesized
  source 1..22: mol_type = other DNA
gaggattttaagagacattaat

SEQ ID NO: 37829 - DNA, 22 bp, synthetic construct
  misc_feature 1..22: note = chemically synthesized
  source 1..22: mol_type = other DNA
aggattttaagagacattaatg

SEQ ID NO: 37830 - DNA, 22 bp, synthetic construct
  misc_feature 1..22: note = chemically synthesized
  source 1..22: mol_type = other DNA
taagagacattaatgttcttag

SEQ ID NO: 37831 - DNA, 22 bp, synthetic construct
  misc_feature 1..22: note = chemically synthesized
  source 1..22: mol_type = other DNA
aagagacattaatgttcttagt

SEQ ID NO: 37832 - DNA, 22 bp, synthetic construct
  misc_feature 1..22: note = chemically synthesized
  source 1..22: mol_type = other DNA
agagacattaatgttcttagta

SEQ ID NO: 37833 - DNA, 22 bp, synthetic construct
  misc_feature 1..22: note = chemically synthesized
  source 1..22: mol_type = other DNA
atgttcttagtagttcctcatt

SEQ ID NO: 37834 - DNA, 22 bp, synthetic construct
  misc_feature 1..22: note = chemically synthesized
  source 1..22: mol_type = other DNA
ttagtagttcctcatttaaaaa

SEQ ID NO: 37835 - DNA, 22 bp, synthetic construct
  misc_feature 1..22: note = chemically synthesized
  source 1..22: mol_type = other DNA
agtagttcctcatttaaaaaaa

SEQ ID NO: 37836 - DNA, 22 bp, synthetic construct
  misc_feature 1..22: note = chemically synthesized
  source 1..22: mol_type = other DNA
gtagttcctcatttaaaaaaaa

SEQ ID NO: 37837 - DNA, 22 bp, synthetic construct
  misc_feature 1..22: note = chemically synthesized
  source 1..22: mol_type = other DNA
ctcatttaaaaaaaaaagatca

SEQ ID NO: 37838 - DNA, 22 bp, synthetic construct
  misc_feature 1..22: note = chemically synthesized
  source 1..22: mol_type = other DNA
atttaaaaaaaaaagatcatga

SEQ ID NO: 37839 - DNA, 22 bp, synthetic construct
  misc_feature 1..22: note = chemically synthesized
  source 1..22: mol_type = other DNA
aaaaaaaaaagatcatgaattc

SEQ ID NO: 37840 - DNA, 22 bp, synthetic construct
  misc_feature 1..22: note = chemically synthesized
  source 1..22: mol_type = other DNA
aaaaaaaaagatcatgaattca

SEQ ID NO: 37841 - DNA, 22 bp, synthetic construct
  misc_feature 1..22: note = chemically synthesized
  source 1..22: mol_type = other DNA
atcttactattggaaatgtgca

SEQ ID NO: 37842 - DNA, 22 bp, synthetic construct
  misc_feature 1..22: note = chemically synthesized
  source 1..22: mol_type = other DNA
actattggaaatgtgcatgtta

SEQ ID NO: 37843 - DNA, 22 bp, synthetic construct
  misc_feature 1..22: note = chemically synthesized
  source 1..22: mol_type = other DNA
ctattggaaatgtgcatgttat

SEQ ID NO: 37844 - DNA, 22 bp, synthetic construct
  misc_feature 1..22: note = chemically synthesized
  source 1..22: mol_type = other DNA
ttggaaatgtgcatgttatttt

SEQ ID NO: 37845 - DNA, 22 bp, synthetic construct
  misc_feature 1..22: note = chemically synthesized
  source 1..22: mol_type = other DNA
gaaatgtgcatgttattttata

SEQ ID NO: 37846 - DNA, 22 bp, synthetic construct
  misc_feature 1..22: note = chemically synthesized
  source 1..22: mol_type = other DNA
ttttatattaagattttaaatt

SEQ ID NO: 37847 - DNA, 22 bp, synthetic construct
  misc_feature 1..22: note = chemically synthesized
  source 1..22: mol_type = other DNA
tatattaagattttaaatttta

SEQ ID NO: 37848 - DNA, 22 bp, synthetic construct
  misc_feature 1..22: note = chemically synthesized
  source 1..22: mol_type = other DNA
atattaagattttaaattttag

SEQ ID NO: 37849 - DNA, 22 bp, synthetic construct
  misc_feature 1..22: note = chemically synthesized
  source 1..22: mol_type = other DNA
tattaagattttaaattttaga

SEQ ID NO: 37850 - DNA, 22 bp, synthetic construct
  misc_feature 1..22: note = chemically synthesized
  source 1..22: mol_type = other DNA
agattttaaattttagagttct

SEQ ID NO: 37851 - DNA, 22 bp, synthetic construct
  misc_feature 1..22: note = chemically synthesized
  source 1..22: mol_type = other DNA
taaattttagagttctggatac

SEQ ID NO: 37852 - DNA, 22 bp, synthetic construct
  misc_feature 1..22: note = chemically synthesized
  source 1..22: mol_type = other DNA
aaattttagagttctggataca

SEQ ID NO: 37853 - DNA, 22 bp, synthetic construct
  misc_feature 1..22: note = chemically synthesized
  source 1..22: mol_type = other DNA
aattttagagttctggatacaa

SEQ ID NO: 37854 - DNA, 22 bp, synthetic construct
  misc_feature 1..22: note = chemically synthesized
  source 1..22: mol_type = other DNA
tagagttctggatacaaaatat

SEQ ID NO: 37855 - DNA, 22 bp, synthetic construct
  misc_feature 1..22: note = chemically synthesized
  source 1..22: mol_type = other DNA
agagttctggatacaaaatatc

SEQ ID NO: 37856 - DNA, 22 bp, synthetic construct
  misc_feature 1..22: note = chemically synthesized
  source 1..22: mol_type = other DNA
gagttctggatacaaaatatca

SEQ ID NO: 37857 - DNA, 22 bp, synthetic construct
  misc_feature 1..22: note = chemically synthesized
  source 1..22: mol_type = other DNA
tggatacaaaatatcatttata

SEQ ID NO: 37858 - DNA, 22 bp, synthetic construct
  misc_feature 1..22: note = chemically synthesized
  source 1..22: mol_type = other DNA
gatacaaaatatcatttataag

SEQ ID NO: 37859 - DNA, 22 bp, synthetic construct
  misc_feature 1..22: note = chemically synthesized
  source 1..22: mol_type = other DNA
ataagtgatatcatgttggcta

SEQ ID NO: 37860 - DNA, 22 bp, synthetic construct
  misc_feature 1..22: note = chemically synthesized
  source 1..22: mol_type = other DNA
taagtgatatcatgttggctag

SEQ ID NO: 37861 - DNA, 22 bp, synthetic construct
  misc_feature 1..22: note = chemically synthesized
  source 1..22: mol_type = other DNA
gctaggttctcatgtttctatt

SEQ ID NO: 37862 - DNA, 22 bp, synthetic construct
  misc_feature 1..22: note = chemically synthesized
  source 1..22: mol_type = other DNA
ggttctcatgtttctattgttc

SEQ ID NO: 37863 - DNA, 22 bp, synthetic construct
  misc_feature 1..22: note = chemically synthesized
  source 1..22: mol_type = other DNA
tcatgtttctattgttcatcag

SEQ ID NO: 37864 - DNA, 22 bp, synthetic construct
  misc_feature 1..22: note = chemically synthesized
  source 1..22: mol_type = other DNA
atgtttctattgttcatcagct

SEQ ID NO: 37865 - DNA, 22 bp, synthetic construct
  misc_feature 1..22: note = chemically synthesized
  source 1..22: mol_type = other DNA
ctattgttcatcagcttcagaa

SEQ ID NO: 37866 - DNA, 22 bp, synthetic construct
  misc_feature 1..22: note = chemically synthesized
  source 1..22: mol_type = other DNA
tattgttcatcagcttcagaaa

SEQ ID NO: 37867 - DNA, 22 bp, synthetic construct
  misc_feature 1..22: note = chemically synthesized
  source 1..22: mol_type = other DNA
ttgttcatcagcttcagaaata

SEQ ID NO: 37868 - DNA, 22 bp, synthetic construct
  misc_feature 1..22: note = chemically synthesized
  source 1..22: mol_type = other DNA
ttcatcagcttcagaaataata

SEQ ID NO: 37869 - DNA, 22 bp, synthetic construct
  misc_feature 1..22: note = chemically synthesized
  source 1..22: mol_type = other DNA
atcagcttcagaaataatattt

SEQ ID NO: 37870 - DNA, 22 bp, synthetic construct
  misc_feature 1..22: note = chemically synthesized
  source 1..22: mol_type = other DNA
cagaaataatattttatcagaa

SEQ ID NO: 37871 - DNA, 22 bp, synthetic construct
  misc_feature 1..22: note = chemically synthesized
  source 1..22: mol_type = other DNA
agaaataatattttatcagaag

SEQ ID NO: 37872 - DNA, 22 bp, synthetic construct
  misc_feature 1..22: note = chemically synthesized
  source 1..22: mol_type = other DNA
tatcagaaggcgtcaataagtc

SEQ ID NO: 37873 - DNA, 22 bp, synthetic construct
  misc_feature 1..22: note = chemically synthesized
  source 1..22: mol_type = other DNA
atcagaaggcgtcaataagtca

SEQ ID NO: 37874 - DNA, 22 bp, synthetic construct
  misc_feature 1..22: note = chemically synthesized
  source 1..22: mol_type = other DNA
tcagaaggcgtcaataagtcag

SEQ ID NO: 37875 - DNA, 22 bp, synthetic construct
  misc_feature 1..22: note = chemically synthesized
  source 1..22: mol_type = other DNA
agtaacctgaagaacccatctc

SEQ ID NO: 37876 - DNA, 22 bp, synthetic construct
  misc_feature 1..22: note = chemically synthesized
  source 1..22: mol_type = other DNA
aagaacccatctcccagtaaat

SEQ ID NO: 37877 - DNA, 22 bp, synthetic construct
  misc_feature 1..22: note = chemically synthesized
  source 1..22: mol_type = other DNA
ccagtaaatttatttaactttg

SEQ ID NO: 37878 - DNA, 22 bp, synthetic construct
  misc_feature 1..22: note = chemically synthesized
  source 1..22: mol_type = other DNA
atttaactttgggaccatgtaa

SEQ ID NO: 37879 - DNA, 22 bp, synthetic construct
  misc_feature 1..22: note = chemically synthesized
  source 1..22: mol_type = other DNA
tttaactttgggaccatgtaaa

SEQ ID NO: 37880 - DNA, 22 bp, synthetic construct
  misc_feature 1..22: note = chemically synthesized
  source 1..22: mol_type = other DNA
aactttgggaccatgtaaatca

SEQ ID NO: 37881 - DNA, 22 bp, synthetic construct
  misc_feature 1..22: note = chemically synthesized
  source 1..22: mol_type = other DNA
actttgggaccatgtaaatcaa

SEQ ID NO: 37882 - DNA, 22 bp, synthetic construct
  misc_feature 1..22: note = chemically synthesized
  source 1..22: mol_type = other DNA
tgggaccatgtaaatcaaacat

SEQ ID NO: 37883 - DNA, 22 bp, synthetic construct
  misc_feature 1..22: note = chemically synthesized
  source 1..22: mol_type = other DNA
gggaccatgtaaatcaaacata

SEQ ID NO: 37884 - DNA, 22 bp, synthetic construct
  misc_feature 1..22: note = chemically synthesized
  source 1..22: mol_type = other DNA
ggaccatgtaaatcaaacataa

SEQ ID NO: 37885 - DNA, 22 bp, synthetic construct
  misc_feature 1..22: note = chemically synthesized
  source 1..22: mol_type = other DNA
tgatttatcaccagatgtttgc

SEQ ID NO: 37886 - DNA, 22 bp, synthetic construct
  misc_feature 1..22: note = chemically synthesized
  source 1..22: mol_type = other DNA
atcaccagatgtttgcactcct

SEQ ID NO: 37887 - DNA, 22 bp, synthetic construct
  misc_feature 1..22: note = chemically synthesized
  source 1..22: mol_type = other DNA
tcaccagatgtttgcactcctc

SEQ ID NO: 37888 - DNA, 22 bp, synthetic construct
  misc_feature 1..22: note = chemically synthesized
  source 1..22: mol_type = other DNA
gcactcctccccattccccatt

SEQ ID NO: 37889 - DNA, 22 bp, synthetic construct
  misc_feature 1..22: note = chemically synthesized
  source 1..22: mol_type = other DNA
cactcctccccattccccattt

SEQ ID NO: 37890 - DNA, 22 bp, synthetic construct
  misc_feature 1..22: note = chemically synthesized
  source 1..22: mol_type = other DNA
ctccccattccccatttgattt

SEQ ID NO: 37891 - DNA, 22 bp, synthetic construct
  misc_feature 1..22: note = chemically synthesized
  source 1..22: mol_type = other DNA
cccattccccatttgatttaag

SEQ ID NO: 37892 - DNA, 22 bp, synthetic construct
  misc_feature 1..22: note = chemically synthesized
  source 1..22: mol_type = other DNA
cccatttgatttaagaaatttg

SEQ ID NO: 37893 - DNA, 22 bp, synthetic construct
  misc_feature 1..22: note = chemically synthesized
  source 1..22: mol_type = other DNA
gatttaagaaatttgaacagac

SEQ ID NO: 37894 - DNA, 22 bp, synthetic construct
  misc_feature 1..22: note = chemically synthesized
  source 1..22: mol_type = other DNA
atttaagaaatttgaacagaca

SEQ ID NO: 37895 - DNA, 22 bp, synthetic construct
  misc_feature 1..22: note = chemically synthesized
  source 1..22: mol_type = other DNA
aagaaatttgaacagacaagtg

SEQ ID NO: 37896 - DNA, 22 bp, synthetic construct
  misc_feature 1..22: note = chemically synthesized
  source 1..22: mol_type = other DNA
agaaatttgaacagacaagtgt

SEQ ID NO: 37897 - DNA, 22 bp, synthetic construct
  misc_feature 1..22: note = chemically synthesized
  source 1..22: mol_type = other DNA
gaacagacaagtgtacagtatc

SEQ ID NO: 37898 - DNA, 22 bp, synthetic construct
  misc_feature 1..22: note = chemically synthesized
  source 1..22: mol_type = other DNA
aacagacaagtgtacagtatcc

SEQ ID NO: 37899 - DNA, 22 bp, synthetic construct
  misc_feature 1..22: note = chemically synthesized
  source 1..22: mol_type = other DNA
attctgtctgtcaggatgcaaa

SEQ ID NO: 37900 - DNA, 22 bp, synthetic construct
  misc_feature 1..22: note = chemically synthesized
  source 1..22: mol_type = other DNA
tgtctgtcaggatgcaaaacct

SEQ ID NO: 37901 - DNA, 22 bp, synthetic construct
  misc_feature 1..22: note = chemically synthesized
  source 1..22: mol_type = other DNA
tctgtcaggatgcaaaacctaa

SEQ ID NO: 37902 - DNA, 22 bp, synthetic construct
  misc_feature 1..22: note = chemically synthesized
  source 1..22: mol_type = other DNA
tcaggatgcaaaacctaattac

SEQ ID NO: 37903 - DNA, 22 bp, synthetic construct
  misc_feature 1..22: note = chemically synthesized
  source 1..22: mol_type = other DNA
attacgctaagagcagcatata

SEQ ID NO: 37904 - DNA, 22 bp, synthetic construct
  misc_feature 1..22: note = chemically synthesized
  source 1..22: mol_type = other DNA
cgctaagagcagcatatactga

SEQ ID NO: 37905 - DNA, 22 bp, synthetic construct
  misc_feature 1..22: note = chemically synthesized
  source 1..22: mol_type = other DNA
agagcagcatatactgagaaat

SEQ ID NO: 37906 - DNA, 22 bp, synthetic construct
  misc_feature 1..22: note = chemically synthesized
  source 1..22: mol_type = other DNA
agaaattaaaatgaatactgta

SEQ ID NO: 37907 - DNA, 22 bp, synthetic construct
  misc_feature 1..22: note = chemically synthesized
  source 1..22: mol_type = other DNA
aaatgaatactgtatataaaac

SEQ ID NO: 37908 - DNA, 22 bp, synthetic construct
  misc_feature 1..22: note = chemically synthesized
  source 1..22: mol_type = other DNA
tatataaaacctacacagttgc

SEQ ID NO: 37909 - DNA, 22 bp, synthetic construct
  misc_feature 1..22: note = chemically synthesized
  source 1..22: mol_type = other DNA
cacagttgcactcatagctcct

SEQ ID NO: 37910 - DNA, 22 bp, synthetic construct
  misc_feature 1..22: note = chemically synthesized
  source 1..22: mol_type = other DNA
cactcatagctcctaataaaag

SEQ ID NO: 37911 - DNA, 22 bp, synthetic construct
  misc_feature 1..22: note = chemically synthesized
  source 1..22: mol_type = other DNA
atagctcctaataaaagagtaa

SEQ ID NO: 37912 - DNA, 22 bp, synthetic construct
  misc_feature 1..22: note = chemically synthesized
  source 1..22: mol_type = other DNA
ctaataaaagagtaatagggac

SEQ ID NO: 37913 - DNA, 22 bp, synthetic construct
  misc_feature 1..22: note = chemically synthesized
  source 1..22: mol_type = other DNA
ataaaagagtaatagggacaca

SEQ ID NO: 37914 - DNA, 22 bp, synthetic construct
  misc_feature 1..22: note = chemically synthesized
  source 1..22: mol_type = other DNA
tatggacatttaatagggtgga

SEQ ID NO: 37915 - DNA, 22 bp, synthetic construct
  misc_feature 1..22: note = chemically synthesized
  source 1..22: mol_type = other DNA
atggacatttaatagggtggag

SEQ ID NO: 37916 - DNA, 22 bp, synthetic construct
  misc_feature 1..22: note = chemically synthesized
  source 1..22: mol_type = other DNA
tggacatttaatagggtggagt

SEQ ID NO: 37917 - DNA, 22 bp, synthetic construct
  misc_feature 1..22: note = chemically synthesized
  source 1..22: mol_type = other DNA
aatagggtggagtcgaagtcac

SEQ ID NO: 37918 - DNA, 22 bp, synthetic construct
  misc_feature 1..22: note = chemically synthesized
  source 1..22: mol_type = other DNA
atagggtggagtcgaagtcacc

SEQ ID NO: 37919 - DNA, 22 bp, synthetic construct
  misc_feature 1..22: note = chemically synthesized
  source 1..22: mol_type = other DNA
aagctggcatggcactggggaa

SEQ ID NO: 37920 - DNA, 22 bp, synthetic construct
  misc_feature 1..22: note = chemically synthesized
  source 1..22: mol_type = other DNA
gcatggcactggggaattattt

SEQ ID NO: 37921 - DNA, 22 bp, synthetic construct
  misc_feature 1..22: note = chemically synthesized
  source 1..22: mol_type = other DNA
gggaattatttctatctgtctt

SEQ ID NO: 37922 - DNA, 22 bp, synthetic construct
  misc_feature 1..22: note = chemically synthesized
  source 1..22: mol_type = other DNA
tttctatctgtcttgagcagca

SEQ ID NO: 37923 - DNA, 22 bp, synthetic construct
  misc_feature 1..22: note = chemically synthesized
  source 1..22: mol_type = other DNA
ctatctgtcttgagcagcattt

SEQ ID NO: 37924 - DNA, 22 bp, synthetic construct
  misc_feature 1..22: note = chemically synthesized
  source 1..22: mol_type = other DNA
tatctgtcttgagcagcatttt

SEQ ID NO: 37925 - DNA, 22 bp, synthetic construct
  misc_feature 1..22: note = chemically synthesized
  source 1..22: mol_type = other DNA
tctgtcttgagcagcattttgg

SEQ ID NO: 37926 - DNA, 22 bp, synthetic construct
  misc_feature 1..22: note = chemically synthesized
  source 1..22: mol_type = other DNA
tcttgagcagcattttggattc

SEQ ID NO: 37927 - DNA, 22 bp, synthetic construct
  misc_feature 1..22: note = chemically synthesized
  source 1..22: mol_type = other DNA
gagcagcattttggattcagtt

SEQ ID NO: 37928 - DNA, 22 bp, synthetic construct
  misc_feature 1..22: note = chemically synthesized
  source 1..22: mol_type = other DNA
agcagcattttggattcagttt

SEQ ID NO: 37929 - DNA, 22 bp, synthetic construct
  misc_feature 1..22: note = chemically synthesized
  source 1..22: mol_type = other DNA
tggattcagttttggagaaacc

SEQ ID NO: 37930 - DNA, 22 bp, synthetic construct
  misc_feature 1..22: note = chemically synthesized
  source 1..22: mol_type = other DNA
ggattcagttttggagaaacct

SEQ ID NO: 37931 - DNA, 22 bp, synthetic construct
  misc_feature 1..22: note = chemically synthesized
  source 1..22: mol_type = other DNA
gattcagttttggagaaaccta

SEQ ID NO: 37932 - DNA, 22 bp, synthetic construct
  misc_feature 1..22: note = chemically synthesized
  source 1..22: mol_type = other DNA
agttttggagaaacctaatcca

SEQ ID NO: 37933 - DNA, 22 bp, synthetic construct
  misc_feature 1..22: note = chemically synthesized
  source 1..22: mol_type = other DNA
tggagaaacctaatccaaaaca

SEQ ID NO: 37934 - DNA, 22 bp, synthetic construct
  misc_feature 1..22: note = chemically synthesized
  source 1..22: mol_type = other DNA
ggagaaacctaatccaaaacac

SEQ ID NO: 37935 - DNA, 22 bp, synthetic construct
  misc_feature 1..22: note = chemically synthesized
  source 1..22: mol_type = other DNA
gagaaacctaatccaaaacaca

SEQ ID NO: 37936 - DNA, 22 bp, synthetic construct
  misc_feature 1..22: note = chemically synthesized
  source 1..22: mol_type = other DNA
atccaaaacacatacagtatat

SEQ ID NO: 37937 - DNA, 22 bp, synthetic construct
  misc_feature 1..22: note = chemically synthesized
  source 1..22: mol_type = other DNA
ttctaagttcagtgacaaacat

SEQ ID NO: 37938 - DNA, 22 bp, synthetic construct
  misc_feature 1..22: note = chemically synthesized
  source 1..22: mol_type = other DNA
tctaagttcagtgacaaacatc

SEQ ID NO: 37939 - DNA, 22 bp, synthetic construct
  misc_feature 1..22: note = chemically synthesized
  source 1..22: mol_type = other DNA
ctaagttcagtgacaaacatca

SEQ ID NO: 37940 - DNA, 22 bp, synthetic construct
  misc_feature 1..22: note = chemically synthesized
  source 1..22: mol_type = other DNA
taagttcagtgacaaacatcaa

SEQ ID NO: 37941 - DNA, 22 bp, synthetic construct
  misc_feature 1..22: note = chemically synthesized
  source 1..22: mol_type = other DNA
agttcagtgacaaacatcaagt

SEQ ID NO: 37942 - DNA, 22 bp, synthetic construct
  misc_feature 1..22: note = chemically synthesized
  source 1..22: mol_type = other DNA
agtgacaaacatcaagttctca

SEQ ID NO: 37943 - DNA, 22 bp, synthetic construct
  misc_feature 1..22: note = chemically synthesized
  source 1..22: mol_type = other DNA
tcaaggtaccgcacgcccaccc

SEQ ID NO: 37944 - DNA, 22 bp, synthetic construct
  misc_feature 1..22: note = chemically synthesized
  source 1..22: mol_type = other DNA
aaggtaccgcacgcccacccca

SEQ ID NO: 37945 - DNA, 22 bp, synthetic construct
  misc_feature 1..22: note = chemically synthesized
  source 1..22: mol_type = other DNA
ctatgtaatattctccaacatc

SEQ ID NO: 37946 - DNA, 22 bp, synthetic construct
  misc_feature 1..22: note = chemically synthesized
  source 1..22: mol_type = other DNA
tgtaatattctccaacatcctt

SEQ ID NO: 37947 - DNA, 22 bp, synthetic construct
  misc_feature 1..22: note = chemically synthesized
  source 1..22: mol_type = other DNA
tccaacatcctttctcagtgga

SEQ ID NO: 37948 - DNA, 22 bp, synthetic construct
  misc_feature 1..22: note = chemically synthesized
  source 1..22: mol_type = other DNA
caacatcctttctcagtggatt

SEQ ID NO: 37949 - DNA, 22 bp, synthetic construct
  misc_feature 1..22: note = chemically synthesized
  source 1..22: mol_type = other DNA
tctcagtggattcctctagccc

SEQ ID NO: 37950 - DNA, 22 bp, synthetic construct
  misc_feature 1..22: note = chemically synthesized
  source 1..22: mol_type = other DNA
ctcagtggattcctctagcccc

SEQ ID NO: 37951 - DNA, 22 bp, synthetic construct
  misc_feature 1..22: note = chemically synthesized
  source 1..22: mol_type = other DNA
tcagtggattcctctagcccca

SEQ ID NO: 37952 - DNA, 22 bp, synthetic construct
  misc_feature 1..22: note = chemically synthesized
  source 1..22: mol_type = other DNA
agtggattcctctagccccact

SEQ ID NO: 37953 - DNA, 22 bp, synthetic construct
  misc_feature 1..22: note = chemically synthesized
  source 1..22: mol_type = other DNA
ctctagccccactctctccttc

SEQ ID NO: 37954 - DNA, 22 bp, synthetic construct
  misc_feature 1..22: note = chemically synthesized
  source 1..22: mol_type = other DNA
tagccccactctctccttccca

SEQ ID NO: 37955 - DNA, 22 bp, synthetic construct
  misc_feature 1..22: note = chemically synthesized
  source 1..22: mol_type = other DNA
gccccactctctccttcccacc

SEQ ID NO: 37956 - DNA, 22 bp, synthetic construct
  misc_feature 1..22: note = chemically synthesized
  source 1..22: mol_type = other DNA
tctccttcccacccaaactggc

SEQ ID NO: 37957 - DNA, 22 bp, synthetic construct
  misc_feature 1..22: note = chemically synthesized
  source 1..22: mol_type = other DNA
tccttcccacccaaactggctt

SEQ ID NO: 37958 - DNA, 22 bp, synthetic construct
  misc_feature 1..22: note = chemically synthesized
  source 1..22: mol_type = other DNA
cttcccacccaaactggctttt

SEQ ID NO: 37959 - DNA, 22 bp, synthetic construct
  misc_feature 1..22: note = chemically synthesized
  source 1..22: mol_type = other DNA
cccacccaaactggcttttcag

SEQ ID NO: 37960 - DNA, 22 bp, synthetic construct
  misc_feature 1..22: note = chemically synthesized
  source 1..22: mol_type = other DNA
ccacccaaactggcttttcaga

SEQ ID NO: 37961 - DNA, 22 bp, synthetic construct
  misc_feature 1..22: note = chemically synthesized
  source 1..22: mol_type = other DNA
gcttttcagaaaacattgactt

SEQ ID NO: 37962 - DNA, 22 bp, synthetic construct
  misc_feature 1..22: note = chemically synthesized
  source 1..22: mol_type = other DNA
ttcagaaaacattgactttctt

SEQ ID NO: 37963 - DNA, 22 bp, synthetic construct
  misc_feature 1..22: note = chemically synthesized
  source 1..22: mol_type = other DNA
tcagaaaacattgactttcttt

SEQ ID NO: 37964 - DNA, 22 bp, synthetic construct
  misc_feature 1..22: note = chemically synthesized
  source 1..22: mol_type = other DNA
cagaaaacattgactttcttta

SEQ ID NO: 37965 - DNA, 22 bp, synthetic construct
  misc_feature 1..22: note = chemically synthesized
  source 1..22: mol_type = other DNA
agaaaacattgactttctttat

SEQ ID NO: 37966 - DNA, 22 bp, synthetic construct
  misc_feature 1..22: note = chemically synthesized
  source 1..22: mol_type = other DNA
actttctttatactttagaaag

SEQ ID NO: 37967 - DNA, 22 bp, synthetic construct
  misc_feature 1..22: note = chemically synthesized
  source 1..22: mol_type = other DNA
tctttatactttagaaagataa

SEQ ID NO: 37968 - DNA, 22 bp, synthetic construct
  misc_feature 1..22: note = chemically synthesized
  source 1..22: mol_type = other DNA
ctttatactttagaaagataaa

SEQ ID NO: 37969 - DNA, 22 bp, synthetic construct
  misc_feature 1..22: note = chemically synthesized
  source 1..22: mol_type = other DNA
tttatactttagaaagataaaa

SEQ ID NO: 37970 - DNA, 22 bp, synthetic construct
  misc_feature 1..22: note = chemically synthesized
  source 1..22: mol_type = other DNA
tatactttagaaagataaaact

SEQ ID NO: 37971 - DNA, 22 bp, synthetic construct
  misc_feature 1..22: note = chemically synthesized
  source 1..22: mol_type = other DNA
atactttagaaagataaaacta

SEQ ID NO: 37972 - DNA, 22 bp, synthetic construct
  misc_feature 1..22: note = chemically synthesized
  source 1..22: mol_type = other DNA
tactttagaaagataaaactat

SEQ ID NO: 37973 - DNA, 22 bp, synthetic construct
  misc_feature 1..22: note = chemically synthesized
  source 1..22: mol_type = other DNA
tagaaagataaaactattcttg

SEQ ID NO: 37974 - DNA, 22 bp, synthetic construct
  misc_feature 1..22: note = chemically synthesized
  source 1..22: mol_type = other DNA
agaaagataaaactattcttgc

SEQ ID NO: 37975 - DNA, 22 bp, synthetic construct
  misc_feature 1..22: note = chemically synthesized
  source 1..22: mol_type = other DNA
gaaagataaaactattcttgcc

SEQ ID NO: 37976 - DNA, 22 bp, synthetic construct
  misc_feature 1..22: note = chemically synthesized
  source 1..22: mol_type = other DNA
ttcttgcctcagataaaaggca

SEQ ID NO: 37977 - DNA, 22 bp, synthetic construct
  misc_feature 1..22: note = chemically synthesized
  source 1..22: mol_type = other DNA
ttgcctcagataaaaggcatga

SEQ ID NO: 37978 - DNA, 22 bp, synthetic construct
  misc_feature 1..22: note = chemically synthesized
  source 1..22: mol_type = other DNA
gcctcagataaaaggcatgaca

SEQ ID NO: 37979 - DNA, 22 bp, synthetic construct
  misc_feature 1..22: note = chemically synthesized
  source 1..22: mol_type = other DNA
cctcagataaaaggcatgacat

SEQ ID NO: 37980 - DNA, 22 bp, synthetic construct
  misc_feature 1..22: note = chemically synthesized
  source 1..22: mol_type = other DNA
agataaaaggcatgacatgaaa

SEQ ID NO: 37981 - DNA, 22 bp, synthetic construct
  misc_feature 1..22: note = chemically synthesized
  source 1..22: mol_type = other DNA
acaggcactagggcataagaac

SEQ ID NO: 37982 - DNA, 22 bp, synthetic construct
  misc_feature 1..22: note = chemically synthesized
  source 1..22: mol_type = other DNA
gggcataagaactgagcgacaa

SEQ ID NO: 37983 - DNA, 22 bp, synthetic construct
  misc_feature 1..22: note = chemically synthesized
  source 1..22: mol_type = other DNA
agcgacaaaaaatgctaccaca

SEQ ID NO: 37984 - DNA, 22 bp, synthetic construct
  misc_feature 1..22: note = chemically synthesized
  source 1..22: mol_type = other DNA
ccacaagaagacaacagaacgg

SEQ ID NO: 37985 - DNA, 22 bp, synthetic construct
  misc_feature 1..22: note = chemically synthesized
  source 1..22: mol_type = other DNA
ttgttttggttttttacaaaaa

SEQ ID NO: 37986 - DNA, 22 bp, synthetic construct
  misc_feature 1..22: note = chemically synthesized
  source 1..22: mol_type = other DNA
tgttttggttttttacaaaaat

SEQ ID NO: 37987 - DNA, 22 bp, synthetic construct
  misc_feature 1..22: note = chemically synthesized
  source 1..22: mol_type = other DNA
gttttggttttttacaaaaata

SEQ ID NO: 37988 - DNA, 22 bp, synthetic construct
  misc_feature 1..22: note = chemically synthesized
  source 1..22: mol_type = other DNA
ttttggttttttacaaaaataa

SEQ ID NO: 37989 - DNA, 22 bp, synthetic construct
  misc_feature 1..22: note = chemically synthesized
  source 1..22: mol_type = other DNA
tggttttttacaaaaataagaa

SEQ ID NO: 37990 - DNA, 22 bp, synthetic construct
  misc_feature 1..22: note = chemically synthesized
  source 1..22: mol_type = other DNA
ggttttttacaaaaataagaac

SEQ ID NO: 37991 - DNA, 22 bp, synthetic construct
  misc_feature 1..22: note = chemically synthesized
  source 1..22: mol_type = other DNA
gttttttacaaaaataagaaca

SEQ ID NO: 37992 - DNA, 22 bp, synthetic construct
  misc_feature 1..22: note = chemically synthesized
  source 1..22: mol_type = other DNA
tttacaaaaataagaacaatgt

SEQ ID NO: 37993 - DNA, 22 bp, synthetic construct
  misc_feature 1..22: note = chemically synthesized
  source 1..22: mol_type = other DNA
ttacaaaaataagaacaatgtc

SEQ ID NO: 37994 - DNA, 22 bp, synthetic construct
  misc_feature 1..22: note = chemically synthesized
  source 1..22: mol_type = other DNA
tacaaaaataagaacaatgtcg

SEQ ID NO: 37995 - DNA, 22 bp, synthetic construct
  misc_feature 1..22: note = chemically synthesized
  source 1..22: mol_type = other DNA
acaaaaataagaacaatgtcgt

SEQ ID NO: 37996 - DNA, 22 bp, synthetic construct
  misc_feature 1..22: note = chemically synthesized
  source 1..22: mol_type = other DNA
caaaaataagaacaatgtcgta

SEQ ID NO: 37997 - DNA, 22 bp, synthetic construct
  misc_feature 1..22: note = chemically synthesized
  source 1..22: mol_type = other DNA
attcatctacactgggaacagg

SEQ ID NO: 37998 - DNA, 22 bp, synthetic construct
  misc_feature 1..22: note = chemically synthesized
  source 1..22: mol_type = other DNA
atctacactgggaacagggaca

SEQ ID NO: 37999 - DNA, 22 bp, synthetic construct
  misc_feature 1..22: note = chemically synthesized
  source 1..22: mol_type = other DNA
cactgggaacagggacacgata

SEQ ID NO: 38000 - DNA, 22 bp, synthetic construct
  misc_feature 1..22: note = chemically synthesized
  source 1..22: mol_type = other DNA
ggaacagggacacgatatcaca

SEQ ID NO: 38001 - DNA, 22 bp, synthetic construct
  misc_feature 1..22: note = chemically synthesized
  source 1..22: mol_type = other DNA
agtaaagcaaatagatgctgca

SEQ ID NO: 38002 - DNA, 22 bp, synthetic construct
  misc_feature 1..22: note = chemically synthesized
  source 1..22: mol_type = other DNA
gtaaagcaaatagatgctgcaa

SEQ ID NO: 38003 - DNA, 22 bp, synthetic construct
  misc_feature 1..22: note = chemically synthesized
  source 1..22: mol_type = other DNA
caacatgcagtatttgtaaaag

SEQ ID NO: 38004 - DNA, 22 bp, synthetic construct
  misc_feature 1..22: note = chemically synthesized
  source 1..22: mol_type = other DNA
gtaaaagtgacaacacagattt

SEQ ID NO: 38005 - DNA, 22 bp, synthetic construct
  misc_feature 1..22: note = chemically synthesized
  source 1..22: mol_type = other DNA
taaaagtgacaacacagatttc

SEQ ID NO: 38006 - DNA, 22 bp, synthetic construct
  misc_feature 1..22: note = chemically synthesized
  source 1..22: mol_type = other DNA
ctaaggatttttaaaatagacc

SEQ ID NO: 38007 - DNA, 22 bp, synthetic construct
  misc_feature 1..22: note = chemically synthesized
  source 1..22: mol_type = other DNA
taaggatttttaaaatagacct

SEQ ID NO: 38008 - DNA, 22 bp, synthetic construct
  misc_feature 1..22: note = chemically synthesized
  source 1..22: mol_type = other DNA
aggatttttaaaatagacctaa

SEQ ID NO: 38009 - DNA, 22 bp, synthetic construct
  misc_feature 1..22: note = chemically synthesized
  source 1..22: mol_type = other DNA
ttaaaatagacctaactggctg

SEQ ID NO: 38010 - DNA, 22 bp, synthetic construct
  misc_feature 1..22: note = chemically synthesized
  source 1..22: mol_type = other DNA
taaaatagacctaactggctgg

SEQ ID NO: 38011 - DNA, 22 bp, synthetic construct
  misc_feature 1..22: note = chemically synthesized
  source 1..22: mol_type = other DNA
aaaatagacctaactggctggt

SEQ ID NO: 38012 - DNA, 22 bp, synthetic construct
  misc_feature 1..22: note = chemically synthesized
  source 1..22: mol_type = other DNA
aaatagacctaactggctggtc

SEQ ID NO: 38013 - DNA, 22 bp, synthetic construct
  misc_feature 1..22: note = chemically synthesized
  source 1..22: mol_type = other DNA
actggctggtcagaagataatt

SEQ ID NO: 38014 - DNA, 22 bp, synthetic construct
  misc_feature 1..22: note = chemically synthesized
  source 1..22: mol_type = other DNA
gctggtcagaagataattgaag

SEQ ID NO: 38015 - DNA, 22 bp, synthetic construct
  misc_feature 1..22: note = chemically synthesized
  source 1..22: mol_type = other DNA
gtcagaagataattgaagggta

SEQ ID NO: 38016 - DNA, 22 bp, synthetic construct
  misc_feature 1..22: note = chemically synthesized
  source 1..22: mol_type = other DNA
aagggtattcccgcccttattt

SEQ ID NO: 38017 - DNA, 22 bp, synthetic construct
  misc_feature 1..22: note = chemically synthesized
  source 1..22: mol_type = other DNA
ccgcccttatttgctgtcatcc

SEQ ID NO: 38018 - DNA, 22 bp, synthetic construct
  misc_feature 1..22: note = chemically synthesized
  source 1..22: mol_type = other DNA
atttgctgtcatccaggaagac

SEQ ID NO: 38019 - DNA, 22 bp, synthetic construct
  misc_feature 1..22: note = chemically synthesized
  source 1..22: mol_type = other DNA
tttgctgtcatccaggaagacc

SEQ ID NO: 38020 - DNA, 22 bp, synthetic construct
  misc_feature 1..22: note = chemically synthesized
  source 1..22: mol_type = other DNA
gctgtcatccaggaagacccta

SEQ ID NO: 38021 - DNA, 22 bp, synthetic construct
  misc_feature 1..22: note = chemically synthesized
  source 1..22: mol_type = other DNA
ctgtcatccaggaagaccctat

SEQ ID NO: 38022 - DNA, 22 bp, synthetic construct
  misc_feature 1..22: note = chemically synthesized
  source 1..22: mol_type = other DNA
tcatccaggaagaccctatcaa

SEQ ID NO: 38023 - DNA, 22 bp, synthetic construct
  misc_feature 1..22: note = chemically synthesized
  source 1..22: mol_type = other DNA
tcaaaacacctaaagtaatctg

SEQ ID NO: 38024 - DNA, 22 bp, synthetic construct
  misc_feature 1..22: note = chemically synthesized
  source 1..22: mol_type = other DNA
aagtaatctgtagcatctaggg

SEQ ID NO: 38025 - DNA, 22 bp, synthetic construct
  misc_feature 1..22: note = chemically synthesized
  source 1..22: mol_type = other DNA
tagcatctagggttcctgggat

SEQ ID NO: 38026 - DNA, 22 bp, synthetic construct
  misc_feature 1..22: note = chemically synthesized
  source 1..22: mol_type = other DNA
gggttcctgggatctcagaacc

SEQ ID NO: 38027 - DNA, 22 bp, synthetic construct
  misc_feature 1..22: note = chemically synthesized
  source 1..22: mol_type = other DNA
ctgggatctcagaaccacaagg

SEQ ID NO: 38028 - DNA, 22 bp, synthetic construct
  misc_feature 1..22: note = chemically synthesized
  source 1..22: mol_type = other DNA
ggatctcagaaccacaaggcaa

SEQ ID NO: 38029 - DNA, 22 bp, synthetic construct
  misc_feature 1..22: note = chemically synthesized
  source 1..22: mol_type = other DNA
agaaccacaaggcaaaccacta

SEQ ID NO: 38030 - DNA, 22 bp, synthetic construct
  misc_feature 1..22: note = chemically synthesized
  source 1..22: mol_type = other DNA
tgcatctcaggaaatcagtggc

SEQ ID NO: 38031 - DNA, 22 bp, synthetic construct
  misc_feature 1..22: note = chemically synthesized
  source 1..22: mol_type = other DNA
aggaaatcagtggctgattcca

SEQ ID NO: 38032 - DNA, 22 bp, synthetic construct
  misc_feature 1..22: note = chemically synthesized
  source 1..22: mol_type = other DNA
attccaaagatttcactatgtc

SEQ ID NO: 38033 - DNA, 22 bp, synthetic construct
  misc_feature 1..22: note = chemically synthesized
  source 1..22: mol_type = other DNA
caaagatttcactatgtctggc

SEQ ID NO: 38034 - DNA, 22 bp, synthetic construct
  misc_feature 1..22: note = chemically synthesized
  source 1..22: mol_type = other DNA
cactatgtctggctacacccct

SEQ ID NO: 38035 - DNA, 22 bp, synthetic construct
  misc_feature 1..22: note = chemically synthesized
  source 1..22: mol_type = other DNA
actatgtctggctacaccccta

SEQ ID NO: 38036 - DNA, 22 bp, synthetic construct
  misc_feature 1..22: note = chemically synthesized
  source 1..22: mol_type = other DNA
tgtctggctacacccctagtgg

SEQ ID NO: 38037 - DNA, 22 bp, synthetic construct
  misc_feature 1..22: note = chemically synthesized
  source 1..22: mol_type = other DNA
gctacacccctagtggctgctt

SEQ ID NO: 38038 - DNA, 22 bp, synthetic construct
  misc_feature 1..22: note = chemically synthesized
  source 1..22: mol_type = other DNA
cacccctagtggctgctttctt

SEQ ID NO: 38039 - DNA, 22 bp, synthetic construct
  misc_feature 1..22: note = chemically synthesized
  source 1..22: mol_type = other DNA
gtggctgctttcttttctttcg

SEQ ID NO: 38040 - DNA, 22 bp, synthetic construct
  misc_feature 1..22: note = chemically synthesized
  source 1..22: mol_type = other DNA
ctttcttttctttcgtctctct

SEQ ID NO: 38041 - DNA, 22 bp, synthetic construct
  misc_feature 1..22: note = chemically synthesized
  source 1..22: mol_type = other DNA
tcttttctttcgtctctctctt

SEQ ID NO: 38042 - DNA, 22 bp, synthetic construct
  misc_feature 1..22: note = chemically synthesized
  source 1..22: mol_type = other DNA
cttttctttcgtctctctcttt

SEQ ID NO: 38043 - DNA, 22 bp, synthetic construct
  misc_feature 1..22: note = chemically synthesized
  source 1..22: mol_type = other DNA
ttttctttcgtctctctctttt

SEQ ID NO: 38044 - DNA, 22 bp, synthetic construct
  misc_feature 1..22: note = chemically synthesized
  source 1..22: mol_type = other DNA
ttctttcgtctctctctttttt

SEQ ID NO: 38045 - DNA, 22 bp, synthetic construct
  misc_feature 1..22: note = chemically synthesized
  source 1..22: mol_type = other DNA
tctttcgtctctctcttttttt

SEQ ID NO: 38046 - DNA, 22 bp, synthetic construct
  misc_feature 1..22: note = chemically synthesized
  source 1..22: mol_type = other DNA
ctttcgtctctctctttttttc

SEQ ID NO: 38047 - DNA, 22 bp, synthetic construct
  misc_feature 1..22: note = chemically synthesized
  source 1..22: mol_type = other DNA
tttcgtctctctctttttttct

SEQ ID NO: 38048 - DNA, 22 bp, synthetic construct
  misc_feature 1..22: note = chemically synthesized
  source 1..22: mol_type = other DNA
tcgtctctctctttttttctcc

SEQ ID NO: 38049 - DNA, 22 bp, synthetic construct
  misc_feature 1..22: note = chemically synthesized
  source 1..22: mol_type = other DNA
cgtctctctctttttttctccc

SEQ ID NO: 38050 - DNA, 22 bp, synthetic construct
  misc_feature 1..22: note = chemically synthesized
  source 1..22: mol_type = other DNA
gtctctctctttttttctccct

SEQ ID NO: 38051 - DNA, 22 bp, synthetic construct
  misc_feature 1..22: note = chemically synthesized
  source 1..22: mol_type = other DNA
tctctttttttctccctctttt

SEQ ID NO: 38052 - DNA, 22 bp, synthetic construct
  misc_feature 1..22: note = chemically synthesized
  source 1..22: mol_type = other DNA
tctttttttctccctctttttt

SEQ ID NO: 38053 - DNA, 22 bp, synthetic construct
  misc_feature 1..22: note = chemically synthesized
  source 1..22: mol_type = other DNA
tttttttctccctcttttttaa

SEQ ID NO: 38054 - DNA, 22 bp, synthetic construct
  misc_feature 1..22: note = chemically synthesized
  source 1..22: mol_type = other DNA
tttttctccctcttttttaaac

SEQ ID NO: 38055 - DNA, 22 bp, synthetic construct
  misc_feature 1..22: note = chemically synthesized
  source 1..22: mol_type = other DNA
ttttctccctcttttttaaaca

SEQ ID NO: 38056 - DNA, 22 bp, synthetic construct
  misc_feature 1..22: note = chemically synthesized
  source 1..22: mol_type = other DNA
tttctccctcttttttaaacaa

SEQ ID NO: 38057 - DNA, 22 bp, synthetic construct
  misc_feature 1..22: note = chemically synthesized
  source 1..22: mol_type = other DNA
ttctccctcttttttaaacaaa

SEQ ID NO: 38058 - DNA, 22 bp, synthetic construct
  misc_feature 1..22: note = chemically synthesized
  source 1..22: mol_type = other DNA
tctccctcttttttaaacaaaa

SEQ ID NO: 38059 - DNA, 22 bp, synthetic construct
  misc_feature 1..22: note = chemically synthesized
  source 1..22: mol_type = other DNA
ctccctcttttttaaacaaaac

SEQ ID NO: 38060 - DNA, 22 bp, synthetic construct
  misc_feature 1..22: note = chemically synthesized
  source 1..22: mol_type = other DNA
tccctcttttttaaacaaaaca

SEQ ID NO: 38061 - DNA, 22 bp, synthetic construct
  misc_feature 1..22: note = chemically synthesized
  source 1..22: mol_type = other DNA
cctcttttttaaacaaaacaaa

SEQ ID NO: 38062 - DNA, 22 bp, synthetic construct
  misc_feature 1..22: note = chemically synthesized
  source 1..22: mol_type = other DNA
ttttttaaacaaaacaaaacaa

SEQ ID NO: 38063 - DNA, 22 bp, synthetic construct
  misc_feature 1..22: note = chemically synthesized
  source 1..22: mol_type = other DNA
ttttaaacaaaacaaaacaaaa

SEQ ID NO: 38064 - DNA, 22 bp, synthetic construct
  misc_feature 1..22: note = chemically synthesized
  source 1..22: mol_type = other DNA
tttaaacaaaacaaaacaaaac

SEQ ID NO: 38065 - DNA, 22 bp, synthetic construct
  misc_feature 1..22: note = chemically synthesized
  source 1..22: mol_type = other DNA
ttaaacaaaacaaaacaaaaca

SEQ ID NO: 38066 - DNA, 22 bp, synthetic construct
  misc_feature 1..22: note = chemically synthesized
  source 1..22: mol_type = other DNA
taaacaaaacaaaacaaaacaa

SEQ ID NO: 38067 - DNA, 22 bp, synthetic construct
  misc_feature 1..22: note = chemically synthesized
  source 1..22: mol_type = other DNA
aaacaaaacaaaacaaaacaaa

SEQ ID NO: 38068 - DNA, 22 bp, synthetic construct
  misc_feature 1..22: note = chemically synthesized
  source 1..22: mol_type = other DNA
aacaaaacaaaacaaaacaaaa

SEQ ID NO: 38069 - DNA, 22 bp, synthetic construct
  misc_feature 1..22: note = chemically synthesized
  source 1..22: mol_type = other DNA
atgcctttgtttccagattttt

SEQ ID NO: 38070 - DNA, 22 bp, synthetic construct
  misc_feature 1..22: note = chemically synthesized
  source 1..22: mol_type = other DNA
tgtttccagatttttagatttc

SEQ ID NO: 38071 - DNA, 22 bp, synthetic construct
  misc_feature 1..22: note = chemically synthesized
  source 1..22: mol_type = other DNA
gtttccagatttttagatttca

SEQ ID NO: 38072 - DNA, 22 bp, synthetic construct
  misc_feature 1..22: note = chemically synthesized
  source 1..22: mol_type = other DNA
tttccagatttttagatttcaa

SEQ ID NO: 38073 - DNA, 22 bp, synthetic construct
  misc_feature 1..22: note = chemically synthesized
  source 1..22: mol_type = other DNA
ccagatttttagatttcaaaag

SEQ ID NO: 38074 - DNA, 22 bp, synthetic construct
  misc_feature 1..22: note = chemically synthesized
  source 1..22: mol_type = other DNA
cagatttttagatttcaaaagt

SEQ ID NO: 38075 - DNA, 22 bp, synthetic construct
  misc_feature 1..22: note = chemically synthesized
  source 1..22: mol_type = other DNA
ttagatttcaaaagtggggtta

SEQ ID NO: 38076 - DNA, 22 bp, synthetic construct
  misc_feature 1..22: note = chemically synthesized
  source 1..22: mol_type = other DNA
tagatttcaaaagtggggttat

SEQ ID NO: 38077 - DNA, 22 bp, synthetic construct
  misc_feature 1..22: note = chemically synthesized
  source 1..22: mol_type = other DNA
agatttcaaaagtggggttatt

SEQ ID NO: 38078 - DNA, 22 bp, synthetic construct
  misc_feature 1..22: note = chemically synthesized
  source 1..22: mol_type = other DNA
gatttcaaaagtggggttattt

SEQ ID NO: 38079 - DNA, 22 bp, synthetic construct
  misc_feature 1..22: note = chemically synthesized
  source 1..22: mol_type = other DNA
caaaagtggggttattttgtta

SEQ ID NO: 38080 - DNA, 22 bp, synthetic construct
  misc_feature 1..22: note = chemically synthesized
  source 1..22: mol_type = other DNA
aaaagtggggttattttgttat

SEQ ID NO: 38081 - DNA, 22 bp, synthetic construct
  misc_feature 1..22: note = chemically synthesized
  source 1..22: mol_type = other DNA
ttttgttatgagaaaagactct

SEQ ID NO: 38082 - DNA, 22 bp, synthetic construct
  misc_feature 1..22: note = chemically synthesized
  source 1..22: mol_type = other DNA
tgttatgagaaaagactcttac

SEQ ID NO: 38083 - DNA, 22 bp, synthetic construct
  misc_feature 1..22: note = chemically synthesized
  source 1..22: mol_type = other DNA
gttatgagaaaagactcttaca

SEQ ID NO: 38084 - DNA, 22 bp, synthetic construct
  misc_feature 1..22: note = chemically synthesized
  source 1..22: mol_type = other DNA
ttatgagaaaagactcttacat

SEQ ID NO: 38085 - DNA, 22 bp, synthetic construct
  misc_feature 1..22: note = chemically synthesized
  source 1..22: mol_type = other DNA
tgagaaaagactcttacatgga

SEQ ID NO: 38086 - DNA, 22 bp, synthetic construct
  misc_feature 1..22: note = chemically synthesized
  source 1..22: mol_type = other DNA
ttacatggaaaccaaagagctg

SEQ ID NO: 38087 - DNA, 22 bp, synthetic construct
  misc_feature 1..22: note = chemically synthesized
  source 1..22: mol_type = other DNA
acatggaaaccaaagagctgat

SEQ ID NO: 38088 - DNA, 22 bp, synthetic construct
  misc_feature 1..22: note = chemically synthesized
  source 1..22: mol_type = other DNA
catggaaaccaaagagctgatt

SEQ ID NO: 38089 - DNA, 22 bp, synthetic construct
  misc_feature 1..22: note = chemically synthesized
  source 1..22: mol_type = other DNA
attttttttaaaaaaatctttt

SEQ ID NO: 38090 - DNA, 22 bp, synthetic construct
  misc_feature 1..22: note = chemically synthesized
  source 1..22: mol_type = other DNA
tttttaaaaaaatcttttttac

SEQ ID NO: 38091 - DNA, 22 bp, synthetic construct
  misc_feature 1..22: note = chemically synthesized
  source 1..22: mol_type = other DNA
ttttaaaaaaatcttttttaca

SEQ ID NO: 38092 - DNA, 22 bp, synthetic construct
  misc_feature 1..22: note = chemically synthesized
  source 1..22: mol_type = other DNA
tttaaaaaaatcttttttacat

SEQ ID NO: 38093 - DNA, 22 bp, synthetic construct
  misc_feature 1..22: note = chemically synthesized
  source 1..22: mol_type = other DNA
ttaaaaaaatcttttttacatt

SEQ ID NO: 38094 - DNA, 22 bp, synthetic construct
  misc_feature 1..22: note = chemically synthesized
  source 1..22: mol_type = other DNA
taaaaaaatcttttttacatta

SEQ ID NO: 38095 - DNA, 22 bp, synthetic construct
  misc_feature 1..22: note = chemically synthesized
  source 1..22: mol_type = other DNA
aaaaaaatcttttttacattat

SEQ ID NO: 38096 - DNA, 22 bp, synthetic construct
  misc_feature 1..22: note = chemically synthesized
  source 1..22: mol_type = other DNA
aaaaaatcttttttacattatg

SEQ ID NO: 38097 - DNA, 22 bp, synthetic construct
  misc_feature 1..22: note = chemically synthesized
  source 1..22: mol_type = other DNA
ttttacattatgttctaagata

SEQ ID NO: 38098 - DNA, 22 bp, synthetic construct
  misc_feature 1..22: note = chemically synthesized
  source 1..22: mol_type = other DNA
tttacattatgttctaagataa

SEQ ID NO: 38099 - DNA, 22 bp, synthetic construct
  misc_feature 1..22: note = chemically synthesized
  source 1..22: mol_type = other DNA
ttacattatgttctaagataaa

SEQ ID NO: 38100 - DNA, 22 bp, synthetic construct
  misc_feature 1..22: note = chemically synthesized
  source 1..22: mol_type = other DNA
tacattatgttctaagataaag

SEQ ID NO: 38101 - DNA, 22 bp, synthetic construct
  misc_feature 1..22: note = chemically synthesized
  source 1..22: mol_type = other DNA
acattatgttctaagataaagc

SEQ ID NO: 38102 - DNA, 22 bp, synthetic construct
  misc_feature 1..22: note = chemically synthesized
  source 1..22: mol_type = other DNA
cattatgttctaagataaagca

SEQ ID NO: 38103 - DNA, 22 bp, synthetic construct
  misc_feature 1..22: note = chemically synthesized
  source 1..22: mol_type = other DNA
tgttctaagataaagcaaggat

SEQ ID NO: 38104 - DNA, 22 bp, synthetic construct
  misc_feature 1..22: note = chemically synthesized
  source 1..22: mol_type = other DNA
taagataaagcaaggatgggag

SEQ ID NO: 38105 - DNA, 22 bp, synthetic construct
  misc_feature 1..22: note = chemically synthesized
  source 1..22: mol_type = other DNA
agataaagcaaggatgggagaa

SEQ ID NO: 38106 - DNA, 22 bp, synthetic construct
  misc_feature 1..22: note = chemically synthesized
  source 1..22: mol_type = other DNA
ttagacaacaagaacagcaaaa

SEQ ID NO: 38107 - DNA, 22 bp, synthetic construct
  misc_feature 1..22: note = chemically synthesized
  source 1..22: mol_type = other DNA
tagacaacaagaacagcaaaaa

SEQ ID NO: 38108 - DNA, 22 bp, synthetic construct
  misc_feature 1..22: note = chemically synthesized
  source 1..22: mol_type = other DNA
agacaacaagaacagcaaaaaa

SEQ ID NO: 38109 - DNA, 22 bp, synthetic construct
  misc_feature 1..22: note = chemically synthesized
  source 1..22: mol_type = other DNA
gacaacaagaacagcaaaaaat

SEQ ID NO: 38110 - DNA, 22 bp, synthetic construct
  misc_feature 1..22: note = chemically synthesized
  source 1..22: mol_type = other DNA
aaaggaaataaaagtttaagat

SEQ ID NO: 38111 - DNA, 22 bp, synthetic construct
  misc_feature 1..22: note = chemically synthesized
  source 1..22: mol_type = other DNA
aaggaaataaaagtttaagatg

SEQ ID NO: 38112 - DNA, 22 bp, synthetic construct
  misc_feature 1..22: note = chemically synthesized
  source 1..22: mol_type = other DNA
aagatgctattaccagcaagtt

SEQ ID NO: 38113 - DNA, 22 bp, synthetic construct
  misc_feature 1..22: note = chemically synthesized
  source 1..22: mol_type = other DNA
agatgctattaccagcaagttt

SEQ ID NO: 38114 - DNA, 22 bp, synthetic construct
  misc_feature 1..22: note = chemically synthesized
  source 1..22: mol_type = other DNA
ttaccagcaagttttttcactt

SEQ ID NO: 38115 - DNA, 22 bp, synthetic construct
  misc_feature 1..22: note = chemically synthesized
  source 1..22: mol_type = other DNA
ccagcaagttttttcacttatg

SEQ ID NO: 38116 - DNA, 22 bp, synthetic construct
  misc_feature 1..22: note = chemically synthesized
  source 1..22: mol_type = other DNA
tttcacttatgtttgaatggat

SEQ ID NO: 38117 - DNA, 22 bp, synthetic construct
  misc_feature 1..22: note = chemically synthesized
  source 1..22: mol_type = other DNA
ttcacttatgtttgaatggatt

SEQ ID NO: 38118 - DNA, 22 bp, synthetic construct
  misc_feature 1..22: note = chemically synthesized
  source 1..22: mol_type = other DNA
tcacttatgtttgaatggattt

SEQ ID NO: 38119 - DNA, 22 bp, synthetic construct
  misc_feature 1..22: note = chemically synthesized
  source 1..22: mol_type = other DNA
cacttatgtttgaatggatttc

SEQ ID NO: 38120 - DNA, 22 bp, synthetic construct
  misc_feature 1..22: note = chemically synthesized
  source 1..22: mol_type = other DNA
acttatgtttgaatggatttct

SEQ ID NO: 38121 - DNA, 22 bp, synthetic construct
  misc_feature 1..22: note = chemically synthesized
  source 1..22: mol_type = other DNA
atgtttgaatggatttctgcta

SEQ ID NO: 38122 - DNA, 22 bp, synthetic construct
  misc_feature 1..22: note = chemically synthesized
  source 1..22: mol_type = other DNA
tgtttgaatggatttctgctaa

SEQ ID NO: 38123 - DNA, 22 bp, synthetic construct
  misc_feature 1..22: note = chemically synthesized
  source 1..22: mol_type = other DNA
gaatggatttctgctaagagat

SEQ ID NO: 38124 - DNA, 22 bp, synthetic construct
  misc_feature 1..22: note = chemically synthesized
  source 1..22: mol_type = other DNA
aatggatttctgctaagagatg

SEQ ID NO: 38125 - DNA, 22 bp, synthetic construct
  misc_feature 1..22: note = chemically synthesized
  source 1..22: mol_type = other DNA
ctgctaagagatggagtaagtt

SEQ ID NO: 38126 - DNA, 22 bp, synthetic construct
  misc_feature 1..22: note = chemically synthesized
  source 1..22: mol_type = other DNA
tgctaagagatggagtaagttt

SEQ ID NO: 38127 - DNA, 22 bp, synthetic construct
  misc_feature 1..22: note = chemically synthesized
  source 1..22: mol_type = other DNA
ctaagagatggagtaagttttt

SEQ ID NO: 38128 - DNA, 22 bp, synthetic construct
  misc_feature 1..22: note = chemically synthesized
  source 1..22: mol_type = other DNA
agagatggagtaagtttttaac

SEQ ID NO: 38129 - DNA, 22 bp, synthetic construct
  misc_feature 1..22: note = chemically synthesized
  source 1..22: mol_type = other DNA
ttaacatcagactgaaaacacc

SEQ ID NO: 38130 - DNA, 22 bp, synthetic construct
  misc_feature 1..22: note = chemically synthesized
  source 1..22: mol_type = other DNA
taacatcagactgaaaacacct

SEQ ID NO: 38131 - DNA, 22 bp, synthetic construct
  misc_feature 1..22: note = chemically synthesized
  source 1..22: mol_type = other DNA
aacatcagactgaaaacacctt

SEQ ID NO: 38132 - DNA, 22 bp, synthetic construct
  misc_feature 1..22: note = chemically synthesized
  source 1..22: mol_type = other DNA
acatcagactgaaaacaccttc

SEQ ID NO: 38133 - DNA, 22 bp, synthetic construct
  misc_feature 1..22: note = chemically synthesized
  source 1..22: mol_type = other DNA
aaaacaccttccatttcttgaa

SEQ ID NO: 38134 - DNA, 22 bp, synthetic construct
  misc_feature 1..22: note = chemically synthesized
  source 1..22: mol_type = other DNA
ccatttcttgaaaactattcta

SEQ ID NO: 38135 - DNA, 22 bp, synthetic construct
  misc_feature 1..22: note = chemically synthesized
  source 1..22: mol_type = other DNA
catttcttgaaaactattctaa

SEQ ID NO: 38136 - DNA, 22 bp, synthetic construct
  misc_feature 1..22: note = chemically synthesized
  source 1..22: mol_type = other DNA
cttgaaaactattctaaactgg

SEQ ID NO: 38137 - DNA, 22 bp, synthetic construct
  misc_feature 1..22: note = chemically synthesized
  source 1..22: mol_type = other DNA
ttgaaaactattctaaactgga

SEQ ID NO: 38138 - DNA, 22 bp, synthetic construct
  misc_feature 1..22: note = chemically synthesized
  source 1..22: mol_type = other DNA
gaaaactattctaaactggaaa

SEQ ID NO: 38139 - DNA, 22 bp, synthetic construct
  misc_feature 1..22: note = chemically synthesized
  source 1..22: mol_type = other DNA
aaaactattctaaactggaaag

SEQ ID NO: 38140 - DNA, 22 bp, synthetic construct
  misc_feature 1..22: note = chemically synthesized
  source 1..22: mol_type = other DNA
ttctaaactggaaagccttaaa

SEQ ID NO: 38141 - DNA, 22 bp, synthetic construct
  misc_feature 1..22: note = chemically synthesized
  source 1..22: mol_type = other DNA
taaactggaaagccttaaaact

SEQ ID NO: 38142 - DNA, 22 bp, synthetic construct
  misc_feature 1..22: note = chemically synthesized
  source 1..22: mol_type = other DNA
aactggaaagccttaaaactat

SEQ ID NO: 38143 - DNA, 22 bp, synthetic construct
  misc_feature 1..22: note = chemically synthesized
  source 1..22: mol_type = other DNA
gaaagccttaaaactatgtcca

SEQ ID NO: 38144 - DNA, 22 bp, synthetic construct
  misc_feature 1..22: note = chemically synthesized
  source 1..22: mol_type = other DNA
aaaactatgtccagggtttgag

SEQ ID NO: 38145 - DNA, 22 bp, synthetic construct
  misc_feature 1..22: note = chemically synthesized
  source 1..22: mol_type = other DNA
aaactatgtccagggtttgaga

SEQ ID NO: 38146 - DNA, 22 bp, synthetic construct
  misc_feature 1..22: note = chemically synthesized
  source 1..22: mol_type = other DNA
tgtccagggtttgagatatgtc

SEQ ID NO: 38147 - DNA, 22 bp, synthetic construct
  misc_feature 1..22: note = chemically synthesized
  source 1..22: mol_type = other DNA
gagatatgtctattttaatata

SEQ ID NO: 38148 - DNA, 22 bp, synthetic construct
  misc_feature 1..22: note = chemically synthesized
  source 1..22: mol_type = other DNA
agatatgtctattttaatatag

SEQ ID NO: 38149 - DNA, 22 bp, synthetic construct
  misc_feature 1..22: note = chemically synthesized
  source 1..22: mol_type = other DNA
ttttaatatagtaagtacttta

SEQ ID NO: 38150 - DNA, 22 bp, synthetic construct
  misc_feature 1..22: note = chemically synthesized
  source 1..22: mol_type = other DNA
taatatagtaagtactttatgt

SEQ ID NO: 38151 - DNA, 22 bp, synthetic construct
  misc_feature 1..22: note = chemically synthesized
  source 1..22: mol_type = other DNA
aatatagtaagtactttatgtt

SEQ ID NO: 38152 - DNA, 22 bp, synthetic construct
  misc_feature 1..22: note = chemically synthesized
  source 1..22: mol_type = other DNA
atatagtaagtactttatgttc

SEQ ID NO: 38153 - DNA, 22 bp, synthetic construct
  misc_feature 1..22: note = chemically synthesized
  source 1..22: mol_type = other DNA
tatgttcctttagggtataata

SEQ ID NO: 38154 - DNA, 22 bp, synthetic construct
  misc_feature 1..22: note = chemically synthesized
  source 1..22: mol_type = other DNA
atgttcctttagggtataatac

SEQ ID NO: 38155 - DNA, 22 bp, synthetic construct
  misc_feature 1..22: note = chemically synthesized
  source 1..22: mol_type = other DNA
tgttcctttagggtataataca

SEQ ID NO: 38156 - DNA, 22 bp, synthetic construct
  misc_feature 1..22: note = chemically synthesized
  source 1..22: mol_type = other DNA
ctttagggtataatacacgcat

SEQ ID NO: 38157 - DNA, 22 bp, synthetic construct
  misc_feature 1..22: note = chemically synthesized
  source 1..22: mol_type = other DNA
tagggtataatacacgcatcag

SEQ ID NO: 38158 - DNA, 22 bp, synthetic construct
  misc_feature 1..22: note = chemically synthesized
  source 1..22: mol_type = other DNA
agggtataatacacgcatcaga

SEQ ID NO: 38159 - DNA, 22 bp, synthetic construct
  misc_feature 1..22: note = chemically synthesized
  source 1..22: mol_type = other DNA
gggtataatacacgcatcagaa

SEQ ID NO: 38160 - DNA, 22 bp, synthetic construct
  misc_feature 1..22: note = chemically synthesized
  source 1..22: mol_type = other DNA
aaaaagactgactggccttctc

SEQ ID NO: 38161 - DNA, 22 bp, synthetic construct
  misc_feature 1..22: note = chemically synthesized
  source 1..22: mol_type = other DNA
actggccttctcttaaaacctg

SEQ ID NO: 38162 - DNA, 22 bp, synthetic construct
  misc_feature 1..22: note = chemically synthesized
  source 1..22: mol_type = other DNA
gccttctcttaaaacctgttat

SEQ ID NO: 38163 - DNA, 22 bp, synthetic construct
  misc_feature 1..22: note = chemically synthesized
  source 1..22: mol_type = other DNA
ctcttaaaacctgttattttct

SEQ ID NO: 38164 - DNA, 22 bp, synthetic construct
  misc_feature 1..22: note = chemically synthesized
  source 1..22: mol_type = other DNA
tcttaaaacctgttattttctt

SEQ ID NO: 38165 - DNA, 22 bp, synthetic construct
  misc_feature 1..22: note = chemically synthesized
  source 1..22: mol_type = other DNA
ttaaaacctgttattttcttgc

SEQ ID NO: 38166 - DNA, 22 bp, synthetic construct
  misc_feature 1..22: note = chemically synthesized
  source 1..22: mol_type = other DNA
aaaacctgttattttcttgcaa

SEQ ID NO: 38167 - DNA, 22 bp, synthetic construct
  misc_feature 1..22: note = chemically synthesized
  source 1..22: mol_type = other DNA
aaacctgttattttcttgcaag

SEQ ID NO: 38168 - DNA, 22 bp, synthetic construct
  misc_feature 1..22: note = chemically synthesized
  source 1..22: mol_type = other DNA
ttattttcttgcaagtaattta

SEQ ID NO: 38169 - DNA, 22 bp, synthetic construct
  misc_feature 1..22: note = chemically synthesized
  source 1..22: mol_type = other DNA
ttttcttgcaagtaatttacag

SEQ ID NO: 38170 - DNA, 22 bp, synthetic construct
  misc_feature 1..22: note = chemically synthesized
  source 1..22: mol_type = other DNA
tcttgcaagtaatttacagagt

SEQ ID NO: 38171 - DNA, 22 bp, synthetic construct
  misc_feature 1..22: note = chemically synthesized
  source 1..22: mol_type = other DNA
cttgcaagtaatttacagagtg

SEQ ID NO: 38172 - DNA, 22 bp, synthetic construct
  misc_feature 1..22: note = chemically synthesized
  source 1..22: mol_type = other DNA
ttgcaagtaatttacagagtgt

SEQ ID NO: 38173 - DNA, 22 bp, synthetic construct
  misc_feature 1..22: note = chemically synthesized
  source 1..22: mol_type = other DNA
gcaagtaatttacagagtgtgt

SEQ ID NO: 38174 - DNA, 22 bp, synthetic construct
  misc_feature 1..22: note = chemically synthesized
  source 1..22: mol_type = other DNA
caagtaatttacagagtgtgtc

SEQ ID NO: 38175 - DNA, 22 bp, synthetic construct
  misc_feature 1..22: note = chemically synthesized
  source 1..22: mol_type = other DNA
acagagtgtgtcaaatgaggac

SEQ ID NO: 38176 - DNA, 22 bp, synthetic construct
  misc_feature 1..22: note = chemically synthesized
  source 1..22: mol_type = other DNA
cagagtgtgtcaaatgaggaca

SEQ ID NO: 38177 - DNA, 22 bp, synthetic construct
  misc_feature 1..22: note = chemically synthesized
  source 1..22: mol_type = other DNA
acaatgtgtactttaatttttt

SEQ ID NO: 38178 - DNA, 22 bp, synthetic construct
  misc_feature 1..22: note = chemically synthesized
  source 1..22: mol_type = other DNA
caatgtgtactttaattttttt

SEQ ID NO: 38179 - DNA, 22 bp, synthetic construct
  misc_feature 1..22: note = chemically synthesized
  source 1..22: mol_type = other DNA
taattttttttattttttcaat

SEQ ID NO: 38180 - DNA, 22 bp, synthetic construct
  misc_feature 1..22: note = chemically synthesized
  source 1..22: mol_type = other DNA
aattttttttattttttcaata

SEQ ID NO: 38181 - DNA, 22 bp, synthetic construct
  misc_feature 1..22: note = chemically synthesized
  source 1..22: mol_type = other DNA
attttttttattttttcaataa

SEQ ID NO: 38182 - DNA, 22 bp, synthetic construct
  misc_feature 1..22: note = chemically synthesized
  source 1..22: mol_type = other DNA
tttttattttttcaataaaggg

SEQ ID NO: 38183 - DNA, 22 bp, synthetic construct
  misc_feature 1..22: note = chemically synthesized
  source 1..22: mol_type = other DNA
ttttattttttcaataaaggga

SEQ ID NO: 38184 - DNA, 22 bp, synthetic construct
  misc_feature 1..22: note = chemically synthesized
  source 1..22: mol_type = other DNA
tttattttttcaataaagggac

SEQ ID NO: 38185 - DNA, 22 bp, synthetic construct
  misc_feature 1..22: note = chemically synthesized
  source 1..22: mol_type = other DNA
ttattttttcaataaagggaca

SEQ ID NO: 38186 - DNA, 22 bp, synthetic construct
  misc_feature 1..22: note = chemically synthesized
  source 1..22: mol_type = other DNA
tattttttcaataaagggacaa

SEQ ID NO: 38187 - DNA, 22 bp, synthetic construct
  misc_feature 1..22: note = chemically synthesized
  source 1..22: mol_type = other DNA
attttttcaataaagggacaaa

SEQ ID NO: 38188 - DNA, 22 bp, synthetic construct
  misc_feature 1..22: note = chemically synthesized
  source 1..22: mol_type = other DNA
ttttttcaataaagggacaaaa

SEQ ID NO: 38189 - DNA, 22 bp, synthetic construct
  misc_feature 1..22: note = chemically synthesized
  source 1..22: mol_type = other DNA
tttcaataaagggacaaaatgg

SEQ ID NO: 38190 - DNA, 22 bp, synthetic construct
  misc_feature 1..22: note = chemically synthesized
  source 1..22: mol_type = other DNA
ttcaataaagggacaaaatggg

SEQ ID NO: 38191 - DNA, 22 bp, synthetic construct
  misc_feature 1..22: note = chemically synthesized
  source 1..22: mol_type = other DNA
tcaataaagggacaaaatgggt

SEQ ID NO: 38192 - DNA, 22 bp, synthetic construct
  misc_feature 1..22: note = chemically synthesized
  source 1..22: mol_type = other DNA
caataaagggacaaaatgggtg

SEQ ID NO: 38193 - DNA, 22 bp, synthetic construct
  misc_feature 1..22: note = chemically synthesized
  source 1..22: mol_type = other DNA
aataaagggacaaaatgggtgt

SEQ ID NO: 38194 - DNA, 22 bp, synthetic construct
  misc_feature 1..22: note = chemically synthesized
  source 1..22: mol_type = other DNA
atgcagacaactgccaaaaaaa

SEQ ID NO: 38195 - DNA, 22 bp, synthetic construct
  misc_feature 1..22: note = chemically synthesized
  source 1..22: mol_type = other DNA
ccaaaaaaacacagacagtggt

SEQ ID NO: 38196 - DNA, 22 bp, synthetic construct
  misc_feature 1..22: note = chemically synthesized
  source 1..22: mol_type = other DNA
ttccaatagaacttaacaaaga

SEQ ID NO: 38197 - DNA, 22 bp, synthetic construct
  misc_feature 1..22: note = chemically synthesized
  source 1..22: mol_type = other DNA
tccaatagaacttaacaaagac

SEQ ID NO: 38198 - DNA, 22 bp, synthetic construct
  misc_feature 1..22: note = chemically synthesized
  source 1..22: mol_type = other DNA
ccaatagaacttaacaaagacc

SEQ ID NO: 38199 - DNA, 22 bp, synthetic construct
  misc_feature 1..22: note = chemically synthesized
  source 1..22: mol_type = other DNA
caatagaacttaacaaagacca

SEQ ID NO: 38200 - DNA, 22 bp, synthetic construct
  misc_feature 1..22: note = chemically synthesized
  source 1..22: mol_type = other DNA
aacaaagaccagaaacaaatac

SEQ ID NO: 38201 - DNA, 22 bp, synthetic construct
  misc_feature 1..22: note = chemically synthesized
  source 1..22: mol_type = other DNA
acaaagaccagaaacaaataca

SEQ ID NO: 38202 - DNA, 22 bp, synthetic construct
  misc_feature 1..22: note = chemically synthesized
  source 1..22: mol_type = other DNA
taatgacctttggtcatctaaa

SEQ ID NO: 38203 - DNA, 22 bp, synthetic construct
  misc_feature 1..22: note = chemically synthesized
  source 1..22: mol_type = other DNA
tggtcatctaaataaaaaaaaa

SEQ ID NO: 38204 - DNA, 22 bp, synthetic construct
  misc_feature 1..22: note = chemically synthesized
  source 1..22: mol_type = other DNA
ggtcatctaaataaaaaaaaaa

SEQ ID NO: 38205 - DNA, 22 bp, synthetic construct
  misc_feature 1..22: note = chemically synthesized
  source 1..22: mol_type = other DNA
gtcatctaaataaaaaaaaaaa

SEQ ID NO: 38206 - DNA, 22 bp, synthetic construct
  misc_feature 1..22: note = chemically synthesized
  source 1..22: mol_type = other DNA
aataaaaaaaaaaataaaaaca

SEQ ID NO: 38207 - DNA, 22 bp, synthetic construct
  misc_feature 1..22: note = chemically synthesized
  source 1..22: mol_type = other DNA
agtgcctctgttttgaacaggg

SEQ ID NO: 38208 - DNA, 22 bp, synthetic construct
  misc_feature 1..22: note = chemically synthesized
  source 1..22: mol_type = other DNA
tgttttgaacagggcacataag

SEQ ID NO: 38209 - DNA, 22 bp, synthetic construct
  misc_feature 1..22: note = chemically synthesized
  source 1..22: mol_type = other DNA
ttttgaacagggcacataagca

SEQ ID NO: 38210 - DNA, 22 bp, synthetic construct
  misc_feature 1..22: note = chemically synthesized
  source 1..22: mol_type = other DNA
tgaacagggcacataagcaata

SEQ ID NO: 38211 - DNA, 22 bp, synthetic construct
  misc_feature 1..22: note = chemically synthesized
  source 1..22: mol_type = other DNA
gaacagggcacataagcaataa

SEQ ID NO: 38212 - DNA, 22 bp, synthetic construct
  misc_feature 1..22: note = chemically synthesized
  source 1..22: mol_type = other DNA
aacagggcacataagcaataat

SEQ ID NO: 38213 - DNA, 22 bp, synthetic construct
  misc_feature 1..22: note = chemically synthesized
  source 1..22: mol_type = other DNA
ccatagtaaaagataaaatttc

SEQ ID NO: 38214 - DNA, 22 bp, synthetic construct
  misc_feature 1..22: note = chemically synthesized
  source 1..22: mol_type = other DNA
caagttacgacaaacagctttc

SEQ ID NO: 38215 - DNA, 22 bp, synthetic construct
  misc_feature 1..22: note = chemically synthesized
  source 1..22: mol_type = other DNA
aagttacgacaaacagctttca

SEQ ID NO: 38216 - DNA, 22 bp, synthetic construct
  misc_feature 1..22: note = chemically synthesized
  source 1..22: mol_type = other DNA
cgacaaacagctttcattacag

SEQ ID NO: 38217 - DNA, 22 bp, synthetic construct
  misc_feature 1..22: note = chemically synthesized
  source 1..22: mol_type = other DNA
tcattacaggaatagaaaaggc

SEQ ID NO: 38218 - DNA, 22 bp, synthetic construct
  misc_feature 1..22: note = chemically synthesized
  source 1..22: mol_type = other DNA
cattacaggaatagaaaaggcc

SEQ ID NO: 38219 - DNA, 22 bp, synthetic construct
  misc_feature 1..22: note = chemically synthesized
  source 1..22: mol_type = other DNA
attacaggaatagaaaaggcca

SEQ ID NO: 38220 - DNA, 22 bp, synthetic construct
  misc_feature 1..22: note = chemically synthesized
  source 1..22: mol_type = other DNA
caggaatagaaaaggccaataa

SEQ ID NO: 38221 - DNA, 22 bp, synthetic construct
  misc_feature 1..22: note = chemically synthesized
  source 1..22: mol_type = other DNA
tgcattgccatttacaaaaaag

SEQ ID NO: 38222 - DNA, 22 bp, synthetic construct
  misc_feature 1..22: note = chemically synthesized
  source 1..22: mol_type = other DNA
cattgccatttacaaaaaagta

SEQ ID NO: 38223 - DNA, 22 bp, synthetic construct
  misc_feature 1..22: note = chemically synthesized
  source 1..22: mol_type = other DNA
ccatttacaaaaaagtattgac

SEQ ID NO: 38224 - DNA, 22 bp, synthetic construct
  misc_feature 1..22: note = chemically synthesized
  source 1..22: mol_type = other DNA
acaaaaaagtattgactaaagc

SEQ ID NO: 38225 - DNA, 22 bp, synthetic construct
  misc_feature 1..22: note = chemically synthesized
  source 1..22: mol_type = other DNA
caaaaaagtattgactaaagcg

SEQ ID NO: 38226 - DNA, 22 bp, synthetic construct
  misc_feature 1..22: note = chemically synthesized
  source 1..22: mol_type = other DNA
actaaagcgggctttctcttta

SEQ ID NO: 38227 - DNA, 22 bp, synthetic construct
  misc_feature 1..22: note = chemically synthesized
  source 1..22: mol_type = other DNA
aagcgggctttctctttaatat

SEQ ID NO: 38228 - DNA, 22 bp, synthetic construct
  misc_feature 1..22: note = chemically synthesized
  source 1..22: mol_type = other DNA
tctctttaatatgctttgcata

SEQ ID NO: 38229 - DNA, 22 bp, synthetic construct
  misc_feature 1..22: note = chemically synthesized
  source 1..22: mol_type = other DNA
ctctttaatatgctttgcatat

SEQ ID NO: 38230 - DNA, 22 bp, synthetic construct
  misc_feature 1..22: note = chemically synthesized
  source 1..22: mol_type = other DNA
tctttaatatgctttgcatatg

SEQ ID NO: 38231 - DNA, 22 bp, synthetic construct
  misc_feature 1..22: note = chemically synthesized
  source 1..22: mol_type = other DNA
tttaatatgctttgcatatgaa

SEQ ID NO: 38232 - DNA, 22 bp, synthetic construct
  misc_feature 1..22: note = chemically synthesized
  source 1..22: mol_type = other DNA
taatatgctttgcatatgaaat

SEQ ID NO: 38233 - DNA, 22 bp, synthetic construct
  misc_feature 1..22: note = chemically synthesized
  source 1..22: mol_type = other DNA
aatatgctttgcatatgaaatt

SEQ ID NO: 38234 - DNA, 22 bp, synthetic construct
  misc_feature 1..22: note = chemically synthesized
  source 1..22: mol_type = other DNA
atatgctttgcatatgaaattc

SEQ ID NO: 38235 - DNA, 22 bp, synthetic construct
  misc_feature 1..22: note = chemically synthesized
  source 1..22: mol_type = other DNA
tgcatatgaaattctttccaat

SEQ ID NO: 38236 - DNA, 22 bp, synthetic construct
  misc_feature 1..22: note = chemically synthesized
  source 1..22: mol_type = other DNA
gcatatgaaattctttccaatc

SEQ ID NO: 38237 - DNA, 22 bp, synthetic construct
  misc_feature 1..22: note = chemically synthesized
  source 1..22: mol_type = other DNA
catatgaaattctttccaatct

SEQ ID NO: 38238 - DNA, 22 bp, synthetic construct
  misc_feature 1..22: note = chemically synthesized
  source 1..22: mol_type = other DNA
tttccaatctaaatataaagca

SEQ ID NO: 38239 - DNA, 22 bp, synthetic construct
  misc_feature 1..22: note = chemically synthesized
  source 1..22: mol_type = other DNA
tccaatctaaatataaagcacc

SEQ ID NO: 38240 - DNA, 22 bp, synthetic construct
  misc_feature 1..22: note = chemically synthesized
  source 1..22: mol_type = other DNA
ccaatctaaatataaagcacca

SEQ ID NO: 38241 - DNA, 22 bp, synthetic construct
  misc_feature 1..22: note = chemically synthesized
  source 1..22: mol_type = other DNA
caatctaaatataaagcaccat

SEQ ID NO: 38242 - DNA, 22 bp, synthetic construct
  misc_feature 1..22: note = chemically synthesized
  source 1..22: mol_type = other DNA
aatataaagcaccatttagttt

SEQ ID NO: 38243 - DNA, 22 bp, synthetic construct
  misc_feature 1..22: note = chemically synthesized
  source 1..22: mol_type = other DNA
agtttttggcaatgaaaaaaac

SEQ ID NO: 38244 - DNA, 22 bp, synthetic construct
  misc_feature 1..22: note = chemically synthesized
  source 1..22: mol_type = other DNA
gtttttggcaatgaaaaaaact

SEQ ID NO: 38245 - DNA, 22 bp, synthetic construct
  misc_feature 1..22: note = chemically synthesized
  source 1..22: mol_type = other DNA
ttggcaatgaaaaaaactgcaa

SEQ ID NO: 38246 - DNA, 22 bp, synthetic construct
  misc_feature 1..22: note = chemically synthesized
  source 1..22: mol_type = other DNA
tggcaatgaaaaaaactgcaaa

SEQ ID NO: 38247 - DNA, 22 bp, synthetic construct
  misc_feature 1..22: note = chemically synthesized
  source 1..22: mol_type = other DNA
ggcaatgaaaaaaactgcaaaa

SEQ ID NO: 38248 - DNA, 22 bp, synthetic construct
  misc_feature 1..22: note = chemically synthesized
  source 1..22: mol_type = other DNA
gcaatgaaaaaaactgcaaaac

SEQ ID NO: 38249 - DNA, 22 bp, synthetic construct
  misc_feature 1..22: note = chemically synthesized
  source 1..22: mol_type = other DNA
caaaacattggttttttttttt

SEQ ID NO: 38250 - DNA, 22 bp, synthetic construct
  misc_feature 1..22: note = chemically synthesized
  source 1..22: mol_type = other DNA
gtttttttttttttttcctttt

SEQ ID NO: 38251 - DNA, 22 bp, synthetic construct
  misc_feature 1..22: note = chemically synthesized
  source 1..22: mol_type = other DNA
ttttttttttttcctttttttt

SEQ ID NO: 38252 - DNA, 22 bp, synthetic construct
  misc_feature 1..22: note = chemically synthesized
  source 1..22: mol_type = other DNA
tttttttttttccttttttttt

SEQ ID NO: 38253 - DNA, 22 bp, synthetic construct
  misc_feature 1..22: note = chemically synthesized
  source 1..22: mol_type = other DNA
ttttttttttcctttttttttc

SEQ ID NO: 38254 - DNA, 22 bp, synthetic construct
  misc_feature 1..22: note = chemically synthesized
  source 1..22: mol_type = other DNA
tttttttttcctttttttttct

SEQ ID NO: 38255 - DNA, 22 bp, synthetic construct
  misc_feature 1..22: note = chemically synthesized
  source 1..22: mol_type = other DNA
ttttttttcctttttttttctt

SEQ ID NO: 38256 - DNA, 22 bp, synthetic construct
  misc_feature 1..22: note = chemically synthesized
  source 1..22: mol_type = other DNA
tttttttcctttttttttcttt

SEQ ID NO: 38257 - DNA, 22 bp, synthetic construct
  misc_feature 1..22: note = chemically synthesized
  source 1..22: mol_type = other DNA
ttttttcctttttttttctttc

SEQ ID NO: 38258 - DNA, 22 bp, synthetic construct
  misc_feature 1..22: note = chemically synthesized
  source 1..22: mol_type = other DNA
tttttcctttttttttctttct

SEQ ID NO: 38259 - DNA, 22 bp, synthetic construct
  misc_feature 1..22: note = chemically synthesized
  source 1..22: mol_type = other DNA
ttttcctttttttttctttctt

SEQ ID NO: 38260 - DNA, 22 bp, synthetic construct
  misc_feature 1..22: note = chemically synthesized
  source 1..22: mol_type = other DNA
tttcctttttttttctttcttt

SEQ ID NO: 38261 - DNA, 22 bp, synthetic construct
  misc_feature 1..22: note = chemically synthesized
  source 1..22: mol_type = other DNA
ttcctttttttttctttctttc

SEQ ID NO: 38262 - DNA, 22 bp, synthetic construct
  misc_feature 1..22: note = chemically synthesized
  source 1..22: mol_type = other DNA
tcctttttttttctttctttct

SEQ ID NO: 38263 - DNA, 22 bp, synthetic construct
  misc_feature 1..22: note = chemically synthesized
  source 1..22: mol_type = other DNA
cctttttttttctttctttctt

SEQ ID NO: 38264 - DNA, 22 bp, synthetic construct
  misc_feature 1..22: note = chemically synthesized
  source 1..22: mol_type = other DNA
ctttttttttctttctttcttt

SEQ ID NO: 38265 - DNA, 22 bp, synthetic construct
  misc_feature 1..22: note = chemically synthesized
  source 1..22: mol_type = other DNA
tttttttctttctttcttttac

SEQ ID NO: 38266 - DNA, 22 bp, synthetic construct
  misc_feature 1..22: note = chemically synthesized
  source 1..22: mol_type = other DNA
ttttttctttctttcttttact

SEQ ID NO: 38267 - DNA, 22 bp, synthetic construct
  misc_feature 1..22: note = chemically synthesized
  source 1..22: mol_type = other DNA
tttttctttctttcttttactg

SEQ ID NO: 38268 - DNA, 22 bp, synthetic construct
  misc_feature 1..22: note = chemically synthesized
  source 1..22: mol_type = other DNA
ttttctttctttcttttactgc

SEQ ID NO: 38269 - DNA, 22 bp, synthetic construct
  misc_feature 1..22: note = chemically synthesized
  source 1..22: mol_type = other DNA
tttctttctttcttttactgca

SEQ ID NO: 38270 - DNA, 22 bp, synthetic construct
  misc_feature 1..22: note = chemically synthesized
  source 1..22: mol_type = other DNA
ttctttctttcttttactgcat

SEQ ID NO: 38271 - DNA, 22 bp, synthetic construct
  misc_feature 1..22: note = chemically synthesized
  source 1..22: mol_type = other DNA
tctttctttcttttactgcata

SEQ ID NO: 38272 - DNA, 22 bp, synthetic construct
  misc_feature 1..22: note = chemically synthesized
  source 1..22: mol_type = other DNA
ctttctttcttttactgcatat

SEQ ID NO: 38273 - DNA, 22 bp, synthetic construct
  misc_feature 1..22: note = chemically synthesized
  source 1..22: mol_type = other DNA
tttctttcttttactgcatatg

SEQ ID NO: 38274 - DNA, 22 bp, synthetic construct
  misc_feature 1..22: note = chemically synthesized
  source 1..22: mol_type = other DNA
tctttcttttactgcatatgaa

SEQ ID NO: 38275 - DNA, 22 bp, synthetic construct
  misc_feature 1..22: note = chemically synthesized
  source 1..22: mol_type = other DNA
ctttcttttactgcatatgaag

SEQ ID NO: 38276 - DNA, 22 bp, synthetic construct
  misc_feature 1..22: note = chemically synthesized
  source 1..22: mol_type = other DNA
tttcttttactgcatatgaagg

SEQ ID NO: 38277 - DNA, 22 bp, synthetic construct
  misc_feature 1..22: note = chemically synthesized
  source 1..22: mol_type = other DNA
tcttttactgcatatgaaggta

SEQ ID NO: 38278 - DNA, 22 bp, synthetic construct
  misc_feature 1..22: note = chemically synthesized
  source 1..22: mol_type = other DNA
cttttactgcatatgaaggtaa

SEQ ID NO: 38279 - DNA, 22 bp, synthetic construct
  misc_feature 1..22: note = chemically synthesized
  source 1..22: mol_type = other DNA
ttttactgcatatgaaggtaag

SEQ ID NO: 38280 - DNA, 22 bp, synthetic construct
  misc_feature 1..22: note = chemically synthesized
  source 1..22: mol_type = other DNA
ttactgcatatgaaggtaagat

SEQ ID NO: 38281 - DNA, 22 bp, synthetic construct
  misc_feature 1..22: note = chemically synthesized
  source 1..22: mol_type = other DNA
tactgcatatgaaggtaagatg

SEQ ID NO: 38282 - DNA, 22 bp, synthetic construct
  misc_feature 1..22: note = chemically synthesized
  source 1..22: mol_type = other DNA
actgcatatgaaggtaagatgc

SEQ ID NO: 38283 - DNA, 22 bp, synthetic construct
  misc_feature 1..22: note = chemically synthesized
  source 1..22: mol_type = other DNA
ctgcatatgaaggtaagatgct

SEQ ID NO: 38284 - DNA, 22 bp, synthetic construct
  misc_feature 1..22: note = chemically synthesized
  source 1..22: mol_type = other DNA
catatgaaggtaagatgctgga

SEQ ID NO: 38285 - DNA, 22 bp, synthetic construct
  misc_feature 1..22: note = chemically synthesized
  source 1..22: mol_type = other DNA
gaatgtagggtgatagaaggaa

SEQ ID NO: 38286 - DNA, 22 bp, synthetic construct
  misc_feature 1..22: note = chemically synthesized
  source 1..22: mol_type = other DNA
cataacaaaccaacgttattag

SEQ ID NO: 38287 - DNA, 22 bp, synthetic construct
  misc_feature 1..22: note = chemically synthesized
  source 1..22: mol_type = other DNA
ttagcttgcagtactgcataca

SEQ ID NO: 38288 - DNA, 22 bp, synthetic construct
  misc_feature 1..22: note = chemically synthesized
  source 1..22: mol_type = other DNA
gcttgcagtactgcatacagta

SEQ ID NO: 38289 - DNA, 22 bp, synthetic construct
  misc_feature 1..22: note = chemically synthesized
  source 1..22: mol_type = other DNA
gcagtactgcatacagtatggc

SEQ ID NO: 38290 - DNA, 22 bp, synthetic construct
  misc_feature 1..22: note = chemically synthesized
  source 1..22: mol_type = other DNA
cagtactgcatacagtatggca

SEQ ID NO: 38291 - DNA, 22 bp, synthetic construct
  misc_feature 1..22: note = chemically synthesized
  source 1..22: mol_type = other DNA
catacagtatggcagcaggaaa

SEQ ID NO: 38292 - DNA, 22 bp, synthetic construct
  misc_feature 1..22: note = chemically synthesized
  source 1..22: mol_type = other DNA
tgacagccatccatgtgacatt

SEQ ID NO: 38293 - DNA, 22 bp, synthetic construct
  misc_feature 1..22: note = chemically synthesized
  source 1..22: mol_type = other DNA
tagcaggctcccccaaaccgcc

SEQ ID NO: 38294 - DNA, 22 bp, synthetic construct
  misc_feature 1..22: note = chemically synthesized
  source 1..22: mol_type = other DNA
gcaggctcccccaaaccgccat

SEQ ID NO: 38295 - DNA, 22 bp, synthetic construct
  misc_feature 1..22: note = chemically synthesized
  source 1..22: mol_type = other DNA
ccccaaaccgccattatatggc

SEQ ID NO: 38296 - DNA, 22 bp, synthetic construct
  misc_feature 1..22: note = chemically synthesized
  source 1..22: mol_type = other DNA
tatggcttctcatctgtaatgt

SEQ ID NO: 38297 - DNA, 22 bp, synthetic construct
  misc_feature 1..22: note = chemically synthesized
  source 1..22: mol_type = other DNA
ctcatctgtaatgtcacacttt

SEQ ID NO: 38298 - DNA, 22 bp, synthetic construct
  misc_feature 1..22: note = chemically synthesized
  source 1..22: mol_type = other DNA
tcatctgtaatgtcacactttt

SEQ ID NO: 38299 - DNA, 22 bp, synthetic construct
  misc_feature 1..22: note = chemically synthesized
  source 1..22: mol_type = other DNA
atctgtaatgtcacactttttt

SEQ ID NO: 38300 - DNA, 22 bp, synthetic construct
  misc_feature 1..22: note = chemically synthesized
  source 1..22: mol_type = other DNA
taatgtcacacttttttgtttc

SEQ ID NO: 38301 - DNA, 22 bp, synthetic construct
  misc_feature 1..22: note = chemically synthesized
  source 1..22: mol_type = other DNA
ttttgtttctctcttttttttt

SEQ ID NO: 38302 - DNA, 22 bp, synthetic construct
  misc_feature 1..22: note = chemically synthesized
  source 1..22: mol_type = other DNA
tttgtttctctctttttttttt

SEQ ID NO: 38303 - DNA, 22 bp, synthetic construct
  misc_feature 1..22: note = chemically synthesized
  source 1..22: mol_type = other DNA
ttgtttctctcttttttttttt

SEQ ID NO: 38304 - DNA, 22 bp, synthetic construct
  misc_feature 1..22: note = chemically synthesized
  source 1..22: mol_type = other DNA
tgtttctctctttttttttttt

SEQ ID NO: 38305 - DNA, 22 bp, synthetic construct
  misc_feature 1..22: note = chemically synthesized
  source 1..22: mol_type = other DNA
gtttctctcttttttttttttt

SEQ ID NO: 38306 - DNA, 22 bp, synthetic construct
  misc_feature 1..22: note = chemically synthesized
  source 1..22: mol_type = other DNA
tttctctctttttttttttttt

SEQ ID NO: 38307 - DNA, 22 bp, synthetic construct
  misc_feature 1..22: note = chemically synthesized
  source 1..22: mol_type = other DNA
ctctcttttttttttttttgaa

SEQ ID NO: 38308 - DNA, 22 bp, synthetic construct
  misc_feature 1..22: note = chemically synthesized
  source 1..22: mol_type = other DNA
tctcttttttttttttttgaag

SEQ ID NO: 38309 - DNA, 22 bp, synthetic construct
  misc_feature 1..22: note = chemically synthesized
  source 1..22: mol_type = other DNA
tcttttttttttttttgaagca

SEQ ID NO: 38310 - DNA, 22 bp, synthetic construct
  misc_feature 1..22: note = chemically synthesized
  source 1..22: mol_type = other DNA
ttttttttttttttgaagcata

SEQ ID NO: 38311 - DNA, 22 bp, synthetic construct
  misc_feature 1..22: note = chemically synthesized
  source 1..22: mol_type = other DNA
ttttttttttttgaagcataca

SEQ ID NO: 38312 - DNA, 22 bp, synthetic construct
  misc_feature 1..22: note = chemically synthesized
  source 1..22: mol_type = other DNA
tttttttttttgaagcatacaa

SEQ ID NO: 38313 - DNA, 22 bp, synthetic construct
  misc_feature 1..22: note = chemically synthesized
  source 1..22: mol_type = other DNA
ttttttttttgaagcatacaaa

SEQ ID NO: 38314 - DNA, 22 bp, synthetic construct
  misc_feature 1..22: note = chemically synthesized
  source 1..22: mol_type = other DNA
tttttttttgaagcatacaaat

SEQ ID NO: 38315 - DNA, 22 bp, synthetic construct
  misc_feature 1..22: note = chemically synthesized
  source 1..22: mol_type = other DNA
ttttttttgaagcatacaaata

SEQ ID NO: 38316 - DNA, 22 bp, synthetic construct
  misc_feature 1..22: note = chemically synthesized
  source 1..22: mol_type = other DNA
tttttttgaagcatacaaataa

SEQ ID NO: 38317 - DNA, 22 bp, synthetic construct
  misc_feature 1..22: note = chemically synthesized
  source 1..22: mol_type = other DNA
ttttttgaagcatacaaataat

SEQ ID NO: 38318 - DNA, 22 bp, synthetic construct
  misc_feature 1..22: note = chemically synthesized
  source 1..22: mol_type = other DNA
tttttgaagcatacaaataatt

SEQ ID NO: 38319 - DNA, 22 bp, synthetic construct
  misc_feature 1..22: note = chemically synthesized
  source 1..22: mol_type = other DNA
ttttgaagcatacaaataattt

SEQ ID NO: 38320 - DNA, 22 bp, synthetic construct
  misc_feature 1..22: note = chemically synthesized
  source 1..22: mol_type = other DNA
tttgaagcatacaaataatttg

SEQ ID NO: 38321 - DNA, 22 bp, synthetic construct
  misc_feature 1..22: note = chemically synthesized
  source 1..22: mol_type = other DNA
ttgaagcatacaaataatttgc

SEQ ID NO: 38322 - DNA, 22 bp, synthetic construct
  misc_feature 1..22: note = chemically synthesized
  source 1..22: mol_type = other DNA
tgaagcatacaaataatttgca

SEQ ID NO: 38323 - DNA, 22 bp, synthetic construct
  misc_feature 1..22: note = chemically synthesized
  source 1..22: mol_type = other DNA
gaagcatacaaataatttgcac

SEQ ID NO: 38324 - DNA, 22 bp, synthetic construct
  misc_feature 1..22: note = chemically synthesized
  source 1..22: mol_type = other DNA
aagcatacaaataatttgcact

SEQ ID NO: 38325 - DNA, 22 bp, synthetic construct
  misc_feature 1..22: note = chemically synthesized
  source 1..22: mol_type = other DNA
gcactatattatcctgccaaat

SEQ ID NO: 38326 - DNA, 22 bp, synthetic construct
  misc_feature 1..22: note = chemically synthesized
  source 1..22: mol_type = other DNA
cactatattatcctgccaaatt

SEQ ID NO: 38327 - DNA, 22 bp, synthetic construct
  misc_feature 1..22: note = chemically synthesized
  source 1..22: mol_type = other DNA
tattatcctgccaaattaaaaa

SEQ ID NO: 38328 - DNA, 22 bp, synthetic construct
  misc_feature 1..22: note = chemically synthesized
  source 1..22: mol_type = other DNA
tcctgccaaattaaaaaaatat

SEQ ID NO: 38329 - DNA, 22 bp, synthetic construct
  misc_feature 1..22: note = chemically synthesized
  source 1..22: mol_type = other DNA
ccaaattaaaaaaatatactgt

SEQ ID NO: 38330 - DNA, 22 bp, synthetic construct
  misc_feature 1..22: note = chemically synthesized
  source 1..22: mol_type = other DNA
aaaaaatatactgtggcagcct

SEQ ID NO: 38331 - DNA, 22 bp, synthetic construct
  misc_feature 1..22: note = chemically synthesized
  source 1..22: mol_type = other DNA
tggcagcctgtctttttttttt

SEQ ID NO: 38332 - DNA, 22 bp, synthetic construct
  misc_feature 1..22: note = chemically synthesized
  source 1..22: mol_type = other DNA
tcttttttttttccactaccaa

SEQ ID NO: 38333 - DNA, 22 bp, synthetic construct
  misc_feature 1..22: note = chemically synthesized
  source 1..22: mol_type = other DNA
ttttttttccactaccaaaaaa

SEQ ID NO: 38334 - DNA, 22 bp, synthetic construct
  misc_feature 1..22: note = chemically synthesized
  source 1..22: mol_type = other DNA
tttttttccactaccaaaaaag

SEQ ID NO: 38335 - DNA, 22 bp, synthetic construct
  misc_feature 1..22: note = chemically synthesized
  source 1..22: mol_type = other DNA
ttttttccactaccaaaaaagg

SEQ ID NO: 38336 - DNA, 22 bp, synthetic construct
  misc_feature 1..22: note = chemically synthesized
  source 1..22: mol_type = other DNA
tttttccactaccaaaaaaggt

SEQ ID NO: 38337 - DNA, 22 bp, synthetic construct
  misc_feature 1..22: note = chemically synthesized
  source 1..22: mol_type = other DNA
ttttccactaccaaaaaaggta

SEQ ID NO: 38338 - DNA, 22 bp, synthetic construct
  misc_feature 1..22: note = chemically synthesized
  source 1..22: mol_type = other DNA
tttccactaccaaaaaaggtac

SEQ ID NO: 38339 - DNA, 22 bp, synthetic construct
  misc_feature 1..22: note = chemically synthesized
  source 1..22: mol_type = other DNA
ttccactaccaaaaaaggtaca

SEQ ID NO: 38340 - DNA, 22 bp, synthetic construct
  misc_feature 1..22: note = chemically synthesized
  source 1..22: mol_type = other DNA
tccactaccaaaaaaggtacat

SEQ ID NO: 38341 - DNA, 22 bp, synthetic construct
  misc_feature 1..22: note = chemically synthesized
  source 1..22: mol_type = other DNA
ccactaccaaaaaaggtacatt

SEQ ID NO: 38342 - DNA, 22 bp, synthetic construct
  misc_feature 1..22: note = chemically synthesized
  source 1..22: mol_type = other DNA
cactaccaaaaaaggtacattg

SEQ ID NO: 38343 - DNA, 22 bp, synthetic construct
  misc_feature 1..22: note = chemically synthesized
  source 1..22: mol_type = other DNA
ccaaaaaaggtacattgatacc

SEQ ID NO: 38344 - DNA, 22 bp, synthetic construct
  misc_feature 1..22: note = chemically synthesized
  source 1..22: mol_type = other DNA
ataccttttaagagaacaagca

SEQ ID NO: 38345 - DNA, 22 bp, synthetic construct
  misc_feature 1..22: note = chemically synthesized
  source 1..22: mol_type = other DNA
ttaagagaacaagcaacagtta

SEQ ID NO: 38346 - DNA, 22 bp, synthetic construct
  misc_feature 1..22: note = chemically synthesized
  source 1..22: mol_type = other DNA
taagagaacaagcaacagttaa

SEQ ID NO: 38347 - DNA, 22 bp, synthetic construct
  misc_feature 1..22: note = chemically synthesized
  source 1..22: mol_type = other DNA
aagagaacaagcaacagttaaa

SEQ ID NO: 38348 - DNA, 22 bp, synthetic construct
  misc_feature 1..22: note = chemically synthesized
  source 1..22: mol_type = other DNA
agagaacaagcaacagttaaaa

SEQ ID NO: 38349 - DNA, 22 bp, synthetic construct
  misc_feature 1..22: note = chemically synthesized
  source 1..22: mol_type = other DNA
aaaatacaagcttcaatataaa

SEQ ID NO: 38350 - DNA, 22 bp, synthetic construct
  misc_feature 1..22: note = chemically synthesized
  source 1..22: mol_type = other DNA
caatataaatactatagtgcct

SEQ ID NO: 38351 - DNA, 22 bp, synthetic construct
  misc_feature 1..22: note = chemically synthesized
  source 1..22: mol_type = other DNA
aatataaatactatagtgccta

SEQ ID NO: 38352 - DNA, 22 bp, synthetic construct
  misc_feature 1..22: note = chemically synthesized
  source 1..22: mol_type = other DNA
tagtgcctaacactagatgaac

SEQ ID NO: 38353 - DNA, 22 bp, synthetic construct
  misc_feature 1..22: note = chemically synthesized
  source 1..22: mol_type = other DNA
acactagatgaacatttaattc

SEQ ID NO: 38354 - DNA, 22 bp, synthetic construct
  misc_feature 1..22: note = chemically synthesized
  source 1..22: mol_type = other DNA
gatgaacatttaattcaaatac

SEQ ID NO: 38355 - DNA, 22 bp, synthetic construct
  misc_feature 1..22: note = chemically synthesized
  source 1..22: mol_type = other DNA
aattcaaataccattctagaaa

SEQ ID NO: 38356 - DNA, 22 bp, synthetic construct
  misc_feature 1..22: note = chemically synthesized
  source 1..22: mol_type = other DNA
attcaaataccattctagaaat

SEQ ID NO: 38357 - DNA, 22 bp, synthetic construct
  misc_feature 1..22: note = chemically synthesized
  source 1..22: mol_type = other DNA
aaataccattctagaaatacag

SEQ ID NO: 38358 - DNA, 22 bp, synthetic construct
  misc_feature 1..22: note = chemically synthesized
  source 1..22: mol_type = other DNA
tagaaatacagaaaaaagacca

SEQ ID NO: 38359 - DNA, 22 bp, synthetic construct
  misc_feature 1..22: note = chemically synthesized
  source 1..22: mol_type = other DNA
gaaatacagaaaaaagaccata

SEQ ID NO: 38360 - DNA, 22 bp, synthetic construct
  misc_feature 1..22: note = chemically synthesized
  source 1..22: mol_type = other DNA
tagcataggaatcaacatgagt

SEQ ID NO: 38361 - DNA, 22 bp, synthetic construct
  misc_feature 1..22: note = chemically synthesized
  source 1..22: mol_type = other DNA
agcataggaatcaacatgagtg

SEQ ID NO: 38362 - DNA, 22 bp, synthetic construct
  misc_feature 1..22: note = chemically synthesized
  source 1..22: mol_type = other DNA
gcataggaatcaacatgagtgt

SEQ ID NO: 38363 - DNA, 22 bp, synthetic construct
  misc_feature 1..22: note = chemically synthesized
  source 1..22: mol_type = other DNA
tcctatatttaagtactatata

SEQ ID NO: 38364 - DNA, 22 bp, synthetic construct
  misc_feature 1..22: note = chemically synthesized
  source 1..22: mol_type = other DNA
cctatatttaagtactatataa

SEQ ID NO: 38365 - DNA, 22 bp, synthetic construct
  misc_feature 1..22: note = chemically synthesized
  source 1..22: mol_type = other DNA
ctatatttaagtactatataat

SEQ ID NO: 38366 - DNA, 22 bp, synthetic construct
  misc_feature 1..22: note = chemically synthesized
  source 1..22: mol_type = other DNA
tatttaagtactatataatctt

SEQ ID NO: 38367 - DNA, 22 bp, synthetic construct
  misc_feature 1..22: note = chemically synthesized
  source 1..22: mol_type = other DNA
aagtactatataatcttaaacc

SEQ ID NO: 38368 - DNA, 22 bp, synthetic construct
  misc_feature 1..22: note = chemically synthesized
  source 1..22: mol_type = other DNA
agtactatataatcttaaacct

SEQ ID NO: 38369 - DNA, 22 bp, synthetic construct
  misc_feature 1..22: note = chemically synthesized
  source 1..22: mol_type = other DNA
tataatcttaaacctttcccca

SEQ ID NO: 38370 - DNA, 22 bp, synthetic construct
  misc_feature 1..22: note = chemically synthesized
  source 1..22: mol_type = other DNA
aaacctttccccaatgtatgtt

SEQ ID NO: 38371 - DNA, 22 bp, synthetic construct
  misc_feature 1..22: note = chemically synthesized
  source 1..22: mol_type = other DNA
aacctttccccaatgtatgttt

SEQ ID NO: 38372 - DNA, 22 bp, synthetic construct
  misc_feature 1..22: note = chemically synthesized
  source 1..22: mol_type = other DNA
tccccaatgtatgttttttttt

SEQ ID NO: 38373 - DNA, 22 bp, synthetic construct
  misc_feature 1..22: note = chemically synthesized
  source 1..22: mol_type = other DNA
ccccaatgtatgtttttttttt

SEQ ID NO: 38374 - DNA, 22 bp, synthetic construct
  misc_feature 1..22: note = chemically synthesized
  source 1..22: mol_type = other DNA
cccaatgtatgttttttttttt

SEQ ID NO: 38375 - DNA, 22 bp, synthetic construct
  misc_feature 1..22: note = chemically synthesized
  source 1..22: mol_type = other DNA
tttttttttacaacctgaagag

SEQ ID NO: 38376 - DNA, 22 bp, synthetic construct
  misc_feature 1..22: note = chemically synthesized
  source 1..22: mol_type = other DNA
ttttttttacaacctgaagagc

SEQ ID NO: 38377 - DNA, 22 bp, synthetic construct
  misc_feature 1..22: note = chemically synthesized
  source 1..22: mol_type = other DNA
tttttttacaacctgaagagcg

SEQ ID NO: 38378 - DNA, 22 bp, synthetic construct
  misc_feature 1..22: note = chemically synthesized
  source 1..22: mol_type = other DNA
ttttttacaacctgaagagcgg

SEQ ID NO: 38379 - DNA, 22 bp, synthetic construct
  misc_feature 1..22: note = chemically synthesized
  source 1..22: mol_type = other DNA
tttttacaacctgaagagcggt

SEQ ID NO: 38380 - DNA, 22 bp, synthetic construct
  misc_feature 1..22: note = chemically synthesized
  source 1..22: mol_type = other DNA
ttttacaacctgaagagcggtg

SEQ ID NO: 38381 - DNA, 22 bp, synthetic construct
  misc_feature 1..22: note = chemically synthesized
  source 1..22: mol_type = other DNA
tttacaacctgaagagcggtgt

SEQ ID NO: 38382 - DNA, 22 bp, synthetic construct
  misc_feature 1..22: note = chemically synthesized
  source 1..22: mol_type = other DNA
ttacaacctgaagagcggtgtg

SEQ ID NO: 38383 - DNA, 22 bp, synthetic construct
  misc_feature 1..22: note = chemically synthesized
  source 1..22: mol_type = other DNA
tacaacctgaagagcggtgtgt

SEQ ID NO: 38384 - DNA, 22 bp, synthetic construct
  misc_feature 1..22: note = chemically synthesized
  source 1..22: mol_type = other DNA
acaacctgaagagcggtgtgta

SEQ ID NO: 38385 - DNA, 22 bp, synthetic construct
  misc_feature 1..22: note = chemically synthesized
  source 1..22: mol_type = other DNA
caacctgaagagcggtgtgtat

SEQ ID NO: 38386 - DNA, 22 bp, synthetic construct
  misc_feature 1..22: note = chemically synthesized
  source 1..22: mol_type = other DNA
aagagcggtgtgtatccaaggc

SEQ ID NO: 38387 - DNA, 22 bp, synthetic construct
  misc_feature 1..22: note = chemically synthesized
  source 1..22: mol_type = other DNA
ccactaccatttttaaatggat

SEQ ID NO: 38388 - DNA, 22 bp, synthetic construct
  misc_feature 1..22: note = chemically synthesized
  source 1..22: mol_type = other DNA
cactaccatttttaaatggata

SEQ ID NO: 38389 - DNA, 22 bp, synthetic construct
  misc_feature 1..22: note = chemically synthesized
  source 1..22: mol_type = other DNA
ccatttttaaatggataacaag

SEQ ID NO: 38390 - DNA, 22 bp, synthetic construct
  misc_feature 1..22: note = chemically synthesized
  source 1..22: mol_type = other DNA
ttaaatggataacaagtcttgt

SEQ ID NO: 38391 - DNA, 22 bp, synthetic construct
  misc_feature 1..22: note = chemically synthesized
  source 1..22: mol_type = other DNA
taaatggataacaagtcttgta

SEQ ID NO: 38392 - DNA, 22 bp, synthetic construct
  misc_feature 1..22: note = chemically synthesized
  source 1..22: mol_type = other DNA
aaatggataacaagtcttgtaa

SEQ ID NO: 38393 - DNA, 22 bp, synthetic construct
  misc_feature 1..22: note = chemically synthesized
  source 1..22: mol_type = other DNA
aatggataacaagtcttgtaac

SEQ ID NO: 38394 - DNA, 22 bp, synthetic construct
  misc_feature 1..22: note = chemically synthesized
  source 1..22: mol_type = other DNA
gtaacaccaccaagacaatgga

SEQ ID NO: 38395 - DNA, 22 bp, synthetic construct
  misc_feature 1..22: note = chemically synthesized
  source 1..22: mol_type = other DNA
taacaccaccaagacaatggaa

SEQ ID NO: 38396 - DNA, 22 bp, synthetic construct
  misc_feature 1..22: note = chemically synthesized
  source 1..22: mol_type = other DNA
aaatgcagttcccccctaaaca

SEQ ID NO: 38397 - DNA, 22 bp, synthetic construct
  misc_feature 1..22: note = chemically synthesized
  source 1..22: mol_type = other DNA
ccccctaaacataatgaagtgt

SEQ ID NO: 38398 - DNA, 22 bp, synthetic construct
  misc_feature 1..22: note = chemically synthesized
  source 1..22: mol_type = other DNA
aacataatgaagtgttttttaa

SEQ ID NO: 38399 - DNA, 22 bp, synthetic construct
  misc_feature 1..22: note = chemically synthesized
  source 1..22: mol_type = other DNA
tttaaaaaaaatttttcttaac

SEQ ID NO: 38400 - DNA, 22 bp, synthetic construct
  misc_feature 1..22: note = chemically synthesized
  source 1..22: mol_type = other DNA
ttaaaaaaaatttttcttaaca

SEQ ID NO: 38401 - DNA, 22 bp, synthetic construct
  misc_feature 1..22: note = chemically synthesized
  source 1..22: mol_type = other DNA
taaaaaaaatttttcttaacat

SEQ ID NO: 38402 - DNA, 22 bp, synthetic construct
  misc_feature 1..22: note = chemically synthesized
  source 1..22: mol_type = other DNA
aaaaaaaatttttcttaacatt

SEQ ID NO: 38403 - DNA, 22 bp, synthetic construct
  misc_feature 1..22: note = chemically synthesized
  source 1..22: mol_type = other DNA
aaaaaaatttttcttaacattt

SEQ ID NO: 38404 - DNA, 22 bp, synthetic construct
  misc_feature 1..22: note = chemically synthesized
  source 1..22: mol_type = other DNA
ttcttaacatttatatttaaaa

SEQ ID NO: 38405 - DNA, 22 bp, synthetic construct
  misc_feature 1..22: note = chemically synthesized
  source 1..22: mol_type = other DNA
tcttaacatttatatttaaaaa

SEQ ID NO: 38406 - DNA, 22 bp, synthetic construct
  misc_feature 1..22: note = chemically synthesized
  source 1..22: mol_type = other DNA
cttaacatttatatttaaaaaa

SEQ ID NO: 38407 - DNA, 22 bp, synthetic construct
  misc_feature 1..22: note = chemically synthesized
  source 1..22: mol_type = other DNA
ttaacatttatatttaaaaaag

SEQ ID NO: 38408 - DNA, 22 bp, synthetic construct
  misc_feature 1..22: note = chemically synthesized
  source 1..22: mol_type = other DNA
aacatttatatttaaaaaagtt

SEQ ID NO: 38409 - DNA, 22 bp, synthetic construct
  misc_feature 1..22: note = chemically synthesized
  source 1..22: mol_type = other DNA
acatttatatttaaaaaagttt

SEQ ID NO: 38410 - DNA, 22 bp, synthetic construct
  misc_feature 1..22: note = chemically synthesized
  source 1..22: mol_type = other DNA
atatttaaaaaagttttgtaca

SEQ ID NO: 38411 - DNA, 22 bp, synthetic construct
  misc_feature 1..22: note = chemically synthesized
  source 1..22: mol_type = other DNA
tatttaaaaaagttttgtacaa

SEQ ID NO: 38412 - DNA, 22 bp, synthetic construct
  misc_feature 1..22: note = chemically synthesized
  source 1..22: mol_type = other DNA
aaaaaagttttgtacaaaaaaa

SEQ ID NO: 38413 - DNA, 22 bp, synthetic construct
  misc_feature 1..22: note = chemically synthesized
  source 1..22: mol_type = other DNA
aaaaagttttgtacaaaaaaat

SEQ ID NO: 38414 - DNA, 22 bp, synthetic construct
  misc_feature 1..22: note = chemically synthesized
  source 1..22: mol_type = other DNA
tgtacaaaaaaatccttgcact

SEQ ID NO: 38415 - DNA, 22 bp, synthetic construct
  misc_feature 1..22: note = chemically synthesized
  source 1..22: mol_type = other DNA
gtacaaaaaaatccttgcactg

SEQ ID NO: 38416 - DNA, 22 bp, synthetic construct
  misc_feature 1..22: note = chemically synthesized
  source 1..22: mol_type = other DNA
tacaaaaaaatccttgcactgt

SEQ ID NO: 38417 - DNA, 22 bp, synthetic construct
  misc_feature 1..22: note = chemically synthesized
  source 1..22: mol_type = other DNA
gcactgtagaagcgaaagcaat

SEQ ID NO: 38418 - DNA, 22 bp, synthetic construct
  misc_feature 1..22: note = chemically synthesized
  source 1..22: mol_type = other DNA
cactgtagaagcgaaagcaatc

SEQ ID NO: 38419 - DNA, 22 bp, synthetic construct
  misc_feature 1..22: note = chemically synthesized
  source 1..22: mol_type = other DNA
tagaagcgaaagcaatcattca

SEQ ID NO: 38420 - DNA, 22 bp, synthetic construct
  misc_feature 1..22: note = chemically synthesized
  source 1..22: mol_type = other DNA
atttctatgttaagtgtattct

SEQ ID NO: 38421 - DNA, 22 bp, synthetic construct
  misc_feature 1..22: note = chemically synthesized
  source 1..22: mol_type = other DNA
ctatgttaagtgtattctgttt

SEQ ID NO: 38422 - DNA, 22 bp, synthetic construct
  misc_feature 1..22: note = chemically synthesized
  source 1..22: mol_type = other DNA
tatgttaagtgtattctgtttc

SEQ ID NO: 38423 - DNA, 22 bp, synthetic construct
  misc_feature 1..22: note = chemically synthesized
  source 1..22: mol_type = other DNA
tgttaagtgtattctgtttcca

SEQ ID NO: 38424 - DNA, 22 bp, synthetic construct
  misc_feature 1..22: note = chemically synthesized
  source 1..22: mol_type = other DNA
agtgtattctgtttccattcac

SEQ ID NO: 38425 - DNA, 22 bp, synthetic construct
  misc_feature 1..22: note = chemically synthesized
  source 1..22: mol_type = other DNA
tgtttccattcacagcgcttgc

SEQ ID NO: 38426 - DNA, 22 bp, synthetic construct
  misc_feature 1..22: note = chemically synthesized
  source 1..22: mol_type = other DNA
tttccattcacagcgcttgcaa

SEQ ID NO: 38427 - DNA, 22 bp, synthetic construct
  misc_feature 1..22: note = chemically synthesized
  source 1..22: mol_type = other DNA
ccattcacagcgcttgcaatgt

SEQ ID NO: 38428 - DNA, 22 bp, synthetic construct
  misc_feature 1..22: note = chemically synthesized
  source 1..22: mol_type = other DNA
cattcacagcgcttgcaatgtt

SEQ ID NO: 38429 - DNA, 22 bp, synthetic construct
  misc_feature 1..22: note = chemically synthesized
  source 1..22: mol_type = other DNA
acagcgcttgcaatgttgcgtc

SEQ ID NO: 38430 - DNA, 22 bp, synthetic construct
  misc_feature 1..22: note = chemically synthesized
  source 1..22: mol_type = other DNA
gcaatgttgcgtccaagtaagt

SEQ ID NO: 38431 - DNA, 22 bp, synthetic construct
  misc_feature 1..22: note = chemically synthesized
  source 1..22: mol_type = other DNA
caatgttgcgtccaagtaagta

SEQ ID NO: 38432 - DNA, 22 bp, synthetic construct
  misc_feature 1..22: note = chemically synthesized
  source 1..22: mol_type = other DNA
cgtccaagtaagtaagctcaat

SEQ ID NO: 38433 - DNA, 22 bp, synthetic construct
  misc_feature 1..22: note = chemically synthesized
  source 1..22: mol_type = other DNA
aatagtcaagtaaatggctggc

SEQ ID NO: 38434 - DNA, 22 bp, synthetic construct
  misc_feature 1..22: note = chemically synthesized
  source 1..22: mol_type = other DNA
gcaaagtttttttttttttagt

SEQ ID NO: 38435 - DNA, 22 bp, synthetic construct
  misc_feature 1..22: note = chemically synthesized
  source 1..22: mol_type = other DNA
ttttttttttagtttttaaaaa

SEQ ID NO: 38436 - DNA, 22 bp, synthetic construct
  misc_feature 1..22: note = chemically synthesized
  source 1..22: mol_type = other DNA
tttttttttagtttttaaaaaa

SEQ ID NO: 38437 - DNA, 22 bp, synthetic construct
  misc_feature 1..22: note = chemically synthesized
  source 1..22: mol_type = other DNA
ttttttttagtttttaaaaaat

SEQ ID NO: 38438 - DNA, 22 bp, synthetic construct
  misc_feature 1..22: note = chemically synthesized
  source 1..22: mol_type = other DNA
tttttttagtttttaaaaaatg

SEQ ID NO: 38439 - DNA, 22 bp, synthetic construct
  misc_feature 1..22: note = chemically synthesized
  source 1..22: mol_type = other DNA
ttttttagtttttaaaaaatgc

SEQ ID NO: 38440 - DNA, 22 bp, synthetic construct
  misc_feature 1..22: note = chemically synthesized
  source 1..22: mol_type = other DNA
tttttagtttttaaaaaatgct

SEQ ID NO: 38441 - DNA, 22 bp, synthetic construct
  misc_feature 1..22: note = chemically synthesized
  source 1..22: mol_type = other DNA
ttttagtttttaaaaaatgctc

SEQ ID NO: 38442 - DNA, 22 bp, synthetic construct
  misc_feature 1..22: note = chemically synthesized
  source 1..22: mol_type = other DNA
tttagtttttaaaaaatgctcc

SEQ ID NO: 38443 - DNA, 22 bp, synthetic construct
  misc_feature 1..22: note = chemically synthesized
  source 1..22: mol_type = other DNA
ttagtttttaaaaaatgctcct

SEQ ID NO: 38444 - DNA, 22 bp, synthetic construct
  misc_feature 1..22: note = chemically synthesized
  source 1..22: mol_type = other DNA
tagtttttaaaaaatgctcctc

SEQ ID NO: 38445 - DNA, 22 bp, synthetic construct
  misc_feature 1..22: note = chemically synthesized
  source 1..22: mol_type = other DNA
agtttttaaaaaatgctcctca

SEQ ID NO: 38446 - DNA, 22 bp, synthetic construct
  misc_feature 1..22: note = chemically synthesized
  source 1..22: mol_type = other DNA
gtttttaaaaaatgctcctcaa

SEQ ID NO: 38447 - DNA, 22 bp, synthetic construct
  misc_feature 1..22: note = chemically synthesized
  source 1..22: mol_type = other DNA
ttaaaaaatgctcctcaatgag

SEQ ID NO: 38448 - DNA, 22 bp, synthetic construct
  misc_feature 1..22: note = chemically synthesized
  source 1..22: mol_type = other DNA
taaaaaatgctcctcaatgaga

SEQ ID NO: 38449 - DNA, 22 bp, synthetic construct
  misc_feature 1..22: note = chemically synthesized
  source 1..22: mol_type = other DNA
aaaaaatgctcctcaatgagat

SEQ ID NO: 38450 - DNA, 22 bp, synthetic construct
  misc_feature 1..22: note = chemically synthesized
  source 1..22: mol_type = other DNA
aaaaatgctcctcaatgagatt

SEQ ID NO: 38451 - DNA, 22 bp, synthetic construct
  misc_feature 1..22: note = chemically synthesized
  source 1..22: mol_type = other DNA
ctcaatgagattgtgttcaatt

SEQ ID NO: 38452 - DNA, 22 bp, synthetic construct
  misc_feature 1..22: note = chemically synthesized
  source 1..22: mol_type = other DNA
aatgagattgtgttcaattttt

SEQ ID NO: 38453 - DNA, 22 bp, synthetic construct
  misc_feature 1..22: note = chemically synthesized
  source 1..22: mol_type = other DNA
tgttcaattttttttcagcatt

SEQ ID NO: 38454 - DNA, 22 bp, synthetic construct
  misc_feature 1..22: note = chemically synthesized
  source 1..22: mol_type = other DNA
aattttttttcagcattcttgc

SEQ ID NO: 38455 - DNA, 22 bp, synthetic construct
  misc_feature 1..22: note = chemically synthesized
  source 1..22: mol_type = other DNA
tttttcagcattcttgcaactt

SEQ ID NO: 38456 - DNA, 22 bp, synthetic construct
  misc_feature 1..22: note = chemically synthesized
  source 1..22: mol_type = other DNA
ttttcagcattcttgcaacttt

SEQ ID NO: 38457 - DNA, 22 bp, synthetic construct
  misc_feature 1..22: note = chemically synthesized
  source 1..22: mol_type = other DNA
tttcagcattcttgcaactttt

SEQ ID NO: 38458 - DNA, 22 bp, synthetic construct
  misc_feature 1..22: note = chemically synthesized
  source 1..22: mol_type = other DNA
ttcagcattcttgcaacttttc

SEQ ID NO: 38459 - DNA, 22 bp, synthetic construct
  misc_feature 1..22: note = chemically synthesized
  source 1..22: mol_type = other DNA
tcagcattcttgcaacttttcc

SEQ ID NO: 38460 - DNA, 22 bp, synthetic construct
  misc_feature 1..22: note = chemically synthesized
  source 1..22: mol_type = other DNA
cagcattcttgcaacttttccc

SEQ ID NO: 38461 - DNA, 22 bp, synthetic construct
  misc_feature 1..22: note = chemically synthesized
  source 1..22: mol_type = other DNA
agcattcttgcaacttttccct

SEQ ID NO: 38462 - DNA, 22 bp, synthetic construct
  misc_feature 1..22: note = chemically synthesized
  source 1..22: mol_type = other DNA
ttgcaacttttcccttaagtat

SEQ ID NO: 38463 - DNA, 22 bp, synthetic construct
  misc_feature 1..22: note = chemically synthesized
  source 1..22: mol_type = other DNA
gcaacttttcccttaagtatag

SEQ ID NO: 38464 - DNA, 22 bp, synthetic construct
  misc_feature 1..22: note = chemically synthesized
  source 1..22: mol_type = other DNA
caacttttcccttaagtataga

SEQ ID NO: 38465 - DNA, 22 bp, synthetic construct
  misc_feature 1..22: note = chemically synthesized
  source 1..22: mol_type = other DNA
ttcccttaagtatagacctgta

SEQ ID NO: 38466 - DNA, 22 bp, synthetic construct
  misc_feature 1..22: note = chemically synthesized
  source 1..22: mol_type = other DNA
tcccttaagtatagacctgtaa

SEQ ID NO: 38467 - DNA, 22 bp, synthetic construct
  misc_feature 1..22: note = chemically synthesized
  source 1..22: mol_type = other DNA
cccttaagtatagacctgtaaa

SEQ ID NO: 38468 - DNA, 22 bp, synthetic construct
  misc_feature 1..22: note = chemically synthesized
  source 1..22: mol_type = other DNA
ccttaagtatagacctgtaaac

SEQ ID NO: 38469 - DNA, 22 bp, synthetic construct
  misc_feature 1..22: note = chemically synthesized
  source 1..22: mol_type = other DNA
aagtatagacctgtaaactggg

SEQ ID NO: 38470 - DNA, 22 bp, synthetic construct
  misc_feature 1..22: note = chemically synthesized
  source 1..22: mol_type = other DNA
agtatagacctgtaaactggga

SEQ ID NO: 38471 - DNA, 22 bp, synthetic construct
  misc_feature 1..22: note = chemically synthesized
  source 1..22: mol_type = other DNA
taaactgggaaaattgtacagt

SEQ ID NO: 38472 - DNA, 22 bp, synthetic construct
  misc_feature 1..22: note = chemically synthesized
  source 1..22: mol_type = other DNA
ggaaaattgtacagtgcactta

SEQ ID NO: 38473 - DNA, 22 bp, synthetic construct
  misc_feature 1..22: note = chemically synthesized
  source 1..22: mol_type = other DNA
tacagtgcacttaattgtccta

SEQ ID NO: 38474 - DNA, 22 bp, synthetic construct
  misc_feature 1..22: note = chemically synthesized
  source 1..22: mol_type = other DNA
aattgtcctatctgagcaggtt

SEQ ID NO: 38475 - DNA, 22 bp, synthetic construct
  misc_feature 1..22: note = chemically synthesized
  source 1..22: mol_type = other DNA
attgtcctatctgagcaggttt

SEQ ID NO: 38476 - DNA, 22 bp, synthetic construct
  misc_feature 1..22: note = chemically synthesized
  source 1..22: mol_type = other DNA
tcctatctgagcaggtttattt

SEQ ID NO: 38477 - DNA, 22 bp, synthetic construct
  misc_feature 1..22: note = chemically synthesized
  source 1..22: mol_type = other DNA
tctgagcaggtttattttatac

SEQ ID NO: 38478 - DNA, 22 bp, synthetic construct
  misc_feature 1..22: note = chemically synthesized
  source 1..22: mol_type = other DNA
agcaggtttattttatactcaa

SEQ ID NO: 38479 - DNA, 22 bp, synthetic construct
  misc_feature 1..22: note = chemically synthesized
  source 1..22: mol_type = other DNA
attttatactcaacctctgtat

SEQ ID NO: 38480 - DNA, 22 bp, synthetic construct
  misc_feature 1..22: note = chemically synthesized
  source 1..22: mol_type = other DNA
ttttatactcaacctctgtatc

SEQ ID NO: 38481 - DNA, 22 bp, synthetic construct
  misc_feature 1..22: note = chemically synthesized
  source 1..22: mol_type = other DNA
tatactcaacctctgtatctct

SEQ ID NO: 38482 - DNA, 22 bp, synthetic construct
  misc_feature 1..22: note = chemically synthesized
  source 1..22: mol_type = other DNA
atactcaacctctgtatctctg

SEQ ID NO: 38483 - DNA, 22 bp, synthetic construct
  misc_feature 1..22: note = chemically synthesized
  source 1..22: mol_type = other DNA
tactcaacctctgtatctctga

SEQ ID NO: 38484 - DNA, 22 bp, synthetic construct
  misc_feature 1..22: note = chemically synthesized
  source 1..22: mol_type = other DNA
aacctctgtatctctgattaga

SEQ ID NO: 38485 - DNA, 22 bp, synthetic construct
  misc_feature 1..22: note = chemically synthesized
  source 1..22: mol_type = other DNA
tgtatctctgattagagaaaag

SEQ ID NO: 38486 - DNA, 22 bp, synthetic construct
  misc_feature 1..22: note = chemically synthesized
  source 1..22: mol_type = other DNA
tatctctgattagagaaaagat

SEQ ID NO: 38487 - DNA, 22 bp, synthetic construct
  misc_feature 1..22: note = chemically synthesized
  source 1..22: mol_type = other DNA
tgattagagaaaagatacagat

SEQ ID NO: 38488 - DNA, 22 bp, synthetic construct
  misc_feature 1..22: note = chemically synthesized
  source 1..22: mol_type = other DNA
attagagaaaagatacagatat

SEQ ID NO: 38489 - DNA, 22 bp, synthetic construct
  misc_feature 1..22: note = chemically synthesized
  source 1..22: mol_type = other DNA
gagaaaagatacagatatcaca

SEQ ID NO: 38490 - DNA, 22 bp, synthetic construct
  misc_feature 1..22: note = chemically synthesized
  source 1..22: mol_type = other DNA
tttgaacaccaactggggcaga

SEQ ID NO: 38491 - DNA, 22 bp, synthetic construct
  misc_feature 1..22: note = chemically synthesized
  source 1..22: mol_type = other DNA
gaacaccaactggggcagatgc

SEQ ID NO: 38492 - DNA, 22 bp, synthetic construct
  misc_feature 1..22: note = chemically synthesized
  source 1..22: mol_type = other DNA
aacaccaactggggcagatgct

SEQ ID NO: 38493 - DNA, 22 bp, synthetic construct
  misc_feature 1..22: note = chemically synthesized
  source 1..22: mol_type = other DNA
gggcagatgctagcttaataaa

SEQ ID NO: 38494 - DNA, 22 bp, synthetic construct
  misc_feature 1..22: note = chemically synthesized
  source 1..22: mol_type = other DNA
gcttaataaaaaagaaaaaatt

SEQ ID NO: 38495 - DNA, 22 bp, synthetic construct
  misc_feature 1..22: note = chemically synthesized
  source 1..22: mol_type = other DNA
aataaaaaagaaaaaattaaaa

SEQ ID NO: 38496 - DNA, 22 bp, synthetic construct
  misc_feature 1..22: note = chemically synthesized
  source 1..22: mol_type = other DNA
ataaaaaagaaaaaattaaaaa

SEQ ID NO: 38497 - DNA, 22 bp, synthetic construct
  misc_feature 1..22: note = chemically synthesized
  source 1..22: mol_type = other DNA
aaaaaataaaaataaaaacaat

SEQ ID NO: 38498 - DNA, 22 bp, synthetic construct
  misc_feature 1..22: note = chemically synthesized
  source 1..22: mol_type = other DNA
ttccatgttaacacaaatagca

SEQ ID NO: 38499 - DNA, 22 bp, synthetic construct
  misc_feature 1..22: note = chemically synthesized
  source 1..22: mol_type = other DNA
ccatgttaacacaaatagcaca

SEQ ID NO: 38500 - DNA, 22 bp, synthetic construct
  misc_feature 1..22: note = chemically synthesized
  source 1..22: mol_type = other DNA
catgttaacacaaatagcacac

SEQ ID NO: 38501 - DNA, 22 bp, synthetic construct
  misc_feature 1..22: note = chemically synthesized
  source 1..22: mol_type = other DNA
acacaaatagcacacagtgtat

SEQ ID NO: 38502 - DNA, 22 bp, synthetic construct
  misc_feature 1..22: note = chemically synthesized
  source 1..22: mol_type = other DNA
ttagggagcacagacatatata

SEQ ID NO: 38503 - DNA, 22 bp, synthetic construct
  misc_feature 1..22: note = chemically synthesized
  source 1..22: mol_type = other DNA
tagggagcacagacatatatac

SEQ ID NO: 38504 - DNA, 22 bp, synthetic construct
  misc_feature 1..22: note = chemically synthesized
  source 1..22: mol_type = other DNA
agggagcacagacatatatact

SEQ ID NO: 38505 - DNA, 22 bp, synthetic construct
  misc_feature 1..22: note = chemically synthesized
  source 1..22: mol_type = other DNA
gggagcacagacatatatactg

SEQ ID NO: 38506 - DNA, 22 bp, synthetic construct
  misc_feature 1..22: note = chemically synthesized
  source 1..22: mol_type = other DNA
ctactcttaaaattctttctct

SEQ ID NO: 38507 - DNA, 22 bp, synthetic construct
  misc_feature 1..22: note = chemically synthesized
  source 1..22: mol_type = other DNA
ctcttaaaattctttctcttct

SEQ ID NO: 38508 - DNA, 22 bp, synthetic construct
  misc_feature 1..22: note = chemically synthesized
  source 1..22: mol_type = other DNA
ttaaaattctttctcttctttt

SEQ ID NO: 38509 - DNA, 22 bp, synthetic construct
  misc_feature 1..22: note = chemically synthesized
  source 1..22: mol_type = other DNA
aaaattctttctcttctttttt

SEQ ID NO: 38510 - DNA, 22 bp, synthetic construct
  misc_feature 1..22: note = chemically synthesized
  source 1..22: mol_type = other DNA
aaattctttctcttcttttttt

SEQ ID NO: 38511 - DNA, 22 bp, synthetic construct
  misc_feature 1..22: note = chemically synthesized
  source 1..22: mol_type = other DNA
tttctcttctttttttaagaat

SEQ ID NO: 38512 - DNA, 22 bp, synthetic construct
  misc_feature 1..22: note = chemically synthesized
  source 1..22: mol_type = other DNA
tctcttctttttttaagaatgt

SEQ ID NO: 38513 - DNA, 22 bp, synthetic construct
  misc_feature 1..22: note = chemically synthesized
  source 1..22: mol_type = other DNA
ctcttctttttttaagaatgtc

SEQ ID NO: 38514 - DNA, 22 bp, synthetic construct
  misc_feature 1..22: note = chemically synthesized
  source 1..22: mol_type = other DNA
tcttctttttttaagaatgtca

SEQ ID NO: 38515 - DNA, 22 bp, synthetic construct
  misc_feature 1..22: note = chemically synthesized
  source 1..22: mol_type = other DNA
ttctttttttaagaatgtcaca

SEQ ID NO: 38516 - DNA, 22 bp, synthetic construct
  misc_feature 1..22: note = chemically synthesized
  source 1..22: mol_type = other DNA
ctttttttaagaatgtcacatt

SEQ ID NO: 38517 - DNA, 22 bp, synthetic construct
  misc_feature 1..22: note = chemically synthesized
  source 1..22: mol_type = other DNA
tttttttaagaatgtcacattt

SEQ ID NO: 38518 - DNA, 22 bp, synthetic construct
  misc_feature 1..22: note = chemically synthesized
  source 1..22: mol_type = other DNA
tttttaagaatgtcacatttaa

SEQ ID NO: 38519 - DNA, 22 bp, synthetic construct
  misc_feature 1..22: note = chemically synthesized
  source 1..22: mol_type = other DNA
ttttaagaatgtcacatttaaa

SEQ ID NO: 38520 - DNA, 22 bp, synthetic construct
  misc_feature 1..22: note = chemically synthesized
  source 1..22: mol_type = other DNA
tttaagaatgtcacatttaaat

SEQ ID NO: 38521 - DNA, 22 bp, synthetic construct
  misc_feature 1..22: note = chemically synthesized
  source 1..22: mol_type = other DNA
ttaagaatgtcacatttaaatg

SEQ ID NO: 38522 - DNA, 22 bp, synthetic construct
  misc_feature 1..22: note = chemically synthesized
  source 1..22: mol_type = other DNA
taagaatgtcacatttaaatgc

SEQ ID NO: 38523 - DNA, 22 bp, synthetic construct
  misc_feature 1..22: note = chemically synthesized
  source 1..22: mol_type = other DNA
aagaatgtcacatttaaatgca

SEQ ID NO: 38524 - DNA, 22 bp, synthetic construct
  misc_feature 1..22: note = chemically synthesized
  source 1..22: mol_type = other DNA
agaatgtcacatttaaatgcaa

SEQ ID NO: 38525 - DNA, 22 bp, synthetic construct
  misc_feature 1..22: note = chemically synthesized
  source 1..22: mol_type = other DNA
aaatgcaagtcttaagaattca

SEQ ID NO: 38526 - DNA, 22 bp, synthetic construct
  misc_feature 1..22: note = chemically synthesized
  source 1..22: mol_type = other DNA
aatgcaagtcttaagaattcat

SEQ ID NO: 38527 - DNA, 22 bp, synthetic construct
  misc_feature 1..22: note = chemically synthesized
  source 1..22: mol_type = other DNA
aagaattcatagttaatcatca

SEQ ID NO: 38528 - DNA, 22 bp, synthetic construct
  misc_feature 1..22: note = chemically synthesized
  source 1..22: mol_type = other DNA
agaattcatagttaatcatcat

SEQ ID NO: 38529 - DNA, 22 bp, synthetic construct
  misc_feature 1..22: note = chemically synthesized
  source 1..22: mol_type = other DNA
atagttaatcatcattgtatca

SEQ ID NO: 38530 - DNA, 22 bp, synthetic construct
  misc_feature 1..22: note = chemically synthesized
  source 1..22: mol_type = other DNA
atcatcattgtatcaatattag

SEQ ID NO: 38531 - DNA, 22 bp, synthetic construct
  misc_feature 1..22: note = chemically synthesized
  source 1..22: mol_type = other DNA
tatcaatattagcttatatacc

SEQ ID NO: 38532 - DNA, 22 bp, synthetic construct
  misc_feature 1..22: note = chemically synthesized
  source 1..22: mol_type = other DNA
gcttatatacctgttctagttt

SEQ ID NO: 38533 - DNA, 22 bp, synthetic construct
  misc_feature 1..22: note = chemically synthesized
  source 1..22: mol_type = other DNA
atatacctgttctagttttaaa

SEQ ID NO: 38534 - DNA, 22 bp, synthetic construct
  misc_feature 1..22: note = chemically synthesized
  source 1..22: mol_type = other DNA
tatacctgttctagttttaaat

SEQ ID NO: 38535 - DNA, 22 bp, synthetic construct
  misc_feature 1..22: note = chemically synthesized
  source 1..22: mol_type = other DNA
ttctagttttaaatggcaaata

SEQ ID NO: 38536 - DNA, 22 bp, synthetic construct
  misc_feature 1..22: note = chemically synthesized
  source 1..22: mol_type = other DNA
tagttttaaatggcaaatagta

SEQ ID NO: 38537 - DNA, 22 bp, synthetic construct
  misc_feature 1..22: note = chemically synthesized
  source 1..22: mol_type = other DNA
gttttaaatggcaaatagtacc

SEQ ID NO: 38538 - DNA, 22 bp, synthetic construct
  misc_feature 1..22: note = chemically synthesized
  source 1..22: mol_type = other DNA
taaatggcaaatagtaccacgt

SEQ ID NO: 38539 - DNA, 22 bp, synthetic construct
  misc_feature 1..22: note = chemically synthesized
  source 1..22: mol_type = other DNA
aaatggcaaatagtaccacgtt

SEQ ID NO: 38540 - DNA, 22 bp, synthetic construct
  misc_feature 1..22: note = chemically synthesized
  source 1..22: mol_type = other DNA
aatggcaaatagtaccacgttg

SEQ ID NO: 38541 - DNA, 22 bp, synthetic construct
  misc_feature 1..22: note = chemically synthesized
  source 1..22: mol_type = other DNA
tgctaataaatcatattatttt

SEQ ID NO: 38542 - DNA, 22 bp, synthetic construct
  misc_feature 1..22: note = chemically synthesized
  source 1..22: mol_type = other DNA
ataaatcatattattttcttct

SEQ ID NO: 38543 - DNA, 22 bp, synthetic construct
  misc_feature 1..22: note = chemically synthesized
  source 1..22: mol_type = other DNA
ttttcttctgttcccctctgtc

SEQ ID NO: 38544 - DNA, 22 bp, synthetic construct
  misc_feature 1..22: note = chemically synthesized
  source 1..22: mol_type = other DNA
tcttctgttcccctctgtcaaa

SEQ ID NO: 38545 - DNA, 22 bp, synthetic construct
  misc_feature 1..22: note = chemically synthesized
  source 1..22: mol_type = other DNA
cttctgttcccctctgtcaaac

SEQ ID NO: 38546 - DNA, 22 bp, synthetic construct
  misc_feature 1..22: note = chemically synthesized
  source 1..22: mol_type = other DNA
ttctgttcccctctgtcaaacc

SEQ ID NO: 38547 - DNA, 22 bp, synthetic construct
  misc_feature 1..22: note = chemically synthesized
  source 1..22: mol_type = other DNA
ctgttcccctctgtcaaacctt

SEQ ID NO: 38548 - DNA, 22 bp, synthetic construct
  misc_feature 1..22: note = chemically synthesized
  source 1..22: mol_type = other DNA
tgttcccctctgtcaaacctta

SEQ ID NO: 38549 - DNA, 22 bp, synthetic construct
  misc_feature 1..22: note = chemically synthesized
  source 1..22: mol_type = other DNA
ttcccctctgtcaaaccttatt

SEQ ID NO: 38550 - DNA, 22 bp, synthetic construct
  misc_feature 1..22: note = chemically synthesized
  source 1..22: mol_type = other DNA
ccctctgtcaaaccttattgtc

SEQ ID NO: 38551 - DNA, 22 bp, synthetic construct
  misc_feature 1..22: note = chemically synthesized
  source 1..22: mol_type = other DNA
tgtcaaaccttattgtcagcct

SEQ ID NO: 38552 - DNA, 22 bp, synthetic construct
  misc_feature 1..22: note = chemically synthesized
  source 1..22: mol_type = other DNA
tcaaaccttattgtcagcctct

SEQ ID NO: 38553 - DNA, 22 bp, synthetic construct
  misc_feature 1..22: note = chemically synthesized
  source 1..22: mol_type = other DNA
attgtcagcctcttcctttcaa

SEQ ID NO: 38554 - DNA, 22 bp, synthetic construct
  misc_feature 1..22: note = chemically synthesized
  source 1..22: mol_type = other DNA
ttgtcagcctcttcctttcaat

SEQ ID NO: 38555 - DNA, 22 bp, synthetic construct
  misc_feature 1..22: note = chemically synthesized
  source 1..22: mol_type = other DNA
tcagcctcttcctttcaatatg

SEQ ID NO: 38556 - DNA, 22 bp, synthetic construct
  misc_feature 1..22: note = chemically synthesized
  source 1..22: mol_type = other DNA
ttcctttcaatatggtatacaa

SEQ ID NO: 38557 - DNA, 22 bp, synthetic construct
  misc_feature 1..22: note = chemically synthesized
  source 1..22: mol_type = other DNA
cctttcaatatggtatacaagg

SEQ ID NO: 38558 - DNA, 22 bp, synthetic construct
  misc_feature 1..22: note = chemically synthesized
  source 1..22: mol_type = other DNA
ctttcaatatggtatacaaggt

SEQ ID NO: 38559 - DNA, 22 bp, synthetic construct
  misc_feature 1..22: note = chemically synthesized
  source 1..22: mol_type = other DNA
tcaatatggtatacaaggtctt

SEQ ID NO: 38560 - DNA, 22 bp, synthetic construct
  misc_feature 1..22: note = chemically synthesized
  source 1..22: mol_type = other DNA
caatatggtatacaaggtctta

SEQ ID NO: 38561 - DNA, 22 bp, synthetic construct
  misc_feature 1..22: note = chemically synthesized
  source 1..22: mol_type = other DNA
aatatggtatacaaggtcttaa

SEQ ID NO: 38562 - DNA, 22 bp, synthetic construct
  misc_feature 1..22: note = chemically synthesized
  source 1..22: mol_type = other DNA
aaagtttatcatttgattgtcc

SEQ ID NO: 38563 - DNA, 22 bp, synthetic construct
  misc_feature 1..22: note = chemically synthesized
  source 1..22: mol_type = other DNA
aagtttatcatttgattgtcca

SEQ ID NO: 38564 - DNA, 22 bp, synthetic construct
  misc_feature 1..22: note = chemically synthesized
  source 1..22: mol_type = other DNA
atcatttgattgtccacttgac

SEQ ID NO: 38565 - DNA, 22 bp, synthetic construct
  misc_feature 1..22: note = chemically synthesized
  source 1..22: mol_type = other DNA
tcatttgattgtccacttgaca

SEQ ID NO: 38566 - DNA, 22 bp, synthetic construct
  misc_feature 1..22: note = chemically synthesized
  source 1..22: mol_type = other DNA
gattgtccacttgacaaccaag

SEQ ID NO: 38567 - DNA, 22 bp, synthetic construct
  misc_feature 1..22: note = chemically synthesized
  source 1..22: mol_type = other DNA
attgtccacttgacaaccaagt

SEQ ID NO: 38568 - DNA, 22 bp, synthetic construct
  misc_feature 1..22: note = chemically synthesized
  source 1..22: mol_type = other DNA
tccacttgacaaccaagtagat

SEQ ID NO: 38569 - DNA, 22 bp, synthetic construct
  misc_feature 1..22: note = chemically synthesized
  source 1..22: mol_type = other DNA
gacaaccaagtagatctggatc

SEQ ID NO: 38570 - DNA, 22 bp, synthetic construct
  misc_feature 1..22: note = chemically synthesized
  source 1..22: mol_type = other DNA
acaaccaagtagatctggatct

SEQ ID NO: 38571 - DNA, 22 bp, synthetic construct
  misc_feature 1..22: note = chemically synthesized
  source 1..22: mol_type = other DNA
gatctatttcttttggtgccag

SEQ ID NO: 38572 - DNA, 22 bp, synthetic construct
  misc_feature 1..22: note = chemically synthesized
  source 1..22: mol_type = other DNA
tttcttttggtgccagtatttt

SEQ ID NO: 38573 - DNA, 22 bp, synthetic construct
  misc_feature 1..22: note = chemically synthesized
  source 1..22: mol_type = other DNA
cttttggtgccagtatttttaa

SEQ ID NO: 38574 - DNA, 22 bp, synthetic construct
  misc_feature 1..22: note = chemically synthesized
  source 1..22: mol_type = other DNA
ttttggtgccagtatttttaaa

SEQ ID NO: 38575 - DNA, 22 bp, synthetic construct
  misc_feature 1..22: note = chemically synthesized
  source 1..22: mol_type = other DNA
ttggtgccagtatttttaaaaa

SEQ ID NO: 38576 - DNA, 22 bp, synthetic construct
  misc_feature 1..22: note = chemically synthesized
  source 1..22: mol_type = other DNA
tggtgccagtatttttaaaaag

SEQ ID NO: 38577 - DNA, 22 bp, synthetic construct
  misc_feature 1..22: note = chemically synthesized
  source 1..22: mol_type = other DNA
ggtgccagtatttttaaaaaga

SEQ ID NO: 38578 - DNA, 22 bp, synthetic construct
  misc_feature 1..22: note = chemically synthesized
  source 1..22: mol_type = other DNA
gtgccagtatttttaaaaagac

SEQ ID NO: 38579 - DNA, 22 bp, synthetic construct
  misc_feature 1..22: note = chemically synthesized
  source 1..22: mol_type = other DNA
ttaaaaagacattattaaagca

SEQ ID NO: 38580 - DNA, 22 bp, synthetic construct
  misc_feature 1..22: note = chemically synthesized
  source 1..22: mol_type = other DNA
taaaaagacattattaaagcaa

SEQ ID NO: 38581 - DNA, 22 bp, synthetic construct
  misc_feature 1..22: note = chemically synthesized
  source 1..22: mol_type = other DNA
aaaaagacattattaaagcaaa

SEQ ID NO: 38582 - DNA, 22 bp, synthetic construct
  misc_feature 1..22: note = chemically synthesized
  source 1..22: mol_type = other DNA
aaaagacattattaaagcaaat

SEQ ID NO: 38583 - DNA, 22 bp, synthetic construct
  misc_feature 1..22: note = chemically synthesized
  source 1..22: mol_type = other DNA
ttaaagcaaatatcttcataaa

SEQ ID NO: 38584 - DNA, 22 bp, synthetic construct
  misc_feature 1..22: note = chemically synthesized
  source 1..22: mol_type = other DNA
aagcaaatatcttcataaaatg

SEQ ID NO: 38585 - DNA, 22 bp, synthetic construct
  misc_feature 1..22: note = chemically synthesized
  source 1..22: mol_type = other DNA
cataaaatgaactccttactag

SEQ ID NO: 38586 - DNA, 22 bp, synthetic construct
  misc_feature 1..22: note = chemically synthesized
  source 1..22: mol_type = other DNA
ataaaatgaactccttactagt

SEQ ID NO: 38587 - DNA, 22 bp, synthetic construct
  misc_feature 1..22: note = chemically synthesized
  source 1..22: mol_type = other DNA
cttactagtgtatttaattgcg

SEQ ID NO: 38588 - DNA, 22 bp, synthetic construct
  misc_feature 1..22: note = chemically synthesized
  source 1..22: mol_type = other DNA
actagtgtatttaattgcgttc

SEQ ID NO: 38589 - DNA, 22 bp, synthetic construct
  misc_feature 1..22: note = chemically synthesized
  source 1..22: mol_type = other DNA
ctagtgtatttaattgcgttcc

SEQ ID NO: 38590 - DNA, 22 bp, synthetic construct
  misc_feature 1..22: note = chemically synthesized
  source 1..22: mol_type = other DNA
gtgtatttaattgcgttccagg

SEQ ID NO: 38591 - DNA, 22 bp, synthetic construct
  misc_feature 1..22: note = chemically synthesized
  source 1..22: mol_type = other DNA
aattgcgttccagggcttttgc

SEQ ID NO: 38592 - DNA, 22 bp, synthetic construct
  misc_feature 1..22: note = chemically synthesized
  source 1..22: mol_type = other DNA
attgcgttccagggcttttgca

SEQ ID NO: 38593 - DNA, 22 bp, synthetic construct
  misc_feature 1..22: note = chemically synthesized
  source 1..22: mol_type = other DNA
cgttccagggcttttgcacatt

SEQ ID NO: 38594 - DNA, 22 bp, synthetic construct
  misc_feature 1..22: note = chemically synthesized
  source 1..22: mol_type = other DNA
cagggcttttgcacattacaca

SEQ ID NO: 38595 - DNA, 22 bp, synthetic construct
  misc_feature 1..22: note = chemically synthesized
  source 1..22: mol_type = other DNA
ttgcacattacacattcaattt

SEQ ID NO: 38596 - DNA, 22 bp, synthetic construct
  misc_feature 1..22: note = chemically synthesized
  source 1..22: mol_type = other DNA
tgcacattacacattcaattta

SEQ ID NO: 38597 - DNA, 22 bp, synthetic construct
  misc_feature 1..22: note = chemically synthesized
  source 1..22: mol_type = other DNA
gcacattacacattcaatttaa

SEQ ID NO: 38598 - DNA, 22 bp, synthetic construct
  misc_feature 1..22: note = chemically synthesized
  source 1..22: mol_type = other DNA
cacattacacattcaatttaat

SEQ ID NO: 38599 - DNA, 22 bp, synthetic construct
  misc_feature 1..22: note = chemically synthesized
  source 1..22: mol_type = other DNA
cacattcaatttaatcattgtt

SEQ ID NO: 38600 - DNA, 22 bp, synthetic construct
  misc_feature 1..22: note = chemically synthesized
  source 1..22: mol_type = other DNA
aatttaatcattgtttaaaaaa

SEQ ID NO: 38601 - DNA, 22 bp, synthetic construct
  misc_feature 1..22: note = chemically synthesized
  source 1..22: mol_type = other DNA
aatcattgtttaaaaaaaataa

SEQ ID NO: 38602 - DNA, 22 bp, synthetic construct
  misc_feature 1..22: note = chemically synthesized
  source 1..22: mol_type = other DNA
atcattgtttaaaaaaaataaa

SEQ ID NO: 38603 - DNA, 22 bp, synthetic construct
  misc_feature 1..22: note = chemically synthesized
  source 1..22: mol_type = other DNA
tttaaaaaaaataaaactttgg

SEQ ID NO: 38604 - DNA, 22 bp, synthetic construct
  misc_feature 1..22: note = chemically synthesized
  source 1..22: mol_type = other DNA
aaaaaaaataaaactttgggca

SEQ ID NO: 38605 - DNA, 22 bp, synthetic construct
  misc_feature 1..22: note = chemically synthesized
  source 1..22: mol_type = other DNA
aaaaaaataaaactttgggcaa

SEQ ID NO: 38606 - DNA, 22 bp, synthetic construct
  misc_feature 1..22: note = chemically synthesized
  source 1..22: mol_type = other DNA
tgggcaaaacagcccatttctt

SEQ ID NO: 38607 - DNA, 22 bp, synthetic construct
  misc_feature 1..22: note = chemically synthesized
  source 1..22: mol_type = other DNA
gggcaaaacagcccatttcttt

SEQ ID NO: 38608 - DNA, 22 bp, synthetic construct
  misc_feature 1..22: note = chemically synthesized
  source 1..22: mol_type = other DNA
ggcaaaacagcccatttctttt

SEQ ID NO: 38609 - DNA, 22 bp, synthetic construct
  misc_feature 1..22: note = chemically synthesized
  source 1..22: mol_type = other DNA
cttttaagctctcaccaggagc

SEQ ID NO: 38610 - DNA, 22 bp, synthetic construct
  misc_feature 1..22: note = chemically synthesized
  source 1..22: mol_type = other DNA
ttttaagctctcaccaggagca

SEQ ID NO: 38611 - DNA, 22 bp, synthetic construct
  misc_feature 1..22: note = chemically synthesized
  source 1..22: mol_type = other DNA
ttaagctctcaccaggagcaaa

SEQ ID NO: 38612 - DNA, 22 bp, synthetic construct
  misc_feature 1..22: note = chemically synthesized
  source 1..22: mol_type = other DNA
taagctctcaccaggagcaaag

SEQ ID NO: 38613 - DNA, 22 bp, synthetic construct
  misc_feature 1..22: note = chemically synthesized
  source 1..22: mol_type = other DNA
aagctctcaccaggagcaaagt

SEQ ID NO: 38614 - DNA, 22 bp, synthetic construct
  misc_feature 1..22: note = chemically synthesized
  source 1..22: mol_type = other DNA
agctctcaccaggagcaaagta

SEQ ID NO: 38615 - DNA, 22 bp, synthetic construct
  misc_feature 1..22: note = chemically synthesized
  source 1..22: mol_type = other DNA
tcaccaggagcaaagtagcttt

SEQ ID NO: 38616 - DNA, 22 bp, synthetic construct
  misc_feature 1..22: note = chemically synthesized
  source 1..22: mol_type = other DNA
accaggagcaaagtagctttta

SEQ ID NO: 38617 - DNA, 22 bp, synthetic construct
  misc_feature 1..22: note = chemically synthesized
  source 1..22: mol_type = other DNA
ttatactggtataatcagtttt

SEQ ID NO: 38618 - DNA, 22 bp, synthetic construct
  misc_feature 1..22: note = chemically synthesized
  source 1..22: mol_type = other DNA
tatactggtataatcagttttg

SEQ ID NO: 38619 - DNA, 22 bp, synthetic construct
  misc_feature 1..22: note = chemically synthesized
  source 1..22: mol_type = other DNA
atactggtataatcagttttgt

SEQ ID NO: 38620 - DNA, 22 bp, synthetic construct
  misc_feature 1..22: note = chemically synthesized
  source 1..22: mol_type = other DNA
tactggtataatcagttttgtt

SEQ ID NO: 38621 - DNA, 22 bp, synthetic construct
  misc_feature 1..22: note = chemically synthesized
  source 1..22: mol_type = other DNA
gtataatcagttttgtttataa

SEQ ID NO: 38622 - DNA, 22 bp, synthetic construct
  misc_feature 1..22: note = chemically synthesized
  source 1..22: mol_type = other DNA
tgtttataaaattaaactaaag

SEQ ID NO: 38623 - DNA, 22 bp, synthetic construct
  misc_feature 1..22: note = chemically synthesized
  source 1..22: mol_type = other DNA
gtttataaaattaaactaaagg

SEQ ID NO: 38624 - DNA, 22 bp, synthetic construct
  misc_feature 1..22: note = chemically synthesized
  source 1..22: mol_type = other DNA
tttataaaattaaactaaagga

SEQ ID NO: 38625 - DNA, 22 bp, synthetic construct
  misc_feature 1..22: note = chemically synthesized
  source 1..22: mol_type = other DNA
ataaaattaaactaaaggaaaa

SEQ ID NO: 38626 - DNA, 22 bp, synthetic construct
  misc_feature 1..22: note = chemically synthesized
  source 1..22: mol_type = other DNA
taaaattaaactaaaggaaaaa

SEQ ID NO: 38627 - DNA, 22 bp, synthetic construct
  misc_feature 1..22: note = chemically synthesized
  source 1..22: mol_type = other DNA
aactaaaggaaaaatgatgatt

SEQ ID NO: 38628 - DNA, 22 bp, synthetic construct
  misc_feature 1..22: note = chemically synthesized
  source 1..22: mol_type = other DNA
aaggaaaaatgatgattaacta

SEQ ID NO: 38629 - DNA, 22 bp, synthetic construct
  misc_feature 1..22: note = chemically synthesized
  source 1..22: mol_type = other DNA
actaggacataatgggtcatct

SEQ ID NO: 38630 - DNA, 22 bp, synthetic construct
  misc_feature 1..22: note = chemically synthesized
  source 1..22: mol_type = other DNA
ggacataatgggtcatcttttt

SEQ ID NO: 38631 - DNA, 22 bp, synthetic construct
  misc_feature 1..22: note = chemically synthesized
  source 1..22: mol_type = other DNA
tttaggtagccattgttgtgag

SEQ ID NO: 38632 - DNA, 22 bp, synthetic construct
  misc_feature 1..22: note = chemically synthesized
  source 1..22: mol_type = other DNA
ttaggtagccattgttgtgaga

SEQ ID NO: 38633 - DNA, 22 bp, synthetic construct
  misc_feature 1..22: note = chemically synthesized
  source 1..22: mol_type = other DNA
taggtagccattgttgtgagaa

SEQ ID NO: 38634 - DNA, 22 bp, synthetic construct
  misc_feature 1..22: note = chemically synthesized
  source 1..22: mol_type = other DNA
aggtagccattgttgtgagaaa

SEQ ID NO: 38635 - DNA, 22 bp, synthetic construct
  misc_feature 1..22: note = chemically synthesized
  source 1..22: mol_type = other DNA
ggtagccattgttgtgagaaat

SEQ ID NO: 38636 - DNA, 22 bp, synthetic construct
  misc_feature 1..22: note = chemically synthesized
  source 1..22: mol_type = other DNA
ttgtgagaaatacaatatagaa

SEQ ID NO: 38637 - DNA, 22 bp, synthetic construct
  misc_feature 1..22: note = chemically synthesized
  source 1..22: mol_type = other DNA
tgagaaatacaatatagaatta

SEQ ID NO: 38638 - DNA, 22 bp, synthetic construct
  misc_feature 1..22: note = chemically synthesized
  source 1..22: mol_type = other DNA
tatgctagttcctaaggtttat

SEQ ID NO: 38639 - DNA, 22 bp, synthetic construct
  misc_feature 1..22: note = chemically synthesized
  source 1..22: mol_type = other DNA
gttcctaaggtttattacctca

SEQ ID NO: 38640 - DNA, 22 bp, synthetic construct
  misc_feature 1..22: note = chemically synthesized
  source 1..22: mol_type = other DNA
ctaaggtttattacctcaccca

SEQ ID NO: 38641 - DNA, 22 bp, synthetic construct
  misc_feature 1..22: note = chemically synthesized
  source 1..22: mol_type = other DNA
aggtttattacctcacccaatg

SEQ ID NO: 38642 - DNA, 22 bp, synthetic construct
  misc_feature 1..22: note = chemically synthesized
  source 1..22: mol_type = other DNA
attacctcacccaatgctgaat

SEQ ID NO: 38643 - DNA, 22 bp, synthetic construct
  misc_feature 1..22: note = chemically synthesized
  source 1..22: mol_type = other DNA
ttacctcacccaatgctgaatt

SEQ ID NO: 38644 - DNA, 22 bp, synthetic construct
  misc_feature 1..22: note = chemically synthesized
  source 1..22: mol_type = other DNA
cctcacccaatgctgaattaag

SEQ ID NO: 38645 - DNA, 22 bp, synthetic construct
  misc_feature 1..22: note = chemically synthesized
  source 1..22: mol_type = other DNA
acccaatgctgaattaagctac

SEQ ID NO: 38646 - DNA, 22 bp, synthetic construct
  misc_feature 1..22: note = chemically synthesized
  source 1..22: mol_type = other DNA
aattaagctacaagtttataac

SEQ ID NO: 38647 - DNA, 22 bp, synthetic construct
  misc_feature 1..22: note = chemically synthesized
  source 1..22: mol_type = other DNA
agctacaagtttataacaagta

SEQ ID NO: 38648 - DNA, 22 bp, synthetic construct
  misc_feature 1..22: note = chemically synthesized
  source 1..22: mol_type = other DNA
caagtttataacaagtagaaag

SEQ ID NO: 38649 - DNA, 22 bp, synthetic construct
  misc_feature 1..22: note = chemically synthesized
  source 1..22: mol_type = other DNA
ataacaagtagaaagaaccatc

SEQ ID NO: 38650 - DNA, 22 bp, synthetic construct
  misc_feature 1..22: note = chemically synthesized
  source 1..22: mol_type = other DNA
taacaagtagaaagaaccatcg

SEQ ID NO: 38651 - DNA, 22 bp, synthetic construct
  misc_feature 1..22: note = chemically synthesized
  source 1..22: mol_type = other DNA
taatagatccaaggcactcata

SEQ ID NO: 38652 - DNA, 22 bp, synthetic construct
  misc_feature 1..22: note = chemically synthesized
  source 1..22: mol_type = other DNA
aatagatccaaggcactcatat

SEQ ID NO: 38653 - DNA, 22 bp, synthetic construct
  misc_feature 1..22: note = chemically synthesized
  source 1..22: mol_type = other DNA
atagatccaaggcactcatatt

SEQ ID NO: 38654 - DNA, 22 bp, synthetic construct
  misc_feature 1..22: note = chemically synthesized
  source 1..22: mol_type = other DNA
atattttaaaaccaaatgatag

SEQ ID NO: 38655 - DNA, 22 bp, synthetic construct
  misc_feature 1..22: note = chemically synthesized
  source 1..22: mol_type = other DNA
taaaaccaaatgatagaataaa

SEQ ID NO: 38656 - DNA, 22 bp, synthetic construct
  misc_feature 1..22: note = chemically synthesized
  source 1..22: mol_type = other DNA
aaaaccaaatgatagaataaac

SEQ ID NO: 38657 - DNA, 22 bp, synthetic construct
  misc_feature 1..22: note = chemically synthesized
  source 1..22: mol_type = other DNA
aaaccaaatgatagaataaact

SEQ ID NO: 38658 - DNA, 22 bp, synthetic construct
  misc_feature 1..22: note = chemically synthesized
  source 1..22: mol_type = other DNA
gttctgtttttctgttaatttg

SEQ ID NO: 38659 - DNA, 22 bp, synthetic construct
  misc_feature 1..22: note = chemically synthesized
  source 1..22: mol_type = other DNA
ttctgtttttctgttaatttgt

SEQ ID NO: 38660 - DNA, 22 bp, synthetic construct
  misc_feature 1..22: note = chemically synthesized
  source 1..22: mol_type = other DNA
tgtttttctgttaatttgtcaa

SEQ ID NO: 38661 - DNA, 22 bp, synthetic construct
  misc_feature 1..22: note = chemically synthesized
  source 1..22: mol_type = other DNA
tttttctgttaatttgtcaatt

SEQ ID NO: 38662 - DNA, 22 bp, synthetic construct
  misc_feature 1..22: note = chemically synthesized
  source 1..22: mol_type = other DNA
ttctgttaatttgtcaattcaa

SEQ ID NO: 38663 - DNA, 22 bp, synthetic construct
  misc_feature 1..22: note = chemically synthesized
  source 1..22: mol_type = other DNA
tctgttaatttgtcaattcaag

SEQ ID NO: 38664 - DNA, 22 bp, synthetic construct
  misc_feature 1..22: note = chemically synthesized
  source 1..22: mol_type = other DNA
ctgttaatttgtcaattcaagg

SEQ ID NO: 38665 - DNA, 22 bp, synthetic construct
  misc_feature 1..22: note = chemically synthesized
  source 1..22: mol_type = other DNA
tgttaatttgtcaattcaaggc

SEQ ID NO: 38666 - DNA, 22 bp, synthetic construct
  misc_feature 1..22: note = chemically synthesized
  source 1..22: mol_type = other DNA
ttaatttgtcaattcaaggcct

SEQ ID NO: 38667 - DNA, 22 bp, synthetic construct
  misc_feature 1..22: note = chemically synthesized
  source 1..22: mol_type = other DNA
atttgtcaattcaaggcctttt

SEQ ID NO: 38668 - DNA, 22 bp, synthetic construct
  misc_feature 1..22: note = chemically synthesized
  source 1..22: mol_type = other DNA
gtcaattcaaggccttttttct

SEQ ID NO: 38669 - DNA, 22 bp, synthetic construct
  misc_feature 1..22: note = chemically synthesized
  source 1..22: mol_type = other DNA
tcaattcaaggccttttttctt

SEQ ID NO: 38670 - DNA, 22 bp, synthetic construct
  misc_feature 1..22: note = chemically synthesized
  source 1..22: mol_type = other DNA
aaggccttttttcttcctttcc

SEQ ID NO: 38671 - DNA, 22 bp, synthetic construct
  misc_feature 1..22: note = chemically synthesized
  source 1..22: mol_type = other DNA
ttttcttcctttccaattgata

SEQ ID NO: 38672 - DNA, 22 bp, synthetic construct
  misc_feature 1..22: note = chemically synthesized
  source 1..22: mol_type = other DNA
tttcttcctttccaattgatac

SEQ ID NO: 38673 - DNA, 22 bp, synthetic construct
  misc_feature 1..22: note = chemically synthesized
  source 1..22: mol_type = other DNA
ttcttcctttccaattgataca

SEQ ID NO: 38674 - DNA, 22 bp, synthetic construct
  misc_feature 1..22: note = chemically synthesized
  source 1..22: mol_type = other DNA
tcttcctttccaattgatacat

SEQ ID NO: 38675 - DNA, 22 bp, synthetic construct
  misc_feature 1..22: note = chemically synthesized
  source 1..22: mol_type = other DNA
cttcctttccaattgatacatt

SEQ ID NO: 38676 - DNA, 22 bp, synthetic construct
  misc_feature 1..22: note = chemically synthesized
  source 1..22: mol_type = other DNA
ttcctttccaattgatacattt

SEQ ID NO: 38677 - DNA, 22 bp, synthetic construct
  misc_feature 1..22: note = chemically synthesized
  source 1..22: mol_type = other DNA
cctttccaattgatacatttaa

SEQ ID NO: 38678 - DNA, 22 bp, synthetic construct
  misc_feature 1..22: note = chemically synthesized
  source 1..22: mol_type = other DNA
ctttccaattgatacatttaac

SEQ ID NO: 38679 - DNA, 22 bp, synthetic construct
  misc_feature 1..22: note = chemically synthesized
  source 1..22: mol_type = other DNA
tccaattgatacatttaaccct

SEQ ID NO: 38680 - DNA, 22 bp, synthetic construct
  misc_feature 1..22: note = chemically synthesized
  source 1..22: mol_type = other DNA
ccaattgatacatttaaccctt

SEQ ID NO: 38681 - DNA, 22 bp, synthetic construct
  misc_feature 1..22: note = chemically synthesized
  source 1..22: mol_type = other DNA
caattgatacatttaacccttt

SEQ ID NO: 38682 - DNA, 22 bp, synthetic construct
  misc_feature 1..22: note = chemically synthesized
  source 1..22: mol_type = other DNA
atacatttaaccctttagagac

SEQ ID NO: 38683 - DNA, 22 bp, synthetic construct
  misc_feature 1..22: note = chemically synthesized
  source 1..22: mol_type = other DNA
aaccctttagagacagacattt

SEQ ID NO: 38684 - DNA, 22 bp, synthetic construct
  misc_feature 1..22: note = chemically synthesized
  source 1..22: mol_type = other DNA
accctttagagacagacattta

SEQ ID NO: 38685 - DNA, 22 bp, synthetic construct
  misc_feature 1..22: note = chemically synthesized
  source 1..22: mol_type = other DNA
tagagacagacatttagctcat

SEQ ID NO: 38686 - DNA, 22 bp, synthetic construct
  misc_feature 1..22: note = chemically synthesized
  source 1..22: mol_type = other DNA
agagacagacatttagctcata

SEQ ID NO: 38687 - DNA, 22 bp, synthetic construct
  misc_feature 1..22: note = chemically synthesized
  source 1..22: mol_type = other DNA
gagacagacatttagctcatag

SEQ ID NO: 38688 - DNA, 22 bp, synthetic construct
  misc_feature 1..22: note = chemically synthesized
  source 1..22: mol_type = other DNA
agctcatagagattttttttca

SEQ ID NO: 38689 - DNA, 22 bp, synthetic construct
  misc_feature 1..22: note = chemically synthesized
  source 1..22: mol_type = other DNA
gctcatagagattttttttcag

SEQ ID NO: 38690 - DNA, 22 bp, synthetic construct
  misc_feature 1..22: note = chemically synthesized
  source 1..22: mol_type = other DNA
atagagattttttttcagtgct

SEQ ID NO: 38691 - DNA, 22 bp, synthetic construct
  misc_feature 1..22: note = chemically synthesized
  source 1..22: mol_type = other DNA
tttttcagtgctatctattctg

SEQ ID NO: 38692 - DNA, 22 bp, synthetic construct
  misc_feature 1..22: note = chemically synthesized
  source 1..22: mol_type = other DNA
ttttcagtgctatctattctgt

SEQ ID NO: 38693 - DNA, 22 bp, synthetic construct
  misc_feature 1..22: note = chemically synthesized
  source 1..22: mol_type = other DNA
tttcagtgctatctattctgtc

SEQ ID NO: 38694 - DNA, 22 bp, synthetic construct
  misc_feature 1..22: note = chemically synthesized
  source 1..22: mol_type = other DNA
ttcagtgctatctattctgtct

SEQ ID NO: 38695 - DNA, 22 bp, synthetic construct
  misc_feature 1..22: note = chemically synthesized
  source 1..22: mol_type = other DNA
tcagtgctatctattctgtcta

SEQ ID NO: 38696 - DNA, 22 bp, synthetic construct
  misc_feature 1..22: note = chemically synthesized
  source 1..22: mol_type = other DNA
cagtgctatctattctgtctat

SEQ ID NO: 38697 - DNA, 22 bp, synthetic construct
  misc_feature 1..22: note = chemically synthesized
  source 1..22: mol_type = other DNA
agtgctatctattctgtctata

SEQ ID NO: 38698 - DNA, 22 bp, synthetic construct
  misc_feature 1..22: note = chemically synthesized
  source 1..22: mol_type = other DNA
tctattctgtctatagagggtt

SEQ ID NO: 38699 - DNA, 22 bp, synthetic construct
  misc_feature 1..22: note = chemically synthesized
  source 1..22: mol_type = other DNA
ttctgtctatagagggttaatc

SEQ ID NO: 38700 - DNA, 22 bp, synthetic construct
  misc_feature 1..22: note = chemically synthesized
  source 1..22: mol_type = other DNA
tgtctatagagggttaatccaa

SEQ ID NO: 38701 - DNA, 22 bp, synthetic construct
  misc_feature 1..22: note = chemically synthesized
  source 1..22: mol_type = other DNA
tctatagagggttaatccaaag

SEQ ID NO: 38702 - DNA, 22 bp, synthetic construct
  misc_feature 1..22: note = chemically synthesized
  source 1..22: mol_type = other DNA
tagagggttaatccaaagactg

SEQ ID NO: 38703 - DNA, 22 bp, synthetic construct
  misc_feature 1..22: note = chemically synthesized
  source 1..22: mol_type = other DNA
atccaaagactgtttttcctcc

SEQ ID NO: 38704 - DNA, 22 bp, synthetic construct
  misc_feature 1..22: note = chemically synthesized
  source 1..22: mol_type = other DNA
tttttcctcctcacgttataaa

SEQ ID NO: 38705 - DNA, 22 bp, synthetic construct
  misc_feature 1..22: note = chemically synthesized
  source 1..22: mol_type = other DNA
ttcctcctcacgttataaaata

SEQ ID NO: 38706 - DNA, 22 bp, synthetic construct
  misc_feature 1..22: note = chemically synthesized
  source 1..22: mol_type = other DNA
tcctcctcacgttataaaataa

SEQ ID NO: 38707 - DNA, 22 bp, synthetic construct
  misc_feature 1..22: note = chemically synthesized
  source 1..22: mol_type = other DNA
cctcctcacgttataaaataaa

SEQ ID NO: 38708 - DNA, 22 bp, synthetic construct
  misc_feature 1..22: note = chemically synthesized
  source 1..22: mol_type = other DNA
ctcctcacgttataaaataaaa

SEQ ID NO: 38709 - DNA, 22 bp, synthetic construct
  misc_feature 1..22: note = chemically synthesized
  source 1..22: mol_type = other DNA
ctcacgttataaaataaaactg

SEQ ID NO: 38710 - DNA, 22 bp, synthetic construct
  misc_feature 1..22: note = chemically synthesized
  source 1..22: mol_type = other DNA
acgttataaaataaaactgtac

SEQ ID NO: 38711 - DNA, 22 bp, synthetic construct
  misc_feature 1..22: note = chemically synthesized
  source 1..22: mol_type = other DNA
taaaataaaactgtacatgata

SEQ ID NO: 38712 - DNA, 22 bp, synthetic construct
  misc_feature 1..22: note = chemically synthesized
  source 1..22: mol_type = other DNA
tacatgatatgtattacagaat

SEQ ID NO: 38713 - DNA, 22 bp, synthetic construct
  misc_feature 1..22: note = chemically synthesized
  source 1..22: mol_type = other DNA
cagaatgtatgcagcatggtct

SEQ ID NO: 38714 - DNA, 22 bp, synthetic construct
  misc_feature 1..22: note = chemically synthesized
  source 1..22: mol_type = other DNA
tttctctctctctctctttttc

SEQ ID NO: 38715 - DNA, 22 bp, synthetic construct
  misc_feature 1..22: note = chemically synthesized
  source 1..22: mol_type = other DNA
ttctctctctctctctttttct

SEQ ID NO: 38716 - DNA, 22 bp, synthetic construct
  misc_feature 1..22: note = chemically synthesized
  source 1..22: mol_type = other DNA
tctctctctctctctttttctc

SEQ ID NO: 38717 - DNA, 22 bp, synthetic construct
  misc_feature 1..22: note = chemically synthesized
  source 1..22: mol_type = other DNA
ctctctctctctctttttctct

SEQ ID NO: 38718 - DNA, 22 bp, synthetic construct
  misc_feature 1..22: note = chemically synthesized
  source 1..22: mol_type = other DNA
tctctctctctctttttctctc

SEQ ID NO: 38719 - DNA, 22 bp, synthetic construct
  misc_feature 1..22: note = chemically synthesized
  source 1..22: mol_type = other DNA
tctctctctctttttctctcag

SEQ ID NO: 38720 - DNA, 22 bp, synthetic construct
  misc_feature 1..22: note = chemically synthesized
  source 1..22: mol_type = other DNA
tctctctctttttctctcagaa

SEQ ID NO: 38721 - DNA, 22 bp, synthetic construct
  misc_feature 1..22: note = chemically synthesized
  source 1..22: mol_type = other DNA
tctctctttttctctcagaacg

SEQ ID NO: 38722 - DNA, 22 bp, synthetic construct
  misc_feature 1..22: note = chemically synthesized
  source 1..22: mol_type = other DNA
tctctttttctctcagaacgga

SEQ ID NO: 38723 - DNA, 22 bp, synthetic construct
  misc_feature 1..22: note = chemically synthesized
  source 1..22: mol_type = other DNA
tctttttctctcagaacggaac

SEQ ID NO: 38724 - DNA, 22 bp, synthetic construct
  misc_feature 1..22: note = chemically synthesized
  source 1..22: mol_type = other DNA
tttttctctcagaacggaactg

SEQ ID NO: 38725 - DNA, 22 bp, synthetic construct
  misc_feature 1..22: note = chemically synthesized
  source 1..22: mol_type = other DNA
tttctctcagaacggaactgga

SEQ ID NO: 38726 - DNA, 22 bp, synthetic construct
  misc_feature 1..22: note = chemically synthesized
  source 1..22: mol_type = other DNA
ttctctcagaacggaactggaa

SEQ ID NO: 38727 - DNA, 22 bp, synthetic construct
  misc_feature 1..22: note = chemically synthesized
  source 1..22: mol_type = other DNA
tctctcagaacggaactggaaa

SEQ ID NO: 38728 - DNA, 22 bp, synthetic construct
  misc_feature 1..22: note = chemically synthesized
  source 1..22: mol_type = other DNA
ctctcagaacggaactggaaac

SEQ ID NO: 38729 - DNA, 22 bp, synthetic construct
  misc_feature 1..22: note = chemically synthesized
  source 1..22: mol_type = other DNA
tctcagaacggaactggaaaca

SEQ ID NO: 38730 - DNA, 22 bp, synthetic construct
  misc_feature 1..22: note = chemically synthesized
  source 1..22: mol_type = other DNA
tcagaacggaactggaaacagc

SEQ ID NO: 38731 - DNA, 22 bp, synthetic construct
  misc_feature 1..22: note = chemically synthesized
  source 1..22: mol_type = other DNA
agaacggaactggaaacagcaa

SEQ ID NO: 38732 - DNA, 22 bp, synthetic construct
  misc_feature 1..22: note = chemically synthesized
  source 1..22: mol_type = other DNA
gaaacagcaacatgtttgctca

SEQ ID NO: 38733 - DNA, 22 bp, synthetic construct
  misc_feature 1..22: note = chemically synthesized
  source 1..22: mol_type = other DNA
gctcagcaacgaattagggaca

SEQ ID NO: 38734 - DNA, 22 bp, synthetic construct
  misc_feature 1..22: note = chemically synthesized
  source 1..22: mol_type = other DNA
ctcagcaacgaattagggacaa

SEQ ID NO: 38735 - DNA, 22 bp, synthetic construct
  misc_feature 1..22: note = chemically synthesized
  source 1..22: mol_type = other DNA
agcaacgaattagggacaattt

SEQ ID NO: 38736 - DNA, 22 bp, synthetic construct
  misc_feature 1..22: note = chemically synthesized
  source 1..22: mol_type = other DNA
gggacaatttaaaatagccata

SEQ ID NO: 38737 - DNA, 22 bp, synthetic construct
  misc_feature 1..22: note = chemically synthesized
  source 1..22: mol_type = other DNA
aaaatagccataacataccata

SEQ ID NO: 38738 - DNA, 22 bp, synthetic construct
  misc_feature 1..22: note = chemically synthesized
  source 1..22: mol_type = other DNA
aaatagccataacataccatac

SEQ ID NO: 38739 - DNA, 22 bp, synthetic construct
  misc_feature 1..22: note = chemically synthesized
  source 1..22: mol_type = other DNA
tctaagtttaaaaaaaaacata

SEQ ID NO: 38740 - DNA, 22 bp, synthetic construct
  misc_feature 1..22: note = chemically synthesized
  source 1..22: mol_type = other DNA
agtttaaaaaaaaacatacaca

SEQ ID NO: 38741 - DNA, 22 bp, synthetic construct
  misc_feature 1..22: note = chemically synthesized
  source 1..22: mol_type = other DNA
aaaaaaaaacatacacaacatg

SEQ ID NO: 38742 - DNA, 22 bp, synthetic construct
  misc_feature 1..22: note = chemically synthesized
  source 1..22: mol_type = other DNA
aaaaaaaacatacacaacatgt

SEQ ID NO: 38743 - DNA, 22 bp, synthetic construct
  misc_feature 1..22: note = chemically synthesized
  source 1..22: mol_type = other DNA
ttgcacaagagaaaggctcaaa

SEQ ID NO: 38744 - DNA, 22 bp, synthetic construct
  misc_feature 1..22: note = chemically synthesized
  source 1..22: mol_type = other DNA
cacaagagaaaggctcaaagtt

SEQ ID NO: 38745 - DNA, 22 bp, synthetic construct
  misc_feature 1..22: note = chemically synthesized
  source 1..22: mol_type = other DNA
aaagtttgcgtaaaatgcaata

SEQ ID NO: 38746 - DNA, 22 bp, synthetic construct
  misc_feature 1..22: note = chemically synthesized
  source 1..22: mol_type = other DNA
gcgtaaaatgcaatagtattgc

SEQ ID NO: 38747 - DNA, 22 bp, synthetic construct
  misc_feature 1..22: note = chemically synthesized
  source 1..22: mol_type = other DNA
cgtaaaatgcaatagtattgcc

SEQ ID NO: 38748 - DNA, 22 bp, synthetic construct
  misc_feature 1..22: note = chemically synthesized
  source 1..22: mol_type = other DNA
ccccatacagatcatgcattca

SEQ ID NO: 38749 - DNA, 22 bp, synthetic construct
  misc_feature 1..22: note = chemically synthesized
  source 1..22: mol_type = other DNA
aaacggtgagaacataaaggaa

SEQ ID NO: 38750 - DNA, 22 bp, synthetic construct
  misc_feature 1..22: note = chemically synthesized
  source 1..22: mol_type = other DNA
gtgacaagcactctcatattct

SEQ ID NO: 38751 - DNA, 22 bp, synthetic construct
  misc_feature 1..22: note = chemically synthesized
  source 1..22: mol_type = other DNA
tcatattcttagcttcgttact

SEQ ID NO: 38752 - DNA, 22 bp, synthetic construct
  misc_feature 1..22: note = chemically synthesized
  source 1..22: mol_type = other DNA
atattcttagcttcgttacttc

SEQ ID NO: 38753 - DNA, 22 bp, synthetic construct
  misc_feature 1..22: note = chemically synthesized
  source 1..22: mol_type = other DNA
ttagcttcgttacttctgtttg

SEQ ID NO: 38754 - DNA, 22 bp, synthetic construct
  misc_feature 1..22: note = chemically synthesized
  source 1..22: mol_type = other DNA
agcttcgttacttctgtttgtt

SEQ ID NO: 38755 - DNA, 22 bp, synthetic construct
  misc_feature 1..22: note = chemically synthesized
  source 1..22: mol_type = other DNA
gcttcgttacttctgtttgttt

SEQ ID NO: 38756 - DNA, 22 bp, synthetic construct
  misc_feature 1..22: note = chemically synthesized
  source 1..22: mol_type = other DNA
cgttacttctgtttgtttgttt

SEQ ID NO: 38757 - DNA, 22 bp, synthetic construct
  misc_feature 1..22: note = chemically synthesized
  source 1..22: mol_type = other DNA
gttacttctgtttgtttgtttg

SEQ ID NO: 38758 - DNA, 22 bp, synthetic construct
  misc_feature 1..22: note = chemically synthesized
  source 1..22: mol_type = other DNA
cttctgtttgtttgtttgtttg

SEQ ID NO: 38759 - DNA, 22 bp, synthetic construct
  misc_feature 1..22: note = chemically synthesized
  source 1..22: mol_type = other DNA
ctgtttgtttgtttgtttgttt

SEQ ID NO: 38760 - DNA, 22 bp, synthetic construct
  misc_feature 1..22: note = chemically synthesized
  source 1..22: mol_type = other DNA
tgtttgtttgtttgtttgttta

SEQ ID NO: 38761 - DNA, 22 bp, synthetic construct
  misc_feature 1..22: note = chemically synthesized
  source 1..22: mol_type = other DNA
tttgtttgtttgtttgtttaaa

SEQ ID NO: 38762 - DNA, 22 bp, synthetic construct
  misc_feature 1..22: note = chemically synthesized
  source 1..22: mol_type = other DNA
gtttgtttgtttgtttaaatca

SEQ ID NO: 38763 - DNA, 22 bp, synthetic construct
  misc_feature 1..22: note = chemically synthesized
  source 1..22: mol_type = other DNA
tttgtttgtttgtttaaatcac

SEQ ID NO: 38764 - DNA, 22 bp, synthetic construct
  misc_feature 1..22: note = chemically synthesized
  source 1..22: mol_type = other DNA
gtttgtttgtttaaatcacatg

SEQ ID NO: 38765 - DNA, 22 bp, synthetic construct
  misc_feature 1..22: note = chemically synthesized
  source 1..22: mol_type = other DNA
tttgtttgtttaaatcacatgg

SEQ ID NO: 38766 - DNA, 22 bp, synthetic construct
  misc_feature 1..22: note = chemically synthesized
  source 1..22: mol_type = other DNA
gtttgtttaaatcacatgggac

SEQ ID NO: 38767 - DNA, 22 bp, synthetic construct
  misc_feature 1..22: note = chemically synthesized
  source 1..22: mol_type = other DNA
tttgtttaaatcacatgggact

SEQ ID NO: 38768 - DNA, 22 bp, synthetic construct
  misc_feature 1..22: note = chemically synthesized
  source 1..22: mol_type = other DNA
gtttaaatcacatgggactaga

SEQ ID NO: 38769 - DNA, 22 bp, synthetic construct
  misc_feature 1..22: note = chemically synthesized
  source 1..22: mol_type = other DNA
tttaaatcacatgggactagaa

SEQ ID NO: 38770 - DNA, 22 bp, synthetic construct
  misc_feature 1..22: note = chemically synthesized
  source 1..22: mol_type = other DNA
aaatcacatgggactagaaaaa

SEQ ID NO: 38771 - DNA, 22 bp, synthetic construct
  misc_feature 1..22: note = chemically synthesized
  source 1..22: mol_type = other DNA
aatcacatgggactagaaaaaa

SEQ ID NO: 38772 - DNA, 22 bp, synthetic construct
  misc_feature 1..22: note = chemically synthesized
  source 1..22: mol_type = other DNA
gaaaaaaatcctacagggagtg

SEQ ID NO: 38773 - DNA, 22 bp, synthetic construct
  misc_feature 1..22: note = chemically synthesized
  source 1..22: mol_type = other DNA
cagggagtggggctggagggcg

SEQ ID NO: 38774 - DNA, 22 bp, synthetic construct
  misc_feature 1..22: note = chemically synthesized
  source 1..22: mol_type = other DNA
gagggcgatggggaaggggagt

SEQ ID NO: 38775 - DNA, 22 bp, synthetic construct
  misc_feature 1..22: note = chemically synthesized
  source 1..22: mol_type = other DNA
atatacctctattcagttttta

SEQ ID NO: 38776 - DNA, 22 bp, synthetic construct
  misc_feature 1..22: note = chemically synthesized
  source 1..22: mol_type = other DNA
tattcagtttttatatcattat

SEQ ID NO: 38777 - DNA, 22 bp, synthetic construct
  misc_feature 1..22: note = chemically synthesized
  source 1..22: mol_type = other DNA
ttcagtttttatatcattattc

SEQ ID NO: 38778 - DNA, 22 bp, synthetic construct
  misc_feature 1..22: note = chemically synthesized
  source 1..22: mol_type = other DNA
agtttttatatcattattcaac

SEQ ID NO: 38779 - DNA, 22 bp, synthetic construct
  misc_feature 1..22: note = chemically synthesized
  source 1..22: mol_type = other DNA
ttatatcattattcaacactcg

SEQ ID NO: 38780 - DNA, 22 bp, synthetic construct
  misc_feature 1..22: note = chemically synthesized
  source 1..22: mol_type = other DNA
tatatcattattcaacactcga

SEQ ID NO: 38781 - DNA, 22 bp, synthetic construct
  misc_feature 1..22: note = chemically synthesized
  source 1..22: mol_type = other DNA
atatcattattcaacactcgat

SEQ ID NO: 38782 - DNA, 22 bp, synthetic construct
  misc_feature 1..22: note = chemically synthesized
  source 1..22: mol_type = other DNA
tatcattattcaacactcgatc

SEQ ID NO: 38783 - DNA, 22 bp, synthetic construct
  misc_feature 1..22: note = chemically synthesized
  source 1..22: mol_type = other DNA
ttcaacactcgatcactgtgcc

SEQ ID NO: 38784 - DNA, 22 bp, synthetic construct
  misc_feature 1..22: note = chemically synthesized
  source 1..22: mol_type = other DNA
aacactcgatcactgtgccatt

SEQ ID NO: 38785 - DNA, 22 bp, synthetic construct
  misc_feature 1..22: note = chemically synthesized
  source 1..22: mol_type = other DNA
gatcactgtgccattttttcat

SEQ ID NO: 38786 - DNA, 22 bp, synthetic construct
  misc_feature 1..22: note = chemically synthesized
  source 1..22: mol_type = other DNA
tgccattttttcatgtgtttct

SEQ ID NO: 38787 - DNA, 22 bp, synthetic construct
  misc_feature 1..22: note = chemically synthesized
  source 1..22: mol_type = other DNA
tttcatgtgtttctccagggta

SEQ ID NO: 38788 - DNA, 22 bp, synthetic construct
  misc_feature 1..22: note = chemically synthesized
  source 1..22: mol_type = other DNA
ttcatgtgtttctccagggtac

SEQ ID NO: 38789 - DNA, 22 bp, synthetic construct
  misc_feature 1..22: note = chemically synthesized
  source 1..22: mol_type = other DNA
tcatgtgtttctccagggtact

SEQ ID NO: 38790 - DNA, 22 bp, synthetic construct
  misc_feature 1..22: note = chemically synthesized
  source 1..22: mol_type = other DNA
catgtgtttctccagggtactg

SEQ ID NO: 38791 - DNA, 22 bp, synthetic construct
  misc_feature 1..22: note = chemically synthesized
  source 1..22: mol_type = other DNA
atgtgtttctccagggtactgt

SEQ ID NO: 38792 - DNA, 22 bp, synthetic construct
  misc_feature 1..22: note = chemically synthesized
  source 1..22: mol_type = other DNA
ctccagggtactgtacacgcta

SEQ ID NO: 38793 - DNA, 22 bp, synthetic construct
  misc_feature 1..22: note = chemically synthesized
  source 1..22: mol_type = other DNA
tccagggtactgtacacgctaa

SEQ ID NO: 38794 - DNA, 22 bp, synthetic construct
  misc_feature 1..22: note = chemically synthesized
  source 1..22: mol_type = other DNA
cagggtactgtacacgctaaaa

SEQ ID NO: 38795 - DNA, 22 bp, synthetic construct
  misc_feature 1..22: note = chemically synthesized
  source 1..22: mol_type = other DNA
tacacgctaaaaggcatcttac

SEQ ID NO: 38796 - DNA, 22 bp, synthetic construct
  misc_feature 1..22: note = chemically synthesized
  source 1..22: mol_type = other DNA
aaaggcatcttacaaatttcac

SEQ ID NO: 38797 - DNA, 22 bp, synthetic construct
  misc_feature 1..22: note = chemically synthesized
  source 1..22: mol_type = other DNA
acaaatttcacatttgtaaacg

SEQ ID NO: 38798 - DNA, 22 bp, synthetic construct
  misc_feature 1..22: note = chemically synthesized
  source 1..22: mol_type = other DNA
caaatttcacatttgtaaacgt

SEQ ID NO: 38799 - DNA, 22 bp, synthetic construct
  misc_feature 1..22: note = chemically synthesized
  source 1..22: mol_type = other DNA
cacatttgtaaacgtccttccc

SEQ ID NO: 38800 - DNA, 22 bp, synthetic construct
  misc_feature 1..22: note = chemically synthesized
  source 1..22: mol_type = other DNA
acatttgtaaacgtccttcccc

SEQ ID NO: 38801 - DNA, 22 bp, synthetic construct
  misc_feature 1..22: note = chemically synthesized
  source 1..22: mol_type = other DNA
gtaaacgtccttccccacctgg

SEQ ID NO: 38802 - DNA, 22 bp, synthetic construct
  misc_feature 1..22: note = chemically synthesized
  source 1..22: mol_type = other DNA
taaacgtccttccccacctggc

SEQ ID NO: 38803 - DNA, 22 bp, synthetic construct
  misc_feature 1..22: note = chemically synthesized
  source 1..22: mol_type = other DNA
ccccacctggccatgcgttttc

SEQ ID NO: 38804 - DNA, 22 bp, synthetic construct
  misc_feature 1..22: note = chemically synthesized
  source 1..22: mol_type = other DNA
cccacctggccatgcgttttca

SEQ ID NO: 38805 - DNA, 22 bp, synthetic construct
  misc_feature 1..22: note = chemically synthesized
  source 1..22: mol_type = other DNA
gccatgcgttttcatgtgcctg

SEQ ID NO: 38806 - DNA, 22 bp, synthetic construct
  misc_feature 1..22: note = chemically synthesized
  source 1..22: mol_type = other DNA
tcatgtgcctggtgagcttgct

SEQ ID NO: 38807 - DNA, 22 bp, synthetic construct
  misc_feature 1..22: note = chemically synthesized
  source 1..22: mol_type = other DNA
catgtgcctggtgagcttgcta

SEQ ID NO: 38808 - DNA, 22 bp, synthetic construct
  misc_feature 1..22: note = chemically synthesized
  source 1..22: mol_type = other DNA
atgtgcctggtgagcttgctac

SEQ ID NO: 38809 - DNA, 22 bp, synthetic construct
  misc_feature 1..22: note = chemically synthesized
  source 1..22: mol_type = other DNA
gtgagcttgctactctgggcac

SEQ ID NO: 38810 - DNA, 22 bp, synthetic construct
  misc_feature 1..22: note = chemically synthesized
  source 1..22: mol_type = other DNA
gctactctgggcacaggcatag

SEQ ID NO: 38811 - DNA, 22 bp, synthetic construct
  misc_feature 1..22: note = chemically synthesized
  source 1..22: mol_type = other DNA
ctactctgggcacaggcatagt

SEQ ID NO: 38812 - DNA, 22 bp, synthetic construct
  misc_feature 1..22: note = chemically synthesized
  source 1..22: mol_type = other DNA
ctctgggcacaggcatagttgc

SEQ ID NO: 38813 - DNA, 22 bp, synthetic construct
  misc_feature 1..22: note = chemically synthesized
  source 1..22: mol_type = other DNA
tgggcacaggcatagttgcaca

SEQ ID NO: 38814 - DNA, 22 bp, synthetic construct
  misc_feature 1..22: note = chemically synthesized
  source 1..22: mol_type = other DNA
ggcacaggcatagttgcacagc

SEQ ID NO: 38815 - DNA, 22 bp, synthetic construct
  misc_feature 1..22: note = chemically synthesized
  source 1..22: mol_type = other DNA
cacagctcgcatttataaggcc

SEQ ID NO: 38816 - DNA, 22 bp, synthetic construct
  misc_feature 1..22: note = chemically synthesized
  source 1..22: mol_type = other DNA
gcatttataaggcctttcgccc

SEQ ID NO: 38817 - DNA, 22 bp, synthetic construct
  misc_feature 1..22: note = chemically synthesized
  source 1..22: mol_type = other DNA
ataaggcctttcgcccgtgtgg

SEQ ID NO: 38818 - DNA, 22 bp, synthetic construct
  misc_feature 1..22: note = chemically synthesized
  source 1..22: mol_type = other DNA
taaggcctttcgcccgtgtggc

SEQ ID NO: 38819 - DNA, 22 bp, synthetic construct
  misc_feature 1..22: note = chemically synthesized
  source 1..22: mol_type = other DNA
tcgcccgtgtggcttctcctgt

SEQ ID NO: 38820 - DNA, 22 bp, synthetic construct
  misc_feature 1..22: note = chemically synthesized
  source 1..22: mol_type = other DNA
cgcccgtgtggcttctcctgtg

SEQ ID NO: 38821 - DNA, 22 bp, synthetic construct
  misc_feature 1..22: note = chemically synthesized
  source 1..22: mol_type = other DNA
gcccgtgtggcttctcctgtgg

SEQ ID NO: 38822 - DNA, 22 bp, synthetic construct
  misc_feature 1..22: note = chemically synthesized
  source 1..22: mol_type = other DNA
ctcctgtggacagtgagattgc

SEQ ID NO: 38823 - DNA, 22 bp, synthetic construct
  misc_feature 1..22: note = chemically synthesized
  source 1..22: mol_type = other DNA
tcctgtggacagtgagattgct

SEQ ID NO: 38824 - DNA, 22 bp, synthetic construct
  misc_feature 1..22: note = chemically synthesized
  source 1..22: mol_type = other DNA
ctgtggacagtgagattgctac

SEQ ID NO: 38825 - DNA, 22 bp, synthetic construct
  misc_feature 1..22: note = chemically synthesized
  source 1..22: mol_type = other DNA
tggacagtgagattgctacagt

SEQ ID NO: 38826 - DNA, 22 bp, synthetic construct
  misc_feature 1..22: note = chemically synthesized
  source 1..22: mol_type = other DNA
ctacagttcttgaagactttcc

SEQ ID NO: 38827 - DNA, 22 bp, synthetic construct
  misc_feature 1..22: note = chemically synthesized
  source 1..22: mol_type = other DNA
cagttcttgaagactttcccac

SEQ ID NO: 38828 - DNA, 22 bp, synthetic construct
  misc_feature 1..22: note = chemically synthesized
  source 1..22: mol_type = other DNA
ttgaagactttcccacagtact

SEQ ID NO: 38829 - DNA, 22 bp, synthetic construct
  misc_feature 1..22: note = chemically synthesized
  source 1..22: mol_type = other DNA
gaagactttcccacagtactca

SEQ ID NO: 38830 - DNA, 22 bp, synthetic construct
  misc_feature 1..22: note = chemically synthesized
  source 1..22: mol_type = other DNA
aagactttcccacagtactcac

SEQ ID NO: 38831 - DNA, 22 bp, synthetic construct
  misc_feature 1..22: note = chemically synthesized
  source 1..22: mol_type = other DNA
tcccacagtactcacaagtgtc

SEQ ID NO: 38832 - DNA, 22 bp, synthetic construct
  misc_feature 1..22: note = chemically synthesized
  source 1..22: mol_type = other DNA
cccacagtactcacaagtgtcg

SEQ ID NO: 38833 - DNA, 22 bp, synthetic construct
  misc_feature 1..22: note = chemically synthesized
  source 1..22: mol_type = other DNA
ccacagtactcacaagtgtcgc

SEQ ID NO: 38834 - DNA, 22 bp, synthetic construct
  misc_feature 1..22: note = chemically synthesized
  source 1..22: mol_type = other DNA
acaagtgtcgctgcgtctgccc

SEQ ID NO: 38835 - DNA, 22 bp, synthetic construct
  misc_feature 1..22: note = chemically synthesized
  source 1..22: mol_type = other DNA
cgtctgccctcttttgagctgg

SEQ ID NO: 38836 - DNA, 22 bp, synthetic construct
  misc_feature 1..22: note = chemically synthesized
  source 1..22: mol_type = other DNA
ccctcttttgagctgggcctgc

SEQ ID NO: 38837 - DNA, 22 bp, synthetic construct
  misc_feature 1..22: note = chemically synthesized
  source 1..22: mol_type = other DNA
ttttgagctgggcctgcccggg

SEQ ID NO: 38838 - DNA, 22 bp, synthetic construct
  misc_feature 1..22: note = chemically synthesized
  source 1..22: mol_type = other DNA
ttgagctgggcctgcccgggcc

SEQ ID NO: 38839 - DNA, 22 bp, synthetic construct
  misc_feature 1..22: note = chemically synthesized
  source 1..22: mol_type = other DNA
tgagctgggcctgcccgggccc

SEQ ID NO: 38840 - DNA, 22 bp, synthetic construct
  misc_feature 1..22: note = chemically synthesized
  source 1..22: mol_type = other DNA
gagctgggcctgcccgggcccg

SEQ ID NO: 38841 - DNA, 22 bp, synthetic construct
  misc_feature 1..22: note = chemically synthesized
  source 1..22: mol_type = other DNA
agctgggcctgcccgggcccgg

SEQ ID NO: 38842 - DNA, 22 bp, synthetic construct
  misc_feature 1..22: note = chemically synthesized
  source 1..22: mol_type = other DNA
ggcctgcccgggcccggaccac

SEQ ID NO: 38843 - DNA, 22 bp, synthetic construct
  misc_feature 1..22: note = chemically synthesized
  source 1..22: mol_type = other DNA
cccgggcccggaccactaatat

SEQ ID NO: 38844 - DNA, 22 bp, synthetic construct
  misc_feature 1..22: note = chemically synthesized
  source 1..22: mol_type = other DNA
atatggggcgtgctccctccac

SEQ ID NO: 38845 - DNA, 22 bp, synthetic construct
  misc_feature 1..22: note = chemically synthesized
  source 1..22: mol_type = other DNA
cctccacttcccgtgccgctgc

SEQ ID NO: 38846 - DNA, 22 bp, synthetic construct
  misc_feature 1..22: note = chemically synthesized
  source 1..22: mol_type = other DNA
cacttcccgtgccgctgcgccc

SEQ ID NO: 38847 - DNA, 22 bp, synthetic construct
  misc_feature 1..22: note = chemically synthesized
  source 1..22: mol_type = other DNA
cccgtgccgctgcgccccgaga

SEQ ID NO: 38848 - DNA, 22 bp, synthetic construct
  misc_feature 1..22: note = chemically synthesized
  source 1..22: mol_type = other DNA
ccgtgccgctgcgccccgagat

SEQ ID NO: 38849 - DNA, 22 bp, synthetic construct
  misc_feature 1..22: note = chemically synthesized
  source 1..22: mol_type = other DNA
cgccccgagatccctccgtcca

SEQ ID NO: 38850 - DNA, 22 bp, synthetic construct
  misc_feature 1..22: note = chemically synthesized
  source 1..22: mol_type = other DNA
cgtccagctccccgggcggtgt

SEQ ID NO: 38851 - DNA, 22 bp, synthetic construct
  misc_feature 1..22: note = chemically synthesized
  source 1..22: mol_type = other DNA
cccgggcggtgtggagaagcgc

SEQ ID NO: 38852 - DNA, 22 bp, synthetic construct
  misc_feature 1..22: note = chemically synthesized
  source 1..22: mol_type = other DNA
ccgttctccgaggagtgctccg

SEQ ID NO: 38853 - DNA, 22 bp, synthetic construct
  misc_feature 1..22: note = chemically synthesized
  source 1..22: mol_type = other DNA
tccgaggagtgctccgacgagg

SEQ ID NO: 38854 - DNA, 22 bp, synthetic construct
  misc_feature 1..22: note = chemically synthesized
  source 1..22: mol_type = other DNA
cgaggagtgctccgacgaggag

SEQ ID NO: 38855 - DNA, 22 bp, synthetic construct
  misc_feature 1..22: note = chemically synthesized
  source 1..22: mol_type = other DNA
cgacgaggaggcaaaaggcgat

SEQ ID NO: 38856 - DNA, 22 bp, synthetic construct
  misc_feature 1..22: note = chemically synthesized
  source 1..22: mol_type = other DNA
tctggagtctccgaagctaagg

SEQ ID NO: 38857 - DNA, 22 bp, synthetic construct
  misc_feature 1..22: note = chemically synthesized
  source 1..22: mol_type = other DNA
gagtctccgaagctaaggaagg

SEQ ID NO: 38858 - DNA, 22 bp, synthetic construct
  misc_feature 1..22: note = chemically synthesized
  source 1..22: mol_type = other DNA
cgaagctaaggaagggatcttt

SEQ ID NO: 38859 - DNA, 22 bp, synthetic construct
  misc_feature 1..22: note = chemically synthesized
  source 1..22: mol_type = other DNA
aggaagggatctttgagctgcc

SEQ ID NO: 38860 - DNA, 22 bp, synthetic construct
  misc_feature 1..22: note = chemically synthesized
  source 1..22: mol_type = other DNA
tgagctgcctggaggccgcgta

SEQ ID NO: 38861 - DNA, 22 bp, synthetic construct
  misc_feature 1..22: note = chemically synthesized
  source 1..22: mol_type = other DNA
gagctgcctggaggccgcgtag

SEQ ID NO: 38862 - DNA, 22 bp, synthetic construct
  misc_feature 1..22: note = chemically synthesized
  source 1..22: mol_type = other DNA
agctgcctggaggccgcgtagc

SEQ ID NO: 38863 - DNA, 22 bp, synthetic construct
  misc_feature 1..22: note = chemically synthesized
  source 1..22: mol_type = other DNA
cctggaggccgcgtagccggcg

SEQ ID NO: 38864 - DNA, 22 bp, synthetic construct
  misc_feature 1..22: note = chemically synthesized
  source 1..22: mol_type = other DNA
gaggccgcgtagccggcgagcc

SEQ ID NO: 38865 - DNA, 22 bp, synthetic construct
  misc_feature 1..22: note = chemically synthesized
  source 1..22: mol_type = other DNA
cgagtacacgttctccgtgttg

SEQ ID NO: 38866 - DNA, 22 bp, synthetic construct
  misc_feature 1..22: note = chemically synthesized
  source 1..22: mol_type = other DNA
tccgtgttgggcatcgcggccg

SEQ ID NO: 38867 - DNA, 22 bp, synthetic construct
  misc_feature 1..22: note = chemically synthesized
  source 1..22: mol_type = other DNA
cgtgttgggcatcgcggccggg

SEQ ID NO: 38868 - DNA, 22 bp, synthetic construct
  misc_feature 1..22: note = chemically synthesized
  source 1..22: mol_type = other DNA
ggcatcgcggccgggggcaggt

SEQ ID NO: 38869 - DNA, 22 bp, synthetic construct
  misc_feature 1..22: note = chemically synthesized
  source 1..22: mol_type = other DNA
cttctcgagcttgatgcgctta

SEQ ID NO: 38870 - DNA, 22 bp, synthetic construct
  misc_feature 1..22: note = chemically synthesized
  source 1..22: mol_type = other DNA
ctcgagcttgatgcgcttagag

SEQ ID NO: 38871 - DNA, 22 bp, synthetic construct
  misc_feature 1..22: note = chemically synthesized
  source 1..22: mol_type = other DNA
tcgagcttgatgcgcttagaga

SEQ ID NO: 38872 - DNA, 22 bp, synthetic construct
  misc_feature 1..22: note = chemically synthesized
  source 1..22: mol_type = other DNA
gagcttgatgcgcttagagaag

SEQ ID NO: 38873 - DNA, 22 bp, synthetic construct
  misc_feature 1..22: note = chemically synthesized
  source 1..22: mol_type = other DNA
gatgcgcttagagaaggggctc

SEQ ID NO: 38874 - DNA, 22 bp, synthetic construct
  misc_feature 1..22: note = chemically synthesized
  source 1..22: mol_type = other DNA
atgcgcttagagaaggggctca

SEQ ID NO: 38875 - DNA, 22 bp, synthetic construct
  misc_feature 1..22: note = chemically synthesized
  source 1..22: mol_type = other DNA
agagaaggggctcagcgagctg

SEQ ID NO: 38876 - DNA, 22 bp, synthetic construct
  misc_feature 1..22: note = chemically synthesized
  source 1..22: mol_type = other DNA
gagaaggggctcagcgagctgg

SEQ ID NO: 38877 - DNA, 22 bp, synthetic construct
  misc_feature 1..22: note = chemically synthesized
  source 1..22: mol_type = other DNA
agcgagctggggctgcccagca

SEQ ID NO: 38878 - DNA, 22 bp, synthetic construct
  misc_feature 1..22: note = chemically synthesized
  source 1..22: mol_type = other DNA
gggctgcccagcagcagctttt

SEQ ID NO: 38879 - DNA, 22 bp, synthetic construct
  misc_feature 1..22: note = chemically synthesized
  source 1..22: mol_type = other DNA
cccagcagcagctttttggaca

SEQ ID NO: 38880 - DNA, 22 bp, synthetic construct
  misc_feature 1..22: note = chemically synthesized
  source 1..22: mol_type = other DNA
tttggacaggccccccgaggcc

SEQ ID NO: 38881 - DNA, 22 bp, synthetic construct
  misc_feature 1..22: note = chemically synthesized
  source 1..22: mol_type = other DNA
ttggacaggccccccgaggccg

SEQ ID NO: 38882 - DNA, 22 bp, synthetic construct
  misc_feature 1..22: note = chemically synthesized
  source 1..22: mol_type = other DNA
tggacaggccccccgaggccga

SEQ ID NO: 38883 - DNA, 22 bp, synthetic construct
  misc_feature 1..22: note = chemically synthesized
  source 1..22: mol_type = other DNA
ggacaggccccccgaggccgac

SEQ ID NO: 38884 - DNA, 22 bp, synthetic construct
  misc_feature 1..22: note = chemically synthesized
  source 1..22: mol_type = other DNA
gacaggccccccgaggccgact

SEQ ID NO: 38885 - DNA, 22 bp, synthetic construct
  misc_feature 1..22: note = chemically synthesized
  source 1..22: mol_type = other DNA
gcccggggagcagccgcggcca

SEQ ID NO: 38886 - DNA, 22 bp, synthetic construct
  misc_feature 1..22: note = chemically synthesized
  source 1..22: mol_type = other DNA
acagtgccatcgtctatgcggt

SEQ ID NO: 38887 - DNA, 22 bp, synthetic construct
  misc_feature 1..22: note = chemically synthesized
  source 1..22: mol_type = other DNA
tgcggtccgactcgccggccac

SEQ ID NO: 38888 - DNA, 22 bp, synthetic construct
  misc_feature 1..22: note = chemically synthesized
  source 1..22: mol_type = other DNA
gccggccaccgagtcttcgtcg

SEQ ID NO: 38889 - DNA, 22 bp, synthetic construct
  misc_feature 1..22: note = chemically synthesized
  source 1..22: mol_type = other DNA
cgtcgcaagtgtccctgtggcc

SEQ ID NO: 38890 - DNA, 22 bp, synthetic construct
  misc_feature 1..22: note = chemically synthesized
  source 1..22: mol_type = other DNA
gtcgcaagtgtccctgtggccc

SEQ ID NO: 38891 - DNA, 22 bp, synthetic construct
  misc_feature 1..22: note = chemically synthesized
  source 1..22: mol_type = other DNA
tggccctcggcctcggccaggt

SEQ ID NO: 38892 - DNA, 22 bp, synthetic construct
  misc_feature 1..22: note = chemically synthesized
  source 1..22: mol_type = other DNA
ggcctcggccaggtggccgcgc

SEQ ID NO: 38893 - DNA, 22 bp, synthetic construct
  misc_feature 1..22: note = chemically synthesized
  source 1..22: mol_type = other DNA
ggccaggtggccgcgcttatgc

SEQ ID NO: 38894 - DNA, 22 bp, synthetic construct
  misc_feature 1..22: note = chemically synthesized
  source 1..22: mol_type = other DNA
atgcttctcgcccaggacctgg

SEQ ID NO: 38895 - DNA, 22 bp, synthetic construct
  misc_feature 1..22: note = chemically synthesized
  source 1..22: mol_type = other DNA
tgcttctcgcccaggacctggt

SEQ ID NO: 38896 - DNA, 22 bp, synthetic construct
  misc_feature 1..22: note = chemically synthesized
  source 1..22: mol_type = other DNA
ctcgcccaggacctggtggaag

SEQ ID NO: 38897 - DNA, 22 bp, synthetic construct
  misc_feature 1..22: note = chemically synthesized
  source 1..22: mol_type = other DNA
tcgcccaggacctggtggaagg

SEQ ID NO: 38898 - DNA, 22 bp, synthetic construct
  misc_feature 1..22: note = chemically synthesized
  source 1..22: mol_type = other DNA
gcccaggacctggtggaaggcc

SEQ ID NO: 38899 - DNA, 22 bp, synthetic construct
  misc_feature 1..22: note = chemically synthesized
  source 1..22: mol_type = other DNA
gtggaaggcctcgctgaagtgc

SEQ ID NO: 38900 - DNA, 22 bp, synthetic construct
  misc_feature 1..22: note = chemically synthesized
  source 1..22: mol_type = other DNA
gctgaagtgctgcatggagctg

SEQ ID NO: 38901 - DNA, 22 bp, synthetic construct
  misc_feature 1..22: note = chemically synthesized
  source 1..22: mol_type = other DNA
aagtgctgcatggagctgagca

SEQ ID NO: 38902 - DNA, 22 bp, synthetic construct
  misc_feature 1..22: note = chemically synthesized
  source 1..22: mol_type = other DNA
catggagctgagcaccatgccc

SEQ ID NO: 38903 - DNA, 22 bp, synthetic construct
  misc_feature 1..22: note = chemically synthesized
  source 1..22: mol_type = other DNA
agcaccatgccctgcatgacgt

SEQ ID NO: 38904 - DNA, 22 bp, synthetic construct
  misc_feature 1..22: note = chemically synthesized
  source 1..22: mol_type = other DNA
catgacgtcgggcagggcgcgg

SEQ ID NO: 38905 - DNA, 22 bp, synthetic construct
  misc_feature 1..22: note = chemically synthesized
  source 1..22: mol_type = other DNA
tcgtcgcccacgcccacgaccg

SEQ ID NO: 38906 - DNA, 22 bp, synthetic construct
  misc_feature 1..22: note = chemically synthesized
  source 1..22: mol_type = other DNA
gtcgcccacgcccacgaccgcg

SEQ ID NO: 38907 - DNA, 22 bp, synthetic construct
  misc_feature 1..22: note = chemically synthesized
  source 1..22: mol_type = other DNA
ttctcgtggtggcgcgccgcct

SEQ ID NO: 38908 - DNA, 22 bp, synthetic construct
  misc_feature 1..22: note = chemically synthesized
  source 1..22: mol_type = other DNA
tcgtggtggcgcgccgcctcca

SEQ ID NO: 38909 - DNA, 22 bp, synthetic construct
  misc_feature 1..22: note = chemically synthesized
  source 1..22: mol_type = other DNA
gtggtggcgcgccgcctccagg

SEQ ID NO: 38910 - DNA, 22 bp, synthetic construct
  misc_feature 1..22: note = chemically synthesized
  source 1..22: mol_type = other DNA
caggctcagcccgaagccgtag

SEQ ID NO: 38911 - DNA, 22 bp, synthetic construct
  misc_feature 1..22: note = chemically synthesized
  source 1..22: mol_type = other DNA
agcccgaagccgtagtccaccc

SEQ ID NO: 38912 - DNA, 22 bp, synthetic construct
  misc_feature 1..22: note = chemically synthesized
  source 1..22: mol_type = other DNA
tcgctctccgtcagctcctcct

SEQ ID NO: 38913 - DNA, 22 bp, synthetic construct
  misc_feature 1..22: note = chemically synthesized
  source 1..22: mol_type = other DNA
gctctccgtcagctcctcctcc

SEQ ID NO: 38914 - DNA, 22 bp, synthetic construct
  misc_feature 1..22: note = chemically synthesized
  source 1..22: mol_type = other DNA
tccgtcagctcctcctcctcct

SEQ ID NO: 38915 - DNA, 22 bp, synthetic construct
  misc_feature 1..22: note = chemically synthesized
  source 1..22: mol_type = other DNA
cgtcagctcctcctcctcctct

SEQ ID NO: 38916 - DNA, 22 bp, synthetic construct
  misc_feature 1..22: note = chemically synthesized
  source 1..22: mol_type = other DNA
ctcctcctcctcttcctcctct

SEQ ID NO: 38917 - DNA, 22 bp, synthetic construct
  misc_feature 1..22: note = chemically synthesized
  source 1..22: mol_type = other DNA
ctcctcctcttcctcctcttct

SEQ ID NO: 38918 - DNA, 22 bp, synthetic construct
  misc_feature 1..22: note = chemically synthesized
  source 1..22: mol_type = other DNA
ctcctcttcctcctcttcttcc

SEQ ID NO: 38919 - DNA, 22 bp, synthetic construct
  misc_feature 1..22: note = chemically synthesized
  source 1..22: mol_type = other DNA
ctcttcctcctcttcttcctct

SEQ ID NO: 38920 - DNA, 22 bp, synthetic construct
  misc_feature 1..22: note = chemically synthesized
  source 1..22: mol_type = other DNA
ttcctcctcttcttcctcttcc

SEQ ID NO: 38921 - DNA, 22 bp, synthetic construct
  misc_feature 1..22: note = chemically synthesized
  source 1..22: mol_type = other DNA
cctcctcttcttcctcttcctc

SEQ ID NO: 38922 - DNA, 22 bp, synthetic construct
  misc_feature 1..22: note = chemically synthesized
  source 1..22: mol_type = other DNA
ctcctcttcttcctcttcctcg

SEQ ID NO: 38923 - DNA, 22 bp, synthetic construct
  misc_feature 1..22: note = chemically synthesized
  source 1..22: mol_type = other DNA
ctcttcttcctcttcctcgtcg

SEQ ID NO: 38924 - DNA, 22 bp, synthetic construct
  misc_feature 1..22: note = chemically synthesized
  source 1..22: mol_type = other DNA
ttcttcctcttcctcgtcgtcc

SEQ ID NO: 38925 - DNA, 22 bp, synthetic construct
  misc_feature 1..22: note = chemically synthesized
  source 1..22: mol_type = other DNA
cttcctcttcctcgtcgtcctc

SEQ ID NO: 38926 - DNA, 22 bp, synthetic construct
  misc_feature 1..22: note = chemically synthesized
  source 1..22: mol_type = other DNA
ttcctcttcctcgtcgtcctcc

SEQ ID NO: 38927 - DNA, 22 bp, synthetic construct
  misc_feature 1..22: note = chemically synthesized
  source 1..22: mol_type = other DNA
cctcttcctcgtcgtcctcctc

SEQ ID NO: 38928 - DNA, 22 bp, synthetic construct
  misc_feature 1..22: note = chemically synthesized
  source 1..22: mol_type = other DNA
ctcttcctcgtcgtcctcctct

SEQ ID NO: 38929 - DNA, 22 bp, synthetic construct
  misc_feature 1..22: note = chemically synthesized
  source 1..22: mol_type = other DNA
ttcctcgtcgtcctcctcttcc

SEQ ID NO: 38930 - DNA, 22 bp, synthetic construct
  misc_feature 1..22: note = chemically synthesized
  source 1..22: mol_type = other DNA
cctcgtcgtcctcctcttcctc

SEQ ID NO: 38931 - DNA, 22 bp, synthetic construct
  misc_feature 1..22: note = chemically synthesized
  source 1..22: mol_type = other DNA
ctcgtcgtcctcctcttcctcc

SEQ ID NO: 38932 - DNA, 22 bp, synthetic construct
  misc_feature 1..22: note = chemically synthesized
  source 1..22: mol_type = other DNA
gtcgtcctcctcttcctcctcg

SEQ ID NO: 38933 - DNA, 22 bp, synthetic construct
  misc_feature 1..22: note = chemically synthesized
  source 1..22: mol_type = other DNA
ctcttcctcctcgtccccgttc

SEQ ID NO: 38934 - DNA, 22 bp, synthetic construct
  misc_feature 1..22: note = chemically synthesized
  source 1..22: mol_type = other DNA
ttcctcctcgtccccgttctcc

SEQ ID NO: 38935 - DNA, 22 bp, synthetic construct
  misc_feature 1..22: note = chemically synthesized
  source 1..22: mol_type = other DNA
cctcctcgtccccgttctccgg

SEQ ID NO: 38936 - DNA, 22 bp, synthetic construct
  misc_feature 1..22: note = chemically synthesized
  source 1..22: mol_type = other DNA
ctcctcgtccccgttctccggg

SEQ ID NO: 38937 - DNA, 22 bp, synthetic construct
  misc_feature 1..22: note = chemically synthesized
  source 1..22: mol_type = other DNA
ctcgtccccgttctccgggatc

SEQ ID NO: 38938 - DNA, 22 bp, synthetic construct
  misc_feature 1..22: note = chemically synthesized
  source 1..22: mol_type = other DNA
gtccccgttctccgggatcagg

SEQ ID NO: 38939 - DNA, 22 bp, synthetic construct
  misc_feature 1..22: note = chemically synthesized
  source 1..22: mol_type = other DNA
tccgggatcaggttggggtcgt

SEQ ID NO: 38940 - DNA, 22 bp, synthetic construct
  misc_feature 1..22: note = chemically synthesized
  source 1..22: mol_type = other DNA
cgggatcaggttggggtcgttc

SEQ ID NO: 38941 - DNA, 22 bp, synthetic construct
  misc_feature 1..22: note = chemically synthesized
  source 1..22: mol_type = other DNA
gggtcgttctcgctcttgaact

SEQ ID NO: 38942 - DNA, 22 bp, synthetic construct
  misc_feature 1..22: note = chemically synthesized
  source 1..22: mol_type = other DNA
tcgctcttgaacttggccacca

SEQ ID NO: 38943 - DNA, 22 bp, synthetic construct
  misc_feature 1..22: note = chemically synthesized
  source 1..22: mol_type = other DNA
gctcttgaacttggccaccacg

SEQ ID NO: 38944 - DNA, 22 bp, synthetic construct
  misc_feature 1..22: note = chemically synthesized
  source 1..22: mol_type = other DNA
ttgaacttggccaccacggact

SEQ ID NO: 38945 - DNA, 22 bp, synthetic construct
  misc_feature 1..22: note = chemically synthesized
  source 1..22: mol_type = other DNA
gaacttggccaccacggacttg

SEQ ID NO: 38946 - DNA, 22 bp, synthetic construct
  misc_feature 1..22: note = chemically synthesized
  source 1..22: mol_type = other DNA
aacttggccaccacggacttga

SEQ ID NO: 38947 - DNA, 22 bp, synthetic construct
  misc_feature 1..22: note = chemically synthesized
  source 1..22: mol_type = other DNA
ggccaccacggacttgagcgcg

SEQ ID NO: 38948 - DNA, 22 bp, synthetic construct
  misc_feature 1..22: note = chemically synthesized
  source 1..22: mol_type = other DNA
gccaccacggacttgagcgcgc

SEQ ID NO: 38949 - DNA, 22 bp, synthetic construct
  misc_feature 1..22: note = chemically synthesized
  source 1..22: mol_type = other DNA
gagcgcgctgctggcgctgccc

SEQ ID NO: 38950 - DNA, 22 bp, synthetic construct
  misc_feature 1..22: note = chemically synthesized
  source 1..22: mol_type = other DNA
agcgcgctgctggcgctgccca

SEQ ID NO: 38951 - DNA, 22 bp, synthetic construct
  misc_feature 1..22: note = chemically synthesized
  source 1..22: mol_type = other DNA
ctggcgctgcccaccaagtcgc

SEQ ID NO: 38952 - DNA, 22 bp, synthetic construct
  misc_feature 1..22: note = chemically synthesized
  source 1..22: mol_type = other DNA
gcgctgcccaccaagtcgctgg

SEQ ID NO: 38953 - DNA, 22 bp, synthetic construct
  misc_feature 1..22: note = chemically synthesized
  source 1..22: mol_type = other DNA
cccaccaagtcgctggtgccgg

SEQ ID NO: 38954 - DNA, 22 bp, synthetic construct
  misc_feature 1..22: note = chemically synthesized
  source 1..22: mol_type = other DNA
gtgccgggttccggggagctgg

SEQ ID NO: 38955 - DNA, 22 bp, synthetic construct
  misc_feature 1..22: note = chemically synthesized
  source 1..22: mol_type = other DNA
cggggagctggcggtggagaga

SEQ ID NO: 38956 - DNA, 22 bp, synthetic construct
  misc_feature 1..22: note = chemically synthesized
  source 1..22: mol_type = other DNA
gcggtggagagaccgtcgtcgg

SEQ ID NO: 38957 - DNA, 22 bp, synthetic construct
  misc_feature 1..22: note = chemically synthesized
  source 1..22: mol_type = other DNA
gaccgtcatgggggacgatttg

SEQ ID NO: 38958 - DNA, 22 bp, synthetic construct
  misc_feature 1..22: note = chemically synthesized
  source 1..22: mol_type = other DNA
accgtcatgggggacgatttgt

SEQ ID NO: 38959 - DNA, 22 bp, synthetic construct
  misc_feature 1..22: note = chemically synthesized
  source 1..22: mol_type = other DNA
gtgcatgtgcgtcttcatgtgg

SEQ ID NO: 38960 - DNA, 22 bp, synthetic construct
  misc_feature 1..22: note = chemically synthesized
  source 1..22: mol_type = other DNA
tgcatgtgcgtcttcatgtggc

SEQ ID NO: 38961 - DNA, 22 bp, synthetic construct
  misc_feature 1..22: note = chemically synthesized
  source 1..22: mol_type = other DNA
catgtggcgcttcagcttgctg

SEQ ID NO: 38962 - DNA, 22 bp, synthetic construct
  misc_feature 1..22: note = chemically synthesized
  source 1..22: mol_type = other DNA
atgtggcgcttcagcttgctgg

SEQ ID NO: 38963 - DNA, 22 bp, synthetic construct
  misc_feature 1..22: note = chemically synthesized
  source 1..22: mol_type = other DNA
cagcttgctggcctgggtgcac

SEQ ID NO: 38964 - DNA, 22 bp, synthetic construct
  misc_feature 1..22: note = chemically synthesized
  source 1..22: mol_type = other DNA
agcttgctggcctgggtgcacg

SEQ ID NO: 38965 - DNA, 22 bp, synthetic construct
  misc_feature 1..22: note = chemically synthesized
  source 1..22: mol_type = other DNA
gctggcctgggtgcacgcgtgg

SEQ ID NO: 38966 - DNA, 22 bp, synthetic construct
  misc_feature 1..22: note = chemically synthesized
  source 1..22: mol_type = other DNA
ctggcctgggtgcacgcgtggt

SEQ ID NO: 38967 - DNA, 22 bp, synthetic construct
  misc_feature 1..22: note = chemically synthesized
  source 1..22: mol_type = other DNA
gcctgggtgcacgcgtggtcgc

SEQ ID NO: 38968 - DNA, 22 bp, synthetic construct
  misc_feature 1..22: note = chemically synthesized
  source 1..22: mol_type = other DNA
ggtgcacgcgtggtcgcacagg

SEQ ID NO: 38969 - DNA, 22 bp, synthetic construct
  misc_feature 1..22: note = chemically synthesized
  source 1..22: mol_type = other DNA
cacttgtagggcttctcgcccg

SEQ ID NO: 38970 - DNA, 22 bp, synthetic construct
  misc_feature 1..22: note = chemically synthesized
  source 1..22: mol_type = other DNA
gtagggcttctcgcccgtgtgg

SEQ ID NO: 38971 - DNA, 22 bp, synthetic construct
  misc_feature 1..22: note = chemically synthesized
  source 1..22: mol_type = other DNA
tagggcttctcgcccgtgtggc

SEQ ID NO: 38972 - DNA, 22 bp, synthetic construct
  misc_feature 1..22: note = chemically synthesized
  source 1..22: mol_type = other DNA
ctcgcccgtgtggctgcgccgg

SEQ ID NO: 38973 - DNA, 22 bp, synthetic construct
  misc_feature 1..22: note = chemically synthesized
  source 1..22: mol_type = other DNA
tcgcccgtgtggctgcgccggt

SEQ ID NO: 38974 - DNA, 22 bp, synthetic construct
  misc_feature 1..22: note = chemically synthesized
  source 1..22: mol_type = other DNA
gcccgtgtggctgcgccggtgc

SEQ ID NO: 38975 - DNA, 22 bp, synthetic construct
  misc_feature 1..22: note = chemically synthesized
  source 1..22: mol_type = other DNA
cgccggtgcaccaccaggttgc

SEQ ID NO: 38976 - DNA, 22 bp, synthetic construct
  misc_feature 1..22: note = chemically synthesized
  source 1..22: mol_type = other DNA
ctctgaaatttgaacgtcttgc

SEQ ID NO: 38977 - DNA, 22 bp, synthetic construct
  misc_feature 1..22: note = chemically synthesized
  source 1..22: mol_type = other DNA
tgaaatttgaacgtcttgccgc

SEQ ID NO: 38978 - DNA, 22 bp, synthetic construct
  misc_feature 1..22: note = chemically synthesized
  source 1..22: mol_type = other DNA
aaatttgaacgtcttgccgcag

SEQ ID NO: 38979 - DNA, 22 bp, synthetic construct
  misc_feature 1..22: note = chemically synthesized
  source 1..22: mol_type = other DNA
gaacgtcttgccgcagaactcg

SEQ ID NO: 38980 - DNA, 22 bp, synthetic construct
  misc_feature 1..22: note = chemically synthesized
  source 1..22: mol_type = other DNA
aacgtcttgccgcagaactcgc

SEQ ID NO: 38981 - DNA, 22 bp, synthetic construct
  misc_feature 1..22: note = chemically synthesized
  source 1..22: mol_type = other DNA
gccgcagaactcgcatgacttg

SEQ ID NO: 38982 - DNA, 22 bp, synthetic construct
  misc_feature 1..22: note = chemically synthesized
  source 1..22: mol_type = other DNA
ccgcagaactcgcatgacttgg

SEQ ID NO: 38983 - DNA, 22 bp, synthetic construct
  misc_feature 1..22: note = chemically synthesized
  source 1..22: mol_type = other DNA
gcatgacttggacttgaccggg

SEQ ID NO: 38984 - DNA, 22 bp, synthetic construct
  misc_feature 1..22: note = chemically synthesized
  source 1..22: mol_type = other DNA
ggacttgaccgggggctgggag

SEQ ID NO: 38985 - DNA, 22 bp, synthetic construct
  misc_feature 1..22: note = chemically synthesized
  source 1..22: mol_type = other DNA
gacttgaccgggggctgggagg

SEQ ID NO: 38986 - DNA, 22 bp, synthetic construct
  misc_feature 1..22: note = chemically synthesized
  source 1..22: mol_type = other DNA
gaccgggggctgggagggagga

SEQ ID NO: 38987 - DNA, 22 bp, synthetic construct
  misc_feature 1..22: note = chemically synthesized
  source 1..22: mol_type = other DNA
accgggggctgggagggaggag

SEQ ID NO: 38988 - DNA, 22 bp, synthetic construct
  misc_feature 1..22: note = chemically synthesized
  source 1..22: mol_type = other DNA
ggagggaggaggggcggattgc

SEQ ID NO: 38989 - DNA, 22 bp, synthetic construct
  misc_feature 1..22: note = chemically synthesized
  source 1..22: mol_type = other DNA
cagaggagggagggggggcgtc

SEQ ID NO: 38990 - DNA, 22 bp, synthetic construct
  misc_feature 1..22: note = chemically synthesized
  source 1..22: mol_type = other DNA
gctacctggctggaatggttgc

SEQ ID NO: 38991 - DNA, 22 bp, synthetic construct
  misc_feature 1..22: note = chemically synthesized
  source 1..22: mol_type = other DNA
ctacctggctggaatggttgca

SEQ ID NO: 38992 - DNA, 22 bp, synthetic construct
  misc_feature 1..22: note = chemically synthesized
  source 1..22: mol_type = other DNA
cctggctggaatggttgcagta

SEQ ID NO: 38993 - DNA, 22 bp, synthetic construct
  misc_feature 1..22: note = chemically synthesized
  source 1..22: mol_type = other DNA
gctggaatggttgcagtaacct

SEQ ID NO: 38994 - DNA, 22 bp, synthetic construct
  misc_feature 1..22: note = chemically synthesized
  source 1..22: mol_type = other DNA
gaatggttgcagtaacctttgc

SEQ ID NO: 38995 - DNA, 22 bp, synthetic construct
  misc_feature 1..22: note = chemically synthesized
  source 1..22: mol_type = other DNA
cagtaacctttgcatagggctg

SEQ ID NO: 38996 - DNA, 22 bp, synthetic construct
  misc_feature 1..22: note = chemically synthesized
  source 1..22: mol_type = other DNA
tgcatagggctgggccggcctg

SEQ ID NO: 38997 - DNA, 22 bp, synthetic construct
  misc_feature 1..22: note = chemically synthesized
  source 1..22: mol_type = other DNA
gcatagggctgggccggcctgg

SEQ ID NO: 38998 - DNA, 22 bp, synthetic construct
  misc_feature 1..22: note = chemically synthesized
  source 1..22: mol_type = other DNA
catagggctgggccggcctggg

SEQ ID NO: 38999 - DNA, 22 bp, synthetic construct
  misc_feature 1..22: note = chemically synthesized
  source 1..22: mol_type = other DNA
ggccggcctggggacagcggtg

SEQ ID NO: 39000 - DNA, 22 bp, synthetic construct
  misc_feature 1..22: note = chemically synthesized
  source 1..22: mol_type = other DNA
gggacagcggtgggctagacgt

SEQ ID NO: 39001 - DNA, 22 bp, synthetic construct
  misc_feature 1..22: note = chemically synthesized
  source 1..22: mol_type = other DNA
gacgtgttccctgccagctctc

SEQ ID NO: 39002 - DNA, 22 bp, synthetic construct
  misc_feature 1..22: note = chemically synthesized
  source 1..22: mol_type = other DNA
cctgccagctctctaagtctcc

SEQ ID NO: 39003 - DNA, 22 bp, synthetic construct
  misc_feature 1..22: note = chemically synthesized
  source 1..22: mol_type = other DNA
ccagctctctaagtctcctaga

SEQ ID NO: 39004 - DNA, 22 bp, synthetic construct
  misc_feature 1..22: note = chemically synthesized
  source 1..22: mol_type = other DNA
tctaagtctcctagagaaatcc

SEQ ID NO: 39005 - DNA, 22 bp, synthetic construct
  misc_feature 1..22: note = chemically synthesized
  source 1..22: mol_type = other DNA
taagtctcctagagaaatccat

SEQ ID NO: 39006 - DNA, 22 bp, synthetic construct
  misc_feature 1..22: note = chemically synthesized
  source 1..22: mol_type = other DNA
agtctcctagagaaatccatgg

SEQ ID NO: 39007 - DNA, 22 bp, synthetic construct
  misc_feature 1..22: note = chemically synthesized
  source 1..22: mol_type = other DNA
ctagagaaatccatggcgggag

SEQ ID NO: 39008 - DNA, 22 bp, synthetic construct
  misc_feature 1..22: note = chemically synthesized
  source 1..22: mol_type = other DNA
gagaaatccatggcgggaggct

SEQ ID NO: 39009 - DNA, 22 bp, synthetic construct
  misc_feature 1..22: note = chemically synthesized
  source 1..22: mol_type = other DNA
catagccattggattcaaccgc

SEQ ID NO: 39010 - DNA, 22 bp, synthetic construct
  misc_feature 1..22: note = chemically synthesized
  source 1..22: mol_type = other DNA
gattcaaccgcagcaccctgtc

SEQ ID NO: 39011 - DNA, 22 bp, synthetic construct
  misc_feature 1..22: note = chemically synthesized
  source 1..22: mol_type = other DNA
aaccgcagcaccctgtcaaagg

SEQ ID NO: 39012 - DNA, 22 bp, synthetic construct
  misc_feature 1..22: note = chemically synthesized
  source 1..22: mol_type = other DNA
tcaaaggcactcgggtgatggg

SEQ ID NO: 39013 - DNA, 22 bp, synthetic construct
  misc_feature 1..22: note = chemically synthesized
  source 1..22: mol_type = other DNA
gggtgatgggtggccagggcca

SEQ ID NO: 39014 - DNA, 22 bp, synthetic construct
  misc_feature 1..22: note = chemically synthesized
  source 1..22: mol_type = other DNA
ttccgcccccaggcgctctatg

SEQ ID NO: 39015 - DNA, 22 bp, synthetic construct
  misc_feature 1..22: note = chemically synthesized
  source 1..22: mol_type = other DNA
ccgcccccaggcgctctatgcg

SEQ ID NO: 39016 - DNA, 22 bp, synthetic construct
  misc_feature 1..22: note = chemically synthesized
  source 1..22: mol_type = other DNA
cgcccccaggcgctctatgcgg

SEQ ID NO: 39017 - DNA, 22 bp, synthetic construct
  misc_feature 1..22: note = chemically synthesized
  source 1..22: mol_type = other DNA
tatgcggtgggggtccaagtga

SEQ ID NO: 39018 - DNA, 22 bp, synthetic construct
  misc_feature 1..22: note = chemically synthesized
  source 1..22: mol_type = other DNA
tgcggtgggggtccaagtgatg

SEQ ID NO: 39019 - DNA, 22 bp, synthetic construct
  misc_feature 1..22: note = chemically synthesized
  source 1..22: mol_type = other DNA
ggtggtggactaaacagggggg

SEQ ID NO: 39020 - DNA, 22 bp, synthetic construct
  misc_feature 1..22: note = chemically synthesized
  source 1..22: mol_type = other DNA
aacagggggggagtgggtggaa

SEQ ID NO: 39021 - DNA, 22 bp, synthetic construct
  misc_feature 1..22: note = chemically synthesized
  source 1..22: mol_type = other DNA
ctgccaggccggaagcctctct

SEQ ID NO: 39022 - DNA, 22 bp, synthetic construct
  misc_feature 1..22: note = chemically synthesized
  source 1..22: mol_type = other DNA
tgccaggccggaagcctctctc

SEQ ID NO: 39023 - DNA, 22 bp, synthetic construct
  misc_feature 1..22: note = chemically synthesized
  source 1..22: mol_type = other DNA
ccaggccggaagcctctctcga

SEQ ID NO: 39024 - DNA, 22 bp, synthetic construct
  misc_feature 1..22: note = chemically synthesized
  source 1..22: mol_type = other DNA
tctcgatactgatcctggtatt

SEQ ID NO: 39025 - DNA, 22 bp, synthetic construct
  misc_feature 1..22: note = chemically synthesized
  source 1..22: mol_type = other DNA
tcgatactgatcctggtattct

SEQ ID NO: 39026 - DNA, 22 bp, synthetic construct
  misc_feature 1..22: note = chemically synthesized
  source 1..22: mol_type = other DNA
gatactgatcctggtattctta

SEQ ID NO: 39027 - DNA, 22 bp, synthetic construct
  misc_feature 1..22: note = chemically synthesized
  source 1..22: mol_type = other DNA
atcctggtattcttagcaggtt

SEQ ID NO: 39028 - DNA, 22 bp, synthetic construct
  misc_feature 1..22: note = chemically synthesized
  source 1..22: mol_type = other DNA
gtattcttagcaggttaaaggg

SEQ ID NO: 39029 - DNA, 22 bp, synthetic construct
  misc_feature 1..22: note = chemically synthesized
  source 1..22: mol_type = other DNA
ttagcaggttaaaggggttatt

SEQ ID NO: 39030 - DNA, 22 bp, synthetic construct
  misc_feature 1..22: note = chemically synthesized
  source 1..22: mol_type = other DNA
agcaggttaaaggggttattgt

SEQ ID NO: 39031 - DNA, 22 bp, synthetic construct
  misc_feature 1..22: note = chemically synthesized
  source 1..22: mol_type = other DNA
gcaggttaaaggggttattgtc

SEQ ID NO: 39032 - DNA, 22 bp, synthetic construct
  misc_feature 1..22: note = chemically synthesized
  source 1..22: mol_type = other DNA
aaggggttattgtctgcaatat

SEQ ID NO: 39033 - DNA, 22 bp, synthetic construct
  misc_feature 1..22: note = chemically synthesized
  source 1..22: mol_type = other DNA
ttgtctgcaatatgaatcccat

SEQ ID NO: 39034 - DNA, 22 bp, synthetic construct
  misc_feature 1..22: note = chemically synthesized
  source 1..22: mol_type = other DNA
tctgcaatatgaatcccatgga

SEQ ID NO: 39035 - DNA, 22 bp, synthetic construct
  misc_feature 1..22: note = chemically synthesized
  source 1..22: mol_type = other DNA
caatatgaatcccatggagagg

SEQ ID NO: 39036 - DNA, 22 bp, synthetic construct
  misc_feature 1..22: note = chemically synthesized
  source 1..22: mol_type = other DNA
ggaaggacattctgcacctagt

SEQ ID NO: 39037 - DNA, 22 bp, synthetic construct
  misc_feature 1..22: note = chemically synthesized
  source 1..22: mol_type = other DNA
tgcacctagtcctgaagggata

SEQ ID NO: 39038 - DNA, 22 bp, synthetic construct
  misc_feature 1..22: note = chemically synthesized
  source 1..22: mol_type = other DNA
cacctagtcctgaagggatacc

SEQ ID NO: 39039 - DNA, 22 bp, synthetic construct
  misc_feature 1..22: note = chemically synthesized
  source 1..22: mol_type = other DNA
gtcctgaagggataccaacccg

SEQ ID NO: 39040 - DNA, 22 bp, synthetic construct
  misc_feature 1..22: note = chemically synthesized
  source 1..22: mol_type = other DNA
aagggataccaacccgcggggt

SEQ ID NO: 39041 - DNA, 22 bp, synthetic construct
  misc_feature 1..22: note = chemically synthesized
  source 1..22: mol_type = other DNA
ccgtgttcgctttctaagtaga

SEQ ID NO: 39042 - DNA, 22 bp, synthetic construct
  misc_feature 1..22: note = chemically synthesized
  source 1..22: mol_type = other DNA
cgtgttcgctttctaagtagat

SEQ ID NO: 39043 - DNA, 22 bp, synthetic construct
  misc_feature 1..22: note = chemically synthesized
  source 1..22: mol_type = other DNA
gctttctaagtagattcttaat

SEQ ID NO: 39044 - DNA, 22 bp, synthetic construct
  misc_feature 1..22: note = chemically synthesized
  source 1..22: mol_type = other DNA
tctaagtagattcttaatccat

SEQ ID NO: 39045 - DNA, 22 bp, synthetic construct
  misc_feature 1..22: note = chemically synthesized
  source 1..22: mol_type = other DNA
ctaagtagattcttaatccatg

SEQ ID NO: 39046 - DNA, 22 bp, synthetic construct
  misc_feature 1..22: note = chemically synthesized
  source 1..22: mol_type = other DNA
taagtagattcttaatccatga

SEQ ID NO: 39047 - DNA, 22 bp, synthetic construct
  misc_feature 1..22: note = chemically synthesized
  source 1..22: mol_type = other DNA
agtagattcttaatccatgagt

SEQ ID NO: 39048 - DNA, 22 bp, synthetic construct
  misc_feature 1..22: note = chemically synthesized
  source 1..22: mol_type = other DNA
ttaatccatgagtgttctgtgc

SEQ ID NO: 39049 - DNA, 22 bp, synthetic construct
  misc_feature 1..22: note = chemically synthesized
  source 1..22: mol_type = other DNA
aatccatgagtgttctgtgcgt

SEQ ID NO: 39050 - DNA, 22 bp, synthetic construct
  misc_feature 1..22: note = chemically synthesized
  source 1..22: mol_type = other DNA
atccatgagtgttctgtgcgtg

SEQ ID NO: 39051 - DNA, 22 bp, synthetic construct
  misc_feature 1..22: note = chemically synthesized
  source 1..22: mol_type = other DNA
tgtgcgtgttgcaagagaaacc

SEQ ID NO: 39052 - DNA, 22 bp, synthetic construct
  misc_feature 1..22: note = chemically synthesized
  source 1..22: mol_type = other DNA
tgcgtgttgcaagagaaaccat

SEQ ID NO: 39053 - DNA, 22 bp, synthetic construct
  misc_feature 1..22: note = chemically synthesized
  source 1..22: mol_type = other DNA
caagagaaaccatgcactggtg

SEQ ID NO: 39054 - DNA, 22 bp, synthetic construct
  misc_feature 1..22: note = chemically synthesized
  source 1..22: mol_type = other DNA
gtgaatggctgtttgcaagttg

SEQ ID NO: 39055 - DNA, 22 bp, synthetic construct
  misc_feature 1..22: note = chemically synthesized
  source 1..22: mol_type = other DNA
tttgcaagttgtacatgtgtag

SEQ ID NO: 39056 - DNA, 22 bp, synthetic construct
  misc_feature 1..22: note = chemically synthesized
  source 1..22: mol_type = other DNA
gcaagttgtacatgtgtagctg

SEQ ID NO: 39057 - DNA, 22 bp, synthetic construct
  misc_feature 1..22: note = chemically synthesized
  source 1..22: mol_type = other DNA
caagttgtacatgtgtagctgc

SEQ ID NO: 39058 - DNA, 22 bp, synthetic construct
  misc_feature 1..22: note = chemically synthesized
  source 1..22: mol_type = other DNA
tacatgtgtagctgctgggctc

SEQ ID NO: 39059 - DNA, 22 bp, synthetic construct
  misc_feature 1..22: note = chemically synthesized
  source 1..22: mol_type = other DNA
ctgggctcatctttacctgcaa

SEQ ID NO: 39060 - DNA, 22 bp, synthetic construct
  misc_feature 1..22: note = chemically synthesized
  source 1..22: mol_type = other DNA
ggctcatctttacctgcaaaat

SEQ ID NO: 39061 - DNA, 22 bp, synthetic construct
  misc_feature 1..22: note = chemically synthesized
  source 1..22: mol_type = other DNA
atctttacctgcaaaataatac

SEQ ID NO: 39062 - DNA, 22 bp, synthetic construct
  misc_feature 1..22: note = chemically synthesized
  source 1..22: mol_type = other DNA
tacctgcaaaataatacaacac

SEQ ID NO: 39063 - DNA, 22 bp, synthetic construct
  misc_feature 1..22: note = chemically synthesized
  source 1..22: mol_type = other DNA
acctgcaaaataatacaacacc

SEQ ID NO: 39064 - DNA, 22 bp, synthetic construct
  misc_feature 1..22: note = chemically synthesized
  source 1..22: mol_type = other DNA
cctgcaaaataatacaacacca

SEQ ID NO: 39065 - DNA, 22 bp, synthetic construct
  misc_feature 1..22: note = chemically synthesized
  source 1..22: mol_type = other DNA
caaaataatacaacaccaacat

SEQ ID NO: 39066 - DNA, 22 bp, synthetic construct
  misc_feature 1..22: note = chemically synthesized
  source 1..22: mol_type = other DNA
aatcactgaggcgggcatcagc

SEQ ID NO: 39067 - DNA, 22 bp, synthetic construct
  misc_feature 1..22: note = chemically synthesized
  source 1..22: mol_type = other DNA
atcactgaggcgggcatcagca

SEQ ID NO: 39068 - DNA, 22 bp, synthetic construct
  misc_feature 1..22: note = chemically synthesized
  source 1..22: mol_type = other DNA
aggcgggcatcagcaattgctt

SEQ ID NO: 39069 - DNA, 22 bp, synthetic construct
  misc_feature 1..22: note = chemically synthesized
  source 1..22: mol_type = other DNA
cttatttatgttccacctccag

SEQ ID NO: 39070 - DNA, 22 bp, synthetic construct
  misc_feature 1..22: note = chemically synthesized
  source 1..22: mol_type = other DNA
atttatgttccacctccagcct

SEQ ID NO: 39071 - DNA, 22 bp, synthetic construct
  misc_feature 1..22: note = chemically synthesized
  source 1..22: mol_type = other DNA
tttatgttccacctccagcctt

SEQ ID NO: 39072 - DNA, 22 bp, synthetic construct
  misc_feature 1..22: note = chemically synthesized
  source 1..22: mol_type = other DNA
atgttccacctccagccttccc

SEQ ID NO: 39073 - DNA, 22 bp, synthetic construct
  misc_feature 1..22: note = chemically synthesized
  source 1..22: mol_type = other DNA
tgttccacctccagccttccct

SEQ ID NO: 39074 - DNA, 22 bp, synthetic construct
  misc_feature 1..22: note = chemically synthesized
  source 1..22: mol_type = other DNA
cacctccagccttccctgcccc

SEQ ID NO: 39075 - DNA, 22 bp, synthetic construct
  misc_feature 1..22: note = chemically synthesized
  source 1..22: mol_type = other DNA
cagccttccctgcccccacccc

SEQ ID NO: 39076 - DNA, 22 bp, synthetic construct
  misc_feature 1..22: note = chemically synthesized
  source 1..22: mol_type = other DNA
ccctgcccccacccctcaaccc

SEQ ID NO: 39077 - DNA, 22 bp, synthetic construct
  misc_feature 1..22: note = chemically synthesized
  source 1..22: mol_type = other DNA
cctgcccccacccctcaacccc

SEQ ID NO: 39078 - DNA, 22 bp, synthetic construct
  misc_feature 1..22: note = chemically synthesized
  source 1..22: mol_type = other DNA
cccccacccctcaaccccaagg

SEQ ID NO: 39079 - DNA, 22 bp, synthetic construct
  misc_feature 1..22: note = chemically synthesized
  source 1..22: mol_type = other DNA
aaccccaaggcctaagccctca

SEQ ID NO: 39080 - DNA, 22 bp, synthetic construct
  misc_feature 1..22: note = chemically synthesized
  source 1..22: mol_type = other DNA
agccctcactgacctaccccct

SEQ ID NO: 39081 - DNA, 22 bp, synthetic construct
  misc_feature 1..22: note = chemically synthesized
  source 1..22: mol_type = other DNA
actgacctaccccctgtgcctg

SEQ ID NO: 39082 - DNA, 22 bp, synthetic construct
  misc_feature 1..22: note = chemically synthesized
  source 1..22: mol_type = other DNA
acctaccccctgtgcctggcac

SEQ ID NO: 39083 - DNA, 22 bp, synthetic construct
  misc_feature 1..22: note = chemically synthesized
  source 1..22: mol_type = other DNA
ccccctgtgcctggcacgtctg

SEQ ID NO: 39084 - DNA, 22 bp, synthetic construct
  misc_feature 1..22: note = chemically synthesized
  source 1..22: mol_type = other DNA
tgcctggcacgtctgagcatgg

SEQ ID NO: 39085 - DNA, 22 bp, synthetic construct
  misc_feature 1..22: note = chemically synthesized
  source 1..22: mol_type = other DNA
gcacgtctgagcatgggtaccc

SEQ ID NO: 39086 - DNA, 22 bp, synthetic construct
  misc_feature 1..22: note = chemically synthesized
  source 1..22: mol_type = other DNA
agcatgggtacccagtaaatat

SEQ ID NO: 39087 - DNA, 22 bp, synthetic construct
  misc_feature 1..22: note = chemically synthesized
  source 1..22: mol_type = other DNA
gtccaattgatcttcctgccat

SEQ ID NO: 39088 - DNA, 22 bp, synthetic construct
  misc_feature 1..22: note = chemically synthesized
  source 1..22: mol_type = other DNA
atcttcctgccattaaactcag

SEQ ID NO: 39089 - DNA, 22 bp, synthetic construct
  misc_feature 1..22: note = chemically synthesized
  source 1..22: mol_type = other DNA
cctgccattaaactcagttcta

SEQ ID NO: 39090 - DNA, 22 bp, synthetic construct
  misc_feature 1..22: note = chemically synthesized
  source 1..22: mol_type = other DNA
ctgccattaaactcagttctag

SEQ ID NO: 39091 - DNA, 22 bp, synthetic construct
  misc_feature 1..22: note = chemically synthesized
  source 1..22: mol_type = other DNA
ccattaaactcagttctagaaa

SEQ ID NO: 39092 - DNA, 22 bp, synthetic construct
  misc_feature 1..22: note = chemically synthesized
  source 1..22: mol_type = other DNA
aactcagttctagaaattttat

SEQ ID NO: 39093 - DNA, 22 bp, synthetic construct
  misc_feature 1..22: note = chemically synthesized
  source 1..22: mol_type = other DNA
agttctagaaattttatatcca

SEQ ID NO: 39094 - DNA, 22 bp, synthetic construct
  misc_feature 1..22: note = chemically synthesized
  source 1..22: mol_type = other DNA
tagaaattttatatccaatccc

SEQ ID NO: 39095 - DNA, 22 bp, synthetic construct
  misc_feature 1..22: note = chemically synthesized
  source 1..22: mol_type = other DNA
gaaattttatatccaatcccca

SEQ ID NO: 39096 - DNA, 22 bp, synthetic construct
  misc_feature 1..22: note = chemically synthesized
  source 1..22: mol_type = other DNA
tatatccaatccccaaagcaga

SEQ ID NO: 39097 - DNA, 22 bp, synthetic construct
  misc_feature 1..22: note = chemically synthesized
  source 1..22: mol_type = other DNA
atatccaatccccaaagcagaa

SEQ ID NO: 39098 - DNA, 22 bp, synthetic construct
  misc_feature 1..22: note = chemically synthesized
  source 1..22: mol_type = other DNA
tatccaatccccaaagcagaaa

SEQ ID NO: 39099 - DNA, 22 bp, synthetic construct
  misc_feature 1..22: note = chemically synthesized
  source 1..22: mol_type = other DNA
accagttctggcttgaggatga

SEQ ID NO: 39100 - DNA, 22 bp, synthetic construct
  misc_feature 1..22: note = chemically synthesized
  source 1..22: mol_type = other DNA
tggcttgaggatgaaggtccct

SEQ ID NO: 39101 - DNA, 22 bp, synthetic construct
  misc_feature 1..22: note = chemically synthesized
  source 1..22: mol_type = other DNA
gcttgaggatgaaggtccctac

SEQ ID NO: 39102 - DNA, 22 bp, synthetic construct
  misc_feature 1..22: note = chemically synthesized
  source 1..22: mol_type = other DNA
gaggatgaaggtccctacattc

SEQ ID NO: 39103 - DNA, 22 bp, synthetic construct
  misc_feature 1..22: note = chemically synthesized
  source 1..22: mol_type = other DNA
aggatgaaggtccctacattct

SEQ ID NO: 39104 - DNA, 22 bp, synthetic construct
  misc_feature 1..22: note = chemically synthesized
  source 1..22: mol_type = other DNA
cattctaggcacctcaacaaat

SEQ ID NO: 39105 - DNA, 22 bp, synthetic construct
  misc_feature 1..22: note = chemically synthesized
  source 1..22: mol_type = other DNA
taggcacctcaacaaatgtctt

SEQ ID NO: 39106 - DNA, 22 bp, synthetic construct
  misc_feature 1..22: note = chemically synthesized
  source 1..22: mol_type = other DNA
ggcacctcaacaaatgtcttct

SEQ ID NO: 39107 - DNA, 22 bp, synthetic construct
  misc_feature 1..22: note = chemically synthesized
  source 1..22: mol_type = other DNA
aacaaatgtcttctaaactttc

SEQ ID NO: 39108 - DNA, 22 bp, synthetic construct
  misc_feature 1..22: note = chemically synthesized
  source 1..22: mol_type = other DNA
ctaaactttccagttccatcag

SEQ ID NO: 39109 - DNA, 22 bp, synthetic construct
  misc_feature 1..22: note = chemically synthesized
  source 1..22: mol_type = other DNA
taaactttccagttccatcagc

SEQ ID NO: 39110 - DNA, 22 bp, synthetic construct
  misc_feature 1..22: note = chemically synthesized
  source 1..22: mol_type = other DNA
aactttccagttccatcagctg

SEQ ID NO: 39111 - DNA, 22 bp, synthetic construct
  misc_feature 1..22: note = chemically synthesized
  source 1..22: mol_type = other DNA
tccagttccatcagctgtagtt

SEQ ID NO: 39112 - DNA, 22 bp, synthetic construct
  misc_feature 1..22: note = chemically synthesized
  source 1..22: mol_type = other DNA
ccagttccatcagctgtagttt

SEQ ID NO: 39113 - DNA, 22 bp, synthetic construct
  misc_feature 1..22: note = chemically synthesized
  source 1..22: mol_type = other DNA
cagttccatcagctgtagtttg

SEQ ID NO: 39114 - DNA, 22 bp, synthetic construct
  misc_feature 1..22: note = chemically synthesized
  source 1..22: mol_type = other DNA
catcagctgtagtttggggcaa

SEQ ID NO: 39115 - DNA, 22 bp, synthetic construct
  misc_feature 1..22: note = chemically synthesized
  source 1..22: mol_type = other DNA
tagtttggggcaagccatctca

SEQ ID NO: 39116 - DNA, 22 bp, synthetic construct
  misc_feature 1..22: note = chemically synthesized
  source 1..22: mol_type = other DNA
ggggcaagccatctcatctcca

SEQ ID NO: 39117 - DNA, 22 bp, synthetic construct
  misc_feature 1..22: note = chemically synthesized
  source 1..22: mol_type = other DNA
gggcaagccatctcatctccat

SEQ ID NO: 39118 - DNA, 22 bp, synthetic construct
  misc_feature 1..22: note = chemically synthesized
  source 1..22: mol_type = other DNA
atctccatgtgcctctgtttcc

SEQ ID NO: 39119 - DNA, 22 bp, synthetic construct
  misc_feature 1..22: note = chemically synthesized
  source 1..22: mol_type = other DNA
catgtgcctctgtttcctcctt

SEQ ID NO: 39120 - DNA, 22 bp, synthetic construct
  misc_feature 1..22: note = chemically synthesized
  source 1..22: mol_type = other DNA
tgtttcctccttgttaagtgag

SEQ ID NO: 39121 - DNA, 22 bp, synthetic construct
  misc_feature 1..22: note = chemically synthesized
  source 1..22: mol_type = other DNA
tttcctccttgttaagtgagaa

SEQ ID NO: 39122 - DNA, 22 bp, synthetic construct
  misc_feature 1..22: note = chemically synthesized
  source 1..22: mol_type = other DNA
cctccttgttaagtgagaaact

SEQ ID NO: 39123 - DNA, 22 bp, synthetic construct
  misc_feature 1..22: note = chemically synthesized
  source 1..22: mol_type = other DNA
ctccttgttaagtgagaaactt

SEQ ID NO: 39124 - DNA, 22 bp, synthetic construct
  misc_feature 1..22: note = chemically synthesized
  source 1..22: mol_type = other DNA
cttgttaagtgagaaacttgga

SEQ ID NO: 39125 - DNA, 22 bp, synthetic construct
  misc_feature 1..22: note = chemically synthesized
  source 1..22: mol_type = other DNA
gttaagtgagaaacttggacaa

SEQ ID NO: 39126 - DNA, 22 bp, synthetic construct
  misc_feature 1..22: note = chemically synthesized
  source 1..22: mol_type = other DNA
ttaagtgagaaacttggacaag

SEQ ID NO: 39127 - DNA, 22 bp, synthetic construct
  misc_feature 1..22: note = chemically synthesized
  source 1..22: mol_type = other DNA
agtgagaaacttggacaaggtg

SEQ ID NO: 39128 - DNA, 22 bp, synthetic construct
  misc_feature 1..22: note = chemically synthesized
  source 1..22: mol_type = other DNA
ggacaaggtgacccaaggaaac

SEQ ID NO: 39129 - DNA, 22 bp, synthetic construct
  misc_feature 1..22: note = chemically synthesized
  source 1..22: mol_type = other DNA
gacaaggtgacccaaggaaact

SEQ ID NO: 39130 - DNA, 22 bp, synthetic construct
  misc_feature 1..22: note = chemically synthesized
  source 1..22: mol_type = other DNA
tttggcttcctaaatcccagct

SEQ ID NO: 39131 - DNA, 22 bp, synthetic construct
  misc_feature 1..22: note = chemically synthesized
  source 1..22: mol_type = other DNA
ttggcttcctaaatcccagctt

SEQ ID NO: 39132 - DNA, 22 bp, synthetic construct
  misc_feature 1..22: note = chemically synthesized
  source 1..22: mol_type = other DNA
tggcttcctaaatcccagcttt

SEQ ID NO: 39133 - DNA, 22 bp, synthetic construct
  misc_feature 1..22: note = chemically synthesized
  source 1..22: mol_type = other DNA
ggcttcctaaatcccagctttc

SEQ ID NO: 39134 - DNA, 22 bp, synthetic construct
  misc_feature 1..22: note = chemically synthesized
  source 1..22: mol_type = other DNA
gcttcctaaatcccagctttct

SEQ ID NO: 39135 - DNA, 22 bp, synthetic construct
  misc_feature 1..22: note = chemically synthesized
  source 1..22: mol_type = other DNA
cctaaatcccagctttctattc

SEQ ID NO: 39136 - DNA, 22 bp, synthetic construct
  misc_feature 1..22: note = chemically synthesized
  source 1..22: mol_type = other DNA
ctaaatcccagctttctattcc

SEQ ID NO: 39137 - DNA, 22 bp, synthetic construct
  misc_feature 1..22: note = chemically synthesized
  source 1..22: mol_type = other DNA
aatcccagctttctattccccc

SEQ ID NO: 39138 - DNA, 22 bp, synthetic construct
  misc_feature 1..22: note = chemically synthesized
  source 1..22: mol_type = other DNA
tctattcccccctgggtgacag

SEQ ID NO: 39139 - DNA, 22 bp, synthetic construct
  misc_feature 1..22: note = chemically synthesized
  source 1..22: mol_type = other DNA
ctattcccccctgggtgacagg

SEQ ID NO: 39140 - DNA, 22 bp, synthetic construct
  misc_feature 1..22: note = chemically synthesized
  source 1..22: mol_type = other DNA
tattcccccctgggtgacaggt

SEQ ID NO: 39141 - DNA, 22 bp, synthetic construct
  misc_feature 1..22: note = chemically synthesized
  source 1..22: mol_type = other DNA
ttcccccctgggtgacaggtga

SEQ ID NO: 39142 - DNA, 22 bp, synthetic construct
  misc_feature 1..22: note = chemically synthesized
  source 1..22: mol_type = other DNA
ccccctgggtgacaggtgaact

SEQ ID NO: 39143 - DNA, 22 bp, synthetic construct
  misc_feature 1..22: note = chemically synthesized
  source 1..22: mol_type = other DNA
ggtgacaggtgaactttctaaa

SEQ ID NO: 39144 - DNA, 22 bp, synthetic construct
  misc_feature 1..22: note = chemically synthesized
  source 1..22: mol_type = other DNA
tctaaataggcaaacatttcat

SEQ ID NO: 39145 - DNA, 22 bp, synthetic construct
  misc_feature 1..22: note = chemically synthesized
  source 1..22: mol_type = other DNA
ctaaataggcaaacatttcata

SEQ ID NO: 39146 - DNA, 22 bp, synthetic construct
  misc_feature 1..22: note = chemically synthesized
  source 1..22: mol_type = other DNA
taaataggcaaacatttcatag

SEQ ID NO: 39147 - DNA, 22 bp, synthetic construct
  misc_feature 1..22: note = chemically synthesized
  source 1..22: mol_type = other DNA
aataggcaaacatttcatagag

SEQ ID NO: 39148 - DNA, 22 bp, synthetic construct
  misc_feature 1..22: note = chemically synthesized
  source 1..22: mol_type = other DNA
catagaggtatcaaaaaagggg

SEQ ID NO: 39149 - DNA, 22 bp, synthetic construct
  misc_feature 1..22: note = chemically synthesized
  source 1..22: mol_type = other DNA
atagaggtatcaaaaaagggga

SEQ ID NO: 39150 - DNA, 22 bp, synthetic construct
  misc_feature 1..22: note = chemically synthesized
  source 1..22: mol_type = other DNA
actacaatgttctatggcccta

SEQ ID NO: 39151 - DNA, 22 bp, synthetic construct
  misc_feature 1..22: note = chemically synthesized
  source 1..22: mol_type = other DNA
caatgttctatggccctaaaga

SEQ ID NO: 39152 - DNA, 22 bp, synthetic construct
  misc_feature 1..22: note = chemically synthesized
  source 1..22: mol_type = other DNA
tatggccctaaagatgctttca

SEQ ID NO: 39153 - DNA, 22 bp, synthetic construct
  misc_feature 1..22: note = chemically synthesized
  source 1..22: mol_type = other DNA
tggccctaaagatgctttcagc

SEQ ID NO: 39154 - DNA, 22 bp, synthetic construct
  misc_feature 1..22: note = chemically synthesized
  source 1..22: mol_type = other DNA
aagatgctttcagcattagcct

SEQ ID NO: 39155 - DNA, 22 bp, synthetic construct
  misc_feature 1..22: note = chemically synthesized
  source 1..22: mol_type = other DNA
tcagcattagcctgaaacacac

SEQ ID NO: 39156 - DNA, 22 bp, synthetic construct
  misc_feature 1..22: note = chemically synthesized
  source 1..22: mol_type = other DNA
cagcattagcctgaaacacact

SEQ ID NO: 39157 - DNA, 22 bp, synthetic construct
  misc_feature 1..22: note = chemically synthesized
  source 1..22: mol_type = other DNA
agcattagcctgaaacacacta

SEQ ID NO: 39158 - DNA, 22 bp, synthetic construct
  misc_feature 1..22: note = chemically synthesized
  source 1..22: mol_type = other DNA
gcctgaaacacactaattgttg

SEQ ID NO: 39159 - DNA, 22 bp, synthetic construct
  misc_feature 1..22: note = chemically synthesized
  source 1..22: mol_type = other DNA
aaacacactaattgttgatatt

SEQ ID NO: 39160 - DNA, 22 bp, synthetic construct
  misc_feature 1..22: note = chemically synthesized
  source 1..22: mol_type = other DNA
attgttgatattgttaaaatga

SEQ ID NO: 39161 - DNA, 22 bp, synthetic construct
  misc_feature 1..22: note = chemically synthesized
  source 1..22: mol_type = other DNA
ttgatattgttaaaatgagagg

SEQ ID NO: 39162 - DNA, 22 bp, synthetic construct
  misc_feature 1..22: note = chemically synthesized
  source 1..22: mol_type = other DNA
atattgttaaaatgagagggta

SEQ ID NO: 39163 - DNA, 22 bp, synthetic construct
  misc_feature 1..22: note = chemically synthesized
  source 1..22: mol_type = other DNA
ttaaaatgagagggtactcata

SEQ ID NO: 39164 - DNA, 22 bp, synthetic construct
  misc_feature 1..22: note = chemically synthesized
  source 1..22: mol_type = other DNA
aaatgagagggtactcataaaa

SEQ ID NO: 39165 - DNA, 22 bp, synthetic construct
  misc_feature 1..22: note = chemically synthesized
  source 1..22: mol_type = other DNA
ataaaatacttccgtggaaaaa

SEQ ID NO: 39166 - DNA, 22 bp, synthetic construct
  misc_feature 1..22: note = chemically synthesized
  source 1..22: mol_type = other DNA
ccgtggaaaaaagactagcaac

SEQ ID NO: 39167 - DNA, 22 bp, synthetic construct
  misc_feature 1..22: note = chemically synthesized
  source 1..22: mol_type = other DNA
cgtggaaaaaagactagcaaca

SEQ ID NO: 39168 - DNA, 22 bp, synthetic construct
  misc_feature 1..22: note = chemically synthesized
  source 1..22: mol_type = other DNA
gcaacattctcacaccccagac

SEQ ID NO: 39169 - DNA, 22 bp, synthetic construct
  misc_feature 1..22: note = chemically synthesized
  source 1..22: mol_type = other DNA
tcacaccccagactgtgggagg

SEQ ID NO: 39170 - DNA, 22 bp, synthetic construct
  misc_feature 1..22: note = chemically synthesized
  source 1..22: mol_type = other DNA
acaccccagactgtgggaggat

SEQ ID NO: 39171 - DNA, 22 bp, synthetic construct
  misc_feature 1..22: note = chemically synthesized
  source 1..22: mol_type = other DNA
tgggaggatcagtgagtcccaa

SEQ ID NO: 39172 - DNA, 22 bp, synthetic construct
  misc_feature 1..22: note = chemically synthesized
  source 1..22: mol_type = other DNA
tggttccacaacaccccatggg

SEQ ID NO: 39173 - DNA, 22 bp, synthetic construct
  misc_feature 1..22: note = chemically synthesized
  source 1..22: mol_type = other DNA
ggttccacaacaccccatgggg

SEQ ID NO: 39174 - DNA, 22 bp, synthetic construct
  misc_feature 1..22: note = chemically synthesized
  source 1..22: mol_type = other DNA
gttccacaacaccccatgggga

SEQ ID NO: 39175 - DNA, 22 bp, synthetic construct
  misc_feature 1..22: note = chemically synthesized
  source 1..22: mol_type = other DNA
cacaacaccccatggggacgtc

SEQ ID NO: 39176 - DNA, 22 bp, synthetic construct
  misc_feature 1..22: note = chemically synthesized
  source 1..22: mol_type = other DNA
ttatctcaaagaatgtttaaaa

SEQ ID NO: 39177 - DNA, 22 bp, synthetic construct
  misc_feature 1..22: note = chemically synthesized
  source 1..22: mol_type = other DNA
tatctcaaagaatgtttaaaaa

SEQ ID NO: 39178 - DNA, 22 bp, synthetic construct
  misc_feature 1..22: note = chemically synthesized
  source 1..22: mol_type = other DNA
atctcaaagaatgtttaaaaaa

SEQ ID NO: 39179 - DNA, 22 bp, synthetic construct
  misc_feature 1..22: note = chemically synthesized
  source 1..22: mol_type = other DNA
tctcaaagaatgtttaaaaaat

SEQ ID NO: 39180 - DNA, 22 bp, synthetic construct
  misc_feature 1..22: note = chemically synthesized
  source 1..22: mol_type = other DNA
aaagaatgtttaaaaaatctga

SEQ ID NO: 39181 - DNA, 22 bp, synthetic construct
  misc_feature 1..22: note = chemically synthesized
  source 1..22: mol_type = other DNA
aaaaaatctgaaagaaaaactt

SEQ ID NO: 39182 - DNA, 22 bp, synthetic construct
  misc_feature 1..22: note = chemically synthesized
  source 1..22: mol_type = other DNA
aaaaatctgaaagaaaaacttc

SEQ ID NO: 39183 - DNA, 22 bp, synthetic construct
  misc_feature 1..22: note = chemically synthesized
  source 1..22: mol_type = other DNA
aaagaaaaacttcattcagatt

SEQ ID NO: 39184 - DNA, 22 bp, synthetic construct
  misc_feature 1..22: note = chemically synthesized
  source 1..22: mol_type = other DNA
cattcagatttaacggataggc

SEQ ID NO: 39185 - DNA, 22 bp, synthetic construct
  misc_feature 1..22: note = chemically synthesized
  source 1..22: mol_type = other DNA
attcagatttaacggataggct

SEQ ID NO: 39186 - DNA, 22 bp, synthetic construct
  misc_feature 1..22: note = chemically synthesized
  source 1..22: mol_type = other DNA
agatttaacggataggctgtat

SEQ ID NO: 39187 - DNA, 22 bp, synthetic construct
  misc_feature 1..22: note = chemically synthesized
  source 1..22: mol_type = other DNA
aacggataggctgtatccaatc

SEQ ID NO: 39188 - DNA, 22 bp, synthetic construct
  misc_feature 1..22: note = chemically synthesized
  source 1..22: mol_type = other DNA
acggataggctgtatccaatct

SEQ ID NO: 39189 - DNA, 22 bp, synthetic construct
  misc_feature 1..22: note = chemically synthesized
  source 1..22: mol_type = other DNA
tatccaatctttaggagttgtc

SEQ ID NO: 39190 - DNA, 22 bp, synthetic construct
  misc_feature 1..22: note = chemically synthesized
  source 1..22: mol_type = other DNA
taggagttgtcccccggtcaga

SEQ ID NO: 39191 - DNA, 22 bp, synthetic construct
  misc_feature 1..22: note = chemically synthesized
  source 1..22: mol_type = other DNA
aggagttgtcccccggtcagac

SEQ ID NO: 39192 - DNA, 22 bp, synthetic construct
  misc_feature 1..22: note = chemically synthesized
  source 1..22: mol_type = other DNA
ggagttgtcccccggtcagaca

SEQ ID NO: 39193 - DNA, 22 bp, synthetic construct
  misc_feature 1..22: note = chemically synthesized
  source 1..22: mol_type = other DNA
tcccccggtcagacaaatgcaa

SEQ ID NO: 39194 - DNA, 22 bp, synthetic construct
  misc_feature 1..22: note = chemically synthesized
  source 1..22: mol_type = other DNA
gaaaagttaggaggagtggctg

SEQ ID NO: 39195 - DNA, 22 bp, synthetic construct
  misc_feature 1..22: note = chemically synthesized
  source 1..22: mol_type = other DNA
ggaggagtggctggtgccgact

SEQ ID NO: 39196 - DNA, 22 bp, synthetic construct
  misc_feature 1..22: note = chemically synthesized
  source 1..22: mol_type = other DNA
gtgccgacttaagcagacacag

SEQ ID NO: 39197 - DNA, 22 bp, synthetic construct
  misc_feature 1..22: note = chemically synthesized
  source 1..22: mol_type = other DNA
aagcagacacagcatcctagtt

SEQ ID NO: 39198 - DNA, 22 bp, synthetic construct
  misc_feature 1..22: note = chemically synthesized
  source 1..22: mol_type = other DNA
agcagacacagcatcctagttt

SEQ ID NO: 39199 - DNA, 22 bp, synthetic construct
  misc_feature 1..22: note = chemically synthesized
  source 1..22: mol_type = other DNA
gtttaaggaacagttaaaacag

SEQ ID NO: 39200 - DNA, 22 bp, synthetic construct
  misc_feature 1..22: note = chemically synthesized
  source 1..22: mol_type = other DNA
aaggaacagttaaaacagccag

SEQ ID NO: 39201 - DNA, 22 bp, synthetic construct
  misc_feature 1..22: note = chemically synthesized
  source 1..22: mol_type = other DNA
aggaacagttaaaacagccagc

SEQ ID NO: 39202 - DNA, 22 bp, synthetic construct
  misc_feature 1..22: note = chemically synthesized
  source 1..22: mol_type = other DNA
aaacagccagcgccatgacagg

SEQ ID NO: 39203 - DNA, 22 bp, synthetic construct
  misc_feature 1..22: note = chemically synthesized
  source 1..22: mol_type = other DNA
agaaatgctacactatcctcct

SEQ ID NO: 39204 - DNA, 22 bp, synthetic construct
  misc_feature 1..22: note = chemically synthesized
  source 1..22: mol_type = other DNA
cactatcctcctcctcattgtt

SEQ ID NO: 39205 - DNA, 22 bp, synthetic construct
  misc_feature 1..22: note = chemically synthesized
  source 1..22: mol_type = other DNA
tcctcctcctcattgttttgag

SEQ ID NO: 39206 - DNA, 22 bp, synthetic construct
  misc_feature 1..22: note = chemically synthesized
  source 1..22: mol_type = other DNA
ctcctcattgttttgagaggct

SEQ ID NO: 39207 - DNA, 22 bp, synthetic construct
  misc_feature 1..22: note = chemically synthesized
  source 1..22: mol_type = other DNA
ctcattgttttgagaggctaac

SEQ ID NO: 39208 - DNA, 22 bp, synthetic construct
  misc_feature 1..22: note = chemically synthesized
  source 1..22: mol_type = other DNA
attgttttgagaggctaacaac

SEQ ID NO: 39209 - DNA, 22 bp, synthetic construct
  misc_feature 1..22: note = chemically synthesized
  source 1..22: mol_type = other DNA
ttttgagaggctaacaacgtga

SEQ ID NO: 39210 - DNA, 22 bp, synthetic construct
  misc_feature 1..22: note = chemically synthesized
  source 1..22: mol_type = other DNA
tgagaggctaacaacgtgaacc

SEQ ID NO: 39211 - DNA, 22 bp, synthetic construct
  misc_feature 1..22: note = chemically synthesized
  source 1..22: mol_type = other DNA
gagaggctaacaacgtgaacca

SEQ ID NO: 39212 - DNA, 22 bp, synthetic construct
  misc_feature 1..22: note = chemically synthesized
  source 1..22: mol_type = other DNA
agaggctaacaacgtgaaccaa

SEQ ID NO: 39213 - DNA, 22 bp, synthetic construct
  misc_feature 1..22: note = chemically synthesized
  source 1..22: mol_type = other DNA
acaacgtgaaccaaattataca

SEQ ID NO: 39214 - DNA, 22 bp, synthetic construct
  misc_feature 1..22: note = chemically synthesized
  source 1..22: mol_type = other DNA
tacaacatcctgcgccctcggc

SEQ ID NO: 39215 - DNA, 22 bp, synthetic construct
  misc_feature 1..22: note = chemically synthesized
  source 1..22: mol_type = other DNA
cgccctcggctgggactcagct

SEQ ID NO: 39216 - DNA, 22 bp, synthetic construct
  misc_feature 1..22: note = chemically synthesized
  source 1..22: mol_type = other DNA
ggctgggactcagctccagttg

SEQ ID NO: 39217 - DNA, 22 bp, synthetic construct
  misc_feature 1..22: note = chemically synthesized
  source 1..22: mol_type = other DNA
ggactcagctccagttgagaaa

SEQ ID NO: 39218 - DNA, 22 bp, synthetic construct
  misc_feature 1..22: note = chemically synthesized
  source 1..22: mol_type = other DNA
agctccagttgagaaagaaaca

SEQ ID NO: 39219 - DNA, 22 bp, synthetic construct
  misc_feature 1..22: note = chemically synthesized
  source 1..22: mol_type = other DNA
cagttgagaaagaaacagaaag

SEQ ID NO: 39220 - DNA, 22 bp, synthetic construct
  misc_feature 1..22: note = chemically synthesized
  source 1..22: mol_type = other DNA
agaaagaaacagaaagatacag

SEQ ID NO: 39221 - DNA, 22 bp, synthetic construct
  misc_feature 1..22: note = chemically synthesized
  source 1..22: mol_type = other DNA
agctagtcaactctggccagta

SEQ ID NO: 39222 - DNA, 22 bp, synthetic construct
  misc_feature 1..22: note = chemically synthesized
  source 1..22: mol_type = other DNA
gtcaactctggccagtagccaa

SEQ ID NO: 39223 - DNA, 22 bp, synthetic construct
  misc_feature 1..22: note = chemically synthesized
  source 1..22: mol_type = other DNA
tggccagtagccaagccgtctg

SEQ ID NO: 39224 - DNA, 22 bp, synthetic construct
  misc_feature 1..22: note = chemically synthesized
  source 1..22: mol_type = other DNA
gccagtagccaagccgtctgga

SEQ ID NO: 39225 - DNA, 22 bp, synthetic construct
  misc_feature 1..22: note = chemically synthesized
  source 1..22: mol_type = other DNA
gagaggggccctgcttaagtca

SEQ ID NO: 39226 - DNA, 22 bp, synthetic construct
  misc_feature 1..22: note = chemically synthesized
  source 1..22: mol_type = other DNA
cttaagtcacattatttccctt

SEQ ID NO: 39227 - DNA, 22 bp, synthetic construct
  misc_feature 1..22: note = chemically synthesized
  source 1..22: mol_type = other DNA
aagtcacattatttcccttgct

SEQ ID NO: 39228 - DNA, 22 bp, synthetic construct
  misc_feature 1..22: note = chemically synthesized
  source 1..22: mol_type = other DNA
agtcacattatttcccttgctg

SEQ ID NO: 39229 - DNA, 22 bp, synthetic construct
  misc_feature 1..22: note = chemically synthesized
  source 1..22: mol_type = other DNA
tttcccttgctgaaaagaaccc

SEQ ID NO: 39230 - DNA, 22 bp, synthetic construct
  misc_feature 1..22: note = chemically synthesized
  source 1..22: mol_type = other DNA
cccttgctgaaaagaacccaag

SEQ ID NO: 39231 - DNA, 22 bp, synthetic construct
  misc_feature 1..22: note = chemically synthesized
  source 1..22: mol_type = other DNA
ccttgctgaaaagaacccaaga

SEQ ID NO: 39232 - DNA, 22 bp, synthetic construct
  misc_feature 1..22: note = chemically synthesized
  source 1..22: mol_type = other DNA
gctgaaaagaacccaagagtgg

SEQ ID NO: 39233 - DNA, 22 bp, synthetic construct
  misc_feature 1..22: note = chemically synthesized
  source 1..22: mol_type = other DNA
ctgaaaagaacccaagagtggt

SEQ ID NO: 39234 - DNA, 22 bp, synthetic construct
  misc_feature 1..22: note = chemically synthesized
  source 1..22: mol_type = other DNA
aaaagaacccaagagtggtaaa

SEQ ID NO: 39235 - DNA, 22 bp, synthetic construct
  misc_feature 1..22: note = chemically synthesized
  source 1..22: mol_type = other DNA
tggcaaagaagggccagcttga

SEQ ID NO: 39236 - DNA, 22 bp, synthetic construct
  misc_feature 1..22: note = chemically synthesized
  source 1..22: mol_type = other DNA
ggcaaagaagggccagcttgac

SEQ ID NO: 39237 - DNA, 22 bp, synthetic construct
  misc_feature 1..22: note = chemically synthesized
  source 1..22: mol_type = other DNA
gcaaagaagggccagcttgact

SEQ ID NO: 39238 - DNA, 22 bp, synthetic construct
  misc_feature 1..22: note = chemically synthesized
  source 1..22: mol_type = other DNA
gacttcacaaaatatttcattt

SEQ ID NO: 39239 - DNA, 22 bp, synthetic construct
  misc_feature 1..22: note = chemically synthesized
  source 1..22: mol_type = other DNA
acttcacaaaatatttcatttg

SEQ ID NO: 39240 - DNA, 22 bp, synthetic construct
  misc_feature 1..22: note = chemically synthesized
  source 1..22: mol_type = other DNA
cacaaaatatttcatttgggga

SEQ ID NO: 39241 - DNA, 22 bp, synthetic construct
  misc_feature 1..22: note = chemically synthesized
  source 1..22: mol_type = other DNA
acaaaatatttcatttggggag

SEQ ID NO: 39242 - DNA, 22 bp, synthetic construct
  misc_feature 1..22: note = chemically synthesized
  source 1..22: mol_type = other DNA
catttggggagatggctaaatt

SEQ ID NO: 39243 - DNA, 22 bp, synthetic construct
  misc_feature 1..22: note = chemically synthesized
  source 1..22: mol_type = other DNA
atttggggagatggctaaatta

SEQ ID NO: 39244 - DNA, 22 bp, synthetic construct
  misc_feature 1..22: note = chemically synthesized
  source 1..22: mol_type = other DNA
ggggagatggctaaattaaata

SEQ ID NO: 39245 - DNA, 22 bp, synthetic construct
  misc_feature 1..22: note = chemically synthesized
  source 1..22: mol_type = other DNA
gggagatggctaaattaaatat

SEQ ID NO: 39246 - DNA, 22 bp, synthetic construct
  misc_feature 1..22: note = chemically synthesized
  source 1..22: mol_type = other DNA
aattaaatatatatggggagat

SEQ ID NO: 39247 - DNA, 22 bp, synthetic construct
  misc_feature 1..22: note = chemically synthesized
  source 1..22: mol_type = other DNA
aatatatatggggagatagcta

SEQ ID NO: 39248 - DNA, 22 bp, synthetic construct
  misc_feature 1..22: note = chemically synthesized
  source 1..22: mol_type = other DNA
cattaaatatatatatatatgg

SEQ ID NO: 39249 - DNA, 22 bp, synthetic construct
  misc_feature 1..22: note = chemically synthesized
  source 1..22: mol_type = other DNA
aatatatatatatatggaataa

SEQ ID NO: 39250 - DNA, 22 bp, synthetic construct
  misc_feature 1..22: note = chemically synthesized
  source 1..22: mol_type = other DNA
accaacagtttactagtcaact

SEQ ID NO: 39251 - DNA, 22 bp, synthetic construct
  misc_feature 1..22: note = chemically synthesized
  source 1..22: mol_type = other DNA
actagtcaactgcaacattaaa

SEQ ID NO: 39252 - DNA, 22 bp, synthetic construct
  misc_feature 1..22: note = chemically synthesized
  source 1..22: mol_type = other DNA
ctagtcaactgcaacattaaaa

SEQ ID NO: 39253 - DNA, 22 bp, synthetic construct
  misc_feature 1..22: note = chemically synthesized
  source 1..22: mol_type = other DNA
gtcaactgcaacattaaaaagg

SEQ ID NO: 39254 - DNA, 22 bp, synthetic construct
  misc_feature 1..22: note = chemically synthesized
  source 1..22: mol_type = other DNA
caacattaaaaagggcagaagt

SEQ ID NO: 39255 - DNA, 22 bp, synthetic construct
  misc_feature 1..22: note = chemically synthesized
  source 1..22: mol_type = other DNA
aaaagggcagaagtaatggtag

SEQ ID NO: 39256 - DNA, 22 bp, synthetic construct
  misc_feature 1..22: note = chemically synthesized
  source 1..22: mol_type = other DNA
cccagagattctgaaaaaaaaa

SEQ ID NO: 39257 - DNA, 22 bp, synthetic construct
  misc_feature 1..22: note = chemically synthesized
  source 1..22: mol_type = other DNA
ccagagattctgaaaaaaaaag

SEQ ID NO: 39258 - DNA, 22 bp, synthetic construct
  misc_feature 1..22: note = chemically synthesized
  source 1..22: mol_type = other DNA
tgaaaaaaaaagccttaaaata

SEQ ID NO: 39259 - DNA, 22 bp, synthetic construct
  misc_feature 1..22: note = chemically synthesized
  source 1..22: mol_type = other DNA
aaaaaaaaagccttaaaatata

SEQ ID NO: 39260 - DNA, 22 bp, synthetic construct
  misc_feature 1..22: note = chemically synthesized
  source 1..22: mol_type = other DNA
aaaatataactgagaaataaca

SEQ ID NO: 39261 - DNA, 22 bp, synthetic construct
  misc_feature 1..22: note = chemically synthesized
  source 1..22: mol_type = other DNA
aaatataactgagaaataacaa

SEQ ID NO: 39262 - DNA, 22 bp, synthetic construct
  misc_feature 1..22: note = chemically synthesized
  source 1..22: mol_type = other DNA
agaaataacaaacttttctcct

SEQ ID NO: 39263 - DNA, 22 bp, synthetic construct
  misc_feature 1..22: note = chemically synthesized
  source 1..22: mol_type = other DNA
ttctccttcttttaaaagaagg

SEQ ID NO: 39264 - DNA, 22 bp, synthetic construct
  misc_feature 1..22: note = chemically synthesized
  source 1..22: mol_type = other DNA
tctccttcttttaaaagaaggg

SEQ ID NO: 39265 - DNA, 22 bp, synthetic construct
  misc_feature 1..22: note = chemically synthesized
  source 1..22: mol_type = other DNA
ctccttcttttaaaagaagggc

SEQ ID NO: 39266 - DNA, 22 bp, synthetic construct
  misc_feature 1..22: note = chemically synthesized
  source 1..22: mol_type = other DNA
tccttcttttaaaagaagggct

SEQ ID NO: 39267 - DNA, 22 bp, synthetic construct
  misc_feature 1..22: note = chemically synthesized
  source 1..22: mol_type = other DNA
cttcttttaaaagaagggctgc

SEQ ID NO: 39268 - DNA, 22 bp, synthetic construct
  misc_feature 1..22: note = chemically synthesized
  source 1..22: mol_type = other DNA
cttttaaaagaagggctgcaag

SEQ ID NO: 39269 - DNA, 22 bp, synthetic construct
  misc_feature 1..22: note = chemically synthesized
  source 1..22: mol_type = other DNA
ttttaaaagaagggctgcaaga

SEQ ID NO: 39270 - DNA, 22 bp, synthetic construct
  misc_feature 1..22: note = chemically synthesized
  source 1..22: mol_type = other DNA
ttaaaagaagggctgcaagagt

SEQ ID NO: 39271 - DNA, 22 bp, synthetic construct
  misc_feature 1..22: note = chemically synthesized
  source 1..22: mol_type = other DNA
taaaagaagggctgcaagagtt

SEQ ID NO: 39272 - DNA, 22 bp, synthetic construct
  misc_feature 1..22: note = chemically synthesized
  source 1..22: mol_type = other DNA
aaaagaagggctgcaagagttc

SEQ ID NO: 39273 - DNA, 22 bp, synthetic construct
  misc_feature 1..22: note = chemically synthesized
  source 1..22: mol_type = other DNA
aaagaagggctgcaagagttct

SEQ ID NO: 39274 - DNA, 22 bp, synthetic construct
  misc_feature 1..22: note = chemically synthesized
  source 1..22: mol_type = other DNA
caagagttctttaaggccacag

SEQ ID NO: 39275 - DNA, 22 bp, synthetic construct
  misc_feature 1..22: note = chemically synthesized
  source 1..22: mol_type = other DNA
tttaaggccacagctagtattt

SEQ ID NO: 39276 - DNA, 22 bp, synthetic construct
  misc_feature 1..22: note = chemically synthesized
  source 1..22: mol_type = other DNA
taaggccacagctagtatttgt

SEQ ID NO: 39277 - DNA, 22 bp, synthetic construct
  misc_feature 1..22: note = chemically synthesized
  source 1..22: mol_type = other DNA
aaggccacagctagtatttgtc

SEQ ID NO: 39278 - DNA, 22 bp, synthetic construct
  misc_feature 1..22: note = chemically synthesized
  source 1..22: mol_type = other DNA
aggccacagctagtatttgtca

SEQ ID NO: 39279 - DNA, 22 bp, synthetic construct
  misc_feature 1..22: note = chemically synthesized
  source 1..22: mol_type = other DNA
gtatttgtcagtaactttctaa

SEQ ID NO: 39280 - DNA, 22 bp, synthetic construct
  misc_feature 1..22: note = chemically synthesized
  source 1..22: mol_type = other DNA
gtcagtaactttctaagaagga

SEQ ID NO: 39281 - DNA, 22 bp, synthetic construct
  misc_feature 1..22: note = chemically synthesized
  source 1..22: mol_type = other DNA
tcagtaactttctaagaaggaa

SEQ ID NO: 39282 - DNA, 22 bp, synthetic construct
  misc_feature 1..22: note = chemically synthesized
  source 1..22: mol_type = other DNA
tctaagaaggaaaaaaaaaaaa

SEQ ID NO: 39283 - DNA, 22 bp, synthetic construct
  misc_feature 1..22: note = chemically synthesized
  source 1..22: mol_type = other DNA
ctaagaaggaaaaaaaaaaaaa

SEQ ID NO: 39284 - DNA, 22 bp, synthetic construct
  misc_feature 1..22: note = chemically synthesized
  source 1..22: mol_type = other DNA
taagaaggaaaaaaaaaaaaaa

SEQ ID NO: 39285 - DNA, 22 bp, synthetic construct
  misc_feature 1..22: note = chemically synthesized
  source 1..22: mol_type = other DNA
agaaggaaaaaaaaaaaaaatc

SEQ ID NO: 39286 - DNA, 22 bp, synthetic construct
  misc_feature 1..22: note = chemically synthesized
  source 1..22: mol_type = other DNA
ccagggaggttaagagtgagaa

SEQ ID NO: 39287 - DNA, 22 bp, synthetic construct
  misc_feature 1..22: note = chemically synthesized
  source 1..22: mol_type = other DNA
agagtgagaatgaggaattaat

SEQ ID NO: 39288 - DNA, 22 bp, synthetic construct
  misc_feature 1..22: note = chemically synthesized
  source 1..22: mol_type = other DNA
atcaattatatgatgcctccat

SEQ ID NO: 39289 - DNA, 22 bp, synthetic construct
  misc_feature 1..22: note = chemically synthesized
  source 1..22: mol_type = other DNA
tatgatgcctccatttagcaag

SEQ ID NO: 39290 - DNA, 22 bp, synthetic construct
  misc_feature 1..22: note = chemically synthesized
  source 1..22: mol_type = other DNA
catttagcaagtcagaaagaaa

SEQ ID NO: 39291 - DNA, 22 bp, synthetic construct
  misc_feature 1..22: note = chemically synthesized
  source 1..22: mol_type = other DNA
agcaagtcagaaagaaaagccg

SEQ ID NO: 39292 - DNA, 22 bp, synthetic construct
  misc_feature 1..22: note = chemically synthesized
  source 1..22: mol_type = other DNA
gcaagtcagaaagaaaagccgg

SEQ ID NO: 39293 - DNA, 22 bp, synthetic construct
  misc_feature 1..22: note = chemically synthesized
  source 1..22: mol_type = other DNA
ctcaggagcccccaaacactgg

SEQ ID NO: 39294 - DNA, 22 bp, synthetic construct
  misc_feature 1..22: note = chemically synthesized
  source 1..22: mol_type = other DNA
tcaggagcccccaaacactggt

SEQ ID NO: 39295 - DNA, 22 bp, synthetic construct
  misc_feature 1..22: note = chemically synthesized
  source 1..22: mol_type = other DNA
aggagcccccaaacactggtat

SEQ ID NO: 39296 - DNA, 22 bp, synthetic construct
  misc_feature 1..22: note = chemically synthesized
  source 1..22: mol_type = other DNA
gtattccaaaataagccagcct

SEQ ID NO: 39297 - DNA, 22 bp, synthetic construct
  misc_feature 1..22: note = chemically synthesized
  source 1..22: mol_type = other DNA
caaaataagccagcctcgctca

SEQ ID NO: 39298 - DNA, 22 bp, synthetic construct
  misc_feature 1..22: note = chemically synthesized
  source 1..22: mol_type = other DNA
gctcaagcacttgtctaaataa

SEQ ID NO: 39299 - DNA, 22 bp, synthetic construct
  misc_feature 1..22: note = chemically synthesized
  source 1..22: mol_type = other DNA
aagcacttgtctaaataatgga

SEQ ID NO: 39300 - DNA, 22 bp, synthetic construct
  misc_feature 1..22: note = chemically synthesized
  source 1..22: mol_type = other DNA
gtctaaataatggactcctgcc

SEQ ID NO: 39301 - DNA, 22 bp, synthetic construct
  misc_feature 1..22: note = chemically synthesized
  source 1..22: mol_type = other DNA
tctaaataatggactcctgccc

SEQ ID NO: 39302 - DNA, 22 bp, synthetic construct
  misc_feature 1..22: note = chemically synthesized
  source 1..22: mol_type = other DNA
aataatggactcctgccctgac

SEQ ID NO: 39303 - DNA, 22 bp, synthetic construct
  misc_feature 1..22: note = chemically synthesized
  source 1..22: mol_type = other DNA
ctgccctgaccttgtaatttac

SEQ ID NO: 39304 - DNA, 22 bp, synthetic construct
  misc_feature 1..22: note = chemically synthesized
  source 1..22: mol_type = other DNA
ccctgaccttgtaatttacttt

SEQ ID NO: 39305 - DNA, 22 bp, synthetic construct
  misc_feature 1..22: note = chemically synthesized
  source 1..22: mol_type = other DNA
accttgtaatttactttacaac

SEQ ID NO: 39306 - DNA, 22 bp, synthetic construct
  misc_feature 1..22: note = chemically synthesized
  source 1..22: mol_type = other DNA
gtaatttactttacaacgcatt

SEQ ID NO: 39307 - DNA, 22 bp, synthetic construct
  misc_feature 1..22: note = chemically synthesized
  source 1..22: mol_type = other DNA
taatttactttacaacgcattt

SEQ ID NO: 39308 - DNA, 22 bp, synthetic construct
  misc_feature 1..22: note = chemically synthesized
  source 1..22: mol_type = other DNA
actttacaacgcatttataatc

SEQ ID NO: 39309 - DNA, 22 bp, synthetic construct
  misc_feature 1..22: note = chemically synthesized
  source 1..22: mol_type = other DNA
ctttacaacgcatttataatcc

SEQ ID NO: 39310 - DNA, 22 bp, synthetic construct
  misc_feature 1..22: note = chemically synthesized
  source 1..22: mol_type = other DNA
tacaacgcatttataatcccac

SEQ ID NO: 39311 - DNA, 22 bp, synthetic construct
  misc_feature 1..22: note = chemically synthesized
  source 1..22: mol_type = other DNA
acaacgcatttataatcccact

SEQ ID NO: 39312 - DNA, 22 bp, synthetic construct
  misc_feature 1..22: note = chemically synthesized
  source 1..22: mol_type = other DNA
caacgcatttataatcccactc

SEQ ID NO: 39313 - DNA, 22 bp, synthetic construct
  misc_feature 1..22: note = chemically synthesized
  source 1..22: mol_type = other DNA
ataatcccactcaatatatctc

SEQ ID NO: 39314 - DNA, 22 bp, synthetic construct
  misc_feature 1..22: note = chemically synthesized
  source 1..22: mol_type = other DNA
taatcccactcaatatatctca

SEQ ID NO: 39315 - DNA, 22 bp, synthetic construct
  misc_feature 1..22: note = chemically synthesized
  source 1..22: mol_type = other DNA
aatatatctcactcctgggtaa

SEQ ID NO: 39316 - DNA, 22 bp, synthetic construct
  misc_feature 1..22: note = chemically synthesized
  source 1..22: mol_type = other DNA
actcctgggtaaatctcttaaa

SEQ ID NO: 39317 - DNA, 22 bp, synthetic construct
  misc_feature 1..22: note = chemically synthesized
  source 1..22: mol_type = other DNA
ctgggtaaatctcttaaacaag

SEQ ID NO: 39318 - DNA, 22 bp, synthetic construct
  misc_feature 1..22: note = chemically synthesized
  source 1..22: mol_type = other DNA
ggtaaatctcttaaacaagatt

SEQ ID NO: 39319 - DNA, 22 bp, synthetic construct
  misc_feature 1..22: note = chemically synthesized
  source 1..22: mol_type = other DNA
ttaaacaagattagatggtaag

SEQ ID NO: 39320 - DNA, 22 bp, synthetic construct
  misc_feature 1..22: note = chemically synthesized
  source 1..22: mol_type = other DNA
aaacaagattagatggtaagat

SEQ ID NO: 39321 - DNA, 22 bp, synthetic construct
  misc_feature 1..22: note = chemically synthesized
  source 1..22: mol_type = other DNA
aacaagattagatggtaagata

SEQ ID NO: 39322 - DNA, 22 bp, synthetic construct
  misc_feature 1..22: note = chemically synthesized
  source 1..22: mol_type = other DNA
gatggtaagataccaaaattag

SEQ ID NO: 39323 - DNA, 22 bp, synthetic construct
  misc_feature 1..22: note = chemically synthesized
  source 1..22: mol_type = other DNA
ggtttcaaacatttgtctaatg

SEQ ID NO: 39324 - DNA, 22 bp, synthetic construct
  misc_feature 1..22: note = chemically synthesized
  source 1..22: mol_type = other DNA
caaacatttgtctaatgtggaa

SEQ ID NO: 39325 - DNA, 22 bp, synthetic construct
  misc_feature 1..22: note = chemically synthesized
  source 1..22: mol_type = other DNA
aaacatttgtctaatgtggaag

SEQ ID NO: 39326 - DNA, 22 bp, synthetic construct
  misc_feature 1..22: note = chemically synthesized
  source 1..22: mol_type = other DNA
gtctaatgtggaagggggaaaa

SEQ ID NO: 39327 - DNA, 22 bp, synthetic construct
  misc_feature 1..22: note = chemically synthesized
  source 1..22: mol_type = other DNA
tctaatgtggaagggggaaaaa

SEQ ID NO: 39328 - DNA, 22 bp, synthetic construct
  misc_feature 1..22: note = chemically synthesized
  source 1..22: mol_type = other DNA
atgtggaagggggaaaaaaggc

SEQ ID NO: 39329 - DNA, 22 bp, synthetic construct
  misc_feature 1..22: note = chemically synthesized
  source 1..22: mol_type = other DNA
tgaaagaaaacgctgacattag

SEQ ID NO: 39330 - DNA, 22 bp, synthetic construct
  misc_feature 1..22: note = chemically synthesized
  source 1..22: mol_type = other DNA
gaaagaaaacgctgacattagt

SEQ ID NO: 39331 - DNA, 22 bp, synthetic construct
  misc_feature 1..22: note = chemically synthesized
  source 1..22: mol_type = other DNA
aaagaaaacgctgacattagta

SEQ ID NO: 39332 - DNA, 22 bp, synthetic construct
  misc_feature 1..22: note = chemically synthesized
  source 1..22: mol_type = other DNA
acattagtatcacattatctgc

SEQ ID NO: 39333 - DNA, 22 bp, synthetic construct
  misc_feature 1..22: note = chemically synthesized
  source 1..22: mol_type = other DNA
gtatcacattatctgcctattt

SEQ ID NO: 39334 - DNA, 22 bp, synthetic construct
  misc_feature 1..22: note = chemically synthesized
  source 1..22: mol_type = other DNA
tctgcctatttttgtttgcctc

SEQ ID NO: 39335 - DNA, 22 bp, synthetic construct
  misc_feature 1..22: note = chemically synthesized
  source 1..22: mol_type = other DNA
cctatttttgtttgcctcctct

SEQ ID NO: 39336 - DNA, 22 bp, synthetic construct
  misc_feature 1..22: note = chemically synthesized
  source 1..22: mol_type = other DNA
tttttgtttgcctcctctcttc

SEQ ID NO: 39337 - DNA, 22 bp, synthetic construct
  misc_feature 1..22: note = chemically synthesized
  source 1..22: mol_type = other DNA
ttgtttgcctcctctcttcaaa

SEQ ID NO: 39338 - DNA, 22 bp, synthetic construct
  misc_feature 1..22: note = chemically synthesized
  source 1..22: mol_type = other DNA
tgtttgcctcctctcttcaaag

SEQ ID NO: 39339 - DNA, 22 bp, synthetic construct
  misc_feature 1..22: note = chemically synthesized
  source 1..22: mol_type = other DNA
gtttgcctcctctcttcaaagg

SEQ ID NO: 39340 - DNA, 22 bp, synthetic construct
  misc_feature 1..22: note = chemically synthesized
  source 1..22: mol_type = other DNA
tttgcctcctctcttcaaaggg

SEQ ID NO: 39341 - DNA, 22 bp, synthetic construct
  misc_feature 1..22: note = chemically synthesized
  source 1..22: mol_type = other DNA
gcctcctctcttcaaagggaaa

SEQ ID NO: 39342 - DNA, 22 bp, synthetic construct
  misc_feature 1..22: note = chemically synthesized
  source 1..22: mol_type = other DNA
cctcctctcttcaaagggaaat

SEQ ID NO: 39343 - DNA, 22 bp, synthetic construct
  misc_feature 1..22: note = chemically synthesized
  source 1..22: mol_type = other DNA
ctctcttcaaagggaaataaaa

SEQ ID NO: 39344 - DNA, 22 bp, synthetic construct
  misc_feature 1..22: note = chemically synthesized
  source 1..22: mol_type = other DNA
tcttcaaagggaaataaaaagc

SEQ ID NO: 39345 - DNA, 22 bp, synthetic construct
  misc_feature 1..22: note = chemically synthesized
  source 1..22: mol_type = other DNA
ttcaaagggaaataaaaagctt

SEQ ID NO: 39346 - DNA, 22 bp, synthetic construct
  misc_feature 1..22: note = chemically synthesized
  source 1..22: mol_type = other DNA
caaagggaaataaaaagcttca

SEQ ID NO: 39347 - DNA, 22 bp, synthetic construct
  misc_feature 1..22: note = chemically synthesized
  source 1..22: mol_type = other DNA
aaagggaaataaaaagcttcat

SEQ ID NO: 39348 - DNA, 22 bp, synthetic construct
  misc_feature 1..22: note = chemically synthesized
  source 1..22: mol_type = other DNA
cattgagaacatttttataaat

SEQ ID NO: 39349 - DNA, 22 bp, synthetic construct
  misc_feature 1..22: note = chemically synthesized
  source 1..22: mol_type = other DNA
attgagaacatttttataaatt

SEQ ID NO: 39350 - DNA, 22 bp, synthetic construct
  misc_feature 1..22: note = chemically synthesized
  source 1..22: mol_type = other DNA
agaacatttttataaatttttt

SEQ ID NO: 39351 - DNA, 22 bp, synthetic construct
  misc_feature 1..22: note = chemically synthesized
  source 1..22: mol_type = other DNA
ttataaattttttgttgttgtt

SEQ ID NO: 39352 - DNA, 22 bp, synthetic construct
  misc_feature 1..22: note = chemically synthesized
  source 1..22: mol_type = other DNA
tataaattttttgttgttgttg

SEQ ID NO: 39353 - DNA, 22 bp, synthetic construct
  misc_feature 1..22: note = chemically synthesized
  source 1..22: mol_type = other DNA
ataaattttttgttgttgttga

SEQ ID NO: 39354 - DNA, 22 bp, synthetic construct
  misc_feature 1..22: note = chemically synthesized
  source 1..22: mol_type = other DNA
taaattttttgttgttgttgaa

SEQ ID NO: 39355 - DNA, 22 bp, synthetic construct
  misc_feature 1..22: note = chemically synthesized
  source 1..22: mol_type = other DNA
tttgttgttgttgaacaataac

SEQ ID NO: 39356 - DNA, 22 bp, synthetic construct
  misc_feature 1..22: note = chemically synthesized
  source 1..22: mol_type = other DNA
ttgttgttgttgaacaataact

SEQ ID NO: 39357 - DNA, 22 bp, synthetic construct
  misc_feature 1..22: note = chemically synthesized
  source 1..22: mol_type = other DNA
tgttgttgttgaacaataactt

SEQ ID NO: 39358 - DNA, 22 bp, synthetic construct
  misc_feature 1..22: note = chemically synthesized
  source 1..22: mol_type = other DNA
gttgttgttgaacaataacttg

SEQ ID NO: 39359 - DNA, 22 bp, synthetic construct
  misc_feature 1..22: note = chemically synthesized
  source 1..22: mol_type = other DNA
ttgttgttgaacaataacttgg

SEQ ID NO: 39360 - DNA, 22 bp, synthetic construct
  misc_feature 1..22: note = chemically synthesized
  source 1..22: mol_type = other DNA
ttgttgaacaataacttgggtc

SEQ ID NO: 39361 - DNA, 22 bp, synthetic construct
  misc_feature 1..22: note = chemically synthesized
  source 1..22: mol_type = other DNA
ttgaacaataacttgggtccca

SEQ ID NO: 39362 - DNA, 22 bp, synthetic construct
  misc_feature 1..22: note = chemically synthesized
  source 1..22: mol_type = other DNA
aacaataacttgggtcccaaat

SEQ ID NO: 39363 - DNA, 22 bp, synthetic construct
  misc_feature 1..22: note = chemically synthesized
  source 1..22: mol_type = other DNA
gggtcccaaataggctggaaaa

SEQ ID NO: 39364 - DNA, 22 bp, synthetic construct
  misc_feature 1..22: note = chemically synthesized
  source 1..22: mol_type = other DNA
ggtcccaaataggctggaaaaa

SEQ ID NO: 39365 - DNA, 22 bp, synthetic construct
  misc_feature 1..22: note = chemically synthesized
  source 1..22: mol_type = other DNA
gaaaaaaaactatctggttcca

SEQ ID NO: 39366 - DNA, 22 bp, synthetic construct
  misc_feature 1..22: note = chemically synthesized
  source 1..22: mol_type = other DNA
tctggttccaactacatgatcc

SEQ ID NO: 39367 - DNA, 22 bp, synthetic construct
  misc_feature 1..22: note = chemically synthesized
  source 1..22: mol_type = other DNA
gttccaactacatgatcctctg

SEQ ID NO: 39368 - DNA, 22 bp, synthetic construct
  misc_feature 1..22: note = chemically synthesized
  source 1..22: mol_type = other DNA
caactacatgatcctctgtggc

SEQ ID NO: 39369 - DNA, 22 bp, synthetic construct
  misc_feature 1..22: note = chemically synthesized
  source 1..22: mol_type = other DNA
catgatcctctgtggcttcctc

SEQ ID NO: 39370 - DNA, 22 bp, synthetic construct
  misc_feature 1..22: note = chemically synthesized
  source 1..22: mol_type = other DNA
tgtggcttcctccttgtcctcc

SEQ ID NO: 39371 - DNA, 22 bp, synthetic construct
  misc_feature 1..22: note = chemically synthesized
  source 1..22: mol_type = other DNA
tggcttcctccttgtcctccct

SEQ ID NO: 39372 - DNA, 22 bp, synthetic construct
  misc_feature 1..22: note = chemically synthesized
  source 1..22: mol_type = other DNA
cctccttgtcctccctagatct

SEQ ID NO: 39373 - DNA, 22 bp, synthetic construct
  misc_feature 1..22: note = chemically synthesized
  source 1..22: mol_type = other DNA
ctccttgtcctccctagatctc

SEQ ID NO: 39374 - DNA, 22 bp, synthetic construct
  misc_feature 1..22: note = chemically synthesized
  source 1..22: mol_type = other DNA
cttgtcctccctagatctctgg

SEQ ID NO: 39375 - DNA, 22 bp, synthetic construct
  misc_feature 1..22: note = chemically synthesized
  source 1..22: mol_type = other DNA
gtcctccctagatctctgggtg

SEQ ID NO: 39376 - DNA, 22 bp, synthetic construct
  misc_feature 1..22: note = chemically synthesized
  source 1..22: mol_type = other DNA
tcctccctagatctctgggtga

SEQ ID NO: 39377 - DNA, 22 bp, synthetic construct
  misc_feature 1..22: note = chemically synthesized
  source 1..22: mol_type = other DNA
cctagatctctgggtgactatc

SEQ ID NO: 39378 - DNA, 22 bp, synthetic construct
  misc_feature 1..22: note = chemically synthesized
  source 1..22: mol_type = other DNA
gatctctgggtgactatcattc

SEQ ID NO: 39379 - DNA, 22 bp, synthetic construct
  misc_feature 1..22: note = chemically synthesized
  source 1..22: mol_type = other DNA
tgggtgactatcattcctattt

SEQ ID NO: 39380 - DNA, 22 bp, synthetic construct
  misc_feature 1..22: note = chemically synthesized
  source 1..22: mol_type = other DNA
ggtgactatcattcctatttag

SEQ ID NO: 39381 - DNA, 22 bp, synthetic construct
  misc_feature 1..22: note = chemically synthesized
  source 1..22: mol_type = other DNA
tcattcctatttagcctgacga

SEQ ID NO: 39382 - DNA, 22 bp, synthetic construct
  misc_feature 1..22: note = chemically synthesized
  source 1..22: mol_type = other DNA
ctatttagcctgacgatctgag

SEQ ID NO: 39383 - DNA, 22 bp, synthetic construct
  misc_feature 1..22: note = chemically synthesized
  source 1..22: mol_type = other DNA
tttagcctgacgatctgagttg

SEQ ID NO: 39384 - DNA, 22 bp, synthetic construct
  misc_feature 1..22: note = chemically synthesized
  source 1..22: mol_type = other DNA
agcctgacgatctgagttgggc

SEQ ID NO: 39385 - DNA, 22 bp, synthetic construct
  misc_feature 1..22: note = chemically synthesized
  source 1..22: mol_type = other DNA
gcctgacgatctgagttgggca

SEQ ID NO: 39386 - DNA, 22 bp, synthetic construct
  misc_feature 1..22: note = chemically synthesized
  source 1..22: mol_type = other DNA
acgatctgagttgggcaagtaa

SEQ ID NO: 39387 - DNA, 22 bp, synthetic construct
  misc_feature 1..22: note = chemically synthesized
  source 1..22: mol_type = other DNA
agttgggcaagtaaaaagattt

SEQ ID NO: 39388 - DNA, 22 bp, synthetic construct
  misc_feature 1..22: note = chemically synthesized
  source 1..22: mol_type = other DNA
ggcaagtaaaaagatttgtctg

SEQ ID NO: 39389 - DNA, 22 bp, synthetic construct
  misc_feature 1..22: note = chemically synthesized
  source 1..22: mol_type = other DNA
gtctgataatccaagtccttaa

SEQ ID NO: 39390 - DNA, 22 bp, synthetic construct
  misc_feature 1..22: note = chemically synthesized
  source 1..22: mol_type = other DNA
tctgataatccaagtccttaac

SEQ ID NO: 39391 - DNA, 22 bp, synthetic construct
  misc_feature 1..22: note = chemically synthesized
  source 1..22: mol_type = other DNA
ataatccaagtccttaacacgt

SEQ ID NO: 39392 - DNA, 22 bp, synthetic construct
  misc_feature 1..22: note = chemically synthesized
  source 1..22: mol_type = other DNA
aacacgttcatcactccaaatg

SEQ ID NO: 39393 - DNA, 22 bp, synthetic construct
  misc_feature 1..22: note = chemically synthesized
  source 1..22: mol_type = other DNA
acacgttcatcactccaaatgc

SEQ ID NO: 39394 - DNA, 22 bp, synthetic construct
  misc_feature 1..22: note = chemically synthesized
  source 1..22: mol_type = other DNA
atcactccaaatgccttaaaat

SEQ ID NO: 39395 - DNA, 22 bp, synthetic construct
  misc_feature 1..22: note = chemically synthesized
  source 1..22: mol_type = other DNA
caaatgccttaaaattatattt

SEQ ID NO: 39396 - DNA, 22 bp, synthetic construct
  misc_feature 1..22: note = chemically synthesized
  source 1..22: mol_type = other DNA
aaaattatattttaccttataa

SEQ ID NO: 39397 - DNA, 22 bp, synthetic construct
  misc_feature 1..22: note = chemically synthesized
  source 1..22: mol_type = other DNA
aaattatattttaccttataaa

SEQ ID NO: 39398 - DNA, 22 bp, synthetic construct
  misc_feature 1..22: note = chemically synthesized
  source 1..22: mol_type = other DNA
tattttaccttataaaacatcg

SEQ ID NO: 39399 - DNA, 22 bp, synthetic construct
  misc_feature 1..22: note = chemically synthesized
  source 1..22: mol_type = other DNA
taccttataaaacatcgattga

SEQ ID NO: 39400 - DNA, 22 bp, synthetic construct
  misc_feature 1..22: note = chemically synthesized
  source 1..22: mol_type = other DNA
accttataaaacatcgattgaa

SEQ ID NO: 39401 - DNA, 22 bp, synthetic construct
  misc_feature 1..22: note = chemically synthesized
  source 1..22: mol_type = other DNA
ccttataaaacatcgattgaaa

SEQ ID NO: 39402 - DNA, 22 bp, synthetic construct
  misc_feature 1..22: note = chemically synthesized
  source 1..22: mol_type = other DNA
ataaaacatcgattgaaatcca

SEQ ID NO: 39403 - DNA, 22 bp, synthetic construct
  misc_feature 1..22: note = chemically synthesized
  source 1..22: mol_type = other DNA
taaaacatcgattgaaatccag

SEQ ID NO: 39404 - DNA, 22 bp, synthetic construct
  misc_feature 1..22: note = chemically synthesized
  source 1..22: mol_type = other DNA
aaatccaggactagactcataa

SEQ ID NO: 39405 - DNA, 22 bp, synthetic construct
  misc_feature 1..22: note = chemically synthesized
  source 1..22: mol_type = other DNA
gactcataattagtggtgctgg

SEQ ID NO: 39406 - DNA, 22 bp, synthetic construct
  misc_feature 1..22: note = chemically synthesized
  source 1..22: mol_type = other DNA
ataattagtggtgctggtttca

SEQ ID NO: 39407 - DNA, 22 bp, synthetic construct
  misc_feature 1..22: note = chemically synthesized
  source 1..22: mol_type = other DNA
gtggtgctggtttcacatgtgc

SEQ ID NO: 39408 - DNA, 22 bp, synthetic construct
  misc_feature 1..22: note = chemically synthesized
  source 1..22: mol_type = other DNA
gtttcacatgtgccatgaattg

SEQ ID NO: 39409 - DNA, 22 bp, synthetic construct
  misc_feature 1..22: note = chemically synthesized
  source 1..22: mol_type = other DNA
cacatgtgccatgaattgtagt

SEQ ID NO: 39410 - DNA, 22 bp, synthetic construct
  misc_feature 1..22: note = chemically synthesized
  source 1..22: mol_type = other DNA
acatgtgccatgaattgtagtc

SEQ ID NO: 39411 - DNA, 22 bp, synthetic construct
  misc_feature 1..22: note = chemically synthesized
  source 1..22: mol_type = other DNA
tagtcattgataaatgccaaaa

SEQ ID NO: 39412 - DNA, 22 bp, synthetic construct
  misc_feature 1..22: note = chemically synthesized
  source 1..22: mol_type = other DNA
ataaatgccaaaatctgtggca

SEQ ID NO: 39413 - DNA, 22 bp, synthetic construct
  misc_feature 1..22: note = chemically synthesized
  source 1..22: mol_type = other DNA
tggcatacagcactacatcaag

SEQ ID NO: 39414 - DNA, 22 bp, synthetic construct
  misc_feature 1..22: note = chemically synthesized
  source 1..22: mol_type = other DNA
catcaaggatctcatttgtatc

SEQ ID NO: 39415 - DNA, 22 bp, synthetic construct
  misc_feature 1..22: note = chemically synthesized
  source 1..22: mol_type = other DNA
atttgtatcctttcaaaaaggc

SEQ ID NO: 39416 - DNA, 22 bp, synthetic construct
  misc_feature 1..22: note = chemically synthesized
  source 1..22: mol_type = other DNA
gtatcctttcaaaaaggcttaa

SEQ ID NO: 39417 - DNA, 22 bp, synthetic construct
  misc_feature 1..22: note = chemically synthesized
  source 1..22: mol_type = other DNA
tatcctttcaaaaaggcttaaa

SEQ ID NO: 39418 - DNA, 22 bp, synthetic construct
  misc_feature 1..22: note = chemically synthesized
  source 1..22: mol_type = other DNA
tcaaaaaggcttaaatgagaaa

SEQ ID NO: 39419 - DNA, 22 bp, synthetic construct
  misc_feature 1..22: note = chemically synthesized
  source 1..22: mol_type = other DNA
caaaaaggcttaaatgagaaaa

SEQ ID NO: 39420 - DNA, 22 bp, synthetic construct
  misc_feature 1..22: note = chemically synthesized
  source 1..22: mol_type = other DNA
aaaaaggcttaaatgagaaaag

SEQ ID NO: 39421 - DNA, 22 bp, synthetic construct
  misc_feature 1..22: note = chemically synthesized
  source 1..22: mol_type = other DNA
aaatgagaaaagtccattttat

SEQ ID NO: 39422 - DNA, 22 bp, synthetic construct
  misc_feature 1..22: note = chemically synthesized
  source 1..22: mol_type = other DNA
aatgagaaaagtccattttatt

SEQ ID NO: 39423 - DNA, 22 bp, synthetic construct
  misc_feature 1..22: note = chemically synthesized
  source 1..22: mol_type = other DNA
tattttgctgccctgagcatcc

SEQ ID NO: 39424 - DNA, 22 bp, synthetic construct
  misc_feature 1..22: note = chemically synthesized
  source 1..22: mol_type = other DNA
attttgctgccctgagcatcct

SEQ ID NO: 39425 - DNA, 22 bp, synthetic construct
  misc_feature 1..22: note = chemically synthesized
  source 1..22: mol_type = other DNA
ttttgctgccctgagcatccta

SEQ ID NO: 39426 - DNA, 22 bp, synthetic construct
  misc_feature 1..22: note = chemically synthesized
  source 1..22: mol_type = other DNA
tgctgccctgagcatcctaaac

SEQ ID NO: 39427 - DNA, 22 bp, synthetic construct
  misc_feature 1..22: note = chemically synthesized
  source 1..22: mol_type = other DNA
gctgccctgagcatcctaaact

SEQ ID NO: 39428 - DNA, 22 bp, synthetic construct
  misc_feature 1..22: note = chemically synthesized
  source 1..22: mol_type = other DNA
ctgccctgagcatcctaaactt

SEQ ID NO: 39429 - DNA, 22 bp, synthetic construct
  misc_feature 1..22: note = chemically synthesized
  source 1..22: mol_type = other DNA
ccctgagcatcctaaacttttt

SEQ ID NO: 39430 - DNA, 22 bp, synthetic construct
  misc_feature 1..22: note = chemically synthesized
  source 1..22: mol_type = other DNA
agcatcctaaactttttttcag

SEQ ID NO: 39431 - DNA, 22 bp, synthetic construct
  misc_feature 1..22: note = chemically synthesized
  source 1..22: mol_type = other DNA
aactttttttcagagccagtta

SEQ ID NO: 39432 - DNA, 22 bp, synthetic construct
  misc_feature 1..22: note = chemically synthesized
  source 1..22: mol_type = other DNA
tttttcagagccagttatgtga

SEQ ID NO: 39433 - DNA, 22 bp, synthetic construct
  misc_feature 1..22: note = chemically synthesized
  source 1..22: mol_type = other DNA
ttttcagagccagttatgtgat

SEQ ID NO: 39434 - DNA, 22 bp, synthetic construct
  misc_feature 1..22: note = chemically synthesized
  source 1..22: mol_type = other DNA
tttcagagccagttatgtgatc

SEQ ID NO: 39435 - DNA, 22 bp, synthetic construct
  misc_feature 1..22: note = chemically synthesized
  source 1..22: mol_type = other DNA
ttcagagccagttatgtgatca

SEQ ID NO: 39436 - DNA, 22 bp, synthetic construct
  misc_feature 1..22: note = chemically synthesized
  source 1..22: mol_type = other DNA
tcagagccagttatgtgatcat

SEQ ID NO: 39437 - DNA, 22 bp, synthetic construct
  misc_feature 1..22: note = chemically synthesized
  source 1..22: mol_type = other DNA
cagagccagttatgtgatcatg

SEQ ID NO: 39438 - DNA, 22 bp, synthetic construct
  misc_feature 1..22: note = chemically synthesized
  source 1..22: mol_type = other DNA
agagccagttatgtgatcatgc

SEQ ID NO: 39439 - DNA, 22 bp, synthetic construct
  misc_feature 1..22: note = chemically synthesized
  source 1..22: mol_type = other DNA
tgtgatcatgctacagtatgtt

SEQ ID NO: 39440 - DNA, 22 bp, synthetic construct
  misc_feature 1..22: note = chemically synthesized
  source 1..22: mol_type = other DNA
cagtatgttaacactgtgatgt

SEQ ID NO: 39441 - DNA, 22 bp, synthetic construct
  misc_feature 1..22: note = chemically synthesized
  source 1..22: mol_type = other DNA
acactgtgatgttatcctcccc

SEQ ID NO: 39442 - DNA, 22 bp, synthetic construct
  misc_feature 1..22: note = chemically synthesized
  source 1..22: mol_type = other DNA
tgatgttatcctcccctctctc

SEQ ID NO: 39443 - DNA, 22 bp, synthetic construct
  misc_feature 1..22: note = chemically synthesized
  source 1..22: mol_type = other DNA
tcctcccctctctctcatacat

SEQ ID NO: 39444 - DNA, 22 bp, synthetic construct
  misc_feature 1..22: note = chemically synthesized
  source 1..22: mol_type = other DNA
ccctctctctcatacatcaggt

SEQ ID NO: 39445 - DNA, 22 bp, synthetic construct
  misc_feature 1..22: note = chemically synthesized
  source 1..22: mol_type = other DNA
tctctcatacatcaggtcagag

SEQ ID NO: 39446 - DNA, 22 bp, synthetic construct
  misc_feature 1..22: note = chemically synthesized
  source 1..22: mol_type = other DNA
tctcatacatcaggtcagagaa

SEQ ID NO: 39447 - DNA, 22 bp, synthetic construct
  misc_feature 1..22: note = chemically synthesized
  source 1..22: mol_type = other DNA
tcatacatcaggtcagagaaaa

SEQ ID NO: 39448 - DNA, 22 bp, synthetic construct
  misc_feature 1..22: note = chemically synthesized
  source 1..22: mol_type = other DNA
atacatcaggtcagagaaaatg

SEQ ID NO: 39449 - DNA, 22 bp, synthetic construct
  misc_feature 1..22: note = chemically synthesized
  source 1..22: mol_type = other DNA
tatcttataatgagcatacaac

SEQ ID NO: 39450 - DNA, 22 bp, synthetic construct
  misc_feature 1..22: note = chemically synthesized
  source 1..22: mol_type = other DNA
atcttataatgagcatacaaca

SEQ ID NO: 39451 - DNA, 22 bp, synthetic construct
  misc_feature 1..22: note = chemically synthesized
  source 1..22: mol_type = other DNA
tcttataatgagcatacaacat

SEQ ID NO: 39452 - DNA, 22 bp, synthetic construct
  misc_feature 1..22: note = chemically synthesized
  source 1..22: mol_type = other DNA
ataatgagcatacaacatacag

SEQ ID NO: 39453 - DNA, 22 bp, synthetic construct
  misc_feature 1..22: note = chemically synthesized
  source 1..22: mol_type = other DNA
taatgagcatacaacatacagt

SEQ ID NO: 39454 - DNA, 22 bp, synthetic construct
  misc_feature 1..22: note = chemically synthesized
  source 1..22: mol_type = other DNA
tcactatcgcattttagtattc

SEQ ID NO: 39455 - DNA, 22 bp, synthetic construct
  misc_feature 1..22: note = chemically synthesized
  source 1..22: mol_type = other DNA
cactatcgcattttagtattcc

SEQ ID NO: 39456 - DNA, 22 bp, synthetic construct
  misc_feature 1..22: note = chemically synthesized
  source 1..22: mol_type = other DNA
actatcgcattttagtattccc

SEQ ID NO: 39457 - DNA, 22 bp, synthetic construct
  misc_feature 1..22: note = chemically synthesized
  source 1..22: mol_type = other DNA
tcgcattttagtattcccatca

SEQ ID NO: 39458 - DNA, 22 bp, synthetic construct
  misc_feature 1..22: note = chemically synthesized
  source 1..22: mol_type = other DNA
tagtattcccatcaactagata

SEQ ID NO: 39459 - DNA, 22 bp, synthetic construct
  misc_feature 1..22: note = chemically synthesized
  source 1..22: mol_type = other DNA
agtattcccatcaactagatat

SEQ ID NO: 39460 - DNA, 22 bp, synthetic construct
  misc_feature 1..22: note = chemically synthesized
  source 1..22: mol_type = other DNA
gtattcccatcaactagatatt

SEQ ID NO: 39461 - DNA, 22 bp, synthetic construct
  misc_feature 1..22: note = chemically synthesized
  source 1..22: mol_type = other DNA
ccatcaactagatattctagat

SEQ ID NO: 39462 - DNA, 22 bp, synthetic construct
  misc_feature 1..22: note = chemically synthesized
  source 1..22: mol_type = other DNA
gatattctagatcatgagggca

SEQ ID NO: 39463 - DNA, 22 bp, synthetic construct
  misc_feature 1..22: note = chemically synthesized
  source 1..22: mol_type = other DNA
tagatcatgagggcagctagtg

SEQ ID NO: 39464 - DNA, 22 bp, synthetic construct
  misc_feature 1..22: note = chemically synthesized
  source 1..22: mol_type = other DNA
gatcatgagggcagctagtgta

SEQ ID NO: 39465 - DNA, 22 bp, synthetic construct
  misc_feature 1..22: note = chemically synthesized
  source 1..22: mol_type = other DNA
gtgtaatcataatgtcaatgag

SEQ ID NO: 39466 - DNA, 22 bp, synthetic construct
  misc_feature 1..22: note = chemically synthesized
  source 1..22: mol_type = other DNA
ttacgattgagactaaagatta

SEQ ID NO: 39467 - DNA, 22 bp, synthetic construct
  misc_feature 1..22: note = chemically synthesized
  source 1..22: mol_type = other DNA
cgattgagactaaagattacat

SEQ ID NO: 39468 - DNA, 22 bp, synthetic construct
  misc_feature 1..22: note = chemically synthesized
  source 1..22: mol_type = other DNA
agactaaagattacatggagag

SEQ ID NO: 39469 - DNA, 22 bp, synthetic construct
  misc_feature 1..22: note = chemically synthesized
  source 1..22: mol_type = other DNA
aagattacatggagagagctgc

SEQ ID NO: 39470 - DNA, 22 bp, synthetic construct
  misc_feature 1..22: note = chemically synthesized
  source 1..22: mol_type = other DNA
catggagagagctgctttgaaa

SEQ ID NO: 39471 - DNA, 22 bp, synthetic construct
  misc_feature 1..22: note = chemically synthesized
  source 1..22: mol_type = other DNA
ctttgaaactggtaattattac

SEQ ID NO: 39472 - DNA, 22 bp, synthetic construct
  misc_feature 1..22: note = chemically synthesized
  source 1..22: mol_type = other DNA
tgaaactggtaattattaccag

SEQ ID NO: 39473 - DNA, 22 bp, synthetic construct
  misc_feature 1..22: note = chemically synthesized
  source 1..22: mol_type = other DNA
gaaactggtaattattaccagt

SEQ ID NO: 39474 - DNA, 22 bp, synthetic construct
  misc_feature 1..22: note = chemically synthesized
  source 1..22: mol_type = other DNA
aaactggtaattattaccagtc

SEQ ID NO: 39475 - DNA, 22 bp, synthetic construct
  misc_feature 1..22: note = chemically synthesized
  source 1..22: mol_type = other DNA
gtaattattaccagtccactaa

SEQ ID NO: 39476 - DNA, 22 bp, synthetic construct
  misc_feature 1..22: note = chemically synthesized
  source 1..22: mol_type = other DNA
ttaccagtccactaatagcaaa

SEQ ID NO: 39477 - DNA, 22 bp, synthetic construct
  misc_feature 1..22: note = chemically synthesized
  source 1..22: mol_type = other DNA
ccagtccactaatagcaaatga

SEQ ID NO: 39478 - DNA, 22 bp, synthetic construct
  misc_feature 1..22: note = chemically synthesized
  source 1..22: mol_type = other DNA
atagcaaatgatgcattacaat

SEQ ID NO: 39479 - DNA, 22 bp, synthetic construct
  misc_feature 1..22: note = chemically synthesized
  source 1..22: mol_type = other DNA
caatttcaccatataatctgta

SEQ ID NO: 39480 - DNA, 22 bp, synthetic construct
  misc_feature 1..22: note = chemically synthesized
  source 1..22: mol_type = other DNA
caccatataatctgtatttcac

SEQ ID NO: 39481 - DNA, 22 bp, synthetic construct
  misc_feature 1..22: note = chemically synthesized
  source 1..22: mol_type = other DNA
accatataatctgtatttcact

SEQ ID NO: 39482 - DNA, 22 bp, synthetic construct
  misc_feature 1..22: note = chemically synthesized
  source 1..22: mol_type = other DNA
tatttcactcagctcatgccgg

SEQ ID NO: 39483 - DNA, 22 bp, synthetic construct
  misc_feature 1..22: note = chemically synthesized
  source 1..22: mol_type = other DNA
cactcagctcatgccggtgtac

SEQ ID NO: 39484 - DNA, 22 bp, synthetic construct
  misc_feature 1..22: note = chemically synthesized
  source 1..22: mol_type = other DNA
actcagctcatgccggtgtacc

SEQ ID NO: 39485 - DNA, 22 bp, synthetic construct
  misc_feature 1..22: note = chemically synthesized
  source 1..22: mol_type = other DNA
agctcatgccggtgtaccatat

SEQ ID NO: 39486 - DNA, 22 bp, synthetic construct
  misc_feature 1..22: note = chemically synthesized
  source 1..22: mol_type = other DNA
atgccggtgtaccatattatat

SEQ ID NO: 39487 - DNA, 22 bp, synthetic construct
  misc_feature 1..22: note = chemically synthesized
  source 1..22: mol_type = other DNA
tattacagtgctcacagattct

SEQ ID NO: 39488 - DNA, 22 bp, synthetic construct
  misc_feature 1..22: note = chemically synthesized
  source 1..22: mol_type = other DNA
cagtgctcacagattctaaatt

SEQ ID NO: 39489 - DNA, 22 bp, synthetic construct
  misc_feature 1..22: note = chemically synthesized
  source 1..22: mol_type = other DNA
acagattctaaattcctaaact

SEQ ID NO: 39490 - DNA, 22 bp, synthetic construct
  misc_feature 1..22: note = chemically synthesized
  source 1..22: mol_type = other DNA
taaattcctaaactgcagtcat

SEQ ID NO: 39491 - DNA, 22 bp, synthetic construct
  misc_feature 1..22: note = chemically synthesized
  source 1..22: mol_type = other DNA
aattcctaaactgcagtcatca

SEQ ID NO: 39492 - DNA, 22 bp, synthetic construct
  misc_feature 1..22: note = chemically synthesized
  source 1..22: mol_type = other DNA
ctaaactgcagtcatcaataaa

SEQ ID NO: 39493 - DNA, 22 bp, synthetic construct
  misc_feature 1..22: note = chemically synthesized
  source 1..22: mol_type = other DNA
aactgcagtcatcaataaatgt

SEQ ID NO: 39494 - DNA, 22 bp, synthetic construct
  misc_feature 1..22: note = chemically synthesized
  source 1..22: mol_type = other DNA
cagtcatcaataaatgtgttac

SEQ ID NO: 39495 - DNA, 22 bp, synthetic construct
  misc_feature 1..22: note = chemically synthesized
  source 1..22: mol_type = other DNA
cttgccataatttgtgaaatta

SEQ ID NO: 39496 - DNA, 22 bp, synthetic construct
  misc_feature 1..22: note = chemically synthesized
  source 1..22: mol_type = other DNA
gccataatttgtgaaattactt

SEQ ID NO: 39497 - DNA, 22 bp, synthetic construct
  misc_feature 1..22: note = chemically synthesized
  source 1..22: mol_type = other DNA
ccataatttgtgaaattacttt

SEQ ID NO: 39498 - DNA, 22 bp, synthetic construct
  misc_feature 1..22: note = chemically synthesized
  source 1..22: mol_type = other DNA
gtgaaattactttgttcataac

SEQ ID NO: 39499 - DNA, 22 bp, synthetic construct
  misc_feature 1..22: note = chemically synthesized
  source 1..22: mol_type = other DNA
tgaaattactttgttcataaca

SEQ ID NO: 39500 - DNA, 22 bp, synthetic construct
  misc_feature 1..22: note = chemically synthesized
  source 1..22: mol_type = other DNA
ctttgttcataacatctttgat

SEQ ID NO: 39501 - DNA, 22 bp, synthetic construct
  misc_feature 1..22: note = chemically synthesized
  source 1..22: mol_type = other DNA
tgttcataacatctttgatgat

SEQ ID NO: 39502 - DNA, 22 bp, synthetic construct
  misc_feature 1..22: note = chemically synthesized
  source 1..22: mol_type = other DNA
gttcataacatctttgatgatt

SEQ ID NO: 39503 - DNA, 22 bp, synthetic construct
  misc_feature 1..22: note = chemically synthesized
  source 1..22: mol_type = other DNA
ttcataacatctttgatgattt

SEQ ID NO: 39504 - DNA, 22 bp, synthetic construct
  misc_feature 1..22: note = chemically synthesized
  source 1..22: mol_type = other DNA
ataacatctttgatgatttaga

SEQ ID NO: 39505 - DNA, 22 bp, synthetic construct
  misc_feature 1..22: note = chemically synthesized
  source 1..22: mol_type = other DNA
tgatgatttagaaagactggaa

SEQ ID NO: 39506 - DNA, 22 bp, synthetic construct
  misc_feature 1..22: note = chemically synthesized
  source 1..22: mol_type = other DNA
gatgatttagaaagactggaat

SEQ ID NO: 39507 - DNA, 22 bp, synthetic construct
  misc_feature 1..22: note = chemically synthesized
  source 1..22: mol_type = other DNA
atgatttagaaagactggaatt

SEQ ID NO: 39508 - DNA, 22 bp, synthetic construct
  misc_feature 1..22: note = chemically synthesized
  source 1..22: mol_type = other DNA
agaaagactggaattgatttcc

SEQ ID NO: 39509 - DNA, 22 bp, synthetic construct
  misc_feature 1..22: note = chemically synthesized
  source 1..22: mol_type = other DNA
gaaagactggaattgatttcct

SEQ ID NO: 39510 - DNA, 22 bp, synthetic construct
  misc_feature 1..22: note = chemically synthesized
  source 1..22: mol_type = other DNA
gaattgatttcctgtgtggcaa

SEQ ID NO: 39511 - DNA, 22 bp, synthetic construct
  misc_feature 1..22: note = chemically synthesized
  source 1..22: mol_type = other DNA
atttcctgtgtggcaaaattag

SEQ ID NO: 39512 - DNA, 22 bp, synthetic construct
  misc_feature 1..22: note = chemically synthesized
  source 1..22: mol_type = other DNA
cctgtgtggcaaaattagggct

SEQ ID NO: 39513 - DNA, 22 bp, synthetic construct
  misc_feature 1..22: note = chemically synthesized
  source 1..22: mol_type = other DNA
ctgtgtggcaaaattagggcta

SEQ ID NO: 39514 - DNA, 22 bp, synthetic construct
  misc_feature 1..22: note = chemically synthesized
  source 1..22: mol_type = other DNA
tgtggcaaaattagggctacat

SEQ ID NO: 39515 - DNA, 22 bp, synthetic construct
  misc_feature 1..22: note = chemically synthesized
  source 1..22: mol_type = other DNA
gggctacattgatttattgatg

SEQ ID NO: 39516 - DNA, 22 bp, synthetic construct
  misc_feature 1..22: note = chemically synthesized
  source 1..22: mol_type = other DNA
cattgatttattgatgtgtaaa

SEQ ID NO: 39517 - DNA, 22 bp, synthetic construct
  misc_feature 1..22: note = chemically synthesized
  source 1..22: mol_type = other DNA
atttattgatgtgtaaaatata

SEQ ID NO: 39518 - DNA, 22 bp, synthetic construct
  misc_feature 1..22: note = chemically synthesized
  source 1..22: mol_type = other DNA
attgatgtgtaaaatataataa

SEQ ID NO: 39519 - DNA, 22 bp, synthetic construct
  misc_feature 1..22: note = chemically synthesized
  source 1..22: mol_type = other DNA
ttgatgtgtaaaatataataat

SEQ ID NO: 39520 - DNA, 22 bp, synthetic construct
  misc_feature 1..22: note = chemically synthesized
  source 1..22: mol_type = other DNA
atgtgtaaaatataataatatt

SEQ ID NO: 39521 - DNA, 22 bp, synthetic construct
  misc_feature 1..22: note = chemically synthesized
  source 1..22: mol_type = other DNA
ttcatttactctgatgaaaatc

SEQ ID NO: 39522 - DNA, 22 bp, synthetic construct
  misc_feature 1..22: note = chemically synthesized
  source 1..22: mol_type = other DNA
catttactctgatgaaaatcaa

SEQ ID NO: 39523 - DNA, 22 bp, synthetic construct
  misc_feature 1..22: note = chemically synthesized
  source 1..22: mol_type = other DNA
atttactctgatgaaaatcaac

SEQ ID NO: 39524 - DNA, 22 bp, synthetic construct
  misc_feature 1..22: note = chemically synthesized
  source 1..22: mol_type = other DNA
actctgatgaaaatcaacttct

SEQ ID NO: 39525 - DNA, 22 bp, synthetic construct
  misc_feature 1..22: note = chemically synthesized
  source 1..22: mol_type = other DNA
ctctgatgaaaatcaacttctc

SEQ ID NO: 39526 - DNA, 22 bp, synthetic construct
  misc_feature 1..22: note = chemically synthesized
  source 1..22: mol_type = other DNA
tgatgaaaatcaacttctcaat

SEQ ID NO: 39527 - DNA, 22 bp, synthetic construct
  misc_feature 1..22: note = chemically synthesized
  source 1..22: mol_type = other DNA
atgaaaatcaacttctcaattt

SEQ ID NO: 39528 - DNA, 22 bp, synthetic construct
  misc_feature 1..22: note = chemically synthesized
  source 1..22: mol_type = other DNA
ctcaatttgagagcctcattgg

SEQ ID NO: 39529 - DNA, 22 bp, synthetic construct
  misc_feature 1..22: note = chemically synthesized
  source 1..22: mol_type = other DNA
tcaatttgagagcctcattggg

SEQ ID NO: 39530 - DNA, 22 bp, synthetic construct
  misc_feature 1..22: note = chemically synthesized
  source 1..22: mol_type = other DNA
aatttgagagcctcattgggca

SEQ ID NO: 39531 - DNA, 22 bp, synthetic construct
  misc_feature 1..22: note = chemically synthesized
  source 1..22: mol_type = other DNA
gagagcctcattgggcatttac

SEQ ID NO: 39532 - DNA, 22 bp, synthetic construct
  misc_feature 1..22: note = chemically synthesized
  source 1..22: mol_type = other DNA
agagcctcattgggcatttacg

SEQ ID NO: 39533 - DNA, 22 bp, synthetic construct
  misc_feature 1..22: note = chemically synthesized
  source 1..22: mol_type = other DNA
attgggcatttacggggattgt

SEQ ID NO: 39534 - DNA, 22 bp, synthetic construct
  misc_feature 1..22: note = chemically synthesized
  source 1..22: mol_type = other DNA
ggcatttacggggattgttttg

SEQ ID NO: 39535 - DNA, 22 bp, synthetic construct
  misc_feature 1..22: note = chemically synthesized
  source 1..22: mol_type = other DNA
acggggattgttttgatttaga

SEQ ID NO: 39536 - DNA, 22 bp, synthetic construct
  misc_feature 1..22: note = chemically synthesized
  source 1..22: mol_type = other DNA
cggggattgttttgatttagag

SEQ ID NO: 39537 - DNA, 22 bp, synthetic construct
  misc_feature 1..22: note = chemically synthesized
  source 1..22: mol_type = other DNA
ttttgatttagagcaataaact

SEQ ID NO: 39538 - DNA, 22 bp, synthetic construct
  misc_feature 1..22: note = chemically synthesized
  source 1..22: mol_type = other DNA
tgatttagagcaataaactgac

SEQ ID NO: 39539 - DNA, 22 bp, synthetic construct
  misc_feature 1..22: note = chemically synthesized
  source 1..22: mol_type = other DNA
gatttagagcaataaactgaca

SEQ ID NO: 39540 - DNA, 22 bp, synthetic construct
  misc_feature 1..22: note = chemically synthesized
  source 1..22: mol_type = other DNA
atttagagcaataaactgacac

SEQ ID NO: 39541 - DNA, 22 bp, synthetic construct
  misc_feature 1..22: note = chemically synthesized
  source 1..22: mol_type = other DNA
agagcaataaactgacacctgg

SEQ ID NO: 39542 - DNA, 22 bp, synthetic construct
  misc_feature 1..22: note = chemically synthesized
  source 1..22: mol_type = other DNA
gagcaataaactgacacctggc

SEQ ID NO: 39543 - DNA, 22 bp, synthetic construct
  misc_feature 1..22: note = chemically synthesized
  source 1..22: mol_type = other DNA
acacctggcccctaagcatagg

SEQ ID NO: 39544 - DNA, 22 bp, synthetic construct
  misc_feature 1..22: note = chemically synthesized
  source 1..22: mol_type = other DNA
gcccctaagcataggaacttga

SEQ ID NO: 39545 - DNA, 22 bp, synthetic construct
  misc_feature 1..22: note = chemically synthesized
  source 1..22: mol_type = other DNA
agcataggaacttgagacatca

SEQ ID NO: 39546 - DNA, 22 bp, synthetic construct
  misc_feature 1..22: note = chemically synthesized
  source 1..22: mol_type = other DNA
gagacatcaaaagggttaaaat

SEQ ID NO: 39547 - DNA, 22 bp, synthetic construct
  misc_feature 1..22: note = chemically synthesized
  source 1..22: mol_type = other DNA
agacatcaaaagggttaaaatc

SEQ ID NO: 39548 - DNA, 22 bp, synthetic construct
  misc_feature 1..22: note = chemically synthesized
  source 1..22: mol_type = other DNA
aaatcagctattagcccaccta

SEQ ID NO: 39549 - DNA, 22 bp, synthetic construct
  misc_feature 1..22: note = chemically synthesized
  source 1..22: mol_type = other DNA
ttagcccacctactggctttta

SEQ ID NO: 39550 - DNA, 22 bp, synthetic construct
  misc_feature 1..22: note = chemically synthesized
  source 1..22: mol_type = other DNA
gcccacctactggcttttattt

SEQ ID NO: 39551 - DNA, 22 bp, synthetic construct
  misc_feature 1..22: note = chemically synthesized
  source 1..22: mol_type = other DNA
ctggcttttattttatttcatt

SEQ ID NO: 39552 - DNA, 22 bp, synthetic construct
  misc_feature 1..22: note = chemically synthesized
  source 1..22: mol_type = other DNA
gcttttattttatttcatttta

SEQ ID NO: 39553 - DNA, 22 bp, synthetic construct
  misc_feature 1..22: note = chemically synthesized
  source 1..22: mol_type = other DNA
ttattttatttcattttacttt

SEQ ID NO: 39554 - DNA, 22 bp, synthetic construct
  misc_feature 1..22: note = chemically synthesized
  source 1..22: mol_type = other DNA
tattttatttcattttacttta

SEQ ID NO: 39555 - DNA, 22 bp, synthetic construct
  misc_feature 1..22: note = chemically synthesized
  source 1..22: mol_type = other DNA
attttatttcattttactttat

SEQ ID NO: 39556 - DNA, 22 bp, synthetic construct
  misc_feature 1..22: note = chemically synthesized
  source 1..22: mol_type = other DNA
ttttatttcattttactttatg

SEQ ID NO: 39557 - DNA, 22 bp, synthetic construct
  misc_feature 1..22: note = chemically synthesized
  source 1..22: mol_type = other DNA
tatttcattttactttatggga

SEQ ID NO: 39558 - DNA, 22 bp, synthetic construct
  misc_feature 1..22: note = chemically synthesized
  source 1..22: mol_type = other DNA
atttcattttactttatgggaa

SEQ ID NO: 39559 - DNA, 22 bp, synthetic construct
  misc_feature 1..22: note = chemically synthesized
  source 1..22: mol_type = other DNA
tttcattttactttatgggaag

SEQ ID NO: 39560 - DNA, 22 bp, synthetic construct
  misc_feature 1..22: note = chemically synthesized
  source 1..22: mol_type = other DNA
cattttactttatgggaaggaa

SEQ ID NO: 39561 - DNA, 22 bp, synthetic construct
  misc_feature 1..22: note = chemically synthesized
  source 1..22: mol_type = other DNA
attttactttatgggaaggaat

SEQ ID NO: 39562 - DNA, 22 bp, synthetic construct
  misc_feature 1..22: note = chemically synthesized
  source 1..22: mol_type = other DNA
tactttatgggaaggaatgacc

SEQ ID NO: 39563 - DNA, 22 bp, synthetic construct
  misc_feature 1..22: note = chemically synthesized
  source 1..22: mol_type = other DNA
actttatgggaaggaatgaccc

SEQ ID NO: 39564 - DNA, 22 bp, synthetic construct
  misc_feature 1..22: note = chemically synthesized
  source 1..22: mol_type = other DNA
ctttatgggaaggaatgacccc

SEQ ID NO: 39565 - DNA, 22 bp, synthetic construct
  misc_feature 1..22: note = chemically synthesized
  source 1..22: mol_type = other DNA
tatgggaaggaatgacccccat

SEQ ID NO: 39566 - DNA, 22 bp, synthetic construct
  misc_feature 1..22: note = chemically synthesized
  source 1..22: mol_type = other DNA
atgggaaggaatgacccccatt

SEQ ID NO: 39567 - DNA, 22 bp, synthetic construct
  misc_feature 1..22: note = chemically synthesized
  source 1..22: mol_type = other DNA
tgggaaggaatgacccccattt

SEQ ID NO: 39568 - DNA, 22 bp, synthetic construct
  misc_feature 1..22: note = chemically synthesized
  source 1..22: mol_type = other DNA
ctagtatgtcaccaatgtgaaa

SEQ ID NO: 39569 - DNA, 22 bp, synthetic construct
  misc_feature 1..22: note = chemically synthesized
  source 1..22: mol_type = other DNA
tagtatgtcaccaatgtgaaaa

SEQ ID NO: 39570 - DNA, 22 bp, synthetic construct
  misc_feature 1..22: note = chemically synthesized
  source 1..22: mol_type = other DNA
gtatgtcaccaatgtgaaaaag

SEQ ID NO: 39571 - DNA, 22 bp, synthetic construct
  misc_feature 1..22: note = chemically synthesized
  source 1..22: mol_type = other DNA
agcctcaagattcagaagaaca

SEQ ID NO: 39572 - DNA, 22 bp, synthetic construct
  misc_feature 1..22: note = chemically synthesized
  source 1..22: mol_type = other DNA
aagattcagaagaacaaggagg

SEQ ID NO: 39573 - DNA, 22 bp, synthetic construct
  misc_feature 1..22: note = chemically synthesized
  source 1..22: mol_type = other DNA
agaagaacaaggaggtctgaga

SEQ ID NO: 39574 - DNA, 22 bp, synthetic construct
  misc_feature 1..22: note = chemically synthesized
  source 1..22: mol_type = other DNA
agactggaggcctagctctatt

SEQ ID NO: 39575 - DNA, 22 bp, synthetic construct
  misc_feature 1..22: note = chemically synthesized
  source 1..22: mol_type = other DNA
gaggcctagctctattatccac

SEQ ID NO: 39576 - DNA, 22 bp, synthetic construct
  misc_feature 1..22: note = chemically synthesized
  source 1..22: mol_type = other DNA
gctctattatccactagattgt

SEQ ID NO: 39577 - DNA, 22 bp, synthetic construct
  misc_feature 1..22: note = chemically synthesized
  source 1..22: mol_type = other DNA
tattatccactagattgtaact

SEQ ID NO: 39578 - DNA, 22 bp, synthetic construct
  misc_feature 1..22: note = chemically synthesized
  source 1..22: mol_type = other DNA
ttatccactagattgtaactct

SEQ ID NO: 39579 - DNA, 22 bp, synthetic construct
  misc_feature 1..22: note = chemically synthesized
  source 1..22: mol_type = other DNA
tccactagattgtaactctggg

SEQ ID NO: 39580 - DNA, 22 bp, synthetic construct
  misc_feature 1..22: note = chemically synthesized
  source 1..22: mol_type = other DNA
gattgtaactctgggatagtca

SEQ ID NO: 39581 - DNA, 22 bp, synthetic construct
  misc_feature 1..22: note = chemically synthesized
  source 1..22: mol_type = other DNA
taactctgggatagtcatttga

SEQ ID NO: 39582 - DNA, 22 bp, synthetic construct
  misc_feature 1..22: note = chemically synthesized
  source 1..22: mol_type = other DNA
tgggatagtcatttgatttctc

SEQ ID NO: 39583 - DNA, 22 bp, synthetic construct
  misc_feature 1..22: note = chemically synthesized
  source 1..22: mol_type = other DNA
ggatagtcatttgatttctctg

SEQ ID NO: 39584 - DNA, 22 bp, synthetic construct
  misc_feature 1..22: note = chemically synthesized
  source 1..22: mol_type = other DNA
gatttctctgagtcttggaatt

SEQ ID NO: 39585 - DNA, 22 bp, synthetic construct
  misc_feature 1..22: note = chemically synthesized
  source 1..22: mol_type = other DNA
atttctctgagtcttggaattc

SEQ ID NO: 39586 - DNA, 22 bp, synthetic construct
  misc_feature 1..22: note = chemically synthesized
  source 1..22: mol_type = other DNA
ctctgagtcttggaattcctat

SEQ ID NO: 39587 - DNA, 22 bp, synthetic construct
  misc_feature 1..22: note = chemically synthesized
  source 1..22: mol_type = other DNA
tctgagtcttggaattcctatc

SEQ ID NO: 39588 - DNA, 22 bp, synthetic construct
  misc_feature 1..22: note = chemically synthesized
  source 1..22: mol_type = other DNA
tgagtcttggaattcctatctg

SEQ ID NO: 39589 - DNA, 22 bp, synthetic construct
  misc_feature 1..22: note = chemically synthesized
  source 1..22: mol_type = other DNA
agtcttggaattcctatctgta

SEQ ID NO: 39590 - DNA, 22 bp, synthetic construct
  misc_feature 1..22: note = chemically synthesized
  source 1..22: mol_type = other DNA
ggaattcctatctgtaaaatga

SEQ ID NO: 39591 - DNA, 22 bp, synthetic construct
  misc_feature 1..22: note = chemically synthesized
  source 1..22: mol_type = other DNA
gaattcctatctgtaaaatgag

SEQ ID NO: 39592 - DNA, 22 bp, synthetic construct
  misc_feature 1..22: note = chemically synthesized
  source 1..22: mol_type = other DNA
ctatctgtaaaatgagcataaa

SEQ ID NO: 39593 - DNA, 22 bp, synthetic construct
  misc_feature 1..22: note = chemically synthesized
  source 1..22: mol_type = other DNA
tctgtaaaatgagcataaaaac

SEQ ID NO: 39594 - DNA, 22 bp, synthetic construct
  misc_feature 1..22: note = chemically synthesized
  source 1..22: mol_type = other DNA
taaaatgagcataaaaacagta

SEQ ID NO: 39595 - DNA, 22 bp, synthetic construct
  misc_feature 1..22: note = chemically synthesized
  source 1..22: mol_type = other DNA
taagaattgttgggaagttcaa

SEQ ID NO: 39596 - DNA, 22 bp, synthetic construct
  misc_feature 1..22: note = chemically synthesized
  source 1..22: mol_type = other DNA
ttgggaagttcaaatgacagaa

SEQ ID NO: 39597 - DNA, 22 bp, synthetic construct
  misc_feature 1..22: note = chemically synthesized
  source 1..22: mol_type = other DNA
ggaagttcaaatgacagaagta

SEQ ID NO: 39598 - DNA, 22 bp, synthetic construct
  misc_feature 1..22: note = chemically synthesized
  source 1..22: mol_type = other DNA
aaatgacagaagtatataaaag

SEQ ID NO: 39599 - DNA, 22 bp, synthetic construct
  misc_feature 1..22: note = chemically synthesized
  source 1..22: mol_type = other DNA
tgtaaactatcaggtcgaatgt

SEQ ID NO: 39600 - DNA, 22 bp, synthetic construct
  misc_feature 1..22: note = chemically synthesized
  source 1..22: mol_type = other DNA
taaactatcaggtcgaatgtga

SEQ ID NO: 39601 - DNA, 22 bp, synthetic construct
  misc_feature 1..22: note = chemically synthesized
  source 1..22: mol_type = other DNA
tcaggtcgaatgtgaatgtgag

SEQ ID NO: 39602 - DNA, 22 bp, synthetic construct
  misc_feature 1..22: note = chemically synthesized
  source 1..22: mol_type = other DNA
tcattactaccaggggtgatta

SEQ ID NO: 39603 - DNA, 22 bp, synthetic construct
  misc_feature 1..22: note = chemically synthesized
  source 1..22: mol_type = other DNA
cattactaccaggggtgattaa

SEQ ID NO: 39604 - DNA, 22 bp, synthetic construct
  misc_feature 1..22: note = chemically synthesized
  source 1..22: mol_type = other DNA
attactaccaggggtgattaat

SEQ ID NO: 39605 - DNA, 22 bp, synthetic construct
  misc_feature 1..22: note = chemically synthesized
  source 1..22: mol_type = other DNA
ctaccaggggtgattaattact

SEQ ID NO: 39606 - DNA, 22 bp, synthetic construct
  misc_feature 1..22: note = chemically synthesized
  source 1..22: mol_type = other DNA
ccaggggtgattaattactgag

SEQ ID NO: 39607 - DNA, 22 bp, synthetic construct
  misc_feature 1..22: note = chemically synthesized
  source 1..22: mol_type = other DNA
attactgagggtaatgactaac

SEQ ID NO: 39608 - DNA, 22 bp, synthetic construct
  misc_feature 1..22: note = chemically synthesized
  source 1..22: mol_type = other DNA
ctgagggtaatgactaaccaca

SEQ ID NO: 39609 - DNA, 22 bp, synthetic construct
  misc_feature 1..22: note = chemically synthesized
  source 1..22: mol_type = other DNA
agggtaatgactaaccacatta

SEQ ID NO: 39610 - DNA, 22 bp, synthetic construct
  misc_feature 1..22: note = chemically synthesized
  source 1..22: mol_type = other DNA
accacattacacaccccgaacg

SEQ ID NO: 39611 - DNA, 22 bp, synthetic construct
  misc_feature 1..22: note = chemically synthesized
  source 1..22: mol_type = other DNA
cacaccccgaacggcttccaga

SEQ ID NO: 39612 - DNA, 22 bp, synthetic construct
  misc_feature 1..22: note = chemically synthesized
  source 1..22: mol_type = other DNA
ccagaggaaggtcccagtccag

SEQ ID NO: 39613 - DNA, 22 bp, synthetic construct
  misc_feature 1..22: note = chemically synthesized
  source 1..22: mol_type = other DNA
cagaggaaggtcccagtccagg

SEQ ID NO: 39614 - DNA, 22 bp, synthetic construct
  misc_feature 1..22: note = chemically synthesized
  source 1..22: mol_type = other DNA
aacccaggccaaaaggaggctc

SEQ ID NO: 39615 - DNA, 22 bp, synthetic construct
  misc_feature 1..22: note = chemically synthesized
  source 1..22: mol_type = other DNA
acccaggccaaaaggaggctct

SEQ ID NO: 39616 - DNA, 22 bp, synthetic construct
  misc_feature 1..22: note = chemically synthesized
  source 1..22: mol_type = other DNA
tagttaaagagcaggggtgact

SEQ ID NO: 39617 - DNA, 22 bp, synthetic construct
  misc_feature 1..22: note = chemically synthesized
  source 1..22: mol_type = other DNA
gttaaagagcaggggtgactgg

SEQ ID NO: 39618 - DNA, 22 bp, synthetic construct
  misc_feature 1..22: note = chemically synthesized
  source 1..22: mol_type = other DNA
aagagcaggggtgactggcaca

SEQ ID NO: 39619 - DNA, 22 bp, synthetic construct
  misc_feature 1..22: note = chemically synthesized
  source 1..22: mol_type = other DNA
gcacacagcagagtggccacag

SEQ ID NO: 39620 - DNA, 22 bp, synthetic construct
  misc_feature 1..22: note = chemically synthesized
  source 1..22: mol_type = other DNA
tgagctctggaagccaggggca

SEQ ID NO: 39621 - DNA, 22 bp, synthetic construct
  misc_feature 1..22: note = chemically synthesized
  source 1..22: mol_type = other DNA
tggaagccaggggcagcaggtt

SEQ ID NO: 39622 - DNA, 22 bp, synthetic construct
  misc_feature 1..22: note = chemically synthesized
  source 1..22: mol_type = other DNA
gaagccaggggcagcaggttaa

SEQ ID NO: 39623 - DNA, 22 bp, synthetic construct
  misc_feature 1..22: note = chemically synthesized
  source 1..22: mol_type = other DNA
atgccgccaagtggaatgggca

SEQ ID NO: 39624 - DNA, 22 bp, synthetic construct
  misc_feature 1..22: note = chemically synthesized
  source 1..22: mol_type = other DNA
gttctagagctttctggacccc

SEQ ID NO: 39625 - DNA, 22 bp, synthetic construct
  misc_feature 1..22: note = chemically synthesized
  source 1..22: mol_type = other DNA
ttctagagctttctggaccccc

SEQ ID NO: 39626 - DNA, 22 bp, synthetic construct
  misc_feature 1..22: note = chemically synthesized
  source 1..22: mol_type = other DNA
tagagctttctggacccccaca

SEQ ID NO: 39627 - DNA, 22 bp, synthetic construct
  misc_feature 1..22: note = chemically synthesized
  source 1..22: mol_type = other DNA
gagctttctggacccccacaac

SEQ ID NO: 39628 - DNA, 22 bp, synthetic construct
  misc_feature 1..22: note = chemically synthesized
  source 1..22: mol_type = other DNA
tctggacccccacaacccactt

SEQ ID NO: 39629 - DNA, 22 bp, synthetic construct
  misc_feature 1..22: note = chemically synthesized
  source 1..22: mol_type = other DNA
ctggacccccacaacccacttc

SEQ ID NO: 39630 - DNA, 22 bp, synthetic construct
  misc_feature 1..22: note = chemically synthesized
  source 1..22: mol_type = other DNA
tggacccccacaacccacttcc

SEQ ID NO: 39631 - DNA, 22 bp, synthetic construct
  misc_feature 1..22: note = chemically synthesized
  source 1..22: mol_type = other DNA
gacccccacaacccacttccac

SEQ ID NO: 39632 - DNA, 22 bp, synthetic construct
  misc_feature 1..22: note = chemically synthesized
  source 1..22: mol_type = other DNA
ccacataccttgttctggtcac

SEQ ID NO: 39633 - DNA, 22 bp, synthetic construct
  misc_feature 1..22: note = chemically synthesized
  source 1..22: mol_type = other DNA
cacataccttgttctggtcact

SEQ ID NO: 39634 - DNA, 22 bp, synthetic construct
  misc_feature 1..22: note = chemically synthesized
  source 1..22: mol_type = other DNA
gttctggtcactcctaaattgg

SEQ ID NO: 39635 - DNA, 22 bp, synthetic construct
  misc_feature 1..22: note = chemically synthesized
  source 1..22: mol_type = other DNA
ttctggtcactcctaaattggt

SEQ ID NO: 39636 - DNA, 22 bp, synthetic construct
  misc_feature 1..22: note = chemically synthesized
  source 1..22: mol_type = other DNA
tggtcactcctaaattggtcct

SEQ ID NO: 39637 - DNA, 22 bp, synthetic construct
  misc_feature 1..22: note = chemically synthesized
  source 1..22: mol_type = other DNA
gtcactcctaaattggtcctgc

SEQ ID NO: 39638 - DNA, 22 bp, synthetic construct
  misc_feature 1..22: note = chemically synthesized
  source 1..22: mol_type = other DNA
ctaaattggtcctgccagcagg

SEQ ID NO: 39639 - DNA, 22 bp, synthetic construct
  misc_feature 1..22: note = chemically synthesized
  source 1..22: mol_type = other DNA
aattggtcctgccagcaggggc

SEQ ID NO: 39640 - DNA, 22 bp, synthetic construct
  misc_feature 1..22: note = chemically synthesized
  source 1..22: mol_type = other DNA
gtcctgccagcaggggcaccag

SEQ ID NO: 39641 - DNA, 22 bp, synthetic construct
  misc_feature 1..22: note = chemically synthesized
  source 1..22: mol_type = other DNA
ccagcaggggcaccagcaaact

SEQ ID NO: 39642 - DNA, 22 bp, synthetic construct
  misc_feature 1..22: note = chemically synthesized
  source 1..22: mol_type = other DNA
tgtaccctccctttgtgggaag

SEQ ID NO: 39643 - DNA, 22 bp, synthetic construct
  misc_feature 1..22: note = chemically synthesized
  source 1..22: mol_type = other DNA
cctttgtgggaaggtgggagag

SEQ ID NO: 39644 - DNA, 22 bp, synthetic construct
  misc_feature 1..22: note = chemically synthesized
  source 1..22: mol_type = other DNA
tgtgggaaggtgggagaggaca

SEQ ID NO: 39645 - DNA, 22 bp, synthetic construct
  misc_feature 1..22: note = chemically synthesized
  source 1..22: mol_type = other DNA
gtgggaaggtgggagaggacag

SEQ ID NO: 39646 - DNA, 22 bp, synthetic construct
  misc_feature 1..22: note = chemically synthesized
  source 1..22: mol_type = other DNA
tgggaaggtgggagaggacagg

SEQ ID NO: 39647 - DNA, 22 bp, synthetic construct
  misc_feature 1..22: note = chemically synthesized
  source 1..22: mol_type = other DNA
cctatcaagctcagactttcct

SEQ ID NO: 39648 - DNA, 22 bp, synthetic construct
  misc_feature 1..22: note = chemically synthesized
  source 1..22: mol_type = other DNA
tcaagctcagactttcctacca

SEQ ID NO: 39649 - DNA, 22 bp, synthetic construct
  misc_feature 1..22: note = chemically synthesized
  source 1..22: mol_type = other DNA
agactttcctaccagtcaaatc

SEQ ID NO: 39650 - DNA, 22 bp, synthetic construct
  misc_feature 1..22: note = chemically synthesized
  source 1..22: mol_type = other DNA
tcctaccagtcaaatcaaactc

SEQ ID NO: 39651 - DNA, 22 bp, synthetic construct
  misc_feature 1..22: note = chemically synthesized
  source 1..22: mol_type = other DNA
cctaccagtcaaatcaaactcc

SEQ ID NO: 39652 - DNA, 22 bp, synthetic construct
  misc_feature 1..22: note = chemically synthesized
  source 1..22: mol_type = other DNA
ctaccagtcaaatcaaactccc

SEQ ID NO: 39653 - DNA, 22 bp, synthetic construct
  misc_feature 1..22: note = chemically synthesized
  source 1..22: mol_type = other DNA
ccagtcaaatcaaactcccagc

SEQ ID NO: 39654 - DNA, 22 bp, synthetic construct
  misc_feature 1..22: note = chemically synthesized
  source 1..22: mol_type = other DNA
ccagccctcaggaagaccaggc

SEQ ID NO: 39655 - DNA, 22 bp, synthetic construct
  misc_feature 1..22: note = chemically synthesized
  source 1..22: mol_type = other DNA
aggaagaccaggctgaagaccg

SEQ ID NO: 39656 - DNA, 22 bp, synthetic construct
  misc_feature 1..22: note = chemically synthesized
  source 1..22: mol_type = other DNA
aagaccgagaactatgtttccc

SEQ ID NO: 39657 - DNA, 22 bp, synthetic construct
  misc_feature 1..22: note = chemically synthesized
  source 1..22: mol_type = other DNA
tgtttccctggcaacagccctt

SEQ ID NO: 39658 - DNA, 22 bp, synthetic construct
  misc_feature 1..22: note = chemically synthesized
  source 1..22: mol_type = other DNA
ccctggcaacagcccttggcct

SEQ ID NO: 39659 - DNA, 22 bp, synthetic construct
  misc_feature 1..22: note = chemically synthesized
  source 1..22: mol_type = other DNA
cctggcaacagcccttggcctc

SEQ ID NO: 39660 - DNA, 22 bp, synthetic construct
  misc_feature 1..22: note = chemically synthesized
  source 1..22: mol_type = other DNA
gcaacagcccttggcctctcaa

SEQ ID NO: 39661 - DNA, 22 bp, synthetic construct
  misc_feature 1..22: note = chemically synthesized
  source 1..22: mol_type = other DNA
ggcctctcaactccaccctcct

SEQ ID NO: 39662 - DNA, 22 bp, synthetic construct
  misc_feature 1..22: note = chemically synthesized
  source 1..22: mol_type = other DNA
gcctctcaactccaccctcctc

SEQ ID NO: 39663 - DNA, 22 bp, synthetic construct
  misc_feature 1..22: note = chemically synthesized
  source 1..22: mol_type = other DNA
tcaactccaccctcctctgaac

SEQ ID NO: 39664 - DNA, 22 bp, synthetic construct
  misc_feature 1..22: note = chemically synthesized
  source 1..22: mol_type = other DNA
aactccaccctcctctgaactg

SEQ ID NO: 39665 - DNA, 22 bp, synthetic construct
  misc_feature 1..22: note = chemically synthesized
  source 1..22: mol_type = other DNA
caccctcctctgaactgctcaa

SEQ ID NO: 39666 - DNA, 22 bp, synthetic construct
  misc_feature 1..22: note = chemically synthesized
  source 1..22: mol_type = other DNA
ctctgaactgctcaactccctt

SEQ ID NO: 39667 - DNA, 22 bp, synthetic construct
  misc_feature 1..22: note = chemically synthesized
  source 1..22: mol_type = other DNA
tgaactgctcaactcccttcta

SEQ ID NO: 39668 - DNA, 22 bp, synthetic construct
  misc_feature 1..22: note = chemically synthesized
  source 1..22: mol_type = other DNA
aactgctcaactcccttctatc

SEQ ID NO: 39669 - DNA, 22 bp, synthetic construct
  misc_feature 1..22: note = chemically synthesized
  source 1..22: mol_type = other DNA
ctcaactcccttctatcccttc

SEQ ID NO: 39670 - DNA, 22 bp, synthetic construct
  misc_feature 1..22: note = chemically synthesized
  source 1..22: mol_type = other DNA
aactcccttctatcccttccct

SEQ ID NO: 39671 - DNA, 22 bp, synthetic construct
  misc_feature 1..22: note = chemically synthesized
  source 1..22: mol_type = other DNA
ccttctatcccttccctccaaa

SEQ ID NO: 39672 - DNA, 22 bp, synthetic construct
  misc_feature 1..22: note = chemically synthesized
  source 1..22: mol_type = other DNA
ctatcccttccctccaaaagtg

SEQ ID NO: 39673 - DNA, 22 bp, synthetic construct
  misc_feature 1..22: note = chemically synthesized
  source 1..22: mol_type = other DNA
tatcccttccctccaaaagtgg

SEQ ID NO: 39674 - DNA, 22 bp, synthetic construct
  misc_feature 1..22: note = chemically synthesized
  source 1..22: mol_type = other DNA
tcccttccctccaaaagtggct

SEQ ID NO: 39675 - DNA, 22 bp, synthetic construct
  misc_feature 1..22: note = chemically synthesized
  source 1..22: mol_type = other DNA
ccctccaaaagtggctccgttt

SEQ ID NO: 39676 - DNA, 22 bp, synthetic construct
  misc_feature 1..22: note = chemically synthesized
  source 1..22: mol_type = other DNA
cctccaaaagtggctccgtttc

SEQ ID NO: 39677 - DNA, 22 bp, synthetic construct
  misc_feature 1..22: note = chemically synthesized
  source 1..22: mol_type = other DNA
caaaagtggctccgtttccaca

SEQ ID NO: 39678 - DNA, 22 bp, synthetic construct
  misc_feature 1..22: note = chemically synthesized
  source 1..22: mol_type = other DNA
cgtttccacagccccatgcagg

SEQ ID NO: 39679 - DNA, 22 bp, synthetic construct
  misc_feature 1..22: note = chemically synthesized
  source 1..22: mol_type = other DNA
ccacagccccatgcaggcccca

SEQ ID NO: 39680 - DNA, 22 bp, synthetic construct
  misc_feature 1..22: note = chemically synthesized
  source 1..22: mol_type = other DNA
cacagccccatgcaggccccag

SEQ ID NO: 39681 - DNA, 22 bp, synthetic construct
  misc_feature 1..22: note = chemically synthesized
  source 1..22: mol_type = other DNA
tccccacccagccagcatgcag

SEQ ID NO: 39682 - DNA, 22 bp, synthetic construct
  misc_feature 1..22: note = chemically synthesized
  source 1..22: mol_type = other DNA
cccacccagccagcatgcaggg

SEQ ID NO: 39683 - DNA, 22 bp, synthetic construct
  misc_feature 1..22: note = chemically synthesized
  source 1..22: mol_type = other DNA
gaaaccgtgagcccaacctcct

SEQ ID NO: 39684 - DNA, 22 bp, synthetic construct
  misc_feature 1..22: note = chemically synthesized
  source 1..22: mol_type = other DNA
ctaaaccttctgcaatctgtga

SEQ ID NO: 39685 - DNA, 22 bp, synthetic construct
  misc_feature 1..22: note = chemically synthesized
  source 1..22: mol_type = other DNA
aaccttctgcaatctgtgacct

SEQ ID NO: 39686 - DNA, 22 bp, synthetic construct
  misc_feature 1..22: note = chemically synthesized
  source 1..22: mol_type = other DNA
ctgcaatctgtgacctaaccca

SEQ ID NO: 39687 - DNA, 22 bp, synthetic construct
  misc_feature 1..22: note = chemically synthesized
  source 1..22: mol_type = other DNA
tgcaatctgtgacctaacccag

SEQ ID NO: 39688 - DNA, 22 bp, synthetic construct
  misc_feature 1..22: note = chemically synthesized
  source 1..22: mol_type = other DNA
caatctgtgacctaacccaggc

SEQ ID NO: 39689 - DNA, 22 bp, synthetic construct
  misc_feature 1..22: note = chemically synthesized
  source 1..22: mol_type = other DNA
tgacctaacccaggcttaggcc

SEQ ID NO: 39690 - DNA, 22 bp, synthetic construct
  misc_feature 1..22: note = chemically synthesized
  source 1..22: mol_type = other DNA
acccaggcttaggcccagcttg

SEQ ID NO: 39691 - DNA, 22 bp, synthetic construct
  misc_feature 1..22: note = chemically synthesized
  source 1..22: mol_type = other DNA
aggcccagcttgggggaaggga

SEQ ID NO: 39692 - DNA, 22 bp, synthetic construct
  misc_feature 1..22: note = chemically synthesized
  source 1..22: mol_type = other DNA
ggcccagcttgggggaagggag

SEQ ID NO: 39693 - DNA, 22 bp, synthetic construct
  misc_feature 1..22: note = chemically synthesized
  source 1..22: mol_type = other DNA
gggggaagggagcagatgaggt

SEQ ID NO: 39694 - DNA, 22 bp, synthetic construct
  misc_feature 1..22: note = chemically synthesized
  source 1..22: mol_type = other DNA
ggggaagggagcagatgaggtg

SEQ ID NO: 39695 - DNA, 22 bp, synthetic construct
  misc_feature 1..22: note = chemically synthesized
  source 1..22: mol_type = other DNA
ttaacccctgaaccacccagcc

SEQ ID NO: 39696 - DNA, 22 bp, synthetic construct
  misc_feature 1..22: note = chemically synthesized
  source 1..22: mol_type = other DNA
taacccctgaaccacccagccc

SEQ ID NO: 39697 - DNA, 22 bp, synthetic construct
  misc_feature 1..22: note = chemically synthesized
  source 1..22: mol_type = other DNA
aacccctgaaccacccagccct

SEQ ID NO: 39698 - DNA, 22 bp, synthetic construct
  misc_feature 1..22: note = chemically synthesized
  source 1..22: mol_type = other DNA
acccctgaaccacccagccctc

SEQ ID NO: 39699 - DNA, 22 bp, synthetic construct
  misc_feature 1..22: note = chemically synthesized
  source 1..22: mol_type = other DNA
aaccacccagccctcaggacct

SEQ ID NO: 39700 - DNA, 22 bp, synthetic construct
  misc_feature 1..22: note = chemically synthesized
  source 1..22: mol_type = other DNA
aggacctgagggcttatgaaat

SEQ ID NO: 39701 - DNA, 22 bp, synthetic construct
  misc_feature 1..22: note = chemically synthesized
  source 1..22: mol_type = other DNA
agggcttatgaaattcacacaa

SEQ ID NO: 39702 - DNA, 22 bp, synthetic construct
  misc_feature 1..22: note = chemically synthesized
  source 1..22: mol_type = other DNA
atgaaattcacacaataactct

SEQ ID NO: 39703 - DNA, 22 bp, synthetic construct
  misc_feature 1..22: note = chemically synthesized
  source 1..22: mol_type = other DNA
tgaaattcacacaataactctt

SEQ ID NO: 39704 - DNA, 22 bp, synthetic construct
  misc_feature 1..22: note = chemically synthesized
  source 1..22: mol_type = other DNA
acacaataactctttgttacct

SEQ ID NO: 39705 - DNA, 22 bp, synthetic construct
  misc_feature 1..22: note = chemically synthesized
  source 1..22: mol_type = other DNA
tttgttacctaggattacctag

SEQ ID NO: 39706 - DNA, 22 bp, synthetic construct
  misc_feature 1..22: note = chemically synthesized
  source 1..22: mol_type = other DNA
tgttacctaggattacctagga

SEQ ID NO: 39707 - DNA, 22 bp, synthetic construct
  misc_feature 1..22: note = chemically synthesized
  source 1..22: mol_type = other DNA
gttacctaggattacctaggag

SEQ ID NO: 39708 - DNA, 22 bp, synthetic construct
  misc_feature 1..22: note = chemically synthesized
  source 1..22: mol_type = other DNA
ttacctaggattacctaggagt

SEQ ID NO: 39709 - DNA, 22 bp, synthetic construct
  misc_feature 1..22: note = chemically synthesized
  source 1..22: mol_type = other DNA
cctaggattacctaggagttaa

SEQ ID NO: 39710 - DNA, 22 bp, synthetic construct
  misc_feature 1..22: note = chemically synthesized
  source 1..22: mol_type = other DNA
ggattacctaggagttaacaaa

SEQ ID NO: 39711 - DNA, 22 bp, synthetic construct
  misc_feature 1..22: note = chemically synthesized
  source 1..22: mol_type = other DNA
cctaggagttaacaaaaataaa

SEQ ID NO: 39712 - DNA, 22 bp, synthetic construct
  misc_feature 1..22: note = chemically synthesized
  source 1..22: mol_type = other DNA
ggagttaacaaaaataaacaac

SEQ ID NO: 39713 - DNA, 22 bp, synthetic construct
  misc_feature 1..22: note = chemically synthesized
  source 1..22: mol_type = other DNA
acaaaaataaacaactggcttt

SEQ ID NO: 39714 - DNA, 22 bp, synthetic construct
  misc_feature 1..22: note = chemically synthesized
  source 1..22: mol_type = other DNA
gctttgaatctggtctcagggt

SEQ ID NO: 39715 - DNA, 22 bp, synthetic construct
  misc_feature 1..22: note = chemically synthesized
  source 1..22: mol_type = other DNA
tgaatctggtctcagggtgcat

SEQ ID NO: 39716 - DNA, 22 bp, synthetic construct
  misc_feature 1..22: note = chemically synthesized
  source 1..22: mol_type = other DNA
gaatctggtctcagggtgcatg

SEQ ID NO: 39717 - DNA, 22 bp, synthetic construct
  misc_feature 1..22: note = chemically synthesized
  source 1..22: mol_type = other DNA
aatctggtctcagggtgcatgc

SEQ ID NO: 39718 - DNA, 22 bp, synthetic construct
  misc_feature 1..22: note = chemically synthesized
  source 1..22: mol_type = other DNA
gtctcagggtgcatgccctgct

SEQ ID NO: 39719 - DNA, 22 bp, synthetic construct
  misc_feature 1..22: note = chemically synthesized
  source 1..22: mol_type = other DNA
agggtgcatgccctgctcttca

SEQ ID NO: 39720 - DNA, 22 bp, synthetic construct
  misc_feature 1..22: note = chemically synthesized
  source 1..22: mol_type = other DNA
ctcttcagataccatttacaag

SEQ ID NO: 39721 - DNA, 22 bp, synthetic construct
  misc_feature 1..22: note = chemically synthesized
  source 1..22: mol_type = other DNA
ttcagataccatttacaagatg

SEQ ID NO: 39722 - DNA, 22 bp, synthetic construct
  misc_feature 1..22: note = chemically synthesized
  source 1..22: mol_type = other DNA
cagataccatttacaagatggg

SEQ ID NO: 39723 - DNA, 22 bp, synthetic construct
  misc_feature 1..22: note = chemically synthesized
  source 1..22: mol_type = other DNA
agataccatttacaagatgggt

SEQ ID NO: 39724 - DNA, 22 bp, synthetic construct
  misc_feature 1..22: note = chemically synthesized
  source 1..22: mol_type = other DNA
acaagatgggtaagtgtcatct

SEQ ID NO: 39725 - DNA, 22 bp, synthetic construct
  misc_feature 1..22: note = chemically synthesized
  source 1..22: mol_type = other DNA
caagatgggtaagtgtcatctc

SEQ ID NO: 39726 - DNA, 22 bp, synthetic construct
  misc_feature 1..22: note = chemically synthesized
  source 1..22: mol_type = other DNA
cctcccatctaaaaacagtccc

SEQ ID NO: 39727 - DNA, 22 bp, synthetic construct
  misc_feature 1..22: note = chemically synthesized
  source 1..22: mol_type = other DNA
ccatctaaaaacagtccccctt

SEQ ID NO: 39728 - DNA, 22 bp, synthetic construct
  misc_feature 1..22: note = chemically synthesized
  source 1..22: mol_type = other DNA
aaaacagtcccccttagagcct

SEQ ID NO: 39729 - DNA, 22 bp, synthetic construct
  misc_feature 1..22: note = chemically synthesized
  source 1..22: mol_type = other DNA
agagccttaactctggcatctt

SEQ ID NO: 39730 - DNA, 22 bp, synthetic construct
  misc_feature 1..22: note = chemically synthesized
  source 1..22: mol_type = other DNA
gagccttaactctggcatcttg

SEQ ID NO: 39731 - DNA, 22 bp, synthetic construct
  misc_feature 1..22: note = chemically synthesized
  source 1..22: mol_type = other DNA
aactctggcatcttgctctttg

SEQ ID NO: 39732 - DNA, 22 bp, synthetic construct
  misc_feature 1..22: note = chemically synthesized
  source 1..22: mol_type = other DNA
actctggcatcttgctctttgt

SEQ ID NO: 39733 - DNA, 22 bp, synthetic construct
  misc_feature 1..22: note = chemically synthesized
  source 1..22: mol_type = other DNA
tggcatcttgctctttgttatt

SEQ ID NO: 39734 - DNA, 22 bp, synthetic construct
  misc_feature 1..22: note = chemically synthesized
  source 1..22: mol_type = other DNA
gcatcttgctctttgttattct

SEQ ID NO: 39735 - DNA, 22 bp, synthetic construct
  misc_feature 1..22: note = chemically synthesized
  source 1..22: mol_type = other DNA
gctctttgttattctctctcca

SEQ ID NO: 39736 - DNA, 22 bp, synthetic construct
  misc_feature 1..22: note = chemically synthesized
  source 1..22: mol_type = other DNA
ctctttgttattctctctccat

SEQ ID NO: 39737 - DNA, 22 bp, synthetic construct
  misc_feature 1..22: note = chemically synthesized
  source 1..22: mol_type = other DNA
tttgttattctctctccatgac

SEQ ID NO: 39738 - DNA, 22 bp, synthetic construct
  misc_feature 1..22: note = chemically synthesized
  source 1..22: mol_type = other DNA
tgttattctctctccatgacct

SEQ ID NO: 39739 - DNA, 22 bp, synthetic construct
  misc_feature 1..22: note = chemically synthesized
  source 1..22: mol_type = other DNA
gttattctctctccatgacctt

SEQ ID NO: 39740 - DNA, 22 bp, synthetic construct
  misc_feature 1..22: note = chemically synthesized
  source 1..22: mol_type = other DNA
ttattctctctccatgaccttt

SEQ ID NO: 39741 - DNA, 22 bp, synthetic construct
  misc_feature 1..22: note = chemically synthesized
  source 1..22: mol_type = other DNA
ttctctctccatgacctttttc

SEQ ID NO: 39742 - DNA, 22 bp, synthetic construct
  misc_feature 1..22: note = chemically synthesized
  source 1..22: mol_type = other DNA
tctctccatgacctttttcctt

SEQ ID NO: 39743 - DNA, 22 bp, synthetic construct
  misc_feature 1..22: note = chemically synthesized
  source 1..22: mol_type = other DNA
tctccatgacctttttcctttt

SEQ ID NO: 39744 - DNA, 22 bp, synthetic construct
  misc_feature 1..22: note = chemically synthesized
  source 1..22: mol_type = other DNA
tccatgacctttttccttttct

SEQ ID NO: 39745 - DNA, 22 bp, synthetic construct
  misc_feature 1..22: note = chemically synthesized
  source 1..22: mol_type = other DNA
catgacctttttccttttcttt

SEQ ID NO: 39746 - DNA, 22 bp, synthetic construct
  misc_feature 1..22: note = chemically synthesized
  source 1..22: mol_type = other DNA
tttccttttctttttttttctt

SEQ ID NO: 39747 - DNA, 22 bp, synthetic construct
  misc_feature 1..22: note = chemically synthesized
  source 1..22: mol_type = other DNA
ttccttttctttttttttcttt

SEQ ID NO: 39748 - DNA, 22 bp, synthetic construct
  misc_feature 1..22: note = chemically synthesized
  source 1..22: mol_type = other DNA
tccttttctttttttttctttc

SEQ ID NO: 39749 - DNA, 22 bp, synthetic construct
  misc_feature 1..22: note = chemically synthesized
  source 1..22: mol_type = other DNA
ccttttctttttttttctttcc

SEQ ID NO: 39750 - DNA, 22 bp, synthetic construct
  misc_feature 1..22: note = chemically synthesized
  source 1..22: mol_type = other DNA
cttttctttttttttctttcca

SEQ ID NO: 39751 - DNA, 22 bp, synthetic construct
  misc_feature 1..22: note = chemically synthesized
  source 1..22: mol_type = other DNA
ttctttttttttctttccacag

SEQ ID NO: 39752 - DNA, 22 bp, synthetic construct
  misc_feature 1..22: note = chemically synthesized
  source 1..22: mol_type = other DNA
tctttttttttctttccacagc

SEQ ID NO: 39753 - DNA, 22 bp, synthetic construct
  misc_feature 1..22: note = chemically synthesized
  source 1..22: mol_type = other DNA
ctttttttttctttccacagca

SEQ ID NO: 39754 - DNA, 22 bp, synthetic construct
  misc_feature 1..22: note = chemically synthesized
  source 1..22: mol_type = other DNA
tttttttttctttccacagcag

SEQ ID NO: 39755 - DNA, 22 bp, synthetic construct
  misc_feature 1..22: note = chemically synthesized
  source 1..22: mol_type = other DNA
tttttttctttccacagcaggt

SEQ ID NO: 39756 - DNA, 22 bp, synthetic construct
  misc_feature 1..22: note = chemically synthesized
  source 1..22: mol_type = other DNA
ttttttctttccacagcaggtt

SEQ ID NO: 39757 - DNA, 22 bp, synthetic construct
  misc_feature 1..22: note = chemically synthesized
  source 1..22: mol_type = other DNA
tttttctttccacagcaggtta

SEQ ID NO: 39758 - DNA, 22 bp, synthetic construct
  misc_feature 1..22: note = chemically synthesized
  source 1..22: mol_type = other DNA
ttttctttccacagcaggttat

SEQ ID NO: 39759 - DNA, 22 bp, synthetic construct
  misc_feature 1..22: note = chemically synthesized
  source 1..22: mol_type = other DNA
tttctttccacagcaggttatt

SEQ ID NO: 39760 - DNA, 22 bp, synthetic construct
  misc_feature 1..22: note = chemically synthesized
  source 1..22: mol_type = other DNA
ttctttccacagcaggttattt

SEQ ID NO: 39761 - DNA, 22 bp, synthetic construct
  misc_feature 1..22: note = chemically synthesized
  source 1..22: mol_type = other DNA
tctttccacagcaggttatttt

SEQ ID NO: 39762 - DNA, 22 bp, synthetic construct
  misc_feature 1..22: note = chemically synthesized
  source 1..22: mol_type = other DNA
ctttccacagcaggttattttt

SEQ ID NO: 39763 - DNA, 22 bp, synthetic construct
  misc_feature 1..22: note = chemically synthesized
  source 1..22: mol_type = other DNA
tttccacagcaggttatttttc

SEQ ID NO: 39764 - DNA, 22 bp, synthetic construct
  misc_feature 1..22: note = chemically synthesized
  source 1..22: mol_type = other DNA
tccacagcaggttatttttcat

SEQ ID NO: 39765 - DNA, 22 bp, synthetic construct
  misc_feature 1..22: note = chemically synthesized
  source 1..22: mol_type = other DNA
ccacagcaggttatttttcatt

SEQ ID NO: 39766 - DNA, 22 bp, synthetic construct
  misc_feature 1..22: note = chemically synthesized
  source 1..22: mol_type = other DNA
cacagcaggttatttttcattt

SEQ ID NO: 39767 - DNA, 22 bp, synthetic construct
  misc_feature 1..22: note = chemically synthesized
  source 1..22: mol_type = other DNA
tttttcatttactttcaaataa

SEQ ID NO: 39768 - DNA, 22 bp, synthetic construct
  misc_feature 1..22: note = chemically synthesized
  source 1..22: mol_type = other DNA
ttcatttactttcaaataaaaa

SEQ ID NO: 39769 - DNA, 22 bp, synthetic construct
  misc_feature 1..22: note = chemically synthesized
  source 1..22: mol_type = other DNA
tcatttactttcaaataaaaat

SEQ ID NO: 39770 - DNA, 22 bp, synthetic construct
  misc_feature 1..22: note = chemically synthesized
  source 1..22: mol_type = other DNA
catttactttcaaataaaaatt

SEQ ID NO: 39771 - DNA, 22 bp, synthetic construct
  misc_feature 1..22: note = chemically synthesized
  source 1..22: mol_type = other DNA
atttactttcaaataaaaatta

SEQ ID NO: 39772 - DNA, 22 bp, synthetic construct
  misc_feature 1..22: note = chemically synthesized
  source 1..22: mol_type = other DNA
actttcaaataaaaattagatg

SEQ ID NO: 39773 - DNA, 22 bp, synthetic construct
  misc_feature 1..22: note = chemically synthesized
  source 1..22: mol_type = other DNA
ctttcaaataaaaattagatgt

SEQ ID NO: 39774 - DNA, 22 bp, synthetic construct
  misc_feature 1..22: note = chemically synthesized
  source 1..22: mol_type = other DNA
tcaaataaaaattagatgtcac

SEQ ID NO: 39775 - DNA, 22 bp, synthetic construct
  misc_feature 1..22: note = chemically synthesized
  source 1..22: mol_type = other DNA
caaataaaaattagatgtcaca

SEQ ID NO: 39776 - DNA, 22 bp, synthetic construct
  misc_feature 1..22: note = chemically synthesized
  source 1..22: mol_type = other DNA
aaataaaaattagatgtcacac

SEQ ID NO: 39777 - DNA, 22 bp, synthetic construct
  misc_feature 1..22: note = chemically synthesized
  source 1..22: mol_type = other DNA
gatgtcacacttcttttcttct

SEQ ID NO: 39778 - DNA, 22 bp, synthetic construct
  misc_feature 1..22: note = chemically synthesized
  source 1..22: mol_type = other DNA
cttttcttcttgaacctgcttt

SEQ ID NO: 39779 - DNA, 22 bp, synthetic construct
  misc_feature 1..22: note = chemically synthesized
  source 1..22: mol_type = other DNA
ttttcttcttgaacctgctttt

SEQ ID NO: 39780 - DNA, 22 bp, synthetic construct
  misc_feature 1..22: note = chemically synthesized
  source 1..22: mol_type = other DNA
ttcttcttgaacctgctttttt

SEQ ID NO: 39781 - DNA, 22 bp, synthetic construct
  misc_feature 1..22: note = chemically synthesized
  source 1..22: mol_type = other DNA
tcttcttgaacctgcttttttg

SEQ ID NO: 39782 - DNA, 22 bp, synthetic construct
  misc_feature 1..22: note = chemically synthesized
  source 1..22: mol_type = other DNA
cttcttgaacctgcttttttgt

SEQ ID NO: 39783 - DNA, 22 bp, synthetic construct
  misc_feature 1..22: note = chemically synthesized
  source 1..22: mol_type = other DNA
ttcttgaacctgcttttttgtg

SEQ ID NO: 39784 - DNA, 22 bp, synthetic construct
  misc_feature 1..22: note = chemically synthesized
  source 1..22: mol_type = other DNA
cttgaacctgcttttttgtgtt

SEQ ID NO: 39785 - DNA, 22 bp, synthetic construct
  misc_feature 1..22: note = chemically synthesized
  source 1..22: mol_type = other DNA
ttgaacctgcttttttgtgttt

SEQ ID NO: 39786 - DNA, 22 bp, synthetic construct
  misc_feature 1..22: note = chemically synthesized
  source 1..22: mol_type = other DNA
gaacctgcttttttgtgtttag

SEQ ID NO: 39787 - DNA, 22 bp, synthetic construct
  misc_feature 1..22: note = chemically synthesized
  source 1..22: mol_type = other DNA
aacctgcttttttgtgtttagg

SEQ ID NO: 39788 - DNA, 22 bp, synthetic construct
  misc_feature 1..22: note = chemically synthesized
  source 1..22: mol_type = other DNA
cttttttgtgtttagggtggaa

SEQ ID NO: 39789 - DNA, 22 bp, synthetic construct
  misc_feature 1..22: note = chemically synthesized
  source 1..22: mol_type = other DNA
ttttgtgtttagggtggaatca

SEQ ID NO: 39790 - DNA, 22 bp, synthetic construct
  misc_feature 1..22: note = chemically synthesized
  source 1..22: mol_type = other DNA
tttgtgtttagggtggaatcac

SEQ ID NO: 39791 - DNA, 22 bp, synthetic construct
  misc_feature 1..22: note = chemically synthesized
  source 1..22: mol_type = other DNA
ttgtgtttagggtggaatcact

SEQ ID NO: 39792 - DNA, 22 bp, synthetic construct
  misc_feature 1..22: note = chemically synthesized
  source 1..22: mol_type = other DNA
tgtgtttagggtggaatcactg

SEQ ID NO: 39793 - DNA, 22 bp, synthetic construct
  misc_feature 1..22: note = chemically synthesized
  source 1..22: mol_type = other DNA
gtgtttagggtggaatcactgc

SEQ ID NO: 39794 - DNA, 22 bp, synthetic construct
  misc_feature 1..22: note = chemically synthesized
  source 1..22: mol_type = other DNA
tgtttagggtggaatcactgcc

SEQ ID NO: 39795 - DNA, 22 bp, synthetic construct
  misc_feature 1..22: note = chemically synthesized
  source 1..22: mol_type = other DNA
agggtggaatcactgcccaccc

SEQ ID NO: 39796 - DNA, 22 bp, synthetic construct
  misc_feature 1..22: note = chemically synthesized
  source 1..22: mol_type = other DNA
gggtggaatcactgcccacccc

SEQ ID NO: 39797 - DNA, 22 bp, synthetic construct
  misc_feature 1..22: note = chemically synthesized
  source 1..22: mol_type = other DNA
cccaccccctaaccttttagcc

SEQ ID NO: 39798 - DNA, 22 bp, synthetic construct
  misc_feature 1..22: note = chemically synthesized
  source 1..22: mol_type = other DNA
accttttagccatgcatgattc

SEQ ID NO: 39799 - DNA, 22 bp, synthetic construct
  misc_feature 1..22: note = chemically synthesized
  source 1..22: mol_type = other DNA
ttagccatgcatgattcatacc

SEQ ID NO: 39800 - DNA, 22 bp, synthetic construct
  misc_feature 1..22: note = chemically synthesized
  source 1..22: mol_type = other DNA
tagccatgcatgattcatacca

SEQ ID NO: 39801 - DNA, 22 bp, synthetic construct
  misc_feature 1..22: note = chemically synthesized
  source 1..22: mol_type = other DNA
agccatgcatgattcataccat

SEQ ID NO: 39802 - DNA, 22 bp, synthetic construct
  misc_feature 1..22: note = chemically synthesized
  source 1..22: mol_type = other DNA
gccatgcatgattcataccatg

SEQ ID NO: 39803 - DNA, 22 bp, synthetic construct
  misc_feature 1..22: note = chemically synthesized
  source 1..22: mol_type = other DNA
ataccatgtgttcctacacaga

SEQ ID NO: 39804 - DNA, 22 bp, synthetic construct
  misc_feature 1..22: note = chemically synthesized
  source 1..22: mol_type = other DNA
ctacacagagaagcaaactgta

SEQ ID NO: 39805 - DNA, 22 bp, synthetic construct
  misc_feature 1..22: note = chemically synthesized
  source 1..22: mol_type = other DNA
cacagagaagcaaactgtatta

SEQ ID NO: 39806 - DNA, 22 bp, synthetic construct
  misc_feature 1..22: note = chemically synthesized
  source 1..22: mol_type = other DNA
tattattttctaaaacagtatc

SEQ ID NO: 39807 - DNA, 22 bp, synthetic construct
  misc_feature 1..22: note = chemically synthesized
  source 1..22: mol_type = other DNA
ttttctaaaacagtatctttca

SEQ ID NO: 39808 - DNA, 22 bp, synthetic construct
  misc_feature 1..22: note = chemically synthesized
  source 1..22: mol_type = other DNA
tctaaaacagtatctttcagaa

SEQ ID NO: 39809 - DNA, 22 bp, synthetic construct
  misc_feature 1..22: note = chemically synthesized
  source 1..22: mol_type = other DNA
ctaaaacagtatctttcagaaa

SEQ ID NO: 39810 - DNA, 22 bp, synthetic construct
  misc_feature 1..22: note = chemically synthesized
  source 1..22: mol_type = other DNA
taaaacagtatctttcagaaaa

SEQ ID NO: 39811 - DNA, 22 bp, synthetic construct
  misc_feature 1..22: note = chemically synthesized
  source 1..22: mol_type = other DNA
aaacagtatctttcagaaaaca

SEQ ID NO: 39812 - DNA, 22 bp, synthetic construct
  misc_feature 1..22: note = chemically synthesized
  source 1..22: mol_type = other DNA
tcagaaaacatttgtataaatg

SEQ ID NO: 39813 - DNA, 22 bp, synthetic construct
  misc_feature 1..22: note = chemically synthesized
  source 1..22: mol_type = other DNA
cagaaaacatttgtataaatgg

SEQ ID NO: 39814 - DNA, 22 bp, synthetic construct
  misc_feature 1..22: note = chemically synthesized
  source 1..22: mol_type = other DNA
agaaaacatttgtataaatgga

SEQ ID NO: 39815 - DNA, 22 bp, synthetic construct
  misc_feature 1..22: note = chemically synthesized
  source 1..22: mol_type = other DNA
gtataaatggacaaatttaagt

SEQ ID NO: 39816 - DNA, 22 bp, synthetic construct
  misc_feature 1..22: note = chemically synthesized
  source 1..22: mol_type = other DNA
tataaatggacaaatttaagtt

SEQ ID NO: 39817 - DNA, 22 bp, synthetic construct
  misc_feature 1..22: note = chemically synthesized
  source 1..22: mol_type = other DNA
aagtttcataaaatggtcccta

SEQ ID NO: 39818 - DNA, 22 bp, synthetic construct
  misc_feature 1..22: note = chemically synthesized
  source 1..22: mol_type = other DNA
agtttcataaaatggtccctac

SEQ ID NO: 39819 - DNA, 22 bp, synthetic construct
  misc_feature 1..22: note = chemically synthesized
  source 1..22: mol_type = other DNA
cataaaatggtccctactataa

SEQ ID NO: 39820 - DNA, 22 bp, synthetic construct
  misc_feature 1..22: note = chemically synthesized
  source 1..22: mol_type = other DNA
ataaaatggtccctactataaa

SEQ ID NO: 39821 - DNA, 22 bp, synthetic construct
  misc_feature 1..22: note = chemically synthesized
  source 1..22: mol_type = other DNA
ctataaaagctcacttgaacaa

SEQ ID NO: 39822 - DNA, 22 bp, synthetic construct
  misc_feature 1..22: note = chemically synthesized
  source 1..22: mol_type = other DNA
taaaagctcacttgaacaagta

SEQ ID NO: 39823 - DNA, 22 bp, synthetic construct
  misc_feature 1..22: note = chemically synthesized
  source 1..22: mol_type = other DNA
acttgaacaagtaaatggtggt

SEQ ID NO: 39824 - DNA, 22 bp, synthetic construct
  misc_feature 1..22: note = chemically synthesized
  source 1..22: mol_type = other DNA
gaacaagtaaatggtggtggca

SEQ ID NO: 39825 - DNA, 22 bp, synthetic construct
  misc_feature 1..22: note = chemically synthesized
  source 1..22: mol_type = other DNA
aacaagtaaatggtggtggcag

SEQ ID NO: 39826 - DNA, 22 bp, synthetic construct
  misc_feature 1..22: note = chemically synthesized
  source 1..22: mol_type = other DNA
gtggtgatggtggtggtggtgg

SEQ ID NO: 39827 - DNA, 22 bp, synthetic construct
  misc_feature 1..22: note = chemically synthesized
  source 1..22: mol_type = other DNA
gtgatggtggtggtggtagtga

SEQ ID NO: 39828 - DNA, 22 bp, synthetic construct
  misc_feature 1..22: note = chemically synthesized
  source 1..22: mol_type = other DNA
gtggtgatggtgatggtgatgg

SEQ ID NO: 39829 - DNA, 22 bp, synthetic construct
  misc_feature 1..22: note = chemically synthesized
  source 1..22: mol_type = other DNA
gtgatggtggtggtggtagtga

SEQ ID NO: 39830 - DNA, 22 bp, synthetic construct
  misc_feature 1..22: note = chemically synthesized
  source 1..22: mol_type = other DNA
gtggtgatggtgatggtgatgg

SEQ ID NO: 39831 - DNA, 22 bp, synthetic construct
  misc_feature 1..22: note = chemically synthesized
  source 1..22: mol_type = other DNA
gtgatggtggtggtggtagtga

SEQ ID NO: 39832 - DNA, 22 bp, synthetic construct
  misc_feature 1..22: note = chemically synthesized
  source 1..22: mol_type = other DNA
gtggtgatggtgatggtggtgg

SEQ ID NO: 39833 - DNA, 22 bp, synthetic construct
  misc_feature 1..22: note = chemically synthesized
  source 1..22: mol_type = other DNA
gtggtgatggtactggtggtga

SEQ ID NO: 39834 - DNA, 22 bp, synthetic construct
  misc_feature 1..22: note = chemically synthesized
  source 1..22: mol_type = other DNA
gtggtgatggtggtggtggtag

SEQ ID NO: 39835 - DNA, 22 bp, synthetic construct
  misc_feature 1..22: note = chemically synthesized
  source 1..22: mol_type = other DNA
atggtgatggtactggtggtga

SEQ ID NO: 39836 - DNA, 22 bp, synthetic construct
  misc_feature 1..22: note = chemically synthesized
  source 1..22: mol_type = other DNA
gtggtgatggtactggtggtga

SEQ ID NO: 39837 - DNA, 22 bp, synthetic construct
  misc_feature 1..22: note = chemically synthesized
  source 1..22: mol_type = other DNA
gtggtgatggtgatggtggtgg

SEQ ID NO: 39838 - DNA, 22 bp, synthetic construct
  misc_feature 1..22: note = chemically synthesized
  source 1..22: mol_type = other DNA
ctggtggtgatggtactggtgg

SEQ ID NO: 39839 - DNA, 22 bp, synthetic construct
  misc_feature 1..22: note = chemically synthesized
  source 1..22: mol_type = other DNA
gtggtgatggtactggtggtga

SEQ ID NO: 39840 - DNA, 22 bp, synthetic construct
  misc_feature 1..22: note = chemically synthesized
  source 1..22: mol_type = other DNA
gtggtgatggtggtggtggtag

SEQ ID NO: 39841 - DNA, 22 bp, synthetic construct
  misc_feature 1..22: note = chemically synthesized
  source 1..22: mol_type = other DNA
gtggtgatggtggtggtggtag

SEQ ID NO: 39842 - DNA, 22 bp, synthetic construct
  misc_feature 1..22: note = chemically synthesized
  source 1..22: mol_type = other DNA
gtggtgatggtggtggtggtag

SEQ ID NO: 39843 - DNA, 22 bp, synthetic construct
  misc_feature 1..22: note = chemically synthesized
  source 1..22: mol_type = other DNA
tggtggtggtggtgatggtggc

SEQ ID NO: 39844 - DNA, 22 bp, synthetic construct
  misc_feature 1..22: note = chemically synthesized
  source 1..22: mol_type = other DNA
tggtggtggtggtgatggtggt

SEQ ID NO: 39845 - DNA, 22 bp, synthetic construct
  misc_feature 1..22: note = chemically synthesized
  source 1..22: mol_type = other DNA
cacattttaactacaatgatgt

SEQ ID NO: 39846 - DNA, 22 bp, synthetic construct
  misc_feature 1..22: note = chemically synthesized
  source 1..22: mol_type = other DNA
acattttaactacaatgatgtg

SEQ ID NO: 39847 - DNA, 22 bp, synthetic construct
  misc_feature 1..22: note = chemically synthesized
  source 1..22: mol_type = other DNA
taactacaatgatgtgcatttt

SEQ ID NO: 39848 - DNA, 22 bp, synthetic construct
  misc_feature 1..22: note = chemically synthesized
  source 1..22: mol_type = other DNA
aactacaatgatgtgcattttt

SEQ ID NO: 39849 - DNA, 22 bp, synthetic construct
  misc_feature 1..22: note = chemically synthesized
  source 1..22: mol_type = other DNA
actacaatgatgtgcatttttc

SEQ ID NO: 39850 - DNA, 22 bp, synthetic construct
  misc_feature 1..22: note = chemically synthesized
  source 1..22: mol_type = other DNA
caatgatgtgcatttttctcta

SEQ ID NO: 39851 - DNA, 22 bp, synthetic construct
  misc_feature 1..22: note = chemically synthesized
  source 1..22: mol_type = other DNA
ttctctaaaaccaggagaaaaa

SEQ ID NO: 39852 - DNA, 22 bp, synthetic construct
  misc_feature 1..22: note = chemically synthesized
  source 1..22: mol_type = other DNA
tctctaaaaccaggagaaaaat

SEQ ID NO: 39853 - DNA, 22 bp, synthetic construct
  misc_feature 1..22: note = chemically synthesized
  source 1..22: mol_type = other DNA
ctctaaaaccaggagaaaaatt

SEQ ID NO: 39854 - DNA, 22 bp, synthetic construct
  misc_feature 1..22: note = chemically synthesized
  source 1..22: mol_type = other DNA
tctaaaaccaggagaaaaatta

SEQ ID NO: 39855 - DNA, 22 bp, synthetic construct
  misc_feature 1..22: note = chemically synthesized
  source 1..22: mol_type = other DNA
taaaaccaggagaaaaattagt

SEQ ID NO: 39856 - DNA, 22 bp, synthetic construct
  misc_feature 1..22: note = chemically synthesized
  source 1..22: mol_type = other DNA
aaaccaggagaaaaattagtca

SEQ ID NO: 39857 - DNA, 22 bp, synthetic construct
  misc_feature 1..22: note = chemically synthesized
  source 1..22: mol_type = other DNA
gtcaaaattatgtgtgggcatg

SEQ ID NO: 39858 - DNA, 22 bp, synthetic construct
  misc_feature 1..22: note = chemically synthesized
  source 1..22: mol_type = other DNA
tgtgtgggcatgaatatacaac

SEQ ID NO: 39859 - DNA, 22 bp, synthetic construct
  misc_feature 1..22: note = chemically synthesized
  source 1..22: mol_type = other DNA
tgttcaaatacacatgtaaata

SEQ ID NO: 39860 - DNA, 22 bp, synthetic construct
  misc_feature 1..22: note = chemically synthesized
  source 1..22: mol_type = other DNA
aaatacacatgtaaatacataa

SEQ ID NO: 39861 - DNA, 22 bp, synthetic construct
  misc_feature 1..22: note = chemically synthesized
  source 1..22: mol_type = other DNA
gaataactctggaataacccta

SEQ ID NO: 39862 - DNA, 22 bp, synthetic construct
  misc_feature 1..22: note = chemically synthesized
  source 1..22: mol_type = other DNA
tggaataaccctaaactgactc

SEQ ID NO: 39863 - DNA, 22 bp, synthetic construct
  misc_feature 1..22: note = chemically synthesized
  source 1..22: mol_type = other DNA
gaataaccctaaactgactcct

SEQ ID NO: 39864 - DNA, 22 bp, synthetic construct
  misc_feature 1..22: note = chemically synthesized
  source 1..22: mol_type = other DNA
aactgactccttttgattctgg

SEQ ID NO: 39865 - DNA, 22 bp, synthetic construct
  misc_feature 1..22: note = chemically synthesized
  source 1..22: mol_type = other DNA
actccttttgattctggccttg

SEQ ID NO: 39866 - DNA, 22 bp, synthetic construct
  misc_feature 1..22: note = chemically synthesized
  source 1..22: mol_type = other DNA
cttttgattctggccttggcta

SEQ ID NO: 39867 - DNA, 22 bp, synthetic construct
  misc_feature 1..22: note = chemically synthesized
  source 1..22: mol_type = other DNA
ttgattctggccttggctaaag

SEQ ID NO: 39868 - DNA, 22 bp, synthetic construct
  misc_feature 1..22: note = chemically synthesized
  source 1..22: mol_type = other DNA
tgattctggccttggctaaaga

SEQ ID NO: 39869 - DNA, 22 bp, synthetic construct
  misc_feature 1..22: note = chemically synthesized
  source 1..22: mol_type = other DNA
gattctggccttggctaaagat

SEQ ID NO: 39870 - DNA, 22 bp, synthetic construct
  misc_feature 1..22: note = chemically synthesized
  source 1..22: mol_type = other DNA
attctggccttggctaaagatg

SEQ ID NO: 39871 - DNA, 22 bp, synthetic construct
  misc_feature 1..22: note = chemically synthesized
  source 1..22: mol_type = other DNA
tggccttggctaaagatgtgtg

SEQ ID NO: 39872 - DNA, 22 bp, synthetic construct
  misc_feature 1..22: note = chemically synthesized
  source 1..22: mol_type = other DNA
gccttggctaaagatgtgtgcc

SEQ ID NO: 39873 - DNA, 22 bp, synthetic construct
  misc_feature 1..22: note = chemically synthesized
  source 1..22: mol_type = other DNA
ggctaaagatgtgtgccatgga

SEQ ID NO: 39874 - DNA, 22 bp, synthetic construct
  misc_feature 1..22: note = chemically synthesized
  source 1..22: mol_type = other DNA
gctaaagatgtgtgccatggac

SEQ ID NO: 39875 - DNA, 22 bp, synthetic construct
  misc_feature 1..22: note = chemically synthesized
  source 1..22: mol_type = other DNA
aagatgtgtgccatggactata

SEQ ID NO: 39876 - DNA, 22 bp, synthetic construct
  misc_feature 1..22: note = chemically synthesized
  source 1..22: mol_type = other DNA
tacccaaagtcctaaatgaggc

SEQ ID NO: 39877 - DNA, 22 bp, synthetic construct
  misc_feature 1..22: note = chemically synthesized
  source 1..22: mol_type = other DNA
aatgaggccacaggagtgaatg

SEQ ID NO: 39878 - DNA, 22 bp, synthetic construct
  misc_feature 1..22: note = chemically synthesized
  source 1..22: mol_type = other DNA
cagaggcacaggcatcttcaat

SEQ ID NO: 39879 - DNA, 22 bp, synthetic construct
  misc_feature 1..22: note = chemically synthesized
  source 1..22: mol_type = other DNA
caatcactagccacggagcaag

SEQ ID NO: 39880 - DNA, 22 bp, synthetic construct
  misc_feature 1..22: note = chemically synthesized
  source 1..22: mol_type = other DNA
aatcactagccacggagcaaga

SEQ ID NO: 39881 - DNA, 22 bp, synthetic construct
  misc_feature 1..22: note = chemically synthesized
  source 1..22: mol_type = other DNA
gccacggagcaagacaagaccc

SEQ ID NO: 39882 - DNA, 22 bp, synthetic construct
  misc_feature 1..22: note = chemically synthesized
  source 1..22: mol_type = other DNA
gggagaagacccacagggatga

SEQ ID NO: 39883 - DNA, 22 bp, synthetic construct
  misc_feature 1..22: note = chemically synthesized
  source 1..22: mol_type = other DNA
ctatcagctcccagcctccagt

SEQ ID NO: 39884 - DNA, 22 bp, synthetic construct
  misc_feature 1..22: note = chemically synthesized
  source 1..22: mol_type = other DNA
tcagctcccagcctccagtgag

SEQ ID NO: 39885 - DNA, 22 bp, synthetic construct
  misc_feature 1..22: note = chemically synthesized
  source 1..22: mol_type = other DNA
ccagcctccagtgaggaaagaa

SEQ ID NO: 39886 - DNA, 22 bp, synthetic construct
  misc_feature 1..22: note = chemically synthesized
  source 1..22: mol_type = other DNA
cagtgaggaaagaaaaagggga

SEQ ID NO: 39887 - DNA, 22 bp, synthetic construct
  misc_feature 1..22: note = chemically synthesized
  source 1..22: mol_type = other DNA
tggggctgagtggagtggggag

SEQ ID NO: 39888 - DNA, 22 bp, synthetic construct
  misc_feature 1..22: note = chemically synthesized
  source 1..22: mol_type = other DNA
gggctgagtggagtggggagcg

SEQ ID NO: 39889 - DNA, 22 bp, synthetic construct
  misc_feature 1..22: note = chemically synthesized
  source 1..22: mol_type = other DNA
agtggagtggggagcggctgcc

SEQ ID NO: 39890 - DNA, 22 bp, synthetic construct
  misc_feature 1..22: note = chemically synthesized
  source 1..22: mol_type = other DNA
ccaagtgagtaatggaataata

SEQ ID NO: 39891 - DNA, 22 bp, synthetic construct
  misc_feature 1..22: note = chemically synthesized
  source 1..22: mol_type = other DNA
ttttggaagtaactccttcagt

SEQ ID NO: 39892 - DNA, 22 bp, synthetic construct
  misc_feature 1..22: note = chemically synthesized
  source 1..22: mol_type = other DNA
tggaagtaactccttcagtact

SEQ ID NO: 39893 - DNA, 22 bp, synthetic construct
  misc_feature 1..22: note = chemically synthesized
  source 1..22: mol_type = other DNA
ggaagtaactccttcagtactt

SEQ ID NO: 39894 - DNA, 22 bp, synthetic construct
  misc_feature 1..22: note = chemically synthesized
  source 1..22: mol_type = other DNA
gaagtaactccttcagtactta

SEQ ID NO: 39895 - DNA, 22 bp, synthetic construct
  misc_feature 1..22: note = chemically synthesized
  source 1..22: mol_type = other DNA
cttcagtacttaaaaagtaagg

SEQ ID NO: 39896 - DNA, 22 bp, synthetic construct
  misc_feature 1..22: note = chemically synthesized
  source 1..22: mol_type = other DNA
cagtacttaaaaagtaagggca

SEQ ID NO: 39897 - DNA, 22 bp, synthetic construct
  misc_feature 1..22: note = chemically synthesized
  source 1..22: mol_type = other DNA
agtacttaaaaagtaagggcaa

SEQ ID NO: 39898 - DNA, 22 bp, synthetic construct
  misc_feature 1..22: note = chemically synthesized
  source 1..22: mol_type = other DNA
aaaaagtaagggcaatttccag

SEQ ID NO: 39899 - DNA, 22 bp, synthetic construct
  misc_feature 1..22: note = chemically synthesized
  source 1..22: mol_type = other DNA
aaaagtaagggcaatttccaga

SEQ ID NO: 39900 - DNA, 22 bp, synthetic construct
  misc_feature 1..22: note = chemically synthesized
  source 1..22: mol_type = other DNA
ccagaaattctcatctctatac

SEQ ID NO: 39901 - DNA, 22 bp, synthetic construct
  misc_feature 1..22: note = chemically synthesized
  source 1..22: mol_type = other DNA
cagaaattctcatctctataca

SEQ ID NO: 39902 - DNA, 22 bp, synthetic construct
  misc_feature 1..22: note = chemically synthesized
  source 1..22: mol_type = other DNA
tcatctctatacacatggacat

SEQ ID NO: 39903 - DNA, 22 bp, synthetic construct
  misc_feature 1..22: note = chemically synthesized
  source 1..22: mol_type = other DNA
atctctatacacatggacattt

SEQ ID NO: 39904 - DNA, 22 bp, synthetic construct
  misc_feature 1..22: note = chemically synthesized
  source 1..22: mol_type = other DNA
tatacacatggacatttgtaga

SEQ ID NO: 39905 - DNA, 22 bp, synthetic construct
  misc_feature 1..22: note = chemically synthesized
  source 1..22: mol_type = other DNA
tacacatggacatttgtagaag

SEQ ID NO: 39906 - DNA, 22 bp, synthetic construct
  misc_feature 1..22: note = chemically synthesized
  source 1..22: mol_type = other DNA
gtagaagaaataaggctcaact

SEQ ID NO: 39907 - DNA, 22 bp, synthetic construct
  misc_feature 1..22: note = chemically synthesized
  source 1..22: mol_type = other DNA
tagaagaaataaggctcaactt

SEQ ID NO: 39908 - DNA, 22 bp, synthetic construct
  misc_feature 1..22: note = chemically synthesized
  source 1..22: mol_type = other DNA
aacttacaaataccctgcgggg

SEQ ID NO: 39909 - DNA, 22 bp, synthetic construct
  misc_feature 1..22: note = chemically synthesized
  source 1..22: mol_type = other DNA
acaaataccctgcggggcatat

SEQ ID NO: 39910 - DNA, 22 bp, synthetic construct
  misc_feature 1..22: note = chemically synthesized
  source 1..22: mol_type = other DNA
caaataccctgcggggcatatt

SEQ ID NO: 39911 - DNA, 22 bp, synthetic construct
  misc_feature 1..22: note = chemically synthesized
  source 1..22: mol_type = other DNA
cggggcatattctgcactcatc

SEQ ID NO: 39912 - DNA, 22 bp, synthetic construct
  misc_feature 1..22: note = chemically synthesized
  source 1..22: mol_type = other DNA
tgcactcatcccaggcgtgggg

SEQ ID NO: 39913 - DNA, 22 bp, synthetic construct
  misc_feature 1..22: note = chemically synthesized
  source 1..22: mol_type = other DNA
cactcatcccaggcgtggggat

SEQ ID NO: 39914 - DNA, 22 bp, synthetic construct
  misc_feature 1..22: note = chemically synthesized
  source 1..22: mol_type = other DNA
atcccaggcgtggggattagag

SEQ ID NO: 39915 - DNA, 22 bp, synthetic construct
  misc_feature 1..22: note = chemically synthesized
  source 1..22: mol_type = other DNA
gagctccatgtgcagaacgagg

SEQ ID NO: 39916 - DNA, 22 bp, synthetic construct
  misc_feature 1..22: note = chemically synthesized
  source 1..22: mol_type = other DNA
catgtgcagaacgaggggagga

SEQ ID NO: 39917 - DNA, 22 bp, synthetic construct
  misc_feature 1..22: note = chemically synthesized
  source 1..22: mol_type = other DNA
cagtgcagaagtttatctgtga

SEQ ID NO: 39918 - DNA, 22 bp, synthetic construct
  misc_feature 1..22: note = chemically synthesized
  source 1..22: mol_type = other DNA
atctgtgaaagaaacccaaaat

SEQ ID NO: 39919 - DNA, 22 bp, synthetic construct
  misc_feature 1..22: note = chemically synthesized
  source 1..22: mol_type = other DNA
tctgtgaaagaaacccaaaatc

SEQ ID NO: 39920 - DNA, 22 bp, synthetic construct
  misc_feature 1..22: note = chemically synthesized
  source 1..22: mol_type = other DNA
tgaaagaaacccaaaatcaagc

SEQ ID NO: 39921 - DNA, 22 bp, synthetic construct
  misc_feature 1..22: note = chemically synthesized
  source 1..22: mol_type = other DNA
cagctacaaacaacgtgcatca

SEQ ID NO: 39922 - DNA, 22 bp, synthetic construct
  misc_feature 1..22: note = chemically synthesized
  source 1..22: mol_type = other DNA
caaacaacgtgcatcataaacc

SEQ ID NO: 39923 - DNA, 22 bp, synthetic construct
  misc_feature 1..22: note = chemically synthesized
  source 1..22: mol_type = other DNA
caattccattaaaatagattac

SEQ ID NO: 39924 - DNA, 22 bp, synthetic construct
  misc_feature 1..22: note = chemically synthesized
  source 1..22: mol_type = other DNA
aattccattaaaatagattaca

SEQ ID NO: 39925 - DNA, 22 bp, synthetic construct
  misc_feature 1..22: note = chemically synthesized
  source 1..22: mol_type = other DNA
cattaaaatagattacaacatc

SEQ ID NO: 39926 - DNA, 22 bp, synthetic construct
  misc_feature 1..22: note = chemically synthesized
  source 1..22: mol_type = other DNA
aaatagattacaacatcattac

SEQ ID NO: 39927 - DNA, 22 bp, synthetic construct
  misc_feature 1..22: note = chemically synthesized
  source 1..22: mol_type = other DNA
caacatcattacaacagccttg

SEQ ID NO: 39928 - DNA, 22 bp, synthetic construct
  misc_feature 1..22: note = chemically synthesized
  source 1..22: mol_type = other DNA
caacagccttgcagatagttaa

SEQ ID NO: 39929 - DNA, 22 bp, synthetic construct
  misc_feature 1..22: note = chemically synthesized
  source 1..22: mol_type = other DNA
gcagatagttaacaggcccaag

SEQ ID NO: 39930 - DNA, 22 bp, synthetic construct
  misc_feature 1..22: note = chemically synthesized
  source 1..22: mol_type = other DNA
cagatagttaacaggcccaagg

SEQ ID NO: 39931 - DNA, 22 bp, synthetic construct
  misc_feature 1..22: note = chemically synthesized
  source 1..22: mol_type = other DNA
acaggcccaaggcctgaaacaa

SEQ ID NO: 39932 - DNA, 22 bp, synthetic construct
  misc_feature 1..22: note = chemically synthesized
  source 1..22: mol_type = other DNA
aaacaaaagaagagtggtgagt

SEQ ID NO: 39933 - DNA, 22 bp, synthetic construct
  misc_feature 1..22: note = chemically synthesized
  source 1..22: mol_type = other DNA
tttcccagagtttctgttttgt

SEQ ID NO: 39934 - DNA, 22 bp, synthetic construct
  misc_feature 1..22: note = chemically synthesized
  source 1..22: mol_type = other DNA
cccagagtttctgttttgtttt

SEQ ID NO: 39935 - DNA, 22 bp, synthetic construct
  misc_feature 1..22: note = chemically synthesized
  source 1..22: mol_type = other DNA
ccagagtttctgttttgttttc

SEQ ID NO: 39936 - DNA, 22 bp, synthetic construct
  misc_feature 1..22: note = chemically synthesized
  source 1..22: mol_type = other DNA
ctgttttgttttcaatttcggt

SEQ ID NO: 39937 - DNA, 22 bp, synthetic construct
  misc_feature 1..22: note = chemically synthesized
  source 1..22: mol_type = other DNA
tgttttgttttcaatttcggtc

SEQ ID NO: 39938 - DNA, 22 bp, synthetic construct
  misc_feature 1..22: note = chemically synthesized
  source 1..22: mol_type = other DNA
ttttgttttcaatttcggtctt

SEQ ID NO: 39939 - DNA, 22 bp, synthetic construct
  misc_feature 1..22: note = chemically synthesized
  source 1..22: mol_type = other DNA
tgttttcaatttcggtcttttt

SEQ ID NO: 39940 - DNA, 22 bp, synthetic construct
  misc_feature 1..22: note = chemically synthesized
  source 1..22: mol_type = other DNA
gttttcaatttcggtctttttg

SEQ ID NO: 39941 - DNA, 22 bp, synthetic construct
  misc_feature 1..22: note = chemically synthesized
  source 1..22: mol_type = other DNA
ttttcaatttcggtctttttga

SEQ ID NO: 39942 - DNA, 22 bp, synthetic construct
  misc_feature 1..22: note = chemically synthesized
  source 1..22: mol_type = other DNA
tcaatttcggtctttttgacaa

SEQ ID NO: 39943 - DNA, 22 bp, synthetic construct
  misc_feature 1..22: note = chemically synthesized
  source 1..22: mol_type = other DNA
caatttcggtctttttgacaaa

SEQ ID NO: 39944 - DNA, 22 bp, synthetic construct
  misc_feature 1..22: note = chemically synthesized
  source 1..22: mol_type = other DNA
aatttcggtctttttgacaaaa

SEQ ID NO: 39945 - DNA, 22 bp, synthetic construct
  misc_feature 1..22: note = chemically synthesized
  source 1..22: mol_type = other DNA
cggtctttttgacaaaagtgaa

SEQ ID NO: 39946 - DNA, 22 bp, synthetic construct
  misc_feature 1..22: note = chemically synthesized
  source 1..22: mol_type = other DNA
ggtctttttgacaaaagtgaaa

SEQ ID NO: 39947 - DNA, 22 bp, synthetic construct
  misc_feature 1..22: note = chemically synthesized
  source 1..22: mol_type = other DNA
tttgacaaaagtgaaagggttt

SEQ ID NO: 39948 - DNA, 22 bp, synthetic construct
  misc_feature 1..22: note = chemically synthesized
  source 1..22: mol_type = other DNA
ttgacaaaagtgaaagggtttg

SEQ ID NO: 39949 - DNA, 22 bp, synthetic construct
  misc_feature 1..22: note = chemically synthesized
  source 1..22: mol_type = other DNA
tgacaaaagtgaaagggtttgt

SEQ ID NO: 39950 - DNA, 22 bp, synthetic construct
  misc_feature 1..22: note = chemically synthesized
  source 1..22: mol_type = other DNA
gacaaaagtgaaagggtttgtt

SEQ ID NO: 39951 - DNA, 22 bp, synthetic construct
  misc_feature 1..22: note = chemically synthesized
  source 1..22: mol_type = other DNA
acaaaagtgaaagggtttgttt

SEQ ID NO: 39952 - DNA, 22 bp, synthetic construct
  misc_feature 1..22: note = chemically synthesized
  source 1..22: mol_type = other DNA
gttttaggaaaggggagaggtg

SEQ ID NO: 39953 - DNA, 22 bp, synthetic construct
  misc_feature 1..22: note = chemically synthesized
  source 1..22: mol_type = other DNA
ttttaggaaaggggagaggtgg

SEQ ID NO: 39954 - DNA, 22 bp, synthetic construct
  misc_feature 1..22: note = chemically synthesized
  source 1..22: mol_type = other DNA
taggaaaggggagaggtggtct

SEQ ID NO: 39955 - DNA, 22 bp, synthetic construct
  misc_feature 1..22: note = chemically synthesized
  source 1..22: mol_type = other DNA
aggaaaggggagaggtggtctt

SEQ ID NO: 39956 - DNA, 22 bp, synthetic construct
  misc_feature 1..22: note = chemically synthesized
  source 1..22: mol_type = other DNA
ggaaaggggagaggtggtcttt

SEQ ID NO: 39957 - DNA, 22 bp, synthetic construct
  misc_feature 1..22: note = chemically synthesized
  source 1..22: mol_type = other DNA
tggttcatttgcttatttattt

SEQ ID NO: 39958 - DNA, 22 bp, synthetic construct
  misc_feature 1..22: note = chemically synthesized
  source 1..22: mol_type = other DNA
ggttcatttgcttatttatttg

SEQ ID NO: 39959 - DNA, 22 bp, synthetic construct
  misc_feature 1..22: note = chemically synthesized
  source 1..22: mol_type = other DNA
gttcatttgcttatttatttgt

SEQ ID NO: 39960 - DNA, 22 bp, synthetic construct
  misc_feature 1..22: note = chemically synthesized
  source 1..22: mol_type = other DNA
atttgcttatttatttgttgtt

SEQ ID NO: 39961 - DNA, 22 bp, synthetic construct
  misc_feature 1..22: note = chemically synthesized
  source 1..22: mol_type = other DNA
gcttatttatttgttgttgttt

SEQ ID NO: 39962 - DNA, 22 bp, synthetic construct
  misc_feature 1..22: note = chemically synthesized
  source 1..22: mol_type = other DNA
cttatttatttgttgttgtttg

SEQ ID NO: 39963 - DNA, 22 bp, synthetic construct
  misc_feature 1..22: note = chemically synthesized
  source 1..22: mol_type = other DNA
atttatttgttgttgtttgatt

SEQ ID NO: 39964 - DNA, 22 bp, synthetic construct
  misc_feature 1..22: note = chemically synthesized
  source 1..22: mol_type = other DNA
tttatttgttgttgtttgatta

SEQ ID NO: 39965 - DNA, 22 bp, synthetic construct
  misc_feature 1..22: note = chemically synthesized
  source 1..22: mol_type = other DNA
atttgttgttgtttgattattg

SEQ ID NO: 39966 - DNA, 22 bp, synthetic construct
  misc_feature 1..22: note = chemically synthesized
  source 1..22: mol_type = other DNA
tttgttgttgtttgattattgt

SEQ ID NO: 39967 - DNA, 22 bp, synthetic construct
  misc_feature 1..22: note = chemically synthesized
  source 1..22: mol_type = other DNA
gttgttgtttgattattgtctt

SEQ ID NO: 39968 - DNA, 22 bp, synthetic construct
  misc_feature 1..22: note = chemically synthesized
  source 1..22: mol_type = other DNA
ttgttgtttgattattgtcttg

SEQ ID NO: 39969 - DNA, 22 bp, synthetic construct
  misc_feature 1..22: note = chemically synthesized
  source 1..22: mol_type = other DNA
ttgtttgattattgtcttgtgg

SEQ ID NO: 39970 - DNA, 22 bp, synthetic construct
  misc_feature 1..22: note = chemically synthesized
  source 1..22: mol_type = other DNA
tttgattattgtcttgtggaaa

SEQ ID NO: 39971 - DNA, 22 bp, synthetic construct
  misc_feature 1..22: note = chemically synthesized
  source 1..22: mol_type = other DNA
gattattgtcttgtggaaagaa

SEQ ID NO: 39972 - DNA, 22 bp, synthetic construct
  misc_feature 1..22: note = chemically synthesized
  source 1..22: mol_type = other DNA
attattgtcttgtggaaagaag

SEQ ID NO: 39973 - DNA, 22 bp, synthetic construct
  misc_feature 1..22: note = chemically synthesized
  source 1..22: mol_type = other DNA
ttgtcttgtggaaagaagatgt

SEQ ID NO: 39974 - DNA, 22 bp, synthetic construct
  misc_feature 1..22: note = chemically synthesized
  source 1..22: mol_type = other DNA
tcttgtggaaagaagatgtgta

SEQ ID NO: 39975 - DNA, 22 bp, synthetic construct
  misc_feature 1..22: note = chemically synthesized
  source 1..22: mol_type = other DNA
gtggaaagaagatgtgtaagca

SEQ ID NO: 39976 - DNA, 22 bp, synthetic construct
  misc_feature 1..22: note = chemically synthesized
  source 1..22: mol_type = other DNA
tggaaagaagatgtgtaagcag

SEQ ID NO: 39977 - DNA, 22 bp, synthetic construct
  misc_feature 1..22: note = chemically synthesized
  source 1..22: mol_type = other DNA
gtaatattgtgggtagcctgga

SEQ ID NO: 39978 - DNA, 22 bp, synthetic construct
  misc_feature 1..22: note = chemically synthesized
  source 1..22: mol_type = other DNA
tgggtagcctggaaacatgggg

SEQ ID NO: 39979 - DNA, 22 bp, synthetic construct
  misc_feature 1..22: note = chemically synthesized
  source 1..22: mol_type = other DNA
gaaacatggggggattttatct

SEQ ID NO: 39980 - DNA, 22 bp, synthetic construct
  misc_feature 1..22: note = chemically synthesized
  source 1..22: mol_type = other DNA
tatctgcaaggctggtttacat

SEQ ID NO: 39981 - DNA, 22 bp, synthetic construct
  misc_feature 1..22: note = chemically synthesized
  source 1..22: mol_type = other DNA
atctgcaaggctggtttacatg

SEQ ID NO: 39982 - DNA, 22 bp, synthetic construct
  misc_feature 1..22: note = chemically synthesized
  source 1..22: mol_type = other DNA
tctgcaaggctggtttacatgc

SEQ ID NO: 39983 - DNA, 22 bp, synthetic construct
  misc_feature 1..22: note = chemically synthesized
  source 1..22: mol_type = other DNA
caaggctggtttacatgcatac

SEQ ID NO: 39984 - DNA, 22 bp, synthetic construct
  misc_feature 1..22: note = chemically synthesized
  source 1..22: mol_type = other DNA
gtttacatgcatacattaactt

SEQ ID NO: 39985 - DNA, 22 bp, synthetic construct
  misc_feature 1..22: note = chemically synthesized
  source 1..22: mol_type = other DNA
acatgcatacattaactttact

SEQ ID NO: 39986 - DNA, 22 bp, synthetic construct
  misc_feature 1..22: note = chemically synthesized
  source 1..22: mol_type = other DNA
catgcatacattaactttactt

SEQ ID NO: 39987 - DNA, 22 bp, synthetic construct
  misc_feature 1..22: note = chemically synthesized
  source 1..22: mol_type = other DNA
actttactttatagacaaaccc

SEQ ID NO: 39988 - DNA, 22 bp, synthetic construct
  misc_feature 1..22: note = chemically synthesized
  source 1..22: mol_type = other DNA
tactttatagacaaacccaagc

SEQ ID NO: 39989 - DNA, 22 bp, synthetic construct
  misc_feature 1..22: note = chemically synthesized
  source 1..22: mol_type = other DNA
actttatagacaaacccaagca

SEQ ID NO: 39990 - DNA, 22 bp, synthetic construct
  misc_feature 1..22: note = chemically synthesized
  source 1..22: mol_type = other DNA
ctttatagacaaacccaagcaa

SEQ ID NO: 39991 - DNA, 22 bp, synthetic construct
  misc_feature 1..22: note = chemically synthesized
  source 1..22: mol_type = other DNA
tatagacaaacccaagcaaaaa

SEQ ID NO: 39992 - DNA, 22 bp, synthetic construct
  misc_feature 1..22: note = chemically synthesized
  source 1..22: mol_type = other DNA
atagacaaacccaagcaaaaag

SEQ ID NO: 39993 - DNA, 22 bp, synthetic construct
  misc_feature 1..22: note = chemically synthesized
  source 1..22: mol_type = other DNA
tagacaaacccaagcaaaaagc

SEQ ID NO: 39994 - DNA, 22 bp, synthetic construct
  misc_feature 1..22: note = chemically synthesized
  source 1..22: mol_type = other DNA
ataggaaatgagtagatttgtg

SEQ ID NO: 39995 - DNA, 22 bp, synthetic construct
  misc_feature 1..22: note = chemically synthesized
  source 1..22: mol_type = other DNA
gtgaatcgttttttatgggaca

SEQ ID NO: 39996 - DNA, 22 bp, synthetic construct
  misc_feature 1..22: note = chemically synthesized
  source 1..22: mol_type = other DNA
tgaatcgttttttatgggacag

SEQ ID NO: 39997 - DNA, 22 bp, synthetic construct
  misc_feature 1..22: note = chemically synthesized
  source 1..22: mol_type = other DNA
tttatgggacagagtcccactt

SEQ ID NO: 39998 - DNA, 22 bp, synthetic construct
  misc_feature 1..22: note = chemically synthesized
  source 1..22: mol_type = other DNA
ttatgggacagagtcccacttt

SEQ ID NO: 39999 - DNA, 22 bp, synthetic construct
  misc_feature 1..22: note = chemically synthesized
  source 1..22: mol_type = other DNA
tatgggacagagtcccactttg

SEQ ID NO: 40000 - DNA, 22 bp, synthetic construct
  misc_feature 1..22: note = chemically synthesized
  source 1..22: mol_type = other DNA
atgggacagagtcccactttgc

SEQ ID NO: 40001 - DNA, 22 bp, synthetic construct
  misc_feature 1..22: note = chemically synthesized
  source 1..22: mol_type = other DNA
tgggacagagtcccactttgct

SEQ ID NO: 40002 - DNA, 22 bp, synthetic construct
  misc_feature 1..22: note = chemically synthesized
  source 1..22: mol_type = other DNA
tgctttctctgtccctctgccc

SEQ ID NO: 40003 - DNA, 22 bp, synthetic construct
  misc_feature 1..22: note = chemically synthesized
  source 1..22: mol_type = other DNA
gctttctctgtccctctgcccc

SEQ ID NO: 40004 - DNA, 22 bp, synthetic construct
  misc_feature 1..22: note = chemically synthesized
  source 1..22: mol_type = other DNA
ctttctctgtccctctgccccc

SEQ ID NO: 40005 - DNA, 22 bp, synthetic construct
  misc_feature 1..22: note = chemically synthesized
  source 1..22: mol_type = other DNA
tctctgtccctctgcccccctc

SEQ ID NO: 40006 - DNA, 22 bp, synthetic construct
  misc_feature 1..22: note = chemically synthesized
  source 1..22: mol_type = other DNA
ctctgtccctctgcccccctct

SEQ ID NO: 40007 - DNA, 22 bp, synthetic construct
  misc_feature 1..22: note = chemically synthesized
  source 1..22: mol_type = other DNA
tctgtccctctgcccccctctt

SEQ ID NO: 40008 - DNA, 22 bp, synthetic construct
  misc_feature 1..22: note = chemically synthesized
  source 1..22: mol_type = other DNA
tgtccctctgcccccctcttcc

SEQ ID NO: 40009 - DNA, 22 bp, synthetic construct
  misc_feature 1..22: note = chemically synthesized
  source 1..22: mol_type = other DNA
tccctctgcccccctcttccca

SEQ ID NO: 40010 - DNA, 22 bp, synthetic construct
  misc_feature 1..22: note = chemically synthesized
  source 1..22: mol_type = other DNA
tgcccccctcttcccatgctat

SEQ ID NO: 40011 - DNA, 22 bp, synthetic construct
  misc_feature 1..22: note = chemically synthesized
  source 1..22: mol_type = other DNA
cccccctcttcccatgctatat

SEQ ID NO: 40012 - DNA, 22 bp, synthetic construct
  misc_feature 1..22: note = chemically synthesized
  source 1..22: mol_type = other DNA
ttcccatgctatatttatgata

SEQ ID NO: 40013 - DNA, 22 bp, synthetic construct
  misc_feature 1..22: note = chemically synthesized
  source 1..22: mol_type = other DNA
cccatgctatatttatgatagc

SEQ ID NO: 40014 - DNA, 22 bp, synthetic construct
  misc_feature 1..22: note = chemically synthesized
  source 1..22: mol_type = other DNA
ccatgctatatttatgatagcg

SEQ ID NO: 40015 - DNA, 22 bp, synthetic construct
  misc_feature 1..22: note = chemically synthesized
  source 1..22: mol_type = other DNA
tatttatgatagcgccttcagt

SEQ ID NO: 40016 - DNA, 22 bp, synthetic construct
  misc_feature 1..22: note = chemically synthesized
  source 1..22: mol_type = other DNA
atgatagcgccttcagtgatag

SEQ ID NO: 40017 - DNA, 22 bp, synthetic construct
  misc_feature 1..22: note = chemically synthesized
  source 1..22: mol_type = other DNA
tgatagcgccttcagtgatagg

SEQ ID NO: 40018 - DNA, 22 bp, synthetic construct
  misc_feature 1..22: note = chemically synthesized
  source 1..22: mol_type = other DNA
cagtgataggggaaacctgggc

SEQ ID NO: 40019 - DNA, 22 bp, synthetic construct
  misc_feature 1..22: note = chemically synthesized
  source 1..22: mol_type = other DNA
agtgataggggaaacctgggca

SEQ ID NO: 40020 - DNA, 22 bp, synthetic construct
  misc_feature 1..22: note = chemically synthesized
  source 1..22: mol_type = other DNA
ggcatttctggactgagctggg

SEQ ID NO: 40021 - DNA, 22 bp, synthetic construct
  misc_feature 1..22: note = chemically synthesized
  source 1..22: mol_type = other DNA
ctggactgagctgggccatact

SEQ ID NO: 40022 - DNA, 22 bp, synthetic construct
  misc_feature 1..22: note = chemically synthesized
  source 1..22: mol_type = other DNA
tggactgagctgggccatactc

SEQ ID NO: 40023 - DNA, 22 bp, synthetic construct
  misc_feature 1..22: note = chemically synthesized
  source 1..22: mol_type = other DNA
gactgagctgggccatactcta

SEQ ID NO: 40024 - DNA, 22 bp, synthetic construct
  misc_feature 1..22: note = chemically synthesized
  source 1..22: mol_type = other DNA
agctgggccatactctagaatc

SEQ ID NO: 40025 - DNA, 22 bp, synthetic construct
  misc_feature 1..22: note = chemically synthesized
  source 1..22: mol_type = other DNA
ggccatactctagaatcctgtc

SEQ ID NO: 40026 - DNA, 22 bp, synthetic construct
  misc_feature 1..22: note = chemically synthesized
  source 1..22: mol_type = other DNA
tagaatcctgtcaactggaaac

SEQ ID NO: 40027 - DNA, 22 bp, synthetic construct
  misc_feature 1..22: note = chemically synthesized
  source 1..22: mol_type = other DNA
gaatcctgtcaactggaaacct

SEQ ID NO: 40028 - DNA, 22 bp, synthetic construct
  misc_feature 1..22: note = chemically synthesized
  source 1..22: mol_type = other DNA
tcaactggaaaccttacacaga

SEQ ID NO: 40029 - DNA, 22 bp, synthetic construct
  misc_feature 1..22: note = chemically synthesized
  source 1..22: mol_type = other DNA
gaaaccttacacagatgtggct

SEQ ID NO: 40030 - DNA, 22 bp, synthetic construct
  misc_feature 1..22: note = chemically synthesized
  source 1..22: mol_type = other DNA
acacagatgtggcttctcacaa

SEQ ID NO: 40031 - DNA, 22 bp, synthetic construct
  misc_feature 1..22: note = chemically synthesized
  source 1..22: mol_type = other DNA
cacagatgtggcttctcacaat

SEQ ID NO: 40032 - DNA, 22 bp, synthetic construct
  misc_feature 1..22: note = chemically synthesized
  source 1..22: mol_type = other DNA
ctcacaatacaaagcaatggaa

SEQ ID NO: 40033 - DNA, 22 bp, synthetic construct
  misc_feature 1..22: note = chemically synthesized
  source 1..22: mol_type = other DNA
tcacaatacaaagcaatggaag

SEQ ID NO: 40034 - DNA, 22 bp, synthetic construct
  misc_feature 1..22: note = chemically synthesized
  source 1..22: mol_type = other DNA
acaatacaaagcaatggaagat

SEQ ID NO: 40035 - DNA, 22 bp, synthetic construct
  misc_feature 1..22: note = chemically synthesized
  source 1..22: mol_type = other DNA
gacttctggggtccaaataact

SEQ ID NO: 40036 - DNA, 22 bp, synthetic construct
  misc_feature 1..22: note = chemically synthesized
  source 1..22: mol_type = other DNA
ctggggtccaaataactttgac

SEQ ID NO: 40037 - DNA, 22 bp, synthetic construct
  misc_feature 1..22: note = chemically synthesized
  source 1..22: mol_type = other DNA
tggggtccaaataactttgacc

SEQ ID NO: 40038 - DNA, 22 bp, synthetic construct
  misc_feature 1..22: note = chemically synthesized
  source 1..22: mol_type = other DNA
gggtccaaataactttgaccat

SEQ ID NO: 40039 - DNA, 22 bp, synthetic construct
  misc_feature 1..22: note = chemically synthesized
  source 1..22: mol_type = other DNA
tgaccattaaatgacaaggaaa

SEQ ID NO: 40040 - DNA, 22 bp, synthetic construct
  misc_feature 1..22: note = chemically synthesized
  source 1..22: mol_type = other DNA
gaccattaaatgacaaggaaag

SEQ ID NO: 40041 - DNA, 22 bp, synthetic construct
  misc_feature 1..22: note = chemically synthesized
  source 1..22: mol_type = other DNA
accattaaatgacaaggaaaga

SEQ ID NO: 40042 - DNA, 22 bp, synthetic construct
  misc_feature 1..22: note = chemically synthesized
  source 1..22: mol_type = other DNA
aatgacaaggaaagaaccagca

SEQ ID NO: 40043 - DNA, 22 bp, synthetic construct
  misc_feature 1..22: note = chemically synthesized
  source 1..22: mol_type = other DNA
caataatgccagcacccagaaa

SEQ ID NO: 40044 - DNA, 22 bp, synthetic construct
  misc_feature 1..22: note = chemically synthesized
  source 1..22: mol_type = other DNA
acccatcttcaccattttactg

SEQ ID NO: 40045 - DNA, 22 bp, synthetic construct
  misc_feature 1..22: note = chemically synthesized
  source 1..22: mol_type = other DNA
caccattttactgcactttgtt

SEQ ID NO: 40046 - DNA, 22 bp, synthetic construct
  misc_feature 1..22: note = chemically synthesized
  source 1..22: mol_type = other DNA
accattttactgcactttgttg

SEQ ID NO: 40047 - DNA, 22 bp, synthetic construct
  misc_feature 1..22: note = chemically synthesized
  source 1..22: mol_type = other DNA
tactgcactttgttgtactctg

SEQ ID NO: 40048 - DNA, 22 bp, synthetic construct
  misc_feature 1..22: note = chemically synthesized
  source 1..22: mol_type = other DNA
actgcactttgttgtactctgg

SEQ ID NO: 40049 - DNA, 22 bp, synthetic construct
  misc_feature 1..22: note = chemically synthesized
  source 1..22: mol_type = other DNA
ctgcactttgttgtactctggt

SEQ ID NO: 40050 - DNA, 22 bp, synthetic construct
  misc_feature 1..22: note = chemically synthesized
  source 1..22: mol_type = other DNA
cactttgttgtactctggtgaa

SEQ ID NO: 40051 - DNA, 22 bp, synthetic construct
  misc_feature 1..22: note = chemically synthesized
  source 1..22: mol_type = other DNA
tgttgtactctggtgaagacaa

SEQ ID NO: 40052 - DNA, 22 bp, synthetic construct
  misc_feature 1..22: note = chemically synthesized
  source 1..22: mol_type = other DNA
gttgtactctggtgaagacaag

SEQ ID NO: 40053 - DNA, 22 bp, synthetic construct
  misc_feature 1..22: note = chemically synthesized
  source 1..22: mol_type = other DNA
ttgtactctggtgaagacaagt

SEQ ID NO: 40054 - DNA, 22 bp, synthetic construct
  misc_feature 1..22: note = chemically synthesized
  source 1..22: mol_type = other DNA
tactctggtgaagacaagtgac

SEQ ID NO: 40055 - DNA, 22 bp, synthetic construct
  misc_feature 1..22: note = chemically synthesized
  source 1..22: mol_type = other DNA
tggtgaagacaagtgacttctc

SEQ ID NO: 40056 - DNA, 22 bp, synthetic construct
  misc_feature 1..22: note = chemically synthesized
  source 1..22: mol_type = other DNA
gtgaagacaagtgacttctcac

SEQ ID NO: 40057 - DNA, 22 bp, synthetic construct
  misc_feature 1..22: note = chemically synthesized
  source 1..22: mol_type = other DNA
ctcacactaataaaatgaatct

SEQ ID NO: 40058 - DNA, 22 bp, synthetic construct
  misc_feature 1..22: note = chemically synthesized
  source 1..22: mol_type = other DNA
tcacactaataaaatgaatcta

SEQ ID NO: 40059 - DNA, 22 bp, synthetic construct
  misc_feature 1..22: note = chemically synthesized
  source 1..22: mol_type = other DNA
acactaataaaatgaatctaat

SEQ ID NO: 40060 - DNA, 22 bp, synthetic construct
  misc_feature 1..22: note = chemically synthesized
  source 1..22: mol_type = other DNA
ataaaatgaatctaatagtcaa

SEQ ID NO: 40061 - DNA, 22 bp, synthetic construct
  misc_feature 1..22: note = chemically synthesized
  source 1..22: mol_type = other DNA
atagtcaatgaaacatttgtag

SEQ ID NO: 40062 - DNA, 22 bp, synthetic construct
  misc_feature 1..22: note = chemically synthesized
  source 1..22: mol_type = other DNA
gtagcactgagatttttttgag

SEQ ID NO: 40063 - DNA, 22 bp, synthetic construct
  misc_feature 1..22: note = chemically synthesized
  source 1..22: mol_type = other DNA
tagcactgagatttttttgaga

SEQ ID NO: 40064 - DNA, 22 bp, synthetic construct
  misc_feature 1..22: note = chemically synthesized
  source 1..22: mol_type = other DNA
agatttttttgagaagaggaaa

SEQ ID NO: 40065 - DNA, 22 bp, synthetic construct
  misc_feature 1..22: note = chemically synthesized
  source 1..22: mol_type = other DNA
ttttgagaagaggaaaatttgg

SEQ ID NO: 40066 - DNA, 22 bp, synthetic construct
  misc_feature 1..22: note = chemically synthesized
  source 1..22: mol_type = other DNA
tttgagaagaggaaaatttggt

SEQ ID NO: 40067 - DNA, 22 bp, synthetic construct
  misc_feature 1..22: note = chemically synthesized
  source 1..22: mol_type = other DNA
ttgagaagaggaaaatttggtt

SEQ ID NO: 40068 - DNA, 22 bp, synthetic construct
  misc_feature 1..22: note = chemically synthesized
  source 1..22: mol_type = other DNA
tgagaagaggaaaatttggttt

SEQ ID NO: 40069 - DNA, 22 bp, synthetic construct
  misc_feature 1..22: note = chemically synthesized
  source 1..22: mol_type = other DNA
gagaagaggaaaatttggtttg

SEQ ID NO: 40070 - DNA, 22 bp, synthetic construct
  misc_feature 1..22: note = chemically synthesized
  source 1..22: mol_type = other DNA
agaagaggaaaatttggtttgt

SEQ ID NO: 40071 - DNA, 22 bp, synthetic construct
  misc_feature 1..22: note = chemically synthesized
  source 1..22: mol_type = other DNA
ggtttgtgcaatctggggattt

SEQ ID NO: 40072 - DNA, 22 bp, synthetic construct
  misc_feature 1..22: note = chemically synthesized
  source 1..22: mol_type = other DNA
gtttgtgcaatctggggatttt

SEQ ID NO: 40073 - DNA, 22 bp, synthetic construct
  misc_feature 1..22: note = chemically synthesized
  source 1..22: mol_type = other DNA
gtgcaatctggggattttacgg

SEQ ID NO: 40074 - DNA, 22 bp, synthetic construct
  misc_feature 1..22: note = chemically synthesized
  source 1..22: mol_type = other DNA
tgcaatctggggattttacggt

SEQ ID NO: 40075 - DNA, 22 bp, synthetic construct
  misc_feature 1..22: note = chemically synthesized
  source 1..22: mol_type = other DNA
gggattttacggtttatgtggt

SEQ ID NO: 40076 - DNA, 22 bp, synthetic construct
  misc_feature 1..22: note = chemically synthesized
  source 1..22: mol_type = other DNA
tacggtttatgtggtaagtgcc

SEQ ID NO: 40077 - DNA, 22 bp, synthetic construct
  misc_feature 1..22: note = chemically synthesized
  source 1..22: mol_type = other DNA
acggtttatgtggtaagtgcct

SEQ ID NO: 40078 - DNA, 22 bp, synthetic construct
  misc_feature 1..22: note = chemically synthesized
  source 1..22: mol_type = other DNA
cggtttatgtggtaagtgccta

SEQ ID NO: 40079 - DNA, 22 bp, synthetic construct
  misc_feature 1..22: note = chemically synthesized
  source 1..22: mol_type = other DNA
atgtggtaagtgcctagctttt

SEQ ID NO: 40080 - DNA, 22 bp, synthetic construct
  misc_feature 1..22: note = chemically synthesized
  source 1..22: mol_type = other DNA
tgtggtaagtgcctagcttttc

SEQ ID NO: 40081 - DNA, 22 bp, synthetic construct
  misc_feature 1..22: note = chemically synthesized
  source 1..22: mol_type = other DNA
gcttttccaagtcctcctctag

SEQ ID NO: 40082 - DNA, 22 bp, synthetic construct
  misc_feature 1..22: note = chemically synthesized
  source 1..22: mol_type = other DNA
ttccaagtcctcctctagctaa

SEQ ID NO: 40083 - DNA, 22 bp, synthetic construct
  misc_feature 1..22: note = chemically synthesized
  source 1..22: mol_type = other DNA
tccaagtcctcctctagctaac

SEQ ID NO: 40084 - DNA, 22 bp, synthetic construct
  misc_feature 1..22: note = chemically synthesized
  source 1..22: mol_type = other DNA
ccaagtcctcctctagctaact

SEQ ID NO: 40085 - DNA, 22 bp, synthetic construct
  misc_feature 1..22: note = chemically synthesized
  source 1..22: mol_type = other DNA
caagtcctcctctagctaacta

SEQ ID NO: 40086 - DNA, 22 bp, synthetic construct
  misc_feature 1..22: note = chemically synthesized
  source 1..22: mol_type = other DNA
ctctagctaactaaccatgtag

SEQ ID NO: 40087 - DNA, 22 bp, synthetic construct
  misc_feature 1..22: note = chemically synthesized
  source 1..22: mol_type = other DNA
tagctaactaaccatgtagctg

SEQ ID NO: 40088 - DNA, 22 bp, synthetic construct
  misc_feature 1..22: note = chemically synthesized
  source 1..22: mol_type = other DNA
gctaactaaccatgtagctgtc

SEQ ID NO: 40089 - DNA, 22 bp, synthetic construct
  misc_feature 1..22: note = chemically synthesized
  source 1..22: mol_type = other DNA
actaaccatgtagctgtccatc

SEQ ID NO: 40090 - DNA, 22 bp, synthetic construct
  misc_feature 1..22: note = chemically synthesized
  source 1..22: mol_type = other DNA
accatgtagctgtccatcttga

SEQ ID NO: 40091 - DNA, 22 bp, synthetic construct
  misc_feature 1..22: note = chemically synthesized
  source 1..22: mol_type = other DNA
tccatcttgagacagactggag

SEQ ID NO: 40092 - DNA, 22 bp, synthetic construct
  misc_feature 1..22: note = chemically synthesized
  source 1..22: mol_type = other DNA
gagacagactggaggatagatg

SEQ ID NO: 40093 - DNA, 22 bp, synthetic construct
  misc_feature 1..22: note = chemically synthesized
  source 1..22: mol_type = other DNA
agacagactggaggatagatgg

SEQ ID NO: 40094 - DNA, 22 bp, synthetic construct
  misc_feature 1..22: note = chemically synthesized
  source 1..22: mol_type = other DNA
gaggatagatggtgcaggagac

SEQ ID NO: 40095 - DNA, 22 bp, synthetic construct
  misc_feature 1..22: note = chemically synthesized
  source 1..22: mol_type = other DNA
tgtgtgttctagaggtttggag

SEQ ID NO: 40096 - DNA, 22 bp, synthetic construct
  misc_feature 1..22: note = chemically synthesized
  source 1..22: mol_type = other DNA
tgtgttctagaggtttggagtt

SEQ ID NO: 40097 - DNA, 22 bp, synthetic construct
  misc_feature 1..22: note = chemically synthesized
  source 1..22: mol_type = other DNA
tagaggtttggagttcatgatg

SEQ ID NO: 40098 - DNA, 22 bp, synthetic construct
  misc_feature 1..22: note = chemically synthesized
  source 1..22: mol_type = other DNA
gaggtttggagttcatgatgat

SEQ ID NO: 40099 - DNA, 22 bp, synthetic construct
  misc_feature 1..22: note = chemically synthesized
  source 1..22: mol_type = other DNA
ggagttcatgatgattggggag

SEQ ID NO: 40100 - DNA, 22 bp, synthetic construct
  misc_feature 1..22: note = chemically synthesized
  source 1..22: mol_type = other DNA
gagttcatgatgattggggagg

SEQ ID NO: 40101 - DNA, 22 bp, synthetic construct
  misc_feature 1..22: note = chemically synthesized
  source 1..22: mol_type = other DNA
atgatgattggggagggcggga

SEQ ID NO: 40102 - DNA, 22 bp, synthetic construct
  misc_feature 1..22: note = chemically synthesized
  source 1..22: mol_type = other DNA
gggagggcgggagacaagaaaa

SEQ ID NO: 40103 - DNA, 22 bp, synthetic construct
  misc_feature 1..22: note = chemically synthesized
  source 1..22: mol_type = other DNA
tgatggtgaacaaacagtatgt

SEQ ID NO: 40104 - DNA, 22 bp, synthetic construct
  misc_feature 1..22: note = chemically synthesized
  source 1..22: mol_type = other DNA
gatggtgaacaaacagtatgtt

SEQ ID NO: 40105 - DNA, 22 bp, synthetic construct
  misc_feature 1..22: note = chemically synthesized
  source 1..22: mol_type = other DNA
atggtgaacaaacagtatgttt

SEQ ID NO: 40106 - DNA, 22 bp, synthetic construct
  misc_feature 1..22: note = chemically synthesized
  source 1..22: mol_type = other DNA
tccattagcttaatattaagag

SEQ ID NO: 40107 - DNA, 22 bp, synthetic construct
  misc_feature 1..22: note = chemically synthesized
  source 1..22: mol_type = other DNA
ccattagcttaatattaagagc

SEQ ID NO: 40108 - DNA, 22 bp, synthetic construct
  misc_feature 1..22: note = chemically synthesized
  source 1..22: mol_type = other DNA
cattagcttaatattaagagca

SEQ ID NO: 40109 - DNA, 22 bp, synthetic construct
  misc_feature 1..22: note = chemically synthesized
  source 1..22: mol_type = other DNA
gcttaatattaagagcacttag

SEQ ID NO: 40110 - DNA, 22 bp, synthetic construct
  misc_feature 1..22: note = chemically synthesized
  source 1..22: mol_type = other DNA
aatattaagagcacttagaagt

SEQ ID NO: 40111 - DNA, 22 bp, synthetic construct
  misc_feature 1..22: note = chemically synthesized
  source 1..22: mol_type = other DNA
atattaagagcacttagaagtg

SEQ ID NO: 40112 - DNA, 22 bp, synthetic construct
  misc_feature 1..22: note = chemically synthesized
  source 1..22: mol_type = other DNA
agagcacttagaagtgttgttg

SEQ ID NO: 40113 - DNA, 22 bp, synthetic construct
  misc_feature 1..22: note = chemically synthesized
  source 1..22: mol_type = other DNA
agaagtgttgttgttgtactct

SEQ ID NO: 40114 - DNA, 22 bp, synthetic construct
  misc_feature 1..22: note = chemically synthesized
  source 1..22: mol_type = other DNA
gaagtgttgttgttgtactcta

SEQ ID NO: 40115 - DNA, 22 bp, synthetic construct
  misc_feature 1..22: note = chemically synthesized
  source 1..22: mol_type = other DNA
ttgttgtactctaggatagcag

SEQ ID NO: 40116 - DNA, 22 bp, synthetic construct
  misc_feature 1..22: note = chemically synthesized
  source 1..22: mol_type = other DNA
ttgtactctaggatagcaggtc

SEQ ID NO: 40117 - DNA, 22 bp, synthetic construct
  misc_feature 1..22: note = chemically synthesized
  source 1..22: mol_type = other DNA
tactctaggatagcaggtctca

SEQ ID NO: 40118 - DNA, 22 bp, synthetic construct
  misc_feature 1..22: note = chemically synthesized
  source 1..22: mol_type = other DNA
taggatagcaggtctcaagtgt

SEQ ID NO: 40119 - DNA, 22 bp, synthetic construct
  misc_feature 1..22: note = chemically synthesized
  source 1..22: mol_type = other DNA
ggatagcaggtctcaagtgtaa

SEQ ID NO: 40120 - DNA, 22 bp, synthetic construct
  misc_feature 1..22: note = chemically synthesized
  source 1..22: mol_type = other DNA
aagtgtaaaatacatcctgttc

SEQ ID NO: 40121 - DNA, 22 bp, synthetic construct
  misc_feature 1..22: note = chemically synthesized
  source 1..22: mol_type = other DNA
ttctccttatatagagcacact

SEQ ID NO: 40122 - DNA, 22 bp, synthetic construct
  misc_feature 1..22: note = chemically synthesized
  source 1..22: mol_type = other DNA
tccttatatagagcacactgcc

SEQ ID NO: 40123 - DNA, 22 bp, synthetic construct
  misc_feature 1..22: note = chemically synthesized
  source 1..22: mol_type = other DNA
cttatatagagcacactgccaa

SEQ ID NO: 40124 - DNA, 22 bp, synthetic construct
  misc_feature 1..22: note = chemically synthesized
  source 1..22: mol_type = other DNA
atatagagcacactgccaagca

SEQ ID NO: 40125 - DNA, 22 bp, synthetic construct
  misc_feature 1..22: note = chemically synthesized
  source 1..22: mol_type = other DNA
tatagagcacactgccaagcac

SEQ ID NO: 40126 - DNA, 22 bp, synthetic construct
  misc_feature 1..22: note = chemically synthesized
  source 1..22: mol_type = other DNA
ccaagcacagccaaggcagttg

SEQ ID NO: 40127 - DNA, 22 bp, synthetic construct
  misc_feature 1..22: note = chemically synthesized
  source 1..22: mol_type = other DNA
ggacaagatttcctttcgcaag

SEQ ID NO: 40128 - DNA, 22 bp, synthetic construct
  misc_feature 1..22: note = chemically synthesized
  source 1..22: mol_type = other DNA
cctttcgcaaggagcctggtgg

SEQ ID NO: 40129 - DNA, 22 bp, synthetic construct
  misc_feature 1..22: note = chemically synthesized
  source 1..22: mol_type = other DNA
ctttcgcaaggagcctggtggg

SEQ ID NO: 40130 - DNA, 22 bp, synthetic construct
  misc_feature 1..22: note = chemically synthesized
  source 1..22: mol_type = other DNA
tcgcaaggagcctggtgggtaa

SEQ ID NO: 40131 - DNA, 22 bp, synthetic construct
  misc_feature 1..22: note = chemically synthesized
  source 1..22: mol_type = other DNA
cgcaaggagcctggtgggtaac

SEQ ID NO: 40132 - DNA, 22 bp, synthetic construct
  misc_feature 1..22: note = chemically synthesized
  source 1..22: mol_type = other DNA
gcaaggagcctggtgggtaacg

SEQ ID NO: 40133 - DNA, 22 bp, synthetic construct
  misc_feature 1..22: note = chemically synthesized
  source 1..22: mol_type = other DNA
gtgggtaacgatggtgtgctgc

SEQ ID NO: 40134 - DNA, 22 bp, synthetic construct
  misc_feature 1..22: note = chemically synthesized
  source 1..22: mol_type = other DNA
ctgagaaggctcttacacagac

SEQ ID NO: 40135 - DNA, 22 bp, synthetic construct
  misc_feature 1..22: note = chemically synthesized
  source 1..22: mol_type = other DNA
agaaggctcttacacagacagc

SEQ ID NO: 40136 - DNA, 22 bp, synthetic construct
  misc_feature 1..22: note = chemically synthesized
  source 1..22: mol_type = other DNA
ttacacagacagcataggtctg

SEQ ID NO: 40137 - DNA, 22 bp, synthetic construct
  misc_feature 1..22: note = chemically synthesized
  source 1..22: mol_type = other DNA
acacagacagcataggtctgct

SEQ ID NO: 40138 - DNA, 22 bp, synthetic construct
  misc_feature 1..22: note = chemically synthesized
  source 1..22: mol_type = other DNA
cacagacagcataggtctgctg

SEQ ID NO: 40139 - DNA, 22 bp, synthetic construct
  misc_feature 1..22: note = chemically synthesized
  source 1..22: mol_type = other DNA
ctgttaccaggcctgcagaggg

SEQ ID NO: 40140 - DNA, 22 bp, synthetic construct
  misc_feature 1..22: note = chemically synthesized
  source 1..22: mol_type = other DNA
ttaccaggcctgcagagggaag

SEQ ID NO: 40141 - DNA, 22 bp, synthetic construct
  misc_feature 1..22: note = chemically synthesized
  source 1..22: mol_type = other DNA
ccaggcctgcagagggaagccc

SEQ ID NO: 40142 - DNA, 22 bp, synthetic construct
  misc_feature 1..22: note = chemically synthesized
  source 1..22: mol_type = other DNA
cagagggaagccctggtggaag

SEQ ID NO: 40143 - DNA, 22 bp, synthetic construct
  misc_feature 1..22: note = chemically synthesized
  source 1..22: mol_type = other DNA
gtggaagcaccacctagcctga

SEQ ID NO: 40144 - DNA, 22 bp, synthetic construct
  misc_feature 1..22: note = chemically synthesized
  source 1..22: mol_type = other DNA
gcctgagaacatctacagagac

SEQ ID NO: 40145 - DNA, 22 bp, synthetic construct
  misc_feature 1..22: note = chemically synthesized
  source 1..22: mol_type = other DNA
agaacatctacagagacatttc

SEQ ID NO: 40146 - DNA, 22 bp, synthetic construct
  misc_feature 1..22: note = chemically synthesized
  source 1..22: mol_type = other DNA
cagagacatttcatcctctctg

SEQ ID NO: 40147 - DNA, 22 bp, synthetic construct
  misc_feature 1..22: note = chemically synthesized
  source 1..22: mol_type = other DNA
catcctctctgacccaaaacaa

SEQ ID NO: 40148 - DNA, 22 bp, synthetic construct
  misc_feature 1..22: note = chemically synthesized
  source 1..22: mol_type = other DNA
atcctctctgacccaaaacaaa

SEQ ID NO: 40149 - DNA, 22 bp, synthetic construct
  misc_feature 1..22: note = chemically synthesized
  source 1..22: mol_type = other DNA
tctgacccaaaacaaaataaac

SEQ ID NO: 40150 - DNA, 22 bp, synthetic construct
  misc_feature 1..22: note = chemically synthesized
  source 1..22: mol_type = other DNA
tgacccaaaacaaaataaacac

SEQ ID NO: 40151 - DNA, 22 bp, synthetic construct
  misc_feature 1..22: note = chemically synthesized
  source 1..22: mol_type = other DNA
acccaaaacaaaataaacacca

SEQ ID NO: 40152 - DNA, 22 bp, synthetic construct
  misc_feature 1..22: note = chemically synthesized
  source 1..22: mol_type = other DNA
aacaaacaagtatgtctacatt

SEQ ID NO: 40153 - DNA, 22 bp, synthetic construct
  misc_feature 1..22: note = chemically synthesized
  source 1..22: mol_type = other DNA
acaaacaagtatgtctacattt

SEQ ID NO: 40154 - DNA, 22 bp, synthetic construct
  misc_feature 1..22: note = chemically synthesized
  source 1..22: mol_type = other DNA
catttgactgtttacgtcaagt

SEQ ID NO: 40155 - DNA, 22 bp, synthetic construct
  misc_feature 1..22: note = chemically synthesized
  source 1..22: mol_type = other DNA
gactgtttacgtcaagtgaatt

SEQ ID NO: 40156 - DNA, 22 bp, synthetic construct
  misc_feature 1..22: note = chemically synthesized
  source 1..22: mol_type = other DNA
actgtttacgtcaagtgaattg

SEQ ID NO: 40157 - DNA, 22 bp, synthetic construct
  misc_feature 1..22: note = chemically synthesized
  source 1..22: mol_type = other DNA
tttacgtcaagtgaattgagag

SEQ ID NO: 40158 - DNA, 22 bp, synthetic construct
  misc_feature 1..22: note = chemically synthesized
  source 1..22: mol_type = other DNA
acgtcaagtgaattgagagtgt

SEQ ID NO: 40159 - DNA, 22 bp, synthetic construct
  misc_feature 1..22: note = chemically synthesized
  source 1..22: mol_type = other DNA
cgtcaagtgaattgagagtgtg

SEQ ID NO: 40160 - DNA, 22 bp, synthetic construct
  misc_feature 1..22: note = chemically synthesized
  source 1..22: mol_type = other DNA
agagtgtggcgtaaaattacta

SEQ ID NO: 40161 - DNA, 22 bp, synthetic construct
  misc_feature 1..22: note = chemically synthesized
  source 1..22: mol_type = other DNA
ctacagattttgtcatggtatt

SEQ ID NO: 40162 - DNA, 22 bp, synthetic construct
  misc_feature 1..22: note = chemically synthesized
  source 1..22: mol_type = other DNA
cagattttgtcatggtattttt

SEQ ID NO: 40163 - DNA, 22 bp, synthetic construct
  misc_feature 1..22: note = chemically synthesized
  source 1..22: mol_type = other DNA
tgtcatggtatttttcaatgag

SEQ ID NO: 40164 - DNA, 22 bp, synthetic construct
  misc_feature 1..22: note = chemically synthesized
  source 1..22: mol_type = other DNA
gtcatggtatttttcaatgaga

SEQ ID NO: 40165 - DNA, 22 bp, synthetic construct
  misc_feature 1..22: note = chemically synthesized
  source 1..22: mol_type = other DNA
tcatggtatttttcaatgagaa

SEQ ID NO: 40166 - DNA, 22 bp, synthetic construct
  misc_feature 1..22: note = chemically synthesized
  source 1..22: mol_type = other DNA
ttcaatgagaaatctgagaatc

SEQ ID NO: 40167 - DNA, 22 bp, synthetic construct
  misc_feature 1..22: note = chemically synthesized
  source 1..22: mol_type = other DNA
tcaatgagaaatctgagaatcc

SEQ ID NO: 40168 - DNA, 22 bp, synthetic construct
  misc_feature 1..22: note = chemically synthesized
  source 1..22: mol_type = other DNA
caatgagaaatctgagaatcca

SEQ ID NO: 40169 - DNA, 22 bp, synthetic construct
  misc_feature 1..22: note = chemically synthesized
  source 1..22: mol_type = other DNA
aatgagaaatctgagaatccat

SEQ ID NO: 40170 - DNA, 22 bp, synthetic construct
  misc_feature 1..22: note = chemically synthesized
  source 1..22: mol_type = other DNA
agaatccatctttgcacttgtt

SEQ ID NO: 40171 - DNA, 22 bp, synthetic construct
  misc_feature 1..22: note = chemically synthesized
  source 1..22: mol_type = other DNA
tgcacttgtttttgcctcagcc

SEQ ID NO: 40172 - DNA, 22 bp, synthetic construct
  misc_feature 1..22: note = chemically synthesized
  source 1..22: mol_type = other DNA
gcacttgtttttgcctcagccg

SEQ ID NO: 40173 - DNA, 22 bp, synthetic construct
  misc_feature 1..22: note = chemically synthesized
  source 1..22: mol_type = other DNA
cacttgtttttgcctcagccgt

SEQ ID NO: 40174 - DNA, 22 bp, synthetic construct
  misc_feature 1..22: note = chemically synthesized
  source 1..22: mol_type = other DNA
gtttttgcctcagccgttcact

SEQ ID NO: 40175 - DNA, 22 bp, synthetic construct
  misc_feature 1..22: note = chemically synthesized
  source 1..22: mol_type = other DNA
tttttgcctcagccgttcacta

SEQ ID NO: 40176 - DNA, 22 bp, synthetic construct
  misc_feature 1..22: note = chemically synthesized
  source 1..22: mol_type = other DNA
ttgcctcagccgttcactaagt

SEQ ID NO: 40177 - DNA, 22 bp, synthetic construct
  misc_feature 1..22: note = chemically synthesized
  source 1..22: mol_type = other DNA
tgcctcagccgttcactaagtt

SEQ ID NO: 40178 - DNA, 22 bp, synthetic construct
  misc_feature 1..22: note = chemically synthesized
  source 1..22: mol_type = other DNA
gcctcagccgttcactaagttt

SEQ ID NO: 40179 - DNA, 22 bp, synthetic construct
  misc_feature 1..22: note = chemically synthesized
  source 1..22: mol_type = other DNA
cctcagccgttcactaagtttg

SEQ ID NO: 40180 - DNA, 22 bp, synthetic construct
  misc_feature 1..22: note = chemically synthesized
  source 1..22: mol_type = other DNA
agccgttcactaagtttgctgc

SEQ ID NO: 40181 - DNA, 22 bp, synthetic construct
  misc_feature 1..22: note = chemically synthesized
  source 1..22: mol_type = other DNA
actaagtttgctgccaaaacag

SEQ ID NO: 40182 - DNA, 22 bp, synthetic construct
  misc_feature 1..22: note = chemically synthesized
  source 1..22: mol_type = other DNA
agtttgctgccaaaacagacat

SEQ ID NO: 40183 - DNA, 22 bp, synthetic construct
  misc_feature 1..22: note = chemically synthesized
  source 1..22: mol_type = other DNA
gctgccaaaacagacatccttt

SEQ ID NO: 40184 - DNA, 22 bp, synthetic construct
  misc_feature 1..22: note = chemically synthesized
  source 1..22: mol_type = other DNA
ctgccaaaacagacatcctttt

SEQ ID NO: 40185 - DNA, 22 bp, synthetic construct
  misc_feature 1..22: note = chemically synthesized
  source 1..22: mol_type = other DNA
ccaaaacagacatccttttctt

SEQ ID NO: 40186 - DNA, 22 bp, synthetic construct
  misc_feature 1..22: note = chemically synthesized
  source 1..22: mol_type = other DNA
ttcttaggaaacacaggcaacc

SEQ ID NO: 40187 - DNA, 22 bp, synthetic construct
  misc_feature 1..22: note = chemically synthesized
  source 1..22: mol_type = other DNA
tcttaggaaacacaggcaaccc

SEQ ID NO: 40188 - DNA, 22 bp, synthetic construct
  misc_feature 1..22: note = chemically synthesized
  source 1..22: mol_type = other DNA
cttaggaaacacaggcaaccca

SEQ ID NO: 40189 - DNA, 22 bp, synthetic construct
  misc_feature 1..22: note = chemically synthesized
  source 1..22: mol_type = other DNA
ttaggaaacacaggcaacccag

SEQ ID NO: 40190 - DNA, 22 bp, synthetic construct
  misc_feature 1..22: note = chemically synthesized
  source 1..22: mol_type = other DNA
aggaaacacaggcaacccaggt

SEQ ID NO: 40191 - DNA, 22 bp, synthetic construct
  misc_feature 1..22: note = chemically synthesized
  source 1..22: mol_type = other DNA
ggaaacacaggcaacccaggta

SEQ ID NO: 40192 - DNA, 22 bp, synthetic construct
  misc_feature 1..22: note = chemically synthesized
  source 1..22: mol_type = other DNA
tgtgatcccagcataaacgcaa

SEQ ID NO: 40193 - DNA, 22 bp, synthetic construct
  misc_feature 1..22: note = chemically synthesized
  source 1..22: mol_type = other DNA
tgatcccagcataaacgcaaca

SEQ ID NO: 40194 - DNA, 22 bp, synthetic construct
  misc_feature 1..22: note = chemically synthesized
  source 1..22: mol_type = other DNA
ggatccttgtatggggagtatc

SEQ ID NO: 40195 - DNA, 22 bp, synthetic construct
  misc_feature 1..22: note = chemically synthesized
  source 1..22: mol_type = other DNA
gatccttgtatggggagtatca

SEQ ID NO: 40196 - DNA, 22 bp, synthetic construct
  misc_feature 1..22: note = chemically synthesized
  source 1..22: mol_type = other DNA
gtatggggagtatcaaatttca

SEQ ID NO: 40197 - DNA, 22 bp, synthetic construct
  misc_feature 1..22: note = chemically synthesized
  source 1..22: mol_type = other DNA
tatggggagtatcaaatttcaa

SEQ ID NO: 40198 - DNA, 22 bp, synthetic construct
  misc_feature 1..22: note = chemically synthesized
  source 1..22: mol_type = other DNA
caaattctctgccacttactct

SEQ ID NO: 40199 - DNA, 22 bp, synthetic construct
  misc_feature 1..22: note = chemically synthesized
  source 1..22: mol_type = other DNA
aaattctctgccacttactctg

SEQ ID NO: 40200 - DNA, 22 bp, synthetic construct
  misc_feature 1..22: note = chemically synthesized
  source 1..22: mol_type = other DNA
tctgccacttactctgggaaga

SEQ ID NO: 40201 - DNA, 22 bp, synthetic construct
  misc_feature 1..22: note = chemically synthesized
  source 1..22: mol_type = other DNA
tgccacttactctgggaagaga

SEQ ID NO: 40202 - DNA, 22 bp, synthetic construct
  misc_feature 1..22: note = chemically synthesized
  source 1..22: mol_type = other DNA
ccacttactctgggaagagacc

SEQ ID NO: 40203 - DNA, 22 bp, synthetic construct
  misc_feature 1..22: note = chemically synthesized
  source 1..22: mol_type = other DNA
actctgggaagagaccctgaag

SEQ ID NO: 40204 - DNA, 22 bp, synthetic construct
  misc_feature 1..22: note = chemically synthesized
  source 1..22: mol_type = other DNA
ctctgggaagagaccctgaagt

SEQ ID NO: 40205 - DNA, 22 bp, synthetic construct
  misc_feature 1..22: note = chemically synthesized
  source 1..22: mol_type = other DNA
tgggaagagaccctgaagtgct

SEQ ID NO: 40206 - DNA, 22 bp, synthetic construct
  misc_feature 1..22: note = chemically synthesized
  source 1..22: mol_type = other DNA
ggaagagaccctgaagtgcttc

SEQ ID NO: 40207 - DNA, 22 bp, synthetic construct
  misc_feature 1..22: note = chemically synthesized
  source 1..22: mol_type = other DNA
aagtgcttcagcaggcctccag

SEQ ID NO: 40208 - DNA, 22 bp, synthetic construct
  misc_feature 1..22: note = chemically synthesized
  source 1..22: mol_type = other DNA
cagcaggcctccagcaagaaat

SEQ ID NO: 40209 - DNA, 22 bp, synthetic construct
  misc_feature 1..22: note = chemically synthesized
  source 1..22: mol_type = other DNA
agcaggcctccagcaagaaatg

SEQ ID NO: 40210 - DNA, 22 bp, synthetic construct
  misc_feature 1..22: note = chemically synthesized
  source 1..22: mol_type = other DNA
cagcaagaaatgggagaactgc

SEQ ID NO: 40211 - DNA, 22 bp, synthetic construct
  misc_feature 1..22: note = chemically synthesized
  source 1..22: mol_type = other DNA
ctaacctaatccatgcctagcc

SEQ ID NO: 40212 - DNA, 22 bp, synthetic construct
  misc_feature 1..22: note = chemically synthesized
  source 1..22: mol_type = other DNA
acctaatccatgcctagcccct

SEQ ID NO: 40213 - DNA, 22 bp, synthetic construct
  misc_feature 1..22: note = chemically synthesized
  source 1..22: mol_type = other DNA
atccatgcctagcccctcgcat

SEQ ID NO: 40214 - DNA, 22 bp, synthetic construct
  misc_feature 1..22: note = chemically synthesized
  source 1..22: mol_type = other DNA
gcccctcgcatgaatctcttgt

SEQ ID NO: 40215 - DNA, 22 bp, synthetic construct
  misc_feature 1..22: note = chemically synthesized
  source 1..22: mol_type = other DNA
gcatgaatctcttgttggcaaa

SEQ ID NO: 40216 - DNA, 22 bp, synthetic construct
  misc_feature 1..22: note = chemically synthesized
  source 1..22: mol_type = other DNA
ttgttggcaaacttgtctacaa

SEQ ID NO: 40217 - DNA, 22 bp, synthetic construct
  misc_feature 1..22: note = chemically synthesized
  source 1..22: mol_type = other DNA
gttggcaaacttgtctacaaac

SEQ ID NO: 40218 - DNA, 22 bp, synthetic construct
  misc_feature 1..22: note = chemically synthesized
  source 1..22: mol_type = other DNA
ttggcaaacttgtctacaaacc

SEQ ID NO: 40219 - DNA, 22 bp, synthetic construct
  misc_feature 1..22: note = chemically synthesized
  source 1..22: mol_type = other DNA
gcaaacttgtctacaaacccat

SEQ ID NO: 40220 - DNA, 22 bp, synthetic construct
  misc_feature 1..22: note = chemically synthesized
  source 1..22: mol_type = other DNA
gtctacaaacccattagcccta

SEQ ID NO: 40221 - DNA, 22 bp, synthetic construct
  misc_feature 1..22: note = chemically synthesized
  source 1..22: mol_type = other DNA
tctacaaacccattagccctaa

SEQ ID NO: 40222 - DNA, 22 bp, synthetic construct
  misc_feature 1..22: note = chemically synthesized
  source 1..22: mol_type = other DNA
caaacccattagccctaaacaa

SEQ ID NO: 40223 - DNA, 22 bp, synthetic construct
  misc_feature 1..22: note = chemically synthesized
  source 1..22: mol_type = other DNA
gccctaaacaagctgacggcag

SEQ ID NO: 40224 - DNA, 22 bp, synthetic construct
  misc_feature 1..22: note = chemically synthesized
  source 1..22: mol_type = other DNA
aacaagctgacggcaggaccag

SEQ ID NO: 40225 - DNA, 22 bp, synthetic construct
  misc_feature 1..22: note = chemically synthesized
  source 1..22: mol_type = other DNA
acggcaggaccagatctctaca

SEQ ID NO: 40226 - DNA, 22 bp, synthetic construct
  misc_feature 1..22: note = chemically synthesized
  source 1..22: mol_type = other DNA
tacagtgtctggccgtgtggca

SEQ ID NO: 40227 - DNA, 22 bp, synthetic construct
  misc_feature 1..22: note = chemically synthesized
  source 1..22: mol_type = other DNA
cagtgtctggccgtgtggcaaa

SEQ ID NO: 40228 - DNA, 22 bp, synthetic construct
  misc_feature 1..22: note = chemically synthesized
  source 1..22: mol_type = other DNA
gccgtgtggcaaagtgaggtct

SEQ ID NO: 40229 - DNA, 22 bp, synthetic construct
  misc_feature 1..22: note = chemically synthesized
  source 1..22: mol_type = other DNA
atctgactatctggcagcatag

SEQ ID NO: 40230 - DNA, 22 bp, synthetic construct
  misc_feature 1..22: note = chemically synthesized
  source 1..22: mol_type = other DNA
actatctggcagcatagtttgt

SEQ ID NO: 40231 - DNA, 22 bp, synthetic construct
  misc_feature 1..22: note = chemically synthesized
  source 1..22: mol_type = other DNA
tctggcagcatagtttgttttt

SEQ ID NO: 40232 - DNA, 22 bp, synthetic construct
  misc_feature 1..22: note = chemically synthesized
  source 1..22: mol_type = other DNA
gcagcatagtttgtttttgttt

SEQ ID NO: 40233 - DNA, 22 bp, synthetic construct
  misc_feature 1..22: note = chemically synthesized
  source 1..22: mol_type = other DNA
gtttttgtttttgtttttgttt

SEQ ID NO: 40234 - DNA, 22 bp, synthetic construct
  misc_feature 1..22: note = chemically synthesized
  source 1..22: mol_type = other DNA
tttttgtttttgtttttgtttt

SEQ ID NO: 40235 - DNA, 22 bp, synthetic construct
  misc_feature 1..22: note = chemically synthesized
  source 1..22: mol_type = other DNA
ttgtttttgtttttgtttttgt

SEQ ID NO: 40236 - DNA, 22 bp, synthetic construct
  misc_feature 1..22: note = chemically synthesized
  source 1..22: mol_type = other DNA
tgtttttgtttttgtttttgtt

SEQ ID NO: 40237 - DNA, 22 bp, synthetic construct
  misc_feature 1..22: note = chemically synthesized
  source 1..22: mol_type = other DNA
gtttttgtttttgtttttgttt

SEQ ID NO: 40238 - DNA, 22 bp, synthetic construct
  misc_feature 1..22: note = chemically synthesized
  source 1..22: mol_type = other DNA
tttttgtttttgtttttgtttt

SEQ ID NO: 40239 - DNA, 22 bp, synthetic construct
  misc_feature 1..22: note = chemically synthesized
  source 1..22: mol_type = other DNA
ttgtttttgtttttgttttcta

SEQ ID NO: 40240 - DNA, 22 bp, synthetic construct
  misc_feature 1..22: note = chemically synthesized
  source 1..22: mol_type = other DNA
tgtttttgtttttgttttctaa

SEQ ID NO: 40241 - DNA, 22 bp, synthetic construct
  misc_feature 1..22: note = chemically synthesized
  source 1..22: mol_type = other DNA
gtttttgtttttgttttctaag

SEQ ID NO: 40242 - DNA, 22 bp, synthetic construct
  misc_feature 1..22: note = chemically synthesized
  source 1..22: mol_type = other DNA
tttttgtttttgttttctaagt

SEQ ID NO: 40243 - DNA, 22 bp, synthetic construct
  misc_feature 1..22: note = chemically synthesized
  source 1..22: mol_type = other DNA
ttgtttttgttttctaagttgt

SEQ ID NO: 40244 - DNA, 22 bp, synthetic construct
  misc_feature 1..22: note = chemically synthesized
  source 1..22: mol_type = other DNA
tgtttttgttttctaagttgta

SEQ ID NO: 40245 - DNA, 22 bp, synthetic construct
  misc_feature 1..22: note = chemically synthesized
  source 1..22: mol_type = other DNA
gtttttgttttctaagttgtaa

SEQ ID NO: 40246 - DNA, 22 bp, synthetic construct
  misc_feature 1..22: note = chemically synthesized
  source 1..22: mol_type = other DNA
tttttgttttctaagttgtaaa

SEQ ID NO: 40247 - DNA, 22 bp, synthetic construct
  misc_feature 1..22: note = chemically synthesized
  source 1..22: mol_type = other DNA
ttgttttctaagttgtaaaaaa

SEQ ID NO: 40248 - DNA, 22 bp, synthetic construct
  misc_feature 1..22: note = chemically synthesized
  source 1..22: mol_type = other DNA
tgttttctaagttgtaaaaaac

SEQ ID NO: 40249 - DNA, 22 bp, synthetic construct
  misc_feature 1..22: note = chemically synthesized
  source 1..22: mol_type = other DNA
gttttctaagttgtaaaaaacc

SEQ ID NO: 40250 - DNA, 22 bp, synthetic construct
  misc_feature 1..22: note = chemically synthesized
  source 1..22: mol_type = other DNA
ttttctaagttgtaaaaaaccc

SEQ ID NO: 40251 - DNA, 22 bp, synthetic construct
  misc_feature 1..22: note = chemically synthesized
  source 1..22: mol_type = other DNA
tctaagttgtaaaaaaccctag

SEQ ID NO: 40252 - DNA, 22 bp, synthetic construct
  misc_feature 1..22: note = chemically synthesized
  source 1..22: mol_type = other DNA
ctaagttgtaaaaaaccctagc

SEQ ID NO: 40253 - DNA, 22 bp, synthetic construct
  misc_feature 1..22: note = chemically synthesized
  source 1..22: mol_type = other DNA
taagttgtaaaaaaccctagct

SEQ ID NO: 40254 - DNA, 22 bp, synthetic construct
  misc_feature 1..22: note = chemically synthesized
  source 1..22: mol_type = other DNA
agttgtaaaaaaccctagctat

SEQ ID NO: 40255 - DNA, 22 bp, synthetic construct
  misc_feature 1..22: note = chemically synthesized
  source 1..22: mol_type = other DNA
taaaaaaccctagctatcatca

SEQ ID NO: 40256 - DNA, 22 bp, synthetic construct
  misc_feature 1..22: note = chemically synthesized
  source 1..22: mol_type = other DNA
gctatcatcaagtctgtccctt

SEQ ID NO: 40257 - DNA, 22 bp, synthetic construct
  misc_feature 1..22: note = chemically synthesized
  source 1..22: mol_type = other DNA
tcatcaagtctgtcccttcatt

SEQ ID NO: 40258 - DNA, 22 bp, synthetic construct
  misc_feature 1..22: note = chemically synthesized
  source 1..22: mol_type = other DNA
tcccttcattttacagatgggg

SEQ ID NO: 40259 - DNA, 22 bp, synthetic construct
  misc_feature 1..22: note = chemically synthesized
  source 1..22: mol_type = other DNA
cattttacagatggggaaactg

SEQ ID NO: 40260 - DNA, 22 bp, synthetic construct
  misc_feature 1..22: note = chemically synthesized
  source 1..22: mol_type = other DNA
attttacagatggggaaactga

SEQ ID NO: 40261 - DNA, 22 bp, synthetic construct
  misc_feature 1..22: note = chemically synthesized
  source 1..22: mol_type = other DNA
tacagatggggaaactgaggcc

SEQ ID NO: 40262 - DNA, 22 bp, synthetic construct
  misc_feature 1..22: note = chemically synthesized
  source 1..22: mol_type = other DNA
acagatggggaaactgaggcca

SEQ ID NO: 40263 - DNA, 22 bp, synthetic construct
  misc_feature 1..22: note = chemically synthesized
  source 1..22: mol_type = other DNA
cagatggggaaactgaggccat

SEQ ID NO: 40264 - DNA, 22 bp, synthetic construct
  misc_feature 1..22: note = chemically synthesized
  source 1..22: mol_type = other DNA
aggccatgagaaattaagtgac

SEQ ID NO: 40265 - DNA, 22 bp, synthetic construct
  misc_feature 1..22: note = chemically synthesized
  source 1..22: mol_type = other DNA
agtgacttgcccatggctacac

SEQ ID NO: 40266 - DNA, 22 bp, synthetic construct
  misc_feature 1..22: note = chemically synthesized
  source 1..22: mol_type = other DNA
gcccatggctacactgatgatt

SEQ ID NO: 40267 - DNA, 22 bp, synthetic construct
  misc_feature 1..22: note = chemically synthesized
  source 1..22: mol_type = other DNA
cccatggctacactgatgatta

SEQ ID NO: 40268 - DNA, 22 bp, synthetic construct
  misc_feature 1..22: note = chemically synthesized
  source 1..22: mol_type = other DNA
cactgatgattaaccacaatgt

SEQ ID NO: 40269 - DNA, 22 bp, synthetic construct
  misc_feature 1..22: note = chemically synthesized
  source 1..22: mol_type = other DNA
atgattaaccacaatgtgaaga

SEQ ID NO: 40270 - DNA, 22 bp, synthetic construct
  misc_feature 1..22: note = chemically synthesized
  source 1..22: mol_type = other DNA
accacaatgtgaagattagaat

SEQ ID NO: 40271 - DNA, 22 bp, synthetic construct
  misc_feature 1..22: note = chemically synthesized
  source 1..22: mol_type = other DNA
gaattaatctcctgactcctga

SEQ ID NO: 40272 - DNA, 22 bp, synthetic construct
  misc_feature 1..22: note = chemically synthesized
  source 1..22: mol_type = other DNA
atctcctgactcctgatccagt

SEQ ID NO: 40273 - DNA, 22 bp, synthetic construct
  misc_feature 1..22: note = chemically synthesized
  source 1..22: mol_type = other DNA
ctgactcctgatccagtggtct

SEQ ID NO: 40274 - DNA, 22 bp, synthetic construct
  misc_feature 1..22: note = chemically synthesized
  source 1..22: mol_type = other DNA
actcctgatccagtggtctttc

SEQ ID NO: 40275 - DNA, 22 bp, synthetic construct
  misc_feature 1..22: note = chemically synthesized
  source 1..22: mol_type = other DNA
ctgatccagtggtctttcctgg

SEQ ID NO: 40276 - DNA, 22 bp, synthetic construct
  misc_feature 1..22: note = chemically synthesized
  source 1..22: mol_type = other DNA
atccagtggtctttcctgggaa

SEQ ID NO: 40277 - DNA, 22 bp, synthetic construct
  misc_feature 1..22: note = chemically synthesized
  source 1..22: mol_type = other DNA
tcctgggaatttgtctcttccc

SEQ ID NO: 40278 - DNA, 22 bp, synthetic construct
  misc_feature 1..22: note = chemically synthesized
  source 1..22: mol_type = other DNA
cctgggaatttgtctcttcccc

SEQ ID NO: 40279 - DNA, 22 bp, synthetic construct
  misc_feature 1..22: note = chemically synthesized
  source 1..22: mol_type = other DNA
ctgggaatttgtctcttccccc

SEQ ID NO: 40280 - DNA, 22 bp, synthetic construct
  misc_feature 1..22: note = chemically synthesized
  source 1..22: mol_type = other DNA
ggaatttgtctcttcccccctg

SEQ ID NO: 40281 - DNA, 22 bp, synthetic construct
  misc_feature 1..22: note = chemically synthesized
  source 1..22: mol_type = other DNA
gtctcttcccccctgctgctcc

SEQ ID NO: 40282 - DNA, 22 bp, synthetic construct
  misc_feature 1..22: note = chemically synthesized
  source 1..22: mol_type = other DNA
tctcttcccccctgctgctcct

SEQ ID NO: 40283 - DNA, 22 bp, synthetic construct
  misc_feature 1..22: note = chemically synthesized
  source 1..22: mol_type = other DNA
ttcccccctgctgctcctgccg

SEQ ID NO: 40284 - DNA, 22 bp, synthetic construct
  misc_feature 1..22: note = chemically synthesized
  source 1..22: mol_type = other DNA
cccccctgctgctcctgccgtg

SEQ ID NO: 40285 - DNA, 22 bp, synthetic construct
  misc_feature 1..22: note = chemically synthesized
  source 1..22: mol_type = other DNA
ccccctgctgctcctgccgtgg

SEQ ID NO: 40286 - DNA, 22 bp, synthetic construct
  misc_feature 1..22: note = chemically synthesized
  source 1..22: mol_type = other DNA
ctgctcctgccgtggtcttcac

SEQ ID NO: 40287 - DNA, 22 bp, synthetic construct
  misc_feature 1..22: note = chemically synthesized
  source 1..22: mol_type = other DNA
ctcctgccgtggtcttcactgc

SEQ ID NO: 40288 - DNA, 22 bp, synthetic construct
  misc_feature 1..22: note = chemically synthesized
  source 1..22: mol_type = other DNA
ctgccgtggtcttcactgccca

SEQ ID NO: 40289 - DNA, 22 bp, synthetic construct
  misc_feature 1..22: note = chemically synthesized
  source 1..22: mol_type = other DNA
ccgtggtcttcactgcccaaca

SEQ ID NO: 40290 - DNA, 22 bp, synthetic construct
  misc_feature 1..22: note = chemically synthesized
  source 1..22: mol_type = other DNA
cactgcccaacaagaaggtcct

SEQ ID NO: 40291 - DNA, 22 bp, synthetic construct
  misc_feature 1..22: note = chemically synthesized
  source 1..22: mol_type = other DNA
actgcccaacaagaaggtcctg

SEQ ID NO: 40292 - DNA, 22 bp, synthetic construct
  misc_feature 1..22: note = chemically synthesized
  source 1..22: mol_type = other DNA
cccaacaagaaggtcctgtttc

SEQ ID NO: 40293 - DNA, 22 bp, synthetic construct
  misc_feature 1..22: note = chemically synthesized
  source 1..22: mol_type = other DNA
tttctactgatccattaagcag

SEQ ID NO: 40294 - DNA, 22 bp, synthetic construct
  misc_feature 1..22: note = chemically synthesized
  source 1..22: mol_type = other DNA
ctactgatccattaagcagtac

SEQ ID NO: 40295 - DNA, 22 bp, synthetic construct
  misc_feature 1..22: note = chemically synthesized
  source 1..22: mol_type = other DNA
tactgatccattaagcagtact

SEQ ID NO: 40296 - DNA, 22 bp, synthetic construct
  misc_feature 1..22: note = chemically synthesized
  source 1..22: mol_type = other DNA
ctgatccattaagcagtactta

SEQ ID NO: 40297 - DNA, 22 bp, synthetic construct
  misc_feature 1..22: note = chemically synthesized
  source 1..22: mol_type = other DNA
atccattaagcagtacttaacc

SEQ ID NO: 40298 - DNA, 22 bp, synthetic construct
  misc_feature 1..22: note = chemically synthesized
  source 1..22: mol_type = other DNA
agcagtacttaaccgtcttggg

SEQ ID NO: 40299 - DNA, 22 bp, synthetic construct
  misc_feature 1..22: note = chemically synthesized
  source 1..22: mol_type = other DNA
aaccgtcttgggggagggtcca

SEQ ID NO: 40300 - DNA, 22 bp, synthetic construct
  misc_feature 1..22: note = chemically synthesized
  source 1..22: mol_type = other DNA
accgtcttgggggagggtccag

SEQ ID NO: 40301 - DNA, 22 bp, synthetic construct
  misc_feature 1..22: note = chemically synthesized
  source 1..22: mol_type = other DNA
gggggagggtccagcccagcag

SEQ ID NO: 40302 - DNA, 22 bp, synthetic construct
  misc_feature 1..22: note = chemically synthesized
  source 1..22: mol_type = other DNA
ggggagggtccagcccagcagc

SEQ ID NO: 40303 - DNA, 22 bp, synthetic construct
  misc_feature 1..22: note = chemically synthesized
  source 1..22: mol_type = other DNA
catggggctttcgaaaggtgcc

SEQ ID NO: 40304 - DNA, 22 bp, synthetic construct
  misc_feature 1..22: note = chemically synthesized
  source 1..22: mol_type = other DNA
tcgaaaggtgccaatgaactga

SEQ ID NO: 40305 - DNA, 22 bp, synthetic construct
  misc_feature 1..22: note = chemically synthesized
  source 1..22: mol_type = other DNA
cgaaaggtgccaatgaactgac

SEQ ID NO: 40306 - DNA, 22 bp, synthetic construct
  misc_feature 1..22: note = chemically synthesized
  source 1..22: mol_type = other DNA
gaaaggtgccaatgaactgact

SEQ ID NO: 40307 - DNA, 22 bp, synthetic construct
  misc_feature 1..22: note = chemically synthesized
  source 1..22: mol_type = other DNA
acttggtctcacaattggaaaa

SEQ ID NO: 40308 - DNA, 22 bp, synthetic construct
  misc_feature 1..22: note = chemically synthesized
  source 1..22: mol_type = other DNA
ggtctcacaattggaaaacaag

SEQ ID NO: 40309 - DNA, 22 bp, synthetic construct
  misc_feature 1..22: note = chemically synthesized
  source 1..22: mol_type = other DNA
gtctcacaattggaaaacaagg

SEQ ID NO: 40310 - DNA, 22 bp, synthetic construct
  misc_feature 1..22: note = chemically synthesized
  source 1..22: mol_type = other DNA
acaattggaaaacaaggcctgc

SEQ ID NO: 40311 - DNA, 22 bp, synthetic construct
  misc_feature 1..22: note = chemically synthesized
  source 1..22: mol_type = other DNA
gaaaacaaggcctgctctgctg

SEQ ID NO: 40312 - DNA, 22 bp, synthetic construct
  misc_feature 1..22: note = chemically synthesized
  source 1..22: mol_type = other DNA
ctctgctgcctgggcctcctgg

SEQ ID NO: 40313 - DNA, 22 bp, synthetic construct
  misc_feature 1..22: note = chemically synthesized
  source 1..22: mol_type = other DNA
tgctgcctgggcctcctggcct

SEQ ID NO: 40314 - DNA, 22 bp, synthetic construct
  misc_feature 1..22: note = chemically synthesized
  source 1..22: mol_type = other DNA
ctgcctgggcctcctggcctca

SEQ ID NO: 40315 - DNA, 22 bp, synthetic construct
  misc_feature 1..22: note = chemically synthesized
  source 1..22: mol_type = other DNA
cctgggcctcctggcctcacct

SEQ ID NO: 40316 - DNA, 22 bp, synthetic construct
  misc_feature 1..22: note = chemically synthesized
  source 1..22: mol_type = other DNA
ggcctcctggcctcacctttgc

SEQ ID NO: 40317 - DNA, 22 bp, synthetic construct
  misc_feature 1..22: note = chemically synthesized
  source 1..22: mol_type = other DNA
ctggcctcacctttgctgtgtt

SEQ ID NO: 40318 - DNA, 22 bp, synthetic construct
  misc_feature 1..22: note = chemically synthesized
  source 1..22: mol_type = other DNA
gcctcacctttgctgtgttcac

SEQ ID NO: 40319 - DNA, 22 bp, synthetic construct
  misc_feature 1..22: note = chemically synthesized
  source 1..22: mol_type = other DNA
acctttgctgtgttcaccctct

SEQ ID NO: 40320 - DNA, 22 bp, synthetic construct
  misc_feature 1..22: note = chemically synthesized
  source 1..22: mol_type = other DNA
tgctgtgttcaccctctacctc

SEQ ID NO: 40321 - DNA, 22 bp, synthetic construct
  misc_feature 1..22: note = chemically synthesized
  source 1..22: mol_type = other DNA
gctgtgttcaccctctacctct

SEQ ID NO: 40322 - DNA, 22 bp, synthetic construct
  misc_feature 1..22: note = chemically synthesized
  source 1..22: mol_type = other DNA
ctgtgttcaccctctacctctg

SEQ ID NO: 40323 - DNA, 22 bp, synthetic construct
  misc_feature 1..22: note = chemically synthesized
  source 1..22: mol_type = other DNA
tgttcaccctctacctctgctt

SEQ ID NO: 40324 - DNA, 22 bp, synthetic construct
  misc_feature 1..22: note = chemically synthesized
  source 1..22: mol_type = other DNA
accctctacctctgcttcccct

SEQ ID NO: 40325 - DNA, 22 bp, synthetic construct
  misc_feature 1..22: note = chemically synthesized
  source 1..22: mol_type = other DNA
tacctctgcttcccctgcagaa

SEQ ID NO: 40326 - DNA, 22 bp, synthetic construct
  misc_feature 1..22: note = chemically synthesized
  source 1..22: mol_type = other DNA
cctctgcttcccctgcagaatt

SEQ ID NO: 40327 - DNA, 22 bp, synthetic construct
  misc_feature 1..22: note = chemically synthesized
  source 1..22: mol_type = other DNA
tgcttcccctgcagaattagac

SEQ ID NO: 40328 - DNA, 22 bp, synthetic construct
  misc_feature 1..22: note = chemically synthesized
  source 1..22: mol_type = other DNA
cttcccctgcagaattagacag

SEQ ID NO: 40329 - DNA, 22 bp, synthetic construct
  misc_feature 1..22: note = chemically synthesized
  source 1..22: mol_type = other DNA
cccctgcagaattagacagcta

SEQ ID NO: 40330 - DNA, 22 bp, synthetic construct
  misc_feature 1..22: note = chemically synthesized
  source 1..22: mol_type = other DNA
ccctgcagaattagacagctaa

SEQ ID NO: 40331 - DNA, 22 bp, synthetic construct
  misc_feature 1..22: note = chemically synthesized
  source 1..22: mol_type = other DNA
cagaattagacagctaaaaaca

SEQ ID NO: 40332 - DNA, 22 bp, synthetic construct
  misc_feature 1..22: note = chemically synthesized
  source 1..22: mol_type = other DNA
gacagctaaaaacatttctatc

SEQ ID NO: 40333 - DNA, 22 bp, synthetic construct
  misc_feature 1..22: note = chemically synthesized
  source 1..22: mol_type = other DNA
aaaacatttctatcagcctaag

SEQ ID NO: 40334 - DNA, 22 bp, synthetic construct
  misc_feature 1..22: note = chemically synthesized
  source 1..22: mol_type = other DNA
ctatcagcctaagaagctattt

SEQ ID NO: 40335 - DNA, 22 bp, synthetic construct
  misc_feature 1..22: note = chemically synthesized
  source 1..22: mol_type = other DNA
tatcagcctaagaagctattta

SEQ ID NO: 40336 - DNA, 22 bp, synthetic construct
  misc_feature 1..22: note = chemically synthesized
  source 1..22: mol_type = other DNA
tcagcctaagaagctatttact

SEQ ID NO: 40337 - DNA, 22 bp, synthetic construct
  misc_feature 1..22: note = chemically synthesized
  source 1..22: mol_type = other DNA
agaagctatttactttagaaaa

SEQ ID NO: 40338 - DNA, 22 bp, synthetic construct
  misc_feature 1..22: note = chemically synthesized
  source 1..22: mol_type = other DNA
tttactttagaaaaaaagcaca

SEQ ID NO: 40339 - DNA, 22 bp, synthetic construct
  misc_feature 1..22: note = chemically synthesized
  source 1..22: mol_type = other DNA
actttagaaaaaaagcacactg

SEQ ID NO: 40340 - DNA, 22 bp, synthetic construct
  misc_feature 1..22: note = chemically synthesized
  source 1..22: mol_type = other DNA
ctttagaaaaaaagcacactgt

SEQ ID NO: 40341 - DNA, 22 bp, synthetic construct
  misc_feature 1..22: note = chemically synthesized
  source 1..22: mol_type = other DNA
tagaaaaaaagcacactgtctt

SEQ ID NO: 40342 - DNA, 22 bp, synthetic construct
  misc_feature 1..22: note = chemically synthesized
  source 1..22: mol_type = other DNA
agaaaaaaagcacactgtcttt

SEQ ID NO: 40343 - DNA, 22 bp, synthetic construct
  misc_feature 1..22: note = chemically synthesized
  source 1..22: mol_type = other DNA
gaaaaaaagcacactgtctttg

SEQ ID NO: 40344 - DNA, 22 bp, synthetic construct
  misc_feature 1..22: note = chemically synthesized
  source 1..22: mol_type = other DNA
tctttgtgagactcacccttgc

SEQ ID NO: 40345 - DNA, 22 bp, synthetic construct
  misc_feature 1..22: note = chemically synthesized
  source 1..22: mol_type = other DNA
tgtgagactcacccttgcattt

SEQ ID NO: 40346 - DNA, 22 bp, synthetic construct
  misc_feature 1..22: note = chemically synthesized
  source 1..22: mol_type = other DNA
gtgagactcacccttgcattta

SEQ ID NO: 40347 - DNA, 22 bp, synthetic construct
  misc_feature 1..22: note = chemically synthesized
  source 1..22: mol_type = other DNA
tgagactcacccttgcatttat

SEQ ID NO: 40348 - DNA, 22 bp, synthetic construct
  misc_feature 1..22: note = chemically synthesized
  source 1..22: mol_type = other DNA
acccttgcatttatcttccttc

SEQ ID NO: 40349 - DNA, 22 bp, synthetic construct
  misc_feature 1..22: note = chemically synthesized
  source 1..22: mol_type = other DNA
gcatttatcttccttcaggaag

SEQ ID NO: 40350 - DNA, 22 bp, synthetic construct
  misc_feature 1..22: note = chemically synthesized
  source 1..22: mol_type = other DNA
catttatcttccttcaggaaga

SEQ ID NO: 40351 - DNA, 22 bp, synthetic construct
  misc_feature 1..22: note = chemically synthesized
  source 1..22: mol_type = other DNA
atcttccttcaggaagagggtc

SEQ ID NO: 40352 - DNA, 22 bp, synthetic construct
  misc_feature 1..22: note = chemically synthesized
  source 1..22: mol_type = other DNA
tcttccttcaggaagagggtca

SEQ ID NO: 40353 - DNA, 22 bp, synthetic construct
  misc_feature 1..22: note = chemically synthesized
  source 1..22: mol_type = other DNA
ccttcaggaagagggtcaaagc

SEQ ID NO: 40354 - DNA, 22 bp, synthetic construct
  misc_feature 1..22: note = chemically synthesized
  source 1..22: mol_type = other DNA
cttcaggaagagggtcaaagca

SEQ ID NO: 40355 - DNA, 22 bp, synthetic construct
  misc_feature 1..22: note = chemically synthesized
  source 1..22: mol_type = other DNA
caggaagagggtcaaagcaaag

SEQ ID NO: 40356 - DNA, 22 bp, synthetic construct
  misc_feature 1..22: note = chemically synthesized
  source 1..22: mol_type = other DNA
aggaagagggtcaaagcaaagc

SEQ ID NO: 40357 - DNA, 22 bp, synthetic construct
  misc_feature 1..22: note = chemically synthesized
  source 1..22: mol_type = other DNA
gggaccccagctgattctgctg

SEQ ID NO: 40358 - DNA, 22 bp, synthetic construct
  misc_feature 1..22: note = chemically synthesized
  source 1..22: mol_type = other DNA
attctgctgcttcttccactaa

SEQ ID NO: 40359 - DNA, 22 bp, synthetic construct
  misc_feature 1..22: note = chemically synthesized
  source 1..22: mol_type = other DNA
tgctgcttcttccactaaacac

SEQ ID NO: 40360 - DNA, 22 bp, synthetic construct
  misc_feature 1..22: note = chemically synthesized
  source 1..22: mol_type = other DNA
ctgcttcttccactaaacacat

SEQ ID NO: 40361 - DNA, 22 bp, synthetic construct
  misc_feature 1..22: note = chemically synthesized
  source 1..22: mol_type = other DNA
cttcttccactaaacacatcca

SEQ ID NO: 40362 - DNA, 22 bp, synthetic construct
  misc_feature 1..22: note = chemically synthesized
  source 1..22: mol_type = other DNA
cttccactaaacacatccataa

SEQ ID NO: 40363 - DNA, 22 bp, synthetic construct
  misc_feature 1..22: note = chemically synthesized
  source 1..22: mol_type = other DNA
ttccactaaacacatccataat

SEQ ID NO: 40364 - DNA, 22 bp, synthetic construct
  misc_feature 1..22: note = chemically synthesized
  source 1..22: mol_type = other DNA
ccactaaacacatccataatat

SEQ ID NO: 40365 - DNA, 22 bp, synthetic construct
  misc_feature 1..22: note = chemically synthesized
  source 1..22: mol_type = other DNA
cactaaacacatccataatatt

SEQ ID NO: 40366 - DNA, 22 bp, synthetic construct
  misc_feature 1..22: note = chemically synthesized
  source 1..22: mol_type = other DNA
aacacatccataatattctctt

SEQ ID NO: 40367 - DNA, 22 bp, synthetic construct
  misc_feature 1..22: note = chemically synthesized
  source 1..22: mol_type = other DNA
tctttggtaagtaaaatcgaca

SEQ ID NO: 40368 - DNA, 22 bp, synthetic construct
  misc_feature 1..22: note = chemically synthesized
  source 1..22: mol_type = other DNA
tttggtaagtaaaatcgacatt

SEQ ID NO: 40369 - DNA, 22 bp, synthetic construct
  misc_feature 1..22: note = chemically synthesized
  source 1..22: mol_type = other DNA
tggtaagtaaaatcgacattcc

SEQ ID NO: 40370 - DNA, 22 bp, synthetic construct
  misc_feature 1..22: note = chemically synthesized
  source 1..22: mol_type = other DNA
ggtaagtaaaatcgacattccc

SEQ ID NO: 40371 - DNA, 22 bp, synthetic construct
  misc_feature 1..22: note = chemically synthesized
  source 1..22: mol_type = other DNA
gtaagtaaaatcgacattccca

SEQ ID NO: 40372 - DNA, 22 bp, synthetic construct
  misc_feature 1..22: note = chemically synthesized
  source 1..22: mol_type = other DNA
ccacatgaactggaaatgctaa

SEQ ID NO: 40373 - DNA, 22 bp, synthetic construct
  misc_feature 1..22: note = chemically synthesized
  source 1..22: mol_type = other DNA
gaaatgctaaattgttaatagc

SEQ ID NO: 40374 - DNA, 22 bp, synthetic construct
  misc_feature 1..22: note = chemically synthesized
  source 1..22: mol_type = other DNA
aattgttaatagcctccctagg

SEQ ID NO: 40375 - DNA, 22 bp, synthetic construct
  misc_feature 1..22: note = chemically synthesized
  source 1..22: mol_type = other DNA
ttaatagcctccctagggctta

SEQ ID NO: 40376 - DNA, 22 bp, synthetic construct
  misc_feature 1..22: note = chemically synthesized
  source 1..22: mol_type = other DNA
atagcctccctagggcttaact

SEQ ID NO: 40377 - DNA, 22 bp, synthetic construct
  misc_feature 1..22: note = chemically synthesized
  source 1..22: mol_type = other DNA
cctagggcttaacttcttgcta

SEQ ID NO: 40378 - DNA, 22 bp, synthetic construct
  misc_feature 1..22: note = chemically synthesized
  source 1..22: mol_type = other DNA
gggcttaacttcttgctatgat

SEQ ID NO: 40379 - DNA, 22 bp, synthetic construct
  misc_feature 1..22: note = chemically synthesized
  source 1..22: mol_type = other DNA
aacttcttgctatgatgccttc

SEQ ID NO: 40380 - DNA, 22 bp, synthetic construct
  misc_feature 1..22: note = chemically synthesized
  source 1..22: mol_type = other DNA
acttcttgctatgatgccttca

SEQ ID NO: 40381 - DNA, 22 bp, synthetic construct
  misc_feature 1..22: note = chemically synthesized
  source 1..22: mol_type = other DNA
cttgctatgatgccttcaatta

SEQ ID NO: 40382 - DNA, 22 bp, synthetic construct
  misc_feature 1..22: note = chemically synthesized
  source 1..22: mol_type = other DNA
ttgctatgatgccttcaattat

SEQ ID NO: 40383 - DNA, 22 bp, synthetic construct
  misc_feature 1..22: note = chemically synthesized
  source 1..22: mol_type = other DNA
gctatgatgccttcaattattt

SEQ ID NO: 40384 - DNA, 22 bp, synthetic construct
  misc_feature 1..22: note = chemically synthesized
  source 1..22: mol_type = other DNA
ctatgatgccttcaattatttc

SEQ ID NO: 40385 - DNA, 22 bp, synthetic construct
  misc_feature 1..22: note = chemically synthesized
  source 1..22: mol_type = other DNA
tgatgccttcaattatttcatc

SEQ ID NO: 40386 - DNA, 22 bp, synthetic construct
  misc_feature 1..22: note = chemically synthesized
  source 1..22: mol_type = other DNA
caattatttcatcacggcttag

SEQ ID NO: 40387 - DNA, 22 bp, synthetic construct
  misc_feature 1..22: note = chemically synthesized
  source 1..22: mol_type = other DNA
aattatttcatcacggcttagg

SEQ ID NO: 40388 - DNA, 22 bp, synthetic construct
  misc_feature 1..22: note = chemically synthesized
  source 1..22: mol_type = other DNA
tttcatcacggcttaggcaaag

SEQ ID NO: 40389 - DNA, 22 bp, synthetic construct
  misc_feature 1..22: note = chemically synthesized
  source 1..22: mol_type = other DNA
catcacggcttaggcaaagtaa

SEQ ID NO: 40390 - DNA, 22 bp, synthetic construct
  misc_feature 1..22: note = chemically synthesized
  source 1..22: mol_type = other DNA
atcacggcttaggcaaagtaaa

SEQ ID NO: 40391 - DNA, 22 bp, synthetic construct
  misc_feature 1..22: note = chemically synthesized
  source 1..22: mol_type = other DNA
aggcaaagtaaagtatcacaat

SEQ ID NO: 40392 - DNA, 22 bp, synthetic construct
  misc_feature 1..22: note = chemically synthesized
  source 1..22: mol_type = other DNA
ggcaaagtaaagtatcacaatt

SEQ ID NO: 40393 - DNA, 22 bp, synthetic construct
  misc_feature 1..22: note = chemically synthesized
  source 1..22: mol_type = other DNA
atgcttctgagcgtcaaactcg

SEQ ID NO: 40394 - DNA, 22 bp, synthetic construct
  misc_feature 1..22: note = chemically synthesized
  source 1..22: mol_type = other DNA
ctgagcgtcaaactcgaggagc

SEQ ID NO: 40395 - DNA, 22 bp, synthetic construct
  misc_feature 1..22: note = chemically synthesized
  source 1..22: mol_type = other DNA
tgagcgtcaaactcgaggagca

SEQ ID NO: 40396 - DNA, 22 bp, synthetic construct
  misc_feature 1..22: note = chemically synthesized
  source 1..22: mol_type = other DNA
agcgtcaaactcgaggagcagc

SEQ ID NO: 40397 - DNA, 22 bp, synthetic construct
  misc_feature 1..22: note = chemically synthesized
  source 1..22: mol_type = other DNA
gaggagcagctctgccttccca

SEQ ID NO: 40398 - DNA, 22 bp, synthetic construct
  misc_feature 1..22: note = chemically synthesized
  source 1..22: mol_type = other DNA
tgccttcccaggccaaggtggg

SEQ ID NO: 40399 - DNA, 22 bp, synthetic construct
  misc_feature 1..22: note = chemically synthesized
  source 1..22: mol_type = other DNA
ccttcccaggccaaggtgggga

SEQ ID NO: 40400 - DNA, 22 bp, synthetic construct
  misc_feature 1..22: note = chemically synthesized
  source 1..22: mol_type = other DNA
cccaggccaaggtggggaaaag

SEQ ID NO: 40401 - DNA, 22 bp, synthetic construct
  misc_feature 1..22: note = chemically synthesized
  source 1..22: mol_type = other DNA
ccaggccaaggtggggaaaagg

SEQ ID NO: 40402 - DNA, 22 bp, synthetic construct
  misc_feature 1..22: note = chemically synthesized
  source 1..22: mol_type = other DNA
cccctggttgagggcctcttct

SEQ ID NO: 40403 - DNA, 22 bp, synthetic construct
  misc_feature 1..22: note = chemically synthesized
  source 1..22: mol_type = other DNA
gttgagggcctcttcttttccc

SEQ ID NO: 40404 - DNA, 22 bp, synthetic construct
  misc_feature 1..22: note = chemically synthesized
  source 1..22: mol_type = other DNA
agggcctcttcttttcccacct

SEQ ID NO: 40405 - DNA, 22 bp, synthetic construct
  misc_feature 1..22: note = chemically synthesized
  source 1..22: mol_type = other DNA
ttcttttcccaccttcgctttc

SEQ ID NO: 40406 - DNA, 22 bp, synthetic construct
  misc_feature 1..22: note = chemically synthesized
  source 1..22: mol_type = other DNA
cttttcccaccttcgctttcat

SEQ ID NO: 40407 - DNA, 22 bp, synthetic construct
  misc_feature 1..22: note = chemically synthesized
  source 1..22: mol_type = other DNA
ttttcccaccttcgctttcatt

SEQ ID NO: 40408 - DNA, 22 bp, synthetic construct
  misc_feature 1..22: note = chemically synthesized
  source 1..22: mol_type = other DNA
ttcccaccttcgctttcattct

SEQ ID NO: 40409 - DNA, 22 bp, synthetic construct
  misc_feature 1..22: note = chemically synthesized
  source 1..22: mol_type = other DNA
tcccaccttcgctttcattctc

SEQ ID NO: 40410 - DNA, 22 bp, synthetic construct
  misc_feature 1..22: note = chemically synthesized
  source 1..22: mol_type = other DNA
cccaccttcgctttcattctcc

SEQ ID NO: 40411 - DNA, 22 bp, synthetic construct
  misc_feature 1..22: note = chemically synthesized
  source 1..22: mol_type = other DNA
ccaccttcgctttcattctccc

SEQ ID NO: 40412 - DNA, 22 bp, synthetic construct
  misc_feature 1..22: note = chemically synthesized
  source 1..22: mol_type = other DNA
cgctttcattctccccagccag

SEQ ID NO: 40413 - DNA, 22 bp, synthetic construct
  misc_feature 1..22: note = chemically synthesized
  source 1..22: mol_type = other DNA
gctttcattctccccagccaga

SEQ ID NO: 40414 - DNA, 22 bp, synthetic construct
  misc_feature 1..22: note = chemically synthesized
  source 1..22: mol_type = other DNA
tcattctccccagccagagatg

SEQ ID NO: 40415 - DNA, 22 bp, synthetic construct
  misc_feature 1..22: note = chemically synthesized
  source 1..22: mol_type = other DNA
cattctccccagccagagatgg

SEQ ID NO: 40416 - DNA, 22 bp, synthetic construct
  misc_feature 1..22: note = chemically synthesized
  source 1..22: mol_type = other DNA
attctccccagccagagatggg

SEQ ID NO: 40417 - DNA, 22 bp, synthetic construct
  misc_feature 1..22: note = chemically synthesized
  source 1..22: mol_type = other DNA
tccccagccagagatgggctct

SEQ ID NO: 40418 - DNA, 22 bp, synthetic construct
  misc_feature 1..22: note = chemically synthesized
  source 1..22: mol_type = other DNA
cccagccagagatgggctctgg

SEQ ID NO: 40419 - DNA, 22 bp, synthetic construct
  misc_feature 1..22: note = chemically synthesized
  source 1..22: mol_type = other DNA
tggttgctggctaggaagtggg

SEQ ID NO: 40420 - DNA, 22 bp, synthetic construct
  misc_feature 1..22: note = chemically synthesized
  source 1..22: mol_type = other DNA
gttgctggctaggaagtgggtg

SEQ ID NO: 40421 - DNA, 22 bp, synthetic construct
  misc_feature 1..22: note = chemically synthesized
  source 1..22: mol_type = other DNA
ctggctaggaagtgggtgatct

SEQ ID NO: 40422 - DNA, 22 bp, synthetic construct
  misc_feature 1..22: note = chemically synthesized
  source 1..22: mol_type = other DNA
gctaggaagtgggtgatctagt

SEQ ID NO: 40423 - DNA, 22 bp, synthetic construct
  misc_feature 1..22: note = chemically synthesized
  source 1..22: mol_type = other DNA
ggaagtgggtgatctagttatg

SEQ ID NO: 40424 - DNA, 22 bp, synthetic construct
  misc_feature 1..22: note = chemically synthesized
  source 1..22: mol_type = other DNA
gttatgtcctctttttttcttt

SEQ ID NO: 40425 - DNA, 22 bp, synthetic construct
  misc_feature 1..22: note = chemically synthesized
  source 1..22: mol_type = other DNA
tgtcctctttttttctttgtta

SEQ ID NO: 40426 - DNA, 22 bp, synthetic construct
  misc_feature 1..22: note = chemically synthesized
  source 1..22: mol_type = other DNA
tttttttctttgttagtgctct

SEQ ID NO: 40427 - DNA, 22 bp, synthetic construct
  misc_feature 1..22: note = chemically synthesized
  source 1..22: mol_type = other DNA
tttttctttgttagtgctctta

SEQ ID NO: 40428 - DNA, 22 bp, synthetic construct
  misc_feature 1..22: note = chemically synthesized
  source 1..22: mol_type = other DNA
ttttctttgttagtgctcttag

SEQ ID NO: 40429 - DNA, 22 bp, synthetic construct
  misc_feature 1..22: note = chemically synthesized
  source 1..22: mol_type = other DNA
tttctttgttagtgctcttagg

SEQ ID NO: 40430 - DNA, 22 bp, synthetic construct
  misc_feature 1..22: note = chemically synthesized
  source 1..22: mol_type = other DNA
ttctttgttagtgctcttaggc

SEQ ID NO: 40431 - DNA, 22 bp, synthetic construct
  misc_feature 1..22: note = chemically synthesized
  source 1..22: mol_type = other DNA
tctttgttagtgctcttaggca

SEQ ID NO: 40432 - DNA, 22 bp, synthetic construct
  misc_feature 1..22: note = chemically synthesized
  source 1..22: mol_type = other DNA
ctttgttagtgctcttaggcaa

SEQ ID NO: 40433 - DNA, 22 bp, synthetic construct
  misc_feature 1..22: note = chemically synthesized
  source 1..22: mol_type = other DNA
tttgttagtgctcttaggcaag

SEQ ID NO: 40434 - DNA, 22 bp, synthetic construct
  misc_feature 1..22: note = chemically synthesized
  source 1..22: mol_type = other DNA
tgttagtgctcttaggcaagtg

SEQ ID NO: 40435 - DNA, 22 bp, synthetic construct
  misc_feature 1..22: note = chemically synthesized
  source 1..22: mol_type = other DNA
gttagtgctcttaggcaagtga

SEQ ID NO: 40436 - DNA, 22 bp, synthetic construct
  misc_feature 1..22: note = chemically synthesized
  source 1..22: mol_type = other DNA
ttagtgctcttaggcaagtgat

SEQ ID NO: 40437 - DNA, 22 bp, synthetic construct
  misc_feature 1..22: note = chemically synthesized
  source 1..22: mol_type = other DNA
gtgctcttaggcaagtgattct

SEQ ID NO: 40438 - DNA, 22 bp, synthetic construct
  misc_feature 1..22: note = chemically synthesized
  source 1..22: mol_type = other DNA
ttaggcaagtgattctcacagc

SEQ ID NO: 40439 - DNA, 22 bp, synthetic construct
  misc_feature 1..22: note = chemically synthesized
  source 1..22: mol_type = other DNA
aggcaagtgattctcacagcgc

SEQ ID NO: 40440 - DNA, 22 bp, synthetic construct
  misc_feature 1..22: note = chemically synthesized
  source 1..22: mol_type = other DNA
ggcaagtgattctcacagcgca

SEQ ID NO: 40441 - DNA, 22 bp, synthetic construct
  misc_feature 1..22: note = chemically synthesized
  source 1..22: mol_type = other DNA
tcacagcgcagacccaggccca

SEQ ID NO: 40442 - DNA, 22 bp, synthetic construct
  misc_feature 1..22: note = chemically synthesized
  source 1..22: mol_type = other DNA
acagcgcagacccaggcccacc

SEQ ID NO: 40443 - DNA, 22 bp, synthetic construct
  misc_feature 1..22: note = chemically synthesized
  source 1..22: mol_type = other DNA
ggagtttgttcaaaatgcaaat

SEQ ID NO: 40444 - DNA, 22 bp, synthetic construct
  misc_feature 1..22: note = chemically synthesized
  source 1..22: mol_type = other DNA
gttcaaaatgcaaattcttggg

SEQ ID NO: 40445 - DNA, 22 bp, synthetic construct
  misc_feature 1..22: note = chemically synthesized
  source 1..22: mol_type = other DNA
ttcaaaatgcaaattcttgggc

SEQ ID NO: 40446 - DNA, 22 bp, synthetic construct
  misc_feature 1..22: note = chemically synthesized
  source 1..22: mol_type = other DNA
aaaatgcaaattcttgggcacc

SEQ ID NO: 40447 - DNA, 22 bp, synthetic construct
  misc_feature 1..22: note = chemically synthesized
  source 1..22: mol_type = other DNA
ttgggcaccacctcagacttac

SEQ ID NO: 40448 - DNA, 22 bp, synthetic construct
  misc_feature 1..22: note = chemically synthesized
  source 1..22: mol_type = other DNA
gggcaccacctcagacttactg

SEQ ID NO: 40449 - DNA, 22 bp, synthetic construct
  misc_feature 1..22: note = chemically synthesized
  source 1..22: mol_type = other DNA
ggcaccacctcagacttactga

SEQ ID NO: 40450 - DNA, 22 bp, synthetic construct
  misc_feature 1..22: note = chemically synthesized
  source 1..22: mol_type = other DNA
agacttactgaatcagaaattg

SEQ ID NO: 40451 - DNA, 22 bp, synthetic construct
  misc_feature 1..22: note = chemically synthesized
  source 1..22: mol_type = other DNA
actgaatcagaaattgagggtg

SEQ ID NO: 40452 - DNA, 22 bp, synthetic construct
  misc_feature 1..22: note = chemically synthesized
  source 1..22: mol_type = other DNA
ctgaatcagaaattgagggtgg

SEQ ID NO: 40453 - DNA, 22 bp, synthetic construct
  misc_feature 1..22: note = chemically synthesized
  source 1..22: mol_type = other DNA
aatcagaaattgagggtgggga

SEQ ID NO: 40454 - DNA, 22 bp, synthetic construct
  misc_feature 1..22: note = chemically synthesized
  source 1..22: mol_type = other DNA
agggtggggaagcagccttcta

SEQ ID NO: 40455 - DNA, 22 bp, synthetic construct
  misc_feature 1..22: note = chemically synthesized
  source 1..22: mol_type = other DNA
ctatgttgaataaattctccag

SEQ ID NO: 40456 - DNA, 22 bp, synthetic construct
  misc_feature 1..22: note = chemically synthesized
  source 1..22: mol_type = other DNA
tatgttgaataaattctccagg

SEQ ID NO: 40457 - DNA, 22 bp, synthetic construct
  misc_feature 1..22: note = chemically synthesized
  source 1..22: mol_type = other DNA
tgttgaataaattctccaggtg

SEQ ID NO: 40458 - DNA, 22 bp, synthetic construct
  misc_feature 1..22: note = chemically synthesized
  source 1..22: mol_type = other DNA
aataaattctccaggtgattct

SEQ ID NO: 40459 - DNA, 22 bp, synthetic construct
  misc_feature 1..22: note = chemically synthesized
  source 1..22: mol_type = other DNA
tccaggtgattctcatgcacac

SEQ ID NO: 40460 - DNA, 22 bp, synthetic construct
  misc_feature 1..22: note = chemically synthesized
  source 1..22: mol_type = other DNA
caggtgattctcatgcacactc

SEQ ID NO: 40461 - DNA, 22 bp, synthetic construct
  misc_feature 1..22: note = chemically synthesized
  source 1..22: mol_type = other DNA
tcatgcacactcaagctgaatc

SEQ ID NO: 40462 - DNA, 22 bp, synthetic construct
  misc_feature 1..22: note = chemically synthesized
  source 1..22: mol_type = other DNA
atgcacactcaagctgaatcag

SEQ ID NO: 40463 - DNA, 22 bp, synthetic construct
  misc_feature 1..22: note = chemically synthesized
  source 1..22: mol_type = other DNA
aagctgaatcagcactgctgtc

SEQ ID NO: 40464 - DNA, 22 bp, synthetic construct
  misc_feature 1..22: note = chemically synthesized
  source 1..22: mol_type = other DNA
aatcagcactgctgtcttaggg

SEQ ID NO: 40465 - DNA, 22 bp, synthetic construct
  misc_feature 1..22: note = chemically synthesized
  source 1..22: mol_type = other DNA
ctgtcttagggtaagggaagta

SEQ ID NO: 40466 - DNA, 22 bp, synthetic construct
  misc_feature 1..22: note = chemically synthesized
  source 1..22: mol_type = other DNA
tcttagggtaagggaagtatga

SEQ ID NO: 40467 - DNA, 22 bp, synthetic construct
  misc_feature 1..22: note = chemically synthesized
  source 1..22: mol_type = other DNA
agggtaagggaagtatgaacgc

SEQ ID NO: 40468 - DNA, 22 bp, synthetic construct
  misc_feature 1..22: note = chemically synthesized
  source 1..22: mol_type = other DNA
gggtaagggaagtatgaacgct

SEQ ID NO: 40469 - DNA, 22 bp, synthetic construct
  misc_feature 1..22: note = chemically synthesized
  source 1..22: mol_type = other DNA
gaagctttgaaattccctgggc

SEQ ID NO: 40470 - DNA, 22 bp, synthetic construct
  misc_feature 1..22: note = chemically synthesized
  source 1..22: mol_type = other DNA
tgaaattccctgggcagagacc

SEQ ID NO: 40471 - DNA, 22 bp, synthetic construct
  misc_feature 1..22: note = chemically synthesized
  source 1..22: mol_type = other DNA
gaaattccctgggcagagaccc

SEQ ID NO: 40472 - DNA, 22 bp, synthetic construct
  misc_feature 1..22: note = chemically synthesized
  source 1..22: mol_type = other DNA
aaattccctgggcagagaccca

SEQ ID NO: 40473 - DNA, 22 bp, synthetic construct
  misc_feature 1..22: note = chemically synthesized
  source 1..22: mol_type = other DNA
cctgggcagagacccatgggcc

SEQ ID NO: 40474 - DNA, 22 bp, synthetic construct
  misc_feature 1..22: note = chemically synthesized
  source 1..22: mol_type = other DNA
ggcagagacccatgggccatga

SEQ ID NO: 40475 - DNA, 22 bp, synthetic construct
  misc_feature 1..22: note = chemically synthesized
  source 1..22: mol_type = other DNA
ttttccctcctgtccaggaccc

SEQ ID NO: 40476 - DNA, 22 bp, synthetic construct
  misc_feature 1..22: note = chemically synthesized
  source 1..22: mol_type = other DNA
tccctcctgtccaggacccacc

SEQ ID NO: 40477 - DNA, 22 bp, synthetic construct
  misc_feature 1..22: note = chemically synthesized
  source 1..22: mol_type = other DNA
ccctcctgtccaggacccacct

SEQ ID NO: 40478 - DNA, 22 bp, synthetic construct
  misc_feature 1..22: note = chemically synthesized
  source 1..22: mol_type = other DNA
cctcctgtccaggacccacctc

SEQ ID NO: 40479 - DNA, 22 bp, synthetic construct
  misc_feature 1..22: note = chemically synthesized
  source 1..22: mol_type = other DNA
ctgtccaggacccacctccttt

SEQ ID NO: 40480 - DNA, 22 bp, synthetic construct
  misc_feature 1..22: note = chemically synthesized
  source 1..22: mol_type = other DNA
tccaggacccacctcctttagg

SEQ ID NO: 40481 - DNA, 22 bp, synthetic construct
  misc_feature 1..22: note = chemically synthesized
  source 1..22: mol_type = other DNA
ctttaggactggaacagtcaaa

SEQ ID NO: 40482 - DNA, 22 bp, synthetic construct
  misc_feature 1..22: note = chemically synthesized
  source 1..22: mol_type = other DNA
taggactggaacagtcaaaaac

SEQ ID NO: 40483 - DNA, 22 bp, synthetic construct
  misc_feature 1..22: note = chemically synthesized
  source 1..22: mol_type = other DNA
aggactggaacagtcaaaaaca

SEQ ID NO: 40484 - DNA, 22 bp, synthetic construct
  misc_feature 1..22: note = chemically synthesized
  source 1..22: mol_type = other DNA
ggactggaacagtcaaaaacaa

SEQ ID NO: 40485 - DNA, 22 bp, synthetic construct
  misc_feature 1..22: note = chemically synthesized
  source 1..22: mol_type = other DNA
gaacagtcaaaaacaaattaag

SEQ ID NO: 40486 - DNA, 22 bp, synthetic construct
  misc_feature 1..22: note = chemically synthesized
  source 1..22: mol_type = other DNA
agcttagggaatccctaaggat

SEQ ID NO: 40487 - DNA, 22 bp, synthetic construct
  misc_feature 1..22: note = chemically synthesized
  source 1..22: mol_type = other DNA
agggaatccctaaggatccctc

SEQ ID NO: 40488 - DNA, 22 bp, synthetic construct
  misc_feature 1..22: note = chemically synthesized
  source 1..22: mol_type = other DNA
gggaatccctaaggatccctcc

SEQ ID NO: 40489 - DNA, 22 bp, synthetic construct
  misc_feature 1..22: note = chemically synthesized
  source 1..22: mol_type = other DNA
aggatccctccattaggaaatt

SEQ ID NO: 40490 - DNA, 22 bp, synthetic construct
  misc_feature 1..22: note = chemically synthesized
  source 1..22: mol_type = other DNA
cattaggaaattcaggttccac

SEQ ID NO: 40491 - DNA, 22 bp, synthetic construct
  misc_feature 1..22: note = chemically synthesized
  source 1..22: mol_type = other DNA
ggaaattcaggttccaccctcc

SEQ ID NO: 40492 - DNA, 22 bp, synthetic construct
  misc_feature 1..22: note = chemically synthesized
  source 1..22: mol_type = other DNA
aggttccaccctccgtctgtca

SEQ ID NO: 40493 - DNA, 22 bp, synthetic construct
  misc_feature 1..22: note = chemically synthesized
  source 1..22: mol_type = other DNA
caccctccgtctgtcattgata

SEQ ID NO: 40494 - DNA, 22 bp, synthetic construct
  misc_feature 1..22: note = chemically synthesized
  source 1..22: mol_type = other DNA
cgtctgtcattgataaggacag

SEQ ID NO: 40495 - DNA, 22 bp, synthetic construct
  misc_feature 1..22: note = chemically synthesized
  source 1..22: mol_type = other DNA
tcattgataaggacagggaaca

SEQ ID NO: 40496 - DNA, 22 bp, synthetic construct
  misc_feature 1..22: note = chemically synthesized
  source 1..22: mol_type = other DNA
ataaggacagggaacaggtcca

SEQ ID NO: 40497 - DNA, 22 bp, synthetic construct
  misc_feature 1..22: note = chemically synthesized
  source 1..22: mol_type = other DNA
tccatcaggtccagggccttct

SEQ ID NO: 40498 - DNA, 22 bp, synthetic construct
  misc_feature 1..22: note = chemically synthesized
  source 1..22: mol_type = other DNA
catcaggtccagggccttctta

SEQ ID NO: 40499 - DNA, 22 bp, synthetic construct
  misc_feature 1..22: note = chemically synthesized
  source 1..22: mol_type = other DNA
cttagcatgagacaacacccaa

SEQ ID NO: 40500 - DNA, 22 bp, synthetic construct
  misc_feature 1..22: note = chemically synthesized
  source 1..22: mol_type = other DNA
ttagcatgagacaacacccaaa

SEQ ID NO: 40501 - DNA, 22 bp, synthetic construct
  misc_feature 1..22: note = chemically synthesized
  source 1..22: mol_type = other DNA
agcatgagacaacacccaaacc

SEQ ID NO: 40502 - DNA, 22 bp, synthetic construct
  misc_feature 1..22: note = chemically synthesized
  source 1..22: mol_type = other DNA
gcatgagacaacacccaaacca

SEQ ID NO: 40503 - DNA, 22 bp, synthetic construct
  misc_feature 1..22: note = chemically synthesized
  source 1..22: mol_type = other DNA
gtgccagacagattgtgtcctc

SEQ ID NO: 40504 - DNA, 22 bp, synthetic construct
  misc_feature 1..22: note = chemically synthesized
  source 1..22: mol_type = other DNA
tgccagacagattgtgtcctca

SEQ ID NO: 40505 - DNA, 22 bp, synthetic construct
  misc_feature 1..22: note = chemically synthesized
  source 1..22: mol_type = other DNA
tgtcctcactgcttccattaaa

SEQ ID NO: 40506 - DNA, 22 bp, synthetic construct
  misc_feature 1..22: note = chemically synthesized
  source 1..22: mol_type = other DNA
actgcttccattaaagccgaca

SEQ ID NO: 40507 - DNA, 22 bp, synthetic construct
  misc_feature 1..22: note = chemically synthesized
  source 1..22: mol_type = other DNA
cttccattaaagccgacatgtc

SEQ ID NO: 40508 - DNA, 22 bp, synthetic construct
  misc_feature 1..22: note = chemically synthesized
  source 1..22: mol_type = other DNA
ccattaaagccgacatgtcagc

SEQ ID NO: 40509 - DNA, 22 bp, synthetic construct
  misc_feature 1..22: note = chemically synthesized
  source 1..22: mol_type = other DNA
cattaaagccgacatgtcagcg

SEQ ID NO: 40510 - DNA, 22 bp, synthetic construct
  misc_feature 1..22: note = chemically synthesized
  source 1..22: mol_type = other DNA
aagccgacatgtcagcgaacgc

SEQ ID NO: 40511 - DNA, 22 bp, synthetic construct
  misc_feature 1..22: note = chemically synthesized
  source 1..22: mol_type = other DNA
tggcaactgcacggacacagca

SEQ ID NO: 40512 - DNA, 22 bp, synthetic construct
  misc_feature 1..22: note = chemically synthesized
  source 1..22: mol_type = other DNA
cacggacacagcaggaactgga

SEQ ID NO: 40513 - DNA, 22 bp, synthetic construct
  misc_feature 1..22: note = chemically synthesized
  source 1..22: mol_type = other DNA
gactcttgtttccctttctggt

SEQ ID NO: 40514 - DNA, 22 bp, synthetic construct
  misc_feature 1..22: note = chemically synthesized
  source 1..22: mol_type = other DNA
ttgtttccctttctggtctctc

SEQ ID NO: 40515 - DNA, 22 bp, synthetic construct
  misc_feature 1..22: note = chemically synthesized
  source 1..22: mol_type = other DNA
gtttccctttctggtctctcaa

SEQ ID NO: 40516 - DNA, 22 bp, synthetic construct
  misc_feature 1..22: note = chemically synthesized
  source 1..22: mol_type = other DNA
tttccctttctggtctctcaaa

SEQ ID NO: 40517 - DNA, 22 bp, synthetic construct
  misc_feature 1..22: note = chemically synthesized
  source 1..22: mol_type = other DNA
ccctttctggtctctcaaatgg

SEQ ID NO: 40518 - DNA, 22 bp, synthetic construct
  misc_feature 1..22: note = chemically synthesized
  source 1..22: mol_type = other DNA
cctttctggtctctcaaatggg

SEQ ID NO: 40519 - DNA, 22 bp, synthetic construct
  misc_feature 1..22: note = chemically synthesized
  source 1..22: mol_type = other DNA
tctggtctctcaaatgggacac

SEQ ID NO: 40520 - DNA, 22 bp, synthetic construct
  misc_feature 1..22: note = chemically synthesized
  source 1..22: mol_type = other DNA
ctggtctctcaaatgggacaca

SEQ ID NO: 40521 - DNA, 22 bp, synthetic construct
  misc_feature 1..22: note = chemically synthesized
  source 1..22: mol_type = other DNA
tggtctctcaaatgggacacat

SEQ ID NO: 40522 - DNA, 22 bp, synthetic construct
  misc_feature 1..22: note = chemically synthesized
  source 1..22: mol_type = other DNA
gtctctcaaatgggacacattt

SEQ ID NO: 40523 - DNA, 22 bp, synthetic construct
  misc_feature 1..22: note = chemically synthesized
  source 1..22: mol_type = other DNA
tcaaatgggacacatttccctt

SEQ ID NO: 40524 - DNA, 22 bp, synthetic construct
  misc_feature 1..22: note = chemically synthesized
  source 1..22: mol_type = other DNA
aaatgggacacatttccctttt

SEQ ID NO: 40525 - DNA, 22 bp, synthetic construct
  misc_feature 1..22: note = chemically synthesized
  source 1..22: mol_type = other DNA
cccttttctgactcaatctttt

SEQ ID NO: 40526 - DNA, 22 bp, synthetic construct
  misc_feature 1..22: note = chemically synthesized
  source 1..22: mol_type = other DNA
ccttttctgactcaatcttttt

SEQ ID NO: 40527 - DNA, 22 bp, synthetic construct
  misc_feature 1..22: note = chemically synthesized
  source 1..22: mol_type = other DNA
ttctgactcaatcttttttcaa

SEQ ID NO: 40528 - DNA, 22 bp, synthetic construct
  misc_feature 1..22: note = chemically synthesized
  source 1..22: mol_type = other DNA
tctgactcaatcttttttcaaa

SEQ ID NO: 40529 - DNA, 22 bp, synthetic construct
  misc_feature 1..22: note = chemically synthesized
  source 1..22: mol_type = other DNA
ctgactcaatcttttttcaaat

SEQ ID NO: 40530 - DNA, 22 bp, synthetic construct
  misc_feature 1..22: note = chemically synthesized
  source 1..22: mol_type = other DNA
tgactcaatcttttttcaaatg

SEQ ID NO: 40531 - DNA, 22 bp, synthetic construct
  misc_feature 1..22: note = chemically synthesized
  source 1..22: mol_type = other DNA
actcaatcttttttcaaatgtc

SEQ ID NO: 40532 - DNA, 22 bp, synthetic construct
  misc_feature 1..22: note = chemically synthesized
  source 1..22: mol_type = other DNA
aatcttttttcaaatgtcttac

SEQ ID NO: 40533 - DNA, 22 bp, synthetic construct
  misc_feature 1..22: note = chemically synthesized
  source 1..22: mol_type = other DNA
ttttcaaatgtcttacactttt

SEQ ID NO: 40534 - DNA, 22 bp, synthetic construct
  misc_feature 1..22: note = chemically synthesized
  source 1..22: mol_type = other DNA
tttcaaatgtcttacacttttc

SEQ ID NO: 40535 - DNA, 22 bp, synthetic construct
  misc_feature 1..22: note = chemically synthesized
  source 1..22: mol_type = other DNA
ttcaaatgtcttacacttttct

SEQ ID NO: 40536 - DNA, 22 bp, synthetic construct
  misc_feature 1..22: note = chemically synthesized
  source 1..22: mol_type = other DNA
tcaaatgtcttacacttttctg

SEQ ID NO: 40537 - DNA, 22 bp, synthetic construct
  misc_feature 1..22: note = chemically synthesized
  source 1..22: mol_type = other DNA
caaatgtcttacacttttctgg

SEQ ID NO: 40538 - DNA, 22 bp, synthetic construct
  misc_feature 1..22: note = chemically synthesized
  source 1..22: mol_type = other DNA
aaatgtcttacacttttctggt

SEQ ID NO: 40539 - DNA, 22 bp, synthetic construct
  misc_feature 1..22: note = chemically synthesized
  source 1..22: mol_type = other DNA
acacttttctggtggaaggtgt

SEQ ID NO: 40540 - DNA, 22 bp, synthetic construct
  misc_feature 1..22: note = chemically synthesized
  source 1..22: mol_type = other DNA
cacttttctggtggaaggtgtt

SEQ ID NO: 40541 - DNA, 22 bp, synthetic construct
  misc_feature 1..22: note = chemically synthesized
  source 1..22: mol_type = other DNA
ttctggtggaaggtgtttcaac

SEQ ID NO: 40542 - DNA, 22 bp, synthetic construct
  misc_feature 1..22: note = chemically synthesized
  source 1..22: mol_type = other DNA
tctggtggaaggtgtttcaacc

SEQ ID NO: 40543 - DNA, 22 bp, synthetic construct
  misc_feature 1..22: note = chemically synthesized
  source 1..22: mol_type = other DNA
ctggtggaaggtgtttcaacct

SEQ ID NO: 40544 - DNA, 22 bp, synthetic construct
  misc_feature 1..22: note = chemically synthesized
  source 1..22: mol_type = other DNA
tggtggaaggtgtttcaacctg

SEQ ID NO: 40545 - DNA, 22 bp, synthetic construct
  misc_feature 1..22: note = chemically synthesized
  source 1..22: mol_type = other DNA
gtggaaggtgtttcaacctgtt

SEQ ID NO: 40546 - DNA, 22 bp, synthetic construct
  misc_feature 1..22: note = chemically synthesized
  source 1..22: mol_type = other DNA
caacctgttctatttcataaag

SEQ ID NO: 40547 - DNA, 22 bp, synthetic construct
  misc_feature 1..22: note = chemically synthesized
  source 1..22: mol_type = other DNA
aacctgttctatttcataaagg

SEQ ID NO: 40548 - DNA, 22 bp, synthetic construct
  misc_feature 1..22: note = chemically synthesized
  source 1..22: mol_type = other DNA
ttctatttcataaaggtctctc

SEQ ID NO: 40549 - DNA, 22 bp, synthetic construct
  misc_feature 1..22: note = chemically synthesized
  source 1..22: mol_type = other DNA
tatttcataaaggtctctctag

SEQ ID NO: 40550 - DNA, 22 bp, synthetic construct
  misc_feature 1..22: note = chemically synthesized
  source 1..22: mol_type = other DNA
tttcataaaggtctctctagac

SEQ ID NO: 40551 - DNA, 22 bp, synthetic construct
  misc_feature 1..22: note = chemically synthesized
  source 1..22: mol_type = other DNA
cataaaggtctctctagaccca

SEQ ID NO: 40552 - DNA, 22 bp, synthetic construct
  misc_feature 1..22: note = chemically synthesized
  source 1..22: mol_type = other DNA
ataaaggtctctctagacccag

SEQ ID NO: 40553 - DNA, 22 bp, synthetic construct
  misc_feature 1..22: note = chemically synthesized
  source 1..22: mol_type = other DNA
tctagacccagtatttccactt

SEQ ID NO: 40554 - DNA, 22 bp, synthetic construct
  misc_feature 1..22: note = chemically synthesized
  source 1..22: mol_type = other DNA
tagacccagtatttccacttgg

SEQ ID NO: 40555 - DNA, 22 bp, synthetic construct
  misc_feature 1..22: note = chemically synthesized
  source 1..22: mol_type = other DNA
gacccagtatttccacttgggg

SEQ ID NO: 40556 - DNA, 22 bp, synthetic construct
  misc_feature 1..22: note = chemically synthesized
  source 1..22: mol_type = other DNA
ccacttggggcctcagaaatgc

SEQ ID NO: 40557 - DNA, 22 bp, synthetic construct
  misc_feature 1..22: note = chemically synthesized
  source 1..22: mol_type = other DNA
cacttggggcctcagaaatgcc

SEQ ID NO: 40558 - DNA, 22 bp, synthetic construct
  misc_feature 1..22: note = chemically synthesized
  source 1..22: mol_type = other DNA
ggggcctcagaaatgccttaca

SEQ ID NO: 40559 - DNA, 22 bp, synthetic construct
  misc_feature 1..22: note = chemically synthesized
  source 1..22: mol_type = other DNA
gggcctcagaaatgccttacac

SEQ ID NO: 40560 - DNA, 22 bp, synthetic construct
  misc_feature 1..22: note = chemically synthesized
  source 1..22: mol_type = other DNA
agaaatgccttacacattatta

SEQ ID NO: 40561 - DNA, 22 bp, synthetic construct
  misc_feature 1..22: note = chemically synthesized
  source 1..22: mol_type = other DNA
acacattattaggttgcaaagt

SEQ ID NO: 40562 - DNA, 22 bp, synthetic construct
  misc_feature 1..22: note = chemically synthesized
  source 1..22: mol_type = other DNA
cacattattaggttgcaaagtt

SEQ ID NO: 40563 - DNA, 22 bp, synthetic construct
  misc_feature 1..22: note = chemically synthesized
  source 1..22: mol_type = other DNA
ttaggttgcaaagtttccttat

SEQ ID NO: 40564 - DNA, 22 bp, synthetic construct
  misc_feature 1..22: note = chemically synthesized
  source 1..22: mol_type = other DNA
ggttgcaaagtttccttatggc

SEQ ID NO: 40565 - DNA, 22 bp, synthetic construct
  misc_feature 1..22: note = chemically synthesized
  source 1..22: mol_type = other DNA
caaagtttccttatggctgaat

SEQ ID NO: 40566 - DNA, 22 bp, synthetic construct
  misc_feature 1..22: note = chemically synthesized
  source 1..22: mol_type = other DNA
ccttatggctgaatttaaaaat

SEQ ID NO: 40567 - DNA, 22 bp, synthetic construct
  misc_feature 1..22: note = chemically synthesized
  source 1..22: mol_type = other DNA
cttatggctgaatttaaaaata

SEQ ID NO: 40568 - DNA, 22 bp, synthetic construct
  misc_feature 1..22: note = chemically synthesized
  source 1..22: mol_type = other DNA
atggctgaatttaaaaatagtg

SEQ ID NO: 40569 - DNA, 22 bp, synthetic construct
  misc_feature 1..22: note = chemically synthesized
  source 1..22: mol_type = other DNA
tggctgaatttaaaaatagtga

SEQ ID NO: 40570 - DNA, 22 bp, synthetic construct
  misc_feature 1..22: note = chemically synthesized
  source 1..22: mol_type = other DNA
aatttaaaaatagtgactctta

SEQ ID NO: 40571 - DNA, 22 bp, synthetic construct
  misc_feature 1..22: note = chemically synthesized
  source 1..22: mol_type = other DNA
aaaaatagtgactcttattttt

SEQ ID NO: 40572 - DNA, 22 bp, synthetic construct
  misc_feature 1..22: note = chemically synthesized
  source 1..22: mol_type = other DNA
aaaatagtgactcttatttttc

SEQ ID NO: 40573 - DNA, 22 bp, synthetic construct
  misc_feature 1..22: note = chemically synthesized
  source 1..22: mol_type = other DNA
ttatttttcaggtttcattaaa

SEQ ID NO: 40574 - DNA, 22 bp, synthetic construct
  misc_feature 1..22: note = chemically synthesized
  source 1..22: mol_type = other DNA
atttttcaggtttcattaaaaa

SEQ ID NO: 40575 - DNA, 22 bp, synthetic construct
  misc_feature 1..22: note = chemically synthesized
  source 1..22: mol_type = other DNA
tttttcaggtttcattaaaaaa

SEQ ID NO: 40576 - DNA, 22 bp, synthetic construct
  misc_feature 1..22: note = chemically synthesized
  source 1..22: mol_type = other DNA
ttcaggtttcattaaaaaatat

SEQ ID NO: 40577 - DNA, 22 bp, synthetic construct
  misc_feature 1..22: note = chemically synthesized
  source 1..22: mol_type = other DNA
tcaggtttcattaaaaaatatg

SEQ ID NO: 40578 - DNA, 22 bp, synthetic construct
  misc_feature 1..22: note = chemically synthesized
  source 1..22: mol_type = other DNA
caggtttcattaaaaaatatgc

SEQ ID NO: 40579 - DNA, 22 bp, synthetic construct
  misc_feature 1..22: note = chemically synthesized
  source 1..22: mol_type = other DNA
aggtttcattaaaaaatatgca

SEQ ID NO: 40580 - DNA, 22 bp, synthetic construct
  misc_feature 1..22: note = chemically synthesized
  source 1..22: mol_type = other DNA
cattaaaaaatatgcagcaaac

SEQ ID NO: 40581 - DNA, 22 bp, synthetic construct
  misc_feature 1..22: note = chemically synthesized
  source 1..22: mol_type = other DNA
attaaaaaatatgcagcaaact

SEQ ID NO: 40582 - DNA, 22 bp, synthetic construct
  misc_feature 1..22: note = chemically synthesized
  source 1..22: mol_type = other DNA
aaaaatatgcagcaaactggga

SEQ ID NO: 40583 - DNA, 22 bp, synthetic construct
  misc_feature 1..22: note = chemically synthesized
  source 1..22: mol_type = other DNA
ggaatggctttgatttaatgtt

SEQ ID NO: 40584 - DNA, 22 bp, synthetic construct
  misc_feature 1..22: note = chemically synthesized
  source 1..22: mol_type = other DNA
tgatttaatgttatacatttgg

SEQ ID NO: 40585 - DNA, 22 bp, synthetic construct
  misc_feature 1..22: note = chemically synthesized
  source 1..22: mol_type = other DNA
gatttaatgttatacatttggt

SEQ ID NO: 40586 - DNA, 22 bp, synthetic construct
  misc_feature 1..22: note = chemically synthesized
  source 1..22: mol_type = other DNA
atttaatgttatacatttggtc

SEQ ID NO: 40587 - DNA, 22 bp, synthetic construct
  misc_feature 1..22: note = chemically synthesized
  source 1..22: mol_type = other DNA
aatgttatacatttggtcactt

SEQ ID NO: 40588 - DNA, 22 bp, synthetic construct
  misc_feature 1..22: note = chemically synthesized
  source 1..22: mol_type = other DNA
atgttatacatttggtcacttt

SEQ ID NO: 40589 - DNA, 22 bp, synthetic construct
  misc_feature 1..22: note = chemically synthesized
  source 1..22: mol_type = other DNA
tacatttggtcactttacattt

SEQ ID NO: 40590 - DNA, 22 bp, synthetic construct
  misc_feature 1..22: note = chemically synthesized
  source 1..22: mol_type = other DNA
ggtcactttacatttctacata

SEQ ID NO: 40591 - DNA, 22 bp, synthetic construct
  misc_feature 1..22: note = chemically synthesized
  source 1..22: mol_type = other DNA
gtcactttacatttctacatat

SEQ ID NO: 40592 - DNA, 22 bp, synthetic construct
  misc_feature 1..22: note = chemically synthesized
  source 1..22: mol_type = other DNA
tacatttctacatatattgggt

SEQ ID NO: 40593 - DNA, 22 bp, synthetic construct
  misc_feature 1..22: note = chemically synthesized
  source 1..22: mol_type = other DNA
acatttctacatatattgggta

SEQ ID NO: 40594 - DNA, 22 bp, synthetic construct
  misc_feature 1..22: note = chemically synthesized
  source 1..22: mol_type = other DNA
catttctacatatattgggtac

SEQ ID NO: 40595 - DNA, 22 bp, synthetic construct
  misc_feature 1..22: note = chemically synthesized
  source 1..22: mol_type = other DNA
ctacatatattgggtaccaact

SEQ ID NO: 40596 - DNA, 22 bp, synthetic construct
  misc_feature 1..22: note = chemically synthesized
  source 1..22: mol_type = other DNA
tacatatattgggtaccaactt

SEQ ID NO: 40597 - DNA, 22 bp, synthetic construct
  misc_feature 1..22: note = chemically synthesized
  source 1..22: mol_type = other DNA
catatattgggtaccaactttt

SEQ ID NO: 40598 - DNA, 22 bp, synthetic construct
  misc_feature 1..22: note = chemically synthesized
  source 1..22: mol_type = other DNA
ggtaccaacttttgacaaagag

SEQ ID NO: 40599 - DNA, 22 bp, synthetic construct
  misc_feature 1..22: note = chemically synthesized
  source 1..22: mol_type = other DNA
ttgacaaagagctctaagccca

SEQ ID NO: 40600 - DNA, 22 bp, synthetic construct
  misc_feature 1..22: note = chemically synthesized
  source 1..22: mol_type = other DNA
tgacaaagagctctaagcccag

SEQ ID NO: 40601 - DNA, 22 bp, synthetic construct
  misc_feature 1..22: note = chemically synthesized
  source 1..22: mol_type = other DNA
gacaaagagctctaagcccagt

SEQ ID NO: 40602 - DNA, 22 bp, synthetic construct
  misc_feature 1..22: note = chemically synthesized
  source 1..22: mol_type = other DNA
acaaagagctctaagcccagtg

SEQ ID NO: 40603 - DNA, 22 bp, synthetic construct
  misc_feature 1..22: note = chemically synthesized
  source 1..22: mol_type = other DNA
taagcccagtgggatgttcctg

SEQ ID NO: 40604 - DNA, 22 bp, synthetic construct
  misc_feature 1..22: note = chemically synthesized
  source 1..22: mol_type = other DNA
agcccagtgggatgttcctgga

SEQ ID NO: 40605 - DNA, 22 bp, synthetic construct
  misc_feature 1..22: note = chemically synthesized
  source 1..22: mol_type = other DNA
ctggaatttaagtcattaaatc

SEQ ID NO: 40606 - DNA, 22 bp, synthetic construct
  misc_feature 1..22: note = chemically synthesized
  source 1..22: mol_type = other DNA
gaatttaagtcattaaatcaag

SEQ ID NO: 40607 - DNA, 22 bp, synthetic construct
  misc_feature 1..22: note = chemically synthesized
  source 1..22: mol_type = other DNA
aagtcattaaatcaagtttttt

SEQ ID NO: 40608 - DNA, 22 bp, synthetic construct
  misc_feature 1..22: note = chemically synthesized
  source 1..22: mol_type = other DNA
agtcattaaatcaagttttttg

SEQ ID NO: 40609 - DNA, 22 bp, synthetic construct
  misc_feature 1..22: note = chemically synthesized
  source 1..22: mol_type = other DNA
aatcaagttttttggtttcctc

SEQ ID NO: 40610 - DNA, 22 bp, synthetic construct
  misc_feature 1..22: note = chemically synthesized
  source 1..22: mol_type = other DNA
tttggtttcctcaagaacatct

SEQ ID NO: 40611 - DNA, 22 bp, synthetic construct
  misc_feature 1..22: note = chemically synthesized
  source 1..22: mol_type = other DNA
ttggtttcctcaagaacatctc

SEQ ID NO: 40612 - DNA, 22 bp, synthetic construct
  misc_feature 1..22: note = chemically synthesized
  source 1..22: mol_type = other DNA
tggtttcctcaagaacatctca

SEQ ID NO: 40613 - DNA, 22 bp, synthetic construct
  misc_feature 1..22: note = chemically synthesized
  source 1..22: mol_type = other DNA
ggtttcctcaagaacatctcaa

SEQ ID NO: 40614 - DNA, 22 bp, synthetic construct
  misc_feature 1..22: note = chemically synthesized
  source 1..22: mol_type = other DNA
gtttcctcaagaacatctcaaa

SEQ ID NO: 40615 - DNA, 22 bp, synthetic construct
  misc_feature 1..22: note = chemically synthesized
  source 1..22: mol_type = other DNA
cctcaagaacatctcaaagatt

SEQ ID NO: 40616 - DNA, 22 bp, synthetic construct
  misc_feature 1..22: note = chemically synthesized
  source 1..22: mol_type = other DNA
ctcaagaacatctcaaagattc

SEQ ID NO: 40617 - DNA, 22 bp, synthetic construct
  misc_feature 1..22: note = chemically synthesized
  source 1..22: mol_type = other DNA
aagaacatctcaaagattcctt

SEQ ID NO: 40618 - DNA, 22 bp, synthetic construct
  misc_feature 1..22: note = chemically synthesized
  source 1..22: mol_type = other DNA
aaagattccttgactattaaca

SEQ ID NO: 40619 - DNA, 22 bp, synthetic construct
  misc_feature 1..22: note = chemically synthesized
  source 1..22: mol_type = other DNA
cttgactattaacatgctattt

SEQ ID NO: 40620 - DNA, 22 bp, synthetic construct
  misc_feature 1..22: note = chemically synthesized
  source 1..22: mol_type = other DNA
gactattaacatgctatttgtt

SEQ ID NO: 40621 - DNA, 22 bp, synthetic construct
  misc_feature 1..22: note = chemically synthesized
  source 1..22: mol_type = other DNA
actattaacatgctatttgttt

SEQ ID NO: 40622 - DNA, 22 bp, synthetic construct
  misc_feature 1..22: note = chemically synthesized
  source 1..22: mol_type = other DNA
ttaacatgctatttgtttctga

SEQ ID NO: 40623 - DNA, 22 bp, synthetic construct
  misc_feature 1..22: note = chemically synthesized
  source 1..22: mol_type = other DNA
acatgctatttgtttctgaaac

SEQ ID NO: 40624 - DNA, 22 bp, synthetic construct
  misc_feature 1..22: note = chemically synthesized
  source 1..22: mol_type = other DNA
tttgtttctgaaactaatcact

SEQ ID NO: 40625 - DNA, 22 bp, synthetic construct
  misc_feature 1..22: note = chemically synthesized
  source 1..22: mol_type = other DNA
gtttctgaaactaatcactggg

SEQ ID NO: 40626 - DNA, 22 bp, synthetic construct
  misc_feature 1..22: note = chemically synthesized
  source 1..22: mol_type = other DNA
tttctgaaactaatcactgggt

SEQ ID NO: 40627 - DNA, 22 bp, synthetic construct
  misc_feature 1..22: note = chemically synthesized
  source 1..22: mol_type = other DNA
ctgaaactaatcactgggtgtg

SEQ ID NO: 40628 - DNA, 22 bp, synthetic construct
  misc_feature 1..22: note = chemically synthesized
  source 1..22: mol_type = other DNA
tgaaactaatcactgggtgtgt

SEQ ID NO: 40629 - DNA, 22 bp, synthetic construct
  misc_feature 1..22: note = chemically synthesized
  source 1..22: mol_type = other DNA
aaactaatcactgggtgtgtaa

SEQ ID NO: 40630 - DNA, 22 bp, synthetic construct
  misc_feature 1..22: note = chemically synthesized
  source 1..22: mol_type = other DNA
atcactgggtgtgtaatacagc

SEQ ID NO: 40631 - DNA, 22 bp, synthetic construct
  misc_feature 1..22: note = chemically synthesized
  source 1..22: mol_type = other DNA
ggtgtgtaatacagccacatta

SEQ ID NO: 40632 - DNA, 22 bp, synthetic construct
  misc_feature 1..22: note = chemically synthesized
  source 1..22: mol_type = other DNA
ctgtctactaatcaacaggtaa

SEQ ID NO: 40633 - DNA, 22 bp, synthetic construct
  misc_feature 1..22: note = chemically synthesized
  source 1..22: mol_type = other DNA
tctactaatcaacaggtaatac

SEQ ID NO: 40634 - DNA, 22 bp, synthetic construct
  misc_feature 1..22: note = chemically synthesized
  source 1..22: mol_type = other DNA
ctaatcaacaggtaatactgca

SEQ ID NO: 40635 - DNA, 22 bp, synthetic construct
  misc_feature 1..22: note = chemically synthesized
  source 1..22: mol_type = other DNA
atcaacaggtaatactgcagat

SEQ ID NO: 40636 - DNA, 22 bp, synthetic construct
  misc_feature 1..22: note = chemically synthesized
  source 1..22: mol_type = other DNA
cagatttccaaatgtgccaaaa

SEQ ID NO: 40637 - DNA, 22 bp, synthetic construct
  misc_feature 1..22: note = chemically synthesized
  source 1..22: mol_type = other DNA
ccaaatgtgccaaaacagctaa

SEQ ID NO: 40638 - DNA, 22 bp, synthetic construct
  misc_feature 1..22: note = chemically synthesized
  source 1..22: mol_type = other DNA
caaatgtgccaaaacagctaag

SEQ ID NO: 40639 - DNA, 22 bp, synthetic construct
  misc_feature 1..22: note = chemically synthesized
  source 1..22: mol_type = other DNA
agcaaaaagcatcattccaaca

SEQ ID NO: 40640 - DNA, 22 bp, synthetic construct
  misc_feature 1..22: note = chemically synthesized
  source 1..22: mol_type = other DNA
caacacgtttaatgactgcttt

SEQ ID NO: 40641 - DNA, 22 bp, synthetic construct
  misc_feature 1..22: note = chemically synthesized
  source 1..22: mol_type = other DNA
aatgactgctttgggagcccaa

SEQ ID NO: 40642 - DNA, 22 bp, synthetic construct
  misc_feature 1..22: note = chemically synthesized
  source 1..22: mol_type = other DNA
atgactgctttgggagcccaac

SEQ ID NO: 40643 - DNA, 22 bp, synthetic construct
  misc_feature 1..22: note = chemically synthesized
  source 1..22: mol_type = other DNA
ctttgggagcccaactttaaca

SEQ ID NO: 40644 - DNA, 22 bp, synthetic construct
  misc_feature 1..22: note = chemically synthesized
  source 1..22: mol_type = other DNA
tgggagcccaactttaacaggt

SEQ ID NO: 40645 - DNA, 22 bp, synthetic construct
  misc_feature 1..22: note = chemically synthesized
  source 1..22: mol_type = other DNA
gggagcccaactttaacaggta

SEQ ID NO: 40646 - DNA, 22 bp, synthetic construct
  misc_feature 1..22: note = chemically synthesized
  source 1..22: mol_type = other DNA
ggagcccaactttaacaggtat

SEQ ID NO: 40647 - DNA, 22 bp, synthetic construct
  misc_feature 1..22: note = chemically synthesized
  source 1..22: mol_type = other DNA
taacaggtattaaaaccacagg

SEQ ID NO: 40648 - DNA, 22 bp, synthetic construct
  misc_feature 1..22: note = chemically synthesized
  source 1..22: mol_type = other DNA
aacaggtattaaaaccacagga

SEQ ID NO: 40649 - DNA, 22 bp, synthetic construct
  misc_feature 1..22: note = chemically synthesized
  source 1..22: mol_type = other DNA
acaggtattaaaaccacaggac

SEQ ID NO: 40650 - DNA, 22 bp, synthetic construct
  misc_feature 1..22: note = chemically synthesized
  source 1..22: mol_type = other DNA
aaaccacaggactctccacagg

SEQ ID NO: 40651 - DNA, 22 bp, synthetic construct
  misc_feature 1..22: note = chemically synthesized
  source 1..22: mol_type = other DNA
tccacaggagtacatagatgtg

SEQ ID NO: 40652 - DNA, 22 bp, synthetic construct
  misc_feature 1..22: note = chemically synthesized
  source 1..22: mol_type = other DNA
cacaggagtacatagatgtgtg

SEQ ID NO: 40653 - DNA, 22 bp, synthetic construct
  misc_feature 1..22: note = chemically synthesized
  source 1..22: mol_type = other DNA
ttcactaaaatgtacgtgtgtg

SEQ ID NO: 40654 - DNA, 22 bp, synthetic construct
  misc_feature 1..22: note = chemically synthesized
  source 1..22: mol_type = other DNA
actaaaatgtacgtgtgtgtgt

SEQ ID NO: 40655 - DNA, 22 bp, synthetic construct
  misc_feature 1..22: note = chemically synthesized
  source 1..22: mol_type = other DNA
aaatgtacgtgtgtgtgtgttt

SEQ ID NO: 40656 - DNA, 22 bp, synthetic construct
  misc_feature 1..22: note = chemically synthesized
  source 1..22: mol_type = other DNA
gcaagcatttatgtgtacatat

SEQ ID NO: 40657 - DNA, 22 bp, synthetic construct
  misc_feature 1..22: note = chemically synthesized
  source 1..22: mol_type = other DNA
caagcatttatgtgtacatatg

SEQ ID NO: 40658 - DNA, 22 bp, synthetic construct
  misc_feature 1..22: note = chemically synthesized
  source 1..22: mol_type = other DNA
atgtgtacatatgtgtgttagc

SEQ ID NO: 40659 - DNA, 22 bp, synthetic construct
  misc_feature 1..22: note = chemically synthesized
  source 1..22: mol_type = other DNA
tgtgtacatatgtgtgttagcg

SEQ ID NO: 40660 - DNA, 22 bp, synthetic construct
  misc_feature 1..22: note = chemically synthesized
  source 1..22: mol_type = other DNA
gcgtgtgcatgcatatgtgttt

SEQ ID NO: 40661 - DNA, 22 bp, synthetic construct
  misc_feature 1..22: note = chemically synthesized
  source 1..22: mol_type = other DNA
gtgagcatgtgcatgtgtgtat

SEQ ID NO: 40662 - DNA, 22 bp, synthetic construct
  misc_feature 1..22: note = chemically synthesized
  source 1..22: mol_type = other DNA
tgagcatgtgcatgtgtgtata

SEQ ID NO: 40663 - DNA, 22 bp, synthetic construct
  misc_feature 1..22: note = chemically synthesized
  source 1..22: mol_type = other DNA
tgactgtgtgcatgtgtgtgta

SEQ ID NO: 40664 - DNA, 22 bp, synthetic construct
  misc_feature 1..22: note = chemically synthesized
  source 1..22: mol_type = other DNA
tgtgcatgtgtgtgtatgcttg

SEQ ID NO: 40665 - DNA, 22 bp, synthetic construct
  misc_feature 1..22: note = chemically synthesized
  source 1..22: mol_type = other DNA
gtgcatgtgttagcatgtgcat

SEQ ID NO: 40666 - DNA, 22 bp, synthetic construct
  misc_feature 1..22: note = chemically synthesized
  source 1..22: mol_type = other DNA
tgcatgtgttagcatgtgcatg

SEQ ID NO: 40667 - DNA, 22 bp, synthetic construct
  misc_feature 1..22: note = chemically synthesized
  source 1..22: mol_type = other DNA
gcatgtgcatgcacatgtgtgt

SEQ ID NO: 40668 - DNA, 22 bp, synthetic construct
  misc_feature 1..22: note = chemically synthesized
  source 1..22: mol_type = other DNA
gcgtgttcatgtgtgtgtatat

SEQ ID NO: 40669 - DNA, 22 bp, synthetic construct
  misc_feature 1..22: note = chemically synthesized
  source 1..22: mol_type = other DNA
atgtgtgtgtatatgtgagtgt

SEQ ID NO: 40670 - DNA, 22 bp, synthetic construct
  misc_feature 1..22: note = chemically synthesized
  source 1..22: mol_type = other DNA
tgtacgtgtgtgaatgtgtgta

SEQ ID NO: 40671 - DNA, 22 bp, synthetic construct
  misc_feature 1..22: note = chemically synthesized
  source 1..22: mol_type = other DNA
cctaaacatatgtttttagata

SEQ ID NO: 40672 - DNA, 22 bp, synthetic construct
  misc_feature 1..22: note = chemically synthesized
  source 1..22: mol_type = other DNA
ctaaacatatgtttttagataa

SEQ ID NO: 40673 - DNA, 22 bp, synthetic construct
  misc_feature 1..22: note = chemically synthesized
  source 1..22: mol_type = other DNA
aacatatgtttttagataattt

SEQ ID NO: 40674 - DNA, 22 bp, synthetic construct
  misc_feature 1..22: note = chemically synthesized
  source 1..22: mol_type = other DNA
ttagataatttccctgtttttt

SEQ ID NO: 40675 - DNA, 22 bp, synthetic construct
  misc_feature 1..22: note = chemically synthesized
  source 1..22: mol_type = other DNA
tagataatttccctgttttttt

SEQ ID NO: 40676 - DNA, 22 bp, synthetic construct
  misc_feature 1..22: note = chemically synthesized
  source 1..22: mol_type = other DNA
agataatttccctgtttttttt

SEQ ID NO: 40677 - DNA, 22 bp, synthetic construct
  misc_feature 1..22: note = chemically synthesized
  source 1..22: mol_type = other DNA
gataatttccctgttttttttt

SEQ ID NO: 40678 - DNA, 22 bp, synthetic construct
  misc_feature 1..22: note = chemically synthesized
  source 1..22: mol_type = other DNA
ccctgtttttttttttttttca

SEQ ID NO: 40679 - DNA, 22 bp, synthetic construct
  misc_feature 1..22: note = chemically synthesized
  source 1..22: mol_type = other DNA
cctgtttttttttttttttcag

SEQ ID NO: 40680 - DNA, 22 bp, synthetic construct
  misc_feature 1..22: note = chemically synthesized
  source 1..22: mol_type = other DNA
tttttttttttttttcagtgag

SEQ ID NO: 40681 - DNA, 22 bp, synthetic construct
  misc_feature 1..22: note = chemically synthesized
  source 1..22: mol_type = other DNA
ttttttttttttcagtgagaca

SEQ ID NO: 40682 - DNA, 22 bp, synthetic construct
  misc_feature 1..22: note = chemically synthesized
  source 1..22: mol_type = other DNA
tttttttttttcagtgagacag

SEQ ID NO: 40683 - DNA, 22 bp, synthetic construct
  misc_feature 1..22: note = chemically synthesized
  source 1..22: mol_type = other DNA
ttttttttttcagtgagacagg

SEQ ID NO: 40684 - DNA, 22 bp, synthetic construct
  misc_feature 1..22: note = chemically synthesized
  source 1..22: mol_type = other DNA
tttttttttcagtgagacaggc

SEQ ID NO: 40685 - DNA, 22 bp, synthetic construct
  misc_feature 1..22: note = chemically synthesized
  source 1..22: mol_type = other DNA
ttttttttcagtgagacaggca

SEQ ID NO: 40686 - DNA, 22 bp, synthetic construct
  misc_feature 1..22: note = chemically synthesized
  source 1..22: mol_type = other DNA
tttttttcagtgagacaggcac

SEQ ID NO: 40687 - DNA, 22 bp, synthetic construct
  misc_feature 1..22: note = chemically synthesized
  source 1..22: mol_type = other DNA
ttttttcagtgagacaggcaca

SEQ ID NO: 40688 - DNA, 22 bp, synthetic construct
  misc_feature 1..22: note = chemically synthesized
  source 1..22: mol_type = other DNA
tttttcagtgagacaggcacaa

SEQ ID NO: 40689 - DNA, 22 bp, synthetic construct
  misc_feature 1..22: note = chemically synthesized
  source 1..22: mol_type = other DNA
ttttcagtgagacaggcacaaa

SEQ ID NO: 40690 - DNA, 22 bp, synthetic construct
  misc_feature 1..22: note = chemically synthesized
  source 1..22: mol_type = other DNA
tttcagtgagacaggcacaaaa

SEQ ID NO: 40691 - DNA, 22 bp, synthetic construct
  misc_feature 1..22: note = chemically synthesized
  source 1..22: mol_type = other DNA
ttcagtgagacaggcacaaaag

SEQ ID NO: 40692 - DNA, 22 bp, synthetic construct
  misc_feature 1..22: note = chemically synthesized
  source 1..22: mol_type = other DNA
tcagtgagacaggcacaaaagc

SEQ ID NO: 40693 - DNA, 22 bp, synthetic construct
  misc_feature 1..22: note = chemically synthesized
  source 1..22: mol_type = other DNA
cagtgagacaggcacaaaagca

SEQ ID NO: 40694 - DNA, 22 bp, synthetic construct
  misc_feature 1..22: note = chemically synthesized
  source 1..22: mol_type = other DNA
agtgagacaggcacaaaagcag

SEQ ID NO: 40695 - DNA, 22 bp, synthetic construct
  misc_feature 1..22: note = chemically synthesized
  source 1..22: mol_type = other DNA
tcccacgtggaatgggctatct

SEQ ID NO: 40696 - DNA, 22 bp, synthetic construct
  misc_feature 1..22: note = chemically synthesized
  source 1..22: mol_type = other DNA
tctcgtgacactgtgaccccct

SEQ ID NO: 40697 - DNA, 22 bp, synthetic construct
  misc_feature 1..22: note = chemically synthesized
  source 1..22: mol_type = other DNA
gtgacactgtgaccccctttct

SEQ ID NO: 40698 - DNA, 22 bp, synthetic construct
  misc_feature 1..22: note = chemically synthesized
  source 1..22: mol_type = other DNA
tgaccccctttctttcaccctg

SEQ ID NO: 40699 - DNA, 22 bp, synthetic construct
  misc_feature 1..22: note = chemically synthesized
  source 1..22: mol_type = other DNA
tctttcaccctgggtcttcaaa

SEQ ID NO: 40700 - DNA, 22 bp, synthetic construct
  misc_feature 1..22: note = chemically synthesized
  source 1..22: mol_type = other DNA
ctttcaccctgggtcttcaaaa

SEQ ID NO: 40701 - DNA, 22 bp, synthetic construct
  misc_feature 1..22: note = chemically synthesized
  source 1..22: mol_type = other DNA
tttcaccctgggtcttcaaaaa

SEQ ID NO: 40702 - DNA, 22 bp, synthetic construct
  misc_feature 1..22: note = chemically synthesized
  source 1..22: mol_type = other DNA
tcaccctgggtcttcaaaaaga

SEQ ID NO: 40703 - DNA, 22 bp, synthetic construct
  misc_feature 1..22: note = chemically synthesized
  source 1..22: mol_type = other DNA
caccctgggtcttcaaaaagag

SEQ ID NO: 40704 - DNA, 22 bp, synthetic construct
  misc_feature 1..22: note = chemically synthesized
  source 1..22: mol_type = other DNA
accctgggtcttcaaaaagaga

SEQ ID NO: 40705 - DNA, 22 bp, synthetic construct
  misc_feature 1..22: note = chemically synthesized
  source 1..22: mol_type = other DNA
ggtcttcaaaaagagaatggat

SEQ ID NO: 40706 - DNA, 22 bp, synthetic construct
  misc_feature 1..22: note = chemically synthesized
  source 1..22: mol_type = other DNA
caaaaagagaatggatgacact

SEQ ID NO: 40707 - DNA, 22 bp, synthetic construct
  misc_feature 1..22: note = chemically synthesized
  source 1..22: mol_type = other DNA
aaaaagagaatggatgacacta

SEQ ID NO: 40708 - DNA, 22 bp, synthetic construct
  misc_feature 1..22: note = chemically synthesized
  source 1..22: mol_type = other DNA
tgatgaggaggggtctctatat

SEQ ID NO: 40709 - DNA, 22 bp, synthetic construct
  misc_feature 1..22: note = chemically synthesized
  source 1..22: mol_type = other DNA
tatattggtgacaggccaaaat

SEQ ID NO: 40710 - DNA, 22 bp, synthetic construct
  misc_feature 1..22: note = chemically synthesized
  source 1..22: mol_type = other DNA
tattggtgacaggccaaaatac

SEQ ID NO: 40711 - DNA, 22 bp, synthetic construct
  misc_feature 1..22: note = chemically synthesized
  source 1..22: mol_type = other DNA
gtgacaggccaaaatacaggac

SEQ ID NO: 40712 - DNA, 22 bp, synthetic construct
  misc_feature 1..22: note = chemically synthesized
  source 1..22: mol_type = other DNA
cctacagtcctttcgcagtcca

SEQ ID NO: 40713 - DNA, 22 bp, synthetic construct
  misc_feature 1..22: note = chemically synthesized
  source 1..22: mol_type = other DNA
cagtcctttcgcagtccataat

SEQ ID NO: 40714 - DNA, 22 bp, synthetic construct
  misc_feature 1..22: note = chemically synthesized
  source 1..22: mol_type = other DNA
tcgcagtccataatcctcaagt

SEQ ID NO: 40715 - DNA, 22 bp, synthetic construct
  misc_feature 1..22: note = chemically synthesized
  source 1..22: mol_type = other DNA
cgcagtccataatcctcaagtc

SEQ ID NO: 40716 - DNA, 22 bp, synthetic construct
  misc_feature 1..22: note = chemically synthesized
  source 1..22: mol_type = other DNA
gcagtccataatcctcaagtcc

SEQ ID NO: 40717 - DNA, 22 bp, synthetic construct
  misc_feature 1..22: note = chemically synthesized
  source 1..22: mol_type = other DNA
aagtccctcagctcttccatgt

SEQ ID NO: 40718 - DNA, 22 bp, synthetic construct
  misc_feature 1..22: note = chemically synthesized
  source 1..22: mol_type = other DNA
agctcttccatgtaccaccttc

SEQ ID NO: 40719 - DNA, 22 bp, synthetic construct
  misc_feature 1..22: note = chemically synthesized
  source 1..22: mol_type = other DNA
ttccatgtaccaccttctagac

SEQ ID NO: 40720 - DNA, 22 bp, synthetic construct
  misc_feature 1..22: note = chemically synthesized
  source 1..22: mol_type = other DNA
ccatgtaccaccttctagacta

SEQ ID NO: 40721 - DNA, 22 bp, synthetic construct
  misc_feature 1..22: note = chemically synthesized
  source 1..22: mol_type = other DNA
catgtaccaccttctagactac

SEQ ID NO: 40722 - DNA, 22 bp, synthetic construct
  misc_feature 1..22: note = chemically synthesized
  source 1..22: mol_type = other DNA
ctagactacacttaaaatgcat

SEQ ID NO: 40723 - DNA, 22 bp, synthetic construct
  misc_feature 1..22: note = chemically synthesized
  source 1..22: mol_type = other DNA
tagactacacttaaaatgcatc

SEQ ID NO: 40724 - DNA, 22 bp, synthetic construct
  misc_feature 1..22: note = chemically synthesized
  source 1..22: mol_type = other DNA
gactacacttaaaatgcatcct

SEQ ID NO: 40725 - DNA, 22 bp, synthetic construct
  misc_feature 1..22: note = chemically synthesized
  source 1..22: mol_type = other DNA
cacttaaaatgcatcctgaacg

SEQ ID NO: 40726 - DNA, 22 bp, synthetic construct
  misc_feature 1..22: note = chemically synthesized
  source 1..22: mol_type = other DNA
aaaatgcatcctgaacgtttgt

SEQ ID NO: 40727 - DNA, 22 bp, synthetic construct
  misc_feature 1..22: note = chemically synthesized
  source 1..22: mol_type = other DNA
aaatgcatcctgaacgtttgta

SEQ ID NO: 40728 - DNA, 22 bp, synthetic construct
  misc_feature 1..22: note = chemically synthesized
  source 1..22: mol_type = other DNA
aacgtttgtaaagtaccctgaa

SEQ ID NO: 40729 - DNA, 22 bp, synthetic construct
  misc_feature 1..22: note = chemically synthesized
  source 1..22: mol_type = other DNA
gtaaagtaccctgaaggaaccc

SEQ ID NO: 40730 - DNA, 22 bp, synthetic construct
  misc_feature 1..22: note = chemically synthesized
  source 1..22: mol_type = other DNA
taaagtaccctgaaggaaccca

SEQ ID NO: 40731 - DNA, 22 bp, synthetic construct
  misc_feature 1..22: note = chemically synthesized
  source 1..22: mol_type = other DNA
aaggaacccattccagttctga

SEQ ID NO: 40732 - DNA, 22 bp, synthetic construct
  misc_feature 1..22: note = chemically synthesized
  source 1..22: mol_type = other DNA
cagttctgaatccgattactag

SEQ ID NO: 40733 - DNA, 22 bp, synthetic construct
  misc_feature 1..22: note = chemically synthesized
  source 1..22: mol_type = other DNA
tgaatccgattactaggttcaa

SEQ ID NO: 40734 - DNA, 22 bp, synthetic construct
  misc_feature 1..22: note = chemically synthesized
  source 1..22: mol_type = other DNA
aatccgattactaggttcaagc

SEQ ID NO: 40735 - DNA, 22 bp, synthetic construct
  misc_feature 1..22: note = chemically synthesized
  source 1..22: mol_type = other DNA
ctaggttcaagccacacaaata

SEQ ID NO: 40736 - DNA, 22 bp, synthetic construct
  misc_feature 1..22: note = chemically synthesized
  source 1..22: mol_type = other DNA
ggttcaagccacacaaataaca

SEQ ID NO: 40737 - DNA, 22 bp, synthetic construct
  misc_feature 1..22: note = chemically synthesized
  source 1..22: mol_type = other DNA
aagccacacaaataacaacagt

SEQ ID NO: 40738 - DNA, 22 bp, synthetic construct
  misc_feature 1..22: note = chemically synthesized
  source 1..22: mol_type = other DNA
gtctgagctagaggcttcttta

SEQ ID NO: 40739 - DNA, 22 bp, synthetic construct
  misc_feature 1..22: note = chemically synthesized
  source 1..22: mol_type = other DNA
agctagaggcttctttacctaa

SEQ ID NO: 40740 - DNA, 22 bp, synthetic construct
  misc_feature 1..22: note = chemically synthesized
  source 1..22: mol_type = other DNA
gaggcttctttacctaactgca

SEQ ID NO: 40741 - DNA, 22 bp, synthetic construct
  misc_feature 1..22: note = chemically synthesized
  source 1..22: mol_type = other DNA
ctttacctaactgcaaagtaaa

SEQ ID NO: 40742 - DNA, 22 bp, synthetic construct
  misc_feature 1..22: note = chemically synthesized
  source 1..22: mol_type = other DNA
tttacctaactgcaaagtaaat

SEQ ID NO: 40743 - DNA, 22 bp, synthetic construct
  misc_feature 1..22: note = chemically synthesized
  source 1..22: mol_type = other DNA
tacctaactgcaaagtaaatgt

SEQ ID NO: 40744 - DNA, 22 bp, synthetic construct
  misc_feature 1..22: note = chemically synthesized
  source 1..22: mol_type = other DNA
acctaactgcaaagtaaatgtc

SEQ ID NO: 40745 - DNA, 22 bp, synthetic construct
  misc_feature 1..22: note = chemically synthesized
  source 1..22: mol_type = other DNA
cctaactgcaaagtaaatgtcc

SEQ ID NO: 40746 - DNA, 22 bp, synthetic construct
  misc_feature 1..22: note = chemically synthesized
  source 1..22: mol_type = other DNA
actgcaaagtaaatgtcctttc

SEQ ID NO: 40747 - DNA, 22 bp, synthetic construct
  misc_feature 1..22: note = chemically synthesized
  source 1..22: mol_type = other DNA
caaagtaaatgtcctttctatt

SEQ ID NO: 40748 - DNA, 22 bp, synthetic construct
  misc_feature 1..22: note = chemically synthesized
  source 1..22: mol_type = other DNA
tctattcagccgcatctagctc

SEQ ID NO: 40749 - DNA, 22 bp, synthetic construct
  misc_feature 1..22: note = chemically synthesized
  source 1..22: mol_type = other DNA
ctattcagccgcatctagctct

SEQ ID NO: 40750 - DNA, 22 bp, synthetic construct
  misc_feature 1..22: note = chemically synthesized
  source 1..22: mol_type = other DNA
tattcagccgcatctagctctt

SEQ ID NO: 40751 - DNA, 22 bp, synthetic construct
  misc_feature 1..22: note = chemically synthesized
  source 1..22: mol_type = other DNA
ttcagccgcatctagctcttga

SEQ ID NO: 40752 - DNA, 22 bp, synthetic construct
  misc_feature 1..22: note = chemically synthesized
  source 1..22: mol_type = other DNA
agccgcatctagctcttgaccc

SEQ ID NO: 40753 - DNA, 22 bp, synthetic construct
  misc_feature 1..22: note = chemically synthesized
  source 1..22: mol_type = other DNA
gctcttgaccctatgtttacca

SEQ ID NO: 40754 - DNA, 22 bp, synthetic construct
  misc_feature 1..22: note = chemically synthesized
  source 1..22: mol_type = other DNA
ttgaccctatgtttaccataga

SEQ ID NO: 40755 - DNA, 22 bp, synthetic construct
  misc_feature 1..22: note = chemically synthesized
  source 1..22: mol_type = other DNA
gaccctatgtttaccatagata

SEQ ID NO: 40756 - DNA, 22 bp, synthetic construct
  misc_feature 1..22: note = chemically synthesized
  source 1..22: mol_type = other DNA
accctatgtttaccatagatac

SEQ ID NO: 40757 - DNA, 22 bp, synthetic construct
  misc_feature 1..22: note = chemically synthesized
  source 1..22: mol_type = other DNA
tgtttaccatagataccagttc

SEQ ID NO: 40758 - DNA, 22 bp, synthetic construct
  misc_feature 1..22: note = chemically synthesized
  source 1..22: mol_type = other DNA
accatagataccagttcttctc

SEQ ID NO: 40759 - DNA, 22 bp, synthetic construct
  misc_feature 1..22: note = chemically synthesized
  source 1..22: mol_type = other DNA
ccatagataccagttcttctca

SEQ ID NO: 40760 - DNA, 22 bp, synthetic construct
  misc_feature 1..22: note = chemically synthesized
  source 1..22: mol_type = other DNA
ttctcacttagattctctgact

SEQ ID NO: 40761 - DNA, 22 bp, synthetic construct
  misc_feature 1..22: note = chemically synthesized
  source 1..22: mol_type = other DNA
ctcacttagattctctgactta

SEQ ID NO: 40762 - DNA, 22 bp, synthetic construct
  misc_feature 1..22: note = chemically synthesized
  source 1..22: mol_type = other DNA
tcacttagattctctgacttat

SEQ ID NO: 40763 - DNA, 22 bp, synthetic construct
  misc_feature 1..22: note = chemically synthesized
  source 1..22: mol_type = other DNA
acttagattctctgacttatca

SEQ ID NO: 40764 - DNA, 22 bp, synthetic construct
  misc_feature 1..22: note = chemically synthesized
  source 1..22: mol_type = other DNA
agattctctgacttatcagagt

SEQ ID NO: 40765 - DNA, 22 bp, synthetic construct
  misc_feature 1..22: note = chemically synthesized
  source 1..22: mol_type = other DNA
gattctctgacttatcagagta

SEQ ID NO: 40766 - DNA, 22 bp, synthetic construct
  misc_feature 1..22: note = chemically synthesized
  source 1..22: mol_type = other DNA
tctgacttatcagagtattata

SEQ ID NO: 40767 - DNA, 22 bp, synthetic construct
  misc_feature 1..22: note = chemically synthesized
  source 1..22: mol_type = other DNA
tgacttatcagagtattataga

SEQ ID NO: 40768 - DNA, 22 bp, synthetic construct
  misc_feature 1..22: note = chemically synthesized
  source 1..22: mol_type = other DNA
acttatcagagtattatagagc

SEQ ID NO: 40769 - DNA, 22 bp, synthetic construct
  misc_feature 1..22: note = chemically synthesized
  source 1..22: mol_type = other DNA
atcagagtattatagagcaaac

SEQ ID NO: 40770 - DNA, 22 bp, synthetic construct
  misc_feature 1..22: note = chemically synthesized
  source 1..22: mol_type = other DNA
tcagagtattatagagcaaaca

SEQ ID NO: 40771 - DNA, 22 bp, synthetic construct
  misc_feature 1..22: note = chemically synthesized
  source 1..22: mol_type = other DNA
tagagcaaacattagctatgcc

SEQ ID NO: 40772 - DNA, 22 bp, synthetic construct
  misc_feature 1..22: note = chemically synthesized
  source 1..22: mol_type = other DNA
gctatgcctgtgacttgagttg

SEQ ID NO: 40773 - DNA, 22 bp, synthetic construct
  misc_feature 1..22: note = chemically synthesized
  source 1..22: mol_type = other DNA
tgcctgtgacttgagttgtgtc

SEQ ID NO: 40774 - DNA, 22 bp, synthetic construct
  misc_feature 1..22: note = chemically synthesized
  source 1..22: mol_type = other DNA
tgacttgagttgtgtcaatctg

SEQ ID NO: 40775 - DNA, 22 bp, synthetic construct
  misc_feature 1..22: note = chemically synthesized
  source 1..22: mol_type = other DNA
gagttgtgtcaatctgtaatga

SEQ ID NO: 40776 - DNA, 22 bp, synthetic construct
  misc_feature 1..22: note = chemically synthesized
  source 1..22: mol_type = other DNA
agttgtgtcaatctgtaatgaa

SEQ ID NO: 40777 - DNA, 22 bp, synthetic construct
  misc_feature 1..22: note = chemically synthesized
  source 1..22: mol_type = other DNA
tgtcaatctgtaatgaaaatgt

SEQ ID NO: 40778 - DNA, 22 bp, synthetic construct
  misc_feature 1..22: note = chemically synthesized
  source 1..22: mol_type = other DNA
taatgaaaatgtgccagcttta

SEQ ID NO: 40779 - DNA, 22 bp, synthetic construct
  misc_feature 1..22: note = chemically synthesized
  source 1..22: mol_type = other DNA
tatcatcactcacagacttctt

SEQ ID NO: 40780 - DNA, 22 bp, synthetic construct
  misc_feature 1..22: note = chemically synthesized
  source 1..22: mol_type = other DNA
atcatcactcacagacttctta

SEQ ID NO: 40781 - DNA, 22 bp, synthetic construct
  misc_feature 1..22: note = chemically synthesized
  source 1..22: mol_type = other DNA
tcatcactcacagacttcttaa

SEQ ID NO: 40782 - DNA, 22 bp, synthetic construct
  misc_feature 1..22: note = chemically synthesized
  source 1..22: mol_type = other DNA
acagacttcttaattaaccttc

SEQ ID NO: 40783 - DNA, 22 bp, synthetic construct
  misc_feature 1..22: note = chemically synthesized
  source 1..22: mol_type = other DNA
cttaattaaccttctgatattg

SEQ ID NO: 40784 - DNA, 22 bp, synthetic construct
  misc_feature 1..22: note = chemically synthesized
  source 1..22: mol_type = other DNA
ttaattaaccttctgatattgt

SEQ ID NO: 40785 - DNA, 22 bp, synthetic construct
  misc_feature 1..22: note = chemically synthesized
  source 1..22: mol_type = other DNA
aattaaccttctgatattgtca

SEQ ID NO: 40786 - DNA, 22 bp, synthetic construct
  misc_feature 1..22: note = chemically synthesized
  source 1..22: mol_type = other DNA
attaaccttctgatattgtcaa

SEQ ID NO: 40787 - DNA, 22 bp, synthetic construct
  misc_feature 1..22: note = chemically synthesized
  source 1..22: mol_type = other DNA
accttctgatattgtcaaaatc

SEQ ID NO: 40788 - DNA, 22 bp, synthetic construct
  misc_feature 1..22: note = chemically synthesized
  source 1..22: mol_type = other DNA
ctgatattgtcaaaatcgcact

SEQ ID NO: 40789 - DNA, 22 bp, synthetic construct
  misc_feature 1..22: note = chemically synthesized
  source 1..22: mol_type = other DNA
tgatattgtcaaaatcgcactc

SEQ ID NO: 40790 - DNA, 22 bp, synthetic construct
  misc_feature 1..22: note = chemically synthesized
  source 1..22: mol_type = other DNA
atattgtcaaaatcgcactctc

SEQ ID NO: 40791 - DNA, 22 bp, synthetic construct
  misc_feature 1..22: note = chemically synthesized
  source 1..22: mol_type = other DNA
tcaaaatcgcactctcttttgt

SEQ ID NO: 40792 - DNA, 22 bp, synthetic construct
  misc_feature 1..22: note = chemically synthesized
  source 1..22: mol_type = other DNA
tcttttgttctagaaatgagca

SEQ ID NO: 40793 - DNA, 22 bp, synthetic construct
  misc_feature 1..22: note = chemically synthesized
  source 1..22: mol_type = other DNA
ttttgttctagaaatgagcatt

SEQ ID NO: 40794 - DNA, 22 bp, synthetic construct
  misc_feature 1..22: note = chemically synthesized
  source 1..22: mol_type = other DNA
ttgttctagaaatgagcattta

SEQ ID NO: 40795 - DNA, 22 bp, synthetic construct
  misc_feature 1..22: note = chemically synthesized
  source 1..22: mol_type = other DNA
tgttctagaaatgagcatttac

SEQ ID NO: 40796 - DNA, 22 bp, synthetic construct
  misc_feature 1..22: note = chemically synthesized
  source 1..22: mol_type = other DNA
gttctagaaatgagcatttaca

SEQ ID NO: 40797 - DNA, 22 bp, synthetic construct
  misc_feature 1..22: note = chemically synthesized
  source 1..22: mol_type = other DNA
ttctagaaatgagcatttacat

SEQ ID NO: 40798 - DNA, 22 bp, synthetic construct
  misc_feature 1..22: note = chemically synthesized
  source 1..22: mol_type = other DNA
tagaaatgagcatttacatgtg

SEQ ID NO: 40799 - DNA, 22 bp, synthetic construct
  misc_feature 1..22: note = chemically synthesized
  source 1..22: mol_type = other DNA
gaaatgagcatttacatgtgca

SEQ ID NO: 40800 - DNA, 22 bp, synthetic construct
  misc_feature 1..22: note = chemically synthesized
  source 1..22: mol_type = other DNA
acatgtgcattttttttccttc

SEQ ID NO: 40801 - DNA, 22 bp, synthetic construct
  misc_feature 1..22: note = chemically synthesized
  source 1..22: mol_type = other DNA
catgtgcattttttttccttca

SEQ ID NO: 40802 - DNA, 22 bp, synthetic construct
  misc_feature 1..22: note = chemically synthesized
  source 1..22: mol_type = other DNA
tttttccttcattgctttttta

SEQ ID NO: 40803 - DNA, 22 bp, synthetic construct
  misc_feature 1..22: note = chemically synthesized
  source 1..22: mol_type = other DNA
ttttccttcattgcttttttac

SEQ ID NO: 40804 - DNA, 22 bp, synthetic construct
  misc_feature 1..22: note = chemically synthesized
  source 1..22: mol_type = other DNA
tttccttcattgcttttttact

SEQ ID NO: 40805 - DNA, 22 bp, synthetic construct
  misc_feature 1..22: note = chemically synthesized
  source 1..22: mol_type = other DNA
ttccttcattgcttttttactg

SEQ ID NO: 40806 - DNA, 22 bp, synthetic construct
  misc_feature 1..22: note = chemically synthesized
  source 1..22: mol_type = other DNA
tccttcattgcttttttactgg

SEQ ID NO: 40807 - DNA, 22 bp, synthetic construct
  misc_feature 1..22: note = chemically synthesized
  source 1..22: mol_type = other DNA
ccttcattgcttttttactggc

SEQ ID NO: 40808 - DNA, 22 bp, synthetic construct
  misc_feature 1..22: note = chemically synthesized
  source 1..22: mol_type = other DNA
cttcattgcttttttactggct

SEQ ID NO: 40809 - DNA, 22 bp, synthetic construct
  misc_feature 1..22: note = chemically synthesized
  source 1..22: mol_type = other DNA
cattgcttttttactggctgtt

SEQ ID NO: 40810 - DNA, 22 bp, synthetic construct
  misc_feature 1..22: note = chemically synthesized
  source 1..22: mol_type = other DNA
attgcttttttactggctgttt

SEQ ID NO: 40811 - DNA, 22 bp, synthetic construct
  misc_feature 1..22: note = chemically synthesized
  source 1..22: mol_type = other DNA
cttttttactggctgttttacc

SEQ ID NO: 40812 - DNA, 22 bp, synthetic construct
  misc_feature 1..22: note = chemically synthesized
  source 1..22: mol_type = other DNA
ttttactggctgttttaccaaa

SEQ ID NO: 40813 - DNA, 22 bp, synthetic construct
  misc_feature 1..22: note = chemically synthesized
  source 1..22: mol_type = other DNA
tttactggctgttttaccaaat

SEQ ID NO: 40814 - DNA, 22 bp, synthetic construct
  misc_feature 1..22: note = chemically synthesized
  source 1..22: mol_type = other DNA
ttactggctgttttaccaaatc

SEQ ID NO: 40815 - DNA, 22 bp, synthetic construct
  misc_feature 1..22: note = chemically synthesized
  source 1..22: mol_type = other DNA
tactggctgttttaccaaatcc

SEQ ID NO: 40816 - DNA, 22 bp, synthetic construct
  misc_feature 1..22: note = chemically synthesized
  source 1..22: mol_type = other DNA
actggctgttttaccaaatcct

SEQ ID NO: 40817 - DNA, 22 bp, synthetic construct
  misc_feature 1..22: note = chemically synthesized
  source 1..22: mol_type = other DNA
ctggctgttttaccaaatcctg

SEQ ID NO: 40818 - DNA, 22 bp, synthetic construct
  misc_feature 1..22: note = chemically synthesized
  source 1..22: mol_type = other DNA
gctgttttaccaaatcctgatg

SEQ ID NO: 40819 - DNA, 22 bp, synthetic construct
  misc_feature 1..22: note = chemically synthesized
  source 1..22: mol_type = other DNA
ttttaccaaatcctgatgttct

SEQ ID NO: 40820 - DNA, 22 bp, synthetic construct
  misc_feature 1..22: note = chemically synthesized
  source 1..22: mol_type = other DNA
taccaaatcctgatgttcttta

SEQ ID NO: 40821 - DNA, 22 bp, synthetic construct
  misc_feature 1..22: note = chemically synthesized
  source 1..22: mol_type = other DNA
accaaatcctgatgttctttaa

SEQ ID NO: 40822 - DNA, 22 bp, synthetic construct
  misc_feature 1..22: note = chemically synthesized
  source 1..22: mol_type = other DNA
ccaaatcctgatgttctttaaa

SEQ ID NO: 40823 - DNA, 22 bp, synthetic construct
  misc_feature 1..22: note = chemically synthesized
  source 1..22: mol_type = other DNA
atgttctttaaaaagtgtattc

SEQ ID NO: 40824 - DNA, 22 bp, synthetic construct
  misc_feature 1..22: note = chemically synthesized
  source 1..22: mol_type = other DNA
tttaaaaagtgtattctgcaaa

SEQ ID NO: 40825 - DNA, 22 bp, synthetic construct
  misc_feature 1..22: note = chemically synthesized
  source 1..22: mol_type = other DNA
taaaaagtgtattctgcaaaaa

SEQ ID NO: 40826 - DNA, 22 bp, synthetic construct
  misc_feature 1..22: note = chemically synthesized
  source 1..22: mol_type = other DNA
aaaaagtgtattctgcaaaaac

SEQ ID NO: 40827 - DNA, 22 bp, synthetic construct
  misc_feature 1..22: note = chemically synthesized
  source 1..22: mol_type = other DNA
aaaagtgtattctgcaaaaaca

SEQ ID NO: 40828 - DNA, 22 bp, synthetic construct
  misc_feature 1..22: note = chemically synthesized
  source 1..22: mol_type = other DNA
tgcaaaaacaaaagaaagcaat

SEQ ID NO: 40829 - DNA, 22 bp, synthetic construct
  misc_feature 1..22: note = chemically synthesized
  source 1..22: mol_type = other DNA
caaaaacaaaagaaagcaataa

SEQ ID NO: 40830 - DNA, 22 bp, synthetic construct
  misc_feature 1..22: note = chemically synthesized
  source 1..22: mol_type = other DNA
tagacactacaatatagaattt

SEQ ID NO: 40831 - DNA, 22 bp, synthetic construct
  misc_feature 1..22: note = chemically synthesized
  source 1..22: mol_type = other DNA
caatatagaatttcttccctga

SEQ ID NO: 40832 - DNA, 22 bp, synthetic construct
  misc_feature 1..22: note = chemically synthesized
  source 1..22: mol_type = other DNA
cttccctgaaactctctcatgg

SEQ ID NO: 40833 - DNA, 22 bp, synthetic construct
  misc_feature 1..22: note = chemically synthesized
  source 1..22: mol_type = other DNA
ttccctgaaactctctcatggt

SEQ ID NO: 40834 - DNA, 22 bp, synthetic construct
  misc_feature 1..22: note = chemically synthesized
  source 1..22: mol_type = other DNA
ccctgaaactctctcatggtcc

SEQ ID NO: 40835 - DNA, 22 bp, synthetic construct
  misc_feature 1..22: note = chemically synthesized
  source 1..22: mol_type = other DNA
cctgaaactctctcatggtcct

SEQ ID NO: 40836 - DNA, 22 bp, synthetic construct
  misc_feature 1..22: note = chemically synthesized
  source 1..22: mol_type = other DNA
aaactctctcatggtccttaga

SEQ ID NO: 40837 - DNA, 22 bp, synthetic construct
  misc_feature 1..22: note = chemically synthesized
  source 1..22: mol_type = other DNA
tctcatggtccttagattcctt

SEQ ID NO: 40838 - DNA, 22 bp, synthetic construct
  misc_feature 1..22: note = chemically synthesized
  source 1..22: mol_type = other DNA
tcatggtccttagattccttga

SEQ ID NO: 40839 - DNA, 22 bp, synthetic construct
  misc_feature 1..22: note = chemically synthesized
  source 1..22: mol_type = other DNA
atggtccttagattccttgata

SEQ ID NO: 40840 - DNA, 22 bp, synthetic construct
  misc_feature 1..22: note = chemically synthesized
  source 1..22: mol_type = other DNA
agattccttgatacttcaccag

SEQ ID NO: 40841 - DNA, 22 bp, synthetic construct
  misc_feature 1..22: note = chemically synthesized
  source 1..22: mol_type = other DNA
gattccttgatacttcaccagt

SEQ ID NO: 40842 - DNA, 22 bp, synthetic construct
  misc_feature 1..22: note = chemically synthesized
  source 1..22: mol_type = other DNA
cttgatacttcaccagtgactt

SEQ ID NO: 40843 - DNA, 22 bp, synthetic construct
  misc_feature 1..22: note = chemically synthesized
  source 1..22: mol_type = other DNA
gatacttcaccagtgactttaa

SEQ ID NO: 40844 - DNA, 22 bp, synthetic construct
  misc_feature 1..22: note = chemically synthesized
  source 1..22: mol_type = other DNA
atacttcaccagtgactttaat

SEQ ID NO: 40845 - DNA, 22 bp, synthetic construct
  misc_feature 1..22: note = chemically synthesized
  source 1..22: mol_type = other DNA
caccagtgactttaataacatc

SEQ ID NO: 40846 - DNA, 22 bp, synthetic construct
  misc_feature 1..22: note = chemically synthesized
  source 1..22: mol_type = other DNA
accagtgactttaataacatca

SEQ ID NO: 40847 - DNA, 22 bp, synthetic construct
  misc_feature 1..22: note = chemically synthesized
  source 1..22: mol_type = other DNA
taataacatcaatcactcattt

SEQ ID NO: 40848 - DNA, 22 bp, synthetic construct
  misc_feature 1..22: note = chemically synthesized
  source 1..22: mol_type = other DNA
aataacatcaatcactcatttt

SEQ ID NO: 40849 - DNA, 22 bp, synthetic construct
  misc_feature 1..22: note = chemically synthesized
  source 1..22: mol_type = other DNA
ataacatcaatcactcatttta

SEQ ID NO: 40850 - DNA, 22 bp, synthetic construct
  misc_feature 1..22: note = chemically synthesized
  source 1..22: mol_type = other DNA
attttaaaactcttttttgatc

SEQ ID NO: 40851 - DNA, 22 bp, synthetic construct
  misc_feature 1..22: note = chemically synthesized
  source 1..22: mol_type = other DNA
taaaactcttttttgatcaatg

SEQ ID NO: 40852 - DNA, 22 bp, synthetic construct
  misc_feature 1..22: note = chemically synthesized
  source 1..22: mol_type = other DNA
aaaactcttttttgatcaatgc

SEQ ID NO: 40853 - DNA, 22 bp, synthetic construct
  misc_feature 1..22: note = chemically synthesized
  source 1..22: mol_type = other DNA
aaactcttttttgatcaatgct

SEQ ID NO: 40854 - DNA, 22 bp, synthetic construct
  misc_feature 1..22: note = chemically synthesized
  source 1..22: mol_type = other DNA
ttttttgatcaatgctatcctc

SEQ ID NO: 40855 - DNA, 22 bp, synthetic construct
  misc_feature 1..22: note = chemically synthesized
  source 1..22: mol_type = other DNA
ttttgatcaatgctatcctctt

SEQ ID NO: 40856 - DNA, 22 bp, synthetic construct
  misc_feature 1..22: note = chemically synthesized
  source 1..22: mol_type = other DNA
tttgatcaatgctatcctctta

SEQ ID NO: 40857 - DNA, 22 bp, synthetic construct
  misc_feature 1..22: note = chemically synthesized
  source 1..22: mol_type = other DNA
ttgatcaatgctatcctcttag

SEQ ID NO: 40858 - DNA, 22 bp, synthetic construct
  misc_feature 1..22: note = chemically synthesized
  source 1..22: mol_type = other DNA
tgatcaatgctatcctcttaga

SEQ ID NO: 40859 - DNA, 22 bp, synthetic construct
  misc_feature 1..22: note = chemically synthesized
  source 1..22: mol_type = other DNA
gatcaatgctatcctcttagag

SEQ ID NO: 40860 - DNA, 22 bp, synthetic construct
  misc_feature 1..22: note = chemically synthesized
  source 1..22: mol_type = other DNA
atcaatgctatcctcttagagc

SEQ ID NO: 40861 - DNA, 22 bp, synthetic construct
  misc_feature 1..22: note = chemically synthesized
  source 1..22: mol_type = other DNA
tcctcttagagccttgattact

SEQ ID NO: 40862 - DNA, 22 bp, synthetic construct
  misc_feature 1..22: note = chemically synthesized
  source 1..22: mol_type = other DNA
ttagagccttgattactcaaac

SEQ ID NO: 40863 - DNA, 22 bp, synthetic construct
  misc_feature 1..22: note = chemically synthesized
  source 1..22: mol_type = other DNA
agagccttgattactcaaacaa

SEQ ID NO: 40864 - DNA, 22 bp, synthetic construct
  misc_feature 1..22: note = chemically synthesized
  source 1..22: mol_type = other DNA
gagccttgattactcaaacaac

SEQ ID NO: 40865 - DNA, 22 bp, synthetic construct
  misc_feature 1..22: note = chemically synthesized
  source 1..22: mol_type = other DNA
gattactcaaacaacaggttac

SEQ ID NO: 40866 - DNA, 22 bp, synthetic construct
  misc_feature 1..22: note = chemically synthesized
  source 1..22: mol_type = other DNA
attactcaaacaacaggttact

SEQ ID NO: 40867 - DNA, 22 bp, synthetic construct
  misc_feature 1..22: note = chemically synthesized
  source 1..22: mol_type = other DNA
ctcaaacaacaggttactaact

SEQ ID NO: 40868 - DNA, 22 bp, synthetic construct
  misc_feature 1..22: note = chemically synthesized
  source 1..22: mol_type = other DNA
aaacaacaggttactaacttca

SEQ ID NO: 40869 - DNA, 22 bp, synthetic construct
  misc_feature 1..22: note = chemically synthesized
  source 1..22: mol_type = other DNA
ctaacttcaccttttaagagtt

SEQ ID NO: 40870 - DNA, 22 bp, synthetic construct
  misc_feature 1..22: note = chemically synthesized
  source 1..22: mol_type = other DNA
acttcaccttttaagagttctc

SEQ ID NO: 40871 - DNA, 22 bp, synthetic construct
  misc_feature 1..22: note = chemically synthesized
  source 1..22: mol_type = other DNA
caccttttaagagttctcctcc

SEQ ID NO: 40872 - DNA, 22 bp, synthetic construct
  misc_feature 1..22: note = chemically synthesized
  source 1..22: mol_type = other DNA
accttttaagagttctcctcct

SEQ ID NO: 40873 - DNA, 22 bp, synthetic construct
  misc_feature 1..22: note = chemically synthesized
  source 1..22: mol_type = other DNA
ttaagagttctcctcctaggct

SEQ ID NO: 40874 - DNA, 22 bp, synthetic construct
  misc_feature 1..22: note = chemically synthesized
  source 1..22: mol_type = other DNA
taagagttctcctcctaggctt

SEQ ID NO: 40875 - DNA, 22 bp, synthetic construct
  misc_feature 1..22: note = chemically synthesized
  source 1..22: mol_type = other DNA
aagagttctcctcctaggcttt

SEQ ID NO: 40876 - DNA, 22 bp, synthetic construct
  misc_feature 1..22: note = chemically synthesized
  source 1..22: mol_type = other DNA
agagttctcctcctaggctttt

SEQ ID NO: 40877 - DNA, 22 bp, synthetic construct
  misc_feature 1..22: note = chemically synthesized
  source 1..22: mol_type = other DNA
tcctcctaggctttttctcaat

SEQ ID NO: 40878 - DNA, 22 bp, synthetic construct
  misc_feature 1..22: note = chemically synthesized
  source 1..22: mol_type = other DNA
ctcctaggctttttctcaataa

SEQ ID NO: 40879 - DNA, 22 bp, synthetic construct
  misc_feature 1..22: note = chemically synthesized
  source 1..22: mol_type = other DNA
ctaggctttttctcaataaagg

SEQ ID NO: 40880 - DNA, 22 bp, synthetic construct
  misc_feature 1..22: note = chemically synthesized
  source 1..22: mol_type = other DNA
ggctttttctcaataaagggag

SEQ ID NO: 40881 - DNA, 22 bp, synthetic construct
  misc_feature 1..22: note = chemically synthesized
  source 1..22: mol_type = other DNA
tttctcaataaagggaggaagt

SEQ ID NO: 40882 - DNA, 22 bp, synthetic construct
  misc_feature 1..22: note = chemically synthesized
  source 1..22: mol_type = other DNA
ttctcaataaagggaggaagta

SEQ ID NO: 40883 - DNA, 22 bp, synthetic construct
  misc_feature 1..22: note = chemically synthesized
  source 1..22: mol_type = other DNA
tctcaataaagggaggaagtag

SEQ ID NO: 40884 - DNA, 22 bp, synthetic construct
  misc_feature 1..22: note = chemically synthesized
  source 1..22: mol_type = other DNA
ctcaataaagggaggaagtaga

SEQ ID NO: 40885 - DNA, 22 bp, synthetic construct
  misc_feature 1..22: note = chemically synthesized
  source 1..22: mol_type = other DNA
tcaataaagggaggaagtagag

SEQ ID NO: 40886 - DNA, 22 bp, synthetic construct
  misc_feature 1..22: note = chemically synthesized
  source 1..22: mol_type = other DNA
aataaagggaggaagtagagat

SEQ ID NO: 40887 - DNA, 22 bp, synthetic construct
  misc_feature 1..22: note = chemically synthesized
  source 1..22: mol_type = other DNA
tgcgtgcccctttatctataaa

SEQ ID NO: 40888 - DNA, 22 bp, synthetic construct
  misc_feature 1..22: note = chemically synthesized
  source 1..22: mol_type = other DNA
gcgtgcccctttatctataaaa

SEQ ID NO: 40889 - DNA, 22 bp, synthetic construct
  misc_feature 1..22: note = chemically synthesized
  source 1..22: mol_type = other DNA
cgtgcccctttatctataaaaa

SEQ ID NO: 40890 - DNA, 22 bp, synthetic construct
  misc_feature 1..22: note = chemically synthesized
  source 1..22: mol_type = other DNA
tatctataaaaatgccagccac

SEQ ID NO: 40891 - DNA, 22 bp, synthetic construct
  misc_feature 1..22: note = chemically synthesized
  source 1..22: mol_type = other DNA
atctataaaaatgccagccacc

SEQ ID NO: 40892 - DNA, 22 bp, synthetic construct
  misc_feature 1..22: note = chemically synthesized
  source 1..22: mol_type = other DNA
tctataaaaatgccagccacca

SEQ ID NO: 40893 - DNA, 22 bp, synthetic construct
  misc_feature 1..22: note = chemically synthesized
  source 1..22: mol_type = other DNA
taaaaatgccagccaccaatct

SEQ ID NO: 40894 - DNA, 22 bp, synthetic construct
  misc_feature 1..22: note = chemically synthesized
  source 1..22: mol_type = other DNA
tcaggcctaaacaaaatttttc

SEQ ID NO: 40895 - DNA, 22 bp, synthetic construct
  misc_feature 1..22: note = chemically synthesized
  source 1..22: mol_type = other DNA
aacaaaatttttctgcaagctg

SEQ ID NO: 40896 - DNA, 22 bp, synthetic construct
  misc_feature 1..22: note = chemically synthesized
  source 1..22: mol_type = other DNA
ttctgcaagctgtgtctttaac

SEQ ID NO: 40897 - DNA, 22 bp, synthetic construct
  misc_feature 1..22: note = chemically synthesized
  source 1..22: mol_type = other DNA
tctgcaagctgtgtctttaaca

SEQ ID NO: 40898 - DNA, 22 bp, synthetic construct
  misc_feature 1..22: note = chemically synthesized
  source 1..22: mol_type = other DNA
ctgcaagctgtgtctttaacat

SEQ ID NO: 40899 - DNA, 22 bp, synthetic construct
  misc_feature 1..22: note = chemically synthesized
  source 1..22: mol_type = other DNA
tgcaagctgtgtctttaacata

SEQ ID NO: 40900 - DNA, 22 bp, synthetic construct
  misc_feature 1..22: note = chemically synthesized
  source 1..22: mol_type = other DNA
caagctgtgtctttaacataag

SEQ ID NO: 40901 - DNA, 22 bp, synthetic construct
  misc_feature 1..22: note = chemically synthesized
  source 1..22: mol_type = other DNA
tgtctttaacataagcaaagca

SEQ ID NO: 40902 - DNA, 22 bp, synthetic construct
  misc_feature 1..22: note = chemically synthesized
  source 1..22: mol_type = other DNA
taacataagcaaagcatataat

SEQ ID NO: 40903 - DNA, 22 bp, synthetic construct
  misc_feature 1..22: note = chemically synthesized
  source 1..22: mol_type = other DNA
aacataagcaaagcatataatt

SEQ ID NO: 40904 - DNA, 22 bp, synthetic construct
  misc_feature 1..22: note = chemically synthesized
  source 1..22: mol_type = other DNA
acataagcaaagcatataattc

SEQ ID NO: 40905 - DNA, 22 bp, synthetic construct
  misc_feature 1..22: note = chemically synthesized
  source 1..22: mol_type = other DNA
caaaaaaaaaaaatcttgcttt

SEQ ID NO: 40906 - DNA, 22 bp, synthetic construct
  misc_feature 1..22: note = chemically synthesized
  source 1..22: mol_type = other DNA
gcttttctgaaaagcaactaag

SEQ ID NO: 40907 - DNA, 22 bp, synthetic construct
  misc_feature 1..22: note = chemically synthesized
  source 1..22: mol_type = other DNA
cttttctgaaaagcaactaagc

SEQ ID NO: 40908 - DNA, 22 bp, synthetic construct
  misc_feature 1..22: note = chemically synthesized
  source 1..22: mol_type = other DNA
ttctgaaaagcaactaagccaa

SEQ ID NO: 40909 - DNA, 22 bp, synthetic construct
  misc_feature 1..22: note = chemically synthesized
  source 1..22: mol_type = other DNA
tctgaaaagcaactaagccaaa

SEQ ID NO: 40910 - DNA, 22 bp, synthetic construct
  misc_feature 1..22: note = chemically synthesized
  source 1..22: mol_type = other DNA
ctgaaaagcaactaagccaaag

SEQ ID NO: 40911 - DNA, 22 bp, synthetic construct
  misc_feature 1..22: note = chemically synthesized
  source 1..22: mol_type = other DNA
tgaaaagcaactaagccaaaga

SEQ ID NO: 40912 - DNA, 22 bp, synthetic construct
  misc_feature 1..22: note = chemically synthesized
  source 1..22: mol_type = other DNA
aaaagcaactaagccaaagaca

SEQ ID NO: 40913 - DNA, 22 bp, synthetic construct
  misc_feature 1..22: note = chemically synthesized
  source 1..22: mol_type = other DNA
agccaaagacattgtgttccat

SEQ ID NO: 40914 - DNA, 22 bp, synthetic construct
  misc_feature 1..22: note = chemically synthesized
  source 1..22: mol_type = other DNA
tgttccatctttgtgttgaaat

SEQ ID NO: 40915 - DNA, 22 bp, synthetic construct
  misc_feature 1..22: note = chemically synthesized
  source 1..22: mol_type = other DNA
catctttgtgttgaaatgcaga

SEQ ID NO: 40916 - DNA, 22 bp, synthetic construct
  misc_feature 1..22: note = chemically synthesized
  source 1..22: mol_type = other DNA
tgtgttgaaatgcagatttccc

SEQ ID NO: 40917 - DNA, 22 bp, synthetic construct
  misc_feature 1..22: note = chemically synthesized
  source 1..22: mol_type = other DNA
gtgttgaaatgcagatttccca

SEQ ID NO: 40918 - DNA, 22 bp, synthetic construct
  misc_feature 1..22: note = chemically synthesized
  source 1..22: mol_type = other DNA
tgttgaaatgcagatttcccac

SEQ ID NO: 40919 - DNA, 22 bp, synthetic construct
  misc_feature 1..22: note = chemically synthesized
  source 1..22: mol_type = other DNA
aaatgcagatttcccactaaaa

SEQ ID NO: 40920 - DNA, 22 bp, synthetic construct
  misc_feature 1..22: note = chemically synthesized
  source 1..22: mol_type = other DNA
cccactaaaaggcaaatccttc

SEQ ID NO: 40921 - DNA, 22 bp, synthetic construct
  misc_feature 1..22: note = chemically synthesized
  source 1..22: mol_type = other DNA
ccactaaaaggcaaatccttca

SEQ ID NO: 40922 - DNA, 22 bp, synthetic construct
  misc_feature 1..22: note = chemically synthesized
  source 1..22: mol_type = other DNA
aaaggcaaatccttcatttcaa

SEQ ID NO: 40923 - DNA, 22 bp, synthetic construct
  misc_feature 1..22: note = chemically synthesized
  source 1..22: mol_type = other DNA
catttcaaaaggttgaatagga

SEQ ID NO: 40924 - DNA, 22 bp, synthetic construct
  misc_feature 1..22: note = chemically synthesized
  source 1..22: mol_type = other DNA
atttcaaaaggttgaataggat

SEQ ID NO: 40925 - DNA, 22 bp, synthetic construct
  misc_feature 1..22: note = chemically synthesized
  source 1..22: mol_type = other DNA
caaaaggttgaataggatggta

SEQ ID NO: 40926 - DNA, 22 bp, synthetic construct
  misc_feature 1..22: note = chemically synthesized
  source 1..22: mol_type = other DNA
aaaaggttgaataggatggtac

SEQ ID NO: 40927 - DNA, 22 bp, synthetic construct
  misc_feature 1..22: note = chemically synthesized
  source 1..22: mol_type = other DNA
aataggatggtacttaaaaaaa

SEQ ID NO: 40928 - DNA, 22 bp, synthetic construct
  misc_feature 1..22: note = chemically synthesized
  source 1..22: mol_type = other DNA
aaaaaaagaattccagctggtt

SEQ ID NO: 40929 - DNA, 22 bp, synthetic construct
  misc_feature 1..22: note = chemically synthesized
  source 1..22: mol_type = other DNA
aaaaaagaattccagctggtta

SEQ ID NO: 40930 - DNA, 22 bp, synthetic construct
  misc_feature 1..22: note = chemically synthesized
  source 1..22: mol_type = other DNA
cagctggttaaatttagggtgt

SEQ ID NO: 40931 - DNA, 22 bp, synthetic construct
  misc_feature 1..22: note = chemically synthesized
  source 1..22: mol_type = other DNA
gttaaatttagggtgttaaaaa

SEQ ID NO: 40932 - DNA, 22 bp, synthetic construct
  misc_feature 1..22: note = chemically synthesized
  source 1..22: mol_type = other DNA
aatttagggtgttaaaaaaagt

SEQ ID NO: 40933 - DNA, 22 bp, synthetic construct
  misc_feature 1..22: note = chemically synthesized
  source 1..22: mol_type = other DNA
agggtgttaaaaaaagttcact

SEQ ID NO: 40934 - DNA, 22 bp, synthetic construct
  misc_feature 1..22: note = chemically synthesized
  source 1..22: mol_type = other DNA
gggtgttaaaaaaagttcactc

SEQ ID NO: 40935 - DNA, 22 bp, synthetic construct
  misc_feature 1..22: note = chemically synthesized
  source 1..22: mol_type = other DNA
aaaaaagttcactccaataata

SEQ ID NO: 40936 - DNA, 22 bp, synthetic construct
  misc_feature 1..22: note = chemically synthesized
  source 1..22: mol_type = other DNA
actccaataatattctttggct

SEQ ID NO: 40937 - DNA, 22 bp, synthetic construct
  misc_feature 1..22: note = chemically synthesized
  source 1..22: mol_type = other DNA
caataatattctttggctctgg

SEQ ID NO: 40938 - DNA, 22 bp, synthetic construct
  misc_feature 1..22: note = chemically synthesized
  source 1..22: mol_type = other DNA
tttggctctgggcccaaagtat

SEQ ID NO: 40939 - DNA, 22 bp, synthetic construct
  misc_feature 1..22: note = chemically synthesized
  source 1..22: mol_type = other DNA
tggctctgggcccaaagtattt

SEQ ID NO: 40940 - DNA, 22 bp, synthetic construct
  misc_feature 1..22: note = chemically synthesized
  source 1..22: mol_type = other DNA
ggctctgggcccaaagtatttt

SEQ ID NO: 40941 - DNA, 22 bp, synthetic construct
  misc_feature 1..22: note = chemically synthesized
  source 1..22: mol_type = other DNA
gctctgggcccaaagtattttc

SEQ ID NO: 40942 - DNA, 22 bp, synthetic construct
  misc_feature 1..22: note = chemically synthesized
  source 1..22: mol_type = other DNA
tgggcccaaagtattttcactt

SEQ ID NO: 40943 - DNA, 22 bp, synthetic construct
  misc_feature 1..22: note = chemically synthesized
  source 1..22: mol_type = other DNA
ggcccaaagtattttcacttga

SEQ ID NO: 40944 - DNA, 22 bp, synthetic construct
  misc_feature 1..22: note = chemically synthesized
  source 1..22: mol_type = other DNA
tcacttgatcgtgaattagata

SEQ ID NO: 40945 - DNA, 22 bp, synthetic construct
  misc_feature 1..22: note = chemically synthesized
  source 1..22: mol_type = other DNA
cacttgatcgtgaattagataa

SEQ ID NO: 40946 - DNA, 22 bp, synthetic construct
  misc_feature 1..22: note = chemically synthesized
  source 1..22: mol_type = other DNA
acttgatcgtgaattagataaa

SEQ ID NO: 40947 - DNA, 22 bp, synthetic construct
  misc_feature 1..22: note = chemically synthesized
  source 1..22: mol_type = other DNA
gatcgtgaattagataaatttt

SEQ ID NO: 40948 - DNA, 22 bp, synthetic construct
  misc_feature 1..22: note = chemically synthesized
  source 1..22: mol_type = other DNA
atcgtgaattagataaattttt

SEQ ID NO: 40949 - DNA, 22 bp, synthetic construct
  misc_feature 1..22: note = chemically synthesized
  source 1..22: mol_type = other DNA
gataaatttttattacacttta

SEQ ID NO: 40950 - DNA, 22 bp, synthetic construct
  misc_feature 1..22: note = chemically synthesized
  source 1..22: mol_type = other DNA
ttattacactttaagcttttgc

SEQ ID NO: 40951 - DNA, 22 bp, synthetic construct
  misc_feature 1..22: note = chemically synthesized
  source 1..22: mol_type = other DNA
tattacactttaagcttttgcc

SEQ ID NO: 40952 - DNA, 22 bp, synthetic construct
  misc_feature 1..22: note = chemically synthesized
  source 1..22: mol_type = other DNA
attacactttaagcttttgcct

SEQ ID NO: 40953 - DNA, 22 bp, synthetic construct
  misc_feature 1..22: note = chemically synthesized
  source 1..22: mol_type = other DNA
ttacactttaagcttttgcctt

SEQ ID NO: 40954 - DNA, 22 bp, synthetic construct
  misc_feature 1..22: note = chemically synthesized
  source 1..22: mol_type = other DNA
cactttaagcttttgccttaga

SEQ ID NO: 40955 - DNA, 22 bp, synthetic construct
  misc_feature 1..22: note = chemically synthesized
  source 1..22: mol_type = other DNA
taagcttttgccttagaatggc

SEQ ID NO: 40956 - DNA, 22 bp, synthetic construct
  misc_feature 1..22: note = chemically synthesized
  source 1..22: mol_type = other DNA
aagcttttgccttagaatggcg

SEQ ID NO: 40957 - DNA, 22 bp, synthetic construct
  misc_feature 1..22: note = chemically synthesized
  source 1..22: mol_type = other DNA
agcttttgccttagaatggcgg

SEQ ID NO: 40958 - DNA, 22 bp, synthetic construct
  misc_feature 1..22: note = chemically synthesized
  source 1..22: mol_type = other DNA
ttgccttagaatggcggaactt

SEQ ID NO: 40959 - DNA, 22 bp, synthetic construct
  misc_feature 1..22: note = chemically synthesized
  source 1..22: mol_type = other DNA
tgccttagaatggcggaactta

SEQ ID NO: 40960 - DNA, 22 bp, synthetic construct
  misc_feature 1..22: note = chemically synthesized
  source 1..22: mol_type = other DNA
gccttagaatggcggaacttat

SEQ ID NO: 40961 - DNA, 22 bp, synthetic construct
  misc_feature 1..22: note = chemically synthesized
  source 1..22: mol_type = other DNA
ccttagaatggcggaacttatc

SEQ ID NO: 40962 - DNA, 22 bp, synthetic construct
  misc_feature 1..22: note = chemically synthesized
  source 1..22: mol_type = other DNA
agaatggcggaacttatctagg

SEQ ID NO: 40963 - DNA, 22 bp, synthetic construct
  misc_feature 1..22: note = chemically synthesized
  source 1..22: mol_type = other DNA
gaatggcggaacttatctagga

SEQ ID NO: 40964 - DNA, 22 bp, synthetic construct
  misc_feature 1..22: note = chemically synthesized
  source 1..22: mol_type = other DNA
atctaggagactgagagggcag

SEQ ID NO: 40965 - DNA, 22 bp, synthetic construct
  misc_feature 1..22: note = chemically synthesized
  source 1..22: mol_type = other DNA
tctaggagactgagagggcagc

SEQ ID NO: 40966 - DNA, 22 bp, synthetic construct
  misc_feature 1..22: note = chemically synthesized
  source 1..22: mol_type = other DNA
ggagactgagagggcagctgca

SEQ ID NO: 40967 - DNA, 22 bp, synthetic construct
  misc_feature 1..22: note = chemically synthesized
  source 1..22: mol_type = other DNA
agagggcagctgcataaaaaga

SEQ ID NO: 40968 - DNA, 22 bp, synthetic construct
  misc_feature 1..22: note = chemically synthesized
  source 1..22: mol_type = other DNA
cataaaaagacaaattgtctta

SEQ ID NO: 40969 - DNA, 22 bp, synthetic construct
  misc_feature 1..22: note = chemically synthesized
  source 1..22: mol_type = other DNA
tcttaggacaatttttttttgt

SEQ ID NO: 40970 - DNA, 22 bp, synthetic construct
  misc_feature 1..22: note = chemically synthesized
  source 1..22: mol_type = other DNA
aggacaatttttttttgtttgt

SEQ ID NO: 40971 - DNA, 22 bp, synthetic construct
  misc_feature 1..22: note = chemically synthesized
  source 1..22: mol_type = other DNA
ggacaatttttttttgtttgtt

SEQ ID NO: 40972 - DNA, 22 bp, synthetic construct
  misc_feature 1..22: note = chemically synthesized
  source 1..22: mol_type = other DNA
ttttttgtttgtttaatcacat

SEQ ID NO: 40973 - DNA, 22 bp, synthetic construct
  misc_feature 1..22: note = chemically synthesized
  source 1..22: mol_type = other DNA
tttttgtttgtttaatcacata

SEQ ID NO: 40974 - DNA, 22 bp, synthetic construct
  misc_feature 1..22: note = chemically synthesized
  source 1..22: mol_type = other DNA
ttttgtttgtttaatcacatac

SEQ ID NO: 40975 - DNA, 22 bp, synthetic construct
  misc_feature 1..22: note = chemically synthesized
  source 1..22: mol_type = other DNA
tttgtttgtttaatcacatacc

SEQ ID NO: 40976 - DNA, 22 bp, synthetic construct
  misc_feature 1..22: note = chemically synthesized
  source 1..22: mol_type = other DNA
ttgtttgtttaatcacatacct

SEQ ID NO: 40977 - DNA, 22 bp, synthetic construct
  misc_feature 1..22: note = chemically synthesized
  source 1..22: mol_type = other DNA
tgtttgtttaatcacatacctc

SEQ ID NO: 40978 - DNA, 22 bp, synthetic construct
  misc_feature 1..22: note = chemically synthesized
  source 1..22: mol_type = other DNA
gtttgtttaatcacatacctca

SEQ ID NO: 40979 - DNA, 22 bp, synthetic construct
  misc_feature 1..22: note = chemically synthesized
  source 1..22: mol_type = other DNA
tttgtttaatcacatacctcac

SEQ ID NO: 40980 - DNA, 22 bp, synthetic construct
  misc_feature 1..22: note = chemically synthesized
  source 1..22: mol_type = other DNA
gtttaatcacatacctcactat

SEQ ID NO: 40981 - DNA, 22 bp, synthetic construct
  misc_feature 1..22: note = chemically synthesized
  source 1..22: mol_type = other DNA
tttaatcacatacctcactatg

SEQ ID NO: 40982 - DNA, 22 bp, synthetic construct
  misc_feature 1..22: note = chemically synthesized
  source 1..22: mol_type = other DNA
aatcacatacctcactatgcaa

SEQ ID NO: 40983 - DNA, 22 bp, synthetic construct
  misc_feature 1..22: note = chemically synthesized
  source 1..22: mol_type = other DNA
atcacatacctcactatgcaaa

SEQ ID NO: 40984 - DNA, 22 bp, synthetic construct
  misc_feature 1..22: note = chemically synthesized
  source 1..22: mol_type = other DNA
actatgcaaaatgtgtgttccc

SEQ ID NO: 40985 - DNA, 22 bp, synthetic construct
  misc_feature 1..22: note = chemically synthesized
  source 1..22: mol_type = other DNA
tgcaaaatgtgtgttcccagga

SEQ ID NO: 40986 - DNA, 22 bp, synthetic construct
  misc_feature 1..22: note = chemically synthesized
  source 1..22: mol_type = other DNA
ccaggataaattccattcattc

SEQ ID NO: 40987 - DNA, 22 bp, synthetic construct
  misc_feature 1..22: note = chemically synthesized
  source 1..22: mol_type = other DNA
cattcattcattctctcatgca

SEQ ID NO: 40988 - DNA, 22 bp, synthetic construct
  misc_feature 1..22: note = chemically synthesized
  source 1..22: mol_type = other DNA
attcattctctcatgcattcat

SEQ ID NO: 40989 - DNA, 22 bp, synthetic construct
  misc_feature 1..22: note = chemically synthesized
  source 1..22: mol_type = other DNA
attctctcatgcattcattcaa

SEQ ID NO: 40990 - DNA, 22 bp, synthetic construct
  misc_feature 1..22: note = chemically synthesized
  source 1..22: mol_type = other DNA
tctcatgcattcattcaacctc

SEQ ID NO: 40991 - DNA, 22 bp, synthetic construct
  misc_feature 1..22: note = chemically synthesized
  source 1..22: mol_type = other DNA
tcatgcattcattcaacctctc

SEQ ID NO: 40992 - DNA, 22 bp, synthetic construct
  misc_feature 1..22: note = chemically synthesized
  source 1..22: mol_type = other DNA
atgcattcattcaacctctcat

SEQ ID NO: 40993 - DNA, 22 bp, synthetic construct
  misc_feature 1..22: note = chemically synthesized
  source 1..22: mol_type = other DNA
attcaacctctcatgcattcat

SEQ ID NO: 40994 - DNA, 22 bp, synthetic construct
  misc_feature 1..22: note = chemically synthesized
  source 1..22: mol_type = other DNA
aacctctcatgcattcattcaa

SEQ ID NO: 40995 - DNA, 22 bp, synthetic construct
  misc_feature 1..22: note = chemically synthesized
  source 1..22: mol_type = other DNA
tcatgcattcattcaacaaata

SEQ ID NO: 40996 - DNA, 22 bp, synthetic construct
  misc_feature 1..22: note = chemically synthesized
  source 1..22: mol_type = other DNA
atgcattcattcaacaaatatt

SEQ ID NO: 40997 - DNA, 22 bp, synthetic construct
  misc_feature 1..22: note = chemically synthesized
  source 1..22: mol_type = other DNA
attcaacaaatatttaccgagt

SEQ ID NO: 40998 - DNA, 22 bp, synthetic construct
  misc_feature 1..22: note = chemically synthesized
  source 1..22: mol_type = other DNA
aacaaatatttaccgagtgcct

SEQ ID NO: 40999 - DNA, 22 bp, synthetic construct
  misc_feature 1..22: note = chemically synthesized
  source 1..22: mol_type = other DNA
accgagtgcctacaatgcccaa

SEQ ID NO: 41000 - DNA, 22 bp, synthetic construct
  misc_feature 1..22: note = chemically synthesized
  source 1..22: mol_type = other DNA
ccgagtgcctacaatgcccaaa

SEQ ID NO: 41001 - DNA, 22 bp, synthetic construct
  misc_feature 1..22: note = chemically synthesized
  source 1..22: mol_type = other DNA
caatgcccaaagcaatgggcta

SEQ ID NO: 41002 - DNA, 22 bp, synthetic construct
  misc_feature 1..22: note = chemically synthesized
  source 1..22: mol_type = other DNA
gccgctgtgggcagtacaaaga

SEQ ID NO: 41003 - DNA, 22 bp, synthetic construct
  misc_feature 1..22: note = chemically synthesized
  source 1..22: mol_type = other DNA
tgggcagtacaaagaaaacacg

SEQ ID NO: 41004 - DNA, 22 bp, synthetic construct
  misc_feature 1..22: note = chemically synthesized
  source 1..22: mol_type = other DNA
ctcccacagcaggcttcattta

SEQ ID NO: 41005 - DNA, 22 bp, synthetic construct
  misc_feature 1..22: note = chemically synthesized
  source 1..22: mol_type = other DNA
tcccacagcaggcttcatttag

SEQ ID NO: 41006 - DNA, 22 bp, synthetic construct
  misc_feature 1..22: note = chemically synthesized
  source 1..22: mol_type = other DNA
ccacagcaggcttcatttagta

SEQ ID NO: 41007 - DNA, 22 bp, synthetic construct
  misc_feature 1..22: note = chemically synthesized
  source 1..22: mol_type = other DNA
catttagtagaaaaggtaaggc

SEQ ID NO: 41008 - DNA, 22 bp, synthetic construct
  misc_feature 1..22: note = chemically synthesized
  source 1..22: mol_type = other DNA
atttagtagaaaaggtaaggcc

SEQ ID NO: 41009 - DNA, 22 bp, synthetic construct
  misc_feature 1..22: note = chemically synthesized
  source 1..22: mol_type = other DNA
agtagaaaaggtaaggcctgca

SEQ ID NO: 41010 - DNA, 22 bp, synthetic construct
  misc_feature 1..22: note = chemically synthesized
  source 1..22: mol_type = other DNA
gtagaaaaggtaaggcctgcac

SEQ ID NO: 41011 - DNA, 22 bp, synthetic construct
  misc_feature 1..22: note = chemically synthesized
  source 1..22: mol_type = other DNA
cacagaaattgctctaccccca

SEQ ID NO: 41012 - DNA, 22 bp, synthetic construct
  misc_feature 1..22: note = chemically synthesized
  source 1..22: mol_type = other DNA
ctctacccccatgtagaaagtg

SEQ ID NO: 41013 - DNA, 22 bp, synthetic construct
  misc_feature 1..22: note = chemically synthesized
  source 1..22: mol_type = other DNA
tacccccatgtagaaagtgtgt

SEQ ID NO: 41014 - DNA, 22 bp, synthetic construct
  misc_feature 1..22: note = chemically synthesized
  source 1..22: mol_type = other DNA
cccccatgtagaaagtgtgtca

SEQ ID NO: 41015 - DNA, 22 bp, synthetic construct
  misc_feature 1..22: note = chemically synthesized
  source 1..22: mol_type = other DNA
ctatggaaattcaaaggaagag

SEQ ID NO: 41016 - DNA, 22 bp, synthetic construct
  misc_feature 1..22: note = chemically synthesized
  source 1..22: mol_type = other DNA
tggaaattcaaaggaagagaaa

SEQ ID NO: 41017 - DNA, 22 bp, synthetic construct
  misc_feature 1..22: note = chemically synthesized
  source 1..22: mol_type = other DNA
aaaggaagagaaattatttcca

SEQ ID NO: 41018 - DNA, 22 bp, synthetic construct
  misc_feature 1..22: note = chemically synthesized
  source 1..22: mol_type = other DNA
tttccatttggaagggagggag

SEQ ID NO: 41019 - DNA, 22 bp, synthetic construct
  misc_feature 1..22: note = chemically synthesized
  source 1..22: mol_type = other DNA
ccatttggaagggagggagaga

SEQ ID NO: 41020 - DNA, 22 bp, synthetic construct
  misc_feature 1..22: note = chemically synthesized
  source 1..22: mol_type = other DNA
catttggaagggagggagagag

SEQ ID NO: 41021 - DNA, 22 bp, synthetic construct
  misc_feature 1..22: note = chemically synthesized
  source 1..22: mol_type = other DNA
ggaagggagggagagaggcttt

SEQ ID NO: 41022 - DNA, 22 bp, synthetic construct
  misc_feature 1..22: note = chemically synthesized
  source 1..22: mol_type = other DNA
gaagggagggagagaggctttg

SEQ ID NO: 41023 - DNA, 22 bp, synthetic construct
  misc_feature 1..22: note = chemically synthesized
  source 1..22: mol_type = other DNA
tgggaaagaggaaaacttatga

SEQ ID NO: 41024 - DNA, 22 bp, synthetic construct
  misc_feature 1..22: note = chemically synthesized
  source 1..22: mol_type = other DNA
gggaaagaggaaaacttatgag

SEQ ID NO: 41025 - DNA, 22 bp, synthetic construct
  misc_feature 1..22: note = chemically synthesized
  source 1..22: mol_type = other DNA
ggaaagaggaaaacttatgagt

SEQ ID NO: 41026 - DNA, 22 bp, synthetic construct
  misc_feature 1..22: note = chemically synthesized
  source 1..22: mol_type = other DNA
atgagttaaacctggagagcca

SEQ ID NO: 41027 - DNA, 22 bp, synthetic construct
  misc_feature 1..22: note = chemically synthesized
  source 1..22: mol_type = other DNA
tgagttaaacctggagagccaa

SEQ ID NO: 41028 - DNA, 22 bp, synthetic construct
  misc_feature 1..22: note = chemically synthesized
  source 1..22: mol_type = other DNA
aacctggagagccaagagaaag

SEQ ID NO: 41029 - DNA, 22 bp, synthetic construct
  misc_feature 1..22: note = chemically synthesized
  source 1..22: mol_type = other DNA
gagagccaagagaaaggatatc

SEQ ID NO: 41030 - DNA, 22 bp, synthetic construct
  misc_feature 1..22: note = chemically synthesized
  source 1..22: mol_type = other DNA
gataaaaagaaaaagcaggtaa

SEQ ID NO: 41031 - DNA, 22 bp, synthetic construct
  misc_feature 1..22: note = chemically synthesized
  source 1..22: mol_type = other DNA
agagagaagcaaagcccaaggt

SEQ ID NO: 41032 - DNA, 22 bp, synthetic construct
  misc_feature 1..22: note = chemically synthesized
  source 1..22: mol_type = other DNA
gagagaagcaaagcccaaggtg

SEQ ID NO: 41033 - DNA, 22 bp, synthetic construct
  misc_feature 1..22: note = chemically synthesized
  source 1..22: mol_type = other DNA
cattcacatcaaaatattgcac

SEQ ID NO: 41034 - DNA, 22 bp, synthetic construct
  misc_feature 1..22: note = chemically synthesized
  source 1..22: mol_type = other DNA
acatcaaaatattgcacactga

SEQ ID NO: 41035 - DNA, 22 bp, synthetic construct
  misc_feature 1..22: note = chemically synthesized
  source 1..22: mol_type = other DNA
cacactgattcatccagttgac

SEQ ID NO: 41036 - DNA, 22 bp, synthetic construct
  misc_feature 1..22: note = chemically synthesized
  source 1..22: mol_type = other DNA
attcatccagttgacagcggag

SEQ ID NO: 41037 - DNA, 22 bp, synthetic construct
  misc_feature 1..22: note = chemically synthesized
  source 1..22: mol_type = other DNA
atccagttgacagcggaggata

SEQ ID NO: 41038 - DNA, 22 bp, synthetic construct
  misc_feature 1..22: note = chemically synthesized
  source 1..22: mol_type = other DNA
acagcggaggatacgaccatct

SEQ ID NO: 41039 - DNA, 22 bp, synthetic construct
  misc_feature 1..22: note = chemically synthesized
  source 1..22: mol_type = other DNA
aataaatcctctgaagatttct

SEQ ID NO: 41040 - DNA, 22 bp, synthetic construct
  misc_feature 1..22: note = chemically synthesized
  source 1..22: mol_type = other DNA
tgaagatttctgtgacatcttc

SEQ ID NO: 41041 - DNA, 22 bp, synthetic construct
  misc_feature 1..22: note = chemically synthesized
  source 1..22: mol_type = other DNA
aagatttctgtgacatcttcag

SEQ ID NO: 41042 - DNA, 22 bp, synthetic construct
  misc_feature 1..22: note = chemically synthesized
  source 1..22: mol_type = other DNA
ctgtgacatcttcagctttcac

SEQ ID NO: 41043 - DNA, 22 bp, synthetic construct
  misc_feature 1..22: note = chemically synthesized
  source 1..22: mol_type = other DNA
tgtgacatcttcagctttcaca

SEQ ID NO: 41044 - DNA, 22 bp, synthetic construct
  misc_feature 1..22: note = chemically synthesized
  source 1..22: mol_type = other DNA
tgacatcttcagctttcacaag

SEQ ID NO: 41045 - DNA, 22 bp, synthetic construct
  misc_feature 1..22: note = chemically synthesized
  source 1..22: mol_type = other DNA
cagctttcacaagtgcgtattt

SEQ ID NO: 41046 - DNA, 22 bp, synthetic construct
  misc_feature 1..22: note = chemically synthesized
  source 1..22: mol_type = other DNA
agctttcacaagtgcgtatttt

SEQ ID NO: 41047 - DNA, 22 bp, synthetic construct
  misc_feature 1..22: note = chemically synthesized
  source 1..22: mol_type = other DNA
tcacaagtgcgtattttccaat

SEQ ID NO: 41048 - DNA, 22 bp, synthetic construct
  misc_feature 1..22: note = chemically synthesized
  source 1..22: mol_type = other DNA
cacaagtgcgtattttccaatt

SEQ ID NO: 41049 - DNA, 22 bp, synthetic construct
  misc_feature 1..22: note = chemically synthesized
  source 1..22: mol_type = other DNA
acaagtgcgtattttccaattt

SEQ ID NO: 41050 - DNA, 22 bp, synthetic construct
  misc_feature 1..22: note = chemically synthesized
  source 1..22: mol_type = other DNA
tccaatttcacattttctgaaa

SEQ ID NO: 41051 - DNA, 22 bp, synthetic construct
  misc_feature 1..22: note = chemically synthesized
  source 1..22: mol_type = other DNA
ccaatttcacattttctgaaaa

SEQ ID NO: 41052 - DNA, 22 bp, synthetic construct
  misc_feature 1..22: note = chemically synthesized
  source 1..22: mol_type = other DNA
caatttcacattttctgaaaat

SEQ ID NO: 41053 - DNA, 22 bp, synthetic construct
  misc_feature 1..22: note = chemically synthesized
  source 1..22: mol_type = other DNA
cacattttctgaaaataaggga

SEQ ID NO: 41054 - DNA, 22 bp, synthetic construct
  misc_feature 1..22: note = chemically synthesized
  source 1..22: mol_type = other DNA
acattttctgaaaataagggac

SEQ ID NO: 41055 - DNA, 22 bp, synthetic construct
  misc_feature 1..22: note = chemically synthesized
  source 1..22: mol_type = other DNA
tctgaaaataagggacacaacc

SEQ ID NO: 41056 - DNA, 22 bp, synthetic construct
  misc_feature 1..22: note = chemically synthesized
  source 1..22: mol_type = other DNA
ctgaaaataagggacacaacca

SEQ ID NO: 41057 - DNA, 22 bp, synthetic construct
  misc_feature 1..22: note = chemically synthesized
  source 1..22: mol_type = other DNA
tgaaaataagggacacaaccat

SEQ ID NO: 41058 - DNA, 22 bp, synthetic construct
  misc_feature 1..22: note = chemically synthesized
  source 1..22: mol_type = other DNA
aaaataagggacacaaccatgt

SEQ ID NO: 41059 - DNA, 22 bp, synthetic construct
  misc_feature 1..22: note = chemically synthesized
  source 1..22: mol_type = other DNA
ttgtgaaactccatgaaggttc

SEQ ID NO: 41060 - DNA, 22 bp, synthetic construct
  misc_feature 1..22: note = chemically synthesized
  source 1..22: mol_type = other DNA
gtgaaactccatgaaggttcat

SEQ ID NO: 41061 - DNA, 22 bp, synthetic construct
  misc_feature 1..22: note = chemically synthesized
  source 1..22: mol_type = other DNA
tgaaactccatgaaggttcatc

SEQ ID NO: 41062 - DNA, 22 bp, synthetic construct
  misc_feature 1..22: note = chemically synthesized
  source 1..22: mol_type = other DNA
catgaaggttcatctgttctgt

SEQ ID NO: 41063 - DNA, 22 bp, synthetic construct
  misc_feature 1..22: note = chemically synthesized
  source 1..22: mol_type = other DNA
atctgttctgttttccccccac

SEQ ID NO: 41064 - DNA, 22 bp, synthetic construct
  misc_feature 1..22: note = chemically synthesized
  source 1..22: mol_type = other DNA
ttctgttttccccccacctcaa

SEQ ID NO: 41065 - DNA, 22 bp, synthetic construct
  misc_feature 1..22: note = chemically synthesized
  source 1..22: mol_type = other DNA
tgttttccccccacctcaattg

SEQ ID NO: 41066 - DNA, 22 bp, synthetic construct
  misc_feature 1..22: note = chemically synthesized
  source 1..22: mol_type = other DNA
ttttccccccacctcaattgtt

SEQ ID NO: 41067 - DNA, 22 bp, synthetic construct
  misc_feature 1..22: note = chemically synthesized
  source 1..22: mol_type = other DNA
tccccccacctcaattgtttct

SEQ ID NO: 41068 - DNA, 22 bp, synthetic construct
  misc_feature 1..22: note = chemically synthesized
  source 1..22: mol_type = other DNA
ccccccacctcaattgtttctt

SEQ ID NO: 41069 - DNA, 22 bp, synthetic construct
  misc_feature 1..22: note = chemically synthesized
  source 1..22: mol_type = other DNA
cccccacctcaattgtttcttc

SEQ ID NO: 41070 - DNA, 22 bp, synthetic construct
  misc_feature 1..22: note = chemically synthesized
  source 1..22: mol_type = other DNA
aattgtttcttcccccaatgaa

SEQ ID NO: 41071 - DNA, 22 bp, synthetic construct
  misc_feature 1..22: note = chemically synthesized
  source 1..22: mol_type = other DNA
tttcttcccccaatgaatgtgg

SEQ ID NO: 41072 - DNA, 22 bp, synthetic construct
  misc_feature 1..22: note = chemically synthesized
  source 1..22: mol_type = other DNA
cttcccccaatgaatgtgggtg

SEQ ID NO: 41073 - DNA, 22 bp, synthetic construct
  misc_feature 1..22: note = chemically synthesized
  source 1..22: mol_type = other DNA
ttcccccaatgaatgtgggtgg

SEQ ID NO: 41074 - DNA, 22 bp, synthetic construct
  misc_feature 1..22: note = chemically synthesized
  source 1..22: mol_type = other DNA
cccccaatgaatgtgggtggcc

SEQ ID NO: 41075 - DNA, 22 bp, synthetic construct
  misc_feature 1..22: note = chemically synthesized
  source 1..22: mol_type = other DNA
ccccaatgaatgtgggtggccc

SEQ ID NO: 41076 - DNA, 22 bp, synthetic construct
  misc_feature 1..22: note = chemically synthesized
  source 1..22: mol_type = other DNA
aggcaaaatttactatgtttta

SEQ ID NO: 41077 - DNA, 22 bp, synthetic construct
  misc_feature 1..22: note = chemically synthesized
  source 1..22: mol_type = other DNA
actatgttttattcctctgagt

SEQ ID NO: 41078 - DNA, 22 bp, synthetic construct
  misc_feature 1..22: note = chemically synthesized
  source 1..22: mol_type = other DNA
ctatgttttattcctctgagtc

SEQ ID NO: 41079 - DNA, 22 bp, synthetic construct
  misc_feature 1..22: note = chemically synthesized
  source 1..22: mol_type = other DNA
tgttttattcctctgagtcaga

SEQ ID NO: 41080 - DNA, 22 bp, synthetic construct
  misc_feature 1..22: note = chemically synthesized
  source 1..22: mol_type = other DNA
tattcctctgagtcagacaaac

SEQ ID NO: 41081 - DNA, 22 bp, synthetic construct
  misc_feature 1..22: note = chemically synthesized
  source 1..22: mol_type = other DNA
attcctctgagtcagacaaaca

SEQ ID NO: 41082 - DNA, 22 bp, synthetic construct
  misc_feature 1..22: note = chemically synthesized
  source 1..22: mol_type = other DNA
ttcctctgagtcagacaaacaa

SEQ ID NO: 41083 - DNA, 22 bp, synthetic construct
  misc_feature 1..22: note = chemically synthesized
  source 1..22: mol_type = other DNA
ctctgagtcagacaaacaagtg

SEQ ID NO: 41084 - DNA, 22 bp, synthetic construct
  misc_feature 1..22: note = chemically synthesized
  source 1..22: mol_type = other DNA
tgagtcagacaaacaagtgttg

SEQ ID NO: 41085 - DNA, 22 bp, synthetic construct
  misc_feature 1..22: note = chemically synthesized
  source 1..22: mol_type = other DNA
agtcagacaaacaagtgttgat

SEQ ID NO: 41086 - DNA, 22 bp, synthetic construct
  misc_feature 1..22: note = chemically synthesized
  source 1..22: mol_type = other DNA
atagccatgttcttccttgcaa

SEQ ID NO: 41087 - DNA, 22 bp, synthetic construct
  misc_feature 1..22: note = chemically synthesized
  source 1..22: mol_type = other DNA
ttccttgcaatactgcctccct

SEQ ID NO: 41088 - DNA, 22 bp, synthetic construct
  misc_feature 1..22: note = chemically synthesized
  source 1..22: mol_type = other DNA
ccttgcaatactgcctccctgg

SEQ ID NO: 41089 - DNA, 22 bp, synthetic construct
  misc_feature 1..22: note = chemically synthesized
  source 1..22: mol_type = other DNA
cttgcaatactgcctccctggc

SEQ ID NO: 41090 - DNA, 22 bp, synthetic construct
  misc_feature 1..22: note = chemically synthesized
  source 1..22: mol_type = other DNA
gcaatactgcctccctggctta

SEQ ID NO: 41091 - DNA, 22 bp, synthetic construct
  misc_feature 1..22: note = chemically synthesized
  source 1..22: mol_type = other DNA
caatactgcctccctggcttaa

SEQ ID NO: 41092 - DNA, 22 bp, synthetic construct
  misc_feature 1..22: note = chemically synthesized
  source 1..22: mol_type = other DNA
cctccctggcttaaataatcta

SEQ ID NO: 41093 - DNA, 22 bp, synthetic construct
  misc_feature 1..22: note = chemically synthesized
  source 1..22: mol_type = other DNA
cctggcttaaataatctatttc

SEQ ID NO: 41094 - DNA, 22 bp, synthetic construct
  misc_feature 1..22: note = chemically synthesized
  source 1..22: mol_type = other DNA
gcttaaataatctatttcagat

SEQ ID NO: 41095 - DNA, 22 bp, synthetic construct
  misc_feature 1..22: note = chemically synthesized
  source 1..22: mol_type = other DNA
aaataatctatttcagatgtct

SEQ ID NO: 41096 - DNA, 22 bp, synthetic construct
  misc_feature 1..22: note = chemically synthesized
  source 1..22: mol_type = other DNA
aataatctatttcagatgtctc

SEQ ID NO: 41097 - DNA, 22 bp, synthetic construct
  misc_feature 1..22: note = chemically synthesized
  source 1..22: mol_type = other DNA
tttcagatgtctcattgccagt

SEQ ID NO: 41098 - DNA, 22 bp, synthetic construct
  misc_feature 1..22: note = chemically synthesized
  source 1..22: mol_type = other DNA
cagatgtctcattgccagttta

SEQ ID NO: 41099 - DNA, 22 bp, synthetic construct
  misc_feature 1..22: note = chemically synthesized
  source 1..22: mol_type = other DNA
agatgtctcattgccagtttaa

SEQ ID NO: 41100 - DNA, 22 bp, synthetic construct
  misc_feature 1..22: note = chemically synthesized
  source 1..22: mol_type = other DNA
attgccagtttaagatgggctt

SEQ ID NO: 41101 - DNA, 22 bp, synthetic construct
  misc_feature 1..22: note = chemically synthesized
  source 1..22: mol_type = other DNA
ccagtttaagatgggcttgtac

SEQ ID NO: 41102 - DNA, 22 bp, synthetic construct
  misc_feature 1..22: note = chemically synthesized
  source 1..22: mol_type = other DNA
aagatgggcttgtacttgctga

SEQ ID NO: 41103 - DNA, 22 bp, synthetic construct
  misc_feature 1..22: note = chemically synthesized
  source 1..22: mol_type = other DNA
agatgggcttgtacttgctgac

SEQ ID NO: 41104 - DNA, 22 bp, synthetic construct
  misc_feature 1..22: note = chemically synthesized
  source 1..22: mol_type = other DNA
gtacttgctgacacattttcaa

SEQ ID NO: 41105 - DNA, 22 bp, synthetic construct
  misc_feature 1..22: note = chemically synthesized
  source 1..22: mol_type = other DNA
tacttgctgacacattttcaac

SEQ ID NO: 41106 - DNA, 22 bp, synthetic construct
  misc_feature 1..22: note = chemically synthesized
  source 1..22: mol_type = other DNA
gctgacacattttcaacaaatg

SEQ ID NO: 41107 - DNA, 22 bp, synthetic construct
  misc_feature 1..22: note = chemically synthesized
  source 1..22: mol_type = other DNA
ctgacacattttcaacaaatga

SEQ ID NO: 41108 - DNA, 22 bp, synthetic construct
  misc_feature 1..22: note = chemically synthesized
  source 1..22: mol_type = other DNA
acacattttcaacaaatgactg

SEQ ID NO: 41109 - DNA, 22 bp, synthetic construct
  misc_feature 1..22: note = chemically synthesized
  source 1..22: mol_type = other DNA
tcaacaaatgactgtgcaagaa

SEQ ID NO: 41110 - DNA, 22 bp, synthetic construct
  misc_feature 1..22: note = chemically synthesized
  source 1..22: mol_type = other DNA
caacaaatgactgtgcaagaaa

SEQ ID NO: 41111 - DNA, 22 bp, synthetic construct
  misc_feature 1..22: note = chemically synthesized
  source 1..22: mol_type = other DNA
aacaaatgactgtgcaagaaac

SEQ ID NO: 41112 - DNA, 22 bp, synthetic construct
  misc_feature 1..22: note = chemically synthesized
  source 1..22: mol_type = other DNA
tgcaagaaacattgagattttc

SEQ ID NO: 41113 - DNA, 22 bp, synthetic construct
  misc_feature 1..22: note = chemically synthesized
  source 1..22: mol_type = other DNA
agattttcctacactactttgt

SEQ ID NO: 41114 - DNA, 22 bp, synthetic construct
  misc_feature 1..22: note = chemically synthesized
  source 1..22: mol_type = other DNA
tcctacactactttgtctcttc

SEQ ID NO: 41115 - DNA, 22 bp, synthetic construct
  misc_feature 1..22: note = chemically synthesized
  source 1..22: mol_type = other DNA
cctacactactttgtctcttca

SEQ ID NO: 41116 - DNA, 22 bp, synthetic construct
  misc_feature 1..22: note = chemically synthesized
  source 1..22: mol_type = other DNA
ctacactactttgtctcttcaa

SEQ ID NO: 41117 - DNA, 22 bp, synthetic construct
  misc_feature 1..22: note = chemically synthesized
  source 1..22: mol_type = other DNA
cactactttgtctcttcaatca

SEQ ID NO: 41118 - DNA, 22 bp, synthetic construct
  misc_feature 1..22: note = chemically synthesized
  source 1..22: mol_type = other DNA
ctttgtctcttcaatcatcaac

SEQ ID NO: 41119 - DNA, 22 bp, synthetic construct
  misc_feature 1..22: note = chemically synthesized
  source 1..22: mol_type = other DNA
tgtctcttcaatcatcaacttg

SEQ ID NO: 41120 - DNA, 22 bp, synthetic construct
  misc_feature 1..22: note = chemically synthesized
  source 1..22: mol_type = other DNA
gtctcttcaatcatcaacttga

SEQ ID NO: 41121 - DNA, 22 bp, synthetic construct
  misc_feature 1..22: note = chemically synthesized
  source 1..22: mol_type = other DNA
tctcttcaatcatcaacttgac

SEQ ID NO: 41122 - DNA, 22 bp, synthetic construct
  misc_feature 1..22: note = chemically synthesized
  source 1..22: mol_type = other DNA
ttcaatcatcaacttgaccatc

SEQ ID NO: 41123 - DNA, 22 bp, synthetic construct
  misc_feature 1..22: note = chemically synthesized
  source 1..22: mol_type = other DNA
caatcatcaacttgaccatccc

SEQ ID NO: 41124 - DNA, 22 bp, synthetic construct
  misc_feature 1..22: note = chemically synthesized
  source 1..22: mol_type = other DNA
aatcatcaacttgaccatccct

SEQ ID NO: 41125 - DNA, 22 bp, synthetic construct
  misc_feature 1..22: note = chemically synthesized
  source 1..22: mol_type = other DNA
gaccatccctccaaatttcccc

SEQ ID NO: 41126 - DNA, 22 bp, synthetic construct
  misc_feature 1..22: note = chemically synthesized
  source 1..22: mol_type = other DNA
accatccctccaaatttcccct

SEQ ID NO: 41127 - DNA, 22 bp, synthetic construct
  misc_feature 1..22: note = chemically synthesized
  source 1..22: mol_type = other DNA
caaatttcccctctttcttctt

SEQ ID NO: 41128 - DNA, 22 bp, synthetic construct
  misc_feature 1..22: note = chemically synthesized
  source 1..22: mol_type = other DNA
cccctctttcttcttttcaaag

SEQ ID NO: 41129 - DNA, 22 bp, synthetic construct
  misc_feature 1..22: note = chemically synthesized
  source 1..22: mol_type = other DNA
ccctctttcttcttttcaaagc

SEQ ID NO: 41130 - DNA, 22 bp, synthetic construct
  misc_feature 1..22: note = chemically synthesized
  source 1..22: mol_type = other DNA
tttcttcttttcaaagccatgg

SEQ ID NO: 41131 - DNA, 22 bp, synthetic construct
  misc_feature 1..22: note = chemically synthesized
  source 1..22: mol_type = other DNA
tcttcttttcaaagccatgggg

SEQ ID NO: 41132 - DNA, 22 bp, synthetic construct
  misc_feature 1..22: note = chemically synthesized
  source 1..22: mol_type = other DNA
cttcttttcaaagccatgggga

SEQ ID NO: 41133 - DNA, 22 bp, synthetic construct
  misc_feature 1..22: note = chemically synthesized
  source 1..22: mol_type = other DNA
ttcttttcaaagccatggggag

SEQ ID NO: 41134 - DNA, 22 bp, synthetic construct
  misc_feature 1..22: note = chemically synthesized
  source 1..22: mol_type = other DNA
cttttcaaagccatggggagga

SEQ ID NO: 41135 - DNA, 22 bp, synthetic construct
  misc_feature 1..22: note = chemically synthesized
  source 1..22: mol_type = other DNA
ttttcaaagccatggggaggat

SEQ ID NO: 41136 - DNA, 22 bp, synthetic construct
  misc_feature 1..22: note = chemically synthesized
  source 1..22: mol_type = other DNA
ttcaaagccatggggaggatag

SEQ ID NO: 41137 - DNA, 22 bp, synthetic construct
  misc_feature 1..22: note = chemically synthesized
  source 1..22: mol_type = other DNA
tcaaagccatggggaggatagg

SEQ ID NO: 41138 - DNA, 22 bp, synthetic construct
  misc_feature 1..22: note = chemically synthesized
  source 1..22: mol_type = other DNA
caaagccatggggaggataggg

SEQ ID NO: 41139 - DNA, 22 bp, synthetic construct
  misc_feature 1..22: note = chemically synthesized
  source 1..22: mol_type = other DNA
aaagccatggggaggatagggg

SEQ ID NO: 41140 - DNA, 22 bp, synthetic construct
  misc_feature 1..22: note = chemically synthesized
  source 1..22: mol_type = other DNA
actcctgctctgagtcctcagc

SEQ ID NO: 41141 - DNA, 22 bp, synthetic construct
  misc_feature 1..22: note = chemically synthesized
  source 1..22: mol_type = other DNA
ctcctgctctgagtcctcagct

SEQ ID NO: 41142 - DNA, 22 bp, synthetic construct
  misc_feature 1..22: note = chemically synthesized
  source 1..22: mol_type = other DNA
ctgctctgagtcctcagctgag

SEQ ID NO: 41143 - DNA, 22 bp, synthetic construct
  misc_feature 1..22: note = chemically synthesized
  source 1..22: mol_type = other DNA
ctctgagtcctcagctgaggat

SEQ ID NO: 41144 - DNA, 22 bp, synthetic construct
  misc_feature 1..22: note = chemically synthesized
  source 1..22: mol_type = other DNA
tgagtcctcagctgaggatctt

SEQ ID NO: 41145 - DNA, 22 bp, synthetic construct
  misc_feature 1..22: note = chemically synthesized
  source 1..22: mol_type = other DNA
agtcctcagctgaggatcttgt

SEQ ID NO: 41146 - DNA, 22 bp, synthetic construct
  misc_feature 1..22: note = chemically synthesized
  source 1..22: mol_type = other DNA
agctgaggatcttgtttgtgtg

SEQ ID NO: 41147 - DNA, 22 bp, synthetic construct
  misc_feature 1..22: note = chemically synthesized
  source 1..22: mol_type = other DNA
aggatcttgtttgtgtgtagtg

SEQ ID NO: 41148 - DNA, 22 bp, synthetic construct
  misc_feature 1..22: note = chemically synthesized
  source 1..22: mol_type = other DNA
gtttgtgtgtagtgggggcagg

SEQ ID NO: 41149 - DNA, 22 bp, synthetic construct
  misc_feature 1..22: note = chemically synthesized
  source 1..22: mol_type = other DNA
tttgtgtgtagtgggggcaggg

SEQ ID NO: 41150 - DNA, 22 bp, synthetic construct
  misc_feature 1..22: note = chemically synthesized
  source 1..22: mol_type = other DNA
gtgtgtagtgggggcaggggga

SEQ ID NO: 41151 - DNA, 22 bp, synthetic construct
  misc_feature 1..22: note = chemically synthesized
  source 1..22: mol_type = other DNA
tgtgtagtgggggcagggggag

SEQ ID NO: 41152 - DNA, 22 bp, synthetic construct
  misc_feature 1..22: note = chemically synthesized
  source 1..22: mol_type = other DNA
gcctctatccgaggtatttatc

SEQ ID NO: 41153 - DNA, 22 bp, synthetic construct
  misc_feature 1..22: note = chemically synthesized
  source 1..22: mol_type = other DNA
cctctatccgaggtatttatca

SEQ ID NO: 41154 - DNA, 22 bp, synthetic construct
  misc_feature 1..22: note = chemically synthesized
  source 1..22: mol_type = other DNA
tatccgaggtatttatcaggtt

SEQ ID NO: 41155 - DNA, 22 bp, synthetic construct
  misc_feature 1..22: note = chemically synthesized
  source 1..22: mol_type = other DNA
tccgaggtatttatcaggttat

SEQ ID NO: 41156 - DNA, 22 bp, synthetic construct
  misc_feature 1..22: note = chemically synthesized
  source 1..22: mol_type = other DNA
atcaggttatttgggagctact

SEQ ID NO: 41157 - DNA, 22 bp, synthetic construct
  misc_feature 1..22: note = chemically synthesized
  source 1..22: mol_type = other DNA
tcaggttatttgggagctactt

SEQ ID NO: 41158 - DNA, 22 bp, synthetic construct
  misc_feature 1..22: note = chemically synthesized
  source 1..22: mol_type = other DNA
tttgggagctactttcagagat

SEQ ID NO: 41159 - DNA, 22 bp, synthetic construct
  misc_feature 1..22: note = chemically synthesized
  source 1..22: mol_type = other DNA
gggagctactttcagagatgcc

SEQ ID NO: 41160 - DNA, 22 bp, synthetic construct
  misc_feature 1..22: note = chemically synthesized
  source 1..22: mol_type = other DNA
ggagctactttcagagatgccc

SEQ ID NO: 41161 - DNA, 22 bp, synthetic construct
  misc_feature 1..22: note = chemically synthesized
  source 1..22: mol_type = other DNA
ctttcagagatgcccttgctct

SEQ ID NO: 41162 - DNA, 22 bp, synthetic construct
  misc_feature 1..22: note = chemically synthesized
  source 1..22: mol_type = other DNA
tcagagatgcccttgctctatg

SEQ ID NO: 41163 - DNA, 22 bp, synthetic construct
  misc_feature 1..22: note = chemically synthesized
  source 1..22: mol_type = other DNA
cagagatgcccttgctctatgt

SEQ ID NO: 41164 - DNA, 22 bp, synthetic construct
  misc_feature 1..22: note = chemically synthesized
  source 1..22: mol_type = other DNA
agagatgcccttgctctatgta

SEQ ID NO: 41165 - DNA, 22 bp, synthetic construct
  misc_feature 1..22: note = chemically synthesized
  source 1..22: mol_type = other DNA
gctctatgtattcccactgcca

SEQ ID NO: 41166 - DNA, 22 bp, synthetic construct
  misc_feature 1..22: note = chemically synthesized
  source 1..22: mol_type = other DNA
ctctatgtattcccactgccac

SEQ ID NO: 41167 - DNA, 22 bp, synthetic construct
  misc_feature 1..22: note = chemically synthesized
  source 1..22: mol_type = other DNA
tatgtattcccactgccaccac

SEQ ID NO: 41168 - DNA, 22 bp, synthetic construct
  misc_feature 1..22: note = chemically synthesized
  source 1..22: mol_type = other DNA
tgtattcccactgccaccactc

SEQ ID NO: 41169 - DNA, 22 bp, synthetic construct
  misc_feature 1..22: note = chemically synthesized
  source 1..22: mol_type = other DNA
ccactgccaccactccccggat

SEQ ID NO: 41170 - DNA, 22 bp, synthetic construct
  misc_feature 1..22: note = chemically synthesized
  source 1..22: mol_type = other DNA
ccaccactccccggattctttt

SEQ ID NO: 41171 - DNA, 22 bp, synthetic construct
  misc_feature 1..22: note = chemically synthesized
  source 1..22: mol_type = other DNA
cccggattcttttcttccttta

SEQ ID NO: 41172 - DNA, 22 bp, synthetic construct
  misc_feature 1..22: note = chemically synthesized
  source 1..22: mol_type = other DNA
ttttcttcctttaggaagcagg

SEQ ID NO: 41173 - DNA, 22 bp, synthetic construct
  misc_feature 1..22: note = chemically synthesized
  source 1..22: mol_type = other DNA
ttcttcctttaggaagcaggga

SEQ ID NO: 41174 - DNA, 22 bp, synthetic construct
  misc_feature 1..22: note = chemically synthesized
  source 1..22: mol_type = other DNA
tcttcctttaggaagcagggac

SEQ ID NO: 41175 - DNA, 22 bp, synthetic construct
  misc_feature 1..22: note = chemically synthesized
  source 1..22: mol_type = other DNA
cttcctttaggaagcagggact

SEQ ID NO: 41176 - DNA, 22 bp, synthetic construct
  misc_feature 1..22: note = chemically synthesized
  source 1..22: mol_type = other DNA
ttcctttaggaagcagggactt

SEQ ID NO: 41177 - DNA, 22 bp, synthetic construct
  misc_feature 1..22: note = chemically synthesized
  source 1..22: mol_type = other DNA
cctttaggaagcagggacttgt

SEQ ID NO: 41178 - DNA, 22 bp, synthetic construct
  misc_feature 1..22: note = chemically synthesized
  source 1..22: mol_type = other DNA
ctttaggaagcagggacttgtt

SEQ ID NO: 41179 - DNA, 22 bp, synthetic construct
  misc_feature 1..22: note = chemically synthesized
  source 1..22: mol_type = other DNA
taggaagcagggacttgttcct

SEQ ID NO: 41180 - DNA, 22 bp, synthetic construct
  misc_feature 1..22: note = chemically synthesized
  source 1..22: mol_type = other DNA
aggaagcagggacttgttcctc

SEQ ID NO: 41181 - DNA, 22 bp, synthetic construct
  misc_feature 1..22: note = chemically synthesized
  source 1..22: mol_type = other DNA
ggaagcagggacttgttcctct

SEQ ID NO: 41182 - DNA, 22 bp, synthetic construct
  misc_feature 1..22: note = chemically synthesized
  source 1..22: mol_type = other DNA
gttcctctggagagactgctag

SEQ ID NO: 41183 - DNA, 22 bp, synthetic construct
  misc_feature 1..22: note = chemically synthesized
  source 1..22: mol_type = other DNA
ttcctctggagagactgctaga

SEQ ID NO: 41184 - DNA, 22 bp, synthetic construct
  misc_feature 1..22: note = chemically synthesized
  source 1..22: mol_type = other DNA
ctctggagagactgctagagga

SEQ ID NO: 41185 - DNA, 22 bp, synthetic construct
  misc_feature 1..22: note = chemically synthesized
  source 1..22: mol_type = other DNA
tggagagactgctagaggaaag

SEQ ID NO: 41186 - DNA, 22 bp, synthetic construct
  misc_feature 1..22: note = chemically synthesized
  source 1..22: mol_type = other DNA
gagagactgctagaggaaagtc

SEQ ID NO: 41187 - DNA, 22 bp, synthetic construct
  misc_feature 1..22: note = chemically synthesized
  source 1..22: mol_type = other DNA
ctagaggaaagtcaggaaccta

SEQ ID NO: 41188 - DNA, 22 bp, synthetic construct
  misc_feature 1..22: note = chemically synthesized
  source 1..22: mol_type = other DNA
gaggaaagtcaggaacctaagt

SEQ ID NO: 41189 - DNA, 22 bp, synthetic construct
  misc_feature 1..22: note = chemically synthesized
  source 1..22: mol_type = other DNA
agttctgcaaccccaactctgc

SEQ ID NO: 41190 - DNA, 22 bp, synthetic construct
  misc_feature 1..22: note = chemically synthesized
  source 1..22: mol_type = other DNA
tgcaaccccaactctgccactc

SEQ ID NO: 41191 - DNA, 22 bp, synthetic construct
  misc_feature 1..22: note = chemically synthesized
  source 1..22: mol_type = other DNA
caaccccaactctgccactcac

SEQ ID NO: 41192 - DNA, 22 bp, synthetic construct
  misc_feature 1..22: note = chemically synthesized
  source 1..22: mol_type = other DNA
tgccactcaccagctgtttcgt

SEQ ID NO: 41193 - DNA, 22 bp, synthetic construct
  misc_feature 1..22: note = chemically synthesized
  source 1..22: mol_type = other DNA
ccactcaccagctgtttcgtga

SEQ ID NO: 41194 - DNA, 22 bp, synthetic construct
  misc_feature 1..22: note = chemically synthesized
  source 1..22: mol_type = other DNA
accagctgtttcgtgactttga

SEQ ID NO: 41195 - DNA, 22 bp, synthetic construct
  misc_feature 1..22: note = chemically synthesized
  source 1..22: mol_type = other DNA
tttcgtgactttgaataaatcc

SEQ ID NO: 41196 - DNA, 22 bp, synthetic construct
  misc_feature 1..22: note = chemically synthesized
  source 1..22: mol_type = other DNA
cgtgactttgaataaatccttt

SEQ ID NO: 41197 - DNA, 22 bp, synthetic construct
  misc_feature 1..22: note = chemically synthesized
  source 1..22: mol_type = other DNA
gtgactttgaataaatcctttc

SEQ ID NO: 41198 - DNA, 22 bp, synthetic construct
  misc_feature 1..22: note = chemically synthesized
  source 1..22: mol_type = other DNA
tgaataaatcctttctttctgg

SEQ ID NO: 41199 - DNA, 22 bp, synthetic construct
  misc_feature 1..22: note = chemically synthesized
  source 1..22: mol_type = other DNA
gaataaatcctttctttctggc

SEQ ID NO: 41200 - DNA, 22 bp, synthetic construct
  misc_feature 1..22: note = chemically synthesized
  source 1..22: mol_type = other DNA
aataaatcctttctttctggcc

SEQ ID NO: 41201 - DNA, 22 bp, synthetic construct
  misc_feature 1..22: note = chemically synthesized
  source 1..22: mol_type = other DNA
tctttctggccctaagtgtttc

SEQ ID NO: 41202 - DNA, 22 bp, synthetic construct
  misc_feature 1..22: note = chemically synthesized
  source 1..22: mol_type = other DNA
ctttctggccctaagtgtttcc

SEQ ID NO: 41203 - DNA, 22 bp, synthetic construct
  misc_feature 1..22: note = chemically synthesized
  source 1..22: mol_type = other DNA
tttctggccctaagtgtttcca

SEQ ID NO: 41204 - DNA, 22 bp, synthetic construct
  misc_feature 1..22: note = chemically synthesized
  source 1..22: mol_type = other DNA
tctggccctaagtgtttccatc

SEQ ID NO: 41205 - DNA, 22 bp, synthetic construct
  misc_feature 1..22: note = chemically synthesized
  source 1..22: mol_type = other DNA
ctggccctaagtgtttccatct

SEQ ID NO: 41206 - DNA, 22 bp, synthetic construct
  misc_feature 1..22: note = chemically synthesized
  source 1..22: mol_type = other DNA
tggccctaagtgtttccatctt

SEQ ID NO: 41207 - DNA, 22 bp, synthetic construct
  misc_feature 1..22: note = chemically synthesized
  source 1..22: mol_type = other DNA
gccctaagtgtttccatcttta

SEQ ID NO: 41208 - DNA, 22 bp, synthetic construct
  misc_feature 1..22: note = chemically synthesized
  source 1..22: mol_type = other DNA
agtgtttccatctttaaaagga

SEQ ID NO: 41209 - DNA, 22 bp, synthetic construct
  misc_feature 1..22: note = chemically synthesized
  source 1..22: mol_type = other DNA
ccatctttaaaaggagaagact

SEQ ID NO: 41210 - DNA, 22 bp, synthetic construct
  misc_feature 1..22: note = chemically synthesized
  source 1..22: mol_type = other DNA
catctttaaaaggagaagactg

SEQ ID NO: 41211 - DNA, 22 bp, synthetic construct
  misc_feature 1..22: note = chemically synthesized
  source 1..22: mol_type = other DNA
taaaaggagaagactggattag

SEQ ID NO: 41212 - DNA, 22 bp, synthetic construct
  misc_feature 1..22: note = chemically synthesized
  source 1..22: mol_type = other DNA
aaaaggagaagactggattaga

SEQ ID NO: 41213 - DNA, 22 bp, synthetic construct
  misc_feature 1..22: note = chemically synthesized
  source 1..22: mol_type = other DNA
aaaggagaagactggattagat

SEQ ID NO: 41214 - DNA, 22 bp, synthetic construct
  misc_feature 1..22: note = chemically synthesized
  source 1..22: mol_type = other DNA
gattagatggggtggcttctct

SEQ ID NO: 41215 - DNA, 22 bp, synthetic construct
  misc_feature 1..22: note = chemically synthesized
  source 1..22: mol_type = other DNA
gatggggtggcttctctctcct

SEQ ID NO: 41216 - DNA, 22 bp, synthetic construct
  misc_feature 1..22: note = chemically synthesized
  source 1..22: mol_type = other DNA
ctctctcctgcctcccatgcaa

SEQ ID NO: 41217 - DNA, 22 bp, synthetic construct
  misc_feature 1..22: note = chemically synthesized
  source 1..22: mol_type = other DNA
tctctcctgcctcccatgcaag

SEQ ID NO: 41218 - DNA, 22 bp, synthetic construct
  misc_feature 1..22: note = chemically synthesized
  source 1..22: mol_type = other DNA
tctcctgcctcccatgcaagtc

SEQ ID NO: 41219 - DNA, 22 bp, synthetic construct
  misc_feature 1..22: note = chemically synthesized
  source 1..22: mol_type = other DNA
tcctgcctcccatgcaagtcca

SEQ ID NO: 41220 - DNA, 22 bp, synthetic construct
  misc_feature 1..22: note = chemically synthesized
  source 1..22: mol_type = other DNA
ctgcctcccatgcaagtccagg

SEQ ID NO: 41221 - DNA, 22 bp, synthetic construct
  misc_feature 1..22: note = chemically synthesized
  source 1..22: mol_type = other DNA
cctcccatgcaagtccaggcct

SEQ ID NO: 41222 - DNA, 22 bp, synthetic construct
  misc_feature 1..22: note = chemically synthesized
  source 1..22: mol_type = other DNA
ccatgcaagtccaggcctcctt

SEQ ID NO: 41223 - DNA, 22 bp, synthetic construct
  misc_feature 1..22: note = chemically synthesized
  source 1..22: mol_type = other DNA
ctttggaccaaccaagagacct

SEQ ID NO: 41224 - DNA, 22 bp, synthetic construct
  misc_feature 1..22: note = chemically synthesized
  source 1..22: mol_type = other DNA
tggaccaaccaagagacctact

SEQ ID NO: 41225 - DNA, 22 bp, synthetic construct
  misc_feature 1..22: note = chemically synthesized
  source 1..22: mol_type = other DNA
ggaccaaccaagagacctacta

SEQ ID NO: 41226 - DNA, 22 bp, synthetic construct
  misc_feature 1..22: note = chemically synthesized
  source 1..22: mol_type = other DNA
gaccaaccaagagacctactat

SEQ ID NO: 41227 - DNA, 22 bp, synthetic construct
  misc_feature 1..22: note = chemically synthesized
  source 1..22: mol_type = other DNA
ctataggccgtgctagaagctg

SEQ ID NO: 41228 - DNA, 22 bp, synthetic construct
  misc_feature 1..22: note = chemically synthesized
  source 1..22: mol_type = other DNA
taggccgtgctagaagctggcc

SEQ ID NO: 41229 - DNA, 22 bp, synthetic construct
  misc_feature 1..22: note = chemically synthesized
  source 1..22: mol_type = other DNA
gaagctggccaggatacacctg

SEQ ID NO: 41230 - DNA, 22 bp, synthetic construct
  misc_feature 1..22: note = chemically synthesized
  source 1..22: mol_type = other DNA
gccaggatacacctgttcccct

SEQ ID NO: 41231 - DNA, 22 bp, synthetic construct
  misc_feature 1..22: note = chemically synthesized
  source 1..22: mol_type = other DNA
ttcccctcatgaccttgacctg

SEQ ID NO: 41232 - DNA, 22 bp, synthetic construct
  misc_feature 1..22: note = chemically synthesized
  source 1..22: mol_type = other DNA
ccctcatgaccttgacctggat

SEQ ID NO: 41233 - DNA, 22 bp, synthetic construct
  misc_feature 1..22: note = chemically synthesized
  source 1..22: mol_type = other DNA
atgaccttgacctggatgagga

SEQ ID NO: 41234 - DNA, 22 bp, synthetic construct
  misc_feature 1..22: note = chemically synthesized
  source 1..22: mol_type = other DNA
gacctggatgaggagggcctta

SEQ ID NO: 41235 - DNA, 22 bp, synthetic construct
  misc_feature 1..22: note = chemically synthesized
  source 1..22: mol_type = other DNA
acctggatgaggagggccttat

SEQ ID NO: 41236 - DNA, 22 bp, synthetic construct
  misc_feature 1..22: note = chemically synthesized
  source 1..22: mol_type = other DNA
gatgaggagggccttataggag

SEQ ID NO: 41237 - DNA, 22 bp, synthetic construct
  misc_feature 1..22: note = chemically synthesized
  source 1..22: mol_type = other DNA
ataggagagttcagggctgggc

SEQ ID NO: 41238 - DNA, 22 bp, synthetic construct
  misc_feature 1..22: note = chemically synthesized
  source 1..22: mol_type = other DNA
taggagagttcagggctgggct

SEQ ID NO: 41239 - DNA, 22 bp, synthetic construct
  misc_feature 1..22: note = chemically synthesized
  source 1..22: mol_type = other DNA
agggctgggcttggtccccagg

SEQ ID NO: 41240 - DNA, 22 bp, synthetic construct
  misc_feature 1..22: note = chemically synthesized
  source 1..22: mol_type = other DNA
ggcttggtccccaggctaatcc

SEQ ID NO: 41241 - DNA, 22 bp, synthetic construct
  misc_feature 1..22: note = chemically synthesized
  source 1..22: mol_type = other DNA
ggtccccaggctaatccttagg

SEQ ID NO: 41242 - DNA, 22 bp, synthetic construct
  misc_feature 1..22: note = chemically synthesized
  source 1..22: mol_type = other DNA
gtccccaggctaatccttaggc

SEQ ID NO: 41243 - DNA, 22 bp, synthetic construct
  misc_feature 1..22: note = chemically synthesized
  source 1..22: mol_type = other DNA
atccttaggcttagagagtgag

SEQ ID NO: 41244 - DNA, 22 bp, synthetic construct
  misc_feature 1..22: note = chemically synthesized
  source 1..22: mol_type = other DNA
aggcttagagagtgagcctgat

SEQ ID NO: 41245 - DNA, 22 bp, synthetic construct
  misc_feature 1..22: note = chemically synthesized
  source 1..22: mol_type = other DNA
ggcttagagagtgagcctgatg

SEQ ID NO: 41246 - DNA, 22 bp, synthetic construct
  misc_feature 1..22: note = chemically synthesized
  source 1..22: mol_type = other DNA
agagagtgagcctgatgatgga

SEQ ID NO: 41247 - DNA, 22 bp, synthetic construct
  misc_feature 1..22: note = chemically synthesized
  source 1..22: mol_type = other DNA
gagagtgagcctgatgatggat

SEQ ID NO: 41248 - DNA, 22 bp, synthetic construct
  misc_feature 1..22: note = chemically synthesized
  source 1..22: mol_type = other DNA
atgatggatttcaacctcctgg

SEQ ID NO: 41249 - DNA, 22 bp, synthetic construct
  misc_feature 1..22: note = chemically synthesized
  source 1..22: mol_type = other DNA
caacctcctgggacacagtctt

SEQ ID NO: 41250 - DNA, 22 bp, synthetic construct
  misc_feature 1..22: note = chemically synthesized
  source 1..22: mol_type = other DNA
aacctcctgggacacagtcttg

SEQ ID NO: 41251 - DNA, 22 bp, synthetic construct
  misc_feature 1..22: note = chemically synthesized
  source 1..22: mol_type = other DNA
ctgggacacagtcttgcaaagt

SEQ ID NO: 41252 - DNA, 22 bp, synthetic construct
  misc_feature 1..22: note = chemically synthesized
  source 1..22: mol_type = other DNA
ggacacagtcttgcaaagttta

SEQ ID NO: 41253 - DNA, 22 bp, synthetic construct
  misc_feature 1..22: note = chemically synthesized
  source 1..22: mol_type = other DNA
gcaaagtttacatgtctgagct

SEQ ID NO: 41254 - DNA, 22 bp, synthetic construct
  misc_feature 1..22: note = chemically synthesized
  source 1..22: mol_type = other DNA
caaagtttacatgtctgagctt

SEQ ID NO: 41255 - DNA, 22 bp, synthetic construct
  misc_feature 1..22: note = chemically synthesized
  source 1..22: mol_type = other DNA
acatgtctgagcttcaaggagg

SEQ ID NO: 41256 - DNA, 22 bp, synthetic construct
  misc_feature 1..22: note = chemically synthesized
  source 1..22: mol_type = other DNA
catgtctgagcttcaaggagga

SEQ ID NO: 41257 - DNA, 22 bp, synthetic construct
  misc_feature 1..22: note = chemically synthesized
  source 1..22: mol_type = other DNA
agcttcaaggaggaaacctagg

SEQ ID NO: 41258 - DNA, 22 bp, synthetic construct
  misc_feature 1..22: note = chemically synthesized
  source 1..22: mol_type = other DNA
caaggaggaaacctaggtgtgt

SEQ ID NO: 41259 - DNA, 22 bp, synthetic construct
  misc_feature 1..22: note = chemically synthesized
  source 1..22: mol_type = other DNA
aaggaggaaacctaggtgtgtc

SEQ ID NO: 41260 - DNA, 22 bp, synthetic construct
  misc_feature 1..22: note = chemically synthesized
  source 1..22: mol_type = other DNA
ggtgtgtcctgagccaatgaga

SEQ ID NO: 41261 - DNA, 22 bp, synthetic construct
  misc_feature 1..22: note = chemically synthesized
  source 1..22: mol_type = other DNA
agccaatgagactgaaggtcag

SEQ ID NO: 41262 - DNA, 22 bp, synthetic construct
  misc_feature 1..22: note = chemically synthesized
  source 1..22: mol_type = other DNA
aaggtcagagaaccaggaagaa

SEQ ID NO: 41263 - DNA, 22 bp, synthetic construct
  misc_feature 1..22: note = chemically synthesized
  source 1..22: mol_type = other DNA
ccccaaacccaggctaaatgtc

SEQ ID NO: 41264 - DNA, 22 bp, synthetic construct
  misc_feature 1..22: note = chemically synthesized
  source 1..22: mol_type = other DNA
cccaaacccaggctaaatgtca

SEQ ID NO: 41265 - DNA, 22 bp, synthetic construct
  misc_feature 1..22: note = chemically synthesized
  source 1..22: mol_type = other DNA
aatgtcaagggaaaaggtctca

SEQ ID NO: 41266 - DNA, 22 bp, synthetic construct
  misc_feature 1..22: note = chemically synthesized
  source 1..22: mol_type = other DNA
agtggctcatgccagaagtcca

SEQ ID NO: 41267 - DNA, 22 bp, synthetic construct
  misc_feature 1..22: note = chemically synthesized
  source 1..22: mol_type = other DNA
atgccagaagtccagtagcaaa

SEQ ID NO: 41268 - DNA, 22 bp, synthetic construct
  misc_feature 1..22: note = chemically synthesized
  source 1..22: mol_type = other DNA
ggcctcatgccagagcctggca

SEQ ID NO: 41269 - DNA, 22 bp, synthetic construct
  misc_feature 1..22: note = chemically synthesized
  source 1..22: mol_type = other DNA
atgccagagcctggcacccatt

SEQ ID NO: 41270 - DNA, 22 bp, synthetic construct
  misc_feature 1..22: note = chemically synthesized
  source 1..22: mol_type = other DNA
gcacccattgctcacaaaggca

SEQ ID NO: 41271 - DNA, 22 bp, synthetic construct
  misc_feature 1..22: note = chemically synthesized
  source 1..22: mol_type = other DNA
ctcacaaaggcacacacaggac

SEQ ID NO: 41272 - DNA, 22 bp, synthetic construct
  misc_feature 1..22: note = chemically synthesized
  source 1..22: mol_type = other DNA
acaaaggcacacacaggactct

SEQ ID NO: 41273 - DNA, 22 bp, synthetic construct
  misc_feature 1..22: note = chemically synthesized
  source 1..22: mol_type = other DNA
taagaaaagggagtcctctccc

SEQ ID NO: 41274 - DNA, 22 bp, synthetic construct
  misc_feature 1..22: note = chemically synthesized
  source 1..22: mol_type = other DNA
agaaaagggagtcctctcccca

SEQ ID NO: 41275 - DNA, 22 bp, synthetic construct
  misc_feature 1..22: note = chemically synthesized
  source 1..22: mol_type = other DNA
tccccagccaccacaaaccagg

SEQ ID NO: 41276 - DNA, 22 bp, synthetic construct
  misc_feature 1..22: note = chemically synthesized
  source 1..22: mol_type = other DNA
cccagccaccacaaaccaggac

SEQ ID NO: 41277 - DNA, 22 bp, synthetic construct
  misc_feature 1..22: note = chemically synthesized
  source 1..22: mol_type = other DNA
tggtccttgacctcccaccaca

SEQ ID NO: 41278 - DNA, 22 bp, synthetic construct
  misc_feature 1..22: note = chemically synthesized
  source 1..22: mol_type = other DNA
gacctcccaccacaccccatca

SEQ ID NO: 41279 - DNA, 22 bp, synthetic construct
  misc_feature 1..22: note = chemically synthesized
  source 1..22: mol_type = other DNA
acctcccaccacaccccatcag

SEQ ID NO: 41280 - DNA, 22 bp, synthetic construct
  misc_feature 1..22: note = chemically synthesized
  source 1..22: mol_type = other DNA
ccaccacaccccatcagcatgg

SEQ ID NO: 41281 - DNA, 22 bp, synthetic construct
  misc_feature 1..22: note = chemically synthesized
  source 1..22: mol_type = other DNA
ttggaaagccatgtgtaaaatg

SEQ ID NO: 41282 - DNA, 22 bp, synthetic construct
  misc_feature 1..22: note = chemically synthesized
  source 1..22: mol_type = other DNA
ggaaagccatgtgtaaaatgaa

SEQ ID NO: 41283 - DNA, 22 bp, synthetic construct
  misc_feature 1..22: note = chemically synthesized
  source 1..22: mol_type = other DNA
gaaagccatgtgtaaaatgaat

SEQ ID NO: 41284 - DNA, 22 bp, synthetic construct
  misc_feature 1..22: note = chemically synthesized
  source 1..22: mol_type = other DNA
ctgtaaaataaatcatatttgc

SEQ ID NO: 41285 - DNA, 22 bp, synthetic construct
  misc_feature 1..22: note = chemically synthesized
  source 1..22: mol_type = other DNA
tgtaaaataaatcatatttgct

SEQ ID NO: 41286 - DNA, 22 bp, synthetic construct
  misc_feature 1..22: note = chemically synthesized
  source 1..22: mol_type = other DNA
taaaataaatcatatttgctaa

SEQ ID NO: 41287 - DNA, 22 bp, synthetic construct
  misc_feature 1..22: note = chemically synthesized
  source 1..22: mol_type = other DNA
gctaaccaacataatttcagag

SEQ ID NO: 41288 - DNA, 22 bp, synthetic construct
  misc_feature 1..22: note = chemically synthesized
  source 1..22: mol_type = other DNA
ctaaccaacataatttcagaga

SEQ ID NO: 41289 - DNA, 22 bp, synthetic construct
  misc_feature 1..22: note = chemically synthesized
  source 1..22: mol_type = other DNA
accaacataatttcagagatgt

SEQ ID NO: 41290 - DNA, 22 bp, synthetic construct
  misc_feature 1..22: note = chemically synthesized
  source 1..22: mol_type = other DNA
cagagatgtttcgtcacccttc

SEQ ID NO: 41291 - DNA, 22 bp, synthetic construct
  misc_feature 1..22: note = chemically synthesized
  source 1..22: mol_type = other DNA
agagatgtttcgtcacccttcc

SEQ ID NO: 41292 - DNA, 22 bp, synthetic construct
  misc_feature 1..22: note = chemically synthesized
  source 1..22: mol_type = other DNA
cgtcacccttccaggctcattg

SEQ ID NO: 41293 - DNA, 22 bp, synthetic construct
  misc_feature 1..22: note = chemically synthesized
  source 1..22: mol_type = other DNA
gtcacccttccaggctcattga

SEQ ID NO: 41294 - DNA, 22 bp, synthetic construct
  misc_feature 1..22: note = chemically synthesized
  source 1..22: mol_type = other DNA
ccaggctcattgaaaattggca

SEQ ID NO: 41295 - DNA, 22 bp, synthetic construct
  misc_feature 1..22: note = chemically synthesized
  source 1..22: mol_type = other DNA
caggctcattgaaaattggcag

SEQ ID NO: 41296 - DNA, 22 bp, synthetic construct
  misc_feature 1..22: note = chemically synthesized
  source 1..22: mol_type = other DNA
attgaaaattggcagggcttct

SEQ ID NO: 41297 - DNA, 22 bp, synthetic construct
  misc_feature 1..22: note = chemically synthesized
  source 1..22: mol_type = other DNA
aaaattggcagggcttctaaca

SEQ ID NO: 41298 - DNA, 22 bp, synthetic construct
  misc_feature 1..22: note = chemically synthesized
  source 1..22: mol_type = other DNA
gcagggcttctaacattttacc

SEQ ID NO: 41299 - DNA, 22 bp, synthetic construct
  misc_feature 1..22: note = chemically synthesized
  source 1..22: mol_type = other DNA
ctaacattttaccttttaagtg

SEQ ID NO: 41300 - DNA, 22 bp, synthetic construct
  misc_feature 1..22: note = chemically synthesized
  source 1..22: mol_type = other DNA
taacattttaccttttaagtgt

SEQ ID NO: 41301 - DNA, 22 bp, synthetic construct
  misc_feature 1..22: note = chemically synthesized
  source 1..22: mol_type = other DNA
acattttaccttttaagtgtgt

SEQ ID NO: 41302 - DNA, 22 bp, synthetic construct
  misc_feature 1..22: note = chemically synthesized
  source 1..22: mol_type = other DNA
taccttttaagtgtgtcttcct

SEQ ID NO: 41303 - DNA, 22 bp, synthetic construct
  misc_feature 1..22: note = chemically synthesized
  source 1..22: mol_type = other DNA
accttttaagtgtgtcttcctt

SEQ ID NO: 41304 - DNA, 22 bp, synthetic construct
  misc_feature 1..22: note = chemically synthesized
  source 1..22: mol_type = other DNA
ccttttaagtgtgtcttccttc

SEQ ID NO: 41305 - DNA, 22 bp, synthetic construct
  misc_feature 1..22: note = chemically synthesized
  source 1..22: mol_type = other DNA
ttaagtgtgtcttccttccccc

SEQ ID NO: 41306 - DNA, 22 bp, synthetic construct
  misc_feature 1..22: note = chemically synthesized
  source 1..22: mol_type = other DNA
taagtgtgtcttccttccccca

SEQ ID NO: 41307 - DNA, 22 bp, synthetic construct
  misc_feature 1..22: note = chemically synthesized
  source 1..22: mol_type = other DNA
aagtgtgtcttccttcccccaa

SEQ ID NO: 41308 - DNA, 22 bp, synthetic construct
  misc_feature 1..22: note = chemically synthesized
  source 1..22: mol_type = other DNA
agtgtgtcttccttcccccaac

SEQ ID NO: 41309 - DNA, 22 bp, synthetic construct
  misc_feature 1..22: note = chemically synthesized
  source 1..22: mol_type = other DNA
ccttcccccaacccccaatatc

SEQ ID NO: 41310 - DNA, 22 bp, synthetic construct
  misc_feature 1..22: note = chemically synthesized
  source 1..22: mol_type = other DNA
cttcccccaacccccaatatcc

SEQ ID NO: 41311 - DNA, 22 bp, synthetic construct
  misc_feature 1..22: note = chemically synthesized
  source 1..22: mol_type = other DNA
cccccaacccccaatatcctct

SEQ ID NO: 41312 - DNA, 22 bp, synthetic construct
  misc_feature 1..22: note = chemically synthesized
  source 1..22: mol_type = other DNA
ccccaacccccaatatcctctc

SEQ ID NO: 41313 - DNA, 22 bp, synthetic construct
  misc_feature 1..22: note = chemically synthesized
  source 1..22: mol_type = other DNA
tctgtcaagtagttaatgatct

SEQ ID NO: 41314 - DNA, 22 bp, synthetic construct
  misc_feature 1..22: note = chemically synthesized
  source 1..22: mol_type = other DNA
tgtcaagtagttaatgatctgt

SEQ ID NO: 41315 - DNA, 22 bp, synthetic construct
  misc_feature 1..22: note = chemically synthesized
  source 1..22: mol_type = other DNA
tcaagtagttaatgatctgtaa

SEQ ID NO: 41316 - DNA, 22 bp, synthetic construct
  misc_feature 1..22: note = chemically synthesized
  source 1..22: mol_type = other DNA
atgatctgtaaacaaacacttt

SEQ ID NO: 41317 - DNA, 22 bp, synthetic construct
  misc_feature 1..22: note = chemically synthesized
  source 1..22: mol_type = other DNA
taaacaaacactttaaattcag

SEQ ID NO: 41318 - DNA, 22 bp, synthetic construct
  misc_feature 1..22: note = chemically synthesized
  source 1..22: mol_type = other DNA
taaattcagtgggggagctcac

SEQ ID NO: 41319 - DNA, 22 bp, synthetic construct
  misc_feature 1..22: note = chemically synthesized
  source 1..22: mol_type = other DNA
aaattcagtgggggagctcact

SEQ ID NO: 41320 - DNA, 22 bp, synthetic construct
  misc_feature 1..22: note = chemically synthesized
  source 1..22: mol_type = other DNA
aattcagtgggggagctcacta

SEQ ID NO: 41321 - DNA, 22 bp, synthetic construct
  misc_feature 1..22: note = chemically synthesized
  source 1..22: mol_type = other DNA
agtgggggagctcactatttaa

SEQ ID NO: 41322 - DNA, 22 bp, synthetic construct
  misc_feature 1..22: note = chemically synthesized
  source 1..22: mol_type = other DNA
actatttaaagaaaccctgtgg

SEQ ID NO: 41323 - DNA, 22 bp, synthetic construct
  misc_feature 1..22: note = chemically synthesized
  source 1..22: mol_type = other DNA
tttaaagaaaccctgtggtgaa

SEQ ID NO: 41324 - DNA, 22 bp, synthetic construct
  misc_feature 1..22: note = chemically synthesized
  source 1..22: mol_type = other DNA
aaagaaaccctgtggtgaaacc

SEQ ID NO: 41325 - DNA, 22 bp, synthetic construct
  misc_feature 1..22: note = chemically synthesized
  source 1..22: mol_type = other DNA
aagaaaccctgtggtgaaacct

SEQ ID NO: 41326 - DNA, 22 bp, synthetic construct
  misc_feature 1..22: note = chemically synthesized
  source 1..22: mol_type = other DNA
tggtgaaaccttttgaaaagtt

SEQ ID NO: 41327 - DNA, 22 bp, synthetic construct
  misc_feature 1..22: note = chemically synthesized
  source 1..22: mol_type = other DNA
ttgaaaagttaacaatctttct

SEQ ID NO: 41328 - DNA, 22 bp, synthetic construct
  misc_feature 1..22: note = chemically synthesized
  source 1..22: mol_type = other DNA
tgaaaagttaacaatctttctg

SEQ ID NO: 41329 - DNA, 22 bp, synthetic construct
  misc_feature 1..22: note = chemically synthesized
  source 1..22: mol_type = other DNA
gaaaagttaacaatctttctgt

SEQ ID NO: 41330 - DNA, 22 bp, synthetic construct
  misc_feature 1..22: note = chemically synthesized
  source 1..22: mol_type = other DNA
aaaagttaacaatctttctgta

SEQ ID NO: 41331 - DNA, 22 bp, synthetic construct
  misc_feature 1..22: note = chemically synthesized
  source 1..22: mol_type = other DNA
acaatctttctgtaatgtgaaa

SEQ ID NO: 41332 - DNA, 22 bp, synthetic construct
  misc_feature 1..22: note = chemically synthesized
  source 1..22: mol_type = other DNA
tctgtaatgtgaaaaatcactc

SEQ ID NO: 41333 - DNA, 22 bp, synthetic construct
  misc_feature 1..22: note = chemically synthesized
  source 1..22: mol_type = other DNA
ctgtaatgtgaaaaatcactct

SEQ ID NO: 41334 - DNA, 22 bp, synthetic construct
  misc_feature 1..22: note = chemically synthesized
  source 1..22: mol_type = other DNA
tgtaatgtgaaaaatcactctc

SEQ ID NO: 41335 - DNA, 22 bp, synthetic construct
  misc_feature 1..22: note = chemically synthesized
  source 1..22: mol_type = other DNA
taatgtgaaaaatcactctcta

SEQ ID NO: 41336 - DNA, 22 bp, synthetic construct
  misc_feature 1..22: note = chemically synthesized
  source 1..22: mol_type = other DNA
tctaatttatcagtttccatta

SEQ ID NO: 41337 - DNA, 22 bp, synthetic construct
  misc_feature 1..22: note = chemically synthesized
  source 1..22: mol_type = other DNA
taatttatcagtttccattaat

SEQ ID NO: 41338 - DNA, 22 bp, synthetic construct
  misc_feature 1..22: note = chemically synthesized
  source 1..22: mol_type = other DNA
atttatcagtttccattaatga

SEQ ID NO: 41339 - DNA, 22 bp, synthetic construct
  misc_feature 1..22: note = chemically synthesized
  source 1..22: mol_type = other DNA
atcagtttccattaatgagatt

SEQ ID NO: 41340 - DNA, 22 bp, synthetic construct
  misc_feature 1..22: note = chemically synthesized
  source 1..22: mol_type = other DNA
tcagtttccattaatgagattt

SEQ ID NO: 41341 - DNA, 22 bp, synthetic construct
  misc_feature 1..22: note = chemically synthesized
  source 1..22: mol_type = other DNA
ccattaatgagatttttgtgtg

SEQ ID NO: 41342 - DNA, 22 bp, synthetic construct
  misc_feature 1..22: note = chemically synthesized
  source 1..22: mol_type = other DNA
cattaatgagatttttgtgtgt

SEQ ID NO: 41343 - DNA, 22 bp, synthetic construct
  misc_feature 1..22: note = chemically synthesized
  source 1..22: mol_type = other DNA
atgagatttttgtgtgtattgg

SEQ ID NO: 41344 - DNA, 22 bp, synthetic construct
  misc_feature 1..22: note = chemically synthesized
  source 1..22: mol_type = other DNA
ttgtgtgtattgggccttctga

SEQ ID NO: 41345 - DNA, 22 bp, synthetic construct
  misc_feature 1..22: note = chemically synthesized
  source 1..22: mol_type = other DNA
tgtgtgtattgggccttctgaa

SEQ ID NO: 41346 - DNA, 22 bp, synthetic construct
  misc_feature 1..22: note = chemically synthesized
  source 1..22: mol_type = other DNA
gtgtgtattgggccttctgaaa

SEQ ID NO: 41347 - DNA, 22 bp, synthetic construct
  misc_feature 1..22: note = chemically synthesized
  source 1..22: mol_type = other DNA
tgtgtattgggccttctgaaag

SEQ ID NO: 41348 - DNA, 22 bp, synthetic construct
  misc_feature 1..22: note = chemically synthesized
  source 1..22: mol_type = other DNA
ggccttctgaaagtggggctca

SEQ ID NO: 41349 - DNA, 22 bp, synthetic construct
  misc_feature 1..22: note = chemically synthesized
  source 1..22: mol_type = other DNA
ctgaaagtggggctcaactgca

SEQ ID NO: 41350 - DNA, 22 bp, synthetic construct
  misc_feature 1..22: note = chemically synthesized
  source 1..22: mol_type = other DNA
tgaaagtggggctcaactgcaa

SEQ ID NO: 41351 - DNA, 22 bp, synthetic construct
  misc_feature 1..22: note = chemically synthesized
  source 1..22: mol_type = other DNA
aaagtggggctcaactgcaatc

SEQ ID NO: 41352 - DNA, 22 bp, synthetic construct
  misc_feature 1..22: note = chemically synthesized
  source 1..22: mol_type = other DNA
aactgcaatccatgcctttgta

SEQ ID NO: 41353 - DNA, 22 bp, synthetic construct
  misc_feature 1..22: note = chemically synthesized
  source 1..22: mol_type = other DNA
caatccatgcctttgtagttag

SEQ ID NO: 41354 - DNA, 22 bp, synthetic construct
  misc_feature 1..22: note = chemically synthesized
  source 1..22: mol_type = other DNA
tgtagttagaagggacgataaa

SEQ ID NO: 41355 - DNA, 22 bp, synthetic construct
  misc_feature 1..22: note = chemically synthesized
  source 1..22: mol_type = other DNA
gtagttagaagggacgataaaa

SEQ ID NO: 41356 - DNA, 22 bp, synthetic construct
  misc_feature 1..22: note = chemically synthesized
  source 1..22: mol_type = other DNA
tagttagaagggacgataaaag

SEQ ID NO: 41357 - DNA, 22 bp, synthetic construct
  misc_feature 1..22: note = chemically synthesized
  source 1..22: mol_type = other DNA
gaagggacgataaaagacactg

SEQ ID NO: 41358 - DNA, 22 bp, synthetic construct
  misc_feature 1..22: note = chemically synthesized
  source 1..22: mol_type = other DNA
ccctgaacatatttctgtcacc

SEQ ID NO: 41359 - DNA, 22 bp, synthetic construct
  misc_feature 1..22: note = chemically synthesized
  source 1..22: mol_type = other DNA
aacatatttctgtcacccgaat

SEQ ID NO: 41360 - DNA, 22 bp, synthetic construct
  misc_feature 1..22: note = chemically synthesized
  source 1..22: mol_type = other DNA
ctgtcacccgaattgtccagct

SEQ ID NO: 41361 - DNA, 22 bp, synthetic construct
  misc_feature 1..22: note = chemically synthesized
  source 1..22: mol_type = other DNA
tgtcacccgaattgtccagctt

SEQ ID NO: 41362 - DNA, 22 bp, synthetic construct
  misc_feature 1..22: note = chemically synthesized
  source 1..22: mol_type = other DNA
tcacccgaattgtccagcttca

SEQ ID NO: 41363 - DNA, 22 bp, synthetic construct
  misc_feature 1..22: note = chemically synthesized
  source 1..22: mol_type = other DNA
tccagcttcacacaaacgtatc

SEQ ID NO: 41364 - DNA, 22 bp, synthetic construct
  misc_feature 1..22: note = chemically synthesized
  source 1..22: mol_type = other DNA
cacacaaacgtatcacaaacac

SEQ ID NO: 41365 - DNA, 22 bp, synthetic construct
  misc_feature 1..22: note = chemically synthesized
  source 1..22: mol_type = other DNA
acacaaacgtatcacaaacacc

SEQ ID NO: 41366 - DNA, 22 bp, synthetic construct
  misc_feature 1..22: note = chemically synthesized
  source 1..22: mol_type = other DNA
cctgccccactcgagaaatgaa

SEQ ID NO: 41367 - DNA, 22 bp, synthetic construct
  misc_feature 1..22: note = chemically synthesized
  source 1..22: mol_type = other DNA
ccccactcgagaaatgaagaaa

SEQ ID NO: 41368 - DNA, 22 bp, synthetic construct
  misc_feature 1..22: note = chemically synthesized
  source 1..22: mol_type = other DNA
gagaaatgaagaaaaggatggg

SEQ ID NO: 41369 - DNA, 22 bp, synthetic construct
  misc_feature 1..22: note = chemically synthesized
  source 1..22: mol_type = other DNA
ggacacctggaaagccttgcaa

SEQ ID NO: 41370 - DNA, 22 bp, synthetic construct
  misc_feature 1..22: note = chemically synthesized
  source 1..22: mol_type = other DNA
gacacctggaaagccttgcaaa

SEQ ID NO: 41371 - DNA, 22 bp, synthetic construct
  misc_feature 1..22: note = chemically synthesized
  source 1..22: mol_type = other DNA
gaaagccttgcaaaccacactt

SEQ ID NO: 41372 - DNA, 22 bp, synthetic construct
  misc_feature 1..22: note = chemically synthesized
  source 1..22: mol_type = other DNA
gcaaaccacacttgcgtttctc

SEQ ID NO: 41373 - DNA, 22 bp, synthetic construct
  misc_feature 1..22: note = chemically synthesized
  source 1..22: mol_type = other DNA
caaaccacacttgcgtttctcc

SEQ ID NO: 41374 - DNA, 22 bp, synthetic construct
  misc_feature 1..22: note = chemically synthesized
  source 1..22: mol_type = other DNA
gcgtttctcccaggttaagtat

SEQ ID NO: 41375 - DNA, 22 bp, synthetic construct
  misc_feature 1..22: note = chemically synthesized
  source 1..22: mol_type = other DNA
cgtttctcccaggttaagtatt

SEQ ID NO: 41376 - DNA, 22 bp, synthetic construct
  misc_feature 1..22: note = chemically synthesized
  source 1..22: mol_type = other DNA
ctcccaggttaagtattagata

SEQ ID NO: 41377 - DNA, 22 bp, synthetic construct
  misc_feature 1..22: note = chemically synthesized
  source 1..22: mol_type = other DNA
tcccaggttaagtattagatac

SEQ ID NO: 41378 - DNA, 22 bp, synthetic construct
  misc_feature 1..22: note = chemically synthesized
  source 1..22: mol_type = other DNA
ccaggttaagtattagatacct

SEQ ID NO: 41379 - DNA, 22 bp, synthetic construct
  misc_feature 1..22: note = chemically synthesized
  source 1..22: mol_type = other DNA
agtattagatacctgaggaagg

SEQ ID NO: 41380 - DNA, 22 bp, synthetic construct
  misc_feature 1..22: note = chemically synthesized
  source 1..22: mol_type = other DNA
gatacctgaggaaggtgaaata

SEQ ID NO: 41381 - DNA, 22 bp, synthetic construct
  misc_feature 1..22: note = chemically synthesized
  source 1..22: mol_type = other DNA
aggaaggtgaaatacgcatttt

SEQ ID NO: 41382 - DNA, 22 bp, synthetic construct
  misc_feature 1..22: note = chemically synthesized
  source 1..22: mol_type = other DNA
tcaactgagcattcaggaagag

SEQ ID NO: 41383 - DNA, 22 bp, synthetic construct
  misc_feature 1..22: note = chemically synthesized
  source 1..22: mol_type = other DNA
caactgagcattcaggaagagg

SEQ ID NO: 41384 - DNA, 22 bp, synthetic construct
  misc_feature 1..22: note = chemically synthesized
  source 1..22: mol_type = other DNA
aactgagcattcaggaagaggc

SEQ ID NO: 41385 - DNA, 22 bp, synthetic construct
  misc_feature 1..22: note = chemically synthesized
  source 1..22: mol_type = other DNA
agcattcaggaagaggcatggg

SEQ ID NO: 41386 - DNA, 22 bp, synthetic construct
  misc_feature 1..22: note = chemically synthesized
  source 1..22: mol_type = other DNA
aggaagaggcatggggctgtga

SEQ ID NO: 41387 - DNA, 22 bp, synthetic construct
  misc_feature 1..22: note = chemically synthesized
  source 1..22: mol_type = other DNA
tgaagatggatgcgatgagaat

SEQ ID NO: 41388 - DNA, 22 bp, synthetic construct
  misc_feature 1..22: note = chemically synthesized
  source 1..22: mol_type = other DNA
gcaaacgtttgattctgataac

SEQ ID NO: 41389 - DNA, 22 bp, synthetic construct
  misc_feature 1..22: note = chemically synthesized
  source 1..22: mol_type = other DNA
caaacgtttgattctgataaca

SEQ ID NO: 41390 - DNA, 22 bp, synthetic construct
  misc_feature 1..22: note = chemically synthesized
  source 1..22: mol_type = other DNA
gattctgataacacctgccaga

SEQ ID NO: 41391 - DNA, 22 bp, synthetic construct
  misc_feature 1..22: note = chemically synthesized
  source 1..22: mol_type = other DNA
attctgataacacctgccagag

SEQ ID NO: 41392 - DNA, 22 bp, synthetic construct
  misc_feature 1..22: note = chemically synthesized
  source 1..22: mol_type = other DNA
tgataacacctgccagagcaga

SEQ ID NO: 41393 - DNA, 22 bp, synthetic construct
  misc_feature 1..22: note = chemically synthesized
  source 1..22: mol_type = other DNA
ataacacctgccagagcagaga

SEQ ID NO: 41394 - DNA, 22 bp, synthetic construct
  misc_feature 1..22: note = chemically synthesized
  source 1..22: mol_type = other DNA
ccagagcagagaagggcttgtc

SEQ ID NO: 41395 - DNA, 22 bp, synthetic construct
  misc_feature 1..22: note = chemically synthesized
  source 1..22: mol_type = other DNA
gtctatcaaagccagcagaaca

SEQ ID NO: 41396 - DNA, 22 bp, synthetic construct
  misc_feature 1..22: note = chemically synthesized
  source 1..22: mol_type = other DNA
tctatcaaagccagcagaacac

SEQ ID NO: 41397 - DNA, 22 bp, synthetic construct
  misc_feature 1..22: note = chemically synthesized
  source 1..22: mol_type = other DNA
tcaaagccagcagaacacacaa

SEQ ID NO: 41398 - DNA, 22 bp, synthetic construct
  misc_feature 1..22: note = chemically synthesized
  source 1..22: mol_type = other DNA
ccaaattactctgaagaccacc

SEQ ID NO: 41399 - DNA, 22 bp, synthetic construct
  misc_feature 1..22: note = chemically synthesized
  source 1..22: mol_type = other DNA
ctctgaagaccaccccaagcct

SEQ ID NO: 41400 - DNA, 22 bp, synthetic construct
  misc_feature 1..22: note = chemically synthesized
  source 1..22: mol_type = other DNA
tgaagaccaccccaagcctttt

SEQ ID NO: 41401 - DNA, 22 bp, synthetic construct
  misc_feature 1..22: note = chemically synthesized
  source 1..22: mol_type = other DNA
aagaccaccccaagccttttta

SEQ ID NO: 41402 - DNA, 22 bp, synthetic construct
  misc_feature 1..22: note = chemically synthesized
  source 1..22: mol_type = other DNA
tttatctgcatcaactcacaac

SEQ ID NO: 41403 - DNA, 22 bp, synthetic construct
  misc_feature 1..22: note = chemically synthesized
  source 1..22: mol_type = other DNA
ttatctgcatcaactcacaaca

SEQ ID NO: 41404 - DNA, 22 bp, synthetic construct
  misc_feature 1..22: note = chemically synthesized
  source 1..22: mol_type = other DNA
tatctgcatcaactcacaacaa

SEQ ID NO: 41405 - DNA, 22 bp, synthetic construct
  misc_feature 1..22: note = chemically synthesized
  source 1..22: mol_type = other DNA
atctgcatcaactcacaacaaa

SEQ ID NO: 41406 - DNA, 22 bp, synthetic construct
  misc_feature 1..22: note = chemically synthesized
  source 1..22: mol_type = other DNA
tctgcatcaactcacaacaaat

SEQ ID NO: 41407 - DNA, 22 bp, synthetic construct
  misc_feature 1..22: note = chemically synthesized
  source 1..22: mol_type = other DNA
catcaactcacaacaaatgtgc

SEQ ID NO: 41408 - DNA, 22 bp, synthetic construct
  misc_feature 1..22: note = chemically synthesized
  source 1..22: mol_type = other DNA
acaacaaatgtgctttatgcct

SEQ ID NO: 41409 - DNA, 22 bp, synthetic construct
  misc_feature 1..22: note = chemically synthesized
  source 1..22: mol_type = other DNA
tatgcctctatattatcatttc

SEQ ID NO: 41410 - DNA, 22 bp, synthetic construct
  misc_feature 1..22: note = chemically synthesized
  source 1..22: mol_type = other DNA
atgcctctatattatcatttcg

SEQ ID NO: 41411 - DNA, 22 bp, synthetic construct
  misc_feature 1..22: note = chemically synthesized
  source 1..22: mol_type = other DNA
tgcctctatattatcatttcga

SEQ ID NO: 41412 - DNA, 22 bp, synthetic construct
  misc_feature 1..22: note = chemically synthesized
  source 1..22: mol_type = other DNA
tatattatcatttcgatcggtc

SEQ ID NO: 41413 - DNA, 22 bp, synthetic construct
  misc_feature 1..22: note = chemically synthesized
  source 1..22: mol_type = other DNA
tattatcatttcgatcggtctt

SEQ ID NO: 41414 - DNA, 22 bp, synthetic construct
  misc_feature 1..22: note = chemically synthesized
  source 1..22: mol_type = other DNA
tcatttcgatcggtcttgagaa

SEQ ID NO: 41415 - DNA, 22 bp, synthetic construct
  misc_feature 1..22: note = chemically synthesized
  source 1..22: mol_type = other DNA
cgatcggtcttgagaaaatact

SEQ ID NO: 41416 - DNA, 22 bp, synthetic construct
  misc_feature 1..22: note = chemically synthesized
  source 1..22: mol_type = other DNA
gatcggtcttgagaaaatacta

SEQ ID NO: 41417 - DNA, 22 bp, synthetic construct
  misc_feature 1..22: note = chemically synthesized
  source 1..22: mol_type = other DNA
gagaaaatactagaataagcta

SEQ ID NO: 41418 - DNA, 22 bp, synthetic construct
  misc_feature 1..22: note = chemically synthesized
  source 1..22: mol_type = other DNA
agaaaatactagaataagctaa

SEQ ID NO: 41419 - DNA, 22 bp, synthetic construct
  misc_feature 1..22: note = chemically synthesized
  source 1..22: mol_type = other DNA
gaataagctaaagaaaaccaaa

SEQ ID NO: 41420 - DNA, 22 bp, synthetic construct
  misc_feature 1..22: note = chemically synthesized
  source 1..22: mol_type = other DNA
aagaaaaccaaacatgggtgga

SEQ ID NO: 41421 - DNA, 22 bp, synthetic construct
  misc_feature 1..22: note = chemically synthesized
  source 1..22: mol_type = other DNA
ggagaaatgcctaatgtagatg

SEQ ID NO: 41422 - DNA, 22 bp, synthetic construct
  misc_feature 1..22: note = chemically synthesized
  source 1..22: mol_type = other DNA
atgtagatgatgggttgatagg

SEQ ID NO: 41423 - DNA, 22 bp, synthetic construct
  misc_feature 1..22: note = chemically synthesized
  source 1..22: mol_type = other DNA
ataggtgcagcaaaccaccatg

SEQ ID NO: 41424 - DNA, 22 bp, synthetic construct
  misc_feature 1..22: note = chemically synthesized
  source 1..22: mol_type = other DNA
atgtaacaaacctgcacattct

SEQ ID NO: 41425 - DNA, 22 bp, synthetic construct
  misc_feature 1..22: note = chemically synthesized
  source 1..22: mol_type = other DNA
tgtaacaaacctgcacattctg

SEQ ID NO: 41426 - DNA, 22 bp, synthetic construct
  misc_feature 1..22: note = chemically synthesized
  source 1..22: mol_type = other DNA
cacattctgcacatgtatccca

SEQ ID NO: 41427 - DNA, 22 bp, synthetic construct
  misc_feature 1..22: note = chemically synthesized
  source 1..22: mol_type = other DNA
tgcacatgtatcccagaactta

SEQ ID NO: 41428 - DNA, 22 bp, synthetic construct
  misc_feature 1..22: note = chemically synthesized
  source 1..22: mol_type = other DNA
cacatgtatcccagaacttaga

SEQ ID NO: 41429 - DNA, 22 bp, synthetic construct
  misc_feature 1..22: note = chemically synthesized
  source 1..22: mol_type = other DNA
agagtaaaataaataaagaaag

SEQ ID NO: 41430 - DNA, 22 bp, synthetic construct
  misc_feature 1..22: note = chemically synthesized
  source 1..22: mol_type = other DNA
gagtaaaataaataaagaaaga

SEQ ID NO: 41431 - DNA, 22 bp, synthetic construct
  misc_feature 1..22: note = chemically synthesized
  source 1..22: mol_type = other DNA
ccaagagactcctgatgttttg

SEQ ID NO: 41432 - DNA, 22 bp, synthetic construct
  misc_feature 1..22: note = chemically synthesized
  source 1..22: mol_type = other DNA
caagagactcctgatgttttgt

SEQ ID NO: 41433 - DNA, 22 bp, synthetic construct
  misc_feature 1..22: note = chemically synthesized
  source 1..22: mol_type = other DNA
ctgatgttttgttcgtgggcac

SEQ ID NO: 41434 - DNA, 22 bp, synthetic construct
  misc_feature 1..22: note = chemically synthesized
  source 1..22: mol_type = other DNA
atgttttgttcgtgggcactgt

SEQ ID NO: 41435 - DNA, 22 bp, synthetic construct
  misc_feature 1..22: note = chemically synthesized
  source 1..22: mol_type = other DNA
tgttcgtgggcactgtggaaac

SEQ ID NO: 41436 - DNA, 22 bp, synthetic construct
  misc_feature 1..22: note = chemically synthesized
  source 1..22: mol_type = other DNA
gttcgtgggcactgtggaaaca

SEQ ID NO: 41437 - DNA, 22 bp, synthetic construct
  misc_feature 1..22: note = chemically synthesized
  source 1..22: mol_type = other DNA
ttcgtgggcactgtggaaacag

SEQ ID NO: 41438 - DNA, 22 bp, synthetic construct
  misc_feature 1..22: note = chemically synthesized
  source 1..22: mol_type = other DNA
gtgggcactgtggaaacagggg

SEQ ID NO: 41439 - DNA, 22 bp, synthetic construct
  misc_feature 1..22: note = chemically synthesized
  source 1..22: mol_type = other DNA
tggaaacaggggcagtggtgct

SEQ ID NO: 41440 - DNA, 22 bp, synthetic construct
  misc_feature 1..22: note = chemically synthesized
  source 1..22: mol_type = other DNA
tgagagacaagggagtggggag

SEQ ID NO: 41441 - DNA, 22 bp, synthetic construct
  misc_feature 1..22: note = chemically synthesized
  source 1..22: mol_type = other DNA
cagcccggccaggtggagggct

SEQ ID NO: 41442 - DNA, 22 bp, synthetic construct
  misc_feature 1..22: note = chemically synthesized
  source 1..22: mol_type = other DNA
tcctgacttatcatccaagact

SEQ ID NO: 41443 - DNA, 22 bp, synthetic construct
  misc_feature 1..22: note = chemically synthesized
  source 1..22: mol_type = other DNA
cctgacttatcatccaagactg

SEQ ID NO: 41444 - DNA, 22 bp, synthetic construct
  misc_feature 1..22: note = chemically synthesized
  source 1..22: mol_type = other DNA
ctgacttatcatccaagactgg

SEQ ID NO: 41445 - DNA, 22 bp, synthetic construct
  misc_feature 1..22: note = chemically synthesized
  source 1..22: mol_type = other DNA
acttatcatccaagactggtct

SEQ ID NO: 41446 - DNA, 22 bp, synthetic construct
  misc_feature 1..22: note = chemically synthesized
  source 1..22: mol_type = other DNA
atcatccaagactggtctgtgc

SEQ ID NO: 41447 - DNA, 22 bp, synthetic construct
  misc_feature 1..22: note = chemically synthesized
  source 1..22: mol_type = other DNA
tcatccaagactggtctgtgca

SEQ ID NO: 41448 - DNA, 22 bp, synthetic construct
  misc_feature 1..22: note = chemically synthesized
  source 1..22: mol_type = other DNA
gtctgtgcacggagaaggggcc

SEQ ID NO: 41449 - DNA, 22 bp, synthetic construct
  misc_feature 1..22: note = chemically synthesized
  source 1..22: mol_type = other DNA
tgcacggagaaggggccagaag

SEQ ID NO: 41450 - DNA, 22 bp, synthetic construct
  misc_feature 1..22: note = chemically synthesized
  source 1..22: mol_type = other DNA
tgtcaggcctcccccaaggcca

SEQ ID NO: 41451 - DNA, 22 bp, synthetic construct
  misc_feature 1..22: note = chemically synthesized
  source 1..22: mol_type = other DNA
tcaggcctcccccaaggccaac

SEQ ID NO: 41452 - DNA, 22 bp, synthetic construct
  misc_feature 1..22: note = chemically synthesized
  source 1..22: mol_type = other DNA
ccccaaggccaacaagcccaga

SEQ ID NO: 41453 - DNA, 22 bp, synthetic construct
  misc_feature 1..22: note = chemically synthesized
  source 1..22: mol_type = other DNA
caactctagcccttcttaagga

SEQ ID NO: 41454 - DNA, 22 bp, synthetic construct
  misc_feature 1..22: note = chemically synthesized
  source 1..22: mol_type = other DNA
tagcccttcttaaggaagcaca

SEQ ID NO: 41455 - DNA, 22 bp, synthetic construct
  misc_feature 1..22: note = chemically synthesized
  source 1..22: mol_type = other DNA
gcccttcttaaggaagcacatc

SEQ ID NO: 41456 - DNA, 22 bp, synthetic construct
  misc_feature 1..22: note = chemically synthesized
  source 1..22: mol_type = other DNA
cttaaggaagcacatctgtcct

SEQ ID NO: 41457 - DNA, 22 bp, synthetic construct
  misc_feature 1..22: note = chemically synthesized
  source 1..22: mol_type = other DNA
ttaaggaagcacatctgtcctg

SEQ ID NO: 41458 - DNA, 22 bp, synthetic construct
  misc_feature 1..22: note = chemically synthesized
  source 1..22: mol_type = other DNA
aaggaagcacatctgtcctggc

SEQ ID NO: 41459 - DNA, 22 bp, synthetic construct
  misc_feature 1..22: note = chemically synthesized
  source 1..22: mol_type = other DNA
aggaagcacatctgtcctggcc

SEQ ID NO: 41460 - DNA, 22 bp, synthetic construct
  misc_feature 1..22: note = chemically synthesized
  source 1..22: mol_type = other DNA
tcctggcctttatggaaagctt

SEQ ID NO: 41461 - DNA, 22 bp, synthetic construct
  misc_feature 1..22: note = chemically synthesized
  source 1..22: mol_type = other DNA
gcctttatggaaagcttttttt

SEQ ID NO: 41462 - DNA, 22 bp, synthetic construct
  misc_feature 1..22: note = chemically synthesized
  source 1..22: mol_type = other DNA
tatggaaagctttttttttttt

SEQ ID NO: 41463 - DNA, 22 bp, synthetic construct
  misc_feature 1..22: note = chemically synthesized
  source 1..22: mol_type = other DNA
atggaaagcttttttttttttt

SEQ ID NO: 41464 - DNA, 22 bp, synthetic construct
  misc_feature 1..22: note = chemically synthesized
  source 1..22: mol_type = other DNA
tggaaagctttttttttttttt

SEQ ID NO: 41465 - DNA, 22 bp, synthetic construct
  misc_feature 1..22: note = chemically synthesized
  source 1..22: mol_type = other DNA
ttttttttttttttttaattga

SEQ ID NO: 41466 - DNA, 22 bp, synthetic construct
  misc_feature 1..22: note = chemically synthesized
  source 1..22: mol_type = other DNA
tttttttttttttttaattgag

SEQ ID NO: 41467 - DNA, 22 bp, synthetic construct
  misc_feature 1..22: note = chemically synthesized
  source 1..22: mol_type = other DNA
ttttttttttttttaattgaga

SEQ ID NO: 41468 - DNA, 22 bp, synthetic construct
  misc_feature 1..22: note = chemically synthesized
  source 1..22: mol_type = other DNA
tttttttttttttaattgagac

SEQ ID NO: 41469 - DNA, 22 bp, synthetic construct
  misc_feature 1..22: note = chemically synthesized
  source 1..22: mol_type = other DNA
ttttttttttttaattgagaca

SEQ ID NO: 41470 - DNA, 22 bp, synthetic construct
  misc_feature 1..22: note = chemically synthesized
  source 1..22: mol_type = other DNA
tttttttttttaattgagacat

SEQ ID NO: 41471 - DNA, 22 bp, synthetic construct
  misc_feature 1..22: note = chemically synthesized
  source 1..22: mol_type = other DNA
ttttttttttaattgagacatg

SEQ ID NO: 41472 - DNA, 22 bp, synthetic construct
  misc_feature 1..22: note = chemically synthesized
  source 1..22: mol_type = other DNA
tttttttttaattgagacatgg

SEQ ID NO: 41473 - DNA, 22 bp, synthetic construct
  misc_feature 1..22: note = chemically synthesized
  source 1..22: mol_type = other DNA
ttttttttaattgagacatggt

SEQ ID NO: 41474 - DNA, 22 bp, synthetic construct
  misc_feature 1..22: note = chemically synthesized
  source 1..22: mol_type = other DNA
tttttttaattgagacatggtc

SEQ ID NO: 41475 - DNA, 22 bp, synthetic construct
  misc_feature 1..22: note = chemically synthesized
  source 1..22: mol_type = other DNA
ttttttaattgagacatggtct

SEQ ID NO: 41476 - DNA, 22 bp, synthetic construct
  misc_feature 1..22: note = chemically synthesized
  source 1..22: mol_type = other DNA
tttttaattgagacatggtctc

SEQ ID NO: 41477 - DNA, 22 bp, synthetic construct
  misc_feature 1..22: note = chemically synthesized
  source 1..22: mol_type = other DNA
ttttaattgagacatggtctca

SEQ ID NO: 41478 - DNA, 22 bp, synthetic construct
  misc_feature 1..22: note = chemically synthesized
  source 1..22: mol_type = other DNA
tttaattgagacatggtctcac

SEQ ID NO: 41479 - DNA, 22 bp, synthetic construct
  misc_feature 1..22: note = chemically synthesized
  source 1..22: mol_type = other DNA
ttaattgagacatggtctcact

SEQ ID NO: 41480 - DNA, 22 bp, synthetic construct
  misc_feature 1..22: note = chemically synthesized
  source 1..22: mol_type = other DNA
taattgagacatggtctcactc

SEQ ID NO: 41481 - DNA, 22 bp, synthetic construct
  misc_feature 1..22: note = chemically synthesized
  source 1..22: mol_type = other DNA
aattgagacatggtctcactct

SEQ ID NO: 41482 - DNA, 22 bp, synthetic construct
  misc_feature 1..22: note = chemically synthesized
  source 1..22: mol_type = other DNA
attgagacatggtctcactctg

SEQ ID NO: 41483 - DNA, 22 bp, synthetic construct
  misc_feature 1..22: note = chemically synthesized
  source 1..22: mol_type = other DNA
agacatggtctcactctgttgc

SEQ ID NO: 41484 - DNA, 22 bp, synthetic construct
  misc_feature 1..22: note = chemically synthesized
  source 1..22: mol_type = other DNA
actctgttgcccaggctggagt

SEQ ID NO: 41485 - DNA, 22 bp, synthetic construct
  misc_feature 1..22: note = chemically synthesized
  source 1..22: mol_type = other DNA
tgttgcccaggctggagtgcag

SEQ ID NO: 41486 - DNA, 22 bp, synthetic construct
  misc_feature 1..22: note = chemically synthesized
  source 1..22: mol_type = other DNA
ttgcccaggctggagtgcagtg

SEQ ID NO: 41487 - DNA, 22 bp, synthetic construct
  misc_feature 1..22: note = chemically synthesized
  source 1..22: mol_type = other DNA
cccaggctggagtgcagtggtg

SEQ ID NO: 41488 - DNA, 22 bp, synthetic construct
  misc_feature 1..22: note = chemically synthesized
  source 1..22: mol_type = other DNA
gagtgcagtggtgcaatcttgg

SEQ ID NO: 41489 - DNA, 22 bp, synthetic construct
  misc_feature 1..22: note = chemically synthesized
  source 1..22: mol_type = other DNA
ggctcactgcaacctccgcctc

SEQ ID NO: 41490 - DNA, 22 bp, synthetic construct
  misc_feature 1..22: note = chemically synthesized
  source 1..22: mol_type = other DNA
gctcactgcaacctccgcctcc

SEQ ID NO: 41491 - DNA, 22 bp, synthetic construct
  misc_feature 1..22: note = chemically synthesized
  source 1..22: mol_type = other DNA
actgcaacctccgcctcccgag

SEQ ID NO: 41492 - DNA, 22 bp, synthetic construct
  misc_feature 1..22: note = chemically synthesized
  source 1..22: mol_type = other DNA
caacctccgcctcccgagttca

SEQ ID NO: 41493 - DNA, 22 bp, synthetic construct
  misc_feature 1..22: note = chemically synthesized
  source 1..22: mol_type = other DNA
cgcctcccgagttcaagcagtc

SEQ ID NO: 41494 - DNA, 22 bp, synthetic construct
  misc_feature 1..22: note = chemically synthesized
  source 1..22: mol_type = other DNA
ccgagttcaagcagtcctcctg

SEQ ID NO: 41495 - DNA, 22 bp, synthetic construct
  misc_feature 1..22: note = chemically synthesized
  source 1..22: mol_type = other DNA
aagcagtcctcctgcctcagct

SEQ ID NO: 41496 - DNA, 22 bp, synthetic construct
  misc_feature 1..22: note = chemically synthesized
  source 1..22: mol_type = other DNA
ctgcctcagctctcaagtagct

SEQ ID NO: 41497 - DNA, 22 bp, synthetic construct
  misc_feature 1..22: note = chemically synthesized
  source 1..22: mol_type = other DNA
cctcagctctcaagtagctagg

SEQ ID NO: 41498 - DNA, 22 bp, synthetic construct
  misc_feature 1..22: note = chemically synthesized
  source 1..22: mol_type = other DNA
agctctcaagtagctaggacta

SEQ ID NO: 41499 - DNA, 22 bp, synthetic construct
  misc_feature 1..22: note = chemically synthesized
  source 1..22: mol_type = other DNA
tcaagtagctaggactacaggc

SEQ ID NO: 41500 - DNA, 22 bp, synthetic construct
  misc_feature 1..22: note = chemically synthesized
  source 1..22: mol_type = other DNA
aagtagctaggactacaggcat

SEQ ID NO: 41501 - DNA, 22 bp, synthetic construct
  misc_feature 1..22: note = chemically synthesized
  source 1..22: mol_type = other DNA
ggactacaggcatgcgccacca

SEQ ID NO: 41502 - DNA, 22 bp, synthetic construct
  misc_feature 1..22: note = chemically synthesized
  source 1..22: mol_type = other DNA
caggcatgcgccaccaccacac

SEQ ID NO: 41503 - DNA, 22 bp, synthetic construct
  misc_feature 1..22: note = chemically synthesized
  source 1..22: mol_type = other DNA
gctaatttttgtattttttgta

SEQ ID NO: 41504 - DNA, 22 bp, synthetic construct
  misc_feature 1..22: note = chemically synthesized
  source 1..22: mol_type = other DNA
atttttgtattttttgtagaga

SEQ ID NO: 41505 - DNA, 22 bp, synthetic construct
  misc_feature 1..22: note = chemically synthesized
  source 1..22: mol_type = other DNA
ttgtattttttgtagagatggg

SEQ ID NO: 41506 - DNA, 22 bp, synthetic construct
  misc_feature 1..22: note = chemically synthesized
  source 1..22: mol_type = other DNA
tgtattttttgtagagatggga

SEQ ID NO: 41507 - DNA, 22 bp, synthetic construct
  misc_feature 1..22: note = chemically synthesized
  source 1..22: mol_type = other DNA
gtattttttgtagagatgggat

SEQ ID NO: 41508 - DNA, 22 bp, synthetic construct
  misc_feature 1..22: note = chemically synthesized
  source 1..22: mol_type = other DNA
tattttttgtagagatgggatc

SEQ ID NO: 41509 - DNA, 22 bp, synthetic construct
  misc_feature 1..22: note = chemically synthesized
  source 1..22: mol_type = other DNA
tttgtagagatgggatctcacc

SEQ ID NO: 41510 - DNA, 22 bp, synthetic construct
  misc_feature 1..22: note = chemically synthesized
  source 1..22: mol_type = other DNA
ttgtagagatgggatctcacca

SEQ ID NO: 41511 - DNA, 22 bp, synthetic construct
  misc_feature 1..22: note = chemically synthesized
  source 1..22: mol_type = other DNA
tgtagagatgggatctcaccat

SEQ ID NO: 41512 - DNA, 22 bp, synthetic construct
  misc_feature 1..22: note = chemically synthesized
  source 1..22: mol_type = other DNA
gtagagatgggatctcaccatg

SEQ ID NO: 41513 - DNA, 22 bp, synthetic construct
  misc_feature 1..22: note = chemically synthesized
  source 1..22: mol_type = other DNA
tagagatgggatctcaccatgt

SEQ ID NO: 41514 - DNA, 22 bp, synthetic construct
  misc_feature 1..22: note = chemically synthesized
  source 1..22: mol_type = other DNA
accatgttgcccaggctgggtg

SEQ ID NO: 41515 - DNA, 22 bp, synthetic construct
  misc_feature 1..22: note = chemically synthesized
  source 1..22: mol_type = other DNA
cccaggctgggtggaaagtgtt

SEQ ID NO: 41516 - DNA, 22 bp, synthetic construct
  misc_feature 1..22: note = chemically synthesized
  source 1..22: mol_type = other DNA
ggtggaaagtgttatgttcttc

SEQ ID NO: 41517 - DNA, 22 bp, synthetic construct
  misc_feature 1..22: note = chemically synthesized
  source 1..22: mol_type = other DNA
tgttcttcccaaagtactctcc

SEQ ID NO: 41518 - DNA, 22 bp, synthetic construct
  misc_feature 1..22: note = chemically synthesized
  source 1..22: mol_type = other DNA
ttcccaaagtactctcctcaca

SEQ ID NO: 41519 - DNA, 22 bp, synthetic construct
  misc_feature 1..22: note = chemically synthesized
  source 1..22: mol_type = other DNA
cccaaagtactctcctcacatc

SEQ ID NO: 41520 - DNA, 22 bp, synthetic construct
  misc_feature 1..22: note = chemically synthesized
  source 1..22: mol_type = other DNA
ccaaagtactctcctcacatcc

SEQ ID NO: 41521 - DNA, 22 bp, synthetic construct
  misc_feature 1..22: note = chemically synthesized
  source 1..22: mol_type = other DNA
tcctcacatcctgccccaacag

SEQ ID NO: 41522 - DNA, 22 bp, synthetic construct
  misc_feature 1..22: note = chemically synthesized
  source 1..22: mol_type = other DNA
ctcacatcctgccccaacagtc

SEQ ID NO: 41523 - DNA, 22 bp, synthetic construct
  misc_feature 1..22: note = chemically synthesized
  source 1..22: mol_type = other DNA
acatcctgccccaacagtcgcc

SEQ ID NO: 41524 - DNA, 22 bp, synthetic construct
  misc_feature 1..22: note = chemically synthesized
  source 1..22: mol_type = other DNA
ccccaacagtcgccctgtggaa

SEQ ID NO: 41525 - DNA, 22 bp, synthetic construct
  misc_feature 1..22: note = chemically synthesized
  source 1..22: mol_type = other DNA
tggaatgagggaaggtattagc

SEQ ID NO: 41526 - DNA, 22 bp, synthetic construct
  misc_feature 1..22: note = chemically synthesized
  source 1..22: mol_type = other DNA
gcctcacctcccagtgaggaac

SEQ ID NO: 41527 - DNA, 22 bp, synthetic construct
  misc_feature 1..22: note = chemically synthesized
  source 1..22: mol_type = other DNA
acctcccagtgaggaactcgaa

SEQ ID NO: 41528 - DNA, 22 bp, synthetic construct
  misc_feature 1..22: note = chemically synthesized
  source 1..22: mol_type = other DNA
ccagtgaggaactcgaagatct

SEQ ID NO: 41529 - DNA, 22 bp, synthetic construct
  misc_feature 1..22: note = chemically synthesized
  source 1..22: mol_type = other DNA
gaagatctcagaagtgtcctgc

SEQ ID NO: 41530 - DNA, 22 bp, synthetic construct
  misc_feature 1..22: note = chemically synthesized
  source 1..22: mol_type = other DNA
agaagtgtcctgctgtggacag

SEQ ID NO: 41531 - DNA, 22 bp, synthetic construct
  misc_feature 1..22: note = chemically synthesized
  source 1..22: mol_type = other DNA
ctgtggacagggaggacagggc

SEQ ID NO: 41532 - DNA, 22 bp, synthetic construct
  misc_feature 1..22: note = chemically synthesized
  source 1..22: mol_type = other DNA
tggacagggaggacagggctgg

SEQ ID NO: 41533 - DNA, 22 bp, synthetic construct
  misc_feature 1..22: note = chemically synthesized
  source 1..22: mol_type = other DNA
ggcttcaggaccctgcccacct

SEQ ID NO: 41534 - DNA, 22 bp, synthetic construct
  misc_feature 1..22: note = chemically synthesized
  source 1..22: mol_type = other DNA
caggaccctgcccaccttctga

SEQ ID NO: 41535 - DNA, 22 bp, synthetic construct
  misc_feature 1..22: note = chemically synthesized
  source 1..22: mol_type = other DNA
aggaccctgcccaccttctgac

SEQ ID NO: 41536 - DNA, 22 bp, synthetic construct
  misc_feature 1..22: note = chemically synthesized
  source 1..22: mol_type = other DNA
cccaccttctgacaaacccctc

SEQ ID NO: 41537 - DNA, 22 bp, synthetic construct
  misc_feature 1..22: note = chemically synthesized
  source 1..22: mol_type = other DNA
ctgacaaacccctcccactgcc

SEQ ID NO: 41538 - DNA, 22 bp, synthetic construct
  misc_feature 1..22: note = chemically synthesized
  source 1..22: mol_type = other DNA
tgacaaacccctcccactgcca

SEQ ID NO: 41539 - DNA, 22 bp, synthetic construct
  misc_feature 1..22: note = chemically synthesized
  source 1..22: mol_type = other DNA
acaaacccctcccactgccacc

SEQ ID NO: 41540 - DNA, 22 bp, synthetic construct
  misc_feature 1..22: note = chemically synthesized
  source 1..22: mol_type = other DNA
ccactgccacctcagggccgcg

SEQ ID NO: 41541 - DNA, 22 bp, synthetic construct
  misc_feature 1..22: note = chemically synthesized
  source 1..22: mol_type = other DNA
ccacctcagggccgcggcagaa

SEQ ID NO: 41542 - DNA, 22 bp, synthetic construct
  misc_feature 1..22: note = chemically synthesized
  source 1..22: mol_type = other DNA
agggccgcggcagaaacctgtc

SEQ ID NO: 41543 - DNA, 22 bp, synthetic construct
  misc_feature 1..22: note = chemically synthesized
  source 1..22: mol_type = other DNA
tcgtctggacactggtcataca

SEQ ID NO: 41544 - DNA, 22 bp, synthetic construct
  misc_feature 1..22: note = chemically synthesized
  source 1..22: mol_type = other DNA
gacactggtcatacagcccctt

SEQ ID NO: 41545 - DNA, 22 bp, synthetic construct
  misc_feature 1..22: note = chemically synthesized
  source 1..22: mol_type = other DNA
gtcatacagcccctttcaggca

SEQ ID NO: 41546 - DNA, 22 bp, synthetic construct
  misc_feature 1..22: note = chemically synthesized
  source 1..22: mol_type = other DNA
tcaggcaatctcctcacttgcc

SEQ ID NO: 41547 - DNA, 22 bp, synthetic construct
  misc_feature 1..22: note = chemically synthesized
  source 1..22: mol_type = other DNA
caggcaatctcctcacttgcct

SEQ ID NO: 41548 - DNA, 22 bp, synthetic construct
  misc_feature 1..22: note = chemically synthesized
  source 1..22: mol_type = other DNA
aggcaatctcctcacttgcctt

SEQ ID NO: 41549 - DNA, 22 bp, synthetic construct
  misc_feature 1..22: note = chemically synthesized
  source 1..22: mol_type = other DNA
ctcacttgcctttctggcacta

SEQ ID NO: 41550 - DNA, 22 bp, synthetic construct
  misc_feature 1..22: note = chemically synthesized
  source 1..22: mol_type = other DNA
acttgcctttctggcactattg

SEQ ID NO: 41551 - DNA, 22 bp, synthetic construct
  misc_feature 1..22: note = chemically synthesized
  source 1..22: mol_type = other DNA
gcctttctggcactattgagtg

SEQ ID NO: 41552 - DNA, 22 bp, synthetic construct
  misc_feature 1..22: note = chemically synthesized
  source 1..22: mol_type = other DNA
cctttctggcactattgagtga

SEQ ID NO: 41553 - DNA, 22 bp, synthetic construct
  misc_feature 1..22: note = chemically synthesized
  source 1..22: mol_type = other DNA
tctggcactattgagtgactgg

SEQ ID NO: 41554 - DNA, 22 bp, synthetic construct
  misc_feature 1..22: note = chemically synthesized
  source 1..22: mol_type = other DNA
ctggcactattgagtgactggt

SEQ ID NO: 41555 - DNA, 22 bp, synthetic construct
  misc_feature 1..22: note = chemically synthesized
  source 1..22: mol_type = other DNA
tggcactattgagtgactggtg

SEQ ID NO: 41556 - DNA, 22 bp, synthetic construct
  misc_feature 1..22: note = chemically synthesized
  source 1..22: mol_type = other DNA
gcactattgagtgactggtgtg

SEQ ID NO: 41557 - DNA, 22 bp, synthetic construct
  misc_feature 1..22: note = chemically synthesized
  source 1..22: mol_type = other DNA
ttgagtgactggtgtgtggact

SEQ ID NO: 41558 - DNA, 22 bp, synthetic construct
  misc_feature 1..22: note = chemically synthesized
  source 1..22: mol_type = other DNA
agtgactggtgtgtggacttca

SEQ ID NO: 41559 - DNA, 22 bp, synthetic construct
  misc_feature 1..22: note = chemically synthesized
  source 1..22: mol_type = other DNA
gtgtgtggacttcaggggaagc

SEQ ID NO: 41560 - DNA, 22 bp, synthetic construct
  misc_feature 1..22: note = chemically synthesized
  source 1..22: mol_type = other DNA
caggggaagcgtggaaggcact

SEQ ID NO: 41561 - DNA, 22 bp, synthetic construct
  misc_feature 1..22: note = chemically synthesized
  source 1..22: mol_type = other DNA
aggggaagcgtggaaggcactt

SEQ ID NO: 41562 - DNA, 22 bp, synthetic construct
  misc_feature 1..22: note = chemically synthesized
  source 1..22: mol_type = other DNA
cacaggcctaatactctgtgac

SEQ ID NO: 41563 - DNA, 22 bp, synthetic construct
  misc_feature 1..22: note = chemically synthesized
  source 1..22: mol_type = other DNA
acaggcctaatactctgtgaca

SEQ ID NO: 41564 - DNA, 22 bp, synthetic construct
  misc_feature 1..22: note = chemically synthesized
  source 1..22: mol_type = other DNA
atactctgtgacagtcttggcc

SEQ ID NO: 41565 - DNA, 22 bp, synthetic construct
  misc_feature 1..22: note = chemically synthesized
  source 1..22: mol_type = other DNA
tgtgacagtcttggccaagaga

SEQ ID NO: 41566 - DNA, 22 bp, synthetic construct
  misc_feature 1..22: note = chemically synthesized
  source 1..22: mol_type = other DNA
tgacagtcttggccaagagatt

SEQ ID NO: 41567 - DNA, 22 bp, synthetic construct
  misc_feature 1..22: note = chemically synthesized
  source 1..22: mol_type = other DNA
ggccaagagattctgagaacca

SEQ ID NO: 41568 - DNA, 22 bp, synthetic construct
  misc_feature 1..22: note = chemically synthesized
  source 1..22: mol_type = other DNA
gccaagagattctgagaaccag

SEQ ID NO: 41569 - DNA, 22 bp, synthetic construct
  misc_feature 1..22: note = chemically synthesized
  source 1..22: mol_type = other DNA
tgagaaccagaactggccattc

SEQ ID NO: 41570 - DNA, 22 bp, synthetic construct
  misc_feature 1..22: note = chemically synthesized
  source 1..22: mol_type = other DNA
agaaccagaactggccattctc

SEQ ID NO: 41571 - DNA, 22 bp, synthetic construct
  misc_feature 1..22: note = chemically synthesized
  source 1..22: mol_type = other DNA
gccattctccagaattaaaacc

SEQ ID NO: 41572 - DNA, 22 bp, synthetic construct
  misc_feature 1..22: note = chemically synthesized
  source 1..22: mol_type = other DNA
tccagaattaaaacctattatg

SEQ ID NO: 41573 - DNA, 22 bp, synthetic construct
  misc_feature 1..22: note = chemically synthesized
  source 1..22: mol_type = other DNA
cagaattaaaacctattatgtc

SEQ ID NO: 41574 - DNA, 22 bp, synthetic construct
  misc_feature 1..22: note = chemically synthesized
  source 1..22: mol_type = other DNA
aaacctattatgtcctatggtt

SEQ ID NO: 41575 - DNA, 22 bp, synthetic construct
  misc_feature 1..22: note = chemically synthesized
  source 1..22: mol_type = other DNA
ttatgtcctatggttaacacag

SEQ ID NO: 41576 - DNA, 22 bp, synthetic construct
  misc_feature 1..22: note = chemically synthesized
  source 1..22: mol_type = other DNA
tgtcctatggttaacacagagc

SEQ ID NO: 41577 - DNA, 22 bp, synthetic construct
  misc_feature 1..22: note = chemically synthesized
  source 1..22: mol_type = other DNA
tggttaacacagagctgctcag

SEQ ID NO: 41578 - DNA, 22 bp, synthetic construct
  misc_feature 1..22: note = chemically synthesized
  source 1..22: mol_type = other DNA
acacagagctgctcagaaatta

SEQ ID NO: 41579 - DNA, 22 bp, synthetic construct
  misc_feature 1..22: note = chemically synthesized
  source 1..22: mol_type = other DNA
ctcagaaattatgagaactaat

SEQ ID NO: 41580 - DNA, 22 bp, synthetic construct
  misc_feature 1..22: note = chemically synthesized
  source 1..22: mol_type = other DNA
agaaattatgagaactaattta

SEQ ID NO: 41581 - DNA, 22 bp, synthetic construct
  misc_feature 1..22: note = chemically synthesized
  source 1..22: mol_type = other DNA
tgagaactaatttaaggcttca

SEQ ID NO: 41582 - DNA, 22 bp, synthetic construct
  misc_feature 1..22: note = chemically synthesized
  source 1..22: mol_type = other DNA
atttaaggcttcaaagctctac

SEQ ID NO: 41583 - DNA, 22 bp, synthetic construct
  misc_feature 1..22: note = chemically synthesized
  source 1..22: mol_type = other DNA
aaggcttcaaagctctaccaaa

SEQ ID NO: 41584 - DNA, 22 bp, synthetic construct
  misc_feature 1..22: note = chemically synthesized
  source 1..22: mol_type = other DNA
aggcttcaaagctctaccaaaa

SEQ ID NO: 41585 - DNA, 22 bp, synthetic construct
  misc_feature 1..22: note = chemically synthesized
  source 1..22: mol_type = other DNA
caaagctctaccaaaaaaaatg

SEQ ID NO: 41586 - DNA, 22 bp, synthetic construct
  misc_feature 1..22: note = chemically synthesized
  source 1..22: mol_type = other DNA
aaagctctaccaaaaaaaatgg

SEQ ID NO: 41587 - DNA, 22 bp, synthetic construct
  misc_feature 1..22: note = chemically synthesized
  source 1..22: mol_type = other DNA
taccaaaaaaaatggtctagca

SEQ ID NO: 41588 - DNA, 22 bp, synthetic construct
  misc_feature 1..22: note = chemically synthesized
  source 1..22: mol_type = other DNA
ccaaaaaaaatggtctagcagg

SEQ ID NO: 41589 - DNA, 22 bp, synthetic construct
  misc_feature 1..22: note = chemically synthesized
  source 1..22: mol_type = other DNA
gcaggtcaggctctaacatttc

SEQ ID NO: 41590 - DNA, 22 bp, synthetic construct
  misc_feature 1..22: note = chemically synthesized
  source 1..22: mol_type = other DNA
taacatttcttcaggaataaaa

SEQ ID NO: 41591 - DNA, 22 bp, synthetic construct
  misc_feature 1..22: note = chemically synthesized
  source 1..22: mol_type = other DNA
acatttcttcaggaataaaact

SEQ ID NO: 41592 - DNA, 22 bp, synthetic construct
  misc_feature 1..22: note = chemically synthesized
  source 1..22: mol_type = other DNA
cttcaggaataaaactaggctg

SEQ ID NO: 41593 - DNA, 22 bp, synthetic construct
  misc_feature 1..22: note = chemically synthesized
  source 1..22: mol_type = other DNA
ttcaggaataaaactaggctgc

SEQ ID NO: 41594 - DNA, 22 bp, synthetic construct
  misc_feature 1..22: note = chemically synthesized
  source 1..22: mol_type = other DNA
caggaataaaactaggctgccc

SEQ ID NO: 41595 - DNA, 22 bp, synthetic construct
  misc_feature 1..22: note = chemically synthesized
  source 1..22: mol_type = other DNA
aggaataaaactaggctgccct

SEQ ID NO: 41596 - DNA, 22 bp, synthetic construct
  misc_feature 1..22: note = chemically synthesized
  source 1..22: mol_type = other DNA
ggctgccctctcgcctgaggtg

SEQ ID NO: 41597 - DNA, 22 bp, synthetic construct
  misc_feature 1..22: note = chemically synthesized
  source 1..22: mol_type = other DNA
ccctctcgcctgaggtgaggct

SEQ ID NO: 41598 - DNA, 22 bp, synthetic construct
  misc_feature 1..22: note = chemically synthesized
  source 1..22: mol_type = other DNA
tcgcctgaggtgaggctgaatg

SEQ ID NO: 41599 - DNA, 22 bp, synthetic construct
  misc_feature 1..22: note = chemically synthesized
  source 1..22: mol_type = other DNA
gcctgaggtgaggctgaatgaa

SEQ ID NO: 41600 - DNA, 22 bp, synthetic construct
  misc_feature 1..22: note = chemically synthesized
  source 1..22: mol_type = other DNA
aggtgaggctgaatgaaggagc

SEQ ID NO: 41601 - DNA, 22 bp, synthetic construct
  misc_feature 1..22: note = chemically synthesized
  source 1..22: mol_type = other DNA
aatgaaggagcgctctggtgct

SEQ ID NO: 41602 - DNA, 22 bp, synthetic construct
  misc_feature 1..22: note = chemically synthesized
  source 1..22: mol_type = other DNA
tggtgctgcgaggccaggcctc

SEQ ID NO: 41603 - DNA, 22 bp, synthetic construct
  misc_feature 1..22: note = chemically synthesized
  source 1..22: mol_type = other DNA
gtgctgcgaggccaggcctcct

SEQ ID NO: 41604 - DNA, 22 bp, synthetic construct
  misc_feature 1..22: note = chemically synthesized
  source 1..22: mol_type = other DNA
cgaggccaggcctcctcccatg

SEQ ID NO: 41605 - DNA, 22 bp, synthetic construct
  misc_feature 1..22: note = chemically synthesized
  source 1..22: mol_type = other DNA
ctcccatgacggcaagtccttc

SEQ ID NO: 41606 - DNA, 22 bp, synthetic construct
  misc_feature 1..22: note = chemically synthesized
  source 1..22: mol_type = other DNA
ccatgacggcaagtccttcttt

SEQ ID NO: 41607 - DNA, 22 bp, synthetic construct
  misc_feature 1..22: note = chemically synthesized
  source 1..22: mol_type = other DNA
ctttcagaaaacaggcctctgc

SEQ ID NO: 41608 - DNA, 22 bp, synthetic construct
  misc_feature 1..22: note = chemically synthesized
  source 1..22: mol_type = other DNA
tttcagaaaacaggcctctgcc

SEQ ID NO: 41609 - DNA, 22 bp, synthetic construct
  misc_feature 1..22: note = chemically synthesized
  source 1..22: mol_type = other DNA
tcagaaaacaggcctctgcccg

SEQ ID NO: 41610 - DNA, 22 bp, synthetic construct
  misc_feature 1..22: note = chemically synthesized
  source 1..22: mol_type = other DNA
cagaaaacaggcctctgcccgg

SEQ ID NO: 41611 - DNA, 22 bp, synthetic construct
  misc_feature 1..22: note = chemically synthesized
  source 1..22: mol_type = other DNA
agaaaacaggcctctgcccggg

SEQ ID NO: 41612 - DNA, 22 bp, synthetic construct
  misc_feature 1..22: note = chemically synthesized
  source 1..22: mol_type = other DNA
tgcccggggcatgctgcagctg

SEQ ID NO: 41613 - DNA, 22 bp, synthetic construct
  misc_feature 1..22: note = chemically synthesized
  source 1..22: mol_type = other DNA
cccggggcatgctgcagctgct

SEQ ID NO: 41614 - DNA, 22 bp, synthetic construct
  misc_feature 1..22: note = chemically synthesized
  source 1..22: mol_type = other DNA
cagctgcttctctgcagtgcct

SEQ ID NO: 41615 - DNA, 22 bp, synthetic construct
  misc_feature 1..22: note = chemically synthesized
  source 1..22: mol_type = other DNA
cttctctgcagtgcctcagcac

SEQ ID NO: 41616 - DNA, 22 bp, synthetic construct
  misc_feature 1..22: note = chemically synthesized
  source 1..22: mol_type = other DNA
ctctgcagtgcctcagcacctt

SEQ ID NO: 41617 - DNA, 22 bp, synthetic construct
  misc_feature 1..22: note = chemically synthesized
  source 1..22: mol_type = other DNA
tctgcagtgcctcagcaccttc

SEQ ID NO: 41618 - DNA, 22 bp, synthetic construct
  misc_feature 1..22: note = chemically synthesized
  source 1..22: mol_type = other DNA
tgcagtgcctcagcaccttccc

SEQ ID NO: 41619 - DNA, 22 bp, synthetic construct
  misc_feature 1..22: note = chemically synthesized
  source 1..22: mol_type = other DNA
cagtgcctcagcaccttcccgc

SEQ ID NO: 41620 - DNA, 22 bp, synthetic construct
  misc_feature 1..22: note = chemically synthesized
  source 1..22: mol_type = other DNA
agcaccttcccgcctcccaggc

SEQ ID NO: 41621 - DNA, 22 bp, synthetic construct
  misc_feature 1..22: note = chemically synthesized
  source 1..22: mol_type = other DNA
cccgcctcccaggcacacagca

SEQ ID NO: 41622 - DNA, 22 bp, synthetic construct
  misc_feature 1..22: note = chemically synthesized
  source 1..22: mol_type = other DNA
ccgcctcccaggcacacagcag

SEQ ID NO: 41623 - DNA, 22 bp, synthetic construct
  misc_feature 1..22: note = chemically synthesized
  source 1..22: mol_type = other DNA
ccaggcacacagcagcccagcc

SEQ ID NO: 41624 - DNA, 22 bp, synthetic construct
  misc_feature 1..22: note = chemically synthesized
  source 1..22: mol_type = other DNA
agtcctcatctctctggcaaag

SEQ ID NO: 41625 - DNA, 22 bp, synthetic construct
  misc_feature 1..22: note = chemically synthesized
  source 1..22: mol_type = other DNA
atctctctggcaaagtcccaca

SEQ ID NO: 41626 - DNA, 22 bp, synthetic construct
  misc_feature 1..22: note = chemically synthesized
  source 1..22: mol_type = other DNA
tctggcaaagtcccacagaaca

SEQ ID NO: 41627 - DNA, 22 bp, synthetic construct
  misc_feature 1..22: note = chemically synthesized
  source 1..22: mol_type = other DNA
tggcaaagtcccacagaacaaa

SEQ ID NO: 41628 - DNA, 22 bp, synthetic construct
  misc_feature 1..22: note = chemically synthesized
  source 1..22: mol_type = other DNA
gcaaagtcccacagaacaaaac

SEQ ID NO: 41629 - DNA, 22 bp, synthetic construct
  misc_feature 1..22: note = chemically synthesized
  source 1..22: mol_type = other DNA
ggctttgacgtgctttgttttt

SEQ ID NO: 41630 - DNA, 22 bp, synthetic construct
  misc_feature 1..22: note = chemically synthesized
  source 1..22: mol_type = other DNA
gctttgacgtgctttgtttttt

SEQ ID NO: 41631 - DNA, 22 bp, synthetic construct
  misc_feature 1..22: note = chemically synthesized
  source 1..22: mol_type = other DNA
tgacgtgctttgttttttgttt

SEQ ID NO: 41632 - DNA, 22 bp, synthetic construct
  misc_feature 1..22: note = chemically synthesized
  source 1..22: mol_type = other DNA
gacgtgctttgttttttgtttt

SEQ ID NO: 41633 - DNA, 22 bp, synthetic construct
  misc_feature 1..22: note = chemically synthesized
  source 1..22: mol_type = other DNA
acgtgctttgttttttgttttt

SEQ ID NO: 41634 - DNA, 22 bp, synthetic construct
  misc_feature 1..22: note = chemically synthesized
  source 1..22: mol_type = other DNA
tgttttttgttttttttttttc

SEQ ID NO: 41635 - DNA, 22 bp, synthetic construct
  misc_feature 1..22: note = chemically synthesized
  source 1..22: mol_type = other DNA
gttttttgttttttttttttcc

SEQ ID NO: 41636 - DNA, 22 bp, synthetic construct
  misc_feature 1..22: note = chemically synthesized
  source 1..22: mol_type = other DNA
ttttttgttttttttttttccc

SEQ ID NO: 41637 - DNA, 22 bp, synthetic construct
  misc_feature 1..22: note = chemically synthesized
  source 1..22: mol_type = other DNA
tttgttttttttttttccctcc

SEQ ID NO: 41638 - DNA, 22 bp, synthetic construct
  misc_feature 1..22: note = chemically synthesized
  source 1..22: mol_type = other DNA
ttgttttttttttttccctcct

SEQ ID NO: 41639 - DNA, 22 bp, synthetic construct
  misc_feature 1..22: note = chemically synthesized
  source 1..22: mol_type = other DNA
tgttttttttttttccctcctc

SEQ ID NO: 41640 - DNA, 22 bp, synthetic construct
  misc_feature 1..22: note = chemically synthesized
  source 1..22: mol_type = other DNA
gttttttttttttccctcctcc

SEQ ID NO: 41641 - DNA, 22 bp, synthetic construct
  misc_feature 1..22: note = chemically synthesized
  source 1..22: mol_type = other DNA
ttttttttttttccctcctccc

SEQ ID NO: 41642 - DNA, 22 bp, synthetic construct
  misc_feature 1..22: note = chemically synthesized
  source 1..22: mol_type = other DNA
tttttttttccctcctccctgg

SEQ ID NO: 41643 - DNA, 22 bp, synthetic construct
  misc_feature 1..22: note = chemically synthesized
  source 1..22: mol_type = other DNA
ttttttttccctcctccctggc

SEQ ID NO: 41644 - DNA, 22 bp, synthetic construct
  misc_feature 1..22: note = chemically synthesized
  source 1..22: mol_type = other DNA
tttttttccctcctccctggct

SEQ ID NO: 41645 - DNA, 22 bp, synthetic construct
  misc_feature 1..22: note = chemically synthesized
  source 1..22: mol_type = other DNA
ttttttccctcctccctggctt

SEQ ID NO: 41646 - DNA, 22 bp, synthetic construct
  misc_feature 1..22: note = chemically synthesized
  source 1..22: mol_type = other DNA
tttttccctcctccctggcttt

SEQ ID NO: 41647 - DNA, 22 bp, synthetic construct
  misc_feature 1..22: note = chemically synthesized
  source 1..22: mol_type = other DNA
ttttccctcctccctggctttt

SEQ ID NO: 41648 - DNA, 22 bp, synthetic construct
  misc_feature 1..22: note = chemically synthesized
  source 1..22: mol_type = other DNA
tttccctcctccctggcttttt

SEQ ID NO: 41649 - DNA, 22 bp, synthetic construct
  misc_feature 1..22: note = chemically synthesized
  source 1..22: mol_type = other DNA
ttccctcctccctggcttttta

SEQ ID NO: 41650 - DNA, 22 bp, synthetic construct
  misc_feature 1..22: note = chemically synthesized
  source 1..22: mol_type = other DNA
tccctcctccctggctttttac

SEQ ID NO: 41651 - DNA, 22 bp, synthetic construct
  misc_feature 1..22: note = chemically synthesized
  source 1..22: mol_type = other DNA
ccctcctccctggctttttacc

SEQ ID NO: 41652 - DNA, 22 bp, synthetic construct
  misc_feature 1..22: note = chemically synthesized
  source 1..22: mol_type = other DNA
cctcctccctggctttttaccc

SEQ ID NO: 41653 - DNA, 22 bp, synthetic construct
  misc_feature 1..22: note = chemically synthesized
  source 1..22: mol_type = other DNA
ctccctggctttttacccaatt

SEQ ID NO: 41654 - DNA, 22 bp, synthetic construct
  misc_feature 1..22: note = chemically synthesized
  source 1..22: mol_type = other DNA
cctggctttttacccaatttcc

SEQ ID NO: 41655 - DNA, 22 bp, synthetic construct
  misc_feature 1..22: note = chemically synthesized
  source 1..22: mol_type = other DNA
gctttttacccaatttcctaat

SEQ ID NO: 41656 - DNA, 22 bp, synthetic construct
  misc_feature 1..22: note = chemically synthesized
  source 1..22: mol_type = other DNA
tttacccaatttcctaatcctt

SEQ ID NO: 41657 - DNA, 22 bp, synthetic construct
  misc_feature 1..22: note = chemically synthesized
  source 1..22: mol_type = other DNA
ttacccaatttcctaatccttc

SEQ ID NO: 41658 - DNA, 22 bp, synthetic construct
  misc_feature 1..22: note = chemically synthesized
  source 1..22: mol_type = other DNA
tacccaatttcctaatccttca

SEQ ID NO: 41659 - DNA, 22 bp, synthetic construct
  misc_feature 1..22: note = chemically synthesized
  source 1..22: mol_type = other DNA
acccaatttcctaatccttcat

SEQ ID NO: 41660 - DNA, 22 bp, synthetic construct
  misc_feature 1..22: note = chemically synthesized
  source 1..22: mol_type = other DNA
cccaatttcctaatccttcatt

SEQ ID NO: 41661 - DNA, 22 bp, synthetic construct
  misc_feature 1..22: note = chemically synthesized
  source 1..22: mol_type = other DNA
cctaatccttcatttataccac

SEQ ID NO: 41662 - DNA, 22 bp, synthetic construct
  misc_feature 1..22: note = chemically synthesized
  source 1..22: mol_type = other DNA
ctaatccttcatttataccact

SEQ ID NO: 41663 - DNA, 22 bp, synthetic construct
  misc_feature 1..22: note = chemically synthesized
  source 1..22: mol_type = other DNA
atccttcatttataccactgac

SEQ ID NO: 41664 - DNA, 22 bp, synthetic construct
  misc_feature 1..22: note = chemically synthesized
  source 1..22: mol_type = other DNA
catttataccactgaccaatct

SEQ ID NO: 41665 - DNA, 22 bp, synthetic construct
  misc_feature 1..22: note = chemically synthesized
  source 1..22: mol_type = other DNA
atttataccactgaccaatctg

SEQ ID NO: 41666 - DNA, 22 bp, synthetic construct
  misc_feature 1..22: note = chemically synthesized
  source 1..22: mol_type = other DNA
ataccactgaccaatctggaaa

SEQ ID NO: 41667 - DNA, 22 bp, synthetic construct
  misc_feature 1..22: note = chemically synthesized
  source 1..22: mol_type = other DNA
taccactgaccaatctggaaag

SEQ ID NO: 41668 - DNA, 22 bp, synthetic construct
  misc_feature 1..22: note = chemically synthesized
  source 1..22: mol_type = other DNA
accaatctggaaagagttccct

SEQ ID NO: 41669 - DNA, 22 bp, synthetic construct
  misc_feature 1..22: note = chemically synthesized
  source 1..22: mol_type = other DNA
gaaagagttccctgagcaaatt

SEQ ID NO: 41670 - DNA, 22 bp, synthetic construct
  misc_feature 1..22: note = chemically synthesized
  source 1..22: mol_type = other DNA
cctgagcaaattggagatgccc

SEQ ID NO: 41671 - DNA, 22 bp, synthetic construct
  misc_feature 1..22: note = chemically synthesized
  source 1..22: mol_type = other DNA
agcaaattggagatgcccgcag

SEQ ID NO: 41672 - DNA, 22 bp, synthetic construct
  misc_feature 1..22: note = chemically synthesized
  source 1..22: mol_type = other DNA
gagatgcccgcagatacaacct

SEQ ID NO: 41673 - DNA, 22 bp, synthetic construct
  misc_feature 1..22: note = chemically synthesized
  source 1..22: mol_type = other DNA
ccatcattggagcagcctcagt

SEQ ID NO: 41674 - DNA, 22 bp, synthetic construct
  misc_feature 1..22: note = chemically synthesized
  source 1..22: mol_type = other DNA
gagcagcctcagtccagccatg

SEQ ID NO: 41675 - DNA, 22 bp, synthetic construct
  misc_feature 1..22: note = chemically synthesized
  source 1..22: mol_type = other DNA
agtccagccatggggtgtggca

SEQ ID NO: 41676 - DNA, 22 bp, synthetic construct
  misc_feature 1..22: note = chemically synthesized
  source 1..22: mol_type = other DNA
ccgtctgttcttggctctacta

SEQ ID NO: 41677 - DNA, 22 bp, synthetic construct
  misc_feature 1..22: note = chemically synthesized
  source 1..22: mol_type = other DNA
ttcttggctctactaattctgc

SEQ ID NO: 41678 - DNA, 22 bp, synthetic construct
  misc_feature 1..22: note = chemically synthesized
  source 1..22: mol_type = other DNA
ttggctctactaattctgctga

SEQ ID NO: 41679 - DNA, 22 bp, synthetic construct
  misc_feature 1..22: note = chemically synthesized
  source 1..22: mol_type = other DNA
ggctctactaattctgctgatt

SEQ ID NO: 41680 - DNA, 22 bp, synthetic construct
  misc_feature 1..22: note = chemically synthesized
  source 1..22: mol_type = other DNA
gctctactaattctgctgattc

SEQ ID NO: 41681 - DNA, 22 bp, synthetic construct
  misc_feature 1..22: note = chemically synthesized
  source 1..22: mol_type = other DNA
tactaattctgctgattccata

SEQ ID NO: 41682 - DNA, 22 bp, synthetic construct
  misc_feature 1..22: note = chemically synthesized
  source 1..22: mol_type = other DNA
ctaattctgctgattccatatg

SEQ ID NO: 41683 - DNA, 22 bp, synthetic construct
  misc_feature 1..22: note = chemically synthesized
  source 1..22: mol_type = other DNA
attctgctgattccatatgagt

SEQ ID NO: 41684 - DNA, 22 bp, synthetic construct
  misc_feature 1..22: note = chemically synthesized
  source 1..22: mol_type = other DNA
tgctgattccatatgagtaaca

SEQ ID NO: 41685 - DNA, 22 bp, synthetic construct
  misc_feature 1..22: note = chemically synthesized
  source 1..22: mol_type = other DNA
ctgattccatatgagtaacatc

SEQ ID NO: 41686 - DNA, 22 bp, synthetic construct
  misc_feature 1..22: note = chemically synthesized
  source 1..22: mol_type = other DNA
attccatatgagtaacatccaa

SEQ ID NO: 41687 - DNA, 22 bp, synthetic construct
  misc_feature 1..22: note = chemically synthesized
  source 1..22: mol_type = other DNA
catatgagtaacatccaatgtt

SEQ ID NO: 41688 - DNA, 22 bp, synthetic construct
  misc_feature 1..22: note = chemically synthesized
  source 1..22: mol_type = other DNA
ccagacacctccaagctcctcc

SEQ ID NO: 41689 - DNA, 22 bp, synthetic construct
  misc_feature 1..22: note = chemically synthesized
  source 1..22: mol_type = other DNA
caagctcctccaaccaacagca

SEQ ID NO: 41690 - DNA, 22 bp, synthetic construct
  misc_feature 1..22: note = chemically synthesized
  source 1..22: mol_type = other DNA
ctccaaccaacagcacaacatc

SEQ ID NO: 41691 - DNA, 22 bp, synthetic construct
  misc_feature 1..22: note = chemically synthesized
  source 1..22: mol_type = other DNA
caaccaacagcacaacatcttc

SEQ ID NO: 41692 - DNA, 22 bp, synthetic construct
  misc_feature 1..22: note = chemically synthesized
  source 1..22: mol_type = other DNA
caactcctttctacccacctag

SEQ ID NO: 41693 - DNA, 22 bp, synthetic construct
  misc_feature 1..22: note = chemically synthesized
  source 1..22: mol_type = other DNA
aactcctttctacccacctagc

SEQ ID NO: 41694 - DNA, 22 bp, synthetic construct
  misc_feature 1..22: note = chemically synthesized
  source 1..22: mol_type = other DNA
ctttctacccacctagcaggtc

SEQ ID NO: 41695 - DNA, 22 bp, synthetic construct
  misc_feature 1..22: note = chemically synthesized
  source 1..22: mol_type = other DNA
tctacccacctagcaggtccac

SEQ ID NO: 41696 - DNA, 22 bp, synthetic construct
  misc_feature 1..22: note = chemically synthesized
  source 1..22: mol_type = other DNA
ctacccacctagcaggtccacg

SEQ ID NO: 41697 - DNA, 22 bp, synthetic construct
  misc_feature 1..22: note = chemically synthesized
  source 1..22: mol_type = other DNA
tacccacctagcaggtccacgt

SEQ ID NO: 41698 - DNA, 22 bp, synthetic construct
  misc_feature 1..22: note = chemically synthesized
  source 1..22: mol_type = other DNA
cccacctagcaggtccacgtgg

SEQ ID NO: 41699 - DNA, 22 bp, synthetic construct
  misc_feature 1..22: note = chemically synthesized
  source 1..22: mol_type = other DNA
gcaggtccacgtggggactcag

SEQ ID NO: 41700 - DNA, 22 bp, synthetic construct
  misc_feature 1..22: note = chemically synthesized
  source 1..22: mol_type = other DNA
agcctatggacacctggcctct

SEQ ID NO: 41701 - DNA, 22 bp, synthetic construct
  misc_feature 1..22: note = chemically synthesized
  source 1..22: mol_type = other DNA
tggacacctggcctctgcgggc

SEQ ID NO: 41702 - DNA, 22 bp, synthetic construct
  misc_feature 1..22: note = chemically synthesized
  source 1..22: mol_type = other DNA
gcctctgcgggcacagcggcca

SEQ ID NO: 41703 - DNA, 22 bp, synthetic construct
  misc_feature 1..22: note = chemically synthesized
  source 1..22: mol_type = other DNA
tgcgggcacagcggccacacac

SEQ ID NO: 41704 - DNA, 22 bp, synthetic construct
  misc_feature 1..22: note = chemically synthesized
  source 1..22: mol_type = other DNA
cgggcacagcggccacacacca

SEQ ID NO: 41705 - DNA, 22 bp, synthetic construct
  misc_feature 1..22: note = chemically synthesized
  source 1..22: mol_type = other DNA
tttgttttgagtctctctaaga

SEQ ID NO: 41706 - DNA, 22 bp, synthetic construct
  misc_feature 1..22: note = chemically synthesized
  source 1..22: mol_type = other DNA
ttgttttgagtctctctaagac

SEQ ID NO: 41707 - DNA, 22 bp, synthetic construct
  misc_feature 1..22: note = chemically synthesized
  source 1..22: mol_type = other DNA
tgttttgagtctctctaagact

SEQ ID NO: 41708 - DNA, 22 bp, synthetic construct
  misc_feature 1..22: note = chemically synthesized
  source 1..22: mol_type = other DNA
gttttgagtctctctaagactg

SEQ ID NO: 41709 - DNA, 22 bp, synthetic construct
  misc_feature 1..22: note = chemically synthesized
  source 1..22: mol_type = other DNA
ttttgagtctctctaagactgc

SEQ ID NO: 41710 - DNA, 22 bp, synthetic construct
  misc_feature 1..22: note = chemically synthesized
  source 1..22: mol_type = other DNA
tgagtctctctaagactgcttg

SEQ ID NO: 41711 - DNA, 22 bp, synthetic construct
  misc_feature 1..22: note = chemically synthesized
  source 1..22: mol_type = other DNA
gagtctctctaagactgcttgg

SEQ ID NO: 41712 - DNA, 22 bp, synthetic construct
  misc_feature 1..22: note = chemically synthesized
  source 1..22: mol_type = other DNA
agtctctctaagactgcttggg

SEQ ID NO: 41713 - DNA, 22 bp, synthetic construct
  misc_feature 1..22: note = chemically synthesized
  source 1..22: mol_type = other DNA
tctaagactgcttgggaaatga

SEQ ID NO: 41714 - DNA, 22 bp, synthetic construct
  misc_feature 1..22: note = chemically synthesized
  source 1..22: mol_type = other DNA
taagactgcttgggaaatgagg

SEQ ID NO: 41715 - DNA, 22 bp, synthetic construct
  misc_feature 1..22: note = chemically synthesized
  source 1..22: mol_type = other DNA
agactgcttgggaaatgaggtc

SEQ ID NO: 41716 - DNA, 22 bp, synthetic construct
  misc_feature 1..22: note = chemically synthesized
  source 1..22: mol_type = other DNA
cttgggaaatgaggtctctcag

SEQ ID NO: 41717 - DNA, 22 bp, synthetic construct
  misc_feature 1..22: note = chemically synthesized
  source 1..22: mol_type = other DNA
gggaaatgaggtctctcaggtc

SEQ ID NO: 41718 - DNA, 22 bp, synthetic construct
  misc_feature 1..22: note = chemically synthesized
  source 1..22: mol_type = other DNA
ggaaatgaggtctctcaggtct

SEQ ID NO: 41719 - DNA, 22 bp, synthetic construct
  misc_feature 1..22: note = chemically synthesized
  source 1..22: mol_type = other DNA
tcaggtctagcatttccacgca

SEQ ID NO: 41720 - DNA, 22 bp, synthetic construct
  misc_feature 1..22: note = chemically synthesized
  source 1..22: mol_type = other DNA
aggtctagcatttccacgcagt

SEQ ID NO: 41721 - DNA, 22 bp, synthetic construct
  misc_feature 1..22: note = chemically synthesized
  source 1..22: mol_type = other DNA
gcatttccacgcagtcccaacc

SEQ ID NO: 41722 - DNA, 22 bp, synthetic construct
  misc_feature 1..22: note = chemically synthesized
  source 1..22: mol_type = other DNA
ccacgcagtcccaaccatgagg

SEQ ID NO: 41723 - DNA, 22 bp, synthetic construct
  misc_feature 1..22: note = chemically synthesized
  source 1..22: mol_type = other DNA
cacgcagtcccaaccatgaggc

SEQ ID NO: 41724 - DNA, 22 bp, synthetic construct
  misc_feature 1..22: note = chemically synthesized
  source 1..22: mol_type = other DNA
accagaggccaccaacgtcaag

SEQ ID NO: 41725 - DNA, 22 bp, synthetic construct
  misc_feature 1..22: note = chemically synthesized
  source 1..22: mol_type = other DNA
tctcaggtctactaggaacagg

SEQ ID NO: 41726 - DNA, 22 bp, synthetic construct
  misc_feature 1..22: note = chemically synthesized
  source 1..22: mol_type = other DNA
tcaggtctactaggaacaggaa

SEQ ID NO: 41727 - DNA, 22 bp, synthetic construct
  misc_feature 1..22: note = chemically synthesized
  source 1..22: mol_type = other DNA
aggtctactaggaacaggaaag

SEQ ID NO: 41728 - DNA, 22 bp, synthetic construct
  misc_feature 1..22: note = chemically synthesized
  source 1..22: mol_type = other DNA
ctaggaacaggaaagaataact

SEQ ID NO: 41729 - DNA, 22 bp, synthetic construct
  misc_feature 1..22: note = chemically synthesized
  source 1..22: mol_type = other DNA
ggaacaggaaagaataactctc

SEQ ID NO: 41730 - DNA, 22 bp, synthetic construct
  misc_feature 1..22: note = chemically synthesized
  source 1..22: mol_type = other DNA
tcccttaacaagcccctcaggc

SEQ ID NO: 41731 - DNA, 22 bp, synthetic construct
  misc_feature 1..22: note = chemically synthesized
  source 1..22: mol_type = other DNA
ccttaacaagcccctcaggctg

SEQ ID NO: 41732 - DNA, 22 bp, synthetic construct
  misc_feature 1..22: note = chemically synthesized
  source 1..22: mol_type = other DNA
aacaagcccctcaggctgaaat

SEQ ID NO: 41733 - DNA, 22 bp, synthetic construct
  misc_feature 1..22: note = chemically synthesized
  source 1..22: mol_type = other DNA
acaagcccctcaggctgaaatc

SEQ ID NO: 41734 - DNA, 22 bp, synthetic construct
  misc_feature 1..22: note = chemically synthesized
  source 1..22: mol_type = other DNA
aggctgaaatccttttgcttcc

SEQ ID NO: 41735 - DNA, 22 bp, synthetic construct
  misc_feature 1..22: note = chemically synthesized
  source 1..22: mol_type = other DNA
aaatccttttgcttccagggcc

SEQ ID NO: 41736 - DNA, 22 bp, synthetic construct
  misc_feature 1..22: note = chemically synthesized
  source 1..22: mol_type = other DNA
ttgcttccagggcctcaacctt

SEQ ID NO: 41737 - DNA, 22 bp, synthetic construct
  misc_feature 1..22: note = chemically synthesized
  source 1..22: mol_type = other DNA
tgcttccagggcctcaaccttc

SEQ ID NO: 41738 - DNA, 22 bp, synthetic construct
  misc_feature 1..22: note = chemically synthesized
  source 1..22: mol_type = other DNA
gcttccagggcctcaaccttct

SEQ ID NO: 41739 - DNA, 22 bp, synthetic construct
  misc_feature 1..22: note = chemically synthesized
  source 1..22: mol_type = other DNA
cttccagggcctcaaccttcta

SEQ ID NO: 41740 - DNA, 22 bp, synthetic construct
  misc_feature 1..22: note = chemically synthesized
  source 1..22: mol_type = other DNA
ccagggcctcaaccttctactg

SEQ ID NO: 41741 - DNA, 22 bp, synthetic construct
  misc_feature 1..22: note = chemically synthesized
  source 1..22: mol_type = other DNA
cagggcctcaaccttctactgc

SEQ ID NO: 41742 - DNA, 22 bp, synthetic construct
  misc_feature 1..22: note = chemically synthesized
  source 1..22: mol_type = other DNA
aaccttctactgctgggtagaa

SEQ ID NO: 41743 - DNA, 22 bp, synthetic construct
  misc_feature 1..22: note = chemically synthesized
  source 1..22: mol_type = other DNA
ctactgctgggtagaaagcccc

SEQ ID NO: 41744 - DNA, 22 bp, synthetic construct
  misc_feature 1..22: note = chemically synthesized
  source 1..22: mol_type = other DNA
tactgctgggtagaaagccccc

SEQ ID NO: 41745 - DNA, 22 bp, synthetic construct
  misc_feature 1..22: note = chemically synthesized
  source 1..22: mol_type = other DNA
ctgctgggtagaaagccccctc

SEQ ID NO: 41746 - DNA, 22 bp, synthetic construct
  misc_feature 1..22: note = chemically synthesized
  source 1..22: mol_type = other DNA
ctgggtagaaagccccctctgt

SEQ ID NO: 41747 - DNA, 22 bp, synthetic construct
  misc_feature 1..22: note = chemically synthesized
  source 1..22: mol_type = other DNA
ggtagaaagccccctctgtcac

SEQ ID NO: 41748 - DNA, 22 bp, synthetic construct
  misc_feature 1..22: note = chemically synthesized
  source 1..22: mol_type = other DNA
tgtcaccggcccacagatctca

SEQ ID NO: 41749 - DNA, 22 bp, synthetic construct
  misc_feature 1..22: note = chemically synthesized
  source 1..22: mol_type = other DNA
tcaccggcccacagatctcagc

SEQ ID NO: 41750 - DNA, 22 bp, synthetic construct
  misc_feature 1..22: note = chemically synthesized
  source 1..22: mol_type = other DNA
agctgccatcgcactcaaaccc

SEQ ID NO: 41751 - DNA, 22 bp, synthetic construct
  misc_feature 1..22: note = chemically synthesized
  source 1..22: mol_type = other DNA
ccatcgcactcaaaccctgtca

SEQ ID NO: 41752 - DNA, 22 bp, synthetic construct
  misc_feature 1..22: note = chemically synthesized
  source 1..22: mol_type = other DNA
aaaccctgtcaggcggtggaga

SEQ ID NO: 41753 - DNA, 22 bp, synthetic construct
  misc_feature 1..22: note = chemically synthesized
  source 1..22: mol_type = other DNA
tcaggcggtggagagtgtggac

SEQ ID NO: 41754 - DNA, 22 bp, synthetic construct
  misc_feature 1..22: note = chemically synthesized
  source 1..22: mol_type = other DNA
acgcggtttcaaagaggccgac

SEQ ID NO: 41755 - DNA, 22 bp, synthetic construct
  misc_feature 1..22: note = chemically synthesized
  source 1..22: mol_type = other DNA
caaagaggccgaccaggcaaga

SEQ ID NO: 41756 - DNA, 22 bp, synthetic construct
  misc_feature 1..22: note = chemically synthesized
  source 1..22: mol_type = other DNA
aaagaggccgaccaggcaagaa

SEQ ID NO: 41757 - DNA, 22 bp, synthetic construct
  misc_feature 1..22: note = chemically synthesized
  source 1..22: mol_type = other DNA
tactcctgccccagctctaatg

SEQ ID NO: 41758 - DNA, 22 bp, synthetic construct
  misc_feature 1..22: note = chemically synthesized
  source 1..22: mol_type = other DNA
ctgccccagctctaatgcaata

SEQ ID NO: 41759 - DNA, 22 bp, synthetic construct
  misc_feature 1..22: note = chemically synthesized
  source 1..22: mol_type = other DNA
ccccagctctaatgcaataaaa

SEQ ID NO: 41760 - DNA, 22 bp, synthetic construct
  misc_feature 1..22: note = chemically synthesized
  source 1..22: mol_type = other DNA
taatgcaataaaatgtctttta

SEQ ID NO: 41761 - DNA, 22 bp, synthetic construct
  misc_feature 1..22: note = chemically synthesized
  source 1..22: mol_type = other DNA
atgcaataaaatgtcttttatc

SEQ ID NO: 41762 - DNA, 22 bp, synthetic construct
  misc_feature 1..22: note = chemically synthesized
  source 1..22: mol_type = other DNA
ttatcaatgtaattcaaggcaa

SEQ ID NO: 41763 - DNA, 22 bp, synthetic construct
  misc_feature 1..22: note = chemically synthesized
  source 1..22: mol_type = other DNA
tatcaatgtaattcaaggcaaa

SEQ ID NO: 41764 - DNA, 22 bp, synthetic construct
  misc_feature 1..22: note = chemically synthesized
  source 1..22: mol_type = other DNA
atcaatgtaattcaaggcaaag

SEQ ID NO: 41765 - DNA, 22 bp, synthetic construct
  misc_feature 1..22: note = chemically synthesized
  source 1..22: mol_type = other DNA
tcaatgtaattcaaggcaaaga

SEQ ID NO: 41766 - DNA, 22 bp, synthetic construct
  misc_feature 1..22: note = chemically synthesized
  source 1..22: mol_type = other DNA
aaggcaaagagtcaagggtctg

SEQ ID NO: 41767 - DNA, 22 bp, synthetic construct
  misc_feature 1..22: note = chemically synthesized
  source 1..22: mol_type = other DNA
tcaccattttaaagaggcttat

SEQ ID NO: 41768 - DNA, 22 bp, synthetic construct
  misc_feature 1..22: note = chemically synthesized
  source 1..22: mol_type = other DNA
taaagaggcttattacatggcc

SEQ ID NO: 41769 - DNA, 22 bp, synthetic construct
  misc_feature 1..22: note = chemically synthesized
  source 1..22: mol_type = other DNA
aaagaggcttattacatggcca

SEQ ID NO: 41770 - DNA, 22 bp, synthetic construct
  misc_feature 1..22: note = chemically synthesized
  source 1..22: mol_type = other DNA
aagaggcttattacatggccac

SEQ ID NO: 41771 - DNA, 22 bp, synthetic construct
  misc_feature 1..22: note = chemically synthesized
  source 1..22: mol_type = other DNA
attacatggccacaaaaatttg

SEQ ID NO: 41772 - DNA, 22 bp, synthetic construct
  misc_feature 1..22: note = chemically synthesized
  source 1..22: mol_type = other DNA
ttacatggccacaaaaatttgc

SEQ ID NO: 41773 - DNA, 22 bp, synthetic construct
  misc_feature 1..22: note = chemically synthesized
  source 1..22: mol_type = other DNA
catggccacaaaaatttgcctc

SEQ ID NO: 41774 - DNA, 22 bp, synthetic construct
  misc_feature 1..22: note = chemically synthesized
  source 1..22: mol_type = other DNA
gcctcaggctcaaacctggcat

SEQ ID NO: 41775 - DNA, 22 bp, synthetic construct
  misc_feature 1..22: note = chemically synthesized
  source 1..22: mol_type = other DNA
cctcaggctcaaacctggcatg

SEQ ID NO: 41776 - DNA, 22 bp, synthetic construct
  misc_feature 1..22: note = chemically synthesized
  source 1..22: mol_type = other DNA
aggctcaaacctggcatgtaag

SEQ ID NO: 41777 - DNA, 22 bp, synthetic construct
  misc_feature 1..22: note = chemically synthesized
  source 1..22: mol_type = other DNA
aaacctggcatgtaaggtatca

SEQ ID NO: 41778 - DNA, 22 bp, synthetic construct
  misc_feature 1..22: note = chemically synthesized
  source 1..22: mol_type = other DNA
gcatgtaaggtatcagcgtggg

SEQ ID NO: 41779 - DNA, 22 bp, synthetic construct
  misc_feature 1..22: note = chemically synthesized
  source 1..22: mol_type = other DNA
ttttgattttattttattttct

SEQ ID NO: 41780 - DNA, 22 bp, synthetic construct
  misc_feature 1..22: note = chemically synthesized
  source 1..22: mol_type = other DNA
ttgattttattttattttctta

SEQ ID NO: 41781 - DNA, 22 bp, synthetic construct
  misc_feature 1..22: note = chemically synthesized
  source 1..22: mol_type = other DNA
tgattttattttattttcttac

SEQ ID NO: 41782 - DNA, 22 bp, synthetic construct
  misc_feature 1..22: note = chemically synthesized
  source 1..22: mol_type = other DNA
gattttattttattttcttaca

SEQ ID NO: 41783 - DNA, 22 bp, synthetic construct
  misc_feature 1..22: note = chemically synthesized
  source 1..22: mol_type = other DNA
attttattttattttcttacaa

SEQ ID NO: 41784 - DNA, 22 bp, synthetic construct
  misc_feature 1..22: note = chemically synthesized
  source 1..22: mol_type = other DNA
tattttattttcttacaaaatc

SEQ ID NO: 41785 - DNA, 22 bp, synthetic construct
  misc_feature 1..22: note = chemically synthesized
  source 1..22: mol_type = other DNA
attttattttcttacaaaatct

SEQ ID NO: 41786 - DNA, 22 bp, synthetic construct
  misc_feature 1..22: note = chemically synthesized
  source 1..22: mol_type = other DNA
ttttattttcttacaaaatctg

SEQ ID NO: 41787 - DNA, 22 bp, synthetic construct
  misc_feature 1..22: note = chemically synthesized
  source 1..22: mol_type = other DNA
tattttcttacaaaatctgaaa

SEQ ID NO: 41788 - DNA, 22 bp, synthetic construct
  misc_feature 1..22: note = chemically synthesized
  source 1..22: mol_type = other DNA
attttcttacaaaatctgaaaa

SEQ ID NO: 41789 - DNA, 22 bp, synthetic construct
  misc_feature 1..22: note = chemically synthesized
  source 1..22: mol_type = other DNA
ttttcttacaaaatctgaaaat

SEQ ID NO: 41790 - DNA, 22 bp, synthetic construct
  misc_feature 1..22: note = chemically synthesized
  source 1..22: mol_type = other DNA
tcttacaaaatctgaaaatgaa

SEQ ID NO: 41791 - DNA, 22 bp, synthetic construct
  misc_feature 1..22: note = chemically synthesized
  source 1..22: mol_type = other DNA
cttacaaaatctgaaaatgaaa

SEQ ID NO: 41792 - DNA, 22 bp, synthetic construct
  misc_feature 1..22: note = chemically synthesized
  source 1..22: mol_type = other DNA
ttacaaaatctgaaaatgaaac

SEQ ID NO: 41793 - DNA, 22 bp, synthetic construct
  misc_feature 1..22: note = chemically synthesized
  source 1..22: mol_type = other DNA
acaaaatctgaaaatgaaacgc

SEQ ID NO: 41794 - DNA, 22 bp, synthetic construct
  misc_feature 1..22: note = chemically synthesized
  source 1..22: mol_type = other DNA
caaaatctgaaaatgaaacgct

SEQ ID NO: 41795 - DNA, 22 bp, synthetic construct
  misc_feature 1..22: note = chemically synthesized
  source 1..22: mol_type = other DNA
aaaatgaaacgcttctgtccct

SEQ ID NO: 41796 - DNA, 22 bp, synthetic construct
  misc_feature 1..22: note = chemically synthesized
  source 1..22: mol_type = other DNA
ctgtccctcccttccaccaacc

SEQ ID NO: 41797 - DNA, 22 bp, synthetic construct
  misc_feature 1..22: note = chemically synthesized
  source 1..22: mol_type = other DNA
tgtccctcccttccaccaaccg

SEQ ID NO: 41798 - DNA, 22 bp, synthetic construct
  misc_feature 1..22: note = chemically synthesized
  source 1..22: mol_type = other DNA
tccctcccttccaccaaccgtt

SEQ ID NO: 41799 - DNA, 22 bp, synthetic construct
  misc_feature 1..22: note = chemically synthesized
  source 1..22: mol_type = other DNA
ccttccaccaaccgttttttga

SEQ ID NO: 41800 - DNA, 22 bp, synthetic construct
  misc_feature 1..22: note = chemically synthesized
  source 1..22: mol_type = other DNA
ccaccaaccgttttttgattta

SEQ ID NO: 41801 - DNA, 22 bp, synthetic construct
  misc_feature 1..22: note = chemically synthesized
  source 1..22: mol_type = other DNA
caccaaccgttttttgatttat

SEQ ID NO: 41802 - DNA, 22 bp, synthetic construct
  misc_feature 1..22: note = chemically synthesized
  source 1..22: mol_type = other DNA
tttgatttatggggaggaggaa

SEQ ID NO: 41803 - DNA, 22 bp, synthetic construct
  misc_feature 1..22: note = chemically synthesized
  source 1..22: mol_type = other DNA
ttgatttatggggaggaggaaa

SEQ ID NO: 41804 - DNA, 22 bp, synthetic construct
  misc_feature 1..22: note = chemically synthesized
  source 1..22: mol_type = other DNA
tgatttatggggaggaggaaag

SEQ ID NO: 41805 - DNA, 22 bp, synthetic construct
  misc_feature 1..22: note = chemically synthesized
  source 1..22: mol_type = other DNA
gatttatggggaggaggaaaga

SEQ ID NO: 41806 - DNA, 22 bp, synthetic construct
  misc_feature 1..22: note = chemically synthesized
  source 1..22: mol_type = other DNA
atttatggggaggaggaaagaa

SEQ ID NO: 41807 - DNA, 22 bp, synthetic construct
  misc_feature 1..22: note = chemically synthesized
  source 1..22: mol_type = other DNA
atggggaggaggaaagaaatct

SEQ ID NO: 41808 - DNA, 22 bp, synthetic construct
  misc_feature 1..22: note = chemically synthesized
  source 1..22: mol_type = other DNA
tggggaggaggaaagaaatctg

SEQ ID NO: 41809 - DNA, 22 bp, synthetic construct
  misc_feature 1..22: note = chemically synthesized
  source 1..22: mol_type = other DNA
aagttgacaggttgggacaact

SEQ ID NO: 41810 - DNA, 22 bp, synthetic construct
  misc_feature 1..22: note = chemically synthesized
  source 1..22: mol_type = other DNA
acaggttgggacaactccactc

SEQ ID NO: 41811 - DNA, 22 bp, synthetic construct
  misc_feature 1..22: note = chemically synthesized
  source 1..22: mol_type = other DNA
ggacaactccactcagctttct

SEQ ID NO: 41812 - DNA, 22 bp, synthetic construct
  misc_feature 1..22: note = chemically synthesized
  source 1..22: mol_type = other DNA
cactcagctttctcactcaaaa

SEQ ID NO: 41813 - DNA, 22 bp, synthetic construct
  misc_feature 1..22: note = chemically synthesized
  source 1..22: mol_type = other DNA
agctttctcactcaaaagctgc

SEQ ID NO: 41814 - DNA, 22 bp, synthetic construct
  misc_feature 1..22: note = chemically synthesized
  source 1..22: mol_type = other DNA
tctcactcaaaagctgcttttg

SEQ ID NO: 41815 - DNA, 22 bp, synthetic construct
  misc_feature 1..22: note = chemically synthesized
  source 1..22: mol_type = other DNA
ctcactcaaaagctgcttttgt

SEQ ID NO: 41816 - DNA, 22 bp, synthetic construct
  misc_feature 1..22: note = chemically synthesized
  source 1..22: mol_type = other DNA
tcactcaaaagctgcttttgtt

SEQ ID NO: 41817 - DNA, 22 bp, synthetic construct
  misc_feature 1..22: note = chemically synthesized
  source 1..22: mol_type = other DNA
actcaaaagctgcttttgttaa

SEQ ID NO: 41818 - DNA, 22 bp, synthetic construct
  misc_feature 1..22: note = chemically synthesized
  source 1..22: mol_type = other DNA
aaaagctgcttttgttaaatca

SEQ ID NO: 41819 - DNA, 22 bp, synthetic construct
  misc_feature 1..22: note = chemically synthesized
  source 1..22: mol_type = other DNA
cttttgttaaatcatactttgc

SEQ ID NO: 41820 - DNA, 22 bp, synthetic construct
  misc_feature 1..22: note = chemically synthesized
  source 1..22: mol_type = other DNA
ttgttaaatcatactttgcatt

SEQ ID NO: 41821 - DNA, 22 bp, synthetic construct
  misc_feature 1..22: note = chemically synthesized
  source 1..22: mol_type = other DNA
tgttaaatcatactttgcattt

SEQ ID NO: 41822 - DNA, 22 bp, synthetic construct
  misc_feature 1..22: note = chemically synthesized
  source 1..22: mol_type = other DNA
gttaaatcatactttgcattta

SEQ ID NO: 41823 - DNA, 22 bp, synthetic construct
  misc_feature 1..22: note = chemically synthesized
  source 1..22: mol_type = other DNA
ttaaatcatactttgcatttat

SEQ ID NO: 41824 - DNA, 22 bp, synthetic construct
  misc_feature 1..22: note = chemically synthesized
  source 1..22: mol_type = other DNA
aatcatactttgcatttatggc

SEQ ID NO: 41825 - DNA, 22 bp, synthetic construct
  misc_feature 1..22: note = chemically synthesized
  source 1..22: mol_type = other DNA
tgcatttatggcctgcggctct

SEQ ID NO: 41826 - DNA, 22 bp, synthetic construct
  misc_feature 1..22: note = chemically synthesized
  source 1..22: mol_type = other DNA
gcatttatggcctgcggctctt

SEQ ID NO: 41827 - DNA, 22 bp, synthetic construct
  misc_feature 1..22: note = chemically synthesized
  source 1..22: mol_type = other DNA
catttatggcctgcggctcttg

SEQ ID NO: 41828 - DNA, 22 bp, synthetic construct
  misc_feature 1..22: note = chemically synthesized
  source 1..22: mol_type = other DNA
atggcctgcggctcttggctga

SEQ ID NO: 41829 - DNA, 22 bp, synthetic construct
  misc_feature 1..22: note = chemically synthesized
  source 1..22: mol_type = other DNA
tggcctgcggctcttggctgac

SEQ ID NO: 41830 - DNA, 22 bp, synthetic construct
  misc_feature 1..22: note = chemically synthesized
  source 1..22: mol_type = other DNA
cggctcttggctgactttggcg

SEQ ID NO: 41831 - DNA, 22 bp, synthetic construct
  misc_feature 1..22: note = chemically synthesized
  source 1..22: mol_type = other DNA
ttggctgactttggcggctcct

SEQ ID NO: 41832 - DNA, 22 bp, synthetic construct
  misc_feature 1..22: note = chemically synthesized
  source 1..22: mol_type = other DNA
ggctgactttggcggctcctcc

SEQ ID NO: 41833 - DNA, 22 bp, synthetic construct
  misc_feature 1..22: note = chemically synthesized
  source 1..22: mol_type = other DNA
gctgactttggcggctcctccg

SEQ ID NO: 41834 - DNA, 22 bp, synthetic construct
  misc_feature 1..22: note = chemically synthesized
  source 1..22: mol_type = other DNA
actttggcggctcctccggtgt

SEQ ID NO: 41835 - DNA, 22 bp, synthetic construct
  misc_feature 1..22: note = chemically synthesized
  source 1..22: mol_type = other DNA
tggcggctcctccggtgtggag

SEQ ID NO: 41836 - DNA, 22 bp, synthetic construct
  misc_feature 1..22: note = chemically synthesized
  source 1..22: mol_type = other DNA
ggcggctcctccggtgtggagc

SEQ ID NO: 41837 - DNA, 22 bp, synthetic construct
  misc_feature 1..22: note = chemically synthesized
  source 1..22: mol_type = other DNA
gcggctcctccggtgtggagca

SEQ ID NO: 41838 - DNA, 22 bp, synthetic construct
  misc_feature 1..22: note = chemically synthesized
  source 1..22: mol_type = other DNA
ctccggtgtggagcaagctgtg

SEQ ID NO: 41839 - DNA, 22 bp, synthetic construct
  misc_feature 1..22: note = chemically synthesized
  source 1..22: mol_type = other DNA
cggtgtggagcaagctgtggac

SEQ ID NO: 41840 - DNA, 22 bp, synthetic construct
  misc_feature 1..22: note = chemically synthesized
  source 1..22: mol_type = other DNA
tggacttccccgggaggaggcc

SEQ ID NO: 41841 - DNA, 22 bp, synthetic construct
  misc_feature 1..22: note = chemically synthesized
  source 1..22: mol_type = other DNA
ccccgggaggaggccccactga

SEQ ID NO: 41842 - DNA, 22 bp, synthetic construct
  misc_feature 1..22: note = chemically synthesized
  source 1..22: mol_type = other DNA
cccgggaggaggccccactgag

SEQ ID NO: 41843 - DNA, 22 bp, synthetic construct
  misc_feature 1..22: note = chemically synthesized
  source 1..22: mol_type = other DNA
agatgactgccccactctgcac

SEQ ID NO: 41844 - DNA, 22 bp, synthetic construct
  misc_feature 1..22: note = chemically synthesized
  source 1..22: mol_type = other DNA
ccccactctgcaccaaggacag

SEQ ID NO: 41845 - DNA, 22 bp, synthetic construct
  misc_feature 1..22: note = chemically synthesized
  source 1..22: mol_type = other DNA
tgcaccaaggacagcgaggagg

SEQ ID NO: 41846 - DNA, 22 bp, synthetic construct
  misc_feature 1..22: note = chemically synthesized
  source 1..22: mol_type = other DNA
caccaaggacagcgaggagggg

SEQ ID NO: 41847 - DNA, 22 bp, synthetic construct
  misc_feature 1..22: note = chemically synthesized
  source 1..22: mol_type = other DNA
gaggccagggggctggggacat

SEQ ID NO: 41848 - DNA, 22 bp, synthetic construct
  misc_feature 1..22: note = chemically synthesized
  source 1..22: mol_type = other DNA
gggacatgaaggcactggctag

SEQ ID NO: 41849 - DNA, 22 bp, synthetic construct
  misc_feature 1..22: note = chemically synthesized
  source 1..22: mol_type = other DNA
gctaggtaacacaaaggcctgt

SEQ ID NO: 41850 - DNA, 22 bp, synthetic construct
  misc_feature 1..22: note = chemically synthesized
  source 1..22: mol_type = other DNA
ggtaacacaaaggcctgtaaag

SEQ ID NO: 41851 - DNA, 22 bp, synthetic construct
  misc_feature 1..22: note = chemically synthesized
  source 1..22: mol_type = other DNA
taaaggatatgtctctcttctg

SEQ ID NO: 41852 - DNA, 22 bp, synthetic construct
  misc_feature 1..22: note = chemically synthesized
  source 1..22: mol_type = other DNA
tcttctgaacctggctctccac

SEQ ID NO: 41853 - DNA, 22 bp, synthetic construct
  misc_feature 1..22: note = chemically synthesized
  source 1..22: mol_type = other DNA
ttctgaacctggctctccactc

SEQ ID NO: 41854 - DNA, 22 bp, synthetic construct
  misc_feature 1..22: note = chemically synthesized
  source 1..22: mol_type = other DNA
ctgaacctggctctccactcca

SEQ ID NO: 41855 - DNA, 22 bp, synthetic construct
  misc_feature 1..22: note = chemically synthesized
  source 1..22: mol_type = other DNA
tgaacctggctctccactccat

SEQ ID NO: 41856 - DNA, 22 bp, synthetic construct
  misc_feature 1..22: note = chemically synthesized
  source 1..22: mol_type = other DNA
aacctggctctccactccattt

SEQ ID NO: 41857 - DNA, 22 bp, synthetic construct
  misc_feature 1..22: note = chemically synthesized
  source 1..22: mol_type = other DNA
gctctccactccatttctcctg

SEQ ID NO: 41858 - DNA, 22 bp, synthetic construct
  misc_feature 1..22: note = chemically synthesized
  source 1..22: mol_type = other DNA
tccactccatttctcctggatc

SEQ ID NO: 41859 - DNA, 22 bp, synthetic construct
  misc_feature 1..22: note = chemically synthesized
  source 1..22: mol_type = other DNA
cactccatttctcctggatcca

SEQ ID NO: 41860 - DNA, 22 bp, synthetic construct
  misc_feature 1..22: note = chemically synthesized
  source 1..22: mol_type = other DNA
catttctcctggatccaagtct

SEQ ID NO: 41861 - DNA, 22 bp, synthetic construct
  misc_feature 1..22: note = chemically synthesized
  source 1..22: mol_type = other DNA
ctcctggatccaagtctccctg

SEQ ID NO: 41862 - DNA, 22 bp, synthetic construct
  misc_feature 1..22: note = chemically synthesized
  source 1..22: mol_type = other DNA
tcctggatccaagtctccctgt

SEQ ID NO: 41863 - DNA, 22 bp, synthetic construct
  misc_feature 1..22: note = chemically synthesized
  source 1..22: mol_type = other DNA
ctggatccaagtctccctgtaa

SEQ ID NO: 41864 - DNA, 22 bp, synthetic construct
  misc_feature 1..22: note = chemically synthesized
  source 1..22: mol_type = other DNA
gatccaagtctccctgtaatca

SEQ ID NO: 41865 - DNA, 22 bp, synthetic construct
  misc_feature 1..22: note = chemically synthesized
  source 1..22: mol_type = other DNA
cctgtaatcagcatgtatctac

SEQ ID NO: 41866 - DNA, 22 bp, synthetic construct
  misc_feature 1..22: note = chemically synthesized
  source 1..22: mol_type = other DNA
taatcagcatgtatctaccact

SEQ ID NO: 41867 - DNA, 22 bp, synthetic construct
  misc_feature 1..22: note = chemically synthesized
  source 1..22: mol_type = other DNA
ccactggttctccaactaaaag

SEQ ID NO: 41868 - DNA, 22 bp, synthetic construct
  misc_feature 1..22: note = chemically synthesized
  source 1..22: mol_type = other DNA
gttctccaactaaaagttcaag

SEQ ID NO: 41869 - DNA, 22 bp, synthetic construct
  misc_feature 1..22: note = chemically synthesized
  source 1..22: mol_type = other DNA
tccaactaaaagttcaaggctt

SEQ ID NO: 41870 - DNA, 22 bp, synthetic construct
  misc_feature 1..22: note = chemically synthesized
  source 1..22: mol_type = other DNA
caactaaaagttcaaggcttct

SEQ ID NO: 41871 - DNA, 22 bp, synthetic construct
  misc_feature 1..22: note = chemically synthesized
  source 1..22: mol_type = other DNA
aaagttcaaggcttctaagaac

SEQ ID NO: 41872 - DNA, 22 bp, synthetic construct
  misc_feature 1..22: note = chemically synthesized
  source 1..22: mol_type = other DNA
aaggcttctaagaaccaagact

SEQ ID NO: 41873 - DNA, 22 bp, synthetic construct
  misc_feature 1..22: note = chemically synthesized
  source 1..22: mol_type = other DNA
ctaagaaccaagactcagtggt

SEQ ID NO: 41874 - DNA, 22 bp, synthetic construct
  misc_feature 1..22: note = chemically synthesized
  source 1..22: mol_type = other DNA
taagaaccaagactcagtggtc

SEQ ID NO: 41875 - DNA, 22 bp, synthetic construct
  misc_feature 1..22: note = chemically synthesized
  source 1..22: mol_type = other DNA
agaaccaagactcagtggtcta

SEQ ID NO: 41876 - DNA, 22 bp, synthetic construct
  misc_feature 1..22: note = chemically synthesized
  source 1..22: mol_type = other DNA
agtggtctacctctgactgtcc

SEQ ID NO: 41877 - DNA, 22 bp, synthetic construct
  misc_feature 1..22: note = chemically synthesized
  source 1..22: mol_type = other DNA
cctctgactgtccagcaccatg

SEQ ID NO: 41878 - DNA, 22 bp, synthetic construct
  misc_feature 1..22: note = chemically synthesized
  source 1..22: mol_type = other DNA
tgactgtccagcaccatgctgg

SEQ ID NO: 41879 - DNA, 22 bp, synthetic construct
  misc_feature 1..22: note = chemically synthesized
  source 1..22: mol_type = other DNA
actgtccagcaccatgctgggc

SEQ ID NO: 41880 - DNA, 22 bp, synthetic construct
  misc_feature 1..22: note = chemically synthesized
  source 1..22: mol_type = other DNA
tccagcaccatgctgggcaaag

SEQ ID NO: 41881 - DNA, 22 bp, synthetic construct
  misc_feature 1..22: note = chemically synthesized
  source 1..22: mol_type = other DNA
ggcaaagaagagcccctcaata

SEQ ID NO: 41882 - DNA, 22 bp, synthetic construct
  misc_feature 1..22: note = chemically synthesized
  source 1..22: mol_type = other DNA
aataaataattaggattcaagc

SEQ ID NO: 41883 - DNA, 22 bp, synthetic construct
  misc_feature 1..22: note = chemically synthesized
  source 1..22: mol_type = other DNA
ggattcaagcgctgtgcagtga

SEQ ID NO: 41884 - DNA, 22 bp, synthetic construct
  misc_feature 1..22: note = chemically synthesized
  source 1..22: mol_type = other DNA
aagcgctgtgcagtgaactttt

SEQ ID NO: 41885 - DNA, 22 bp, synthetic construct
  misc_feature 1..22: note = chemically synthesized
  source 1..22: mol_type = other DNA
tgcagtgaacttttcttcctgt

SEQ ID NO: 41886 - DNA, 22 bp, synthetic construct
  misc_feature 1..22: note = chemically synthesized
  source 1..22: mol_type = other DNA
ttcttcctgttggagagccatt

SEQ ID NO: 41887 - DNA, 22 bp, synthetic construct
  misc_feature 1..22: note = chemically synthesized
  source 1..22: mol_type = other DNA
tcttcctgttggagagccattc

SEQ ID NO: 41888 - DNA, 22 bp, synthetic construct
  misc_feature 1..22: note = chemically synthesized
  source 1..22: mol_type = other DNA
cttcctgttggagagccattct

SEQ ID NO: 41889 - DNA, 22 bp, synthetic construct
  misc_feature 1..22: note = chemically synthesized
  source 1..22: mol_type = other DNA
ttcctgttggagagccattcta

SEQ ID NO: 41890 - DNA, 22 bp, synthetic construct
  misc_feature 1..22: note = chemically synthesized
  source 1..22: mol_type = other DNA
cctgttggagagccattctaaa

SEQ ID NO: 41891 - DNA, 22 bp, synthetic construct
  misc_feature 1..22: note = chemically synthesized
  source 1..22: mol_type = other DNA
ctgttggagagccattctaaat

SEQ ID NO: 41892 - DNA, 22 bp, synthetic construct
  misc_feature 1..22: note = chemically synthesized
  source 1..22: mol_type = other DNA
ttggagagccattctaaatgac

SEQ ID NO: 41893 - DNA, 22 bp, synthetic construct
  misc_feature 1..22: note = chemically synthesized
  source 1..22: mol_type = other DNA
gagagccattctaaatgacctg

SEQ ID NO: 41894 - DNA, 22 bp, synthetic construct
  misc_feature 1..22: note = chemically synthesized
  source 1..22: mol_type = other DNA
taaatgacctggctggaaggac

SEQ ID NO: 41895 - DNA, 22 bp, synthetic construct
  misc_feature 1..22: note = chemically synthesized
  source 1..22: mol_type = other DNA
aatgacctggctggaaggacca

SEQ ID NO: 41896 - DNA, 22 bp, synthetic construct
  misc_feature 1..22: note = chemically synthesized
  source 1..22: mol_type = other DNA
gctggaaggaccaggccatgga

SEQ ID NO: 41897 - DNA, 22 bp, synthetic construct
  misc_feature 1..22: note = chemically synthesized
  source 1..22: mol_type = other DNA
gaaggaccaggccatggagcca

SEQ ID NO: 41898 - DNA, 22 bp, synthetic construct
  misc_feature 1..22: note = chemically synthesized
  source 1..22: mol_type = other DNA
ccctagtaaatgattcactaac

SEQ ID NO: 41899 - DNA, 22 bp, synthetic construct
  misc_feature 1..22: note = chemically synthesized
  source 1..22: mol_type = other DNA
cctagtaaatgattcactaacc

SEQ ID NO: 41900 - DNA, 22 bp, synthetic construct
  misc_feature 1..22: note = chemically synthesized
  source 1..22: mol_type = other DNA
gtaaatgattcactaaccaagg

SEQ ID NO: 41901 - DNA, 22 bp, synthetic construct
  misc_feature 1..22: note = chemically synthesized
  source 1..22: mol_type = other DNA
actaaccaaggagcctctgggt

SEQ ID NO: 41902 - DNA, 22 bp, synthetic construct
  misc_feature 1..22: note = chemically synthesized
  source 1..22: mol_type = other DNA
accaaggagcctctgggtcagc

SEQ ID NO: 41903 - DNA, 22 bp, synthetic construct
  misc_feature 1..22: note = chemically synthesized
  source 1..22: mol_type = other DNA
tgggtcagccttgacccaggag

SEQ ID NO: 41904 - DNA, 22 bp, synthetic construct
  misc_feature 1..22: note = chemically synthesized
  source 1..22: mol_type = other DNA
ggtcagccttgacccaggagag

SEQ ID NO: 41905 - DNA, 22 bp, synthetic construct
  misc_feature 1..22: note = chemically synthesized
  source 1..22: mol_type = other DNA
gacccaggagaggattacagcc

SEQ ID NO: 41906 - DNA, 22 bp, synthetic construct
  misc_feature 1..22: note = chemically synthesized
  source 1..22: mol_type = other DNA
acccaggagaggattacagccc

SEQ ID NO: 41907 - DNA, 22 bp, synthetic construct
  misc_feature 1..22: note = chemically synthesized
  source 1..22: mol_type = other DNA
cagccccttgaaagtggctgct

SEQ ID NO: 41908 - DNA, 22 bp, synthetic construct
  misc_feature 1..22: note = chemically synthesized
  source 1..22: mol_type = other DNA
gaaagtggctgctggtccatcg

SEQ ID NO: 41909 - DNA, 22 bp, synthetic construct
  misc_feature 1..22: note = chemically synthesized
  source 1..22: mol_type = other DNA
aaagtggctgctggtccatcgc

SEQ ID NO: 41910 - DNA, 22 bp, synthetic construct
  misc_feature 1..22: note = chemically synthesized
  source 1..22: mol_type = other DNA
ctggtccatcgcttcactgtac

SEQ ID NO: 41911 - DNA, 22 bp, synthetic construct
  misc_feature 1..22: note = chemically synthesized
  source 1..22: mol_type = other DNA
gtccatcgcttcactgtactat

SEQ ID NO: 41912 - DNA, 22 bp, synthetic construct
  misc_feature 1..22: note = chemically synthesized
  source 1..22: mol_type = other DNA
cactgtactattttggcaatct

SEQ ID NO: 41913 - DNA, 22 bp, synthetic construct
  misc_feature 1..22: note = chemically synthesized
  source 1..22: mol_type = other DNA
actgtactattttggcaatctg

SEQ ID NO: 41914 - DNA, 22 bp, synthetic construct
  misc_feature 1..22: note = chemically synthesized
  source 1..22: mol_type = other DNA
tactattttggcaatctgtaat

SEQ ID NO: 41915 - DNA, 22 bp, synthetic construct
  misc_feature 1..22: note = chemically synthesized
  source 1..22: mol_type = other DNA
ttttggcaatctgtaatagtgt

SEQ ID NO: 41916 - DNA, 22 bp, synthetic construct
  misc_feature 1..22: note = chemically synthesized
  source 1..22: mol_type = other DNA
tggcaatctgtaatagtgtatt

SEQ ID NO: 41917 - DNA, 22 bp, synthetic construct
  misc_feature 1..22: note = chemically synthesized
  source 1..22: mol_type = other DNA
ggcaatctgtaatagtgtattt

SEQ ID NO: 41918 - DNA, 22 bp, synthetic construct
  misc_feature 1..22: note = chemically synthesized
  source 1..22: mol_type = other DNA
gcaatctgtaatagtgtattta

SEQ ID NO: 41919 - DNA, 22 bp, synthetic construct
  misc_feature 1..22: note = chemically synthesized
  source 1..22: mol_type = other DNA
taatagtgtatttactcaatgg

SEQ ID NO: 41920 - DNA, 22 bp, synthetic construct
  misc_feature 1..22: note = chemically synthesized
  source 1..22: mol_type = other DNA
actcaatggttgttatggacaa

SEQ ID NO: 41921 - DNA, 22 bp, synthetic construct
  misc_feature 1..22: note = chemically synthesized
  source 1..22: mol_type = other DNA
ctcaatggttgttatggacaat

SEQ ID NO: 41922 - DNA, 22 bp, synthetic construct
  misc_feature 1..22: note = chemically synthesized
  source 1..22: mol_type = other DNA
aatggttgttatggacaatcag

SEQ ID NO: 41923 - DNA, 22 bp, synthetic construct
  misc_feature 1..22: note = chemically synthesized
  source 1..22: mol_type = other DNA
ttatggacaatcaggttaatca

SEQ ID NO: 41924 - DNA, 22 bp, synthetic construct
  misc_feature 1..22: note = chemically synthesized
  source 1..22: mol_type = other DNA
tggacaatcaggttaatcattc

SEQ ID NO: 41925 - DNA, 22 bp, synthetic construct
  misc_feature 1..22: note = chemically synthesized
  source 1..22: mol_type = other DNA
atcattcactttccaaatgctg

SEQ ID NO: 41926 - DNA, 22 bp, synthetic construct
  misc_feature 1..22: note = chemically synthesized
  source 1..22: mol_type = other DNA
actttccaaatgctgtgtaatt

SEQ ID NO: 41927 - DNA, 22 bp, synthetic construct
  misc_feature 1..22: note = chemically synthesized
  source 1..22: mol_type = other DNA
tccaaatgctgtgtaattacac

SEQ ID NO: 41928 - DNA, 22 bp, synthetic construct
  misc_feature 1..22: note = chemically synthesized
  source 1..22: mol_type = other DNA
ccaaatgctgtgtaattacaca

SEQ ID NO: 41929 - DNA, 22 bp, synthetic construct
  misc_feature 1..22: note = chemically synthesized
  source 1..22: mol_type = other DNA
caaatgctgtgtaattacacag

SEQ ID NO: 41930 - DNA, 22 bp, synthetic construct
  misc_feature 1..22: note = chemically synthesized
  source 1..22: mol_type = other DNA
tgtaattacacagttaaaagag

SEQ ID NO: 41931 - DNA, 22 bp, synthetic construct
  misc_feature 1..22: note = chemically synthesized
  source 1..22: mol_type = other DNA
cacagttaaaagagctacagcg

SEQ ID NO: 41932 - DNA, 22 bp, synthetic construct
  misc_feature 1..22: note = chemically synthesized
  source 1..22: mol_type = other DNA
aaagagctacagcggatgtcaa

SEQ ID NO: 41933 - DNA, 22 bp, synthetic construct
  misc_feature 1..22: note = chemically synthesized
  source 1..22: mol_type = other DNA
cagcggatgtcaaatttcctta

SEQ ID NO: 41934 - DNA, 22 bp, synthetic construct
  misc_feature 1..22: note = chemically synthesized
  source 1..22: mol_type = other DNA
ccttaagtcttctggtgaattg

SEQ ID NO: 41935 - DNA, 22 bp, synthetic construct
  misc_feature 1..22: note = chemically synthesized
  source 1..22: mol_type = other DNA
cttaagtcttctggtgaattgg

SEQ ID NO: 41936 - DNA, 22 bp, synthetic construct
  misc_feature 1..22: note = chemically synthesized
  source 1..22: mol_type = other DNA
aagtcttctggtgaattggtct

SEQ ID NO: 41937 - DNA, 22 bp, synthetic construct
  misc_feature 1..22: note = chemically synthesized
  source 1..22: mol_type = other DNA
agtcttctggtgaattggtctc

SEQ ID NO: 41938 - DNA, 22 bp, synthetic construct
  misc_feature 1..22: note = chemically synthesized
  source 1..22: mol_type = other DNA
ctggtgaattggtctcaattac

SEQ ID NO: 41939 - DNA, 22 bp, synthetic construct
  misc_feature 1..22: note = chemically synthesized
  source 1..22: mol_type = other DNA
tggtgaattggtctcaattact

SEQ ID NO: 41940 - DNA, 22 bp, synthetic construct
  misc_feature 1..22: note = chemically synthesized
  source 1..22: mol_type = other DNA
gtgaattggtctcaattactag

SEQ ID NO: 41941 - DNA, 22 bp, synthetic construct
  misc_feature 1..22: note = chemically synthesized
  source 1..22: mol_type = other DNA
gtctcaattactagtctgggtc

SEQ ID NO: 41942 - DNA, 22 bp, synthetic construct
  misc_feature 1..22: note = chemically synthesized
  source 1..22: mol_type = other DNA
aattactagtctgggtcccttt

SEQ ID NO: 41943 - DNA, 22 bp, synthetic construct
  misc_feature 1..22: note = chemically synthesized
  source 1..22: mol_type = other DNA
ctagtctgggtccctttcttcc

SEQ ID NO: 41944 - DNA, 22 bp, synthetic construct
  misc_feature 1..22: note = chemically synthesized
  source 1..22: mol_type = other DNA
gtctgggtccctttcttccttc

SEQ ID NO: 41945 - DNA, 22 bp, synthetic construct
  misc_feature 1..22: note = chemically synthesized
  source 1..22: mol_type = other DNA
ggtccctttcttccttcctctc

SEQ ID NO: 41946 - DNA, 22 bp, synthetic construct
  misc_feature 1..22: note = chemically synthesized
  source 1..22: mol_type = other DNA
tcttccttcctctctcaatttg

SEQ ID NO: 41947 - DNA, 22 bp, synthetic construct
  misc_feature 1..22: note = chemically synthesized
  source 1..22: mol_type = other DNA
cttccttcctctctcaatttgt

SEQ ID NO: 41948 - DNA, 22 bp, synthetic construct
  misc_feature 1..22: note = chemically synthesized
  source 1..22: mol_type = other DNA
ttccttcctctctcaatttgtt

SEQ ID NO: 41949 - DNA, 22 bp, synthetic construct
  misc_feature 1..22: note = chemically synthesized
  source 1..22: mol_type = other DNA
ccttcctctctcaatttgtttt

SEQ ID NO: 41950 - DNA, 22 bp, synthetic construct
  misc_feature 1..22: note = chemically synthesized
  source 1..22: mol_type = other DNA
cttcctctctcaatttgtttta

SEQ ID NO: 41951 - DNA, 22 bp, synthetic construct
  misc_feature 1..22: note = chemically synthesized
  source 1..22: mol_type = other DNA
cctctctcaatttgttttagca

SEQ ID NO: 41952 - DNA, 22 bp, synthetic construct
  misc_feature 1..22: note = chemically synthesized
  source 1..22: mol_type = other DNA
ctctctcaatttgttttagcaa

SEQ ID NO: 41953 - DNA, 22 bp, synthetic construct
  misc_feature 1..22: note = chemically synthesized
  source 1..22: mol_type = other DNA
tctcaatttgttttagcaatcc

SEQ ID NO: 41954 - DNA, 22 bp, synthetic construct
  misc_feature 1..22: note = chemically synthesized
  source 1..22: mol_type = other DNA
tcaatttgttttagcaatcctc

SEQ ID NO: 41955 - DNA, 22 bp, synthetic construct
  misc_feature 1..22: note = chemically synthesized
  source 1..22: mol_type = other DNA
aatttgttttagcaatcctcca

SEQ ID NO: 41956 - DNA, 22 bp, synthetic construct
  misc_feature 1..22: note = chemically synthesized
  source 1..22: mol_type = other DNA
gttttagcaatcctccacattt

SEQ ID NO: 41957 - DNA, 22 bp, synthetic construct
  misc_feature 1..22: note = chemically synthesized
  source 1..22: mol_type = other DNA
ttttagcaatcctccacatttt

SEQ ID NO: 41958 - DNA, 22 bp, synthetic construct
  misc_feature 1..22: note = chemically synthesized
  source 1..22: mol_type = other DNA
tagcaatcctccacattttcct

SEQ ID NO: 41959 - DNA, 22 bp, synthetic construct
  misc_feature 1..22: note = chemically synthesized
  source 1..22: mol_type = other DNA
agcaatcctccacattttcctc

SEQ ID NO: 41960 - DNA, 22 bp, synthetic construct
  misc_feature 1..22: note = chemically synthesized
  source 1..22: mol_type = other DNA
gcaatcctccacattttcctct

SEQ ID NO: 41961 - DNA, 22 bp, synthetic construct
  misc_feature 1..22: note = chemically synthesized
  source 1..22: mol_type = other DNA
cacattttcctctattctcatc

SEQ ID NO: 41962 - DNA, 22 bp, synthetic construct
  misc_feature 1..22: note = chemically synthesized
  source 1..22: mol_type = other DNA
tcctctattctcatcccctacc

SEQ ID NO: 41963 - DNA, 22 bp, synthetic construct
  misc_feature 1..22: note = chemically synthesized
  source 1..22: mol_type = other DNA
cctctattctcatcccctacct

SEQ ID NO: 41964 - DNA, 22 bp, synthetic construct
  misc_feature 1..22: note = chemically synthesized
  source 1..22: mol_type = other DNA
ctctattctcatcccctacctg

SEQ ID NO: 41965 - DNA, 22 bp, synthetic construct
  misc_feature 1..22: note = chemically synthesized
  source 1..22: mol_type = other DNA
tattctcatcccctacctgcac

SEQ ID NO: 41966 - DNA, 22 bp, synthetic construct
  misc_feature 1..22: note = chemically synthesized
  source 1..22: mol_type = other DNA
ttctcatcccctacctgcaccc

SEQ ID NO: 41967 - DNA, 22 bp, synthetic construct
  misc_feature 1..22: note = chemically synthesized
  source 1..22: mol_type = other DNA
tcatcccctacctgcaccccca

SEQ ID NO: 41968 - DNA, 22 bp, synthetic construct
  misc_feature 1..22: note = chemically synthesized
  source 1..22: mol_type = other DNA
atcccctacctgcacccccatc

SEQ ID NO: 41969 - DNA, 22 bp, synthetic construct
  misc_feature 1..22: note = chemically synthesized
  source 1..22: mol_type = other DNA
cctgcacccccatctctgtccc

SEQ ID NO: 41970 - DNA, 22 bp, synthetic construct
  misc_feature 1..22: note = chemically synthesized
  source 1..22: mol_type = other DNA
cacccccatctctgtcccaaga

SEQ ID NO: 41971 - DNA, 22 bp, synthetic construct
  misc_feature 1..22: note = chemically synthesized
  source 1..22: mol_type = other DNA
tgtcccaagagaaagaacagtg

SEQ ID NO: 41972 - DNA, 22 bp, synthetic construct
  misc_feature 1..22: note = chemically synthesized
  source 1..22: mol_type = other DNA
tcccaagagaaagaacagtgtg

SEQ ID NO: 41973 - DNA, 22 bp, synthetic construct
  misc_feature 1..22: note = chemically synthesized
  source 1..22: mol_type = other DNA
cgcttgaataatcctatttttg

SEQ ID NO: 41974 - DNA, 22 bp, synthetic construct
  misc_feature 1..22: note = chemically synthesized
  source 1..22: mol_type = other DNA
gaataatcctatttttgaactc

SEQ ID NO: 41975 - DNA, 22 bp, synthetic construct
  misc_feature 1..22: note = chemically synthesized
  source 1..22: mol_type = other DNA
aataatcctatttttgaactca

SEQ ID NO: 41976 - DNA, 22 bp, synthetic construct
  misc_feature 1..22: note = chemically synthesized
  source 1..22: mol_type = other DNA
tttttgaactcatagttctaaa

SEQ ID NO: 41977 - DNA, 22 bp, synthetic construct
  misc_feature 1..22: note = chemically synthesized
  source 1..22: mol_type = other DNA
ttgaactcatagttctaaatag

SEQ ID NO: 41978 - DNA, 22 bp, synthetic construct
  misc_feature 1..22: note = chemically synthesized
  source 1..22: mol_type = other DNA
tgaactcatagttctaaatagt

SEQ ID NO: 41979 - DNA, 22 bp, synthetic construct
  misc_feature 1..22: note = chemically synthesized
  source 1..22: mol_type = other DNA
gaactcatagttctaaatagtt

SEQ ID NO: 41980 - DNA, 22 bp, synthetic construct
  misc_feature 1..22: note = chemically synthesized
  source 1..22: mol_type = other DNA
aactcatagttctaaatagttt

SEQ ID NO: 41981 - DNA, 22 bp, synthetic construct
  misc_feature 1..22: note = chemically synthesized
  source 1..22: mol_type = other DNA
atagttctaaatagtttttgct

SEQ ID NO: 41982 - DNA, 22 bp, synthetic construct
  misc_feature 1..22: note = chemically synthesized
  source 1..22: mol_type = other DNA
taaatagtttttgctccactaa

SEQ ID NO: 41983 - DNA, 22 bp, synthetic construct
  misc_feature 1..22: note = chemically synthesized
  source 1..22: mol_type = other DNA
aatagtttttgctccactaaaa

SEQ ID NO: 41984 - DNA, 22 bp, synthetic construct
  misc_feature 1..22: note = chemically synthesized
  source 1..22: mol_type = other DNA
ttgctccactaaaagggcttaa

SEQ ID NO: 41985 - DNA, 22 bp, synthetic construct
  misc_feature 1..22: note = chemically synthesized
  source 1..22: mol_type = other DNA
tgctccactaaaagggcttaaa

SEQ ID NO: 41986 - DNA, 22 bp, synthetic construct
  misc_feature 1..22: note = chemically synthesized
  source 1..22: mol_type = other DNA
gctccactaaaagggcttaaaa

SEQ ID NO: 41987 - DNA, 22 bp, synthetic construct
  misc_feature 1..22: note = chemically synthesized
  source 1..22: mol_type = other DNA
ctccactaaaagggcttaaaaa

SEQ ID NO: 41988 - DNA, 22 bp, synthetic construct
  misc_feature 1..22: note = chemically synthesized
  source 1..22: mol_type = other DNA
cactaaaagggcttaaaaataa

SEQ ID NO: 41989 - DNA, 22 bp, synthetic construct
  misc_feature 1..22: note = chemically synthesized
  source 1..22: mol_type = other DNA
aaagggcttaaaaataaggcta

SEQ ID NO: 41990 - DNA, 22 bp, synthetic construct
  misc_feature 1..22: note = chemically synthesized
  source 1..22: mol_type = other DNA
aaaaataaggctaggaagctag

SEQ ID NO: 41991 - DNA, 22 bp, synthetic construct
  misc_feature 1..22: note = chemically synthesized
  source 1..22: mol_type = other DNA
aaaataaggctaggaagctaga

SEQ ID NO: 41992 - DNA, 22 bp, synthetic construct
  misc_feature 1..22: note = chemically synthesized
  source 1..22: mol_type = other DNA
ggaagctagacctgggaggggc

SEQ ID NO: 41993 - DNA, 22 bp, synthetic construct
  misc_feature 1..22: note = chemically synthesized
  source 1..22: mol_type = other DNA
gacctgggaggggcattacagg

SEQ ID NO: 41994 - DNA, 22 bp, synthetic construct
  misc_feature 1..22: note = chemically synthesized
  source 1..22: mol_type = other DNA
ggaggggcattacaggctggct

SEQ ID NO: 41995 - DNA, 22 bp, synthetic construct
  misc_feature 1..22: note = chemically synthesized
  source 1..22: mol_type = other DNA
caggctggctggaagcccccag

SEQ ID NO: 41996 - DNA, 22 bp, synthetic construct
  misc_feature 1..22: note = chemically synthesized
  source 1..22: mol_type = other DNA
gctggaagcccccagctgcctc

SEQ ID NO: 41997 - DNA, 22 bp, synthetic construct
  misc_feature 1..22: note = chemically synthesized
  source 1..22: mol_type = other DNA
gaagcccccagctgcctccctg

SEQ ID NO: 41998 - DNA, 22 bp, synthetic construct
  misc_feature 1..22: note = chemically synthesized
  source 1..22: mol_type = other DNA
cctccctgcctcagatgcaggg

SEQ ID NO: 41999 - DNA, 22 bp, synthetic construct
  misc_feature 1..22: note = chemically synthesized
  source 1..22: mol_type = other DNA
cctgcctcagatgcagggagaa

SEQ ID NO: 42000 - DNA, 22 bp, synthetic construct
  misc_feature 1..22: note = chemically synthesized
  source 1..22: mol_type = other DNA
cctcagatgcagggagaacacc

SEQ ID NO: 42001 - DNA, 22 bp, synthetic construct
  misc_feature 1..22: note = chemically synthesized
  source 1..22: mol_type = other DNA
agatgcagggagaacacctgca

SEQ ID NO: 42002 - DNA, 22 bp, synthetic construct
  misc_feature 1..22: note = chemically synthesized
  source 1..22: mol_type = other DNA
cagccacccacaccttgtcacc

SEQ ID NO: 42003 - DNA, 22 bp, synthetic construct
  misc_feature 1..22: note = chemically synthesized
  source 1..22: mol_type = other DNA
gtcacccaagttgcactagatc

SEQ ID NO: 42004 - DNA, 22 bp, synthetic construct
  misc_feature 1..22: note = chemically synthesized
  source 1..22: mol_type = other DNA
tcacccaagttgcactagatcc

SEQ ID NO: 42005 - DNA, 22 bp, synthetic construct
  misc_feature 1..22: note = chemically synthesized
  source 1..22: mol_type = other DNA
cactagatcctggtacagccca

SEQ ID NO: 42006 - DNA, 22 bp, synthetic construct
  misc_feature 1..22: note = chemically synthesized
  source 1..22: mol_type = other DNA
gatcctggtacagcccagtggt

SEQ ID NO: 42007 - DNA, 22 bp, synthetic construct
  misc_feature 1..22: note = chemically synthesized
  source 1..22: mol_type = other DNA
gtacagcccagtggtggccgca

SEQ ID NO: 42008 - DNA, 22 bp, synthetic construct
  misc_feature 1..22: note = chemically synthesized
  source 1..22: mol_type = other DNA
agggaagaaagaaggcaaagcc

SEQ ID NO: 42009 - DNA, 22 bp, synthetic construct
  misc_feature 1..22: note = chemically synthesized
  source 1..22: mol_type = other DNA
ctgtgctcaaggagattgaggc

SEQ ID NO: 42010 - DNA, 22 bp, synthetic construct
  misc_feature 1..22: note = chemically synthesized
  source 1..22: mol_type = other DNA
tgctcaaggagattgaggcttc

SEQ ID NO: 42011 - DNA, 22 bp, synthetic construct
  misc_feature 1..22: note = chemically synthesized
  source 1..22: mol_type = other DNA
aaggagattgaggcttcccagc

SEQ ID NO: 42012 - DNA, 22 bp, synthetic construct
  misc_feature 1..22: note = chemically synthesized
  source 1..22: mol_type = other DNA
aggcttcccagccccaaaactg

SEQ ID NO: 42013 - DNA, 22 bp, synthetic construct
  misc_feature 1..22: note = chemically synthesized
  source 1..22: mol_type = other DNA
cccagccccaaaactgggaagg

SEQ ID NO: 42014 - DNA, 22 bp, synthetic construct
  misc_feature 1..22: note = chemically synthesized
  source 1..22: mol_type = other DNA
ccagccccaaaactgggaaggg

SEQ ID NO: 42015 - DNA, 22 bp, synthetic construct
  misc_feature 1..22: note = chemically synthesized
  source 1..22: mol_type = other DNA
ggaagggccctggaatgggata

SEQ ID NO: 42016 - DNA, 22 bp, synthetic construct
  misc_feature 1..22: note = chemically synthesized
  source 1..22: mol_type = other DNA
gaatgggatatcccctcccctc

SEQ ID NO: 42017 - DNA, 22 bp, synthetic construct
  misc_feature 1..22: note = chemically synthesized
  source 1..22: mol_type = other DNA
ccctcccagcaccccattccca

SEQ ID NO: 42018 - DNA, 22 bp, synthetic construct
  misc_feature 1..22: note = chemically synthesized
  source 1..22: mol_type = other DNA
ccagcaccccattcccaaacct

SEQ ID NO: 42019 - DNA, 22 bp, synthetic construct
  misc_feature 1..22: note = chemically synthesized
  source 1..22: mol_type = other DNA
ccaaacctagccacccatctct

SEQ ID NO: 42020 - DNA, 22 bp, synthetic construct
  misc_feature 1..22: note = chemically synthesized
  source 1..22: mol_type = other DNA
gccacccatctctgcttgggac

SEQ ID NO: 42021 - DNA, 22 bp, synthetic construct
  misc_feature 1..22: note = chemically synthesized
  source 1..22: mol_type = other DNA
tgcttgggacatgctggaaggc

SEQ ID NO: 42022 - DNA, 22 bp, synthetic construct
  misc_feature 1..22: note = chemically synthesized
  source 1..22: mol_type = other DNA
cttgggacatgctggaaggcaa

SEQ ID NO: 42023 - DNA, 22 bp, synthetic construct
  misc_feature 1..22: note = chemically synthesized
  source 1..22: mol_type = other DNA
gggacatgctggaaggcaagaa

SEQ ID NO: 42024 - DNA, 22 bp, synthetic construct
  misc_feature 1..22: note = chemically synthesized
  source 1..22: mol_type = other DNA
ggacatgctggaaggcaagaag

SEQ ID NO: 42025 - DNA, 22 bp, synthetic construct
  misc_feature 1..22: note = chemically synthesized
  source 1..22: mol_type = other DNA
gaaggcaagaagagagaaacaa

SEQ ID NO: 42026 - DNA, 22 bp, synthetic construct
  misc_feature 1..22: note = chemically synthesized
  source 1..22: mol_type = other DNA
cttgaaaacaaaaatgaagcag

SEQ ID NO: 42027 - DNA, 22 bp, synthetic construct
  misc_feature 1..22: note = chemically synthesized
  source 1..22: mol_type = other DNA
gaaaacaaaaatgaagcaggga

SEQ ID NO: 42028 - DNA, 22 bp, synthetic construct
  misc_feature 1..22: note = chemically synthesized
  source 1..22: mol_type = other DNA
aaaacaaaaatgaagcagggat

SEQ ID NO: 42029 - DNA, 22 bp, synthetic construct
  misc_feature 1..22: note = chemically synthesized
  source 1..22: mol_type = other DNA
ggaaaagtaaaaacattcagaa

SEQ ID NO: 42030 - DNA, 22 bp, synthetic construct
  misc_feature 1..22: note = chemically synthesized
  source 1..22: mol_type = other DNA
agaacccagggccttctctctg

SEQ ID NO: 42031 - DNA, 22 bp, synthetic construct
  misc_feature 1..22: note = chemically synthesized
  source 1..22: mol_type = other DNA
ctctctgtctcccacgacctac

SEQ ID NO: 42032 - DNA, 22 bp, synthetic construct
  misc_feature 1..22: note = chemically synthesized
  source 1..22: mol_type = other DNA
tctctgtctcccacgacctaca

SEQ ID NO: 42033 - DNA, 22 bp, synthetic construct
  misc_feature 1..22: note = chemically synthesized
  source 1..22: mol_type = other DNA
tctgtctcccacgacctacacc

SEQ ID NO: 42034 - DNA, 22 bp, synthetic construct
  misc_feature 1..22: note = chemically synthesized
  source 1..22: mol_type = other DNA
tgtctcccacgacctacaccag

SEQ ID NO: 42035 - DNA, 22 bp, synthetic construct
  misc_feature 1..22: note = chemically synthesized
  source 1..22: mol_type = other DNA
tctcccacgacctacaccaggc

SEQ ID NO: 42036 - DNA, 22 bp, synthetic construct
  misc_feature 1..22: note = chemically synthesized
  source 1..22: mol_type = other DNA
ccacgacctacaccaggccctt

SEQ ID NO: 42037 - DNA, 22 bp, synthetic construct
  misc_feature 1..22: note = chemically synthesized
  source 1..22: mol_type = other DNA
caccaggcccttcgcacctctg

SEQ ID NO: 42038 - DNA, 22 bp, synthetic construct
  misc_feature 1..22: note = chemically synthesized
  source 1..22: mol_type = other DNA
cgcacctctgctttgcggcttt

SEQ ID NO: 42039 - DNA, 22 bp, synthetic construct
  misc_feature 1..22: note = chemically synthesized
  source 1..22: mol_type = other DNA
gcacctctgctttgcggcttta

SEQ ID NO: 42040 - DNA, 22 bp, synthetic construct
  misc_feature 1..22: note = chemically synthesized
  source 1..22: mol_type = other DNA
tgctttgcggctttaacgcact

SEQ ID NO: 42041 - DNA, 22 bp, synthetic construct
  misc_feature 1..22: note = chemically synthesized
  source 1..22: mol_type = other DNA
ctttgcggctttaacgcactac

SEQ ID NO: 42042 - DNA, 22 bp, synthetic construct
  misc_feature 1..22: note = chemically synthesized
  source 1..22: mol_type = other DNA
tgcggctttaacgcactacacc

SEQ ID NO: 42043 - DNA, 22 bp, synthetic construct
  misc_feature 1..22: note = chemically synthesized
  source 1..22: mol_type = other DNA
gcggctttaacgcactacaccc

SEQ ID NO: 42044 - DNA, 22 bp, synthetic construct
  misc_feature 1..22: note = chemically synthesized
  source 1..22: mol_type = other DNA
cggctttaacgcactacacccc

SEQ ID NO: 42045 - DNA, 22 bp, synthetic construct
  misc_feature 1..22: note = chemically synthesized
  source 1..22: mol_type = other DNA
taacgcactacaccccacccac

SEQ ID NO: 42046 - DNA, 22 bp, synthetic construct
  misc_feature 1..22: note = chemically synthesized
  source 1..22: mol_type = other DNA
aacgcactacaccccacccacc

SEQ ID NO: 42047 - DNA, 22 bp, synthetic construct
  misc_feature 1..22: note = chemically synthesized
  source 1..22: mol_type = other DNA
acgcactacaccccacccacca

SEQ ID NO: 42048 - DNA, 22 bp, synthetic construct
  misc_feature 1..22: note = chemically synthesized
  source 1..22: mol_type = other DNA
caccccacccaccacaagcaca

SEQ ID NO: 42049 - DNA, 22 bp, synthetic construct
  misc_feature 1..22: note = chemically synthesized
  source 1..22: mol_type = other DNA
tcaggagtcagagggtcaccca

SEQ ID NO: 42050 - DNA, 22 bp, synthetic construct
  misc_feature 1..22: note = chemically synthesized
  source 1..22: mol_type = other DNA
aggagtcagagggtcacccagg

SEQ ID NO: 42051 - DNA, 22 bp, synthetic construct
  misc_feature 1..22: note = chemically synthesized
  source 1..22: mol_type = other DNA
gaacttaagccacccagcccac

SEQ ID NO: 42052 - DNA, 22 bp, synthetic construct
  misc_feature 1..22: note = chemically synthesized
  source 1..22: mol_type = other DNA
aagccacccagcccacaagctg

SEQ ID NO: 42053 - DNA, 22 bp, synthetic construct
  misc_feature 1..22: note = chemically synthesized
  source 1..22: mol_type = other DNA
agccacccagcccacaagctgg

SEQ ID NO: 42054 - DNA, 22 bp, synthetic construct
  misc_feature 1..22: note = chemically synthesized
  source 1..22: mol_type = other DNA
gcaggtgaaggaggacagggat

SEQ ID NO: 42055 - DNA, 22 bp, synthetic construct
  misc_feature 1..22: note = chemically synthesized
  source 1..22: mol_type = other DNA
tccacgctggcccctggctaag

SEQ ID NO: 42056 - DNA, 22 bp, synthetic construct
  misc_feature 1..22: note = chemically synthesized
  source 1..22: mol_type = other DNA
gcccctggctaagagcaactgc

SEQ ID NO: 42057 - DNA, 22 bp, synthetic construct
  misc_feature 1..22: note = chemically synthesized
  source 1..22: mol_type = other DNA
gctaagagcaactgcagcagaa

SEQ ID NO: 42058 - DNA, 22 bp, synthetic construct
  misc_feature 1..22: note = chemically synthesized
  source 1..22: mol_type = other DNA
agagcaactgcagcagaaacag

SEQ ID NO: 42059 - DNA, 22 bp, synthetic construct
  misc_feature 1..22: note = chemically synthesized
  source 1..22: mol_type = other DNA
cagcagaaacagtgtttcttct

SEQ ID NO: 42060 - DNA, 22 bp, synthetic construct
  misc_feature 1..22: note = chemically synthesized
  source 1..22: mol_type = other DNA
cttctccatttccatggctcgt

SEQ ID NO: 42061 - DNA, 22 bp, synthetic construct
  misc_feature 1..22: note = chemically synthesized
  source 1..22: mol_type = other DNA
ttctccatttccatggctcgtg

SEQ ID NO: 42062 - DNA, 22 bp, synthetic construct
  misc_feature 1..22: note = chemically synthesized
  source 1..22: mol_type = other DNA
ctccatttccatggctcgtgaa

SEQ ID NO: 42063 - DNA, 22 bp, synthetic construct
  misc_feature 1..22: note = chemically synthesized
  source 1..22: mol_type = other DNA
tccatttccatggctcgtgaat

SEQ ID NO: 42064 - DNA, 22 bp, synthetic construct
  misc_feature 1..22: note = chemically synthesized
  source 1..22: mol_type = other DNA
catttccatggctcgtgaattt

SEQ ID NO: 42065 - DNA, 22 bp, synthetic construct
  misc_feature 1..22: note = chemically synthesized
  source 1..22: mol_type = other DNA
ccatggctcgtgaatttttttg

SEQ ID NO: 42066 - DNA, 22 bp, synthetic construct
  misc_feature 1..22: note = chemically synthesized
  source 1..22: mol_type = other DNA
catggctcgtgaatttttttgt

SEQ ID NO: 42067 - DNA, 22 bp, synthetic construct
  misc_feature 1..22: note = chemically synthesized
  source 1..22: mol_type = other DNA
gtgaatttttttgtcttgtttt

SEQ ID NO: 42068 - DNA, 22 bp, synthetic construct
  misc_feature 1..22: note = chemically synthesized
  source 1..22: mol_type = other DNA
ttttgtcttgtttttcttgacg

SEQ ID NO: 42069 - DNA, 22 bp, synthetic construct
  misc_feature 1..22: note = chemically synthesized
  source 1..22: mol_type = other DNA
tttgtcttgtttttcttgacgc

SEQ ID NO: 42070 - DNA, 22 bp, synthetic construct
  misc_feature 1..22: note = chemically synthesized
  source 1..22: mol_type = other DNA
ttgtcttgtttttcttgacgct

SEQ ID NO: 42071 - DNA, 22 bp, synthetic construct
  misc_feature 1..22: note = chemically synthesized
  source 1..22: mol_type = other DNA
tgtcttgtttttcttgacgctc

SEQ ID NO: 42072 - DNA, 22 bp, synthetic construct
  misc_feature 1..22: note = chemically synthesized
  source 1..22: mol_type = other DNA
gtcttgtttttcttgacgctcc

SEQ ID NO: 42073 - DNA, 22 bp, synthetic construct
  misc_feature 1..22: note = chemically synthesized
  source 1..22: mol_type = other DNA
tcttgtttttcttgacgctcca

SEQ ID NO: 42074 - DNA, 22 bp, synthetic construct
  misc_feature 1..22: note = chemically synthesized
  source 1..22: mol_type = other DNA
gtttttcttgacgctccacccc

SEQ ID NO: 42075 - DNA, 22 bp, synthetic construct
  misc_feature 1..22: note = chemically synthesized
  source 1..22: mol_type = other DNA
tttttcttgacgctccaccccc

SEQ ID NO: 42076 - DNA, 22 bp, synthetic construct
  misc_feature 1..22: note = chemically synthesized
  source 1..22: mol_type = other DNA
ttcttgacgctccaccccctac

SEQ ID NO: 42077 - DNA, 22 bp, synthetic construct
  misc_feature 1..22: note = chemically synthesized
  source 1..22: mol_type = other DNA
tcttgacgctccaccccctaca

SEQ ID NO: 42078 - DNA, 22 bp, synthetic construct
  misc_feature 1..22: note = chemically synthesized
  source 1..22: mol_type = other DNA
cttgacgctccaccccctacat

SEQ ID NO: 42079 - DNA, 22 bp, synthetic construct
  misc_feature 1..22: note = chemically synthesized
  source 1..22: mol_type = other DNA
ttgacgctccaccccctacatc

SEQ ID NO: 42080 - DNA, 22 bp, synthetic construct
  misc_feature 1..22: note = chemically synthesized
  source 1..22: mol_type = other DNA
gacgctccaccccctacatctt

SEQ ID NO: 42081 - DNA, 22 bp, synthetic construct
  misc_feature 1..22: note = chemically synthesized
  source 1..22: mol_type = other DNA
acgctccaccccctacatcttt

SEQ ID NO: 42082 - DNA, 22 bp, synthetic construct
  misc_feature 1..22: note = chemically synthesized
  source 1..22: mol_type = other DNA
caccccctacatctttcttttc

SEQ ID NO: 42083 - DNA, 22 bp, synthetic construct
  misc_feature 1..22: note = chemically synthesized
  source 1..22: mol_type = other DNA
catctttcttttccccacatgc

SEQ ID NO: 42084 - DNA, 22 bp, synthetic construct
  misc_feature 1..22: note = chemically synthesized
  source 1..22: mol_type = other DNA
tcttttccccacatgctccagc

SEQ ID NO: 42085 - DNA, 22 bp, synthetic construct
  misc_feature 1..22: note = chemically synthesized
  source 1..22: mol_type = other DNA
cttttccccacatgctccagca

SEQ ID NO: 42086 - DNA, 22 bp, synthetic construct
  misc_feature 1..22: note = chemically synthesized
  source 1..22: mol_type = other DNA
ttttccccacatgctccagcac

SEQ ID NO: 42087 - DNA, 22 bp, synthetic construct
  misc_feature 1..22: note = chemically synthesized
  source 1..22: mol_type = other DNA
ttccccacatgctccagcacat

SEQ ID NO: 42088 - DNA, 22 bp, synthetic construct
  misc_feature 1..22: note = chemically synthesized
  source 1..22: mol_type = other DNA
tccccacatgctccagcacata

SEQ ID NO: 42089 - DNA, 22 bp, synthetic construct
  misc_feature 1..22: note = chemically synthesized
  source 1..22: mol_type = other DNA
ccccacatgctccagcacatac

SEQ ID NO: 42090 - DNA, 22 bp, synthetic construct
  misc_feature 1..22: note = chemically synthesized
  source 1..22: mol_type = other DNA
cccacatgctccagcacataca

SEQ ID NO: 42091 - DNA, 22 bp, synthetic construct
  misc_feature 1..22: note = chemically synthesized
  source 1..22: mol_type = other DNA
cagcacatacaactcagggctc

SEQ ID NO: 42092 - DNA, 22 bp, synthetic construct
  misc_feature 1..22: note = chemically synthesized
  source 1..22: mol_type = other DNA
agggctccagtgttttaagggc

SEQ ID NO: 42093 - DNA, 22 bp, synthetic construct
  misc_feature 1..22: note = chemically synthesized
  source 1..22: mol_type = other DNA
cagtgttttaagggcatttttt

SEQ ID NO: 42094 - DNA, 22 bp, synthetic construct
  misc_feature 1..22: note = chemically synthesized
  source 1..22: mol_type = other DNA
taagggcattttttttccacaa

SEQ ID NO: 42095 - DNA, 22 bp, synthetic construct
  misc_feature 1..22: note = chemically synthesized
  source 1..22: mol_type = other DNA
aagggcattttttttccacaag

SEQ ID NO: 42096 - DNA, 22 bp, synthetic construct
  misc_feature 1..22: note = chemically synthesized
  source 1..22: mol_type = other DNA
agggcattttttttccacaagt

SEQ ID NO: 42097 - DNA, 22 bp, synthetic construct
  misc_feature 1..22: note = chemically synthesized
  source 1..22: mol_type = other DNA
tttttccacaagtgagattaat

SEQ ID NO: 42098 - DNA, 22 bp, synthetic construct
  misc_feature 1..22: note = chemically synthesized
  source 1..22: mol_type = other DNA
ttttccacaagtgagattaatt

SEQ ID NO: 42099 - DNA, 22 bp, synthetic construct
  misc_feature 1..22: note = chemically synthesized
  source 1..22: mol_type = other DNA
tttccacaagtgagattaattt

SEQ ID NO: 42100 - DNA, 22 bp, synthetic construct
  misc_feature 1..22: note = chemically synthesized
  source 1..22: mol_type = other DNA
ttccacaagtgagattaatttt

SEQ ID NO: 42101 - DNA, 22 bp, synthetic construct
  misc_feature 1..22: note = chemically synthesized
  source 1..22: mol_type = other DNA
tccacaagtgagattaattttc

SEQ ID NO: 42102 - DNA, 22 bp, synthetic construct
  misc_feature 1..22: note = chemically synthesized
  source 1..22: mol_type = other DNA
ccacaagtgagattaattttct

SEQ ID NO: 42103 - DNA, 22 bp, synthetic construct
  misc_feature 1..22: note = chemically synthesized
  source 1..22: mol_type = other DNA
cacaagtgagattaattttcta

SEQ ID NO: 42104 - DNA, 22 bp, synthetic construct
  misc_feature 1..22: note = chemically synthesized
  source 1..22: mol_type = other DNA
attttctaacagaaccctagta

SEQ ID NO: 42105 - DNA, 22 bp, synthetic construct
  misc_feature 1..22: note = chemically synthesized
  source 1..22: mol_type = other DNA
tctaacagaaccctagtacatt

SEQ ID NO: 42106 - DNA, 22 bp, synthetic construct
  misc_feature 1..22: note = chemically synthesized
  source 1..22: mol_type = other DNA
ctaacagaaccctagtacattc

SEQ ID NO: 42107 - DNA, 22 bp, synthetic construct
  misc_feature 1..22: note = chemically synthesized
  source 1..22: mol_type = other DNA
taacagaaccctagtacattct

SEQ ID NO: 42108 - DNA, 22 bp, synthetic construct
  misc_feature 1..22: note = chemically synthesized
  source 1..22: mol_type = other DNA
acagaaccctagtacattctgt

SEQ ID NO: 42109 - DNA, 22 bp, synthetic construct
  misc_feature 1..22: note = chemically synthesized
  source 1..22: mol_type = other DNA
gtacattctgtgtgatggtggg

SEQ ID NO: 42110 - DNA, 22 bp, synthetic construct
  misc_feature 1..22: note = chemically synthesized
  source 1..22: mol_type = other DNA
tgtgtgatggtgggagagcctt

SEQ ID NO: 42111 - DNA, 22 bp, synthetic construct
  misc_feature 1..22: note = chemically synthesized
  source 1..22: mol_type = other DNA
tgtgatggtgggagagcctttt

SEQ ID NO: 42112 - DNA, 22 bp, synthetic construct
  misc_feature 1..22: note = chemically synthesized
  source 1..22: mol_type = other DNA
ttgaccatcacagtgtcctgga

SEQ ID NO: 42113 - DNA, 22 bp, synthetic construct
  misc_feature 1..22: note = chemically synthesized
  source 1..22: mol_type = other DNA
tgaccatcacagtgtcctggaa

SEQ ID NO: 42114 - DNA, 22 bp, synthetic construct
  misc_feature 1..22: note = chemically synthesized
  source 1..22: mol_type = other DNA
gaccatcacagtgtcctggaat

SEQ ID NO: 42115 - DNA, 22 bp, synthetic construct
  misc_feature 1..22: note = chemically synthesized
  source 1..22: mol_type = other DNA
accatcacagtgtcctggaatg

SEQ ID NO: 42116 - DNA, 22 bp, synthetic construct
  misc_feature 1..22: note = chemically synthesized
  source 1..22: mol_type = other DNA
gaatgagctcagcatgctctct

SEQ ID NO: 42117 - DNA, 22 bp, synthetic construct
  misc_feature 1..22: note = chemically synthesized
  source 1..22: mol_type = other DNA
agcatgctctctgggaagtgaa

SEQ ID NO: 42118 - DNA, 22 bp, synthetic construct
  misc_feature 1..22: note = chemically synthesized
  source 1..22: mol_type = other DNA
tctgggaagtgaattgggaaag

SEQ ID NO: 42119 - DNA, 22 bp, synthetic construct
  misc_feature 1..22: note = chemically synthesized
  source 1..22: mol_type = other DNA
tgggaagtgaattgggaaagtg

SEQ ID NO: 42120 - DNA, 22 bp, synthetic construct
  misc_feature 1..22: note = chemically synthesized
  source 1..22: mol_type = other DNA
ggaagtgaattgggaaagtgaa

SEQ ID NO: 42121 - DNA, 22 bp, synthetic construct
  misc_feature 1..22: note = chemically synthesized
  source 1..22: mol_type = other DNA
ggaaagtgaatggggaaaagcc

SEQ ID NO: 42122 - DNA, 22 bp, synthetic construct
  misc_feature 1..22: note = chemically synthesized
  source 1..22: mol_type = other DNA
aacacacagacagccccatgga

SEQ ID NO: 42123 - DNA, 22 bp, synthetic construct
  misc_feature 1..22: note = chemically synthesized
  source 1..22: mol_type = other DNA
tccagctcaggaaacccaccta

SEQ ID NO: 42124 - DNA, 22 bp, synthetic construct
  misc_feature 1..22: note = chemically synthesized
  source 1..22: mol_type = other DNA
cagctcaggaaacccacctagg

SEQ ID NO: 42125 - DNA, 22 bp, synthetic construct
  misc_feature 1..22: note = chemically synthesized
  source 1..22: mol_type = other DNA
aggaaacccacctaggtataga

SEQ ID NO: 42126 - DNA, 22 bp, synthetic construct
  misc_feature 1..22: note = chemically synthesized
  source 1..22: mol_type = other DNA
ggtatagagaccttctccggaa

SEQ ID NO: 42127 - DNA, 22 bp, synthetic construct
  misc_feature 1..22: note = chemically synthesized
  source 1..22: mol_type = other DNA
ctccggaacctctggtctgttc

SEQ ID NO: 42128 - DNA, 22 bp, synthetic construct
  misc_feature 1..22: note = chemically synthesized
  source 1..22: mol_type = other DNA
tccggaacctctggtctgttct

SEQ ID NO: 42129 - DNA, 22 bp, synthetic construct
  misc_feature 1..22: note = chemically synthesized
  source 1..22: mol_type = other DNA
cggaacctctggtctgttctag

SEQ ID NO: 42130 - DNA, 22 bp, synthetic construct
  misc_feature 1..22: note = chemically synthesized
  source 1..22: mol_type = other DNA
tggtctgttctagtcctgctgt

SEQ ID NO: 42131 - DNA, 22 bp, synthetic construct
  misc_feature 1..22: note = chemically synthesized
  source 1..22: mol_type = other DNA
gtctgttctagtcctgctgtca

SEQ ID NO: 42132 - DNA, 22 bp, synthetic construct
  misc_feature 1..22: note = chemically synthesized
  source 1..22: mol_type = other DNA
ttctagtcctgctgtcaaaaga

SEQ ID NO: 42133 - DNA, 22 bp, synthetic construct
  misc_feature 1..22: note = chemically synthesized
  source 1..22: mol_type = other DNA
tagtcctgctgtcaaaagaaag

SEQ ID NO: 42134 - DNA, 22 bp, synthetic construct
  misc_feature 1..22: note = chemically synthesized
  source 1..22: mol_type = other DNA
gtcctgctgtcaaaagaaaggg

SEQ ID NO: 42135 - DNA, 22 bp, synthetic construct
  misc_feature 1..22: note = chemically synthesized
  source 1..22: mol_type = other DNA
ctgtcaaaagaaaggggttgga

SEQ ID NO: 42136 - DNA, 22 bp, synthetic construct
  misc_feature 1..22: note = chemically synthesized
  source 1..22: mol_type = other DNA
tcaaaagaaaggggttggactg

SEQ ID NO: 42137 - DNA, 22 bp, synthetic construct
  misc_feature 1..22: note = chemically synthesized
  source 1..22: mol_type = other DNA
gactgatgtttcccagtggagg

SEQ ID NO: 42138 - DNA, 22 bp, synthetic construct
  misc_feature 1..22: note = chemically synthesized
  source 1..22: mol_type = other DNA
atgtttcccagtggagggcttg

SEQ ID NO: 42139 - DNA, 22 bp, synthetic construct
  misc_feature 1..22: note = chemically synthesized
  source 1..22: mol_type = other DNA
cccagtggagggcttgtttgtc

SEQ ID NO: 42140 - DNA, 22 bp, synthetic construct
  misc_feature 1..22: note = chemically synthesized
  source 1..22: mol_type = other DNA
ccagtggagggcttgtttgtca

SEQ ID NO: 42141 - DNA, 22 bp, synthetic construct
  misc_feature 1..22: note = chemically synthesized
  source 1..22: mol_type = other DNA
gtttgtcatttttggacctaac

SEQ ID NO: 42142 - DNA, 22 bp, synthetic construct
  misc_feature 1..22: note = chemically synthesized
  source 1..22: mol_type = other DNA
tttgtcatttttggacctaaca

SEQ ID NO: 42143 - DNA, 22 bp, synthetic construct
  misc_feature 1..22: note = chemically synthesized
  source 1..22: mol_type = other DNA
gtcatttttggacctaacatcc

SEQ ID NO: 42144 - DNA, 22 bp, synthetic construct
  misc_feature 1..22: note = chemically synthesized
  source 1..22: mol_type = other DNA
tcatttttggacctaacatcca

SEQ ID NO: 42145 - DNA, 22 bp, synthetic construct
  misc_feature 1..22: note = chemically synthesized
  source 1..22: mol_type = other DNA
ttggacctaacatccagttcat

SEQ ID NO: 42146 - DNA, 22 bp, synthetic construct
  misc_feature 1..22: note = chemically synthesized
  source 1..22: mol_type = other DNA
tggacctaacatccagttcatc

SEQ ID NO: 42147 - DNA, 22 bp, synthetic construct
  misc_feature 1..22: note = chemically synthesized
  source 1..22: mol_type = other DNA
ggacctaacatccagttcatca

SEQ ID NO: 42148 - DNA, 22 bp, synthetic construct
  misc_feature 1..22: note = chemically synthesized
  source 1..22: mol_type = other DNA
gacctaacatccagttcatcaa

SEQ ID NO: 42149 - DNA, 22 bp, synthetic construct
  misc_feature 1..22: note = chemically synthesized
  source 1..22: mol_type = other DNA
acatccagttcatcaaggtcac

SEQ ID NO: 42150 - DNA, 22 bp, synthetic construct
  misc_feature 1..22: note = chemically synthesized
  source 1..22: mol_type = other DNA
atcaaggtcacttctgactccc

SEQ ID NO: 42151 - DNA, 22 bp, synthetic construct
  misc_feature 1..22: note = chemically synthesized
  source 1..22: mol_type = other DNA
ctgactcccaggaagagaggca

SEQ ID NO: 42152 - DNA, 22 bp, synthetic construct
  misc_feature 1..22: note = chemically synthesized
  source 1..22: mol_type = other DNA
tgactcccaggaagagaggcag

SEQ ID NO: 42153 - DNA, 22 bp, synthetic construct
  misc_feature 1..22: note = chemically synthesized
  source 1..22: mol_type = other DNA
actcccaggaagagaggcagac

SEQ ID NO: 42154 - DNA, 22 bp, synthetic construct
  misc_feature 1..22: note = chemically synthesized
  source 1..22: mol_type = other DNA
ccaggaagagaggcagacctgt

SEQ ID NO: 42155 - DNA, 22 bp, synthetic construct
  misc_feature 1..22: note = chemically synthesized
  source 1..22: mol_type = other DNA
ttaaggggcgggtggtttgagc

SEQ ID NO: 42156 - DNA, 22 bp, synthetic construct
  misc_feature 1..22: note = chemically synthesized
  source 1..22: mol_type = other DNA
aggggcgggtggtttgagccac

SEQ ID NO: 42157 - DNA, 22 bp, synthetic construct
  misc_feature 1..22: note = chemically synthesized
  source 1..22: mol_type = other DNA
gagccacttaggacattttgga

SEQ ID NO: 42158 - DNA, 22 bp, synthetic construct
  misc_feature 1..22: note = chemically synthesized
  source 1..22: mol_type = other DNA
agccacttaggacattttggac

SEQ ID NO: 42159 - DNA, 22 bp, synthetic construct
  misc_feature 1..22: note = chemically synthesized
  source 1..22: mol_type = other DNA
aggacattttggacattttgca

SEQ ID NO: 42160 - DNA, 22 bp, synthetic construct
  misc_feature 1..22: note = chemically synthesized
  source 1..22: mol_type = other DNA
ggacattttggacattttgcat

SEQ ID NO: 42161 - DNA, 22 bp, synthetic construct
  misc_feature 1..22: note = chemically synthesized
  source 1..22: mol_type = other DNA
tggacattttgcatctctcatg

SEQ ID NO: 42162 - DNA, 22 bp, synthetic construct
  misc_feature 1..22: note = chemically synthesized
  source 1..22: mol_type = other DNA
ggacattttgcatctctcatga

SEQ ID NO: 42163 - DNA, 22 bp, synthetic construct
  misc_feature 1..22: note = chemically synthesized
  source 1..22: mol_type = other DNA
gacattttgcatctctcatgat

SEQ ID NO: 42164 - DNA, 22 bp, synthetic construct
  misc_feature 1..22: note = chemically synthesized
  source 1..22: mol_type = other DNA
tgcatctctcatgattctatct

SEQ ID NO: 42165 - DNA, 22 bp, synthetic construct
  misc_feature 1..22: note = chemically synthesized
  source 1..22: mol_type = other DNA
gcatctctcatgattctatctt

SEQ ID NO: 42166 - DNA, 22 bp, synthetic construct
  misc_feature 1..22: note = chemically synthesized
  source 1..22: mol_type = other DNA
catctctcatgattctatcttg

SEQ ID NO: 42167 - DNA, 22 bp, synthetic construct
  misc_feature 1..22: note = chemically synthesized
  source 1..22: mol_type = other DNA
tcatgattctatcttgagagtt

SEQ ID NO: 42168 - DNA, 22 bp, synthetic construct
  misc_feature 1..22: note = chemically synthesized
  source 1..22: mol_type = other DNA
atgattctatcttgagagttta

SEQ ID NO: 42169 - DNA, 22 bp, synthetic construct
  misc_feature 1..22: note = chemically synthesized
  source 1..22: mol_type = other DNA
tatcttgagagtttagtttggt

SEQ ID NO: 42170 - DNA, 22 bp, synthetic construct
  misc_feature 1..22: note = chemically synthesized
  source 1..22: mol_type = other DNA
tcttgagagtttagtttggttg

SEQ ID NO: 42171 - DNA, 22 bp, synthetic construct
  misc_feature 1..22: note = chemically synthesized
  source 1..22: mol_type = other DNA
gagagtttagtttggttggagt

SEQ ID NO: 42172 - DNA, 22 bp, synthetic construct
  misc_feature 1..22: note = chemically synthesized
  source 1..22: mol_type = other DNA
agagtttagtttggttggagtt

SEQ ID NO: 42173 - DNA, 22 bp, synthetic construct
  misc_feature 1..22: note = chemically synthesized
  source 1..22: mol_type = other DNA
agtttggttggagtttagtttt

SEQ ID NO: 42174 - DNA, 22 bp, synthetic construct
  misc_feature 1..22: note = chemically synthesized
  source 1..22: mol_type = other DNA
gtttggttggagtttagttttt

SEQ ID NO: 42175 - DNA, 22 bp, synthetic construct
  misc_feature 1..22: note = chemically synthesized
  source 1..22: mol_type = other DNA
ggttggagtttagtttttgagt

SEQ ID NO: 42176 - DNA, 22 bp, synthetic construct
  misc_feature 1..22: note = chemically synthesized
  source 1..22: mol_type = other DNA
gttggagtttagtttttgagtt

SEQ ID NO: 42177 - DNA, 22 bp, synthetic construct
  misc_feature 1..22: note = chemically synthesized
  source 1..22: mol_type = other DNA
gagtttagtttttgagtttttt

SEQ ID NO: 42178 - DNA, 22 bp, synthetic construct
  misc_feature 1..22: note = chemically synthesized
  source 1..22: mol_type = other DNA
agtttttgagttttttgttcgg

SEQ ID NO: 42179 - DNA, 22 bp, synthetic construct
  misc_feature 1..22: note = chemically synthesized
  source 1..22: mol_type = other DNA
gtttttgagttttttgttcggg

SEQ ID NO: 42180 - DNA, 22 bp, synthetic construct
  misc_feature 1..22: note = chemically synthesized
  source 1..22: mol_type = other DNA
ttgagttttttgttcgggttgt

SEQ ID NO: 42181 - DNA, 22 bp, synthetic construct
  misc_feature 1..22: note = chemically synthesized
  source 1..22: mol_type = other DNA
tgagttttttgttcgggttgtg

SEQ ID NO: 42182 - DNA, 22 bp, synthetic construct
  misc_feature 1..22: note = chemically synthesized
  source 1..22: mol_type = other DNA
gagttttttgttcgggttgtgg

SEQ ID NO: 42183 - DNA, 22 bp, synthetic construct
  misc_feature 1..22: note = chemically synthesized
  source 1..22: mol_type = other DNA
agttttttgttcgggttgtggt

SEQ ID NO: 42184 - DNA, 22 bp, synthetic construct
  misc_feature 1..22: note = chemically synthesized
  source 1..22: mol_type = other DNA
tttgttcgggttgtggtttctc

SEQ ID NO: 42185 - DNA, 22 bp, synthetic construct
  misc_feature 1..22: note = chemically synthesized
  source 1..22: mol_type = other DNA
ttgttcgggttgtggtttctct

SEQ ID NO: 42186 - DNA, 22 bp, synthetic construct
  misc_feature 1..22: note = chemically synthesized
  source 1..22: mol_type = other DNA
tgttcgggttgtggtttctctt

SEQ ID NO: 42187 - DNA, 22 bp, synthetic construct
  misc_feature 1..22: note = chemically synthesized
  source 1..22: mol_type = other DNA
gttcgggttgtggtttctcttc

SEQ ID NO: 42188 - DNA, 22 bp, synthetic construct
  misc_feature 1..22: note = chemically synthesized
  source 1..22: mol_type = other DNA
ttcgggttgtggtttctcttcc

SEQ ID NO: 42189 - DNA, 22 bp, synthetic construct
  misc_feature 1..22: note = chemically synthesized
  source 1..22: mol_type = other DNA
gggttgtggtttctcttcctcc

SEQ ID NO: 42190 - DNA, 22 bp, synthetic construct
  misc_feature 1..22: note = chemically synthesized
  source 1..22: mol_type = other DNA
tggtttctcttcctccattaaa

SEQ ID NO: 42191 - DNA, 22 bp, synthetic construct
  misc_feature 1..22: note = chemically synthesized
  source 1..22: mol_type = other DNA
ctcttcctccattaaaaaaaaa

SEQ ID NO: 42192 - DNA, 22 bp, synthetic construct
  misc_feature 1..22: note = chemically synthesized
  source 1..22: mol_type = other DNA
tcttcctccattaaaaaaaaaa

SEQ ID NO: 42193 - DNA, 22 bp, synthetic construct
  misc_feature 1..22: note = chemically synthesized
  source 1..22: mol_type = other DNA
ttcctccattaaaaaaaaaaat

SEQ ID NO: 42194 - DNA, 22 bp, synthetic construct
  misc_feature 1..22: note = chemically synthesized
  source 1..22: mol_type = other DNA
cctccattaaaaaaaaaaattg

SEQ ID NO: 42195 - DNA, 22 bp, synthetic construct
  misc_feature 1..22: note = chemically synthesized
  source 1..22: mol_type = other DNA
ctccattaaaaaaaaaaattgg

SEQ ID NO: 42196 - DNA, 22 bp, synthetic construct
  misc_feature 1..22: note = chemically synthesized
  source 1..22: mol_type = other DNA
cattaaaaaaaaaaattggagc

SEQ ID NO: 42197 - DNA, 22 bp, synthetic construct
  misc_feature 1..22: note = chemically synthesized
  source 1..22: mol_type = other DNA
aaaaaaaaaattggagctgtat

SEQ ID NO: 42198 - DNA, 22 bp, synthetic construct
  misc_feature 1..22: note = chemically synthesized
  source 1..22: mol_type = other DNA
gagctgtatttctgtttcctgt

SEQ ID NO: 42199 - DNA, 22 bp, synthetic construct
  misc_feature 1..22: note = chemically synthesized
  source 1..22: mol_type = other DNA
tatttctgtttcctgttcacgg

SEQ ID NO: 42200 - DNA, 22 bp, synthetic construct
  misc_feature 1..22: note = chemically synthesized
  source 1..22: mol_type = other DNA
ctgtttcctgttcacggagcgg

SEQ ID NO: 42201 - DNA, 22 bp, synthetic construct
  misc_feature 1..22: note = chemically synthesized
  source 1..22: mol_type = other DNA
tgtttcctgttcacggagcgga

SEQ ID NO: 42202 - DNA, 22 bp, synthetic construct
  misc_feature 1..22: note = chemically synthesized
  source 1..22: mol_type = other DNA
tttcctgttcacggagcggaca

SEQ ID NO: 42203 - DNA, 22 bp, synthetic construct
  misc_feature 1..22: note = chemically synthesized
  source 1..22: mol_type = other DNA
cctgttcacggagcggacagaa

SEQ ID NO: 42204 - DNA, 22 bp, synthetic construct
  misc_feature 1..22: note = chemically synthesized
  source 1..22: mol_type = other DNA
ctgttcacggagcggacagaag

SEQ ID NO: 42205 - DNA, 22 bp, synthetic construct
  misc_feature 1..22: note = chemically synthesized
  source 1..22: mol_type = other DNA
ttcacggagcggacagaaggag

SEQ ID NO: 42206 - DNA, 22 bp, synthetic construct
  misc_feature 1..22: note = chemically synthesized
  source 1..22: mol_type = other DNA
acggagcggacagaaggagggt

SEQ ID NO: 42207 - DNA, 22 bp, synthetic construct
  misc_feature 1..22: note = chemically synthesized
  source 1..22: mol_type = other DNA
atacatggagcagagccgagaa

SEQ ID NO: 42208 - DNA, 22 bp, synthetic construct
  misc_feature 1..22: note = chemically synthesized
  source 1..22: mol_type = other DNA
gagaaaagtgagaaatggagct

SEQ ID NO: 42209 - DNA, 22 bp, synthetic construct
  misc_feature 1..22: note = chemically synthesized
  source 1..22: mol_type = other DNA
ttttcttggcttccaaacagtt

SEQ ID NO: 42210 - DNA, 22 bp, synthetic construct
  misc_feature 1..22: note = chemically synthesized
  source 1..22: mol_type = other DNA
tttcttggcttccaaacagttg

SEQ ID NO: 42211 - DNA, 22 bp, synthetic construct
  misc_feature 1..22: note = chemically synthesized
  source 1..22: mol_type = other DNA
ttcttggcttccaaacagttgt

SEQ ID NO: 42212 - DNA, 22 bp, synthetic construct
  misc_feature 1..22: note = chemically synthesized
  source 1..22: mol_type = other DNA
tcttggcttccaaacagttgta

SEQ ID NO: 42213 - DNA, 22 bp, synthetic construct
  misc_feature 1..22: note = chemically synthesized
  source 1..22: mol_type = other DNA
cttggcttccaaacagttgtaa

SEQ ID NO: 42214 - DNA, 22 bp, synthetic construct
  misc_feature 1..22: note = chemically synthesized
  source 1..22: mol_type = other DNA
ttggcttccaaacagttgtaat

SEQ ID NO: 42215 - DNA, 22 bp, synthetic construct
  misc_feature 1..22: note = chemically synthesized
  source 1..22: mol_type = other DNA
ggcttccaaacagttgtaattt

SEQ ID NO: 42216 - DNA, 22 bp, synthetic construct
  misc_feature 1..22: note = chemically synthesized
  source 1..22: mol_type = other DNA
gcttccaaacagttgtaatttc

SEQ ID NO: 42217 - DNA, 22 bp, synthetic construct
  misc_feature 1..22: note = chemically synthesized
  source 1..22: mol_type = other DNA
ccaaacagttgtaatttccact

SEQ ID NO: 42218 - DNA, 22 bp, synthetic construct
  misc_feature 1..22: note = chemically synthesized
  source 1..22: mol_type = other DNA
caaacagttgtaatttccactg

SEQ ID NO: 42219 - DNA, 22 bp, synthetic construct
  misc_feature 1..22: note = chemically synthesized
  source 1..22: mol_type = other DNA
taatttccactgccactgctta

SEQ ID NO: 42220 - DNA, 22 bp, synthetic construct
  misc_feature 1..22: note = chemically synthesized
  source 1..22: mol_type = other DNA
ccactgccactgcttagttcct

SEQ ID NO: 42221 - DNA, 22 bp, synthetic construct
  misc_feature 1..22: note = chemically synthesized
  source 1..22: mol_type = other DNA
cactgccactgcttagttcctg

SEQ ID NO: 42222 - DNA, 22 bp, synthetic construct
  misc_feature 1..22: note = chemically synthesized
  source 1..22: mol_type = other DNA
ccactgcttagttcctgggcac

SEQ ID NO: 42223 - DNA, 22 bp, synthetic construct
  misc_feature 1..22: note = chemically synthesized
  source 1..22: mol_type = other DNA
cttagttcctgggcaccaggca

SEQ ID NO: 42224 - DNA, 22 bp, synthetic construct
  misc_feature 1..22: note = chemically synthesized
  source 1..22: mol_type = other DNA
agttcctgggcaccaggcatac

SEQ ID NO: 42225 - DNA, 22 bp, synthetic construct
  misc_feature 1..22: note = chemically synthesized
  source 1..22: mol_type = other DNA
gttcctgggcaccaggcataca

SEQ ID NO: 42226 - DNA, 22 bp, synthetic construct
  misc_feature 1..22: note = chemically synthesized
  source 1..22: mol_type = other DNA
ctgggcaccaggcatacagagt

SEQ ID NO: 42227 - DNA, 22 bp, synthetic construct
  misc_feature 1..22: note = chemically synthesized
  source 1..22: mol_type = other DNA
ggcaccaggcatacagagtggg

SEQ ID NO: 42228 - DNA, 22 bp, synthetic construct
  misc_feature 1..22: note = chemically synthesized
  source 1..22: mol_type = other DNA
tgccacaaatcaggatttggca

SEQ ID NO: 42229 - DNA, 22 bp, synthetic construct
  misc_feature 1..22: note = chemically synthesized
  source 1..22: mol_type = other DNA
gccacaaatcaggatttggcat

SEQ ID NO: 42230 - DNA, 22 bp, synthetic construct
  misc_feature 1..22: note = chemically synthesized
  source 1..22: mol_type = other DNA
ccacaaatcaggatttggcatt

SEQ ID NO: 42231 - DNA, 22 bp, synthetic construct
  misc_feature 1..22: note = chemically synthesized
  source 1..22: mol_type = other DNA
ggcatttaaatccacaggaagc

SEQ ID NO: 42232 - DNA, 22 bp, synthetic construct
  misc_feature 1..22: note = chemically synthesized
  source 1..22: mol_type = other DNA
gcatttaaatccacaggaagca

SEQ ID NO: 42233 - DNA, 22 bp, synthetic construct
  misc_feature 1..22: note = chemically synthesized
  source 1..22: mol_type = other DNA
aaatccacaggaagcaagaaga

SEQ ID NO: 42234 - DNA, 22 bp, synthetic construct
  misc_feature 1..22: note = chemically synthesized
  source 1..22: mol_type = other DNA
aatccacaggaagcaagaagaa

SEQ ID NO: 42235 - DNA, 22 bp, synthetic construct
  misc_feature 1..22: note = chemically synthesized
  source 1..22: mol_type = other DNA
cttatttatagatttgcagatg

SEQ ID NO: 42236 - DNA, 22 bp, synthetic construct
  misc_feature 1..22: note = chemically synthesized
  source 1..22: mol_type = other DNA
atttatagatttgcagatgaat

SEQ ID NO: 42237 - DNA, 22 bp, synthetic construct
  misc_feature 1..22: note = chemically synthesized
  source 1..22: mol_type = other DNA
tttatagatttgcagatgaatg

SEQ ID NO: 42238 - DNA, 22 bp, synthetic construct
  misc_feature 1..22: note = chemically synthesized
  source 1..22: mol_type = other DNA
atagatttgcagatgaatgaga

SEQ ID NO: 42239 - DNA, 22 bp, synthetic construct
  misc_feature 1..22: note = chemically synthesized
  source 1..22: mol_type = other DNA
tagatttgcagatgaatgagat

SEQ ID NO: 42240 - DNA, 22 bp, synthetic construct
  misc_feature 1..22: note = chemically synthesized
  source 1..22: mol_type = other DNA
gcagatgaatgagataaccaaa

SEQ ID NO: 42241 - DNA, 22 bp, synthetic construct
  misc_feature 1..22: note = chemically synthesized
  source 1..22: mol_type = other DNA
cagatgaatgagataaccaaaa

SEQ ID NO: 42242 - DNA, 22 bp, synthetic construct
  misc_feature 1..22: note = chemically synthesized
  source 1..22: mol_type = other DNA
ctcgcgtatgtgaaggagcaat

SEQ ID NO: 42243 - DNA, 22 bp, synthetic construct
  misc_feature 1..22: note = chemically synthesized
  source 1..22: mol_type = other DNA
tcgcgtatgtgaaggagcaatt

SEQ ID NO: 42244 - DNA, 22 bp, synthetic construct
  misc_feature 1..22: note = chemically synthesized
  source 1..22: mol_type = other DNA
gcgtatgtgaaggagcaattcc

SEQ ID NO: 42245 - DNA, 22 bp, synthetic construct
  misc_feature 1..22: note = chemically synthesized
  source 1..22: mol_type = other DNA
cattttcagacttggaaagttc

SEQ ID NO: 42246 - DNA, 22 bp, synthetic construct
  misc_feature 1..22: note = chemically synthesized
  source 1..22: mol_type = other DNA
tcagacttggaaagttctccat

SEQ ID NO: 42247 - DNA, 22 bp, synthetic construct
  misc_feature 1..22: note = chemically synthesized
  source 1..22: mol_type = other DNA
cagacttggaaagttctccata

SEQ ID NO: 42248 - DNA, 22 bp, synthetic construct
  misc_feature 1..22: note = chemically synthesized
  source 1..22: mol_type = other DNA
agacttggaaagttctccataa

SEQ ID NO: 42249 - DNA, 22 bp, synthetic construct
  misc_feature 1..22: note = chemically synthesized
  source 1..22: mol_type = other DNA
ggaaagttctccataattaagt

SEQ ID NO: 42250 - DNA, 22 bp, synthetic construct
  misc_feature 1..22: note = chemically synthesized
  source 1..22: mol_type = other DNA
gaaagttctccataattaagta

SEQ ID NO: 42251 - DNA, 22 bp, synthetic construct
  misc_feature 1..22: note = chemically synthesized
  source 1..22: mol_type = other DNA
tccataattaagtatcacccaa

SEQ ID NO: 42252 - DNA, 22 bp, synthetic construct
  misc_feature 1..22: note = chemically synthesized
  source 1..22: mol_type = other DNA
cataattaagtatcacccaacc

SEQ ID NO: 42253 - DNA, 22 bp, synthetic construct
  misc_feature 1..22: note = chemically synthesized
  source 1..22: mol_type = other DNA
agtatcacccaaccctgaaagc

SEQ ID NO: 42254 - DNA, 22 bp, synthetic construct
  misc_feature 1..22: note = chemically synthesized
  source 1..22: mol_type = other DNA
aaagcacactgcatcccaaggt

SEQ ID NO: 42255 - DNA, 22 bp, synthetic construct
  misc_feature 1..22: note = chemically synthesized
  source 1..22: mol_type = other DNA
catcccaaggttaagatcagct

SEQ ID NO: 42256 - DNA, 22 bp, synthetic construct
  misc_feature 1..22: note = chemically synthesized
  source 1..22: mol_type = other DNA
agatcagcttcctgaaaacagg

SEQ ID NO: 42257 - DNA, 22 bp, synthetic construct
  misc_feature 1..22: note = chemically synthesized
  source 1..22: mol_type = other DNA
cctgaaaacagggcagaagact

SEQ ID NO: 42258 - DNA, 22 bp, synthetic construct
  misc_feature 1..22: note = chemically synthesized
  source 1..22: mol_type = other DNA
ctgaaaacagggcagaagactg

SEQ ID NO: 42259 - DNA, 22 bp, synthetic construct
  misc_feature 1..22: note = chemically synthesized
  source 1..22: mol_type = other DNA
aaaacagggcagaagactgctg

SEQ ID NO: 42260 - DNA, 22 bp, synthetic construct
  misc_feature 1..22: note = chemically synthesized
  source 1..22: mol_type = other DNA
ctgcttcagtggtagctcaaaa

SEQ ID NO: 42261 - DNA, 22 bp, synthetic construct
  misc_feature 1..22: note = chemically synthesized
  source 1..22: mol_type = other DNA
cttcagtggtagctcaaaaatt

SEQ ID NO: 42262 - DNA, 22 bp, synthetic construct
  misc_feature 1..22: note = chemically synthesized
  source 1..22: mol_type = other DNA
cagtggtagctcaaaaattcta

SEQ ID NO: 42263 - DNA, 22 bp, synthetic construct
  misc_feature 1..22: note = chemically synthesized
  source 1..22: mol_type = other DNA
agtggtagctcaaaaattctat

SEQ ID NO: 42264 - DNA, 22 bp, synthetic construct
  misc_feature 1..22: note = chemically synthesized
  source 1..22: mol_type = other DNA
aaaaattctattttgaaggaca

SEQ ID NO: 42265 - DNA, 22 bp, synthetic construct
  misc_feature 1..22: note = chemically synthesized
  source 1..22: mol_type = other DNA
tattttgaaggacaggttagta

SEQ ID NO: 42266 - DNA, 22 bp, synthetic construct
  misc_feature 1..22: note = chemically synthesized
  source 1..22: mol_type = other DNA
ttttgaaggacaggttagtacc

SEQ ID NO: 42267 - DNA, 22 bp, synthetic construct
  misc_feature 1..22: note = chemically synthesized
  source 1..22: mol_type = other DNA
tgaaggacaggttagtaccaca

SEQ ID NO: 42268 - DNA, 22 bp, synthetic construct
  misc_feature 1..22: note = chemically synthesized
  source 1..22: mol_type = other DNA
gaaggacaggttagtaccacac

SEQ ID NO: 42269 - DNA, 22 bp, synthetic construct
  misc_feature 1..22: note = chemically synthesized
  source 1..22: mol_type = other DNA
aaggacaggttagtaccacact

SEQ ID NO: 42270 - DNA, 22 bp, synthetic construct
  misc_feature 1..22: note = chemically synthesized
  source 1..22: mol_type = other DNA
gtaccacactacatttaactgg

SEQ ID NO: 42271 - DNA, 22 bp, synthetic construct
  misc_feature 1..22: note = chemically synthesized
  source 1..22: mol_type = other DNA
catttaactggattcagttcat

SEQ ID NO: 42272 - DNA, 22 bp, synthetic construct
  misc_feature 1..22: note = chemically synthesized
  source 1..22: mol_type = other DNA
aactggattcagttcatgtgat

SEQ ID NO: 42273 - DNA, 22 bp, synthetic construct
  misc_feature 1..22: note = chemically synthesized
  source 1..22: mol_type = other DNA
actggattcagttcatgtgatt

SEQ ID NO: 42274 - DNA, 22 bp, synthetic construct
  misc_feature 1..22: note = chemically synthesized
  source 1..22: mol_type = other DNA
gattcagttcatgtgattatac

SEQ ID NO: 42275 - DNA, 22 bp, synthetic construct
  misc_feature 1..22: note = chemically synthesized
  source 1..22: mol_type = other DNA
agttcatgtgattatacagtgc

SEQ ID NO: 42276 - DNA, 22 bp, synthetic construct
  misc_feature 1..22: note = chemically synthesized
  source 1..22: mol_type = other DNA
atgtgattatacagtgccttgc

SEQ ID NO: 42277 - DNA, 22 bp, synthetic construct
  misc_feature 1..22: note = chemically synthesized
  source 1..22: mol_type = other DNA
tacagtgccttgctttctagaa

SEQ ID NO: 42278 - DNA, 22 bp, synthetic construct
  misc_feature 1..22: note = chemically synthesized
  source 1..22: mol_type = other DNA
gctttctagaatgtgtaatcat

SEQ ID NO: 42279 - DNA, 22 bp, synthetic construct
  misc_feature 1..22: note = chemically synthesized
  source 1..22: mol_type = other DNA
ctttctagaatgtgtaatcatc

SEQ ID NO: 42280 - DNA, 22 bp, synthetic construct
  misc_feature 1..22: note = chemically synthesized
  source 1..22: mol_type = other DNA
tctagaatgtgtaatcatctct

SEQ ID NO: 42281 - DNA, 22 bp, synthetic construct
  misc_feature 1..22: note = chemically synthesized
  source 1..22: mol_type = other DNA
ctagaatgtgtaatcatctctt

SEQ ID NO: 42282 - DNA, 22 bp, synthetic construct
  misc_feature 1..22: note = chemically synthesized
  source 1..22: mol_type = other DNA
tagaatgtgtaatcatctcttt

SEQ ID NO: 42283 - DNA, 22 bp, synthetic construct
  misc_feature 1..22: note = chemically synthesized
  source 1..22: mol_type = other DNA
gaatgtgtaatcatctctttct

SEQ ID NO: 42284 - DNA, 22 bp, synthetic construct
  misc_feature 1..22: note = chemically synthesized
  source 1..22: mol_type = other DNA
tttctgatgacattttaaatat

SEQ ID NO: 42285 - DNA, 22 bp, synthetic construct
  misc_feature 1..22: note = chemically synthesized
  source 1..22: mol_type = other DNA
tctgatgacattttaaatatcc

SEQ ID NO: 42286 - DNA, 22 bp, synthetic construct
  misc_feature 1..22: note = chemically synthesized
  source 1..22: mol_type = other DNA
ctgatgacattttaaatatcca

SEQ ID NO: 42287 - DNA, 22 bp, synthetic construct
  misc_feature 1..22: note = chemically synthesized
  source 1..22: mol_type = other DNA
tgatgacattttaaatatccaa

SEQ ID NO: 42288 - DNA, 22 bp, synthetic construct
  misc_feature 1..22: note = chemically synthesized
  source 1..22: mol_type = other DNA
atgacattttaaatatccaact

SEQ ID NO: 42289 - DNA, 22 bp, synthetic construct
  misc_feature 1..22: note = chemically synthesized
  source 1..22: mol_type = other DNA
taaatatccaactagacaaata

SEQ ID NO: 42290 - DNA, 22 bp, synthetic construct
  misc_feature 1..22: note = chemically synthesized
  source 1..22: mol_type = other DNA
aaatatccaactagacaaataa

SEQ ID NO: 42291 - DNA, 22 bp, synthetic construct
  misc_feature 1..22: note = chemically synthesized
  source 1..22: mol_type = other DNA
aatatccaactagacaaataat

SEQ ID NO: 42292 - DNA, 22 bp, synthetic construct
  misc_feature 1..22: note = chemically synthesized
  source 1..22: mol_type = other DNA
gacaaataattgcagcaataat

SEQ ID NO: 42293 - DNA, 22 bp, synthetic construct
  misc_feature 1..22: note = chemically synthesized
  source 1..22: mol_type = other DNA
cagcaataattgatagcagagt

SEQ ID NO: 42294 - DNA, 22 bp, synthetic construct
  misc_feature 1..22: note = chemically synthesized
  source 1..22: mol_type = other DNA
atagcagagtcaagctggaaga

SEQ ID NO: 42295 - DNA, 22 bp, synthetic construct
  misc_feature 1..22: note = chemically synthesized
  source 1..22: mol_type = other DNA
gaagatcattgattggcagagt

SEQ ID NO: 42296 - DNA, 22 bp, synthetic construct
  misc_feature 1..22: note = chemically synthesized
  source 1..22: mol_type = other DNA
attggcagagtccccactgaaa

SEQ ID NO: 42297 - DNA, 22 bp, synthetic construct
  misc_feature 1..22: note = chemically synthesized
  source 1..22: mol_type = other DNA
gcagagtccccactgaaacaaa

SEQ ID NO: 42298 - DNA, 22 bp, synthetic construct
  misc_feature 1..22: note = chemically synthesized
  source 1..22: mol_type = other DNA
aaacaaatctttctttcaaaca

SEQ ID NO: 42299 - DNA, 22 bp, synthetic construct
  misc_feature 1..22: note = chemically synthesized
  source 1..22: mol_type = other DNA
tctttcaaacattacagaaatg

SEQ ID NO: 42300 - DNA, 22 bp, synthetic construct
  misc_feature 1..22: note = chemically synthesized
  source 1..22: mol_type = other DNA
ctttcaaacattacagaaatga

SEQ ID NO: 42301 - DNA, 22 bp, synthetic construct
  misc_feature 1..22: note = chemically synthesized
  source 1..22: mol_type = other DNA
tttcaaacattacagaaatgat

SEQ ID NO: 42302 - DNA, 22 bp, synthetic construct
  misc_feature 1..22: note = chemically synthesized
  source 1..22: mol_type = other DNA
tcaaacattacagaaatgatga

SEQ ID NO: 42303 - DNA, 22 bp, synthetic construct
  misc_feature 1..22: note = chemically synthesized
  source 1..22: mol_type = other DNA
caaacattacagaaatgatgat

SEQ ID NO: 42304 - DNA, 22 bp, synthetic construct
  misc_feature 1..22: note = chemically synthesized
  source 1..22: mol_type = other DNA
aaacattacagaaatgatgatg

SEQ ID NO: 42305 - DNA, 22 bp, synthetic construct
  misc_feature 1..22: note = chemically synthesized
  source 1..22: mol_type = other DNA
cagaaatgatgatgtttaagtc

SEQ ID NO: 42306 - DNA, 22 bp, synthetic construct
  misc_feature 1..22: note = chemically synthesized
  source 1..22: mol_type = other DNA
aagtctaacttttgctgataaa

SEQ ID NO: 42307 - DNA, 22 bp, synthetic construct
  misc_feature 1..22: note = chemically synthesized
  source 1..22: mol_type = other DNA
agtctaacttttgctgataaat

SEQ ID NO: 42308 - DNA, 22 bp, synthetic construct
  misc_feature 1..22: note = chemically synthesized
  source 1..22: mol_type = other DNA
acttttgctgataaatgctcaa

SEQ ID NO: 42309 - DNA, 22 bp, synthetic construct
  misc_feature 1..22: note = chemically synthesized
  source 1..22: mol_type = other DNA
ttgctgataaatgctcaaaatc

SEQ ID NO: 42310 - DNA, 22 bp, synthetic construct
  misc_feature 1..22: note = chemically synthesized
  source 1..22: mol_type = other DNA
tgctgataaatgctcaaaatct

SEQ ID NO: 42311 - DNA, 22 bp, synthetic construct
  misc_feature 1..22: note = chemically synthesized
  source 1..22: mol_type = other DNA
gctgataaatgctcaaaatctg

SEQ ID NO: 42312 - DNA, 22 bp, synthetic construct
  misc_feature 1..22: note = chemically synthesized
  source 1..22: mol_type = other DNA
ctgataaatgctcaaaatctga

SEQ ID NO: 42313 - DNA, 22 bp, synthetic construct
  misc_feature 1..22: note = chemically synthesized
  source 1..22: mol_type = other DNA
ataaatgctcaaaatctgattt

SEQ ID NO: 42314 - DNA, 22 bp, synthetic construct
  misc_feature 1..22: note = chemically synthesized
  source 1..22: mol_type = other DNA
aaaatctgatttactgataaag

SEQ ID NO: 42315 - DNA, 22 bp, synthetic construct
  misc_feature 1..22: note = chemically synthesized
  source 1..22: mol_type = other DNA
atttactgataaaggcactgca

SEQ ID NO: 42316 - DNA, 22 bp, synthetic construct
  misc_feature 1..22: note = chemically synthesized
  source 1..22: mol_type = other DNA
actgataaaggcactgcaagaa

SEQ ID NO: 42317 - DNA, 22 bp, synthetic construct
  misc_feature 1..22: note = chemically synthesized
  source 1..22: mol_type = other DNA
ctgataaaggcactgcaagaaa

SEQ ID NO: 42318 - DNA, 22 bp, synthetic construct
  misc_feature 1..22: note = chemically synthesized
  source 1..22: mol_type = other DNA
ataaaggcactgcaagaaaacc

SEQ ID NO: 42319 - DNA, 22 bp, synthetic construct
  misc_feature 1..22: note = chemically synthesized
  source 1..22: mol_type = other DNA
caagaaaacctgcacttcagcc

SEQ ID NO: 42320 - DNA, 22 bp, synthetic construct
  misc_feature 1..22: note = chemically synthesized
  source 1..22: mol_type = other DNA
cacttcagcccatgattacttt

SEQ ID NO: 42321 - DNA, 22 bp, synthetic construct
  misc_feature 1..22: note = chemically synthesized
  source 1..22: mol_type = other DNA
cagcccatgattactttgcgag

SEQ ID NO: 42322 - DNA, 22 bp, synthetic construct
  misc_feature 1..22: note = chemically synthesized
  source 1..22: mol_type = other DNA
agcccatgattactttgcgaga

SEQ ID NO: 42323 - DNA, 22 bp, synthetic construct
  misc_feature 1..22: note = chemically synthesized
  source 1..22: mol_type = other DNA
ctttgcgagatgtttgagaaga

SEQ ID NO: 42324 - DNA, 22 bp, synthetic construct
  misc_feature 1..22: note = chemically synthesized
  source 1..22: mol_type = other DNA
tgcgagatgtttgagaagaatc

SEQ ID NO: 42325 - DNA, 22 bp, synthetic construct
  misc_feature 1..22: note = chemically synthesized
  source 1..22: mol_type = other DNA
gcgagatgtttgagaagaatca

SEQ ID NO: 42326 - DNA, 22 bp, synthetic construct
  misc_feature 1..22: note = chemically synthesized
  source 1..22: mol_type = other DNA
cgagatgtttgagaagaatcag

SEQ ID NO: 42327 - DNA, 22 bp, synthetic construct
  misc_feature 1..22: note = chemically synthesized
  source 1..22: mol_type = other DNA
gagaagaatcaggcagtgtgat

SEQ ID NO: 42328 - DNA, 22 bp, synthetic construct
  misc_feature 1..22: note = chemically synthesized
  source 1..22: mol_type = other DNA
agaagaatcaggcagtgtgatt

SEQ ID NO: 42329 - DNA, 22 bp, synthetic construct
  misc_feature 1..22: note = chemically synthesized
  source 1..22: mol_type = other DNA
atattatttcccatgaataact

SEQ ID NO: 42330 - DNA, 22 bp, synthetic construct
  misc_feature 1..22: note = chemically synthesized
  source 1..22: mol_type = other DNA
tattatttcccatgaataactg

SEQ ID NO: 42331 - DNA, 22 bp, synthetic construct
  misc_feature 1..22: note = chemically synthesized
  source 1..22: mol_type = other DNA
tttcccatgaataactgcaagg

SEQ ID NO: 42332 - DNA, 22 bp, synthetic construct
  misc_feature 1..22: note = chemically synthesized
  source 1..22: mol_type = other DNA
cccatgaataactgcaaggata

SEQ ID NO: 42333 - DNA, 22 bp, synthetic construct
  misc_feature 1..22: note = chemically synthesized
  source 1..22: mol_type = other DNA
ccatgaataactgcaaggatag

SEQ ID NO: 42334 - DNA, 22 bp, synthetic construct
  misc_feature 1..22: note = chemically synthesized
  source 1..22: mol_type = other DNA
caaggatagtgtgggtagttgg

SEQ ID NO: 42335 - DNA, 22 bp, synthetic construct
  misc_feature 1..22: note = chemically synthesized
  source 1..22: mol_type = other DNA
gaggagaatcaacacaggcgag

SEQ ID NO: 42336 - DNA, 22 bp, synthetic construct
  misc_feature 1..22: note = chemically synthesized
  source 1..22: mol_type = other DNA
ctccttaatgctacacttcctg

SEQ ID NO: 42337 - DNA, 22 bp, synthetic construct
  misc_feature 1..22: note = chemically synthesized
  source 1..22: mol_type = other DNA
cttaatgctacacttcctgaac

SEQ ID NO: 42338 - DNA, 22 bp, synthetic construct
  misc_feature 1..22: note = chemically synthesized
  source 1..22: mol_type = other DNA
aatgctacacttcctgaacaat

SEQ ID NO: 42339 - DNA, 22 bp, synthetic construct
  misc_feature 1..22: note = chemically synthesized
  source 1..22: mol_type = other DNA
atgctacacttcctgaacaatg

SEQ ID NO: 42340 - DNA, 22 bp, synthetic construct
  misc_feature 1..22: note = chemically synthesized
  source 1..22: mol_type = other DNA
cacttcctgaacaatgctagcc

SEQ ID NO: 42341 - DNA, 22 bp, synthetic construct
  misc_feature 1..22: note = chemically synthesized
  source 1..22: mol_type = other DNA
cctgaacaatgctagccaacaa

SEQ ID NO: 42342 - DNA, 22 bp, synthetic construct
  misc_feature 1..22: note = chemically synthesized
  source 1..22: mol_type = other DNA
ctgaacaatgctagccaacaat

SEQ ID NO: 42343 - DNA, 22 bp, synthetic construct
  misc_feature 1..22: note = chemically synthesized
  source 1..22: mol_type = other DNA
aacaatgctagccaacaatcag

SEQ ID NO: 42344 - DNA, 22 bp, synthetic construct
  misc_feature 1..22: note = chemically synthesized
  source 1..22: mol_type = other DNA
gccaacaatcagggtttacagc

SEQ ID NO: 42345 - DNA, 22 bp, synthetic construct
  misc_feature 1..22: note = chemically synthesized
  source 1..22: mol_type = other DNA
acagccgttttcccctctaata

SEQ ID NO: 42346 - DNA, 22 bp, synthetic construct
  misc_feature 1..22: note = chemically synthesized
  source 1..22: mol_type = other DNA
cagccgttttcccctctaatat

SEQ ID NO: 42347 - DNA, 22 bp, synthetic construct
  misc_feature 1..22: note = chemically synthesized
  source 1..22: mol_type = other DNA
tcccctctaatatatatcccgt

SEQ ID NO: 42348 - DNA, 22 bp, synthetic construct
  misc_feature 1..22: note = chemically synthesized
  source 1..22: mol_type = other DNA
cccctctaatatatatcccgtg

SEQ ID NO: 42349 - DNA, 22 bp, synthetic construct
  misc_feature 1..22: note = chemically synthesized
  source 1..22: mol_type = other DNA
ccctctaatatatatcccgtgg

SEQ ID NO: 42350 - DNA, 22 bp, synthetic construct
  misc_feature 1..22: note = chemically synthesized
  source 1..22: mol_type = other DNA
taatatatatcccgtggtagag

SEQ ID NO: 42351 - DNA, 22 bp, synthetic construct
  misc_feature 1..22: note = chemically synthesized
  source 1..22: mol_type = other DNA
atatatatcccgtggtagagaa

SEQ ID NO: 42352 - DNA, 22 bp, synthetic construct
  misc_feature 1..22: note = chemically synthesized
  source 1..22: mol_type = other DNA
gacaaggggaagaccaggaaaa

SEQ ID NO: 42353 - DNA, 22 bp, synthetic construct
  misc_feature 1..22: note = chemically synthesized
  source 1..22: mol_type = other DNA
acaaggggaagaccaggaaaag

SEQ ID NO: 42354 - DNA, 22 bp, synthetic construct
  misc_feature 1..22: note = chemically synthesized
  source 1..22: mol_type = other DNA
cattcaggcctttgaaaagtgg

SEQ ID NO: 42355 - DNA, 22 bp, synthetic construct
  misc_feature 1..22: note = chemically synthesized
  source 1..22: mol_type = other DNA
aggcctttgaaaagtggtttaa

SEQ ID NO: 42356 - DNA, 22 bp, synthetic construct
  misc_feature 1..22: note = chemically synthesized
  source 1..22: mol_type = other DNA
tgaaaagtggtttaaatcgatg

SEQ ID NO: 42357 - DNA, 22 bp, synthetic construct
  misc_feature 1..22: note = chemically synthesized
  source 1..22: mol_type = other DNA
gaaaagtggtttaaatcgatgc

SEQ ID NO: 42358 - DNA, 22 bp, synthetic construct
  misc_feature 1..22: note = chemically synthesized
  source 1..22: mol_type = other DNA
aaaagtggtttaaatcgatgcc

SEQ ID NO: 42359 - DNA, 22 bp, synthetic construct
  misc_feature 1..22: note = chemically synthesized
  source 1..22: mol_type = other DNA
aaatcgatgcctcaaattggga

SEQ ID NO: 42360 - DNA, 22 bp, synthetic construct
  misc_feature 1..22: note = chemically synthesized
  source 1..22: mol_type = other DNA
aatcgatgcctcaaattgggac

SEQ ID NO: 42361 - DNA, 22 bp, synthetic construct
  misc_feature 1..22: note = chemically synthesized
  source 1..22: mol_type = other DNA
aaattgggactcaaattcccct

SEQ ID NO: 42362 - DNA, 22 bp, synthetic construct
  misc_feature 1..22: note = chemically synthesized
  source 1..22: mol_type = other DNA
ggactcaaattcccctgcccag

SEQ ID NO: 42363 - DNA, 22 bp, synthetic construct
  misc_feature 1..22: note = chemically synthesized
  source 1..22: mol_type = other DNA
aaattcccctgcccagtgcaaa

SEQ ID NO: 42364 - DNA, 22 bp, synthetic construct
  misc_feature 1..22: note = chemically synthesized
  source 1..22: mol_type = other DNA
ccctgcccagtgcaaagatccc

SEQ ID NO: 42365 - DNA, 22 bp, synthetic construct
  misc_feature 1..22: note = chemically synthesized
  source 1..22: mol_type = other DNA
cccagtgcaaagatccctggcc

SEQ ID NO: 42366 - DNA, 22 bp, synthetic construct
  misc_feature 1..22: note = chemically synthesized
  source 1..22: mol_type = other DNA
gccaaggtcagaagacttgaga

SEQ ID NO: 42367 - DNA, 22 bp, synthetic construct
  misc_feature 1..22: note = chemically synthesized
  source 1..22: mol_type = other DNA
gagaccaggcaagtcccagatg

SEQ ID NO: 42368 - DNA, 22 bp, synthetic construct
  misc_feature 1..22: note = chemically synthesized
  source 1..22: mol_type = other DNA
agaccaggcaagtcccagatga

SEQ ID NO: 42369 - DNA, 22 bp, synthetic construct
  misc_feature 1..22: note = chemically synthesized
  source 1..22: mol_type = other DNA
aggcaagtccccaggtatagct

SEQ ID NO: 42370 - DNA, 22 bp, synthetic construct
  misc_feature 1..22: note = chemically synthesized
  source 1..22: mol_type = other DNA
cagtccctttagccccagtctg

SEQ ID NO: 42371 - DNA, 22 bp, synthetic construct
  misc_feature 1..22: note = chemically synthesized
  source 1..22: mol_type = other DNA
tagccccagtctgtttctctgt

SEQ ID NO: 42372 - DNA, 22 bp, synthetic construct
  misc_feature 1..22: note = chemically synthesized
  source 1..22: mol_type = other DNA
agccccagtctgtttctctgtc

SEQ ID NO: 42373 - DNA, 22 bp, synthetic construct
  misc_feature 1..22: note = chemically synthesized
  source 1..22: mol_type = other DNA
gccccagtctgtttctctgtcc

SEQ ID NO: 42374 - DNA, 22 bp, synthetic construct
  misc_feature 1..22: note = chemically synthesized
  source 1..22: mol_type = other DNA
tttctctgtccaaggcagaacc

SEQ ID NO: 42375 - DNA, 22 bp, synthetic construct
  misc_feature 1..22: note = chemically synthesized
  source 1..22: mol_type = other DNA
ctctgtccaaggcagaacccaa

SEQ ID NO: 42376 - DNA, 22 bp, synthetic construct
  misc_feature 1..22: note = chemically synthesized
  source 1..22: mol_type = other DNA
tctgtccaaggcagaacccaaa

SEQ ID NO: 42377 - DNA, 22 bp, synthetic construct
  misc_feature 1..22: note = chemically synthesized
  source 1..22: mol_type = other DNA
tgtccaaggcagaacccaaatc

SEQ ID NO: 42378 - DNA, 22 bp, synthetic construct
  misc_feature 1..22: note = chemically synthesized
  source 1..22: mol_type = other DNA
tccaaggcagaacccaaatcaa

SEQ ID NO: 42379 - DNA, 22 bp, synthetic construct
  misc_feature 1..22: note = chemically synthesized
  source 1..22: mol_type = other DNA
ctgtctatgtcatgtgttttga

SEQ ID NO: 42380 - DNA, 22 bp, synthetic construct
  misc_feature 1..22: note = chemically synthesized
  source 1..22: mol_type = other DNA
tctatgtcatgtgttttgattg

SEQ ID NO: 42381 - DNA, 22 bp, synthetic construct
  misc_feature 1..22: note = chemically synthesized
  source 1..22: mol_type = other DNA
tgtcatgtgttttgattgtaat

SEQ ID NO: 42382 - DNA, 22 bp, synthetic construct
  misc_feature 1..22: note = chemically synthesized
  source 1..22: mol_type = other DNA
tgattgtaatatttaagttagg

SEQ ID NO: 42383 - DNA, 22 bp, synthetic construct
  misc_feature 1..22: note = chemically synthesized
  source 1..22: mol_type = other DNA
gattgtaatatttaagttaggg

SEQ ID NO: 42384 - DNA, 22 bp, synthetic construct
  misc_feature 1..22: note = chemically synthesized
  source 1..22: mol_type = other DNA
attgtaatatttaagttagggc

SEQ ID NO: 42385 - DNA, 22 bp, synthetic construct
  misc_feature 1..22: note = chemically synthesized
  source 1..22: mol_type = other DNA
taatatttaagttagggcactg

SEQ ID NO: 42386 - DNA, 22 bp, synthetic construct
  misc_feature 1..22: note = chemically synthesized
  source 1..22: mol_type = other DNA
aagttagggcactgtgttcaac

SEQ ID NO: 42387 - DNA, 22 bp, synthetic construct
  misc_feature 1..22: note = chemically synthesized
  source 1..22: mol_type = other DNA
agttagggcactgtgttcaaca

SEQ ID NO: 42388 - DNA, 22 bp, synthetic construct
  misc_feature 1..22: note = chemically synthesized
  source 1..22: mol_type = other DNA
gggcactgtgttcaacaactca

SEQ ID NO: 42389 - DNA, 22 bp, synthetic construct
  misc_feature 1..22: note = chemically synthesized
  source 1..22: mol_type = other DNA
tgttcaacaactcagaccctgt

SEQ ID NO: 42390 - DNA, 22 bp, synthetic construct
  misc_feature 1..22: note = chemically synthesized
  source 1..22: mol_type = other DNA
aacaactcagaccctgtggaat

SEQ ID NO: 42391 - DNA, 22 bp, synthetic construct
  misc_feature 1..22: note = chemically synthesized
  source 1..22: mol_type = other DNA
agaccctgtggaatgctgcagt

SEQ ID NO: 42392 - DNA, 22 bp, synthetic construct
  misc_feature 1..22: note = chemically synthesized
  source 1..22: mol_type = other DNA
tggaatgctgcagttgtcagaa

SEQ ID NO: 42393 - DNA, 22 bp, synthetic construct
  misc_feature 1..22: note = chemically synthesized
  source 1..22: mol_type = other DNA
cagttgtcagaaataactcaag

SEQ ID NO: 42394 - DNA, 22 bp, synthetic construct
  misc_feature 1..22: note = chemically synthesized
  source 1..22: mol_type = other DNA
tcagaaataactcaagagagga

SEQ ID NO: 42395 - DNA, 22 bp, synthetic construct
  misc_feature 1..22: note = chemically synthesized
  source 1..22: mol_type = other DNA
aagagaggatgctcgtccccag

SEQ ID NO: 42396 - DNA, 22 bp, synthetic construct
  misc_feature 1..22: note = chemically synthesized
  source 1..22: mol_type = other DNA
gtccccaggaaacatcaaatga

SEQ ID NO: 42397 - DNA, 22 bp, synthetic construct
  misc_feature 1..22: note = chemically synthesized
  source 1..22: mol_type = other DNA
gcatattagcagacgtggatta

SEQ ID NO: 42398 - DNA, 22 bp, synthetic construct
  misc_feature 1..22: note = chemically synthesized
  source 1..22: mol_type = other DNA
gcagacgtggattacagtaagg

SEQ ID NO: 42399 - DNA, 22 bp, synthetic construct
  misc_feature 1..22: note = chemically synthesized
  source 1..22: mol_type = other DNA
cagtaaggaaaatctaaaacag

SEQ ID NO: 42400 - DNA, 22 bp, synthetic construct
  misc_feature 1..22: note = chemically synthesized
  source 1..22: mol_type = other DNA
aaacagaagatgtatctggatg

SEQ ID NO: 42401 - DNA, 22 bp, synthetic construct
  misc_feature 1..22: note = chemically synthesized
  source 1..22: mol_type = other DNA
gatgcttcagcagacaacaaag

SEQ ID NO: 42402 - DNA, 22 bp, synthetic construct
  misc_feature 1..22: note = chemically synthesized
  source 1..22: mol_type = other DNA
cagcagacaacaaaggaagaat

SEQ ID NO: 42403 - DNA, 22 bp, synthetic construct
  misc_feature 1..22: note = chemically synthesized
  source 1..22: mol_type = other DNA
agcagacaacaaaggaagaatt

SEQ ID NO: 42404 - DNA, 22 bp, synthetic construct
  misc_feature 1..22: note = chemically synthesized
  source 1..22: mol_type = other DNA
ggggactgggtctaagcactcg

SEQ ID NO: 42405 - DNA, 22 bp, synthetic construct
  misc_feature 1..22: note = chemically synthesized
  source 1..22: mol_type = other DNA
gggactgggtctaagcactcgc

SEQ ID NO: 42406 - DNA, 22 bp, synthetic construct
  misc_feature 1..22: note = chemically synthesized
  source 1..22: mol_type = other DNA
ggtctaagcactcgcccaaagc

SEQ ID NO: 42407 - DNA, 22 bp, synthetic construct
  misc_feature 1..22: note = chemically synthesized
  source 1..22: mol_type = other DNA
agcactcgcccaaagcactaga

SEQ ID NO: 42408 - DNA, 22 bp, synthetic construct
  misc_feature 1..22: note = chemically synthesized
  source 1..22: mol_type = other DNA
gcccaaagcactagaaggagga

SEQ ID NO: 42409 - DNA, 22 bp, synthetic construct
  misc_feature 1..22: note = chemically synthesized
  source 1..22: mol_type = other DNA
gaaggaggatttctttttattt

SEQ ID NO: 42410 - DNA, 22 bp, synthetic construct
  misc_feature 1..22: note = chemically synthesized
  source 1..22: mol_type = other DNA
ctttttatttttctttcctatt

SEQ ID NO: 42411 - DNA, 22 bp, synthetic construct
  misc_feature 1..22: note = chemically synthesized
  source 1..22: mol_type = other DNA
tttttatttttctttcctattt

SEQ ID NO: 42412 - DNA, 22 bp, synthetic construct
  misc_feature 1..22: note = chemically synthesized
  source 1..22: mol_type = other DNA
tttatttttctttcctattttt

SEQ ID NO: 42413 - DNA, 22 bp, synthetic construct
  misc_feature 1..22: note = chemically synthesized
  source 1..22: mol_type = other DNA
ttatttttctttcctatttttg

SEQ ID NO: 42414 - DNA, 22 bp, synthetic construct
  misc_feature 1..22: note = chemically synthesized
  source 1..22: mol_type = other DNA
tatttttctttcctatttttgt

SEQ ID NO: 42415 - DNA, 22 bp, synthetic construct
  misc_feature 1..22: note = chemically synthesized
  source 1..22: mol_type = other DNA
atttttctttcctatttttgtt

SEQ ID NO: 42416 - DNA, 22 bp, synthetic construct
  misc_feature 1..22: note = chemically synthesized
  source 1..22: mol_type = other DNA
tttttctttcctatttttgttc

SEQ ID NO: 42417 - DNA, 22 bp, synthetic construct
  misc_feature 1..22: note = chemically synthesized
  source 1..22: mol_type = other DNA
ttctttcctatttttgttcttc

SEQ ID NO: 42418 - DNA, 22 bp, synthetic construct
  misc_feature 1..22: note = chemically synthesized
  source 1..22: mol_type = other DNA
tctttcctatttttgttcttct

SEQ ID NO: 42419 - DNA, 22 bp, synthetic construct
  misc_feature 1..22: note = chemically synthesized
  source 1..22: mol_type = other DNA
ctttcctatttttgttcttctg

SEQ ID NO: 42420 - DNA, 22 bp, synthetic construct
  misc_feature 1..22: note = chemically synthesized
  source 1..22: mol_type = other DNA
tttcctatttttgttcttctgg

SEQ ID NO: 42421 - DNA, 22 bp, synthetic construct
  misc_feature 1..22: note = chemically synthesized
  source 1..22: mol_type = other DNA
tcctatttttgttcttctggtt

SEQ ID NO: 42422 - DNA, 22 bp, synthetic construct
  misc_feature 1..22: note = chemically synthesized
  source 1..22: mol_type = other DNA
cctatttttgttcttctggttg

SEQ ID NO: 42423 - DNA, 22 bp, synthetic construct
  misc_feature 1..22: note = chemically synthesized
  source 1..22: mol_type = other DNA
ctatttttgttcttctggttgt

SEQ ID NO: 42424 - DNA, 22 bp, synthetic construct
  misc_feature 1..22: note = chemically synthesized
  source 1..22: mol_type = other DNA
tttttgttcttctggttgttct

SEQ ID NO: 42425 - DNA, 22 bp, synthetic construct
  misc_feature 1..22: note = chemically synthesized
  source 1..22: mol_type = other DNA
ttgttcttctggttgttctttc

SEQ ID NO: 42426 - DNA, 22 bp, synthetic construct
  misc_feature 1..22: note = chemically synthesized
  source 1..22: mol_type = other DNA
tgttcttctggttgttctttct

SEQ ID NO: 42427 - DNA, 22 bp, synthetic construct
  misc_feature 1..22: note = chemically synthesized
  source 1..22: mol_type = other DNA
gttcttctggttgttctttctt

SEQ ID NO: 42428 - DNA, 22 bp, synthetic construct
  misc_feature 1..22: note = chemically synthesized
  source 1..22: mol_type = other DNA
ttcttctggttgttctttcttt

SEQ ID NO: 42429 - DNA, 22 bp, synthetic construct
  misc_feature 1..22: note = chemically synthesized
  source 1..22: mol_type = other DNA
ttctggttgttctttctttctt

SEQ ID NO: 42430 - DNA, 22 bp, synthetic construct
  misc_feature 1..22: note = chemically synthesized
  source 1..22: mol_type = other DNA
ctggttgttctttctttcttcc

SEQ ID NO: 42431 - DNA, 22 bp, synthetic construct
  misc_feature 1..22: note = chemically synthesized
  source 1..22: mol_type = other DNA
tggttgttctttctttcttcct

SEQ ID NO: 42432 - DNA, 22 bp, synthetic construct
  misc_feature 1..22: note = chemically synthesized
  source 1..22: mol_type = other DNA
gttgttctttctttcttccttt

SEQ ID NO: 42433 - DNA, 22 bp, synthetic construct
  misc_feature 1..22: note = chemically synthesized
  source 1..22: mol_type = other DNA
ttctttctttcttccttttctc

SEQ ID NO: 42434 - DNA, 22 bp, synthetic construct
  misc_feature 1..22: note = chemically synthesized
  source 1..22: mol_type = other DNA
tttctttcttccttttctccct

SEQ ID NO: 42435 - DNA, 22 bp, synthetic construct
  misc_feature 1..22: note = chemically synthesized
  source 1..22: mol_type = other DNA
tctttcttccttttctcccttt

SEQ ID NO: 42436 - DNA, 22 bp, synthetic construct
  misc_feature 1..22: note = chemically synthesized
  source 1..22: mol_type = other DNA
ctttcttccttttctccctttt

SEQ ID NO: 42437 - DNA, 22 bp, synthetic construct
  misc_feature 1..22: note = chemically synthesized
  source 1..22: mol_type = other DNA
tttcttccttttctcccttttt

SEQ ID NO: 42438 - DNA, 22 bp, synthetic construct
  misc_feature 1..22: note = chemically synthesized
  source 1..22: mol_type = other DNA
tcttccttttctcccttttttt

SEQ ID NO: 42439 - DNA, 22 bp, synthetic construct
  misc_feature 1..22: note = chemically synthesized
  source 1..22: mol_type = other DNA
cttccttttctccctttttttc

SEQ ID NO: 42440 - DNA, 22 bp, synthetic construct
  misc_feature 1..22: note = chemically synthesized
  source 1..22: mol_type = other DNA
ttccttttctccctttttttct

SEQ ID NO: 42441 - DNA, 22 bp, synthetic construct
  misc_feature 1..22: note = chemically synthesized
  source 1..22: mol_type = other DNA
ccttttctccctttttttcttt

SEQ ID NO: 42442 - DNA, 22 bp, synthetic construct
  misc_feature 1..22: note = chemically synthesized
  source 1..22: mol_type = other DNA
cttttctccctttttttctttc

SEQ ID NO: 42443 - DNA, 22 bp, synthetic construct
  misc_feature 1..22: note = chemically synthesized
  source 1..22: mol_type = other DNA
ttctccctttttttctttcctt

SEQ ID NO: 42444 - DNA, 22 bp, synthetic construct
  misc_feature 1..22: note = chemically synthesized
  source 1..22: mol_type = other DNA
tctccctttttttctttccttc

SEQ ID NO: 42445 - DNA, 22 bp, synthetic construct
  misc_feature 1..22: note = chemically synthesized
  source 1..22: mol_type = other DNA
ctccctttttttctttccttct

SEQ ID NO: 42446 - DNA, 22 bp, synthetic construct
  misc_feature 1..22: note = chemically synthesized
  source 1..22: mol_type = other DNA
tccctttttttctttccttctt

SEQ ID NO: 42447 - DNA, 22 bp, synthetic construct
  misc_feature 1..22: note = chemically synthesized
  source 1..22: mol_type = other DNA
cctttttttctttccttctttt

SEQ ID NO: 42448 - DNA, 22 bp, synthetic construct
  misc_feature 1..22: note = chemically synthesized
  source 1..22: mol_type = other DNA
tttttctttccttctttttctt

SEQ ID NO: 42449 - DNA, 22 bp, synthetic construct
  misc_feature 1..22: note = chemically synthesized
  source 1..22: mol_type = other DNA
ttttctttccttctttttcttt

SEQ ID NO: 42450 - DNA, 22 bp, synthetic construct
  misc_feature 1..22: note = chemically synthesized
  source 1..22: mol_type = other DNA
tttctttccttctttttctttc

SEQ ID NO: 42451 - DNA, 22 bp, synthetic construct
  misc_feature 1..22: note = chemically synthesized
  source 1..22: mol_type = other DNA
ttctttccttctttttctttct

SEQ ID NO: 42452 - DNA, 22 bp, synthetic construct
  misc_feature 1..22: note = chemically synthesized
  source 1..22: mol_type = other DNA
tctttccttctttttctttctt

SEQ ID NO: 42453 - DNA, 22 bp, synthetic construct
  misc_feature 1..22: note = chemically synthesized
  source 1..22: mol_type = other DNA
ctttccttctttttctttcttg

SEQ ID NO: 42454 - DNA, 22 bp, synthetic construct
  misc_feature 1..22: note = chemically synthesized
  source 1..22: mol_type = other DNA
tttccttctttttctttcttgg

SEQ ID NO: 42455 - DNA, 22 bp, synthetic construct
  misc_feature 1..22: note = chemically synthesized
  source 1..22: mol_type = other DNA
tccttctttttctttcttggtt

SEQ ID NO: 42456 - DNA, 22 bp, synthetic construct
  misc_feature 1..22: note = chemically synthesized
  source 1..22: mol_type = other DNA
ccttctttttctttcttggttg

SEQ ID NO: 42457 - DNA, 22 bp, synthetic construct
  misc_feature 1..22: note = chemically synthesized
  source 1..22: mol_type = other DNA
cttctttttctttcttggttgc

SEQ ID NO: 42458 - DNA, 22 bp, synthetic construct
  misc_feature 1..22: note = chemically synthesized
  source 1..22: mol_type = other DNA
ctttttctttcttggttgcttt

SEQ ID NO: 42459 - DNA, 22 bp, synthetic construct
  misc_feature 1..22: note = chemically synthesized
  source 1..22: mol_type = other DNA
tttttctttcttggttgctttt

SEQ ID NO: 42460 - DNA, 22 bp, synthetic construct
  misc_feature 1..22: note = chemically synthesized
  source 1..22: mol_type = other DNA
tttctttcttggttgctttttt

SEQ ID NO: 42461 - DNA, 22 bp, synthetic construct
  misc_feature 1..22: note = chemically synthesized
  source 1..22: mol_type = other DNA
ttctttcttggttgcttttttt

SEQ ID NO: 42462 - DNA, 22 bp, synthetic construct
  misc_feature 1..22: note = chemically synthesized
  source 1..22: mol_type = other DNA
tctttcttggttgctttttttt

SEQ ID NO: 42463 - DNA, 22 bp, synthetic construct
  misc_feature 1..22: note = chemically synthesized
  source 1..22: mol_type = other DNA
ctttcttggttgcttttttttc

SEQ ID NO: 42464 - DNA, 22 bp, synthetic construct
  misc_feature 1..22: note = chemically synthesized
  source 1..22: mol_type = other DNA
tttcttggttgcttttttttcc

SEQ ID NO: 42465 - DNA, 22 bp, synthetic construct
  misc_feature 1..22: note = chemically synthesized
  source 1..22: mol_type = other DNA
tcttggttgcttttttttcccc

SEQ ID NO: 42466 - DNA, 22 bp, synthetic construct
  misc_feature 1..22: note = chemically synthesized
  source 1..22: mol_type = other DNA
cttggttgcttttttttccccc

SEQ ID NO: 42467 - DNA, 22 bp, synthetic construct
  misc_feature 1..22: note = chemically synthesized
  source 1..22: mol_type = other DNA
ttggttgcttttttttccccct

SEQ ID NO: 42468 - DNA, 22 bp, synthetic construct
  misc_feature 1..22: note = chemically synthesized
  source 1..22: mol_type = other DNA
ggttgcttttttttcccccttt

SEQ ID NO: 42469 - DNA, 22 bp, synthetic construct
  misc_feature 1..22: note = chemically synthesized
  source 1..22: mol_type = other DNA
gttgcttttttttccccctttg

SEQ ID NO: 42470 - DNA, 22 bp, synthetic construct
  misc_feature 1..22: note = chemically synthesized
  source 1..22: mol_type = other DNA
cttttttttccccctttgaaac

SEQ ID NO: 42471 - DNA, 22 bp, synthetic construct
  misc_feature 1..22: note = chemically synthesized
  source 1..22: mol_type = other DNA
ttttttccccctttgaaactga

SEQ ID NO: 42472 - DNA, 22 bp, synthetic construct
  misc_feature 1..22: note = chemically synthesized
  source 1..22: mol_type = other DNA
tttttccccctttgaaactgaa

SEQ ID NO: 42473 - DNA, 22 bp, synthetic construct
  misc_feature 1..22: note = chemically synthesized
  source 1..22: mol_type = other DNA
ttttccccctttgaaactgaac

SEQ ID NO: 42474 - DNA, 22 bp, synthetic construct
  misc_feature 1..22: note = chemically synthesized
  source 1..22: mol_type = other DNA
tttccccctttgaaactgaacc

SEQ ID NO: 42475 - DNA, 22 bp, synthetic construct
  misc_feature 1..22: note = chemically synthesized
  source 1..22: mol_type = other DNA
ttccccctttgaaactgaacca

SEQ ID NO: 42476 - DNA, 22 bp, synthetic construct
  misc_feature 1..22: note = chemically synthesized
  source 1..22: mol_type = other DNA
tccccctttgaaactgaaccat

SEQ ID NO: 42477 - DNA, 22 bp, synthetic construct
  misc_feature 1..22: note = chemically synthesized
  source 1..22: mol_type = other DNA
ccccctttgaaactgaaccatt

SEQ ID NO: 42478 - DNA, 22 bp, synthetic construct
  misc_feature 1..22: note = chemically synthesized
  source 1..22: mol_type = other DNA
cccctttgaaactgaaccatta

SEQ ID NO: 42479 - DNA, 22 bp, synthetic construct
  misc_feature 1..22: note = chemically synthesized
  source 1..22: mol_type = other DNA
tgaaactgaaccattataaatg

SEQ ID NO: 42480 - DNA, 22 bp, synthetic construct
  misc_feature 1..22: note = chemically synthesized
  source 1..22: mol_type = other DNA
gaaactgaaccattataaatga

SEQ ID NO: 42481 - DNA, 22 bp, synthetic construct
  misc_feature 1..22: note = chemically synthesized
  source 1..22: mol_type = other DNA
aaactgaaccattataaatgag

SEQ ID NO: 42482 - DNA, 22 bp, synthetic construct
  misc_feature 1..22: note = chemically synthesized
  source 1..22: mol_type = other DNA
aaccattataaatgagttggtc

SEQ ID NO: 42483 - DNA, 22 bp, synthetic construct
  misc_feature 1..22: note = chemically synthesized
  source 1..22: mol_type = other DNA
taaatgagttggtctcatagct

SEQ ID NO: 42484 - DNA, 22 bp, synthetic construct
  misc_feature 1..22: note = chemically synthesized
  source 1..22: mol_type = other DNA
gtctcatagcttctgttaaaaa

SEQ ID NO: 42485 - DNA, 22 bp, synthetic construct
  misc_feature 1..22: note = chemically synthesized
  source 1..22: mol_type = other DNA
atagcttctgttaaaaatcaga

SEQ ID NO: 42486 - DNA, 22 bp, synthetic construct
  misc_feature 1..22: note = chemically synthesized
  source 1..22: mol_type = other DNA
ctgttaaaaatcagaagcttgt

SEQ ID NO: 42487 - DNA, 22 bp, synthetic construct
  misc_feature 1..22: note = chemically synthesized
  source 1..22: mol_type = other DNA
tgttaaaaatcagaagcttgtt

SEQ ID NO: 42488 - DNA, 22 bp, synthetic construct
  misc_feature 1..22: note = chemically synthesized
  source 1..22: mol_type = other DNA
ttaaaaatcagaagcttgttag

SEQ ID NO: 42489 - DNA, 22 bp, synthetic construct
  misc_feature 1..22: note = chemically synthesized
  source 1..22: mol_type = other DNA
aaaatcagaagcttgttagatg

SEQ ID NO: 42490 - DNA, 22 bp, synthetic construct
  misc_feature 1..22: note = chemically synthesized
  source 1..22: mol_type = other DNA
gttagatgtaatgattatctgc

SEQ ID NO: 42491 - DNA, 22 bp, synthetic construct
  misc_feature 1..22: note = chemically synthesized
  source 1..22: mol_type = other DNA
ttagatgtaatgattatctgca

SEQ ID NO: 42492 - DNA, 22 bp, synthetic construct
  misc_feature 1..22: note = chemically synthesized
  source 1..22: mol_type = other DNA
gatgtaatgattatctgcattg

SEQ ID NO: 42493 - DNA, 22 bp, synthetic construct
  misc_feature 1..22: note = chemically synthesized
  source 1..22: mol_type = other DNA
tctgcattgtgacacttaccgc

SEQ ID NO: 42494 - DNA, 22 bp, synthetic construct
  misc_feature 1..22: note = chemically synthesized
  source 1..22: mol_type = other DNA
cattgtgacacttaccgcgtat

SEQ ID NO: 42495 - DNA, 22 bp, synthetic construct
  misc_feature 1..22: note = chemically synthesized
  source 1..22: mol_type = other DNA
tgacacttaccgcgtatgaggg

SEQ ID NO: 42496 - DNA, 22 bp, synthetic construct
  misc_feature 1..22: note = chemically synthesized
  source 1..22: mol_type = other DNA
accgcgtatgaggggtcttgtc

SEQ ID NO: 42497 - DNA, 22 bp, synthetic construct
  misc_feature 1..22: note = chemically synthesized
  source 1..22: mol_type = other DNA
ccgcgtatgaggggtcttgtcg

SEQ ID NO: 42498 - DNA, 22 bp, synthetic construct
  misc_feature 1..22: note = chemically synthesized
  source 1..22: mol_type = other DNA
gtcgaacagctttactctaatt

SEQ ID NO: 42499 - DNA, 22 bp, synthetic construct
  misc_feature 1..22: note = chemically synthesized
  source 1..22: mol_type = other DNA
tcgaacagctttactctaattt

SEQ ID NO: 42500 - DNA, 22 bp, synthetic construct
  misc_feature 1..22: note = chemically synthesized
  source 1..22: mol_type = other DNA
tactctaatttagagctcctct

SEQ ID NO: 42501 - DNA, 22 bp, synthetic construct
  misc_feature 1..22: note = chemically synthesized
  source 1..22: mol_type = other DNA
actctaatttagagctcctctg

SEQ ID NO: 42502 - DNA, 22 bp, synthetic construct
  misc_feature 1..22: note = chemically synthesized
  source 1..22: mol_type = other DNA
ctctaatttagagctcctctgt

SEQ ID NO: 42503 - DNA, 22 bp, synthetic construct
  misc_feature 1..22: note = chemically synthesized
  source 1..22: mol_type = other DNA
taatttagagctcctctgttaa

SEQ ID NO: 42504 - DNA, 22 bp, synthetic construct
  misc_feature 1..22: note = chemically synthesized
  source 1..22: mol_type = other DNA
atttagagctcctctgttaatt

SEQ ID NO: 42505 - DNA, 22 bp, synthetic construct
  misc_feature 1..22: note = chemically synthesized
  source 1..22: mol_type = other DNA
agagctcctctgttaattagaa

SEQ ID NO: 42506 - DNA, 22 bp, synthetic construct
  misc_feature 1..22: note = chemically synthesized
  source 1..22: mol_type = other DNA
gagctcctctgttaattagaaa

SEQ ID NO: 42507 - DNA, 22 bp, synthetic construct
  misc_feature 1..22: note = chemically synthesized
  source 1..22: mol_type = other DNA
ctctgttaattagaaagccctc

SEQ ID NO: 42508 - DNA, 22 bp, synthetic construct
  misc_feature 1..22: note = chemically synthesized
  source 1..22: mol_type = other DNA
tgttaattagaaagccctcaga

SEQ ID NO: 42509 - DNA, 22 bp, synthetic construct
  misc_feature 1..22: note = chemically synthesized
  source 1..22: mol_type = other DNA
ttaattagaaagccctcagatt

SEQ ID NO: 42510 - DNA, 22 bp, synthetic construct
  misc_feature 1..22: note = chemically synthesized
  source 1..22: mol_type = other DNA
attagaaagccctcagattttc

SEQ ID NO: 42511 - DNA, 22 bp, synthetic construct
  misc_feature 1..22: note = chemically synthesized
  source 1..22: mol_type = other DNA
gaaagccctcagattttctgca

SEQ ID NO: 42512 - DNA, 22 bp, synthetic construct
  misc_feature 1..22: note = chemically synthesized
  source 1..22: mol_type = other DNA
agattttctgcaaatgcaggtc

SEQ ID NO: 42513 - DNA, 22 bp, synthetic construct
  misc_feature 1..22: note = chemically synthesized
  source 1..22: mol_type = other DNA
tctgcaaatgcaggtcactatc

SEQ ID NO: 42514 - DNA, 22 bp, synthetic construct
  misc_feature 1..22: note = chemically synthesized
  source 1..22: mol_type = other DNA
ctgcaaatgcaggtcactatcg

SEQ ID NO: 42515 - DNA, 22 bp, synthetic construct
  misc_feature 1..22: note = chemically synthesized
  source 1..22: mol_type = other DNA
tgcaaatgcaggtcactatcga

SEQ ID NO: 42516 - DNA, 22 bp, synthetic construct
  misc_feature 1..22: note = chemically synthesized
  source 1..22: mol_type = other DNA
caaatgcaggtcactatcgaca

SEQ ID NO: 42517 - DNA, 22 bp, synthetic construct
  misc_feature 1..22: note = chemically synthesized
  source 1..22: mol_type = other DNA
tcgacagctcatgcttttgatg

SEQ ID NO: 42518 - DNA, 22 bp, synthetic construct
  misc_feature 1..22: note = chemically synthesized
  source 1..22: mol_type = other DNA
atgcttttgatgcttcgtctgt

SEQ ID NO: 42519 - DNA, 22 bp, synthetic construct
  misc_feature 1..22: note = chemically synthesized
  source 1..22: mol_type = other DNA
ttgatgcttcgtctgtgacagt

SEQ ID NO: 42520 - DNA, 22 bp, synthetic construct
  misc_feature 1..22: note = chemically synthesized
  source 1..22: mol_type = other DNA
tgatgcttcgtctgtgacagtt

SEQ ID NO: 42521 - DNA, 22 bp, synthetic construct
  misc_feature 1..22: note = chemically synthesized
  source 1..22: mol_type = other DNA
gatgcttcgtctgtgacagttg

SEQ ID NO: 42522 - DNA, 22 bp, synthetic construct
  misc_feature 1..22: note = chemically synthesized
  source 1..22: mol_type = other DNA
atgcttcgtctgtgacagttgt

SEQ ID NO: 42523 - DNA, 22 bp, synthetic construct
  misc_feature 1..22: note = chemically synthesized
  source 1..22: mol_type = other DNA
cgtctgtgacagttgttgggtt

SEQ ID NO: 42524 - DNA, 22 bp, synthetic construct
  misc_feature 1..22: note = chemically synthesized
  source 1..22: mol_type = other DNA
gtctgtgacagttgttgggttg

SEQ ID NO: 42525 - DNA, 22 bp, synthetic construct
  misc_feature 1..22: note = chemically synthesized
  source 1..22: mol_type = other DNA
tgacagttgttgggttgccctt

SEQ ID NO: 42526 - DNA, 22 bp, synthetic construct
  misc_feature 1..22: note = chemically synthesized
  source 1..22: mol_type = other DNA
ttgggttgcccttctaggagct

SEQ ID NO: 42527 - DNA, 22 bp, synthetic construct
  misc_feature 1..22: note = chemically synthesized
  source 1..22: mol_type = other DNA
ggttgcccttctaggagctggc

SEQ ID NO: 42528 - DNA, 22 bp, synthetic construct
  misc_feature 1..22: note = chemically synthesized
  source 1..22: mol_type = other DNA
cccttctaggagctggcagggt

SEQ ID NO: 42529 - DNA, 22 bp, synthetic construct
  misc_feature 1..22: note = chemically synthesized
  source 1..22: mol_type = other DNA
ctaggagctggcagggttgtcc

SEQ ID NO: 42530 - DNA, 22 bp, synthetic construct
  misc_feature 1..22: note = chemically synthesized
  source 1..22: mol_type = other DNA
taggagctggcagggttgtcca

SEQ ID NO: 42531 - DNA, 22 bp, synthetic construct
  misc_feature 1..22: note = chemically synthesized
  source 1..22: mol_type = other DNA
ggagctggcagggttgtccaga

SEQ ID NO: 42532 - DNA, 22 bp, synthetic construct
  misc_feature 1..22: note = chemically synthesized
  source 1..22: mol_type = other DNA
gcagggttgtccagactctgac

SEQ ID NO: 42533 - DNA, 22 bp, synthetic construct
  misc_feature 1..22: note = chemically synthesized
  source 1..22: mol_type = other DNA
tccagactctgacagtgtcaga

SEQ ID NO: 42534 - DNA, 22 bp, synthetic construct
  misc_feature 1..22: note = chemically synthesized
  source 1..22: mol_type = other DNA
tgacagtgtcagaaaatgcagt

SEQ ID NO: 42535 - DNA, 22 bp, synthetic construct
  misc_feature 1..22: note = chemically synthesized
  source 1..22: mol_type = other DNA
acagtgtcagaaaatgcagtca

SEQ ID NO: 42536 - DNA, 22 bp, synthetic construct
  misc_feature 1..22: note = chemically synthesized
  source 1..22: mol_type = other DNA
cttcacaggaagttacacgcaa

SEQ ID NO: 42537 - DNA, 22 bp, synthetic construct
  misc_feature 1..22: note = chemically synthesized
  source 1..22: mol_type = other DNA
cacaggaagttacacgcaaggt

SEQ ID NO: 42538 - DNA, 22 bp, synthetic construct
  misc_feature 1..22: note = chemically synthesized
  source 1..22: mol_type = other DNA
acaggaagttacacgcaaggtc

SEQ ID NO: 42539 - DNA, 22 bp, synthetic construct
  misc_feature 1..22: note = chemically synthesized
  source 1..22: mol_type = other DNA
cacgcaaggtccgcacacagtc

SEQ ID NO: 42540 - DNA, 22 bp, synthetic construct
  misc_feature 1..22: note = chemically synthesized
  source 1..22: mol_type = other DNA
ccctgtagcccagaagcctgat

SEQ ID NO: 42541 - DNA, 22 bp, synthetic construct
  misc_feature 1..22: note = chemically synthesized
  source 1..22: mol_type = other DNA
cctgtagcccagaagcctgatg

SEQ ID NO: 42542 - DNA, 22 bp, synthetic construct
  misc_feature 1..22: note = chemically synthesized
  source 1..22: mol_type = other DNA
tagcccagaagcctgatgaaat

SEQ ID NO: 42543 - DNA, 22 bp, synthetic construct
  misc_feature 1..22: note = chemically synthesized
  source 1..22: mol_type = other DNA
atgaaatctgcactcacattca

SEQ ID NO: 42544 - DNA, 22 bp, synthetic construct
  misc_feature 1..22: note = chemically synthesized
  source 1..22: mol_type = other DNA
cactcacattcagctgaaaata

SEQ ID NO: 42545 - DNA, 22 bp, synthetic construct
  misc_feature 1..22: note = chemically synthesized
  source 1..22: mol_type = other DNA
acattcagctgaaaatagctcg

SEQ ID NO: 42546 - DNA, 22 bp, synthetic construct
  misc_feature 1..22: note = chemically synthesized
  source 1..22: mol_type = other DNA
agctgaaaatagctcgaattcc

SEQ ID NO: 42547 - DNA, 22 bp, synthetic construct
  misc_feature 1..22: note = chemically synthesized
  source 1..22: mol_type = other DNA
aaaatagctcgaattccaaccc

SEQ ID NO: 42548 - DNA, 22 bp, synthetic construct
  misc_feature 1..22: note = chemically synthesized
  source 1..22: mol_type = other DNA
gaattccaaccctctctccccc

SEQ ID NO: 42549 - DNA, 22 bp, synthetic construct
  misc_feature 1..22: note = chemically synthesized
  source 1..22: mol_type = other DNA
caaccctctctccccctgcctc

SEQ ID NO: 42550 - DNA, 22 bp, synthetic construct
  misc_feature 1..22: note = chemically synthesized
  source 1..22: mol_type = other DNA
tctccccctgcctcctctcttc

SEQ ID NO: 42551 - DNA, 22 bp, synthetic construct
  misc_feature 1..22: note = chemically synthesized
  source 1..22: mol_type = other DNA
tccccctgcctcctctcttccc

SEQ ID NO: 42552 - DNA, 22 bp, synthetic construct
  misc_feature 1..22: note = chemically synthesized
  source 1..22: mol_type = other DNA
cccctgcctcctctcttcccct

SEQ ID NO: 42553 - DNA, 22 bp, synthetic construct
  misc_feature 1..22: note = chemically synthesized
  source 1..22: mol_type = other DNA
cctcctctcttccccttttcct

SEQ ID NO: 42554 - DNA, 22 bp, synthetic construct
  misc_feature 1..22: note = chemically synthesized
  source 1..22: mol_type = other DNA
ctctcttccccttttcctcctt

SEQ ID NO: 42555 - DNA, 22 bp, synthetic construct
  misc_feature 1..22: note = chemically synthesized
  source 1..22: mol_type = other DNA
tcttccccttttcctcctttct

SEQ ID NO: 42556 - DNA, 22 bp, synthetic construct
  misc_feature 1..22: note = chemically synthesized
  source 1..22: mol_type = other DNA
ttccccttttcctcctttctac

SEQ ID NO: 42557 - DNA, 22 bp, synthetic construct
  misc_feature 1..22: note = chemically synthesized
  source 1..22: mol_type = other DNA
ccccttttcctcctttctactt

SEQ ID NO: 42558 - DNA, 22 bp, synthetic construct
  misc_feature 1..22: note = chemically synthesized
  source 1..22: mol_type = other DNA
cccttttcctcctttctacttc

SEQ ID NO: 42559 - DNA, 22 bp, synthetic construct
  misc_feature 1..22: note = chemically synthesized
  source 1..22: mol_type = other DNA
ttcctcctttctacttccttgc

SEQ ID NO: 42560 - DNA, 22 bp, synthetic construct
  misc_feature 1..22: note = chemically synthesized
  source 1..22: mol_type = other DNA
tcctcctttctacttccttgcc

SEQ ID NO: 42561 - DNA, 22 bp, synthetic construct
  misc_feature 1..22: note = chemically synthesized
  source 1..22: mol_type = other DNA
cctcctttctacttccttgcct

SEQ ID NO: 42562 - DNA, 22 bp, synthetic construct
  misc_feature 1..22: note = chemically synthesized
  source 1..22: mol_type = other DNA
ctcctttctacttccttgcctc

SEQ ID NO: 42563 - DNA, 22 bp, synthetic construct
  misc_feature 1..22: note = chemically synthesized
  source 1..22: mol_type = other DNA
ctttctacttccttgcctctct

SEQ ID NO: 42564 - DNA, 22 bp, synthetic construct
  misc_feature 1..22: note = chemically synthesized
  source 1..22: mol_type = other DNA
tctacttccttgcctctctttc

SEQ ID NO: 42565 - DNA, 22 bp, synthetic construct
  misc_feature 1..22: note = chemically synthesized
  source 1..22: mol_type = other DNA
ctacttccttgcctctctttct

SEQ ID NO: 42566 - DNA, 22 bp, synthetic construct
  misc_feature 1..22: note = chemically synthesized
  source 1..22: mol_type = other DNA
tacttccttgcctctctttctc

SEQ ID NO: 42567 - DNA, 22 bp, synthetic construct
  misc_feature 1..22: note = chemically synthesized
  source 1..22: mol_type = other DNA
cttccttgcctctctttctcca

SEQ ID NO: 42568 - DNA, 22 bp, synthetic construct
  misc_feature 1..22: note = chemically synthesized
  source 1..22: mol_type = other DNA
ccttgcctctctttctccaacc

SEQ ID NO: 42569 - DNA, 22 bp, synthetic construct
  misc_feature 1..22: note = chemically synthesized
  source 1..22: mol_type = other DNA
cttgcctctctttctccaacct

SEQ ID NO: 42570 - DNA, 22 bp, synthetic construct
  misc_feature 1..22: note = chemically synthesized
  source 1..22: mol_type = other DNA
gcctctctttctccaacctctg

SEQ ID NO: 42571 - DNA, 22 bp, synthetic construct
  misc_feature 1..22: note = chemically synthesized
  source 1..22: mol_type = other DNA
cctctctttctccaacctctgt

SEQ ID NO: 42572 - DNA, 22 bp, synthetic construct
  misc_feature 1..22: note = chemically synthesized
  source 1..22: mol_type = other DNA
tctttctccaacctctgtttcc

SEQ ID NO: 42573 - DNA, 22 bp, synthetic construct
  misc_feature 1..22: note = chemically synthesized
  source 1..22: mol_type = other DNA
tttctccaacctctgtttccag

SEQ ID NO: 42574 - DNA, 22 bp, synthetic construct
  misc_feature 1..22: note = chemically synthesized
  source 1..22: mol_type = other DNA
tctccaacctctgtttccagca

SEQ ID NO: 42575 - DNA, 22 bp, synthetic construct
  misc_feature 1..22: note = chemically synthesized
  source 1..22: mol_type = other DNA
ctccaacctctgtttccagcat

SEQ ID NO: 42576 - DNA, 22 bp, synthetic construct
  misc_feature 1..22: note = chemically synthesized
  source 1..22: mol_type = other DNA
tccaacctctgtttccagcatc

SEQ ID NO: 42577 - DNA, 22 bp, synthetic construct
  misc_feature 1..22: note = chemically synthesized
  source 1..22: mol_type = other DNA
caacctctgtttccagcatctt

SEQ ID NO: 42578 - DNA, 22 bp, synthetic construct
  misc_feature 1..22: note = chemically synthesized
  source 1..22: mol_type = other DNA
tgtttccagcatcttctttctc

SEQ ID NO: 42579 - DNA, 22 bp, synthetic construct
  misc_feature 1..22: note = chemically synthesized
  source 1..22: mol_type = other DNA
tttccagcatcttctttctcat

SEQ ID NO: 42580 - DNA, 22 bp, synthetic construct
  misc_feature 1..22: note = chemically synthesized
  source 1..22: mol_type = other DNA
ccagcatcttctttctcatctt

SEQ ID NO: 42581 - DNA, 22 bp, synthetic construct
  misc_feature 1..22: note = chemically synthesized
  source 1..22: mol_type = other DNA
cagcatcttctttctcatcttc

SEQ ID NO: 42582 - DNA, 22 bp, synthetic construct
  misc_feature 1..22: note = chemically synthesized
  source 1..22: mol_type = other DNA
ctttctcatcttctctctcttt

SEQ ID NO: 42583 - DNA, 22 bp, synthetic construct
  misc_feature 1..22: note = chemically synthesized
  source 1..22: mol_type = other DNA
tttctcatcttctctctcttta

SEQ ID NO: 42584 - DNA, 22 bp, synthetic construct
  misc_feature 1..22: note = chemically synthesized
  source 1..22: mol_type = other DNA
tctcatcttctctctctttagt

SEQ ID NO: 42585 - DNA, 22 bp, synthetic construct
  misc_feature 1..22: note = chemically synthesized
  source 1..22: mol_type = other DNA
ctcatcttctctctctttagtc

SEQ ID NO: 42586 - DNA, 22 bp, synthetic construct
  misc_feature 1..22: note = chemically synthesized
  source 1..22: mol_type = other DNA
tcatcttctctctctttagtcc

SEQ ID NO: 42587 - DNA, 22 bp, synthetic construct
  misc_feature 1..22: note = chemically synthesized
  source 1..22: mol_type = other DNA
atcttctctctctttagtcctc

SEQ ID NO: 42588 - DNA, 22 bp, synthetic construct
  misc_feature 1..22: note = chemically synthesized
  source 1..22: mol_type = other DNA
ctctctctttagtcctcaacaa

SEQ ID NO: 42589 - DNA, 22 bp, synthetic construct
  misc_feature 1..22: note = chemically synthesized
  source 1..22: mol_type = other DNA
tctctctttagtcctcaacaac

SEQ ID NO: 42590 - DNA, 22 bp, synthetic construct
  misc_feature 1..22: note = chemically synthesized
  source 1..22: mol_type = other DNA
tctctttagtcctcaacaactg

SEQ ID NO: 42591 - DNA, 22 bp, synthetic construct
  misc_feature 1..22: note = chemically synthesized
  source 1..22: mol_type = other DNA
tctttagtcctcaacaactggg

SEQ ID NO: 42592 - DNA, 22 bp, synthetic construct
  misc_feature 1..22: note = chemically synthesized
  source 1..22: mol_type = other DNA
tttagtcctcaacaactggggt

SEQ ID NO: 42593 - DNA, 22 bp, synthetic construct
  misc_feature 1..22: note = chemically synthesized
  source 1..22: mol_type = other DNA
tagtcctcaacaactggggtcc

SEQ ID NO: 42594 - DNA, 22 bp, synthetic construct
  misc_feature 1..22: note = chemically synthesized
  source 1..22: mol_type = other DNA
agtcctcaacaactggggtcct

SEQ ID NO: 42595 - DNA, 22 bp, synthetic construct
  misc_feature 1..22: note = chemically synthesized
  source 1..22: mol_type = other DNA
gtcctcaacaactggggtcctc

SEQ ID NO: 42596 - DNA, 22 bp, synthetic construct
  misc_feature 1..22: note = chemically synthesized
  source 1..22: mol_type = other DNA
aacaactggggtcctctgctgt

SEQ ID NO: 42597 - DNA, 22 bp, synthetic construct
  misc_feature 1..22: note = chemically synthesized
  source 1..22: mol_type = other DNA
gggtcctctgctgtcaaaaaca

SEQ ID NO: 42598 - DNA, 22 bp, synthetic construct
  misc_feature 1..22: note = chemically synthesized
  source 1..22: mol_type = other DNA
tgctgtcaaaaacagccacatt

SEQ ID NO: 42599 - DNA, 22 bp, synthetic construct
  misc_feature 1..22: note = chemically synthesized
  source 1..22: mol_type = other DNA
ctgtcaaaaacagccacattca

SEQ ID NO: 42600 - DNA, 22 bp, synthetic construct
  misc_feature 1..22: note = chemically synthesized
  source 1..22: mol_type = other DNA
tcaaaaacagccacattcacca

SEQ ID NO: 42601 - DNA, 22 bp, synthetic construct
  misc_feature 1..22: note = chemically synthesized
  source 1..22: mol_type = other DNA
accagaaagggaagtaggtttt

SEQ ID NO: 42602 - DNA, 22 bp, synthetic construct
  misc_feature 1..22: note = chemically synthesized
  source 1..22: mol_type = other DNA
tacagataaaccgggttgcttt

SEQ ID NO: 42603 - DNA, 22 bp, synthetic construct
  misc_feature 1..22: note = chemically synthesized
  source 1..22: mol_type = other DNA
acagataaaccgggttgctttt

SEQ ID NO: 42604 - DNA, 22 bp, synthetic construct
  misc_feature 1..22: note = chemically synthesized
  source 1..22: mol_type = other DNA
cagataaaccgggttgcttttc

SEQ ID NO: 42605 - DNA, 22 bp, synthetic construct
  misc_feature 1..22: note = chemically synthesized
  source 1..22: mol_type = other DNA
cttttcactgaaacagcagtga

SEQ ID NO: 42606 - DNA, 22 bp, synthetic construct
  misc_feature 1..22: note = chemically synthesized
  source 1..22: mol_type = other DNA
ttcactgaaacagcagtgattg

SEQ ID NO: 42607 - DNA, 22 bp, synthetic construct
  misc_feature 1..22: note = chemically synthesized
  source 1..22: mol_type = other DNA
tcactgaaacagcagtgattgt

SEQ ID NO: 42608 - DNA, 22 bp, synthetic construct
  misc_feature 1..22: note = chemically synthesized
  source 1..22: mol_type = other DNA
cactgaaacagcagtgattgtg

SEQ ID NO: 42609 - DNA, 22 bp, synthetic construct
  misc_feature 1..22: note = chemically synthesized
  source 1..22: mol_type = other DNA
actgaaacagcagtgattgtgg

SEQ ID NO: 42610 - DNA, 22 bp, synthetic construct
  misc_feature 1..22: note = chemically synthesized
  source 1..22: mol_type = other DNA
aaacagcagtgattgtggaaca

SEQ ID NO: 42611 - DNA, 22 bp, synthetic construct
  misc_feature 1..22: note = chemically synthesized
  source 1..22: mol_type = other DNA
tggaacagaaactctcccctcc

SEQ ID NO: 42612 - DNA, 22 bp, synthetic construct
  misc_feature 1..22: note = chemically synthesized
  source 1..22: mol_type = other DNA
tcccctccctgccttttaaata

SEQ ID NO: 42613 - DNA, 22 bp, synthetic construct
  misc_feature 1..22: note = chemically synthesized
  source 1..22: mol_type = other DNA
ccctccctgccttttaaataat

SEQ ID NO: 42614 - DNA, 22 bp, synthetic construct
  misc_feature 1..22: note = chemically synthesized
  source 1..22: mol_type = other DNA
cctgccttttaaataatatttc

SEQ ID NO: 42615 - DNA, 22 bp, synthetic construct
  misc_feature 1..22: note = chemically synthesized
  source 1..22: mol_type = other DNA
ccttttaaataatatttcctat

SEQ ID NO: 42616 - DNA, 22 bp, synthetic construct
  misc_feature 1..22: note = chemically synthesized
  source 1..22: mol_type = other DNA
ttaaataatatttcctattttt

SEQ ID NO: 42617 - DNA, 22 bp, synthetic construct
  misc_feature 1..22: note = chemically synthesized
  source 1..22: mol_type = other DNA
taaataatatttcctatttttt

SEQ ID NO: 42618 - DNA, 22 bp, synthetic construct
  misc_feature 1..22: note = chemically synthesized
  source 1..22: mol_type = other DNA
aaataatatttcctattttttt

SEQ ID NO: 42619 - DNA, 22 bp, synthetic construct
  misc_feature 1..22: note = chemically synthesized
  source 1..22: mol_type = other DNA
aataatatttcctatttttttg

SEQ ID NO: 42620 - DNA, 22 bp, synthetic construct
  misc_feature 1..22: note = chemically synthesized
  source 1..22: mol_type = other DNA
cctatttttttgcaccggtcag

SEQ ID NO: 42621 - DNA, 22 bp, synthetic construct
  misc_feature 1..22: note = chemically synthesized
  source 1..22: mol_type = other DNA
ctatttttttgcaccggtcagc

SEQ ID NO: 42622 - DNA, 22 bp, synthetic construct
  misc_feature 1..22: note = chemically synthesized
  source 1..22: mol_type = other DNA
tttttttgcaccggtcagcagc

SEQ ID NO: 42623 - DNA, 22 bp, synthetic construct
  misc_feature 1..22: note = chemically synthesized
  source 1..22: mol_type = other DNA
ttttgcaccggtcagcagccgc

SEQ ID NO: 42624 - DNA, 22 bp, synthetic construct
  misc_feature 1..22: note = chemically synthesized
  source 1..22: mol_type = other DNA
tttgcaccggtcagcagccgca

SEQ ID NO: 42625 - DNA, 22 bp, synthetic construct
  misc_feature 1..22: note = chemically synthesized
  source 1..22: mol_type = other DNA
ttgcaccggtcagcagccgcac

SEQ ID NO: 42626 - DNA, 22 bp, synthetic construct
  misc_feature 1..22: note = chemically synthesized
  source 1..22: mol_type = other DNA
tgcaccggtcagcagccgcacc

SEQ ID NO: 42627 - DNA, 22 bp, synthetic construct
  misc_feature 1..22: note = chemically synthesized
  source 1..22: mol_type = other DNA
gcaccggtcagcagccgcacct

SEQ ID NO: 42628 - DNA, 22 bp, synthetic construct
  misc_feature 1..22: note = chemically synthesized
  source 1..22: mol_type = other DNA
caccggtcagcagccgcacctg

SEQ ID NO: 42629 - DNA, 22 bp, synthetic construct
  misc_feature 1..22: note = chemically synthesized
  source 1..22: mol_type = other DNA
gtgaggctgaggtcaaggctgt

SEQ ID NO: 42630 - DNA, 22 bp, synthetic construct
  misc_feature 1..22: note = chemically synthesized
  source 1..22: mol_type = other DNA
aggtcaaggctgtacttccaac

SEQ ID NO: 42631 - DNA, 22 bp, synthetic construct
  misc_feature 1..22: note = chemically synthesized
  source 1..22: mol_type = other DNA
tacttccaacatggctcacgtg

SEQ ID NO: 42632 - DNA, 22 bp, synthetic construct
  misc_feature 1..22: note = chemically synthesized
  source 1..22: mol_type = other DNA
ccaacatggctcacgtgttttt

SEQ ID NO: 42633 - DNA, 22 bp, synthetic construct
  misc_feature 1..22: note = chemically synthesized
  source 1..22: mol_type = other DNA
caacatggctcacgtgtttttt

SEQ ID NO: 42634 - DNA, 22 bp, synthetic construct
  misc_feature 1..22: note = chemically synthesized
  source 1..22: mol_type = other DNA
acgtgttttttcttaagagaag

SEQ ID NO: 42635 - DNA, 22 bp, synthetic construct
  misc_feature 1..22: note = chemically synthesized
  source 1..22: mol_type = other DNA
tttcttaagagaagggggaatt

SEQ ID NO: 42636 - DNA, 22 bp, synthetic construct
  misc_feature 1..22: note = chemically synthesized
  source 1..22: mol_type = other DNA
ttcttaagagaagggggaattt

SEQ ID NO: 42637 - DNA, 22 bp, synthetic construct
  misc_feature 1..22: note = chemically synthesized
  source 1..22: mol_type = other DNA
tcttaagagaagggggaatttg

SEQ ID NO: 42638 - DNA, 22 bp, synthetic construct
  misc_feature 1..22: note = chemically synthesized
  source 1..22: mol_type = other DNA
cttaagagaagggggaatttgg

SEQ ID NO: 42639 - DNA, 22 bp, synthetic construct
  misc_feature 1..22: note = chemically synthesized
  source 1..22: mol_type = other DNA
ttaagagaagggggaatttgga

SEQ ID NO: 42640 - DNA, 22 bp, synthetic construct
  misc_feature 1..22: note = chemically synthesized
  source 1..22: mol_type = other DNA
aagagaagggggaatttggagg

SEQ ID NO: 42641 - DNA, 22 bp, synthetic construct
  misc_feature 1..22: note = chemically synthesized
  source 1..22: mol_type = other DNA
agagaagggggaatttggaggg

SEQ ID NO: 42642 - DNA, 22 bp, synthetic construct
  misc_feature 1..22: note = chemically synthesized
  source 1..22: mol_type = other DNA
ggaggggggcaaaaaaagaagg

SEQ ID NO: 42643 - DNA, 22 bp, synthetic construct
  misc_feature 1..22: note = chemically synthesized
  source 1..22: mol_type = other DNA
gaggggggcaaaaaaagaagga

SEQ ID NO: 42644 - DNA, 22 bp, synthetic construct
  misc_feature 1..22: note = chemically synthesized
  source 1..22: mol_type = other DNA
accactcgagaaaaaatgcaca

SEQ ID NO: 42645 - DNA, 22 bp, synthetic construct
  misc_feature 1..22: note = chemically synthesized
  source 1..22: mol_type = other DNA
gagaaaaaatgcacatgggctg

SEQ ID NO: 42646 - DNA, 22 bp, synthetic construct
  misc_feature 1..22: note = chemically synthesized
  source 1..22: mol_type = other DNA
aggtttcctgcccttatcacca

SEQ ID NO: 42647 - DNA, 22 bp, synthetic construct
  misc_feature 1..22: note = chemically synthesized
  source 1..22: mol_type = other DNA
cctgcccttatcaccattccag

SEQ ID NO: 42648 - DNA, 22 bp, synthetic construct
  misc_feature 1..22: note = chemically synthesized
  source 1..22: mol_type = other DNA
ctgcccttatcaccattccagt

SEQ ID NO: 42649 - DNA, 22 bp, synthetic construct
  misc_feature 1..22: note = chemically synthesized
  source 1..22: mol_type = other DNA
cccttatcaccattccagtata

SEQ ID NO: 42650 - DNA, 22 bp, synthetic construct
  misc_feature 1..22: note = chemically synthesized
  source 1..22: mol_type = other DNA
atcaccattccagtataaaacc

SEQ ID NO: 42651 - DNA, 22 bp, synthetic construct
  misc_feature 1..22: note = chemically synthesized
  source 1..22: mol_type = other DNA
tcaccattccagtataaaacct

SEQ ID NO: 42652 - DNA, 22 bp, synthetic construct
  misc_feature 1..22: note = chemically synthesized
  source 1..22: mol_type = other DNA
cagtataaaacctcaaattatg

SEQ ID NO: 42653 - DNA, 22 bp, synthetic construct
  misc_feature 1..22: note = chemically synthesized
  source 1..22: mol_type = other DNA
aaattatgggaattctcactta

SEQ ID NO: 42654 - DNA, 22 bp, synthetic construct
  misc_feature 1..22: note = chemically synthesized
  source 1..22: mol_type = other DNA
tgggaattctcacttaggaaca

SEQ ID NO: 42655 - DNA, 22 bp, synthetic construct
  misc_feature 1..22: note = chemically synthesized
  source 1..22: mol_type = other DNA
tcacttaggaacacctcattat

SEQ ID NO: 42656 - DNA, 22 bp, synthetic construct
  misc_feature 1..22: note = chemically synthesized
  source 1..22: mol_type = other DNA
acttaggaacacctcattatgg

SEQ ID NO: 42657 - DNA, 22 bp, synthetic construct
  misc_feature 1..22: note = chemically synthesized
  source 1..22: mol_type = other DNA
aggaacacctcattatggaaca

SEQ ID NO: 42658 - DNA, 22 bp, synthetic construct
  misc_feature 1..22: note = chemically synthesized
  source 1..22: mol_type = other DNA
ggaacacctcattatggaacat

SEQ ID NO: 42659 - DNA, 22 bp, synthetic construct
  misc_feature 1..22: note = chemically synthesized
  source 1..22: mol_type = other DNA
attatggaacatatgtgctggg

SEQ ID NO: 42660 - DNA, 22 bp, synthetic construct
  misc_feature 1..22: note = chemically synthesized
  source 1..22: mol_type = other DNA
tggaacatatgtgctgggggtc

SEQ ID NO: 42661 - DNA, 22 bp, synthetic construct
  misc_feature 1..22: note = chemically synthesized
  source 1..22: mol_type = other DNA
ggggtctggggagatgggagaa

SEQ ID NO: 42662 - DNA, 22 bp, synthetic construct
  misc_feature 1..22: note = chemically synthesized
  source 1..22: mol_type = other DNA
gggagatgggagaaggggtgtg

SEQ ID NO: 42663 - DNA, 22 bp, synthetic construct
  misc_feature 1..22: note = chemically synthesized
  source 1..22: mol_type = other DNA
atgaccatgtgtgtaaacttgt

SEQ ID NO: 42664 - DNA, 22 bp, synthetic construct
  misc_feature 1..22: note = chemically synthesized
  source 1..22: mol_type = other DNA
gtgtgctccaaattttatcaag

SEQ ID NO: 42665 - DNA, 22 bp, synthetic construct
  misc_feature 1..22: note = chemically synthesized
  source 1..22: mol_type = other DNA
tgtgctccaaattttatcaagt

SEQ ID NO: 42666 - DNA, 22 bp, synthetic construct
  misc_feature 1..22: note = chemically synthesized
  source 1..22: mol_type = other DNA
caaattttatcaagttcaagcc

SEQ ID NO: 42667 - DNA, 22 bp, synthetic construct
  misc_feature 1..22: note = chemically synthesized
  source 1..22: mol_type = other DNA
tatcaagttcaagccaaaaaga

SEQ ID NO: 42668 - DNA, 22 bp, synthetic construct
  misc_feature 1..22: note = chemically synthesized
  source 1..22: mol_type = other DNA
atcaagttcaagccaaaaagaa

SEQ ID NO: 42669 - DNA, 22 bp, synthetic construct
  misc_feature 1..22: note = chemically synthesized
  source 1..22: mol_type = other DNA
tcaagttcaagccaaaaagaaa

SEQ ID NO: 42670 - DNA, 22 bp, synthetic construct
  misc_feature 1..22: note = chemically synthesized
  source 1..22: mol_type = other DNA
aagccaaaaagaaatcctctgt

SEQ ID NO: 42671 - DNA, 22 bp, synthetic construct
  misc_feature 1..22: note = chemically synthesized
  source 1..22: mol_type = other DNA
tgtggcacttgtttaggactta

SEQ ID NO: 42672 - DNA, 22 bp, synthetic construct
  misc_feature 1..22: note = chemically synthesized
  source 1..22: mol_type = other DNA
tggcacttgtttaggacttaaa

SEQ ID NO: 42673 - DNA, 22 bp, synthetic construct
  misc_feature 1..22: note = chemically synthesized
  source 1..22: mol_type = other DNA
gtttaggacttaaaaaaaaaaa

SEQ ID NO: 42674 - DNA, 22 bp, synthetic construct
  misc_feature 1..22: note = chemically synthesized
  source 1..22: mol_type = other DNA
tttaggacttaaaaaaaaaaaa

SEQ ID NO: 42675 - DNA, 22 bp, synthetic construct
  misc_feature 1..22: note = chemically synthesized
  source 1..22: mol_type = other DNA
aggacttaaaaaaaaaaaaaaa

SEQ ID NO: 42676 - DNA, 22 bp, synthetic construct
  misc_feature 1..22: note = chemically synthesized
  source 1..22: mol_type = other DNA
ggacttaaaaaaaaaaaaaaaa

SEQ ID NO: 42677 - DNA, 22 bp, synthetic construct
  misc_feature 1..22: note = chemically synthesized
  source 1..22: mol_type = other DNA
aaaaaaaaaaaaaaaaaaccaa

SEQ ID NO: 42678 - DNA, 22 bp, synthetic construct
  misc_feature 1..22: note = chemically synthesized
  source 1..22: mol_type = other DNA
aaaaaaaaaaaaaaaaaccaac

SEQ ID NO: 42679 - DNA, 22 bp, synthetic construct
  misc_feature 1..22: note = chemically synthesized
  source 1..22: mol_type = other DNA
aaatcaaaataggaaatacaaa

SEQ ID NO: 42680 - DNA, 22 bp, synthetic construct
  misc_feature 1..22: note = chemically synthesized
  source 1..22: mol_type = other DNA
aatcaaaataggaaatacaaaa

SEQ ID NO: 42681 - DNA, 22 bp, synthetic construct
  misc_feature 1..22: note = chemically synthesized
  source 1..22: mol_type = other DNA
gtacaccctcaccaccaccacc

SEQ ID NO: 42682 - DNA, 22 bp, synthetic construct
  misc_feature 1..22: note = chemically synthesized
  source 1..22: mol_type = other DNA
tacaccctcaccaccaccacca

SEQ ID NO: 42683 - DNA, 22 bp, synthetic construct
  misc_feature 1..22: note = chemically synthesized
  source 1..22: mol_type = other DNA
accaccaccaccaaggcatagc

SEQ ID NO: 42684 - DNA, 22 bp, synthetic construct
  misc_feature 1..22: note = chemically synthesized
  source 1..22: mol_type = other DNA
ggaagaaaaaggcatcccttgc

SEQ ID NO: 42685 - DNA, 22 bp, synthetic construct
  misc_feature 1..22: note = chemically synthesized
  source 1..22: mol_type = other DNA
gaagaaaaaggcatcccttgca

SEQ ID NO: 42686 - DNA, 22 bp, synthetic construct
  misc_feature 1..22: note = chemically synthesized
  source 1..22: mol_type = other DNA
gcagccacaatttcgcaagttg

SEQ ID NO: 42687 - DNA, 22 bp, synthetic construct
  misc_feature 1..22: note = chemically synthesized
  source 1..22: mol_type = other DNA
cagccacaatttcgcaagttga

SEQ ID NO: 42688 - DNA, 22 bp, synthetic construct
  misc_feature 1..22: note = chemically synthesized
  source 1..22: mol_type = other DNA
cgcaagttgaccttttcaccag

SEQ ID NO: 42689 - DNA, 22 bp, synthetic construct
  misc_feature 1..22: note = chemically synthesized
  source 1..22: mol_type = other DNA
gcaagttgaccttttcaccagg

SEQ ID NO: 42690 - DNA, 22 bp, synthetic construct
  misc_feature 1..22: note = chemically synthesized
  source 1..22: mol_type = other DNA
accttttcaccaggccagtgcc

SEQ ID NO: 42691 - DNA, 22 bp, synthetic construct
  misc_feature 1..22: note = chemically synthesized
  source 1..22: mol_type = other DNA
ttcaccaggccagtgcctaatt

SEQ ID NO: 42692 - DNA, 22 bp, synthetic construct
  misc_feature 1..22: note = chemically synthesized
  source 1..22: mol_type = other DNA
tcaccaggccagtgcctaattt

SEQ ID NO: 42693 - DNA, 22 bp, synthetic construct
  misc_feature 1..22: note = chemically synthesized
  source 1..22: mol_type = other DNA
caccaggccagtgcctaatttc

SEQ ID NO: 42694 - DNA, 22 bp, synthetic construct
  misc_feature 1..22: note = chemically synthesized
  source 1..22: mol_type = other DNA
accaggccagtgcctaatttcc

SEQ ID NO: 42695 - DNA, 22 bp, synthetic construct
  misc_feature 1..22: note = chemically synthesized
  source 1..22: mol_type = other DNA
atttcctaaacaggccccttct

SEQ ID NO: 42696 - DNA, 22 bp, synthetic construct
  misc_feature 1..22: note = chemically synthesized
  source 1..22: mol_type = other DNA
cctaaacaggccccttcttcct

SEQ ID NO: 42697 - DNA, 22 bp, synthetic construct
  misc_feature 1..22: note = chemically synthesized
  source 1..22: mol_type = other DNA
ctaaacaggccccttcttcctt

SEQ ID NO: 42698 - DNA, 22 bp, synthetic construct
  misc_feature 1..22: note = chemically synthesized
  source 1..22: mol_type = other DNA
aacaggccccttcttccttgaa

SEQ ID NO: 42699 - DNA, 22 bp, synthetic construct
  misc_feature 1..22: note = chemically synthesized
  source 1..22: mol_type = other DNA
cttccttgaagtcactgcaaat

SEQ ID NO: 42700 - DNA, 22 bp, synthetic construct
  misc_feature 1..22: note = chemically synthesized
  source 1..22: mol_type = other DNA
ttccttgaagtcactgcaaata

SEQ ID NO: 42701 - DNA, 22 bp, synthetic construct
  misc_feature 1..22: note = chemically synthesized
  source 1..22: mol_type = other DNA
ccttgaagtcactgcaaataaa

SEQ ID NO: 42702 - DNA, 22 bp, synthetic construct
  misc_feature 1..22: note = chemically synthesized
  source 1..22: mol_type = other DNA
cttgaagtcactgcaaataaat

SEQ ID NO: 42703 - DNA, 22 bp, synthetic construct
  misc_feature 1..22: note = chemically synthesized
  source 1..22: mol_type = other DNA
gaagtcactgcaaataaatgca

SEQ ID NO: 42704 - DNA, 22 bp, synthetic construct
  misc_feature 1..22: note = chemically synthesized
  source 1..22: mol_type = other DNA
aagtcactgcaaataaatgcag

SEQ ID NO: 42705 - DNA, 22 bp, synthetic construct
  misc_feature 1..22: note = chemically synthesized
  source 1..22: mol_type = other DNA
caaataaatgcagtcatccaga

SEQ ID NO: 42706 - DNA, 22 bp, synthetic construct
  misc_feature 1..22: note = chemically synthesized
  source 1..22: mol_type = other DNA
gccttggagttactggcttatg

SEQ ID NO: 42707 - DNA, 22 bp, synthetic construct
  misc_feature 1..22: note = chemically synthesized
  source 1..22: mol_type = other DNA
ggagttactggcttatgaaatg

SEQ ID NO: 42708 - DNA, 22 bp, synthetic construct
  misc_feature 1..22: note = chemically synthesized
  source 1..22: mol_type = other DNA
gagttactggcttatgaaatgc

SEQ ID NO: 42709 - DNA, 22 bp, synthetic construct
  misc_feature 1..22: note = chemically synthesized
  source 1..22: mol_type = other DNA
ctggcttatgaaatgcaatggg

SEQ ID NO: 42710 - DNA, 22 bp, synthetic construct
  misc_feature 1..22: note = chemically synthesized
  source 1..22: mol_type = other DNA
gcttatgaaatgcaatgggatg

SEQ ID NO: 42711 - DNA, 22 bp, synthetic construct
  misc_feature 1..22: note = chemically synthesized
  source 1..22: mol_type = other DNA
atgaaatgcaatgggatgaggt

SEQ ID NO: 42712 - DNA, 22 bp, synthetic construct
  misc_feature 1..22: note = chemically synthesized
  source 1..22: mol_type = other DNA
tgaaatgcaatgggatgaggtg

SEQ ID NO: 42713 - DNA, 22 bp, synthetic construct
  misc_feature 1..22: note = chemically synthesized
  source 1..22: mol_type = other DNA
aacggcacagtgaccaggtagg

SEQ ID NO: 42714 - DNA, 22 bp, synthetic construct
  misc_feature 1..22: note = chemically synthesized
  source 1..22: mol_type = other DNA
cagcaagaatgccaaggatagc

SEQ ID NO: 42715 - DNA, 22 bp, synthetic construct
  misc_feature 1..22: note = chemically synthesized
  source 1..22: mol_type = other DNA
cagtgggttattagccccagca

SEQ ID NO: 42716 - DNA, 22 bp, synthetic construct
  misc_feature 1..22: note = chemically synthesized
  source 1..22: mol_type = other DNA
ttagccccagcagggcccatgc

SEQ ID NO: 42717 - DNA, 22 bp, synthetic construct
  misc_feature 1..22: note = chemically synthesized
  source 1..22: mol_type = other DNA
gccccagcagggcccatgcctc

SEQ ID NO: 42718 - DNA, 22 bp, synthetic construct
  misc_feature 1..22: note = chemically synthesized
  source 1..22: mol_type = other DNA
tacggccatgttgctgtcatct

SEQ ID NO: 42719 - DNA, 22 bp, synthetic construct
  misc_feature 1..22: note = chemically synthesized
  source 1..22: mol_type = other DNA
cggccatgttgctgtcatcttc

SEQ ID NO: 42720 - DNA, 22 bp, synthetic construct
  misc_feature 1..22: note = chemically synthesized
  source 1..22: mol_type = other DNA
ctgtcatcttcgttcttggcta

SEQ ID NO: 42721 - DNA, 22 bp, synthetic construct
  misc_feature 1..22: note = chemically synthesized
  source 1..22: mol_type = other DNA
tcatcttcgttcttggctagca

SEQ ID NO: 42722 - DNA, 22 bp, synthetic construct
  misc_feature 1..22: note = chemically synthesized
  source 1..22: mol_type = other DNA
cgttcttggctagcagatgcta

SEQ ID NO: 42723 - DNA, 22 bp, synthetic construct
  misc_feature 1..22: note = chemically synthesized
  source 1..22: mol_type = other DNA
gttcttggctagcagatgctag

SEQ ID NO: 42724 - DNA, 22 bp, synthetic construct
  misc_feature 1..22: note = chemically synthesized
  source 1..22: mol_type = other DNA
ttggctagcagatgctagtccc

SEQ ID NO: 42725 - DNA, 22 bp, synthetic construct
  misc_feature 1..22: note = chemically synthesized
  source 1..22: mol_type = other DNA
ggctagcagatgctagtcccag

SEQ ID NO: 42726 - DNA, 22 bp, synthetic construct
  misc_feature 1..22: note = chemically synthesized
  source 1..22: mol_type = other DNA
gctagcagatgctagtcccagg

SEQ ID NO: 42727 - DNA, 22 bp, synthetic construct
  misc_feature 1..22: note = chemically synthesized
  source 1..22: mol_type = other DNA
gcagatgctagtcccaggaatg

SEQ ID NO: 42728 - DNA, 22 bp, synthetic construct
  misc_feature 1..22: note = chemically synthesized
  source 1..22: mol_type = other DNA
gtcccaggaatgtcctccatgc

SEQ ID NO: 42729 - DNA, 22 bp, synthetic construct
  misc_feature 1..22: note = chemically synthesized
  source 1..22: mol_type = other DNA
catgcctttaagctaactgcaa

SEQ ID NO: 42730 - DNA, 22 bp, synthetic construct
  misc_feature 1..22: note = chemically synthesized
  source 1..22: mol_type = other DNA
taagctaactgcaaaaacagaa

SEQ ID NO: 42731 - DNA, 22 bp, synthetic construct
  misc_feature 1..22: note = chemically synthesized
  source 1..22: mol_type = other DNA
aagctaactgcaaaaacagaac

SEQ ID NO: 42732 - DNA, 22 bp, synthetic construct
  misc_feature 1..22: note = chemically synthesized
  source 1..22: mol_type = other DNA
agctaactgcaaaaacagaacg

SEQ ID NO: 42733 - DNA, 22 bp, synthetic construct
  misc_feature 1..22: note = chemically synthesized
  source 1..22: mol_type = other DNA
actgcaaaaacagaacggtgtg

SEQ ID NO: 42734 - DNA, 22 bp, synthetic construct
  misc_feature 1..22: note = chemically synthesized
  source 1..22: mol_type = other DNA
caaaaacagaacggtgtgagcc

SEQ ID NO: 42735 - DNA, 22 bp, synthetic construct
  misc_feature 1..22: note = chemically synthesized
  source 1..22: mol_type = other DNA
ttttatattctacctataaggg

SEQ ID NO: 42736 - DNA, 22 bp, synthetic construct
  misc_feature 1..22: note = chemically synthesized
  source 1..22: mol_type = other DNA
ttatattctacctataagggaa

SEQ ID NO: 42737 - DNA, 22 bp, synthetic construct
  misc_feature 1..22: note = chemically synthesized
  source 1..22: mol_type = other DNA
tatattctacctataagggaaa

SEQ ID NO: 42738 - DNA, 22 bp, synthetic construct
  misc_feature 1..22: note = chemically synthesized
  source 1..22: mol_type = other DNA
atattctacctataagggaaaa

SEQ ID NO: 42739 - DNA, 22 bp, synthetic construct
  misc_feature 1..22: note = chemically synthesized
  source 1..22: mol_type = other DNA
tattctacctataagggaaaaa

SEQ ID NO: 42740 - DNA, 22 bp, synthetic construct
  misc_feature 1..22: note = chemically synthesized
  source 1..22: mol_type = other DNA
tacctataagggaaaaataaac

SEQ ID NO: 42741 - DNA, 22 bp, synthetic construct
  misc_feature 1..22: note = chemically synthesized
  source 1..22: mol_type = other DNA
cctataagggaaaaataaacct

SEQ ID NO: 42742 - DNA, 22 bp, synthetic construct
  misc_feature 1..22: note = chemically synthesized
  source 1..22: mol_type = other DNA
taagggaaaaataaacctagac

SEQ ID NO: 42743 - DNA, 22 bp, synthetic construct
  misc_feature 1..22: note = chemically synthesized
  source 1..22: mol_type = other DNA
gacctggaaaacaatgtgtaaa

SEQ ID NO: 42744 - DNA, 22 bp, synthetic construct
  misc_feature 1..22: note = chemically synthesized
  source 1..22: mol_type = other DNA
gaaaacaatgtgtaaagtggca

SEQ ID NO: 42745 - DNA, 22 bp, synthetic construct
  misc_feature 1..22: note = chemically synthesized
  source 1..22: mol_type = other DNA
atttaaaaagaaaaaccctcca

SEQ ID NO: 42746 - DNA, 22 bp, synthetic construct
  misc_feature 1..22: note = chemically synthesized
  source 1..22: mol_type = other DNA
aaaaagaaaaaccctccatcca

SEQ ID NO: 42747 - DNA, 22 bp, synthetic construct
  misc_feature 1..22: note = chemically synthesized
  source 1..22: mol_type = other DNA
aaaagaaaaaccctccatccaa

SEQ ID NO: 42748 - DNA, 22 bp, synthetic construct
  misc_feature 1..22: note = chemically synthesized
  source 1..22: mol_type = other DNA
catccaacgtcacgaagctgct

SEQ ID NO: 42749 - DNA, 22 bp, synthetic construct
  misc_feature 1..22: note = chemically synthesized
  source 1..22: mol_type = other DNA
ctgaatattaggttcctgggaa

SEQ ID NO: 42750 - DNA, 22 bp, synthetic construct
  misc_feature 1..22: note = chemically synthesized
  source 1..22: mol_type = other DNA
aatattaggttcctgggaagct

SEQ ID NO: 42751 - DNA, 22 bp, synthetic construct
  misc_feature 1..22: note = chemically synthesized
  source 1..22: mol_type = other DNA
ggttcctgggaagctgtcccag

SEQ ID NO: 42752 - DNA, 22 bp, synthetic construct
  misc_feature 1..22: note = chemically synthesized
  source 1..22: mol_type = other DNA
ctgggaagctgtcccagcaacc

SEQ ID NO: 42753 - DNA, 22 bp, synthetic construct
  misc_feature 1..22: note = chemically synthesized
  source 1..22: mol_type = other DNA
ggaagctgtcccagcaacctag

SEQ ID NO: 42754 - DNA, 22 bp, synthetic construct
  misc_feature 1..22: note = chemically synthesized
  source 1..22: mol_type = other DNA
tcccagcaacctagatatgaga

SEQ ID NO: 42755 - DNA, 22 bp, synthetic construct
  misc_feature 1..22: note = chemically synthesized
  source 1..22: mol_type = other DNA
gatatgagaaacaacgcttgct

SEQ ID NO: 42756 - DNA, 22 bp, synthetic construct
  misc_feature 1..22: note = chemically synthesized
  source 1..22: mol_type = other DNA
gctattctggggtgagaagtga

SEQ ID NO: 42757 - DNA, 22 bp, synthetic construct
  misc_feature 1..22: note = chemically synthesized
  source 1..22: mol_type = other DNA
ctattctggggtgagaagtgaa

SEQ ID NO: 42758 - DNA, 22 bp, synthetic construct
  misc_feature 1..22: note = chemically synthesized
  source 1..22: mol_type = other DNA
ttctggggtgagaagtgaagtt

SEQ ID NO: 42759 - DNA, 22 bp, synthetic construct
  misc_feature 1..22: note = chemically synthesized
  source 1..22: mol_type = other DNA
tggggtgagaagtgaagttgcc

SEQ ID NO: 42760 - DNA, 22 bp, synthetic construct
  misc_feature 1..22: note = chemically synthesized
  source 1..22: mol_type = other DNA
gggtgagaagtgaagttgcctt

SEQ ID NO: 42761 - DNA, 22 bp, synthetic construct
  misc_feature 1..22: note = chemically synthesized
  source 1..22: mol_type = other DNA
cctttcactcgggactgtcaaa

SEQ ID NO: 42762 - DNA, 22 bp, synthetic construct
  misc_feature 1..22: note = chemically synthesized
  source 1..22: mol_type = other DNA
tcactcgggactgtcaaacaca

SEQ ID NO: 42763 - DNA, 22 bp, synthetic construct
  misc_feature 1..22: note = chemically synthesized
  source 1..22: mol_type = other DNA
cactcgggactgtcaaacacag

SEQ ID NO: 42764 - DNA, 22 bp, synthetic construct
  misc_feature 1..22: note = chemically synthesized
  source 1..22: mol_type = other DNA
actcgggactgtcaaacacagt

SEQ ID NO: 42765 - DNA, 22 bp, synthetic construct
  misc_feature 1..22: note = chemically synthesized
  source 1..22: mol_type = other DNA
gggactgtcaaacacagtctat

SEQ ID NO: 42766 - DNA, 22 bp, synthetic construct
  misc_feature 1..22: note = chemically synthesized
  source 1..22: mol_type = other DNA
tcaaacacagtctataaatacc

SEQ ID NO: 42767 - DNA, 22 bp, synthetic construct
  misc_feature 1..22: note = chemically synthesized
  source 1..22: mol_type = other DNA
taaataccagcaatgccccttg

SEQ ID NO: 42768 - DNA, 22 bp, synthetic construct
  misc_feature 1..22: note = chemically synthesized
  source 1..22: mol_type = other DNA
gtgaactacgggctgagctcaa

SEQ ID NO: 42769 - DNA, 22 bp, synthetic construct
  misc_feature 1..22: note = chemically synthesized
  source 1..22: mol_type = other DNA
tgaactacgggctgagctcaac

SEQ ID NO: 42770 - DNA, 22 bp, synthetic construct
  misc_feature 1..22: note = chemically synthesized
  source 1..22: mol_type = other DNA
cgggctgagctcaacccagaga

SEQ ID NO: 42771 - DNA, 22 bp, synthetic construct
  misc_feature 1..22: note = chemically synthesized
  source 1..22: mol_type = other DNA
agctcaacccagagaaggcaag

SEQ ID NO: 42772 - DNA, 22 bp, synthetic construct
  misc_feature 1..22: note = chemically synthesized
  source 1..22: mol_type = other DNA
aacccagagaaggcaagtgttt

SEQ ID NO: 42773 - DNA, 22 bp, synthetic construct
  misc_feature 1..22: note = chemically synthesized
  source 1..22: mol_type = other DNA
cccaaaggtcacacagcaattc

SEQ ID NO: 42774 - DNA, 22 bp, synthetic construct
  misc_feature 1..22: note = chemically synthesized
  source 1..22: mol_type = other DNA
ccaaaggtcacacagcaattcc

SEQ ID NO: 42775 - DNA, 22 bp, synthetic construct
  misc_feature 1..22: note = chemically synthesized
  source 1..22: mol_type = other DNA
caggtcccccagaagtagccct

SEQ ID NO: 42776 - DNA, 22 bp, synthetic construct
  misc_feature 1..22: note = chemically synthesized
  source 1..22: mol_type = other DNA
caccagatggatcccatcacca

SEQ ID NO: 42777 - DNA, 22 bp, synthetic construct
  misc_feature 1..22: note = chemically synthesized
  source 1..22: mol_type = other DNA
accagatggatcccatcaccag

SEQ ID NO: 42778 - DNA, 22 bp, synthetic construct
  misc_feature 1..22: note = chemically synthesized
  source 1..22: mol_type = other DNA
ttggaaataatacattgctgca

SEQ ID NO: 42779 - DNA, 22 bp, synthetic construct
  misc_feature 1..22: note = chemically synthesized
  source 1..22: mol_type = other DNA
ggaaataatacattgctgcatc

SEQ ID NO: 42780 - DNA, 22 bp, synthetic construct
  misc_feature 1..22: note = chemically synthesized
  source 1..22: mol_type = other DNA
gaaataatacattgctgcatct

SEQ ID NO: 42781 - DNA, 22 bp, synthetic construct
  misc_feature 1..22: note = chemically synthesized
  source 1..22: mol_type = other DNA
ctgcatctgattctcattttca

SEQ ID NO: 42782 - DNA, 22 bp, synthetic construct
  misc_feature 1..22: note = chemically synthesized
  source 1..22: mol_type = other DNA
catctgattctcattttcaaca

SEQ ID NO: 42783 - DNA, 22 bp, synthetic construct
  misc_feature 1..22: note = chemically synthesized
  source 1..22: mol_type = other DNA
attctcattttcaacaagaagg

SEQ ID NO: 42784 - DNA, 22 bp, synthetic construct
  misc_feature 1..22: note = chemically synthesized
  source 1..22: mol_type = other DNA
tcattttcaacaagaaggctga

SEQ ID NO: 42785 - DNA, 22 bp, synthetic construct
  misc_feature 1..22: note = chemically synthesized
  source 1..22: mol_type = other DNA
attttcaacaagaaggctgagg

SEQ ID NO: 42786 - DNA, 22 bp, synthetic construct
  misc_feature 1..22: note = chemically synthesized
  source 1..22: mol_type = other DNA
tcaacaagaaggctgaggaatg

SEQ ID NO: 42787 - DNA, 22 bp, synthetic construct
  misc_feature 1..22: note = chemically synthesized
  source 1..22: mol_type = other DNA
caacaagaaggctgaggaatga

SEQ ID NO: 42788 - DNA, 22 bp, synthetic construct
  misc_feature 1..22: note = chemically synthesized
  source 1..22: mol_type = other DNA
aacaagaaggctgaggaatgag

SEQ ID NO: 42789 - DNA, 22 bp, synthetic construct
  misc_feature 1..22: note = chemically synthesized
  source 1..22: mol_type = other DNA
aggaatgagattgcacatttta

SEQ ID NO: 42790 - DNA, 22 bp, synthetic construct
  misc_feature 1..22: note = chemically synthesized
  source 1..22: mol_type = other DNA
cacattttagtttccttcccca

SEQ ID NO: 42791 - DNA, 22 bp, synthetic construct
  misc_feature 1..22: note = chemically synthesized
  source 1..22: mol_type = other DNA
tagtttccttccccaactttct

SEQ ID NO: 42792 - DNA, 22 bp, synthetic construct
  misc_feature 1..22: note = chemically synthesized
  source 1..22: mol_type = other DNA
agtttccttccccaactttctt

SEQ ID NO: 42793 - DNA, 22 bp, synthetic construct
  misc_feature 1..22: note = chemically synthesized
  source 1..22: mol_type = other DNA
gtttccttccccaactttcttt

SEQ ID NO: 42794 - DNA, 22 bp, synthetic construct
  misc_feature 1..22: note = chemically synthesized
  source 1..22: mol_type = other DNA
ccttccccaactttctttctcc

SEQ ID NO: 42795 - DNA, 22 bp, synthetic construct
  misc_feature 1..22: note = chemically synthesized
  source 1..22: mol_type = other DNA
cttccccaactttctttctcca

SEQ ID NO: 42796 - DNA, 22 bp, synthetic construct
  misc_feature 1..22: note = chemically synthesized
  source 1..22: mol_type = other DNA
ccccaactttctttctccaacc

SEQ ID NO: 42797 - DNA, 22 bp, synthetic construct
  misc_feature 1..22: note = chemically synthesized
  source 1..22: mol_type = other DNA
cccaactttctttctccaacct

SEQ ID NO: 42798 - DNA, 22 bp, synthetic construct
  misc_feature 1..22: note = chemically synthesized
  source 1..22: mol_type = other DNA
tctttctccaaccttctgctct

SEQ ID NO: 42799 - DNA, 22 bp, synthetic construct
  misc_feature 1..22: note = chemically synthesized
  source 1..22: mol_type = other DNA
ctttctccaaccttctgctctg

SEQ ID NO: 42800 - DNA, 22 bp, synthetic construct
  misc_feature 1..22: note = chemically synthesized
  source 1..22: mol_type = other DNA
tttctccaaccttctgctctgg

SEQ ID NO: 42801 - DNA, 22 bp, synthetic construct
  misc_feature 1..22: note = chemically synthesized
  source 1..22: mol_type = other DNA
tctccaaccttctgctctggtt

SEQ ID NO: 42802 - DNA, 22 bp, synthetic construct
  misc_feature 1..22: note = chemically synthesized
  source 1..22: mol_type = other DNA
ctccaaccttctgctctggttc

SEQ ID NO: 42803 - DNA, 22 bp, synthetic construct
  misc_feature 1..22: note = chemically synthesized
  source 1..22: mol_type = other DNA
tccaaccttctgctctggttct

SEQ ID NO: 42804 - DNA, 22 bp, synthetic construct
  misc_feature 1..22: note = chemically synthesized
  source 1..22: mol_type = other DNA
caaccttctgctctggttctcc

SEQ ID NO: 42805 - DNA, 22 bp, synthetic construct
  misc_feature 1..22: note = chemically synthesized
  source 1..22: mol_type = other DNA
ctgctctggttctcctctcccc

SEQ ID NO: 42806 - DNA, 22 bp, synthetic construct
  misc_feature 1..22: note = chemically synthesized
  source 1..22: mol_type = other DNA
tgctctggttctcctctccccc

SEQ ID NO: 42807 - DNA, 22 bp, synthetic construct
  misc_feature 1..22: note = chemically synthesized
  source 1..22: mol_type = other DNA
ctctggttctcctctcccccac

SEQ ID NO: 42808 - DNA, 22 bp, synthetic construct
  misc_feature 1..22: note = chemically synthesized
  source 1..22: mol_type = other DNA
tggttctcctctcccccaccac

SEQ ID NO: 42809 - DNA, 22 bp, synthetic construct
  misc_feature 1..22: note = chemically synthesized
  source 1..22: mol_type = other DNA
gttctcctctcccccaccacac

SEQ ID NO: 42810 - DNA, 22 bp, synthetic construct
  misc_feature 1..22: note = chemically synthesized
  source 1..22: mol_type = other DNA
tcctctcccccaccacacgtac

SEQ ID NO: 42811 - DNA, 22 bp, synthetic construct
  misc_feature 1..22: note = chemically synthesized
  source 1..22: mol_type = other DNA
ctctcccccaccacacgtacaa

SEQ ID NO: 42812 - DNA, 22 bp, synthetic construct
  misc_feature 1..22: note = chemically synthesized
  source 1..22: mol_type = other DNA
tcccccaccacacgtacaaaaa

SEQ ID NO: 42813 - DNA, 22 bp, synthetic construct
  misc_feature 1..22: note = chemically synthesized
  source 1..22: mol_type = other DNA
ccccaccacacgtacaaaaaaa

SEQ ID NO: 42814 - DNA, 22 bp, synthetic construct
  misc_feature 1..22: note = chemically synthesized
  source 1..22: mol_type = other DNA
tttagtatgtttagggatctat

SEQ ID NO: 42815 - DNA, 22 bp, synthetic construct
  misc_feature 1..22: note = chemically synthesized
  source 1..22: mol_type = other DNA
ttagtatgtttagggatctatt

SEQ ID NO: 42816 - DNA, 22 bp, synthetic construct
  misc_feature 1..22: note = chemically synthesized
  source 1..22: mol_type = other DNA
tagtatgtttagggatctattt

SEQ ID NO: 42817 - DNA, 22 bp, synthetic construct
  misc_feature 1..22: note = chemically synthesized
  source 1..22: mol_type = other DNA
agtatgtttagggatctatttc

SEQ ID NO: 42818 - DNA, 22 bp, synthetic construct
  misc_feature 1..22: note = chemically synthesized
  source 1..22: mol_type = other DNA
gtatgtttagggatctatttcc

SEQ ID NO: 42819 - DNA, 22 bp, synthetic construct
  misc_feature 1..22: note = chemically synthesized
  source 1..22: mol_type = other DNA
agggatctatttccatatctac

SEQ ID NO: 42820 - DNA, 22 bp, synthetic construct
  misc_feature 1..22: note = chemically synthesized
  source 1..22: mol_type = other DNA
gggatctatttccatatctacc

SEQ ID NO: 42821 - DNA, 22 bp, synthetic construct
  misc_feature 1..22: note = chemically synthesized
  source 1..22: mol_type = other DNA
tttccatatctacccaaaatct

SEQ ID NO: 42822 - DNA, 22 bp, synthetic construct
  misc_feature 1..22: note = chemically synthesized
  source 1..22: mol_type = other DNA
ccatatctacccaaaatctcca

SEQ ID NO: 42823 - DNA, 22 bp, synthetic construct
  misc_feature 1..22: note = chemically synthesized
  source 1..22: mol_type = other DNA
catatctacccaaaatctccaa

SEQ ID NO: 42824 - DNA, 22 bp, synthetic construct
  misc_feature 1..22: note = chemically synthesized
  source 1..22: mol_type = other DNA
cccaaaatctccaagccccttg

SEQ ID NO: 42825 - DNA, 22 bp, synthetic construct
  misc_feature 1..22: note = chemically synthesized
  source 1..22: mol_type = other DNA
caagccccttgttctatcagca

SEQ ID NO: 42826 - DNA, 22 bp, synthetic construct
  misc_feature 1..22: note = chemically synthesized
  source 1..22: mol_type = other DNA
gttctatcagcaggtcaagagt

SEQ ID NO: 42827 - DNA, 22 bp, synthetic construct
  misc_feature 1..22: note = chemically synthesized
  source 1..22: mol_type = other DNA
ttctatcagcaggtcaagagta

SEQ ID NO: 42828 - DNA, 22 bp, synthetic construct
  misc_feature 1..22: note = chemically synthesized
  source 1..22: mol_type = other DNA
tatcagcaggtcaagagtagag

SEQ ID NO: 42829 - DNA, 22 bp, synthetic construct
  misc_feature 1..22: note = chemically synthesized
  source 1..22: mol_type = other DNA
tcagcaggtcaagagtagagaa

SEQ ID NO: 42830 - DNA, 22 bp, synthetic construct
  misc_feature 1..22: note = chemically synthesized
  source 1..22: mol_type = other DNA
tgacaagctgttctccattctg

SEQ ID NO: 42831 - DNA, 22 bp, synthetic construct
  misc_feature 1..22: note = chemically synthesized
  source 1..22: mol_type = other DNA
ttctccattctgaaatggattt

SEQ ID NO: 42832 - DNA, 22 bp, synthetic construct
  misc_feature 1..22: note = chemically synthesized
  source 1..22: mol_type = other DNA
tccattctgaaatggatttgac

SEQ ID NO: 42833 - DNA, 22 bp, synthetic construct
  misc_feature 1..22: note = chemically synthesized
  source 1..22: mol_type = other DNA
cattctgaaatggatttgactg

SEQ ID NO: 42834 - DNA, 22 bp, synthetic construct
  misc_feature 1..22: note = chemically synthesized
  source 1..22: mol_type = other DNA
tgaaatggatttgactgaacag

SEQ ID NO: 42835 - DNA, 22 bp, synthetic construct
  misc_feature 1..22: note = chemically synthesized
  source 1..22: mol_type = other DNA
aaatggatttgactgaacagct

SEQ ID NO: 42836 - DNA, 22 bp, synthetic construct
  misc_feature 1..22: note = chemically synthesized
  source 1..22: mol_type = other DNA
gactgaacagctgctgaaaggc

SEQ ID NO: 42837 - DNA, 22 bp, synthetic construct
  misc_feature 1..22: note = chemically synthesized
  source 1..22: mol_type = other DNA
actgaacagctgctgaaaggca

SEQ ID NO: 42838 - DNA, 22 bp, synthetic construct
  misc_feature 1..22: note = chemically synthesized
  source 1..22: mol_type = other DNA
aacagctgctgaaaggcaagac

SEQ ID NO: 42839 - DNA, 22 bp, synthetic construct
  misc_feature 1..22: note = chemically synthesized
  source 1..22: mol_type = other DNA
ctgaaaggcaagacatcctagg

SEQ ID NO: 42840 - DNA, 22 bp, synthetic construct
  misc_feature 1..22: note = chemically synthesized
  source 1..22: mol_type = other DNA
aaaggcaagacatcctagggag

SEQ ID NO: 42841 - DNA, 22 bp, synthetic construct
  misc_feature 1..22: note = chemically synthesized
  source 1..22: mol_type = other DNA
gggagactggtactggggattt

SEQ ID NO: 42842 - DNA, 22 bp, synthetic construct
  misc_feature 1..22: note = chemically synthesized
  source 1..22: mol_type = other DNA
gtactggggatttcagggtcct

SEQ ID NO: 42843 - DNA, 22 bp, synthetic construct
  misc_feature 1..22: note = chemically synthesized
  source 1..22: mol_type = other DNA
gggatttcagggtccttgttct

SEQ ID NO: 42844 - DNA, 22 bp, synthetic construct
  misc_feature 1..22: note = chemically synthesized
  source 1..22: mol_type = other DNA
cagggtccttgttctgtgggtg

SEQ ID NO: 42845 - DNA, 22 bp, synthetic construct
  misc_feature 1..22: note = chemically synthesized
  source 1..22: mol_type = other DNA
agggtccttgttctgtgggtgg

SEQ ID NO: 42846 - DNA, 22 bp, synthetic construct
  misc_feature 1..22: note = chemically synthesized
  source 1..22: mol_type = other DNA
gttctgtgggtggaccatggct

SEQ ID NO: 42847 - DNA, 22 bp, synthetic construct
  misc_feature 1..22: note = chemically synthesized
  source 1..22: mol_type = other DNA
ttctgtgggtggaccatggctc

SEQ ID NO: 42848 - DNA, 22 bp, synthetic construct
  misc_feature 1..22: note = chemically synthesized
  source 1..22: mol_type = other DNA
tgtgggtggaccatggctcctt

SEQ ID NO: 42849 - DNA, 22 bp, synthetic construct
  misc_feature 1..22: note = chemically synthesized
  source 1..22: mol_type = other DNA
tgggtggaccatggctcctttc

SEQ ID NO: 42850 - DNA, 22 bp, synthetic construct
  misc_feature 1..22: note = chemically synthesized
  source 1..22: mol_type = other DNA
ctttccagagaatgacttgtga

SEQ ID NO: 42851 - DNA, 22 bp, synthetic construct
  misc_feature 1..22: note = chemically synthesized
  source 1..22: mol_type = other DNA
tccagagaatgacttgtgattt

SEQ ID NO: 42852 - DNA, 22 bp, synthetic construct
  misc_feature 1..22: note = chemically synthesized
  source 1..22: mol_type = other DNA
ccagagaatgacttgtgatttg

SEQ ID NO: 42853 - DNA, 22 bp, synthetic construct
  misc_feature 1..22: note = chemically synthesized
  source 1..22: mol_type = other DNA
cagagaatgacttgtgatttgt

SEQ ID NO: 42854 - DNA, 22 bp, synthetic construct
  misc_feature 1..22: note = chemically synthesized
  source 1..22: mol_type = other DNA
gtgatttgttctctctcctaca

SEQ ID NO: 42855 - DNA, 22 bp, synthetic construct
  misc_feature 1..22: note = chemically synthesized
  source 1..22: mol_type = other DNA
tgatttgttctctctcctacac

SEQ ID NO: 42856 - DNA, 22 bp, synthetic construct
  misc_feature 1..22: note = chemically synthesized
  source 1..22: mol_type = other DNA
gttctctctcctacacatcaaa

SEQ ID NO: 42857 - DNA, 22 bp, synthetic construct
  misc_feature 1..22: note = chemically synthesized
  source 1..22: mol_type = other DNA
ttctctctcctacacatcaaag

SEQ ID NO: 42858 - DNA, 22 bp, synthetic construct
  misc_feature 1..22: note = chemically synthesized
  source 1..22: mol_type = other DNA
tctctcctacacatcaaagtga

SEQ ID NO: 42859 - DNA, 22 bp, synthetic construct
  misc_feature 1..22: note = chemically synthesized
  source 1..22: mol_type = other DNA
tctcctacacatcaaagtgaga

SEQ ID NO: 42860 - DNA, 22 bp, synthetic construct
  misc_feature 1..22: note = chemically synthesized
  source 1..22: mol_type = other DNA
tcctacacatcaaagtgagaca

SEQ ID NO: 42861 - DNA, 22 bp, synthetic construct
  misc_feature 1..22: note = chemically synthesized
  source 1..22: mol_type = other DNA
ctacacatcaaagtgagacacc

SEQ ID NO: 42862 - DNA, 22 bp, synthetic construct
  misc_feature 1..22: note = chemically synthesized
  source 1..22: mol_type = other DNA
cacatcaaagtgagacaccaat

SEQ ID NO: 42863 - DNA, 22 bp, synthetic construct
  misc_feature 1..22: note = chemically synthesized
  source 1..22: mol_type = other DNA
tactggcccaccttgccccacc

SEQ ID NO: 42864 - DNA, 22 bp, synthetic construct
  misc_feature 1..22: note = chemically synthesized
  source 1..22: mol_type = other DNA
ctggcccaccttgccccacctc

SEQ ID NO: 42865 - DNA, 22 bp, synthetic construct
  misc_feature 1..22: note = chemically synthesized
  source 1..22: mol_type = other DNA
gcccaccttgccccacctccaa

SEQ ID NO: 42866 - DNA, 22 bp, synthetic construct
  misc_feature 1..22: note = chemically synthesized
  source 1..22: mol_type = other DNA
gccccacctccaatttggcaac

SEQ ID NO: 42867 - DNA, 22 bp, synthetic construct
  misc_feature 1..22: note = chemically synthesized
  source 1..22: mol_type = other DNA
ccccacctccaatttggcaact

SEQ ID NO: 42868 - DNA, 22 bp, synthetic construct
  misc_feature 1..22: note = chemically synthesized
  source 1..22: mol_type = other DNA
caatttggcaactttgcctcct

SEQ ID NO: 42869 - DNA, 22 bp, synthetic construct
  misc_feature 1..22: note = chemically synthesized
  source 1..22: mol_type = other DNA
ggcaactttgcctccttctcac

SEQ ID NO: 42870 - DNA, 22 bp, synthetic construct
  misc_feature 1..22: note = chemically synthesized
  source 1..22: mol_type = other DNA
gcaactttgcctccttctcaca

SEQ ID NO: 42871 - DNA, 22 bp, synthetic construct
  misc_feature 1..22: note = chemically synthesized
  source 1..22: mol_type = other DNA
tgcctccttctcacacaatgag

SEQ ID NO: 42872 - DNA, 22 bp, synthetic construct
  misc_feature 1..22: note = chemically synthesized
  source 1..22: mol_type = other DNA
gcctccttctcacacaatgaga

SEQ ID NO: 42873 - DNA, 22 bp, synthetic construct
  misc_feature 1..22: note = chemically synthesized
  source 1..22: mol_type = other DNA
cctccttctcacacaatgagaa

SEQ ID NO: 42874 - DNA, 22 bp, synthetic construct
  misc_feature 1..22: note = chemically synthesized
  source 1..22: mol_type = other DNA
cttctcacacaatgagaaagaa

SEQ ID NO: 42875 - DNA, 22 bp, synthetic construct
  misc_feature 1..22: note = chemically synthesized
  source 1..22: mol_type = other DNA
ctcacacaatgagaaagaacgg

SEQ ID NO: 42876 - DNA, 22 bp, synthetic construct
  misc_feature 1..22: note = chemically synthesized
  source 1..22: mol_type = other DNA
tcacacaatgagaaagaacgga

SEQ ID NO: 42877 - DNA, 22 bp, synthetic construct
  misc_feature 1..22: note = chemically synthesized
  source 1..22: mol_type = other DNA
acacaatgagaaagaacggata

SEQ ID NO: 42878 - DNA, 22 bp, synthetic construct
  misc_feature 1..22: note = chemically synthesized
  source 1..22: mol_type = other DNA
taagagttcactttctgcacat

SEQ ID NO: 42879 - DNA, 22 bp, synthetic construct
  misc_feature 1..22: note = chemically synthesized
  source 1..22: mol_type = other DNA
agagttcactttctgcacatat

SEQ ID NO: 42880 - DNA, 22 bp, synthetic construct
  misc_feature 1..22: note = chemically synthesized
  source 1..22: mol_type = other DNA
actttctgcacatatgtgtagt

SEQ ID NO: 42881 - DNA, 22 bp, synthetic construct
  misc_feature 1..22: note = chemically synthesized
  source 1..22: mol_type = other DNA
tctgcacatatgtgtagttaag

SEQ ID NO: 42882 - DNA, 22 bp, synthetic construct
  misc_feature 1..22: note = chemically synthesized
  source 1..22: mol_type = other DNA
ctgcacatatgtgtagttaagt

SEQ ID NO: 42883 - DNA, 22 bp, synthetic construct
  misc_feature 1..22: note = chemically synthesized
  source 1..22: mol_type = other DNA
tgcacatatgtgtagttaagta

SEQ ID NO: 42884 - DNA, 22 bp, synthetic construct
  misc_feature 1..22: note = chemically synthesized
  source 1..22: mol_type = other DNA
cacatatgtgtagttaagtact

SEQ ID NO: 42885 - DNA, 22 bp, synthetic construct
  misc_feature 1..22: note = chemically synthesized
  source 1..22: mol_type = other DNA
agtactgaagtgagaaattcaa

SEQ ID NO: 42886 - DNA, 22 bp, synthetic construct
  misc_feature 1..22: note = chemically synthesized
  source 1..22: mol_type = other DNA
aagtgagaaattcaagaaaact

SEQ ID NO: 42887 - DNA, 22 bp, synthetic construct
  misc_feature 1..22: note = chemically synthesized
  source 1..22: mol_type = other DNA
aagaaaactatacttaggcaca

SEQ ID NO: 42888 - DNA, 22 bp, synthetic construct
  misc_feature 1..22: note = chemically synthesized
  source 1..22: mol_type = other DNA
tacttaggcacacacacacaca

SEQ ID NO: 42889 - DNA, 22 bp, synthetic construct
  misc_feature 1..22: note = chemically synthesized
  source 1..22: mol_type = other DNA
aggcacacacacacacattttg

SEQ ID NO: 42890 - DNA, 22 bp, synthetic construct
  misc_feature 1..22: note = chemically synthesized
  source 1..22: mol_type = other DNA
ggcacacacacacacattttga

SEQ ID NO: 42891 - DNA, 22 bp, synthetic construct
  misc_feature 1..22: note = chemically synthesized
  source 1..22: mol_type = other DNA
tgagagataatttctaaagacc

SEQ ID NO: 42892 - DNA, 22 bp, synthetic construct
  misc_feature 1..22: note = chemically synthesized
  source 1..22: mol_type = other DNA
gagagataatttctaaagacct

SEQ ID NO: 42893 - DNA, 22 bp, synthetic construct
  misc_feature 1..22: note = chemically synthesized
  source 1..22: mol_type = other DNA
agagataatttctaaagaccta

SEQ ID NO: 42894 - DNA, 22 bp, synthetic construct
  misc_feature 1..22: note = chemically synthesized
  source 1..22: mol_type = other DNA
ctaaagacctaccaatctaaga

SEQ ID NO: 42895 - DNA, 22 bp, synthetic construct
  misc_feature 1..22: note = chemically synthesized
  source 1..22: mol_type = other DNA
taaagacctaccaatctaagat

SEQ ID NO: 42896 - DNA, 22 bp, synthetic construct
  misc_feature 1..22: note = chemically synthesized
  source 1..22: mol_type = other DNA
aagacctaccaatctaagatac

SEQ ID NO: 42897 - DNA, 22 bp, synthetic construct
  misc_feature 1..22: note = chemically synthesized
  source 1..22: mol_type = other DNA
ccaatctaagatactgaaagaa

SEQ ID NO: 42898 - DNA, 22 bp, synthetic construct
  misc_feature 1..22: note = chemically synthesized
  source 1..22: mol_type = other DNA
agatactgaaagaaaatggcta

SEQ ID NO: 42899 - DNA, 22 bp, synthetic construct
  misc_feature 1..22: note = chemically synthesized
  source 1..22: mol_type = other DNA
aaagaaaatggctacatcaggc

SEQ ID NO: 42900 - DNA, 22 bp, synthetic construct
  misc_feature 1..22: note = chemically synthesized
  source 1..22: mol_type = other DNA
catcaggcccagaaaagccttg

SEQ ID NO: 42901 - DNA, 22 bp, synthetic construct
  misc_feature 1..22: note = chemically synthesized
  source 1..22: mol_type = other DNA
gaaattttccctatccacagac

SEQ ID NO: 42902 - DNA, 22 bp, synthetic construct
  misc_feature 1..22: note = chemically synthesized
  source 1..22: mol_type = other DNA
aaattttccctatccacagacc

SEQ ID NO: 42903 - DNA, 22 bp, synthetic construct
  misc_feature 1..22: note = chemically synthesized
  source 1..22: mol_type = other DNA
tccctatccacagaccacagcc

SEQ ID NO: 42904 - DNA, 22 bp, synthetic construct
  misc_feature 1..22: note = chemically synthesized
  source 1..22: mol_type = other DNA
ccctatccacagaccacagccc

SEQ ID NO: 42905 - DNA, 22 bp, synthetic construct
  misc_feature 1..22: note = chemically synthesized
  source 1..22: mol_type = other DNA
cctatccacagaccacagccct

SEQ ID NO: 42906 - DNA, 22 bp, synthetic construct
  misc_feature 1..22: note = chemically synthesized
  source 1..22: mol_type = other DNA
tccacagaccacagccctgtga

SEQ ID NO: 42907 - DNA, 22 bp, synthetic construct
  misc_feature 1..22: note = chemically synthesized
  source 1..22: mol_type = other DNA
tgatggacatgagatcctctgg

SEQ ID NO: 42908 - DNA, 22 bp, synthetic construct
  misc_feature 1..22: note = chemically synthesized
  source 1..22: mol_type = other DNA
tggctttgagatgaataatgca

SEQ ID NO: 42909 - DNA, 22 bp, synthetic construct
  misc_feature 1..22: note = chemically synthesized
  source 1..22: mol_type = other DNA
gctttgagatgaataatgcaca

SEQ ID NO: 42910 - DNA, 22 bp, synthetic construct
  misc_feature 1..22: note = chemically synthesized
  source 1..22: mol_type = other DNA
tgagatgaataatgcacagaaa

SEQ ID NO: 42911 - DNA, 22 bp, synthetic construct
  misc_feature 1..22: note = chemically synthesized
  source 1..22: mol_type = other DNA
gagatgaataatgcacagaaat

SEQ ID NO: 42912 - DNA, 22 bp, synthetic construct
  misc_feature 1..22: note = chemically synthesized
  source 1..22: mol_type = other DNA
agatgaataatgcacagaaatg

SEQ ID NO: 42913 - DNA, 22 bp, synthetic construct
  misc_feature 1..22: note = chemically synthesized
  source 1..22: mol_type = other DNA
gctggcagattattaccagaca

SEQ ID NO: 42914 - DNA, 22 bp, synthetic construct
  misc_feature 1..22: note = chemically synthesized
  source 1..22: mol_type = other DNA
gcagattattaccagacatgtg

SEQ ID NO: 42915 - DNA, 22 bp, synthetic construct
  misc_feature 1..22: note = chemically synthesized
  source 1..22: mol_type = other DNA
ttaccagacatgtgaacatgcc

SEQ ID NO: 42916 - DNA, 22 bp, synthetic construct
  misc_feature 1..22: note = chemically synthesized
  source 1..22: mol_type = other DNA
ccagacatgtgaacatgccaac

SEQ ID NO: 42917 - DNA, 22 bp, synthetic construct
  misc_feature 1..22: note = chemically synthesized
  source 1..22: mol_type = other DNA
aacatcaggattgggcctgaaa

SEQ ID NO: 42918 - DNA, 22 bp, synthetic construct
  misc_feature 1..22: note = chemically synthesized
  source 1..22: mol_type = other DNA
ggcctgaaacttctctcaggaa

SEQ ID NO: 42919 - DNA, 22 bp, synthetic construct
  misc_feature 1..22: note = chemically synthesized
  source 1..22: mol_type = other DNA
aaacttctctcaggaaggcctt

SEQ ID NO: 42920 - DNA, 22 bp, synthetic construct
  misc_feature 1..22: note = chemically synthesized
  source 1..22: mol_type = other DNA
ctctcaggaaggccttgatagc

SEQ ID NO: 42921 - DNA, 22 bp, synthetic construct
  misc_feature 1..22: note = chemically synthesized
  source 1..22: mol_type = other DNA
tctcaggaaggccttgatagca

SEQ ID NO: 42922 - DNA, 22 bp, synthetic construct
  misc_feature 1..22: note = chemically synthesized
  source 1..22: mol_type = other DNA
tcaggaaggccttgatagcatt

SEQ ID NO: 42923 - DNA, 22 bp, synthetic construct
  misc_feature 1..22: note = chemically synthesized
  source 1..22: mol_type = other DNA
aggaaggccttgatagcattag

SEQ ID NO: 42924 - DNA, 22 bp, synthetic construct
  misc_feature 1..22: note = chemically synthesized
  source 1..22: mol_type = other DNA
gatagcattagatggttgacag

SEQ ID NO: 42925 - DNA, 22 bp, synthetic construct
  misc_feature 1..22: note = chemically synthesized
  source 1..22: mol_type = other DNA
atagcattagatggttgacaga

SEQ ID NO: 42926 - DNA, 22 bp, synthetic construct
  misc_feature 1..22: note = chemically synthesized
  source 1..22: mol_type = other DNA
gatggttgacagaggtattaca

SEQ ID NO: 42927 - DNA, 22 bp, synthetic construct
  misc_feature 1..22: note = chemically synthesized
  source 1..22: mol_type = other DNA
acagaggtattacagtgtgaca

SEQ ID NO: 42928 - DNA, 22 bp, synthetic construct
  misc_feature 1..22: note = chemically synthesized
  source 1..22: mol_type = other DNA
cagtgtgacagagtctgagccc

SEQ ID NO: 42929 - DNA, 22 bp, synthetic construct
  misc_feature 1..22: note = chemically synthesized
  source 1..22: mol_type = other DNA
agcccacagtctgagaatgacc

SEQ ID NO: 42930 - DNA, 22 bp, synthetic construct
  misc_feature 1..22: note = chemically synthesized
  source 1..22: mol_type = other DNA
agaatgaccacatcccttccca

SEQ ID NO: 42931 - DNA, 22 bp, synthetic construct
  misc_feature 1..22: note = chemically synthesized
  source 1..22: mol_type = other DNA
cccagggagacgttcccactca

SEQ ID NO: 42932 - DNA, 22 bp, synthetic construct
  misc_feature 1..22: note = chemically synthesized
  source 1..22: mol_type = other DNA
ccagggagacgttcccactcaa

SEQ ID NO: 42933 - DNA, 22 bp, synthetic construct
  misc_feature 1..22: note = chemically synthesized
  source 1..22: mol_type = other DNA
ccactcaacaccctgggaagac

SEQ ID NO: 42934 - DNA, 22 bp, synthetic construct
  misc_feature 1..22: note = chemically synthesized
  source 1..22: mol_type = other DNA
aacaccctgggaagactactgc

SEQ ID NO: 42935 - DNA, 22 bp, synthetic construct
  misc_feature 1..22: note = chemically synthesized
  source 1..22: mol_type = other DNA
ggaagactactgcgaatcactc

SEQ ID NO: 42936 - DNA, 22 bp, synthetic construct
  misc_feature 1..22: note = chemically synthesized
  source 1..22: mol_type = other DNA
ctgcgaatcactctgtctctca

SEQ ID NO: 42937 - DNA, 22 bp, synthetic construct
  misc_feature 1..22: note = chemically synthesized
  source 1..22: mol_type = other DNA
cgaatcactctgtctctcaaac

SEQ ID NO: 42938 - DNA, 22 bp, synthetic construct
  misc_feature 1..22: note = chemically synthesized
  source 1..22: mol_type = other DNA
tgtctctcaaacctggccatgg

SEQ ID NO: 42939 - DNA, 22 bp, synthetic construct
  misc_feature 1..22: note = chemically synthesized
  source 1..22: mol_type = other DNA
tctctcaaacctggccatggct

SEQ ID NO: 42940 - DNA, 22 bp, synthetic construct
  misc_feature 1..22: note = chemically synthesized
  source 1..22: mol_type = other DNA
tcaaacctggccatggctcagc

SEQ ID NO: 42941 - DNA, 22 bp, synthetic construct
  misc_feature 1..22: note = chemically synthesized
  source 1..22: mol_type = other DNA
aaacctggccatggctcagccc

SEQ ID NO: 42942 - DNA, 22 bp, synthetic construct
  misc_feature 1..22: note = chemically synthesized
  source 1..22: mol_type = other DNA
gccatggctcagcccacgccct

SEQ ID NO: 42943 - DNA, 22 bp, synthetic construct
  misc_feature 1..22: note = chemically synthesized
  source 1..22: mol_type = other DNA
agcccacgccctttcatgtatt

SEQ ID NO: 42944 - DNA, 22 bp, synthetic construct
  misc_feature 1..22: note = chemically synthesized
  source 1..22: mol_type = other DNA
tcatgtatttgcccttttccct

SEQ ID NO: 42945 - DNA, 22 bp, synthetic construct
  misc_feature 1..22: note = chemically synthesized
  source 1..22: mol_type = other DNA
catgtatttgcccttttccctg

SEQ ID NO: 42946 - DNA, 22 bp, synthetic construct
  misc_feature 1..22: note = chemically synthesized
  source 1..22: mol_type = other DNA
atgtatttgcccttttccctgc

SEQ ID NO: 42947 - DNA, 22 bp, synthetic construct
  misc_feature 1..22: note = chemically synthesized
  source 1..22: mol_type = other DNA
gcccttttccctgctaacagaa

SEQ ID NO: 42948 - DNA, 22 bp, synthetic construct
  misc_feature 1..22: note = chemically synthesized
  source 1..22: mol_type = other DNA
cccttttccctgctaacagaaa

SEQ ID NO: 42949 - DNA, 22 bp, synthetic construct
  misc_feature 1..22: note = chemically synthesized
  source 1..22: mol_type = other DNA
ttccctgctaacagaaatggaa

SEQ ID NO: 42950 - DNA, 22 bp, synthetic construct
  misc_feature 1..22: note = chemically synthesized
  source 1..22: mol_type = other DNA
tccctgctaacagaaatggaat

SEQ ID NO: 42951 - DNA, 22 bp, synthetic construct
  misc_feature 1..22: note = chemically synthesized
  source 1..22: mol_type = other DNA
ccctgctaacagaaatggaatc

SEQ ID NO: 42952 - DNA, 22 bp, synthetic construct
  misc_feature 1..22: note = chemically synthesized
  source 1..22: mol_type = other DNA
cctgctaacagaaatggaatca

SEQ ID NO: 42953 - DNA, 22 bp, synthetic construct
  misc_feature 1..22: note = chemically synthesized
  source 1..22: mol_type = other DNA
ctaacagaaatggaatcagaac

SEQ ID NO: 42954 - DNA, 22 bp, synthetic construct
  misc_feature 1..22: note = chemically synthesized
  source 1..22: mol_type = other DNA
acagaaatggaatcagaacaaa

SEQ ID NO: 42955 - DNA, 22 bp, synthetic construct
  misc_feature 1..22: note = chemically synthesized
  source 1..22: mol_type = other DNA
atatttaattttaagattacta

SEQ ID NO: 42956 - DNA, 22 bp, synthetic construct
  misc_feature 1..22: note = chemically synthesized
  source 1..22: mol_type = other DNA
aattttaagattactattctat

SEQ ID NO: 42957 - DNA, 22 bp, synthetic construct
  misc_feature 1..22: note = chemically synthesized
  source 1..22: mol_type = other DNA
attttaagattactattctatc

SEQ ID NO: 42958 - DNA, 22 bp, synthetic construct
  misc_feature 1..22: note = chemically synthesized
  source 1..22: mol_type = other DNA
taagattactattctatcagaa

SEQ ID NO: 42959 - DNA, 22 bp, synthetic construct
  misc_feature 1..22: note = chemically synthesized
  source 1..22: mol_type = other DNA
aagattactattctatcagaat

SEQ ID NO: 42960 - DNA, 22 bp, synthetic construct
  misc_feature 1..22: note = chemically synthesized
  source 1..22: mol_type = other DNA
agattactattctatcagaata

SEQ ID NO: 42961 - DNA, 22 bp, synthetic construct
  misc_feature 1..22: note = chemically synthesized
  source 1..22: mol_type = other DNA
ctattctatcagaataaaaaag

SEQ ID NO: 42962 - DNA, 22 bp, synthetic construct
  misc_feature 1..22: note = chemically synthesized
  source 1..22: mol_type = other DNA
ttctatcagaataaaaaagact

SEQ ID NO: 42963 - DNA, 22 bp, synthetic construct
  misc_feature 1..22: note = chemically synthesized
  source 1..22: mol_type = other DNA
tatcagaataaaaaagactcgg

SEQ ID NO: 42964 - DNA, 22 bp, synthetic construct
  misc_feature 1..22: note = chemically synthesized
  source 1..22: mol_type = other DNA
tcagaataaaaaagactcggga

SEQ ID NO: 42965 - DNA, 22 bp, synthetic construct
  misc_feature 1..22: note = chemically synthesized
  source 1..22: mol_type = other DNA
gggagattcaaagcgaaggcaa

SEQ ID NO: 42966 - DNA, 22 bp, synthetic construct
  misc_feature 1..22: note = chemically synthesized
  source 1..22: mol_type = other DNA
aaagcgaaggcaaatgcccctc

SEQ ID NO: 42967 - DNA, 22 bp, synthetic construct
  misc_feature 1..22: note = chemically synthesized
  source 1..22: mol_type = other DNA
ctttaagtctaacgttgctatt

SEQ ID NO: 42968 - DNA, 22 bp, synthetic construct
  misc_feature 1..22: note = chemically synthesized
  source 1..22: mol_type = other DNA
taagtctaacgttgctattcag

SEQ ID NO: 42969 - DNA, 22 bp, synthetic construct
  misc_feature 1..22: note = chemically synthesized
  source 1..22: mol_type = other DNA
aagtctaacgttgctattcagg

SEQ ID NO: 42970 - DNA, 22 bp, synthetic construct
  misc_feature 1..22: note = chemically synthesized
  source 1..22: mol_type = other DNA
agtctaacgttgctattcaggc

SEQ ID NO: 42971 - DNA, 22 bp, synthetic construct
  misc_feature 1..22: note = chemically synthesized
  source 1..22: mol_type = other DNA
acgttgctattcaggcatttag

SEQ ID NO: 42972 - DNA, 22 bp, synthetic construct
  misc_feature 1..22: note = chemically synthesized
  source 1..22: mol_type = other DNA
ctattcaggcatttaggagcgc

SEQ ID NO: 42973 - DNA, 22 bp, synthetic construct
  misc_feature 1..22: note = chemically synthesized
  source 1..22: mol_type = other DNA
ttcaggcatttaggagcgctag

SEQ ID NO: 42974 - DNA, 22 bp, synthetic construct
  misc_feature 1..22: note = chemically synthesized
  source 1..22: mol_type = other DNA
aggcatttaggagcgctagaca

SEQ ID NO: 42975 - DNA, 22 bp, synthetic construct
  misc_feature 1..22: note = chemically synthesized
  source 1..22: mol_type = other DNA
aggagcgctagacacagtgagt

SEQ ID NO: 42976 - DNA, 22 bp, synthetic construct
  misc_feature 1..22: note = chemically synthesized
  source 1..22: mol_type = other DNA
ggagcgctagacacagtgagtt

SEQ ID NO: 42977 - DNA, 22 bp, synthetic construct
  misc_feature 1..22: note = chemically synthesized
  source 1..22: mol_type = other DNA
gacacagtgagtttccctgcct

SEQ ID NO: 42978 - DNA, 22 bp, synthetic construct
  misc_feature 1..22: note = chemically synthesized
  source 1..22: mol_type = other DNA
ccctgcctccaacctgtgattt

SEQ ID NO: 42979 - DNA, 22 bp, synthetic construct
  misc_feature 1..22: note = chemically synthesized
  source 1..22: mol_type = other DNA
cctgcctccaacctgtgatttg

SEQ ID NO: 42980 - DNA, 22 bp, synthetic construct
  misc_feature 1..22: note = chemically synthesized
  source 1..22: mol_type = other DNA
cctccaacctgtgatttgccac

SEQ ID NO: 42981 - DNA, 22 bp, synthetic construct
  misc_feature 1..22: note = chemically synthesized
  source 1..22: mol_type = other DNA
caacctgtgatttgccacaagg

SEQ ID NO: 42982 - DNA, 22 bp, synthetic construct
  misc_feature 1..22: note = chemically synthesized
  source 1..22: mol_type = other DNA
tgatttgccacaaggcaggaag

SEQ ID NO: 42983 - DNA, 22 bp, synthetic construct
  misc_feature 1..22: note = chemically synthesized
  source 1..22: mol_type = other DNA
gccacaaggcaggaaggggaag

SEQ ID NO: 42984 - DNA, 22 bp, synthetic construct
  misc_feature 1..22: note = chemically synthesized
  source 1..22: mol_type = other DNA
ccacaaggcaggaaggggaagg

SEQ ID NO: 42985 - DNA, 22 bp, synthetic construct
  misc_feature 1..22: note = chemically synthesized
  source 1..22: mol_type = other DNA
agtgtgtgaagttctaaccttt

SEQ ID NO: 42986 - DNA, 22 bp, synthetic construct
  misc_feature 1..22: note = chemically synthesized
  source 1..22: mol_type = other DNA
taaccttttacccatgtaatga

SEQ ID NO: 42987 - DNA, 22 bp, synthetic construct
  misc_feature 1..22: note = chemically synthesized
  source 1..22: mol_type = other DNA
accttttacccatgtaatgatc

SEQ ID NO: 42988 - DNA, 22 bp, synthetic construct
  misc_feature 1..22: note = chemically synthesized
  source 1..22: mol_type = other DNA
ttacccatgtaatgatctagtt

SEQ ID NO: 42989 - DNA, 22 bp, synthetic construct
  misc_feature 1..22: note = chemically synthesized
  source 1..22: mol_type = other DNA
tacccatgtaatgatctagtta

SEQ ID NO: 42990 - DNA, 22 bp, synthetic construct
  misc_feature 1..22: note = chemically synthesized
  source 1..22: mol_type = other DNA
acccatgtaatgatctagttaa

SEQ ID NO: 42991 - DNA, 22 bp, synthetic construct
  misc_feature 1..22: note = chemically synthesized
  source 1..22: mol_type = other DNA
cccatgtaatgatctagttaat

SEQ ID NO: 42992 - DNA, 22 bp, synthetic construct
  misc_feature 1..22: note = chemically synthesized
  source 1..22: mol_type = other DNA
gttaatgtaatattttgccttt

SEQ ID NO: 42993 - DNA, 22 bp, synthetic construct
  misc_feature 1..22: note = chemically synthesized
  source 1..22: mol_type = other DNA
atgtaatattttgcctttaatc

SEQ ID NO: 42994 - DNA, 22 bp, synthetic construct
  misc_feature 1..22: note = chemically synthesized
  source 1..22: mol_type = other DNA
tgcctttaatcaatgaaagagt

SEQ ID NO: 42995 - DNA, 22 bp, synthetic construct
  misc_feature 1..22: note = chemically synthesized
  source 1..22: mol_type = other DNA
gcctttaatcaatgaaagagta

SEQ ID NO: 42996 - DNA, 22 bp, synthetic construct
  misc_feature 1..22: note = chemically synthesized
  source 1..22: mol_type = other DNA
cctttaatcaatgaaagagtaa

SEQ ID NO: 42997 - DNA, 22 bp, synthetic construct
  misc_feature 1..22: note = chemically synthesized
  source 1..22: mol_type = other DNA
taatcaatgaaagagtaagata

SEQ ID NO: 42998 - DNA, 22 bp, synthetic construct
  misc_feature 1..22: note = chemically synthesized
  source 1..22: mol_type = other DNA
aatcaatgaaagagtaagataa

SEQ ID NO: 42999 - DNA, 22 bp, synthetic construct
  misc_feature 1..22: note = chemically synthesized
  source 1..22: mol_type = other DNA
atcaatgaaagagtaagataat

SEQ ID NO: 43000 - DNA, 22 bp, synthetic construct
  misc_feature 1..22: note = chemically synthesized
  source 1..22: mol_type = other DNA
gatatcctataaaactccctaa

SEQ ID NO: 43001 - DNA, 22 bp, synthetic construct
  misc_feature 1..22: note = chemically synthesized
  source 1..22: mol_type = other DNA
atatcctataaaactccctaac

SEQ ID NO: 43002 - DNA, 22 bp, synthetic construct
  misc_feature 1..22: note = chemically synthesized
  source 1..22: mol_type = other DNA
taaaactccctaacctatattt

SEQ ID NO: 43003 - DNA, 22 bp, synthetic construct
  misc_feature 1..22: note = chemically synthesized
  source 1..22: mol_type = other DNA
cctaacctatattttgcaagtc

SEQ ID NO: 43004 - DNA, 22 bp, synthetic construct
  misc_feature 1..22: note = chemically synthesized
  source 1..22: mol_type = other DNA
acctatattttgcaagtcgatt

SEQ ID NO: 43005 - DNA, 22 bp, synthetic construct
  misc_feature 1..22: note = chemically synthesized
  source 1..22: mol_type = other DNA
tattttgcaagtcgattagcta

SEQ ID NO: 43006 - DNA, 22 bp, synthetic construct
  misc_feature 1..22: note = chemically synthesized
  source 1..22: mol_type = other DNA
tgcaagtcgattagctaagctc

SEQ ID NO: 43007 - DNA, 22 bp, synthetic construct
  misc_feature 1..22: note = chemically synthesized
  source 1..22: mol_type = other DNA
gcaagtcgattagctaagctct

SEQ ID NO: 43008 - DNA, 22 bp, synthetic construct
  misc_feature 1..22: note = chemically synthesized
  source 1..22: mol_type = other DNA
caagtcgattagctaagctctt

SEQ ID NO: 43009 - DNA, 22 bp, synthetic construct
  misc_feature 1..22: note = chemically synthesized
  source 1..22: mol_type = other DNA
gctaagctcttcatgctaatgt

SEQ ID NO: 43010 - DNA, 22 bp, synthetic construct
  misc_feature 1..22: note = chemically synthesized
  source 1..22: mol_type = other DNA
agctcttcatgctaatgtcagc

SEQ ID NO: 43011 - DNA, 22 bp, synthetic construct
  misc_feature 1..22: note = chemically synthesized
  source 1..22: mol_type = other DNA
ttcatgctaatgtcagcagagc

SEQ ID NO: 43012 - DNA, 22 bp, synthetic construct
  misc_feature 1..22: note = chemically synthesized
  source 1..22: mol_type = other DNA
catgctaatgtcagcagagccc

SEQ ID NO: 43013 - DNA, 22 bp, synthetic construct
  misc_feature 1..22: note = chemically synthesized
  source 1..22: mol_type = other DNA
atgctaatgtcagcagagccca

SEQ ID NO: 43014 - DNA, 22 bp, synthetic construct
  misc_feature 1..22: note = chemically synthesized
  source 1..22: mol_type = other DNA
atgtcagcagagcccatgttac

SEQ ID NO: 43015 - DNA, 22 bp, synthetic construct
  misc_feature 1..22: note = chemically synthesized
  source 1..22: mol_type = other DNA
catctccagtcaggctttcagg

SEQ ID NO: 43016 - DNA, 22 bp, synthetic construct
  misc_feature 1..22: note = chemically synthesized
  source 1..22: mol_type = other DNA
cagtcaggctttcaggtgtctg

SEQ ID NO: 43017 - DNA, 22 bp, synthetic construct
  misc_feature 1..22: note = chemically synthesized
  source 1..22: mol_type = other DNA
tcaggtgtctgcaccccacaat

SEQ ID NO: 43018 - DNA, 22 bp, synthetic construct
  misc_feature 1..22: note = chemically synthesized
  source 1..22: mol_type = other DNA
caggtgtctgcaccccacaatg

SEQ ID NO: 43019 - DNA, 22 bp, synthetic construct
  misc_feature 1..22: note = chemically synthesized
  source 1..22: mol_type = other DNA
aggtgtctgcaccccacaatgc

SEQ ID NO: 43020 - DNA, 22 bp, synthetic construct
  misc_feature 1..22: note = chemically synthesized
  source 1..22: mol_type = other DNA
caccccacaatgccacacaccg

SEQ ID NO: 43021 - DNA, 22 bp, synthetic construct
  misc_feature 1..22: note = chemically synthesized
  source 1..22: mol_type = other DNA
agcagggggagcagtgtagtgg

SEQ ID NO: 43022 - DNA, 22 bp, synthetic construct
  misc_feature 1..22: note = chemically synthesized
  source 1..22: mol_type = other DNA
cgttttcgtcatctgtatggaa

SEQ ID NO: 43023 - DNA, 22 bp, synthetic construct
  misc_feature 1..22: note = chemically synthesized
  source 1..22: mol_type = other DNA
tcgtcatctgtatggaaattgg

SEQ ID NO: 43024 - DNA, 22 bp, synthetic construct
  misc_feature 1..22: note = chemically synthesized
  source 1..22: mol_type = other DNA
cgtcatctgtatggaaattggg

SEQ ID NO: 43025 - DNA, 22 bp, synthetic construct
  misc_feature 1..22: note = chemically synthesized
  source 1..22: mol_type = other DNA
gtcatctgtatggaaattggga

SEQ ID NO: 43026 - DNA, 22 bp, synthetic construct
  misc_feature 1..22: note = chemically synthesized
  source 1..22: mol_type = other DNA
tatggaaattgggaaatcgtct

SEQ ID NO: 43027 - DNA, 22 bp, synthetic construct
  misc_feature 1..22: note = chemically synthesized
  source 1..22: mol_type = other DNA
ggaaatcgtcttctcaaatgta

SEQ ID NO: 43028 - DNA, 22 bp, synthetic construct
  misc_feature 1..22: note = chemically synthesized
  source 1..22: mol_type = other DNA
ctcaaatgtagattatcttccc

SEQ ID NO: 43029 - DNA, 22 bp, synthetic construct
  misc_feature 1..22: note = chemically synthesized
  source 1..22: mol_type = other DNA
tcaaatgtagattatcttccct

SEQ ID NO: 43030 - DNA, 22 bp, synthetic construct
  misc_feature 1..22: note = chemically synthesized
  source 1..22: mol_type = other DNA
aaatgtagattatcttcccttg

SEQ ID NO: 43031 - DNA, 22 bp, synthetic construct
  misc_feature 1..22: note = chemically synthesized
  source 1..22: mol_type = other DNA
tcttcccttgggatccttctgg

SEQ ID NO: 43032 - DNA, 22 bp, synthetic construct
  misc_feature 1..22: note = chemically synthesized
  source 1..22: mol_type = other DNA
cccttgggatccttctggaggg

SEQ ID NO: 43033 - DNA, 22 bp, synthetic construct
  misc_feature 1..22: note = chemically synthesized
  source 1..22: mol_type = other DNA
ccttgggatccttctggagggc

SEQ ID NO: 43034 - DNA, 22 bp, synthetic construct
  misc_feature 1..22: note = chemically synthesized
  source 1..22: mol_type = other DNA
gggatccttctggagggctata

SEQ ID NO: 43035 - DNA, 22 bp, synthetic construct
  misc_feature 1..22: note = chemically synthesized
  source 1..22: mol_type = other DNA
ggatccttctggagggctataa

SEQ ID NO: 43036 - DNA, 22 bp, synthetic construct
  misc_feature 1..22: note = chemically synthesized
  source 1..22: mol_type = other DNA
ctggagggctataaataataga

SEQ ID NO: 43037 - DNA, 22 bp, synthetic construct
  misc_feature 1..22: note = chemically synthesized
  source 1..22: mol_type = other DNA
tggagggctataaataatagaa

SEQ ID NO: 43038 - DNA, 22 bp, synthetic construct
  misc_feature 1..22: note = chemically synthesized
  source 1..22: mol_type = other DNA
gagggctataaataatagaaca

SEQ ID NO: 43039 - DNA, 22 bp, synthetic construct
  misc_feature 1..22: note = chemically synthesized
  source 1..22: mol_type = other DNA
taaataatagaacatactaatc

SEQ ID NO: 43040 - DNA, 22 bp, synthetic construct
  misc_feature 1..22: note = chemically synthesized
  source 1..22: mol_type = other DNA
atcaacattagatatttaaaaa

SEQ ID NO: 43041 - DNA, 22 bp, synthetic construct
  misc_feature 1..22: note = chemically synthesized
  source 1..22: mol_type = other DNA
gatatttaaaaatgaatacaga

SEQ ID NO: 43042 - DNA, 22 bp, synthetic construct
  misc_feature 1..22: note = chemically synthesized
  source 1..22: mol_type = other DNA
aaaaatgaatacagattcagat

SEQ ID NO: 43043 - DNA, 22 bp, synthetic construct
  misc_feature 1..22: note = chemically synthesized
  source 1..22: mol_type = other DNA
aaaatgaatacagattcagatt

SEQ ID NO: 43044 - DNA, 22 bp, synthetic construct
  misc_feature 1..22: note = chemically synthesized
  source 1..22: mol_type = other DNA
agattaagggaaaactaaatga

SEQ ID NO: 43045 - DNA, 22 bp, synthetic construct
  misc_feature 1..22: note = chemically synthesized
  source 1..22: mol_type = other DNA
agggaaaactaaatgatgcctt

SEQ ID NO: 43046 - DNA, 22 bp, synthetic construct
  misc_feature 1..22: note = chemically synthesized
  source 1..22: mol_type = other DNA
aatgatgcctttataaaatcca

SEQ ID NO: 43047 - DNA, 22 bp, synthetic construct
  misc_feature 1..22: note = chemically synthesized
  source 1..22: mol_type = other DNA
tataaaatccagaacaaaacaa

SEQ ID NO: 43048 - DNA, 22 bp, synthetic construct
  misc_feature 1..22: note = chemically synthesized
  source 1..22: mol_type = other DNA
ataaaatccagaacaaaacaaa

SEQ ID NO: 43049 - DNA, 22 bp, synthetic construct
  misc_feature 1..22: note = chemically synthesized
  source 1..22: mol_type = other DNA
taaaatccagaacaaaacaaaa

SEQ ID NO: 43050 - DNA, 22 bp, synthetic construct
  misc_feature 1..22: note = chemically synthesized
  source 1..22: mol_type = other DNA
agcggatcccccttaagttagc

SEQ ID NO: 43051 - DNA, 22 bp, synthetic construct
  misc_feature 1..22: note = chemically synthesized
  source 1..22: mol_type = other DNA
gcggatcccccttaagttagcc

SEQ ID NO: 43052 - DNA, 22 bp, synthetic construct
  misc_feature 1..22: note = chemically synthesized
  source 1..22: mol_type = other DNA
aagttagccctattctctggca

SEQ ID NO: 43053 - DNA, 22 bp, synthetic construct
  misc_feature 1..22: note = chemically synthesized
  source 1..22: mol_type = other DNA
agttagccctattctctggcaa

SEQ ID NO: 43054 - DNA, 22 bp, synthetic construct
  misc_feature 1..22: note = chemically synthesized
  source 1..22: mol_type = other DNA
gccctattctctggcaaccaca

SEQ ID NO: 43055 - DNA, 22 bp, synthetic construct
  misc_feature 1..22: note = chemically synthesized
  source 1..22: mol_type = other DNA
ttctctggcaaccacaccagcc

SEQ ID NO: 43056 - DNA, 22 bp, synthetic construct
  misc_feature 1..22: note = chemically synthesized
  source 1..22: mol_type = other DNA
tctggcaaccacaccagccttt

SEQ ID NO: 43057 - DNA, 22 bp, synthetic construct
  misc_feature 1..22: note = chemically synthesized
  source 1..22: mol_type = other DNA
tggcaaccacaccagcctttaa

SEQ ID NO: 43058 - DNA, 22 bp, synthetic construct
  misc_feature 1..22: note = chemically synthesized
  source 1..22: mol_type = other DNA
gcaaccacaccagcctttaacg

SEQ ID NO: 43059 - DNA, 22 bp, synthetic construct
  misc_feature 1..22: note = chemically synthesized
  source 1..22: mol_type = other DNA
taacgagggtgttcaaagtaac

SEQ ID NO: 43060 - DNA, 22 bp, synthetic construct
  misc_feature 1..22: note = chemically synthesized
  source 1..22: mol_type = other DNA
aacgagggtgttcaaagtaacc

SEQ ID NO: 43061 - DNA, 22 bp, synthetic construct
  misc_feature 1..22: note = chemically synthesized
  source 1..22: mol_type = other DNA
acgagggtgttcaaagtaacca

SEQ ID NO: 43062 - DNA, 22 bp, synthetic construct
  misc_feature 1..22: note = chemically synthesized
  source 1..22: mol_type = other DNA
aaagtaaccatttcccactccc

SEQ ID NO: 43063 - DNA, 22 bp, synthetic construct
  misc_feature 1..22: note = chemically synthesized
  source 1..22: mol_type = other DNA
cccactcccttatttatgagca

SEQ ID NO: 43064 - DNA, 22 bp, synthetic construct
  misc_feature 1..22: note = chemically synthesized
  source 1..22: mol_type = other DNA
ccactcccttatttatgagcag

SEQ ID NO: 43065 - DNA, 22 bp, synthetic construct
  misc_feature 1..22: note = chemically synthesized
  source 1..22: mol_type = other DNA
ccttatttatgagcagcagaat

SEQ ID NO: 43066 - DNA, 22 bp, synthetic construct
  misc_feature 1..22: note = chemically synthesized
  source 1..22: mol_type = other DNA
atttatgagcagcagaatgtaa

SEQ ID NO: 43067 - DNA, 22 bp, synthetic construct
  misc_feature 1..22: note = chemically synthesized
  source 1..22: mol_type = other DNA
tttatgagcagcagaatgtaaa

SEQ ID NO: 43068 - DNA, 22 bp, synthetic construct
  misc_feature 1..22: note = chemically synthesized
  source 1..22: mol_type = other DNA
atgagcagcagaatgtaaaaag

SEQ ID NO: 43069 - DNA, 22 bp, synthetic construct
  misc_feature 1..22: note = chemically synthesized
  source 1..22: mol_type = other DNA
tgagcagcagaatgtaaaaagc

SEQ ID NO: 43070 - DNA, 22 bp, synthetic construct
  misc_feature 1..22: note = chemically synthesized
  source 1..22: mol_type = other DNA
aattttaatgcggtaattttct

SEQ ID NO: 43071 - DNA, 22 bp, synthetic construct
  misc_feature 1..22: note = chemically synthesized
  source 1..22: mol_type = other DNA
attttaatgcggtaattttctc

SEQ ID NO: 43072 - DNA, 22 bp, synthetic construct
  misc_feature 1..22: note = chemically synthesized
  source 1..22: mol_type = other DNA
taatgcggtaattttctcatca

SEQ ID NO: 43073 - DNA, 22 bp, synthetic construct
  misc_feature 1..22: note = chemically synthesized
  source 1..22: mol_type = other DNA
aatgcggtaattttctcatcaa

SEQ ID NO: 43074 - DNA, 22 bp, synthetic construct
  misc_feature 1..22: note = chemically synthesized
  source 1..22: mol_type = other DNA
atgcggtaattttctcatcaac

SEQ ID NO: 43075 - DNA, 22 bp, synthetic construct
  misc_feature 1..22: note = chemically synthesized
  source 1..22: mol_type = other DNA
tctcatcaaccattctatctaa

SEQ ID NO: 43076 - DNA, 22 bp, synthetic construct
  misc_feature 1..22: note = chemically synthesized
  source 1..22: mol_type = other DNA
ctcatcaaccattctatctaag

SEQ ID NO: 43077 - DNA, 22 bp, synthetic construct
  misc_feature 1..22: note = chemically synthesized
  source 1..22: mol_type = other DNA
tcatcaaccattctatctaagg

SEQ ID NO: 43078 - DNA, 22 bp, synthetic construct
  misc_feature 1..22: note = chemically synthesized
  source 1..22: mol_type = other DNA
atcaaccattctatctaaggaa

SEQ ID NO: 43079 - DNA, 22 bp, synthetic construct
  misc_feature 1..22: note = chemically synthesized
  source 1..22: mol_type = other DNA
tatctaaggaagctgcagaaag

SEQ ID NO: 43080 - DNA, 22 bp, synthetic construct
  misc_feature 1..22: note = chemically synthesized
  source 1..22: mol_type = other DNA
tctaaggaagctgcagaaaggt

SEQ ID NO: 43081 - DNA, 22 bp, synthetic construct
  misc_feature 1..22: note = chemically synthesized
  source 1..22: mol_type = other DNA
aggaagctgcagaaaggtgaaa

SEQ ID NO: 43082 - DNA, 22 bp, synthetic construct
  misc_feature 1..22: note = chemically synthesized
  source 1..22: mol_type = other DNA
cagaaaggtgaaaactggaaat

SEQ ID NO: 43083 - DNA, 22 bp, synthetic construct
  misc_feature 1..22: note = chemically synthesized
  source 1..22: mol_type = other DNA
gaaatttatgaacctttaatgg

SEQ ID NO: 43084 - DNA, 22 bp, synthetic construct
  misc_feature 1..22: note = chemically synthesized
  source 1..22: mol_type = other DNA
atgaacctttaatgggaaatct

SEQ ID NO: 43085 - DNA, 22 bp, synthetic construct
  misc_feature 1..22: note = chemically synthesized
  source 1..22: mol_type = other DNA
tgaacctttaatgggaaatctg

SEQ ID NO: 43086 - DNA, 22 bp, synthetic construct
  misc_feature 1..22: note = chemically synthesized
  source 1..22: mol_type = other DNA
taatgggaaatctggataagaa

SEQ ID NO: 43087 - DNA, 22 bp, synthetic construct
  misc_feature 1..22: note = chemically synthesized
  source 1..22: mol_type = other DNA
aatgggaaatctggataagaat

SEQ ID NO: 43088 - DNA, 22 bp, synthetic construct
  misc_feature 1..22: note = chemically synthesized
  source 1..22: mol_type = other DNA
atgggaaatctggataagaatt

SEQ ID NO: 43089 - DNA, 22 bp, synthetic construct
  misc_feature 1..22: note = chemically synthesized
  source 1..22: mol_type = other DNA
gataagaatttggtctaaatat

SEQ ID NO: 43090 - DNA, 22 bp, synthetic construct
  misc_feature 1..22: note = chemically synthesized
  source 1..22: mol_type = other DNA
ggtctaaatatatgaagaggaa

SEQ ID NO: 43091 - DNA, 22 bp, synthetic construct
  misc_feature 1..22: note = chemically synthesized
  source 1..22: mol_type = other DNA
gtctaaatatatgaagaggaac

SEQ ID NO: 43092 - DNA, 22 bp, synthetic construct
  misc_feature 1..22: note = chemically synthesized
  source 1..22: mol_type = other DNA
aatatatgaagaggaacatgga

SEQ ID NO: 43093 - DNA, 22 bp, synthetic construct
  misc_feature 1..22: note = chemically synthesized
  source 1..22: mol_type = other DNA
gcacaaacacaaaatgcaagta

SEQ ID NO: 43094 - DNA, 22 bp, synthetic construct
  misc_feature 1..22: note = chemically synthesized
  source 1..22: mol_type = other DNA
caactccagctccctgataaca

SEQ ID NO: 43095 - DNA, 22 bp, synthetic construct
  misc_feature 1..22: note = chemically synthesized
  source 1..22: mol_type = other DNA
cagctccctgataacatctgcc

SEQ ID NO: 43096 - DNA, 22 bp, synthetic construct
  misc_feature 1..22: note = chemically synthesized
  source 1..22: mol_type = other DNA
cctgataacatctgccactaaa

SEQ ID NO: 43097 - DNA, 22 bp, synthetic construct
  misc_feature 1..22: note = chemically synthesized
  source 1..22: mol_type = other DNA
ataacatctgccactaaaggtt

SEQ ID NO: 43098 - DNA, 22 bp, synthetic construct
  misc_feature 1..22: note = chemically synthesized
  source 1..22: mol_type = other DNA
ccactaaaggtttactgacttg

SEQ ID NO: 43099 - DNA, 22 bp, synthetic construct
  misc_feature 1..22: note = chemically synthesized
  source 1..22: mol_type = other DNA
aaggtttactgacttggttttc

SEQ ID NO: 43100 - DNA, 22 bp, synthetic construct
  misc_feature 1..22: note = chemically synthesized
  source 1..22: mol_type = other DNA
actgacttggttttcccaactc

SEQ ID NO: 43101 - DNA, 22 bp, synthetic construct
  misc_feature 1..22: note = chemically synthesized
  source 1..22: mol_type = other DNA
ctgacttggttttcccaactct

SEQ ID NO: 43102 - DNA, 22 bp, synthetic construct
  misc_feature 1..22: note = chemically synthesized
  source 1..22: mol_type = other DNA
acttggttttcccaactctaga

SEQ ID NO: 43103 - DNA, 22 bp, synthetic construct
  misc_feature 1..22: note = chemically synthesized
  source 1..22: mol_type = other DNA
ggttttcccaactctagaatgg

SEQ ID NO: 43104 - DNA, 22 bp, synthetic construct
  misc_feature 1..22: note = chemically synthesized
  source 1..22: mol_type = other DNA
gttttcccaactctagaatgga

SEQ ID NO: 43105 - DNA, 22 bp, synthetic construct
  misc_feature 1..22: note = chemically synthesized
  source 1..22: mol_type = other DNA
tcccaactctagaatggagccc

SEQ ID NO: 43106 - DNA, 22 bp, synthetic construct
  misc_feature 1..22: note = chemically synthesized
  source 1..22: mol_type = other DNA
cccaactctagaatggagccct

SEQ ID NO: 43107 - DNA, 22 bp, synthetic construct
  misc_feature 1..22: note = chemically synthesized
  source 1..22: mol_type = other DNA
ccaactctagaatggagccctc

SEQ ID NO: 43108 - DNA, 22 bp, synthetic construct
  misc_feature 1..22: note = chemically synthesized
  source 1..22: mol_type = other DNA
tagaatggagccctcatctaaa

SEQ ID NO: 43109 - DNA, 22 bp, synthetic construct
  misc_feature 1..22: note = chemically synthesized
  source 1..22: mol_type = other DNA
gaatggagccctcatctaaacc

SEQ ID NO: 43110 - DNA, 22 bp, synthetic construct
  misc_feature 1..22: note = chemically synthesized
  source 1..22: mol_type = other DNA
atctaaacctggggaagcaata

SEQ ID NO: 43111 - DNA, 22 bp, synthetic construct
  misc_feature 1..22: note = chemically synthesized
  source 1..22: mol_type = other DNA
aacctggggaagcaatatatga

SEQ ID NO: 43112 - DNA, 22 bp, synthetic construct
  misc_feature 1..22: note = chemically synthesized
  source 1..22: mol_type = other DNA
gggaagcaatatatgaacaatt

SEQ ID NO: 43113 - DNA, 22 bp, synthetic construct
  misc_feature 1..22: note = chemically synthesized
  source 1..22: mol_type = other DNA
gatattaaatgcttatagatcc

SEQ ID NO: 43114 - DNA, 22 bp, synthetic construct
  misc_feature 1..22: note = chemically synthesized
  source 1..22: mol_type = other DNA
aatgcttatagatccctctctg

SEQ ID NO: 43115 - DNA, 22 bp, synthetic construct
  misc_feature 1..22: note = chemically synthesized
  source 1..22: mol_type = other DNA
atagatccctctctgtgctatt

SEQ ID NO: 43116 - DNA, 22 bp, synthetic construct
  misc_feature 1..22: note = chemically synthesized
  source 1..22: mol_type = other DNA
tagatccctctctgtgctatta

SEQ ID NO: 43117 - DNA, 22 bp, synthetic construct
  misc_feature 1..22: note = chemically synthesized
  source 1..22: mol_type = other DNA
tctgtgctattacttttgacct

SEQ ID NO: 43118 - DNA, 22 bp, synthetic construct
  misc_feature 1..22: note = chemically synthesized
  source 1..22: mol_type = other DNA
tgtgctattacttttgacctgg

SEQ ID NO: 43119 - DNA, 22 bp, synthetic construct
  misc_feature 1..22: note = chemically synthesized
  source 1..22: mol_type = other DNA
tgctattacttttgacctgggt

SEQ ID NO: 43120 - DNA, 22 bp, synthetic construct
  misc_feature 1..22: note = chemically synthesized
  source 1..22: mol_type = other DNA
ttacttttgacctgggttttaa

SEQ ID NO: 43121 - DNA, 22 bp, synthetic construct
  misc_feature 1..22: note = chemically synthesized
  source 1..22: mol_type = other DNA
cttttgacctgggttttaaaaa

SEQ ID NO: 43122 - DNA, 22 bp, synthetic construct
  misc_feature 1..22: note = chemically synthesized
  source 1..22: mol_type = other DNA
ttgacctgggttttaaaaacac

SEQ ID NO: 43123 - DNA, 22 bp, synthetic construct
  misc_feature 1..22: note = chemically synthesized
  source 1..22: mol_type = other DNA
tgacctgggttttaaaaacaca

SEQ ID NO: 43124 - DNA, 22 bp, synthetic construct
  misc_feature 1..22: note = chemically synthesized
  source 1..22: mol_type = other DNA
gacctgggttttaaaaacacag

SEQ ID NO: 43125 - DNA, 22 bp, synthetic construct
  misc_feature 1..22: note = chemically synthesized
  source 1..22: mol_type = other DNA
acctgggttttaaaaacacagt

SEQ ID NO: 43126 - DNA, 22 bp, synthetic construct
  misc_feature 1..22: note = chemically synthesized
  source 1..22: mol_type = other DNA
ggttttaaaaacacagtaacac

SEQ ID NO: 43127 - DNA, 22 bp, synthetic construct
  misc_feature 1..22: note = chemically synthesized
  source 1..22: mol_type = other DNA
taaaaacacagtaacacttaca

SEQ ID NO: 43128 - DNA, 22 bp, synthetic construct
  misc_feature 1..22: note = chemically synthesized
  source 1..22: mol_type = other DNA
aaaaacacagtaacacttacaa

SEQ ID NO: 43129 - DNA, 22 bp, synthetic construct
  misc_feature 1..22: note = chemically synthesized
  source 1..22: mol_type = other DNA
aaaacacagtaacacttacaat

SEQ ID NO: 43130 - DNA, 22 bp, synthetic construct
  misc_feature 1..22: note = chemically synthesized
  source 1..22: mol_type = other DNA
acaatttattctcattatgtag

SEQ ID NO: 43131 - DNA, 22 bp, synthetic construct
  misc_feature 1..22: note = chemically synthesized
  source 1..22: mol_type = other DNA
caatttattctcattatgtaga

SEQ ID NO: 43132 - DNA, 22 bp, synthetic construct
  misc_feature 1..22: note = chemically synthesized
  source 1..22: mol_type = other DNA
attctcattatgtagaaacatt

SEQ ID NO: 43133 - DNA, 22 bp, synthetic construct
  misc_feature 1..22: note = chemically synthesized
  source 1..22: mol_type = other DNA
ttctcattatgtagaaacattt

SEQ ID NO: 43134 - DNA, 22 bp, synthetic construct
  misc_feature 1..22: note = chemically synthesized
  source 1..22: mol_type = other DNA
tcattatgtagaaacatttaaa

SEQ ID NO: 43135 - DNA, 22 bp, synthetic construct
  misc_feature 1..22: note = chemically synthesized
  source 1..22: mol_type = other DNA
attatgtagaaacatttaaatt

SEQ ID NO: 43136 - DNA, 22 bp, synthetic construct
  misc_feature 1..22: note = chemically synthesized
  source 1..22: mol_type = other DNA
tgtagaaacatttaaattatcc

SEQ ID NO: 43137 - DNA, 22 bp, synthetic construct
  misc_feature 1..22: note = chemically synthesized
  source 1..22: mol_type = other DNA
aaattatcctggaagagtttgt

SEQ ID NO: 43138 - DNA, 22 bp, synthetic construct
  misc_feature 1..22: note = chemically synthesized
  source 1..22: mol_type = other DNA
aattatcctggaagagtttgtc

SEQ ID NO: 43139 - DNA, 22 bp, synthetic construct
  misc_feature 1..22: note = chemically synthesized
  source 1..22: mol_type = other DNA
tcctggaagagtttgtctcacg

SEQ ID NO: 43140 - DNA, 22 bp, synthetic construct
  misc_feature 1..22: note = chemically synthesized
  source 1..22: mol_type = other DNA
gaagagtttgtctcacgggctg

SEQ ID NO: 43141 - DNA, 22 bp, synthetic construct
  misc_feature 1..22: note = chemically synthesized
  source 1..22: mol_type = other DNA
gtctcacgggctgttcaaagag

SEQ ID NO: 43142 - DNA, 22 bp, synthetic construct
  misc_feature 1..22: note = chemically synthesized
  source 1..22: mol_type = other DNA
tctcacgggctgttcaaagagt

SEQ ID NO: 43143 - DNA, 22 bp, synthetic construct
  misc_feature 1..22: note = chemically synthesized
  source 1..22: mol_type = other DNA
acgggctgttcaaagagtgttt

SEQ ID NO: 43144 - DNA, 22 bp, synthetic construct
  misc_feature 1..22: note = chemically synthesized
  source 1..22: mol_type = other DNA
ttcaaagagtgtttcttccttt

SEQ ID NO: 43145 - DNA, 22 bp, synthetic construct
  misc_feature 1..22: note = chemically synthesized
  source 1..22: mol_type = other DNA
aaagagtgtttcttcctttcct

SEQ ID NO: 43146 - DNA, 22 bp, synthetic construct
  misc_feature 1..22: note = chemically synthesized
  source 1..22: mol_type = other DNA
cttcctttccttctaggaacat

SEQ ID NO: 43147 - DNA, 22 bp, synthetic construct
  misc_feature 1..22: note = chemically synthesized
  source 1..22: mol_type = other DNA
ttcctttccttctaggaacatg

SEQ ID NO: 43148 - DNA, 22 bp, synthetic construct
  misc_feature 1..22: note = chemically synthesized
  source 1..22: mol_type = other DNA
cctttccttctaggaacatgag

SEQ ID NO: 43149 - DNA, 22 bp, synthetic construct
  misc_feature 1..22: note = chemically synthesized
  source 1..22: mol_type = other DNA
ctttccttctaggaacatgagg

SEQ ID NO: 43150 - DNA, 22 bp, synthetic construct
  misc_feature 1..22: note = chemically synthesized
  source 1..22: mol_type = other DNA
tccttctaggaacatgaggagt

SEQ ID NO: 43151 - DNA, 22 bp, synthetic construct
  misc_feature 1..22: note = chemically synthesized
  source 1..22: mol_type = other DNA
ccttctaggaacatgaggagtg

SEQ ID NO: 43152 - DNA, 22 bp, synthetic construct
  misc_feature 1..22: note = chemically synthesized
  source 1..22: mol_type = other DNA
cttctaggaacatgaggagtga

SEQ ID NO: 43153 - DNA, 22 bp, synthetic construct
  misc_feature 1..22: note = chemically synthesized
  source 1..22: mol_type = other DNA
ctaggaacatgaggagtgaatc

SEQ ID NO: 43154 - DNA, 22 bp, synthetic construct
  misc_feature 1..22: note = chemically synthesized
  source 1..22: mol_type = other DNA
taggaacatgaggagtgaatct

SEQ ID NO: 43155 - DNA, 22 bp, synthetic construct
  misc_feature 1..22: note = chemically synthesized
  source 1..22: mol_type = other DNA
ggaacatgaggagtgaatctga

SEQ ID NO: 43156 - DNA, 22 bp, synthetic construct
  misc_feature 1..22: note = chemically synthesized
  source 1..22: mol_type = other DNA
actatttcatcaaagcctgtaa

SEQ ID NO: 43157 - DNA, 22 bp, synthetic construct
  misc_feature 1..22: note = chemically synthesized
  source 1..22: mol_type = other DNA
tttcatcaaagcctgtaaaaga

SEQ ID NO: 43158 - DNA, 22 bp, synthetic construct
  misc_feature 1..22: note = chemically synthesized
  source 1..22: mol_type = other DNA
catcaaagcctgtaaaagatac

SEQ ID NO: 43159 - DNA, 22 bp, synthetic construct
  misc_feature 1..22: note = chemically synthesized
  source 1..22: mol_type = other DNA
atcaaagcctgtaaaagatacc

SEQ ID NO: 43160 - DNA, 22 bp, synthetic construct
  misc_feature 1..22: note = chemically synthesized
  source 1..22: mol_type = other DNA
taaaagatacctgagtcatgat

SEQ ID NO: 43161 - DNA, 22 bp, synthetic construct
  misc_feature 1..22: note = chemically synthesized
  source 1..22: mol_type = other DNA
agtcatgattttaactgaacaa

SEQ ID NO: 43162 - DNA, 22 bp, synthetic construct
  misc_feature 1..22: note = chemically synthesized
  source 1..22: mol_type = other DNA
taactgaacaatgtctccaaga

SEQ ID NO: 43163 - DNA, 22 bp, synthetic construct
  misc_feature 1..22: note = chemically synthesized
  source 1..22: mol_type = other DNA
aactgaacaatgtctccaagaa

SEQ ID NO: 43164 - DNA, 22 bp, synthetic construct
  misc_feature 1..22: note = chemically synthesized
  source 1..22: mol_type = other DNA
actgaacaatgtctccaagaat

SEQ ID NO: 43165 - DNA, 22 bp, synthetic construct
  misc_feature 1..22: note = chemically synthesized
  source 1..22: mol_type = other DNA
aacaatgtctccaagaattcag

SEQ ID NO: 43166 - DNA, 22 bp, synthetic construct
  misc_feature 1..22: note = chemically synthesized
  source 1..22: mol_type = other DNA
caagaattcagactgtgagagg

SEQ ID NO: 43167 - DNA, 22 bp, synthetic construct
  misc_feature 1..22: note = chemically synthesized
  source 1..22: mol_type = other DNA
agactgtgagagggggaagaag

SEQ ID NO: 43168 - DNA, 22 bp, synthetic construct
  misc_feature 1..22: note = chemically synthesized
  source 1..22: mol_type = other DNA
tgagagggggaagaagaccgtc

SEQ ID NO: 43169 - DNA, 22 bp, synthetic construct
  misc_feature 1..22: note = chemically synthesized
  source 1..22: mol_type = other DNA
tttggtgcagtgggaattgcca

SEQ ID NO: 43170 - DNA, 22 bp, synthetic construct
  misc_feature 1..22: note = chemically synthesized
  source 1..22: mol_type = other DNA
tggtgcagtgggaattgccatt

SEQ ID NO: 43171 - DNA, 22 bp, synthetic construct
  misc_feature 1..22: note = chemically synthesized
  source 1..22: mol_type = other DNA
ggtgcagtgggaattgccattg

SEQ ID NO: 43172 - DNA, 22 bp, synthetic construct
  misc_feature 1..22: note = chemically synthesized
  source 1..22: mol_type = other DNA
gtgcagtgggaattgccattgt

SEQ ID NO: 43173 - DNA, 22 bp, synthetic construct
  misc_feature 1..22: note = chemically synthesized
  source 1..22: mol_type = other DNA
ccattgtgtcctccctggttcc

SEQ ID NO: 43174 - DNA, 22 bp, synthetic construct
  misc_feature 1..22: note = chemically synthesized
  source 1..22: mol_type = other DNA
tgtcctccctggttcctctcct

SEQ ID NO: 43175 - DNA, 22 bp, synthetic construct
  misc_feature 1..22: note = chemically synthesized
  source 1..22: mol_type = other DNA
cctggttcctctcctctgtcct

SEQ ID NO: 43176 - DNA, 22 bp, synthetic construct
  misc_feature 1..22: note = chemically synthesized
  source 1..22: mol_type = other DNA
gttcctctcctctgtccttggc

SEQ ID NO: 43177 - DNA, 22 bp, synthetic construct
  misc_feature 1..22: note = chemically synthesized
  source 1..22: mol_type = other DNA
ctctcctctgtccttggcaatc

SEQ ID NO: 43178 - DNA, 22 bp, synthetic construct
  misc_feature 1..22: note = chemically synthesized
  source 1..22: mol_type = other DNA
tcctctgtccttggcaatccag

SEQ ID NO: 43179 - DNA, 22 bp, synthetic construct
  misc_feature 1..22: note = chemically synthesized
  source 1..22: mol_type = other DNA
ctctgtccttggcaatccagtt

SEQ ID NO: 43180 - DNA, 22 bp, synthetic construct
  misc_feature 1..22: note = chemically synthesized
  source 1..22: mol_type = other DNA
tgtccttggcaatccagttaca

SEQ ID NO: 43181 - DNA, 22 bp, synthetic construct
  misc_feature 1..22: note = chemically synthesized
  source 1..22: mol_type = other DNA
tccttggcaatccagttacaat

SEQ ID NO: 43182 - DNA, 22 bp, synthetic construct
  misc_feature 1..22: note = chemically synthesized
  source 1..22: mol_type = other DNA
ggcaatccagttacaatttgac

SEQ ID NO: 43183 - DNA, 22 bp, synthetic construct
  misc_feature 1..22: note = chemically synthesized
  source 1..22: mol_type = other DNA
gcaatccagttacaatttgaca

SEQ ID NO: 43184 - DNA, 22 bp, synthetic construct
  misc_feature 1..22: note = chemically synthesized
  source 1..22: mol_type = other DNA
caatttgacagcatttaaagat

SEQ ID NO: 43185 - DNA, 22 bp, synthetic construct
  misc_feature 1..22: note = chemically synthesized
  source 1..22: mol_type = other DNA
gacagcatttaaagatgacagt

SEQ ID NO: 43186 - DNA, 22 bp, synthetic construct
  misc_feature 1..22: note = chemically synthesized
  source 1..22: mol_type = other DNA
acagcatttaaagatgacagta

SEQ ID NO: 43187 - DNA, 22 bp, synthetic construct
  misc_feature 1..22: note = chemically synthesized
  source 1..22: mol_type = other DNA
aaagatgacagtacttgagata

SEQ ID NO: 43188 - DNA, 22 bp, synthetic construct
  misc_feature 1..22: note = chemically synthesized
  source 1..22: mol_type = other DNA
aagatgacagtacttgagataa

SEQ ID NO: 43189 - DNA, 22 bp, synthetic construct
  misc_feature 1..22: note = chemically synthesized
  source 1..22: mol_type = other DNA
gagataataggacaatgccata

SEQ ID NO: 43190 - DNA, 22 bp, synthetic construct
  misc_feature 1..22: note = chemically synthesized
  source 1..22: mol_type = other DNA
agataataggacaatgccataa

SEQ ID NO: 43191 - DNA, 22 bp, synthetic construct
  misc_feature 1..22: note = chemically synthesized
  source 1..22: mol_type = other DNA
cagcaaatgtgaaagaaaggac

SEQ ID NO: 43192 - DNA, 22 bp, synthetic construct
  misc_feature 1..22: note = chemically synthesized
  source 1..22: mol_type = other DNA
tcatttaggtaatgtcatctat

SEQ ID NO: 43193 - DNA, 22 bp, synthetic construct
  misc_feature 1..22: note = chemically synthesized
  source 1..22: mol_type = other DNA
aggtaatgtcatctatgatcag

SEQ ID NO: 43194 - DNA, 22 bp, synthetic construct
  misc_feature 1..22: note = chemically synthesized
  source 1..22: mol_type = other DNA
ggtaatgtcatctatgatcagt

SEQ ID NO: 43195 - DNA, 22 bp, synthetic construct
  misc_feature 1..22: note = chemically synthesized
  source 1..22: mol_type = other DNA
tgatcagtttttgtttcatttt

SEQ ID NO: 43196 - DNA, 22 bp, synthetic construct
  misc_feature 1..22: note = chemically synthesized
  source 1..22: mol_type = other DNA
ttgtttcattttttgctgacac

SEQ ID NO: 43197 - DNA, 22 bp, synthetic construct
  misc_feature 1..22: note = chemically synthesized
  source 1..22: mol_type = other DNA
tgtttcattttttgctgacaca

SEQ ID NO: 43198 - DNA, 22 bp, synthetic construct
  misc_feature 1..22: note = chemically synthesized
  source 1..22: mol_type = other DNA
gtttcattttttgctgacacag

SEQ ID NO: 43199 - DNA, 22 bp, synthetic construct
  misc_feature 1..22: note = chemically synthesized
  source 1..22: mol_type = other DNA
tttcattttttgctgacacaga

SEQ ID NO: 43200 - DNA, 22 bp, synthetic construct
  misc_feature 1..22: note = chemically synthesized
  source 1..22: mol_type = other DNA
cattttttgctgacacagaact

SEQ ID NO: 43201 - DNA, 22 bp, synthetic construct
  misc_feature 1..22: note = chemically synthesized
  source 1..22: mol_type = other DNA
attttttgctgacacagaactc

SEQ ID NO: 43202 - DNA, 22 bp, synthetic construct
  misc_feature 1..22: note = chemically synthesized
  source 1..22: mol_type = other DNA
tttgctgacacagaactcagtg

SEQ ID NO: 43203 - DNA, 22 bp, synthetic construct
  misc_feature 1..22: note = chemically synthesized
  source 1..22: mol_type = other DNA
ttgctgacacagaactcagtgc

SEQ ID NO: 43204 - DNA, 22 bp, synthetic construct
  misc_feature 1..22: note = chemically synthesized
  source 1..22: mol_type = other DNA
tgctgacacagaactcagtgct

SEQ ID NO: 43205 - DNA, 22 bp, synthetic construct
  misc_feature 1..22: note = chemically synthesized
  source 1..22: mol_type = other DNA
gctgacacagaactcagtgcta

SEQ ID NO: 43206 - DNA, 22 bp, synthetic construct
  misc_feature 1..22: note = chemically synthesized
  source 1..22: mol_type = other DNA
ctgacacagaactcagtgctac

SEQ ID NO: 43207 - DNA, 22 bp, synthetic construct
  misc_feature 1..22: note = chemically synthesized
  source 1..22: mol_type = other DNA
acacagaactcagtgctactta

SEQ ID NO: 43208 - DNA, 22 bp, synthetic construct
  misc_feature 1..22: note = chemically synthesized
  source 1..22: mol_type = other DNA
agtgctacttatacaattcact

SEQ ID NO: 43209 - DNA, 22 bp, synthetic construct
  misc_feature 1..22: note = chemically synthesized
  source 1..22: mol_type = other DNA
cttatacaattcactggaaacc

SEQ ID NO: 43210 - DNA, 22 bp, synthetic construct
  misc_feature 1..22: note = chemically synthesized
  source 1..22: mol_type = other DNA
atacaattcactggaaaccctg

SEQ ID NO: 43211 - DNA, 22 bp, synthetic construct
  misc_feature 1..22: note = chemically synthesized
  source 1..22: mol_type = other DNA
tacaattcactggaaaccctgt

SEQ ID NO: 43212 - DNA, 22 bp, synthetic construct
  misc_feature 1..22: note = chemically synthesized
  source 1..22: mol_type = other DNA
actggaaaccctgttatggctg

SEQ ID NO: 43213 - DNA, 22 bp, synthetic construct
  misc_feature 1..22: note = chemically synthesized
  source 1..22: mol_type = other DNA
gaaaccctgttatggctgtaaa

SEQ ID NO: 43214 - DNA, 22 bp, synthetic construct
  misc_feature 1..22: note = chemically synthesized
  source 1..22: mol_type = other DNA
ttatggctgtaaatagtttgct

SEQ ID NO: 43215 - DNA, 22 bp, synthetic construct
  misc_feature 1..22: note = chemically synthesized
  source 1..22: mol_type = other DNA
tggctgtaaatagtttgcttcc

SEQ ID NO: 43216 - DNA, 22 bp, synthetic construct
  misc_feature 1..22: note = chemically synthesized
  source 1..22: mol_type = other DNA
taaatagtttgcttcccccaat

SEQ ID NO: 43217 - DNA, 22 bp, synthetic construct
  misc_feature 1..22: note = chemically synthesized
  source 1..22: mol_type = other DNA
gcttcccccaatgaaagaaaat

SEQ ID NO: 43218 - DNA, 22 bp, synthetic construct
  misc_feature 1..22: note = chemically synthesized
  source 1..22: mol_type = other DNA
cttcccccaatgaaagaaaata

SEQ ID NO: 43219 - DNA, 22 bp, synthetic construct
  misc_feature 1..22: note = chemically synthesized
  source 1..22: mol_type = other DNA
cccccaatgaaagaaaatactt

SEQ ID NO: 43220 - DNA, 22 bp, synthetic construct
  misc_feature 1..22: note = chemically synthesized
  source 1..22: mol_type = other DNA
ccccaatgaaagaaaatactta

SEQ ID NO: 43221 - DNA, 22 bp, synthetic construct
  misc_feature 1..22: note = chemically synthesized
  source 1..22: mol_type = other DNA
actgtactgcaggggaattcgg

SEQ ID NO: 43222 - DNA, 22 bp, synthetic construct
  misc_feature 1..22: note = chemically synthesized
  source 1..22: mol_type = other DNA
ctgtactgcaggggaattcggt

SEQ ID NO: 43223 - DNA, 22 bp, synthetic construct
  misc_feature 1..22: note = chemically synthesized
  source 1..22: mol_type = other DNA
tactgcaggggaattcggtaaa

SEQ ID NO: 43224 - DNA, 22 bp, synthetic construct
  misc_feature 1..22: note = chemically synthesized
  source 1..22: mol_type = other DNA
caggggaattcggtaaaacttt

SEQ ID NO: 43225 - DNA, 22 bp, synthetic construct
  misc_feature 1..22: note = chemically synthesized
  source 1..22: mol_type = other DNA
ggtaaaactttctagttttgct

SEQ ID NO: 43226 - DNA, 22 bp, synthetic construct
  misc_feature 1..22: note = chemically synthesized
  source 1..22: mol_type = other DNA
tctagttttgcttaacatgaaa

SEQ ID NO: 43227 - DNA, 22 bp, synthetic construct
  misc_feature 1..22: note = chemically synthesized
  source 1..22: mol_type = other DNA
ctagttttgcttaacatgaaaa

SEQ ID NO: 43228 - DNA, 22 bp, synthetic construct
  misc_feature 1..22: note = chemically synthesized
  source 1..22: mol_type = other DNA
tagttttgcttaacatgaaaat

SEQ ID NO: 43229 - DNA, 22 bp, synthetic construct
  misc_feature 1..22: note = chemically synthesized
  source 1..22: mol_type = other DNA
gttttgcttaacatgaaaataa

SEQ ID NO: 43230 - DNA, 22 bp, synthetic construct
  misc_feature 1..22: note = chemically synthesized
  source 1..22: mol_type = other DNA
tgcttaacatgaaaataataac

SEQ ID NO: 43231 - DNA, 22 bp, synthetic construct
  misc_feature 1..22: note = chemically synthesized
  source 1..22: mol_type = other DNA
gcttaacatgaaaataataaca

SEQ ID NO: 43232 - DNA, 22 bp, synthetic construct
  misc_feature 1..22: note = chemically synthesized
  source 1..22: mol_type = other DNA
cttaacatgaaaataataacaa

SEQ ID NO: 43233 - DNA, 22 bp, synthetic construct
  misc_feature 1..22: note = chemically synthesized
  source 1..22: mol_type = other DNA
aacatgaaaataataacaaaaa

SEQ ID NO: 43234 - DNA, 22 bp, synthetic construct
  misc_feature 1..22: note = chemically synthesized
  source 1..22: mol_type = other DNA
acatgaaaataataacaaaaaa

SEQ ID NO: 43235 - DNA, 22 bp, synthetic construct
  misc_feature 1..22: note = chemically synthesized
  source 1..22: mol_type = other DNA
caaatcagtatcaatagccaaa

SEQ ID NO: 43236 - DNA, 22 bp, synthetic construct
  misc_feature 1..22: note = chemically synthesized
  source 1..22: mol_type = other DNA
aaatcagtatcaatagccaaag

SEQ ID NO: 43237 - DNA, 22 bp, synthetic construct
  misc_feature 1..22: note = chemically synthesized
  source 1..22: mol_type = other DNA
aagccactgctacccaaaacga

SEQ ID NO: 43238 - DNA, 22 bp, synthetic construct
  misc_feature 1..22: note = chemically synthesized
  source 1..22: mol_type = other DNA
ctacccaaaacgattttgtttg

SEQ ID NO: 43239 - DNA, 22 bp, synthetic construct
  misc_feature 1..22: note = chemically synthesized
  source 1..22: mol_type = other DNA
cccaaaacgattttgtttgttt

SEQ ID NO: 43240 - DNA, 22 bp, synthetic construct
  misc_feature 1..22: note = chemically synthesized
  source 1..22: mol_type = other DNA
tgtttgtttgtttgtttgtttg

SEQ ID NO: 43241 - DNA, 22 bp, synthetic construct
  misc_feature 1..22: note = chemically synthesized
  source 1..22: mol_type = other DNA
gtttgtttgtttgtttgtttgt

SEQ ID NO: 43242 - DNA, 22 bp, synthetic construct
  misc_feature 1..22: note = chemically synthesized
  source 1..22: mol_type = other DNA
tttgtttgtttgtttgtttgtt

SEQ ID NO: 43243 - DNA, 22 bp, synthetic construct
  misc_feature 1..22: note = chemically synthesized
  source 1..22: mol_type = other DNA
gtttgtttgtttgtttgtttgt

SEQ ID NO: 43244 - DNA, 22 bp, synthetic construct
  misc_feature 1..22: note = chemically synthesized
  source 1..22: mol_type = other DNA
tttgtttgtttgtttgtttgtt

SEQ ID NO: 43245 - DNA, 22 bp, synthetic construct
  misc_feature 1..22: note = chemically synthesized
  source 1..22: mol_type = other DNA
gtttgtttgtttgtttgttttt

SEQ ID NO: 43246 - DNA, 22 bp, synthetic construct
  misc_feature 1..22: note = chemically synthesized
  source 1..22: mol_type = other DNA
tttgtttgtttgtttgtttttt

SEQ ID NO: 43247 - DNA, 22 bp, synthetic construct
  misc_feature 1..22: note = chemically synthesized
  source 1..22: mol_type = other DNA
gtttgtttgtttgttttttgtt

SEQ ID NO: 43248 - DNA, 22 bp, synthetic construct
  misc_feature 1..22: note = chemically synthesized
  source 1..22: mol_type = other DNA
tttgtttgtttgttttttgttt

SEQ ID NO: 43249 - DNA, 22 bp, synthetic construct
  misc_feature 1..22: note = chemically synthesized
  source 1..22: mol_type = other DNA
gtttgtttgttttttgtttctg

SEQ ID NO: 43250 - DNA, 22 bp, synthetic construct
  misc_feature 1..22: note = chemically synthesized
  source 1..22: mol_type = other DNA
tttgtttgttttttgtttctga

SEQ ID NO: 43251 - DNA, 22 bp, synthetic construct
  misc_feature 1..22: note = chemically synthesized
  source 1..22: mol_type = other DNA
gtttgttttttgtttctgaggt

SEQ ID NO: 43252 - DNA, 22 bp, synthetic construct
  misc_feature 1..22: note = chemically synthesized
  source 1..22: mol_type = other DNA
tttgttttttgtttctgaggtg

SEQ ID NO: 43253 - DNA, 22 bp, synthetic construct
  misc_feature 1..22: note = chemically synthesized
  source 1..22: mol_type = other DNA
gttttttgtttctgaggtggag

SEQ ID NO: 43254 - DNA, 22 bp, synthetic construct
  misc_feature 1..22: note = chemically synthesized
  source 1..22: mol_type = other DNA
ttttttgtttctgaggtggagt

SEQ ID NO: 43255 - DNA, 22 bp, synthetic construct
  misc_feature 1..22: note = chemically synthesized
  source 1..22: mol_type = other DNA
tttgtttctgaggtggagtttc

SEQ ID NO: 43256 - DNA, 22 bp, synthetic construct
  misc_feature 1..22: note = chemically synthesized
  source 1..22: mol_type = other DNA
ttgtttctgaggtggagtttcg

SEQ ID NO: 43257 - DNA, 22 bp, synthetic construct
  misc_feature 1..22: note = chemically synthesized
  source 1..22: mol_type = other DNA
tgtttctgaggtggagtttcgc

SEQ ID NO: 43258 - DNA, 22 bp, synthetic construct
  misc_feature 1..22: note = chemically synthesized
  source 1..22: mol_type = other DNA
gtttctgaggtggagtttcgct

SEQ ID NO: 43259 - DNA, 22 bp, synthetic construct
  misc_feature 1..22: note = chemically synthesized
  source 1..22: mol_type = other DNA
tttctgaggtggagtttcgctc

SEQ ID NO: 43260 - DNA, 22 bp, synthetic construct
  misc_feature 1..22: note = chemically synthesized
  source 1..22: mol_type = other DNA
ctgaggtggagtttcgctcttg

SEQ ID NO: 43261 - DNA, 22 bp, synthetic construct
  misc_feature 1..22: note = chemically synthesized
  source 1..22: mol_type = other DNA
tgaggtggagtttcgctcttgt

SEQ ID NO: 43262 - DNA, 22 bp, synthetic construct
  misc_feature 1..22: note = chemically synthesized
  source 1..22: mol_type = other DNA
aggtggagtttcgctcttgttg

SEQ ID NO: 43263 - DNA, 22 bp, synthetic construct
  misc_feature 1..22: note = chemically synthesized
  source 1..22: mol_type = other DNA
cgctcttgttgcccgggctgga

SEQ ID NO: 43264 - DNA, 22 bp, synthetic construct
  misc_feature 1..22: note = chemically synthesized
  source 1..22: mol_type = other DNA
gctcttgttgcccgggctggag

SEQ ID NO: 43265 - DNA, 22 bp, synthetic construct
  misc_feature 1..22: note = chemically synthesized
  source 1..22: mol_type = other DNA
ttgttgcccgggctggagtgca

SEQ ID NO: 43266 - DNA, 22 bp, synthetic construct
  misc_feature 1..22: note = chemically synthesized
  source 1..22: mol_type = other DNA
gttgcccgggctggagtgcaat

SEQ ID NO: 43267 - DNA, 22 bp, synthetic construct
  misc_feature 1..22: note = chemically synthesized
  source 1..22: mol_type = other DNA
ttgcccgggctggagtgcaatg

SEQ ID NO: 43268 - DNA, 22 bp, synthetic construct
  misc_feature 1..22: note = chemically synthesized
  source 1..22: mol_type = other DNA
cccgggctggagtgcaatggcg

SEQ ID NO: 43269 - DNA, 22 bp, synthetic construct
  misc_feature 1..22: note = chemically synthesized
  source 1..22: mol_type = other DNA
gagtgcaatggcgcaatctcgg

SEQ ID NO: 43270 - DNA, 22 bp, synthetic construct
  misc_feature 1..22: note = chemically synthesized
  source 1..22: mol_type = other DNA
ggctcaccgcaatctccgcctc

SEQ ID NO: 43271 - DNA, 22 bp, synthetic construct
  misc_feature 1..22: note = chemically synthesized
  source 1..22: mol_type = other DNA
accgcaatctccgcctcccggg

SEQ ID NO: 43272 - DNA, 22 bp, synthetic construct
  misc_feature 1..22: note = chemically synthesized
  source 1..22: mol_type = other DNA
cgcctcccgggttcaagcgatt

SEQ ID NO: 43273 - DNA, 22 bp, synthetic construct
  misc_feature 1..22: note = chemically synthesized
  source 1..22: mol_type = other DNA
ccgggttcaagcgattctcctg

SEQ ID NO: 43274 - DNA, 22 bp, synthetic construct
  misc_feature 1..22: note = chemically synthesized
  source 1..22: mol_type = other DNA
aagcgattctcctgcctcagcc

SEQ ID NO: 43275 - DNA, 22 bp, synthetic construct
  misc_feature 1..22: note = chemically synthesized
  source 1..22: mol_type = other DNA
tcctgcctcagcctcccaagta

SEQ ID NO: 43276 - DNA, 22 bp, synthetic construct
  misc_feature 1..22: note = chemically synthesized
  source 1..22: mol_type = other DNA
ctgcctcagcctcccaagtagc

SEQ ID NO: 43277 - DNA, 22 bp, synthetic construct
  misc_feature 1..22: note = chemically synthesized
  source 1..22: mol_type = other DNA
cctcagcctcccaagtagctgg

SEQ ID NO: 43278 - DNA, 22 bp, synthetic construct
  misc_feature 1..22: note = chemically synthesized
  source 1..22: mol_type = other DNA
agcctcccaagtagctgggatt

SEQ ID NO: 43279 - DNA, 22 bp, synthetic construct
  misc_feature 1..22: note = chemically synthesized
  source 1..22: mol_type = other DNA
ccaagtagctgggattataggc

SEQ ID NO: 43280 - DNA, 22 bp, synthetic construct
  misc_feature 1..22: note = chemically synthesized
  source 1..22: mol_type = other DNA
ggattataggcatgcgccacca

SEQ ID NO: 43281 - DNA, 22 bp, synthetic construct
  misc_feature 1..22: note = chemically synthesized
  source 1..22: mol_type = other DNA
taggcatgcgccaccacacgcg

SEQ ID NO: 43282 - DNA, 22 bp, synthetic construct
  misc_feature 1..22: note = chemically synthesized
  source 1..22: mol_type = other DNA
atttctgtatttttggtagaga

SEQ ID NO: 43283 - DNA, 22 bp, synthetic construct
  misc_feature 1..22: note = chemically synthesized
  source 1..22: mol_type = other DNA
ctgtatttttggtagagacggg

SEQ ID NO: 43284 - DNA, 22 bp, synthetic construct
  misc_feature 1..22: note = chemically synthesized
  source 1..22: mol_type = other DNA
tgtatttttggtagagacgggg

SEQ ID NO: 43285 - DNA, 22 bp, synthetic construct
  misc_feature 1..22: note = chemically synthesized
  source 1..22: mol_type = other DNA
tatttttggtagagacggggtt

SEQ ID NO: 43286 - DNA, 22 bp, synthetic construct
  misc_feature 1..22: note = chemically synthesized
  source 1..22: mol_type = other DNA
ttggtagagacggggtttctcc

SEQ ID NO: 43287 - DNA, 22 bp, synthetic construct
  misc_feature 1..22: note = chemically synthesized
  source 1..22: mol_type = other DNA
tggtagagacggggtttctcca

SEQ ID NO: 43288 - DNA, 22 bp, synthetic construct
  misc_feature 1..22: note = chemically synthesized
  source 1..22: mol_type = other DNA
ggtagagacggggtttctccat

SEQ ID NO: 43289 - DNA, 22 bp, synthetic construct
  misc_feature 1..22: note = chemically synthesized
  source 1..22: mol_type = other DNA
gtagagacggggtttctccatg

SEQ ID NO: 43290 - DNA, 22 bp, synthetic construct
  misc_feature 1..22: note = chemically synthesized
  source 1..22: mol_type = other DNA
ctccatgttggtcaggctggtc

SEQ ID NO: 43291 - DNA, 22 bp, synthetic construct
  misc_feature 1..22: note = chemically synthesized
  source 1..22: mol_type = other DNA
tccatgttggtcaggctggtct

SEQ ID NO: 43292 - DNA, 22 bp, synthetic construct
  misc_feature 1..22: note = chemically synthesized
  source 1..22: mol_type = other DNA
catgttggtcaggctggtctca

SEQ ID NO: 43293 - DNA, 22 bp, synthetic construct
  misc_feature 1..22: note = chemically synthesized
  source 1..22: mol_type = other DNA
gtcaggctggtctcaaactccc

SEQ ID NO: 43294 - DNA, 22 bp, synthetic construct
  misc_feature 1..22: note = chemically synthesized
  source 1..22: mol_type = other DNA
gtctcaaactcccgaccttagg

SEQ ID NO: 43295 - DNA, 22 bp, synthetic construct
  misc_feature 1..22: note = chemically synthesized
  source 1..22: mol_type = other DNA
aaactcccgaccttaggtgatc

SEQ ID NO: 43296 - DNA, 22 bp, synthetic construct
  misc_feature 1..22: note = chemically synthesized
  source 1..22: mol_type = other DNA
ccgaccttaggtgatccaccca

SEQ ID NO: 43297 - DNA, 22 bp, synthetic construct
  misc_feature 1..22: note = chemically synthesized
  source 1..22: mol_type = other DNA
aggtgatccacccacctcagcc

SEQ ID NO: 43298 - DNA, 22 bp, synthetic construct
  misc_feature 1..22: note = chemically synthesized
  source 1..22: mol_type = other DNA
ggtgatccacccacctcagcct

SEQ ID NO: 43299 - DNA, 22 bp, synthetic construct
  misc_feature 1..22: note = chemically synthesized
  source 1..22: mol_type = other DNA
agcctcccaaagtgctgggatt

SEQ ID NO: 43300 - DNA, 22 bp, synthetic construct
  misc_feature 1..22: note = chemically synthesized
  source 1..22: mol_type = other DNA
ccaaagtgctgggattataggc

SEQ ID NO: 43301 - DNA, 22 bp, synthetic construct
  misc_feature 1..22: note = chemically synthesized
  source 1..22: mol_type = other DNA
ggattataggcataagctacca

SEQ ID NO: 43302 - DNA, 22 bp, synthetic construct
  misc_feature 1..22: note = chemically synthesized
  source 1..22: mol_type = other DNA
taggcataagctaccacaccca

SEQ ID NO: 43303 - DNA, 22 bp, synthetic construct
  misc_feature 1..22: note = chemically synthesized
  source 1..22: mol_type = other DNA
ccacacccagccatacccaaaa

SEQ ID NO: 43304 - DNA, 22 bp, synthetic construct
  misc_feature 1..22: note = chemically synthesized
  source 1..22: mol_type = other DNA
atcttcaaagaaaaaaaatgct

SEQ ID NO: 43305 - DNA, 22 bp, synthetic construct
  misc_feature 1..22: note = chemically synthesized
  source 1..22: mol_type = other DNA
tcttcaaagaaaaaaaatgctg

SEQ ID NO: 43306 - DNA, 22 bp, synthetic construct
  misc_feature 1..22: note = chemically synthesized
  source 1..22: mol_type = other DNA
caaagaaaaaaaatgctgtgtg

SEQ ID NO: 43307 - DNA, 22 bp, synthetic construct
  misc_feature 1..22: note = chemically synthesized
  source 1..22: mol_type = other DNA
aaagaaaaaaaatgctgtgtgt

SEQ ID NO: 43308 - DNA, 22 bp, synthetic construct
  misc_feature 1..22: note = chemically synthesized
  source 1..22: mol_type = other DNA
tgtgtcctaaataataggtggt

SEQ ID NO: 43309 - DNA, 22 bp, synthetic construct
  misc_feature 1..22: note = chemically synthesized
  source 1..22: mol_type = other DNA
aataataggtggtcaaaatgtt

SEQ ID NO: 43310 - DNA, 22 bp, synthetic construct
  misc_feature 1..22: note = chemically synthesized
  source 1..22: mol_type = other DNA
ctaaagggtaccttagacccca

SEQ ID NO: 43311 - DNA, 22 bp, synthetic construct
  misc_feature 1..22: note = chemically synthesized
  source 1..22: mol_type = other DNA
taaagggtaccttagaccccaa

SEQ ID NO: 43312 - DNA, 22 bp, synthetic construct
  misc_feature 1..22: note = chemically synthesized
  source 1..22: mol_type = other DNA
aagggtaccttagaccccaatt

SEQ ID NO: 43313 - DNA, 22 bp, synthetic construct
  misc_feature 1..22: note = chemically synthesized
  source 1..22: mol_type = other DNA
agaccccaattaaactgttgct

SEQ ID NO: 43314 - DNA, 22 bp, synthetic construct
  misc_feature 1..22: note = chemically synthesized
  source 1..22: mol_type = other DNA
gaccccaattaaactgttgctt

SEQ ID NO: 43315 - DNA, 22 bp, synthetic construct
  misc_feature 1..22: note = chemically synthesized
  source 1..22: mol_type = other DNA
aactgttgctttagagtttggg

SEQ ID NO: 43316 - DNA, 22 bp, synthetic construct
  misc_feature 1..22: note = chemically synthesized
  source 1..22: mol_type = other DNA
ttgctttagagtttggggaaaa

SEQ ID NO: 43317 - DNA, 22 bp, synthetic construct
  misc_feature 1..22: note = chemically synthesized
  source 1..22: mol_type = other DNA
ctttagagtttggggaaaataa

SEQ ID NO: 43318 - DNA, 22 bp, synthetic construct
  misc_feature 1..22: note = chemically synthesized
  source 1..22: mol_type = other DNA
tagagtttggggaaaataaagt

SEQ ID NO: 43319 - DNA, 22 bp, synthetic construct
  misc_feature 1..22: note = chemically synthesized
  source 1..22: mol_type = other DNA
agagtttggggaaaataaagtg

SEQ ID NO: 43320 - DNA, 22 bp, synthetic construct
  misc_feature 1..22: note = chemically synthesized
  source 1..22: mol_type = other DNA
gagtttggggaaaataaagtgg

SEQ ID NO: 43321 - DNA, 22 bp, synthetic construct
  misc_feature 1..22: note = chemically synthesized
  source 1..22: mol_type = other DNA
ggggaaaataaagtggaaacac

SEQ ID NO: 43322 - DNA, 22 bp, synthetic construct
  misc_feature 1..22: note = chemically synthesized
  source 1..22: mol_type = other DNA
gggaaaataaagtggaaacacc

SEQ ID NO: 43323 - DNA, 22 bp, synthetic construct
  misc_feature 1..22: note = chemically synthesized
  source 1..22: mol_type = other DNA
actaaattcacactgtgagagc

SEQ ID NO: 43324 - DNA, 22 bp, synthetic construct
  misc_feature 1..22: note = chemically synthesized
  source 1..22: mol_type = other DNA
aattcacactgtgagagccagt

SEQ ID NO: 43325 - DNA, 22 bp, synthetic construct
  misc_feature 1..22: note = chemically synthesized
  source 1..22: mol_type = other DNA
acactgtgagagccagtcaaca

SEQ ID NO: 43326 - DNA, 22 bp, synthetic construct
  misc_feature 1..22: note = chemically synthesized
  source 1..22: mol_type = other DNA
tgagagccagtcaacactagcc

SEQ ID NO: 43327 - DNA, 22 bp, synthetic construct
  misc_feature 1..22: note = chemically synthesized
  source 1..22: mol_type = other DNA
gcccacatgccaatggggtcct

SEQ ID NO: 43328 - DNA, 22 bp, synthetic construct
  misc_feature 1..22: note = chemically synthesized
  source 1..22: mol_type = other DNA
gtcagtcacttacactatttct

SEQ ID NO: 43329 - DNA, 22 bp, synthetic construct
  misc_feature 1..22: note = chemically synthesized
  source 1..22: mol_type = other DNA
tcagtcacttacactatttctc

SEQ ID NO: 43330 - DNA, 22 bp, synthetic construct
  misc_feature 1..22: note = chemically synthesized
  source 1..22: mol_type = other DNA
acactatttctcattccatttc

SEQ ID NO: 43331 - DNA, 22 bp, synthetic construct
  misc_feature 1..22: note = chemically synthesized
  source 1..22: mol_type = other DNA
cactatttctcattccatttct

SEQ ID NO: 43332 - DNA, 22 bp, synthetic construct
  misc_feature 1..22: note = chemically synthesized
  source 1..22: mol_type = other DNA
tttctcattccatttcttttat

SEQ ID NO: 43333 - DNA, 22 bp, synthetic construct
  misc_feature 1..22: note = chemically synthesized
  source 1..22: mol_type = other DNA
ctcattccatttcttttatgtc

SEQ ID NO: 43334 - DNA, 22 bp, synthetic construct
  misc_feature 1..22: note = chemically synthesized
  source 1..22: mol_type = other DNA
tcattccatttcttttatgtca

SEQ ID NO: 43335 - DNA, 22 bp, synthetic construct
  misc_feature 1..22: note = chemically synthesized
  source 1..22: mol_type = other DNA
attccatttcttttatgtcatt

SEQ ID NO: 43336 - DNA, 22 bp, synthetic construct
  misc_feature 1..22: note = chemically synthesized
  source 1..22: mol_type = other DNA
catttcttttatgtcattttgc

SEQ ID NO: 43337 - DNA, 22 bp, synthetic construct
  misc_feature 1..22: note = chemically synthesized
  source 1..22: mol_type = other DNA
cttttatgtcattttgcccaca

SEQ ID NO: 43338 - DNA, 22 bp, synthetic construct
  misc_feature 1..22: note = chemically synthesized
  source 1..22: mol_type = other DNA
ttttatgtcattttgcccacaa

SEQ ID NO: 43339 - DNA, 22 bp, synthetic construct
  misc_feature 1..22: note = chemically synthesized
  source 1..22: mol_type = other DNA
ttatgtcattttgcccacaaca

SEQ ID NO: 43340 - DNA, 22 bp, synthetic construct
  misc_feature 1..22: note = chemically synthesized
  source 1..22: mol_type = other DNA
tatgtcattttgcccacaacat

SEQ ID NO: 43341 - DNA, 22 bp, synthetic construct
  misc_feature 1..22: note = chemically synthesized
  source 1..22: mol_type = other DNA
atgtcattttgcccacaacata

SEQ ID NO: 43342 - DNA, 22 bp, synthetic construct
  misc_feature 1..22: note = chemically synthesized
  source 1..22: mol_type = other DNA
tgtcattttgcccacaacatat

SEQ ID NO: 43343 - DNA, 22 bp, synthetic construct
  misc_feature 1..22: note = chemically synthesized
  source 1..22: mol_type = other DNA
tgcccacaacatatccaaattc

SEQ ID NO: 43344 - DNA, 22 bp, synthetic construct
  misc_feature 1..22: note = chemically synthesized
  source 1..22: mol_type = other DNA
gcccacaacatatccaaattca

SEQ ID NO: 43345 - DNA, 22 bp, synthetic construct
  misc_feature 1..22: note = chemically synthesized
  source 1..22: mol_type = other DNA
cccacaacatatccaaattcat

SEQ ID NO: 43346 - DNA, 22 bp, synthetic construct
  misc_feature 1..22: note = chemically synthesized
  source 1..22: mol_type = other DNA
atacaatagaggcatttggaac

SEQ ID NO: 43347 - DNA, 22 bp, synthetic construct
  misc_feature 1..22: note = chemically synthesized
  source 1..22: mol_type = other DNA
ggaacccagtgctactctgctt

SEQ ID NO: 43348 - DNA, 22 bp, synthetic construct
  misc_feature 1..22: note = chemically synthesized
  source 1..22: mol_type = other DNA
gaacccagtgctactctgcttc

SEQ ID NO: 43349 - DNA, 22 bp, synthetic construct
  misc_feature 1..22: note = chemically synthesized
  source 1..22: mol_type = other DNA
ctctgcttcctaactaatttct

SEQ ID NO: 43350 - DNA, 22 bp, synthetic construct
  misc_feature 1..22: note = chemically synthesized
  source 1..22: mol_type = other DNA
tgcttcctaactaatttctgcc

SEQ ID NO: 43351 - DNA, 22 bp, synthetic construct
  misc_feature 1..22: note = chemically synthesized
  source 1..22: mol_type = other DNA
cttcctaactaatttctgccgc

SEQ ID NO: 43352 - DNA, 22 bp, synthetic construct
  misc_feature 1..22: note = chemically synthesized
  source 1..22: mol_type = other DNA
cctaactaatttctgccgctgg

SEQ ID NO: 43353 - DNA, 22 bp, synthetic construct
  misc_feature 1..22: note = chemically synthesized
  source 1..22: mol_type = other DNA
ctaactaatttctgccgctgga

SEQ ID NO: 43354 - DNA, 22 bp, synthetic construct
  misc_feature 1..22: note = chemically synthesized
  source 1..22: mol_type = other DNA
actaatttctgccgctggaagt

SEQ ID NO: 43355 - DNA, 22 bp, synthetic construct
  misc_feature 1..22: note = chemically synthesized
  source 1..22: mol_type = other DNA
atttctgccgctggaagtttgt

SEQ ID NO: 43356 - DNA, 22 bp, synthetic construct
  misc_feature 1..22: note = chemically synthesized
  source 1..22: mol_type = other DNA
ctgccgctggaagtttgttcct

SEQ ID NO: 43357 - DNA, 22 bp, synthetic construct
  misc_feature 1..22: note = chemically synthesized
  source 1..22: mol_type = other DNA
tgccgctggaagtttgttccta

SEQ ID NO: 43358 - DNA, 22 bp, synthetic construct
  misc_feature 1..22: note = chemically synthesized
  source 1..22: mol_type = other DNA
ccgctggaagtttgttcctaaa

SEQ ID NO: 43359 - DNA, 22 bp, synthetic construct
  misc_feature 1..22: note = chemically synthesized
  source 1..22: mol_type = other DNA
gaagtttgttcctaaagccacc

SEQ ID NO: 43360 - DNA, 22 bp, synthetic construct
  misc_feature 1..22: note = chemically synthesized
  source 1..22: mol_type = other DNA
gttcctaaagccaccaagtctc

SEQ ID NO: 43361 - DNA, 22 bp, synthetic construct
  misc_feature 1..22: note = chemically synthesized
  source 1..22: mol_type = other DNA
ttcctaaagccaccaagtctcc

SEQ ID NO: 43362 - DNA, 22 bp, synthetic construct
  misc_feature 1..22: note = chemically synthesized
  source 1..22: mol_type = other DNA
ctaaagccaccaagtctcctag

SEQ ID NO: 43363 - DNA, 22 bp, synthetic construct
  misc_feature 1..22: note = chemically synthesized
  source 1..22: mol_type = other DNA
aagccaccaagtctcctagaag

SEQ ID NO: 43364 - DNA, 22 bp, synthetic construct
  misc_feature 1..22: note = chemically synthesized
  source 1..22: mol_type = other DNA
ctagaagcccttatttcttggc

SEQ ID NO: 43365 - DNA, 22 bp, synthetic construct
  misc_feature 1..22: note = chemically synthesized
  source 1..22: mol_type = other DNA
gaagcccttatttcttggcagt

SEQ ID NO: 43366 - DNA, 22 bp, synthetic construct
  misc_feature 1..22: note = chemically synthesized
  source 1..22: mol_type = other DNA
atttcttggcagtaaacacacg

SEQ ID NO: 43367 - DNA, 22 bp, synthetic construct
  misc_feature 1..22: note = chemically synthesized
  source 1..22: mol_type = other DNA
tttcttggcagtaaacacacgg

SEQ ID NO: 43368 - DNA, 22 bp, synthetic construct
  misc_feature 1..22: note = chemically synthesized
  source 1..22: mol_type = other DNA
cttggcagtaaacacacggcgg

SEQ ID NO: 43369 - DNA, 22 bp, synthetic construct
  misc_feature 1..22: note = chemically synthesized
  source 1..22: mol_type = other DNA
ttggcagtaaacacacggcggc

SEQ ID NO: 43370 - DNA, 22 bp, synthetic construct
  misc_feature 1..22: note = chemically synthesized
  source 1..22: mol_type = other DNA
ggcagtaaacacacggcggccc

SEQ ID NO: 43371 - DNA, 22 bp, synthetic construct
  misc_feature 1..22: note = chemically synthesized
  source 1..22: mol_type = other DNA
gcagtaaacacacggcggccct

SEQ ID NO: 43372 - DNA, 22 bp, synthetic construct
  misc_feature 1..22: note = chemically synthesized
  source 1..22: mol_type = other DNA
cgtgccattaaaatagctgcct

SEQ ID NO: 43373 - DNA, 22 bp, synthetic construct
  misc_feature 1..22: note = chemically synthesized
  source 1..22: mol_type = other DNA
aaatagctgcctcatcatccag

SEQ ID NO: 43374 - DNA, 22 bp, synthetic construct
  misc_feature 1..22: note = chemically synthesized
  source 1..22: mol_type = other DNA
cctcatcatccaggatgacaaa

SEQ ID NO: 43375 - DNA, 22 bp, synthetic construct
  misc_feature 1..22: note = chemically synthesized
  source 1..22: mol_type = other DNA
atcatccaggatgacaaacagc

SEQ ID NO: 43376 - DNA, 22 bp, synthetic construct
  misc_feature 1..22: note = chemically synthesized
  source 1..22: mol_type = other DNA
tgtgccaagtgaccagccacaa

SEQ ID NO: 43377 - DNA, 22 bp, synthetic construct
  misc_feature 1..22: note = chemically synthesized
  source 1..22: mol_type = other DNA
gtttgaccagcacctatctcaa

SEQ ID NO: 43378 - DNA, 22 bp, synthetic construct
  misc_feature 1..22: note = chemically synthesized
  source 1..22: mol_type = other DNA
tttgaccagcacctatctcaaa

SEQ ID NO: 43379 - DNA, 22 bp, synthetic construct
  misc_feature 1..22: note = chemically synthesized
  source 1..22: mol_type = other DNA
gaccagcacctatctcaaaaga

SEQ ID NO: 43380 - DNA, 22 bp, synthetic construct
  misc_feature 1..22: note = chemically synthesized
  source 1..22: mol_type = other DNA
accagcacctatctcaaaagaa

SEQ ID NO: 43381 - DNA, 22 bp, synthetic construct
  misc_feature 1..22: note = chemically synthesized
  source 1..22: mol_type = other DNA
tctcaaaagaaaattctgagta

SEQ ID NO: 43382 - DNA, 22 bp, synthetic construct
  misc_feature 1..22: note = chemically synthesized
  source 1..22: mol_type = other DNA
aaaagaaaattctgagtagaag

SEQ ID NO: 43383 - DNA, 22 bp, synthetic construct
  misc_feature 1..22: note = chemically synthesized
  source 1..22: mol_type = other DNA
tgagtagaagaggaagcacctg

SEQ ID NO: 43384 - DNA, 22 bp, synthetic construct
  misc_feature 1..22: note = chemically synthesized
  source 1..22: mol_type = other DNA
agtagaagaggaagcacctgaa

SEQ ID NO: 43385 - DNA, 22 bp, synthetic construct
  misc_feature 1..22: note = chemically synthesized
  source 1..22: mol_type = other DNA
aaggaagctgaaaagaaagtct

SEQ ID NO: 43386 - DNA, 22 bp, synthetic construct
  misc_feature 1..22: note = chemically synthesized
  source 1..22: mol_type = other DNA
aaaagaaagtctgacatttgaa

SEQ ID NO: 43387 - DNA, 22 bp, synthetic construct
  misc_feature 1..22: note = chemically synthesized
  source 1..22: mol_type = other DNA
acatttgaaattctaacagagg

SEQ ID NO: 43388 - DNA, 22 bp, synthetic construct
  misc_feature 1..22: note = chemically synthesized
  source 1..22: mol_type = other DNA
gaaattctaacagaggttcttt

SEQ ID NO: 43389 - DNA, 22 bp, synthetic construct
  misc_feature 1..22: note = chemically synthesized
  source 1..22: mol_type = other DNA
aaattctaacagaggttctttc

SEQ ID NO: 43390 - DNA, 22 bp, synthetic construct
  misc_feature 1..22: note = chemically synthesized
  source 1..22: mol_type = other DNA
taacagaggttctttcccctct

SEQ ID NO: 43391 - DNA, 22 bp, synthetic construct
  misc_feature 1..22: note = chemically synthesized
  source 1..22: mol_type = other DNA
acagaggttctttcccctctag

SEQ ID NO: 43392 - DNA, 22 bp, synthetic construct
  misc_feature 1..22: note = chemically synthesized
  source 1..22: mol_type = other DNA
tttcccctctaggacactctgg

SEQ ID NO: 43393 - DNA, 22 bp, synthetic construct
  misc_feature 1..22: note = chemically synthesized
  source 1..22: mol_type = other DNA
tcccctctaggacactctgggt

SEQ ID NO: 43394 - DNA, 22 bp, synthetic construct
  misc_feature 1..22: note = chemically synthesized
  source 1..22: mol_type = other DNA
cccctctaggacactctgggtc

SEQ ID NO: 43395 - DNA, 22 bp, synthetic construct
  misc_feature 1..22: note = chemically synthesized
  source 1..22: mol_type = other DNA
ccctctaggacactctgggtca

SEQ ID NO: 43396 - DNA, 22 bp, synthetic construct
  misc_feature 1..22: note = chemically synthesized
  source 1..22: mol_type = other DNA
taggacactctgggtcactagc

SEQ ID NO: 43397 - DNA, 22 bp, synthetic construct
  misc_feature 1..22: note = chemically synthesized
  source 1..22: mol_type = other DNA
ggacactctgggtcactagcat

SEQ ID NO: 43398 - DNA, 22 bp, synthetic construct
  misc_feature 1..22: note = chemically synthesized
  source 1..22: mol_type = other DNA
tgggtcactagcatctctgctt

SEQ ID NO: 43399 - DNA, 22 bp, synthetic construct
  misc_feature 1..22: note = chemically synthesized
  source 1..22: mol_type = other DNA
ggtcactagcatctctgctttc

SEQ ID NO: 43400 - DNA, 22 bp, synthetic construct
  misc_feature 1..22: note = chemically synthesized
  source 1..22: mol_type = other DNA
gcatctctgctttccttgttcc

SEQ ID NO: 43401 - DNA, 22 bp, synthetic construct
  misc_feature 1..22: note = chemically synthesized
  source 1..22: mol_type = other DNA
tgctttccttgttccctggctc

SEQ ID NO: 43402 - DNA, 22 bp, synthetic construct
  misc_feature 1..22: note = chemically synthesized
  source 1..22: mol_type = other DNA
ctttccttgttccctggctcat

SEQ ID NO: 43403 - DNA, 22 bp, synthetic construct
  misc_feature 1..22: note = chemically synthesized
  source 1..22: mol_type = other DNA
tccttgttccctggctcatctc

SEQ ID NO: 43404 - DNA, 22 bp, synthetic construct
  misc_feature 1..22: note = chemically synthesized
  source 1..22: mol_type = other DNA
ccttgttccctggctcatctcc

SEQ ID NO: 43405 - DNA, 22 bp, synthetic construct
  misc_feature 1..22: note = chemically synthesized
  source 1..22: mol_type = other DNA
cttgttccctggctcatctcct

SEQ ID NO: 43406 - DNA, 22 bp, synthetic construct
  misc_feature 1..22: note = chemically synthesized
  source 1..22: mol_type = other DNA
gttccctggctcatctcctgag

SEQ ID NO: 43407 - DNA, 22 bp, synthetic construct
  misc_feature 1..22: note = chemically synthesized
  source 1..22: mol_type = other DNA
ttccctggctcatctcctgagc

SEQ ID NO: 43408 - DNA, 22 bp, synthetic construct
  misc_feature 1..22: note = chemically synthesized
  source 1..22: mol_type = other DNA
cctggctcatctcctgagcccc

SEQ ID NO: 43409 - DNA, 22 bp, synthetic construct
  misc_feature 1..22: note = chemically synthesized
  source 1..22: mol_type = other DNA
gctcatctcctgagcccccggg

SEQ ID NO: 43410 - DNA, 22 bp, synthetic construct
  misc_feature 1..22: note = chemically synthesized
  source 1..22: mol_type = other DNA
atctcctgagcccccgggccgt

SEQ ID NO: 43411 - DNA, 22 bp, synthetic construct
  misc_feature 1..22: note = chemically synthesized
  source 1..22: mol_type = other DNA
ctgagcccccgggccgttctcc

SEQ ID NO: 43412 - DNA, 22 bp, synthetic construct
  misc_feature 1..22: note = chemically synthesized
  source 1..22: mol_type = other DNA
agcccccgggccgttctccttt

SEQ ID NO: 43413 - DNA, 22 bp, synthetic construct
  misc_feature 1..22: note = chemically synthesized
  source 1..22: mol_type = other DNA
tcctttccaactgtctatttac

SEQ ID NO: 43414 - DNA, 22 bp, synthetic construct
  misc_feature 1..22: note = chemically synthesized
  source 1..22: mol_type = other DNA
ctttccaactgtctatttacta

SEQ ID NO: 43415 - DNA, 22 bp, synthetic construct
  misc_feature 1..22: note = chemically synthesized
  source 1..22: mol_type = other DNA
tccaactgtctatttactaacc

SEQ ID NO: 43416 - DNA, 22 bp, synthetic construct
  misc_feature 1..22: note = chemically synthesized
  source 1..22: mol_type = other DNA
ccaactgtctatttactaacca

SEQ ID NO: 43417 - DNA, 22 bp, synthetic construct
  misc_feature 1..22: note = chemically synthesized
  source 1..22: mol_type = other DNA
caactgtctatttactaaccac

SEQ ID NO: 43418 - DNA, 22 bp, synthetic construct
  misc_feature 1..22: note = chemically synthesized
  source 1..22: mol_type = other DNA
tctatttactaaccacttttat

SEQ ID NO: 43419 - DNA, 22 bp, synthetic construct
  misc_feature 1..22: note = chemically synthesized
  source 1..22: mol_type = other DNA
tttactaaccacttttatcagc

SEQ ID NO: 43420 - DNA, 22 bp, synthetic construct
  misc_feature 1..22: note = chemically synthesized
  source 1..22: mol_type = other DNA
actaaccacttttatcagcccc

SEQ ID NO: 43421 - DNA, 22 bp, synthetic construct
  misc_feature 1..22: note = chemically synthesized
  source 1..22: mol_type = other DNA
ctaaccacttttatcagccccc

SEQ ID NO: 43422 - DNA, 22 bp, synthetic construct
  misc_feature 1..22: note = chemically synthesized
  source 1..22: mol_type = other DNA
accacttttatcagcccccctc

SEQ ID NO: 43423 - DNA, 22 bp, synthetic construct
  misc_feature 1..22: note = chemically synthesized
  source 1..22: mol_type = other DNA
ttatcagcccccctctcacccc

SEQ ID NO: 43424 - DNA, 22 bp, synthetic construct
  misc_feature 1..22: note = chemically synthesized
  source 1..22: mol_type = other DNA
tatcagcccccctctcacccca

SEQ ID NO: 43425 - DNA, 22 bp, synthetic construct
  misc_feature 1..22: note = chemically synthesized
  source 1..22: mol_type = other DNA
atcagcccccctctcaccccat

SEQ ID NO: 43426 - DNA, 22 bp, synthetic construct
  misc_feature 1..22: note = chemically synthesized
  source 1..22: mol_type = other DNA
tcagcccccctctcaccccatc

SEQ ID NO: 43427 - DNA, 22 bp, synthetic construct
  misc_feature 1..22: note = chemically synthesized
  source 1..22: mol_type = other DNA
tcaccccatccaaaaatgttta

SEQ ID NO: 43428 - DNA, 22 bp, synthetic construct
  misc_feature 1..22: note = chemically synthesized
  source 1..22: mol_type = other DNA
accccatccaaaaatgtttact

SEQ ID NO: 43429 - DNA, 22 bp, synthetic construct
  misc_feature 1..22: note = chemically synthesized
  source 1..22: mol_type = other DNA
actcaagttcaggctagcttaa

SEQ ID NO: 43430 - DNA, 22 bp, synthetic construct
  misc_feature 1..22: note = chemically synthesized
  source 1..22: mol_type = other DNA
ctcaagttcaggctagcttaat

SEQ ID NO: 43431 - DNA, 22 bp, synthetic construct
  misc_feature 1..22: note = chemically synthesized
  source 1..22: mol_type = other DNA
aagttcaggctagcttaataac

SEQ ID NO: 43432 - DNA, 22 bp, synthetic construct
  misc_feature 1..22: note = chemically synthesized
  source 1..22: mol_type = other DNA
aggctagcttaataacccccaa

SEQ ID NO: 43433 - DNA, 22 bp, synthetic construct
  misc_feature 1..22: note = chemically synthesized
  source 1..22: mol_type = other DNA
gcttaataacccccaaagcagg

SEQ ID NO: 43434 - DNA, 22 bp, synthetic construct
  misc_feature 1..22: note = chemically synthesized
  source 1..22: mol_type = other DNA
aataacccccaaagcaggagga

SEQ ID NO: 43435 - DNA, 22 bp, synthetic construct
  misc_feature 1..22: note = chemically synthesized
  source 1..22: mol_type = other DNA
ataacccccaaagcaggaggac

SEQ ID NO: 43436 - DNA, 22 bp, synthetic construct
  misc_feature 1..22: note = chemically synthesized
  source 1..22: mol_type = other DNA
ttaaagagagatcacagggata

SEQ ID NO: 43437 - DNA, 22 bp, synthetic construct
  misc_feature 1..22: note = chemically synthesized
  source 1..22: mol_type = other DNA
aagagagatcacagggatatga

SEQ ID NO: 43438 - DNA, 22 bp, synthetic construct
  misc_feature 1..22: note = chemically synthesized
  source 1..22: mol_type = other DNA
tgatgcctgccttattttgtca

SEQ ID NO: 43439 - DNA, 22 bp, synthetic construct
  misc_feature 1..22: note = chemically synthesized
  source 1..22: mol_type = other DNA
gatgcctgccttattttgtcac

SEQ ID NO: 43440 - DNA, 22 bp, synthetic construct
  misc_feature 1..22: note = chemically synthesized
  source 1..22: mol_type = other DNA
atgcctgccttattttgtcaca

SEQ ID NO: 43441 - DNA, 22 bp, synthetic construct
  misc_feature 1..22: note = chemically synthesized
  source 1..22: mol_type = other DNA
ccttattttgtcacatatcatc

SEQ ID NO: 43442 - DNA, 22 bp, synthetic construct
  misc_feature 1..22: note = chemically synthesized
  source 1..22: mol_type = other DNA
attttgtcacatatcatcaaaa

SEQ ID NO: 43443 - DNA, 22 bp, synthetic construct
  misc_feature 1..22: note = chemically synthesized
  source 1..22: mol_type = other DNA
ttttgtcacatatcatcaaaat

SEQ ID NO: 43444 - DNA, 22 bp, synthetic construct
  misc_feature 1..22: note = chemically synthesized
  source 1..22: mol_type = other DNA
tgtcacatatcatcaaaatgat

SEQ ID NO: 43445 - DNA, 22 bp, synthetic construct
  misc_feature 1..22: note = chemically synthesized
  source 1..22: mol_type = other DNA
gtcacatatcatcaaaatgata

SEQ ID NO: 43446 - DNA, 22 bp, synthetic construct
  misc_feature 1..22: note = chemically synthesized
  source 1..22: mol_type = other DNA
tcacatatcatcaaaatgataa

SEQ ID NO: 43447 - DNA, 22 bp, synthetic construct
  misc_feature 1..22: note = chemically synthesized
  source 1..22: mol_type = other DNA
tcatgaaacaccatccatgccc

SEQ ID NO: 43448 - DNA, 22 bp, synthetic construct
  misc_feature 1..22: note = chemically synthesized
  source 1..22: mol_type = other DNA
agtatcccaacatggatggact

SEQ ID NO: 43449 - DNA, 22 bp, synthetic construct
  misc_feature 1..22: note = chemically synthesized
  source 1..22: mol_type = other DNA
gaggagagggacaagggaccaa

SEQ ID NO: 43450 - DNA, 22 bp, synthetic construct
  misc_feature 1..22: note = chemically synthesized
  source 1..22: mol_type = other DNA
atgggcccttgattctgaacgt

SEQ ID NO: 43451 - DNA, 22 bp, synthetic construct
  misc_feature 1..22: note = chemically synthesized
  source 1..22: mol_type = other DNA
gattctgaacgtcattcctgcc

SEQ ID NO: 43452 - DNA, 22 bp, synthetic construct
  misc_feature 1..22: note = chemically synthesized
  source 1..22: mol_type = other DNA
attctgaacgtcattcctgccc

SEQ ID NO: 43453 - DNA, 22 bp, synthetic construct
  misc_feature 1..22: note = chemically synthesized
  source 1..22: mol_type = other DNA
tgaacgtcattcctgcccactc

SEQ ID NO: 43454 - DNA, 22 bp, synthetic construct
  misc_feature 1..22: note = chemically synthesized
  source 1..22: mol_type = other DNA
aacgtcattcctgcccactccc

SEQ ID NO: 43455 - DNA, 22 bp, synthetic construct
  misc_feature 1..22: note = chemically synthesized
  source 1..22: mol_type = other DNA
ctgcccactccccatctgcaat

SEQ ID NO: 43456 - DNA, 22 bp, synthetic construct
  misc_feature 1..22: note = chemically synthesized
  source 1..22: mol_type = other DNA
cccactccccatctgcaatggg

SEQ ID NO: 43457 - DNA, 22 bp, synthetic construct
  misc_feature 1..22: note = chemically synthesized
  source 1..22: mol_type = other DNA
cccatctgcaatgggggcaaag

SEQ ID NO: 43458 - DNA, 22 bp, synthetic construct
  misc_feature 1..22: note = chemically synthesized
  source 1..22: mol_type = other DNA
caatgggggcaaaggcaaaagg

SEQ ID NO: 43459 - DNA, 22 bp, synthetic construct
  misc_feature 1..22: note = chemically synthesized
  source 1..22: mol_type = other DNA
tccaagatttaaacagtcctct

SEQ ID NO: 43460 - DNA, 22 bp, synthetic construct
  misc_feature 1..22: note = chemically synthesized
  source 1..22: mol_type = other DNA
ccaagatttaaacagtcctcta

SEQ ID NO: 43461 - DNA, 22 bp, synthetic construct
  misc_feature 1..22: note = chemically synthesized
  source 1..22: mol_type = other DNA
caagatttaaacagtcctctat

SEQ ID NO: 43462 - DNA, 22 bp, synthetic construct
  misc_feature 1..22: note = chemically synthesized
  source 1..22: mol_type = other DNA
aaacagtcctctatattagtaa

SEQ ID NO: 43463 - DNA, 22 bp, synthetic construct
  misc_feature 1..22: note = chemically synthesized
  source 1..22: mol_type = other DNA
aacagtcctctatattagtaac

SEQ ID NO: 43464 - DNA, 22 bp, synthetic construct
  misc_feature 1..22: note = chemically synthesized
  source 1..22: mol_type = other DNA
tatattagtaacagacccatgt

SEQ ID NO: 43465 - DNA, 22 bp, synthetic construct
  misc_feature 1..22: note = chemically synthesized
  source 1..22: mol_type = other DNA
tattagtaacagacccatgtgc

SEQ ID NO: 43466 - DNA, 22 bp, synthetic construct
  misc_feature 1..22: note = chemically synthesized
  source 1..22: mol_type = other DNA
gtaacagacccatgtgctaggc

SEQ ID NO: 43467 - DNA, 22 bp, synthetic construct
  misc_feature 1..22: note = chemically synthesized
  source 1..22: mol_type = other DNA
ggctcctacaatatctggttcc

SEQ ID NO: 43468 - DNA, 22 bp, synthetic construct
  misc_feature 1..22: note = chemically synthesized
  source 1..22: mol_type = other DNA
ctacaatatctggttccattct

SEQ ID NO: 43469 - DNA, 22 bp, synthetic construct
  misc_feature 1..22: note = chemically synthesized
  source 1..22: mol_type = other DNA
caatatctggttccattctgct

SEQ ID NO: 43470 - DNA, 22 bp, synthetic construct
  misc_feature 1..22: note = chemically synthesized
  source 1..22: mol_type = other DNA
gttccattctgctagtgaaagg

SEQ ID NO: 43471 - DNA, 22 bp, synthetic construct
  misc_feature 1..22: note = chemically synthesized
  source 1..22: mol_type = other DNA
cattctgctagtgaaaggaaac

SEQ ID NO: 43472 - DNA, 22 bp, synthetic construct
  misc_feature 1..22: note = chemically synthesized
  source 1..22: mol_type = other DNA
tgctagtgaaaggaaaccctac

SEQ ID NO: 43473 - DNA, 22 bp, synthetic construct
  misc_feature 1..22: note = chemically synthesized
  source 1..22: mol_type = other DNA
ctagtgaaaggaaaccctacgg

SEQ ID NO: 43474 - DNA, 22 bp, synthetic construct
  misc_feature 1..22: note = chemically synthesized
  source 1..22: mol_type = other DNA
gtgaaaggaaaccctacggtca

SEQ ID NO: 43475 - DNA, 22 bp, synthetic construct
  misc_feature 1..22: note = chemically synthesized
  source 1..22: mol_type = other DNA
cggtcaaccaactccatcctct

SEQ ID NO: 43476 - DNA, 22 bp, synthetic construct
  misc_feature 1..22: note = chemically synthesized
  source 1..22: mol_type = other DNA
catcctctagaacatataagtc

SEQ ID NO: 43477 - DNA, 22 bp, synthetic construct
  misc_feature 1..22: note = chemically synthesized
  source 1..22: mol_type = other DNA
tagaacatataagtcaacaggg

SEQ ID NO: 43478 - DNA, 22 bp, synthetic construct
  misc_feature 1..22: note = chemically synthesized
  source 1..22: mol_type = other DNA
gaacatataagtcaacagggga

SEQ ID NO: 43479 - DNA, 22 bp, synthetic construct
  misc_feature 1..22: note = chemically synthesized
  source 1..22: mol_type = other DNA
ggcatgaagggtataacagaga

SEQ ID NO: 43480 - DNA, 22 bp, synthetic construct
  misc_feature 1..22: note = chemically synthesized
  source 1..22: mol_type = other DNA
caacaactcatccacccccttt

SEQ ID NO: 43481 - DNA, 22 bp, synthetic construct
  misc_feature 1..22: note = chemically synthesized
  source 1..22: mol_type = other DNA
aacaactcatccaccccctttg

SEQ ID NO: 43482 - DNA, 22 bp, synthetic construct
  misc_feature 1..22: note = chemically synthesized
  source 1..22: mol_type = other DNA
atccaccccctttgcagagtcc

SEQ ID NO: 43483 - DNA, 22 bp, synthetic construct
  misc_feature 1..22: note = chemically synthesized
  source 1..22: mol_type = other DNA
tgcagagtcctcacttaacatc

SEQ ID NO: 43484 - DNA, 22 bp, synthetic construct
  misc_feature 1..22: note = chemically synthesized
  source 1..22: mol_type = other DNA
gcagagtcctcacttaacatcc

SEQ ID NO: 43485 - DNA, 22 bp, synthetic construct
  misc_feature 1..22: note = chemically synthesized
  source 1..22: mol_type = other DNA
cagagtcctcacttaacatccc

SEQ ID NO: 43486 - DNA, 22 bp, synthetic construct
  misc_feature 1..22: note = chemically synthesized
  source 1..22: mol_type = other DNA
acttaacatcccctagcatgct

SEQ ID NO: 43487 - DNA, 22 bp, synthetic construct
  misc_feature 1..22: note = chemically synthesized
  source 1..22: mol_type = other DNA
aacatcccctagcatgctgcct

SEQ ID NO: 43488 - DNA, 22 bp, synthetic construct
  misc_feature 1..22: note = chemically synthesized
  source 1..22: mol_type = other DNA
acatcccctagcatgctgcctt

SEQ ID NO: 43489 - DNA, 22 bp, synthetic construct
  misc_feature 1..22: note = chemically synthesized
  source 1..22: mol_type = other DNA
gcatgctgcctttgtcttctga

SEQ ID NO: 43490 - DNA, 22 bp, synthetic construct
  misc_feature 1..22: note = chemically synthesized
  source 1..22: mol_type = other DNA
cctttgtcttctgatcagagta

SEQ ID NO: 43491 - DNA, 22 bp, synthetic construct
  misc_feature 1..22: note = chemically synthesized
  source 1..22: mol_type = other DNA
tgtcttctgatcagagtatttc

SEQ ID NO: 43492 - DNA, 22 bp, synthetic construct
  misc_feature 1..22: note = chemically synthesized
  source 1..22: mol_type = other DNA
gtcttctgatcagagtatttca

SEQ ID NO: 43493 - DNA, 22 bp, synthetic construct
  misc_feature 1..22: note = chemically synthesized
  source 1..22: mol_type = other DNA
tcttctgatcagagtatttcag

SEQ ID NO: 43494 - DNA, 22 bp, synthetic construct
  misc_feature 1..22: note = chemically synthesized
  source 1..22: mol_type = other DNA
ctgatcagagtatttcagcagc

SEQ ID NO: 43495 - DNA, 22 bp, synthetic construct
  misc_feature 1..22: note = chemically synthesized
  source 1..22: mol_type = other DNA
tgatcagagtatttcagcagcc

SEQ ID NO: 43496 - DNA, 22 bp, synthetic construct
  misc_feature 1..22: note = chemically synthesized
  source 1..22: mol_type = other DNA
atcagagtatttcagcagccct

SEQ ID NO: 43497 - DNA, 22 bp, synthetic construct
  misc_feature 1..22: note = chemically synthesized
  source 1..22: mol_type = other DNA
cagcagccctctgtgatctata

SEQ ID NO: 43498 - DNA, 22 bp, synthetic construct
  misc_feature 1..22: note = chemically synthesized
  source 1..22: mol_type = other DNA
agcagccctctgtgatctatag

SEQ ID NO: 43499 - DNA, 22 bp, synthetic construct
  misc_feature 1..22: note = chemically synthesized
  source 1..22: mol_type = other DNA
tgtgatctataggatatggtcc

SEQ ID NO: 43500 - DNA, 22 bp, synthetic construct
  misc_feature 1..22: note = chemically synthesized
  source 1..22: mol_type = other DNA
tgatctataggatatggtccaa

SEQ ID NO: 43501 - DNA, 22 bp, synthetic construct
  misc_feature 1..22: note = chemically synthesized
  source 1..22: mol_type = other DNA
taggatatggtccaactcctta

SEQ ID NO: 43502 - DNA, 22 bp, synthetic construct
  misc_feature 1..22: note = chemically synthesized
  source 1..22: mol_type = other DNA
cttaagccatcattccagagct

SEQ ID NO: 43503 - DNA, 22 bp, synthetic construct
  misc_feature 1..22: note = chemically synthesized
  source 1..22: mol_type = other DNA
aagccatcattccagagctcca

SEQ ID NO: 43504 - DNA, 22 bp, synthetic construct
  misc_feature 1..22: note = chemically synthesized
  source 1..22: mol_type = other DNA
agccatcattccagagctccac

SEQ ID NO: 43505 - DNA, 22 bp, synthetic construct
  misc_feature 1..22: note = chemically synthesized
  source 1..22: mol_type = other DNA
cagagctccacaatccaactcc

SEQ ID NO: 43506 - DNA, 22 bp, synthetic construct
  misc_feature 1..22: note = chemically synthesized
  source 1..22: mol_type = other DNA
cacaatccaactccaattttct

SEQ ID NO: 43507 - DNA, 22 bp, synthetic construct
  misc_feature 1..22: note = chemically synthesized
  source 1..22: mol_type = other DNA
caattttctattccagtcttag

SEQ ID NO: 43508 - DNA, 22 bp, synthetic construct
  misc_feature 1..22: note = chemically synthesized
  source 1..22: mol_type = other DNA
tctattccagtcttagttcccc

SEQ ID NO: 43509 - DNA, 22 bp, synthetic construct
  misc_feature 1..22: note = chemically synthesized
  source 1..22: mol_type = other DNA
ctattccagtcttagttccccg

SEQ ID NO: 43510 - DNA, 22 bp, synthetic construct
  misc_feature 1..22: note = chemically synthesized
  source 1..22: mol_type = other DNA
tattccagtcttagttccccgt

SEQ ID NO: 43511 - DNA, 22 bp, synthetic construct
  misc_feature 1..22: note = chemically synthesized
  source 1..22: mol_type = other DNA
ttccagtcttagttccccgtac

SEQ ID NO: 43512 - DNA, 22 bp, synthetic construct
  misc_feature 1..22: note = chemically synthesized
  source 1..22: mol_type = other DNA
cagtcttagttccccgtaccca

SEQ ID NO: 43513 - DNA, 22 bp, synthetic construct
  misc_feature 1..22: note = chemically synthesized
  source 1..22: mol_type = other DNA
agttccccgtacccatcaagga

SEQ ID NO: 43514 - DNA, 22 bp, synthetic construct
  misc_feature 1..22: note = chemically synthesized
  source 1..22: mol_type = other DNA
gttccccgtacccatcaaggaa

SEQ ID NO: 43515 - DNA, 22 bp, synthetic construct
  misc_feature 1..22: note = chemically synthesized
  source 1..22: mol_type = other DNA
cccgtacccatcaaggaaaata

SEQ ID NO: 43516 - DNA, 22 bp, synthetic construct
  misc_feature 1..22: note = chemically synthesized
  source 1..22: mol_type = other DNA
tgcccaagtaaaaatcccttcc

SEQ ID NO: 43517 - DNA, 22 bp, synthetic construct
  misc_feature 1..22: note = chemically synthesized
  source 1..22: mol_type = other DNA
cccaagtaaaaatcccttccgt

SEQ ID NO: 43518 - DNA, 22 bp, synthetic construct
  misc_feature 1..22: note = chemically synthesized
  source 1..22: mol_type = other DNA
ccgttctcatttccttcctggc

SEQ ID NO: 43519 - DNA, 22 bp, synthetic construct
  misc_feature 1..22: note = chemically synthesized
  source 1..22: mol_type = other DNA
cgttctcatttccttcctggct

SEQ ID NO: 43520 - DNA, 22 bp, synthetic construct
  misc_feature 1..22: note = chemically synthesized
  source 1..22: mol_type = other DNA
tcatttccttcctggcttttct

SEQ ID NO: 43521 - DNA, 22 bp, synthetic construct
  misc_feature 1..22: note = chemically synthesized
  source 1..22: mol_type = other DNA
atttccttcctggcttttcttc

SEQ ID NO: 43522 - DNA, 22 bp, synthetic construct
  misc_feature 1..22: note = chemically synthesized
  source 1..22: mol_type = other DNA
ccttcctggcttttcttcttct

SEQ ID NO: 43523 - DNA, 22 bp, synthetic construct
  misc_feature 1..22: note = chemically synthesized
  source 1..22: mol_type = other DNA
cttcctggcttttcttcttctt

SEQ ID NO: 43524 - DNA, 22 bp, synthetic construct
  misc_feature 1..22: note = chemically synthesized
  source 1..22: mol_type = other DNA
cctggcttttcttcttcttctc

SEQ ID NO: 43525 - DNA, 22 bp, synthetic construct
  misc_feature 1..22: note = chemically synthesized
  source 1..22: mol_type = other DNA
ctggcttttcttcttcttctct

SEQ ID NO: 43526 - DNA, 22 bp, synthetic construct
  misc_feature 1..22: note = chemically synthesized
  source 1..22: mol_type = other DNA
gcttttcttcttcttctcttac

SEQ ID NO: 43527 - DNA, 22 bp, synthetic construct
  misc_feature 1..22: note = chemically synthesized
  source 1..22: mol_type = other DNA
ttcttcttcttctcttacctcc

SEQ ID NO: 43528 - DNA, 22 bp, synthetic construct
  misc_feature 1..22: note = chemically synthesized
  source 1..22: mol_type = other DNA
tcttcttcttctcttacctcct

SEQ ID NO: 43529 - DNA, 22 bp, synthetic construct
  misc_feature 1..22: note = chemically synthesized
  source 1..22: mol_type = other DNA
cttcttcttctcttacctcctg

SEQ ID NO: 43530 - DNA, 22 bp, synthetic construct
  misc_feature 1..22: note = chemically synthesized
  source 1..22: mol_type = other DNA
ttcttcttctcttacctcctgg

SEQ ID NO: 43531 - DNA, 22 bp, synthetic construct
  misc_feature 1..22: note = chemically synthesized
  source 1..22: mol_type = other DNA
cttcttctcttacctcctggaa

SEQ ID NO: 43532 - DNA, 22 bp, synthetic construct
  misc_feature 1..22: note = chemically synthesized
  source 1..22: mol_type = other DNA
ttcttctcttacctcctggaat

SEQ ID NO: 43533 - DNA, 22 bp, synthetic construct
  misc_feature 1..22: note = chemically synthesized
  source 1..22: mol_type = other DNA
cttctcttacctcctggaatcc

SEQ ID NO: 43534 - DNA, 22 bp, synthetic construct
  misc_feature 1..22: note = chemically synthesized
  source 1..22: mol_type = other DNA
ttctcttacctcctggaatcct

SEQ ID NO: 43535 - DNA, 22 bp, synthetic construct
  misc_feature 1..22: note = chemically synthesized
  source 1..22: mol_type = other DNA
ctcttacctcctggaatcctgc

SEQ ID NO: 43536 - DNA, 22 bp, synthetic construct
  misc_feature 1..22: note = chemically synthesized
  source 1..22: mol_type = other DNA
tcttacctcctggaatcctgct

SEQ ID NO: 43537 - DNA, 22 bp, synthetic construct
  misc_feature 1..22: note = chemically synthesized
  source 1..22: mol_type = other DNA
ttacctcctggaatcctgctca

SEQ ID NO: 43538 - DNA, 22 bp, synthetic construct
  misc_feature 1..22: note = chemically synthesized
  source 1..22: mol_type = other DNA
acctcctggaatcctgctcata

SEQ ID NO: 43539 - DNA, 22 bp, synthetic construct
  misc_feature 1..22: note = chemically synthesized
  source 1..22: mol_type = other DNA
cctcctggaatcctgctcatac

SEQ ID NO: 43540 - DNA, 22 bp, synthetic construct
  misc_feature 1..22: note = chemically synthesized
  source 1..22: mol_type = other DNA
ctggaatcctgctcatacttca

SEQ ID NO: 43541 - DNA, 22 bp, synthetic construct
  misc_feature 1..22: note = chemically synthesized
  source 1..22: mol_type = other DNA
gaatcctgctcatacttcaagg

SEQ ID NO: 43542 - DNA, 22 bp, synthetic construct
  misc_feature 1..22: note = chemically synthesized
  source 1..22: mol_type = other DNA
ctcatacttcaaggcctcaatg

SEQ ID NO: 43543 - DNA, 22 bp, synthetic construct
  misc_feature 1..22: note = chemically synthesized
  source 1..22: mol_type = other DNA
atacttcaaggcctcaatgaag

SEQ ID NO: 43544 - DNA, 22 bp, synthetic construct
  misc_feature 1..22: note = chemically synthesized
  source 1..22: mol_type = other DNA
caaggcctcaatgaaggtctac

SEQ ID NO: 43545 - DNA, 22 bp, synthetic construct
  misc_feature 1..22: note = chemically synthesized
  source 1..22: mol_type = other DNA
aaggcctcaatgaaggtctacc

SEQ ID NO: 43546 - DNA, 22 bp, synthetic construct
  misc_feature 1..22: note = chemically synthesized
  source 1..22: mol_type = other DNA
aatgaaggtctacctagtcacc

SEQ ID NO: 43547 - DNA, 22 bp, synthetic construct
  misc_feature 1..22: note = chemically synthesized
  source 1..22: mol_type = other DNA
cctagtcaccttagcaagaaga

SEQ ID NO: 43548 - DNA, 22 bp, synthetic construct
  misc_feature 1..22: note = chemically synthesized
  source 1..22: mol_type = other DNA
gtcaccttagcaagaagaatca

SEQ ID NO: 43549 - DNA, 22 bp, synthetic construct
  misc_feature 1..22: note = chemically synthesized
  source 1..22: mol_type = other DNA
agcaagaagaatcaatctcatc

SEQ ID NO: 43550 - DNA, 22 bp, synthetic construct
  misc_feature 1..22: note = chemically synthesized
  source 1..22: mol_type = other DNA
gcaagaagaatcaatctcatcc

SEQ ID NO: 43551 - DNA, 22 bp, synthetic construct
  misc_feature 1..22: note = chemically synthesized
  source 1..22: mol_type = other DNA
atccttctccaacctcatagaa

SEQ ID NO: 43552 - DNA, 22 bp, synthetic construct
  misc_feature 1..22: note = chemically synthesized
  source 1..22: mol_type = other DNA
ctccaacctcatagaacactca

SEQ ID NO: 43553 - DNA, 22 bp, synthetic construct
  misc_feature 1..22: note = chemically synthesized
  source 1..22: mol_type = other DNA
tccaacctcatagaacactcat

SEQ ID NO: 43554 - DNA, 22 bp, synthetic construct
  misc_feature 1..22: note = chemically synthesized
  source 1..22: mol_type = other DNA
caacctcatagaacactcatcc

SEQ ID NO: 43555 - DNA, 22 bp, synthetic construct
  misc_feature 1..22: note = chemically synthesized
  source 1..22: mol_type = other DNA
atagaacactcatcccatgcac

SEQ ID NO: 43556 - DNA, 22 bp, synthetic construct
  misc_feature 1..22: note = chemically synthesized
  source 1..22: mol_type = other DNA
atcccatgcaccactccctgac

SEQ ID NO: 43557 - DNA, 22 bp, synthetic construct
  misc_feature 1..22: note = chemically synthesized
  source 1..22: mol_type = other DNA
cctgactcatatctaggcctta

SEQ ID NO: 43558 - DNA, 22 bp, synthetic construct
  misc_feature 1..22: note = chemically synthesized
  source 1..22: mol_type = other DNA
actcatatctaggccttacatt

SEQ ID NO: 43559 - DNA, 22 bp, synthetic construct
  misc_feature 1..22: note = chemically synthesized
  source 1..22: mol_type = other DNA
atatctaggccttacattgctg

SEQ ID NO: 43560 - DNA, 22 bp, synthetic construct
  misc_feature 1..22: note = chemically synthesized
  source 1..22: mol_type = other DNA
ggccttacattgctggttaacc

SEQ ID NO: 43561 - DNA, 22 bp, synthetic construct
  misc_feature 1..22: note = chemically synthesized
  source 1..22: mol_type = other DNA
acattgctggttaaccctctat

SEQ ID NO: 43562 - DNA, 22 bp, synthetic construct
  misc_feature 1..22: note = chemically synthesized
  source 1..22: mol_type = other DNA
cattgctggttaaccctctatg

SEQ ID NO: 43563 - DNA, 22 bp, synthetic construct
  misc_feature 1..22: note = chemically synthesized
  source 1..22: mol_type = other DNA
ctggttaaccctctatgcctct

SEQ ID NO: 43564 - DNA, 22 bp, synthetic construct
  misc_feature 1..22: note = chemically synthesized
  source 1..22: mol_type = other DNA
gttaaccctctatgcctctaat

SEQ ID NO: 43565 - DNA, 22 bp, synthetic construct
  misc_feature 1..22: note = chemically synthesized
  source 1..22: mol_type = other DNA
accctctatgcctctaattaat

SEQ ID NO: 43566 - DNA, 22 bp, synthetic construct
  misc_feature 1..22: note = chemically synthesized
  source 1..22: mol_type = other DNA
tatgcctctaattaatttcatg

SEQ ID NO: 43567 - DNA, 22 bp, synthetic construct
  misc_feature 1..22: note = chemically synthesized
  source 1..22: mol_type = other DNA
tgcctctaattaatttcatgtg

SEQ ID NO: 43568 - DNA, 22 bp, synthetic construct
  misc_feature 1..22: note = chemically synthesized
  source 1..22: mol_type = other DNA
taattaatttcatgtgttccca

SEQ ID NO: 43569 - DNA, 22 bp, synthetic construct
  misc_feature 1..22: note = chemically synthesized
  source 1..22: mol_type = other DNA
attaatttcatgtgttcccaat

SEQ ID NO: 43570 - DNA, 22 bp, synthetic construct
  misc_feature 1..22: note = chemically synthesized
  source 1..22: mol_type = other DNA
atttcatgtgttcccaatgagt

SEQ ID NO: 43571 - DNA, 22 bp, synthetic construct
  misc_feature 1..22: note = chemically synthesized
  source 1..22: mol_type = other DNA
catgtgttcccaatgagtttct

SEQ ID NO: 43572 - DNA, 22 bp, synthetic construct
  misc_feature 1..22: note = chemically synthesized
  source 1..22: mol_type = other DNA
atgtgttcccaatgagtttctt

SEQ ID NO: 43573 - DNA, 22 bp, synthetic construct
  misc_feature 1..22: note = chemically synthesized
  source 1..22: mol_type = other DNA
ccaatgagtttcttcaatacag

SEQ ID NO: 43574 - DNA, 22 bp, synthetic construct
  misc_feature 1..22: note = chemically synthesized
  source 1..22: mol_type = other DNA
cttcaatacagggactctttct

SEQ ID NO: 43575 - DNA, 22 bp, synthetic construct
  misc_feature 1..22: note = chemically synthesized
  source 1..22: mol_type = other DNA
ttcaatacagggactctttctc

SEQ ID NO: 43576 - DNA, 22 bp, synthetic construct
  misc_feature 1..22: note = chemically synthesized
  source 1..22: mol_type = other DNA
caatacagggactctttctcct

SEQ ID NO: 43577 - DNA, 22 bp, synthetic construct
  misc_feature 1..22: note = chemically synthesized
  source 1..22: mol_type = other DNA
aatacagggactctttctccta

SEQ ID NO: 43578 - DNA, 22 bp, synthetic construct
  misc_feature 1..22: note = chemically synthesized
  source 1..22: mol_type = other DNA
tttctcctacttgcttctatta

SEQ ID NO: 43579 - DNA, 22 bp, synthetic construct
  misc_feature 1..22: note = chemically synthesized
  source 1..22: mol_type = other DNA
tctcctacttgcttctattata

SEQ ID NO: 43580 - DNA, 22 bp, synthetic construct
  misc_feature 1..22: note = chemically synthesized
  source 1..22: mol_type = other DNA
ctcctacttgcttctattatat

SEQ ID NO: 43581 - DNA, 22 bp, synthetic construct
  misc_feature 1..22: note = chemically synthesized
  source 1..22: mol_type = other DNA
tcctacttgcttctattatatt

SEQ ID NO: 43582 - DNA, 22 bp, synthetic construct
  misc_feature 1..22: note = chemically synthesized
  source 1..22: mol_type = other DNA
ctacttgcttctattatatttg

SEQ ID NO: 43583 - DNA, 22 bp, synthetic construct
  misc_feature 1..22: note = chemically synthesized
  source 1..22: mol_type = other DNA
cttgcttctattatatttgaaa

SEQ ID NO: 43584 - DNA, 22 bp, synthetic construct
  misc_feature 1..22: note = chemically synthesized
  source 1..22: mol_type = other DNA
gcttctattatatttgaaagta

SEQ ID NO: 43585 - DNA, 22 bp, synthetic construct
  misc_feature 1..22: note = chemically synthesized
  source 1..22: mol_type = other DNA
cttctattatatttgaaagtac

SEQ ID NO: 43586 - DNA, 22 bp, synthetic construct
  misc_feature 1..22: note = chemically synthesized
  source 1..22: mol_type = other DNA
ctattatatttgaaagtaccag

SEQ ID NO: 43587 - DNA, 22 bp, synthetic construct
  misc_feature 1..22: note = chemically synthesized
  source 1..22: mol_type = other DNA
tattatatttgaaagtaccagc

SEQ ID NO: 43588 - DNA, 22 bp, synthetic construct
  misc_feature 1..22: note = chemically synthesized
  source 1..22: mol_type = other DNA
ttatatttgaaagtaccagcac

SEQ ID NO: 43589 - DNA, 22 bp, synthetic construct
  misc_feature 1..22: note = chemically synthesized
  source 1..22: mol_type = other DNA
tatttgaaagtaccagcacagc

SEQ ID NO: 43590 - DNA, 22 bp, synthetic construct
  misc_feature 1..22: note = chemically synthesized
  source 1..22: mol_type = other DNA
gaaagtaccagcacagcatgtg

SEQ ID NO: 43591 - DNA, 22 bp, synthetic construct
  misc_feature 1..22: note = chemically synthesized
  source 1..22: mol_type = other DNA
aaagtaccagcacagcatgtga

SEQ ID NO: 43592 - DNA, 22 bp, synthetic construct
  misc_feature 1..22: note = chemically synthesized
  source 1..22: mol_type = other DNA
atatattctaggaattcaacaa

SEQ ID NO: 43593 - DNA, 22 bp, synthetic construct
  misc_feature 1..22: note = chemically synthesized
  source 1..22: mol_type = other DNA
taggaattcaacaaatagcata

SEQ ID NO: 43594 - DNA, 22 bp, synthetic construct
  misc_feature 1..22: note = chemically synthesized
  source 1..22: mol_type = other DNA
ggaattcaacaaatagcatata

SEQ ID NO: 43595 - DNA, 22 bp, synthetic construct
  misc_feature 1..22: note = chemically synthesized
  source 1..22: mol_type = other DNA
aacaaatagcatataaatgact

SEQ ID NO: 43596 - DNA, 22 bp, synthetic construct
  misc_feature 1..22: note = chemically synthesized
  source 1..22: mol_type = other DNA
atttaccttcctaaaagggaag

SEQ ID NO: 43597 - DNA, 22 bp, synthetic construct
  misc_feature 1..22: note = chemically synthesized
  source 1..22: mol_type = other DNA
accttcctaaaagggaagttat

SEQ ID NO: 43598 - DNA, 22 bp, synthetic construct
  misc_feature 1..22: note = chemically synthesized
  source 1..22: mol_type = other DNA
ccttcctaaaagggaagttatt

SEQ ID NO: 43599 - DNA, 22 bp, synthetic construct
  misc_feature 1..22: note = chemically synthesized
  source 1..22: mol_type = other DNA
cctaaaagggaagttatttttc

SEQ ID NO: 43600 - DNA, 22 bp, synthetic construct
  misc_feature 1..22: note = chemically synthesized
  source 1..22: mol_type = other DNA
ctaaaagggaagttatttttcc

SEQ ID NO: 43601 - DNA, 22 bp, synthetic construct
  misc_feature 1..22: note = chemically synthesized
  source 1..22: mol_type = other DNA
aaagggaagttatttttccaaa

SEQ ID NO: 43602 - DNA, 22 bp, synthetic construct
  misc_feature 1..22: note = chemically synthesized
  source 1..22: mol_type = other DNA
tttttccaaatatcatttctgt

SEQ ID NO: 43603 - DNA, 22 bp, synthetic construct
  misc_feature 1..22: note = chemically synthesized
  source 1..22: mol_type = other DNA
ttccaaatatcatttctgttca

SEQ ID NO: 43604 - DNA, 22 bp, synthetic construct
  misc_feature 1..22: note = chemically synthesized
  source 1..22: mol_type = other DNA
tccaaatatcatttctgttcaa

SEQ ID NO: 43605 - DNA, 22 bp, synthetic construct
  misc_feature 1..22: note = chemically synthesized
  source 1..22: mol_type = other DNA
ccaaatatcatttctgttcaaa

SEQ ID NO: 43606 - DNA, 22 bp, synthetic construct
  misc_feature 1..22: note = chemically synthesized
  source 1..22: mol_type = other DNA
caaatatcatttctgttcaaaa

SEQ ID NO: 43607 - DNA, 22 bp, synthetic construct
  misc_feature 1..22: note = chemically synthesized
  source 1..22: mol_type = other DNA
ctgttcaaaatggtaattttaa

SEQ ID NO: 43608 - DNA, 22 bp, synthetic construct
  misc_feature 1..22: note = chemically synthesized
  source 1..22: mol_type = other DNA
tgttcaaaatggtaattttaac

SEQ ID NO: 43609 - DNA, 22 bp, synthetic construct
  misc_feature 1..22: note = chemically synthesized
  source 1..22: mol_type = other DNA
ttcaaaatggtaattttaacct

SEQ ID NO: 43610 - DNA, 22 bp, synthetic construct
  misc_feature 1..22: note = chemically synthesized
  source 1..22: mol_type = other DNA
aaaatggtaattttaaccttct

SEQ ID NO: 43611 - DNA, 22 bp, synthetic construct
  misc_feature 1..22: note = chemically synthesized
  source 1..22: mol_type = other DNA
taaccttcttagcacccacaaa

SEQ ID NO: 43612 - DNA, 22 bp, synthetic construct
  misc_feature 1..22: note = chemically synthesized
  source 1..22: mol_type = other DNA
aaccttcttagcacccacaaac

SEQ ID NO: 43613 - DNA, 22 bp, synthetic construct
  misc_feature 1..22: note = chemically synthesized
  source 1..22: mol_type = other DNA
accttcttagcacccacaaaca

SEQ ID NO: 43614 - DNA, 22 bp, synthetic construct
  misc_feature 1..22: note = chemically synthesized
  source 1..22: mol_type = other DNA
cttagcacccacaaacatttcc

SEQ ID NO: 43615 - DNA, 22 bp, synthetic construct
  misc_feature 1..22: note = chemically synthesized
  source 1..22: mol_type = other DNA
ttagcacccacaaacatttccc

SEQ ID NO: 43616 - DNA, 22 bp, synthetic construct
  misc_feature 1..22: note = chemically synthesized
  source 1..22: mol_type = other DNA
agcacccacaaacatttccctt

SEQ ID NO: 43617 - DNA, 22 bp, synthetic construct
  misc_feature 1..22: note = chemically synthesized
  source 1..22: mol_type = other DNA
gcacccacaaacatttcccttc

SEQ ID NO: 43618 - DNA, 22 bp, synthetic construct
  misc_feature 1..22: note = chemically synthesized
  source 1..22: mol_type = other DNA
cccttctgatatctacttgaac

SEQ ID NO: 43619 - DNA, 22 bp, synthetic construct
  misc_feature 1..22: note = chemically synthesized
  source 1..22: mol_type = other DNA
ccttctgatatctacttgaact

SEQ ID NO: 43620 - DNA, 22 bp, synthetic construct
  misc_feature 1..22: note = chemically synthesized
  source 1..22: mol_type = other DNA
ctgatatctacttgaactttca

SEQ ID NO: 43621 - DNA, 22 bp, synthetic construct
  misc_feature 1..22: note = chemically synthesized
  source 1..22: mol_type = other DNA
tgatatctacttgaactttcag

SEQ ID NO: 43622 - DNA, 22 bp, synthetic construct
  misc_feature 1..22: note = chemically synthesized
  source 1..22: mol_type = other DNA
atatctacttgaactttcagat

SEQ ID NO: 43623 - DNA, 22 bp, synthetic construct
  misc_feature 1..22: note = chemically synthesized
  source 1..22: mol_type = other DNA
cttgaactttcagataaaaaaa

SEQ ID NO: 43624 - DNA, 22 bp, synthetic construct
  misc_feature 1..22: note = chemically synthesized
  source 1..22: mol_type = other DNA
gaactttcagataaaaaaaaaa

SEQ ID NO: 43625 - DNA, 22 bp, synthetic construct
  misc_feature 1..22: note = chemically synthesized
  source 1..22: mol_type = other DNA
aactttcagataaaaaaaaaaa

SEQ ID NO: 43626 - DNA, 22 bp, synthetic construct
  misc_feature 1..22: note = chemically synthesized
  source 1..22: mol_type = other DNA
tcagataaaaaaaaaaaagcaa

SEQ ID NO: 43627 - DNA, 22 bp, synthetic construct
  misc_feature 1..22: note = chemically synthesized
  source 1..22: mol_type = other DNA
cagataaaaaaaaaaaagcaag

SEQ ID NO: 43628 - DNA, 22 bp, synthetic construct
  misc_feature 1..22: note = chemically synthesized
  source 1..22: mol_type = other DNA
agataaaaaaaaaaaagcaagt

SEQ ID NO: 43629 - DNA, 22 bp, synthetic construct
  misc_feature 1..22: note = chemically synthesized
  source 1..22: mol_type = other DNA
cagtaacatgttatgctacaca

SEQ ID NO: 43630 - DNA, 22 bp, synthetic construct
  misc_feature 1..22: note = chemically synthesized
  source 1..22: mol_type = other DNA
tgctacacaaagattagcatga

SEQ ID NO: 43631 - DNA, 22 bp, synthetic construct
  misc_feature 1..22: note = chemically synthesized
  source 1..22: mol_type = other DNA
cacaaagattagcatgaatatc

SEQ ID NO: 43632 - DNA, 22 bp, synthetic construct
  misc_feature 1..22: note = chemically synthesized
  source 1..22: mol_type = other DNA
gcatgaatatccaccctcttta

SEQ ID NO: 43633 - DNA, 22 bp, synthetic construct
  misc_feature 1..22: note = chemically synthesized
  source 1..22: mol_type = other DNA
tttaaacagccaccccacaccc

SEQ ID NO: 43634 - DNA, 22 bp, synthetic construct
  misc_feature 1..22: note = chemically synthesized
  source 1..22: mol_type = other DNA
taaacagccaccccacaccctg

SEQ ID NO: 43635 - DNA, 22 bp, synthetic construct
  misc_feature 1..22: note = chemically synthesized
  source 1..22: mol_type = other DNA
aaacagccaccccacaccctgg

SEQ ID NO: 43636 - DNA, 22 bp, synthetic construct
  misc_feature 1..22: note = chemically synthesized
  source 1..22: mol_type = other DNA
aacagccaccccacaccctgga

SEQ ID NO: 43637 - DNA, 22 bp, synthetic construct
  misc_feature 1..22: note = chemically synthesized
  source 1..22: mol_type = other DNA
gagaagagcaaatgtgaagttt

SEQ ID NO: 43638 - DNA, 22 bp, synthetic construct
  misc_feature 1..22: note = chemically synthesized
  source 1..22: mol_type = other DNA
atgtgccaaccagactgtgcgc

SEQ ID NO: 43639 - DNA, 22 bp, synthetic construct
  misc_feature 1..22: note = chemically synthesized
  source 1..22: mol_type = other DNA
tgtgccaaccagactgtgcgcc

SEQ ID NO: 43640 - DNA, 22 bp, synthetic construct
  misc_feature 1..22: note = chemically synthesized
  source 1..22: mol_type = other DNA
tgcgccaggttggtaaagtctg

SEQ ID NO: 43641 - DNA, 22 bp, synthetic construct
  misc_feature 1..22: note = chemically synthesized
  source 1..22: mol_type = other DNA
gtaaagtctgacagagttacca

SEQ ID NO: 43642 - DNA, 22 bp, synthetic construct
  misc_feature 1..22: note = chemically synthesized
  source 1..22: mol_type = other DNA
acagagttaccaaaaaatgaca

SEQ ID NO: 43643 - DNA, 22 bp, synthetic construct
  misc_feature 1..22: note = chemically synthesized
  source 1..22: mol_type = other DNA
ccaaaaaatgacaacatcttct

SEQ ID NO: 43644 - DNA, 22 bp, synthetic construct
  misc_feature 1..22: note = chemically synthesized
  source 1..22: mol_type = other DNA
ctatatgtgaagcccaactacg

SEQ ID NO: 43645 - DNA, 22 bp, synthetic construct
  misc_feature 1..22: note = chemically synthesized
  source 1..22: mol_type = other DNA
tatatgtgaagcccaactacgt

SEQ ID NO: 43646 - DNA, 22 bp, synthetic construct
  misc_feature 1..22: note = chemically synthesized
  source 1..22: mol_type = other DNA
tatgtgaagcccaactacgtgg

SEQ ID NO: 43647 - DNA, 22 bp, synthetic construct
  misc_feature 1..22: note = chemically synthesized
  source 1..22: mol_type = other DNA
cgtggttgtgcaactctatagc

SEQ ID NO: 43648 - DNA, 22 bp, synthetic construct
  misc_feature 1..22: note = chemically synthesized
  source 1..22: mol_type = other DNA
tgcaactctatagctgactttc

SEQ ID NO: 43649 - DNA, 22 bp, synthetic construct
  misc_feature 1..22: note = chemically synthesized
  source 1..22: mol_type = other DNA
tatagctgactttcaaccatgg

SEQ ID NO: 43650 - DNA, 22 bp, synthetic construct
  misc_feature 1..22: note = chemically synthesized
  source 1..22: mol_type = other DNA
tagctgactttcaaccatggtc

SEQ ID NO: 43651 - DNA, 22 bp, synthetic construct
  misc_feature 1..22: note = chemically synthesized
  source 1..22: mol_type = other DNA
actttcaaccatggtcatctgc

SEQ ID NO: 43652 - DNA, 22 bp, synthetic construct
  misc_feature 1..22: note = chemically synthesized
  source 1..22: mol_type = other DNA
tcaaccatggtcatctgcaaag

SEQ ID NO: 43653 - DNA, 22 bp, synthetic construct
  misc_feature 1..22: note = chemically synthesized
  source 1..22: mol_type = other DNA
caaccatggtcatctgcaaaga

SEQ ID NO: 43654 - DNA, 22 bp, synthetic construct
  misc_feature 1..22: note = chemically synthesized
  source 1..22: mol_type = other DNA
aaccatggtcatctgcaaagaa

SEQ ID NO: 43655 - DNA, 22 bp, synthetic construct
  misc_feature 1..22: note = chemically synthesized
  source 1..22: mol_type = other DNA
caaagaagttagtctcagccac

SEQ ID NO: 43656 - DNA, 22 bp, synthetic construct
  misc_feature 1..22: note = chemically synthesized
  source 1..22: mol_type = other DNA
gtctcagccacctgcgcatcct

SEQ ID NO: 43657 - DNA, 22 bp, synthetic construct
  misc_feature 1..22: note = chemically synthesized
  source 1..22: mol_type = other DNA
agccacctgcgcatcctcaatg

SEQ ID NO: 43658 - DNA, 22 bp, synthetic construct
  misc_feature 1..22: note = chemically synthesized
  source 1..22: mol_type = other DNA
cgcatcctcaatgcaaaaagct

SEQ ID NO: 43659 - DNA, 22 bp, synthetic construct
  misc_feature 1..22: note = chemically synthesized
  source 1..22: mol_type = other DNA
aatgcaaaaagctaagttctaa

SEQ ID NO: 43660 - DNA, 22 bp, synthetic construct
  misc_feature 1..22: note = chemically synthesized
  source 1..22: mol_type = other DNA
agttctaaaaacgtattcttaa

SEQ ID NO: 43661 - DNA, 22 bp, synthetic construct
  misc_feature 1..22: note = chemically synthesized
  source 1..22: mol_type = other DNA
taaaaacgtattcttaatgctg

SEQ ID NO: 43662 - DNA, 22 bp, synthetic construct
  misc_feature 1..22: note = chemically synthesized
  source 1..22: mol_type = other DNA
aaaacgtattcttaatgctgtt

SEQ ID NO: 43663 - DNA, 22 bp, synthetic construct
  misc_feature 1..22: note = chemically synthesized
  source 1..22: mol_type = other DNA
ttaatgctgttttaaatgcagc

SEQ ID NO: 43664 - DNA, 22 bp, synthetic construct
  misc_feature 1..22: note = chemically synthesized
  source 1..22: mol_type = other DNA
aatgctgttttaaatgcagcac

SEQ ID NO: 43665 - DNA, 22 bp, synthetic construct
  misc_feature 1..22: note = chemically synthesized
  source 1..22: mol_type = other DNA
atgctgttttaaatgcagcact

SEQ ID NO: 43666 - DNA, 22 bp, synthetic construct
  misc_feature 1..22: note = chemically synthesized
  source 1..22: mol_type = other DNA
ttttaaatgcagcactactaaa

SEQ ID NO: 43667 - DNA, 22 bp, synthetic construct
  misc_feature 1..22: note = chemically synthesized
  source 1..22: mol_type = other DNA
taaatgcagcactactaaaaag

SEQ ID NO: 43668 - DNA, 22 bp, synthetic construct
  misc_feature 1..22: note = chemically synthesized
  source 1..22: mol_type = other DNA
aaatgcagcactactaaaaagg

SEQ ID NO: 43669 - DNA, 22 bp, synthetic construct
  misc_feature 1..22: note = chemically synthesized
  source 1..22: mol_type = other DNA
aatgcagcactactaaaaagga

SEQ ID NO: 43670 - DNA, 22 bp, synthetic construct
  misc_feature 1..22: note = chemically synthesized
  source 1..22: mol_type = other DNA
ctaaaaaggacctcattttgat

SEQ ID NO: 43671 - DNA, 22 bp, synthetic construct
  misc_feature 1..22: note = chemically synthesized
  source 1..22: mol_type = other DNA
aaaaggacctcattttgatgcc

SEQ ID NO: 43672 - DNA, 22 bp, synthetic construct
  misc_feature 1..22: note = chemically synthesized
  source 1..22: mol_type = other DNA
attttgatgccagagggcagca

SEQ ID NO: 43673 - DNA, 22 bp, synthetic construct
  misc_feature 1..22: note = chemically synthesized
  source 1..22: mol_type = other DNA
tgatgccagagggcagcaaaca

SEQ ID NO: 43674 - DNA, 22 bp, synthetic construct
  misc_feature 1..22: note = chemically synthesized
  source 1..22: mol_type = other DNA
gatgccagagggcagcaaacat

SEQ ID NO: 43675 - DNA, 22 bp, synthetic construct
  misc_feature 1..22: note = chemically synthesized
  source 1..22: mol_type = other DNA
atgccagagggcagcaaacatg

SEQ ID NO: 43676 - DNA, 22 bp, synthetic construct
  misc_feature 1..22: note = chemically synthesized
  source 1..22: mol_type = other DNA
ttggcccccttcagctattaag

SEQ ID NO: 43677 - DNA, 22 bp, synthetic construct
  misc_feature 1..22: note = chemically synthesized
  source 1..22: mol_type = other DNA
tggcccccttcagctattaagt

SEQ ID NO: 43678 - DNA, 22 bp, synthetic construct
  misc_feature 1..22: note = chemically synthesized
  source 1..22: mol_type = other DNA
ggcccccttcagctattaagta

SEQ ID NO: 43679 - DNA, 22 bp, synthetic construct
  misc_feature 1..22: note = chemically synthesized
  source 1..22: mol_type = other DNA
gcccccttcagctattaagtac

SEQ ID NO: 43680 - DNA, 22 bp, synthetic construct
  misc_feature 1..22: note = chemically synthesized
  source 1..22: mol_type = other DNA
cagctattaagtacagtaaaag

SEQ ID NO: 43681 - DNA, 22 bp, synthetic construct
  misc_feature 1..22: note = chemically synthesized
  source 1..22: mol_type = other DNA
agctattaagtacagtaaaagg

SEQ ID NO: 43682 - DNA, 22 bp, synthetic construct
  misc_feature 1..22: note = chemically synthesized
  source 1..22: mol_type = other DNA
ttaagtacagtaaaaggaagtc

SEQ ID NO: 43683 - DNA, 22 bp, synthetic construct
  misc_feature 1..22: note = chemically synthesized
  source 1..22: mol_type = other DNA
agtacagtaaaaggaagtccta

SEQ ID NO: 43684 - DNA, 22 bp, synthetic construct
  misc_feature 1..22: note = chemically synthesized
  source 1..22: mol_type = other DNA
actatcatttgaaatgctcccg

SEQ ID NO: 43685 - DNA, 22 bp, synthetic construct
  misc_feature 1..22: note = chemically synthesized
  source 1..22: mol_type = other DNA
tcatttgaaatgctcccggcca

SEQ ID NO: 43686 - DNA, 22 bp, synthetic construct
  misc_feature 1..22: note = chemically synthesized
  source 1..22: mol_type = other DNA
gaaatgctcccggccaggcgct

SEQ ID NO: 43687 - DNA, 22 bp, synthetic construct
  misc_feature 1..22: note = chemically synthesized
  source 1..22: mol_type = other DNA
aaatgctcccggccaggcgctg

SEQ ID NO: 43688 - DNA, 22 bp, synthetic construct
  misc_feature 1..22: note = chemically synthesized
  source 1..22: mol_type = other DNA
ccggccaggcgctgtggctcac

SEQ ID NO: 43689 - DNA, 22 bp, synthetic construct
  misc_feature 1..22: note = chemically synthesized
  source 1..22: mol_type = other DNA
tggctcacacctgtaatcccag

SEQ ID NO: 43690 - DNA, 22 bp, synthetic construct
  misc_feature 1..22: note = chemically synthesized
  source 1..22: mol_type = other DNA
acacctgtaatcccagcacttt

SEQ ID NO: 43691 - DNA, 22 bp, synthetic construct
  misc_feature 1..22: note = chemically synthesized
  source 1..22: mol_type = other DNA
taatcccagcactttgggaggc

SEQ ID NO: 43692 - DNA, 22 bp, synthetic construct
  misc_feature 1..22: note = chemically synthesized
  source 1..22: mol_type = other DNA
tgggaggccggggcaggaggat

SEQ ID NO: 43693 - DNA, 22 bp, synthetic construct
  misc_feature 1..22: note = chemically synthesized
  source 1..22: mol_type = other DNA
gggaggccggggcaggaggatc

SEQ ID NO: 43694 - DNA, 22 bp, synthetic construct
  misc_feature 1..22: note = chemically synthesized
  source 1..22: mol_type = other DNA
ggaggccggggcaggaggatca

SEQ ID NO: 43695 - DNA, 22 bp, synthetic construct
  misc_feature 1..22: note = chemically synthesized
  source 1..22: mol_type = other DNA
aggtcaggagttcaagatcagt

SEQ ID NO: 43696 - DNA, 22 bp, synthetic construct
  misc_feature 1..22: note = chemically synthesized
  source 1..22: mol_type = other DNA
aagatcagtttggacaacacag

SEQ ID NO: 43697 - DNA, 22 bp, synthetic construct
  misc_feature 1..22: note = chemically synthesized
  source 1..22: mol_type = other DNA
ggacaacacagtgaaaccccgt

SEQ ID NO: 43698 - DNA, 22 bp, synthetic construct
  misc_feature 1..22: note = chemically synthesized
  source 1..22: mol_type = other DNA
gacaacacagtgaaaccccgtc

SEQ ID NO: 43699 - DNA, 22 bp, synthetic construct
  misc_feature 1..22: note = chemically synthesized
  source 1..22: mol_type = other DNA
tactaaaaatacaaaattagcc

SEQ ID NO: 43700 - DNA, 22 bp, synthetic construct
  misc_feature 1..22: note = chemically synthesized
  source 1..22: mol_type = other DNA
ctaaaaatacaaaattagccgg

SEQ ID NO: 43701 - DNA, 22 bp, synthetic construct
  misc_feature 1..22: note = chemically synthesized
  source 1..22: mol_type = other DNA
aaaatacaaaattagccgggca

SEQ ID NO: 43702 - DNA, 22 bp, synthetic construct
  misc_feature 1..22: note = chemically synthesized
  source 1..22: mol_type = other DNA
gccgggcatggtaatacatgcc

SEQ ID NO: 43703 - DNA, 22 bp, synthetic construct
  misc_feature 1..22: note = chemically synthesized
  source 1..22: mol_type = other DNA
taatctcagctactcgggaggc

SEQ ID NO: 43704 - DNA, 22 bp, synthetic construct
  misc_feature 1..22: note = chemically synthesized
  source 1..22: mol_type = other DNA
agctactcgggaggctgaggca

SEQ ID NO: 43705 - DNA, 22 bp, synthetic construct
  misc_feature 1..22: note = chemically synthesized
  source 1..22: mol_type = other DNA
ctcgggaggctgaggcaggaga

SEQ ID NO: 43706 - DNA, 22 bp, synthetic construct
  misc_feature 1..22: note = chemically synthesized
  source 1..22: mol_type = other DNA
gggaggctgaggcaggagatcg

SEQ ID NO: 43707 - DNA, 22 bp, synthetic construct
  misc_feature 1..22: note = chemically synthesized
  source 1..22: mol_type = other DNA
aggcaggagatcgcttgaacct

SEQ ID NO: 43708 - DNA, 22 bp, synthetic construct
  misc_feature 1..22: note = chemically synthesized
  source 1..22: mol_type = other DNA
gaacctgggaggcagaagatgc

SEQ ID NO: 43709 - DNA, 22 bp, synthetic construct
  misc_feature 1..22: note = chemically synthesized
  source 1..22: mol_type = other DNA
aacctgggaggcagaagatgca

SEQ ID NO: 43710 - DNA, 22 bp, synthetic construct
  misc_feature 1..22: note = chemically synthesized
  source 1..22: mol_type = other DNA
ggaggcagaagatgcagtgagc

SEQ ID NO: 43711 - DNA, 22 bp, synthetic construct
  misc_feature 1..22: note = chemically synthesized
  source 1..22: mol_type = other DNA
cattccagcccgggcaacaaga

SEQ ID NO: 43712 - DNA, 22 bp, synthetic construct
  misc_feature 1..22: note = chemically synthesized
  source 1..22: mol_type = other DNA
cagcccgggcaacaagagtaaa

SEQ ID NO: 43713 - DNA, 22 bp, synthetic construct
  misc_feature 1..22: note = chemically synthesized
  source 1..22: mol_type = other DNA
cgtctcaccaaaaaaagaaaaa

SEQ ID NO: 43714 - DNA, 22 bp, synthetic construct
  misc_feature 1..22: note = chemically synthesized
  source 1..22: mol_type = other DNA
accaaaaaaagaaaaaagaaaa

SEQ ID NO: 43715 - DNA, 22 bp, synthetic construct
  misc_feature 1..22: note = chemically synthesized
  source 1..22: mol_type = other DNA
ccctcagttctccaggctgggc

SEQ ID NO: 43716 - DNA, 22 bp, synthetic construct
  misc_feature 1..22: note = chemically synthesized
  source 1..22: mol_type = other DNA
agttctccaggctgggctgact

SEQ ID NO: 43717 - DNA, 22 bp, synthetic construct
  misc_feature 1..22: note = chemically synthesized
  source 1..22: mol_type = other DNA
tccaggctgggctgactgccca

SEQ ID NO: 43718 - DNA, 22 bp, synthetic construct
  misc_feature 1..22: note = chemically synthesized
  source 1..22: mol_type = other DNA
caggctgggctgactgcccacg

SEQ ID NO: 43719 - DNA, 22 bp, synthetic construct
  misc_feature 1..22: note = chemically synthesized
  source 1..22: mol_type = other DNA
ggctgactgcccacgtcaaaac

SEQ ID NO: 43720 - DNA, 22 bp, synthetic construct
  misc_feature 1..22: note = chemically synthesized
  source 1..22: mol_type = other DNA
actgcccacgtcaaaacaccct

SEQ ID NO: 43721 - DNA, 22 bp, synthetic construct
  misc_feature 1..22: note = chemically synthesized
  source 1..22: mol_type = other DNA
cccacgtcaaaacaccctaggc

SEQ ID NO: 43722 - DNA, 22 bp, synthetic construct
  misc_feature 1..22: note = chemically synthesized
  source 1..22: mol_type = other DNA
ggcatcatcactccgtgttgag

SEQ ID NO: 43723 - DNA, 22 bp, synthetic construct
  misc_feature 1..22: note = chemically synthesized
  source 1..22: mol_type = other DNA
cgtgttgagagccaagtggcca

SEQ ID NO: 43724 - DNA, 22 bp, synthetic construct
  misc_feature 1..22: note = chemically synthesized
  source 1..22: mol_type = other DNA
agagccaagtggccaggtagga

SEQ ID NO: 43725 - DNA, 22 bp, synthetic construct
  misc_feature 1..22: note = chemically synthesized
  source 1..22: mol_type = other DNA
cgcaggcacagacgttttccat

SEQ ID NO: 43726 - DNA, 22 bp, synthetic construct
  misc_feature 1..22: note = chemically synthesized
  source 1..22: mol_type = other DNA
tccatgttaagaacccaaatcc

SEQ ID NO: 43727 - DNA, 22 bp, synthetic construct
  misc_feature 1..22: note = chemically synthesized
  source 1..22: mol_type = other DNA
ccatgttaagaacccaaatcca

SEQ ID NO: 43728 - DNA, 22 bp, synthetic construct
  misc_feature 1..22: note = chemically synthesized
  source 1..22: mol_type = other DNA
catgttaagaacccaaatccat

SEQ ID NO: 43729 - DNA, 22 bp, synthetic construct
  misc_feature 1..22: note = chemically synthesized
  source 1..22: mol_type = other DNA
agaacccaaatccatacagtcc

SEQ ID NO: 43730 - DNA, 22 bp, synthetic construct
  misc_feature 1..22: note = chemically synthesized
  source 1..22: mol_type = other DNA
agcacccaaataggttcagaaa

SEQ ID NO: 43731 - DNA, 22 bp, synthetic construct
  misc_feature 1..22: note = chemically synthesized
  source 1..22: mol_type = other DNA
gcacccaaataggttcagaaaa

SEQ ID NO: 43732 - DNA, 22 bp, synthetic construct
  misc_feature 1..22: note = chemically synthesized
  source 1..22: mol_type = other DNA
agaaaaggcagtccacacaaat

SEQ ID NO: 43733 - DNA, 22 bp, synthetic construct
  misc_feature 1..22: note = chemically synthesized
  source 1..22: mol_type = other DNA
ccaaataaatgaagttcagata

SEQ ID NO: 43734 - DNA, 22 bp, synthetic construct
  misc_feature 1..22: note = chemically synthesized
  source 1..22: mol_type = other DNA
agatattgcatttacgctaaat

SEQ ID NO: 43735 - DNA, 22 bp, synthetic construct
  misc_feature 1..22: note = chemically synthesized
  source 1..22: mol_type = other DNA
catttacgctaaataccttgga

SEQ ID NO: 43736 - DNA, 22 bp, synthetic construct
  misc_feature 1..22: note = chemically synthesized
  source 1..22: mol_type = other DNA
acgctaaataccttggaaattg

SEQ ID NO: 43737 - DNA, 22 bp, synthetic construct
  misc_feature 1..22: note = chemically synthesized
  source 1..22: mol_type = other DNA
cgctaaataccttggaaattga

SEQ ID NO: 43738 - DNA, 22 bp, synthetic construct
  misc_feature 1..22: note = chemically synthesized
  source 1..22: mol_type = other DNA
aataccttggaaattgagaggg

SEQ ID NO: 43739 - DNA, 22 bp, synthetic construct
  misc_feature 1..22: note = chemically synthesized
  source 1..22: mol_type = other DNA
ggaaattgagagggaatctgga

SEQ ID NO: 43740 - DNA, 22 bp, synthetic construct
  misc_feature 1..22: note = chemically synthesized
  source 1..22: mol_type = other DNA
gaaattgagagggaatctggag

SEQ ID NO: 43741 - DNA, 22 bp, synthetic construct
  misc_feature 1..22: note = chemically synthesized
  source 1..22: mol_type = other DNA
agagggaatctggagaggaaga

SEQ ID NO: 43742 - DNA, 22 bp, synthetic construct
  misc_feature 1..22: note = chemically synthesized
  source 1..22: mol_type = other DNA
gagaggaagatggatgtaggaa

SEQ ID NO: 43743 - DNA, 22 bp, synthetic construct
  misc_feature 1..22: note = chemically synthesized
  source 1..22: mol_type = other DNA
actttacaggaattcagcacag

SEQ ID NO: 43744 - DNA, 22 bp, synthetic construct
  misc_feature 1..22: note = chemically synthesized
  source 1..22: mol_type = other DNA
tacaggaattcagcacaggaga

SEQ ID NO: 43745 - DNA, 22 bp, synthetic construct
  misc_feature 1..22: note = chemically synthesized
  source 1..22: mol_type = other DNA
acaggaattcagcacaggagat

SEQ ID NO: 43746 - DNA, 22 bp, synthetic construct
  misc_feature 1..22: note = chemically synthesized
  source 1..22: mol_type = other DNA
caggaattcagcacaggagatg

SEQ ID NO: 43747 - DNA, 22 bp, synthetic construct
  misc_feature 1..22: note = chemically synthesized
  source 1..22: mol_type = other DNA
agcacaggagatgctacattgt

SEQ ID NO: 43748 - DNA, 22 bp, synthetic construct
  misc_feature 1..22: note = chemically synthesized
  source 1..22: mol_type = other DNA
cattgttagcatctccgcttaa

SEQ ID NO: 43749 - DNA, 22 bp, synthetic construct
  misc_feature 1..22: note = chemically synthesized
  source 1..22: mol_type = other DNA
ttagcatctccgcttaaggaga

SEQ ID NO: 43750 - DNA, 22 bp, synthetic construct
  misc_feature 1..22: note = chemically synthesized
  source 1..22: mol_type = other DNA
gcatctccgcttaaggagaaga

SEQ ID NO: 43751 - DNA, 22 bp, synthetic construct
  misc_feature 1..22: note = chemically synthesized
  source 1..22: mol_type = other DNA
cgcttaaggagaagacatactg

SEQ ID NO: 43752 - DNA, 22 bp, synthetic construct
  misc_feature 1..22: note = chemically synthesized
  source 1..22: mol_type = other DNA
aaggagaagacatactgatgaa

SEQ ID NO: 43753 - DNA, 22 bp, synthetic construct
  misc_feature 1..22: note = chemically synthesized
  source 1..22: mol_type = other DNA
aggagaagacatactgatgaat

SEQ ID NO: 43754 - DNA, 22 bp, synthetic construct
  misc_feature 1..22: note = chemically synthesized
  source 1..22: mol_type = other DNA
atgaataagactgagttggtga

SEQ ID NO: 43755 - DNA, 22 bp, synthetic construct
  misc_feature 1..22: note = chemically synthesized
  source 1..22: mol_type = other DNA
agttggtgacaggcacagtggc

SEQ ID NO: 43756 - DNA, 22 bp, synthetic construct
  misc_feature 1..22: note = chemically synthesized
  source 1..22: mol_type = other DNA
gtgacaggcacagtggctctcg

SEQ ID NO: 43757 - DNA, 22 bp, synthetic construct
  misc_feature 1..22: note = chemically synthesized
  source 1..22: mol_type = other DNA
tcgcctgtaatcccagcacttt

SEQ ID NO: 43758 - DNA, 22 bp, synthetic construct
  misc_feature 1..22: note = chemically synthesized
  source 1..22: mol_type = other DNA
gcctgtaatcccagcactttgg

SEQ ID NO: 43759 - DNA, 22 bp, synthetic construct
  misc_feature 1..22: note = chemically synthesized
  source 1..22: mol_type = other DNA
taatcccagcactttgggaggt

SEQ ID NO: 43760 - DNA, 22 bp, synthetic construct
  misc_feature 1..22: note = chemically synthesized
  source 1..22: mol_type = other DNA
tgggaggtcaaggcaggaggat

SEQ ID NO: 43761 - DNA, 22 bp, synthetic construct
  misc_feature 1..22: note = chemically synthesized
  source 1..22: mol_type = other DNA
gggaggtcaaggcaggaggatc

SEQ ID NO: 43762 - DNA, 22 bp, synthetic construct
  misc_feature 1..22: note = chemically synthesized
  source 1..22: mol_type = other DNA
ggaggtcaaggcaggaggatca

SEQ ID NO: 43763 - DNA, 22 bp, synthetic construct
  misc_feature 1..22: note = chemically synthesized
  source 1..22: mol_type = other DNA
gagcccaggagttcaagaccag

SEQ ID NO: 43764 - DNA, 22 bp, synthetic construct
  misc_feature 1..22: note = chemically synthesized
  source 1..22: mol_type = other DNA
aagaccagcctgggcaacaggg

SEQ ID NO: 43765 - DNA, 22 bp, synthetic construct
  misc_feature 1..22: note = chemically synthesized
  source 1..22: mol_type = other DNA
ggcaacagggagaaactccatc

SEQ ID NO: 43766 - DNA, 22 bp, synthetic construct
  misc_feature 1..22: note = chemically synthesized
  source 1..22: mol_type = other DNA
catctctacaaaattagccagg

SEQ ID NO: 43767 - DNA, 22 bp, synthetic construct
  misc_feature 1..22: note = chemically synthesized
  source 1..22: mol_type = other DNA
tacaaaattagccaggcatggt

SEQ ID NO: 43768 - DNA, 22 bp, synthetic construct
  misc_feature 1..22: note = chemically synthesized
  source 1..22: mol_type = other DNA
caaaattagccaggcatggtgg

SEQ ID NO: 43769 - DNA, 22 bp, synthetic construct
  misc_feature 1..22: note = chemically synthesized
  source 1..22: mol_type = other DNA
gccaggcatggtggcatgcacc

SEQ ID NO: 43770 - DNA, 22 bp, synthetic construct
  misc_feature 1..22: note = chemically synthesized
  source 1..22: mol_type = other DNA
tcgtcccagctactcaggaggc

SEQ ID NO: 43771 - DNA, 22 bp, synthetic construct
  misc_feature 1..22: note = chemically synthesized
  source 1..22: mol_type = other DNA
ctcaggaggctgaggtgacagg

SEQ ID NO: 43772 - DNA, 22 bp, synthetic construct
  misc_feature 1..22: note = chemically synthesized
  source 1..22: mol_type = other DNA
aggaggctgaggtgacaggatg

SEQ ID NO: 43773 - DNA, 22 bp, synthetic construct
  misc_feature 1..22: note = chemically synthesized
  source 1..22: mol_type = other DNA
aggtgacaggatggcttgagcc

SEQ ID NO: 43774 - DNA, 22 bp, synthetic construct
  misc_feature 1..22: note = chemically synthesized
  source 1..22: mol_type = other DNA
gagcctaggagatcaaggctgc

SEQ ID NO: 43775 - DNA, 22 bp, synthetic construct
  misc_feature 1..22: note = chemically synthesized
  source 1..22: mol_type = other DNA
agcctaggagatcaaggctgca

SEQ ID NO: 43776 - DNA, 22 bp, synthetic construct
  misc_feature 1..22: note = chemically synthesized
  source 1..22: mol_type = other DNA
ggagatcaaggctgcagtgagc

SEQ ID NO: 43777 - DNA, 22 bp, synthetic construct
  misc_feature 1..22: note = chemically synthesized
  source 1..22: mol_type = other DNA
cagtgagctatgaacatgccac

SEQ ID NO: 43778 - DNA, 22 bp, synthetic construct
  misc_feature 1..22: note = chemically synthesized
  source 1..22: mol_type = other DNA
tgaacatgccactacactctag

SEQ ID NO: 43779 - DNA, 22 bp, synthetic construct
  misc_feature 1..22: note = chemically synthesized
  source 1..22: mol_type = other DNA
cactctagcctaggcaacacag

SEQ ID NO: 43780 - DNA, 22 bp, synthetic construct
  misc_feature 1..22: note = chemically synthesized
  source 1..22: mol_type = other DNA
tagcctaggcaacacagcgaga

SEQ ID NO: 43781 - DNA, 22 bp, synthetic construct
  misc_feature 1..22: note = chemically synthesized
  source 1..22: mol_type = other DNA
gcctaggcaacacagcgagacc

SEQ ID NO: 43782 - DNA, 22 bp, synthetic construct
  misc_feature 1..22: note = chemically synthesized
  source 1..22: mol_type = other DNA
ggcaacacagcgagaccctgtc

SEQ ID NO: 43783 - DNA, 22 bp, synthetic construct
  misc_feature 1..22: note = chemically synthesized
  source 1..22: mol_type = other DNA
tctcaaaaacaaacaaacaaac

SEQ ID NO: 43784 - DNA, 22 bp, synthetic construct
  misc_feature 1..22: note = chemically synthesized
  source 1..22: mol_type = other DNA
aaaaacaaacaaacaaacaaac

SEQ ID NO: 43785 - DNA, 22 bp, synthetic construct
  misc_feature 1..22: note = chemically synthesized
  source 1..22: mol_type = other DNA
attgggctaatgtttagaataa

SEQ ID NO: 43786 - DNA, 22 bp, synthetic construct
  misc_feature 1..22: note = chemically synthesized
  source 1..22: mol_type = other DNA
ggctaatgtttagaataaatgt

SEQ ID NO: 43787 - DNA, 22 bp, synthetic construct
  misc_feature 1..22: note = chemically synthesized
  source 1..22: mol_type = other DNA
atgtttagaataaatgtatttc

SEQ ID NO: 43788 - DNA, 22 bp, synthetic construct
  misc_feature 1..22: note = chemically synthesized
  source 1..22: mol_type = other DNA
agaataaatgtatttctaggga

SEQ ID NO: 43789 - DNA, 22 bp, synthetic construct
  misc_feature 1..22: note = chemically synthesized
  source 1..22: mol_type = other DNA
gaataaatgtatttctagggaa

SEQ ID NO: 43790 - DNA, 22 bp, synthetic construct
  misc_feature 1..22: note = chemically synthesized
  source 1..22: mol_type = other DNA
ctagggaagaaaaaaacttagt

SEQ ID NO: 43791 - DNA, 22 bp, synthetic construct
  misc_feature 1..22: note = chemically synthesized
  source 1..22: mol_type = other DNA
tagggaagaaaaaaacttagtt

SEQ ID NO: 43792 - DNA, 22 bp, synthetic construct
  misc_feature 1..22: note = chemically synthesized
  source 1..22: mol_type = other DNA
gggaagaaaaaaacttagttgg

SEQ ID NO: 43793 - DNA, 22 bp, synthetic construct
  misc_feature 1..22: note = chemically synthesized
  source 1..22: mol_type = other DNA
agttgggtactccctccccttt

SEQ ID NO: 43794 - DNA, 22 bp, synthetic construct
  misc_feature 1..22: note = chemically synthesized
  source 1..22: mol_type = other DNA
gttgggtactccctcccctttt

SEQ ID NO: 43795 - DNA, 22 bp, synthetic construct
  misc_feature 1..22: note = chemically synthesized
  source 1..22: mol_type = other DNA
ggtactccctcccctttttact

SEQ ID NO: 43796 - DNA, 22 bp, synthetic construct
  misc_feature 1..22: note = chemically synthesized
  source 1..22: mol_type = other DNA
cctcccctttttactttttgaa

SEQ ID NO: 43797 - DNA, 22 bp, synthetic construct
  misc_feature 1..22: note = chemically synthesized
  source 1..22: mol_type = other DNA
ccctttttactttttgaagcct

SEQ ID NO: 43798 - DNA, 22 bp, synthetic construct
  misc_feature 1..22: note = chemically synthesized
  source 1..22: mol_type = other DNA
tttactttttgaagcctgctgg

SEQ ID NO: 43799 - DNA, 22 bp, synthetic construct
  misc_feature 1..22: note = chemically synthesized
  source 1..22: mol_type = other DNA
ttactttttgaagcctgctgga

SEQ ID NO: 43800 - DNA, 22 bp, synthetic construct
  misc_feature 1..22: note = chemically synthesized
  source 1..22: mol_type = other DNA
tactttttgaagcctgctggaa

SEQ ID NO: 43801 - DNA, 22 bp, synthetic construct
  misc_feature 1..22: note = chemically synthesized
  source 1..22: mol_type = other DNA
actttttgaagcctgctggaat

SEQ ID NO: 43802 - DNA, 22 bp, synthetic construct
  misc_feature 1..22: note = chemically synthesized
  source 1..22: mol_type = other DNA
ctttttgaagcctgctggaatt

SEQ ID NO: 43803 - DNA, 22 bp, synthetic construct
  misc_feature 1..22: note = chemically synthesized
  source 1..22: mol_type = other DNA
tttgaagcctgctggaattcta

SEQ ID NO: 43804 - DNA, 22 bp, synthetic construct
  misc_feature 1..22: note = chemically synthesized
  source 1..22: mol_type = other DNA
ttgaagcctgctggaattctag

SEQ ID NO: 43805 - DNA, 22 bp, synthetic construct
  misc_feature 1..22: note = chemically synthesized
  source 1..22: mol_type = other DNA
tgaagcctgctggaattctagg

SEQ ID NO: 43806 - DNA, 22 bp, synthetic construct
  misc_feature 1..22: note = chemically synthesized
  source 1..22: mol_type = other DNA
gaagcctgctggaattctagga

SEQ ID NO: 43807 - DNA, 22 bp, synthetic construct
  misc_feature 1..22: note = chemically synthesized
  source 1..22: mol_type = other DNA
aagcctgctggaattctaggaa

SEQ ID NO: 43808 - DNA, 22 bp, synthetic construct
  misc_feature 1..22: note = chemically synthesized
  source 1..22: mol_type = other DNA
ctggaattctaggaaaacagat

SEQ ID NO: 43809 - DNA, 22 bp, synthetic construct
  misc_feature 1..22: note = chemically synthesized
  source 1..22: mol_type = other DNA
gaattctaggaaaacagatttc

SEQ ID NO: 43810 - DNA, 22 bp, synthetic construct
  misc_feature 1..22: note = chemically synthesized
  source 1..22: mol_type = other DNA
taggaaaacagatttcctcccc

SEQ ID NO: 43811 - DNA, 22 bp, synthetic construct
  misc_feature 1..22: note = chemically synthesized
  source 1..22: mol_type = other DNA
ggaaaacagatttcctcccctt

SEQ ID NO: 43812 - DNA, 22 bp, synthetic construct
  misc_feature 1..22: note = chemically synthesized
  source 1..22: mol_type = other DNA
cctccccttgctctctccttcc

SEQ ID NO: 43813 - DNA, 22 bp, synthetic construct
  misc_feature 1..22: note = chemically synthesized
  source 1..22: mol_type = other DNA
ctccccttgctctctccttcct

SEQ ID NO: 43814 - DNA, 22 bp, synthetic construct
  misc_feature 1..22: note = chemically synthesized
  source 1..22: mol_type = other DNA
cccttgctctctccttcctcac

SEQ ID NO: 43815 - DNA, 22 bp, synthetic construct
  misc_feature 1..22: note = chemically synthesized
  source 1..22: mol_type = other DNA
gctctctccttcctcacatact

SEQ ID NO: 43816 - DNA, 22 bp, synthetic construct
  misc_feature 1..22: note = chemically synthesized
  source 1..22: mol_type = other DNA
ctctctccttcctcacatactc

SEQ ID NO: 43817 - DNA, 22 bp, synthetic construct
  misc_feature 1..22: note = chemically synthesized
  source 1..22: mol_type = other DNA
tctccttcctcacatactcacc

SEQ ID NO: 43818 - DNA, 22 bp, synthetic construct
  misc_feature 1..22: note = chemically synthesized
  source 1..22: mol_type = other DNA
tccttcctcacatactcaccag

SEQ ID NO: 43819 - DNA, 22 bp, synthetic construct
  misc_feature 1..22: note = chemically synthesized
  source 1..22: mol_type = other DNA
cttcctcacatactcaccagta

SEQ ID NO: 43820 - DNA, 22 bp, synthetic construct
  misc_feature 1..22: note = chemically synthesized
  source 1..22: mol_type = other DNA
cctcacatactcaccagtactc

SEQ ID NO: 43821 - DNA, 22 bp, synthetic construct
  misc_feature 1..22: note = chemically synthesized
  source 1..22: mol_type = other DNA
ctcacatactcaccagtactca

SEQ ID NO: 43822 - DNA, 22 bp, synthetic construct
  misc_feature 1..22: note = chemically synthesized
  source 1..22: mol_type = other DNA
acatactcaccagtactcatgc

SEQ ID NO: 43823 - DNA, 22 bp, synthetic construct
  misc_feature 1..22: note = chemically synthesized
  source 1..22: mol_type = other DNA
accagtactcatgcgcttctca

SEQ ID NO: 43824 - DNA, 22 bp, synthetic construct
  misc_feature 1..22: note = chemically synthesized
  source 1..22: mol_type = other DNA
atgcgcttctcagacccaaatg

SEQ ID NO: 43825 - DNA, 22 bp, synthetic construct
  misc_feature 1..22: note = chemically synthesized
  source 1..22: mol_type = other DNA
ctcagacccaaatgctctgctt

SEQ ID NO: 43826 - DNA, 22 bp, synthetic construct
  misc_feature 1..22: note = chemically synthesized
  source 1..22: mol_type = other DNA
tcagacccaaatgctctgctta

SEQ ID NO: 43827 - DNA, 22 bp, synthetic construct
  misc_feature 1..22: note = chemically synthesized
  source 1..22: mol_type = other DNA
agacccaaatgctctgcttatg

SEQ ID NO: 43828 - DNA, 22 bp, synthetic construct
  misc_feature 1..22: note = chemically synthesized
  source 1..22: mol_type = other DNA
tgcttatggtggataaccccat

SEQ ID NO: 43829 - DNA, 22 bp, synthetic construct
  misc_feature 1..22: note = chemically synthesized
  source 1..22: mol_type = other DNA
cttatggtggataaccccatct

SEQ ID NO: 43830 - DNA, 22 bp, synthetic construct
  misc_feature 1..22: note = chemically synthesized
  source 1..22: mol_type = other DNA
atggtggataaccccatctcag

SEQ ID NO: 43831 - DNA, 22 bp, synthetic construct
  misc_feature 1..22: note = chemically synthesized
  source 1..22: mol_type = other DNA
tggtggataaccccatctcagt

SEQ ID NO: 43832 - DNA, 22 bp, synthetic construct
  misc_feature 1..22: note = chemically synthesized
  source 1..22: mol_type = other DNA
agtgggcctccctctctctctc

SEQ ID NO: 43833 - DNA, 22 bp, synthetic construct
  misc_feature 1..22: note = chemically synthesized
  source 1..22: mol_type = other DNA
cctctctctctctctctctctc

SEQ ID NO: 43834 - DNA, 22 bp, synthetic construct
  misc_feature 1..22: note = chemically synthesized
  source 1..22: mol_type = other DNA
tctctctctctctctctctctc

SEQ ID NO: 43835 - DNA, 22 bp, synthetic construct
  misc_feature 1..22: note = chemically synthesized
  source 1..22: mol_type = other DNA
tctctctctctctctctctctc

SEQ ID NO: 43836 - DNA, 22 bp, synthetic construct
  misc_feature 1..22: note = chemically synthesized
  source 1..22: mol_type = other DNA
tctctctctctctctctctctg

SEQ ID NO: 43837 - DNA, 22 bp, synthetic construct
  misc_feature 1..22: note = chemically synthesized
  source 1..22: mol_type = other DNA
tctctctctctctctctctgtc

SEQ ID NO: 43838 - DNA, 22 bp, synthetic construct
  misc_feature 1..22: note = chemically synthesized
  source 1..22: mol_type = other DNA
tctctctctctctctctgtcat

SEQ ID NO: 43839 - DNA, 22 bp, synthetic construct
  misc_feature 1..22: note = chemically synthesized
  source 1..22: mol_type = other DNA
tctctctctctctctgtcatta

SEQ ID NO: 43840 - DNA, 22 bp, synthetic construct
  misc_feature 1..22: note = chemically synthesized
  source 1..22: mol_type = other DNA
tctctctctctctgtcattacc

SEQ ID NO: 43841 - DNA, 22 bp, synthetic construct
  misc_feature 1..22: note = chemically synthesized
  source 1..22: mol_type = other DNA
tctctctctctgtcattaccaa

SEQ ID NO: 43842 - DNA, 22 bp, synthetic construct
  misc_feature 1..22: note = chemically synthesized
  source 1..22: mol_type = other DNA
tctctctctgtcattaccaact

SEQ ID NO: 43843 - DNA, 22 bp, synthetic construct
  misc_feature 1..22: note = chemically synthesized
  source 1..22: mol_type = other DNA
tctctctgtcattaccaacttc

SEQ ID NO: 43844 - DNA, 22 bp, synthetic construct
  misc_feature 1..22: note = chemically synthesized
  source 1..22: mol_type = other DNA
tctctgtcattaccaacttcta

SEQ ID NO: 43845 - DNA, 22 bp, synthetic construct
  misc_feature 1..22: note = chemically synthesized
  source 1..22: mol_type = other DNA
tctgtcattaccaacttctata

SEQ ID NO: 43846 - DNA, 22 bp, synthetic construct
  misc_feature 1..22: note = chemically synthesized
  source 1..22: mol_type = other DNA
tgtcattaccaacttctataaa

SEQ ID NO: 43847 - DNA, 22 bp, synthetic construct
  misc_feature 1..22: note = chemically synthesized
  source 1..22: mol_type = other DNA
tcattaccaacttctataaaat

SEQ ID NO: 43848 - DNA, 22 bp, synthetic construct
  misc_feature 1..22: note = chemically synthesized
  source 1..22: mol_type = other DNA
ccaacttctataaaatctcaga

SEQ ID NO: 43849 - DNA, 22 bp, synthetic construct
  misc_feature 1..22: note = chemically synthesized
  source 1..22: mol_type = other DNA
ctataaaatctcagaatacaaa

SEQ ID NO: 43850 - DNA, 22 bp, synthetic construct
  misc_feature 1..22: note = chemically synthesized
  source 1..22: mol_type = other DNA
tataaaatctcagaatacaaag

SEQ ID NO: 43851 - DNA, 22 bp, synthetic construct
  misc_feature 1..22: note = chemically synthesized
  source 1..22: mol_type = other DNA
taaaatctcagaatacaaaggg

SEQ ID NO: 43852 - DNA, 22 bp, synthetic construct
  misc_feature 1..22: note = chemically synthesized
  source 1..22: mol_type = other DNA
agaatacaaagggcattctcat

SEQ ID NO: 43853 - DNA, 22 bp, synthetic construct
  misc_feature 1..22: note = chemically synthesized
  source 1..22: mol_type = other DNA
tcatttccctgaaatgtacttt

SEQ ID NO: 43854 - DNA, 22 bp, synthetic construct
  misc_feature 1..22: note = chemically synthesized
  source 1..22: mol_type = other DNA
atttccctgaaatgtactttgg

SEQ ID NO: 43855 - DNA, 22 bp, synthetic construct
  misc_feature 1..22: note = chemically synthesized
  source 1..22: mol_type = other DNA
ccctgaaatgtactttggtgct

SEQ ID NO: 43856 - DNA, 22 bp, synthetic construct
  misc_feature 1..22: note = chemically synthesized
  source 1..22: mol_type = other DNA
cctgaaatgtactttggtgcta

SEQ ID NO: 43857 - DNA, 22 bp, synthetic construct
  misc_feature 1..22: note = chemically synthesized
  source 1..22: mol_type = other DNA
aaatgtactttggtgctaccct

SEQ ID NO: 43858 - DNA, 22 bp, synthetic construct
  misc_feature 1..22: note = chemically synthesized
  source 1..22: mol_type = other DNA
tggtgctaccctgaaagacggc

SEQ ID NO: 43859 - DNA, 22 bp, synthetic construct
  misc_feature 1..22: note = chemically synthesized
  source 1..22: mol_type = other DNA
ggtgctaccctgaaagacggct

SEQ ID NO: 43860 - DNA, 22 bp, synthetic construct
  misc_feature 1..22: note = chemically synthesized
  source 1..22: mol_type = other DNA
gtgctaccctgaaagacggcta

SEQ ID NO: 43861 - DNA, 22 bp, synthetic construct
  misc_feature 1..22: note = chemically synthesized
  source 1..22: mol_type = other DNA
ccctgaaagacggctagagtct

SEQ ID NO: 43862 - DNA, 22 bp, synthetic construct
  misc_feature 1..22: note = chemically synthesized
  source 1..22: mol_type = other DNA
aaagacggctagagtcttgagg

SEQ ID NO: 43863 - DNA, 22 bp, synthetic construct
  misc_feature 1..22: note = chemically synthesized
  source 1..22: mol_type = other DNA
gagtcttgaggagacccaaaca

SEQ ID NO: 43864 - DNA, 22 bp, synthetic construct
  misc_feature 1..22: note = chemically synthesized
  source 1..22: mol_type = other DNA
gaggagacccaaacagttaaag

SEQ ID NO: 43865 - DNA, 22 bp, synthetic construct
  misc_feature 1..22: note = chemically synthesized
  source 1..22: mol_type = other DNA
aggagacccaaacagttaaagg

SEQ ID NO: 43866 - DNA, 22 bp, synthetic construct
  misc_feature 1..22: note = chemically synthesized
  source 1..22: mol_type = other DNA
aaggttacagacagacttggtt

SEQ ID NO: 43867 - DNA, 22 bp, synthetic construct
  misc_feature 1..22: note = chemically synthesized
  source 1..22: mol_type = other DNA
cagacagacttggttccactcc

SEQ ID NO: 43868 - DNA, 22 bp, synthetic construct
  misc_feature 1..22: note = chemically synthesized
  source 1..22: mol_type = other DNA
ggttccactccagtggtgggtg

SEQ ID NO: 43869 - DNA, 22 bp, synthetic construct
  misc_feature 1..22: note = chemically synthesized
  source 1..22: mol_type = other DNA
gttccactccagtggtgggtgt

SEQ ID NO: 43870 - DNA, 22 bp, synthetic construct
  misc_feature 1..22: note = chemically synthesized
  source 1..22: mol_type = other DNA
cactccagtggtgggtgttttg

SEQ ID NO: 43871 - DNA, 22 bp, synthetic construct
  misc_feature 1..22: note = chemically synthesized
  source 1..22: mol_type = other DNA
cagtggtgggtgttttgttttg

SEQ ID NO: 43872 - DNA, 22 bp, synthetic construct
  misc_feature 1..22: note = chemically synthesized
  source 1..22: mol_type = other DNA
tgttttgtttcgctttagcttt

SEQ ID NO: 43873 - DNA, 22 bp, synthetic construct
  misc_feature 1..22: note = chemically synthesized
  source 1..22: mol_type = other DNA
gttttgtttcgctttagcttta

SEQ ID NO: 43874 - DNA, 22 bp, synthetic construct
  misc_feature 1..22: note = chemically synthesized
  source 1..22: mol_type = other DNA
ttttgtttcgctttagctttat

SEQ ID NO: 43875 - DNA, 22 bp, synthetic construct
  misc_feature 1..22: note = chemically synthesized
  source 1..22: mol_type = other DNA
tgtttcgctttagctttattaa

SEQ ID NO: 43876 - DNA, 22 bp, synthetic construct
  misc_feature 1..22: note = chemically synthesized
  source 1..22: mol_type = other DNA
gtttcgctttagctttattaag

SEQ ID NO: 43877 - DNA, 22 bp, synthetic construct
  misc_feature 1..22: note = chemically synthesized
  source 1..22: mol_type = other DNA
tttcgctttagctttattaagg

SEQ ID NO: 43878 - DNA, 22 bp, synthetic construct
  misc_feature 1..22: note = chemically synthesized
  source 1..22: mol_type = other DNA
cgctttagctttattaaggtat

SEQ ID NO: 43879 - DNA, 22 bp, synthetic construct
  misc_feature 1..22: note = chemically synthesized
  source 1..22: mol_type = other DNA
gctttagctttattaaggtata

SEQ ID NO: 43880 - DNA, 22 bp, synthetic construct
  misc_feature 1..22: note = chemically synthesized
  source 1..22: mol_type = other DNA
tagctttattaaggtatacttt

SEQ ID NO: 43881 - DNA, 22 bp, synthetic construct
  misc_feature 1..22: note = chemically synthesized
  source 1..22: mol_type = other DNA
agctttattaaggtatacttta

SEQ ID NO: 43882 - DNA, 22 bp, synthetic construct
  misc_feature 1..22: note = chemically synthesized
  source 1..22: mol_type = other DNA
gctttattaaggtatactttac

SEQ ID NO: 43883 - DNA, 22 bp, synthetic construct
  misc_feature 1..22: note = chemically synthesized
  source 1..22: mol_type = other DNA
tattaaggtatactttacatac

SEQ ID NO: 43884 - DNA, 22 bp, synthetic construct
  misc_feature 1..22: note = chemically synthesized
  source 1..22: mol_type = other DNA
attaaggtatactttacataca

SEQ ID NO: 43885 - DNA, 22 bp, synthetic construct
  misc_feature 1..22: note = chemically synthesized
  source 1..22: mol_type = other DNA
ttaaggtatactttacatacaa

SEQ ID NO: 43886 - DNA, 22 bp, synthetic construct
  misc_feature 1..22: note = chemically synthesized
  source 1..22: mol_type = other DNA
aggtatactttacatacaacaa

SEQ ID NO: 43887 - DNA, 22 bp, synthetic construct
  misc_feature 1..22: note = chemically synthesized
  source 1..22: mol_type = other DNA
tacatacaacaaaagtcattca

SEQ ID NO: 43888 - DNA, 22 bp, synthetic construct
  misc_feature 1..22: note = chemically synthesized
  source 1..22: mol_type = other DNA
acatacaacaaaagtcattcat

SEQ ID NO: 43889 - DNA, 22 bp, synthetic construct
  misc_feature 1..22: note = chemically synthesized
  source 1..22: mol_type = other DNA
catacaacaaaagtcattcatt

SEQ ID NO: 43890 - DNA, 22 bp, synthetic construct
  misc_feature 1..22: note = chemically synthesized
  source 1..22: mol_type = other DNA
attttaagtgtacagttggatt

SEQ ID NO: 43891 - DNA, 22 bp, synthetic construct
  misc_feature 1..22: note = chemically synthesized
  source 1..22: mol_type = other DNA
taagtgtacagttggattcaat

SEQ ID NO: 43892 - DNA, 22 bp, synthetic construct
  misc_feature 1..22: note = chemically synthesized
  source 1..22: mol_type = other DNA
aagtgtacagttggattcaatt

SEQ ID NO: 43893 - DNA, 22 bp, synthetic construct
  misc_feature 1..22: note = chemically synthesized
  source 1..22: mol_type = other DNA
agtgtacagttggattcaattt

SEQ ID NO: 43894 - DNA, 22 bp, synthetic construct
  misc_feature 1..22: note = chemically synthesized
  source 1..22: mol_type = other DNA
gattcaatttgccagttgtata

SEQ ID NO: 43895 - DNA, 22 bp, synthetic construct
  misc_feature 1..22: note = chemically synthesized
  source 1..22: mol_type = other DNA
aatttgccagttgtatacagct

SEQ ID NO: 43896 - DNA, 22 bp, synthetic construct
  misc_feature 1..22: note = chemically synthesized
  source 1..22: mol_type = other DNA
gccagttgtatacagctgtgtg

SEQ ID NO: 43897 - DNA, 22 bp, synthetic construct
  misc_feature 1..22: note = chemically synthesized
  source 1..22: mol_type = other DNA
ccagttgtatacagctgtgtgg

SEQ ID NO: 43898 - DNA, 22 bp, synthetic construct
  misc_feature 1..22: note = chemically synthesized
  source 1..22: mol_type = other DNA
tatacagctgtgtggcctccac

SEQ ID NO: 43899 - DNA, 22 bp, synthetic construct
  misc_feature 1..22: note = chemically synthesized
  source 1..22: mol_type = other DNA
tgtggcctccaccaaaatcaag

SEQ ID NO: 43900 - DNA, 22 bp, synthetic construct
  misc_feature 1..22: note = chemically synthesized
  source 1..22: mol_type = other DNA
caccaaaatcaagatacagaac

SEQ ID NO: 43901 - DNA, 22 bp, synthetic construct
  misc_feature 1..22: note = chemically synthesized
  source 1..22: mol_type = other DNA
gaaagccccctcatgccccttt

SEQ ID NO: 43902 - DNA, 22 bp, synthetic construct
  misc_feature 1..22: note = chemically synthesized
  source 1..22: mol_type = other DNA
atgcccctttgctgtcaatccc

SEQ ID NO: 43903 - DNA, 22 bp, synthetic construct
  misc_feature 1..22: note = chemically synthesized
  source 1..22: mol_type = other DNA
tgctgtcaatccccttccctaa

SEQ ID NO: 43904 - DNA, 22 bp, synthetic construct
  misc_feature 1..22: note = chemically synthesized
  source 1..22: mol_type = other DNA
gctgtcaatccccttccctaac

SEQ ID NO: 43905 - DNA, 22 bp, synthetic construct
  misc_feature 1..22: note = chemically synthesized
  source 1..22: mol_type = other DNA
ctgtcaatccccttccctaacc

SEQ ID NO: 43906 - DNA, 22 bp, synthetic construct
  misc_feature 1..22: note = chemically synthesized
  source 1..22: mol_type = other DNA
tcaatccccttccctaaccctc

SEQ ID NO: 43907 - DNA, 22 bp, synthetic construct
  misc_feature 1..22: note = chemically synthesized
  source 1..22: mol_type = other DNA
ccctaaccctctgaccccttcc

SEQ ID NO: 43908 - DNA, 22 bp, synthetic construct
  misc_feature 1..22: note = chemically synthesized
  source 1..22: mol_type = other DNA
cctaaccctctgaccccttcct

SEQ ID NO: 43909 - DNA, 22 bp, synthetic construct
  misc_feature 1..22: note = chemically synthesized
  source 1..22: mol_type = other DNA
accctctgaccccttccttcta

SEQ ID NO: 43910 - DNA, 22 bp, synthetic construct
  misc_feature 1..22: note = chemically synthesized
  source 1..22: mol_type = other DNA
tgaccccttccttctaaccact

SEQ ID NO: 43911 - DNA, 22 bp, synthetic construct
  misc_feature 1..22: note = chemically synthesized
  source 1..22: mol_type = other DNA
accccttccttctaaccactga

SEQ ID NO: 43912 - DNA, 22 bp, synthetic construct
  misc_feature 1..22: note = chemically synthesized
  source 1..22: mol_type = other DNA
ccttctaaccactgaaccccca

SEQ ID NO: 43913 - DNA, 22 bp, synthetic construct
  misc_feature 1..22: note = chemically synthesized
  source 1..22: mol_type = other DNA
cttctaaccactgaacccccac

SEQ ID NO: 43914 - DNA, 22 bp, synthetic construct
  misc_feature 1..22: note = chemically synthesized
  source 1..22: mol_type = other DNA
ctaaccactgaacccccaccta

SEQ ID NO: 43915 - DNA, 22 bp, synthetic construct
  misc_feature 1..22: note = chemically synthesized
  source 1..22: mol_type = other DNA
taaccactgaacccccacctac

SEQ ID NO: 43916 - DNA, 22 bp, synthetic construct
  misc_feature 1..22: note = chemically synthesized
  source 1..22: mol_type = other DNA
accactgaacccccacctacca

SEQ ID NO: 43917 - DNA, 22 bp, synthetic construct
  misc_feature 1..22: note = chemically synthesized
  source 1..22: mol_type = other DNA
aacccccacctaccaccacagt

SEQ ID NO: 43918 - DNA, 22 bp, synthetic construct
  misc_feature 1..22: note = chemically synthesized
  source 1..22: mol_type = other DNA
ccaccacagtgttgagaattct

SEQ ID NO: 43919 - DNA, 22 bp, synthetic construct
  misc_feature 1..22: note = chemically synthesized
  source 1..22: mol_type = other DNA
agaattctagaatttgttacaa

SEQ ID NO: 43920 - DNA, 22 bp, synthetic construct
  misc_feature 1..22: note = chemically synthesized
  source 1..22: mol_type = other DNA
tagaatttgttacaaatggact

SEQ ID NO: 43921 - DNA, 22 bp, synthetic construct
  misc_feature 1..22: note = chemically synthesized
  source 1..22: mol_type = other DNA
gaatttgttacaaatggactca

SEQ ID NO: 43922 - DNA, 22 bp, synthetic construct
  misc_feature 1..22: note = chemically synthesized
  source 1..22: mol_type = other DNA
gttacaaatggactcatacagg

SEQ ID NO: 43923 - DNA, 22 bp, synthetic construct
  misc_feature 1..22: note = chemically synthesized
  source 1..22: mol_type = other DNA
ttacaaatggactcatacagga

SEQ ID NO: 43924 - DNA, 22 bp, synthetic construct
  misc_feature 1..22: note = chemically synthesized
  source 1..22: mol_type = other DNA
caaatggactcatacaggatat

SEQ ID NO: 43925 - DNA, 22 bp, synthetic construct
  misc_feature 1..22: note = chemically synthesized
  source 1..22: mol_type = other DNA
atacaggatatcgtcttttgtg

SEQ ID NO: 43926 - DNA, 22 bp, synthetic construct
  misc_feature 1..22: note = chemically synthesized
  source 1..22: mol_type = other DNA
ttgtgtttaatttcttccacag

SEQ ID NO: 43927 - DNA, 22 bp, synthetic construct
  misc_feature 1..22: note = chemically synthesized
  source 1..22: mol_type = other DNA
tgtgtttaatttcttccacaga

SEQ ID NO: 43928 - DNA, 22 bp, synthetic construct
  misc_feature 1..22: note = chemically synthesized
  source 1..22: mol_type = other DNA
gtgtttaatttcttccacagag

SEQ ID NO: 43929 - DNA, 22 bp, synthetic construct
  misc_feature 1..22: note = chemically synthesized
  source 1..22: mol_type = other DNA
tgtttaatttcttccacagagc

SEQ ID NO: 43930 - DNA, 22 bp, synthetic construct
  misc_feature 1..22: note = chemically synthesized
  source 1..22: mol_type = other DNA
aatttcttccacagagcagaat

SEQ ID NO: 43931 - DNA, 22 bp, synthetic construct
  misc_feature 1..22: note = chemically synthesized
  source 1..22: mol_type = other DNA
atttcttccacagagcagaatg

SEQ ID NO: 43932 - DNA, 22 bp, synthetic construct
  misc_feature 1..22: note = chemically synthesized
  source 1..22: mol_type = other DNA
cttccacagagcagaatgattc

SEQ ID NO: 43933 - DNA, 22 bp, synthetic construct
  misc_feature 1..22: note = chemically synthesized
  source 1..22: mol_type = other DNA
ttccacagagcagaatgattct

SEQ ID NO: 43934 - DNA, 22 bp, synthetic construct
  misc_feature 1..22: note = chemically synthesized
  source 1..22: mol_type = other DNA
ccacagagcagaatgattctgg

SEQ ID NO: 43935 - DNA, 22 bp, synthetic construct
  misc_feature 1..22: note = chemically synthesized
  source 1..22: mol_type = other DNA
cacagagcagaatgattctggg

SEQ ID NO: 43936 - DNA, 22 bp, synthetic construct
  misc_feature 1..22: note = chemically synthesized
  source 1..22: mol_type = other DNA
tgggattcatccatggtgtgga

SEQ ID NO: 43937 - DNA, 22 bp, synthetic construct
  misc_feature 1..22: note = chemically synthesized
  source 1..22: mol_type = other DNA
ggattcatccatggtgtggagt

SEQ ID NO: 43938 - DNA, 22 bp, synthetic construct
  misc_feature 1..22: note = chemically synthesized
  source 1..22: mol_type = other DNA
atccatggtgtggagtgtgtta

SEQ ID NO: 43939 - DNA, 22 bp, synthetic construct
  misc_feature 1..22: note = chemically synthesized
  source 1..22: mol_type = other DNA
ctctttcattcttctactgttg

SEQ ID NO: 43940 - DNA, 22 bp, synthetic construct
  misc_feature 1..22: note = chemically synthesized
  source 1..22: mol_type = other DNA
tttcattcttctactgttgagt

SEQ ID NO: 43941 - DNA, 22 bp, synthetic construct
  misc_feature 1..22: note = chemically synthesized
  source 1..22: mol_type = other DNA
tcattcttctactgttgagttg

SEQ ID NO: 43942 - DNA, 22 bp, synthetic construct
  misc_feature 1..22: note = chemically synthesized
  source 1..22: mol_type = other DNA
cattcttctactgttgagttgt

SEQ ID NO: 43943 - DNA, 22 bp, synthetic construct
  misc_feature 1..22: note = chemically synthesized
  source 1..22: mol_type = other DNA
attcttctactgttgagttgta

SEQ ID NO: 43944 - DNA, 22 bp, synthetic construct
  misc_feature 1..22: note = chemically synthesized
  source 1..22: mol_type = other DNA
ttctactgttgagttgtattcc

SEQ ID NO: 43945 - DNA, 22 bp, synthetic construct
  misc_feature 1..22: note = chemically synthesized
  source 1..22: mol_type = other DNA
ctactgttgagttgtattccac

SEQ ID NO: 43946 - DNA, 22 bp, synthetic construct
  misc_feature 1..22: note = chemically synthesized
  source 1..22: mol_type = other DNA
tactgttgagttgtattccacc

SEQ ID NO: 43947 - DNA, 22 bp, synthetic construct
  misc_feature 1..22: note = chemically synthesized
  source 1..22: mol_type = other DNA
ctgttgagttgtattccaccat

SEQ ID NO: 43948 - DNA, 22 bp, synthetic construct
  misc_feature 1..22: note = chemically synthesized
  source 1..22: mol_type = other DNA
ttgagttgtattccaccatagg

SEQ ID NO: 43949 - DNA, 22 bp, synthetic construct
  misc_feature 1..22: note = chemically synthesized
  source 1..22: mol_type = other DNA
agttgtattccaccatagggcg

SEQ ID NO: 43950 - DNA, 22 bp, synthetic construct
  misc_feature 1..22: note = chemically synthesized
  source 1..22: mol_type = other DNA
tattccaccatagggcgtttat

SEQ ID NO: 43951 - DNA, 22 bp, synthetic construct
  misc_feature 1..22: note = chemically synthesized
  source 1..22: mol_type = other DNA
caccatagggcgtttatccatt

SEQ ID NO: 43952 - DNA, 22 bp, synthetic construct
  misc_feature 1..22: note = chemically synthesized
  source 1..22: mol_type = other DNA
atccattcaacctattggttgc

SEQ ID NO: 43953 - DNA, 22 bp, synthetic construct
  misc_feature 1..22: note = chemically synthesized
  source 1..22: mol_type = other DNA
tccattcaacctattggttgcc

SEQ ID NO: 43954 - DNA, 22 bp, synthetic construct
  misc_feature 1..22: note = chemically synthesized
  source 1..22: mol_type = other DNA
aacctattggttgccatgtggg

SEQ ID NO: 43955 - DNA, 22 bp, synthetic construct
  misc_feature 1..22: note = chemically synthesized
  source 1..22: mol_type = other DNA
ttggttgccatgtgggttgtga

SEQ ID NO: 43956 - DNA, 22 bp, synthetic construct
  misc_feature 1..22: note = chemically synthesized
  source 1..22: mol_type = other DNA
gttgccatgtgggttgtgacca

SEQ ID NO: 43957 - DNA, 22 bp, synthetic construct
  misc_feature 1..22: note = chemically synthesized
  source 1..22: mol_type = other DNA
ccatgtgggttgtgaccacttt

SEQ ID NO: 43958 - DNA, 22 bp, synthetic construct
  misc_feature 1..22: note = chemically synthesized
  source 1..22: mol_type = other DNA
tgaccactttttgaccactatg

SEQ ID NO: 43959 - DNA, 22 bp, synthetic construct
  misc_feature 1..22: note = chemically synthesized
  source 1..22: mol_type = other DNA
tttgaccactatgaacagtgct

SEQ ID NO: 43960 - DNA, 22 bp, synthetic construct
  misc_feature 1..22: note = chemically synthesized
  source 1..22: mol_type = other DNA
ttgaccactatgaacagtgcta

SEQ ID NO: 43961 - DNA, 22 bp, synthetic construct
  misc_feature 1..22: note = chemically synthesized
  source 1..22: mol_type = other DNA
tgaccactatgaacagtgctac

SEQ ID NO: 43962 - DNA, 22 bp, synthetic construct
  misc_feature 1..22: note = chemically synthesized
  source 1..22: mol_type = other DNA
gaccactatgaacagtgctaca

SEQ ID NO: 43963 - DNA, 22 bp, synthetic construct
  misc_feature 1..22: note = chemically synthesized
  source 1..22: mol_type = other DNA
accactatgaacagtgctacaa

SEQ ID NO: 43964 - DNA, 22 bp, synthetic construct
  misc_feature 1..22: note = chemically synthesized
  source 1..22: mol_type = other DNA
tgaacagtgctacaatggacac

SEQ ID NO: 43965 - DNA, 22 bp, synthetic construct
  misc_feature 1..22: note = chemically synthesized
  source 1..22: mol_type = other DNA
caatggacactgtgtagatgtg

SEQ ID NO: 43966 - DNA, 22 bp, synthetic construct
  misc_feature 1..22: note = chemically synthesized
  source 1..22: mol_type = other DNA
tgtagatgtgtttataggaatg

SEQ ID NO: 43967 - DNA, 22 bp, synthetic construct
  misc_feature 1..22: note = chemically synthesized
  source 1..22: mol_type = other DNA
ataggaatgtatgtctacattt

SEQ ID NO: 43968 - DNA, 22 bp, synthetic construct
  misc_feature 1..22: note = chemically synthesized
  source 1..22: mol_type = other DNA
taggaatgtatgtctacatttc

SEQ ID NO: 43969 - DNA, 22 bp, synthetic construct
  misc_feature 1..22: note = chemically synthesized
  source 1..22: mol_type = other DNA
catttctcttaggtaaacatct

SEQ ID NO: 43970 - DNA, 22 bp, synthetic construct
  misc_feature 1..22: note = chemically synthesized
  source 1..22: mol_type = other DNA
ctcttaggtaaacatctaaggc

SEQ ID NO: 43971 - DNA, 22 bp, synthetic construct
  misc_feature 1..22: note = chemically synthesized
  source 1..22: mol_type = other DNA
tcttaggtaaacatctaaggca

SEQ ID NO: 43972 - DNA, 22 bp, synthetic construct
  misc_feature 1..22: note = chemically synthesized
  source 1..22: mol_type = other DNA
ttaggtaaacatctaaggcatt

SEQ ID NO: 43973 - DNA, 22 bp, synthetic construct
  misc_feature 1..22: note = chemically synthesized
  source 1..22: mol_type = other DNA
aggtaaacatctaaggcatttc

SEQ ID NO: 43974 - DNA, 22 bp, synthetic construct
  misc_feature 1..22: note = chemically synthesized
  source 1..22: mol_type = other DNA
ggtaaacatctaaggcatttcg

SEQ ID NO: 43975 - DNA, 22 bp, synthetic construct
  misc_feature 1..22: note = chemically synthesized
  source 1..22: mol_type = other DNA
aggcatttcgagaacacagaaa

SEQ ID NO: 43976 - DNA, 22 bp, synthetic construct
  misc_feature 1..22: note = chemically synthesized
  source 1..22: mol_type = other DNA
cgagaacacagaaaaggttttg

SEQ ID NO: 43977 - DNA, 22 bp, synthetic construct
  misc_feature 1..22: note = chemically synthesized
  source 1..22: mol_type = other DNA
gagaacacagaaaaggttttga

SEQ ID NO: 43978 - DNA, 22 bp, synthetic construct
  misc_feature 1..22: note = chemically synthesized
  source 1..22: mol_type = other DNA
tgagtttgagtccagggagccc

SEQ ID NO: 43979 - DNA, 22 bp, synthetic construct
  misc_feature 1..22: note = chemically synthesized
  source 1..22: mol_type = other DNA
gagtttgagtccagggagccct

SEQ ID NO: 43980 - DNA, 22 bp, synthetic construct
  misc_feature 1..22: note = chemically synthesized
  source 1..22: mol_type = other DNA
agtttgagtccagggagccctc

SEQ ID NO: 43981 - DNA, 22 bp, synthetic construct
  misc_feature 1..22: note = chemically synthesized
  source 1..22: mol_type = other DNA
gagtccagggagccctcatttt

SEQ ID NO: 43982 - DNA, 22 bp, synthetic construct
  misc_feature 1..22: note = chemically synthesized
  source 1..22: mol_type = other DNA
agtccagggagccctcattttg

SEQ ID NO: 43983 - DNA, 22 bp, synthetic construct
  misc_feature 1..22: note = chemically synthesized
  source 1..22: mol_type = other DNA
attttgtcatcctccaggctgc

SEQ ID NO: 43984 - DNA, 22 bp, synthetic construct
  misc_feature 1..22: note = chemically synthesized
  source 1..22: mol_type = other DNA
tgtcatcctccaggctgccccc

SEQ ID NO: 43985 - DNA, 22 bp, synthetic construct
  misc_feature 1..22: note = chemically synthesized
  source 1..22: mol_type = other DNA
gtcatcctccaggctgcccccc

SEQ ID NO: 43986 - DNA, 22 bp, synthetic construct
  misc_feature 1..22: note = chemically synthesized
  source 1..22: mol_type = other DNA
tcatcctccaggctgcccccct

SEQ ID NO: 43987 - DNA, 22 bp, synthetic construct
  misc_feature 1..22: note = chemically synthesized
  source 1..22: mol_type = other DNA
caggctgcccccctcccacccc

SEQ ID NO: 43988 - DNA, 22 bp, synthetic construct
  misc_feature 1..22: note = chemically synthesized
  source 1..22: mol_type = other DNA
cccccctcccaccccattccct

SEQ ID NO: 43989 - DNA, 22 bp, synthetic construct
  misc_feature 1..22: note = chemically synthesized
  source 1..22: mol_type = other DNA
ccaccccattccctggagagtt

SEQ ID NO: 43990 - DNA, 22 bp, synthetic construct
  misc_feature 1..22: note = chemically synthesized
  source 1..22: mol_type = other DNA
cctggagagttcaactccaaac

SEQ ID NO: 43991 - DNA, 22 bp, synthetic construct
  misc_feature 1..22: note = chemically synthesized
  source 1..22: mol_type = other DNA
gagagttcaactccaaacccta

SEQ ID NO: 43992 - DNA, 22 bp, synthetic construct
  misc_feature 1..22: note = chemically synthesized
  source 1..22: mol_type = other DNA
aactccaaaccctatatcccag

SEQ ID NO: 43993 - DNA, 22 bp, synthetic construct
  misc_feature 1..22: note = chemically synthesized
  source 1..22: mol_type = other DNA
caaaccctatatcccagctatc

SEQ ID NO: 43994 - DNA, 22 bp, synthetic construct
  misc_feature 1..22: note = chemically synthesized
  source 1..22: mol_type = other DNA
tatcccagctatctgtttggct

SEQ ID NO: 43995 - DNA, 22 bp, synthetic construct
  misc_feature 1..22: note = chemically synthesized
  source 1..22: mol_type = other DNA
tctgtttggctcagctaccaaa

SEQ ID NO: 43996 - DNA, 22 bp, synthetic construct
  misc_feature 1..22: note = chemically synthesized
  source 1..22: mol_type = other DNA
tttggctcagctaccaaatgtc

SEQ ID NO: 43997 - DNA, 22 bp, synthetic construct
  misc_feature 1..22: note = chemically synthesized
  source 1..22: mol_type = other DNA
ggctcagctaccaaatgtcatc

SEQ ID NO: 43998 - DNA, 22 bp, synthetic construct
  misc_feature 1..22: note = chemically synthesized
  source 1..22: mol_type = other DNA
gctcagctaccaaatgtcatcc

SEQ ID NO: 43999 - DNA, 22 bp, synthetic construct
  misc_feature 1..22: note = chemically synthesized
  source 1..22: mol_type = other DNA
agctaccaaatgtcatcctatt

SEQ ID NO: 44000 - DNA, 22 bp, synthetic construct
  misc_feature 1..22: note = chemically synthesized
  source 1..22: mol_type = other DNA
ccaaatgtcatcctattccgaa

SEQ ID NO: 44001 - DNA, 22 bp, synthetic construct
  misc_feature 1..22: note = chemically synthesized
  source 1..22: mol_type = other DNA
ttccgaatagaaacctctccac

SEQ ID NO: 44002 - DNA, 22 bp, synthetic construct
  misc_feature 1..22: note = chemically synthesized
  source 1..22: mol_type = other DNA
cgaatagaaacctctccactac

SEQ ID NO: 44003 - DNA, 22 bp, synthetic construct
  misc_feature 1..22: note = chemically synthesized
  source 1..22: mol_type = other DNA
tccactacactaaggaaatgat

SEQ ID NO: 44004 - DNA, 22 bp, synthetic construct
  misc_feature 1..22: note = chemically synthesized
  source 1..22: mol_type = other DNA
cactacactaaggaaatgatgg

SEQ ID NO: 44005 - DNA, 22 bp, synthetic construct
  misc_feature 1..22: note = chemically synthesized
  source 1..22: mol_type = other DNA
cactaaggaaatgatgggaaga

SEQ ID NO: 44006 - DNA, 22 bp, synthetic construct
  misc_feature 1..22: note = chemically synthesized
  source 1..22: mol_type = other DNA
aggaaatgatgggaagagaccc

SEQ ID NO: 44007 - DNA, 22 bp, synthetic construct
  misc_feature 1..22: note = chemically synthesized
  source 1..22: mol_type = other DNA
ttaaaatgggcattcatttgaa

SEQ ID NO: 44008 - DNA, 22 bp, synthetic construct
  misc_feature 1..22: note = chemically synthesized
  source 1..22: mol_type = other DNA
aaaatgggcattcatttgaatc

SEQ ID NO: 44009 - DNA, 22 bp, synthetic construct
  misc_feature 1..22: note = chemically synthesized
  source 1..22: mol_type = other DNA
aaatgggcattcatttgaatca

SEQ ID NO: 44010 - DNA, 22 bp, synthetic construct
  misc_feature 1..22: note = chemically synthesized
  source 1..22: mol_type = other DNA
atttgaatcaggccaaataaat

SEQ ID NO: 44011 - DNA, 22 bp, synthetic construct
  misc_feature 1..22: note = chemically synthesized
  source 1..22: mol_type = other DNA
gaatcaggccaaataaattgga

SEQ ID NO: 44012 - DNA, 22 bp, synthetic construct
  misc_feature 1..22: note = chemically synthesized
  source 1..22: mol_type = other DNA
aatcaggccaaataaattggac

SEQ ID NO: 44013 - DNA, 22 bp, synthetic construct
  misc_feature 1..22: note = chemically synthesized
  source 1..22: mol_type = other DNA
gactctgggtcagagataactt

SEQ ID NO: 44014 - DNA, 22 bp, synthetic construct
  misc_feature 1..22: note = chemically synthesized
  source 1..22: mol_type = other DNA
tgggtcagagataacttaagtg

SEQ ID NO: 44015 - DNA, 22 bp, synthetic construct
  misc_feature 1..22: note = chemically synthesized
  source 1..22: mol_type = other DNA
ggtcagagataacttaagtgtg

SEQ ID NO: 44016 - DNA, 22 bp, synthetic construct
  misc_feature 1..22: note = chemically synthesized
  source 1..22: mol_type = other DNA
aagtgtggtgttcggagtccta

SEQ ID NO: 44017 - DNA, 22 bp, synthetic construct
  misc_feature 1..22: note = chemically synthesized
  source 1..22: mol_type = other DNA
agtgtggtgttcggagtcctaa

SEQ ID NO: 44018 - DNA, 22 bp, synthetic construct
  misc_feature 1..22: note = chemically synthesized
  source 1..22: mol_type = other DNA
ggagtcctaagagcccccacta

SEQ ID NO: 44019 - DNA, 22 bp, synthetic construct
  misc_feature 1..22: note = chemically synthesized
  source 1..22: mol_type = other DNA
agagcccccactagctcagaaa

SEQ ID NO: 44020 - DNA, 22 bp, synthetic construct
  misc_feature 1..22: note = chemically synthesized
  source 1..22: mol_type = other DNA
gctcagaaatggacttagttga

SEQ ID NO: 44021 - DNA, 22 bp, synthetic construct
  misc_feature 1..22: note = chemically synthesized
  source 1..22: mol_type = other DNA
agaaatggacttagttgacctc

SEQ ID NO: 44022 - DNA, 22 bp, synthetic construct
  misc_feature 1..22: note = chemically synthesized
  source 1..22: mol_type = other DNA
agttgacctcccccattagcag

SEQ ID NO: 44023 - DNA, 22 bp, synthetic construct
  misc_feature 1..22: note = chemically synthesized
  source 1..22: mol_type = other DNA
gttgacctcccccattagcagc

SEQ ID NO: 44024 - DNA, 22 bp, synthetic construct
  misc_feature 1..22: note = chemically synthesized
  source 1..22: mol_type = other DNA
acctcccccattagcagcatgg

SEQ ID NO: 44025 - DNA, 22 bp, synthetic construct
  misc_feature 1..22: note = chemically synthesized
  source 1..22: mol_type = other DNA
ccccattagcagcatggagagt

SEQ ID NO: 44026 - DNA, 22 bp, synthetic construct
  misc_feature 1..22: note = chemically synthesized
  source 1..22: mol_type = other DNA
gcagcatggagagtcaaggaga

SEQ ID NO: 44027 - DNA, 22 bp, synthetic construct
  misc_feature 1..22: note = chemically synthesized
  source 1..22: mol_type = other DNA
ctaccttgccaaaggccttggg

SEQ ID NO: 44028 - DNA, 22 bp, synthetic construct
  misc_feature 1..22: note = chemically synthesized
  source 1..22: mol_type = other DNA
taccttgccaaaggccttggga

SEQ ID NO: 44029 - DNA, 22 bp, synthetic construct
  misc_feature 1..22: note = chemically synthesized
  source 1..22: mol_type = other DNA
ccttgccaaaggccttgggaag

SEQ ID NO: 44030 - DNA, 22 bp, synthetic construct
  misc_feature 1..22: note = chemically synthesized
  source 1..22: mol_type = other DNA
gccaaaggccttgggaagaaag

SEQ ID NO: 44031 - DNA, 22 bp, synthetic construct
  misc_feature 1..22: note = chemically synthesized
  source 1..22: mol_type = other DNA
ccaaaggccttgggaagaaaga

SEQ ID NO: 44032 - DNA, 22 bp, synthetic construct
  misc_feature 1..22: note = chemically synthesized
  source 1..22: mol_type = other DNA
gggaagaaagacagcatcaagg

SEQ ID NO: 44033 - DNA, 22 bp, synthetic construct
  misc_feature 1..22: note = chemically synthesized
  source 1..22: mol_type = other DNA
ggaagaaagacagcatcaaggt

SEQ ID NO: 44034 - DNA, 22 bp, synthetic construct
  misc_feature 1..22: note = chemically synthesized
  source 1..22: mol_type = other DNA
acacaacactccagggaggcag

SEQ ID NO: 44035 - DNA, 22 bp, synthetic construct
  misc_feature 1..22: note = chemically synthesized
  source 1..22: mol_type = other DNA
cagggaggcagctgctgcccag

SEQ ID NO: 44036 - DNA, 22 bp, synthetic construct
  misc_feature 1..22: note = chemically synthesized
  source 1..22: mol_type = other DNA
ctgcccagtgctgtggacagca

SEQ ID NO: 44037 - DNA, 22 bp, synthetic construct
  misc_feature 1..22: note = chemically synthesized
  source 1..22: mol_type = other DNA
cccagtgctgtggacagcaaag

SEQ ID NO: 44038 - DNA, 22 bp, synthetic construct
  misc_feature 1..22: note = chemically synthesized
  source 1..22: mol_type = other DNA
tggacagcaaagcttcagtgca

SEQ ID NO: 44039 - DNA, 22 bp, synthetic construct
  misc_feature 1..22: note = chemically synthesized
  source 1..22: mol_type = other DNA
cagtgcaggaaattaagattcc

SEQ ID NO: 44040 - DNA, 22 bp, synthetic construct
  misc_feature 1..22: note = chemically synthesized
  source 1..22: mol_type = other DNA
agtgcaggaaattaagattccc

SEQ ID NO: 44041 - DNA, 22 bp, synthetic construct
  misc_feature 1..22: note = chemically synthesized
  source 1..22: mol_type = other DNA
agattccccctgcctccccctc

SEQ ID NO: 44042 - DNA, 22 bp, synthetic construct
  misc_feature 1..22: note = chemically synthesized
  source 1..22: mol_type = other DNA
cccctgcctccccctcccccat

SEQ ID NO: 44043 - DNA, 22 bp, synthetic construct
  misc_feature 1..22: note = chemically synthesized
  source 1..22: mol_type = other DNA
cctccccctcccccatcctcat

SEQ ID NO: 44044 - DNA, 22 bp, synthetic construct
  misc_feature 1..22: note = chemically synthesized
  source 1..22: mol_type = other DNA
cccctcccccatcctcatcagc

SEQ ID NO: 44045 - DNA, 22 bp, synthetic construct
  misc_feature 1..22: note = chemically synthesized
  source 1..22: mol_type = other DNA
ccccatcctcatcagcttggcc

SEQ ID NO: 44046 - DNA, 22 bp, synthetic construct
  misc_feature 1..22: note = chemically synthesized
  source 1..22: mol_type = other DNA
atcagcttggccatggcagggc

SEQ ID NO: 44047 - DNA, 22 bp, synthetic construct
  misc_feature 1..22: note = chemically synthesized
  source 1..22: mol_type = other DNA
ggccatggcagggctgggggat

SEQ ID NO: 44048 - DNA, 22 bp, synthetic construct
  misc_feature 1..22: note = chemically synthesized
  source 1..22: mol_type = other DNA
gccatggcagggctgggggatc

SEQ ID NO: 44049 - DNA, 22 bp, synthetic construct
  misc_feature 1..22: note = chemically synthesized
  source 1..22: mol_type = other DNA
ggggatcagaggtgaacaggaa

SEQ ID NO: 44050 - DNA, 22 bp, synthetic construct
  misc_feature 1..22: note = chemically synthesized
  source 1..22: mol_type = other DNA
ggggagacagggcctccagtgg

SEQ ID NO: 44051 - DNA, 22 bp, synthetic construct
  misc_feature 1..22: note = chemically synthesized
  source 1..22: mol_type = other DNA
cagtgggaccagagctgagtgg

SEQ ID NO: 44052 - DNA, 22 bp, synthetic construct
  misc_feature 1..22: note = chemically synthesized
  source 1..22: mol_type = other DNA
agtggcctcaggcagtggcgga

SEQ ID NO: 44053 - DNA, 22 bp, synthetic construct
  misc_feature 1..22: note = chemically synthesized
  source 1..22: mol_type = other DNA
aggcagtggcggaagctgatta

SEQ ID NO: 44054 - DNA, 22 bp, synthetic construct
  misc_feature 1..22: note = chemically synthesized
  source 1..22: mol_type = other DNA
attaaaggaaggtacggggagt

SEQ ID NO: 44055 - DNA, 22 bp, synthetic construct
  misc_feature 1..22: note = chemically synthesized
  source 1..22: mol_type = other DNA
aaggaaggtacggggagtggag

SEQ ID NO: 44056 - DNA, 22 bp, synthetic construct
  misc_feature 1..22: note = chemically synthesized
  source 1..22: mol_type = other DNA
agacaacaatgcaagggggaga

SEQ ID NO: 44057 - DNA, 22 bp, synthetic construct
  misc_feature 1..22: note = chemically synthesized
  source 1..22: mol_type = other DNA
gacaacaatgcaagggggagaa

SEQ ID NO: 44058 - DNA, 22 bp, synthetic construct
  misc_feature 1..22: note = chemically synthesized
  source 1..22: mol_type = other DNA
aagaaaacagaacagagaccac

SEQ ID NO: 44059 - DNA, 22 bp, synthetic construct
  misc_feature 1..22: note = chemically synthesized
  source 1..22: mol_type = other DNA
ctggcaataaacagagagaaag

SEQ ID NO: 44060 - DNA, 22 bp, synthetic construct
  misc_feature 1..22: note = chemically synthesized
  source 1..22: mol_type = other DNA
gcaataaacagagagaaagtga

SEQ ID NO: 44061 - DNA, 22 bp, synthetic construct
  misc_feature 1..22: note = chemically synthesized
  source 1..22: mol_type = other DNA
cattacttaagaaacctgagca

SEQ ID NO: 44062 - DNA, 22 bp, synthetic construct
  misc_feature 1..22: note = chemically synthesized
  source 1..22: mol_type = other DNA
cttaagaaacctgagcacattc

SEQ ID NO: 44063 - DNA, 22 bp, synthetic construct
  misc_feature 1..22: note = chemically synthesized
  source 1..22: mol_type = other DNA
aagaaacctgagcacattctta

SEQ ID NO: 44064 - DNA, 22 bp, synthetic construct
  misc_feature 1..22: note = chemically synthesized
  source 1..22: mol_type = other DNA
agaaacctgagcacattcttac

SEQ ID NO: 44065 - DNA, 22 bp, synthetic construct
  misc_feature 1..22: note = chemically synthesized
  source 1..22: mol_type = other DNA
agcacattcttacgcctagggc

SEQ ID NO: 44066 - DNA, 22 bp, synthetic construct
  misc_feature 1..22: note = chemically synthesized
  source 1..22: mol_type = other DNA
ttacgcctagggcaataaatac

SEQ ID NO: 44067 - DNA, 22 bp, synthetic construct
  misc_feature 1..22: note = chemically synthesized
  source 1..22: mol_type = other DNA
acgcctagggcaataaatacat

SEQ ID NO: 44068 - DNA, 22 bp, synthetic construct
  misc_feature 1..22: note = chemically synthesized
  source 1..22: mol_type = other DNA
cgcctagggcaataaatacatc

SEQ ID NO: 44069 - DNA, 22 bp, synthetic construct
  misc_feature 1..22: note = chemically synthesized
  source 1..22: mol_type = other DNA
gggcaataaatacatccttgag

SEQ ID NO: 44070 - DNA, 22 bp, synthetic construct
  misc_feature 1..22: note = chemically synthesized
  source 1..22: mol_type = other DNA
gagctacacaggctaagcaaga

SEQ ID NO: 44071 - DNA, 22 bp, synthetic construct
  misc_feature 1..22: note = chemically synthesized
  source 1..22: mol_type = other DNA
agctacacaggctaagcaagag

SEQ ID NO: 44072 - DNA, 22 bp, synthetic construct
  misc_feature 1..22: note = chemically synthesized
  source 1..22: mol_type = other DNA
cacaggctaagcaagagtgaga

SEQ ID NO: 44073 - DNA, 22 bp, synthetic construct
  misc_feature 1..22: note = chemically synthesized
  source 1..22: mol_type = other DNA
agcaagagtgagagagggtgat

SEQ ID NO: 44074 - DNA, 22 bp, synthetic construct
  misc_feature 1..22: note = chemically synthesized
  source 1..22: mol_type = other DNA
acaggccacatgggagagtggg

SEQ ID NO: 44075 - DNA, 22 bp, synthetic construct
  misc_feature 1..22: note = chemically synthesized
  source 1..22: mol_type = other DNA
ggagctgggagtttggcttctc

SEQ ID NO: 44076 - DNA, 22 bp, synthetic construct
  misc_feature 1..22: note = chemically synthesized
  source 1..22: mol_type = other DNA
ggagtttggcttctcatctgtg

SEQ ID NO: 44077 - DNA, 22 bp, synthetic construct
  misc_feature 1..22: note = chemically synthesized
  source 1..22: mol_type = other DNA
ggcttctcatctgtgcatggcc

SEQ ID NO: 44078 - DNA, 22 bp, synthetic construct
  misc_feature 1..22: note = chemically synthesized
  source 1..22: mol_type = other DNA
gcttctcatctgtgcatggcct

SEQ ID NO: 44079 - DNA, 22 bp, synthetic construct
  misc_feature 1..22: note = chemically synthesized
  source 1..22: mol_type = other DNA
ctcatctgtgcatggcctctaa

SEQ ID NO: 44080 - DNA, 22 bp, synthetic construct
  misc_feature 1..22: note = chemically synthesized
  source 1..22: mol_type = other DNA
tcatctgtgcatggcctctaaa

SEQ ID NO: 44081 - DNA, 22 bp, synthetic construct
  misc_feature 1..22: note = chemically synthesized
  source 1..22: mol_type = other DNA
atctgtgcatggcctctaaact

SEQ ID NO: 44082 - DNA, 22 bp, synthetic construct
  misc_feature 1..22: note = chemically synthesized
  source 1..22: mol_type = other DNA
tgcatggcctctaaactgggca

SEQ ID NO: 44083 - DNA, 22 bp, synthetic construct
  misc_feature 1..22: note = chemically synthesized
  source 1..22: mol_type = other DNA
taaactgggcagtgaccatggc

SEQ ID NO: 44084 - DNA, 22 bp, synthetic construct
  misc_feature 1..22: note = chemically synthesized
  source 1..22: mol_type = other DNA
aactgggcagtgaccatggcct

SEQ ID NO: 44085 - DNA, 22 bp, synthetic construct
  misc_feature 1..22: note = chemically synthesized
  source 1..22: mol_type = other DNA
ggcagtgaccatggcctggtca

SEQ ID NO: 44086 - DNA, 22 bp, synthetic construct
  misc_feature 1..22: note = chemically synthesized
  source 1..22: mol_type = other DNA
gtcacctccccactctggacct

SEQ ID NO: 44087 - DNA, 22 bp, synthetic construct
  misc_feature 1..22: note = chemically synthesized
  source 1..22: mol_type = other DNA
cccactctggacctgggttgcc

SEQ ID NO: 44088 - DNA, 22 bp, synthetic construct
  misc_feature 1..22: note = chemically synthesized
  source 1..22: mol_type = other DNA
tggacctgggttgcccctctgt

SEQ ID NO: 44089 - DNA, 22 bp, synthetic construct
  misc_feature 1..22: note = chemically synthesized
  source 1..22: mol_type = other DNA
gacctgggttgcccctctgtaa

SEQ ID NO: 44090 - DNA, 22 bp, synthetic construct
  misc_feature 1..22: note = chemically synthesized
  source 1..22: mol_type = other DNA
ggttgcccctctgtaaacaagg

SEQ ID NO: 44091 - DNA, 22 bp, synthetic construct
  misc_feature 1..22: note = chemically synthesized
  source 1..22: mol_type = other DNA
cccctctgtaaacaaggaggtt

SEQ ID NO: 44092 - DNA, 22 bp, synthetic construct
  misc_feature 1..22: note = chemically synthesized
  source 1..22: mol_type = other DNA
tgtaaacaaggaggttgtaata

SEQ ID NO: 44093 - DNA, 22 bp, synthetic construct
  misc_feature 1..22: note = chemically synthesized
  source 1..22: mol_type = other DNA
taaacaaggaggttgtaataaa

SEQ ID NO: 44094 - DNA, 22 bp, synthetic construct
  misc_feature 1..22: note = chemically synthesized
  source 1..22: mol_type = other DNA
taataaattatctccaataccc

SEQ ID NO: 44095 - DNA, 22 bp, synthetic construct
  misc_feature 1..22: note = chemically synthesized
  source 1..22: mol_type = other DNA
tctccaataccctaatgtctta

SEQ ID NO: 44096 - DNA, 22 bp, synthetic construct
  misc_feature 1..22: note = chemically synthesized
  source 1..22: mol_type = other DNA
caataccctaatgtcttataaa

SEQ ID NO: 44097 - DNA, 22 bp, synthetic construct
  misc_feature 1..22: note = chemically synthesized
  source 1..22: mol_type = other DNA
atgtcttataaatcttatgcaa

SEQ ID NO: 44098 - DNA, 22 bp, synthetic construct
  misc_feature 1..22: note = chemically synthesized
  source 1..22: mol_type = other DNA
ataaatcttatgcaatttttgc

SEQ ID NO: 44099 - DNA, 22 bp, synthetic construct
  misc_feature 1..22: note = chemically synthesized
  source 1..22: mol_type = other DNA
taaatcttatgcaatttttgcc

SEQ ID NO: 44100 - DNA, 22 bp, synthetic construct
  misc_feature 1..22: note = chemically synthesized
  source 1..22: mol_type = other DNA
atgcaatttttgccaagatggg

SEQ ID NO: 44101 - DNA, 22 bp, synthetic construct
  misc_feature 1..22: note = chemically synthesized
  source 1..22: mol_type = other DNA
tgcaatttttgccaagatggga

SEQ ID NO: 44102 - DNA, 22 bp, synthetic construct
  misc_feature 1..22: note = chemically synthesized
  source 1..22: mol_type = other DNA
ttgccaagatgggagtatgggg

SEQ ID NO: 44103 - DNA, 22 bp, synthetic construct
  misc_feature 1..22: note = chemically synthesized
  source 1..22: mol_type = other DNA
tgccaagatgggagtatgggga

SEQ ID NO: 44104 - DNA, 22 bp, synthetic construct
  misc_feature 1..22: note = chemically synthesized
  source 1..22: mol_type = other DNA
gccaagatgggagtatggggag

SEQ ID NO: 44105 - DNA, 22 bp, synthetic construct
  misc_feature 1..22: note = chemically synthesized
  source 1..22: mol_type = other DNA
ccaagatgggagtatggggaga

SEQ ID NO: 44106 - DNA, 22 bp, synthetic construct
  misc_feature 1..22: note = chemically synthesized
  source 1..22: mol_type = other DNA
agtgagatgagatatcaaaggg

SEQ ID NO: 44107 - DNA, 22 bp, synthetic construct
  misc_feature 1..22: note = chemically synthesized
  source 1..22: mol_type = other DNA
attccatctccctaatctccaa

SEQ ID NO: 44108 - DNA, 22 bp, synthetic construct
  misc_feature 1..22: note = chemically synthesized
  source 1..22: mol_type = other DNA
catctccctaatctccaattgg

SEQ ID NO: 44109 - DNA, 22 bp, synthetic construct
  misc_feature 1..22: note = chemically synthesized
  source 1..22: mol_type = other DNA
cctaatctccaattggcaaagc

SEQ ID NO: 44110 - DNA, 22 bp, synthetic construct
  misc_feature 1..22: note = chemically synthesized
  source 1..22: mol_type = other DNA
atctccaattggcaaagccaga

SEQ ID NO: 44111 - DNA, 22 bp, synthetic construct
  misc_feature 1..22: note = chemically synthesized
  source 1..22: mol_type = other DNA
caattggcaaagccagacttgg

SEQ ID NO: 44112 - DNA, 22 bp, synthetic construct
  misc_feature 1..22: note = chemically synthesized
  source 1..22: mol_type = other DNA
gcaaagccagacttggggcaat

SEQ ID NO: 44113 - DNA, 22 bp, synthetic construct
  misc_feature 1..22: note = chemically synthesized
  source 1..22: mol_type = other DNA
ggggcaatacagactggttctg

SEQ ID NO: 44114 - DNA, 22 bp, synthetic construct
  misc_feature 1..22: note = chemically synthesized
  source 1..22: mol_type = other DNA
gggcaatacagactggttctgt

SEQ ID NO: 44115 - DNA, 22 bp, synthetic construct
  misc_feature 1..22: note = chemically synthesized
  source 1..22: mol_type = other DNA
gttctgtgatgacaaataactc

SEQ ID NO: 44116 - DNA, 22 bp, synthetic construct
  misc_feature 1..22: note = chemically synthesized
  source 1..22: mol_type = other DNA
tgtgatgacaaataactcctag

SEQ ID NO: 44117 - DNA, 22 bp, synthetic construct
  misc_feature 1..22: note = chemically synthesized
  source 1..22: mol_type = other DNA
tgatgacaaataactcctagct

SEQ ID NO: 44118 - DNA, 22 bp, synthetic construct
  misc_feature 1..22: note = chemically synthesized
  source 1..22: mol_type = other DNA
ctagctcattcctaatgattta

SEQ ID NO: 44119 - DNA, 22 bp, synthetic construct
  misc_feature 1..22: note = chemically synthesized
  source 1..22: mol_type = other DNA
gctcattcctaatgatttatca

SEQ ID NO: 44120 - DNA, 22 bp, synthetic construct
  misc_feature 1..22: note = chemically synthesized
  source 1..22: mol_type = other DNA
attcctaatgatttatcaccaa

SEQ ID NO: 44121 - DNA, 22 bp, synthetic construct
  misc_feature 1..22: note = chemically synthesized
  source 1..22: mol_type = other DNA
ctaatgatttatcaccaaatgt

SEQ ID NO: 44122 - DNA, 22 bp, synthetic construct
  misc_feature 1..22: note = chemically synthesized
  source 1..22: mol_type = other DNA
atgatttatcaccaaatgttct

SEQ ID NO: 44123 - DNA, 22 bp, synthetic construct
  misc_feature 1..22: note = chemically synthesized
  source 1..22: mol_type = other DNA
atcaccaaatgttctttcttca

SEQ ID NO: 44124 - DNA, 22 bp, synthetic construct
  misc_feature 1..22: note = chemically synthesized
  source 1..22: mol_type = other DNA
tcaccaaatgttctttcttcag

SEQ ID NO: 44125 - DNA, 22 bp, synthetic construct
  misc_feature 1..22: note = chemically synthesized
  source 1..22: mol_type = other DNA
tttcttcagctggaatttaaaa

SEQ ID NO: 44126 - DNA, 22 bp, synthetic construct
  misc_feature 1..22: note = chemically synthesized
  source 1..22: mol_type = other DNA
tcttcagctggaatttaaaata

SEQ ID NO: 44127 - DNA, 22 bp, synthetic construct
  misc_feature 1..22: note = chemically synthesized
  source 1..22: mol_type = other DNA
cttcagctggaatttaaaatat

SEQ ID NO: 44128 - DNA, 22 bp, synthetic construct
  misc_feature 1..22: note = chemically synthesized
  source 1..22: mol_type = other DNA
ttcagctggaatttaaaatatg

SEQ ID NO: 44129 - DNA, 22 bp, synthetic construct
  misc_feature 1..22: note = chemically synthesized
  source 1..22: mol_type = other DNA
cagctggaatttaaaatatgga

SEQ ID NO: 44130 - DNA, 22 bp, synthetic construct
  misc_feature 1..22: note = chemically synthesized
  source 1..22: mol_type = other DNA
agctggaatttaaaatatggac

SEQ ID NO: 44131 - DNA, 22 bp, synthetic construct
  misc_feature 1..22: note = chemically synthesized
  source 1..22: mol_type = other DNA
gaatttaaaatatggactcatc

SEQ ID NO: 44132 - DNA, 22 bp, synthetic construct
  misc_feature 1..22: note = chemically synthesized
  source 1..22: mol_type = other DNA
aaaatatggactcatccgtaaa

SEQ ID NO: 44133 - DNA, 22 bp, synthetic construct
  misc_feature 1..22: note = chemically synthesized
  source 1..22: mol_type = other DNA
aaatatggactcatccgtaaaa

SEQ ID NO: 44134 - DNA, 22 bp, synthetic construct
  misc_feature 1..22: note = chemically synthesized
  source 1..22: mol_type = other DNA
atccgtaaaataggaataataa

SEQ ID NO: 44135 - DNA, 22 bp, synthetic construct
  misc_feature 1..22: note = chemically synthesized
  source 1..22: mol_type = other DNA
catagggtttgtatgaaaataa

SEQ ID NO: 44136 - DNA, 22 bp, synthetic construct
  misc_feature 1..22: note = chemically synthesized
  source 1..22: mol_type = other DNA
atagggtttgtatgaaaataaa

SEQ ID NO: 44137 - DNA, 22 bp, synthetic construct
  misc_feature 1..22: note = chemically synthesized
  source 1..22: mol_type = other DNA
gtatgaaaataaaatgagtgcg

SEQ ID NO: 44138 - DNA, 22 bp, synthetic construct
  misc_feature 1..22: note = chemically synthesized
  source 1..22: mol_type = other DNA
tatgaaaataaaatgagtgcgt

SEQ ID NO: 44139 - DNA, 22 bp, synthetic construct
  misc_feature 1..22: note = chemically synthesized
  source 1..22: mol_type = other DNA
gtaaagttcctagagcagagta

SEQ ID NO: 44140 - DNA, 22 bp, synthetic construct
  misc_feature 1..22: note = chemically synthesized
  source 1..22: mol_type = other DNA
taaagttcctagagcagagtaa

SEQ ID NO: 44141 - DNA, 22 bp, synthetic construct
  misc_feature 1..22: note = chemically synthesized
  source 1..22: mol_type = other DNA
ctagagcagagtaagtgctccg

SEQ ID NO: 44142 - DNA, 22 bp, synthetic construct
  misc_feature 1..22: note = chemically synthesized
  source 1..22: mol_type = other DNA
gagcagagtaagtgctccgagc

SEQ ID NO: 44143 - DNA, 22 bp, synthetic construct
  misc_feature 1..22: note = chemically synthesized
  source 1..22: mol_type = other DNA
cgagcttgtgaactaaaatgct

SEQ ID NO: 44144 - DNA, 22 bp, synthetic construct
  misc_feature 1..22: note = chemically synthesized
  source 1..22: mol_type = other DNA
gtgaactaaaatgctgcctcct

SEQ ID NO: 44145 - DNA, 22 bp, synthetic construct
  misc_feature 1..22: note = chemically synthesized
  source 1..22: mol_type = other DNA
tgaactaaaatgctgcctcctg

SEQ ID NO: 44146 - DNA, 22 bp, synthetic construct
  misc_feature 1..22: note = chemically synthesized
  source 1..22: mol_type = other DNA
aaatgctgcctcctggtattta

SEQ ID NO: 44147 - DNA, 22 bp, synthetic construct
  misc_feature 1..22: note = chemically synthesized
  source 1..22: mol_type = other DNA
cctcctggtatttattagttac

SEQ ID NO: 44148 - DNA, 22 bp, synthetic construct
  misc_feature 1..22: note = chemically synthesized
  source 1..22: mol_type = other DNA
ctggtatttattagttacacct

SEQ ID NO: 44149 - DNA, 22 bp, synthetic construct
  misc_feature 1..22: note = chemically synthesized
  source 1..22: mol_type = other DNA
gtatttattagttacacctcag

SEQ ID NO: 44150 - DNA, 22 bp, synthetic construct
  misc_feature 1..22: note = chemically synthesized
  source 1..22: mol_type = other DNA
attagttacacctcagcagaaa

SEQ ID NO: 44151 - DNA, 22 bp, synthetic construct
  misc_feature 1..22: note = chemically synthesized
  source 1..22: mol_type = other DNA
ttagttacacctcagcagaaac

SEQ ID NO: 44152 - DNA, 22 bp, synthetic construct
  misc_feature 1..22: note = chemically synthesized
  source 1..22: mol_type = other DNA
gttacacctcagcagaaacaaa

SEQ ID NO: 44153 - DNA, 22 bp, synthetic construct
  misc_feature 1..22: note = chemically synthesized
  source 1..22: mol_type = other DNA
cacctcagcagaaacaaagtta

SEQ ID NO: 44154 - DNA, 22 bp, synthetic construct
  misc_feature 1..22: note = chemically synthesized
  source 1..22: mol_type = other DNA
agcagaaacaaagttatcaggc

SEQ ID NO: 44155 - DNA, 22 bp, synthetic construct
  misc_feature 1..22: note = chemically synthesized
  source 1..22: mol_type = other DNA
tcaggccctttccccaattcct

SEQ ID NO: 44156 - DNA, 22 bp, synthetic construct
  misc_feature 1..22: note = chemically synthesized
  source 1..22: mol_type = other DNA
tccccaattcctagtttgggtc

SEQ ID NO: 44157 - DNA, 22 bp, synthetic construct
  misc_feature 1..22: note = chemically synthesized
  source 1..22: mol_type = other DNA
ccccaattcctagtttgggtca

SEQ ID NO: 44158 - DNA, 22 bp, synthetic construct
  misc_feature 1..22: note = chemically synthesized
  source 1..22: mol_type = other DNA
cccaattcctagtttgggtcag

SEQ ID NO: 44159 - DNA, 22 bp, synthetic construct
  misc_feature 1..22: note = chemically synthesized
  source 1..22: mol_type = other DNA
ctagtttgggtcagaagaaaag

SEQ ID NO: 44160 - DNA, 22 bp, synthetic construct
  misc_feature 1..22: note = chemically synthesized
  source 1..22: mol_type = other DNA
gtttgggtcagaagaaaaggga

SEQ ID NO: 44161 - DNA, 22 bp, synthetic construct
  misc_feature 1..22: note = chemically synthesized
  source 1..22: mol_type = other DNA
gggtcagaagaaaagggaaaag

SEQ ID NO: 44162 - DNA, 22 bp, synthetic construct
  misc_feature 1..22: note = chemically synthesized
  source 1..22: mol_type = other DNA
ggtcagaagaaaagggaaaagg

SEQ ID NO: 44163 - DNA, 22 bp, synthetic construct
  misc_feature 1..22: note = chemically synthesized
  source 1..22: mol_type = other DNA
ggaacacagatcctaacacagt

SEQ ID NO: 44164 - DNA, 22 bp, synthetic construct
  misc_feature 1..22: note = chemically synthesized
  source 1..22: mol_type = other DNA
acacagtagctggtacctgata

SEQ ID NO: 44165 - DNA, 22 bp, synthetic construct
  misc_feature 1..22: note = chemically synthesized
  source 1..22: mol_type = other DNA
gtacctgataggtgcctatatg

SEQ ID NO: 44166 - DNA, 22 bp, synthetic construct
  misc_feature 1..22: note = chemically synthesized
  source 1..22: mol_type = other DNA
ataggtgcctatatgtgatgga

SEQ ID NO: 44167 - DNA, 22 bp, synthetic construct
  misc_feature 1..22: note = chemically synthesized
  source 1..22: mol_type = other DNA
tatgtgatggatgggtggacag

SEQ ID NO: 44168 - DNA, 22 bp, synthetic construct
  misc_feature 1..22: note = chemically synthesized
  source 1..22: mol_type = other DNA
tgaggaggggagagtgcagaca

SEQ ID NO: 44169 - DNA, 22 bp, synthetic construct
  misc_feature 1..22: note = chemically synthesized
  source 1..22: mol_type = other DNA
cacctcctttacaattttggga

SEQ ID NO: 44170 - DNA, 22 bp, synthetic construct
  misc_feature 1..22: note = chemically synthesized
  source 1..22: mol_type = other DNA
acctcctttacaattttgggag

SEQ ID NO: 44171 - DNA, 22 bp, synthetic construct
  misc_feature 1..22: note = chemically synthesized
  source 1..22: mol_type = other DNA
ctttacaattttgggagtccac

SEQ ID NO: 44172 - DNA, 22 bp, synthetic construct
  misc_feature 1..22: note = chemically synthesized
  source 1..22: mol_type = other DNA
tacaattttgggagtccacacg

SEQ ID NO: 44173 - DNA, 22 bp, synthetic construct
  misc_feature 1..22: note = chemically synthesized
  source 1..22: mol_type = other DNA
acaattttgggagtccacacgg

SEQ ID NO: 44174 - DNA, 22 bp, synthetic construct
  misc_feature 1..22: note = chemically synthesized
  source 1..22: mol_type = other DNA
caattttgggagtccacacggc

SEQ ID NO: 44175 - DNA, 22 bp, synthetic construct
  misc_feature 1..22: note = chemically synthesized
  source 1..22: mol_type = other DNA
tgggagtccacacggcatggca

SEQ ID NO: 44176 - DNA, 22 bp, synthetic construct
  misc_feature 1..22: note = chemically synthesized
  source 1..22: mol_type = other DNA
gggagtccacacggcatggcat

SEQ ID NO: 44177 - DNA, 22 bp, synthetic construct
  misc_feature 1..22: note = chemically synthesized
  source 1..22: mol_type = other DNA
ggagtccacacggcatggcata

SEQ ID NO: 44178 - DNA, 22 bp, synthetic construct
  misc_feature 1..22: note = chemically synthesized
  source 1..22: mol_type = other DNA
tttcattcccattgagaaataa

SEQ ID NO: 44179 - DNA, 22 bp, synthetic construct
  misc_feature 1..22: note = chemically synthesized
  source 1..22: mol_type = other DNA
cattcccattgagaaataaaat

SEQ ID NO: 44180 - DNA, 22 bp, synthetic construct
  misc_feature 1..22: note = chemically synthesized
  source 1..22: mol_type = other DNA
attcccattgagaaataaaatc

SEQ ID NO: 44181 - DNA, 22 bp, synthetic construct
  misc_feature 1..22: note = chemically synthesized
  source 1..22: mol_type = other DNA
ccattgagaaataaaatccaat

SEQ ID NO: 44182 - DNA, 22 bp, synthetic construct
  misc_feature 1..22: note = chemically synthesized
  source 1..22: mol_type = other DNA
agaaataaaatccaattctcca

SEQ ID NO: 44183 - DNA, 22 bp, synthetic construct
  misc_feature 1..22: note = chemically synthesized
  source 1..22: mol_type = other DNA
tccatcaccaagagagccttcc

SEQ ID NO: 44184 - DNA, 22 bp, synthetic construct
  misc_feature 1..22: note = chemically synthesized
  source 1..22: mol_type = other DNA
catcaccaagagagccttccga

SEQ ID NO: 44185 - DNA, 22 bp, synthetic construct
  misc_feature 1..22: note = chemically synthesized
  source 1..22: mol_type = other DNA
ccgaaagaggcccccctgggca

SEQ ID NO: 44186 - DNA, 22 bp, synthetic construct
  misc_feature 1..22: note = chemically synthesized
  source 1..22: mol_type = other DNA
cgaaagaggcccccctgggcaa

SEQ ID NO: 44187 - DNA, 22 bp, synthetic construct
  misc_feature 1..22: note = chemically synthesized
  source 1..22: mol_type = other DNA
ggcaaacggccaccgatggaga

SEQ ID NO: 44188 - DNA, 22 bp, synthetic construct
  misc_feature 1..22: note = chemically synthesized
  source 1..22: mol_type = other DNA
ccagtcctcttctaccccaccc

SEQ ID NO: 44189 - DNA, 22 bp, synthetic construct
  misc_feature 1..22: note = chemically synthesized
  source 1..22: mol_type = other DNA
ttctaccccacccacgccccca

SEQ ID NO: 44190 - DNA, 22 bp, synthetic construct
  misc_feature 1..22: note = chemically synthesized
  source 1..22: mol_type = other DNA
ctaccccacccacgcccccacc

SEQ ID NO: 44191 - DNA, 22 bp, synthetic construct
  misc_feature 1..22: note = chemically synthesized
  source 1..22: mol_type = other DNA
taccccacccacgcccccaccc

SEQ ID NO: 44192 - DNA, 22 bp, synthetic construct
  misc_feature 1..22: note = chemically synthesized
  source 1..22: mol_type = other DNA
ccccacccacgcccccacccta

SEQ ID NO: 44193 - DNA, 22 bp, synthetic construct
  misc_feature 1..22: note = chemically synthesized
  source 1..22: mol_type = other DNA
atcagaggccaaacccttcctg

SEQ ID NO: 44194 - DNA, 22 bp, synthetic construct
  misc_feature 1..22: note = chemically synthesized
  source 1..22: mol_type = other DNA
cctggagcctgtgataaaagca

SEQ ID NO: 44195 - DNA, 22 bp, synthetic construct
  misc_feature 1..22: note = chemically synthesized
  source 1..22: mol_type = other DNA
ctggagcctgtgataaaagcaa

SEQ ID NO: 44196 - DNA, 22 bp, synthetic construct
  misc_feature 1..22: note = chemically synthesized
  source 1..22: mol_type = other DNA
gagcctgtgataaaagcaactg

SEQ ID NO: 44197 - DNA, 22 bp, synthetic construct
  misc_feature 1..22: note = chemically synthesized
  source 1..22: mol_type = other DNA
tgataaaagcaactgttagctt

SEQ ID NO: 44198 - DNA, 22 bp, synthetic construct
  misc_feature 1..22: note = chemically synthesized
  source 1..22: mol_type = other DNA
ttagcttgcactagactagctt

SEQ ID NO: 44199 - DNA, 22 bp, synthetic construct
  misc_feature 1..22: note = chemically synthesized
  source 1..22: mol_type = other DNA
gcttgcactagactagcttcaa

SEQ ID NO: 44200 - DNA, 22 bp, synthetic construct
  misc_feature 1..22: note = chemically synthesized
  source 1..22: mol_type = other DNA
gcactagactagcttcaaagtt

SEQ ID NO: 44201 - DNA, 22 bp, synthetic construct
  misc_feature 1..22: note = chemically synthesized
  source 1..22: mol_type = other DNA
cactagactagcttcaaagttg

SEQ ID NO: 44202 - DNA, 22 bp, synthetic construct
  misc_feature 1..22: note = chemically synthesized
  source 1..22: mol_type = other DNA
gactagcttcaaagttgtattg

SEQ ID NO: 44203 - DNA, 22 bp, synthetic construct
  misc_feature 1..22: note = chemically synthesized
  source 1..22: mol_type = other DNA
gcttcaaagttgtattgaccct

SEQ ID NO: 44204 - DNA, 22 bp, synthetic construct
  misc_feature 1..22: note = chemically synthesized
  source 1..22: mol_type = other DNA
caaagttgtattgaccctggtg

SEQ ID NO: 44205 - DNA, 22 bp, synthetic construct
  misc_feature 1..22: note = chemically synthesized
  source 1..22: mol_type = other DNA
aaagttgtattgaccctggtgt

SEQ ID NO: 44206 - DNA, 22 bp, synthetic construct
  misc_feature 1..22: note = chemically synthesized
  source 1..22: mol_type = other DNA
tattgaccctggtgtgttatgt

SEQ ID NO: 44207 - DNA, 22 bp, synthetic construct
  misc_feature 1..22: note = chemically synthesized
  source 1..22: mol_type = other DNA
accctggtgtgttatgtctaag

SEQ ID NO: 44208 - DNA, 22 bp, synthetic construct
  misc_feature 1..22: note = chemically synthesized
  source 1..22: mol_type = other DNA
gtgtgttatgtctaagagtaga

SEQ ID NO: 44209 - DNA, 22 bp, synthetic construct
  misc_feature 1..22: note = chemically synthesized
  source 1..22: mol_type = other DNA
tgtctaagagtagatgccatat

SEQ ID NO: 44210 - DNA, 22 bp, synthetic construct
  misc_feature 1..22: note = chemically synthesized
  source 1..22: mol_type = other DNA
agagtagatgccatatctcttt

SEQ ID NO: 44211 - DNA, 22 bp, synthetic construct
  misc_feature 1..22: note = chemically synthesized
  source 1..22: mol_type = other DNA
ttttctggcctatgttattacc

SEQ ID NO: 44212 - DNA, 22 bp, synthetic construct
  misc_feature 1..22: note = chemically synthesized
  source 1..22: mol_type = other DNA
ttctggcctatgttattacctg

SEQ ID NO: 44213 - DNA, 22 bp, synthetic construct
  misc_feature 1..22: note = chemically synthesized
  source 1..22: mol_type = other DNA
tctggcctatgttattacctgt

SEQ ID NO: 44214 - DNA, 22 bp, synthetic construct
  misc_feature 1..22: note = chemically synthesized
  source 1..22: mol_type = other DNA
ctggcctatgttattacctgta

SEQ ID NO: 44215 - DNA, 22 bp, synthetic construct
  misc_feature 1..22: note = chemically synthesized
  source 1..22: mol_type = other DNA
tggcctatgttattacctgtat

SEQ ID NO: 44216 - DNA, 22 bp, synthetic construct
  misc_feature 1..22: note = chemically synthesized
  source 1..22: mol_type = other DNA
gcctatgttattacctgtatgg

SEQ ID NO: 44217 - DNA, 22 bp, synthetic construct
  misc_feature 1..22: note = chemically synthesized
  source 1..22: mol_type = other DNA
tgttattacctgtatggacttt

SEQ ID NO: 44218 - DNA, 22 bp, synthetic construct
  misc_feature 1..22: note = chemically synthesized
  source 1..22: mol_type = other DNA
ttacctgtatggactttgcact

SEQ ID NO: 44219 - DNA, 22 bp, synthetic construct
  misc_feature 1..22: note = chemically synthesized
  source 1..22: mol_type = other DNA
cctgtatggactttgcactgga

SEQ ID NO: 44220 - DNA, 22 bp, synthetic construct
  misc_feature 1..22: note = chemically synthesized
  source 1..22: mol_type = other DNA
tatggactttgcactggaatca

SEQ ID NO: 44221 - DNA, 22 bp, synthetic construct
  misc_feature 1..22: note = chemically synthesized
  source 1..22: mol_type = other DNA
tgcactggaatcagctatctgc

SEQ ID NO: 44222 - DNA, 22 bp, synthetic construct
  misc_feature 1..22: note = chemically synthesized
  source 1..22: mol_type = other DNA
gcactggaatcagctatctgct

SEQ ID NO: 44223 - DNA, 22 bp, synthetic construct
  misc_feature 1..22: note = chemically synthesized
  source 1..22: mol_type = other DNA
cactggaatcagctatctgctc

SEQ ID NO: 44224 - DNA, 22 bp, synthetic construct
  misc_feature 1..22: note = chemically synthesized
  source 1..22: mol_type = other DNA
gaatcagctatctgctcttact

SEQ ID NO: 44225 - DNA, 22 bp, synthetic construct
  misc_feature 1..22: note = chemically synthesized
  source 1..22: mol_type = other DNA
tctgctcttacttatgcacacc

SEQ ID NO: 44226 - DNA, 22 bp, synthetic construct
  misc_feature 1..22: note = chemically synthesized
  source 1..22: mol_type = other DNA
ctcttacttatgcacacctggg

SEQ ID NO: 44227 - DNA, 22 bp, synthetic construct
  misc_feature 1..22: note = chemically synthesized
  source 1..22: mol_type = other DNA
ttacttatgcacacctggggca

SEQ ID NO: 44228 - DNA, 22 bp, synthetic construct
  misc_feature 1..22: note = chemically synthesized
  source 1..22: mol_type = other DNA
acttatgcacacctggggcata

SEQ ID NO: 44229 - DNA, 22 bp, synthetic construct
  misc_feature 1..22: note = chemically synthesized
  source 1..22: mol_type = other DNA
cttatgcacacctggggcatag

SEQ ID NO: 44230 - DNA, 22 bp, synthetic construct
  misc_feature 1..22: note = chemically synthesized
  source 1..22: mol_type = other DNA
atgcacacctggggcatagagc

SEQ ID NO: 44231 - DNA, 22 bp, synthetic construct
  misc_feature 1..22: note = chemically synthesized
  source 1..22: mol_type = other DNA
tgcacacctggggcatagagcc

SEQ ID NO: 44232 - DNA, 22 bp, synthetic construct
  misc_feature 1..22: note = chemically synthesized
  source 1..22: mol_type = other DNA
gggcatagagccagccctgtat

SEQ ID NO: 44233 - DNA, 22 bp, synthetic construct
  misc_feature 1..22: note = chemically synthesized
  source 1..22: mol_type = other DNA
tatcgcttttcagccatctcac

SEQ ID NO: 44234 - DNA, 22 bp, synthetic construct
  misc_feature 1..22: note = chemically synthesized
  source 1..22: mol_type = other DNA
ttcagccatctcactacagata

SEQ ID NO: 44235 - DNA, 22 bp, synthetic construct
  misc_feature 1..22: note = chemically synthesized
  source 1..22: mol_type = other DNA
tcagccatctcactacagataa

SEQ ID NO: 44236 - DNA, 22 bp, synthetic construct
  misc_feature 1..22: note = chemically synthesized
  source 1..22: mol_type = other DNA
cagccatctcactacagataac

SEQ ID NO: 44237 - DNA, 22 bp, synthetic construct
  misc_feature 1..22: note = chemically synthesized
  source 1..22: mol_type = other DNA
agccatctcactacagataact

SEQ ID NO: 44238 - DNA, 22 bp, synthetic construct
  misc_feature 1..22: note = chemically synthesized
  source 1..22: mol_type = other DNA
actacagataactcccaagtcc

SEQ ID NO: 44239 - DNA, 22 bp, synthetic construct
  misc_feature 1..22: note = chemically synthesized
  source 1..22: mol_type = other DNA
cagataactcccaagtcctgtc

SEQ ID NO: 44240 - DNA, 22 bp, synthetic construct
  misc_feature 1..22: note = chemically synthesized
  source 1..22: mol_type = other DNA
ccaagtcctgtctagctgcctt

SEQ ID NO: 44241 - DNA, 22 bp, synthetic construct
  misc_feature 1..22: note = chemically synthesized
  source 1..22: mol_type = other DNA
tctagctgccttccttatcaca

SEQ ID NO: 44242 - DNA, 22 bp, synthetic construct
  misc_feature 1..22: note = chemically synthesized
  source 1..22: mol_type = other DNA
gctgccttccttatcacaggaa

SEQ ID NO: 44243 - DNA, 22 bp, synthetic construct
  misc_feature 1..22: note = chemically synthesized
  source 1..22: mol_type = other DNA
ccttccttatcacaggaatagc

SEQ ID NO: 44244 - DNA, 22 bp, synthetic construct
  misc_feature 1..22: note = chemically synthesized
  source 1..22: mol_type = other DNA
ccttatcacaggaatagcaccc

SEQ ID NO: 44245 - DNA, 22 bp, synthetic construct
  misc_feature 1..22: note = chemically synthesized
  source 1..22: mol_type = other DNA
cttatcacaggaatagcaccca

SEQ ID NO: 44246 - DNA, 22 bp, synthetic construct
  misc_feature 1..22: note = chemically synthesized
  source 1..22: mol_type = other DNA
atcacaggaatagcacccaagg

SEQ ID NO: 44247 - DNA, 22 bp, synthetic construct
  misc_feature 1..22: note = chemically synthesized
  source 1..22: mol_type = other DNA
tcacaggaatagcacccaaggt

SEQ ID NO: 44248 - DNA, 22 bp, synthetic construct
  misc_feature 1..22: note = chemically synthesized
  source 1..22: mol_type = other DNA
agagtagaaccccctataaact

SEQ ID NO: 44249 - DNA, 22 bp, synthetic construct
  misc_feature 1..22: note = chemically synthesized
  source 1..22: mol_type = other DNA
taaactagtctggtttgcccat

SEQ ID NO: 44250 - DNA, 22 bp, synthetic construct
  misc_feature 1..22: note = chemically synthesized
  source 1..22: mol_type = other DNA
gtctggtttgcccatggggcac

SEQ ID NO: 44251 - DNA, 22 bp, synthetic construct
  misc_feature 1..22: note = chemically synthesized
  source 1..22: mol_type = other DNA
gtttgcccatggggcacagtca

SEQ ID NO: 44252 - DNA, 22 bp, synthetic construct
  misc_feature 1..22: note = chemically synthesized
  source 1..22: mol_type = other DNA
gcccatggggcacagtcaggct

SEQ ID NO: 44253 - DNA, 22 bp, synthetic construct
  misc_feature 1..22: note = chemically synthesized
  source 1..22: mol_type = other DNA
cccatggggcacagtcaggctg

SEQ ID NO: 44254 - DNA, 22 bp, synthetic construct
  misc_feature 1..22: note = chemically synthesized
  source 1..22: mol_type = other DNA
ttttccagggtggggtgcagac

SEQ ID NO: 44255 - DNA, 22 bp, synthetic construct
  misc_feature 1..22: note = chemically synthesized
  source 1..22: mol_type = other DNA
tccagggtggggtgcagacatt

SEQ ID NO: 44256 - DNA, 22 bp, synthetic construct
  misc_feature 1..22: note = chemically synthesized
  source 1..22: mol_type = other DNA
ccagggtggggtgcagacattc

SEQ ID NO: 44257 - DNA, 22 bp, synthetic construct
  misc_feature 1..22: note = chemically synthesized
  source 1..22: mol_type = other DNA
cagggtggggtgcagacattct

SEQ ID NO: 44258 - DNA, 22 bp, synthetic construct
  misc_feature 1..22: note = chemically synthesized
  source 1..22: mol_type = other DNA
tctgcctgttgtgatgcttaca

SEQ ID NO: 44259 - DNA, 22 bp, synthetic construct
  misc_feature 1..22: note = chemically synthesized
  source 1..22: mol_type = other DNA
tgcctgttgtgatgcttacata

SEQ ID NO: 44260 - DNA, 22 bp, synthetic construct
  misc_feature 1..22: note = chemically synthesized
  source 1..22: mol_type = other DNA
cctgttgtgatgcttacatata

SEQ ID NO: 44261 - DNA, 22 bp, synthetic construct
  misc_feature 1..22: note = chemically synthesized
  source 1..22: mol_type = other DNA
ttgtgatgcttacatataacgt

SEQ ID NO: 44262 - DNA, 22 bp, synthetic construct
  misc_feature 1..22: note = chemically synthesized
  source 1..22: mol_type = other DNA
tgatgcttacatataacgtcat

SEQ ID NO: 44263 - DNA, 22 bp, synthetic construct
  misc_feature 1..22: note = chemically synthesized
  source 1..22: mol_type = other DNA
acatataacgtcataacagaca

SEQ ID NO: 44264 - DNA, 22 bp, synthetic construct
  misc_feature 1..22: note = chemically synthesized
  source 1..22: mol_type = other DNA
catataacgtcataacagacac

SEQ ID NO: 44265 - DNA, 22 bp, synthetic construct
  misc_feature 1..22: note = chemically synthesized
  source 1..22: mol_type = other DNA
tgatccctgtggtttgagagtt

SEQ ID NO: 44266 - DNA, 22 bp, synthetic construct
  misc_feature 1..22: note = chemically synthesized
  source 1..22: mol_type = other DNA
tggtttgagagtttggagcttc

SEQ ID NO: 44267 - DNA, 22 bp, synthetic construct
  misc_feature 1..22: note = chemically synthesized
  source 1..22: mol_type = other DNA
gagagtttggagcttccctaaa

SEQ ID NO: 44268 - DNA, 22 bp, synthetic construct
  misc_feature 1..22: note = chemically synthesized
  source 1..22: mol_type = other DNA
agagtttggagcttccctaaaa

SEQ ID NO: 44269 - DNA, 22 bp, synthetic construct
  misc_feature 1..22: note = chemically synthesized
  source 1..22: mol_type = other DNA
ggagcttccctaaaagtcaaaa

SEQ ID NO: 44270 - DNA, 22 bp, synthetic construct
  misc_feature 1..22: note = chemically synthesized
  source 1..22: mol_type = other DNA
gagcttccctaaaagtcaaaat

SEQ ID NO: 44271 - DNA, 22 bp, synthetic construct
  misc_feature 1..22: note = chemically synthesized
  source 1..22: mol_type = other DNA
ccctaaaagtcaaaatattctc

SEQ ID NO: 44272 - DNA, 22 bp, synthetic construct
  misc_feature 1..22: note = chemically synthesized
  source 1..22: mol_type = other DNA
cctaaaagtcaaaatattctca

SEQ ID NO: 44273 - DNA, 22 bp, synthetic construct
  misc_feature 1..22: note = chemically synthesized
  source 1..22: mol_type = other DNA
aaagtcaaaatattctcaatgg

SEQ ID NO: 44274 - DNA, 22 bp, synthetic construct
  misc_feature 1..22: note = chemically synthesized
  source 1..22: mol_type = other DNA
tcaatgggccctcaatcagcac

SEQ ID NO: 44275 - DNA, 22 bp, synthetic construct
  misc_feature 1..22: note = chemically synthesized
  source 1..22: mol_type = other DNA
aatgggccctcaatcagcacat

SEQ ID NO: 44276 - DNA, 22 bp, synthetic construct
  misc_feature 1..22: note = chemically synthesized
  source 1..22: mol_type = other DNA
aatcagcacatacacacaaaag

SEQ ID NO: 44277 - DNA, 22 bp, synthetic construct
  misc_feature 1..22: note = chemically synthesized
  source 1..22: mol_type = other DNA
gaaaactgtaattcttttcctg

SEQ ID NO: 44278 - DNA, 22 bp, synthetic construct
  misc_feature 1..22: note = chemically synthesized
  source 1..22: mol_type = other DNA
taattcttttcctgctcaaaga

SEQ ID NO: 44279 - DNA, 22 bp, synthetic construct
  misc_feature 1..22: note = chemically synthesized
  source 1..22: mol_type = other DNA
ttttcctgctcaaagacaggca

SEQ ID NO: 44280 - DNA, 22 bp, synthetic construct
  misc_feature 1..22: note = chemically synthesized
  source 1..22: mol_type = other DNA
ttcctgctcaaagacaggcaat

SEQ ID NO: 44281 - DNA, 22 bp, synthetic construct
  misc_feature 1..22: note = chemically synthesized
  source 1..22: mol_type = other DNA
tcctgctcaaagacaggcaatt

SEQ ID NO: 44282 - DNA, 22 bp, synthetic construct
  misc_feature 1..22: note = chemically synthesized
  source 1..22: mol_type = other DNA
cctgctcaaagacaggcaattc

SEQ ID NO: 44283 - DNA, 22 bp, synthetic construct
  misc_feature 1..22: note = chemically synthesized
  source 1..22: mol_type = other DNA
ctgctcaaagacaggcaattca

SEQ ID NO: 44284 - DNA, 22 bp, synthetic construct
  misc_feature 1..22: note = chemically synthesized
  source 1..22: mol_type = other DNA
ctcaaagacaggcaattcaata

SEQ ID NO: 44285 - DNA, 22 bp, synthetic construct
  misc_feature 1..22: note = chemically synthesized
  source 1..22: mol_type = other DNA
aaagacaggcaattcaataccc

SEQ ID NO: 44286 - DNA, 22 bp, synthetic construct
  misc_feature 1..22: note = chemically synthesized
  source 1..22: mol_type = other DNA
aataccccttcccccaaccaaa

SEQ ID NO: 44287 - DNA, 22 bp, synthetic construct
  misc_feature 1..22: note = chemically synthesized
  source 1..22: mol_type = other DNA
cccccaaccaaaaacccttgcc

SEQ ID NO: 44288 - DNA, 22 bp, synthetic construct
  misc_feature 1..22: note = chemically synthesized
  source 1..22: mol_type = other DNA
ccccaaccaaaaacccttgcca

SEQ ID NO: 44289 - DNA, 22 bp, synthetic construct
  misc_feature 1..22: note = chemically synthesized
  source 1..22: mol_type = other DNA
gccaccatgggagcctggggca

SEQ ID NO: 44290 - DNA, 22 bp, synthetic construct
  misc_feature 1..22: note = chemically synthesized
  source 1..22: mol_type = other DNA
ccaccatgggagcctggggcag

SEQ ID NO: 44291 - DNA, 22 bp, synthetic construct
  misc_feature 1..22: note = chemically synthesized
  source 1..22: mol_type = other DNA
gggcagagaaggcacagtgaag

SEQ ID NO: 44292 - DNA, 22 bp, synthetic construct
  misc_feature 1..22: note = chemically synthesized
  source 1..22: mol_type = other DNA
taattccaggctctaaatggtg

SEQ ID NO: 44293 - DNA, 22 bp, synthetic construct
  misc_feature 1..22: note = chemically synthesized
  source 1..22: mol_type = other DNA
caggctctaaatggtgctgtca

SEQ ID NO: 44294 - DNA, 22 bp, synthetic construct
  misc_feature 1..22: note = chemically synthesized
  source 1..22: mol_type = other DNA
taaatggtgctgtcatttttct

SEQ ID NO: 44295 - DNA, 22 bp, synthetic construct
  misc_feature 1..22: note = chemically synthesized
  source 1..22: mol_type = other DNA
aatggtgctgtcatttttctga

SEQ ID NO: 44296 - DNA, 22 bp, synthetic construct
  misc_feature 1..22: note = chemically synthesized
  source 1..22: mol_type = other DNA
tcatttttctgagagtctctaa

SEQ ID NO: 44297 - DNA, 22 bp, synthetic construct
  misc_feature 1..22: note = chemically synthesized
  source 1..22: mol_type = other DNA
ttctgagagtctctaaattaca

SEQ ID NO: 44298 - DNA, 22 bp, synthetic construct
  misc_feature 1..22: note = chemically synthesized
  source 1..22: mol_type = other DNA
tctgagagtctctaaattacaa

SEQ ID NO: 44299 - DNA, 22 bp, synthetic construct
  misc_feature 1..22: note = chemically synthesized
  source 1..22: mol_type = other DNA
ctgagagtctctaaattacaag

SEQ ID NO: 44300 - DNA, 22 bp, synthetic construct
  misc_feature 1..22: note = chemically synthesized
  source 1..22: mol_type = other DNA
tgagagtctctaaattacaagg

SEQ ID NO: 44301 - DNA, 22 bp, synthetic construct
  misc_feature 1..22: note = chemically synthesized
  source 1..22: mol_type = other DNA
agagtctctaaattacaagggt

SEQ ID NO: 44302 - DNA, 22 bp, synthetic construct
  misc_feature 1..22: note = chemically synthesized
  source 1..22: mol_type = other DNA
taaattacaagggtgttttcac

SEQ ID NO: 44303 - DNA, 22 bp, synthetic construct
  misc_feature 1..22: note = chemically synthesized
  source 1..22: mol_type = other DNA
aattacaagggtgttttcacta

SEQ ID NO: 44304 - DNA, 22 bp, synthetic construct
  misc_feature 1..22: note = chemically synthesized
  source 1..22: mol_type = other DNA
caagggtgttttcactattctt

SEQ ID NO: 44305 - DNA, 22 bp, synthetic construct
  misc_feature 1..22: note = chemically synthesized
  source 1..22: mol_type = other DNA
tcactattcttagctatttttt

SEQ ID NO: 44306 - DNA, 22 bp, synthetic construct
  misc_feature 1..22: note = chemically synthesized
  source 1..22: mol_type = other DNA
cactattcttagctatttttta

SEQ ID NO: 44307 - DNA, 22 bp, synthetic construct
  misc_feature 1..22: note = chemically synthesized
  source 1..22: mol_type = other DNA
actattcttagctattttttaa

SEQ ID NO: 44308 - DNA, 22 bp, synthetic construct
  misc_feature 1..22: note = chemically synthesized
  source 1..22: mol_type = other DNA
ttcttagctattttttaaaaca

SEQ ID NO: 44309 - DNA, 22 bp, synthetic construct
  misc_feature 1..22: note = chemically synthesized
  source 1..22: mol_type = other DNA
ttagctattttttaaaacacct

SEQ ID NO: 44310 - DNA, 22 bp, synthetic construct
  misc_feature 1..22: note = chemically synthesized
  source 1..22: mol_type = other DNA
agctattttttaaaacacctaa

SEQ ID NO: 44311 - DNA, 22 bp, synthetic construct
  misc_feature 1..22: note = chemically synthesized
  source 1..22: mol_type = other DNA
gctattttttaaaacacctaag

SEQ ID NO: 44312 - DNA, 22 bp, synthetic construct
  misc_feature 1..22: note = chemically synthesized
  source 1..22: mol_type = other DNA
ttttttaaaacacctaagaaac

SEQ ID NO: 44313 - DNA, 22 bp, synthetic construct
  misc_feature 1..22: note = chemically synthesized
  source 1..22: mol_type = other DNA
tttaaaacacctaagaaacata

SEQ ID NO: 44314 - DNA, 22 bp, synthetic construct
  misc_feature 1..22: note = chemically synthesized
  source 1..22: mol_type = other DNA
ttaaaacacctaagaaacatac

SEQ ID NO: 44315 - DNA, 22 bp, synthetic construct
  misc_feature 1..22: note = chemically synthesized
  source 1..22: mol_type = other DNA
taaaacacctaagaaacatact

SEQ ID NO: 44316 - DNA, 22 bp, synthetic construct
  misc_feature 1..22: note = chemically synthesized
  source 1..22: mol_type = other DNA
aaaacacctaagaaacatactg

SEQ ID NO: 44317 - DNA, 22 bp, synthetic construct
  misc_feature 1..22: note = chemically synthesized
  source 1..22: mol_type = other DNA
aaacacctaagaaacatactgc

SEQ ID NO: 44318 - DNA, 22 bp, synthetic construct
  misc_feature 1..22: note = chemically synthesized
  source 1..22: mol_type = other DNA
agaaacatactgcagctctgga

SEQ ID NO: 44319 - DNA, 22 bp, synthetic construct
  misc_feature 1..22: note = chemically synthesized
  source 1..22: mol_type = other DNA
cagctctggaaaagagaacaaa

SEQ ID NO: 44320 - DNA, 22 bp, synthetic construct
  misc_feature 1..22: note = chemically synthesized
  source 1..22: mol_type = other DNA
tggaaaagagaacaaacaaacc

SEQ ID NO: 44321 - DNA, 22 bp, synthetic construct
  misc_feature 1..22: note = chemically synthesized
  source 1..22: mol_type = other DNA
gaaaagagaacaaacaaaccaa

SEQ ID NO: 44322 - DNA, 22 bp, synthetic construct
  misc_feature 1..22: note = chemically synthesized
  source 1..22: mol_type = other DNA
atatgtgaaaagtcaattgata

SEQ ID NO: 44323 - DNA, 22 bp, synthetic construct
  misc_feature 1..22: note = chemically synthesized
  source 1..22: mol_type = other DNA
ataatgaaggctttaggataac

SEQ ID NO: 44324 - DNA, 22 bp, synthetic construct
  misc_feature 1..22: note = chemically synthesized
  source 1..22: mol_type = other DNA
taggataaccggaggggagatg

SEQ ID NO: 44325 - DNA, 22 bp, synthetic construct
  misc_feature 1..22: note = chemically synthesized
  source 1..22: mol_type = other DNA
aggataaccggaggggagatga

SEQ ID NO: 44326 - DNA, 22 bp, synthetic construct
  misc_feature 1..22: note = chemically synthesized
  source 1..22: mol_type = other DNA
ggataaccggaggggagatgat

SEQ ID NO: 44327 - DNA, 22 bp, synthetic construct
  misc_feature 1..22: note = chemically synthesized
  source 1..22: mol_type = other DNA
aaagcaatgcacctgtgcagga

SEQ ID NO: 44328 - DNA, 22 bp, synthetic construct
  misc_feature 1..22: note = chemically synthesized
  source 1..22: mol_type = other DNA
tgcaggaaatggattacggaaa

SEQ ID NO: 44329 - DNA, 22 bp, synthetic construct
  misc_feature 1..22: note = chemically synthesized
  source 1..22: mol_type = other DNA
cggaaacagggaattgttcatg

SEQ ID NO: 44330 - DNA, 22 bp, synthetic construct
  misc_feature 1..22: note = chemically synthesized
  source 1..22: mol_type = other DNA
ttcatgaaatcccagaaaacca

SEQ ID NO: 44331 - DNA, 22 bp, synthetic construct
  misc_feature 1..22: note = chemically synthesized
  source 1..22: mol_type = other DNA
atgaaatcccagaaaaccagaa

SEQ ID NO: 44332 - DNA, 22 bp, synthetic construct
  misc_feature 1..22: note = chemically synthesized
  source 1..22: mol_type = other DNA
tggaagtcggaaaaacaaatca

SEQ ID NO: 44333 - DNA, 22 bp, synthetic construct
  misc_feature 1..22: note = chemically synthesized
  source 1..22: mol_type = other DNA
gaagtcggaaaaacaaatcatg

SEQ ID NO: 44334 - DNA, 22 bp, synthetic construct
  misc_feature 1..22: note = chemically synthesized
  source 1..22: mol_type = other DNA
aagcaatggaagtccaatacac

SEQ ID NO: 44335 - DNA, 22 bp, synthetic construct
  misc_feature 1..22: note = chemically synthesized
  source 1..22: mol_type = other DNA
agcaatggaagtccaatacacg

SEQ ID NO: 44336 - DNA, 22 bp, synthetic construct
  misc_feature 1..22: note = chemically synthesized
  source 1..22: mol_type = other DNA
acagaatgccttgtcccacgag

SEQ ID NO: 44337 - DNA, 22 bp, synthetic construct
  misc_feature 1..22: note = chemically synthesized
  source 1..22: mol_type = other DNA
cagaatgccttgtcccacgagg

SEQ ID NO: 44338 - DNA, 22 bp, synthetic construct
  misc_feature 1..22: note = chemically synthesized
  source 1..22: mol_type = other DNA
gtcccacgaggcaacacaggct

SEQ ID NO: 44339 - DNA, 22 bp, synthetic construct
  misc_feature 1..22: note = chemically synthesized
  source 1..22: mol_type = other DNA
tcccacgaggcaacacaggcta

SEQ ID NO: 44340 - DNA, 22 bp, synthetic construct
  misc_feature 1..22: note = chemically synthesized
  source 1..22: mol_type = other DNA
ccacagatgggggacagggtgg

SEQ ID NO: 44341 - DNA, 22 bp, synthetic construct
  misc_feature 1..22: note = chemically synthesized
  source 1..22: mol_type = other DNA
ctgaggggcaaagggatagccc

SEQ ID NO: 44342 - DNA, 22 bp, synthetic construct
  misc_feature 1..22: note = chemically synthesized
  source 1..22: mol_type = other DNA
aggggcaaagggatagccctat

SEQ ID NO: 44343 - DNA, 22 bp, synthetic construct
  misc_feature 1..22: note = chemically synthesized
  source 1..22: mol_type = other DNA
tgaggcaagtgtccagggcaga

SEQ ID NO: 44344 - DNA, 22 bp, synthetic construct
  misc_feature 1..22: note = chemically synthesized
  source 1..22: mol_type = other DNA
gagctttgtgaaaccatttccc

SEQ ID NO: 44345 - DNA, 22 bp, synthetic construct
  misc_feature 1..22: note = chemically synthesized
  source 1..22: mol_type = other DNA
tgtgaaaccatttcccaggcag

SEQ ID NO: 44346 - DNA, 22 bp, synthetic construct
  misc_feature 1..22: note = chemically synthesized
  source 1..22: mol_type = other DNA
gtgaaaccatttcccaggcaga

SEQ ID NO: 44347 - DNA, 22 bp, synthetic construct
  misc_feature 1..22: note = chemically synthesized
  source 1..22: mol_type = other DNA
tgaaaccatttcccaggcagag

SEQ ID NO: 44348 - DNA, 22 bp, synthetic construct
  misc_feature 1..22: note = chemically synthesized
  source 1..22: mol_type = other DNA
cccaggcagagacagagcacta

SEQ ID NO: 44349 - DNA, 22 bp, synthetic construct
  misc_feature 1..22: note = chemically synthesized
  source 1..22: mol_type = other DNA
ccaggcagagacagagcactag

SEQ ID NO: 44350 - DNA, 22 bp, synthetic construct
  misc_feature 1..22: note = chemically synthesized
  source 1..22: mol_type = other DNA
ggctggtgctgccagtctgaca

SEQ ID NO: 44351 - DNA, 22 bp, synthetic construct
  misc_feature 1..22: note = chemically synthesized
  source 1..22: mol_type = other DNA
gtgctgccagtctgacaataag

SEQ ID NO: 44352 - DNA, 22 bp, synthetic construct
  misc_feature 1..22: note = chemically synthesized
  source 1..22: mol_type = other DNA
ccagtctgacaataagtctgcc

SEQ ID NO: 44353 - DNA, 22 bp, synthetic construct
  misc_feature 1..22: note = chemically synthesized
  source 1..22: mol_type = other DNA
acaataagtctgccattgtcct

SEQ ID NO: 44354 - DNA, 22 bp, synthetic construct
  misc_feature 1..22: note = chemically synthesized
  source 1..22: mol_type = other DNA
ccattgtcctctggtcagctct

SEQ ID NO: 44355 - DNA, 22 bp, synthetic construct
  misc_feature 1..22: note = chemically synthesized
  source 1..22: mol_type = other DNA
tcctctggtcagctctggacac

SEQ ID NO: 44356 - DNA, 22 bp, synthetic construct
  misc_feature 1..22: note = chemically synthesized
  source 1..22: mol_type = other DNA
tggtcagctctggacacacagc

SEQ ID NO: 44357 - DNA, 22 bp, synthetic construct
  misc_feature 1..22: note = chemically synthesized
  source 1..22: mol_type = other DNA
gtcagctctggacacacagcaa

SEQ ID NO: 44358 - DNA, 22 bp, synthetic construct
  misc_feature 1..22: note = chemically synthesized
  source 1..22: mol_type = other DNA
tggacacacagcaaaagtgagt

SEQ ID NO: 44359 - DNA, 22 bp, synthetic construct
  misc_feature 1..22: note = chemically synthesized
  source 1..22: mol_type = other DNA
gacacacagcaaaagtgagttc

SEQ ID NO: 44360 - DNA, 22 bp, synthetic construct
  misc_feature 1..22: note = chemically synthesized
  source 1..22: mol_type = other DNA
agagtagcctgaagcaggaaag

SEQ ID NO: 44361 - DNA, 22 bp, synthetic construct
  misc_feature 1..22: note = chemically synthesized
  source 1..22: mol_type = other DNA
aagcaggaaagagggaagagag

SEQ ID NO: 44362 - DNA, 22 bp, synthetic construct
  misc_feature 1..22: note = chemically synthesized
  source 1..22: mol_type = other DNA
tcttccactttgctgcaggttc

SEQ ID NO: 44363 - DNA, 22 bp, synthetic construct
  misc_feature 1..22: note = chemically synthesized
  source 1..22: mol_type = other DNA
ccactttgctgcaggttcaagg

SEQ ID NO: 44364 - DNA, 22 bp, synthetic construct
  misc_feature 1..22: note = chemically synthesized
  source 1..22: mol_type = other DNA
cactttgctgcaggttcaaggc

SEQ ID NO: 44365 - DNA, 22 bp, synthetic construct
  misc_feature 1..22: note = chemically synthesized
  source 1..22: mol_type = other DNA
tgctgcaggttcaaggcaagga

SEQ ID NO: 44366 - DNA, 22 bp, synthetic construct
  misc_feature 1..22: note = chemically synthesized
  source 1..22: mol_type = other DNA
gctgcaggttcaaggcaaggat

SEQ ID NO: 44367 - DNA, 22 bp, synthetic construct
  misc_feature 1..22: note = chemically synthesized
  source 1..22: mol_type = other DNA
ctgcaggttcaaggcaaggatt

SEQ ID NO: 44368 - DNA, 22 bp, synthetic construct
  misc_feature 1..22: note = chemically synthesized
  source 1..22: mol_type = other DNA
caggttcaaggcaaggatttga

SEQ ID NO: 44369 - DNA, 22 bp, synthetic construct
  misc_feature 1..22: note = chemically synthesized
  source 1..22: mol_type = other DNA
aaggcaaggatttgagacagtt

SEQ ID NO: 44370 - DNA, 22 bp, synthetic construct
  misc_feature 1..22: note = chemically synthesized
  source 1..22: mol_type = other DNA
gagacagttaccccttctggaa

SEQ ID NO: 44371 - DNA, 22 bp, synthetic construct
  misc_feature 1..22: note = chemically synthesized
  source 1..22: mol_type = other DNA
agacagttaccccttctggaag

SEQ ID NO: 44372 - DNA, 22 bp, synthetic construct
  misc_feature 1..22: note = chemically synthesized
  source 1..22: mol_type = other DNA
ccccttctggaagagcctggtg

SEQ ID NO: 44373 - DNA, 22 bp, synthetic construct
  misc_feature 1..22: note = chemically synthesized
  source 1..22: mol_type = other DNA
ctggaagagcctggtgagtaca

SEQ ID NO: 44374 - DNA, 22 bp, synthetic construct
  misc_feature 1..22: note = chemically synthesized
  source 1..22: mol_type = other DNA
tggaagagcctggtgagtacat

SEQ ID NO: 44375 - DNA, 22 bp, synthetic construct
  misc_feature 1..22: note = chemically synthesized
  source 1..22: mol_type = other DNA
gaagagcctggtgagtacatct

SEQ ID NO: 44376 - DNA, 22 bp, synthetic construct
  misc_feature 1..22: note = chemically synthesized
  source 1..22: mol_type = other DNA
gtgagtacatctctcctgcctt

SEQ ID NO: 44377 - DNA, 22 bp, synthetic construct
  misc_feature 1..22: note = chemically synthesized
  source 1..22: mol_type = other DNA
tcctgccttgtacaaccctctc

SEQ ID NO: 44378 - DNA, 22 bp, synthetic construct
  misc_feature 1..22: note = chemically synthesized
  source 1..22: mol_type = other DNA
ctgccttgtacaaccctctctc

SEQ ID NO: 44379 - DNA, 22 bp, synthetic construct
  misc_feature 1..22: note = chemically synthesized
  source 1..22: mol_type = other DNA
ccttgtacaaccctctctcctc

SEQ ID NO: 44380 - DNA, 22 bp, synthetic construct
  misc_feature 1..22: note = chemically synthesized
  source 1..22: mol_type = other DNA
gtacaaccctctctcctcaccg

SEQ ID NO: 44381 - DNA, 22 bp, synthetic construct
  misc_feature 1..22: note = chemically synthesized
  source 1..22: mol_type = other DNA
tacaaccctctctcctcaccga

SEQ ID NO: 44382 - DNA, 22 bp, synthetic construct
  misc_feature 1..22: note = chemically synthesized
  source 1..22: mol_type = other DNA
tctcctcaccgactttctctcc

SEQ ID NO: 44383 - DNA, 22 bp, synthetic construct
  misc_feature 1..22: note = chemically synthesized
  source 1..22: mol_type = other DNA
tcctcaccgactttctctccca

SEQ ID NO: 44384 - DNA, 22 bp, synthetic construct
  misc_feature 1..22: note = chemically synthesized
  source 1..22: mol_type = other DNA
ctcaccgactttctctcccagc

SEQ ID NO: 44385 - DNA, 22 bp, synthetic construct
  misc_feature 1..22: note = chemically synthesized
  source 1..22: mol_type = other DNA
accgactttctctcccagcagc

SEQ ID NO: 44386 - DNA, 22 bp, synthetic construct
  misc_feature 1..22: note = chemically synthesized
  source 1..22: mol_type = other DNA
tctctcccagcagccagcaggg

SEQ ID NO: 44387 - DNA, 22 bp, synthetic construct
  misc_feature 1..22: note = chemically synthesized
  source 1..22: mol_type = other DNA
ctctcccagcagccagcagggg

SEQ ID NO: 44388 - DNA, 22 bp, synthetic construct
  misc_feature 1..22: note = chemically synthesized
  source 1..22: mol_type = other DNA
tctcccagcagccagcaggggc

SEQ ID NO: 44389 - DNA, 22 bp, synthetic construct
  misc_feature 1..22: note = chemically synthesized
  source 1..22: mol_type = other DNA
tcccagcagccagcaggggcct

SEQ ID NO: 44390 - DNA, 22 bp, synthetic construct
  misc_feature 1..22: note = chemically synthesized
  source 1..22: mol_type = other DNA
ccagcagccagcaggggcctgg

SEQ ID NO: 44391 - DNA, 22 bp, synthetic construct
  misc_feature 1..22: note = chemically synthesized
  source 1..22: mol_type = other DNA
ggccatttatggaatgcaagcc

SEQ ID NO: 44392 - DNA, 22 bp, synthetic construct
  misc_feature 1..22: note = chemically synthesized
  source 1..22: mol_type = other DNA
atggaatgcaagccctgaccac

SEQ ID NO: 44393 - DNA, 22 bp, synthetic construct
  misc_feature 1..22: note = chemically synthesized
  source 1..22: mol_type = other DNA
tggaatgcaagccctgaccaca

SEQ ID NO: 44394 - DNA, 22 bp, synthetic construct
  misc_feature 1..22: note = chemically synthesized
  source 1..22: mol_type = other DNA
accacacagacttacttacatg

SEQ ID NO: 44395 - DNA, 22 bp, synthetic construct
  misc_feature 1..22: note = chemically synthesized
  source 1..22: mol_type = other DNA
acttacatgccaggacagccac

SEQ ID NO: 44396 - DNA, 22 bp, synthetic construct
  misc_feature 1..22: note = chemically synthesized
  source 1..22: mol_type = other DNA
cttacatgccaggacagccacc

SEQ ID NO: 44397 - DNA, 22 bp, synthetic construct
  misc_feature 1..22: note = chemically synthesized
  source 1..22: mol_type = other DNA
acatgccaggacagccaccagg

SEQ ID NO: 44398 - DNA, 22 bp, synthetic construct
  misc_feature 1..22: note = chemically synthesized
  source 1..22: mol_type = other DNA
catgccaggacagccaccaggt

SEQ ID NO: 44399 - DNA, 22 bp, synthetic construct
  misc_feature 1..22: note = chemically synthesized
  source 1..22: mol_type = other DNA
tcccactctaggttccactgtg

SEQ ID NO: 44400 - DNA, 22 bp, synthetic construct
  misc_feature 1..22: note = chemically synthesized
  source 1..22: mol_type = other DNA
cccactctaggttccactgtga

SEQ ID NO: 44401 - DNA, 22 bp, synthetic construct
  misc_feature 1..22: note = chemically synthesized
  source 1..22: mol_type = other DNA
ccactctaggttccactgtgag

SEQ ID NO: 44402 - DNA, 22 bp, synthetic construct
  misc_feature 1..22: note = chemically synthesized
  source 1..22: mol_type = other DNA
taggttccactgtgagtgctct

SEQ ID NO: 44403 - DNA, 22 bp, synthetic construct
  misc_feature 1..22: note = chemically synthesized
  source 1..22: mol_type = other DNA
ggttccactgtgagtgctctct

SEQ ID NO: 44404 - DNA, 22 bp, synthetic construct
  misc_feature 1..22: note = chemically synthesized
  source 1..22: mol_type = other DNA
cactgtgagtgctctctctctc

SEQ ID NO: 44405 - DNA, 22 bp, synthetic construct
  misc_feature 1..22: note = chemically synthesized
  source 1..22: mol_type = other DNA
tgagtgctctctctctctctct

SEQ ID NO: 44406 - DNA, 22 bp, synthetic construct
  misc_feature 1..22: note = chemically synthesized
  source 1..22: mol_type = other DNA
tctctctctctctctctcacta

SEQ ID NO: 44407 - DNA, 22 bp, synthetic construct
  misc_feature 1..22: note = chemically synthesized
  source 1..22: mol_type = other DNA
tctctctctctctctcactatg

SEQ ID NO: 44408 - DNA, 22 bp, synthetic construct
  misc_feature 1..22: note = chemically synthesized
  source 1..22: mol_type = other DNA
tctctctctctctcactatgct

SEQ ID NO: 44409 - DNA, 22 bp, synthetic construct
  misc_feature 1..22: note = chemically synthesized
  source 1..22: mol_type = other DNA
tctctctctctcactatgctcc

SEQ ID NO: 44410 - DNA, 22 bp, synthetic construct
  misc_feature 1..22: note = chemically synthesized
  source 1..22: mol_type = other DNA
tctctctctcactatgctccca

SEQ ID NO: 44411 - DNA, 22 bp, synthetic construct
  misc_feature 1..22: note = chemically synthesized
  source 1..22: mol_type = other DNA
tctctctcactatgctcccaag

SEQ ID NO: 44412 - DNA, 22 bp, synthetic construct
  misc_feature 1..22: note = chemically synthesized
  source 1..22: mol_type = other DNA
tctctcactatgctcccaagag

SEQ ID NO: 44413 - DNA, 22 bp, synthetic construct
  misc_feature 1..22: note = chemically synthesized
  source 1..22: mol_type = other DNA
tctcactatgctcccaagagga

SEQ ID NO: 44414 - DNA, 22 bp, synthetic construct
  misc_feature 1..22: note = chemically synthesized
  source 1..22: mol_type = other DNA
tcactatgctcccaagaggagt

SEQ ID NO: 44415 - DNA, 22 bp, synthetic construct
  misc_feature 1..22: note = chemically synthesized
  source 1..22: mol_type = other DNA
actatgctcccaagaggagtct

SEQ ID NO: 44416 - DNA, 22 bp, synthetic construct
  misc_feature 1..22: note = chemically synthesized
  source 1..22: mol_type = other DNA
tgctcccaagaggagtcttaca

SEQ ID NO: 44417 - DNA, 22 bp, synthetic construct
  misc_feature 1..22: note = chemically synthesized
  source 1..22: mol_type = other DNA
ccaagaggagtcttacatcaac

SEQ ID NO: 44418 - DNA, 22 bp, synthetic construct
  misc_feature 1..22: note = chemically synthesized
  source 1..22: mol_type = other DNA
acatcaaccccttcctcaaatc

SEQ ID NO: 44419 - DNA, 22 bp, synthetic construct
  misc_feature 1..22: note = chemically synthesized
  source 1..22: mol_type = other DNA
catcaaccccttcctcaaatct

SEQ ID NO: 44420 - DNA, 22 bp, synthetic construct
  misc_feature 1..22: note = chemically synthesized
  source 1..22: mol_type = other DNA
cctcaaatctccctcactggat

SEQ ID NO: 44421 - DNA, 22 bp, synthetic construct
  misc_feature 1..22: note = chemically synthesized
  source 1..22: mol_type = other DNA
ctcaaatctccctcactggatg

SEQ ID NO: 44422 - DNA, 22 bp, synthetic construct
  misc_feature 1..22: note = chemically synthesized
  source 1..22: mol_type = other DNA
aaatctccctcactggatgtca

SEQ ID NO: 44423 - DNA, 22 bp, synthetic construct
  misc_feature 1..22: note = chemically synthesized
  source 1..22: mol_type = other DNA
cctcactggatgtcacagtcat

SEQ ID NO: 44424 - DNA, 22 bp, synthetic construct
  misc_feature 1..22: note = chemically synthesized
  source 1..22: mol_type = other DNA
actggatgtcacagtcataggc

SEQ ID NO: 44425 - DNA, 22 bp, synthetic construct
  misc_feature 1..22: note = chemically synthesized
  source 1..22: mol_type = other DNA
gatgtcacagtcataggcctga

SEQ ID NO: 44426 - DNA, 22 bp, synthetic construct
  misc_feature 1..22: note = chemically synthesized
  source 1..22: mol_type = other DNA
aaaagcagcatgcaaactgaat

SEQ ID NO: 44427 - DNA, 22 bp, synthetic construct
  misc_feature 1..22: note = chemically synthesized
  source 1..22: mol_type = other DNA
aatttttgtaaagcaggaccca

SEQ ID NO: 44428 - DNA, 22 bp, synthetic construct
  misc_feature 1..22: note = chemically synthesized
  source 1..22: mol_type = other DNA
ttgtaaagcaggacccatttcc

SEQ ID NO: 44429 - DNA, 22 bp, synthetic construct
  misc_feature 1..22: note = chemically synthesized
  source 1..22: mol_type = other DNA
tgtaaagcaggacccatttccc

SEQ ID NO: 44430 - DNA, 22 bp, synthetic construct
  misc_feature 1..22: note = chemically synthesized
  source 1..22: mol_type = other DNA
gtaaagcaggacccatttcccc

SEQ ID NO: 44431 - DNA, 22 bp, synthetic construct
  misc_feature 1..22: note = chemically synthesized
  source 1..22: mol_type = other DNA
taaagcaggacccatttcccca

SEQ ID NO: 44432 - DNA, 22 bp, synthetic construct
  misc_feature 1..22: note = chemically synthesized
  source 1..22: mol_type = other DNA
ccccatggacagtcataagaga

SEQ ID NO: 44433 - DNA, 22 bp, synthetic construct
  misc_feature 1..22: note = chemically synthesized
  source 1..22: mol_type = other DNA
cccatggacagtcataagagat

SEQ ID NO: 44434 - DNA, 22 bp, synthetic construct
  misc_feature 1..22: note = chemically synthesized
  source 1..22: mol_type = other DNA
aatttctgtcttcacgattact

SEQ ID NO: 44435 - DNA, 22 bp, synthetic construct
  misc_feature 1..22: note = chemically synthesized
  source 1..22: mol_type = other DNA
atttctgtcttcacgattactt

SEQ ID NO: 44436 - DNA, 22 bp, synthetic construct
  misc_feature 1..22: note = chemically synthesized
  source 1..22: mol_type = other DNA
ctgtcttcacgattacttcacg

SEQ ID NO: 44437 - DNA, 22 bp, synthetic construct
  misc_feature 1..22: note = chemically synthesized
  source 1..22: mol_type = other DNA
tgtcttcacgattacttcacga

SEQ ID NO: 44438 - DNA, 22 bp, synthetic construct
  misc_feature 1..22: note = chemically synthesized
  source 1..22: mol_type = other DNA
tcttcacgattacttcacgata

SEQ ID NO: 44439 - DNA, 22 bp, synthetic construct
  misc_feature 1..22: note = chemically synthesized
  source 1..22: mol_type = other DNA
cacgattacttcacgataaatc

SEQ ID NO: 44440 - DNA, 22 bp, synthetic construct
  misc_feature 1..22: note = chemically synthesized
  source 1..22: mol_type = other DNA
acgattacttcacgataaatct

SEQ ID NO: 44441 - DNA, 22 bp, synthetic construct
  misc_feature 1..22: note = chemically synthesized
  source 1..22: mol_type = other DNA
cttcacgataaatctggattcc

SEQ ID NO: 44442 - DNA, 22 bp, synthetic construct
  misc_feature 1..22: note = chemically synthesized
  source 1..22: mol_type = other DNA
cacgataaatctggattccaaa

SEQ ID NO: 44443 - DNA, 22 bp, synthetic construct
  misc_feature 1..22: note = chemically synthesized
  source 1..22: mol_type = other DNA
acgataaatctggattccaaag

SEQ ID NO: 44444 - DNA, 22 bp, synthetic construct
  misc_feature 1..22: note = chemically synthesized
  source 1..22: mol_type = other DNA
gattccaaagggactataagct

SEQ ID NO: 44445 - DNA, 22 bp, synthetic construct
  misc_feature 1..22: note = chemically synthesized
  source 1..22: mol_type = other DNA
caaagggactataagctctcac

SEQ ID NO: 44446 - DNA, 22 bp, synthetic construct
  misc_feature 1..22: note = chemically synthesized
  source 1..22: mol_type = other DNA
taagctctcacatggaaggaag

SEQ ID NO: 44447 - DNA, 22 bp, synthetic construct
  misc_feature 1..22: note = chemically synthesized
  source 1..22: mol_type = other DNA
tcacatggaaggaagcaagatc

SEQ ID NO: 44448 - DNA, 22 bp, synthetic construct
  misc_feature 1..22: note = chemically synthesized
  source 1..22: mol_type = other DNA
acatggaaggaagcaagatctc

SEQ ID NO: 44449 - DNA, 22 bp, synthetic construct
  misc_feature 1..22: note = chemically synthesized
  source 1..22: mol_type = other DNA
tactcctcccccagtgttgagt

SEQ ID NO: 44450 - DNA, 22 bp, synthetic construct
  misc_feature 1..22: note = chemically synthesized
  source 1..22: mol_type = other DNA
ctcctcccccagtgttgagtgg

SEQ ID NO: 44451 - DNA, 22 bp, synthetic construct
  misc_feature 1..22: note = chemically synthesized
  source 1..22: mol_type = other DNA
ctcccccagtgttgagtggaca

SEQ ID NO: 44452 - DNA, 22 bp, synthetic construct
  misc_feature 1..22: note = chemically synthesized
  source 1..22: mol_type = other DNA
ccccagtgttgagtggacaggg

SEQ ID NO: 44453 - DNA, 22 bp, synthetic construct
  misc_feature 1..22: note = chemically synthesized
  source 1..22: mol_type = other DNA
agtggacagggagtacaccgca

SEQ ID NO: 44454 - DNA, 22 bp, synthetic construct
  misc_feature 1..22: note = chemically synthesized
  source 1..22: mol_type = other DNA
ttggccaaccaattctaattcc

SEQ ID NO: 44455 - DNA, 22 bp, synthetic construct
  misc_feature 1..22: note = chemically synthesized
  source 1..22: mol_type = other DNA
gccaaccaattctaattccctt

SEQ ID NO: 44456 - DNA, 22 bp, synthetic construct
  misc_feature 1..22: note = chemically synthesized
  source 1..22: mol_type = other DNA
taattccctttagctagcatcc

SEQ ID NO: 44457 - DNA, 22 bp, synthetic construct
  misc_feature 1..22: note = chemically synthesized
  source 1..22: mol_type = other DNA
attccctttagctagcatcccc

SEQ ID NO: 44458 - DNA, 22 bp, synthetic construct
  misc_feature 1..22: note = chemically synthesized
  source 1..22: mol_type = other DNA
cctttagctagcatcccctaag

SEQ ID NO: 44459 - DNA, 22 bp, synthetic construct
  misc_feature 1..22: note = chemically synthesized
  source 1..22: mol_type = other DNA
tagctagcatcccctaagctag

SEQ ID NO: 44460 - DNA, 22 bp, synthetic construct
  misc_feature 1..22: note = chemically synthesized
  source 1..22: mol_type = other DNA
agctagcatcccctaagctaga

SEQ ID NO: 44461 - DNA, 22 bp, synthetic construct
  misc_feature 1..22: note = chemically synthesized
  source 1..22: mol_type = other DNA
gctagcatcccctaagctagag

SEQ ID NO: 44462 - DNA, 22 bp, synthetic construct
  misc_feature 1..22: note = chemically synthesized
  source 1..22: mol_type = other DNA
gcatcccctaagctagagctag

SEQ ID NO: 44463 - DNA, 22 bp, synthetic construct
  misc_feature 1..22: note = chemically synthesized
  source 1..22: mol_type = other DNA
agctagagctagagctagagct

SEQ ID NO: 44464 - DNA, 22 bp, synthetic construct
  misc_feature 1..22: note = chemically synthesized
  source 1..22: mol_type = other DNA
gagctagagctagagctatttc

SEQ ID NO: 44465 - DNA, 22 bp, synthetic construct
  misc_feature 1..22: note = chemically synthesized
  source 1..22: mol_type = other DNA
gagctagagctatttccttgca

SEQ ID NO: 44466 - DNA, 22 bp, synthetic construct
  misc_feature 1..22: note = chemically synthesized
  source 1..22: mol_type = other DNA
gagctatttccttgcagccttc

SEQ ID NO: 44467 - DNA, 22 bp, synthetic construct
  misc_feature 1..22: note = chemically synthesized
  source 1..22: mol_type = other DNA
tttccttgcagccttccttttc

SEQ ID NO: 44468 - DNA, 22 bp, synthetic construct
  misc_feature 1..22: note = chemically synthesized
  source 1..22: mol_type = other DNA
ccttgcagccttccttttctct

SEQ ID NO: 44469 - DNA, 22 bp, synthetic construct
  misc_feature 1..22: note = chemically synthesized
  source 1..22: mol_type = other DNA
cttgcagccttccttttctcta

SEQ ID NO: 44470 - DNA, 22 bp, synthetic construct
  misc_feature 1..22: note = chemically synthesized
  source 1..22: mol_type = other DNA
gcagccttccttttctctagca

SEQ ID NO: 44471 - DNA, 22 bp, synthetic construct
  misc_feature 1..22: note = chemically synthesized
  source 1..22: mol_type = other DNA
cagccttccttttctctagcaa

SEQ ID NO: 44472 - DNA, 22 bp, synthetic construct
  misc_feature 1..22: note = chemically synthesized
  source 1..22: mol_type = other DNA
ccttttctctagcaaagtcctt

SEQ ID NO: 44473 - DNA, 22 bp, synthetic construct
  misc_feature 1..22: note = chemically synthesized
  source 1..22: mol_type = other DNA
cttttctctagcaaagtccttc

SEQ ID NO: 44474 - DNA, 22 bp, synthetic construct
  misc_feature 1..22: note = chemically synthesized
  source 1..22: mol_type = other DNA
ttctctagcaaagtccttccat

SEQ ID NO: 44475 - DNA, 22 bp, synthetic construct
  misc_feature 1..22: note = chemically synthesized
  source 1..22: mol_type = other DNA
tctctagcaaagtccttccatg

SEQ ID NO: 44476 - DNA, 22 bp, synthetic construct
  misc_feature 1..22: note = chemically synthesized
  source 1..22: mol_type = other DNA
ctctagcaaagtccttccatgc

SEQ ID NO: 44477 - DNA, 22 bp, synthetic construct
  misc_feature 1..22: note = chemically synthesized
  source 1..22: mol_type = other DNA
tctagcaaagtccttccatgca

SEQ ID NO: 44478 - DNA, 22 bp, synthetic construct
  misc_feature 1..22: note = chemically synthesized
  source 1..22: mol_type = other DNA
tagcaaagtccttccatgcagt

SEQ ID NO: 44479 - DNA, 22 bp, synthetic construct
  misc_feature 1..22: note = chemically synthesized
  source 1..22: mol_type = other DNA
gcaaagtccttccatgcagtag

SEQ ID NO: 44480 - DNA, 22 bp, synthetic construct
  misc_feature 1..22: note = chemically synthesized
  source 1..22: mol_type = other DNA
ccatgcagtagctaatgacctg

SEQ ID NO: 44481 - DNA, 22 bp, synthetic construct
  misc_feature 1..22: note = chemically synthesized
  source 1..22: mol_type = other DNA
catgcagtagctaatgacctgt

SEQ ID NO: 44482 - DNA, 22 bp, synthetic construct
  misc_feature 1..22: note = chemically synthesized
  source 1..22: mol_type = other DNA
atgacctgtaaacacttaatga

SEQ ID NO: 44483 - DNA, 22 bp, synthetic construct
  misc_feature 1..22: note = chemically synthesized
  source 1..22: mol_type = other DNA
taaacacttaatgagctagaga

SEQ ID NO: 44484 - DNA, 22 bp, synthetic construct
  misc_feature 1..22: note = chemically synthesized
  source 1..22: mol_type = other DNA
aatgagctagagaaacattcca

SEQ ID NO: 44485 - DNA, 22 bp, synthetic construct
  misc_feature 1..22: note = chemically synthesized
  source 1..22: mol_type = other DNA
atgagctagagaaacattccat

SEQ ID NO: 44486 - DNA, 22 bp, synthetic construct
  misc_feature 1..22: note = chemically synthesized
  source 1..22: mol_type = other DNA
gagaaacattccattgaaagga

SEQ ID NO: 44487 - DNA, 22 bp, synthetic construct
  misc_feature 1..22: note = chemically synthesized
  source 1..22: mol_type = other DNA
cattgaaaggaataccactgtg

SEQ ID NO: 44488 - DNA, 22 bp, synthetic construct
  misc_feature 1..22: note = chemically synthesized
  source 1..22: mol_type = other DNA
aaaggaataccactgtgcatcc

SEQ ID NO: 44489 - DNA, 22 bp, synthetic construct
  misc_feature 1..22: note = chemically synthesized
  source 1..22: mol_type = other DNA
tgcatccttttgtaaagagggg

SEQ ID NO: 44490 - DNA, 22 bp, synthetic construct
  misc_feature 1..22: note = chemically synthesized
  source 1..22: mol_type = other DNA
ttgtaaagaggggggaaaatct

SEQ ID NO: 44491 - DNA, 22 bp, synthetic construct
  misc_feature 1..22: note = chemically synthesized
  source 1..22: mol_type = other DNA
tgtaaagaggggggaaaatctt

SEQ ID NO: 44492 - DNA, 22 bp, synthetic construct
  misc_feature 1..22: note = chemically synthesized
  source 1..22: mol_type = other DNA
gtaaagaggggggaaaatcttt

SEQ ID NO: 44493 - DNA, 22 bp, synthetic construct
  misc_feature 1..22: note = chemically synthesized
  source 1..22: mol_type = other DNA
taaagaggggggaaaatctttt

SEQ ID NO: 44494 - DNA, 22 bp, synthetic construct
  misc_feature 1..22: note = chemically synthesized
  source 1..22: mol_type = other DNA
ttgtaaaacgaagcatcgcctt

SEQ ID NO: 44495 - DNA, 22 bp, synthetic construct
  misc_feature 1..22: note = chemically synthesized
  source 1..22: mol_type = other DNA
tgtaaaacgaagcatcgccttt

SEQ ID NO: 44496 - DNA, 22 bp, synthetic construct
  misc_feature 1..22: note = chemically synthesized
  source 1..22: mol_type = other DNA
gtaaaacgaagcatcgccttta

SEQ ID NO: 44497 - DNA, 22 bp, synthetic construct
  misc_feature 1..22: note = chemically synthesized
  source 1..22: mol_type = other DNA
taaaacgaagcatcgcctttaa

SEQ ID NO: 44498 - DNA, 22 bp, synthetic construct
  misc_feature 1..22: note = chemically synthesized
  source 1..22: mol_type = other DNA
taactgctctgtttgatcaagt

SEQ ID NO: 44499 - DNA, 22 bp, synthetic construct
  misc_feature 1..22: note = chemically synthesized
  source 1..22: mol_type = other DNA
aactgctctgtttgatcaagtc

SEQ ID NO: 44500 - DNA, 22 bp, synthetic construct
  misc_feature 1..22: note = chemically synthesized
  source 1..22: mol_type = other DNA
actgctctgtttgatcaagtca

SEQ ID NO: 44501 - DNA, 22 bp, synthetic construct
  misc_feature 1..22: note = chemically synthesized
  source 1..22: mol_type = other DNA
ctctgtttgatcaagtcagatt

SEQ ID NO: 44502 - DNA, 22 bp, synthetic construct
  misc_feature 1..22: note = chemically synthesized
  source 1..22: mol_type = other DNA
tgtttgatcaagtcagattttt

SEQ ID NO: 44503 - DNA, 22 bp, synthetic construct
  misc_feature 1..22: note = chemically synthesized
  source 1..22: mol_type = other DNA
tttgatcaagtcagatttttca

SEQ ID NO: 44504 - DNA, 22 bp, synthetic construct
  misc_feature 1..22: note = chemically synthesized
  source 1..22: mol_type = other DNA
gatcaagtcagatttttcagaa

SEQ ID NO: 44505 - DNA, 22 bp, synthetic construct
  misc_feature 1..22: note = chemically synthesized
  source 1..22: mol_type = other DNA
atcaagtcagatttttcagaat

SEQ ID NO: 44506 - DNA, 22 bp, synthetic construct
  misc_feature 1..22: note = chemically synthesized
  source 1..22: mol_type = other DNA
ttcagaatatgaatagctagta

SEQ ID NO: 44507 - DNA, 22 bp, synthetic construct
  misc_feature 1..22: note = chemically synthesized
  source 1..22: mol_type = other DNA
tcagaatatgaatagctagtat

SEQ ID NO: 44508 - DNA, 22 bp, synthetic construct
  misc_feature 1..22: note = chemically synthesized
  source 1..22: mol_type = other DNA
cagaatatgaatagctagtatt

SEQ ID NO: 44509 - DNA, 22 bp, synthetic construct
  misc_feature 1..22: note = chemically synthesized
  source 1..22: mol_type = other DNA
agaatatgaatagctagtattc

SEQ ID NO: 44510 - DNA, 22 bp, synthetic construct
  misc_feature 1..22: note = chemically synthesized
  source 1..22: mol_type = other DNA
gtattcaagcatatatgaactg

SEQ ID NO: 44511 - DNA, 22 bp, synthetic construct
  misc_feature 1..22: note = chemically synthesized
  source 1..22: mol_type = other DNA
aagcatatatgaactgtcttta

SEQ ID NO: 44512 - DNA, 22 bp, synthetic construct
  misc_feature 1..22: note = chemically synthesized
  source 1..22: mol_type = other DNA
tctttaagttaatcaatcccta

SEQ ID NO: 44513 - DNA, 22 bp, synthetic construct
  misc_feature 1..22: note = chemically synthesized
  source 1..22: mol_type = other DNA
taagttaatcaatccctagaaa

SEQ ID NO: 44514 - DNA, 22 bp, synthetic construct
  misc_feature 1..22: note = chemically synthesized
  source 1..22: mol_type = other DNA
aagttaatcaatccctagaaac

SEQ ID NO: 44515 - DNA, 22 bp, synthetic construct
  misc_feature 1..22: note = chemically synthesized
  source 1..22: mol_type = other DNA
agttaatcaatccctagaaact

SEQ ID NO: 44516 - DNA, 22 bp, synthetic construct
  misc_feature 1..22: note = chemically synthesized
  source 1..22: mol_type = other DNA
atcaatccctagaaactagccc

SEQ ID NO: 44517 - DNA, 22 bp, synthetic construct
  misc_feature 1..22: note = chemically synthesized
  source 1..22: mol_type = other DNA
gaaactagccctcaggttagca

SEQ ID NO: 44518 - DNA, 22 bp, synthetic construct
  misc_feature 1..22: note = chemically synthesized
  source 1..22: mol_type = other DNA
gccctcaggttagcaggccaag

SEQ ID NO: 44519 - DNA, 22 bp, synthetic construct
  misc_feature 1..22: note = chemically synthesized
  source 1..22: mol_type = other DNA
aggttagcaggccaaggatata

SEQ ID NO: 44520 - DNA, 22 bp, synthetic construct
  misc_feature 1..22: note = chemically synthesized
  source 1..22: mol_type = other DNA
gcaggccaaggatatatgagag

SEQ ID NO: 44521 - DNA, 22 bp, synthetic construct
  misc_feature 1..22: note = chemically synthesized
  source 1..22: mol_type = other DNA
tgaagtctagacttaaactgcc

SEQ ID NO: 44522 - DNA, 22 bp, synthetic construct
  misc_feature 1..22: note = chemically synthesized
  source 1..22: mol_type = other DNA
gaagtctagacttaaactgccg

SEQ ID NO: 44523 - DNA, 22 bp, synthetic construct
  misc_feature 1..22: note = chemically synthesized
  source 1..22: mol_type = other DNA
aagtctagacttaaactgccgc

SEQ ID NO: 44524 - DNA, 22 bp, synthetic construct
  misc_feature 1..22: note = chemically synthesized
  source 1..22: mol_type = other DNA
gacttaaactgccgctcctgaa

SEQ ID NO: 44525 - DNA, 22 bp, synthetic construct
  misc_feature 1..22: note = chemically synthesized
  source 1..22: mol_type = other DNA
aaactgccgctcctgaattgaa

SEQ ID NO: 44526 - DNA, 22 bp, synthetic construct
  misc_feature 1..22: note = chemically synthesized
  source 1..22: mol_type = other DNA
aactgccgctcctgaattgaat

SEQ ID NO: 44527 - DNA, 22 bp, synthetic construct
  misc_feature 1..22: note = chemically synthesized
  source 1..22: mol_type = other DNA
ccgctcctgaattgaattagaa

SEQ ID NO: 44528 - DNA, 22 bp, synthetic construct
  misc_feature 1..22: note = chemically synthesized
  source 1..22: mol_type = other DNA
ctgaattgaattagaacattcc

SEQ ID NO: 44529 - DNA, 22 bp, synthetic construct
  misc_feature 1..22: note = chemically synthesized
  source 1..22: mol_type = other DNA
aattgaattagaacattccagg

SEQ ID NO: 44530 - DNA, 22 bp, synthetic construct
  misc_feature 1..22: note = chemically synthesized
  source 1..22: mol_type = other DNA
aattagaacattccaggtagac

SEQ ID NO: 44531 - DNA, 22 bp, synthetic construct
  misc_feature 1..22: note = chemically synthesized
  source 1..22: mol_type = other DNA
gaacattccaggtagacagatt

SEQ ID NO: 44532 - DNA, 22 bp, synthetic construct
  misc_feature 1..22: note = chemically synthesized
  source 1..22: mol_type = other DNA
caggtagacagattcatggccc

SEQ ID NO: 44533 - DNA, 22 bp, synthetic construct
  misc_feature 1..22: note = chemically synthesized
  source 1..22: mol_type = other DNA
atggcccctaacatcaggaatc

SEQ ID NO: 44534 - DNA, 22 bp, synthetic construct
  misc_feature 1..22: note = chemically synthesized
  source 1..22: mol_type = other DNA
acatcaggaatcagctagaaac

SEQ ID NO: 44535 - DNA, 22 bp, synthetic construct
  misc_feature 1..22: note = chemically synthesized
  source 1..22: mol_type = other DNA
gaaactcaatcggctcttacca

SEQ ID NO: 44536 - DNA, 22 bp, synthetic construct
  misc_feature 1..22: note = chemically synthesized
  source 1..22: mol_type = other DNA
aatcggctcttaccagtcacta

SEQ ID NO: 44537 - DNA, 22 bp, synthetic construct
  misc_feature 1..22: note = chemically synthesized
  source 1..22: mol_type = other DNA
ttaccagtcactacctacgtca

SEQ ID NO: 44538 - DNA, 22 bp, synthetic construct
  misc_feature 1..22: note = chemically synthesized
  source 1..22: mol_type = other DNA
accagtcactacctacgtcagt

SEQ ID NO: 44539 - DNA, 22 bp, synthetic construct
  misc_feature 1..22: note = chemically synthesized
  source 1..22: mol_type = other DNA
ccagtcactacctacgtcagtg

SEQ ID NO: 44540 - DNA, 22 bp, synthetic construct
  misc_feature 1..22: note = chemically synthesized
  source 1..22: mol_type = other DNA
cctacgtcagtgccatatccta

SEQ ID NO: 44541 - DNA, 22 bp, synthetic construct
  misc_feature 1..22: note = chemically synthesized
  source 1..22: mol_type = other DNA
cgtcagtgccatatcctataat

SEQ ID NO: 44542 - DNA, 22 bp, synthetic construct
  misc_feature 1..22: note = chemically synthesized
  source 1..22: mol_type = other DNA
taatggtgatgataatgaccat

SEQ ID NO: 44543 - DNA, 22 bp, synthetic construct
  misc_feature 1..22: note = chemically synthesized
  source 1..22: mol_type = other DNA
tgatgatgataataataataat

SEQ ID NO: 44544 - DNA, 22 bp, synthetic construct
  misc_feature 1..22: note = chemically synthesized
  source 1..22: mol_type = other DNA
ccactggatggcactttgcacc

SEQ ID NO: 44545 - DNA, 22 bp, synthetic construct
  misc_feature 1..22: note = chemically synthesized
  source 1..22: mol_type = other DNA
cactggatggcactttgcacct

SEQ ID NO: 44546 - DNA, 22 bp, synthetic construct
  misc_feature 1..22: note = chemically synthesized
  source 1..22: mol_type = other DNA
gatggcactttgcaccttccag

SEQ ID NO: 44547 - DNA, 22 bp, synthetic construct
  misc_feature 1..22: note = chemically synthesized
  source 1..22: mol_type = other DNA
tgcaccttccagagcaatttaa

SEQ ID NO: 44548 - DNA, 22 bp, synthetic construct
  misc_feature 1..22: note = chemically synthesized
  source 1..22: mol_type = other DNA
gcaccttccagagcaatttaac

SEQ ID NO: 44549 - DNA, 22 bp, synthetic construct
  misc_feature 1..22: note = chemically synthesized
  source 1..22: mol_type = other DNA
caccttccagagcaatttaaca

SEQ ID NO: 44550 - DNA, 22 bp, synthetic construct
  misc_feature 1..22: note = chemically synthesized
  source 1..22: mol_type = other DNA
ccagagcaatttaacatccttt

SEQ ID NO: 44551 - DNA, 22 bp, synthetic construct
  misc_feature 1..22: note = chemically synthesized
  source 1..22: mol_type = other DNA
cagagcaatttaacatccttta

SEQ ID NO: 44552 - DNA, 22 bp, synthetic construct
  misc_feature 1..22: note = chemically synthesized
  source 1..22: mol_type = other DNA
aacatcctttactttttttgga

SEQ ID NO: 44553 - DNA, 22 bp, synthetic construct
  misc_feature 1..22: note = chemically synthesized
  source 1..22: mol_type = other DNA
acatcctttactttttttggaa

SEQ ID NO: 44554 - DNA, 22 bp, synthetic construct
  misc_feature 1..22: note = chemically synthesized
  source 1..22: mol_type = other DNA
tactttttttggaaggccttca

SEQ ID NO: 44555 - DNA, 22 bp, synthetic construct
  misc_feature 1..22: note = chemically synthesized
  source 1..22: mol_type = other DNA
actttttttggaaggccttcag

SEQ ID NO: 44556 - DNA, 22 bp, synthetic construct
  misc_feature 1..22: note = chemically synthesized
  source 1..22: mol_type = other DNA
ctttttttggaaggccttcagg

SEQ ID NO: 44557 - DNA, 22 bp, synthetic construct
  misc_feature 1..22: note = chemically synthesized
  source 1..22: mol_type = other DNA
tttttggaaggccttcaggtcc

SEQ ID NO: 44558 - DNA, 22 bp, synthetic construct
  misc_feature 1..22: note = chemically synthesized
  source 1..22: mol_type = other DNA
ttttggaaggccttcaggtcca

SEQ ID NO: 44559 - DNA, 22 bp, synthetic construct
  misc_feature 1..22: note = chemically synthesized
  source 1..22: mol_type = other DNA
tttggaaggccttcaggtccag

SEQ ID NO: 44560 - DNA, 22 bp, synthetic construct
  misc_feature 1..22: note = chemically synthesized
  source 1..22: mol_type = other DNA
ttggaaggccttcaggtccagc

SEQ ID NO: 44561 - DNA, 22 bp, synthetic construct
  misc_feature 1..22: note = chemically synthesized
  source 1..22: mol_type = other DNA
tggaaggccttcaggtccagcc

SEQ ID NO: 44562 - DNA, 22 bp, synthetic construct
  misc_feature 1..22: note = chemically synthesized
  source 1..22: mol_type = other DNA
ggaaggccttcaggtccagcct

SEQ ID NO: 44563 - DNA, 22 bp, synthetic construct
  misc_feature 1..22: note = chemically synthesized
  source 1..22: mol_type = other DNA
gaaggccttcaggtccagcctc

SEQ ID NO: 44564 - DNA, 22 bp, synthetic construct
  misc_feature 1..22: note = chemically synthesized
  source 1..22: mol_type = other DNA
caggtccagcctcctactcttc

SEQ ID NO: 44565 - DNA, 22 bp, synthetic construct
  misc_feature 1..22: note = chemically synthesized
  source 1..22: mol_type = other DNA
aggtccagcctcctactcttct

SEQ ID NO: 44566 - DNA, 22 bp, synthetic construct
  misc_feature 1..22: note = chemically synthesized
  source 1..22: mol_type = other DNA
ctactcttctctttctctgaac

SEQ ID NO: 44567 - DNA, 22 bp, synthetic construct
  misc_feature 1..22: note = chemically synthesized
  source 1..22: mol_type = other DNA
ctcttctctttctctgaactat

SEQ ID NO: 44568 - DNA, 22 bp, synthetic construct
  misc_feature 1..22: note = chemically synthesized
  source 1..22: mol_type = other DNA
ttctctttctctgaactatcac

SEQ ID NO: 44569 - DNA, 22 bp, synthetic construct
  misc_feature 1..22: note = chemically synthesized
  source 1..22: mol_type = other DNA
ctctttctctgaactatcacct

SEQ ID NO: 44570 - DNA, 22 bp, synthetic construct
  misc_feature 1..22: note = chemically synthesized
  source 1..22: mol_type = other DNA
tctttctctgaactatcacctt

SEQ ID NO: 44571 - DNA, 22 bp, synthetic construct
  misc_feature 1..22: note = chemically synthesized
  source 1..22: mol_type = other DNA
tttctctgaactatcaccttac

SEQ ID NO: 44572 - DNA, 22 bp, synthetic construct
  misc_feature 1..22: note = chemically synthesized
  source 1..22: mol_type = other DNA
tctctgaactatcaccttacta

SEQ ID NO: 44573 - DNA, 22 bp, synthetic construct
  misc_feature 1..22: note = chemically synthesized
  source 1..22: mol_type = other DNA
ctctgaactatcaccttactat

SEQ ID NO: 44574 - DNA, 22 bp, synthetic construct
  misc_feature 1..22: note = chemically synthesized
  source 1..22: mol_type = other DNA
tctgaactatcaccttactata

SEQ ID NO: 44575 - DNA, 22 bp, synthetic construct
  misc_feature 1..22: note = chemically synthesized
  source 1..22: mol_type = other DNA
tgaactatcaccttactatagg

SEQ ID NO: 44576 - DNA, 22 bp, synthetic construct
  misc_feature 1..22: note = chemically synthesized
  source 1..22: mol_type = other DNA
aactatcaccttactataggca

SEQ ID NO: 44577 - DNA, 22 bp, synthetic construct
  misc_feature 1..22: note = chemically synthesized
  source 1..22: mol_type = other DNA
tcaccttactataggcacatat

SEQ ID NO: 44578 - DNA, 22 bp, synthetic construct
  misc_feature 1..22: note = chemically synthesized
  source 1..22: mol_type = other DNA
actataggcacatatttccccc

SEQ ID NO: 44579 - DNA, 22 bp, synthetic construct
  misc_feature 1..22: note = chemically synthesized
  source 1..22: mol_type = other DNA
ctataggcacatatttccccca

SEQ ID NO: 44580 - DNA, 22 bp, synthetic construct
  misc_feature 1..22: note = chemically synthesized
  source 1..22: mol_type = other DNA
taggcacatatttcccccaaag

SEQ ID NO: 44581 - DNA, 22 bp, synthetic construct
  misc_feature 1..22: note = chemically synthesized
  source 1..22: mol_type = other DNA
cccccaaaggactcagtggcct

SEQ ID NO: 44582 - DNA, 22 bp, synthetic construct
  misc_feature 1..22: note = chemically synthesized
  source 1..22: mol_type = other DNA
ccccaaaggactcagtggcctc

SEQ ID NO: 44583 - DNA, 22 bp, synthetic construct
  misc_feature 1..22: note = chemically synthesized
  source 1..22: mol_type = other DNA
agtggcctcttttgtctcattt

SEQ ID NO: 44584 - DNA, 22 bp, synthetic construct
  misc_feature 1..22: note = chemically synthesized
  source 1..22: mol_type = other DNA
ttttgtctcatttctccctttg

SEQ ID NO: 44585 - DNA, 22 bp, synthetic construct
  misc_feature 1..22: note = chemically synthesized
  source 1..22: mol_type = other DNA
ttgtctcatttctccctttgct

SEQ ID NO: 44586 - DNA, 22 bp, synthetic construct
  misc_feature 1..22: note = chemically synthesized
  source 1..22: mol_type = other DNA
tgtctcatttctccctttgctg

SEQ ID NO: 44587 - DNA, 22 bp, synthetic construct
  misc_feature 1..22: note = chemically synthesized
  source 1..22: mol_type = other DNA
gtctcatttctccctttgctga

SEQ ID NO: 44588 - DNA, 22 bp, synthetic construct
  misc_feature 1..22: note = chemically synthesized
  source 1..22: mol_type = other DNA
tctcatttctccctttgctgat

SEQ ID NO: 44589 - DNA, 22 bp, synthetic construct
  misc_feature 1..22: note = chemically synthesized
  source 1..22: mol_type = other DNA
atttctccctttgctgatgatc

SEQ ID NO: 44590 - DNA, 22 bp, synthetic construct
  misc_feature 1..22: note = chemically synthesized
  source 1..22: mol_type = other DNA
ctccctttgctgatgatccagt

SEQ ID NO: 44591 - DNA, 22 bp, synthetic construct
  misc_feature 1..22: note = chemically synthesized
  source 1..22: mol_type = other DNA
tccctttgctgatgatccagta

SEQ ID NO: 44592 - DNA, 22 bp, synthetic construct
  misc_feature 1..22: note = chemically synthesized
  source 1..22: mol_type = other DNA
cctttgctgatgatccagtaga

SEQ ID NO: 44593 - DNA, 22 bp, synthetic construct
  misc_feature 1..22: note = chemically synthesized
  source 1..22: mol_type = other DNA
tgctgatgatccagtagagaaa

SEQ ID NO: 44594 - DNA, 22 bp, synthetic construct
  misc_feature 1..22: note = chemically synthesized
  source 1..22: mol_type = other DNA
gctgatgatccagtagagaaat

SEQ ID NO: 44595 - DNA, 22 bp, synthetic construct
  misc_feature 1..22: note = chemically synthesized
  source 1..22: mol_type = other DNA
ctgatgatccagtagagaaatg

SEQ ID NO: 44596 - DNA, 22 bp, synthetic construct
  misc_feature 1..22: note = chemically synthesized
  source 1..22: mol_type = other DNA
atgatccagtagagaaatgatc

SEQ ID NO: 44597 - DNA, 22 bp, synthetic construct
  misc_feature 1..22: note = chemically synthesized
  source 1..22: mol_type = other DNA
cacattgtcctaaatgaaacca

SEQ ID NO: 44598 - DNA, 22 bp, synthetic construct
  misc_feature 1..22: note = chemically synthesized
  source 1..22: mol_type = other DNA
tcctaaatgaaaccaagcttcc

SEQ ID NO: 44599 - DNA, 22 bp, synthetic construct
  misc_feature 1..22: note = chemically synthesized
  source 1..22: mol_type = other DNA
aatgaaaccaagcttcctctgc

SEQ ID NO: 44600 - DNA, 22 bp, synthetic construct
  misc_feature 1..22: note = chemically synthesized
  source 1..22: mol_type = other DNA
cctctgcaggatggaagtgagc

SEQ ID NO: 44601 - DNA, 22 bp, synthetic construct
  misc_feature 1..22: note = chemically synthesized
  source 1..22: mol_type = other DNA
ctctgcaggatggaagtgagcc

SEQ ID NO: 44602 - DNA, 22 bp, synthetic construct
  misc_feature 1..22: note = chemically synthesized
  source 1..22: mol_type = other DNA
tgcaggatggaagtgagccagg

SEQ ID NO: 44603 - DNA, 22 bp, synthetic construct
  misc_feature 1..22: note = chemically synthesized
  source 1..22: mol_type = other DNA
caggatggaagtgagccaggtg

SEQ ID NO: 44604 - DNA, 22 bp, synthetic construct
  misc_feature 1..22: note = chemically synthesized
  source 1..22: mol_type = other DNA
gacccaccgcttcattggccga

SEQ ID NO: 44605 - DNA, 22 bp, synthetic construct
  misc_feature 1..22: note = chemically synthesized
  source 1..22: mol_type = other DNA
cattggccgaggatgaccccat

SEQ ID NO: 44606 - DNA, 22 bp, synthetic construct
  misc_feature 1..22: note = chemically synthesized
  source 1..22: mol_type = other DNA
attggccgaggatgaccccata

SEQ ID NO: 44607 - DNA, 22 bp, synthetic construct
  misc_feature 1..22: note = chemically synthesized
  source 1..22: mol_type = other DNA
gccgaggatgaccccataaagg

SEQ ID NO: 44608 - DNA, 22 bp, synthetic construct
  misc_feature 1..22: note = chemically synthesized
  source 1..22: mol_type = other DNA
cagagattgctatgcacaaaat

SEQ ID NO: 44609 - DNA, 22 bp, synthetic construct
  misc_feature 1..22: note = chemically synthesized
  source 1..22: mol_type = other DNA
ctatgcacaaaatccaagaggc

SEQ ID NO: 44610 - DNA, 22 bp, synthetic construct
  misc_feature 1..22: note = chemically synthesized
  source 1..22: mol_type = other DNA
tgcacaaaatccaagaggccca

SEQ ID NO: 44611 - DNA, 22 bp, synthetic construct
  misc_feature 1..22: note = chemically synthesized
  source 1..22: mol_type = other DNA
gcagaccctcaagagcaggggt

SEQ ID NO: 44612 - DNA, 22 bp, synthetic construct
  misc_feature 1..22: note = chemically synthesized
  source 1..22: mol_type = other DNA
aagagcaggggtcttctctttg

SEQ ID NO: 44613 - DNA, 22 bp, synthetic construct
  misc_feature 1..22: note = chemically synthesized
  source 1..22: mol_type = other DNA
ctctttgggggaggacatcact

SEQ ID NO: 44614 - DNA, 22 bp, synthetic construct
  misc_feature 1..22: note = chemically synthesized
  source 1..22: mol_type = other DNA
tctttgggggaggacatcactc

SEQ ID NO: 44615 - DNA, 22 bp, synthetic construct
  misc_feature 1..22: note = chemically synthesized
  source 1..22: mol_type = other DNA
tttgggggaggacatcactctt

SEQ ID NO: 44616 - DNA, 22 bp, synthetic construct
  misc_feature 1..22: note = chemically synthesized
  source 1..22: mol_type = other DNA
tgggggaggacatcactcttag

SEQ ID NO: 44617 - DNA, 22 bp, synthetic construct
  misc_feature 1..22: note = chemically synthesized
  source 1..22: mol_type = other DNA
gggggaggacatcactcttagc

SEQ ID NO: 44618 - DNA, 22 bp, synthetic construct
  misc_feature 1..22: note = chemically synthesized
  source 1..22: mol_type = other DNA
ggggaggacatcactcttagca

SEQ ID NO: 44619 - DNA, 22 bp, synthetic construct
  misc_feature 1..22: note = chemically synthesized
  source 1..22: mol_type = other DNA
ttagcagggctggggtgagtca

SEQ ID NO: 44620 - DNA, 22 bp, synthetic construct
  misc_feature 1..22: note = chemically synthesized
  source 1..22: mol_type = other DNA
agcagggctggggtgagtcaaa

SEQ ID NO: 44621 - DNA, 22 bp, synthetic construct
  misc_feature 1..22: note = chemically synthesized
  source 1..22: mol_type = other DNA
gcagggctggggtgagtcaaaa

SEQ ID NO: 44622 - DNA, 22 bp, synthetic construct
  misc_feature 1..22: note = chemically synthesized
  source 1..22: mol_type = other DNA
gggtgagtcaaaagtctgggag

SEQ ID NO: 44623 - DNA, 22 bp, synthetic construct
  misc_feature 1..22: note = chemically synthesized
  source 1..22: mol_type = other DNA
ggagaatggaggtgtggagggg

SEQ ID NO: 44624 - DNA, 22 bp, synthetic construct
  misc_feature 1..22: note = chemically synthesized
  source 1..22: mol_type = other DNA
ggtcagaccccaagcaggaagg

SEQ ID NO: 44625 - DNA, 22 bp, synthetic construct
  misc_feature 1..22: note = chemically synthesized
  source 1..22: mol_type = other DNA
tatgtagacgggtgtgtggctc

SEQ ID NO: 44626 - DNA, 22 bp, synthetic construct
  misc_feature 1..22: note = chemically synthesized
  source 1..22: mol_type = other DNA
tgtagacgggtgtgtggctcct

SEQ ID NO: 44627 - DNA, 22 bp, synthetic construct
  misc_feature 1..22: note = chemically synthesized
  source 1..22: mol_type = other DNA
cttaaggtgacccagcagccct

SEQ ID NO: 44628 - DNA, 22 bp, synthetic construct
  misc_feature 1..22: note = chemically synthesized
  source 1..22: mol_type = other DNA
aaggtgacccagcagccctggg

SEQ ID NO: 44629 - DNA, 22 bp, synthetic construct
  misc_feature 1..22: note = chemically synthesized
  source 1..22: mol_type = other DNA
aggtgacccagcagccctgggc

SEQ ID NO: 44630 - DNA, 22 bp, synthetic construct
  misc_feature 1..22: note = chemically synthesized
  source 1..22: mol_type = other DNA
ggcacagaagtggtgcgtggag

SEQ ID NO: 44631 - DNA, 22 bp, synthetic construct
  misc_feature 1..22: note = chemically synthesized
  source 1..22: mol_type = other DNA
tcagaagaggccctggacactg

SEQ ID NO: 44632 - DNA, 22 bp, synthetic construct
  misc_feature 1..22: note = chemically synthesized
  source 1..22: mol_type = other DNA
gacactgaaggctgggcacagc

SEQ ID NO: 44633 - DNA, 22 bp, synthetic construct
  misc_feature 1..22: note = chemically synthesized
  source 1..22: mol_type = other DNA
aaggctgggcacagccttgggg

SEQ ID NO: 44634 - DNA, 22 bp, synthetic construct
  misc_feature 1..22: note = chemically synthesized
  source 1..22: mol_type = other DNA
ggcacagccttggggaccgctc

SEQ ID NO: 44635 - DNA, 22 bp, synthetic construct
  misc_feature 1..22: note = chemically synthesized
  source 1..22: mol_type = other DNA
ggggaccgctcacaggacatgc

SEQ ID NO: 44636 - DNA, 22 bp, synthetic construct
  misc_feature 1..22: note = chemically synthesized
  source 1..22: mol_type = other DNA
gggaccgctcacaggacatgca

SEQ ID NO: 44637 - DNA, 22 bp, synthetic construct
  misc_feature 1..22: note = chemically synthesized
  source 1..22: mol_type = other DNA
acaggacatgcagcagtgtgtg

SEQ ID NO: 44638 - DNA, 22 bp, synthetic construct
  misc_feature 1..22: note = chemically synthesized
  source 1..22: mol_type = other DNA
cctaccgcgacccctatcagtg

SEQ ID NO: 44639 - DNA, 22 bp, synthetic construct
  misc_feature 1..22: note = chemically synthesized
  source 1..22: mol_type = other DNA
ccgcgacccctatcagtgccga

SEQ ID NO: 44640 - DNA, 22 bp, synthetic construct
  misc_feature 1..22: note = chemically synthesized
  source 1..22: mol_type = other DNA
tcagtgccgaccaagcacacaa

SEQ ID NO: 44641 - DNA, 22 bp, synthetic construct
  misc_feature 1..22: note = chemically synthesized
  source 1..22: mol_type = other DNA
ggctggacagaggggtcccaca

SEQ ID NO: 44642 - DNA, 22 bp, synthetic construct
  misc_feature 1..22: note = chemically synthesized
  source 1..22: mol_type = other DNA
gacagaggggtcccacaagatc

SEQ ID NO: 44643 - DNA, 22 bp, synthetic construct
  misc_feature 1..22: note = chemically synthesized
  source 1..22: mol_type = other DNA
agaaggtggggagctcacagcc

SEQ ID NO: 44644 - DNA, 22 bp, synthetic construct
  misc_feature 1..22: note = chemically synthesized
  source 1..22: mol_type = other DNA
acagcctccaagcattgcatca

SEQ ID NO: 44645 - DNA, 22 bp, synthetic construct
  misc_feature 1..22: note = chemically synthesized
  source 1..22: mol_type = other DNA
caagcattgcatcatcctggta

SEQ ID NO: 44646 - DNA, 22 bp, synthetic construct
  misc_feature 1..22: note = chemically synthesized
  source 1..22: mol_type = other DNA
catcatcctggtaccaggaagg

SEQ ID NO: 44647 - DNA, 22 bp, synthetic construct
  misc_feature 1..22: note = chemically synthesized
  source 1..22: mol_type = other DNA
gtaccaggaaggcaatgggctg

SEQ ID NO: 44648 - DNA, 22 bp, synthetic construct
  misc_feature 1..22: note = chemically synthesized
  source 1..22: mol_type = other DNA
ccccatacccacttcccttcct

SEQ ID NO: 44649 - DNA, 22 bp, synthetic construct
  misc_feature 1..22: note = chemically synthesized
  source 1..22: mol_type = other DNA
cccttcctagaattggcctggg

SEQ ID NO: 44650 - DNA, 22 bp, synthetic construct
  misc_feature 1..22: note = chemically synthesized
  source 1..22: mol_type = other DNA
ccttcctagaattggcctggga

SEQ ID NO: 44651 - DNA, 22 bp, synthetic construct
  misc_feature 1..22: note = chemically synthesized
  source 1..22: mol_type = other DNA
cctagaattggcctgggacatt

SEQ ID NO: 44652 - DNA, 22 bp, synthetic construct
  misc_feature 1..22: note = chemically synthesized
  source 1..22: mol_type = other DNA
ctagaattggcctgggacattc

SEQ ID NO: 44653 - DNA, 22 bp, synthetic construct
  misc_feature 1..22: note = chemically synthesized
  source 1..22: mol_type = other DNA
gaattggcctgggacattcatt

SEQ ID NO: 44654 - DNA, 22 bp, synthetic construct
  misc_feature 1..22: note = chemically synthesized
  source 1..22: mol_type = other DNA
gcctgggacattcattatttag

SEQ ID NO: 44655 - DNA, 22 bp, synthetic construct
  misc_feature 1..22: note = chemically synthesized
  source 1..22: mol_type = other DNA
ggacattcattatttagccacc

SEQ ID NO: 44656 - DNA, 22 bp, synthetic construct
  misc_feature 1..22: note = chemically synthesized
  source 1..22: mol_type = other DNA
attatttagccacctctggcac

SEQ ID NO: 44657 - DNA, 22 bp, synthetic construct
  misc_feature 1..22: note = chemically synthesized
  source 1..22: mol_type = other DNA
tttagccacctctggcacctgc

SEQ ID NO: 44658 - DNA, 22 bp, synthetic construct
  misc_feature 1..22: note = chemically synthesized
  source 1..22: mol_type = other DNA
agccacctctggcacctgcatt

SEQ ID NO: 44659 - DNA, 22 bp, synthetic construct
  misc_feature 1..22: note = chemically synthesized
  source 1..22: mol_type = other DNA
gccacctctggcacctgcattt

SEQ ID NO: 44660 - DNA, 22 bp, synthetic construct
  misc_feature 1..22: note = chemically synthesized
  source 1..22: mol_type = other DNA
tggcacctgcatttgtttttca

SEQ ID NO: 44661 - DNA, 22 bp, synthetic construct
  misc_feature 1..22: note = chemically synthesized
  source 1..22: mol_type = other DNA
gcacctgcatttgtttttcaaa

SEQ ID NO: 44662 - DNA, 22 bp, synthetic construct
  misc_feature 1..22: note = chemically synthesized
  source 1..22: mol_type = other DNA
catttgtttttcaaattttaat

SEQ ID NO: 44663 - DNA, 22 bp, synthetic construct
  misc_feature 1..22: note = chemically synthesized
  source 1..22: mol_type = other DNA
gtttttcaaattttaatagcaa

SEQ ID NO: 44664 - DNA, 22 bp, synthetic construct
  misc_feature 1..22: note = chemically synthesized
  source 1..22: mol_type = other DNA
tttttcaaattttaatagcaaa

SEQ ID NO: 44665 - DNA, 22 bp, synthetic construct
  misc_feature 1..22: note = chemically synthesized
  source 1..22: mol_type = other DNA
ttcaaattttaatagcaaatag

SEQ ID NO: 44666 - DNA, 22 bp, synthetic construct
  misc_feature 1..22: note = chemically synthesized
  source 1..22: mol_type = other DNA
tcaaattttaatagcaaatagg

SEQ ID NO: 44667 - DNA, 22 bp, synthetic construct
  misc_feature 1..22: note = chemically synthesized
  source 1..22: mol_type = other DNA
caaattttaatagcaaataggc

SEQ ID NO: 44668 - DNA, 22 bp, synthetic construct
  misc_feature 1..22: note = chemically synthesized
  source 1..22: mol_type = other DNA
aaattttaatagcaaataggct

SEQ ID NO: 44669 - DNA, 22 bp, synthetic construct
  misc_feature 1..22: note = chemically synthesized
  source 1..22: mol_type = other DNA
taatagcaaataggcttagtgt

SEQ ID NO: 44670 - DNA, 22 bp, synthetic construct
  misc_feature 1..22: note = chemically synthesized
  source 1..22: mol_type = other DNA
aatagcaaataggcttagtgtg

SEQ ID NO: 44671 - DNA, 22 bp, synthetic construct
  misc_feature 1..22: note = chemically synthesized
  source 1..22: mol_type = other DNA
atagcaaataggcttagtgtgc

SEQ ID NO: 44672 - DNA, 22 bp, synthetic construct
  misc_feature 1..22: note = chemically synthesized
  source 1..22: mol_type = other DNA
agtgtgctgggcagagctgagc

SEQ ID NO: 44673 - DNA, 22 bp, synthetic construct
  misc_feature 1..22: note = chemically synthesized
  source 1..22: mol_type = other DNA
gtgtgctgggcagagctgagca

SEQ ID NO: 44674 - DNA, 22 bp, synthetic construct
  misc_feature 1..22: note = chemically synthesized
  source 1..22: mol_type = other DNA
ggcagagctgagcagaggtgat

SEQ ID NO: 44675 - DNA, 22 bp, synthetic construct
  misc_feature 1..22: note = chemically synthesized
  source 1..22: mol_type = other DNA
agcagaggtgatctgacccctc

SEQ ID NO: 44676 - DNA, 22 bp, synthetic construct
  misc_feature 1..22: note = chemically synthesized
  source 1..22: mol_type = other DNA
acccctctacctactcacataa

SEQ ID NO: 44677 - DNA, 22 bp, synthetic construct
  misc_feature 1..22: note = chemically synthesized
  source 1..22: mol_type = other DNA
tacctactcacataagatcagt

SEQ ID NO: 44678 - DNA, 22 bp, synthetic construct
  misc_feature 1..22: note = chemically synthesized
  source 1..22: mol_type = other DNA
cctactcacataagatcagtaa

SEQ ID NO: 44679 - DNA, 22 bp, synthetic construct
  misc_feature 1..22: note = chemically synthesized
  source 1..22: mol_type = other DNA
ctcacataagatcagtaaagag

SEQ ID NO: 44680 - DNA, 22 bp, synthetic construct
  misc_feature 1..22: note = chemically synthesized
  source 1..22: mol_type = other DNA
acataagatcagtaaagagaag

SEQ ID NO: 44681 - DNA, 22 bp, synthetic construct
  misc_feature 1..22: note = chemically synthesized
  source 1..22: mol_type = other DNA
taggtccaagttcgtacagacc

SEQ ID NO: 44682 - DNA, 22 bp, synthetic construct
  misc_feature 1..22: note = chemically synthesized
  source 1..22: mol_type = other DNA
gtacagacccagccagactgcc

SEQ ID NO: 44683 - DNA, 22 bp, synthetic construct
  misc_feature 1..22: note = chemically synthesized
  source 1..22: mol_type = other DNA
ccagttctctgaggagctagag

SEQ ID NO: 44684 - DNA, 22 bp, synthetic construct
  misc_feature 1..22: note = chemically synthesized
  source 1..22: mol_type = other DNA
tctgaggagctagagacttgtg

SEQ ID NO: 44685 - DNA, 22 bp, synthetic construct
  misc_feature 1..22: note = chemically synthesized
  source 1..22: mol_type = other DNA
tgaggagctagagacttgtggc

SEQ ID NO: 44686 - DNA, 22 bp, synthetic construct
  misc_feature 1..22: note = chemically synthesized
  source 1..22: mol_type = other DNA
aggagctagagacttgtggctt

SEQ ID NO: 44687 - DNA, 22 bp, synthetic construct
  misc_feature 1..22: note = chemically synthesized
  source 1..22: mol_type = other DNA
gagacttgtggcttaaggaagc

SEQ ID NO: 44688 - DNA, 22 bp, synthetic construct
  misc_feature 1..22: note = chemically synthesized
  source 1..22: mol_type = other DNA
gtggcttaaggaagcctctctg

SEQ ID NO: 44689 - DNA, 22 bp, synthetic construct
  misc_feature 1..22: note = chemically synthesized
  source 1..22: mol_type = other DNA
tggcttaaggaagcctctctga

SEQ ID NO: 44690 - DNA, 22 bp, synthetic construct
  misc_feature 1..22: note = chemically synthesized
  source 1..22: mol_type = other DNA
aaggaagcctctctgatggatg

SEQ ID NO: 44691 - DNA, 22 bp, synthetic construct
  misc_feature 1..22: note = chemically synthesized
  source 1..22: mol_type = other DNA
aggaagcctctctgatggatgt

SEQ ID NO: 44692 - DNA, 22 bp, synthetic construct
  misc_feature 1..22: note = chemically synthesized
  source 1..22: mol_type = other DNA
tctgatggatgtactaatatgt

SEQ ID NO: 44693 - DNA, 22 bp, synthetic construct
  misc_feature 1..22: note = chemically synthesized
  source 1..22: mol_type = other DNA
tgatggatgtactaatatgtat

SEQ ID NO: 44694 - DNA, 22 bp, synthetic construct
  misc_feature 1..22: note = chemically synthesized
  source 1..22: mol_type = other DNA
atggatgtactaatatgtatgt

SEQ ID NO: 44695 - DNA, 22 bp, synthetic construct
  misc_feature 1..22: note = chemically synthesized
  source 1..22: mol_type = other DNA
atatgtatgtaccttatacata

SEQ ID NO: 44696 - DNA, 22 bp, synthetic construct
  misc_feature 1..22: note = chemically synthesized
  source 1..22: mol_type = other DNA
atacatacatttgaattacctg

SEQ ID NO: 44697 - DNA, 22 bp, synthetic construct
  misc_feature 1..22: note = chemically synthesized
  source 1..22: mol_type = other DNA
tacatacatttgaattacctgt

SEQ ID NO: 44698 - DNA, 22 bp, synthetic construct
  misc_feature 1..22: note = chemically synthesized
  source 1..22: mol_type = other DNA
gaattacctgtaaatcttgatc

SEQ ID NO: 44699 - DNA, 22 bp, synthetic construct
  misc_feature 1..22: note = chemically synthesized
  source 1..22: mol_type = other DNA
aattacctgtaaatcttgatca

SEQ ID NO: 44700 - DNA, 22 bp, synthetic construct
  misc_feature 1..22: note = chemically synthesized
  source 1..22: mol_type = other DNA
cctgtaaatcttgatcaaactc

SEQ ID NO: 44701 - DNA, 22 bp, synthetic construct
  misc_feature 1..22: note = chemically synthesized
  source 1..22: mol_type = other DNA
taaatcttgatcaaactcagat

SEQ ID NO: 44702 - DNA, 22 bp, synthetic construct
  misc_feature 1..22: note = chemically synthesized
  source 1..22: mol_type = other DNA
gatcaaactcagatgactgtcc

SEQ ID NO: 44703 - DNA, 22 bp, synthetic construct
  misc_feature 1..22: note = chemically synthesized
  source 1..22: mol_type = other DNA
atcaaactcagatgactgtcca

SEQ ID NO: 44704 - DNA, 22 bp, synthetic construct
  misc_feature 1..22: note = chemically synthesized
  source 1..22: mol_type = other DNA
agatgactgtccaactcatcca

SEQ ID NO: 44705 - DNA, 22 bp, synthetic construct
  misc_feature 1..22: note = chemically synthesized
  source 1..22: mol_type = other DNA
tccaactcatccagaaactacg

SEQ ID NO: 44706 - DNA, 22 bp, synthetic construct
  misc_feature 1..22: note = chemically synthesized
  source 1..22: mol_type = other DNA
atccagaaactacgtttgtcta

SEQ ID NO: 44707 - DNA, 22 bp, synthetic construct
  misc_feature 1..22: note = chemically synthesized
  source 1..22: mol_type = other DNA
cgtttgtctaatagaacaggaa

SEQ ID NO: 44708 - DNA, 22 bp, synthetic construct
  misc_feature 1..22: note = chemically synthesized
  source 1..22: mol_type = other DNA
gtctaatagaacaggaagcagg

SEQ ID NO: 44709 - DNA, 22 bp, synthetic construct
  misc_feature 1..22: note = chemically synthesized
  source 1..22: mol_type = other DNA
tctaatagaacaggaagcaggt

SEQ ID NO: 44710 - DNA, 22 bp, synthetic construct
  misc_feature 1..22: note = chemically synthesized
  source 1..22: mol_type = other DNA
atagaacaggaagcaggtggtg

SEQ ID NO: 44711 - DNA, 22 bp, synthetic construct
  misc_feature 1..22: note = chemically synthesized
  source 1..22: mol_type = other DNA
atgagaggcagggccagtgttt

SEQ ID NO: 44712 - DNA, 22 bp, synthetic construct
  misc_feature 1..22: note = chemically synthesized
  source 1..22: mol_type = other DNA
cttcttcattttccattccact

SEQ ID NO: 44713 - DNA, 22 bp, synthetic construct
  misc_feature 1..22: note = chemically synthesized
  source 1..22: mol_type = other DNA
ttcttcattttccattccactg

SEQ ID NO: 44714 - DNA, 22 bp, synthetic construct
  misc_feature 1..22: note = chemically synthesized
  source 1..22: mol_type = other DNA
cttcattttccattccactgat

SEQ ID NO: 44715 - DNA, 22 bp, synthetic construct
  misc_feature 1..22: note = chemically synthesized
  source 1..22: mol_type = other DNA
ttcattttccattccactgatt

SEQ ID NO: 44716 - DNA, 22 bp, synthetic construct
  misc_feature 1..22: note = chemically synthesized
  source 1..22: mol_type = other DNA
cattttccattccactgattct

SEQ ID NO: 44717 - DNA, 22 bp, synthetic construct
  misc_feature 1..22: note = chemically synthesized
  source 1..22: mol_type = other DNA
attttccattccactgattctg

SEQ ID NO: 44718 - DNA, 22 bp, synthetic construct
  misc_feature 1..22: note = chemically synthesized
  source 1..22: mol_type = other DNA
tccattccactgattctgtccc

SEQ ID NO: 44719 - DNA, 22 bp, synthetic construct
  misc_feature 1..22: note = chemically synthesized
  source 1..22: mol_type = other DNA
ccattccactgattctgtcccc

SEQ ID NO: 44720 - DNA, 22 bp, synthetic construct
  misc_feature 1..22: note = chemically synthesized
  source 1..22: mol_type = other DNA
cattccactgattctgtcccca

SEQ ID NO: 44721 - DNA, 22 bp, synthetic construct
  misc_feature 1..22: note = chemically synthesized
  source 1..22: mol_type = other DNA
cactgattctgtccccacacag

SEQ ID NO: 44722 - DNA, 22 bp, synthetic construct
  misc_feature 1..22: note = chemically synthesized
  source 1..22: mol_type = other DNA
attctgtccccacacaggcatc

SEQ ID NO: 44723 - DNA, 22 bp, synthetic construct
  misc_feature 1..22: note = chemically synthesized
  source 1..22: mol_type = other DNA
tgtccccacacaggcatccaaa

SEQ ID NO: 44724 - DNA, 22 bp, synthetic construct
  misc_feature 1..22: note = chemically synthesized
  source 1..22: mol_type = other DNA
tccccacacaggcatccaaagg

SEQ ID NO: 44725 - DNA, 22 bp, synthetic construct
  misc_feature 1..22: note = chemically synthesized
  source 1..22: mol_type = other DNA
cagctacagtccatttctcgct

SEQ ID NO: 44726 - DNA, 22 bp, synthetic construct
  misc_feature 1..22: note = chemically synthesized
  source 1..22: mol_type = other DNA
cagtccatttctcgctggcttt

SEQ ID NO: 44727 - DNA, 22 bp, synthetic construct
  misc_feature 1..22: note = chemically synthesized
  source 1..22: mol_type = other DNA
ctcgctggcttttctgggagat

SEQ ID NO: 44728 - DNA, 22 bp, synthetic construct
  misc_feature 1..22: note = chemically synthesized
  source 1..22: mol_type = other DNA
tcgctggcttttctgggagatc

SEQ ID NO: 44729 - DNA, 22 bp, synthetic construct
  misc_feature 1..22: note = chemically synthesized
  source 1..22: mol_type = other DNA
gctggcttttctgggagatcac

SEQ ID NO: 44730 - DNA, 22 bp, synthetic construct
  misc_feature 1..22: note = chemically synthesized
  source 1..22: mol_type = other DNA
gcttttctgggagatcacccta

SEQ ID NO: 44731 - DNA, 22 bp, synthetic construct
  misc_feature 1..22: note = chemically synthesized
  source 1..22: mol_type = other DNA
ttctgggagatcaccctacaat

SEQ ID NO: 44732 - DNA, 22 bp, synthetic construct
  misc_feature 1..22: note = chemically synthesized
  source 1..22: mol_type = other DNA
tctgggagatcaccctacaatg

SEQ ID NO: 44733 - DNA, 22 bp, synthetic construct
  misc_feature 1..22: note = chemically synthesized
  source 1..22: mol_type = other DNA
ctgggagatcaccctacaatgt

SEQ ID NO: 44734 - DNA, 22 bp, synthetic construct
  misc_feature 1..22: note = chemically synthesized
  source 1..22: mol_type = other DNA
tgggagatcaccctacaatgtg

SEQ ID NO: 44735 - DNA, 22 bp, synthetic construct
  misc_feature 1..22: note = chemically synthesized
  source 1..22: mol_type = other DNA
ggagatcaccctacaatgtgtt

SEQ ID NO: 44736 - DNA, 22 bp, synthetic construct
  misc_feature 1..22: note = chemically synthesized
  source 1..22: mol_type = other DNA
caatgtgttccccagtattcag

SEQ ID NO: 44737 - DNA, 22 bp, synthetic construct
  misc_feature 1..22: note = chemically synthesized
  source 1..22: mol_type = other DNA
cccagtattcaggtttctgggc

SEQ ID NO: 44738 - DNA, 22 bp, synthetic construct
  misc_feature 1..22: note = chemically synthesized
  source 1..22: mol_type = other DNA
aggtttctgggctgccattatc

SEQ ID NO: 44739 - DNA, 22 bp, synthetic construct
  misc_feature 1..22: note = chemically synthesized
  source 1..22: mol_type = other DNA
ctgggctgccattatcttctct

SEQ ID NO: 44740 - DNA, 22 bp, synthetic construct
  misc_feature 1..22: note = chemically synthesized
  source 1..22: mol_type = other DNA
tgggctgccattatcttctctg

SEQ ID NO: 44741 - DNA, 22 bp, synthetic construct
  misc_feature 1..22: note = chemically synthesized
  source 1..22: mol_type = other DNA
ggctgccattatcttctctggt

SEQ ID NO: 44742 - DNA, 22 bp, synthetic construct
  misc_feature 1..22: note = chemically synthesized
  source 1..22: mol_type = other DNA
ccattatcttctctggtctcgg

SEQ ID NO: 44743 - DNA, 22 bp, synthetic construct
  misc_feature 1..22: note = chemically synthesized
  source 1..22: mol_type = other DNA
tcttctctggtctcggggccca

SEQ ID NO: 44744 - DNA, 22 bp, synthetic construct
  misc_feature 1..22: note = chemically synthesized
  source 1..22: mol_type = other DNA
ctctggtctcggggcccaagcc

SEQ ID NO: 44745 - DNA, 22 bp, synthetic construct
  misc_feature 1..22: note = chemically synthesized
  source 1..22: mol_type = other DNA
tctggtctcggggcccaagcca

SEQ ID NO: 44746 - DNA, 22 bp, synthetic construct
  misc_feature 1..22: note = chemically synthesized
  source 1..22: mol_type = other DNA
tggtctcggggcccaagccaaa

SEQ ID NO: 44747 - DNA, 22 bp, synthetic construct
  misc_feature 1..22: note = chemically synthesized
  source 1..22: mol_type = other DNA
gtctcggggcccaagccaaaga

SEQ ID NO: 44748 - DNA, 22 bp, synthetic construct
  misc_feature 1..22: note = chemically synthesized
  source 1..22: mol_type = other DNA
ggggcccaagccaaagagctgg

SEQ ID NO: 44749 - DNA, 22 bp, synthetic construct
  misc_feature 1..22: note = chemically synthesized
  source 1..22: mol_type = other DNA
gagaacagtatctggccacaga

SEQ ID NO: 44750 - DNA, 22 bp, synthetic construct
  misc_feature 1..22: note = chemically synthesized
  source 1..22: mol_type = other DNA
gccacagaacctaaggcctggt

SEQ ID NO: 44751 - DNA, 22 bp, synthetic construct
  misc_feature 1..22: note = chemically synthesized
  source 1..22: mol_type = other DNA
aggcctggtagagcaagacagc

SEQ ID NO: 44752 - DNA, 22 bp, synthetic construct
  misc_feature 1..22: note = chemically synthesized
  source 1..22: mol_type = other DNA
gtagagcaagacagccatgtgc

SEQ ID NO: 44753 - DNA, 22 bp, synthetic construct
  misc_feature 1..22: note = chemically synthesized
  source 1..22: mol_type = other DNA
ccgtcactcccacagagctgca

SEQ ID NO: 44754 - DNA, 22 bp, synthetic construct
  misc_feature 1..22: note = chemically synthesized
  source 1..22: mol_type = other DNA
cgtcactcccacagagctgcag

SEQ ID NO: 44755 - DNA, 22 bp, synthetic construct
  misc_feature 1..22: note = chemically synthesized
  source 1..22: mol_type = other DNA
ccacagagctgcaggggtgtga

SEQ ID NO: 44756 - DNA, 22 bp, synthetic construct
  misc_feature 1..22: note = chemically synthesized
  source 1..22: mol_type = other DNA
caggggtgtgacgcccctgccc

SEQ ID NO: 44757 - DNA, 22 bp, synthetic construct
  misc_feature 1..22: note = chemically synthesized
  source 1..22: mol_type = other DNA
cccagccatacccttctgggcc

SEQ ID NO: 44758 - DNA, 22 bp, synthetic construct
  misc_feature 1..22: note = chemically synthesized
  source 1..22: mol_type = other DNA
ctgggccacagtgctggaggct

SEQ ID NO: 44759 - DNA, 22 bp, synthetic construct
  misc_feature 1..22: note = chemically synthesized
  source 1..22: mol_type = other DNA
tgggccacagtgctggaggctg

SEQ ID NO: 44760 - DNA, 22 bp, synthetic construct
  misc_feature 1..22: note = chemically synthesized
  source 1..22: mol_type = other DNA
ggccacagtgctggaggctgaa

SEQ ID NO: 44761 - DNA, 22 bp, synthetic construct
  misc_feature 1..22: note = chemically synthesized
  source 1..22: mol_type = other DNA
gaggctgaagtcaaagcccatc

SEQ ID NO: 44762 - DNA, 22 bp, synthetic construct
  misc_feature 1..22: note = chemically synthesized
  source 1..22: mol_type = other DNA
aagtcaaagcccatcgtgcctt

SEQ ID NO: 44763 - DNA, 22 bp, synthetic construct
  misc_feature 1..22: note = chemically synthesized
  source 1..22: mol_type = other DNA
attccttcaggagcaatactcc

SEQ ID NO: 44764 - DNA, 22 bp, synthetic construct
  misc_feature 1..22: note = chemically synthesized
  source 1..22: mol_type = other DNA
ttccttcaggagcaatactcct

SEQ ID NO: 44765 - DNA, 22 bp, synthetic construct
  misc_feature 1..22: note = chemically synthesized
  source 1..22: mol_type = other DNA
cttcaggagcaatactcctggg

SEQ ID NO: 44766 - DNA, 22 bp, synthetic construct
  misc_feature 1..22: note = chemically synthesized
  source 1..22: mol_type = other DNA
caggagcaatactcctgggaaa

SEQ ID NO: 44767 - DNA, 22 bp, synthetic construct
  misc_feature 1..22: note = chemically synthesized
  source 1..22: mol_type = other DNA
aggagcaatactcctgggaaag

SEQ ID NO: 44768 - DNA, 22 bp, synthetic construct
  misc_feature 1..22: note = chemically synthesized
  source 1..22: mol_type = other DNA
ctgggaaaggttgcacattctg

SEQ ID NO: 44769 - DNA, 22 bp, synthetic construct
  misc_feature 1..22: note = chemically synthesized
  source 1..22: mol_type = other DNA
ggaaaggttgcacattctgtaa

SEQ ID NO: 44770 - DNA, 22 bp, synthetic construct
  misc_feature 1..22: note = chemically synthesized
  source 1..22: mol_type = other DNA
cacattctgtaactcctctaag

SEQ ID NO: 44771 - DNA, 22 bp, synthetic construct
  misc_feature 1..22: note = chemically synthesized
  source 1..22: mol_type = other DNA
tgtaactcctctaagtgatatt

SEQ ID NO: 44772 - DNA, 22 bp, synthetic construct
  misc_feature 1..22: note = chemically synthesized
  source 1..22: mol_type = other DNA
taactcctctaagtgatatttc

SEQ ID NO: 44773 - DNA, 22 bp, synthetic construct
  misc_feature 1..22: note = chemically synthesized
  source 1..22: mol_type = other DNA
ctctaagtgatatttcttccca

SEQ ID NO: 44774 - DNA, 22 bp, synthetic construct
  misc_feature 1..22: note = chemically synthesized
  source 1..22: mol_type = other DNA
taagtgatatttcttcccaggg

SEQ ID NO: 44775 - DNA, 22 bp, synthetic construct
  misc_feature 1..22: note = chemically synthesized
  source 1..22: mol_type = other DNA
agtgatatttcttcccaggggc

SEQ ID NO: 44776 - DNA, 22 bp, synthetic construct
  misc_feature 1..22: note = chemically synthesized
  source 1..22: mol_type = other DNA
cttcccaggggcaaaaaaggaa

SEQ ID NO: 44777 - DNA, 22 bp, synthetic construct
  misc_feature 1..22: note = chemically synthesized
  source 1..22: mol_type = other DNA
ttcccaggggcaaaaaaggaaa

SEQ ID NO: 44778 - DNA, 22 bp, synthetic construct
  misc_feature 1..22: note = chemically synthesized
  source 1..22: mol_type = other DNA
cccaggggcaaaaaaggaaatt

SEQ ID NO: 44779 - DNA, 22 bp, synthetic construct
  misc_feature 1..22: note = chemically synthesized
  source 1..22: mol_type = other DNA
ccaggggcaaaaaaggaaatta

SEQ ID NO: 44780 - DNA, 22 bp, synthetic construct
  misc_feature 1..22: note = chemically synthesized
  source 1..22: mol_type = other DNA
gccccattttatagataaagag

SEQ ID NO: 44781 - DNA, 22 bp, synthetic construct
  misc_feature 1..22: note = chemically synthesized
  source 1..22: mol_type = other DNA
tatagataaagagcctgaggcc

SEQ ID NO: 44782 - DNA, 22 bp, synthetic construct
  misc_feature 1..22: note = chemically synthesized
  source 1..22: mol_type = other DNA
atagataaagagcctgaggccc

SEQ ID NO: 44783 - DNA, 22 bp, synthetic construct
  misc_feature 1..22: note = chemically synthesized
  source 1..22: mol_type = other DNA
tagataaagagcctgaggccca

SEQ ID NO: 44784 - DNA, 22 bp, synthetic construct
  misc_feature 1..22: note = chemically synthesized
  source 1..22: mol_type = other DNA
aggcccaataggctgattgact

SEQ ID NO: 44785 - DNA, 22 bp, synthetic construct
  misc_feature 1..22: note = chemically synthesized
  source 1..22: mol_type = other DNA
attgacttgtccggggccacct

SEQ ID NO: 44786 - DNA, 22 bp, synthetic construct
  misc_feature 1..22: note = chemically synthesized
  source 1..22: mol_type = other DNA
acttgtccggggccacctagcc

SEQ ID NO: 44787 - DNA, 22 bp, synthetic construct
  misc_feature 1..22: note = chemically synthesized
  source 1..22: mol_type = other DNA
gtccggggccacctagccagca

SEQ ID NO: 44788 - DNA, 22 bp, synthetic construct
  misc_feature 1..22: note = chemically synthesized
  source 1..22: mol_type = other DNA
tccggggccacctagccagcag

SEQ ID NO: 44789 - DNA, 22 bp, synthetic construct
  misc_feature 1..22: note = chemically synthesized
  source 1..22: mol_type = other DNA
gccagcaggtgaaaagactcat

SEQ ID NO: 44790 - DNA, 22 bp, synthetic construct
  misc_feature 1..22: note = chemically synthesized
  source 1..22: mol_type = other DNA
atgtgtagctgactttagagtc

SEQ ID NO: 44791 - DNA, 22 bp, synthetic construct
  misc_feature 1..22: note = chemically synthesized
  source 1..22: mol_type = other DNA
actttagagtccaagctccttc

SEQ ID NO: 44792 - DNA, 22 bp, synthetic construct
  misc_feature 1..22: note = chemically synthesized
  source 1..22: mol_type = other DNA
tagagtccaagctccttcaacg

SEQ ID NO: 44793 - DNA, 22 bp, synthetic construct
  misc_feature 1..22: note = chemically synthesized
  source 1..22: mol_type = other DNA
agagtccaagctccttcaacgt

SEQ ID NO: 44794 - DNA, 22 bp, synthetic construct
  misc_feature 1..22: note = chemically synthesized
  source 1..22: mol_type = other DNA
gagtccaagctccttcaacgtc

SEQ ID NO: 44795 - DNA, 22 bp, synthetic construct
  misc_feature 1..22: note = chemically synthesized
  source 1..22: mol_type = other DNA
cttcaacgtcccactttctcaa

SEQ ID NO: 44796 - DNA, 22 bp, synthetic construct
  misc_feature 1..22: note = chemically synthesized
  source 1..22: mol_type = other DNA
caacgtcccactttctcaagac

SEQ ID NO: 44797 - DNA, 22 bp, synthetic construct
  misc_feature 1..22: note = chemically synthesized
  source 1..22: mol_type = other DNA
aacgtcccactttctcaagaca

SEQ ID NO: 44798 - DNA, 22 bp, synthetic construct
  misc_feature 1..22: note = chemically synthesized
  source 1..22: mol_type = other DNA
tctcaagacagtgtttgccacg

SEQ ID NO: 44799 - DNA, 22 bp, synthetic construct
  misc_feature 1..22: note = chemically synthesized
  source 1..22: mol_type = other DNA
ctcaagacagtgtttgccacgg

SEQ ID NO: 44800 - DNA, 22 bp, synthetic construct
  misc_feature 1..22: note = chemically synthesized
  source 1..22: mol_type = other DNA
tcaagacagtgtttgccacggg

SEQ ID NO: 44801 - DNA, 22 bp, synthetic construct
  misc_feature 1..22: note = chemically synthesized
  source 1..22: mol_type = other DNA
aagacagtgtttgccacgggcc

SEQ ID NO: 44802 - DNA, 22 bp, synthetic construct
  misc_feature 1..22: note = chemically synthesized
  source 1..22: mol_type = other DNA
gccacgggccagggctagcaaa

SEQ ID NO: 44803 - DNA, 22 bp, synthetic construct
  misc_feature 1..22: note = chemically synthesized
  source 1..22: mol_type = other DNA
ccacgggccagggctagcaaaa

SEQ ID NO: 44804 - DNA, 22 bp, synthetic construct
  misc_feature 1..22: note = chemically synthesized
  source 1..22: mol_type = other DNA
gcaaaaagacccctccaacccc

SEQ ID NO: 44805 - DNA, 22 bp, synthetic construct
  misc_feature 1..22: note = chemically synthesized
  source 1..22: mol_type = other DNA
caacccctcatacctccccacc

SEQ ID NO: 44806 - DNA, 22 bp, synthetic construct
  misc_feature 1..22: note = chemically synthesized
  source 1..22: mol_type = other DNA
atacctccccaccaaccccatg

SEQ ID NO: 44807 - DNA, 22 bp, synthetic construct
  misc_feature 1..22: note = chemically synthesized
  source 1..22: mol_type = other DNA
cccaccaaccccatgcaggtgt

SEQ ID NO: 44808 - DNA, 22 bp, synthetic construct
  misc_feature 1..22: note = chemically synthesized
  source 1..22: mol_type = other DNA
cccggaccaaaggggtggacag

SEQ ID NO: 44809 - DNA, 22 bp, synthetic construct
  misc_feature 1..22: note = chemically synthesized
  source 1..22: mol_type = other DNA
aaggaaaccgctcaaccttgag

SEQ ID NO: 44810 - DNA, 22 bp, synthetic construct
  misc_feature 1..22: note = chemically synthesized
  source 1..22: mol_type = other DNA
aaccttgagtggagaggctgct

SEQ ID NO: 44811 - DNA, 22 bp, synthetic construct
  misc_feature 1..22: note = chemically synthesized
  source 1..22: mol_type = other DNA
gagtggagaggctgctgtgaaa

SEQ ID NO: 44812 - DNA, 22 bp, synthetic construct
  misc_feature 1..22: note = chemically synthesized
  source 1..22: mol_type = other DNA
agtggagaggctgctgtgaaac
